United States Patent Application Publication US 2016/0319361 A1 - sequence listing, part 15

SEQ ID NO: 392136 - DNA, 30 bp, Artificial Sequence
  Synthetic oligonucleotide
aaatcatttatgtgtggatccgctcaattt

SEQ ID NO: 392137 - DNA, 30 bp, Artificial Sequence
  Synthetic oligonucleotide
tggagttactcttagcctccccaagaattt

SEQ ID NO: 392138 - DNA, 30 bp, Artificial Sequence
  Synthetic oligonucleotide
ataactggttaagtgtccactctcgaattt

SEQ ID NO: 392139 - DNA, 30 bp, Artificial Sequence
  Synthetic oligonucleotide
acgattccctcggctaaatgggcggaattt

SEQ ID NO: 392140 - DNA, 30 bp, Artificial Sequence
  Synthetic oligonucleotide
atatgacagacaaacaacttcctggaattt

SEQ ID NO: 392141 - DNA, 30 bp, Artificial Sequence
  Synthetic oligonucleotide
ccgcatccctaaggaacctcggtggaattt

SEQ ID NO: 392142 - DNA, 30 bp, Artificial Sequence
  Synthetic oligonucleotide
gccaaggggtgtaactctcctagataattt

SEQ ID NO: 392143 - DNA, 30 bp, Artificial Sequence
  Synthetic oligonucleotide
ggactaaaacccagatgatttagctaattt

SEQ ID NO: 392144 - DNA, 30 bp, Artificial Sequence
  Synthetic oligonucleotide
ggtatacttgcattcgaattcgtctaattt

SEQ ID NO: 392145 - DNA, 30 bp, Artificial Sequence
  Synthetic oligonucleotide
taaaagtatcgtatgagcagtaagtaattt

SEQ ID NO: 392146 - DNA, 30 bp, Artificial Sequence
  Synthetic oligonucleotide
ccaaggctctctgccaataagtagtaattt

SEQ ID NO: 392147 - DNA, 30 bp, Artificial Sequence
  Synthetic oligonucleotide
acataaccaaggaaacgctttttgtaattt

SEQ ID NO: 392148 - DNA, 30 bp, Artificial Sequence
  Synthetic oligonucleotide
gggaaaagggtccacccatgtcgttaattt

SEQ ID NO: 392149 - DNA, 30 bp, Artificial Sequence
  Synthetic oligonucleotide
agcaaactgcatgtgcagtgagtttaattt

SEQ ID NO: 392150 - DNA, 30 bp, Artificial Sequence
  Synthetic oligonucleotide
gggcccacgcaacagcacagacaaacattt

SEQ ID NO: 392151 - DNA, 30 bp, Artificial Sequence
  Synthetic oligonucleotide
cctgttgccaccgatgcaaggggaacattt

SEQ ID NO: 392152 - DNA, 30 bp, Artificial Sequence
  Synthetic oligonucleotide
caatggcacacgaagtccatgcccacattt

SEQ ID NO: 392153 - DNA, 30 bp, Artificial Sequence
  Synthetic oligonucleotide
caagtacttgagactacgacgatcacattt

SEQ ID NO: 392154 - DNA, 30 bp, Artificial Sequence
  Synthetic oligonucleotide
caagcctaacgcacggtcctccggacattt

SEQ ID NO: 392155 - DNA, 30 bp, Artificial Sequence
  Synthetic oligonucleotide
gagctggattgattcattgggtatacattt

SEQ ID NO: 392156 - DNA, 30 bp, Artificial Sequence
  Synthetic oligonucleotide
gctcaacattcacgatgtgccgttacattt

SEQ ID NO: 392157 - DNA, 30 bp, Artificial Sequence
  Synthetic oligonucleotide
tatcccgataatagcttccttcaaccattt

SEQ ID NO: 392158 - DNA, 30 bp, Artificial Sequence
  Synthetic oligonucleotide
gattggctgttcgttccgcggtaaccattt

SEQ ID NO: 392159 - DNA, 30 bp, Artificial Sequence
  Synthetic oligonucleotide
ttctcgccctcgaagttttgtctaccattt

SEQ ID NO: 392160 - DNA, 30 bp, Artificial Sequence
  Synthetic oligonucleotide
gggagggtctcgatccaattagacccattt

SEQ ID NO: 392161 - DNA, 30 bp, Artificial Sequence
  Synthetic oligonucleotide
ctagtggtggctgggatgactgtcccattt

SEQ ID NO: 392162 - DNA, 30 bp, Artificial Sequence
  Synthetic oligonucleotide
tgcgtacccgttctcgactattggccattt

SEQ ID NO: 392163 - DNA, 30 bp, Artificial Sequence
  Synthetic oligonucleotide
cacctcgactaccgtttttattggccattt

SEQ ID NO: 392164 - DNA, 30 bp, Artificial Sequence
  Synthetic oligonucleotide
gtcgtggtcaaagtgctataccttccattt

SEQ ID NO: 392165 - DNA, 30 bp, Artificial Sequence
  Synthetic oligonucleotide
tccgcaccattacggggagaggtagcattt

SEQ ID NO: 392166 - DNA, 30 bp, Artificial Sequence
  Synthetic oligonucleotide
cggcggatggagactgggacatacgcattt

SEQ ID NO: 392167 - DNA, 30 bp, Artificial Sequence
  Synthetic oligonucleotide
caaggcgcccctacgtaacagggcgcattt

SEQ ID NO: 392168 - DNA, 30 bp, Artificial Sequence
  Synthetic oligonucleotide
gtatgtagttcgtgtaatctgtaatcattt

SEQ ID NO: 392169 - DNA, 30 bp, Artificial Sequence
  Synthetic oligonucleotide
ctcattataccaagatcccgattatcattt

SEQ ID NO: 392170 - DNA, 30 bp, Artificial Sequence
  Synthetic oligonucleotide
tgtggtctattaagcggtctcttatcattt

SEQ ID NO: 392171 - DNA, 30 bp, Artificial Sequence
  Synthetic oligonucleotide
taccgtctggccctaggggctccctcattt

SEQ ID NO: 392172 - DNA, 30 bp, Artificial Sequence
  Synthetic oligonucleotide
ctccaaagctacgcgtggcgaaggtcattt

SEQ ID NO: 392173 - DNA, 30 bp, Artificial Sequence
  Synthetic oligonucleotide
aaggtgagagtagctctgtctatgtcattt

SEQ ID NO: 392174 - DNA, 30 bp, Artificial Sequence
  Synthetic oligonucleotide
cttcggataacgaacctggtactgtcattt

SEQ ID NO: 392175 - DNA, 30 bp, Artificial Sequence
  Synthetic oligonucleotide
cagcgaatgctgtcacgcgtacattcattt

SEQ ID NO: 392176 - DNA, 30 bp, Artificial Sequence
  Synthetic oligonucleotide
taagaaaacagagatagtgcgccttcattt

SEQ ID NO: 392177 - DNA, 30 bp, Artificial Sequence
  Synthetic oligonucleotide
aacctttggatcacgggagatgcttcattt

SEQ ID NO: 392178 - DNA, 30 bp, Artificial Sequence
  Synthetic oligonucleotide
cgaactcgactagtggtctaacgttcattt

SEQ ID NO: 392179 - DNA, 30 bp, Artificial Sequence
  Synthetic oligonucleotide
aactgagatagagaaacgaatcgttcattt

SEQ ID NO: 392180 - DNA, 30 bp, Artificial Sequence
  Synthetic oligonucleotide
gcagttcctctcaatatattcttttcattt

SEQ ID NO: 392181 - DNA, 30 bp, Artificial Sequence
  Synthetic oligonucleotide
agttcgtcgtgcagctgcctgttttcattt

SEQ ID NO: 392182 - DNA, 30 bp, Artificial Sequence
  Synthetic oligonucleotide
aagttgggtaactcaatcaaggaaagattt

SEQ ID NO: 392183 - DNA, 30 bp, Artificial Sequence
  Synthetic oligonucleotide
gcgtgcgccaagtatccctctcccagattt

SEQ ID NO: 392184 - DNA, 30 bp, Artificial Sequence
  Synthetic oligonucleotide
agatgtaattgtaaactaacgtccagattt

SEQ ID NO: 392185 - DNA, 30 bp, Artificial Sequence
  Synthetic oligonucleotide
taacagtgtagacgctacaaggtcagattt

SEQ ID NO: 392186 - DNA, 30 bp, Artificial Sequence
  Synthetic oligonucleotide
taaatatggaaccggtgattccggagattt

SEQ ID NO: 392187 - DNA, 30 bp, Artificial Sequence
  Synthetic oligonucleotide
agcctacgaagccatgtcgttaatagattt

SEQ ID NO: 392188 - DNA, 30 bp, Artificial Sequence
  Synthetic oligonucleotide
atcccagtcctgcgaagacactttagattt

SEQ ID NO: 392189 - DNA, 30 bp, Artificial Sequence
  Synthetic oligonucleotide
acgcttggccatgtctgcaatcaacgattt

SEQ ID NO: 392190 - DNA, 30 bp, Artificial Sequence
  Synthetic oligonucleotide
atcacacgcgcggtaggggtttcacgattt

SEQ ID NO: 392191 - DNA, 31 bp, Artificial Sequence
  Synthetic oligonucleotide
tttatcgccgttaccaccctagcgacgattt

SEQ ID NO: 392192 - DNA, 30 bp, Artificial Sequence
  Synthetic oligonucleotide
gtagtttagtgagtgttggaactacgattt

SEQ ID NO: 392193 - DNA, 30 bp, Artificial Sequence
  Synthetic oligonucleotide
ttaaggacatttgagtagtactatcgattt

SEQ ID NO: 392194 - DNA, 30 bp, Artificial Sequence
  Synthetic oligonucleotide
aggtgtaaggggttatatctgtctcgattt

SEQ ID NO: 392195 - DNA, 30 bp, Artificial Sequence
  Synthetic oligonucleotide
gtcaattttatgatgccggcctaaggattt

SEQ ID NO: 392196 - DNA, 30 bp, Artificial Sequence
  Synthetic oligonucleotide
cctaccttaggaagccgtccgggaggattt

SEQ ID NO: 392197 - DNA, 30 bp, Artificial Sequence
  Synthetic oligonucleotide
gcctgtacaattctgccggggataggattt

SEQ ID NO: 392198 - DNA, 30 bp, Artificial Sequence
  Synthetic oligonucleotide
ttggtccgggtgaggtatgatcagggattt

SEQ ID NO: 392199 - DNA, 30 bp, Artificial Sequence
  Synthetic oligonucleotide
gatgtgaccctatctctaatcgcgggattt

SEQ ID NO: 392200 - DNA, 30 bp, Artificial Sequence
  Synthetic oligonucleotide
gctgaccgtgactacattagtaggggattt

SEQ ID NO: 392201 - DNA, 30 bp, Artificial Sequence
  Synthetic oligonucleotide
tttcgaacgtagagcaatgccattggattt

SEQ ID NO: 392202 - DNA, 30 bp, Artificial Sequence
  Synthetic oligonucleotide
ctggcctgtgatggcccaaatgttggattt

SEQ ID NO: 392203 - DNA, 30 bp, Artificial Sequence
  Synthetic oligonucleotide
caatgtgggcattggtccaactgatgattt

SEQ ID NO: 392204 - DNA, 30 bp, Artificial Sequence
  Synthetic oligonucleotide
ccgtatcaggtcgaagggcaggtatgattt

SEQ ID NO: 392205 - DNA, 30 bp, Artificial Sequence
  Synthetic oligonucleotide
agtcgtcggccagaaagtttcgactgattt

SEQ ID NO: 392206 - DNA, 30 bp, Artificial Sequence
  Synthetic oligonucleotide
attcttccgggaaacctaatcacctgattt

SEQ ID NO: 392207 - DNA, 30 bp, Artificial Sequence
  Synthetic oligonucleotide
gtataaacagcgtcacgagtgctctgattt

SEQ ID NO: 392208 - DNA, 30 bp, Artificial Sequence
  Synthetic oligonucleotide
aagttaggtgtccggggattagtctgattt

SEQ ID NO: 392209 - DNA, 30 bp, Artificial Sequence
  Synthetic oligonucleotide
atccgattataacgcgtgtatgtctgattt

SEQ ID NO: 392210 - DNA, 30 bp, Artificial Sequence
  Synthetic oligonucleotide
aagctcaccttcgtgttttgtgtctgattt

SEQ ID NO: 392211 - DNA, 30 bp, Artificial Sequence
  Synthetic oligonucleotide
aaagaccgatagtaatgaagattctgattt

SEQ ID NO: 392212 - DNA, 30 bp, Artificial Sequence
  Synthetic oligonucleotide
tgggccttgagggtcaaacgattaatattt

SEQ ID NO: 392213 - DNA, 30 bp, Artificial Sequence
  Synthetic oligonucleotide
ttgttaaatagttgagggaagaacatattt

SEQ ID NO: 392214 - DNA, 30 bp, Artificial Sequence
  Synthetic oligonucleotide
tttcggacccactgttggactgacatattt

SEQ ID NO: 392215 - DNA, 30 bp, Artificial Sequence
  Synthetic oligonucleotide
gttgtcgccgggaagcttttttagatattt

SEQ ID NO: 392216 - DNA, 30 bp, Artificial Sequence
  Synthetic oligonucleotide
ggagaggctcaatggctggggaatatattt

SEQ ID NO: 392217 - DNA, 30 bp, Artificial Sequence
  Synthetic oligonucleotide
catacacaggctctgccctgacatatattt

SEQ ID NO: 392218 - DNA, 30 bp, Artificial Sequence
  Synthetic oligonucleotide
tcacgattctttaccgaaaatctactattt

SEQ ID NO: 392219 - DNA, 30 bp, Artificial Sequence
  Synthetic oligonucleotide
ggtacggaagcgaaaagcgacttcctattt

SEQ ID NO: 392220 - DNA, 30 bp, Artificial Sequence
  Synthetic oligonucleotide
gcgaattgcaagtaatgggcctggctattt

SEQ ID NO: 392221 - DNA, 30 bp, Artificial Sequence
  Synthetic oligonucleotide
tgaaataaaagagaccagcgaactctattt

SEQ ID NO: 392222 - DNA, 30 bp, Artificial Sequence
  Synthetic oligonucleotide
gtacaagtgctactgctcagctctctattt

SEQ ID NO: 392223 - DNA, 30 bp, Artificial Sequence
  Synthetic oligonucleotide
gactggcccatccagggaaaataagtattt

SEQ ID NO: 392224 - DNA, 30 bp, Artificial Sequence
  Synthetic oligonucleotide
tttatttagccaaatgggtcccgagtattt

SEQ ID NO: 392225 - DNA, 30 bp, Artificial Sequence
  Synthetic oligonucleotide
ggaaccggcaccaagtaattgctagtattt

SEQ ID NO: 392226 - DNA, 30 bp, Artificial Sequence
  Synthetic oligonucleotide
gtcgttccataaccggtaacggtagtattt

SEQ ID NO: 392227 - DNA, 30 bp, Artificial Sequence
  Synthetic oligonucleotide
tgccaacgatcacatgcacttgtcgtattt

SEQ ID NO: 392228 - DNA, 30 bp, Artificial Sequence
  Synthetic oligonucleotide
gcacgggctcaaatggtttttaaggtattt

SEQ ID NO: 392229 - DNA, 30 bp, Artificial Sequence
  Synthetic oligonucleotide
tctttggctggtccggtccaggaggtattt

SEQ ID NO: 392230 - DNA, 30 bp, Artificial Sequence
  Synthetic oligonucleotide
gtgtttgcggcctttggcggctgggtattt

SEQ ID NO: 392231 - DNA, 30 bp, Artificial Sequence
  Synthetic oligonucleotide
atcgacgatttgcttctgttgtgggtattt

SEQ ID NO: 392232 - DNA, 30 bp, Artificial Sequence
  Synthetic oligonucleotide
ccgttgccaggacaacctttcctggtattt

SEQ ID NO: 392233 - DNA, 30 bp, Artificial Sequence
  Synthetic oligonucleotide
gctagcccatgatggacacgagctgtattt

SEQ ID NO: 392234 - DNA, 30 bp, Artificial Sequence
  Synthetic oligonucleotide
aacatgggcatcacgtaatatcaattattt

SEQ ID NO: 392235 - DNA, 30 bp, Artificial Sequence
  Synthetic oligonucleotide
caacacgctaaagatacgtagcgattattt

SEQ ID NO: 392236 - DNA, 30 bp, Artificial Sequence
  Synthetic oligonucleotide
tcgcctcaggacggatggcagcacttattt

SEQ ID NO: 392237 - DNA, 30 bp, Artificial Sequence
  Synthetic oligonucleotide
actttaaaataggagacatataccttattt

SEQ ID NO: 392238 - DNA, 30 bp, Artificial Sequence
  Synthetic oligonucleotide
gcggcagtcgtagagacgccgtagttattt

SEQ ID NO: 392239 - DNA, 30 bp, Artificial Sequence
  Synthetic oligonucleotide
gggcccctttatgtaaggcatcggttattt

SEQ ID NO: 392240 - DNA, 30 bp, Artificial Sequence
  Synthetic oligonucleotide
catgtttagggggcgtaaccgcctttattt

SEQ ID NO: 392241 - DNA, 30 bp, Artificial Sequence
  Synthetic oligonucleotide
aatgccagctgacgaatcaacgttttattt

SEQ ID NO: 392242 - DNA, 30 bp, Artificial Sequence
  Synthetic oligonucleotide
cggcctgtggcagcacgcacggaaaacttt

SEQ ID NO: 392243 - DNA, 30 bp, Artificial Sequence
  Synthetic oligonucleotide
catacaagcttttcctgatatcgcaacttt

SEQ ID NO: 392244 - DNA, 30 bp, Artificial Sequence
  Synthetic oligonucleotide
caaggcgcgatttaggttgtggtcaacttt

SEQ ID NO: 392245 - DNA, 30 bp, Artificial Sequence
  Synthetic oligonucleotide
aaaatgtgtcatcataccgttaagaacttt

SEQ ID NO: 392246 - DNA, 30 bp, Artificial Sequence
  Synthetic oligonucleotide
agccattgggagaacgtctctccgaacttt

SEQ ID NO: 392247 - DNA, 30 bp, Artificial Sequence
  Synthetic oligonucleotide
tacagtgtgccaggtatatgttcgaacttt

SEQ ID NO: 392248 - DNA, 30 bp, Artificial Sequence
  Synthetic oligonucleotide
ttcctccgaactttctctacggataacttt

SEQ ID NO: 392249 - DNA, 30 bp, Artificial Sequence
  Synthetic oligonucleotide
cttcggccccgcacggattgtcaacacttt

SEQ ID NO: 392250 - DNA, 30 bp, Artificial Sequence
  Synthetic oligonucleotide
tagcttttaacggacgggacgccacacttt

SEQ ID NO: 392251 - DNA, 30 bp, Artificial Sequence
  Synthetic oligonucleotide
cgtaggtagtcagcgtgaacatcacacttt

SEQ ID NO: 392252 - DNA, 30 bp, Artificial Sequence
  Synthetic oligonucleotide
agagtcttgagacaggtcaatagacacttt

SEQ ID NO: 392253 - DNA, 30 bp, Artificial Sequence
  Synthetic oligonucleotide
ccaacgccgaggggcttctaaaagcacttt

SEQ ID NO: 392254 - DNA, 30 bp, Artificial Sequence
  Synthetic oligonucleotide
agcagaatctgttcaaattgggatcacttt

SEQ ID NO: 392255 - DNA, 31 bp, Artificial Sequence
  Synthetic oligonucleotide
ctagggagattcatccactggttgagacttt

SEQ ID NO: 392256 - DNA, 30 bp, Artificial Sequence
  Synthetic oligonucleotide
cgccctatcgtagccaaaaaagacgacttt

SEQ ID NO: 392257 - DNA, 30 bp, Artificial Sequence
  Synthetic oligonucleotide
cactataaaaacctcgagacaggcgacttt

SEQ ID NO: 392258 - DNA, 30 bp, Artificial Sequence
  Synthetic oligonucleotide
cggttggccaggccgctcaactgcgacttt

SEQ ID NO: 392259 - DNA, 30 bp, Artificial Sequence
  Synthetic oligonucleotide
ggataatagatctagggcaatttcgacttt

SEQ ID NO: 392260 - DNA, 30 bp, Artificial Sequence
  Synthetic oligonucleotide
gaaaacacctcaagtattggttaggacttt

SEQ ID NO: 392261 - DNA, 30 bp, Artificial Sequence
  Synthetic oligonucleotide
aacacgagacataggcttttggatgacttt

SEQ ID NO: 392262 - DNA, 30 bp, Artificial Sequence
  Synthetic oligonucleotide
cgtgggatgtaaatcatcacggaatacttt

SEQ ID NO: 392263 - DNA, 30 bp, Artificial Sequence
  Synthetic oligonucleotide
tagaccagtttgcgggagtggagatacttt

SEQ ID NO: 392264 - DNA, 30 bp, Artificial Sequence
  Synthetic oligonucleotide
ggcaatccgacgataataccattgtacttt

SEQ ID NO: 392265 - DNA, 30 bp, Artificial Sequence
  Synthetic oligonucleotide
gcacgtaggtaatatgggttcagttacttt

SEQ ID NO: 392266 - DNA, 30 bp, Artificial Sequence
  Synthetic oligonucleotide
aaagaggcgaaattgggtccaatttacttt

SEQ ID NO: 392267 - DNA, 30 bp, Artificial Sequence
  Synthetic oligonucleotide
aacagaaactatctaggcgaactttacttt

SEQ ID NO: 392268 - DNA, 30 bp, Artificial Sequence
  Synthetic oligonucleotide
gattgtgctatgaccggaggcgcaaccttt

SEQ ID NO: 392269 - DNA, 30 bp, Artificial Sequence
  Synthetic oligonucleotide
cgaaccgtcatatatttagaccagaccttt

SEQ ID NO: 392270 - DNA, 30 bp, Artificial Sequence
  Synthetic oligonucleotide
atgttgcgccttcacgtcttgtagaccttt

SEQ ID NO: 392271 - DNA, 30 bp, Artificial Sequence
  Synthetic oligonucleotide
tgtagcgccaatagaaaagactataccttt

SEQ ID NO: 392272 - DNA, 30 bp, Artificial Sequence
  Synthetic oligonucleotide
gccgtcttggcaatgggcagtcctaccttt

SEQ ID NO: 392273 - DNA, 30 bp, Artificial Sequence
  Synthetic oligonucleotide
atcttgttgattaacttataggcacccttt

SEQ ID NO: 392274 - DNA, 30 bp, Artificial Sequence
  Synthetic oligonucleotide
aaccggtaggggatcgcggagagccccttt

SEQ ID NO: 392275 - DNA, 30 bp, Artificial Sequence
  Synthetic oligonucleotide
aaaacattgaaaacgtaatacgagcccttt

SEQ ID NO: 392276 - DNA, 30 bp, Artificial Sequence
  Synthetic oligonucleotide
gcccacggttcgcgcgaccgtcggcccttt

SEQ ID NO: 392277 - DNA, 29 bp, Artificial Sequence
  Synthetic oligonucleotide
tcgttttaatcccgtcaagggtgcccttt

SEQ ID NO: 392278 - DNA, 30 bp, Artificial Sequence
  Synthetic oligonucleotide
ctacgctgccgttaatcttacgttcccttt

SEQ ID NO: 392279 - DNA, 30 bp, Artificial Sequence
  Synthetic oligonucleotide
gggaagttactaaaatcgaagaaagccttt

SEQ ID NO: 392280 - DNA, 30 bp, Artificial Sequence
  Synthetic oligonucleotide
acaattctaggagtacgcaattgcgccttt

SEQ ID NO: 392281 - DNA, 30 bp, Artificial Sequence
  Synthetic oligonucleotide
gtgaaagggtttttctgttgaagggccttt

SEQ ID NO: 392282 - DNA, 30 bp, Artificial Sequence
  Synthetic oligonucleotide
acctttccccggaggacgttgtgggccttt

SEQ ID NO: 392283 - DNA, 30 bp, Artificial Sequence
  Synthetic oligonucleotide
ggcagagcttacaatgaacctatggccttt

SEQ ID NO: 392284 - DNA, 30 bp, Artificial Sequence
  Synthetic oligonucleotide
cgctttcctcttacttctcctaatgccttt

SEQ ID NO: 392285 - DNA, 30 bp, Artificial Sequence
  Synthetic oligonucleotide
gggctaaatctttggtactaagatgccttt

SEQ ID NO: 392286 - DNA, 30 bp, Artificial Sequence
  Synthetic oligonucleotide
ggtatacaggggcgtctaatagtgtccttt

SEQ ID NO: 392287 - DNA, 30 bp, Artificial Sequence
  Synthetic oligonucleotide
ctaaggcacagggtacttactgtgtccttt

SEQ ID NO: 392288 - DNA, 30 bp, Artificial Sequence
  Synthetic oligonucleotide
tgcgagatgtcaggcggctggtcttccttt

SEQ ID NO: 392289 - DNA, 30 bp, Artificial Sequence
  Synthetic oligonucleotide
tttgagtttgctcggcgtagtagttccttt

SEQ ID NO: 392290 - DNA, 30 bp, Artificial Sequence
  Synthetic oligonucleotide
tggggttttagcgggggatggaaaagcttt

SEQ ID NO: 392291 - DNA, 30 bp, Artificial Sequence
  Synthetic oligonucleotide
gggcatgcaagaaggcgttgcacaagcttt

SEQ ID NO: 392292 - DNA, 30 bp, Artificial Sequence
  Synthetic oligonucleotide
atgtttgtgaatcagatgtttgacagcttt

SEQ ID NO: 392293 - DNA, 30 bp, Artificial Sequence
  Synthetic oligonucleotide
tggataatgacacattcatgatacagcttt

SEQ ID NO: 392294 - DNA, 30 bp, Artificial Sequence
  Synthetic oligonucleotide
gaaggttaaataaaactgtccagcagcttt

SEQ ID NO: 392295 - DNA, 30 bp, Artificial Sequence
  Synthetic oligonucleotide
cgaaatggcttgccggacgtgcagagcttt

SEQ ID NO: 392296 - DNA, 30 bp, Artificial Sequence
  Synthetic oligonucleotide
ggttgataatgatttatggggacgagcttt

SEQ ID NO: 392297 - DNA, 30 bp, Artificial Sequence
  Synthetic oligonucleotide
atctgagcaacgtgtcatacctcgagcttt

SEQ ID NO: 392298 - DNA, 30 bp, Artificial Sequence
  Synthetic oligonucleotide
gtactaacattcgacaaatccatacgcttt

SEQ ID NO: 392299 - DNA, 30 bp, Artificial Sequence
  Synthetic oligonucleotide
gctagaggacggatgctttggaagcgcttt

SEQ ID NO: 392300 - DNA, 30 bp, Artificial Sequence
  Synthetic oligonucleotide
tttgtgttagacgtctagacattgcgcttt

SEQ ID NO: 392301 - DNA, 30 bp, Artificial Sequence
  Synthetic oligonucleotide
ctcataagactactcatgccctttcgcttt

SEQ ID NO: 392302 - DNA, 30 bp, Artificial Sequence
  Synthetic oligonucleotide
aaggcccaaacagccaagcccaaaggcttt

SEQ ID NO: 392303 - DNA, 30 bp, Artificial Sequence
  Synthetic oligonucleotide
atgaccagtccaaggcatctcataggcttt

SEQ ID NO: 392304 - DNA, 30 bp, Artificial Sequence
  Synthetic oligonucleotide
ccggcaatgctagtaagtgaagtaggcttt

SEQ ID NO: 392305 - DNA, 30 bp, Artificial Sequence
  Synthetic oligonucleotide
ataatgatcgactcggtcatagagggcttt

SEQ ID NO: 392306 - DNA, 30 bp, Artificial Sequence
  Synthetic oligonucleotide
gagttagtgtaattgctgtgaaggggcttt

SEQ ID NO: 392307 - DNA, 30 bp, Artificial Sequence
  Synthetic oligonucleotide
gccagtcagctgccgcttgtgttgggcttt

SEQ ID NO: 392308 - DNA, 30 bp, Artificial Sequence
  Synthetic oligonucleotide
tgtccggccctttacggccgatctggcttt

SEQ ID NO: 392309 - DNA, 30 bp, Artificial Sequence
  Synthetic oligonucleotide
ccagtacagttgcattcaatagcatgcttt

SEQ ID NO: 392310 - DNA, 30 bp, Artificial Sequence
  Synthetic oligonucleotide
accacattatcagatagccagggatgcttt

SEQ ID NO: 392311 - DNA, 30 bp, Artificial Sequence
  Synthetic oligonucleotide
gaaccgatagcaggggactgtctatgcttt

SEQ ID NO: 392312 - DNA, 30 bp, Artificial Sequence
  Synthetic oligonucleotide
tagaacaccttcagttacactaactgcttt

SEQ ID NO: 392313 - DNA, 30 bp, Artificial Sequence
  Synthetic oligonucleotide
ttcgacagatttatcgttgtacagtgcttt

SEQ ID NO: 392314 - DNA, 30 bp, Artificial Sequence
  Synthetic oligonucleotide
gcatgcgggtgcaggatttcaacgtgcttt

SEQ ID NO: 392315 - DNA, 30 bp, Artificial Sequence
  Synthetic oligonucleotide
acgctcatcacgaggatgtgaacttgcttt

SEQ ID NO: 392316 - DNA, 30 bp, Artificial Sequence
  Synthetic oligonucleotide
aggtactaagcaccgacacaattttgcttt

SEQ ID NO: 392317 - DNA, 30 bp, Artificial Sequence
  Synthetic oligonucleotide
aatcgtcctacagtaaaagccagaatcttt

SEQ ID NO: 392318 - DNA, 30 bp, Artificial Sequence
  Synthetic oligonucleotide
tcggcaagccatggaggtgtcataatcttt

SEQ ID NO: 392319 - DNA, 30 bp, Artificial Sequence
  Synthetic oligonucleotide
tagagatgcaaaagctggactgggatcttt

SEQ ID NO: 392320 - DNA, 30 bp, Artificial Sequence
  Synthetic oligonucleotide
atatcgggctttggacgggcacacctcttt

SEQ ID NO: 392321 - DNA, 30 bp, Artificial Sequence
  Synthetic oligonucleotide
tttgaaggcacgaccggacagttcctcttt

SEQ ID NO: 392322 - DNA, 30 bp, Artificial Sequence
  Synthetic oligonucleotide
gggttacaaccacgccagggagtgctcttt

SEQ ID NO: 392323 - DNA, 30 bp, Artificial Sequence
  Synthetic oligonucleotide
ggcctcgaaattgggcggcgtgatctcttt

SEQ ID NO: 392324 - DNA, 30 bp, Artificial Sequence
  Synthetic oligonucleotide
ttggaggccatattcaggtcatctctcttt

SEQ ID NO: 392325 - DNA, 30 bp, Artificial Sequence
  Synthetic oligonucleotide
gacagcttaccgcagcggcgaggtctcttt

SEQ ID NO: 392326 - DNA, 30 bp, Artificial Sequence
  Synthetic oligonucleotide
tctcgttggcgactagttgccgaagtcttt

SEQ ID NO: 392327 - DNA, 30 bp, Artificial Sequence
  Synthetic oligonucleotide
taagatctgtccgtggttacataagtcttt

SEQ ID NO: 392328 - DNA, 30 bp, Artificial Sequence
  Synthetic oligonucleotide
gcggtagacccgactgtccacctagtcttt

SEQ ID NO: 392329 - DNA, 30 bp, Artificial Sequence
  Synthetic oligonucleotide
tccagcgggagcggcatagtgttcgtcttt

SEQ ID NO: 392330 - DNA, 30 bp, Artificial Sequence
  Synthetic oligonucleotide
tcagattgaattccggtttgaagggtcttt

SEQ ID NO: 392331 - DNA, 30 bp, Artificial Sequence
  Synthetic oligonucleotide
gagatgcacgtgcgctgatgccgggtcttt

SEQ ID NO: 392332 - DNA, 30 bp, Artificial Sequence
  Synthetic oligonucleotide
acttgggcacgcaataagtaacctgtcttt

SEQ ID NO: 392333 - DNA, 30 bp, Artificial Sequence
  Synthetic oligonucleotide
ccggaggcccttatccctttggctgtcttt

SEQ ID NO: 392334 - DNA, 30 bp, Artificial Sequence
  Synthetic oligonucleotide
caagccgagcgtgcctctcaaaaattcttt

SEQ ID NO: 392335 - DNA, 30 bp, Artificial Sequence
  Synthetic oligonucleotide
gctggataatagaaaagtgggccattcttt

SEQ ID NO: 392336 - DNA, 30 bp, Artificial Sequence
  Synthetic oligonucleotide
caccgttatgaataagagtttggattcttt

SEQ ID NO: 392337 - DNA, 30 bp, Artificial Sequence
  Synthetic oligonucleotide
gcggtactggtgtgaacgctcgtattcttt

SEQ ID NO: 392338 - DNA, 30 bp, Artificial Sequence
  Synthetic oligonucleotide
attgggcaactctgtttatgtcacttcttt

SEQ ID NO: 392339 - DNA, 30 bp, Artificial Sequence
  Synthetic oligonucleotide
agggagcttctcgggctgaacagcttcttt

SEQ ID NO: 392340 - DNA, 30 bp, Artificial Sequence
  Synthetic oligonucleotide
ttattgttattttagtacccagagttcttt

SEQ ID NO: 392341 - DNA, 30 bp, Artificial Sequence
  Synthetic oligonucleotide
cctatggtgtaagagtttaaaacgttcttt

SEQ ID NO: 392342 - DNA, 30 bp, Artificial Sequence
  Synthetic oligonucleotide
ttgactcccaagtctgaactaaggttcttt

SEQ ID NO: 392343 - DNA, 30 bp, Artificial Sequence
  Synthetic oligonucleotide
ctatgcatgaatgcgtagagtgggttcttt

SEQ ID NO: 392344 - DNA, 30 bp, Artificial Sequence
  Synthetic oligonucleotide
atagcacaatatatttagccgtttttcttt

SEQ ID NO: 392345 - DNA, 30 bp, Artificial Sequence
  Synthetic oligonucleotide
gtgactgcttcgcggagtgcaaacaagttt

SEQ ID NO: 392346 - DNA, 30 bp, Artificial Sequence
  Synthetic oligonucleotide
cctatatccaagaaagactttgacaagttt

SEQ ID NO: 392347 - DNA, 30 bp, Artificial Sequence
  Synthetic oligonucleotide
atagccggcagcaaatgctaacccaagttt

SEQ ID NO: 392348 - DNA, 30 bp, Artificial Sequence
  Synthetic oligonucleotide
cacggcttactgattcggtttacgaagttt

SEQ ID NO: 392349 - DNA, 30 bp, Artificial Sequence
  Synthetic oligonucleotide
catcaacaaatgacgtactctgataagttt

SEQ ID NO: 392350 - DNA, 30 bp, Artificial Sequence
  Synthetic oligonucleotide
gtaccgtaatgtttctttttgtgtaagttt

SEQ ID NO: 392351 - DNA, 30 bp, Artificial Sequence
  Synthetic oligonucleotide
tgcaaacttttcaaatgagtttgtaagttt

SEQ ID NO: 392352 - DNA, 30 bp, Artificial Sequence
  Synthetic oligonucleotide
agggaaatttttcggatcccagtacagttt

SEQ ID NO: 392353 - DNA, 30 bp, Artificial Sequence
  Synthetic oligonucleotide
gcgtacactgtattcagcaatgtacagttt

SEQ ID NO: 392354 - DNA, 30 bp, Artificial Sequence
  Synthetic oligonucleotide
gtaaccctatttgattactgtccccagttt

SEQ ID NO: 392355 - DNA, 30 bp, Artificial Sequence
  Synthetic oligonucleotide
agtatcccaatagcgcagtacaagcagttt

SEQ ID NO: 392356 - DNA, 30 bp, Artificial Sequence
  Synthetic oligonucleotide
gaagtcggtaaaacggcgatatcgcagttt

SEQ ID NO: 392357 - DNA, 30 bp, Artificial Sequence
  Synthetic oligonucleotide
gtgcgtgatctccgacgcggccggcagttt

SEQ ID NO: 392358 - DNA, 30 bp, Artificial Sequence
  Synthetic oligonucleotide
gttttgcccatttaaaaagatcatcagttt

SEQ ID NO: 392359 - DNA, 30 bp, Artificial Sequence
  Synthetic oligonucleotide
ttttctgtgggatgccctatgagtcagttt

SEQ ID NO: 392360 - DNA, 30 bp, Artificial Sequence
  Synthetic oligonucleotide
gtcaacaaaacgttagcctgtagagagttt

SEQ ID NO: 392361 - DNA, 30 bp, Artificial Sequence
  Synthetic oligonucleotide
caggcagacgagggcatcccttaggagttt

SEQ ID NO: 392362 - DNA, 30 bp, Artificial Sequence
  Synthetic oligonucleotide
tataactcagtatggtcgtggtgggagttt

SEQ ID NO: 392363 - DNA, 30 bp, Artificial Sequence
  Synthetic oligonucleotide
ggtacggttgctcttaatgaaatggagttt

SEQ ID NO: 392364 - DNA, 30 bp, Artificial Sequence
  Synthetic oligonucleotide
cgggaccctcattaatttagcgtggagttt

SEQ ID NO: 392365 - DNA, 30 bp, Artificial Sequence
  Synthetic oligonucleotide
ttcataatctgaggaacggacactgagttt

SEQ ID NO: 392366 - DNA, 30 bp, Artificial Sequence
  Synthetic oligonucleotide
tctgaatgtgttaaatgtctaaaatagttt

SEQ ID NO: 392367 - DNA, 30 bp, Artificial Sequence
  Synthetic oligonucleotide
ctcgttagagcgggacgggtctaatagttt

SEQ ID NO: 392368 - DNA, 30 bp, Artificial Sequence
  Synthetic oligonucleotide
cagggttgcgtctttttctgtatatagttt

SEQ ID NO: 392369 - DNA, 30 bp, Artificial Sequence
  Synthetic oligonucleotide
cgctccgcctggaaagtgccggactagttt

SEQ ID NO: 392370 - DNA, 30 bp, Artificial Sequence
  Synthetic oligonucleotide
ggattacgggggactcctaatgattagttt

SEQ ID NO: 392371 - DNA, 30 bp, Artificial Sequence
  Synthetic oligonucleotide
ctggctggtgataaaattccgagttagttt

SEQ ID NO: 392372 - DNA, 30 bp, Artificial Sequence
  Synthetic oligonucleotide
ttcgatgtagttgtcacatggatttagttt

SEQ ID NO: 392373 - DNA, 30 bp, Artificial Sequence
  Synthetic oligonucleotide
gagttggttcatggctctcggcggacgttt

SEQ ID NO: 392374 - DNA, 30 bp, Artificial Sequence
  Synthetic oligonucleotide
agttattcatctaggcgtgccaaaccgttt

SEQ ID NO: 392375 - DNA, 30 bp, Artificial Sequence
  Synthetic oligonucleotide
ctcttgaaaaacccgtaactacacccgttt

SEQ ID NO: 392376 - DNA, 30 bp, Artificial Sequence
  Synthetic oligonucleotide
tgcttaaaatgaaatgggacactcccgttt

SEQ ID NO: 392377 - DNA, 30 bp, Artificial Sequence
  Synthetic oligonucleotide
gattggatcaaactgatatatctcccgttt

SEQ ID NO: 392378 - DNA, 30 bp, Artificial Sequence
  Synthetic oligonucleotide
ctgcatggcatgccgagattgatgccgttt

SEQ ID NO: 392379 - DNA, 30 bp, Artificial Sequence
  Synthetic oligonucleotide
tgtataggtggaatacaccttcttccgttt

SEQ ID NO: 392380 - DNA, 30 bp, Artificial Sequence
  Synthetic oligonucleotide
gacagtcatacgtctggaaattttccgttt

SEQ ID NO: 392381 - DNA, 30 bp, Artificial Sequence
  Synthetic oligonucleotide
atgaatattaatggcgttgaaaaagcgttt

SEQ ID NO: 392382 - DNA, 30 bp, Artificial Sequence
  Synthetic oligonucleotide
atgccccagactagacggagtgcagcgttt

SEQ ID NO: 392383 - DNA, 30 bp, Artificial Sequence
  Synthetic oligonucleotide
gtttgagaatcgcgtcgatttttagcgttt

SEQ ID NO: 392384 - DNA, 30 bp, Artificial Sequence
  Synthetic oligonucleotide
atacgccgacggacccttcttagcgcgttt

SEQ ID NO: 392385 - DNA, 30 bp, Artificial Sequence
  Synthetic oligonucleotide
tcatcgtctgcagaattggatgtcgcgttt

SEQ ID NO: 392386 - DNA, 30 bp, Artificial Sequence
  Synthetic oligonucleotide
tgcgtacatcggtatatccctcgggcgttt

SEQ ID NO: 392387 - DNA, 30 bp, Artificial Sequence
  Synthetic oligonucleotide
aggggtttgaccaggatagtgatggcgttt

SEQ ID NO: 392388 - DNA, 30 bp, Artificial Sequence
  Synthetic oligonucleotide
cgctaacggtacacggccagctatgcgttt

SEQ ID NO: 392389 - DNA, 30 bp, Artificial Sequence
  Synthetic oligonucleotide
agatggagacaatcggagccaactgcgttt

SEQ ID NO: 392390 - DNA, 30 bp, Artificial Sequence
  Synthetic oligonucleotide
tcgtaatagttggatcgttgagctgcgttt

SEQ ID NO: 392391 - DNA, 30 bp, Artificial Sequence
  Synthetic oligonucleotide
aacgtaaatgctcctgtccctatatcgttt

SEQ ID NO: 392392 - DNA, 30 bp, Artificial Sequence
  Synthetic oligonucleotide
ccttggttgaataggcggcccgcctcgttt

SEQ ID NO: 392393 - DNA, 30 bp, Artificial Sequence
  Synthetic oligonucleotide
aacctaaaacggacgattgctgtctcgttt

SEQ ID NO: 392394 - DNA, 30 bp, Artificial Sequence
  Synthetic oligonucleotide
cgaatagcgcttcctatttcttagtcgttt

SEQ ID NO: 392395 - DNA, 30 bp, Artificial Sequence
  Synthetic oligonucleotide
atcaggctagaagcgtgctacttgtcgttt

SEQ ID NO: 392396 - DNA, 30 bp, Artificial Sequence
  Synthetic oligonucleotide
gcgtagcatttcatggtttgctattcgttt

SEQ ID NO: 392397 - DNA, 30 bp, Artificial Sequence
  Synthetic oligonucleotide
gtaactgggtcccgtttagtgcaaaggttt

SEQ ID NO: 392398 - DNA, 30 bp, Artificial Sequence
  Synthetic oligonucleotide
gattaacccgtactcataacaccaaggttt

SEQ ID NO: 392399 - DNA, 30 bp, Artificial Sequence
  Synthetic oligonucleotide
atcaagcggagcggtgcagcctagaggttt

SEQ ID NO: 392400 - DNA, 30 bp, Artificial Sequence
  Synthetic oligonucleotide
agatagttcgtcgcgccacataataggttt

SEQ ID NO: 392401 - DNA, 30 bp, Artificial Sequence
  Synthetic oligonucleotide
atttaggattaacggattggtaaacggttt

SEQ ID NO: 392402 - DNA, 30 bp, Artificial Sequence
  Synthetic oligonucleotide
cgcaacctagctgtacggccttaacggttt

SEQ ID NO: 392403 - DNA, 30 bp, Artificial Sequence
  Synthetic oligonucleotide
ataaaaagattctacaagcagggacggttt

SEQ ID NO: 392404 - DNA, 30 bp, Artificial Sequence
  Synthetic oligonucleotide
cttgcggtgtgggtctcagattctcggttt

SEQ ID NO: 392405 - DNA, 30 bp, Artificial Sequence
  Synthetic oligonucleotide
atgacacggtaaatagcgggagaagggttt

SEQ ID NO: 392406 - DNA, 30 bp, Artificial Sequence
  Synthetic oligonucleotide
ctcggcgtaaactgaagtaagtaagggttt

SEQ ID NO: 392407 - DNA, 30 bp, Artificial Sequence
  Synthetic oligonucleotide
ccctaagggacacagcgacacaacgggttt

SEQ ID NO: 392408 - DNA, 30 bp, Artificial Sequence
  Synthetic oligonucleotide
ccttcagcctggcaggatatcaacgggttt

SEQ ID NO: 392409 - DNA, 30 bp, Artificial Sequence
  Synthetic oligonucleotide
ggtccgctctgcactaccgatcacgggttt

SEQ ID NO: 392410 - DNA, 30 bp, Artificial Sequence
  Synthetic oligonucleotide
agcaacaacgaagcccgaagtggggggttt

SEQ ID NO: 392411 - DNA, 30 bp, Artificial Sequence
  Synthetic oligonucleotide
gcgttcgattcccgcataaaggtggggttt

SEQ ID NO: 392412 - DNA, 31 bp, Artificial Sequence
  Synthetic oligonucleotide
aattgccgttcaagtaggaccgttggggttt

SEQ ID NO: 392413 - DNA, 30 bp, Artificial Sequence
  Synthetic oligonucleotide
catttataaaaaggagcatcgcatgggttt

SEQ ID NO: 392414 - DNA, 30 bp, Artificial Sequence
  Synthetic oligonucleotide
ggctgcggactcagcaactaccggtggttt

SEQ ID NO: 392415 - DNA, 30 bp, Artificial Sequence
  Synthetic oligonucleotide
tcaggcaaccgtggcccagtttattggttt

SEQ ID NO: 392416 - DNA, 30 bp, Artificial Sequence
  Synthetic oligonucleotide
atacggggtaaggctaataaaacaatgttt

SEQ ID NO: 392417 - DNA, 30 bp, Artificial Sequence
  Synthetic oligonucleotide
tgccctgcggcgacaacagtgacaatgttt

SEQ ID NO: 392418 - DNA, 30 bp, Artificial Sequence
  Synthetic oligonucleotide
aggtctaacctggttctagccagaatgttt

SEQ ID NO: 392419 - DNA, 30 bp, Artificial Sequence
  Synthetic oligonucleotide
ctgggaaccatgagatcgtaggccatgttt

SEQ ID NO: 392420 - DNA, 30 bp, Artificial Sequence
  Synthetic oligonucleotide
gtaaacgcgtagtttaagattccgatgttt

SEQ ID NO: 392421 - DNA, 30 bp, Artificial Sequence
  Synthetic oligonucleotide
tataaatcaagccagctatacactatgttt

SEQ ID NO: 392422 - DNA, 30 bp, Artificial Sequence
  Synthetic oligonucleotide
aatctcgctttcgtgctatcccgtatgttt

SEQ ID NO: 392423 - DNA, 30 bp, Artificial Sequence
  Synthetic oligonucleotide
gttgcatttgcccggattgttttactgttt

SEQ ID NO: 392424 - DNA, 30 bp, Artificial Sequence
  Synthetic oligonucleotide
gtttcgagtggctcgaaggtagagctgttt

SEQ ID NO: 392425 - DNA, 30 bp, Artificial Sequence
  Synthetic oligonucleotide
tgctgaggaaaacaccctatttagctgttt

SEQ ID NO: 392426 - DNA, 30 bp, Artificial Sequence
  Synthetic oligonucleotide
ccgtctcagtcaatggcacccgcgctgttt

SEQ ID NO: 392427 - DNA, 30 bp, Artificial Sequence
  Synthetic oligonucleotide
ggtagcagttacattgccgtttggctgttt

SEQ ID NO: 392428 - DNA, 30 bp, Artificial Sequence
  Synthetic oligonucleotide
gacctcctacgcatcgtaaagaaagtgttt

SEQ ID NO: 392429 - DNA, 30 bp, Artificial Sequence
  Synthetic oligonucleotide
acttggggacgctaaacaactctagtgttt

SEQ ID NO: 392430 - DNA, 29 bp, Artificial Sequence
  Synthetic oligonucleotide
gaactgcaacatcttactaatgcgtgttt

SEQ ID NO: 392431 - DNA, 30 bp, Artificial Sequence
  Synthetic oligonucleotide
ggaaacatgtgactatcactctaggtgttt

SEQ ID NO: 392432 - DNA, 30 bp, Artificial Sequence
  Synthetic oligonucleotide
accctggaggcaattgaataccatgtgttt

SEQ ID NO: 392433 - DNA, 30 bp, Artificial Sequence
  Synthetic oligonucleotide
gaagaagggggtctgatcatctatgtgttt

SEQ ID NO: 392434 - DNA, 30 bp, Artificial Sequence
  Synthetic oligonucleotide
tcatattttatgaggtggggctttgtgttt

SEQ ID NO: 392435 - DNA, 30 bp, Artificial Sequence
  Synthetic oligonucleotide
gatggaccagccttgaacataggcttgttt

SEQ ID NO: 392436 - DNA, 30 bp, Artificial Sequence
  Synthetic oligonucleotide
cattttaccatcaataggctaaagttgttt

SEQ ID NO: 392437 - DNA, 30 bp, Artificial Sequence
  Synthetic oligonucleotide
ttccttttattgggggcgtagtagttgttt

SEQ ID NO: 392438 - DNA, 30 bp, Artificial Sequence
  Synthetic oligonucleotide
gcatgtggagtcttacatgatgatttgttt

SEQ ID NO: 392439 - DNA, 30 bp, Artificial Sequence
  Synthetic oligonucleotide
taagagggaaggaatattcccataaatttt

SEQ ID NO: 392440 - DNA, 30 bp, Artificial Sequence
  Synthetic oligonucleotide
cattggtaacaatgtctcgtgggcaatttt

SEQ ID NO: 392441 - DNA, 30 bp, Artificial Sequence
  Synthetic oligonucleotide
gtaagtctgcactgcggagtcacgaatttt

SEQ ID NO: 392442 - DNA, 30 bp, Artificial Sequence
  Synthetic oligonucleotide
gccaagcgatatctcaaccgattgaatttt

SEQ ID NO: 392443 - DNA, 30 bp, Artificial Sequence
  Synthetic oligonucleotide
gagaaaccgcgacctagtggtaataatttt

SEQ ID NO: 392444 - DNA, 30 bp, Artificial Sequence
  Synthetic oligonucleotide
tagatatagtgatggccaggttataatttt

SEQ ID NO: 392445 - DNA, 30 bp, Artificial Sequence
  Synthetic oligonucleotide
cctacggtacaaatgggggctcttaatttt

SEQ ID NO: 392446 - DNA, 30 bp, Artificial Sequence
  Synthetic oligonucleotide
ctatgagccaccaccatcctgtttaatttt

SEQ ID NO: 392447 - DNA, 30 bp, Artificial Sequence
  Synthetic oligonucleotide
gaatgttacgtgttcgagccggaacatttt

SEQ ID NO: 392448 - DNA, 30 bp, Artificial Sequence
  Synthetic oligonucleotide
gagcgttaccaacggagtgtgtaacatttt

SEQ ID NO: 392449 - DNA, 30 bp, Artificial Sequence
  Synthetic oligonucleotide
tgattcttcggttgggtggatagacatttt

SEQ ID NO: 392450 - DNA, 30 bp, Artificial Sequence
  Synthetic oligonucleotide
ggccggacatagctataaactttacatttt

SEQ ID NO: 392451 - DNA, 30 bp, Artificial Sequence
  Synthetic oligonucleotide
atggtactacaccgcgacgagagccatttt

SEQ ID NO: 392452 - DNA, 30 bp, Artificial Sequence
  Synthetic oligonucleotide
attggatacgtgcccttcaacggccatttt

SEQ ID NO: 392453 - DNA, 30 bp, Artificial Sequence
  Synthetic oligonucleotide
gtgaaacgaacaacccccggatgccatttt

SEQ ID NO: 392454 - DNA, 30 bp, Artificial Sequence
  Synthetic oligonucleotide
aagacggggctcggcgatactttccatttt

SEQ ID NO: 392455 - DNA, 30 bp, Artificial Sequence
  Synthetic oligonucleotide
atcggtctcgtaggctctagcagtcatttt

SEQ ID NO: 392456 - DNA, 30 bp, Artificial Sequence
  Synthetic oligonucleotide
ttgatgtgagcatatcaggtcggtcatttt

SEQ ID NO: 392457 - DNA, 30 bp, Artificial Sequence
  Synthetic oligonucleotide
taagccttggccgattaaactattcatttt

SEQ ID NO: 392458 - DNA, 30 bp, Artificial Sequence
  Synthetic oligonucleotide
actgtgcttcgtgagcaatcgccagatttt

SEQ ID NO: 392459 - DNA, 30 bp, Artificial Sequence
  Synthetic oligonucleotide
cgacccccagatactcttctgccagatttt

SEQ ID NO: 392460 - DNA, 30 bp, Artificial Sequence
  Synthetic oligonucleotide
tgccctccaagattttagcgtcccgatttt

SEQ ID NO: 392461 - DNA, 30 bp, Artificial Sequence
  Synthetic oligonucleotide
tggatgtggaaatttagtctcgccgatttt

SEQ ID NO: 392462 - DNA, 30 bp, Artificial Sequence
  Synthetic oligonucleotide
ttgtacaagctcggacagaccagcgatttt

SEQ ID NO: 392463 - DNA, 30 bp, Artificial Sequence
  Synthetic oligonucleotide
agccgtcctctgacgttagtgcgggatttt

SEQ ID NO: 392464 - DNA, 30 bp, Artificial Sequence
  Synthetic oligonucleotide
gcggggccagtaccaaggggatgggatttt

SEQ ID NO: 392465 - DNA, 30 bp, Artificial Sequence
  Synthetic oligonucleotide
caatagtagccaaagccaacgtgggatttt

SEQ ID NO: 392466 - DNA, 30 bp, Artificial Sequence
  Synthetic oligonucleotide
gagactcttccaagactcgccatggatttt

SEQ ID NO: 392467 - DNA, 30 bp, Artificial Sequence
  Synthetic oligonucleotide
ttgaaggaaaacagaccaggccatgatttt

SEQ ID NO: 392468 - DNA, 30 bp, Artificial Sequence
  Synthetic oligonucleotide
attacgtatatgcttagcattagtgatttt

SEQ ID NO: 392469 - DNA, 30 bp, Artificial Sequence
  Synthetic oligonucleotide
gggcaggacccatagcgagggttctatttt

SEQ ID NO: 392470 - DNA, 30 bp, Artificial Sequence
  Synthetic oligonucleotide
gatagtgtgggattggccttcgcgtatttt

SEQ ID NO: 392471 - DNA, 30 bp, Artificial Sequence
  Synthetic oligonucleotide
accacggactagtgggtgcctaggtatttt

SEQ ID NO: 392472 - DNA, 30 bp, Artificial Sequence
  Synthetic oligonucleotide
ggaccaagtgggcctgatgtactgtatttt

SEQ ID NO: 392473 - DNA, 30 bp, Artificial Sequence
  Synthetic oligonucleotide
tgagagtttaagacagttcacgattatttt

SEQ ID NO: 392474 - DNA, 30 bp, Artificial Sequence
  Synthetic oligonucleotide
gaatagaacaaattcacgataacttatttt

SEQ ID NO: 392475 - DNA, 30 bp, Artificial Sequence
  Synthetic oligonucleotide
atcgtgtagagacattatatcagttatttt

SEQ ID NO: 392476 - DNA, 30 bp, Artificial Sequence
  Synthetic oligonucleotide
gcatttaatgaacaactcctgtgttatttt

SEQ ID NO: 392477 - DNA, 30 bp, Artificial Sequence
  Synthetic oligonucleotide
ggtctatgacgcatggaaataatttatttt

SEQ ID NO: 392478 - DNA, 30 bp, Artificial Sequence
  Synthetic oligonucleotide
gagcctggtttccccatgcgttcaactttt

SEQ ID NO: 392479 - DNA, 30 bp, Artificial Sequence
  Synthetic oligonucleotide
cttaaaagaaattgcgggacaagaactttt

SEQ ID NO: 392480 - DNA, 30 bp, Artificial Sequence
  Synthetic oligonucleotide
caaatggcatctcaggcaagacgaactttt

SEQ ID NO: 392481 - DNA, 30 bp, Artificial Sequence
  Synthetic oligonucleotide
gacctgccacttgtcttagagtgaactttt

SEQ ID NO: 392482 - DNA, 30 bp, Artificial Sequence
  Synthetic oligonucleotide
cgaaggaatgaggttggaagtgtaactttt

SEQ ID NO: 392483 - DNA, 30 bp, Artificial Sequence
  Synthetic oligonucleotide
gtttgcccgcaagacggcaaacacactttt

SEQ ID NO: 392484 - DNA, 30 bp, Artificial Sequence
  Synthetic oligonucleotide
gtgactgaagttccttgtcagtcgactttt

SEQ ID NO: 392485 - DNA, 30 bp, Artificial Sequence
  Synthetic oligonucleotide
cattagccacgccgactgtccaggactttt

SEQ ID NO: 392486 - DNA, 30 bp, Artificial Sequence
  Synthetic oligonucleotide
ggtcgcgggggccattttttggggactttt

SEQ ID NO: 392487 - DNA, 30 bp, Artificial Sequence
  Synthetic oligonucleotide
atctaggaaagcctgataggtgttactttt

SEQ ID NO: 392488 - DNA, 30 bp, Artificial Sequence
  Synthetic oligonucleotide
agaaggctttgcatctggattactcctttt

SEQ ID NO: 392489 - DNA, 30 bp, Artificial Sequence
  Synthetic oligonucleotide
acaggggcgatcttggggcatacagctttt

SEQ ID NO: 392490 - DNA, 30 bp, Artificial Sequence
  Synthetic oligonucleotide
cccgtcggtaacagaatgggagcagctttt

SEQ ID NO: 392491 - DNA, 30 bp, Artificial Sequence
  Synthetic oligonucleotide
gatacctcaggccactggccccgagctttt

SEQ ID NO: 392492 - DNA, 30 bp, Artificial Sequence
  Synthetic oligonucleotide
gatggagcttaaagaaaccagctcgctttt

SEQ ID NO: 392493 - DNA, 30 bp, Artificial Sequence
  Synthetic oligonucleotide
ttaatccaacgttggtatcaacatgctttt

SEQ ID NO: 392494 - DNA, 30 bp, Artificial Sequence
  Synthetic oligonucleotide
gtcggtcatccccaactaaagtaatctttt

SEQ ID NO: 392495 - DNA, 30 bp, Artificial Sequence
  Synthetic oligonucleotide
tcggtattagattgatgacccaactctttt

SEQ ID NO: 392496 - DNA, 30 bp, Artificial Sequence
  Synthetic oligonucleotide
gcccgtgttacggtcaccaaacagtctttt

SEQ ID NO: 392497 - DNA, 30 bp, Artificial Sequence
  Synthetic oligonucleotide
acaatgtccgaggcagagtgagcgtctttt

SEQ ID NO: 392498 - DNA, 30 bp, Artificial Sequence
  Synthetic oligonucleotide
gggggcgtcagattatatcaaaggtctttt

SEQ ID NO: 392499 - DNA, 30 bp, Artificial Sequence
  Synthetic oligonucleotide
gcgctctgggaatgttcaaaggggtctttt

SEQ ID NO: 392500 - DNA, 30 bp, Artificial Sequence
  Synthetic oligonucleotide
attgagaacttccttgttacattgtctttt

SEQ ID NO: 392501 - DNA, 30 bp, Artificial Sequence
  Synthetic oligonucleotide
gtggaaatctatccgatagtcagttctttt

SEQ ID NO: 392502 - DNA, 30 bp, Artificial Sequence
  Synthetic oligonucleotide
cctgtgctgtcaaccgttaaaatttctttt

SEQ ID NO: 392503 - DNA, 30 bp, Artificial Sequence
  Synthetic oligonucleotide
agactcttggaacaccctgtataaagtttt

SEQ ID NO: 392504 - DNA, 30 bp, Artificial Sequence
  Synthetic oligonucleotide
taagaatgtggtatagttgtgcgcagtttt

SEQ ID NO: 392505 - DNA, 30 bp, Artificial Sequence
  Synthetic oligonucleotide
gtcgttaaagcctacaaagacaatagtttt

SEQ ID NO: 392506 - DNA, 30 bp, Artificial Sequence
  Synthetic oligonucleotide
atgattaaagtactgaaggtgtatagtttt

SEQ ID NO: 392507 - DNA, 30 bp, Artificial Sequence
  Synthetic oligonucleotide
atattgcgtgccatctaaccttatagtttt

SEQ ID NO: 392508 - DNA, 30 bp, Artificial Sequence
  Synthetic oligonucleotide
gcgtagatgtcccgcaaattcggtagtttt

SEQ ID NO: 392509 - DNA, 30 bp, Artificial Sequence
  Synthetic oligonucleotide
aatactaccgcatggctgcatattagtttt

SEQ ID NO: 392510 - DNA, 30 bp, Artificial Sequence
  Synthetic oligonucleotide
gtaagactagtatttaccggccaacgtttt

SEQ ID NO: 392511 - DNA, 30 bp, Artificial Sequence
  Synthetic oligonucleotide
attggaatcccggaggttatcacacgtttt

SEQ ID NO: 392512 - DNA, 30 bp, Artificial Sequence
  Synthetic oligonucleotide
aaaaggttcgctgggttcacccgacgtttt

SEQ ID NO: 392513 - DNA, 30 bp, Artificial Sequence
  Synthetic oligonucleotide
aaaaatgaagaacgcttgaagtaccgtttt

SEQ ID NO: 392514 - DNA, 30 bp, Artificial Sequence
  Synthetic oligonucleotide
tgtagaaatttccagtacgaatagcgtttt

SEQ ID NO: 392515 - DNA, 30 bp, Artificial Sequence
  Synthetic oligonucleotide
ctttggtccgtacccaaaatcccgcgtttt

SEQ ID NO: 392516 - DNA, 30 bp, Artificial Sequence
  Synthetic oligonucleotide
aaacgccaagtaaacgacgctttcggtttt

SEQ ID NO: 392517 - DNA, 30 bp, Artificial Sequence
  Synthetic oligonucleotide
gttgatcggtatcgcacgccgaagggtttt

SEQ ID NO: 392518 - DNA, 30 bp, Artificial Sequence
  Synthetic oligonucleotide
acatatccacatgcaaaaccaaatggtttt

SEQ ID NO: 392519 - DNA, 30 bp, Artificial Sequence
  Synthetic oligonucleotide
ttagtcgtgcctacttccttgactggtttt

SEQ ID NO: 392520 - DNA, 30 bp, Artificial Sequence
  Synthetic oligonucleotide
tattggctgcgagcctcacaatctggtttt

SEQ ID NO: 392521 - DNA, 30 bp, Artificial Sequence
  Synthetic oligonucleotide
tacaggactccgaacacggataaatgtttt

SEQ ID NO: 392522 - DNA, 30 bp, Artificial Sequence
  Synthetic oligonucleotide
atcgtggaacattgtgaggcgtaatgtttt

SEQ ID NO: 392523 - DNA, 30 bp, Artificial Sequence
  Synthetic oligonucleotide
gagcaaagttgggcccgccaacgatgtttt

SEQ ID NO: 392524 - DNA, 30 bp, Artificial Sequence
  Synthetic oligonucleotide
tcgagtattggctcaatggcacgatgtttt

SEQ ID NO: 392525 - DNA, 30 bp, Artificial Sequence
  Synthetic oligonucleotide
gagagtacgtggtttgtgcattactgtttt

SEQ ID NO: 392526 - DNA, 30 bp, Artificial Sequence
  Synthetic oligonucleotide
gcgccgctaaagctgggctagatctgtttt

SEQ ID NO: 392527 - DNA, 30 bp, Artificial Sequence
  Synthetic oligonucleotide
tcgaaaagtcaatatttcgcacggtgtttt

SEQ ID NO: 392528 - DNA, 30 bp, Artificial Sequence
  Synthetic oligonucleotide
cgcgtaataaaagacaaaaaagaaattttt

SEQ ID NO: 392529 - DNA, 30 bp, Artificial Sequence
  Synthetic oligonucleotide
aacactcataaaagatcaaggcgaattttt

SEQ ID NO: 392530 - DNA, 30 bp, Artificial Sequence
  Synthetic oligonucleotide
attacaagttccctcgaatacctaattttt

SEQ ID NO: 392531 - DNA, 30 bp, Artificial Sequence
  Synthetic oligonucleotide
taagatatcgttaacgggctggtaattttt

SEQ ID NO: 392532 - DNA, 30 bp, Artificial Sequence
  Synthetic oligonucleotide
gttccatacatgcaaagaatgtgcattttt

SEQ ID NO: 392533 - DNA, 29 bp, Artificial Sequence
  Synthetic oligonucleotide
ttgctgaacttcatgttctttgcattttt

SEQ ID NO: 392534 - DNA, 30 bp, Artificial Sequence
  Synthetic oligonucleotide
caggatgttcgctaggatcacaagattttt

SEQ ID NO: 392535 - DNA, 30 bp, Artificial Sequence
  Synthetic oligonucleotide
aaagtagtattaggtatcgtaacccttttt

SEQ ID NO: 392536 - DNA, 30 bp, Artificial Sequence
  Synthetic oligonucleotide
gcgaaaaatttagacccatacgatcttttt

SEQ ID NO: 392537 - DNA, 30 bp, Artificial Sequence
  Synthetic oligonucleotide
ttgtaagagagtatccgcttgccagttttt

SEQ ID NO: 392538 - DNA, 30 bp, Artificial Sequence
  Synthetic oligonucleotide
actcgcaaggtgctttagtcgcgcgttttt

SEQ ID NO: 392539 - DNA, 30 bp, Artificial Sequence
  Synthetic oligonucleotide
cgaatggcgcattaatttaaaggcgttttt

SEQ ID NO: 392540 - DNA, 30 bp, Artificial Sequence
  Synthetic oligonucleotide
gtcccggaagtcgacatccgctgggttttt

SEQ ID NO: 392541 - DNA, 30 bp, Artificial Sequence
  Synthetic oligonucleotide
gagtcgtttccgtatgactcaatggttttt

SEQ ID NO: 392542 - DNA, 30 bp, Artificial Sequence
  Synthetic oligonucleotide
tagatagagatgcaggagccaagtgttttt

SEQ ID NO: 392543 - DNA, 30 bp, Artificial Sequence
  Synthetic oligonucleotide
ccgccacctccgatgacggaccgatttttt

SEQ ID NO: 392544 - DNA, 30 bp, Artificial Sequence
  Synthetic oligonucleotide
gaacggatagtcatcgtgtacctctttttt

SEQ ID NO: 392545 - DNA, 30 bp, Artificial Sequence
  Synthetic oligonucleotide
cacctgacgagtgcactatcggagtttttt

SEQ ID NO: 392546 - DNA, 30 bp, Artificial Sequence
  Synthetic oligonucleotide
gttcctggtggtagcagagcaacgtttttt

SEQ ID NO: 392547 - DNA, 30 bp, Artificial Sequence
  Synthetic oligonucleotide
ttatcgtaggagcaacgtttaaggtttttt

SEQ ID NO: 392548 - DNA, 30 bp, Artificial Sequence
  Synthetic oligonucleotide
gtggggctgagtgctaccaggacttttttt

SEQ ID NO: 392549 - DNA, 30 bp, Artificial Sequence
  Synthetic oligonucleotide
gcggtctcggtaggagcggattcttttttt

SEQ ID NO: 392550 - DNA, 30 bp, Artificial Sequence
  Synthetic oligonucleotide
tgtccaggggatctagataaaagttttttt

SEQ ID NO: 392551 - DNA, 30 bp, Artificial Sequence
  Synthetic oligonucleotide
tgagggctgataaatgagtaaggttttttt

SEQ ID NO: 392552 - DNA, 30 bp, Artificial Sequence
  Synthetic oligonucleotide
cctttgcatcgaatttctccgacaaaaaaa

SEQ ID NO: 392553 - DNA, 30 bp, Artificial Sequence
  Synthetic oligonucleotide
gcacagctcggtaatcatcacataaaaaaa

SEQ ID NO: 392554 - DNA, 30 bp, Artificial Sequence
  Synthetic oligonucleotide
gtaatttgttttaaagataaccacaaaaaa

SEQ ID NO: 392555 - DNA, 30 bp, Artificial Sequence
  Synthetic oligonucleotide
ggagtggtcccctaggggtatgacaaaaaa

SEQ ID NO: 392556 - DNA, 30 bp, Artificial Sequence
  Synthetic oligonucleotide
agctaaccaatgctttgttaatacaaaaaa

SEQ ID NO: 392557 - DNA, 30 bp, Artificial Sequence
  Synthetic oligonucleotide
tcttcccgctagcctaatagtgggaaaaaa

SEQ ID NO: 392558 - DNA, 30 bp, Artificial Sequence
  Synthetic oligonucleotide
ttcgcttttcctcgtaaaagcgtgaaaaaa

SEQ ID NO: 392559 - DNA, 30 bp, Artificial Sequence
  Synthetic oligonucleotide
ctgtctataggcgccgcacgggtgaaaaaa

SEQ ID NO: 392560 - DNA, 30 bp, Artificial Sequence
  Synthetic oligonucleotide
aaaaccatcggtatgtgcctaaataaaaaa

SEQ ID NO: 392561 - DNA, 29 bp, Artificial Sequence
  Synthetic oligonucleotide
tttagaagtatagcatacggcataaaaaa

SEQ ID NO: 392562 - DNA, 30 bp, Artificial Sequence
  Synthetic oligonucleotide
gctgtgtgtcacctcgttcacactaaaaaa

SEQ ID NO: 392563 - DNA, 30 bp, Artificial Sequence
  Synthetic oligonucleotide
ctaggtgcgacctggccggagcgtaaaaaa

SEQ ID NO: 392564 - DNA, 30 bp, Artificial Sequence
  Synthetic oligonucleotide
agacttatgtcttctacgtaaggacaaaaa

SEQ ID NO: 392565 - DNA, 30 bp, Artificial Sequence
  Synthetic oligonucleotide
aactagcaccactttcaccgacaccaaaaa

SEQ ID NO: 392566 - DNA, 30 bp, Artificial Sequence
  Synthetic oligonucleotide
tcgaatttaccccccgccggggagcaaaaa

SEQ ID NO: 392567 - DNA, 30 bp, Artificial Sequence
  Synthetic oligonucleotide
tggtcatcaatcttcatgttatcgcaaaaa

SEQ ID NO: 392568 - DNA, 30 bp, Artificial Sequence
  Synthetic oligonucleotide
cataatcggcggactgatctaaggcaaaaa

SEQ ID NO: 392569 - DNA, 30 bp, Artificial Sequence
  Synthetic oligonucleotide
caactcaaaattactttggaagtgcaaaaa

SEQ ID NO: 392570 - DNA, 30 bp, Artificial Sequence
  Synthetic oligonucleotide
gctaaatgcgaaccttagcacattcaaaaa

SEQ ID NO: 392571 - DNA, 30 bp, Artificial Sequence
  Synthetic oligonucleotide
tcacgttggcaaggcccgcagcttcaaaaa

SEQ ID NO: 392572 - DNA, 30 bp, Artificial Sequence
  Synthetic oligonucleotide
acaagagagtggttgttggtagacgaaaaa

SEQ ID NO: 392573 - DNA, 30 bp, Artificial Sequence
  Synthetic oligonucleotide
gatgaacaatgtaacgctacttaggaaaaa

SEQ ID NO: 392574 - DNA, 30 bp, Artificial Sequence
  Synthetic oligonucleotide
tcgcatgtagagcactgctccgcggaaaaa

SEQ ID NO: 392575 - DNA, 30 bp, Artificial Sequence
  Synthetic oligonucleotide
acaccgccgccagagtgcttctgggaaaaa

SEQ ID NO: 392576 - DNA, 30 bp, Artificial Sequence
  Synthetic oligonucleotide
ggagatggcattttaattggtaatgaaaaa

SEQ ID NO: 392577 - DNA, 30 bp, Artificial Sequence
  Synthetic oligonucleotide
tcaaaaattgaatgtcacgtacgtgaaaaa

SEQ ID NO: 392578 - DNA, 30 bp, Artificial Sequence
  Synthetic oligonucleotide
ttaccggtcagaggtaagtaaagataaaaa

SEQ ID NO: 392579 - DNA, 30 bp, Artificial Sequence
  Synthetic oligonucleotide
aggatgtatgtacactgtaaaggctaaaaa

SEQ ID NO: 392580 - DNA, 30 bp, Artificial Sequence
  Synthetic oligonucleotide
gacagttagccttagaggccatgctaaaaa

SEQ ID NO: 392581 - DNA, 30 bp, Artificial Sequence
  Synthetic oligonucleotide
gcgggtgtaagttttgacgggatctaaaaa

SEQ ID NO: 392582 - DNA, 30 bp, Artificial Sequence
  Synthetic oligonucleotide
tccagagaaaaattggggatactctaaaaa

SEQ ID NO: 392583 - DNA, 30 bp, Artificial Sequence
  Synthetic oligonucleotide
aatggcttactgcgagctatactctaaaaa

SEQ ID NO: 392584 - DNA, 30 bp, Artificial Sequence
  Synthetic oligonucleotide
cagtcgtccactatgaagtaagtctaaaaa

SEQ ID NO: 392585 - DNA, 30 bp, Artificial Sequence
  Synthetic oligonucleotide
gagggatcaggtatcctacccttctaaaaa

SEQ ID NO: 392586 - DNA, 30 bp, Artificial Sequence
  Synthetic oligonucleotide
cggggcgggcgtatgtgagccgggtaaaaa

SEQ ID NO: 392587 - DNA, 30 bp, Artificial Sequence
  Synthetic oligonucleotide
gcgtttatgcactaatcaagtcattaaaaa

SEQ ID NO: 392588 - DNA, 30 bp, Artificial Sequence
  Synthetic oligonucleotide
aatgtttgggttcgtaccgtcatttaaaaa

SEQ ID NO: 392589 - DNA, 30 bp, Artificial Sequence
  Synthetic oligonucleotide
aagtgcccctctaactcgtcgttaacaaaa

SEQ ID NO: 392590 - DNA, 30 bp, Artificial Sequence
  Synthetic oligonucleotide
agtagattactcctttcatcgtacacaaaa

SEQ ID NO: 392591 - DNA, 30 bp, Artificial Sequence
  Synthetic oligonucleotide
ataatctgtcctagggtcgagcgcacaaaa

SEQ ID NO: 392592 - DNA, 30 bp, Artificial Sequence
  Synthetic oligonucleotide
gtattgttttttggggttcagggcacaaaa

SEQ ID NO: 392593 - DNA, 30 bp, Artificial Sequence
  Synthetic oligonucleotide
aacattttagggttaaggcgggtcacaaaa

SEQ ID NO: 392594 - DNA, 30 bp, Artificial Sequence
  Synthetic oligonucleotide
ttggagtcacattctttgcacgggacaaaa

SEQ ID NO: 392595 - DNA, 30 bp, Artificial Sequence
  Synthetic oligonucleotide
cctggcatgttcggcaagccgttgacaaaa

SEQ ID NO: 392596 - DNA, 30 bp, Artificial Sequence
  Synthetic oligonucleotide
ttttctttagagtaggaagcagatacaaaa

SEQ ID NO: 392597 - DNA, 30 bp, Artificial Sequence
  Synthetic oligonucleotide
gttgattggattggtccgcctcctacaaaa

SEQ ID NO: 392598 - DNA, 30 bp, Artificial Sequence
  Synthetic oligonucleotide
tggtttttccgaattttatttcctacaaaa

SEQ ID NO: 392599 - DNA, 30 bp, Artificial Sequence
  Synthetic oligonucleotide
gtttagcggtgccggaattggggaccaaaa

SEQ ID NO: 392600 - DNA, 30 bp, Artificial Sequence
  Synthetic oligonucleotide
gcggcggccgaggactcatatttcccaaaa

SEQ ID NO: 392601 - DNA, 30 bp, Artificial Sequence
  Synthetic oligonucleotide
atgagctccacgagtcttgctatgccaaaa

SEQ ID NO: 392602 - DNA, 30 bp, Artificial Sequence
  Synthetic oligonucleotide
tctctaattccggttaaaggattgccaaaa

SEQ ID NO: 392603 - DNA, 30 bp, Artificial Sequence
  Synthetic oligonucleotide
gctcgattcaggtgacgctgaagtccaaaa

SEQ ID NO: 392604 - DNA, 30 bp, Artificial Sequence
  Synthetic oligonucleotide
gaacgtggatttcatctagtgaaagcaaaa

SEQ ID NO: 392605 - DNA, 30 bp, Artificial Sequence
  Synthetic oligonucleotide
cctttgcaacgaccgacataagtagcaaaa

SEQ ID NO: 392606 - DNA, 30 bp, Artificial Sequence
  Synthetic oligonucleotide
gtacatcgatattacagttacgacgcaaaa

SEQ ID NO: 392607 - DNA, 30 bp, Artificial Sequence
  Synthetic oligonucleotide
tccgtctcctccagacaccatgccgcaaaa

SEQ ID NO: 392608 - DNA, 30 bp, Artificial Sequence
  Synthetic oligonucleotide
ttcccaagagacgcgggtcgcggggcaaaa

SEQ ID NO: 392609 - DNA, 30 bp, Artificial Sequence
  Synthetic oligonucleotide
cttggttcttcccattcggggggggcaaaa

SEQ ID NO: 392610 - DNA, 30 bp, Artificial Sequence
  Synthetic oligonucleotide
tgcagcgcgctagcatccaattctgcaaaa

SEQ ID NO: 392611 - DNA, 30 bp, Artificial Sequence
  Synthetic oligonucleotide
gcatcagtggaatcgagcgtagcatcaaaa

SEQ ID NO: 392612 - DNA, 30 bp, Artificial Sequence
  Synthetic oligonucleotide
gatatgaactaggagcctcgcatatcaaaa

SEQ ID NO: 392613 - DNA, 30 bp, Artificial Sequence
  Synthetic oligonucleotide
atctaggcgtggcataaggtttactcaaaa

SEQ ID NO: 392614 - DNA, 30 bp, Artificial Sequence
  Synthetic oligonucleotide
acacttgaatttgacaagcgaagctcaaaa

SEQ ID NO: 392615 - DNA, 30 bp, Artificial Sequence
  Synthetic oligonucleotide
ggtcactcacaataaagcttactctcaaaa

SEQ ID NO: 392616 - DNA, 30 bp, Artificial Sequence
  Synthetic oligonucleotide
agtatgagcttatgaaaggttccgtcaaaa

SEQ ID NO: 392617 - DNA, 30 bp, Artificial Sequence
  Synthetic oligonucleotide
gttacatgaagagtgacaagattttcaaaa

SEQ ID NO: 392618 - DNA, 30 bp, Artificial Sequence
  Synthetic oligonucleotide
cgggggtttagacaaatacaaacaagaaaa

SEQ ID NO: 392619 - DNA, 29 bp, Artificial Sequence
  Synthetic oligonucleotide
ctcgtcgtcaccgatattttcgaagaaaa

SEQ ID NO: 392620 - DNA, 30 bp, Artificial Sequence
  Synthetic oligonucleotide
taatatcacccgtaagaggttggaagaaaa

SEQ ID NO: 392621 - DNA, 30 bp, Artificial Sequence
  Synthetic oligonucleotide
cgtagtattaagcttctcgctataagaaaa

SEQ ID NO: 392622 - DNA, 30 bp, Artificial Sequence
  Synthetic oligonucleotide
gcttcctgtaggaattggtacctgagaaaa

SEQ ID NO: 392623 - DNA, 30 bp, Artificial Sequence
  Synthetic oligonucleotide
tctctccgtcgttaatcctaaagtagaaaa

SEQ ID NO: 392624 - DNA, 30 bp, Artificial Sequence
  Synthetic oligonucleotide
aaggtaatactaggtacgcattttagaaaa

SEQ ID NO: 392625 - DNA, 30 bp, Artificial Sequence
  Synthetic oligonucleotide
gggagctgccatactagcaacttacgaaaa

SEQ ID NO: 392626 - DNA, 30 bp, Artificial Sequence
  Synthetic oligonucleotide
ttctacatgttaagtgtcgggacgcgaaaa

SEQ ID NO: 392627 - DNA, 30 bp, Artificial Sequence
  Synthetic oligonucleotide
gacctgcacttgtacgtcgcgaggcgaaaa

SEQ ID NO: 392628 - DNA, 30 bp, Artificial Sequence
  Synthetic oligonucleotide
ttatatgtaagaccggagaacgggcgaaaa

SEQ ID NO: 392629 - DNA, 30 bp, Artificial Sequence
  Synthetic oligonucleotide
aagaatgagcgtgctcatgatgggcgaaaa

SEQ ID NO: 392630 - DNA, 30 bp, Artificial Sequence
  Synthetic oligonucleotide
cgcggacacgactatctacgtaatcgaaaa

SEQ ID NO: 392631 - DNA, 30 bp, Artificial Sequence
  Synthetic oligonucleotide
catgaagtaacacggcaactatgtcgaaaa

SEQ ID NO: 392632 - DNA, 30 bp, Artificial Sequence
  Synthetic oligonucleotide
gactgcacccacggtattcctacaggaaaa

SEQ ID NO: 392633 - DNA, 30 bp, Artificial Sequence
  Synthetic oligonucleotide
ttatgcctgaaagagttgtaatgaggaaaa

SEQ ID NO: 392634 - DNA, 30 bp, Artificial Sequence
  Synthetic oligonucleotide
gccacatttacaaataatgaattaggaaaa

SEQ ID NO: 392635 - DNA, 30 bp, Artificial Sequence
  Synthetic oligonucleotide
atttacgcgctattcaaaactttaggaaaa

SEQ ID NO: 392636 - DNA, 30 bp, Artificial Sequence
  Synthetic oligonucleotide
acggacctggaatctatggcttacggaaaa

SEQ ID NO: 392637 - DNA, 30 bp, Artificial Sequence
  Synthetic oligonucleotide
gaaaaaaccaccgatggagcaggcggaaaa

SEQ ID NO: 392638 - DNA, 30 bp, Artificial Sequence
  Synthetic oligonucleotide
ggattacattatggttatcccaagggaaaa

SEQ ID NO: 392639 - DNA, 30 bp, Artificial Sequence
  Synthetic oligonucleotide
tcggactgtttaatagatagggcgggaaaa

SEQ ID NO: 392640 - DNA, 30 bp, Artificial Sequence
  Synthetic oligonucleotide
ttagaggttgcatcaagctccaggggaaaa

SEQ ID NO: 392641 - DNA, 30 bp, Artificial Sequence
  Synthetic oligonucleotide
ggcgcttacttccgctacccgatgggaaaa

SEQ ID NO: 392642 - DNA, 30 bp, Artificial Sequence
  Synthetic oligonucleotide
catgtattgaatatgaggtcattgggaaaa

SEQ ID NO: 392643 - DNA, 30 bp, Artificial Sequence
  Synthetic oligonucleotide
attgttggcgttcgattagttgttggaaaa

SEQ ID NO: 392644 - DNA, 30 bp, Artificial Sequence
  Synthetic oligonucleotide
gggttgcaaagccgaacaagctttggaaaa

SEQ ID NO: 392645 - DNA, 30 bp, Artificial Sequence
  Synthetic oligonucleotide
gactttatcggggcaaggagacaatgaaaa

SEQ ID NO: 392646 - DNA, 30 bp, Artificial Sequence
  Synthetic oligonucleotide
ttctagaaagttaggtatgctgcctgaaaa

SEQ ID NO: 392647 - DNA, 30 bp, Artificial Sequence
  Synthetic oligonucleotide
aagtatttggttggtgcagaccgctgaaaa

SEQ ID NO: 392648 - DNA, 30 bp, Artificial Sequence
  Synthetic oligonucleotide
caagatattaatactagcagtttctgaaaa

SEQ ID NO: 392649 - DNA, 30 bp, Artificial Sequence
  Synthetic oligonucleotide
gttgatcaattctcgcggagaaagtgaaaa

SEQ ID NO: 392650 - DNA, 30 bp, Artificial Sequence
  Synthetic oligonucleotide
ctatttatttgagcactcaaagagtgaaaa

SEQ ID NO: 392651 - DNA, 30 bp, Artificial Sequence
  Synthetic oligonucleotide
ggtcagcaaagccgcgctgaatcgtgaaaa

SEQ ID NO: 392652 - DNA, 30 bp, Artificial Sequence
  Synthetic oligonucleotide
atagacgggggatctgtatactcttgaaaa

SEQ ID NO: 392653 - DNA, 30 bp, Artificial Sequence
  Synthetic oligonucleotide
aaaataataactaagatgggacgttgaaaa

SEQ ID NO: 392654 - DNA, 30 bp, Artificial Sequence
  Synthetic oligonucleotide
aaattgtacggtcatcatgagtcaataaaa

SEQ ID NO: 392655 - DNA, 30 bp, Artificial Sequence
  Synthetic oligonucleotide
aattggtaatgagaatcggtgctaataaaa

SEQ ID NO: 392656 - DNA, 30 bp, Artificial Sequence
  Synthetic oligonucleotide
ttgttagcgaaacggatagtaaacataaaa

SEQ ID NO: 392657 - DNA, 30 bp, Artificial Sequence
  Synthetic oligonucleotide
gttcgataacctattgtcattgacataaaa

SEQ ID NO: 392658 - DNA, 30 bp, Artificial Sequence
  Synthetic oligonucleotide
cgatctatggtgtatcataacggcataaaa

SEQ ID NO: 392659 - DNA, 30 bp, Artificial Sequence
  Synthetic oligonucleotide
ctgggtatcacgctgagagcagtcataaaa

SEQ ID NO: 392660 - DNA, 30 bp, Artificial Sequence
  Synthetic oligonucleotide
ttgcttgcggtgaaccataatccgataaaa

SEQ ID NO: 392661 - DNA, 30 bp, Artificial Sequence
  Synthetic oligonucleotide
aaaataacggagacagcgttgatgataaaa

SEQ ID NO: 392662 - DNA, 30 bp, Artificial Sequence
  Synthetic oligonucleotide
ctgcactgttggtcataatttttgataaaa

SEQ ID NO: 392663 - DNA, 30 bp, Artificial Sequence
  Synthetic oligonucleotide
tcgagccctacgttcaaaatcaatataaaa

SEQ ID NO: 392664 - DNA, 30 bp, Artificial Sequence
  Synthetic oligonucleotide
taagtagtaaatctagcttgttaactaaaa

SEQ ID NO: 392665 - DNA, 30 bp, Artificial Sequence
  Synthetic oligonucleotide
atcccgcataaattcttgtgcccactaaaa

SEQ ID NO: 392666 - DNA, 30 bp, Artificial Sequence
  Synthetic oligonucleotide
ttgacacgttgccagtgcatcttactaaaa

SEQ ID NO: 392667 - DNA, 30 bp, Artificial Sequence
  Synthetic oligonucleotide
ctccaagctccgcctattttgctcctaaaa

SEQ ID NO: 392668 - DNA, 30 bp, Artificial Sequence
  Synthetic oligonucleotide
ggtgatcgagattttactctttcgctaaaa

SEQ ID NO: 392669 - DNA, 30 bp, Artificial Sequence
  Synthetic oligonucleotide
atttatctgcaaatagcaaggcggctaaaa

SEQ ID NO: 392670 - DNA, 30 bp, Artificial Sequence
  Synthetic oligonucleotide
aactacgtcgcgccgggctgcattctaaaa

SEQ ID NO: 392671 - DNA, 30 bp, Artificial Sequence
  Synthetic oligonucleotide
gacgctcagtcgacgctaggtaaagtaaaa

SEQ ID NO: 392672 - DNA, 30 bp, Artificial Sequence
  Synthetic oligonucleotide
agtcttatacgcatcgtcttggaagtaaaa

SEQ ID NO: 392673 - DNA, 30 bp, Artificial Sequence
  Synthetic oligonucleotide
gcagggtttggactgtgccatacagtaaaa

SEQ ID NO: 392674 - DNA, 30 bp, Artificial Sequence
  Synthetic oligonucleotide
ctataccggaagggttcacttacagtaaaa

SEQ ID NO: 392675 - DNA, 30 bp, Artificial Sequence
  Synthetic oligonucleotide
gtgatggtgggtggcgcatcgggcgtaaaa

SEQ ID NO: 392676 - DNA, 30 bp, Artificial Sequence
  Synthetic oligonucleotide
ggtctgcagatgtacgcggcttcggtaaaa

SEQ ID NO: 392677 - DNA, 30 bp, Artificial Sequence
  Synthetic oligonucleotide
gtatctggaatgagtatcatttgggtaaaa

SEQ ID NO: 392678 - DNA, 30 bp, Artificial Sequence
  Synthetic oligonucleotide
gctccacggttgacctatatggctgtaaaa

SEQ ID NO: 392679 - DNA, 30 bp, Artificial Sequence
  Synthetic oligonucleotide
ttgagttacccggaaacggatgaattaaaa

SEQ ID NO: 392680 - DNA, 30 bp, Artificial Sequence
  Synthetic oligonucleotide
ggttcgccatcgccaaaggacgcattaaaa

SEQ ID NO: 392681 - DNA, 30 bp, Artificial Sequence
  Synthetic oligonucleotide
aaaccactataagcccgtttttcattaaaa

SEQ ID NO: 392682 - DNA, 30 bp, Artificial Sequence
  Synthetic oligonucleotide
gtatccgggaaagatttccagctattaaaa

SEQ ID NO: 392683 - DNA, 30 bp, Artificial Sequence
  Synthetic oligonucleotide
taactcgcgtgataattgttgttattaaaa

SEQ ID NO: 392684 - DNA, 30 bp, Artificial Sequence
  Synthetic oligonucleotide
gcatcataaatccaccttcctttattaaaa

SEQ ID NO: 392685 - DNA, 30 bp, Artificial Sequence
  Synthetic oligonucleotide
tgaagtggtcccctagcgtcgcacttaaaa

SEQ ID NO: 392686 - DNA, 30 bp, Artificial Sequence
  Synthetic oligonucleotide
ggttggtccaccaagtctaattacttaaaa

SEQ ID NO: 392687 - DNA, 30 bp, Artificial Sequence
  Synthetic oligonucleotide
cccaccttccccgtaaggagcagcttaaaa

SEQ ID NO: 392688 - DNA, 30 bp, Artificial Sequence
  Synthetic oligonucleotide
gtctggagctgtgtgtcactacgcttaaaa

SEQ ID NO: 392689 - DNA, 30 bp, Artificial Sequence
  Synthetic oligonucleotide
tacggcatgtgaaccgctagcatcttaaaa

SEQ ID NO: 392690 - DNA, 30 bp, Artificial Sequence
  Synthetic oligonucleotide
ggttacgaccacaaagaagcagtcttaaaa

SEQ ID NO: 392691 - DNA, 30 bp, Artificial Sequence
  Synthetic oligonucleotide
tctgcagtcttaggttctgaacagttaaaa

SEQ ID NO: 392692 - DNA, 30 bp, Artificial Sequence
  Synthetic oligonucleotide
aatgggtagtatttcgaaatagggttaaaa

SEQ ID NO: 392693 - DNA, 30 bp, Artificial Sequence
  Synthetic oligonucleotide
atgaagttaaactaacatggagatttaaaa

SEQ ID NO: 392694 - DNA, 30 bp, Artificial Sequence
  Synthetic oligonucleotide
gtgttcggaccagggtcgggggctttaaaa

SEQ ID NO: 392695 - DNA, 30 bp, Artificial Sequence
  Synthetic oligonucleotide
acaaccggtcagtgctaagcagttttaaaa

SEQ ID NO: 392696 - DNA, 30 bp, Artificial Sequence
  Synthetic oligonucleotide
gagtacgcgggtacttatacgaaaaacaaa

SEQ ID NO: 392697 - DNA, 30 bp, Artificial Sequence
  Synthetic oligonucleotide
gagagaggagctccactttcgaaaaacaaa

SEQ ID NO: 392698 - DNA, 30 bp, Artificial Sequence
  Synthetic oligonucleotide
aaacaactagtgccgtgcgcaccaaacaaa

SEQ ID NO: 392699 - DNA, 30 bp, Artificial Sequence
  Synthetic oligonucleotide
tcatcgcacagcatctggtgtcgaaacaaa

SEQ ID NO: 392700 - DNA, 30 bp, Artificial Sequence
  Synthetic oligonucleotide
actataggcggccagctatatctaaacaaa

SEQ ID NO: 392701 - DNA, 30 bp, Artificial Sequence
  Synthetic oligonucleotide
acggtttattttggttggcgtgtaaacaaa

SEQ ID NO: 392702 - DNA, 30 bp, Artificial Sequence
  Synthetic oligonucleotide
cgctacgttggcatcgcaagcaacaacaaa

SEQ ID NO: 392703 - DNA, 30 bp, Artificial Sequence
  Synthetic oligonucleotide
attcattatacgttatgttgagacaacaaa

SEQ ID NO: 392704 - DNA, 30 bp, Artificial Sequence
  Synthetic oligonucleotide
gaaaaagaaggactgaactggcagaacaaa

SEQ ID NO: 392705 - DNA, 30 bp, Artificial Sequence
  Synthetic oligonucleotide
aacccaccccgcctttgggttgcgaacaaa

SEQ ID NO: 392706 - DNA, 30 bp, Artificial Sequence
  Synthetic oligonucleotide
aacacgaagtttaaacgctccttgaacaaa

SEQ ID NO: 392707 - DNA, 30 bp, Artificial Sequence
  Synthetic oligonucleotide
tctcagactttggatactgacatgcacaaa

SEQ ID NO: 392708 - DNA, 30 bp, Artificial Sequence
  Synthetic oligonucleotide
tatatagaccttggttctgaagtgcacaaa

SEQ ID NO: 392709 - DNA, 30 bp, Artificial Sequence
  Synthetic oligonucleotide
gtatcctacaacgctctttatactcacaaa

SEQ ID NO: 392710 - DNA, 30 bp, Artificial Sequence
  Synthetic oligonucleotide
agacagcagctgacacgcacggttcacaaa

SEQ ID NO: 392711 - DNA, 30 bp, Artificial Sequence
  Synthetic oligonucleotide
ggcgagttctgtgtgtcttggctagacaaa

SEQ ID NO: 392712 - DNA, 30 bp, Artificial Sequence
  Synthetic oligonucleotide
tccgcctgatccggtgttagttacgacaaa

SEQ ID NO: 392713 - DNA, 30 bp, Artificial Sequence
  Synthetic oligonucleotide
tatatctagagctactgaggcgccgacaaa

SEQ ID NO: 392714 - DNA, 30 bp, Artificial Sequence
  Synthetic oligonucleotide
tcacattagtattcagctgcggcggacaaa

SEQ ID NO: 392715 - DNA, 30 bp, Artificial Sequence
  Synthetic oligonucleotide
gaccgtaatgggccaccatagatggacaaa

SEQ ID NO: 392716 - DNA, 30 bp, Artificial Sequence
  Synthetic oligonucleotide
gattcacctaaggacttgtaatgtgacaaa

SEQ ID NO: 392717 - DNA, 30 bp, Artificial Sequence
  Synthetic oligonucleotide
catttgttagaggctaaagcccaatacaaa

SEQ ID NO: 392718 - DNA, 30 bp, Artificial Sequence
  Synthetic oligonucleotide
ttctagcaaaatagactctacggatacaaa

SEQ ID NO: 392719 - DNA, 30 bp, Artificial Sequence
  Synthetic oligonucleotide
tcattagcccgttcgcgtggggtatacaaa

SEQ ID NO: 392720 - DNA, 30 bp, Artificial Sequence
  Synthetic oligonucleotide
ttattgttcggcgcctaggtagcctacaaa

SEQ ID NO: 392721 - DNA, 30 bp, Artificial Sequence
  Synthetic oligonucleotide
gattgagaacgaccccggtcaaagtacaaa

SEQ ID NO: 392722 - DNA, 30 bp, Artificial Sequence
  Synthetic oligonucleotide
cgagctcggttgttgtcactctagtacaaa

SEQ ID NO: 392723 - DNA, 30 bp, Artificial Sequence
  Synthetic oligonucleotide
tttacggcaaatctatatagccggtacaaa

SEQ ID NO: 392724 - DNA, 30 bp, Artificial Sequence
  Synthetic oligonucleotide
agtccgcctactggcttaaaaatgtacaaa

SEQ ID NO: 392725 - DNA, 30 bp, Artificial Sequence
  Synthetic oligonucleotide
gcacttttccagattcagcgcagttacaaa

SEQ ID NO: 392726 - DNA, 31 bp, Artificial Sequence
  Synthetic oligonucleotide
tttagtatcataataggagtcgttttacaaa

SEQ ID NO: 392727 - DNA, 30 bp, Artificial Sequence
  Synthetic oligonucleotide
ttgtgggactagtttttcagggtaaccaaa

SEQ ID NO: 392728 - DNA, 30 bp, Artificial Sequence
  Synthetic oligonucleotide
gatgtgacgatgaccgattgccgcaccaaa

SEQ ID NO: 392729 - DNA, 30 bp, Artificial Sequence
  Synthetic oligonucleotide
tgctttagatcaagggcactcggcaccaaa

SEQ ID NO: 392730 - DNA, 30 bp, Artificial Sequence
  Synthetic oligonucleotide
gtattgtgaagatagaattgtctcaccaaa

SEQ ID NO: 392731 - DNA, 30 bp, Artificial Sequence
  Synthetic oligonucleotide
ggcgttccgagtaggctacgattgaccaaa

SEQ ID NO: 392732 - DNA, 30 bp, Artificial Sequence
  Synthetic oligonucleotide
gaagttaaagggggggcggttttgaccaaa

SEQ ID NO: 392733 - DNA, 30 bp, Artificial Sequence
  Synthetic oligonucleotide
gctcgacatgcgcatcggtacagtaccaaa

SEQ ID NO: 392734 - DNA, 30 bp, Artificial Sequence
  Synthetic oligonucleotide
ttatgtagtttaaagggggaatttaccaaa

SEQ ID NO: 392735 - DNA, 30 bp, Artificial Sequence
  Synthetic oligonucleotide
gtcgaatcagaggcagatacataacccaaa

SEQ ID NO: 392736 - DNA, 30 bp, Artificial Sequence
  Synthetic oligonucleotide
ctccttccctggcggcgtttctaacccaaa

SEQ ID NO: 392737 - DNA, 30 bp, Artificial Sequence
  Synthetic oligonucleotide
aaaacgaagttcttcaagatagcacccaaa

SEQ ID NO: 392738 - DNA, 30 bp, Artificial Sequence
  Synthetic oligonucleotide
tagcgacaatggggtcgacagggccccaaa

SEQ ID NO: 392739 - DNA, 30 bp, Artificial Sequence
  Synthetic oligonucleotide
agtgtctacatcatgtgctgtcgtcccaaa

SEQ ID NO: 392740 - DNA, 30 bp, Artificial Sequence
  Synthetic oligonucleotide
gaatgtgttatatcgtaggggcgagccaaa

SEQ ID NO: 392741 - DNA, 31 bp, Artificial Sequence
  Synthetic oligonucleotide
tctgtactttggatctccgggttgagccaaa

SEQ ID NO: 392742 - DNA, 30 bp, Artificial Sequence
  Synthetic oligonucleotide
cccagctgaaggggttgcgtacccgccaaa

SEQ ID NO: 392743 - DNA, 30 bp, Artificial Sequence
  Synthetic oligonucleotide
acggatcatttgtaccgcccagccgccaaa

SEQ ID NO: 392744 - DNA, 30 bp, Artificial Sequence
  Synthetic oligonucleotide
aaataggtggccactccttgtgctgccaaa

SEQ ID NO: 392745 - DNA, 29 bp, Artificial Sequence
  Synthetic oligonucleotide
tcctgggtccgggtattgctccatccaaa

SEQ ID NO: 392746 - DNA, 30 bp, Artificial Sequence
  Synthetic oligonucleotide
gtatatccaacttggattttgtcatccaaa

SEQ ID NO: 392747 - DNA, 30 bp, Artificial Sequence
  Synthetic oligonucleotide
tccctagcggcttattgaactgtatccaaa

SEQ ID NO: 392748 - DNA, 30 bp, Artificial Sequence
  Synthetic oligonucleotide
ctgtattggcttgcgcgcatagcctccaaa

SEQ ID NO: 392749 - DNA, 30 bp, Artificial Sequence
  Synthetic oligonucleotide
taaaatcatacggttggcaacgcctccaaa

SEQ ID NO: 392750 - DNA, 30 bp, Artificial Sequence
  Synthetic oligonucleotide
gtagtgttataaaatcggggctcctccaaa

SEQ ID NO: 392751 - DNA, 30 bp, Artificial Sequence
  Synthetic oligonucleotide
agctatgtgtgacgtctcacagcttccaaa

SEQ ID NO: 392752 - DNA, 30 bp, Artificial Sequence
  Synthetic oligonucleotide
gttataatgggcgtatacactagttccaaa

SEQ ID NO: 392753 - DNA, 30 bp, Artificial Sequence
  Synthetic oligonucleotide
gttcacctgccggtgggatttagttccaaa

SEQ ID NO: 392754 - DNA, 30 bp, Artificial Sequence
  Synthetic oligonucleotide
attggtctgcatccaggcagttgaagcaaa

SEQ ID NO: 392755 - DNA, 30 bp, Artificial Sequence
  Synthetic oligonucleotide
cgtaggggtcccgtggtttgcgtcagcaaa

SEQ ID NO: 392756 - DNA, 30 bp, Artificial Sequence
  Synthetic oligonucleotide
ccctttaactgttcggcatcattcagcaaa

SEQ ID NO: 392757 - DNA, 30 bp, Artificial Sequence
  Synthetic oligonucleotide
aaaacgcttagttacgtgagttagagcaaa

SEQ ID NO: 392758 - DNA, 30 bp, Artificial Sequence
  Synthetic oligonucleotide
aatgcgtgatatgttgaaatcacgagcaaa

SEQ ID NO: 392759 - DNA, 30 bp, Artificial Sequence
  Synthetic oligonucleotide
catataaatgaaacaactgtaatgagcaaa

SEQ ID NO: 392760 - DNA, 30 bp, Artificial Sequence
  Synthetic oligonucleotide
gcttgtctctcaatagaagatgtgagcaaa

SEQ ID NO: 392761 - DNA, 30 bp, Artificial Sequence
  Synthetic oligonucleotide
gtacgctagcgcaggagacttattagcaaa

SEQ ID NO: 392762 - DNA, 30 bp, Artificial Sequence
  Synthetic oligonucleotide
ctaatattaagaccccacctacttagcaaa

SEQ ID NO: 392763 - DNA, 30 bp, Artificial Sequence
  Synthetic oligonucleotide
ggaaatttgcgaggctattgcatacgcaaa

SEQ ID NO: 392764 - DNA, 30 bp, Artificial Sequence
  Synthetic oligonucleotide
tactgtttgccgggaagagaagtacgcaaa

SEQ ID NO: 392765 - DNA, 30 bp, Artificial Sequence
  Synthetic oligonucleotide
atatctgataccaacgagactcaccgcaaa

SEQ ID NO: 392766 - DNA, 30 bp, Artificial Sequence
  Synthetic oligonucleotide
ctgcccataggcaggcttgctccccgcaaa

SEQ ID NO: 392767 - DNA, 30 bp, Artificial Sequence
  Synthetic oligonucleotide
cctaataggccgttgatcattatccgcaaa

SEQ ID NO: 392768 - DNA, 30 bp, Artificial Sequence
  Synthetic oligonucleotide
gtgtatcccggtaattcgacgccgcgcaaa

SEQ ID NO: 392769 - DNA, 30 bp, Artificial Sequence
  Synthetic oligonucleotide
tttccacggagttttccgatagcgcgcaaa

SEQ ID NO: 392770 - DNA, 30 bp, Artificial Sequence
  Synthetic oligonucleotide
gtgatcgagcgatcgctcatgattcgcaaa

SEQ ID NO: 392771 - DNA, 30 bp, Artificial Sequence
  Synthetic oligonucleotide
gaatcaatgtaatagttccaacaaggcaaa

SEQ ID NO: 392772 - DNA, 30 bp, Artificial Sequence
  Synthetic oligonucleotide
gatatacgagagactactcccccaggcaaa

SEQ ID NO: 392773 - DNA, 30 bp, Artificial Sequence
  Synthetic oligonucleotide
cccccgacgcaagagaaatttccaggcaaa

SEQ ID NO: 392774 - DNA, 30 bp, Artificial Sequence
  Synthetic oligonucleotide
cggtatcataggggggcctaacgaggcaaa

SEQ ID NO: 392775 - DNA, 30 bp, Artificial Sequence
  Synthetic oligonucleotide
atccgagcgttttatggtgtcctaggcaaa

SEQ ID NO: 392776 - DNA, 30 bp, Artificial Sequence
  Synthetic oligonucleotide
tagcatgccaatccttaatcgatcggcaaa

SEQ ID NO: 392777 - DNA, 30 bp, Artificial Sequence
  Synthetic oligonucleotide
atgcgggtctgactaaaatgttagggcaaa

SEQ ID NO: 392778 - DNA, 30 bp, Artificial Sequence
  Synthetic oligonucleotide
tttttcattgcgatgatggagagtggcaaa

SEQ ID NO: 392779 - DNA, 30 bp, Artificial Sequence
  Synthetic oligonucleotide
gcgttcacgttcactgttctataatgcaaa

SEQ ID NO: 392780 - DNA, 30 bp, Artificial Sequence
  Synthetic oligonucleotide
gtagctggaccgatcgagatttgatgcaaa

SEQ ID NO: 392781 - DNA, 31 bp, Artificial Sequence
  Synthetic oligonucleotide
atcattggtttgcttcctaggaccctgcaaa

SEQ ID NO: 392782 - DNA, 30 bp, Artificial Sequence
  Synthetic oligonucleotide
aacactgcactctcaaaaggttgctgcaaa

SEQ ID NO: 392783 - DNA, 30 bp, Artificial Sequence
  Synthetic oligonucleotide
gtatttgttcagcccaaaagggtctgcaaa

SEQ ID NO: 392784 - DNA, 30 bp, Artificial Sequence
  Synthetic oligonucleotide
actagtgcggccgttagcatgaattgcaaa

SEQ ID NO: 392785 - DNA, 30 bp, Artificial Sequence
  Synthetic oligonucleotide
ctgttcatgggaatgttattggcttgcaaa

SEQ ID NO: 392786 - DNA, 29 bp, Artificial Sequence
  Synthetic oligonucleotide
ggtggagttgcgccggcctatgttgcaaa

SEQ ID NO: 392787 - DNA, 30 bp, Artificial Sequence
  Synthetic oligonucleotide
agtcagcaggatgttatcctaatttgcaaa

SEQ ID NO: 392788 - DNA, 30 bp, Artificial Sequence
  Synthetic oligonucleotide
cgccactactcagtttatcgcttttgcaaa

SEQ ID NO: 392789 - DNA, 30 bp, Artificial Sequence
  Synthetic oligonucleotide
gtttgggcctcgccaacgagaggaatcaaa

SEQ ID NO: 392790 - DNA, 30 bp, Artificial Sequence
  Synthetic oligonucleotide
tgaagtgtttgggtgagtaggttaatcaaa

SEQ ID NO: 392791 - DNA, 30 bp, Artificial Sequence
  Synthetic oligonucleotide
tcaagtaggttgcggcctagcagcatcaaa

SEQ ID NO: 392792 - DNA, 30 bp, Artificial Sequence
  Synthetic oligonucleotide
tcttttacagacagcctgttaaagatcaaa

SEQ ID NO: 392793 - DNA, 30 bp, Artificial Sequence
  Synthetic oligonucleotide
tggaatacgcggcttgtcgcggagatcaaa

SEQ ID NO: 392794 - DNA, 30 bp, Artificial Sequence
  Synthetic oligonucleotide
tgtctccaaacgatgtaacgaaatatcaaa

SEQ ID NO: 392795 - DNA, 30 bp, Artificial Sequence
  Synthetic oligonucleotide
attggttagacccatagctggcaactcaaa

SEQ ID NO: 392796 - DNA, 30 bp, Artificial Sequence
  Synthetic oligonucleotide
cgttggtgtgcggccttggaagcactcaaa

SEQ ID NO: 392797 - DNA, 30 bp, Artificial Sequence
  Synthetic oligonucleotide
tgcatgatcaatccattgtaagacctcaaa

SEQ ID NO: 392798 - DNA, 30 bp, Artificial Sequence
  Synthetic oligonucleotide
tggcctctggtgctaagatactacctcaaa

SEQ ID NO: 392799 - DNA, 30 bp, Artificial Sequence
  Synthetic oligonucleotide
cttgagtacgctggtaagctctacctcaaa

SEQ ID NO: 392800 - DNA, 30 bp, Artificial Sequence
  Synthetic oligonucleotide
ctccagtatgacaaacgcagcaccctcaaa

SEQ ID NO: 392801 - DNA, 30 bp, Artificial Sequence
  Synthetic oligonucleotide
tcgagatactgtttaaaagagctcctcaaa

SEQ ID NO: 392802 - DNA, 30 bp, Artificial Sequence
  Synthetic oligonucleotide
cacttatataattgttagtcttcgctcaaa

SEQ ID NO: 392803 - DNA, 30 bp, Artificial Sequence
  Synthetic oligonucleotide
tatgctgcctaattccaccagaaagtcaaa

SEQ ID NO: 392804 - DNA, 30 bp, Artificial Sequence
  Synthetic oligonucleotide
ccatatttagacctagggctccaagtcaaa

SEQ ID NO: 392805 - DNA, 30 bp, Artificial Sequence
  Synthetic oligonucleotide
catagttattcaagagtattaagagtcaaa

SEQ ID NO: 392806 - DNA, 30 bp, Artificial Sequence
  Synthetic oligonucleotide
gtagacggtatccccagcctagtagtcaaa

SEQ ID NO: 392807 - DNA, 30 bp, Artificial Sequence
  Synthetic oligonucleotide
gttagtggaccagcatttcgggtagtcaaa

SEQ ID NO: 392808 - DNA, 30 bp, Artificial Sequence
  Synthetic oligonucleotide
tctgaactaattcgcgcctttgtagtcaaa

SEQ ID NO: 392809 - DNA, 30 bp, Artificial Sequence
  Synthetic oligonucleotide
ggcagctgtgtgcgtccgcaatgcgtcaaa

SEQ ID NO: 392810 - DNA, 30 bp, Artificial Sequence
  Synthetic oligonucleotide
gagaaaggttcatttgtagaagtggtcaaa

SEQ ID NO: 392811 - DNA, 30 bp, Artificial Sequence
  Synthetic oligonucleotide
ctcgggtagtcggtcgggctgcgtgtcaaa

SEQ ID NO: 392812 - DNA, 30 bp, Artificial Sequence
  Synthetic oligonucleotide
cattcatacaggaaccttgtttttgtcaaa

SEQ ID NO: 392813 - DNA, 30 bp, Artificial Sequence
  Synthetic oligonucleotide
atatgtgactggagttattagacattcaaa

SEQ ID NO: 392814 - DNA, 30 bp, Artificial Sequence
  Synthetic oligonucleotide
cttaggcggtttgtaaaggggacattcaaa

SEQ ID NO: 392815 - DNA, 30 bp, Artificial Sequence
  Synthetic oligonucleotide
tcatttaaaacctgaggatatagattcaaa

SEQ ID NO: 392816 - DNA, 30 bp, Artificial Sequence
  Synthetic oligonucleotide
agtccctcccacggtatgagttccttcaaa

SEQ ID NO: 392817 - DNA, 30 bp, Artificial Sequence
  Synthetic oligonucleotide
tatagatcttgcatgcatcaccggttcaaa

SEQ ID NO: 392818 - DNA, 30 bp, Artificial Sequence
  Synthetic oligonucleotide
gtacgttgtatcgaatggcccaatttcaaa

SEQ ID NO: 392819 - DNA, 30 bp, Artificial Sequence
  Synthetic oligonucleotide
tcctgtatgcggttcgaattagctttcaaa

SEQ ID NO: 392820 - DNA, 30 bp, Artificial Sequence
  Synthetic oligonucleotide
gaatgaagtcagctttgcgagtaaaagaaa

SEQ ID NO: 392821 - DNA, 30 bp, Artificial Sequence
  Synthetic oligonucleotide
ggcgcgtagagtcaacatgtttcaaagaaa

SEQ ID NO: 392822 - DNA, 30 bp, Artificial Sequence
  Synthetic oligonucleotide
tagaagatcgggttatttaatagaaagaaa

SEQ ID NO: 392823 - DNA, 30 bp, Artificial Sequence
  Synthetic oligonucleotide
tttcaataattgtcaagacaatgaaagaaa

SEQ ID NO: 392824 - DNA, 30 bp, Artificial Sequence
  Synthetic oligonucleotide
taaaattgacgtcatggtgtgtgaaagaaa

SEQ ID NO: 392825 - DNA, 30 bp, Artificial Sequence
  Synthetic oligonucleotide
gtagtcaatttttactctattttcaagaaa

SEQ ID NO: 392826 - DNA, 30 bp, Artificial Sequence
  Synthetic oligonucleotide
ggcccggccacgtgatgctgggagaagaaa

SEQ ID NO: 392827 - DNA, 30 bp, Artificial Sequence
  Synthetic oligonucleotide
gtagagcgtaaacaagttttgaataagaaa

SEQ ID NO: 392828 - DNA, 30 bp, Artificial Sequence
  Synthetic oligonucleotide
ttggtagtacttctcgggtagtataagaaa

SEQ ID NO: 392829 - DNA, 30 bp, Artificial Sequence
  Synthetic oligonucleotide
aggaaaaccgatcttttcatgactaagaaa

SEQ ID NO: 392830 - DNA, 30 bp, Artificial Sequence
  Synthetic oligonucleotide
tctgaagtcattggatgctgttgtaagaaa

SEQ ID NO: 392831 - DNA, 30 bp, Artificial Sequence
  Synthetic oligonucleotide
ttgaacttaaggtatacgctcgttaagaaa

SEQ ID NO: 392832 - DNA, 30 bp, Artificial Sequence
  Synthetic oligonucleotide
atactttaaatctattgctaaccacagaaa

SEQ ID NO: 392833 - DNA, 30 bp, Artificial Sequence
  Synthetic oligonucleotide
acgggggttaatacccccacatgacagaaa

SEQ ID NO: 392834 - DNA, 30 bp, Artificial Sequence
  Synthetic oligonucleotide
actgcagatttaggcatcaagttacagaaa

SEQ ID NO: 392835 - DNA, 30 bp, Artificial Sequence
  Synthetic oligonucleotide
ccctttggccgccaggccagcgaccagaaa

SEQ ID NO: 392836 - DNA, 30 bp, Artificial Sequence
  Synthetic oligonucleotide
tctttattatcgtttatatcgggccagaaa

SEQ ID NO: 392837 - DNA, 30 bp, Artificial Sequence
  Synthetic oligonucleotide
gatttgtcatttattcggaaaacgcagaaa

SEQ ID NO: 392838 - DNA, 30 bp, Artificial Sequence
  Synthetic oligonucleotide
cacttcacccttaagagctgggcgcagaaa

SEQ ID NO: 392839 - DNA, 30 bp, Artificial Sequence
  Synthetic oligonucleotide
gcatctacccctgactctgcgaggcagaaa

SEQ ID NO: 392840 - DNA, 30 bp, Artificial Sequence
  Synthetic oligonucleotide
ggaccactcctgttctcccagaatcagaaa

SEQ ID NO: 392841 - DNA, 30 bp, Artificial Sequence
  Synthetic oligonucleotide
cactgcagttattgagatcgtactcagaaa

SEQ ID NO: 392842 - DNA, 30 bp, Artificial Sequence
  Synthetic oligonucleotide
tttgtccggagagattaactaagtcagaaa

SEQ ID NO: 392843 - DNA, 30 bp, Artificial Sequence
  Synthetic oligonucleotide
attggggtgattagttcgaatagtcagaaa

SEQ ID NO: 392844 - DNA, 30 bp, Artificial Sequence
  Synthetic oligonucleotide
tcatagcttgagatcgttgtgtcagagaaa

SEQ ID NO: 392845 - DNA, 30 bp, Artificial Sequence
  Synthetic oligonucleotide
ccgaagttctttaacccttgaatcgagaaa

SEQ ID NO: 392846 - DNA, 30 bp, Artificial Sequence
  Synthetic oligonucleotide
gtccactccttaggcaagggcctcgagaaa

SEQ ID NO: 392847 - DNA, 30 bp, Artificial Sequence
  Synthetic oligonucleotide
gtataagatccaatatttaagttcgagaaa

SEQ ID NO: 392848 - DNA, 30 bp, Artificial Sequence
  Synthetic oligonucleotide
gggtaactgtgggtcccgcgcttggagaaa

SEQ ID NO: 392849 - DNA, 30 bp, Artificial Sequence
  Synthetic oligonucleotide
tagaatgataaatgctgcatccaatagaaa

SEQ ID NO: 392850 - DNA, 30 bp, Artificial Sequence
  Synthetic oligonucleotide
gctaggttaccccaccaacttgggtagaaa

SEQ ID NO: 392851 - DNA, 30 bp, Artificial Sequence
  Synthetic oligonucleotide
aatccgtagagtaaaccctctttgtagaaa

SEQ ID NO: 392852 - DNA, 30 bp, Artificial Sequence
  Synthetic oligonucleotide
ttcaattgctctaatctcgatgattagaaa

SEQ ID NO: 392853 - DNA, 30 bp, Artificial Sequence
  Synthetic oligonucleotide
tcactacgcggcttacagatcatttagaaa

SEQ ID NO: 392854 - DNA, 30 bp, Artificial Sequence
  Synthetic oligonucleotide
attacggccgcttcaagttggctaacgaaa

SEQ ID NO: 392855 - DNA, 30 bp, Artificial Sequence
  Synthetic oligonucleotide
tccattgcagatgcgctttcgtacacgaaa

SEQ ID NO: 392856 - DNA, 30 bp, Artificial Sequence
  Synthetic oligonucleotide
aaaagttggaaactaaaatctcagacgaaa

SEQ ID NO: 392857 - DNA, 30 bp, Artificial Sequence
  Synthetic oligonucleotide
gcatcacaggggatttgatcgcggacgaaa

SEQ ID NO: 392858 - DNA, 30 bp, Artificial Sequence
  Synthetic oligonucleotide
tgggcctgtaggtgccgcccccgtacgaaa

SEQ ID NO: 392859 - DNA, 30 bp, Artificial Sequence
  Synthetic oligonucleotide
cgccagagcttctcgttggggcgtacgaaa

SEQ ID NO: 392860 - DNA, 30 bp, Artificial Sequence
  Synthetic oligonucleotide
cttgatccggtccagttgggggaaccgaaa

SEQ ID NO: 392861 - DNA, 30 bp, Artificial Sequence
  Synthetic oligonucleotide
caaatgtcttgcaccaaagtggaaccgaaa

SEQ ID NO: 392862 - DNA, 30 bp, Artificial Sequence
  Synthetic oligonucleotide
aagcgcttcggtacgatataaccaccgaaa

SEQ ID NO: 392863 - DNA, 30 bp, Artificial Sequence
  Synthetic oligonucleotide
gtcgtcgtctggtctgtgcacaagccgaaa

SEQ ID NO: 392864 - DNA, 30 bp, Artificial Sequence
  Synthetic oligonucleotide
gtagttagccactgggccctcaggccgaaa

SEQ ID NO: 392865 - DNA, 30 bp, Artificial Sequence
  Synthetic oligonucleotide
aaatcaacaatcgtttgtgtagctccgaaa

SEQ ID NO: 392866 - DNA, 30 bp, Artificial Sequence
  Synthetic oligonucleotide
acagcctgcgtaacgtggcactttccgaaa

SEQ ID NO: 392867 - DNA, 30 bp, Artificial Sequence
  Synthetic oligonucleotide
cactgctggttaggacctcaaccagcgaaa

SEQ ID NO: 392868 - DNA, 30 bp, Artificial Sequence
  Synthetic oligonucleotide
accatctcgtgggctcttgaatcagcgaaa

SEQ ID NO: 392869 - DNA, 30 bp, Artificial Sequence
  Synthetic oligonucleotide
atccaagcggcttatcaagtacgcgcgaaa

SEQ ID NO: 392870 - DNA, 30 bp, Artificial Sequence
  Synthetic oligonucleotide
agcaatatgagcatgaatcgttttgcgaaa

SEQ ID NO: 392871 - DNA, 30 bp, Artificial Sequence
  Synthetic oligonucleotide
gcaaccatgtgtttctttgccagatcgaaa

SEQ ID NO: 392872 - DNA, 30 bp, Artificial Sequence
  Synthetic oligonucleotide
tgcgcgacatatcatatcgcgtgatcgaaa

SEQ ID NO: 392873 - DNA, 30 bp, Artificial Sequence
  Synthetic oligonucleotide
gccagttgtaatggccagtgcttatcgaaa

SEQ ID NO: 392874 - DNA, 30 bp, Artificial Sequence
  Synthetic oligonucleotide
agtgattaactccggctaggggacaggaaa

SEQ ID NO: 392875 - DNA, 30 bp, Artificial Sequence
  Synthetic oligonucleotide
tttgttacgggaaacatcgtcgccaggaaa

SEQ ID NO: 392876 - DNA, 30 bp, Artificial Sequence
  Synthetic oligonucleotide
gcggggtacatacttccctggaataggaaa

SEQ ID NO: 392877 - DNA, 30 bp, Artificial Sequence
  Synthetic oligonucleotide
gacatgaacgccgcaataagatataggaaa

SEQ ID NO: 392878 - DNA, 30 bp, Artificial Sequence
  Synthetic oligonucleotide
ccgccccatagctcctcagggactaggaaa

SEQ ID NO: 392879 - DNA, 30 bp, Artificial Sequence
  Synthetic oligonucleotide
ctccgatccttatgaccacccattaggaaa

SEQ ID NO: 392880 - DNA, 30 bp, Artificial Sequence
  Synthetic oligonucleotide
aaacttcctatctccgaattgaaacggaaa

SEQ ID NO: 392881 - DNA, 30 bp, Artificial Sequence
  Synthetic oligonucleotide
tcaccccttagtcgagcgtagggacggaaa

SEQ ID NO: 392882 - DNA, 30 bp, Artificial Sequence
  Synthetic oligonucleotide
tctactcttaggtcgctaactcaccggaaa

SEQ ID NO: 392883 - DNA, 30 bp, Artificial Sequence
  Synthetic oligonucleotide
cttcattgccgggccagctctacccggaaa

SEQ ID NO: 392884 - DNA, 30 bp, Artificial Sequence
  Synthetic oligonucleotide
aggtagagaagacatcagcacatccggaaa

SEQ ID NO: 392885 - DNA, 30 bp, Artificial Sequence
  Synthetic oligonucleotide
tatgcgttagaccaattaggtcatcggaaa

SEQ ID NO: 392886 - DNA, 30 bp, Artificial Sequence
  Synthetic oligonucleotide
cgctgttgatccgtacgtcacttagggaaa

SEQ ID NO: 392887 - DNA, 30 bp, Artificial Sequence
  Synthetic oligonucleotide
taaccgttgctcgaagtgagaaacgggaaa

SEQ ID NO: 392888 - DNA, 30 bp, Artificial Sequence
  Synthetic oligonucleotide
gttcgcgttgccgttcattggcacgggaaa

SEQ ID NO: 392889 - DNA, 30 bp, Artificial Sequence
  Synthetic oligonucleotide
atccgactcgcgccagggtgaagcgggaaa

SEQ ID NO: 392890 - DNA, 30 bp, Artificial Sequence
  Synthetic oligonucleotide
ttagcttccaggttctaatcgttcgggaaa

SEQ ID NO: 392891 - DNA, 30 bp, Artificial Sequence
  Synthetic oligonucleotide
gcaggtggaccggttaggccacaggggaaa

SEQ ID NO: 392892 - DNA, 30 bp, Artificial Sequence
  Synthetic oligonucleotide
taacgcagcacagctcgatgacatgggaaa

SEQ ID NO: 392893 - DNA, 30 bp, Artificial Sequence
  Synthetic oligonucleotide
tttgtttcattttgggactatagtgggaaa

SEQ ID NO: 392894 - DNA, 30 bp, Artificial Sequence
  Synthetic oligonucleotide
aagacggatggcggctatccgggtgggaaa

SEQ ID NO: 392895 - DNA, 30 bp, Artificial Sequence
  Synthetic oligonucleotide
aggctcaaagttttggccttttaatggaaa

SEQ ID NO: 392896 - DNA, 30 bp, Artificial Sequence
  Synthetic oligonucleotide
gaaatggctgggacgcgggtgcgatggaaa

SEQ ID NO: 392897 - DNA, 30 bp, Artificial Sequence
  Synthetic oligonucleotide
gcaagatgggcggagctctacctatggaaa

SEQ ID NO: 392898 - DNA, 30 bp, Artificial Sequence
  Synthetic oligonucleotide
cagtcgaagcttttgtgctagcactggaaa

SEQ ID NO: 392899 - DNA, 30 bp, Artificial Sequence
  Synthetic oligonucleotide
ccattaatatgtgtgtctgattcctggaaa

SEQ ID NO: 392900 - DNA, 30 bp, Artificial Sequence
  Synthetic oligonucleotide
gtcttcttgaccagcaagggcatctggaaa

SEQ ID NO: 392901 - DNA, 30 bp, Artificial Sequence
  Synthetic oligonucleotide
ggcaatggctatgctagtctgatctggaaa

SEQ ID NO: 392902 - DNA, 30 bp, Artificial Sequence
  Synthetic oligonucleotide
aaatatgtacagtttaaagtcaagtggaaa

SEQ ID NO: 392903 - DNA, 30 bp, Artificial Sequence
  Synthetic oligonucleotide
cttaataagcttttcctctacacttggaaa

SEQ ID NO: 392904 - DNA, 30 bp, Artificial Sequence
  Synthetic oligonucleotide
aaataccgtcgtcgcgtgggcatttggaaa

SEQ ID NO: 392905 - DNA, 30 bp, Artificial Sequence
  Synthetic oligonucleotide
tggccgcgccttagggccgggtcaatgaaa

SEQ ID NO: 392906 - DNA, 30 bp, Artificial Sequence
  Synthetic oligonucleotide
tccccatgggaacggaccgggggaatgaaa

SEQ ID NO: 392907 - DNA, 30 bp, Artificial Sequence
  Synthetic oligonucleotide
acgcttctttgacggagtcgtgtaatgaaa

SEQ ID NO: 392908 - DNA, 30 bp, Artificial Sequence
  Synthetic oligonucleotide
ttatgtcttgaaaacaggcggaacatgaaa

SEQ ID NO: 392909 - DNA, 30 bp, Artificial Sequence
  Synthetic oligonucleotide
ggtagcatttactcttaatgtgacatgaaa

SEQ ID NO: 392910 - DNA, 30 bp, Artificial Sequence
  Synthetic oligonucleotide
atatgattattaagtccgacggccatgaaa

SEQ ID NO: 392911 - DNA, 30 bp, Artificial Sequence
  Synthetic oligonucleotide
cgtcgcacagtgcccggatattttatgaaa

SEQ ID NO: 392912 - DNA, 30 bp, Artificial Sequence
  Synthetic oligonucleotide
aaatgtgtcccggacggctgagaactgaaa

SEQ ID NO: 392913 - DNA, 30 bp, Artificial Sequence
  Synthetic oligonucleotide
aaacagcgactgtctaaggtggcactgaaa

SEQ ID NO: 392914 - DNA, 30 bp, Artificial Sequence
  Synthetic oligonucleotide
atccctatgcaaaaccgccgcaacctgaaa

SEQ ID NO: 392915 - DNA, 31 bp, Artificial Sequence
  Synthetic oligonucleotide
aaattggacataaggttagtataacctgaaa

SEQ ID NO: 392916 - DNA, 30 bp, Artificial Sequence
  Synthetic oligonucleotide
ttaaagcgcatacttacaacacaagtgaaa

SEQ ID NO: 392917 - DNA, 30 bp, Artificial Sequence
  Synthetic oligonucleotide
gttatgaatttcaaaaacagtccagtgaaa

SEQ ID NO: 392918 - DNA, 30 bp, Artificial Sequence
  Synthetic oligonucleotide
aggatcgcaccgtctcggcgagccgtgaaa

SEQ ID NO: 392919 - DNA, 30 bp, Artificial Sequence
  Synthetic oligonucleotide
ctggcttgaacatttctacgtggcgtgaaa

SEQ ID NO: 392920 - DNA, 30 bp, Artificial Sequence
  Synthetic oligonucleotide
caagcgcgcacccttggatagtgcgtgaaa

SEQ ID NO: 392921 - DNA, 30 bp, Artificial Sequence
  Synthetic oligonucleotide
aagaacgttcgggattttctcaatgtgaaa

SEQ ID NO: 392922 - DNA, 25 bp, Artificial Sequence
  Synthetic oligonucleotide
agacacctatcccatgattgtgaaa

SEQ ID NO: 392923 - DNA, 30 bp, Artificial Sequence
  Synthetic oligonucleotide
tctatccgcgtgtgggggaaatttgtgaaa

SEQ ID NO: 392924 - DNA, 30 bp, Artificial Sequence
  Synthetic oligonucleotide
gggtttggcagaccggaatatgcattgaaa

SEQ ID NO: 392925 - DNA, 30 bp, Artificial Sequence
  Synthetic oligonucleotide
gcaagcctataatatcgagatagattgaaa

SEQ ID NO: 392926 - DNA, 30 bp, Artificial Sequence
  Synthetic oligonucleotide
gactggtggtctccgattatatgattgaaa

SEQ ID NO: 392927 - DNA, 30 bp, Artificial Sequence
  Synthetic oligonucleotide
catggttcggtggctaggtctgtcttgaaa

SEQ ID NO: 392928 - DNA, 30 bp, Artificial Sequence
  Synthetic oligonucleotide
atccttgatctataatttgataagttgaaa

SEQ ID NO: 392929 - DNA, 30 bp, Artificial Sequence
  Synthetic oligonucleotide
gcatataaatcatctcctatcaggttgaaa

SEQ ID NO: 392930 - DNA, 30 bp, Artificial Sequence
  Synthetic oligonucleotide
cgactaccaatggcgacgcggaatttgaaa

SEQ ID NO: 392931 - DNA, 30 bp, Artificial Sequence
  Synthetic oligonucleotide
acgtagcgtgacacgccgcgtgctttgaaa

SEQ ID NO: 392932 - DNA, 30 bp, Artificial Sequence
  Synthetic oligonucleotide
gttcaatttaaatacccagaaagtttgaaa

SEQ ID NO: 392933 - DNA, 30 bp, Artificial Sequence
  Synthetic oligonucleotide
ccgcctggacttcagcaataaattttgaaa

SEQ ID NO: 392934 - DNA, 30 bp, Artificial Sequence
  Synthetic oligonucleotide
acaggttttaaacgaatgctcgttttgaaa

SEQ ID NO: 392935 - DNA, 30 bp, Artificial Sequence
  Synthetic oligonucleotide
cagggtgtactcacgcggcgtcaaaataaa

SEQ ID NO: 392936 - DNA, 30 bp, Artificial Sequence
  Synthetic oligonucleotide
ccgcaaaggcgtctaccttgcataaataaa

SEQ ID NO: 392937 - DNA, 30 bp, Artificial Sequence
  Synthetic oligonucleotide
ggcacgtagataaaatttgaattcaataaa

SEQ ID NO: 392938 - DNA, 30 bp, Artificial Sequence
  Synthetic oligonucleotide
ggtaagctggtcctagcgttgtataataaa

SEQ ID NO: 392939 - DNA, 30 bp, Artificial Sequence
  Synthetic oligonucleotide
tcatacggggagtttgtccagaaccataaa

SEQ ID NO: 392940 - DNA, 30 bp, Artificial Sequence
  Synthetic oligonucleotide
aaaactatgtactatatggccggccataaa

SEQ ID NO: 392941 - DNA, 30 bp, Artificial Sequence
  Synthetic oligonucleotide
cacggggttaattacaggttcaagcataaa

SEQ ID NO: 392942 - DNA, 30 bp, Artificial Sequence
  Synthetic oligonucleotide
agtcgaagtactaactcgcggtcgcataaa

SEQ ID NO: 392943 - DNA, 30 bp, Artificial Sequence
  Synthetic oligonucleotide
ttgccccacaccggtatggattcgcataaa

SEQ ID NO: 392944 - DNA, 30 bp, Artificial Sequence
  Synthetic oligonucleotide
atcatcgcttggtaataatcaaatcataaa

SEQ ID NO: 392945 - DNA, 30 bp, Artificial Sequence
  Synthetic oligonucleotide
ggtaaggacgcaatatctcaacaagataaa

SEQ ID NO: 392946 - DNA, 30 bp, Artificial Sequence
  Synthetic oligonucleotide
tccctgagttaatgaaaggtgtcagataaa

SEQ ID NO: 392947 - DNA, 30 bp, Artificial Sequence
  Synthetic oligonucleotide
cataccgccccctggggaatgtgagataaa

SEQ ID NO: 392948 - DNA, 30 bp, Artificial Sequence
  Synthetic oligonucleotide
aggagccatatctggggtgccccggataaa

SEQ ID NO: 392949 - DNA, 30 bp, Artificial Sequence
  Synthetic oligonucleotide
aaattccaattgaaaacgtattatgataaa

SEQ ID NO: 392950 - DNA, 30 bp, Artificial Sequence
  Synthetic oligonucleotide
tttgggtataagtaggatggccgtgataaa

SEQ ID NO: 392951 - DNA, 30 bp, Artificial Sequence
  Synthetic oligonucleotide
caatggaactcctccacagttccatataaa

SEQ ID NO: 392952 - DNA, 30 bp, Artificial Sequence
  Synthetic oligonucleotide
ttatctcgacgcctctagacatgctataaa

SEQ ID NO: 392953 - DNA, 30 bp, Artificial Sequence
  Synthetic oligonucleotide
tataagcgggtgtctttgttatgctataaa

SEQ ID NO: 392954 - DNA, 30 bp, Artificial Sequence
  Synthetic oligonucleotide
gagatctcacgttgagattatcattataaa

SEQ ID NO: 392955 - DNA, 30 bp, Artificial Sequence
  Synthetic oligonucleotide
agctttgaatagccacaagggatttataaa

SEQ ID NO: 392956 - DNA, 30 bp, Artificial Sequence
  Synthetic oligonucleotide
acaggggttcatttctacgagaaaactaaa

SEQ ID NO: 392957 - DNA, 30 bp, Artificial Sequence
  Synthetic oligonucleotide
caccgcattaaacgccagccggaaactaaa

SEQ ID NO: 392958 - DNA, 30 bp, Artificial Sequence
  Synthetic oligonucleotide
ttaaacctgctttaggtacaaggaactaaa

SEQ ID NO: 392959 - DNA, 30 bp, Artificial Sequence
  Synthetic oligonucleotide
ggtgggttcattcgtagatgaaccactaaa

SEQ ID NO: 392960 - DNA, 30 bp, Artificial Sequence
  Synthetic oligonucleotide
tgtatgtccagcttagttcactgcactaaa

SEQ ID NO: 392961 - DNA, 30 bp, Artificial Sequence
  Synthetic oligonucleotide
ggcttcgtacgagagctttgacagactaaa

SEQ ID NO: 392962 - DNA, 30 bp, Artificial Sequence
  Synthetic oligonucleotide
aatacttcaactgcggtcgttaggactaaa

SEQ ID NO: 392963 - DNA, 30 bp, Artificial Sequence
  Synthetic oligonucleotide
agggtcaacctgccctatgcagtgactaaa

SEQ ID NO: 392964 - DNA, 30 bp, Artificial Sequence
  Synthetic oligonucleotide
gccaaatccagcactgcacgcgtgactaaa

SEQ ID NO: 392965 - DNA, 30 bp, Artificial Sequence
  Synthetic oligonucleotide
taaatgcatggaccctttcgtcatactaaa

SEQ ID NO: 392966 - DNA, 30 bp, Artificial Sequence
  Synthetic oligonucleotide
tcttcactctagaatttgggtcctactaaa

SEQ ID NO: 392967 - DNA, 30 bp, Artificial Sequence
  Synthetic oligonucleotide
catagcgccgcatcttgacggcgtactaaa

SEQ ID NO: 392968 - DNA, 30 bp, Artificial Sequence
  Synthetic oligonucleotide
tgtaagctatgctcataagttcgtactaaa

SEQ ID NO: 392969 - DNA, 30 bp, Artificial Sequence
  Synthetic oligonucleotide
atttggacatatggttaggcataacctaaa

SEQ ID NO: 392970 - DNA, 30 bp, Artificial Sequence
  Synthetic oligonucleotide
tgccgatcttgcatgcgatctgcacctaaa

SEQ ID NO: 392971 - DNA, 30 bp, Artificial Sequence
  Synthetic oligonucleotide
gcattctagatgcgagtggtaagacctaaa

SEQ ID NO: 392972 - DNA, 30 bp, Artificial Sequence
  Synthetic oligonucleotide
gtatcattagtaagtcttgaactccctaaa

SEQ ID NO: 392973 - DNA, 30 bp, Artificial Sequence
  Synthetic oligonucleotide
cgatatagttaggactagccaaagcctaaa

SEQ ID NO: 392974 - DNA, 30 bp, Artificial Sequence
  Synthetic oligonucleotide
ccaactaaacaactcttctgtctgcctaaa

SEQ ID NO: 392975 - DNA, 30 bp, Artificial Sequence
  Synthetic oligonucleotide
aggtccgaggaacatcactcgggtcctaaa

SEQ ID NO: 392976 - DNA, 30 bp, Artificial Sequence
  Synthetic oligonucleotide
acaaatccaagaaagacgaagcttcctaaa

SEQ ID NO: 392977 - DNA, 30 bp, Artificial Sequence
  Synthetic oligonucleotide
gattaacatttcacacgcaggcttcctaaa

SEQ ID NO: 392978 - DNA, 30 bp, Artificial Sequence
  Synthetic oligonucleotide
cacactaagcccgattagccctttcctaaa

SEQ ID NO: 392979 - DNA, 30 bp, Artificial Sequence
  Synthetic oligonucleotide
tattggtatgagggcctcaatttggctaaa

SEQ ID NO: 392980 - DNA, 30 bp, Artificial Sequence
  Synthetic oligonucleotide
acgtcttaggaatacctaaggtaatctaaa

SEQ ID NO: 392981 - DNA, 30 bp, Artificial Sequence
  Synthetic oligonucleotide
gtgtaatagtgtcagggagtttaatctaaa

SEQ ID NO: 392982 - DNA, 30 bp, Artificial Sequence
  Synthetic oligonucleotide
ctacttgcccaggtctaggtgccctctaaa

SEQ ID NO: 392983 - DNA, 30 bp, Artificial Sequence
  Synthetic oligonucleotide
acaatagtcggtagacgtgccagctctaaa

SEQ ID NO: 392984 - DNA, 30 bp, Artificial Sequence
  Synthetic oligonucleotide
tacggactcaggagcccgcgtgagtctaaa

SEQ ID NO: 392985 - DNA, 30 bp, Artificial Sequence
  Synthetic oligonucleotide
actaatggtacaacatttaagtagtctaaa

SEQ ID NO: 392986 - DNA, 30 bp, Artificial Sequence
  Synthetic oligonucleotide
atgagcaagtcgggcgctcacgggtctaaa

SEQ ID NO: 392987 - DNA, 30 bp, Artificial Sequence
  Synthetic oligonucleotide
gttatgctgtgtgccggtgcgttgtctaaa

SEQ ID NO: 392988 - DNA, 30 bp, Artificial Sequence
  Synthetic oligonucleotide
cagagtcaagcccatgtgggatattctaaa

SEQ ID NO: 392989 - DNA, 30 bp, Artificial Sequence
  Synthetic oligonucleotide
attttggtctttagaaagcaaggttctaaa

SEQ ID NO: 392990 - DNA, 30 bp, Artificial Sequence
  Synthetic oligonucleotide
gttaggtacattatccgagggggttctaaa

SEQ ID NO: 392991 - DNA, 30 bp, Artificial Sequence
  Synthetic oligonucleotide
ggttgttatccggaaaaagctatttctaaa

SEQ ID NO: 392992 - DNA, 30 bp, Artificial Sequence
  Synthetic oligonucleotide
ctttctagggaccgtagggttatttctaaa

SEQ ID NO: 392993 - DNA, 30 bp, Artificial Sequence
  Synthetic oligonucleotide
aacgctccgatccgattctcgtcaagtaaa

SEQ ID NO: 392994 - DNA, 30 bp, Artificial Sequence
  Synthetic oligonucleotide
tacttcatgtgggcctctgcgcgaagtaaa

SEQ ID NO: 392995 - DNA, 30 bp, Artificial Sequence
  Synthetic oligonucleotide
gcgcgatgctgtagcaatgcttacagtaaa

SEQ ID NO: 392996 - DNA, 30 bp, Artificial Sequence
  Synthetic oligonucleotide
cccattttgctattcaaggggaagagtaaa

SEQ ID NO: 392997 - DNA, 30 bp, Artificial Sequence
  Synthetic oligonucleotide
taccaaccgggggacgcatcttcgagtaaa

SEQ ID NO: 392998 - DNA, 30 bp, Artificial Sequence
  Synthetic oligonucleotide
gccgctgtgattgggaaaactctgagtaaa

SEQ ID NO: 392999 - DNA, 30 bp, Artificial Sequence
  Synthetic oligonucleotide
aaacgtgtttcaaggcctgacgtgagtaaa

SEQ ID NO: 393000 - DNA, 30 bp, Artificial Sequence
  Synthetic oligonucleotide
aaactgtataatagatcattcggtagtaaa

SEQ ID NO: 393001 - DNA, 30 bp, Artificial Sequence
  Synthetic oligonucleotide
gcgatctcgggttcaaacacttttagtaaa

SEQ ID NO: 393002 - DNA, 30 bp, Artificial Sequence
  Synthetic oligonucleotide
gtcatttcaccaaaacccgttctacgtaaa

SEQ ID NO: 393003 - DNA, 30 bp, Artificial Sequence
  Synthetic oligonucleotide
ttcgcactggttcgccatgatagccgtaaa

SEQ ID NO: 393004 - DNA, 30 bp, Artificial Sequence
  Synthetic oligonucleotide
aatagatcacgcaaaattaagtgccgtaaa

SEQ ID NO: 393005 - DNA, 30 bp, Artificial Sequence
  Synthetic oligonucleotide
gcgctttccccctactctataaagcgtaaa

SEQ ID NO: 393006 - DNA, 30 bp, Artificial Sequence
  Synthetic oligonucleotide
gcctgtttaatatttctcccaaatcgtaaa

SEQ ID NO: 393007 - DNA, 30 bp, Artificial Sequence
  Synthetic oligonucleotide
ctgggtttgtctgttgggcggcctcgtaaa

SEQ ID NO: 393008 - DNA, 30 bp, Artificial Sequence
  Synthetic oligonucleotide
ctactagtctcgcgggtttagagtcgtaaa

SEQ ID NO: 393009 - DNA, 30 bp, Artificial Sequence
  Synthetic oligonucleotide
cctctagacggtcctacatatcaaggtaaa

SEQ ID NO: 393010 - DNA, 30 bp, Artificial Sequence
  Synthetic oligonucleotide
taaaggtatgctggattttgtgaaggtaaa

SEQ ID NO: 393011 - DNA, 30 bp, Artificial Sequence
  Synthetic oligonucleotide
cccccagggcgggctgaaaacctaggtaaa

SEQ ID NO: 393012 - DNA, 30 bp, Artificial Sequence
  Synthetic oligonucleotide
tcgcattatgcgcatgaactatacggtaaa

SEQ ID NO: 393013 - DNA, 30 bp, Artificial Sequence
  Synthetic oligonucleotide
tgcgaataatccgggattatctccggtaaa

SEQ ID NO: 393014 - DNA, 30 bp, Artificial Sequence
  Synthetic oligonucleotide
tgtctggctgatcattaggtatcgggtaaa

SEQ ID NO: 393015 - DNA, 30 bp, Artificial Sequence
  Synthetic oligonucleotide
ctcctataaacttcaagaggctggggtaaa

SEQ ID NO: 393016 - DNA, 30 bp, Artificial Sequence
  Synthetic oligonucleotide
tcatattatcccacgtgtcgatctggtaaa

SEQ ID NO: 393017 - DNA, 30 bp, Artificial Sequence
  Synthetic oligonucleotide
tgaaattatttttaataaggatgtggtaaa

SEQ ID NO: 393018 - DNA, 30 bp, Artificial Sequence
  Synthetic oligonucleotide
cggcccggccgttaccagattcactgtaaa

SEQ ID NO: 393019 - DNA, 30 bp, Artificial Sequence
  Synthetic oligonucleotide
gaggctcgatttgcacacacggggtgtaaa

SEQ ID NO: 393020 - DNA, 30 bp, Artificial Sequence
  Synthetic oligonucleotide
tcggaaggaactgactggtggaaaattaaa

SEQ ID NO: 393021 - DNA, 30 bp, Artificial Sequence
  Synthetic oligonucleotide
gtaatcaactcaggagtcttttcaattaaa

SEQ ID NO: 393022 - DNA, 30 bp, Artificial Sequence
  Synthetic oligonucleotide
cacgcgacatgggccaaatacataattaaa

SEQ ID NO: 393023 - DNA, 30 bp, Artificial Sequence
  Synthetic oligonucleotide
gggtgctcgcctttcgagataacgattaaa

SEQ ID NO: 393024 - DNA, 30 bp, Artificial Sequence
  Synthetic oligonucleotide
cgccgttgtgtcaccgtagagcggattaaa

SEQ ID NO: 393025 - DNA, 30 bp, Artificial Sequence
  Synthetic oligonucleotide
ctcagttagaggttcggacacgtgattaaa

SEQ ID NO: 393026 - DNA, 30 bp, Artificial Sequence
  Synthetic oligonucleotide
cagccatatacgatcatgggtgtgattaaa

SEQ ID NO: 393027 - DNA, 30 bp, Artificial Sequence
  Synthetic oligonucleotide
cacaccaagcggcataatgcaggtattaaa

SEQ ID NO: 393028 - DNA, 30 bp, Artificial Sequence
  Synthetic oligonucleotide
tctatcgtgacgtttcaaatgtttattaaa

SEQ ID NO: 393029 - DNA, 30 bp, Artificial Sequence
  Synthetic oligonucleotide
ccggcggttcattaaacgcacaaccttaaa

SEQ ID NO: 393030 - DNA, 30 bp, Artificial Sequence
  Synthetic oligonucleotide
ccagggctagcaattaaaatctagcttaaa

SEQ ID NO: 393031 - DNA, 30 bp, Artificial Sequence
  Synthetic oligonucleotide
tcggtacgtatgaactaggacgcgcttaaa

SEQ ID NO: 393032 - DNA, 30 bp, Artificial Sequence
  Synthetic oligonucleotide
tctctctgaaatataaatggggcgcttaaa

SEQ ID NO: 393033 - DNA, 30 bp, Artificial Sequence
  Synthetic oligonucleotide
gcagggggataaagttgccacaatcttaaa

SEQ ID NO: 393034 - DNA, 30 bp, Artificial Sequence
  Synthetic oligonucleotide
agtgtcattcaagcaaggttgtgtcttaaa

SEQ ID NO: 393035 - DNA, 30 bp, Artificial Sequence
  Synthetic oligonucleotide
ggattctgtctgctaccttcttaagttaaa

SEQ ID NO: 393036 - DNA, 30 bp, Artificial Sequence
  Synthetic oligonucleotide
gttgacaaagggcgttgtgaaagagttaaa

SEQ ID NO: 393037 - DNA, 30 bp, Artificial Sequence
  Synthetic oligonucleotide
caccgtggggcaatcttacaatccgttaaa

SEQ ID NO: 393038 - DNA, 30 bp, Artificial Sequence
  Synthetic oligonucleotide
cataagtaaacatgtaccgccggggttaaa

SEQ ID NO: 393039 - DNA, 30 bp, Artificial Sequence
  Synthetic oligonucleotide
cctagtacatacttcatcgcgctggttaaa

SEQ ID NO: 393040 - DNA, 30 bp, Artificial Sequence
  Synthetic oligonucleotide
ccaatcagcgctgtggggcacttggttaaa

SEQ ID NO: 393041 - DNA, 30 bp, Artificial Sequence
  Synthetic oligonucleotide
tcgaggcagtagtattctttcaaatttaaa

SEQ ID NO: 393042 - DNA, 30 bp, Artificial Sequence
  Synthetic oligonucleotide
ggctctcaggtcatgactcccttatttaaa

SEQ ID NO: 393043 - DNA, 30 bp, Artificial Sequence
  Synthetic oligonucleotide
gcactgggacgcatcttgacagactttaaa

SEQ ID NO: 393044 - DNA, 30 bp, Artificial Sequence
  Synthetic oligonucleotide
tatgcaaggttgtacactttaacctttaaa

SEQ ID NO: 393045 - DNA, 30 bp, Artificial Sequence
  Synthetic oligonucleotide
gggctgctcttgctaactacggtctttaaa

SEQ ID NO: 393046 - DNA, 30 bp, Artificial Sequence
  Synthetic oligonucleotide
gtatactattcattgatcgaggagtttaaa

SEQ ID NO: 393047 - DNA, 30 bp, Artificial Sequence
  Synthetic oligonucleotide
atttggccctctgggaagggcaggtttaaa

SEQ ID NO: 393048 - DNA, 30 bp, Artificial Sequence
  Synthetic oligonucleotide
cagagtcgtcgatgggaccatttgtttaaa

SEQ ID NO: 393049 - DNA, 30 bp, Artificial Sequence
  Synthetic oligonucleotide
tcacttaggtgcggtcggactaattttaaa

SEQ ID NO: 393050 - DNA, 30 bp, Artificial Sequence
  Synthetic oligonucleotide
cataaaatcgccgtaatatacggttttaaa

SEQ ID NO: 393051 - DNA, 30 bp, Artificial Sequence
  Synthetic oligonucleotide
ccatgttatctcccacatcactgttttaaa

SEQ ID NO: 393052 - DNA, 30 bp, Artificial Sequence
  Synthetic oligonucleotide
tgaccacctggctcgactgcgctttttaaa

SEQ ID NO: 393053 - DNA, 30 bp, Artificial Sequence
  Synthetic oligonucleotide
gctaaaaacaaattgataagcgtttttaaa

SEQ ID NO: 393054 - DNA, 30 bp, Artificial Sequence
  Synthetic oligonucleotide
ccctcattcgatcatgctagggcaaaacaa

SEQ ID NO: 393055 - DNA, 30 bp, Artificial Sequence
  Synthetic oligonucleotide
aagaatcaactaacacgcgccagcaaacaa

SEQ ID NO: 393056 - DNA, 30 bp, Artificial Sequence
  Synthetic oligonucleotide
tacgcagggaagtctttctactgcaaacaa

SEQ ID NO: 393057 - DNA, 30 bp, Artificial Sequence
  Synthetic oligonucleotide
agtcagtttgttctacgtaagtggaaacaa

SEQ ID NO: 393058 - DNA, 30 bp, Artificial Sequence
  Synthetic oligonucleotide
gaaaaggctttgtccgagaagttgaaacaa

SEQ ID NO: 393059 - DNA, 30 bp, Artificial Sequence
  Synthetic oligonucleotide
gatggatactatgtcatccagtataaacaa

SEQ ID NO: 393060 - DNA, 30 bp, Artificial Sequence
  Synthetic oligonucleotide
caggtctacattaccttcgggtataaacaa

SEQ ID NO: 393061 - DNA, 30 bp, Artificial Sequence
  Synthetic oligonucleotide
ttccacagacctcctaacccttataaacaa

SEQ ID NO: 393062 - DNA, 30 bp, Artificial Sequence
  Synthetic oligonucleotide
tcatgaccgcacgctaacggcggtaaacaa

SEQ ID NO: 393063 - DNA, 31 bp, Artificial Sequence
  Synthetic oligonucleotide
tcgctgtccttctctgcagaagtctcaacaa

SEQ ID NO: 393064 - DNA, 30 bp, Artificial Sequence
  Synthetic oligonucleotide
gatgcgcgggtgggttctcgtggtcaacaa

SEQ ID NO: 393065 - DNA, 30 bp, Artificial Sequence
  Synthetic oligonucleotide
tgttgcgttaaaatacccggtacagaacaa

SEQ ID NO: 393066 - DNA, 30 bp, Artificial Sequence
  Synthetic oligonucleotide
accgccggatgttactccagatgcgaacaa

SEQ ID NO: 393067 - DNA, 30 bp, Artificial Sequence
  Synthetic oligonucleotide
ttagatcgagggatagtgcccaaggaacaa

SEQ ID NO: 393068 - DNA, 30 bp, Artificial Sequence
  Synthetic oligonucleotide
tgggtctcatcctgtttcagttaggaacaa

SEQ ID NO: 393069 - DNA, 30 bp, Artificial Sequence
  Synthetic oligonucleotide
tttaaattgttcttttatgaactggaacaa

SEQ ID NO: 393070 - DNA, 30 bp, Artificial Sequence
  Synthetic oligonucleotide
ggatcataatgtcaaggcattagtgaacaa

SEQ ID NO: 393071 - DNA, 30 bp, Artificial Sequence
  Synthetic oligonucleotide
cggtcaagggacaccaaagtgggataacaa

SEQ ID NO: 393072 - DNA, 30 bp, Artificial Sequence
  Synthetic oligonucleotide
attggtgttgacgtctcactggtataacaa

SEQ ID NO: 393073 - DNA, 30 bp, Artificial Sequence
  Synthetic oligonucleotide
gtgatctacagtttgtacgggccctaacaa

SEQ ID NO: 393074 - DNA, 30 bp, Artificial Sequence
  Synthetic oligonucleotide
ggatctaatatatcgctacgggcctaacaa

SEQ ID NO: 393075 - DNA, 30 bp, Artificial Sequence
  Synthetic oligonucleotide
agggttgagcctcgccgcaactgctaacaa

SEQ ID NO: 393076 - DNA, 30 bp, Artificial Sequence
  Synthetic oligonucleotide
tgaacagacaggccactctagtattaacaa

SEQ ID NO: 393077 - DNA, 30 bp, Artificial Sequence
  Synthetic oligonucleotide
agcattccgcacaataacggtgcttaacaa

SEQ ID NO: 393078 - DNA, 30 bp, Artificial Sequence
  Synthetic oligonucleotide
tgtcccggctgtatacacctcatttaacaa

SEQ ID NO: 393079 - DNA, 30 bp, Artificial Sequence
  Synthetic oligonucleotide
aacttcctcagtcggatgtgcgaaacacaa

SEQ ID NO: 393080 - DNA, 30 bp, Artificial Sequence
  Synthetic oligonucleotide
tgagtatcgcaacaagcgcggtaaacacaa

SEQ ID NO: 393081 - DNA, 30 bp, Artificial Sequence
  Synthetic oligonucleotide
ctatcgcattaccttattgtgctaacacaa

SEQ ID NO: 393082 - DNA, 30 bp, Artificial Sequence
  Synthetic oligonucleotide
gggaagttatatttgaaaccagtaacacaa

SEQ ID NO: 393083 - DNA, 30 bp, Artificial Sequence
  Synthetic oligonucleotide
gcaggctaacttggcattttgaccacacaa

SEQ ID NO: 393084 - DNA, 30 bp, Artificial Sequence
  Synthetic oligonucleotide
gactctctaaccagtcccctgcccacacaa

SEQ ID NO: 393085 - DNA, 30 bp, Artificial Sequence
  Synthetic oligonucleotide
cctttcattgagggtatatggcgcacacaa

SEQ ID NO: 393086 - DNA, 30 bp, Artificial Sequence
  Synthetic oligonucleotide
cctatagtgtagaccagttgtctcacacaa

SEQ ID NO: 393087 - DNA, 31 bp, Artificial Sequence
  Synthetic oligonucleotide
aatcacgcgttaggatgtgcgttcgacacaa

SEQ ID NO: 393088 - DNA, 30 bp, Artificial Sequence
  Synthetic oligonucleotide
ccgcgtgttcaagttgataatgatacacaa

SEQ ID NO: 393089 - DNA, 30 bp, Artificial Sequence
  Synthetic oligonucleotide
tgcgatgtgtttccgagcattagtacacaa

SEQ ID NO: 393090 - DNA, 30 bp, Artificial Sequence
  Synthetic oligonucleotide
cggggtgccatagacctcgtatttacacaa

SEQ ID NO: 393091 - DNA, 30 bp, Artificial Sequence
  Synthetic oligonucleotide
aaagagtttcaataccgggacagcccacaa

SEQ ID NO: 393092 - DNA, 30 bp, Artificial Sequence
  Synthetic oligonucleotide
aagttggtcatcgacgacgtcaagccacaa

SEQ ID NO: 393093 - DNA, 30 bp, Artificial Sequence
  Synthetic oligonucleotide
atatggcaccggcaaccgcccgtgccacaa

SEQ ID NO: 393094 - DNA, 30 bp, Artificial Sequence
  Synthetic oligonucleotide
gtataaaagtctctgatgtgcttgccacaa

SEQ ID NO: 393095 - DNA, 30 bp, Artificial Sequence
  Synthetic oligonucleotide
tacaagaccctgcgtatacttaatccacaa

SEQ ID NO: 393096 - DNA, 29 bp, Artificial Sequence
  Synthetic oligonucleotide
tttcagtaaacaaagggtttgcagcacaa

SEQ ID NO: 393097 - DNA, 30 bp, Artificial Sequence
  Synthetic oligonucleotide
tattcaatgcgcgaccttcttggcgcacaa

SEQ ID NO: 393098 - DNA, 30 bp, Artificial Sequence
  Synthetic oligonucleotide
tcgttcacttctagtaaccatggggcacaa

SEQ ID NO: 393099 - DNA, 31 bp, Artificial Sequence
  Synthetic oligonucleotide
tcttgtcatcgcccgtacaatctgggcacaa

SEQ ID NO: 393100 - DNA, 30 bp, Artificial Sequence
  Synthetic oligonucleotide
tggcgaagatttcagaacgggttggcacaa

SEQ ID NO: 393101 - DNA, 30 bp, Artificial Sequence
  Synthetic oligonucleotide
aatttgtcggtgagttagaggtgatcacaa

SEQ ID NO: 393102 - DNA, 30 bp, Artificial Sequence
  Synthetic oligonucleotide
cattcaccgatttcctctaacgtatcacaa

SEQ ID NO: 393103 - DNA, 30 bp, Artificial Sequence
  Synthetic oligonucleotide
gttattcttcggctcattcatagctcacaa

SEQ ID NO: 393104 - DNA, 30 bp, Artificial Sequence
  Synthetic oligonucleotide
ggatatggggtaaagacattcgagtcacaa

SEQ ID NO: 393105 - DNA, 30 bp, Artificial Sequence
  Synthetic oligonucleotide
aataaactacaaataccgtcgtcgtcacaa

SEQ ID NO: 393106 - DNA, 30 bp, Artificial Sequence
  Synthetic oligonucleotide
tattccgtcgtcggccactcatcttcacaa

SEQ ID NO: 393107 - DNA, 30 bp, Artificial Sequence
  Synthetic oligonucleotide
gagatagcctcgtttagtgataacagacaa

SEQ ID NO: 393108 - DNA, 30 bp, Artificial Sequence
  Synthetic oligonucleotide
aatgattcctagcaggctgatttcagacaa

SEQ ID NO: 393109 - DNA, 30 bp, Artificial Sequence
  Synthetic oligonucleotide
gagatggagccgtaggaatcgtcgagacaa

SEQ ID NO: 393110 - DNA, 30 bp, Artificial Sequence
  Synthetic oligonucleotide
tattttaagagttctaaggtatggagacaa

SEQ ID NO: 393111 - DNA, 30 bp, Artificial Sequence
  Synthetic oligonucleotide
tcgtcttccagctcatgtctaaatagacaa

SEQ ID NO: 393112 - DNA, 30 bp, Artificial Sequence
  Synthetic oligonucleotide
ctatgattgtacgacccctgcgatagacaa

SEQ ID NO: 393113 - DNA, 30 bp, Artificial Sequence
  Synthetic oligonucleotide
agcagagggtcaggcgggtggcctagacaa

SEQ ID NO: 393114 - DNA, 30 bp, Artificial Sequence
  Synthetic oligonucleotide
agccattatatacgttaagtagcacgacaa

SEQ ID NO: 393115 - DNA, 30 bp, Artificial Sequence
  Synthetic oligonucleotide
tagtgtaggtccctaaccatgcatcgacaa

SEQ ID NO: 393116 - DNA, 30 bp, Artificial Sequence
  Synthetic oligonucleotide
gctcaagttaaaatatgtaattctcgacaa

SEQ ID NO: 393117 - DNA, 30 bp, Artificial Sequence
  Synthetic oligonucleotide
gtatcctccttacggatacaagtaggacaa

SEQ ID NO: 393118 - DNA, 30 bp, Artificial Sequence
  Synthetic oligonucleotide
ttaacaaaatcttgatttttatgcggacaa

SEQ ID NO: 393119 - DNA, 30 bp, Artificial Sequence
  Synthetic oligonucleotide
gtctagcatacgtgctagcggctcggacaa

SEQ ID NO: 393120 - DNA, 30 bp, Artificial Sequence
  Synthetic oligonucleotide
cagacactcgtctcatagccgtagggacaa

SEQ ID NO: 393121 - DNA, 30 bp, Artificial Sequence
  Synthetic oligonucleotide
taaaggacacttctacttcctaggggacaa

SEQ ID NO: 393122 - DNA, 30 bp, Artificial Sequence
  Synthetic oligonucleotide
acgaagcagatgtacaccgttgtgggacaa

SEQ ID NO: 393123 - DNA, 30 bp, Artificial Sequence
  Synthetic oligonucleotide
taggagatactgcgaccttgcactggacaa

SEQ ID NO: 393124 - DNA, 30 bp, Artificial Sequence
  Synthetic oligonucleotide
tgctaagtgtatcacgttacaagtggacaa

SEQ ID NO: 393125 - DNA, 31 bp, Artificial Sequence
  Synthetic oligonucleotide
gaatagctaatacgacactcgctcatgacaa

SEQ ID NO: 393126 - DNA, 30 bp, Artificial Sequence
  Synthetic oligonucleotide
tctccctgactgtcgcgtgcaagatgacaa

SEQ ID NO: 393127 - DNA, 30 bp, Artificial Sequence
  Synthetic oligonucleotide
tccgggctaccatgatcgctgcgatgacaa

SEQ ID NO: 393128 - DNA, 30 bp, Artificial Sequence
  Synthetic oligonucleotide
cgtgctgccttctcgtataagtggtgacaa

SEQ ID NO: 393129 - DNA, 30 bp, Artificial Sequence
  Synthetic oligonucleotide
accgttctacagtaaggtgtcagaatacaa

SEQ ID NO: 393130 - DNA, 30 bp, Artificial Sequence
  Synthetic oligonucleotide
cggtgtcagatcttcttcgatctaatacaa

SEQ ID NO: 393131 - DNA, 30 bp, Artificial Sequence
  Synthetic oligonucleotide
atacgctgcacacctcaggccgccatacaa

SEQ ID NO: 393132 - DNA, 30 bp, Artificial Sequence
  Synthetic oligonucleotide
tgctgcatgcctccaatccgggagatacaa

SEQ ID NO: 393133 - DNA, 30 bp, Artificial Sequence
  Synthetic oligonucleotide
tttgaaagtcccgcatatgttgggatacaa

SEQ ID NO: 393134 - DNA, 30 bp, Artificial Sequence
  Synthetic oligonucleotide
aaactcgagtggagtgaataagatatacaa

SEQ ID NO: 393135 - DNA, 30 bp, Artificial Sequence
  Synthetic oligonucleotide
atgtgggttaattttcccacttatatacaa

SEQ ID NO: 393136 - DNA, 30 bp, Artificial Sequence
  Synthetic oligonucleotide
ttggactgttcgttgattaaacgtatacaa

SEQ ID NO: 393137 - DNA, 30 bp, Artificial Sequence
  Synthetic oligonucleotide
ggcttaattgatatttaagggccactacaa

SEQ ID NO: 393138 - DNA, 30 bp, Artificial Sequence
  Synthetic oligonucleotide
cgggaccataaggatacgttaatactacaa

SEQ ID NO: 393139 - DNA, 30 bp, Artificial Sequence
  Synthetic oligonucleotide
catggtttggctggctaacttagcctacaa

SEQ ID NO: 393140 - DNA, 30 bp, Artificial Sequence
  Synthetic oligonucleotide
tactaaagtggtggcagcataggcctacaa

SEQ ID NO: 393141 - DNA, 30 bp, Artificial Sequence
  Synthetic oligonucleotide
gatgtaatcattgaggtgcggacgctacaa

SEQ ID NO: 393142 - DNA, 30 bp, Artificial Sequence
  Synthetic oligonucleotide
cttacattcagatatcctgggcggctacaa

SEQ ID NO: 393143 - DNA, 30 bp, Artificial Sequence
  Synthetic oligonucleotide
ccctactagccttttgactgtatgctacaa

SEQ ID NO: 393144 - DNA, 30 bp, Artificial Sequence
  Synthetic oligonucleotide
gaaaaaatttttaaaagaggtgtgctacaa

SEQ ID NO: 393145 - DNA, 30 bp, Artificial Sequence
  Synthetic oligonucleotide
ctcagcaccacgattctgtgaactctacaa

SEQ ID NO: 393146 - DNA, 30 bp, Artificial Sequence
  Synthetic oligonucleotide
agtgaccgcagaggtgtatagagtctacaa

SEQ ID NO: 393147 - DNA, 30 bp, Artificial Sequence
  Synthetic oligonucleotide
agcgagtcggcccacgtcaggggtctacaa

SEQ ID NO: 393148 - DNA, 30 bp, Artificial Sequence
  Synthetic oligonucleotide
gtgaggtttttatgaggatgctttctacaa

SEQ ID NO: 393149 - DNA, 29 bp, Artificial Sequence
  Synthetic oligonucleotide
cagcgatcaggtcactaactccagtacaa

SEQ ID NO: 393150 - DNA, 30 bp, Artificial Sequence
  Synthetic oligonucleotide
gggtgatatggggctcccatgggagtacaa

SEQ ID NO: 393151 - DNA, 30 bp, Artificial Sequence
  Synthetic oligonucleotide
aatagtatggacagacagatcgtagtacaa

SEQ ID NO: 393152 - DNA, 30 bp, Artificial Sequence
  Synthetic oligonucleotide
cgaaagctaagtcttgaggtacacgtacaa

SEQ ID NO: 393153 - DNA, 30 bp, Artificial Sequence
  Synthetic oligonucleotide
aattccttctaagcatatatgtacgtacaa

SEQ ID NO: 393154 - DNA, 30 bp, Artificial Sequence
  Synthetic oligonucleotide
tcctttgaaatttggtacatacgcgtacaa

SEQ ID NO: 393155 - DNA, 30 bp, Artificial Sequence
  Synthetic oligonucleotide
ccagggcgcgcacttcacgcggaggtacaa

SEQ ID NO: 393156 - DNA, 30 bp, Artificial Sequence
  Synthetic oligonucleotide
tgggccccatgctacttcatataggtacaa

SEQ ID NO: 393157 - DNA, 29 bp, Artificial Sequence
  Synthetic oligonucleotide
ctgaaattactatgacagggagattacaa

SEQ ID NO: 393158 - DNA, 30 bp, Artificial Sequence
  Synthetic oligonucleotide
ttttcatgaagtcaggggcgaatattacaa

SEQ ID NO: 393159 - DNA, 30 bp, Artificial Sequence
  Synthetic oligonucleotide
atatgtataatagccttggggaccttacaa

SEQ ID NO: 393160 - DNA, 30 bp, Artificial Sequence
  Synthetic oligonucleotide
gcttcgctgcccatagcgacactgttacaa

SEQ ID NO: 393161 - DNA, 30 bp, Artificial Sequence
  Synthetic oligonucleotide
atgatgttgcctggcgctagcccaaaccaa

SEQ ID NO: 393162 - DNA, 30 bp, Artificial Sequence
  Synthetic oligonucleotide
gcgtgagtggcccattacggcggaaaccaa

SEQ ID NO: 393163 - DNA, 30 bp, Artificial Sequence
  Synthetic oligonucleotide
cggcgttgcatggttagcaggggaaaccaa

SEQ ID NO: 393164 - DNA, 30 bp, Artificial Sequence
  Synthetic oligonucleotide
gtctgggcgtgacgttgctttataaaccaa

SEQ ID NO: 393165 - DNA, 30 bp, Artificial Sequence
  Synthetic oligonucleotide
tctgactcctttagtagggctcagaaccaa

SEQ ID NO: 393166 - DNA, 30 bp, Artificial Sequence
  Synthetic oligonucleotide
tttgacttctcttcgcaagctaataaccaa

SEQ ID NO: 393167 - DNA, 30 bp, Artificial Sequence
  Synthetic oligonucleotide
gcaccctatgagtccctcggacataaccaa

SEQ ID NO: 393168 - DNA, 30 bp, Artificial Sequence
  Synthetic oligonucleotide
ttcataaagcccgcaattctgattaaccaa

SEQ ID NO: 393169 - DNA, 30 bp, Artificial Sequence
  Synthetic oligonucleotide
ctatatcagtagtgagctattcaacaccaa

SEQ ID NO: 393170 - DNA, 30 bp, Artificial Sequence
  Synthetic oligonucleotide
cctccagtccctaactgagggggccaccaa

SEQ ID NO: 393171 - DNA, 29 bp, Artificial Sequence
  Synthetic oligonucleotide
ggggatacgtttagcggccactccaccaa

SEQ ID NO: 393172 - DNA, 30 bp, Artificial Sequence
  Synthetic oligonucleotide
taatctgagccttgtagtgtagggcaccaa

SEQ ID NO: 393173 - DNA, 30 bp, Artificial Sequence
  Synthetic oligonucleotide
gtattgttaaatgtaagaagcgttcaccaa

SEQ ID NO: 393174 - DNA, 30 bp, Artificial Sequence
  Synthetic oligonucleotide
tgtcctattctccgggtggagggagaccaa

SEQ ID NO: 393175 - DNA, 30 bp, Artificial Sequence
  Synthetic oligonucleotide
gggaataaactcgagttcttctgcgaccaa

SEQ ID NO: 393176 - DNA, 30 bp, Artificial Sequence
  Synthetic oligonucleotide
tgtattcaggatgaagtacctggggaccaa

SEQ ID NO: 393177 - DNA, 30 bp, Artificial Sequence
  Synthetic oligonucleotide
gattagacggaagttggtcctaatgaccaa

SEQ ID NO: 393178 - DNA, 30 bp, Artificial Sequence
  Synthetic oligonucleotide
cggggacttcttcgagtgtctaaataccaa

SEQ ID NO: 393179 - DNA, 30 bp, Artificial Sequence
  Synthetic oligonucleotide
tagaagcctggttgccccgagaagtaccaa

SEQ ID NO: 393180 - DNA, 30 bp, Artificial Sequence
  Synthetic oligonucleotide
atttggctctaaagaacttggcggtaccaa

SEQ ID NO: 393181 - DNA, 30 bp, Artificial Sequence
  Synthetic oligonucleotide
atgggacactgtaactgtgtgttgtaccaa

SEQ ID NO: 393182 - DNA, 30 bp, Artificial Sequence
  Synthetic oligonucleotide
aatgcacccctcacctgaatcccttaccaa

SEQ ID NO: 393183 - DNA, 30 bp, Artificial Sequence
  Synthetic oligonucleotide
gtacttggtgagactgggactgtttaccaa

SEQ ID NO: 393184 - DNA, 30 bp, Artificial Sequence
  Synthetic oligonucleotide
ggctgtgttacttgaatttggccaacccaa

SEQ ID NO: 393185 - DNA, 30 bp, Artificial Sequence
  Synthetic oligonucleotide
ctgcgcaaacttggtgatatcaacacccaa

SEQ ID NO: 393186 - DNA, 30 bp, Artificial Sequence
  Synthetic oligonucleotide
ggttcgaaggtagacatggttgtcacccaa

SEQ ID NO: 393187 - DNA, 30 bp, Artificial Sequence
  Synthetic oligonucleotide
gctgtccgcgcttcgtgtggcttcacccaa

SEQ ID NO: 393188 - DNA, 30 bp, Artificial Sequence
  Synthetic oligonucleotide
cgctatcctaatccgcaaaacaggacccaa

SEQ ID NO: 393189 - DNA, 30 bp, Artificial Sequence
  Synthetic oligonucleotide
atgcttcgtccagaaaaacgtaggacccaa

SEQ ID NO: 393190 - DNA, 30 bp, Artificial Sequence
  Synthetic oligonucleotide
gggtccgcgggccgggcttgaaatacccaa

SEQ ID NO: 393191 - DNA, 30 bp, Artificial Sequence
  Synthetic oligonucleotide
tgcacataattatcggtaatcaatacccaa

SEQ ID NO: 393192 - DNA, 30 bp, Artificial Sequence
  Synthetic oligonucleotide
acccccacaggggtaagaatcaaaccccaa

SEQ ID NO: 393193 - DNA, 30 bp, Artificial Sequence
  Synthetic oligonucleotide
gccgccgtgggtgagtgtggcagaccccaa

SEQ ID NO: 393194 - DNA, 30 bp, Artificial Sequence
  Synthetic oligonucleotide
ctggggcagtctatttgagtagacccccaa

SEQ ID NO: 393195 - DNA, 30 bp, Artificial Sequence
  Synthetic oligonucleotide
catgccgaaactattctgggatccccccaa

SEQ ID NO: 393196 - DNA, 30 bp, Artificial Sequence
  Synthetic oligonucleotide
agacgcccttacccaacgttaagtccccaa

SEQ ID NO: 393197 - DNA, 30 bp, Artificial Sequence
  Synthetic oligonucleotide
ggaactggtttagttatctagacagcccaa

SEQ ID NO: 393198 - DNA, 30 bp, Artificial Sequence
  Synthetic oligonucleotide
taactgtctttgggcaacttctcagcccaa

SEQ ID NO: 393199 - DNA, 30 bp, Artificial Sequence
  Synthetic oligonucleotide
tttaatgagtgaccccgccaaaaggcccaa

SEQ ID NO: 393200 - DNA, 30 bp, Artificial Sequence
  Synthetic oligonucleotide
gcctgactggtgtgatgctaacatgcccaa

SEQ ID NO: 393201 - DNA, 30 bp, Artificial Sequence
  Synthetic oligonucleotide
gccttacacaacgtttacctcgaatcccaa

SEQ ID NO: 393202 - DNA, 30 bp, Artificial Sequence
  Synthetic oligonucleotide
gtctataatcttttctaaccgcagtcccaa

SEQ ID NO: 393203 - DNA, 30 bp, Artificial Sequence
  Synthetic oligonucleotide
atttactatcataagtcggagtggtcccaa

SEQ ID NO: 393204 - DNA, 30 bp, Artificial Sequence
  Synthetic oligonucleotide
ccacgaggcagtacctactatcgttcccaa

SEQ ID NO: 393205 - DNA, 30 bp, Artificial Sequence
  Synthetic oligonucleotide
gggagtgaccaagcagatgcaagaagccaa

SEQ ID NO: 393206 - DNA, 30 bp, Artificial Sequence
  Synthetic oligonucleotide
agcaggacttattgactgccgtccagccaa

SEQ ID NO: 393207 - DNA, 30 bp, Artificial Sequence
  Synthetic oligonucleotide
aatttttgcggaagcccggaggtcagccaa

SEQ ID NO: 393208 - DNA, 30 bp, Artificial Sequence
  Synthetic oligonucleotide
gtcgaatcggatttactgggcgagagccaa

SEQ ID NO: 393209 - DNA, 30 bp, Artificial Sequence
  Synthetic oligonucleotide
gctcgcgataggcgtattggatggagccaa

SEQ ID NO: 393210 - DNA, 30 bp, Artificial Sequence
  Synthetic oligonucleotide
gtcttaagctatccacagtacgttagccaa

SEQ ID NO: 393211 - DNA, 30 bp, Artificial Sequence
  Synthetic oligonucleotide
ccaaattggacgggacatggtctacgccaa

SEQ ID NO: 393212 - DNA, 30 bp, Artificial Sequence
  Synthetic oligonucleotide
cgtggctgattctagaacaattgccgccaa

SEQ ID NO: 393213 - DNA, 30 bp, Artificial Sequence
  Synthetic oligonucleotide
gaagcattcggccaaaagtccgtccgccaa

SEQ ID NO: 393214 - DNA, 30 bp, Artificial Sequence
  Synthetic oligonucleotide
gtatccgctctcggcagtgtgagaggccaa

SEQ ID NO: 393215 - DNA, 30 bp, Artificial Sequence
  Synthetic oligonucleotide
gggtaaagttgaccgctcatgcgcggccaa

SEQ ID NO: 393216 - DNA, 30 bp, Artificial Sequence
  Synthetic oligonucleotide
gacaactacaaccatttatagccgggccaa

SEQ ID NO: 393217 - DNA, 30 bp, Artificial Sequence
  Synthetic oligonucleotide
tggccataactttcgttgcaattgggccaa

SEQ ID NO: 393218 - DNA, 30 bp, Artificial Sequence
  Synthetic oligonucleotide
taccctgccacgctgagtttgatatgccaa

SEQ ID NO: 393219 - DNA, 30 bp, Artificial Sequence
  Synthetic oligonucleotide
cgtggtagccgtatgtatgctgcgtgccaa

SEQ ID NO: 393220 - DNA, 30 bp, Artificial Sequence
  Synthetic oligonucleotide
ttcctagtaatcggtactctacaaatccaa

SEQ ID NO: 393221 - DNA, 30 bp, Artificial Sequence
  Synthetic oligonucleotide
gatgtgaatgagactgcgatggaaatccaa

SEQ ID NO: 393222 - DNA, 30 bp, Artificial Sequence
  Synthetic oligonucleotide
ggctacagcgtttggggttagtgaatccaa

SEQ ID NO: 393223 - DNA, 30 bp, Artificial Sequence
  Synthetic oligonucleotide
cctaatcggtagatacgtagctccatccaa

SEQ ID NO: 393224 - DNA, 30 bp, Artificial Sequence
  Synthetic oligonucleotide
caaacgttggtcttgcgcataagcatccaa

SEQ ID NO: 393225 - DNA, 30 bp, Artificial Sequence
  Synthetic oligonucleotide
ctcgtaataatttctgggcttggcatccaa

SEQ ID NO: 393226 - DNA, 30 bp, Artificial Sequence
  Synthetic oligonucleotide
tccaatcacaaggttcatgttactatccaa

SEQ ID NO: 393227 - DNA, 30 bp, Artificial Sequence
  Synthetic oligonucleotide
atggtcggtaggacgagggtccttatccaa

SEQ ID NO: 393228 - DNA, 30 bp, Artificial Sequence
  Synthetic oligonucleotide
actgttagtcgggtgtgtggtgccctccaa

SEQ ID NO: 393229 - DNA, 30 bp, Artificial Sequence
  Synthetic oligonucleotide
cgccataggtccatcataattggcctccaa

SEQ ID NO: 393230 - DNA, 30 bp, Artificial Sequence
  Synthetic oligonucleotide
ccgaatgatctcccttttctgaagctccaa

SEQ ID NO: 393231 - DNA, 30 bp, Artificial Sequence
  Synthetic oligonucleotide
tcaaacttacaggcatagctacagctccaa

SEQ ID NO: 393232 - DNA, 30 bp, Artificial Sequence
  Synthetic oligonucleotide
tcagccagaggccggtatatagtgctccaa

SEQ ID NO: 393233 - DNA, 30 bp, Artificial Sequence
  Synthetic oligonucleotide
ctaacagtacgcctggagtcgttgctccaa

SEQ ID NO: 393234 - DNA, 30 bp, Artificial Sequence
  Synthetic oligonucleotide
taacggtaacttgaagttattgcagtccaa

SEQ ID NO: 393235 - DNA, 30 bp, Artificial Sequence
  Synthetic oligonucleotide
cccgcggcgtgggtggagggttgagtccaa

SEQ ID NO: 393236 - DNA, 30 bp, Artificial Sequence
  Synthetic oligonucleotide
tctggctgatactagtgaggacacgtccaa

SEQ ID NO: 393237 - DNA, 30 bp, Artificial Sequence
  Synthetic oligonucleotide
cggcaatttattattagggtggaggtccaa

SEQ ID NO: 393238 - DNA, 30 bp, Artificial Sequence
  Synthetic oligonucleotide
caacttctgaaacacgtcctttcggtccaa

SEQ ID NO: 393239 - DNA, 30 bp, Artificial Sequence
  Synthetic oligonucleotide
tcgtcatgctcacttttaactaatgtccaa

SEQ ID NO: 393240 - DNA, 30 bp, Artificial Sequence
  Synthetic oligonucleotide
cggaatggcgcttttttgatctttgtccaa

SEQ ID NO: 393241 - DNA, 30 bp, Artificial Sequence
  Synthetic oligonucleotide
taacggccatggacaacgtcaacattccaa

SEQ ID NO: 393242 - DNA, 31 bp, Artificial Sequence
  Synthetic oligonucleotide
cggtccctgtcaatcatgccctacattccaa

SEQ ID NO: 393243 - DNA, 30 bp, Artificial Sequence
  Synthetic oligonucleotide
cccgtcgaaaatctgtcgagatcattccaa

SEQ ID NO: 393244 - DNA, 30 bp, Artificial Sequence
  Synthetic oligonucleotide
ggactctggtcgcaatcggttggattccaa

SEQ ID NO: 393245 - DNA, 30 bp, Artificial Sequence
  Synthetic oligonucleotide
cttactggaacactttaagaggtattccaa

SEQ ID NO: 393246 - DNA, 30 bp, Artificial Sequence
  Synthetic oligonucleotide
tgatacatgattggaaatcagttattccaa

SEQ ID NO: 393247 - DNA, 30 bp, Artificial Sequence
  Synthetic oligonucleotide
gagaccccaaataggatcggaggcttccaa

SEQ ID NO: 393248 - DNA, 30 bp, Artificial Sequence
  Synthetic oligonucleotide
aaagctctgggataaagatttttgttccaa

SEQ ID NO: 393249 - DNA, 30 bp, Artificial Sequence
  Synthetic oligonucleotide
tgactttaaaacaaaacgagatatttccaa

SEQ ID NO: 393250 - DNA, 30 bp, Artificial Sequence
  Synthetic oligonucleotide
acggctcataccgcacaagcgattttccaa

SEQ ID NO: 393251 - DNA, 30 bp, Artificial Sequence
  Synthetic oligonucleotide
cggcttcactaatttcttgacataaagcaa

SEQ ID NO: 393252 - DNA, 30 bp, Artificial Sequence
  Synthetic oligonucleotide
gtccgttgtttggcttaggggttaaagcaa

SEQ ID NO: 393253 - DNA, 30 bp, Artificial Sequence
  Synthetic oligonucleotide
tgaagccattgtactacaataggcaagcaa

SEQ ID NO: 393254 - DNA, 30 bp, Artificial Sequence
  Synthetic oligonucleotide
gtcaaaagccctgattacgcagcgaagcaa

SEQ ID NO: 393255 - DNA, 30 bp, Artificial Sequence
  Synthetic oligonucleotide
gttatgtcttgtttcgaggccatgaagcaa

SEQ ID NO: 393256 - DNA, 30 bp, Artificial Sequence
  Synthetic oligonucleotide
tgcaggaattgttggacggttgataagcaa

SEQ ID NO: 393257 - DNA, 30 bp, Artificial Sequence
  Synthetic oligonucleotide
atcatagtactgcacggcatagaccagcaa

SEQ ID NO: 393258 - DNA, 30 bp, Artificial Sequence
  Synthetic oligonucleotide
ttacgattccctggagcacggttccagcaa

SEQ ID NO: 393259 - DNA, 30 bp, Artificial Sequence
  Synthetic oligonucleotide
accgtatgacgcaggtgtaatcagcagcaa

SEQ ID NO: 393260 - DNA, 30 bp, Artificial Sequence
  Synthetic oligonucleotide
gtcacattattttgttggtcaaggcagcaa

SEQ ID NO: 393261 - DNA, 30 bp, Artificial Sequence
  Synthetic oligonucleotide
ggccgatcatggacttaaaagaggcagcaa

SEQ ID NO: 393262 - DNA, 30 bp, Artificial Sequence
  Synthetic oligonucleotide
actgatttccgaggatctcatatgcagcaa

SEQ ID NO: 393263 - DNA, 30 bp, Artificial Sequence
  Synthetic oligonucleotide
aaccgtctactgatggtacccctgcagcaa

SEQ ID NO: 393264 - DNA, 30 bp, Artificial Sequence
  Synthetic oligonucleotide
gaatcccctgttaacaccgcgttgcagcaa

SEQ ID NO: 393265 - DNA, 30 bp, Artificial Sequence
  Synthetic oligonucleotide
tttatttgggaaatatataacagtcagcaa

SEQ ID NO: 393266 - DNA, 30 bp, Artificial Sequence
  Synthetic oligonucleotide
cggttgctcgtgcgatgcatgggcgagcaa

SEQ ID NO: 393267 - DNA, 30 bp, Artificial Sequence
  Synthetic oligonucleotide
ataccacaattctgagaacgtggtgagcaa

SEQ ID NO: 393268 - DNA, 30 bp, Artificial Sequence
  Synthetic oligonucleotide
atcgcttcggcaaaacccgtggttgagcaa

SEQ ID NO: 393269 - DNA, 30 bp, Artificial Sequence
  Synthetic oligonucleotide
actgattagacctagtaccgttttgagcaa

SEQ ID NO: 393270 - DNA, 30 bp, Artificial Sequence
  Synthetic oligonucleotide
tgcatcgagtctattcgttagtaatagcaa

SEQ ID NO: 393271 - DNA, 30 bp, Artificial Sequence
  Synthetic oligonucleotide
ccgtacttagcgttttcgcttagatagcaa

SEQ ID NO: 393272 - DNA, 30 bp, Artificial Sequence
  Synthetic oligonucleotide
atgaaacttacaaactcatttggatagcaa

SEQ ID NO: 393273 - DNA, 30 bp, Artificial Sequence
  Synthetic oligonucleotide
taaagtccatcttctgtgggagactagcaa

SEQ ID NO: 393274 - DNA, 30 bp, Artificial Sequence
  Synthetic oligonucleotide
acaattatattattgcggcaattctagcaa

SEQ ID NO: 393275 - DNA, 30 bp, Artificial Sequence
  Synthetic oligonucleotide
cctgaaattaactctctcaagacgtagcaa

SEQ ID NO: 393276 - DNA, 30 bp, Artificial Sequence
  Synthetic oligonucleotide
ttgcagacacgggcgtacgctcgttagcaa

SEQ ID NO: 393277 - DNA, 30 bp, Artificial Sequence
  Synthetic oligonucleotide
aattgcctttcgcttatcgttggttagcaa

SEQ ID NO: 393278 - DNA, 30 bp, Artificial Sequence
  Synthetic oligonucleotide
cagctttcaaatgtgatgtgctaaacgcaa

SEQ ID NO: 393279 - DNA, 30 bp, Artificial Sequence
  Synthetic oligonucleotide
cagccactcccgtgaagctagcccacgcaa

SEQ ID NO: 393280 - DNA, 30 bp, Artificial Sequence
  Synthetic oligonucleotide
tccaatatgaggcaatacccggtcacgcaa

SEQ ID NO: 393281 - DNA, 30 bp, Artificial Sequence
  Synthetic oligonucleotide
cgtaattaatagccgtctcggacgacgcaa

SEQ ID NO: 393282 - DNA, 30 bp, Artificial Sequence
  Synthetic oligonucleotide
gcctacggcgccttggtcacgccgacgcaa

SEQ ID NO: 393283 - DNA, 30 bp, Artificial Sequence
  Synthetic oligonucleotide
tcagctcaaatacgttttcaccggacgcaa

SEQ ID NO: 393284 - DNA, 30 bp, Artificial Sequence
  Synthetic oligonucleotide
actcctcttgactacccgccgggtacgcaa

SEQ ID NO: 393285 - DNA, 30 bp, Artificial Sequence
  Synthetic oligonucleotide
aagcggtccattcacacaaatgcaccgcaa

SEQ ID NO: 393286 - DNA, 30 bp, Artificial Sequence
  Synthetic oligonucleotide
gaaagttaatggctatactaccgaccgcaa

SEQ ID NO: 393287 - DNA, 30 bp, Artificial Sequence
  Synthetic oligonucleotide
aaccagtaactgagcccgtgcacgccgcaa

SEQ ID NO: 393288 - DNA, 30 bp, Artificial Sequence
  Synthetic oligonucleotide
cacgtaatacaagtcgaagtggcgccgcaa

SEQ ID NO: 393289 - DNA, 30 bp, Artificial Sequence
  Synthetic oligonucleotide
cttgggcttggtctgaggggggatccgcaa

SEQ ID NO: 393290 - DNA, 30 bp, Artificial Sequence
  Synthetic oligonucleotide
ctaatgattattgattagctccctccgcaa

SEQ ID NO: 393291 - DNA, 30 bp, Artificial Sequence
  Synthetic oligonucleotide
gagttgacgatatcatcaggaggagcgcaa

SEQ ID NO: 393292 - DNA, 30 bp, Artificial Sequence
  Synthetic oligonucleotide
tgatattgctgcctgtaggactgagcgcaa

SEQ ID NO: 393293 - DNA, 30 bp, Artificial Sequence
  Synthetic oligonucleotide
agaatagtaaatgcgtcccatttagcgcaa

SEQ ID NO: 393294 - DNA, 30 bp, Artificial Sequence
  Synthetic oligonucleotide
acttgggttcgatgcggatgtttagcgcaa

SEQ ID NO: 393295 - DNA, 30 bp, Artificial Sequence
  Synthetic oligonucleotide
gtactggccggtaccacgaagcgggcgcaa

SEQ ID NO: 393296 - DNA, 30 bp, Artificial Sequence
  Synthetic oligonucleotide
aggactccttattattgtatcctggcgcaa

SEQ ID NO: 393297 - DNA, 30 bp, Artificial Sequence
  Synthetic oligonucleotide
tcactactgactcacttgcacactgcgcaa

SEQ ID NO: 393298 - DNA, 30 bp, Artificial Sequence
  Synthetic oligonucleotide
aaggtcgactttaagatgggaagctcgcaa

SEQ ID NO: 393299 - DNA, 30 bp, Artificial Sequence
  Synthetic oligonucleotide
caggccgcggtaacatttgaaggctcgcaa

SEQ ID NO: 393300 - DNA, 30 bp, Artificial Sequence
  Synthetic oligonucleotide
tccgcaggcctccagtgtggtaagtcgcaa

SEQ ID NO: 393301 - DNA, 30 bp, Artificial Sequence
  Synthetic oligonucleotide
ggttcttattggtttacatgcccgtcgcaa

SEQ ID NO: 393302 - DNA, 30 bp, Artificial Sequence
  Synthetic oligonucleotide
cgtccagttcagtaccgttacgcgtcgcaa

SEQ ID NO: 393303 - DNA, 30 bp, Artificial Sequence
  Synthetic oligonucleotide
aaacgagaacgcttatatagggcttcgcaa

SEQ ID NO: 393304 - DNA, 30 bp, Artificial Sequence
  Synthetic oligonucleotide
agtcttccgaatgtatgtgaaggttcgcaa

SEQ ID NO: 393305 - DNA, 30 bp, Artificial Sequence
  Synthetic oligonucleotide
acacataggcaatcacgtcgaaaaaggcaa

SEQ ID NO: 393306 - DNA, 30 bp, Artificial Sequence
  Synthetic oligonucleotide
ttgagcaaaattatcttagtttcgaggcaa

SEQ ID NO: 393307 - DNA, 30 bp, Artificial Sequence
  Synthetic oligonucleotide
gtttccgaattcaagcgtattgggaggcaa

SEQ ID NO: 393308 - DNA, 30 bp, Artificial Sequence
  Synthetic oligonucleotide
tagtccggtgggtcggcggccattaggcaa

SEQ ID NO: 393309 - DNA, 30 bp, Artificial Sequence
  Synthetic oligonucleotide
gcattctaaggtagactctactttaggcaa

SEQ ID NO: 393310 - DNA, 30 bp, Artificial Sequence
  Synthetic oligonucleotide
ttctaccgggagtttctgtgagaacggcaa

SEQ ID NO: 393311 - DNA, 30 bp, Artificial Sequence
  Synthetic oligonucleotide
aggtagttgctcttagcgctagaacggcaa

SEQ ID NO: 393312 - DNA, 30 bp, Artificial Sequence
  Synthetic oligonucleotide
tgggtttggtagcggcgtgcaccacggcaa

SEQ ID NO: 393313 - DNA, 30 bp, Artificial Sequence
  Synthetic oligonucleotide
attataccatgttagttaggaggacggcaa

SEQ ID NO: 393314 - DNA, 30 bp, Artificial Sequence
  Synthetic oligonucleotide
cacagtcccgacccaaattgggtacggcaa

SEQ ID NO: 393315 - DNA, 30 bp, Artificial Sequence
  Synthetic oligonucleotide
gggccctggtaagaaatctgccaccggcaa

SEQ ID NO: 393316 - DNA, 30 bp, Artificial Sequence
  Synthetic oligonucleotide
ttataaccagactaatggctgtaccggcaa

SEQ ID NO: 393317 - DNA, 30 bp, Artificial Sequence
  Synthetic oligonucleotide
cgctgtcgtctaaggatgctaccccggcaa

SEQ ID NO: 393318 - DNA, 30 bp, Artificial Sequence
  Synthetic oligonucleotide
acacgcgtcagtcgtagggagatgcggcaa

SEQ ID NO: 393319 - DNA, 30 bp, Artificial Sequence
  Synthetic oligonucleotide
gccccacggcttggacttattcgtcggcaa

SEQ ID NO: 393320 - DNA, 30 bp, Artificial Sequence
  Synthetic oligonucleotide
tagcttatacgtacttgcaagggtcggcaa

SEQ ID NO: 393321 - DNA, 30 bp, Artificial Sequence
  Synthetic oligonucleotide
ttggcatggcgacggattatgggtcggcaa

SEQ ID NO: 393322 - DNA, 30 bp, Artificial Sequence
  Synthetic oligonucleotide
aagaagtcgcgacgcgaaccggttcggcaa

SEQ ID NO: 393323 - DNA, 30 bp, Artificial Sequence
  Synthetic oligonucleotide
ttgtgatgaccgccatttactacagggcaa

SEQ ID NO: 393324 - DNA, 30 bp, Artificial Sequence
  Synthetic oligonucleotide
aaactcgaattgcgctcctgcccagggcaa

SEQ ID NO: 393325 - DNA, 30 bp, Artificial Sequence
  Synthetic oligonucleotide
ccgactccagcagggcagatgccagggcaa

SEQ ID NO: 393326 - DNA, 30 bp, Artificial Sequence
  Synthetic oligonucleotide
ggggtacccagggcggggtttccagggcaa

SEQ ID NO: 393327 - DNA, 30 bp, Artificial Sequence
  Synthetic oligonucleotide
cgctgcgcattcaggaagtcgctagggcaa

SEQ ID NO: 393328 - DNA, 30 bp, Artificial Sequence
  Synthetic oligonucleotide
tcttctgcactctagtggcacgtcgggcaa

SEQ ID NO: 393329 - DNA, 30 bp, Artificial Sequence
  Synthetic oligonucleotide
agtttgtaacgttcccctgatttcgggcaa

SEQ ID NO: 393330 - DNA, 30 bp, Artificial Sequence
  Synthetic oligonucleotide
ctatttaaggtaaagtacaggcaggggcaa

SEQ ID NO: 393331 - DNA, 30 bp, Artificial Sequence
  Synthetic oligonucleotide
aggcatctcccgtcatttcgtacggggcaa

SEQ ID NO: 393332 - DNA, 30 bp, Artificial Sequence
  Synthetic oligonucleotide
agagggcaatggtccaacgggagggggcaa

SEQ ID NO: 393333 - DNA, 30 bp, Artificial Sequence
  Synthetic oligonucleotide
accaaaattgtttcggtgcatagggggcaa

SEQ ID NO: 393334 - DNA, 30 bp, Artificial Sequence
  Synthetic oligonucleotide
aagccccggattgtatactttcgggggcaa

SEQ ID NO: 393335 - DNA, 30 bp, Artificial Sequence
  Synthetic oligonucleotide
agtcccctgtcgtatgttccacatgggcaa

SEQ ID NO: 393336 - DNA, 30 bp, Artificial Sequence
  Synthetic oligonucleotide
acggcgggtctatcggcggaggctgggcaa

SEQ ID NO: 393337 - DNA, 30 bp, Artificial Sequence
  Synthetic oligonucleotide
aatggattttagctaggcgggcgatggcaa

SEQ ID NO: 393338 - DNA, 30 bp, Artificial Sequence
  Synthetic oligonucleotide
accaatctgccagccacgagtgcctggcaa

SEQ ID NO: 393339 - DNA, 30 bp, Artificial Sequence
  Synthetic oligonucleotide
cggccgaaccaaggcacatggatctggcaa

SEQ ID NO: 393340 - DNA, 30 bp, Artificial Sequence
  Synthetic oligonucleotide
ttaacagatacagtatgcttaacttggcaa

SEQ ID NO: 393341 - DNA, 30 bp, Artificial Sequence
  Synthetic oligonucleotide
ggcttcggtgtggccataaggcaaatgcaa

SEQ ID NO: 393342 - DNA, 30 bp, Artificial Sequence
  Synthetic oligonucleotide
aatgtggggcgtagaagcctagcaatgcaa

SEQ ID NO: 393343 - DNA, 30 bp, Artificial Sequence
  Synthetic oligonucleotide
attccggctccatcgattgcaaggatgcaa

SEQ ID NO: 393344 - DNA, 30 bp, Artificial Sequence
  Synthetic oligonucleotide
ctcgtgacacctgccgtcaatgttatgcaa

SEQ ID NO: 393345 - DNA, 30 bp, Artificial Sequence
  Synthetic oligonucleotide
gtgagcttggaagggcttatagaactgcaa

SEQ ID NO: 393346 - DNA, 30 bp, Artificial Sequence
  Synthetic oligonucleotide
agcatggcggcgattgcaaggttactgcaa

SEQ ID NO: 393347 - DNA, 30 bp, Artificial Sequence
  Synthetic oligonucleotide
ggctttttatgaaaatagatcaatctgcaa

SEQ ID NO: 393348 - DNA, 30 bp, Artificial Sequence
  Synthetic oligonucleotide
tgagctcatatagacgaggatactctgcaa

SEQ ID NO: 393349 - DNA, 30 bp, Artificial Sequence
  Synthetic oligonucleotide
cgcagatatgggtagagcaaataagtgcaa

SEQ ID NO: 393350 - DNA, 30 bp, Artificial Sequence
  Synthetic oligonucleotide
aaagttgggtctgaagcgtcggacgtgcaa

SEQ ID NO: 393351 - DNA, 30 bp, Artificial Sequence
  Synthetic oligonucleotide
aggaattactcactaggtgtcttcgtgcaa

SEQ ID NO: 393352 - DNA, 30 bp, Artificial Sequence
  Synthetic oligonucleotide
attcgcaaggtataacagagcaaggtgcaa

SEQ ID NO: 393353 - DNA, 30 bp, Artificial Sequence
  Synthetic oligonucleotide
gacaatcttggcagtcacctagatgtgcaa

SEQ ID NO: 393354 - DNA, 30 bp, Artificial Sequence
  Synthetic oligonucleotide
agaacgaggttgcgcggcgtttaattgcaa

SEQ ID NO: 393355 - DNA, 30 bp, Artificial Sequence
  Synthetic oligonucleotide
gttagacgggcggagtacggcatattgcaa

SEQ ID NO: 393356 - DNA, 30 bp, Artificial Sequence
  Synthetic oligonucleotide
tgatttgtcttggttgagaagttcttgcaa

SEQ ID NO: 393357 - DNA, 30 bp, Artificial Sequence
  Synthetic oligonucleotide
aacattcgagtggctttcctgcagttgcaa

SEQ ID NO: 393358 - DNA, 30 bp, Artificial Sequence
  Synthetic oligonucleotide
gatagcagccgttgccgatgttcgttgcaa

SEQ ID NO: 393359 - DNA, 30 bp, Artificial Sequence
  Synthetic oligonucleotide
aaccgattcattgatacgtaaaggttgcaa

SEQ ID NO: 393360 - DNA, 30 bp, Artificial Sequence
  Synthetic oligonucleotide
tctgtcggttgtaagggtgaattgttgcaa

SEQ ID NO: 393361 - DNA, 30 bp, Artificial Sequence
  Synthetic oligonucleotide
cttggacaatggtaccagttcttgttgcaa

SEQ ID NO: 393362 - DNA, 30 bp, Artificial Sequence
  Synthetic oligonucleotide
tgggcgtagtttaccaccagatctttgcaa

SEQ ID NO: 393363 - DNA, 30 bp, Artificial Sequence
  Synthetic oligonucleotide
ctccctttttaaagtgggagtgaaaatcaa

SEQ ID NO: 393364 - DNA, 30 bp, Artificial Sequence
  Synthetic oligonucleotide
gacctgttggttgggaccgggcacaatcaa

SEQ ID NO: 393365 - DNA, 30 bp, Artificial Sequence
  Synthetic oligonucleotide
aaacatatgaggtcaatgggccgcaatcaa

SEQ ID NO: 393366 - DNA, 30 bp, Artificial Sequence
  Synthetic oligonucleotide
atctcgatccttgacgtatccctcaatcaa

SEQ ID NO: 393367 - DNA, 30 bp, Artificial Sequence
  Synthetic oligonucleotide
tgacaattgatgcaggcgcgaacgaatcaa

SEQ ID NO: 393368 - DNA, 30 bp, Artificial Sequence
  Synthetic oligonucleotide
tttagtgccagagcggtgttaacgaatcaa

SEQ ID NO: 393369 - DNA, 30 bp, Artificial Sequence
  Synthetic oligonucleotide
tgcccctaatccatatcttaaccgaatcaa

SEQ ID NO: 393370 - DNA, 30 bp, Artificial Sequence
  Synthetic oligonucleotide
gcctttaatgcgcggttctaacggaatcaa

SEQ ID NO: 393371 - DNA, 30 bp, Artificial Sequence
  Synthetic oligonucleotide
tgccagaatgcgcgtaccggtttgaatcaa

SEQ ID NO: 393372 - DNA, 30 bp, Artificial Sequence
  Synthetic oligonucleotide
atagttacaagtcacggcgccgttaatcaa

SEQ ID NO: 393373 - DNA, 30 bp, Artificial Sequence
  Synthetic oligonucleotide
cacggtgtattctctgcgcgccaacatcaa

SEQ ID NO: 393374 - DNA, 30 bp, Artificial Sequence
  Synthetic oligonucleotide
taaaacccactggtcatggatggacatcaa

SEQ ID NO: 393375 - DNA, 30 bp, Artificial Sequence
  Synthetic oligonucleotide
gctatttgacttcaagattgttaccatcaa

SEQ ID NO: 393376 - DNA, 30 bp, Artificial Sequence
  Synthetic oligonucleotide
aaatcctctcacagcctccaaccccatcaa

SEQ ID NO: 393377 - DNA, 30 bp, Artificial Sequence
  Synthetic oligonucleotide
tctcctcctatcagaatcggtggccatcaa

SEQ ID NO: 393378 - DNA, 30 bp, Artificial Sequence
  Synthetic oligonucleotide
atgacttggactatgggttaggagcatcaa

SEQ ID NO: 393379 - DNA, 30 bp, Artificial Sequence
  Synthetic oligonucleotide
ggtcagttcaatattgtattttcgcatcaa

SEQ ID NO: 393380 - DNA, 30 bp, Artificial Sequence
  Synthetic oligonucleotide
gatcgcaccgtgtcgctctgtttgcatcaa

SEQ ID NO: 393381 - DNA, 30 bp, Artificial Sequence
  Synthetic oligonucleotide
taggtccctggcgttatgacttctcatcaa

SEQ ID NO: 393382 - DNA, 30 bp, Artificial Sequence
  Synthetic oligonucleotide
agagtacacagaggaggggtggcagatcaa

SEQ ID NO: 393383 - DNA, 30 bp, Artificial Sequence
  Synthetic oligonucleotide
ttaagacgctgcttcttcagcgacgatcaa

SEQ ID NO: 393384 - DNA, 30 bp, Artificial Sequence
  Synthetic oligonucleotide
ctacgttatttaatcttatcccaggatcaa

SEQ ID NO: 393385 - DNA, 30 bp, Artificial Sequence
  Synthetic oligonucleotide
ataatgcgcctcaaatctgctcgggatcaa

SEQ ID NO: 393386 - DNA, 30 bp, Artificial Sequence
  Synthetic oligonucleotide
cctttcgaaatgccggtgggaggggatcaa

SEQ ID NO: 393387 - DNA, 30 bp, Artificial Sequence
  Synthetic oligonucleotide
ataactttccattcactgtttcatgatcaa

SEQ ID NO: 393388 - DNA, 30 bp, Artificial Sequence
  Synthetic oligonucleotide
tcgcatctggattgcagaggttatgatcaa

SEQ ID NO: 393389 - DNA, 30 bp, Artificial Sequence
  Synthetic oligonucleotide
tagtcgggggaatgatcataatgtgatcaa

SEQ ID NO: 393390 - DNA, 30 bp, Artificial Sequence
  Synthetic oligonucleotide
tttcgcctataagggtaaactcactatcaa

SEQ ID NO: 393391 - DNA, 30 bp, Artificial Sequence
  Synthetic oligonucleotide
gctccgtgaacgagcgggtgacgctatcaa

SEQ ID NO: 393392 - DNA, 30 bp, Artificial Sequence
  Synthetic oligonucleotide
ttatagataggtcttagtagccggtatcaa

SEQ ID NO: 393393 - DNA, 30 bp, Artificial Sequence
  Synthetic oligonucleotide
gttgcgtagaacgcagaaatgtggtatcaa

SEQ ID NO: 393394 - DNA, 30 bp, Artificial Sequence
  Synthetic oligonucleotide
atgcagaaaaaagatgttcgcttttatcaa

SEQ ID NO: 393395 - DNA, 30 bp, Artificial Sequence
  Synthetic oligonucleotide
ttaccaataaggaagtgatggctgactcaa

SEQ ID NO: 393396 - DNA, 30 bp, Artificial Sequence
  Synthetic oligonucleotide
agctggtttccctagttgtaattgactcaa

SEQ ID NO: 393397 - DNA, 30 bp, Artificial Sequence
  Synthetic oligonucleotide
atcatactgacactcatatgtagtactcaa

SEQ ID NO: 393398 - DNA, 30 bp, Artificial Sequence
  Synthetic oligonucleotide
cgctggtagggctggtgctctaggcctcaa

SEQ ID NO: 393399 - DNA, 30 bp, Artificial Sequence
  Synthetic oligonucleotide
tcctgttcgcgtaagcccatggggcctcaa

SEQ ID NO: 393400 - DNA, 30 bp, Artificial Sequence
  Synthetic oligonucleotide
gaattgacccttaaataacagagtcctcaa

SEQ ID NO: 393401 - DNA, 30 bp, Artificial Sequence
  Synthetic oligonucleotide
atgatatgaattttgtaaagttttcctcaa

SEQ ID NO: 393402 - DNA, 30 bp, Artificial Sequence
  Synthetic oligonucleotide
cccatggcgtgatgattgcttctagctcaa

SEQ ID NO: 393403 - DNA, 30 bp, Artificial Sequence
  Synthetic oligonucleotide
atcggttctcggttagcccccttagctcaa

SEQ ID NO: 393404 - DNA, 30 bp, Artificial Sequence
  Synthetic oligonucleotide
gtgaggtttacgctgctggctaacgctcaa

SEQ ID NO: 393405 - DNA, 30 bp, Artificial Sequence
  Synthetic oligonucleotide
acggtatacattaactgcagtaacgctcaa

SEQ ID NO: 393406 - DNA, 30 bp, Artificial Sequence
  Synthetic oligonucleotide
gttgattgaaacgcatactcaggtgctcaa

SEQ ID NO: 393407 - DNA, 29 bp, Artificial Sequence
  Synthetic oligonucleotide
tggacgggcaagggacaacgggtgctcaa

SEQ ID NO: 393408 - DNA, 30 bp, Artificial Sequence
  Synthetic oligonucleotide
aataattatcgtttgcaccccgttgctcaa

SEQ ID NO: 393409 - DNA, 30 bp, Artificial Sequence
  Synthetic oligonucleotide
cagtgaataaaagcggttagcgttgctcaa

SEQ ID NO: 393410 - DNA, 30 bp, Artificial Sequence
  Synthetic oligonucleotide
ttatcctagatcgcatgtgttttatctcaa

SEQ ID NO: 393411 - DNA, 30 bp, Artificial Sequence
  Synthetic oligonucleotide
tcaagaggtaggaagtacggggtctctcaa

SEQ ID NO: 393412 - DNA, 30 bp, Artificial Sequence
  Synthetic oligonucleotide
gatccatatgttaaagtccccacgtctcaa

SEQ ID NO: 393413 - DNA, 30 bp, Artificial Sequence
  Synthetic oligonucleotide
gttaagcttgctttatttttacggtctcaa

SEQ ID NO: 393414 - DNA, 30 bp, Artificial Sequence
  Synthetic oligonucleotide
gcagcaaacagagatacatttgggtctcaa

SEQ ID NO: 393415 - DNA, 30 bp, Artificial Sequence
  Synthetic oligonucleotide
agaggcctagagaggtcttttttgtctcaa

SEQ ID NO: 393416 - DNA, 30 bp, Artificial Sequence
  Synthetic oligonucleotide
attaagtatatggatgataaacattctcaa

SEQ ID NO: 393417 - DNA, 30 bp, Artificial Sequence
  Synthetic oligonucleotide
agtcagcggtgcgtttagttgatttctcaa

SEQ ID NO: 393418 - DNA, 30 bp, Artificial Sequence
  Synthetic oligonucleotide
ctgaggggacacatcatggttgcaagtcaa

SEQ ID NO: 393419 - DNA, 30 bp, Artificial Sequence
  Synthetic oligonucleotide
ttaggcgtcccatgtcgaattgtaagtcaa

SEQ ID NO: 393420 - DNA, 30 bp, Artificial Sequence
  Synthetic oligonucleotide
cacgtcttgataacgctacgacacagtcaa

SEQ ID NO: 393421 - DNA, 30 bp, Artificial Sequence
  Synthetic oligonucleotide
gacattgattctaccattctggacagtcaa

SEQ ID NO: 393422 - DNA, 30 bp, Artificial Sequence
  Synthetic oligonucleotide
ggatctttagtaaataatgttatcagtcaa

SEQ ID NO: 393423 - DNA, 30 bp, Artificial Sequence
  Synthetic oligonucleotide
agaattcaacgccaggtctttcggagtcaa

SEQ ID NO: 393424 - DNA, 30 bp, Artificial Sequence
  Synthetic oligonucleotide
aaaaggctagttgagggccgcttgagtcaa

SEQ ID NO: 393425 - DNA, 30 bp, Artificial Sequence
  Synthetic oligonucleotide
acataccaccgcaactcggcccgtagtcaa

SEQ ID NO: 393426 - DNA, 30 bp, Artificial Sequence
  Synthetic oligonucleotide
catgtaaaattgtttgatgttagacgtcaa

SEQ ID NO: 393427 - DNA, 30 bp, Artificial Sequence
  Synthetic oligonucleotide
ctgcaggagctcatgcgcattacgcgtcaa

SEQ ID NO: 393428 - DNA, 30 bp, Artificial Sequence
  Synthetic oligonucleotide
gtatcattagcgggcccaagaatgcgtcaa

SEQ ID NO: 393429 - DNA, 30 bp, Artificial Sequence
  Synthetic oligonucleotide
agtcgtctcagagatggtccgcaaggtcaa

SEQ ID NO: 393430 - DNA, 30 bp, Artificial Sequence
  Synthetic oligonucleotide
gacccatcgtagaacgcctctaacggtcaa

SEQ ID NO: 393431 - DNA, 30 bp, Artificial Sequence
  Synthetic oligonucleotide
gcattcgcagagaatccaggagtcggtcaa

SEQ ID NO: 393432 - DNA, 30 bp, Artificial Sequence
  Synthetic oligonucleotide
catgaatttcccgaccgacaacagggtcaa

SEQ ID NO: 393433 - DNA, 30 bp, Artificial Sequence
  Synthetic oligonucleotide
gttagcgctagatagtaggatgcgggtcaa

SEQ ID NO: 393434 - DNA, 30 bp, Artificial Sequence
  Synthetic oligonucleotide
gcgccttttatcacctgtaaatggggtcaa

SEQ ID NO: 393435 - DNA, 30 bp, Artificial Sequence
  Synthetic oligonucleotide
cgctacaatattttatattaaaatggtcaa

SEQ ID NO: 393436 - DNA, 30 bp, Artificial Sequence
  Synthetic oligonucleotide
taagctcgttatcattaatgccatggtcaa

SEQ ID NO: 393437 - DNA, 30 bp, Artificial Sequence
  Synthetic oligonucleotide
gccatttccagtccaaagtcatctggtcaa

SEQ ID NO: 393438 - DNA, 30 bp, Artificial Sequence
  Synthetic oligonucleotide
gggacccaaccactaaatttacgtggtcaa

SEQ ID NO: 393439 - DNA, 30 bp, Artificial Sequence
  Synthetic oligonucleotide
gagcgacgtaagctcttcactgttggtcaa

SEQ ID NO: 393440 - DNA, 30 bp, Artificial Sequence
  Synthetic oligonucleotide
ccgtcaattcggcagcgggtcgcctgtcaa

SEQ ID NO: 393441 - DNA, 30 bp, Artificial Sequence
  Synthetic oligonucleotide
gcaccaatcggccacacgtcgggctgtcaa

SEQ ID NO: 393442 - DNA, 30 bp, Artificial Sequence
  Synthetic oligonucleotide
tcagtcgagcatgtttaacaccgaattcaa

SEQ ID NO: 393443 - DNA, 30 bp, Artificial Sequence
  Synthetic oligonucleotide
tgattggatccaacgtttcgttgcattcaa

SEQ ID NO: 393444 - DNA, 30 bp, Artificial Sequence
  Synthetic oligonucleotide
atggggacaaggtggtacgcatcgattcaa

SEQ ID NO: 393445 - DNA, 30 bp, Artificial Sequence
  Synthetic oligonucleotide
cgattttcacctctcgctaagaatattcaa

SEQ ID NO: 393446 - DNA, 30 bp, Artificial Sequence
  Synthetic oligonucleotide
caaactttggccggacgaagagcacttcaa

SEQ ID NO: 393447 - DNA, 31 bp, Artificial Sequence
  Synthetic oligonucleotide
actggtactaaatctttatcgtgcacttcaa

SEQ ID NO: 393448 - DNA, 30 bp, Artificial Sequence
  Synthetic oligonucleotide
agcttcccttctctgtatactatccttcaa

SEQ ID NO: 393449 - DNA, 30 bp, Artificial Sequence
  Synthetic oligonucleotide
gtaggttgtattgagctttctaagcttcaa

SEQ ID NO: 393450 - DNA, 29 bp, Artificial Sequence
  Synthetic oligonucleotide
catccgtagcccgtgccagggagcttcaa

SEQ ID NO: 393451 - DNA, 30 bp, Artificial Sequence
  Synthetic oligonucleotide
gtgtattacatgcggcaggcctagcttcaa

SEQ ID NO: 393452 - DNA, 30 bp, Artificial Sequence
  Synthetic oligonucleotide
tttacgggtcatacgctgcagacgcttcaa

SEQ ID NO: 393453 - DNA, 30 bp, Artificial Sequence
  Synthetic oligonucleotide
acacattgtcaggaattgacatggcttcaa

SEQ ID NO: 393454 - DNA, 30 bp, Artificial Sequence
  Synthetic oligonucleotide
aaaacataacgccatgcttggcatcttcaa

SEQ ID NO: 393455 - DNA, 30 bp, Artificial Sequence
  Synthetic oligonucleotide
aaattaatgtgtaatagtatagttcttcaa

SEQ ID NO: 393456 - DNA, 30 bp, Artificial Sequence
  Synthetic oligonucleotide
aatcattcgcacggtcgtcacgcagttcaa

SEQ ID NO: 393457 - DNA, 30 bp, Artificial Sequence
  Synthetic oligonucleotide
agctgtagtcgttccgggacgagagttcaa

SEQ ID NO: 393458 - DNA, 30 bp, Artificial Sequence
  Synthetic oligonucleotide
gacgaaggttacccctggtaagtagttcaa

SEQ ID NO: 393459 - DNA, 30 bp, Artificial Sequence
  Synthetic oligonucleotide
cggcgcctgcctggaagggggaccgttcaa

SEQ ID NO: 393460 - DNA, 30 bp, Artificial Sequence
  Synthetic oligonucleotide
gtcgccccgtaactgaagttgtccgttcaa

SEQ ID NO: 393461 - DNA, 30 bp, Artificial Sequence
  Synthetic oligonucleotide
gaatatacaatatgatgctgttgcgttcaa

SEQ ID NO: 393462 - DNA, 30 bp, Artificial Sequence
  Synthetic oligonucleotide
tgagtgtgaagttaagcgactgcggttcaa

SEQ ID NO: 393463 - DNA, 30 bp, Artificial Sequence
  Synthetic oligonucleotide
gtggtgccatgctttatagacatggttcaa

SEQ ID NO: 393464 - DNA, 30 bp, Artificial Sequence
  Synthetic oligonucleotide
tagcaccatttcgggtaacatgtggttcaa

SEQ ID NO: 393465 - DNA, 30 bp, Artificial Sequence
  Synthetic oligonucleotide
gcccgtgttgtgcaggtcggaacatttcaa

SEQ ID NO: 393466 - DNA, 30 bp, Artificial Sequence
  Synthetic oligonucleotide
aaaaactactgtaggaatatcgcctttcaa

SEQ ID NO: 393467 - DNA, 30 bp, Artificial Sequence
  Synthetic oligonucleotide
tcttaattaacacggagtcacgtgtttcaa

SEQ ID NO: 393468 - DNA, 29 bp, Artificial Sequence
  Synthetic oligonucleotide
gaacacgcaggacgatatttgattttcaa

SEQ ID NO: 393469 - DNA, 30 bp, Artificial Sequence
  Synthetic oligonucleotide
tagggtcccttcgttaacgtcgcttttcaa

SEQ ID NO: 393470 - DNA, 30 bp, Artificial Sequence
  Synthetic oligonucleotide
acgccgcgtaatgtctagcactgttttcaa

SEQ ID NO: 393471 - DNA, 27 bp, Artificial Sequence
  Synthetic oligonucleotide
gtactctttcaagttggatcaaaagaa

SEQ ID NO: 393472 - DNA, 29 bp, Artificial Sequence
  Synthetic oligonucleotide
ggctagggggtaggagtcgccccaaagaa

SEQ ID NO: 393473 - DNA, 31 bp, Artificial Sequence
  Synthetic oligonucleotide
aaacaccagtttgtgtgtgtggaataaagaa

SEQ ID NO: 393474 - DNA, 30 bp, Artificial Sequence
  Synthetic oligonucleotide
tcatttctggacatcgtgttttaacaagaa

SEQ ID NO: 393475 - DNA, 30 bp, Artificial Sequence
  Synthetic oligonucleotide
accattggaggcccggagggggcacaagaa

SEQ ID NO: 393476 - DNA, 30 bp, Artificial Sequence
  Synthetic oligonucleotide
cttagtacattttaataagaacgacaagaa

SEQ ID NO: 393477 - DNA, 30 bp, Artificial Sequence
  Synthetic oligonucleotide
actttgtggtaaatgttaagcttacaagaa

SEQ ID NO: 393478 - DNA, 30 bp, Artificial Sequence
  Synthetic oligonucleotide
accacttccagtattttctatacccaagaa

SEQ ID NO: 393479 - DNA, 30 bp, Artificial Sequence
  Synthetic oligonucleotide
gaggaggagctctttggttcttgccaagaa

SEQ ID NO: 393480 - DNA, 30 bp, Artificial Sequence
  Synthetic oligonucleotide
tattggagtcttacgcgcgcctgtcaagaa

SEQ ID NO: 393481 - DNA, 30 bp, Artificial Sequence
  Synthetic oligonucleotide
gggtcttacgaaagcacttcggttcaagaa

SEQ ID NO: 393482 - DNA, 30 bp, Artificial Sequence
  Synthetic oligonucleotide
gttatttctacggaggaatgtgaagaagaa

SEQ ID NO: 393483 - DNA, 30 bp, Artificial Sequence
  Synthetic oligonucleotide
ggtgcgggagcgggcggagtaagagaagaa

SEQ ID NO: 393484 - DNA, 30 bp, Artificial Sequence
  Synthetic oligonucleotide
gcctcaaattcggcttgcgctagcgaagaa

SEQ ID NO: 393485 - DNA, 30 bp, Artificial Sequence
  Synthetic oligonucleotide
ctccgtcagacgctcagatggcactaagaa

SEQ ID NO: 393486 - DNA, 30 bp, Artificial Sequence
  Synthetic oligonucleotide
actctagctggacgaccgctctgctaagaa

SEQ ID NO: 393487 - DNA, 30 bp, Artificial Sequence
  Synthetic oligonucleotide
cagtcaatcatactccaccgtaggtaagaa

SEQ ID NO: 393488 - DNA, 30 bp, Artificial Sequence
  Synthetic oligonucleotide
tggcccggttcaacgaacgttggttaagaa

SEQ ID NO: 393489 - DNA, 30 bp, Artificial Sequence
  Synthetic oligonucleotide
gtgccgaatcgttgaaggaatctttaagaa

SEQ ID NO: 393490 - DNA, 30 bp, Artificial Sequence
  Synthetic oligonucleotide
ataaaataacgcgtagaacatctttaagaa

SEQ ID NO: 393491 - DNA, 30 bp, Artificial Sequence
  Synthetic oligonucleotide
atactcaaagtcaactattcggtttaagaa

SEQ ID NO: 393492 - DNA, 30 bp, Artificial Sequence
  Synthetic oligonucleotide
gtacaatatactggcaataggttttaagaa

SEQ ID NO: 393493 - DNA, 30 bp, Artificial Sequence
  Synthetic oligonucleotide
gattgtggggcgatccttcttttttaagaa

SEQ ID NO: 393494 - DNA, 30 bp, Artificial Sequence
  Synthetic oligonucleotide
gttattgatctcacccaaataacaacagaa

SEQ ID NO: 393495 - DNA, 30 bp, Artificial Sequence
  Synthetic oligonucleotide
ttacatatgtttacggacgccgctacagaa

SEQ ID NO: 393496 - DNA, 30 bp, Artificial Sequence
  Synthetic oligonucleotide
ttatacctcgacgagcaacagcagccagaa

SEQ ID NO: 393497 - DNA, 30 bp, Artificial Sequence
  Synthetic oligonucleotide
agcaatcgttgaacaccgcttgggccagaa

SEQ ID NO: 393498 - DNA, 30 bp, Artificial Sequence
  Synthetic oligonucleotide
atcctgtcctggacggatcccatgccagaa

SEQ ID NO: 393499 - DNA, 30 bp, Artificial Sequence
  Synthetic oligonucleotide
attatctttgggacgatgtcggctccagaa

SEQ ID NO: 393500 - DNA, 30 bp, Artificial Sequence
  Synthetic oligonucleotide
agggaggaggaaggtcgcggggcagcagaa

SEQ ID NO: 393501 - DNA, 30 bp, Artificial Sequence
  Synthetic oligonucleotide
gacgccgctcactgcaacgcgggcgcagaa

SEQ ID NO: 393502 - DNA, 30 bp, Artificial Sequence
  Synthetic oligonucleotide
tgatacttacttatcatgacgtgcgcagaa

SEQ ID NO: 393503 - DNA, 30 bp, Artificial Sequence
  Synthetic oligonucleotide
gcattctcggtaaacactagagtcgcagaa

SEQ ID NO: 393504 - DNA, 30 bp, Artificial Sequence
  Synthetic oligonucleotide
ccggcacacggagcttggctctcggcagaa

SEQ ID NO: 393505 - DNA, 30 bp, Artificial Sequence
  Synthetic oligonucleotide
cgaacgatgcgtgtctgggtattgtcagaa

SEQ ID NO: 393506 - DNA, 30 bp, Artificial Sequence
  Synthetic oligonucleotide
ataaaaatgccctttcaacgttattcagaa

SEQ ID NO: 393507 - DNA, 30 bp, Artificial Sequence
  Synthetic oligonucleotide
acaactcaccaattctcgtgtctttcagaa

SEQ ID NO: 393508 - DNA, 30 bp, Artificial Sequence
  Synthetic oligonucleotide
catctgagtgtcgcgcgtcatgtttcagaa

SEQ ID NO: 393509 - DNA, 30 bp, Artificial Sequence
  Synthetic oligonucleotide
tataggcatggggactgtgaattttcagaa

SEQ ID NO: 393510 - DNA, 30 bp, Artificial Sequence
  Synthetic oligonucleotide
aggatgtcgggtgcacgtatgagaagagaa

SEQ ID NO: 393511 - DNA, 30 bp, Artificial Sequence
  Synthetic oligonucleotide
tactgactggtctcgcacttgagcagagaa

SEQ ID NO: 393512 - DNA, 30 bp, Artificial Sequence
  Synthetic oligonucleotide
aattgggtactaggcgagtaatatagagaa

SEQ ID NO: 393513 - DNA, 30 bp, Artificial Sequence
  Synthetic oligonucleotide
gcacatggagctctcggatgaggtagagaa

SEQ ID NO: 393514 - DNA, 30 bp, Artificial Sequence
  Synthetic oligonucleotide
actcaagaaccgaccttgcttggacgagaa

SEQ ID NO: 393515 - DNA, 30 bp, Artificial Sequence
  Synthetic oligonucleotide
gcgtttctattgtctaatataatacgagaa

SEQ ID NO: 393516 - DNA, 30 bp, Artificial Sequence
  Synthetic oligonucleotide
ctattataacatgcccccgagctacgagaa

SEQ ID NO: 393517 - DNA, 30 bp, Artificial Sequence
  Synthetic oligonucleotide
gagagagagcgtccagacgtatcccgagaa

SEQ ID NO: 393518 - DNA, 30 bp, Artificial Sequence
  Synthetic oligonucleotide
gtctataacggggggcgatacaggcgagaa

SEQ ID NO: 393519 - DNA, 30 bp, Artificial Sequence
  Synthetic oligonucleotide
tataattttgtagacacaatccggcgagaa

SEQ ID NO: 393520 - DNA, 30 bp, Artificial Sequence
  Synthetic oligonucleotide
ttgagaagaatgccagtgtaacatcgagaa

SEQ ID NO: 393521 - DNA, 30 bp, Artificial Sequence
  Synthetic oligonucleotide
ttcagtatttatggtgaaagcgatcgagaa

SEQ ID NO: 393522 - DNA, 30 bp, Artificial Sequence
  Synthetic oligonucleotide
ttggcatactctggactctgtgatcgagaa

SEQ ID NO: 393523 - DNA, 30 bp, Artificial Sequence
  Synthetic oligonucleotide
cagcttgtagttggtcctagtaggggagaa

SEQ ID NO: 393524 - DNA, 30 bp, Artificial Sequence
  Synthetic oligonucleotide
tctaatagattggcgacgccaatgggagaa

SEQ ID NO: 393525 - DNA, 30 bp, Artificial Sequence
  Synthetic oligonucleotide
acaggtatacgggtgattttcactggagaa

SEQ ID NO: 393526 - DNA, 31 bp, Artificial Sequence
  Synthetic oligonucleotide
ggccctttattagtaaagacggtgtggagaa

SEQ ID NO: 393527 - DNA, 30 bp, Artificial Sequence
  Synthetic oligonucleotide
gaaaatgacttggctacgggctttggagaa

SEQ ID NO: 393528 - DNA, 30 bp, Artificial Sequence
  Synthetic oligonucleotide
gccctttatattaaaagagtcaaatgagaa

SEQ ID NO: 393529 - DNA, 30 bp, Artificial Sequence
  Synthetic oligonucleotide
tatagcagcgcctcgtcggcctgatgagaa

SEQ ID NO: 393530 - DNA, 30 bp, Artificial Sequence
  Synthetic oligonucleotide
cggtagttcagagaagttccaggctgagaa

SEQ ID NO: 393531 - DNA, 30 bp, Artificial Sequence
  Synthetic oligonucleotide
gccgtcccgttgttgacctggggctgagaa

SEQ ID NO: 393532 - DNA, 30 bp, Artificial Sequence
  Synthetic oligonucleotide
aattagcgcattcaagggctttggtgagaa

SEQ ID NO: 393533 - DNA, 30 bp, Artificial Sequence
  Synthetic oligonucleotide
gctagcggtgtctccggcgaccattgagaa

SEQ ID NO: 393534 - DNA, 30 bp, Artificial Sequence
  Synthetic oligonucleotide
ttatccatttatccatagtggtattgagaa

SEQ ID NO: 393535 - DNA, 30 bp, Artificial Sequence
  Synthetic oligonucleotide
aggagctttcgaggagagtgtttttgagaa

SEQ ID NO: 393536 - DNA, 30 bp, Artificial Sequence
  Synthetic oligonucleotide
agtcgctcagcgtaagttgcattaatagaa

SEQ ID NO: 393537 - DNA, 30 bp, Artificial Sequence
  Synthetic oligonucleotide
gatggtcatttttgagttgcaaccatagaa

SEQ ID NO: 393538 - DNA, 30 bp, Artificial Sequence
  Synthetic oligonucleotide
acatagtggaggtttgacggtctcatagaa

SEQ ID NO: 393539 - DNA, 30 bp, Artificial Sequence
  Synthetic oligonucleotide
cgcggctagaatatcgctacgtggatagaa

SEQ ID NO: 393540 - DNA, 30 bp, Artificial Sequence
  Synthetic oligonucleotide
tgcagggtctcctcggtactatctatagaa

SEQ ID NO: 393541 - DNA, 30 bp, Artificial Sequence
  Synthetic oligonucleotide
ataaaggctgctagatatatttctatagaa

SEQ ID NO: 393542 - DNA, 30 bp, Artificial Sequence
  Synthetic oligonucleotide
ccagctcaataaagtcatactattatagaa

SEQ ID NO: 393543 - DNA, 30 bp, Artificial Sequence
  Synthetic oligonucleotide
ctaagctagaacccgaatggagttatagaa

SEQ ID NO: 393544 - DNA, 30 bp, Artificial Sequence
  Synthetic oligonucleotide
tagcgcgggtcctggggcatagttatagaa

SEQ ID NO: 393545 - DNA, 30 bp, Artificial Sequence
  Synthetic oligonucleotide
tacacggtacttccgtgaatcaaactagaa

SEQ ID NO: 393546 - DNA, 30 bp, Artificial Sequence
  Synthetic oligonucleotide
gacagtgtttttagagtaaggcaactagaa

SEQ ID NO: 393547 - DNA, 30 bp, Artificial Sequence
  Synthetic oligonucleotide
gcagaagacagtatacaagctatactagaa

SEQ ID NO: 393548 - DNA, 30 bp, Artificial Sequence
  Synthetic oligonucleotide
gctaagtaacagattctatgaatgctagaa

SEQ ID NO: 393549 - DNA, 30 bp, Artificial Sequence
  Synthetic oligonucleotide
tccgccagtgtatcgacacgcgtgctagaa

SEQ ID NO: 393550 - DNA, 30 bp, Artificial Sequence
  Synthetic oligonucleotide
tatcaaccatggcatgcggcaaatctagaa

SEQ ID NO: 393551 - DNA, 30 bp, Artificial Sequence
  Synthetic oligonucleotide
ctttcttgaatctcccggccccatctagaa

SEQ ID NO: 393552 - DNA, 30 bp, Artificial Sequence
  Synthetic oligonucleotide
caatagcattcgccacggctgattctagaa

SEQ ID NO: 393553 - DNA, 30 bp, Artificial Sequence
  Synthetic oligonucleotide
ccccttacgtggctcatagggcaagtagaa

SEQ ID NO: 393554 - DNA, 30 bp, Artificial Sequence
  Synthetic oligonucleotide
tgggtccgcgccatagatatgcacgtagaa

SEQ ID NO: 393555 - DNA, 30 bp, Artificial Sequence
  Synthetic oligonucleotide
tcttttgatgagttggtcattgacgtagaa

SEQ ID NO: 393556 - DNA, 30 bp, Artificial Sequence
  Synthetic oligonucleotide
acaattacggttctccctcttgacgtagaa

SEQ ID NO: 393557 - DNA, 30 bp, Artificial Sequence
  Synthetic oligonucleotide
ggtccctacttggtataagcatccgtagaa

SEQ ID NO: 393558 - DNA, 30 bp, Artificial Sequence
  Synthetic oligonucleotide
atttcccacgtattgaccacttgcgtagaa

SEQ ID NO: 393559 - DNA, 30 bp, Artificial Sequence
  Synthetic oligonucleotide
gtgtatccacgggtattgcagcgcttagaa

SEQ ID NO: 393560 - DNA, 30 bp, Artificial Sequence
  Synthetic oligonucleotide
atgactgggtggggctttgggtagttagaa

SEQ ID NO: 393561 - DNA, 30 bp, Artificial Sequence
  Synthetic oligonucleotide
catttcgcgccgtatgttattcggttagaa

SEQ ID NO: 393562 - DNA, 30 bp, Artificial Sequence
  Synthetic oligonucleotide
tcagaaccagtaactgcccggtctttagaa

SEQ ID NO: 393563 - DNA, 30 bp, Artificial Sequence
  Synthetic oligonucleotide
gggataattcaaaagaacaattctttagaa

SEQ ID NO: 393564 - DNA, 30 bp, Artificial Sequence
  Synthetic oligonucleotide
catcagggagggctaagtactgaaaacgaa

SEQ ID NO: 393565 - DNA, 30 bp, Artificial Sequence
  Synthetic oligonucleotide
gaactggacggggtggcagtcacaaacgaa

SEQ ID NO: 393566 - DNA, 30 bp, Artificial Sequence
  Synthetic oligonucleotide
atttcatcgctgtaagtccagttaaacgaa

SEQ ID NO: 393567 - DNA, 30 bp, Artificial Sequence
  Synthetic oligonucleotide
tgatatggaaaacatacaaaccacaacgaa

SEQ ID NO: 393568 - DNA, 30 bp, Artificial Sequence
  Synthetic oligonucleotide
tgattgtcatgaactcgatagcccaacgaa

SEQ ID NO: 393569 - DNA, 30 bp, Artificial Sequence
  Synthetic oligonucleotide
ttgaagaattagaactttatgggcaacgaa

SEQ ID NO: 393570 - DNA, 30 bp, Artificial Sequence
  Synthetic oligonucleotide
gaaagggcccaaatgagcttattgaacgaa

SEQ ID NO: 393571 - DNA, 30 bp, Artificial Sequence
  Synthetic oligonucleotide
cgtaccagtatttgtggtacaaataacgaa

SEQ ID NO: 393572 - DNA, 30 bp, Artificial Sequence
  Synthetic oligonucleotide
ctgcccacgttaattgttgactaacacgaa

SEQ ID NO: 393573 - DNA, 30 bp, Artificial Sequence
  Synthetic oligonucleotide
cggttacttgctagcaagacgccacacgaa

SEQ ID NO: 393574 - DNA, 30 bp, Artificial Sequence
  Synthetic oligonucleotide
ccaagctgtgttacgtaaacgtaccacgaa

SEQ ID NO: 393575 - DNA, 30 bp, Artificial Sequence
  Synthetic oligonucleotide
ttctgtatgattaatcgataaccccacgaa

SEQ ID NO: 393576 - DNA, 30 bp, Artificial Sequence
  Synthetic oligonucleotide
gtagtgactcagagcaaacgggcccacgaa

SEQ ID NO: 393577 - DNA, 30 bp, Artificial Sequence
  Synthetic oligonucleotide
ctgtcagcttaagtatcagttgcccacgaa

SEQ ID NO: 393578 - DNA, 30 bp, Artificial Sequence
  Synthetic oligonucleotide
cgtccatcgggggacttttctgctcacgaa

SEQ ID NO: 393579 - DNA, 30 bp, Artificial Sequence
  Synthetic oligonucleotide
aaggtttgcatggtattagaagttcacgaa

SEQ ID NO: 393580 - DNA, 30 bp, Artificial Sequence
  Synthetic oligonucleotide
cggtaggaatcctcagttttagttcacgaa

SEQ ID NO: 393581 - DNA, 30 bp, Artificial Sequence
  Synthetic oligonucleotide
acgaataaaagacatcgaagggttcacgaa

SEQ ID NO: 393582 - DNA, 30 bp, Artificial Sequence
  Synthetic oligonucleotide
agtgtcttttttacggatagaggagacgaa

SEQ ID NO: 393583 - DNA, 30 bp, Artificial Sequence
  Synthetic oligonucleotide
gagttgttgcggcatggaagtctagacgaa

SEQ ID NO: 393584 - DNA, 30 bp, Artificial Sequence
  Synthetic oligonucleotide
actctcggaatttttcagccagtagacgaa

SEQ ID NO: 393585 - DNA, 30 bp, Artificial Sequence
  Synthetic oligonucleotide
taaatggccatatttgttttccacgacgaa

SEQ ID NO: 393586 - DNA, 30 bp, Artificial Sequence
  Synthetic oligonucleotide
tcaggatgctccggagttttgtccgacgaa

SEQ ID NO: 393587 - DNA, 30 bp, Artificial Sequence
  Synthetic oligonucleotide
ttttacaaattagcgttcgtgagggacgaa

SEQ ID NO: 393588 - DNA, 30 bp, Artificial Sequence
  Synthetic oligonucleotide
gcgcgatcacaacccaacgcaggggacgaa

SEQ ID NO: 393589 - DNA, 30 bp, Artificial Sequence
  Synthetic oligonucleotide
tttgatttctcagggttgtaaagtgacgaa

SEQ ID NO: 393590 - DNA, 30 bp, Artificial Sequence
  Synthetic oligonucleotide
ttgccatctagtcgagagtggggtgacgaa

SEQ ID NO: 393591 - DNA, 30 bp, Artificial Sequence
  Synthetic oligonucleotide
gtaaaacttttggcgtgccctgtctacgaa

SEQ ID NO: 393592 - DNA, 30 bp, Artificial Sequence
  Synthetic oligonucleotide
cgttccctgataacggaacggtagtacgaa

SEQ ID NO: 393593 - DNA, 29 bp, Artificial Sequence
  Synthetic oligonucleotide
ttcagcattcaggggaacaatcgtacgaa

SEQ ID NO: 393594 - DNA, 30 bp, Artificial Sequence
  Synthetic oligonucleotide
aatatctatagtttgctaataccttacgaa

SEQ ID NO: 393595 - DNA, 30 bp, Artificial Sequence
  Synthetic oligonucleotide
cgggcgctggtatatcaacagtcaaccgaa

SEQ ID NO: 393596 - DNA, 30 bp, Artificial Sequence
  Synthetic oligonucleotide
accatccagggatgccggatatacaccgaa

SEQ ID NO: 393597 - DNA, 30 bp, Artificial Sequence
  Synthetic oligonucleotide
ttcatccaatgcgtgttgtgaaagaccgaa

SEQ ID NO: 393598 - DNA, 30 bp, Artificial Sequence
  Synthetic oligonucleotide
tcaggcatagatggcgggcgttagaccgaa

SEQ ID NO: 393599 - DNA, 30 bp, Artificial Sequence
  Synthetic oligonucleotide
gtgtatgtcagttatctgttgccgaccgaa

SEQ ID NO: 393600 - DNA, 30 bp, Artificial Sequence
  Synthetic oligonucleotide
acgttatgcttgacactggcccctaccgaa

SEQ ID NO: 393601 - DNA, 29 bp, Artificial Sequence
  Synthetic oligonucleotide
tgtttgacgccgcgaattgagctaccgaa

SEQ ID NO: 393602 - DNA, 30 bp, Artificial Sequence
  Synthetic oligonucleotide
gccactgggcatatatgcgtcagtaccgaa

SEQ ID NO: 393603 - DNA, 30 bp, Artificial Sequence
  Synthetic oligonucleotide
cctggagatagttcggtctgcacgcccgaa

SEQ ID NO: 393604 - DNA, 30 bp, Artificial Sequence
  Synthetic oligonucleotide
taacactttatgtgtgatcggtggcccgaa

SEQ ID NO: 393605 - DNA, 30 bp, Artificial Sequence
  Synthetic oligonucleotide
ggggaaacaggttttcctagatgtcccgaa

SEQ ID NO: 393606 - DNA, 30 bp, Artificial Sequence
  Synthetic oligonucleotide
gtggagcgccaatcggttttgcgagccgaa

SEQ ID NO: 393607 - DNA, 30 bp, Artificial Sequence
  Synthetic oligonucleotide
ttaggtccgccgggggttcgaatagccgaa

SEQ ID NO: 393608 - DNA, 30 bp, Artificial Sequence
  Synthetic oligonucleotide
tcgagatgtcagatgtcgtcgttagccgaa

SEQ ID NO: 393609 - DNA, 30 bp, Artificial Sequence
  Synthetic oligonucleotide
tggtcttgccgactagtacggcacgccgaa

SEQ ID NO: 393610 - DNA, 30 bp, Artificial Sequence
  Synthetic oligonucleotide
gcgttttttggcaggatattatgcgccgaa

SEQ ID NO: 393611 - DNA, 30 bp, Artificial Sequence
  Synthetic oligonucleotide
cgacacagattccggccatggacggccgaa

SEQ ID NO: 393612 - DNA, 30 bp, Artificial Sequence
  Synthetic oligonucleotide
atctgtacgccatagtaactcccggccgaa

SEQ ID NO: 393613 - DNA, 30 bp, Artificial Sequence
  Synthetic oligonucleotide
aactctccagctgtccgtgaaaactccgaa

SEQ ID NO: 393614 - DNA, 30 bp, Artificial Sequence
  Synthetic oligonucleotide
ccgccgcgggccgagagtactatttccgaa

SEQ ID NO: 393615 - DNA, 30 bp, Artificial Sequence
  Synthetic oligonucleotide
caggcccccgcggagctctgcattagcgaa

SEQ ID NO: 393616 - DNA, 30 bp, Artificial Sequence
  Synthetic oligonucleotide
tctacacgaggaccgccagtacgacgcgaa

SEQ ID NO: 393617 - DNA, 30 bp, Artificial Sequence
  Synthetic oligonucleotide
tattgccgtgcctgcctcctggaccgcgaa

SEQ ID NO: 393618 - DNA, 30 bp, Artificial Sequence
  Synthetic oligonucleotide
accacgatatgtggtttcaaacgccgcgaa

SEQ ID NO: 393619 - DNA, 30 bp, Artificial Sequence
  Synthetic oligonucleotide
gcgttggaatattaagaaccgatgcgcgaa

SEQ ID NO: 393620 - DNA, 30 bp, Artificial Sequence
  Synthetic oligonucleotide
aggctggccccccctttacggactcgcgaa

SEQ ID NO: 393621 - DNA, 30 bp, Artificial Sequence
  Synthetic oligonucleotide
ctctaactgccgtcgcgagatactcgcgaa

SEQ ID NO: 393622 - DNA, 30 bp, Artificial Sequence
  Synthetic oligonucleotide
gtataagagatttttcttctgccaggcgaa

SEQ ID NO: 393623 - DNA, 30 bp, Artificial Sequence
  Synthetic oligonucleotide
gagtatgccaccttctcggcaataggcgaa

SEQ ID NO: 393624 - DNA, 30 bp, Artificial Sequence
  Synthetic oligonucleotide
ttagttctgtttggatggtggaccggcgaa

SEQ ID NO: 393625 - DNA, 30 bp, Artificial Sequence
  Synthetic oligonucleotide
tatgaatgggaccgaacctcttatggcgaa

SEQ ID NO: 393626 - DNA, 30 bp, Artificial Sequence
  Synthetic oligonucleotide
atcatagtaaaaatttggtggtgtggcgaa

SEQ ID NO: 393627 - DNA, 30 bp, Artificial Sequence
  Synthetic oligonucleotide
cgcggcatttagcccaaccgtacatgcgaa

SEQ ID NO: 393628 - DNA, 30 bp, Artificial Sequence
  Synthetic oligonucleotide
tgctagcaatgccgtggacaccgctgcgaa

SEQ ID NO: 393629 - DNA, 30 bp, Artificial Sequence
  Synthetic oligonucleotide
ccacctgtttagaggagaccggtgtgcgaa

SEQ ID NO: 393630 - DNA, 30 bp, Artificial Sequence
  Synthetic oligonucleotide
cccccggtacgttacccgggtgattgcgaa

SEQ ID NO: 393631 - DNA, 30 bp, Artificial Sequence
  Synthetic oligonucleotide
ttactatcctgagactagcatccttgcgaa

SEQ ID NO: 393632 - DNA, 30 bp, Artificial Sequence
  Synthetic oligonucleotide
aaaacactacatcagtatttcatttgcgaa

SEQ ID NO: 393633 - DNA, 30 bp, Artificial Sequence
  Synthetic oligonucleotide
ggtctaatattctgagagggtttttgcgaa

SEQ ID NO: 393634 - DNA, 30 bp, Artificial Sequence
  Synthetic oligonucleotide
gccgactagacgttcgagtattgaatcgaa

SEQ ID NO: 393635 - DNA, 30 bp, Artificial Sequence
  Synthetic oligonucleotide
agccccgttcgacatgtctttagcatcgaa

SEQ ID NO: 393636 - DNA, 30 bp, Artificial Sequence
  Synthetic oligonucleotide
ctgcgccaaaaacgcaccacgtcgatcgaa

SEQ ID NO: 393637 - DNA, 30 bp, Artificial Sequence
  Synthetic oligonucleotide
cgcttccgccttgatggtgtgatgatcgaa

SEQ ID NO: 393638 - DNA, 30 bp, Artificial Sequence
  Synthetic oligonucleotide
gaagtaagtgtgccagtattgatgatcgaa

SEQ ID NO: 393639 - DNA, 30 bp, Artificial Sequence
  Synthetic oligonucleotide
gttacagttgacggtaatagcgtgatcgaa

SEQ ID NO: 393640 - DNA, 30 bp, Artificial Sequence
  Synthetic oligonucleotide
gattgatactatcgggcgaacaatatcgaa

SEQ ID NO: 393641 - DNA, 30 bp, Artificial Sequence
  Synthetic oligonucleotide
accgtttcacgacgcttctttaatatcgaa

SEQ ID NO: 393642 - DNA, 30 bp, Artificial Sequence
  Synthetic oligonucleotide
attggaagcataaggaattccgatatcgaa

SEQ ID NO: 393643 - DNA, 30 bp, Artificial Sequence
  Synthetic oligonucleotide
tttcatcaacgttagacggagcctatcgaa

SEQ ID NO: 393644 - DNA, 30 bp, Artificial Sequence
  Synthetic oligonucleotide
tatatcactctctaagttgaagctatcgaa

SEQ ID NO: 393645 - DNA, 30 bp, Artificial Sequence
  Synthetic oligonucleotide
gttttaacaacagtaaacttgggactcgaa

SEQ ID NO: 393646 - DNA, 29 bp, Artificial Sequence
  Synthetic oligonucleotide
agtgtgagattcaaggggagtacctcgaa

SEQ ID NO: 393647 - DNA, 30 bp, Artificial Sequence
  Synthetic oligonucleotide
gagtgccattgcacgaagatatggctcgaa

SEQ ID NO: 393648 - DNA, 30 bp, Artificial Sequence
  Synthetic oligonucleotide
ctagaacggtaaggattttccgttctcgaa

SEQ ID NO: 393649 - DNA, 30 bp, Artificial Sequence
  Synthetic oligonucleotide
aggctagctgaggggaatgtttttctcgaa

SEQ ID NO: 393650 - DNA, 30 bp, Artificial Sequence
  Synthetic oligonucleotide
tatagtcgggacctcgcttcagacgtcgaa

SEQ ID NO: 393651 - DNA, 30 bp, Artificial Sequence
  Synthetic oligonucleotide
gagcggcccgtctatggcggcaccgtcgaa

SEQ ID NO: 393652 - DNA, 30 bp, Artificial Sequence
  Synthetic oligonucleotide
atgatatagttacctgcagtcttcgtcgaa

SEQ ID NO: 393653 - DNA, 25 bp, Artificial Sequence
  Synthetic oligonucleotide
gatggtaaagttaagagttgtcgaa

SEQ ID NO: 393654 - DNA, 30 bp, Artificial Sequence
  Synthetic oligonucleotide
tctactttcgtatactacctggttgtcgaa

SEQ ID NO: 393655 - DNA, 30 bp, Artificial Sequence
  Synthetic oligonucleotide
tgtaaaatcacactgcgaactcgattcgaa

SEQ ID NO: 393656 - DNA, 30 bp, Artificial Sequence
  Synthetic oligonucleotide
ctctaaaattcaattctactgacgttcgaa

SEQ ID NO: 393657 - DNA, 31 bp, Artificial Sequence
  Synthetic oligonucleotide
tgttcaccacactattgaatctttgttcgaa

SEQ ID NO: 393658 - DNA, 30 bp, Artificial Sequence
  Synthetic oligonucleotide
ttttcaacaggctaattgatcattttcgaa

SEQ ID NO: 393659 - DNA, 30 bp, Artificial Sequence
  Synthetic oligonucleotide
gaatagaaatttggtgactcagttttcgaa

SEQ ID NO: 393660 - DNA, 30 bp, Artificial Sequence
  Synthetic oligonucleotide
gttatagtttggtgtcacagtcaaaaggaa

SEQ ID NO: 393661 - DNA, 30 bp, Artificial Sequence
  Synthetic oligonucleotide
tttatcggaatggttgaatcaggaaaggaa

SEQ ID NO: 393662 - DNA, 30 bp, Artificial Sequence
  Synthetic oligonucleotide
ggcaggagactatttcatataggaaaggaa

SEQ ID NO: 393663 - DNA, 30 bp, Artificial Sequence
  Synthetic oligonucleotide
aggggtctaggaatggtgacgtggaaggaa

SEQ ID NO: 393664 - DNA, 30 bp, Artificial Sequence
  Synthetic oligonucleotide
gtaccgcattttgtaactgcactgaaggaa

SEQ ID NO: 393665 - DNA, 30 bp, Artificial Sequence
  Synthetic oligonucleotide
cgtagttatgtctgtatcgtacttaaggaa

SEQ ID NO: 393666 - DNA, 30 bp, Artificial Sequence
  Synthetic oligonucleotide
aattatgccaggtattcttctcgacaggaa

SEQ ID NO: 393667 - DNA, 30 bp, Artificial Sequence
  Synthetic oligonucleotide
ctcgctccgatacgcgtctcacgccaggaa

SEQ ID NO: 393668 - DNA, 30 bp, Artificial Sequence
  Synthetic oligonucleotide
tccccgtgttagcttataatagcgcaggaa

SEQ ID NO: 393669 - DNA, 30 bp, Artificial Sequence
  Synthetic oligonucleotide
atgccagtgacccagtggctagcgcaggaa

SEQ ID NO: 393670 - DNA, 30 bp, Artificial Sequence
  Synthetic oligonucleotide
taccccatcatccgtacctctcggcaggaa

SEQ ID NO: 393671 - DNA, 30 bp, Artificial Sequence
  Synthetic oligonucleotide
ttgcgcatagcatacagcatagtgcaggaa

SEQ ID NO: 393672 - DNA, 30 bp, Artificial Sequence
  Synthetic oligonucleotide
catttgcccatcgagctatttttgcaggaa

SEQ ID NO: 393673 - DNA, 30 bp, Artificial Sequence
  Synthetic oligonucleotide
gggcgtcatggtgcttgaggttatcaggaa

SEQ ID NO: 393674 - DNA, 30 bp, Artificial Sequence
  Synthetic oligonucleotide
aaaaattatcgctaagtgtaacgagaggaa

SEQ ID NO: 393675 - DNA, 30 bp, Artificial Sequence
  Synthetic oligonucleotide
acctctgtcgcaacccaaacgttagaggaa

SEQ ID NO: 393676 - DNA, 30 bp, Artificial Sequence
  Synthetic oligonucleotide
gtatatgttcccgtatgggctatcgaggaa

SEQ ID NO: 393677 - DNA, 30 bp, Artificial Sequence
  Synthetic oligonucleotide
cagcaccagtttgacgcacccacggaggaa

SEQ ID NO: 393678 - DNA, 30 bp, Artificial Sequence
  Synthetic oligonucleotide
gtggtgagtcgcagcgattaaactgaggaa

SEQ ID NO: 393679 - DNA, 30 bp, Artificial Sequence
  Synthetic oligonucleotide
cgcttcaacgcatctcaattacgtgaggaa

SEQ ID NO: 393680 - DNA, 30 bp, Artificial Sequence
  Synthetic oligonucleotide
catgacaggtagcagatccttattgaggaa

SEQ ID NO: 393681 - DNA, 30 bp, Artificial Sequence
  Synthetic oligonucleotide
tgtggatgcctacctagatcctcttaggaa

SEQ ID NO: 393682 - DNA, 30 bp, Artificial Sequence
  Synthetic oligonucleotide
gacttttccacggaggttccgcgaacggaa

SEQ ID NO: 393683 - DNA, 30 bp, Artificial Sequence
  Synthetic oligonucleotide
agacacgcacagcgcctggcagacacggaa

SEQ ID NO: 393684 - DNA, 30 bp, Artificial Sequence
  Synthetic oligonucleotide
ttatcgatgcttccagtaaaatgcacggaa

SEQ ID NO: 393685 - DNA, 30 bp, Artificial Sequence
  Synthetic oligonucleotide
aatgtcccgataagacataattgcacggaa

SEQ ID NO: 393686 - DNA, 30 bp, Artificial Sequence
  Synthetic oligonucleotide
tctgttacagatgaattaccgcatacggaa

SEQ ID NO: 393687 - DNA, 30 bp, Artificial Sequence
  Synthetic oligonucleotide
ggggattgatgaaagacacctggaccggaa

SEQ ID NO: 393688 - DNA, 30 bp, Artificial Sequence
  Synthetic oligonucleotide
tgtgggcgcgtaactttgaatgacccggaa

SEQ ID NO: 393689 - DNA, 29 bp, Artificial Sequence
  Synthetic oligonucleotide
actctactgttagccgaagcaccccggaa

SEQ ID NO: 393690 - DNA, 30 bp, Artificial Sequence
  Synthetic oligonucleotide
gattatgctcctgaggtgatcggcccggaa

SEQ ID NO: 393691 - DNA, 30 bp, Artificial Sequence
  Synthetic oligonucleotide
tttcaagggatcattagagacttcccggaa

SEQ ID NO: 393692 - DNA, 30 bp, Artificial Sequence
  Synthetic oligonucleotide
gtttgcaaaatccccgccagcacgccggaa

SEQ ID NO: 393693 - DNA, 30 bp, Artificial Sequence
  Synthetic oligonucleotide
tgtaaggccccgtcccccgtacggccggaa

SEQ ID NO: 393694 - DNA, 30 bp, Artificial Sequence
  Synthetic oligonucleotide
tatatgtgccagtgcatggtgttgccggaa

SEQ ID NO: 393695 - DNA, 30 bp, Artificial Sequence
  Synthetic oligonucleotide
aatccatacccgtgtagcatctatccggaa

SEQ ID NO: 393696 - DNA, 30 bp, Artificial Sequence
  Synthetic oligonucleotide
tttaagaagggtcttgagaccaaagcggaa

SEQ ID NO: 393697 - DNA, 30 bp, Artificial Sequence
  Synthetic oligonucleotide
cttcatacagggccccttacgaaagcggaa

SEQ ID NO: 393698 - DNA, 30 bp, Artificial Sequence
  Synthetic oligonucleotide
cggacccatccgtcgaacgctgcagcggaa

SEQ ID NO: 393699 - DNA, 30 bp, Artificial Sequence
  Synthetic oligonucleotide
cgagttgcatgttaggctggcgacgcggaa

SEQ ID NO: 393700 - DNA, 29 bp, Artificial Sequence
  Synthetic oligonucleotide
tctggtgtgcgtaaagcactcccgcggaa

SEQ ID NO: 393701 - DNA, 30 bp, Artificial Sequence
  Synthetic oligonucleotide
aggcttctccttaccggtaaccgggcggaa

SEQ ID NO: 393702 - DNA, 30 bp, Artificial Sequence
  Synthetic oligonucleotide
agattagttccagccaaactagatgcggaa

SEQ ID NO: 393703 - DNA, 30 bp, Artificial Sequence
  Synthetic oligonucleotide
gctttggtatagcagtttgtaactgcggaa

SEQ ID NO: 393704 - DNA, 30 bp, Artificial Sequence
  Synthetic oligonucleotide
agaatacaattcgtaagattttttgcggaa

SEQ ID NO: 393705 - DNA, 30 bp, Artificial Sequence
  Synthetic oligonucleotide
ccccaacgtgaaattttcgagagatcggaa

SEQ ID NO: 393706 - DNA, 30 bp, Artificial Sequence
  Synthetic oligonucleotide
agcaccgtaggcgtctgcaggcattcggaa

SEQ ID NO: 393707 - DNA, 30 bp, Artificial Sequence
  Synthetic oligonucleotide
taatagttagactcgcgacgttgttcggaa

SEQ ID NO: 393708 - DNA, 30 bp, Artificial Sequence
  Synthetic oligonucleotide
aataaaccacccgtgggctatatttcggaa

SEQ ID NO: 393709 - DNA, 30 bp, Artificial Sequence
  Synthetic oligonucleotide
ttacggcgagcaccgttgaggttttcggaa

SEQ ID NO: 393710 - DNA, 30 bp, Artificial Sequence
  Synthetic oligonucleotide
aatcggggtacgatgggtgttcaaagggaa

SEQ ID NO: 393711 - DNA, 30 bp, Artificial Sequence
  Synthetic oligonucleotide
tcacccgcaagttatcgacggtgcagggaa

SEQ ID NO: 393712 - DNA, 30 bp, Artificial Sequence
  Synthetic oligonucleotide
aactctgctcagcgggtatgtagtagggaa

SEQ ID NO: 393713 - DNA, 30 bp, Artificial Sequence
  Synthetic oligonucleotide
gtagtacgtcaggttctcactcgtagggaa

SEQ ID NO: 393714 - DNA, 30 bp, Artificial Sequence
  Synthetic oligonucleotide
ttgcgggggcgtcaccagcgctaccgggaa

SEQ ID NO: 393715 - DNA, 30 bp, Artificial Sequence
  Synthetic oligonucleotide
tgaacttattatagggtcctagtccgggaa

SEQ ID NO: 393716 - DNA, 30 bp, Artificial Sequence
  Synthetic oligonucleotide
cgcattagtcgtcgggcagcatgaggggaa

SEQ ID NO: 393717 - DNA, 30 bp, Artificial Sequence
  Synthetic oligonucleotide
aatcagccgttgtaagtatgctgaggggaa

SEQ ID NO: 393718 - DNA, 30 bp, Artificial Sequence
  Synthetic oligonucleotide
ttcctcgtttggagtgcgttgataggggaa

SEQ ID NO: 393719 - DNA, 30 bp, Artificial Sequence
  Synthetic oligonucleotide
tcattacccgtatataacccactcggggaa

SEQ ID NO: 393720 - DNA, 30 bp, Artificial Sequence
  Synthetic oligonucleotide
agtgatagctgcccagtgtaattcggggaa

SEQ ID NO: 393721 - DNA, 30 bp, Artificial Sequence
  Synthetic oligonucleotide
cccacgtggtgcctgtcgggattcggggaa

SEQ ID NO: 393722 - DNA, 30 bp, Artificial Sequence
  Synthetic oligonucleotide
gattttcaaaaaccaagtgaccagggggaa

SEQ ID NO: 393723 - DNA, 30 bp, Artificial Sequence
  Synthetic oligonucleotide
aaagactttgcgatgcctgcttggggggaa

SEQ ID NO: 393724 - DNA, 30 bp, Artificial Sequence
  Synthetic oligonucleotide
agccacctattcgttcataagaatggggaa

SEQ ID NO: 393725 - DNA, 30 bp, Artificial Sequence
  Synthetic oligonucleotide
gtggctagatgtaaaggtcgggatggggaa

SEQ ID NO: 393726 - DNA, 30 bp, Artificial Sequence
  Synthetic oligonucleotide
atctactgtgaacaaaagaaaggtggggaa

SEQ ID NO: 393727 - DNA, 30 bp, Artificial Sequence
  Synthetic oligonucleotide
gaatcgaggtacccagaccgacaatgggaa

SEQ ID NO: 393728 - DNA, 30 bp, Artificial Sequence
  Synthetic oligonucleotide
attggaattagacctggcatcacatgggaa

SEQ ID NO: 393729 - DNA, 30 bp, Artificial Sequence
  Synthetic oligonucleotide
cctctgattaccgtattcctggcatgggaa

SEQ ID NO: 393730 - DNA, 30 bp, Artificial Sequence
  Synthetic oligonucleotide
tggatgtctgacgggcgagttatatgggaa

SEQ ID NO: 393731 - DNA, 30 bp, Artificial Sequence
  Synthetic oligonucleotide
gagaaacgcggtcgtgcccagatctgggaa

SEQ ID NO: 393732 - DNA, 30 bp, Artificial Sequence
  Synthetic oligonucleotide
cggctccagacggcgcctgttgcgtgggaa

SEQ ID NO: 393733 - DNA, 30 bp, Artificial Sequence
  Synthetic oligonucleotide
ctgtcggactgcgtaccttgcgtgtgggaa

SEQ ID NO: 393734 - DNA, 30 bp, Artificial Sequence
  Synthetic oligonucleotide
caccgattcgtagtacggtgtgtgtgggaa

SEQ ID NO: 393735 - DNA, 30 bp, Artificial Sequence
  Synthetic oligonucleotide
tactgggaaagtaatcatgtgttgtgggaa

SEQ ID NO: 393736 - DNA, 30 bp, Artificial Sequence
  Synthetic oligonucleotide
cgcttgacggaaaccctgccgacttgggaa

SEQ ID NO: 393737 - DNA, 30 bp, Artificial Sequence
  Synthetic oligonucleotide
gttgcccattgtcaggggttttgttgggaa

SEQ ID NO: 393738 - DNA, 30 bp, Artificial Sequence
  Synthetic oligonucleotide
gcgcaaatgccatgtgggtcgtcaatggaa

SEQ ID NO: 393739 - DNA, 30 bp, Artificial Sequence
  Synthetic oligonucleotide
aaatagtatacctggagattaaccatggaa

SEQ ID NO: 393740 - DNA, 30 bp, Artificial Sequence
  Synthetic oligonucleotide
ggttttgaagtgaccgagccgttcatggaa

SEQ ID NO: 393741 - DNA, 30 bp, Artificial Sequence
  Synthetic oligonucleotide
aattcaaatcctaataggtcctagatggaa

SEQ ID NO: 393742 - DNA, 30 bp, Artificial Sequence
  Synthetic oligonucleotide
ggtagtttctatgggatcctagcgatggaa

SEQ ID NO: 393743 - DNA, 30 bp, Artificial Sequence
  Synthetic oligonucleotide
gcgtgccatactcggaggttcagtatggaa

SEQ ID NO: 393744 - DNA, 30 bp, Artificial Sequence
  Synthetic oligonucleotide
acgtatcgccgtagcacctcaggtatggaa

SEQ ID NO: 393745 - DNA, 30 bp, Artificial Sequence
  Synthetic oligonucleotide
tatgcaaatgattgatatcttacactggaa

SEQ ID NO: 393746 - DNA, 30 bp, Artificial Sequence
  Synthetic oligonucleotide
ttcgttcgtatcctggggatacgactggaa

SEQ ID NO: 393747 - DNA, 30 bp, Artificial Sequence
  Synthetic oligonucleotide
gttggtcgcaccttactaggcggactggaa

SEQ ID NO: 393748 - DNA, 30 bp, Artificial Sequence
  Synthetic oligonucleotide
ttagagttcccaggctagcacaacctggaa

SEQ ID NO: 393749 - DNA, 30 bp, Artificial Sequence
  Synthetic oligonucleotide
tcgggtgggtatcataggcgcggcctggaa

SEQ ID NO: 393750 - DNA, 30 bp, Artificial Sequence
  Synthetic oligonucleotide
cttttctcgtccgccgagtagggcctggaa

SEQ ID NO: 393751 - DNA, 30 bp, Artificial Sequence
  Synthetic oligonucleotide
tgctaagaggttgaaatagaaatcctggaa

SEQ ID NO: 393752 - DNA, 30 bp, Artificial Sequence
  Synthetic oligonucleotide
caccaagcgacctagggttaggtgctggaa

SEQ ID NO: 393753 - DNA, 30 bp, Artificial Sequence
  Synthetic oligonucleotide
attattggggaaggctaaacccctctggaa

SEQ ID NO: 393754 - DNA, 30 bp, Artificial Sequence
  Synthetic oligonucleotide
tagcctatccgcaacaaaccccgagtggaa

SEQ ID NO: 393755 - DNA, 30 bp, Artificial Sequence
  Synthetic oligonucleotide
gagatgcaggacctggttatgatagtggaa

SEQ ID NO: 393756 - DNA, 30 bp, Artificial Sequence
  Synthetic oligonucleotide
tagccggaccgctccggctacgccgtggaa

SEQ ID NO: 393757 - DNA, 30 bp, Artificial Sequence
  Synthetic oligonucleotide
tacataaattacatggactcgtcggtggaa

SEQ ID NO: 393758 - DNA, 30 bp, Artificial Sequence
  Synthetic oligonucleotide
ttgcttgtggccacatactcaagggtggaa

SEQ ID NO: 393759 - DNA, 30 bp, Artificial Sequence
  Synthetic oligonucleotide
catctagaatcattgccttcgatggtggaa

SEQ ID NO: 393760 - DNA, 30 bp, Artificial Sequence
  Synthetic oligonucleotide
ggctaatgtgtataaacaaagcaattggaa

SEQ ID NO: 393761 - DNA, 30 bp, Artificial Sequence
  Synthetic oligonucleotide
ttgccgatcccgtcccccatcaacttggaa

SEQ ID NO: 393762 - DNA, 30 bp, Artificial Sequence
  Synthetic oligonucleotide
gtgtcgctttatctcgggcctgccttggaa

SEQ ID NO: 393763 - DNA, 30 bp, Artificial Sequence
  Synthetic oligonucleotide
ctgacctggctgaggaagctatagttggaa

SEQ ID NO: 393764 - DNA, 30 bp, Artificial Sequence
  Synthetic oligonucleotide
agtttaggtaggcttcaggtgtctttggaa

SEQ ID NO: 393765 - DNA, 30 bp, Artificial Sequence
  Synthetic oligonucleotide
taggctagctaccggaaatagtgtttggaa

SEQ ID NO: 393766 - DNA, 30 bp, Artificial Sequence
  Synthetic oligonucleotide
tgcatcagggtttttgataagacaaatgaa

SEQ ID NO: 393767 - DNA, 30 bp, Artificial Sequence
  Synthetic oligonucleotide
ttcgctgcggcattaggccgtcacaatgaa

SEQ ID NO: 393768 - DNA, 30 bp, Artificial Sequence
  Synthetic oligonucleotide
catcatttcgaaagtacactgtacaatgaa

SEQ ID NO: 393769 - DNA, 30 bp, Artificial Sequence
  Synthetic oligonucleotide
ttcagttttaatctagtggtgacgaatgaa

SEQ ID NO: 393770 - DNA, 30 bp, Artificial Sequence
  Synthetic oligonucleotide
taatcgggtttgggtcgctagaataatgaa

SEQ ID NO: 393771 - DNA, 30 bp, Artificial Sequence
  Synthetic oligonucleotide
cgccgtattacagggaattcccgacatgaa

SEQ ID NO: 393772 - DNA, 30 bp, Artificial Sequence
  Synthetic oligonucleotide
gttcgtctttcaggtccgggcgaccatgaa

SEQ ID NO: 393773 - DNA, 30 bp, Artificial Sequence
  Synthetic oligonucleotide
cttttaacttccggtaggggggcccatgaa

SEQ ID NO: 393774 - DNA, 30 bp, Artificial Sequence
  Synthetic oligonucleotide
gttgtcatctttagtcgctctggtcatgaa

SEQ ID NO: 393775 - DNA, 30 bp, Artificial Sequence
  Synthetic oligonucleotide
acgatttccgatcgtcaacgcgttcatgaa

SEQ ID NO: 393776 - DNA, 30 bp, Artificial Sequence
  Synthetic oligonucleotide
acattcacttccccactgataaaagatgaa

SEQ ID NO: 393777 - DNA, 30 bp, Artificial Sequence
  Synthetic oligonucleotide
aagaatttaatcggattattagcagatgaa

SEQ ID NO: 393778 - DNA, 30 bp, Artificial Sequence
  Synthetic oligonucleotide
ctcggactcgcactaatccggttagatgaa

SEQ ID NO: 393779 - DNA, 30 bp, Artificial Sequence
  Synthetic oligonucleotide
accgcggttctgttcataaaaatcgatgaa

SEQ ID NO: 393780 - DNA, 30 bp, Artificial Sequence
  Synthetic oligonucleotide
tcacgacttgagttgagcgcctcatatgaa

SEQ ID NO: 393781 - DNA, 31 bp, Artificial Sequence
  Synthetic oligonucleotide
aaccgatcagggaatgtaaagcggatatgaa

SEQ ID NO: 393782 - DNA, 30 bp, Artificial Sequence
  Synthetic oligonucleotide
cccgtgagctttaacttttggcagtatgaa

SEQ ID NO: 393783 - DNA, 30 bp, Artificial Sequence
  Synthetic oligonucleotide
gctaactgatgagccgccacgtagtatgaa

SEQ ID NO: 393784 - DNA, 30 bp, Artificial Sequence
  Synthetic oligonucleotide
cccactcgggagccgtatcctatgtatgaa

SEQ ID NO: 393785 - DNA, 30 bp, Artificial Sequence
  Synthetic oligonucleotide
tatcacccgtaggttctgctccattatgaa

SEQ ID NO: 393786 - DNA, 30 bp, Artificial Sequence
  Synthetic oligonucleotide
aaacttaacactctgcagatttgttatgaa

SEQ ID NO: 393787 - DNA, 30 bp, Artificial Sequence
  Synthetic oligonucleotide
tttacgaggtaaacgcaggtccacactgaa

SEQ ID NO: 393788 - DNA, 30 bp, Artificial Sequence
  Synthetic oligonucleotide
tccccagtgtgattaccagcatccactgaa

SEQ ID NO: 393789 - DNA, 30 bp, Artificial Sequence
  Synthetic oligonucleotide
gcgaccgcttgtgcacatctaggcactgaa

SEQ ID NO: 393790 - DNA, 30 bp, Artificial Sequence
  Synthetic oligonucleotide
tcaggtagtcgatcgttttcgaggactgaa

SEQ ID NO: 393791 - DNA, 30 bp, Artificial Sequence
  Synthetic oligonucleotide
agcccctccggccactctgtacgtactgaa

SEQ ID NO: 393792 - DNA, 30 bp, Artificial Sequence
  Synthetic oligonucleotide
gatgatcgctttgcgttgcttattactgaa

SEQ ID NO: 393793 - DNA, 30 bp, Artificial Sequence
  Synthetic oligonucleotide
atccaaaagtagggcagcctgtttactgaa

SEQ ID NO: 393794 - DNA, 30 bp, Artificial Sequence
  Synthetic oligonucleotide
caagatgtcgttaaccagtcgacacctgaa

SEQ ID NO: 393795 - DNA, 30 bp, Artificial Sequence
  Synthetic oligonucleotide
cctttgacagctccccaactcagacctgaa

SEQ ID NO: 393796 - DNA, 30 bp, Artificial Sequence
  Synthetic oligonucleotide
ctttgtattgagcgatcaagcatccctgaa

SEQ ID NO: 393797 - DNA, 30 bp, Artificial Sequence
  Synthetic oligonucleotide
tcacagacgcacccgagacgcgggcctgaa

SEQ ID NO: 393798 - DNA, 30 bp, Artificial Sequence
  Synthetic oligonucleotide
tctaccgctgggattgagtcttccgctgaa

SEQ ID NO: 393799 - DNA, 30 bp, Artificial Sequence
  Synthetic oligonucleotide
ccagttactatcttggtcctaggggctgaa

SEQ ID NO: 393800 - DNA, 30 bp, Artificial Sequence
  Synthetic oligonucleotide
aatcgtaggacaatacacctcaatgctgaa

SEQ ID NO: 393801 - DNA, 30 bp, Artificial Sequence
  Synthetic oligonucleotide
tggcccagggttcatggacatcctgctgaa

SEQ ID NO: 393802 - DNA, 30 bp, Artificial Sequence
  Synthetic oligonucleotide
cgttctttaatcaccgggaccggtgctgaa

SEQ ID NO: 393803 - DNA, 30 bp, Artificial Sequence
  Synthetic oligonucleotide
gtccgtttgtaaattcttaggattgctgaa

SEQ ID NO: 393804 - DNA, 30 bp, Artificial Sequence
  Synthetic oligonucleotide
tcgttaaagtactcggcctgctcatctgaa

SEQ ID NO: 393805 - DNA, 30 bp, Artificial Sequence
  Synthetic oligonucleotide
acgtaagtgtctcaatgagacgcttctgaa

SEQ ID NO: 393806 - DNA, 30 bp, Artificial Sequence
  Synthetic oligonucleotide
tattccctcgtcctagccatgtcaagtgaa

SEQ ID NO: 393807 - DNA, 30 bp, Artificial Sequence
  Synthetic oligonucleotide
taggctttggcctgacaaacatgaagtgaa

SEQ ID NO: 393808 - DNA, 30 bp, Artificial Sequence
  Synthetic oligonucleotide
aatcaacatttaaggatcgcaaacagtgaa

SEQ ID NO: 393809 - DNA, 30 bp, Artificial Sequence
  Synthetic oligonucleotide
accatagcacttgggaggaagcgcagtgaa

SEQ ID NO: 393810 - DNA, 30 bp, Artificial Sequence
  Synthetic oligonucleotide
tctcaatttctggtaccttcttggagtgaa

SEQ ID NO: 393811 - DNA, 30 bp, Artificial Sequence
  Synthetic oligonucleotide
aacactgtttgccccacatggtctagtgaa

SEQ ID NO: 393812 - DNA, 30 bp, Artificial Sequence
  Synthetic oligonucleotide
ggatgcaggttatgcgctcaccgacgtgaa

SEQ ID NO: 393813 - DNA, 30 bp, Artificial Sequence
  Synthetic oligonucleotide
ggcttatgaatagtctcactgggacgtgaa

SEQ ID NO: 393814 - DNA, 30 bp, Artificial Sequence
  Synthetic oligonucleotide
attagttcaccagcaaaagcatagcgtgaa

SEQ ID NO: 393815 - DNA, 30 bp, Artificial Sequence
  Synthetic oligonucleotide
acaaggaaattcacacgggttgggcgtgaa

SEQ ID NO: 393816 - DNA, 30 bp, Artificial Sequence
  Synthetic oligonucleotide
ccggatatttggattacacggggtcgtgaa

SEQ ID NO: 393817 - DNA, 30 bp, Artificial Sequence
  Synthetic oligonucleotide
tcagtagtctccgtgaaaactcttcgtgaa

SEQ ID NO: 393818 - DNA, 30 bp, Artificial Sequence
  Synthetic oligonucleotide
agcggtcccaattttcgtgcgaggggtgaa

SEQ ID NO: 393819 - DNA, 30 bp, Artificial Sequence
  Synthetic oligonucleotide
atcatacaaggagagtatgtacatggtgaa

SEQ ID NO: 393820 - DNA, 30 bp, Artificial Sequence
  Synthetic oligonucleotide
tgtatcgttttggttctcacgtgtggtgaa

SEQ ID NO: 393821 - DNA, 30 bp, Artificial Sequence
  Synthetic oligonucleotide
taaaaaggtctgatggaagggtttggtgaa

SEQ ID NO: 393822 - DNA, 30 bp, Artificial Sequence
  Synthetic oligonucleotide
tggccgcgtactccgcgcatccaatgtgaa

SEQ ID NO: 393823 - DNA, 30 bp, Artificial Sequence
  Synthetic oligonucleotide
agtgcgacgcagaaatgattagaatgtgaa

SEQ ID NO: 393824 - DNA, 30 bp, Artificial Sequence
  Synthetic oligonucleotide
gcagctggttattacaatcactcctgtgaa

SEQ ID NO: 393825 - DNA, 30 bp, Artificial Sequence
  Synthetic oligonucleotide
cacctcatggtactgcttctgaagtgtgaa

SEQ ID NO: 393826 - DNA, 30 bp, Artificial Sequence
  Synthetic oligonucleotide
cacggagaccggcaacgggtaccgtgtgaa

SEQ ID NO: 393827 - DNA, 30 bp, Artificial Sequence
  Synthetic oligonucleotide
tgacgcaaagaccttacgtggtggtgtgaa

SEQ ID NO: 393828 - DNA, 30 bp, Artificial Sequence
  Synthetic oligonucleotide
tgcttacttagaatcgtttaaaattgtgaa

SEQ ID NO: 393829 - DNA, 30 bp, Artificial Sequence
  Synthetic oligonucleotide
ttttgttgcgtgtaatcaacaacttgtgaa

SEQ ID NO: 393830 - DNA, 30 bp, Artificial Sequence
  Synthetic oligonucleotide
cgggctcaggggcgggaccgccgttgtgaa

SEQ ID NO: 393831 - DNA, 30 bp, Artificial Sequence
  Synthetic oligonucleotide
accatggctactaggatgacggaaattgaa

SEQ ID NO: 393832 - DNA, 30 bp, Artificial Sequence
  Synthetic oligonucleotide
gtccgcatttcaacatatcggcgaattgaa

SEQ ID NO: 393833 - DNA, 30 bp, Artificial Sequence
  Synthetic oligonucleotide
gccgcatgaatcagtggagcttacattgaa

SEQ ID NO: 393834 - DNA, 30 bp, Artificial Sequence
  Synthetic oligonucleotide
tgggtttgcaagatatcctcaggcattgaa

SEQ ID NO: 393835 - DNA, 30 bp, Artificial Sequence
  Synthetic oligonucleotide
tgagtgaccgtggctgtatccgatattgaa

SEQ ID NO: 393836 - DNA, 30 bp, Artificial Sequence
  Synthetic oligonucleotide
ctgatgtcaaggagtgcttaatatattgaa

SEQ ID NO: 393837 - DNA, 30 bp, Artificial Sequence
  Synthetic oligonucleotide
aaaaagacgcccgagtgcaagtttattgaa

SEQ ID NO: 393838 - DNA, 30 bp, Artificial Sequence
  Synthetic oligonucleotide
agcgcatgggagggcctttaaaaacttgaa

SEQ ID NO: 393839 - DNA, 29 bp, Artificial Sequence
  Synthetic oligonucleotide
acgcacagtccttattgtaacgacttgaa

SEQ ID NO: 393840 - DNA, 30 bp, Artificial Sequence
  Synthetic oligonucleotide
agcgacctcgttactataagtatacttgaa

SEQ ID NO: 393841 - DNA, 30 bp, Artificial Sequence
  Synthetic oligonucleotide
actcccaggggtgccgacaaacaccttgaa

SEQ ID NO: 393842 - DNA, 30 bp, Artificial Sequence
  Synthetic oligonucleotide
gaaagcggtgattgatttttgcaccttgaa

SEQ ID NO: 393843 - DNA, 30 bp, Artificial Sequence
  Synthetic oligonucleotide
tggtcacgtttgctagagggataccttgaa

SEQ ID NO: 393844 - DNA, 30 bp, Artificial Sequence
  Synthetic oligonucleotide
taggacgccgcagaaaagtagccccttgaa

SEQ ID NO: 393845 - DNA, 30 bp, Artificial Sequence
  Synthetic oligonucleotide
ttaattcatagggtttccaggacgcttgaa

SEQ ID NO: 393846 - DNA, 30 bp, Artificial Sequence
  Synthetic oligonucleotide
ctcgaagccgggtatcgacgaccgcttgaa

SEQ ID NO: 393847 - DNA, 30 bp, Artificial Sequence
  Synthetic oligonucleotide
gaccagccacctgagatgtagcatcttgaa

SEQ ID NO: 393848 - DNA, 30 bp, Artificial Sequence
  Synthetic oligonucleotide
agcgcgccattggattgatggactcttgaa

SEQ ID NO: 393849 - DNA, 30 bp, Artificial Sequence
  Synthetic oligonucleotide
ataattcgcgtatgatgttggcttcttgaa

SEQ ID NO: 393850 - DNA, 30 bp, Artificial Sequence
  Synthetic oligonucleotide
caggatggtctagagcagctacaagttgaa

SEQ ID NO: 393851 - DNA, 30 bp, Artificial Sequence
  Synthetic oligonucleotide
ctccgaactgaaggatcccaagcagttgaa

SEQ ID NO: 393852 - DNA, 30 bp, Artificial Sequence
  Synthetic oligonucleotide
gcgtgtcatacccacctctaaatagttgaa

SEQ ID NO: 393853 - DNA, 30 bp, Artificial Sequence
  Synthetic oligonucleotide
gtagaagggcacgacagttttttagttgaa

SEQ ID NO: 393854 - DNA, 30 bp, Artificial Sequence
  Synthetic oligonucleotide
taagcgatccacggtatagcgcccgttgaa

SEQ ID NO: 393855 - DNA, 30 bp, Artificial Sequence
  Synthetic oligonucleotide
tctgggtttgcgacaaacactagggttgaa

SEQ ID NO: 393856 - DNA, 30 bp, Artificial Sequence
  Synthetic oligonucleotide
aattacgtccaagccccgacaccatttgaa

SEQ ID NO: 393857 - DNA, 30 bp, Artificial Sequence
  Synthetic oligonucleotide
gcatctatgcggcatatcggaccatttgaa

SEQ ID NO: 393858 - DNA, 30 bp, Artificial Sequence
  Synthetic oligonucleotide
tgaaaagtgggaacgttgggtccctttgaa

SEQ ID NO: 393859 - DNA, 30 bp, Artificial Sequence
  Synthetic oligonucleotide
cacacggaggatttccgcctaagctttgaa

SEQ ID NO: 393860 - DNA, 30 bp, Artificial Sequence
  Synthetic oligonucleotide
caggcaaagcttttttatcaatcgtttgaa

SEQ ID NO: 393861 - DNA, 30 bp, Artificial Sequence
  Synthetic oligonucleotide
gctttaaagctcgaggtatatgtgtttgaa

SEQ ID NO: 393862 - DNA, 30 bp, Artificial Sequence
  Synthetic oligonucleotide
ggtcaagttttaaaaggaggccattttgaa

SEQ ID NO: 393863 - DNA, 30 bp, Artificial Sequence
  Synthetic oligonucleotide
attgggaagaaatccccaatatattttgaa

SEQ ID NO: 393864 - DNA, 30 bp, Artificial Sequence
  Synthetic oligonucleotide
aatacttgacgccatactagagcttttgaa

SEQ ID NO: 393865 - DNA, 30 bp, Artificial Sequence
  Synthetic oligonucleotide
agaattcctgagttgtcgggagcttttgaa

SEQ ID NO: 393866 - DNA, 30 bp, Artificial Sequence
  Synthetic oligonucleotide
ttcgttccctaaccaatgaatctttttgaa

SEQ ID NO: 393867 - DNA, 29 bp, Artificial Sequence
  Synthetic oligonucleotide
accaatgtaactaccagaaaaaaaaataa

SEQ ID NO: 393868 - DNA, 30 bp, Artificial Sequence
  Synthetic oligonucleotide
atgttctcacgtacccatgaagaaaaataa

SEQ ID NO: 393869 - DNA, 30 bp, Artificial Sequence
  Synthetic oligonucleotide
gctaggatgggaacggaaagtgaaaaataa

SEQ ID NO: 393870 - DNA, 30 bp, Artificial Sequence
  Synthetic oligonucleotide
tagcaaatccttgtgaagaacacaaaataa

SEQ ID NO: 393871 - DNA, 31 bp, Artificial Sequence
  Synthetic oligonucleotide
aatacccctgagccctaactttcacaaataa

SEQ ID NO: 393872 - DNA, 30 bp, Artificial Sequence
  Synthetic oligonucleotide
caaccagagcgacgttgattatacaaataa

SEQ ID NO: 393873 - DNA, 30 bp, Artificial Sequence
  Synthetic oligonucleotide
gggataggggtggggctacttatcaaataa

SEQ ID NO: 393874 - DNA, 30 bp, Artificial Sequence
  Synthetic oligonucleotide
ttcgaacttggcttttagcctgtcaaataa

SEQ ID NO: 393875 - DNA, 30 bp, Artificial Sequence
  Synthetic oligonucleotide
ttattgttttattgcgatgttcagaaataa

SEQ ID NO: 393876 - DNA, 30 bp, Artificial Sequence
  Synthetic oligonucleotide
atataaattggggtgctatgtctgaaataa

SEQ ID NO: 393877 - DNA, 30 bp, Artificial Sequence
  Synthetic oligonucleotide
ggataaacctggcaagtcttatttaaataa

SEQ ID NO: 393878 - DNA, 30 bp, Artificial Sequence
  Synthetic oligonucleotide
tttgagggtttcggaccgatatcacaataa

SEQ ID NO: 393879 - DNA, 30 bp, Artificial Sequence
  Synthetic oligonucleotide
taaggcatcaggttaacgtacacccaataa

SEQ ID NO: 393880 - DNA, 30 bp, Artificial Sequence
  Synthetic oligonucleotide
gggcagcgaccctgctagaaaacgcaataa

SEQ ID NO: 393881 - DNA, 30 bp, Artificial Sequence
  Synthetic oligonucleotide
tacttagacagcaggaatccaatgcaataa

SEQ ID NO: 393882 - DNA, 30 bp, Artificial Sequence
  Synthetic oligonucleotide
gaatccatttgcatatagcacgtgcaataa

SEQ ID NO: 393883 - DNA, 30 bp, Artificial Sequence
  Synthetic oligonucleotide
attaacataccaaagtttatcgatcaataa

SEQ ID NO: 393884 - DNA, 30 bp, Artificial Sequence
  Synthetic oligonucleotide
ctgcccgatataggggtcgttactcaataa

SEQ ID NO: 393885 - DNA, 30 bp, Artificial Sequence
  Synthetic oligonucleotide
gaggtagcggcatttgggaaccttcaataa

SEQ ID NO: 393886 - DNA, 30 bp, Artificial Sequence
  Synthetic oligonucleotide
gggacggataaggttttctaaatagaataa

SEQ ID NO: 393887 - DNA, 30 bp, Artificial Sequence
  Synthetic oligonucleotide
gataaatggccccatagcatccgggaataa

SEQ ID NO: 393888 - DNA, 30 bp, Artificial Sequence
  Synthetic oligonucleotide
cgcctaagggccaatgggtccggggaataa

SEQ ID NO: 393889 - DNA, 30 bp, Artificial Sequence
  Synthetic oligonucleotide
aagtacttagcgcactaccatgtggaataa

SEQ ID NO: 393890 - DNA, 30 bp, Artificial Sequence
  Synthetic oligonucleotide
cgcgccccctaagtcgtggtctctgaataa

SEQ ID NO: 393891 - DNA, 30 bp, Artificial Sequence
  Synthetic oligonucleotide
ttttcgtccgagaacagggttcaataataa

SEQ ID NO: 393892 - DNA, 30 bp, Artificial Sequence
  Synthetic oligonucleotide
tagatcgtaataggctgttgcccataataa

SEQ ID NO: 393893 - DNA, 30 bp, Artificial Sequence
  Synthetic oligonucleotide
ctaccctagccccgagtgtcattataataa

SEQ ID NO: 393894 - DNA, 30 bp, Artificial Sequence
  Synthetic oligonucleotide
atcatcttcgctgaagcagacacctaataa

SEQ ID NO: 393895 - DNA, 30 bp, Artificial Sequence
  Synthetic oligonucleotide
gattgggtttgccattcataggagtaataa

SEQ ID NO: 393896 - DNA, 30 bp, Artificial Sequence
  Synthetic oligonucleotide
aaatctttcaaggactagggttattaataa

SEQ ID NO: 393897 - DNA, 30 bp, Artificial Sequence
  Synthetic oligonucleotide
taaagtggtacgaggggacttatttaataa

SEQ ID NO: 393898 - DNA, 30 bp, Artificial Sequence
  Synthetic oligonucleotide
tggtgtgtatgacgacgagctgtttaataa

SEQ ID NO: 393899 - DNA, 30 bp, Artificial Sequence
  Synthetic oligonucleotide
gcctgcccactgggccttccaacaacataa

SEQ ID NO: 393900 - DNA, 30 bp, Artificial Sequence
  Synthetic oligonucleotide
attgccgctcgtagtcgtagcggaacataa

SEQ ID NO: 393901 - DNA, 30 bp, Artificial Sequence
  Synthetic oligonucleotide
acaccgaaggtttcgcgcaggataacataa

SEQ ID NO: 393902 - DNA, 30 bp, Artificial Sequence
  Synthetic oligonucleotide
tggtttcgtaatcgcctgttatgcacataa

SEQ ID NO: 393903 - DNA, 30 bp, Artificial Sequence
  Synthetic oligonucleotide
ttgccgacggggttcccctagtgcacataa

SEQ ID NO: 393904 - DNA, 30 bp, Artificial Sequence
  Synthetic oligonucleotide
gtacctggtatgtcggcttgcgcgacataa

SEQ ID NO: 393905 - DNA, 30 bp, Artificial Sequence
  Synthetic oligonucleotide
attgcgtggtcacgtataagcgggacataa

SEQ ID NO: 393906 - DNA, 30 bp, Artificial Sequence
  Synthetic oligonucleotide
gacagccacgctatgagcatgggtacataa

SEQ ID NO: 393907 - DNA, 30 bp, Artificial Sequence
  Synthetic oligonucleotide
ttataggctgggccgcacacttttacataa

SEQ ID NO: 393908 - DNA, 30 bp, Artificial Sequence
  Synthetic oligonucleotide
gccgcctatagacgaatcttacaaccataa

SEQ ID NO: 393909 - DNA, 30 bp, Artificial Sequence
  Synthetic oligonucleotide
aacttactgcaggcgcggtttggaccataa

SEQ ID NO: 393910 - DNA, 30 bp, Artificial Sequence
  Synthetic oligonucleotide
gttttatccagccggaaaaaacacccataa

SEQ ID NO: 393911 - DNA, 30 bp, Artificial Sequence
  Synthetic oligonucleotide
accgacctgggcatagggcgggatccataa

SEQ ID NO: 393912 - DNA, 30 bp, Artificial Sequence
  Synthetic oligonucleotide
tgtaaccaatatatgaaattcattccataa

SEQ ID NO: 393913 - DNA, 30 bp, Artificial Sequence
  Synthetic oligonucleotide
ctggtacctcacggtcccgcacttccataa

SEQ ID NO: 393914 - DNA, 29 bp, Artificial Sequence
  Synthetic oligonucleotide
tcctgacaatatgtcgccgaatagcataa

SEQ ID NO: 393915 - DNA, 30 bp, Artificial Sequence
  Synthetic oligonucleotide
gcgcgtgtatatttttgagctatagcataa

SEQ ID NO: 393916 - DNA, 30 bp, Artificial Sequence
  Synthetic oligonucleotide
tcgtaaaagcttccatgttatttagcataa

SEQ ID NO: 393917 - DNA, 30 bp, Artificial Sequence
  Synthetic oligonucleotide
ggccacgtattagccatgtataccgcataa

SEQ ID NO: 393918 - DNA, 30 bp, Artificial Sequence
  Synthetic oligonucleotide
caataaacgacacatggatcggccgcataa

SEQ ID NO: 393919 - DNA, 30 bp, Artificial Sequence
  Synthetic oligonucleotide
gagcatcaaataggccaagtcacggcataa

SEQ ID NO: 393920 - DNA, 30 bp, Artificial Sequence
  Synthetic oligonucleotide
ctaccgaggacatcacttcgctcggcataa

SEQ ID NO: 393921 - DNA, 30 bp, Artificial Sequence
  Synthetic oligonucleotide
gttagacgtatgaatcgactcggtgcataa

SEQ ID NO: 393922 - DNA, 30 bp, Artificial Sequence
  Synthetic oligonucleotide
aacagtgtatcctgggatcagaaatcataa

SEQ ID NO: 393923 - DNA, 30 bp, Artificial Sequence
  Synthetic oligonucleotide
aactactgtgtataaataatgaaatcataa

SEQ ID NO: 393924 - DNA, 30 bp, Artificial Sequence
  Synthetic oligonucleotide
ctcacggcctcgcgggccagtaactcataa

SEQ ID NO: 393925 - DNA, 30 bp, Artificial Sequence
  Synthetic oligonucleotide
gtcattgttgttcgaccaagaatctcataa

SEQ ID NO: 393926 - DNA, 30 bp, Artificial Sequence
  Synthetic oligonucleotide
ggaatcacggcgtgggatcattagtcataa

SEQ ID NO: 393927 - DNA, 30 bp, Artificial Sequence
  Synthetic oligonucleotide
gtcggatgagacttagaggttgggtcataa

SEQ ID NO: 393928 - DNA, 30 bp, Artificial Sequence
  Synthetic oligonucleotide
tcttagacacgttcgtaatatgtttcataa

SEQ ID NO: 393929 - DNA, 30 bp, Artificial Sequence
  Synthetic oligonucleotide
tttatcgtttggaagacttaagaaagataa

SEQ ID NO: 393930 - DNA, 30 bp, Artificial Sequence
  Synthetic oligonucleotide
acatgtctgccccgtttgcgttaaagataa

SEQ ID NO: 393931 - DNA, 30 bp, Artificial Sequence
  Synthetic oligonucleotide
aggaatttgacttgttttcaagcaagataa

SEQ ID NO: 393932 - DNA, 30 bp, Artificial Sequence
  Synthetic oligonucleotide
gatcttgtcccttaaaagaggttaagataa

SEQ ID NO: 393933 - DNA, 30 bp, Artificial Sequence
  Synthetic oligonucleotide
caacttcgcaagtatgaattagacagataa

SEQ ID NO: 393934 - DNA, 30 bp, Artificial Sequence
  Synthetic oligonucleotide
cacgctctgtcttgagatcgaggcagataa

SEQ ID NO: 393935 - DNA, 30 bp, Artificial Sequence
  Synthetic oligonucleotide
tagtttcacgcaccactcccactcagataa

SEQ ID NO: 393936 - DNA, 30 bp, Artificial Sequence
  Synthetic oligonucleotide
ttcgcgtgaatcagtttgatatagagataa

SEQ ID NO: 393937 - DNA, 30 bp, Artificial Sequence
  Synthetic oligonucleotide
gggggaagtatccggcagctggggagataa

SEQ ID NO: 393938 - DNA, 30 bp, Artificial Sequence
  Synthetic oligonucleotide
ccgtcttgggaaatcttgatcctgagataa

SEQ ID NO: 393939 - DNA, 30 bp, Artificial Sequence
  Synthetic oligonucleotide
aaacccccaggcagcttaagatgtagataa

SEQ ID NO: 393940 - DNA, 30 bp, Artificial Sequence
  Synthetic oligonucleotide
gccaaatatacgcttgccaggcaacgataa

SEQ ID NO: 393941 - DNA, 30 bp, Artificial Sequence
  Synthetic oligonucleotide
ttctgatgtgtatgagtcgcaggacgataa

SEQ ID NO: 393942 - DNA, 30 bp, Artificial Sequence
  Synthetic oligonucleotide
gaggaattaatatcgaagctaatacgataa

SEQ ID NO: 393943 - DNA, 30 bp, Artificial Sequence
  Synthetic oligonucleotide
tatatatgcctgtcaggacgggaccgataa

SEQ ID NO: 393944 - DNA, 30 bp, Artificial Sequence
  Synthetic oligonucleotide
taataggaggtccttctggaggtccgataa

SEQ ID NO: 393945 - DNA, 30 bp, Artificial Sequence
  Synthetic oligonucleotide
gaaataagatgtggcgtccgtttccgataa

SEQ ID NO: 393946 - DNA, 30 bp, Artificial Sequence
  Synthetic oligonucleotide
aacagcaataatcgtctgtagatgcgataa

SEQ ID NO: 393947 - DNA, 30 bp, Artificial Sequence
  Synthetic oligonucleotide
cacaggatttaggttaatgcccatcgataa

SEQ ID NO: 393948 - DNA, 30 bp, Artificial Sequence
  Synthetic oligonucleotide
gatctatcaggatggagcgcgactcgataa

SEQ ID NO: 393949 - DNA, 30 bp, Artificial Sequence
  Synthetic oligonucleotide
ttgtttcgcgctgaatgcttgtgtcgataa

SEQ ID NO: 393950 - DNA, 30 bp, Artificial Sequence
  Synthetic oligonucleotide
gtatccacacgtagaataactgaaggataa

SEQ ID NO: 393951 - DNA, 30 bp, Artificial Sequence
  Synthetic oligonucleotide
tctctatgacgaagtccacacggcggataa

SEQ ID NO: 393952 - DNA, 30 bp, Artificial Sequence
  Synthetic oligonucleotide
gaacctatgggaaggtctaggacgggataa

SEQ ID NO: 393953 - DNA, 30 bp, Artificial Sequence
  Synthetic oligonucleotide
catatagtcgggtagtatgatccgggataa

SEQ ID NO: 393954 - DNA, 30 bp, Artificial Sequence
  Synthetic oligonucleotide
ggttaagctatggtataagggcggggataa

SEQ ID NO: 393955 - DNA, 30 bp, Artificial Sequence
  Synthetic oligonucleotide
gctttgatcagaattggcgcaactggataa

SEQ ID NO: 393956 - DNA, 30 bp, Artificial Sequence
  Synthetic oligonucleotide
tgagacttccatccgtgcaccgtatgataa

SEQ ID NO: 393957 - DNA, 30 bp, Artificial Sequence
  Synthetic oligonucleotide
actagttgttcgttctgttaattatgataa

SEQ ID NO: 393958 - DNA, 30 bp, Artificial Sequence
  Synthetic oligonucleotide
acattttcatagaacggttgcagctgataa

SEQ ID NO: 393959 - DNA, 30 bp, Artificial Sequence
  Synthetic oligonucleotide
ttgtcaatggtcctaccgtgacgctgataa

SEQ ID NO: 393960 - DNA, 30 bp, Artificial Sequence
  Synthetic oligonucleotide
tcgcgaatcatgtcaccagtctagtgataa

SEQ ID NO: 393961 - DNA, 30 bp, Artificial Sequence
  Synthetic oligonucleotide
cgcctatgatgcgtagcccggaggtgataa

SEQ ID NO: 393962 - DNA, 30 bp, Artificial Sequence
  Synthetic oligonucleotide
gagcccgggacagcgtggccccggtgataa

SEQ ID NO: 393963 - DNA, 30 bp, Artificial Sequence
  Synthetic oligonucleotide
ctaatgaaaattacggagcgggggtgataa

SEQ ID NO: 393964 - DNA, 30 bp, Artificial Sequence
  Synthetic oligonucleotide
cccgacgttaagctcgactccgattgataa

SEQ ID NO: 393965 - DNA, 30 bp, Artificial Sequence
  Synthetic oligonucleotide
gcctaatcggcgattacgggctgttgataa

SEQ ID NO: 393966 - DNA, 30 bp, Artificial Sequence
  Synthetic oligonucleotide
aaatcgtcccgaacgcccagagaaatataa

SEQ ID NO: 393967 - DNA, 30 bp, Artificial Sequence
  Synthetic oligonucleotide
gttcgtgggtcggggtccaggccaatataa

SEQ ID NO: 393968 - DNA, 30 bp, Artificial Sequence
  Synthetic oligonucleotide
gcagaatggttattttccgaggcaatataa

SEQ ID NO: 393969 - DNA, 30 bp, Artificial Sequence
  Synthetic oligonucleotide
actgaaagccgtggccatgtttacatataa

SEQ ID NO: 393970 - DNA, 30 bp, Artificial Sequence
  Synthetic oligonucleotide
gatgtgataggtctggcgcagggcatataa

SEQ ID NO: 393971 - DNA, 30 bp, Artificial Sequence
  Synthetic oligonucleotide
tacatttactcacgcccgctgtgcatataa

SEQ ID NO: 393972 - DNA, 30 bp, Artificial Sequence
  Synthetic oligonucleotide
tgcttgtttaatttgttattcgtcatataa

SEQ ID NO: 393973 - DNA, 30 bp, Artificial Sequence
  Synthetic oligonucleotide
ggacaaaagtaggtgaaatcaaagatataa

SEQ ID NO: 393974 - DNA, 30 bp, Artificial Sequence
  Synthetic oligonucleotide
gtttatatcgactgcattcagtggatataa

SEQ ID NO: 393975 - DNA, 30 bp, Artificial Sequence
  Synthetic oligonucleotide
catgtaataaaagcggtatttgatatataa

SEQ ID NO: 393976 - DNA, 30 bp, Artificial Sequence
  Synthetic oligonucleotide
ggtgcgattgcatccgttttgtgtatataa

SEQ ID NO: 393977 - DNA, 30 bp, Artificial Sequence
  Synthetic oligonucleotide
attcgacatgttatccgtgctcttatataa

SEQ ID NO: 393978 - DNA, 30 bp, Artificial Sequence
  Synthetic oligonucleotide
cctaccaacggttcaacacctttactataa

SEQ ID NO: 393979 - DNA, 30 bp, Artificial Sequence
  Synthetic oligonucleotide
gggaatgccttggctatatttgatctataa

SEQ ID NO: 393980 - DNA, 30 bp, Artificial Sequence
  Synthetic oligonucleotide
acctaatctcctcacgtaggtcctctataa

SEQ ID NO: 393981 - DNA, 30 bp, Artificial Sequence
  Synthetic oligonucleotide
ttacaagcaaaacctataggggttctataa

SEQ ID NO: 393982 - DNA, 30 bp, Artificial Sequence
  Synthetic oligonucleotide
tttagggaactgcacgtacaacaagtataa

SEQ ID NO: 393983 - DNA, 30 bp, Artificial Sequence
  Synthetic oligonucleotide
tctgaatgtgcccgtcacggagaagtataa

SEQ ID NO: 393984 - DNA, 30 bp, Artificial Sequence
  Synthetic oligonucleotide
aagaggctccgagcgtaaatcggagtataa

SEQ ID NO: 393985 - DNA, 30 bp, Artificial Sequence
  Synthetic oligonucleotide
gcaccaaggattagtctcttactagtataa

SEQ ID NO: 393986 - DNA, 30 bp, Artificial Sequence
  Synthetic oligonucleotide
gagttacaggaattttgttcgtccgtataa

SEQ ID NO: 393987 - DNA, 30 bp, Artificial Sequence
  Synthetic oligonucleotide
atgtatacgtgtcttcgagggggcgtataa

SEQ ID NO: 393988 - DNA, 30 bp, Artificial Sequence
  Synthetic oligonucleotide
gtatcttgacactcgtgaagtttcgtataa

SEQ ID NO: 393989 - DNA, 30 bp, Artificial Sequence
  Synthetic oligonucleotide
ctccagataagcgcgccggggcgggtataa

SEQ ID NO: 393990 - DNA, 30 bp, Artificial Sequence
  Synthetic oligonucleotide
ctagactctgcacttatagagtgggtataa

SEQ ID NO: 393991 - DNA, 30 bp, Artificial Sequence
  Synthetic oligonucleotide
gataaagtacgcaaatgatatttggtataa

SEQ ID NO: 393992 - DNA, 30 bp, Artificial Sequence
  Synthetic oligonucleotide
attccggaacacaaagcaaagcttgtataa

SEQ ID NO: 393993 - DNA, 30 bp, Artificial Sequence
  Synthetic oligonucleotide
cacgaatggactctatgtcacgcattataa

SEQ ID NO: 393994 - DNA, 30 bp, Artificial Sequence
  Synthetic oligonucleotide
tctccaaacaaaaatcgaaggtgcttataa

SEQ ID NO: 393995 - DNA, 30 bp, Artificial Sequence
  Synthetic oligonucleotide
atgcccgataagtaacgttgtatcttataa

SEQ ID NO: 393996 - DNA, 30 bp, Artificial Sequence
  Synthetic oligonucleotide
gcttaccgcttcatacactcatagttataa

SEQ ID NO: 393997 - DNA, 30 bp, Artificial Sequence
  Synthetic oligonucleotide
ggtataggctcgttcatatgccggttataa

SEQ ID NO: 393998 - DNA, 30 bp, Artificial Sequence
  Synthetic oligonucleotide
ctaattcgtcgtcaacatggtgtgttataa

SEQ ID NO: 393999 - DNA, 30 bp, Artificial Sequence
  Synthetic oligonucleotide
tgtaatttagggcgtcggtagttgttataa

SEQ ID NO: 394000 - DNA, 30 bp, Artificial Sequence
  Synthetic oligonucleotide
aggctgttggtgcgacttggttatttataa

SEQ ID NO: 394001 - DNA, 30 bp, Artificial Sequence
  Synthetic oligonucleotide
ttacaagcacctttgtaagaccctttataa

SEQ ID NO: 394002 - DNA, 30 bp, Artificial Sequence
  Synthetic oligonucleotide
cttgtctcaaaacaataagcggttttataa

SEQ ID NO: 394003 - DNA, 30 bp, Artificial Sequence
  Synthetic oligonucleotide
attgaagctacaacccagcagtttttataa

SEQ ID NO: 394004 - DNA, 30 bp, Artificial Sequence
  Synthetic oligonucleotide
agccccataaggccctgtcagataaactaa

SEQ ID NO: 394005 - DNA, 30 bp, Artificial Sequence
  Synthetic oligonucleotide
ccagatgaacatacacacgcgataaactaa

SEQ ID NO: 394006 - DNA, 30 bp, Artificial Sequence
  Synthetic oligonucleotide
aaacataaatagtggaccgaccgcaactaa

SEQ ID NO: 394007 - DNA, 30 bp, Artificial Sequence
  Synthetic oligonucleotide
cgggggttttctgagataaaaaataactaa

SEQ ID NO: 394008 - DNA, 30 bp, Artificial Sequence
  Synthetic oligonucleotide
acattatcttaaatggtactcattaactaa

SEQ ID NO: 394009 - DNA, 30 bp, Artificial Sequence
  Synthetic oligonucleotide
cattagggcatctttaaagcgtgacactaa

SEQ ID NO: 394010 - DNA, 30 bp, Artificial Sequence
  Synthetic oligonucleotide
gccgattcgtcccgaagtacgctacactaa

SEQ ID NO: 394011 - DNA, 30 bp, Artificial Sequence
  Synthetic oligonucleotide
ggatctaaactcattctcaagttacactaa

SEQ ID NO: 394012 - DNA, 30 bp, Artificial Sequence
  Synthetic oligonucleotide
attcgattaaccgctagctcaaaccactaa

SEQ ID NO: 394013 - DNA, 30 bp, Artificial Sequence
  Synthetic oligonucleotide
cagtagaagctccgaaattgtatccactaa

SEQ ID NO: 394014 - DNA, 30 bp, Artificial Sequence
  Synthetic oligonucleotide
ttgtttacttggaataggaaggcgcactaa

SEQ ID NO: 394015 - DNA, 30 bp, Artificial Sequence
  Synthetic oligonucleotide
gtgtaactggacgaagtggttagagactaa

SEQ ID NO: 394016 - DNA, 30 bp, Artificial Sequence
  Synthetic oligonucleotide
gaacacacatttttcgttgagaccgactaa

SEQ ID NO: 394017 - DNA, 30 bp, Artificial Sequence
  Synthetic oligonucleotide
gggacgactccttaaaggtttggcgactaa

SEQ ID NO: 394018 - DNA, 30 bp, Artificial Sequence
  Synthetic oligonucleotide
ttcagacactaggctttacgcctcgactaa

SEQ ID NO: 394019 - DNA, 30 bp, Artificial Sequence
  Synthetic oligonucleotide
atactacactggcaggacgtcgcggactaa

SEQ ID NO: 394020 - DNA, 30 bp, Artificial Sequence
  Synthetic oligonucleotide
ggagctggtacgggcagcaaatgggactaa

SEQ ID NO: 394021 - DNA, 30 bp, Artificial Sequence
  Synthetic oligonucleotide
atacagcgctcagcggaatcctatgactaa

SEQ ID NO: 394022 - DNA, 30 bp, Artificial Sequence
  Synthetic oligonucleotide
ttggggtattcagggagttttgtatactaa

SEQ ID NO: 394023 - DNA, 30 bp, Artificial Sequence
  Synthetic oligonucleotide
ccccaaattagctcgtgtgcgctctactaa

SEQ ID NO: 394024 - DNA, 30 bp, Artificial Sequence
  Synthetic oligonucleotide
aaaagcgtgtctgcccgaaattgttactaa

SEQ ID NO: 394025 - DNA, 30 bp, Artificial Sequence
  Synthetic oligonucleotide
tcagattttggagtgtggggcgtttactaa

SEQ ID NO: 394026 - DNA, 30 bp, Artificial Sequence
  Synthetic oligonucleotide
tccatcgatattcatagagattaaacctaa

SEQ ID NO: 394027 - DNA, 30 bp, Artificial Sequence
  Synthetic oligonucleotide
ttttaaaattgtgccaactccacaacctaa

SEQ ID NO: 394028 - DNA, 30 bp, Artificial Sequence
  Synthetic oligonucleotide
agatcctggcagattccgatgcacacctaa

SEQ ID NO: 394029 - DNA, 30 bp, Artificial Sequence
  Synthetic oligonucleotide
tcagcctgtgtattagagtggtggacctaa

SEQ ID NO: 394030 - DNA, 30 bp, Artificial Sequence
  Synthetic oligonucleotide
agcttgttttcttgatacaggcatacctaa

SEQ ID NO: 394031 - DNA, 30 bp, Artificial Sequence
  Synthetic oligonucleotide
tcctatggtgggtcacgccggactacctaa

SEQ ID NO: 394032 - DNA, 31 bp, Artificial Sequence
  Synthetic oligonucleotide
tacgtgtgtaaaccatttaagggctacctaa

SEQ ID NO: 394033 - DNA, 30 bp, Artificial Sequence
  Synthetic oligonucleotide
tgggacacggaccgattaccatctacctaa

SEQ ID NO: 394034 - DNA, 29 bp, Artificial Sequence
  Synthetic oligonucleotide
agatttcgggaaaacagttaaaaccctaa

SEQ ID NO: 394035 - DNA, 30 bp, Artificial Sequence
  Synthetic oligonucleotide
gttcggaatccactaggttactcaccctaa

SEQ ID NO: 394036 - DNA, 30 bp, Artificial Sequence
  Synthetic oligonucleotide
gaatgtttggtgcgccgaatttgcccctaa

SEQ ID NO: 394037 - DNA, 30 bp, Artificial Sequence
  Synthetic oligonucleotide
cttgtgatggagtccggtagaatcccctaa

SEQ ID NO: 394038 - DNA, 30 bp, Artificial Sequence
  Synthetic oligonucleotide
gactatcccccaaccggacatctgccctaa

SEQ ID NO: 394039 - DNA, 30 bp, Artificial Sequence
  Synthetic oligonucleotide
cgcttaaggcactttaactgcaatccctaa

SEQ ID NO: 394040 - DNA, 30 bp, Artificial Sequence
  Synthetic oligonucleotide
gtatatccccggtccaacgggagtccctaa

SEQ ID NO: 394041 - DNA, 30 bp, Artificial Sequence
  Synthetic oligonucleotide
attaggcgttctatgccttcggcagcctaa

SEQ ID NO: 394042 - DNA, 30 bp, Artificial Sequence
  Synthetic oligonucleotide
acctatctaaatggtaaccacagagcctaa

SEQ ID NO: 394043 - DNA, 30 bp, Artificial Sequence
  Synthetic oligonucleotide
gatgtctgaatagcgctacattgagcctaa

SEQ ID NO: 394044 - DNA, 30 bp, Artificial Sequence
  Synthetic oligonucleotide
atctcacagaacattttggtcatcgcctaa

SEQ ID NO: 394045 - DNA, 30 bp, Artificial Sequence
  Synthetic oligonucleotide
agattacttggtttcagtacaagggcctaa

SEQ ID NO: 394046 - DNA, 30 bp, Artificial Sequence
  Synthetic oligonucleotide
tagtaccgcggggctggaaacacctcctaa

SEQ ID NO: 394047 - DNA, 30 bp, Artificial Sequence
  Synthetic oligonucleotide
gtcttttccgcggtggattcggcgtcctaa

SEQ ID NO: 394048 - DNA, 30 bp, Artificial Sequence
  Synthetic oligonucleotide
gtcggggcccgatgctgtgcatggtcctaa

SEQ ID NO: 394049 - DNA, 30 bp, Artificial Sequence
  Synthetic oligonucleotide
gtgtctacaggtttgattgcatcaagctaa

SEQ ID NO: 394050 - DNA, 30 bp, Artificial Sequence
  Synthetic oligonucleotide
ctctcgaaggctgaagcctgcgacagctaa

SEQ ID NO: 394051 - DNA, 30 bp, Artificial Sequence
  Synthetic oligonucleotide
aatataaacatggttttacgcgccagctaa

SEQ ID NO: 394052 - DNA, 30 bp, Artificial Sequence
  Synthetic oligonucleotide
tgtacattaagcccccccgatagcagctaa

SEQ ID NO: 394053 - DNA, 30 bp, Artificial Sequence
  Synthetic oligonucleotide
tataaggttggggttcgcgtatcgagctaa

SEQ ID NO: 394054 - DNA, 30 bp, Artificial Sequence
  Synthetic oligonucleotide
gttctgagcatgttggagaatggtagctaa

SEQ ID NO: 394055 - DNA, 30 bp, Artificial Sequence
  Synthetic oligonucleotide
agtcgttctatgctaaacccccgacgctaa

SEQ ID NO: 394056 - DNA, 30 bp, Artificial Sequence
  Synthetic oligonucleotide
cacgggggaatccgtgagggtgtacgctaa

SEQ ID NO: 394057 - DNA, 30 bp, Artificial Sequence
  Synthetic oligonucleotide
cccgcctgatttcaaggttggcagcgctaa

SEQ ID NO: 394058 - DNA, 30 bp, Artificial Sequence
  Synthetic oligonucleotide
caatcagtgtttcaattaagcacgcgctaa

SEQ ID NO: 394059 - DNA, 30 bp, Artificial Sequence
  Synthetic oligonucleotide
ctacattcatcatcactctaacggcgctaa

SEQ ID NO: 394060 - DNA, 30 bp, Artificial Sequence
  Synthetic oligonucleotide
attcccagctggcttagccatttgcgctaa

SEQ ID NO: 394061 - DNA, 30 bp, Artificial Sequence
  Synthetic oligonucleotide
caacaagatgtggaccaggtttttcgctaa

SEQ ID NO: 394062 - DNA, 30 bp, Artificial Sequence
  Synthetic oligonucleotide
gtgtctaatttgatagacgggagaggctaa

SEQ ID NO: 394063 - DNA, 30 bp, Artificial Sequence
  Synthetic oligonucleotide
atatggaatgtccatatggacgtaggctaa

SEQ ID NO: 394064 - DNA, 30 bp, Artificial Sequence
  Synthetic oligonucleotide
gaaacttggataacttcaccattaggctaa

SEQ ID NO: 394065 - DNA, 30 bp, Artificial Sequence
  Synthetic oligonucleotide
attagttcctaccacccgccggacggctaa

SEQ ID NO: 394066 - DNA, 30 bp, Artificial Sequence
  Synthetic oligonucleotide
cgcagatttgcctagaacagtgacggctaa

SEQ ID NO: 394067 - DNA, 30 bp, Artificial Sequence
  Synthetic oligonucleotide
taagtatttgctcttccaatcaggggctaa

SEQ ID NO: 394068 - DNA, 30 bp, Artificial Sequence
  Synthetic oligonucleotide
cagtcttcgtcaataatcgcggctggctaa

SEQ ID NO: 394069 - DNA, 30 bp, Artificial Sequence
  Synthetic oligonucleotide
gcgtacgattaggatgtacgagcatgctaa

SEQ ID NO: 394070 - DNA, 30 bp, Artificial Sequence
  Synthetic oligonucleotide
tggtatggccgccgatccgtaggctgctaa

SEQ ID NO: 394071 - DNA, 30 bp, Artificial Sequence
  Synthetic oligonucleotide
agtcaggacgaggttgtatgtttctgctaa

SEQ ID NO: 394072 - DNA, 30 bp, Artificial Sequence
  Synthetic oligonucleotide
cgtagttccacggagaagcagtagtgctaa

SEQ ID NO: 394073 - DNA, 30 bp, Artificial Sequence
  Synthetic oligonucleotide
ataataattcgaatatcttggccgtgctaa

SEQ ID NO: 394074 - DNA, 30 bp, Artificial Sequence
  Synthetic oligonucleotide
aattaatggcactgatgccttggttgctaa

SEQ ID NO: 394075 - DNA, 30 bp, Artificial Sequence
  Synthetic oligonucleotide
atagactctgagtttgcgcgtatttgctaa

SEQ ID NO: 394076 - DNA, 30 bp, Artificial Sequence
  Synthetic oligonucleotide
ttcggctggccaggacgattcaaaatctaa

SEQ ID NO: 394077 - DNA, 30 bp, Artificial Sequence
  Synthetic oligonucleotide
agaatagagactatcttataccaaatctaa

SEQ ID NO: 394078 - DNA, 30 bp, Artificial Sequence
  Synthetic oligonucleotide
actattacacaggcatgacttgaaatctaa

SEQ ID NO: 394079 - DNA, 30 bp, Artificial Sequence
  Synthetic oligonucleotide
tgctgacgccataaatatatctaaatctaa

SEQ ID NO: 394080 - DNA, 30 bp, Artificial Sequence
  Synthetic oligonucleotide
agtagtgcttctcacatgcctttaatctaa

SEQ ID NO: 394081 - DNA, 30 bp, Artificial Sequence
  Synthetic oligonucleotide
ggtgcccaggtggtacgactgcacatctaa

SEQ ID NO: 394082 - DNA, 30 bp, Artificial Sequence
  Synthetic oligonucleotide
cccagaaagtagtttgagatctccatctaa

SEQ ID NO: 394083 - DNA, 30 bp, Artificial Sequence
  Synthetic oligonucleotide
gccagataactttagtgttcacgcatctaa

SEQ ID NO: 394084 - DNA, 30 bp, Artificial Sequence
  Synthetic oligonucleotide
agaataaatgccgccgcctctgggatctaa

SEQ ID NO: 394085 - DNA, 30 bp, Artificial Sequence
  Synthetic oligonucleotide
tttgcgatcgggcactaaaggatgatctaa

SEQ ID NO: 394086 - DNA, 30 bp, Artificial Sequence
  Synthetic oligonucleotide
tctatgcgcaggtgatggcccaatatctaa

SEQ ID NO: 394087 - DNA, 30 bp, Artificial Sequence
  Synthetic oligonucleotide
taccgggtacggggggtcacggaactctaa

SEQ ID NO: 394088 - DNA, 30 bp, Artificial Sequence
  Synthetic oligonucleotide
aatgggctaactttcatctggcacctctaa

SEQ ID NO: 394089 - DNA, 30 bp, Artificial Sequence
  Synthetic oligonucleotide
cccgatccttacaaatgtatccgcctctaa

SEQ ID NO: 394090 - DNA, 30 bp, Artificial Sequence
  Synthetic oligonucleotide
ggccctgttgtcgcttttcgttgcctctaa

SEQ ID NO: 394091 - DNA, 30 bp, Artificial Sequence
  Synthetic oligonucleotide
aagaaattaggggttttctgccagctctaa

SEQ ID NO: 394092 - DNA, 30 bp, Artificial Sequence
  Synthetic oligonucleotide
aaaaacgttctaaggaggggaccgctctaa

SEQ ID NO: 394093 - DNA, 30 bp, Artificial Sequence
  Synthetic oligonucleotide
atcgtcgcattcaactgcaaaatgctctaa

SEQ ID NO: 394094 - DNA, 30 bp, Artificial Sequence
  Synthetic oligonucleotide
agtacgacgttatagagagcaatgctctaa

SEQ ID NO: 394095 - DNA, 30 bp, Artificial Sequence
  Synthetic oligonucleotide
tgctgggggaaattactgggcttgctctaa

SEQ ID NO: 394096 - DNA, 30 bp, Artificial Sequence
  Synthetic oligonucleotide
ggggtacaagtagcacgtttccctctctaa

SEQ ID NO: 394097 - DNA, 30 bp, Artificial Sequence
  Synthetic oligonucleotide
tctgtaggtgaatccgctagccgcgtctaa

SEQ ID NO: 394098 - DNA, 30 bp, Artificial Sequence
  Synthetic oligonucleotide
taaccagacgggggctgtttataggtctaa

SEQ ID NO: 394099 - DNA, 30 bp, Artificial Sequence
  Synthetic oligonucleotide
agggcaaaaaatttagctacgacggtctaa

SEQ ID NO: 394100 - DNA, 30 bp, Artificial Sequence
  Synthetic oligonucleotide
aaaacaaatacttaactggggacggtctaa

SEQ ID NO: 394101 - DNA, 30 bp, Artificial Sequence
  Synthetic oligonucleotide
tcatacagatgtgaaattaagggggtctaa

SEQ ID NO: 394102 - DNA, 30 bp, Artificial Sequence
  Synthetic oligonucleotide
agttatagagtgtcgactcagattgtctaa

SEQ ID NO: 394103 - DNA, 30 bp, Artificial Sequence
  Synthetic oligonucleotide
aagtccgggattattcggagctttgtctaa

SEQ ID NO: 394104 - DNA, 30 bp, Artificial Sequence
  Synthetic oligonucleotide
gtaatgtccttcgtattcaccgtattctaa

SEQ ID NO: 394105 - DNA, 30 bp, Artificial Sequence
  Synthetic oligonucleotide
atcatgtgaggcccttcgtgtaacttctaa

SEQ ID NO: 394106 - DNA, 30 bp, Artificial Sequence
  Synthetic oligonucleotide
aatctgtgcagaacaggtgctgacttctaa

SEQ ID NO: 394107 - DNA, 30 bp, Artificial Sequence
  Synthetic oligonucleotide
attagtatgttggatatcatcaagttctaa

SEQ ID NO: 394108 - DNA, 30 bp, Artificial Sequence
  Synthetic oligonucleotide
cttcgtcatggcctagcttcgcagttctaa

SEQ ID NO: 394109 - DNA, 30 bp, Artificial Sequence
  Synthetic oligonucleotide
ccagtgtgaaggccatctaaaagtttctaa

SEQ ID NO: 394110 - DNA, 30 bp, Artificial Sequence
  Synthetic oligonucleotide
tctaatatataatcattattcccaaagtaa

SEQ ID NO: 394111 - DNA, 30 bp, Artificial Sequence
  Synthetic oligonucleotide
cttttacgaagtgtttcacgcctgaagtaa

SEQ ID NO: 394112 - DNA, 30 bp, Artificial Sequence
  Synthetic oligonucleotide
gggttacacaattgtgtgaccgataagtaa

SEQ ID NO: 394113 - DNA, 30 bp, Artificial Sequence
  Synthetic oligonucleotide
ttaatcgagtcggggtcgtcccctaagtaa

SEQ ID NO: 394114 - DNA, 30 bp, Artificial Sequence
  Synthetic oligonucleotide
cttggccatataccggagtcaagtaagtaa

SEQ ID NO: 394115 - DNA, 30 bp, Artificial Sequence
  Synthetic oligonucleotide
gactatgttgaagcgcttacgtcacagtaa

SEQ ID NO: 394116 - DNA, 30 bp, Artificial Sequence
  Synthetic oligonucleotide
atgtgtcagcactggtttgcgttacagtaa

SEQ ID NO: 394117 - DNA, 30 bp, Artificial Sequence
  Synthetic oligonucleotide
gtcaaggactttctcagtaagccccagtaa

SEQ ID NO: 394118 - DNA, 30 bp, Artificial Sequence
  Synthetic oligonucleotide
atctggatccaatacgtacagtcccagtaa

SEQ ID NO: 394119 - DNA, 30 bp, Artificial Sequence
  Synthetic oligonucleotide
gttgtcttgggcagccctggagcgcagtaa

SEQ ID NO: 394120 - DNA, 30 bp, Artificial Sequence
  Synthetic oligonucleotide
actcgttttcgtcaggcggtgcggcagtaa

SEQ ID NO: 394121 - DNA, 30 bp, Artificial Sequence
  Synthetic oligonucleotide
gctttgccagtttcaaacccatggcagtaa

SEQ ID NO: 394122 - DNA, 30 bp, Artificial Sequence
  Synthetic oligonucleotide
atcagagcgtcatctgaagtaatgcagtaa

SEQ ID NO: 394123 - DNA, 30 bp, Artificial Sequence
  Synthetic oligonucleotide
atcgtctagctatgcagattggtgcagtaa

SEQ ID NO: 394124 - DNA, 30 bp, Artificial Sequence
  Synthetic oligonucleotide
ataaagcatggggaggctttattgcagtaa

SEQ ID NO: 394125 - DNA, 30 bp, Artificial Sequence
  Synthetic oligonucleotide
acctataaggttgaacatggtattcagtaa

SEQ ID NO: 394126 - DNA, 30 bp, Artificial Sequence
  Synthetic oligonucleotide
ggatttgcctggaaggtgagctttcagtaa

SEQ ID NO: 394127 - DNA, 30 bp, Artificial Sequence
  Synthetic oligonucleotide
gatagtcgattcatgatattgggcgagtaa

SEQ ID NO: 394128 - DNA, 30 bp, Artificial Sequence
  Synthetic oligonucleotide
tttggacgctcttcctcggacatggagtaa

SEQ ID NO: 394129 - DNA, 30 bp, Artificial Sequence
  Synthetic oligonucleotide
gccccggggactggtctgaacgatgagtaa

SEQ ID NO: 394130 - DNA, 31 bp, Artificial Sequence
  Synthetic oligonucleotide
aagcttaaagtcgtactatcttgatgagtaa

SEQ ID NO: 394131 - DNA, 30 bp, Artificial Sequence
  Synthetic oligonucleotide
gtttactacttctccgcctaggaatagtaa

SEQ ID NO: 394132 - DNA, 30 bp, Artificial Sequence
  Synthetic oligonucleotide
gaacgtcactggataagttcacgctagtaa

SEQ ID NO: 394133 - DNA, 30 bp, Artificial Sequence
  Synthetic oligonucleotide
tagttgataaattggaccgctctctagtaa

SEQ ID NO: 394134 - DNA, 30 bp, Artificial Sequence
  Synthetic oligonucleotide
gaacccaattacgactcttggaagtagtaa

SEQ ID NO: 394135 - DNA, 30 bp, Artificial Sequence
  Synthetic oligonucleotide
cccgtggtgtcgaagcagcccaggtagtaa

SEQ ID NO: 394136 - DNA, 30 bp, Artificial Sequence
  Synthetic oligonucleotide
caggaaacggtcactcttgttaggtagtaa

SEQ ID NO: 394137 - DNA, 30 bp, Artificial Sequence
  Synthetic oligonucleotide
atattcggaaatgtattaaatcggtagtaa

SEQ ID NO: 394138 - DNA, 30 bp, Artificial Sequence
  Synthetic oligonucleotide
gccaagcccgaggcaatatatttgtagtaa

SEQ ID NO: 394139 - DNA, 30 bp, Artificial Sequence
  Synthetic oligonucleotide
ccgatctgcgaggctgcacgtaattagtaa

SEQ ID NO: 394140 - DNA, 30 bp, Artificial Sequence
  Synthetic oligonucleotide
ggaattataagggctgtaggtcattagtaa

SEQ ID NO: 394141 - DNA, 30 bp, Artificial Sequence
  Synthetic oligonucleotide
ccccgcatatggaaggtgtgtggttagtaa

SEQ ID NO: 394142 - DNA, 30 bp, Artificial Sequence
  Synthetic oligonucleotide
gatatgcaggctgatcctgaataaacgtaa

SEQ ID NO: 394143 - DNA, 31 bp, Artificial Sequence
  Synthetic oligonucleotide
tgctattaatagccctgtgtttataacgtaa

SEQ ID NO: 394144 - DNA, 30 bp, Artificial Sequence
  Synthetic oligonucleotide
gtggtcacgtccctcgcagtgggcacgtaa

SEQ ID NO: 394145 - DNA, 30 bp, Artificial Sequence
  Synthetic oligonucleotide
gacggacctctttgatcggctctgacgtaa

SEQ ID NO: 394146 - DNA, 30 bp, Artificial Sequence
  Synthetic oligonucleotide
ttacgccgtctcctgtgctgacatacgtaa

SEQ ID NO: 394147 - DNA, 30 bp, Artificial Sequence
  Synthetic oligonucleotide
tgcaccggagctgctgacacacgtacgtaa

SEQ ID NO: 394148 - DNA, 30 bp, Artificial Sequence
  Synthetic oligonucleotide
tagttcaacacaatgcgaggctaagcgtaa

SEQ ID NO: 394149 - DNA, 30 bp, Artificial Sequence
  Synthetic oligonucleotide
gtaaagttgatttccagggataccgcgtaa

SEQ ID NO: 394150 - DNA, 30 bp, Artificial Sequence
  Synthetic oligonucleotide
ctttccaaatgggttttcagagaggcgtaa

SEQ ID NO: 394151 - DNA, 30 bp, Artificial Sequence
  Synthetic oligonucleotide
cagcatgccatagcacgcataagggcgtaa

SEQ ID NO: 394152 - DNA, 30 bp, Artificial Sequence
  Synthetic oligonucleotide
tcgctttgtttcggcctcctcagggcgtaa

SEQ ID NO: 394153 - DNA, 30 bp, Artificial Sequence
  Synthetic oligonucleotide
atcaattgcacgaatatgcacctggcgtaa

SEQ ID NO: 394154 - DNA, 30 bp, Artificial Sequence
  Synthetic oligonucleotide
catccgacttcgctgtcaggtgctgcgtaa

SEQ ID NO: 394155 - DNA, 30 bp, Artificial Sequence
  Synthetic oligonucleotide
gtttaaaagttgtcgtggcttggatcgtaa

SEQ ID NO: 394156 - DNA, 30 bp, Artificial Sequence
  Synthetic oligonucleotide
ccctgagtgcgccgttctgactactcgtaa

SEQ ID NO: 394157 - DNA, 30 bp, Artificial Sequence
  Synthetic oligonucleotide
atattgagcgagaccgcgcacgattcgtaa

SEQ ID NO: 394158 - DNA, 30 bp, Artificial Sequence
  Synthetic oligonucleotide
tgcttttagcagaatccctgcgctaggtaa

SEQ ID NO: 394159 - DNA, 30 bp, Artificial Sequence
  Synthetic oligonucleotide
agtcccagaagtttaacaactgctaggtaa

SEQ ID NO: 394160 - DNA, 30 bp, Artificial Sequence
  Synthetic oligonucleotide
accaattgatgtttcaatcagtctaggtaa

SEQ ID NO: 394161 - DNA, 30 bp, Artificial Sequence
  Synthetic oligonucleotide
aaaagacggctattacaaactagtaggtaa

SEQ ID NO: 394162 - DNA, 30 bp, Artificial Sequence
  Synthetic oligonucleotide
atttccattgatggcatgtagcttaggtaa

SEQ ID NO: 394163 - DNA, 30 bp, Artificial Sequence
  Synthetic oligonucleotide
ccagtcactaccggagtctcacgacggtaa

SEQ ID NO: 394164 - DNA, 30 bp, Artificial Sequence
  Synthetic oligonucleotide
gggaacacatacttcaactcctgacggtaa

SEQ ID NO: 394165 - DNA, 30 bp, Artificial Sequence
  Synthetic oligonucleotide
aaatcaggtacgcaaccgatgctacggtaa

SEQ ID NO: 394166 - DNA, 30 bp, Artificial Sequence
  Synthetic oligonucleotide
aatgtcgactttcgctgagaaagccggtaa

SEQ ID NO: 394167 - DNA, 30 bp, Artificial Sequence
  Synthetic oligonucleotide
tccgatttactctgaacccgtcctcggtaa

SEQ ID NO: 394168 - DNA, 30 bp, Artificial Sequence
  Synthetic oligonucleotide
gctggaacacttctcaatgtgagagggtaa

SEQ ID NO: 394169 - DNA, 30 bp, Artificial Sequence
  Synthetic oligonucleotide
acttctcgtagtcctctcttgctagggtaa

SEQ ID NO: 394170 - DNA, 30 bp, Artificial Sequence
  Synthetic oligonucleotide
acttacttgaaactttgaaataacgggtaa

SEQ ID NO: 394171 - DNA, 30 bp, Artificial Sequence
  Synthetic oligonucleotide
ttcaactcggtgtgtgcagaacacgggtaa

SEQ ID NO: 394172 - DNA, 30 bp, Artificial Sequence
  Synthetic oligonucleotide
tactcccatccttcaatattatacgggtaa

SEQ ID NO: 394173 - DNA, 30 bp, Artificial Sequence
  Synthetic oligonucleotide
gtccagatatcgaaatatcgattcgggtaa

SEQ ID NO: 394174 - DNA, 30 bp, Artificial Sequence
  Synthetic oligonucleotide
cataatagcttccactgcgacaaggggtaa

SEQ ID NO: 394175 - DNA, 30 bp, Artificial Sequence
  Synthetic oligonucleotide
accgacttaggcgttgatgtcacggggtaa

SEQ ID NO: 394176 - DNA, 30 bp, Artificial Sequence
  Synthetic oligonucleotide
ggtagagctaaaaggagcttaaatgggtaa

SEQ ID NO: 394177 - DNA, 30 bp, Artificial Sequence
  Synthetic oligonucleotide
ggtcttaatccaatgagtcgtgatgggtaa

SEQ ID NO: 394178 - DNA, 30 bp, Artificial Sequence
  Synthetic oligonucleotide
ccatcagggttcttgctgacaggtgggtaa

SEQ ID NO: 394179 - DNA, 30 bp, Artificial Sequence
  Synthetic oligonucleotide
agcgatcattcgcccgatatgattgggtaa

SEQ ID NO: 394180 - DNA, 30 bp, Artificial Sequence
  Synthetic oligonucleotide
ttgaaatgctaattgttaatcccatggtaa

SEQ ID NO: 394181 - DNA, 30 bp, Artificial Sequence
  Synthetic oligonucleotide
cgatacacaggtcgttgaggcgcatggtaa

SEQ ID NO: 394182 - DNA, 30 bp, Artificial Sequence
  Synthetic oligonucleotide
ccagctcaccggtactgcatactatggtaa

SEQ ID NO: 394183 - DNA, 30 bp, Artificial Sequence
  Synthetic oligonucleotide
ttcacggaaccgcccattggcaactggtaa

SEQ ID NO: 394184 - DNA, 30 bp, Artificial Sequence
  Synthetic oligonucleotide
ccttgggcgccctagggctgtcactggtaa

SEQ ID NO: 394185 - DNA, 30 bp, Artificial Sequence
  Synthetic oligonucleotide
gagcgcgggccattcacgttgtactggtaa

SEQ ID NO: 394186 - DNA, 30 bp, Artificial Sequence
  Synthetic oligonucleotide
agttaatacaacacattactcacctggtaa

SEQ ID NO: 394187 - DNA, 30 bp, Artificial Sequence
  Synthetic oligonucleotide
aagaacgctcatatgacgattaagtggtaa

SEQ ID NO: 394188 - DNA, 30 bp, Artificial Sequence
  Synthetic oligonucleotide
ttctacgttttgtgcgatttctcgtggtaa

SEQ ID NO: 394189 - DNA, 30 bp, Artificial Sequence
  Synthetic oligonucleotide
tctatgatggatagcggttgggggtggtaa

SEQ ID NO: 394190 - DNA, 30 bp, Artificial Sequence
  Synthetic oligonucleotide
gctaggacgcctttttcgaaaaattggtaa

SEQ ID NO: 394191 - DNA, 30 bp, Artificial Sequence
  Synthetic oligonucleotide
aagaatcatcatatttactaaaattggtaa

SEQ ID NO: 394192 - DNA, 30 bp, Artificial Sequence
  Synthetic oligonucleotide
aagaatgccaattgtcttgggggttggtaa

SEQ ID NO: 394193 - DNA, 30 bp, Artificial Sequence
  Synthetic oligonucleotide
aagaagaaatcgttagatttgggcatgtaa

SEQ ID NO: 394194 - DNA, 30 bp, Artificial Sequence
  Synthetic oligonucleotide
cggaccaacgccttggaacggcagatgtaa

SEQ ID NO: 394195 - DNA, 30 bp, Artificial Sequence
  Synthetic oligonucleotide
acatactgagcacgttgcggcaggatgtaa

SEQ ID NO: 394196 - DNA, 30 bp, Artificial Sequence
  Synthetic oligonucleotide
gcggcagtattttgtttccccctgatgtaa

SEQ ID NO: 394197 - DNA, 30 bp, Artificial Sequence
  Synthetic oligonucleotide
attggatcgtgcttggctgtatagctgtaa

SEQ ID NO: 394198 - DNA, 30 bp, Artificial Sequence
  Synthetic oligonucleotide
cgatcacgcgctggctttggttttctgtaa

SEQ ID NO: 394199 - DNA, 30 bp, Artificial Sequence
  Synthetic oligonucleotide
tgttctcgcgcctacggtcgaatagtgtaa

SEQ ID NO: 394200 - DNA, 30 bp, Artificial Sequence
  Synthetic oligonucleotide
tataaagacttggtggtgggctacgtgtaa

SEQ ID NO: 394201 - DNA, 30 bp, Artificial Sequence
  Synthetic oligonucleotide
aaagcaacctggtacgtagcgttcgtgtaa

SEQ ID NO: 394202 - DNA, 30 bp, Artificial Sequence
  Synthetic oligonucleotide
tataccatcaactgtagggtaatggtgtaa

SEQ ID NO: 394203 - DNA, 30 bp, Artificial Sequence
  Synthetic oligonucleotide
gtagtacggtcctcttggtgatgtgtgtaa

SEQ ID NO: 394204 - DNA, 30 bp, Artificial Sequence
  Synthetic oligonucleotide
atcaaaattgctgtccatttatgtgtgtaa

SEQ ID NO: 394205 - DNA, 30 bp, Artificial Sequence
  Synthetic oligonucleotide
acctccgccgacaggccgccacttgtgtaa

SEQ ID NO: 394206 - DNA, 30 bp, Artificial Sequence
  Synthetic oligonucleotide
tgcgcttttatccctgctacttttgtgtaa

SEQ ID NO: 394207 - DNA, 30 bp, Artificial Sequence
  Synthetic oligonucleotide
gaagtactgcgattgagacgaaaattgtaa

SEQ ID NO: 394208 - DNA, 30 bp, Artificial Sequence
  Synthetic oligonucleotide
tacggagtttgataggtataggccttgtaa

SEQ ID NO: 394209 - DNA, 30 bp, Artificial Sequence
  Synthetic oligonucleotide
ggggccgtagcggctagggtccggttgtaa

SEQ ID NO: 394210 - DNA, 30 bp, Artificial Sequence
  Synthetic oligonucleotide
gagtaactgggatgagtactttggttgtaa

SEQ ID NO: 394211 - DNA, 30 bp, Artificial Sequence
  Synthetic oligonucleotide
ggagggttcacactgtagcacaatttgtaa

SEQ ID NO: 394212 - DNA, 30 bp, Artificial Sequence
  Synthetic oligonucleotide
gagaagagaacctgcggttactgtttgtaa

SEQ ID NO: 394213 - DNA, 30 bp, Artificial Sequence
  Synthetic oligonucleotide
agtgcatattatgcaaagattattttgtaa

SEQ ID NO: 394214 - DNA, 30 bp, Artificial Sequence
  Synthetic oligonucleotide
tgcttagtttggctctaccggcttttgtaa

SEQ ID NO: 394215 - DNA, 30 bp, Artificial Sequence
  Synthetic oligonucleotide
ttctaatggcaattttggtgggcaaattaa

SEQ ID NO: 394216 - DNA, 30 bp, Artificial Sequence
  Synthetic oligonucleotide
agtggtccgtttcatgccggtgcaaattaa

SEQ ID NO: 394217 - DNA, 30 bp, Artificial Sequence
  Synthetic oligonucleotide
gcagaaacaacaacatgaggcagaaattaa

SEQ ID NO: 394218 - DNA, 30 bp, Artificial Sequence
  Synthetic oligonucleotide
ttaaaaaagatgcgttaactcataaattaa

SEQ ID NO: 394219 - DNA, 30 bp, Artificial Sequence
  Synthetic oligonucleotide
tatcaaaacgcttgcatgcccaacaattaa

SEQ ID NO: 394220 - DNA, 29 bp, Artificial Sequence
  Synthetic oligonucleotide
tgccagaatgaacactgcaaggcaattaa

SEQ ID NO: 394221 - DNA, 30 bp, Artificial Sequence
  Synthetic oligonucleotide
ttttatgctttagccgtgcggaagaattaa

SEQ ID NO: 394222 - DNA, 30 bp, Artificial Sequence
  Synthetic oligonucleotide
ctactttagacgacgattgaacagaattaa

SEQ ID NO: 394223 - DNA, 30 bp, Artificial Sequence
  Synthetic oligonucleotide
attgatggtaaacactgctacgctaattaa

SEQ ID NO: 394224 - DNA, 30 bp, Artificial Sequence
  Synthetic oligonucleotide
tgcagtccttccgctgccaccgctaattaa

SEQ ID NO: 394225 - DNA, 30 bp, Artificial Sequence
  Synthetic oligonucleotide
tccaagcacacactaatataatctaattaa

SEQ ID NO: 394226 - DNA, 30 bp, Artificial Sequence
  Synthetic oligonucleotide
ggaccccaaaagcccaaggtttctaattaa

SEQ ID NO: 394227 - DNA, 30 bp, Artificial Sequence
  Synthetic oligonucleotide
gaacacttccgatacgtaccctttaattaa

SEQ ID NO: 394228 - DNA, 30 bp, Artificial Sequence
  Synthetic oligonucleotide
tatcttcgtcggttcatgtgtctacattaa

SEQ ID NO: 394229 - DNA, 30 bp, Artificial Sequence
  Synthetic oligonucleotide
cgcggatacgcaacatttcagtcccattaa

SEQ ID NO: 394230 - DNA, 30 bp, Artificial Sequence
  Synthetic oligonucleotide
tgcgagcatgatgcttgcagcagccattaa

SEQ ID NO: 394231 - DNA, 30 bp, Artificial Sequence
  Synthetic oligonucleotide
ggtgtgggagcttgacaccttaatcattaa

SEQ ID NO: 394232 - DNA, 30 bp, Artificial Sequence
  Synthetic oligonucleotide
tggtcaccccgcgcaatcatagaagattaa

SEQ ID NO: 394233 - DNA, 30 bp, Artificial Sequence
  Synthetic oligonucleotide
tgcatgcacgcgaaagcaccaggagattaa

SEQ ID NO: 394234 - DNA, 30 bp, Artificial Sequence
  Synthetic oligonucleotide
tagagcgttgcagtctagtcacaggattaa

SEQ ID NO: 394235 - DNA, 30 bp, Artificial Sequence
  Synthetic oligonucleotide
acaacaccgctttcagacgtctcggattaa

SEQ ID NO: 394236 - DNA, 30 bp, Artificial Sequence
  Synthetic oligonucleotide
atcagaacaaccaatcactccggggattaa

SEQ ID NO: 394237 - DNA, 30 bp, Artificial Sequence
  Synthetic oligonucleotide
ccgcagactcgccctcgaattaatgattaa

SEQ ID NO: 394238 - DNA, 30 bp, Artificial Sequence
  Synthetic oligonucleotide
taccgtaatacgccacctttccatgattaa

SEQ ID NO: 394239 - DNA, 30 bp, Artificial Sequence
  Synthetic oligonucleotide
tttcaatctatcacagaaaatcgtgattaa

SEQ ID NO: 394240 - DNA, 30 bp, Artificial Sequence
  Synthetic oligonucleotide
tacccgctgtcctaggtaaggggtgattaa

SEQ ID NO: 394241 - DNA, 30 bp, Artificial Sequence
  Synthetic oligonucleotide
atacttaagcgaacaaccctaagatattaa

SEQ ID NO: 394242 - DNA, 30 bp, Artificial Sequence
  Synthetic oligonucleotide
aagagggtcttagtctcagcatgatattaa

SEQ ID NO: 394243 - DNA, 30 bp, Artificial Sequence
  Synthetic oligonucleotide
tttagtacccgtaggctcgatctatattaa

SEQ ID NO: 394244 - DNA, 30 bp, Artificial Sequence
  Synthetic oligonucleotide
ccatcatgaaaggattcgtgattatattaa

SEQ ID NO: 394245 - DNA, 30 bp, Artificial Sequence
  Synthetic oligonucleotide
tcaccagcgaggtatcgccaggggtattaa

SEQ ID NO: 394246 - DNA, 30 bp, Artificial Sequence
  Synthetic oligonucleotide
ccaaacgctaagaaccgtgggcattattaa

SEQ ID NO: 394247 - DNA, 30 bp, Artificial Sequence
  Synthetic oligonucleotide
gctttagcggcacagtaattctgttattaa

SEQ ID NO: 394248 - DNA, 30 bp, Artificial Sequence
  Synthetic oligonucleotide
aaacattagatacgtgtcttcgcaacttaa

SEQ ID NO: 394249 - DNA, 31 bp, Artificial Sequence
  Synthetic oligonucleotide
aaaggtcggagtggctgtggtcagaacttaa

SEQ ID NO: 394250 - DNA, 30 bp, Artificial Sequence
  Synthetic oligonucleotide
acgcattcccattgtgctctcatcacttaa

SEQ ID NO: 394251 - DNA, 30 bp, Artificial Sequence
  Synthetic oligonucleotide
agttattcgttgttgggttttctcacttaa

SEQ ID NO: 394252 - DNA, 30 bp, Artificial Sequence
  Synthetic oligonucleotide
taaacccagtttgctcagtctgtcacttaa

SEQ ID NO: 394253 - DNA, 30 bp, Artificial Sequence
  Synthetic oligonucleotide
gccaaattgcaaaaactctttaagacttaa

SEQ ID NO: 394254 - DNA, 30 bp, Artificial Sequence
  Synthetic oligonucleotide
taagcttggtagtgttctcagcagacttaa

SEQ ID NO: 394255 - DNA, 30 bp, Artificial Sequence
  Synthetic oligonucleotide
cagtagaaacttctgtctacctggacttaa

SEQ ID NO: 394256 - DNA, 30 bp, Artificial Sequence
  Synthetic oligonucleotide
tgatttcggctctggttctaactgacttaa

SEQ ID NO: 394257 - DNA, 30 bp, Artificial Sequence
  Synthetic oligonucleotide
tacgcatatcactcttgttggaatacttaa

SEQ ID NO: 394258 - DNA, 30 bp, Artificial Sequence
  Synthetic oligonucleotide
agcttcaacaagctgctataggttacttaa

SEQ ID NO: 394259 - DNA, 31 bp, Artificial Sequence
  Synthetic oligonucleotide
atgttcttaagccagtattggtgttacttaa

SEQ ID NO: 394260 - DNA, 30 bp, Artificial Sequence
  Synthetic oligonucleotide
tctcgggcagatgacggcatagaaccttaa

SEQ ID NO: 394261 - DNA, 30 bp, Artificial Sequence
  Synthetic oligonucleotide
taatcggagcggataggacggaacccttaa

SEQ ID NO: 394262 - DNA, 30 bp, Artificial Sequence
  Synthetic oligonucleotide
tcgcaaaactcaaggtcatatcacccttaa

SEQ ID NO: 394263 - DNA, 30 bp, Artificial Sequence
  Synthetic oligonucleotide
atagaacaataggtcgttaaggacccttaa

SEQ ID NO: 394264 - DNA, 30 bp, Artificial Sequence
  Synthetic oligonucleotide
gaggccgttaaacgctagcataccccttaa

SEQ ID NO: 394265 - DNA, 30 bp, Artificial Sequence
  Synthetic oligonucleotide
tgtcaattacttgcactccccatcccttaa

SEQ ID NO: 394266 - DNA, 30 bp, Artificial Sequence
  Synthetic oligonucleotide
ttatattgaacgggtgactggatcccttaa

SEQ ID NO: 394267 - DNA, 30 bp, Artificial Sequence
  Synthetic oligonucleotide
tatagtgattattccttttaagtgccttaa

SEQ ID NO: 394268 - DNA, 30 bp, Artificial Sequence
  Synthetic oligonucleotide
gcagcatacggtgagctatccgtgccttaa

SEQ ID NO: 394269 - DNA, 30 bp, Artificial Sequence
  Synthetic oligonucleotide
gggtatacaatttaggaccacggtccttaa

SEQ ID NO: 394270 - DNA, 30 bp, Artificial Sequence
  Synthetic oligonucleotide
gattagccaccttgtaacctccaagcttaa

SEQ ID NO: 394271 - DNA, 30 bp, Artificial Sequence
  Synthetic oligonucleotide
tctgattccatgcgtatccaatacgcttaa

SEQ ID NO: 394272 - DNA, 30 bp, Artificial Sequence
  Synthetic oligonucleotide
ccacagcgatcggtgggtacgagggcttaa

SEQ ID NO: 394273 - DNA, 30 bp, Artificial Sequence
  Synthetic oligonucleotide
ttccgatgatagttgaaggcaagtgcttaa

SEQ ID NO: 394274 - DNA, 30 bp, Artificial Sequence
  Synthetic oligonucleotide
acctcgggtttcgcctccagatgtgcttaa

SEQ ID NO: 394275 - DNA, 30 bp, Artificial Sequence
  Synthetic oligonucleotide
ggatctagggttcgtttcagtcttgcttaa

SEQ ID NO: 394276 - DNA, 30 bp, Artificial Sequence
  Synthetic oligonucleotide
acgtggggattggtacaaaaaaaatcttaa

SEQ ID NO: 394277 - DNA, 30 bp, Artificial Sequence
  Synthetic oligonucleotide
ggcgtccctacgatcggtggtgtatcttaa

SEQ ID NO: 394278 - DNA, 30 bp, Artificial Sequence
  Synthetic oligonucleotide
tcaatagcacgatcattatgggactcttaa

SEQ ID NO: 394279 - DNA, 30 bp, Artificial Sequence
  Synthetic oligonucleotide
tgatgttcgatgagtgatctcacctcttaa

SEQ ID NO: 394280 - DNA, 30 bp, Artificial Sequence
  Synthetic oligonucleotide
ataaagctgaattgcgtttacaagtcttaa

SEQ ID NO: 394281 - DNA, 30 bp, Artificial Sequence
  Synthetic oligonucleotide
tatgtccaaattcagcacatccagtcttaa

SEQ ID NO: 394282 - DNA, 30 bp, Artificial Sequence
  Synthetic oligonucleotide
gacggattctcaggcagcccagagtcttaa

SEQ ID NO: 394283 - DNA, 30 bp, Artificial Sequence
  Synthetic oligonucleotide
ctgaatagacacaatggcggtacttcttaa

SEQ ID NO: 394284 - DNA, 30 bp, Artificial Sequence
  Synthetic oligonucleotide
tgtgtctcccacaaaagcgtgccttcttaa

SEQ ID NO: 394285 - DNA, 30 bp, Artificial Sequence
  Synthetic oligonucleotide
tggcacaaatttgtgacatgtgcttcttaa

SEQ ID NO: 394286 - DNA, 30 bp, Artificial Sequence
  Synthetic oligonucleotide
ttgtctcccatcgctctcaagagttcttaa

SEQ ID NO: 394287 - DNA, 30 bp, Artificial Sequence
  Synthetic oligonucleotide
ttttgagaacgactctaccgtataagttaa

SEQ ID NO: 394288 - DNA, 30 bp, Artificial Sequence
  Synthetic oligonucleotide
atggaccatgacccgcagtacctaagttaa

SEQ ID NO: 394289 - DNA, 30 bp, Artificial Sequence
  Synthetic oligonucleotide
gggtcgttacttcggttaatggacagttaa

SEQ ID NO: 394290 - DNA, 30 bp, Artificial Sequence
  Synthetic oligonucleotide
atttccaagtccattctagttgggagttaa

SEQ ID NO: 394291 - DNA, 30 bp, Artificial Sequence
  Synthetic oligonucleotide
ttgggcgcacaagttctagtatggagttaa

SEQ ID NO: 394292 - DNA, 30 bp, Artificial Sequence
  Synthetic oligonucleotide
gatgccattgttccggtaaaggtgagttaa

SEQ ID NO: 394293 - DNA, 30 bp, Artificial Sequence
  Synthetic oligonucleotide
acccgcttagagagctcgctatcacgttaa

SEQ ID NO: 394294 - DNA, 30 bp, Artificial Sequence
  Synthetic oligonucleotide
gcatattgtggatcagagttcaaccgttaa

SEQ ID NO: 394295 - DNA, 30 bp, Artificial Sequence
  Synthetic oligonucleotide
tcttatcggtgcagttgttggagccgttaa

SEQ ID NO: 394296 - DNA, 29 bp, Artificial Sequence
  Synthetic oligonucleotide
aaactacttagcgggcatcgtgccgttaa

SEQ ID NO: 394297 - DNA, 31 bp, Artificial Sequence
  Synthetic oligonucleotide
ggcccggtacttttcttaatcagtccgttaa

SEQ ID NO: 394298 - DNA, 30 bp, Artificial Sequence
  Synthetic oligonucleotide
cttgaacaactagatatggaattccgttaa

SEQ ID NO: 394299 - DNA, 30 bp, Artificial Sequence
  Synthetic oligonucleotide
accttcggattcaaaggatttcggcgttaa

SEQ ID NO: 394300 - DNA, 30 bp, Artificial Sequence
  Synthetic oligonucleotide
ggtgacgaacatatcgcaccgatgcgttaa

SEQ ID NO: 394301 - DNA, 30 bp, Artificial Sequence
  Synthetic oligonucleotide
atgtcaaagacgtgctaatggctgcgttaa

SEQ ID NO: 394302 - DNA, 30 bp, Artificial Sequence
  Synthetic oligonucleotide
tatgtggcgttatcctcattctctcgttaa

SEQ ID NO: 394303 - DNA, 30 bp, Artificial Sequence
  Synthetic oligonucleotide
taaacacgccaaactagatatattcgttaa

SEQ ID NO: 394304 - DNA, 30 bp, Artificial Sequence
  Synthetic oligonucleotide
ctgtggccatttcgataaggttttcgttaa

SEQ ID NO: 394305 - DNA, 30 bp, Artificial Sequence
  Synthetic oligonucleotide
ctcgcgctaatctcagtttgttttcgttaa

SEQ ID NO: 394306 - DNA, 30 bp, Artificial Sequence
  Synthetic oligonucleotide
ctgcctcatcgatggtgacgcttaggttaa

SEQ ID NO: 394307 - DNA, 30 bp, Artificial Sequence
  Synthetic oligonucleotide
ctaaaggtgttaggttctccaaccggttaa

SEQ ID NO: 394308 - DNA, 30 bp, Artificial Sequence
  Synthetic oligonucleotide
gcctccccacgacattacgcattcggttaa

SEQ ID NO: 394309 - DNA, 30 bp, Artificial Sequence
  Synthetic oligonucleotide
ttattcggtaaggtacttatgacgggttaa

SEQ ID NO: 394310 - DNA, 30 bp, Artificial Sequence
  Synthetic oligonucleotide
ataatagagcgcgctattggaccgggttaa

SEQ ID NO: 394311 - DNA, 30 bp, Artificial Sequence
  Synthetic oligonucleotide
ggaagccccgccattgtgccgagtggttaa

SEQ ID NO: 394312 - DNA, 30 bp, Artificial Sequence
  Synthetic oligonucleotide
ccgattatgtaacgacgattggaatgttaa

SEQ ID NO: 394313 - DNA, 30 bp, Artificial Sequence
  Synthetic oligonucleotide
cctaaaattcctctgatatcaccatgttaa

SEQ ID NO: 394314 - DNA, 30 bp, Artificial Sequence
  Synthetic oligonucleotide
cttaaaagttagaagatcttagtatgttaa

SEQ ID NO: 394315 - DNA, 30 bp, Artificial Sequence
  Synthetic oligonucleotide
tagtcctccagactttgtcgggactgttaa

SEQ ID NO: 394316 - DNA, 30 bp, Artificial Sequence
  Synthetic oligonucleotide
agtccctcagtaacagccggttactgttaa

SEQ ID NO: 394317 - DNA, 30 bp, Artificial Sequence
  Synthetic oligonucleotide
gagtaatcgaggatagccaattcctgttaa

SEQ ID NO: 394318 - DNA, 30 bp, Artificial Sequence
  Synthetic oligonucleotide
gtgttccttgccgtataagagagctgttaa

SEQ ID NO: 394319 - DNA, 30 bp, Artificial Sequence
  Synthetic oligonucleotide
atgaagcgtacagagacaatttgctgttaa

SEQ ID NO: 394320 - DNA, 30 bp, Artificial Sequence
  Synthetic oligonucleotide
gcctagatatgtgtacacttgaagtgttaa

SEQ ID NO: 394321 - DNA, 30 bp, Artificial Sequence
  Synthetic oligonucleotide
cagttgcgcgttgtcaccgttaagtgttaa

SEQ ID NO: 394322 - DNA, 30 bp, Artificial Sequence
  Synthetic oligonucleotide
tttcgcagtcaaaagttaaatgggtgttaa

SEQ ID NO: 394323 - DNA, 30 bp, Artificial Sequence
  Synthetic oligonucleotide
gttagacgtaaggcattagactggtgttaa

SEQ ID NO: 394324 - DNA, 30 bp, Artificial Sequence
  Synthetic oligonucleotide
aggcgcactctcgctggttacatgtgttaa

SEQ ID NO: 394325 - DNA, 30 bp, Artificial Sequence
  Synthetic oligonucleotide
tcagcactgggtgtgcgctttgattgttaa

SEQ ID NO: 394326 - DNA, 30 bp, Artificial Sequence
  Synthetic oligonucleotide
gagtatgtcacgttaactgtgtattgttaa

SEQ ID NO: 394327 - DNA, 30 bp, Artificial Sequence
  Synthetic oligonucleotide
tagctcaagctcaaggccctacgaatttaa

SEQ ID NO: 394328 - DNA, 30 bp, Artificial Sequence
  Synthetic oligonucleotide
gcataaagagtcggtcaagaccgaatttaa

SEQ ID NO: 394329 - DNA, 30 bp, Artificial Sequence
  Synthetic oligonucleotide
accgtcccggttttcccggccgtaatttaa

SEQ ID NO: 394330 - DNA, 30 bp, Artificial Sequence
  Synthetic oligonucleotide
gctggcaccgtaaccctatgggtaatttaa

SEQ ID NO: 394331 - DNA, 30 bp, Artificial Sequence
  Synthetic oligonucleotide
aaacgtataggtctaacgtataacatttaa

SEQ ID NO: 394332 - DNA, 30 bp, Artificial Sequence
  Synthetic oligonucleotide
atcgttttgctaaaggattgcttcatttaa

SEQ ID NO: 394333 - DNA, 30 bp, Artificial Sequence
  Synthetic oligonucleotide
actcggggacgtctggtggagttcatttaa

SEQ ID NO: 394334 - DNA, 30 bp, Artificial Sequence
  Synthetic oligonucleotide
ctgccgttaacgggaaaggcgcagatttaa

SEQ ID NO: 394335 - DNA, 30 bp, Artificial Sequence
  Synthetic oligonucleotide
tccctgacccagggcaagtaaacgatttaa

SEQ ID NO: 394336 - DNA, 30 bp, Artificial Sequence
  Synthetic oligonucleotide
acagggccttaaagccgccgctcgatttaa

SEQ ID NO: 394337 - DNA, 30 bp, Artificial Sequence
  Synthetic oligonucleotide
agtatactagaggtatcgtccatgatttaa

SEQ ID NO: 394338 - DNA, 30 bp, Artificial Sequence
  Synthetic oligonucleotide
gagctgttcgggtgcgctcagaatatttaa

SEQ ID NO: 394339 - DNA, 30 bp, Artificial Sequence
  Synthetic oligonucleotide
ctctcgtcgacatgctcagttcatatttaa

SEQ ID NO: 394340 - DNA, 30 bp, Artificial Sequence
  Synthetic oligonucleotide
tcctctcgactctgttctacacgtatttaa

SEQ ID NO: 394341 - DNA, 30 bp, Artificial Sequence
  Synthetic oligonucleotide
tagctcagggaacactccctagaactttaa

SEQ ID NO: 394342 - DNA, 30 bp, Artificial Sequence
  Synthetic oligonucleotide
atcgtgaacgcttggagagttgaactttaa

SEQ ID NO: 394343 - DNA, 30 bp, Artificial Sequence
  Synthetic oligonucleotide
ggtaatttactaaacggctcataactttaa

SEQ ID NO: 394344 - DNA, 30 bp, Artificial Sequence
  Synthetic oligonucleotide
tatgccagttcgtcccacgttgtactttaa

SEQ ID NO: 394345 - DNA, 30 bp, Artificial Sequence
  Synthetic oligonucleotide
cggttaacacttcccgattgtgacctttaa

SEQ ID NO: 394346 - DNA, 30 bp, Artificial Sequence
  Synthetic oligonucleotide
aaaaattgacttaaatgggagagcctttaa

SEQ ID NO: 394347 - DNA, 30 bp, Artificial Sequence
  Synthetic oligonucleotide
cctaattgtagtggggatcgcttcctttaa

SEQ ID NO: 394348 - DNA, 30 bp, Artificial Sequence
  Synthetic oligonucleotide
caccctgggatataaatatccaatctttaa

SEQ ID NO: 394349 - DNA, 30 bp, Artificial Sequence
  Synthetic oligonucleotide
aaattattttgcgataagtagactctttaa

SEQ ID NO: 394350 - DNA, 30 bp, Artificial Sequence
  Synthetic oligonucleotide
gtccacacgtcggtccgcggaacagtttaa

SEQ ID NO: 394351 - DNA, 30 bp, Artificial Sequence
  Synthetic oligonucleotide
aacaaatgtgggtacagttcgccagtttaa

SEQ ID NO: 394352 - DNA, 30 bp, Artificial Sequence
  Synthetic oligonucleotide
cgtggtgcgatccctacgcttcacgtttaa

SEQ ID NO: 394353 - DNA, 30 bp, Artificial Sequence
  Synthetic oligonucleotide
ggtaacgcgcgtatcgatgcctacgtttaa

SEQ ID NO: 394354 - DNA, 30 bp, Artificial Sequence
  Synthetic oligonucleotide
atcccgagccagaaatctactggcgtttaa

SEQ ID NO: 394355 - DNA, 30 bp, Artificial Sequence
  Synthetic oligonucleotide
gttgcatttatagttgacagagaggtttaa

SEQ ID NO: 394356 - DNA, 31 bp, Artificial Sequence
  Synthetic oligonucleotide
ttaatagaagtaaagtgttgtataggtttaa

SEQ ID NO: 394357 - DNA, 31 bp, Artificial Sequence
  Synthetic oligonucleotide
gaccgccggggcatgttaccaaagggtttaa

SEQ ID NO: 394358 - DNA, 30 bp, Artificial Sequence
  Synthetic oligonucleotide
cccattgtttgccgacggattttggtttaa

SEQ ID NO: 394359 - DNA, 30 bp, Artificial Sequence
  Synthetic oligonucleotide
atcattcactcatgcggctatgctgtttaa

SEQ ID NO: 394360 - DNA, 30 bp, Artificial Sequence
  Synthetic oligonucleotide
gtgtaaggtttggtggggaaccgtgtttaa

SEQ ID NO: 394361 - DNA, 30 bp, Artificial Sequence
  Synthetic oligonucleotide
ctcttcatcccagactaggaaattgtttaa

SEQ ID NO: 394362 - DNA, 30 bp, Artificial Sequence
  Synthetic oligonucleotide
actccataacgattagacagaattgtttaa

SEQ ID NO: 394363 - DNA, 30 bp, Artificial Sequence
  Synthetic oligonucleotide
taccatggtacggttaggcgctttgtttaa

SEQ ID NO: 394364 - DNA, 30 bp, Artificial Sequence
  Synthetic oligonucleotide
gataggtctcgaaccgcaagtaaattttaa

SEQ ID NO: 394365 - DNA, 30 bp, Artificial Sequence
  Synthetic oligonucleotide
ttacgctaatcagtataaggctaattttaa

SEQ ID NO: 394366 - DNA, 30 bp, Artificial Sequence
  Synthetic oligonucleotide
tgaattgccagactggcctcgtgattttaa

SEQ ID NO: 394367 - DNA, 30 bp, Artificial Sequence
  Synthetic oligonucleotide
ttcgggattgcgagcaacattgtattttaa

SEQ ID NO: 394368 - DNA, 30 bp, Artificial Sequence
  Synthetic oligonucleotide
tagtacggagatatggggctcggcttttaa

SEQ ID NO: 394369 - DNA, 30 bp, Artificial Sequence
  Synthetic oligonucleotide
tgcgctgttagagcaacatagtggttttaa

SEQ ID NO: 394370 - DNA, 30 bp, Artificial Sequence
  Synthetic oligonucleotide
cgctgactacctgaattggtaatgttttaa

SEQ ID NO: 394371 - DNA, 30 bp, Artificial Sequence
  Synthetic oligonucleotide
tttagaacggctccaaaatcgctgttttaa

SEQ ID NO: 394372 - DNA, 30 bp, Artificial Sequence
  Synthetic oligonucleotide
ttgtttgtgatcgagaagggtggtttttaa

SEQ ID NO: 394373 - DNA, 30 bp, Artificial Sequence
  Synthetic oligonucleotide
agtattttactgacgcgtatgcttttttaa

SEQ ID NO: 394374 - DNA, 30 bp, Artificial Sequence
  Synthetic oligonucleotide
atactacattgttgcatgttgcaaaaaaca

SEQ ID NO: 394375 - DNA, 30 bp, Artificial Sequence
  Synthetic oligonucleotide
tcgagtgagttaaccatggtataaaaaaca

SEQ ID NO: 394376 - DNA, 30 bp, Artificial Sequence
  Synthetic oligonucleotide
attccactagaggcctaagccagaaaaaca

SEQ ID NO: 394377 - DNA, 30 bp, Artificial Sequence
  Synthetic oligonucleotide
aagcatcttccggtcatgtgtttaaaaaca

SEQ ID NO: 394378 - DNA, 30 bp, Artificial Sequence
  Synthetic oligonucleotide
ctatcctgtataggccataggagcaaaaca

SEQ ID NO: 394379 - DNA, 30 bp, Artificial Sequence
  Synthetic oligonucleotide
caagaagttggcatgtagggtcagaaaaca

SEQ ID NO: 394380 - DNA, 30 bp, Artificial Sequence
  Synthetic oligonucleotide
gacgatttttggggcgttgtaatgaaaaca

SEQ ID NO: 394381 - DNA, 30 bp, Artificial Sequence
  Synthetic oligonucleotide
ttctgttgggtcataatgcggactaaaaca

SEQ ID NO: 394382 - DNA, 31 bp, Artificial Sequence
  Synthetic oligonucleotide
aagtgatgaaatttatgccatagagcaaaca

SEQ ID NO: 394383 - DNA, 30 bp, Artificial Sequence
  Synthetic oligonucleotide
aacttttacgcatgtaaggctaggcaaaca

SEQ ID NO: 394384 - DNA, 30 bp, Artificial Sequence
  Synthetic oligonucleotide
agaggagggtccagggacccccggcaaaca

SEQ ID NO: 394385 - DNA, 30 bp, Artificial Sequence
  Synthetic oligonucleotide
ttgataggctgtttgcgaatagtgcaaaca

SEQ ID NO: 394386 - DNA, 30 bp, Artificial Sequence
  Synthetic oligonucleotide
gactacctccggtagctcacaccagaaaca

SEQ ID NO: 394387 - DNA, 30 bp, Artificial Sequence
  Synthetic oligonucleotide
ctaaagattagtttgcaaggcgcagaaaca

SEQ ID NO: 394388 - DNA, 30 bp, Artificial Sequence
  Synthetic oligonucleotide
attaatgatcgaactgtgcactgagaaaca

SEQ ID NO: 394389 - DNA, 30 bp, Artificial Sequence
  Synthetic oligonucleotide
gctgcttgatatctacgtctgctagaaaca

SEQ ID NO: 394390 - DNA, 30 bp, Artificial Sequence
  Synthetic oligonucleotide
ctactatcggcgcagttctaatccgaaaca

SEQ ID NO: 394391 - DNA, 30 bp, Artificial Sequence
  Synthetic oligonucleotide
ttagtggttctggtaccgcgattcgaaaca

SEQ ID NO: 394392 - DNA, 30 bp, Artificial Sequence
  Synthetic oligonucleotide
aagggatgttgccgtgcctctgaggaaaca

SEQ ID NO: 394393 - DNA, 30 bp, Artificial Sequence
  Synthetic oligonucleotide
caacttgcatacaactcgaaatgggaaaca

SEQ ID NO: 394394 - DNA, 30 bp, Artificial Sequence
  Synthetic oligonucleotide
ataactcatttggtcgatagccaataaaca

SEQ ID NO: 394395 - DNA, 30 bp, Artificial Sequence
  Synthetic oligonucleotide
attagaaaaacgggttggaatccataaaca

SEQ ID NO: 394396 - DNA, 30 bp, Artificial Sequence
  Synthetic oligonucleotide
tctgcgttgtgatctactttcatataaaca

SEQ ID NO: 394397 - DNA, 30 bp, Artificial Sequence
  Synthetic oligonucleotide
ttgtcaagggcaaaccattatgtataaaca

SEQ ID NO: 394398 - DNA, 30 bp, Artificial Sequence
  Synthetic oligonucleotide
ctcacagggtcacaggattacttataaaca

SEQ ID NO: 394399 - DNA, 30 bp, Artificial Sequence
  Synthetic oligonucleotide
tgagagcggtttaagttgatcgactaaaca

SEQ ID NO: 394400 - DNA, 30 bp, Artificial Sequence
  Synthetic oligonucleotide
gccgctgtacccagtgggtacccctaaaca

SEQ ID NO: 394401 - DNA, 30 bp, Artificial Sequence
  Synthetic oligonucleotide
caactccgaagatcgcatccacgctaaaca

SEQ ID NO: 394402 - DNA, 30 bp, Artificial Sequence
  Synthetic oligonucleotide
taaatgttgtagctggcaattcgctaaaca

SEQ ID NO: 394403 - DNA, 30 bp, Artificial Sequence
  Synthetic oligonucleotide
acgtaattcacgacatgttgcgtctaaaca

SEQ ID NO: 394404 - DNA, 30 bp, Artificial Sequence
  Synthetic oligonucleotide
tgtactcttggagtatgggcggcgtaaaca

SEQ ID NO: 394405 - DNA, 30 bp, Artificial Sequence
  Synthetic oligonucleotide
aaggggacaaaattgggataccattaaaca

SEQ ID NO: 394406 - DNA, 30 bp, Artificial Sequence
  Synthetic oligonucleotide
cttgtgatgcttagggactatgattaaaca

SEQ ID NO: 394407 - DNA, 30 bp, Artificial Sequence
  Synthetic oligonucleotide
acgtctctttagccccatatcggttaaaca

SEQ ID NO: 394408 - DNA, 30 bp, Artificial Sequence
  Synthetic oligonucleotide
cctctggggcacaagtgttgtgtttaaaca

SEQ ID NO: 394409 - DNA, 30 bp, Artificial Sequence
  Synthetic oligonucleotide
caattttggtgttcggaaacggaaacaaca

SEQ ID NO: 394410 - DNA, 30 bp, Artificial Sequence
  Synthetic oligonucleotide
ggaggcttagtttcgagccccctaacaaca

SEQ ID NO: 394411 - DNA, 30 bp, Artificial Sequence
  Synthetic oligonucleotide
gcacatcgcgtgtttagcacaaacacaaca

SEQ ID NO: 394412 - DNA, 30 bp, Artificial Sequence
  Synthetic oligonucleotide
tttgcttagagaggctggccttgcacaaca

SEQ ID NO: 394413 - DNA, 30 bp, Artificial Sequence
  Synthetic oligonucleotide
attctcccaggattaaataggatgacaaca

SEQ ID NO: 394414 - DNA, 30 bp, Artificial Sequence
  Synthetic oligonucleotide
tgtaaattgcgtacgtatggcattacaaca

SEQ ID NO: 394415 - DNA, 30 bp, Artificial Sequence
  Synthetic oligonucleotide
gcgacgctattcagatgaagtcgaccaaca

SEQ ID NO: 394416 - DNA, 30 bp, Artificial Sequence
  Synthetic oligonucleotide
agtttggagtaggtcacaaaaaacccaaca

SEQ ID NO: 394417 - DNA, 30 bp, Artificial Sequence
  Synthetic oligonucleotide
ggagacagctcaggatggaagaccccaaca

SEQ ID NO: 394418 - DNA, 30 bp, Artificial Sequence
  Synthetic oligonucleotide
agtcgtaatctcgcagctgttaagccaaca

SEQ ID NO: 394419 - DNA, 30 bp, Artificial Sequence
  Synthetic oligonucleotide
gaacaggacttgaacataacagagccaaca

SEQ ID NO: 394420 - DNA, 30 bp, Artificial Sequence
  Synthetic oligonucleotide
ggatttgctattgttactgtaacagcaaca

SEQ ID NO: 394421 - DNA, 30 bp, Artificial Sequence
  Synthetic oligonucleotide
ctagacaggactacagctcaggacgcaaca

SEQ ID NO: 394422 - DNA, 30 bp, Artificial Sequence
  Synthetic oligonucleotide
gaacgcagggcgagctgctctagcgcaaca

SEQ ID NO: 394423 - DNA, 30 bp, Artificial Sequence
  Synthetic oligonucleotide
tctgtttctaccagtcagttatgcgcaaca

SEQ ID NO: 394424 - DNA, 30 bp, Artificial Sequence
  Synthetic oligonucleotide
tgcgacacgatgagaatgtaaccctcaaca

SEQ ID NO: 394425 - DNA, 30 bp, Artificial Sequence
  Synthetic oligonucleotide
tattctgctagatggcttgaggagtcaaca

SEQ ID NO: 394426 - DNA, 30 bp, Artificial Sequence
  Synthetic oligonucleotide
ataacaaatatacaccgaccgcggtcaaca

SEQ ID NO: 394427 - DNA, 30 bp, Artificial Sequence
  Synthetic oligonucleotide
ttaggattgcatggctatacagggtcaaca

SEQ ID NO: 394428 - DNA, 29 bp, Artificial Sequence
  Synthetic oligonucleotide
tgtaggcgagttgttcacttcattcaaca

SEQ ID NO: 394429 - DNA, 30 bp, Artificial Sequence
  Synthetic oligonucleotide
tcgttgaatgtagggaattattattcaaca

SEQ ID NO: 394430 - DNA, 30 bp, Artificial Sequence
  Synthetic oligonucleotide
gtccgctgagagacctgccgagtttcaaca

SEQ ID NO: 394431 - DNA, 30 bp, Artificial Sequence
  Synthetic oligonucleotide
tattaaataacgggttctgtaagaagaaca

SEQ ID NO: 394432 - DNA, 30 bp, Artificial Sequence
  Synthetic oligonucleotide
tattagagcttatgtgttcaaggaagaaca

SEQ ID NO: 394433 - DNA, 30 bp, Artificial Sequence
  Synthetic oligonucleotide
aaccgatcattactttcgcccataagaaca

SEQ ID NO: 394434 - DNA, 30 bp, Artificial Sequence
  Synthetic oligonucleotide
caccatatggcccgtcgtcagcacagaaca

SEQ ID NO: 394435 - DNA, 30 bp, Artificial Sequence
  Synthetic oligonucleotide
gggaggtcaattttctggatttacagaaca

SEQ ID NO: 394436 - DNA, 30 bp, Artificial Sequence
  Synthetic oligonucleotide
ccccggatggcctaaggagccggcagaaca

SEQ ID NO: 394437 - DNA, 30 bp, Artificial Sequence
  Synthetic oligonucleotide
ctgggtctccaggttagaattggcagaaca

SEQ ID NO: 394438 - DNA, 30 bp, Artificial Sequence
  Synthetic oligonucleotide
atagcaattaaccacagttcaatcagaaca

SEQ ID NO: 394439 - DNA, 30 bp, Artificial Sequence
  Synthetic oligonucleotide
tgtcagtccctgtttcgaaacctgagaaca

SEQ ID NO: 394440 - DNA, 30 bp, Artificial Sequence
  Synthetic oligonucleotide
tctgaaattttcatcgtacccgctagaaca

SEQ ID NO: 394441 - DNA, 30 bp, Artificial Sequence
  Synthetic oligonucleotide
gatttcccgctacgaacggctgctagaaca

SEQ ID NO: 394442 - DNA, 30 bp, Artificial Sequence
  Synthetic oligonucleotide
tggctaggcacttgcgcccgtagacgaaca

SEQ ID NO: 394443 - DNA, 30 bp, Artificial Sequence
  Synthetic oligonucleotide
tcctaatttcgtgttaagtgtggacgaaca

SEQ ID NO: 394444 - DNA, 30 bp, Artificial Sequence
  Synthetic oligonucleotide
gccagtggtcaccgggactctccgcgaaca

SEQ ID NO: 394445 - DNA, 30 bp, Artificial Sequence
  Synthetic oligonucleotide
ttttcgagatgttcttgttcgaatcgaaca

SEQ ID NO: 394446 - DNA, 30 bp, Artificial Sequence
  Synthetic oligonucleotide
agcggttcagactcgacccgggatcgaaca

SEQ ID NO: 394447 - DNA, 30 bp, Artificial Sequence
  Synthetic oligonucleotide
gctcggaatcccgtatatgatccaggaaca

SEQ ID NO: 394448 - DNA, 30 bp, Artificial Sequence
  Synthetic oligonucleotide
cttcgtttgcatgcaaccaaaaacggaaca

SEQ ID NO: 394449 - DNA, 30 bp, Artificial Sequence
  Synthetic oligonucleotide
cggctataaatccctcacgctcggggaaca

SEQ ID NO: 394450 - DNA, 30 bp, Artificial Sequence
  Synthetic oligonucleotide
atactcttgcctactaactaggggggaaca

SEQ ID NO: 394451 - DNA, 30 bp, Artificial Sequence
  Synthetic oligonucleotide
gtccttgtgcctttttcagaccttggaaca

SEQ ID NO: 394452 - DNA, 30 bp, Artificial Sequence
  Synthetic oligonucleotide
gcggacctgtcttctaagacttttggaaca

SEQ ID NO: 394453 - DNA, 30 bp, Artificial Sequence
  Synthetic oligonucleotide
gttcgcgctcctctgccaggtcggtgaaca

SEQ ID NO: 394454 - DNA, 30 bp, Artificial Sequence
  Synthetic oligonucleotide
cttaggagtagctctggcagatggtgaaca

SEQ ID NO: 394455 - DNA, 30 bp, Artificial Sequence
  Synthetic oligonucleotide
ttcctaggtaaggcgagcagagtgtgaaca

SEQ ID NO: 394456 - DNA, 30 bp, Artificial Sequence
  Synthetic oligonucleotide
tctccgattattgccgttttattgtgaaca

SEQ ID NO: 394457 - DNA, 30 bp, Artificial Sequence
  Synthetic oligonucleotide
taggcagcactcttagacggataaataaca

SEQ ID NO: 394458 - DNA, 30 bp, Artificial Sequence
  Synthetic oligonucleotide
gatcaatagtgtagtcatggctccataaca

SEQ ID NO: 394459 - DNA, 30 bp, Artificial Sequence
  Synthetic oligonucleotide
gaagatggcatggcccgcggccagataaca

SEQ ID NO: 394460 - DNA, 30 bp, Artificial Sequence
  Synthetic oligonucleotide
tcagtttcatgaagaggcaaggaactaaca

SEQ ID NO: 394461 - DNA, 30 bp, Artificial Sequence
  Synthetic oligonucleotide
gtttctagacaacgtattcttctactaaca

SEQ ID NO: 394462 - DNA, 30 bp, Artificial Sequence
  Synthetic oligonucleotide
catgaatagtttgcaacttttcacctaaca

SEQ ID NO: 394463 - DNA, 30 bp, Artificial Sequence
  Synthetic oligonucleotide
gagctttacgtactgggacaggtgctaaca

SEQ ID NO: 394464 - DNA, 30 bp, Artificial Sequence
  Synthetic oligonucleotide
aacattggatcgcctagaacatatctaaca

SEQ ID NO: 394465 - DNA, 30 bp, Artificial Sequence
  Synthetic oligonucleotide
tttgcgcggggtgttaacgcctgtctaaca

SEQ ID NO: 394466 - DNA, 30 bp, Artificial Sequence
  Synthetic oligonucleotide
aacgctgtagagatttccagctttctaaca

SEQ ID NO: 394467 - DNA, 30 bp, Artificial Sequence
  Synthetic oligonucleotide
gtttgtactggcagcgcactgagagtaaca

SEQ ID NO: 394468 - DNA, 30 bp, Artificial Sequence
  Synthetic oligonucleotide
gagaagtagtttcttgaattgagagtaaca

SEQ ID NO: 394469 - DNA, 30 bp, Artificial Sequence
  Synthetic oligonucleotide
tggaagaattattacggatctgtagtaaca

SEQ ID NO: 394470 - DNA, 30 bp, Artificial Sequence
  Synthetic oligonucleotide
catttgtgggcgattgtggcttacgtaaca

SEQ ID NO: 394471 - DNA, 30 bp, Artificial Sequence
  Synthetic oligonucleotide
agacactagcatgtaacttgcggcgtaaca

SEQ ID NO: 394472 - DNA, 30 bp, Artificial Sequence
  Synthetic oligonucleotide
caattgaccgtctattgagccctcgtaaca

SEQ ID NO: 394473 - DNA, 30 bp, Artificial Sequence
  Synthetic oligonucleotide
tcaggtagatcaggcctgcctgtcgtaaca

SEQ ID NO: 394474 - DNA, 30 bp, Artificial Sequence
  Synthetic oligonucleotide
cattatacacagttcgggctaaaggtaaca

SEQ ID NO: 394475 - DNA, 30 bp, Artificial Sequence
  Synthetic oligonucleotide
tatattttcctggttaaagccaaattaaca

SEQ ID NO: 394476 - DNA, 30 bp, Artificial Sequence
  Synthetic oligonucleotide
tcttaatccaaactccgtaatcaattaaca

SEQ ID NO: 394477 - DNA, 30 bp, Artificial Sequence
  Synthetic oligonucleotide
gaaagatattactgtccactatggttaaca

SEQ ID NO: 394478 - DNA, 30 bp, Artificial Sequence
  Synthetic oligonucleotide
gttgccatcgtcgtcgcaggaaatttaaca

SEQ ID NO: 394479 - DNA, 30 bp, Artificial Sequence
  Synthetic oligonucleotide
gccctactaagcagtaatccataaaacaca

SEQ ID NO: 394480 - DNA, 30 bp, Artificial Sequence
  Synthetic oligonucleotide
gctgccatcagtgtgataggatgaaacaca

SEQ ID NO: 394481 - DNA, 30 bp, Artificial Sequence
  Synthetic oligonucleotide
cccgattagcgtaaccgcaagatcaacaca

SEQ ID NO: 394482 - DNA, 30 bp, Artificial Sequence
  Synthetic oligonucleotide
cgtcgggtataaggtgtggggcataacaca

SEQ ID NO: 394483 - DNA, 30 bp, Artificial Sequence
  Synthetic oligonucleotide
ccgcctttacgatgggtgaaatttaacaca

SEQ ID NO: 394484 - DNA, 30 bp, Artificial Sequence
  Synthetic oligonucleotide
ggactttctagtttatggtaacaccacaca

SEQ ID NO: 394485 - DNA, 30 bp, Artificial Sequence
  Synthetic oligonucleotide
cagacttaaggcagcgctcagcaccacaca

SEQ ID NO: 394486 - DNA, 30 bp, Artificial Sequence
  Synthetic oligonucleotide
aatgtccaggcaccacgaagcacccacaca

SEQ ID NO: 394487 - DNA, 30 bp, Artificial Sequence
  Synthetic oligonucleotide
tgcgggaaactgcggcacgtgtcccacaca

SEQ ID NO: 394488 - DNA, 30 bp, Artificial Sequence
  Synthetic oligonucleotide
cgggcgtcgggtgataggatcacgcacaca

SEQ ID NO: 394489 - DNA, 30 bp, Artificial Sequence
  Synthetic oligonucleotide
agtatttggcaaaatgggcgctcgcacaca

SEQ ID NO: 394490 - DNA, 30 bp, Artificial Sequence
  Synthetic oligonucleotide
aatcagtttcacaacccgaggaaagacaca

SEQ ID NO: 394491 - DNA, 30 bp, Artificial Sequence
  Synthetic oligonucleotide
tatttctccctgggaggtaaacaagacaca

SEQ ID NO: 394492 - DNA, 30 bp, Artificial Sequence
  Synthetic oligonucleotide
gctatacttactaaatgtaacagagacaca

SEQ ID NO: 394493 - DNA, 30 bp, Artificial Sequence
  Synthetic oligonucleotide
ggtattctcacaattctcgacttagacaca

SEQ ID NO: 394494 - DNA, 30 bp, Artificial Sequence
  Synthetic oligonucleotide
cgagtgaattcgttagatgcacccgacaca

SEQ ID NO: 394495 - DNA, 30 bp, Artificial Sequence
  Synthetic oligonucleotide
gtgcgggcactcaactggtatagtgacaca

SEQ ID NO: 394496 - DNA, 30 bp, Artificial Sequence
  Synthetic oligonucleotide
gaaatggttccgagtattggtattgacaca

SEQ ID NO: 394497 - DNA, 30 bp, Artificial Sequence
  Synthetic oligonucleotide
gcacaaatgtttcggatacgctaatacaca

SEQ ID NO: 394498 - DNA, 30 bp, Artificial Sequence
  Synthetic oligonucleotide
tagatcgtggaatccgctctgtcgtacaca

SEQ ID NO: 394499 - DNA, 30 bp, Artificial Sequence
  Synthetic oligonucleotide
ctgcgtttttggaccaggagtcaaaccaca

SEQ ID NO: 394500 - DNA, 30 bp, Artificial Sequence
  Synthetic oligonucleotide
gtcaatcgcaggcaactggtttgaaccaca

SEQ ID NO: 394501 - DNA, 30 bp, Artificial Sequence
  Synthetic oligonucleotide
taatggataggccgtacggcttgcaccaca

SEQ ID NO: 394502 - DNA, 30 bp, Artificial Sequence
  Synthetic oligonucleotide
ccagcgcttccttgacatggcaataccaca

SEQ ID NO: 394503 - DNA, 30 bp, Artificial Sequence
  Synthetic oligonucleotide
atcattttcatgaagggcctaagtaccaca

SEQ ID NO: 394504 - DNA, 30 bp, Artificial Sequence
  Synthetic oligonucleotide
actgaggtctgggatgattttaagcccaca

SEQ ID NO: 394505 - DNA, 30 bp, Artificial Sequence
  Synthetic oligonucleotide
ggggtctacccggcgtcgtcgtagcccaca

SEQ ID NO: 394506 - DNA, 30 bp, Artificial Sequence
  Synthetic oligonucleotide
ttcagtctataactagccgcaccgcccaca

SEQ ID NO: 394507 - DNA, 30 bp, Artificial Sequence
  Synthetic oligonucleotide
ccttgaaccagtcagtaataaagtcccaca

SEQ ID NO: 394508 - DNA, 30 bp, Artificial Sequence
  Synthetic oligonucleotide
cgcgcaccctttctacttccgggagccaca

SEQ ID NO: 394509 - DNA, 30 bp, Artificial Sequence
  Synthetic oligonucleotide
gattacgattgtaaggtaatcgcggccaca

SEQ ID NO: 394510 - DNA, 30 bp, Artificial Sequence
  Synthetic oligonucleotide
aagtttactacttattcaacgatggccaca

SEQ ID NO: 394511 - DNA, 30 bp, Artificial Sequence
  Synthetic oligonucleotide
actacgaaaacctcctgttgggcatccaca

SEQ ID NO: 394512 - DNA, 30 bp, Artificial Sequence
  Synthetic oligonucleotide
gtatttgcgcatacgaagaggtcatccaca

SEQ ID NO: 394513 - DNA, 30 bp, Artificial Sequence
  Synthetic oligonucleotide
ccagtataaatatgacgtgcatgatccaca

SEQ ID NO: 394514 - DNA, 30 bp, Artificial Sequence
  Synthetic oligonucleotide
ttactagggaacgcttcaccattatccaca

SEQ ID NO: 394515 - DNA, 30 bp, Artificial Sequence
  Synthetic oligonucleotide
ttgtctacgtgttcgtgtagtcactccaca

SEQ ID NO: 394516 - DNA, 30 bp, Artificial Sequence
  Synthetic oligonucleotide
gcagtgagtcgatagactactgattccaca

SEQ ID NO: 394517 - DNA, 30 bp, Artificial Sequence
  Synthetic oligonucleotide
tggtcgacttgttcgtccgcatcttccaca

SEQ ID NO: 394518 - DNA, 30 bp, Artificial Sequence
  Synthetic oligonucleotide
gctccaccaacgggtacgtagcaaagcaca

SEQ ID NO: 394519 - DNA, 30 bp, Artificial Sequence
  Synthetic oligonucleotide
tgccagcagcctcaaaattatataagcaca

SEQ ID NO: 394520 - DNA, 30 bp, Artificial Sequence
  Synthetic oligonucleotide
atgcactccggaatcagggcttgcagcaca

SEQ ID NO: 394521 - DNA, 30 bp, Artificial Sequence
  Synthetic oligonucleotide
tcctctcgttcagggggcttctcgagcaca

SEQ ID NO: 394522 - DNA, 30 bp, Artificial Sequence
  Synthetic oligonucleotide
gccattactttgcgagtgataaatagcaca

SEQ ID NO: 394523 - DNA, 30 bp, Artificial Sequence
  Synthetic oligonucleotide
gctgccgtgctgccaccggaaattagcaca

SEQ ID NO: 394524 - DNA, 30 bp, Artificial Sequence
  Synthetic oligonucleotide
atctagcgtacttgggatgcgcttagcaca

SEQ ID NO: 394525 - DNA, 30 bp, Artificial Sequence
  Synthetic oligonucleotide
cttcgagtatagattatctattttagcaca

SEQ ID NO: 394526 - DNA, 30 bp, Artificial Sequence
  Synthetic oligonucleotide
cttcgatgtgcacgtgccctaccacgcaca

SEQ ID NO: 394527 - DNA, 30 bp, Artificial Sequence
  Synthetic oligonucleotide
tcatgttctaattgtcctcagtcacgcaca

SEQ ID NO: 394528 - DNA, 30 bp, Artificial Sequence
  Synthetic oligonucleotide
gtggccagcggtccgcgaaaattgcgcaca

SEQ ID NO: 394529 - DNA, 30 bp, Artificial Sequence
  Synthetic oligonucleotide
aaacaataagatgcttcgattactcgcaca

SEQ ID NO: 394530 - DNA, 30 bp, Artificial Sequence
  Synthetic oligonucleotide
cggtatttccttaaggtctttagtcgcaca

SEQ ID NO: 394531 - DNA, 30 bp, Artificial Sequence
  Synthetic oligonucleotide
ccgcggtactgttataggattcgtcgcaca

SEQ ID NO: 394532 - DNA, 30 bp, Artificial Sequence
  Synthetic oligonucleotide
agctccttaagtcaggcgaatggtcgcaca

SEQ ID NO: 394533 - DNA, 30 bp, Artificial Sequence
  Synthetic oligonucleotide
gatgggctccaaggtgccatctgtcgcaca

SEQ ID NO: 394534 - DNA, 30 bp, Artificial Sequence
  Synthetic oligonucleotide
aggaccttagatcggcagatgcgaggcaca

SEQ ID NO: 394535 - DNA, 30 bp, Artificial Sequence
  Synthetic oligonucleotide
ggaaggcccggtagtaagccttgaggcaca

SEQ ID NO: 394536 - DNA, 30 bp, Artificial Sequence
  Synthetic oligonucleotide
aaaataaagcccctgacgcaatgcggcaca

SEQ ID NO: 394537 - DNA, 30 bp, Artificial Sequence
  Synthetic oligonucleotide
tttgctcgcactccaatgggcgtcggcaca

SEQ ID NO: 394538 - DNA, 30 bp, Artificial Sequence
  Synthetic oligonucleotide
gttcttacccgcaccaagggtacgggcaca

SEQ ID NO: 394539 - DNA, 30 bp, Artificial Sequence
  Synthetic oligonucleotide
gccgatcgctgcctttaaaccctgggcaca

SEQ ID NO: 394540 - DNA, 30 bp, Artificial Sequence
  Synthetic oligonucleotide
gcaccggtaaccattattggtttgggcaca

SEQ ID NO: 394541 - DNA, 30 bp, Artificial Sequence
  Synthetic oligonucleotide
agcctatccaagggatcatacaatggcaca

SEQ ID NO: 394542 - DNA, 30 bp, Artificial Sequence
  Synthetic oligonucleotide
atattgtacatacactcctggtatggcaca

SEQ ID NO: 394543 - DNA, 30 bp, Artificial Sequence
  Synthetic oligonucleotide
gaacgtcaacctacttgggtgattggcaca

SEQ ID NO: 394544 - DNA, 30 bp, Artificial Sequence
  Synthetic oligonucleotide
ggggtttacctaagcagctctatatgcaca

SEQ ID NO: 394545 - DNA, 30 bp, Artificial Sequence
  Synthetic oligonucleotide
gtcaggtcctgttcgatgaaacgctgcaca

SEQ ID NO: 394546 - DNA, 30 bp, Artificial Sequence
  Synthetic oligonucleotide
aaaaagggtaggcaaattccgggctgcaca

SEQ ID NO: 394547 - DNA, 30 bp, Artificial Sequence
  Synthetic oligonucleotide
acaatagaagacgtcgtagagcggtgcaca

SEQ ID NO: 394548 - DNA, 30 bp, Artificial Sequence
  Synthetic oligonucleotide
acaataaattctgttgggtagtcttgcaca

SEQ ID NO: 394549 - DNA, 30 bp, Artificial Sequence
  Synthetic oligonucleotide
gcacctcagtaagttgtttacagttgcaca

SEQ ID NO: 394550 - DNA, 30 bp, Artificial Sequence
  Synthetic oligonucleotide
tatacttaattcagttcttcgaaaatcaca

SEQ ID NO: 394551 - DNA, 30 bp, Artificial Sequence
  Synthetic oligonucleotide
agcgaagccactggcgctctgtaaatcaca

SEQ ID NO: 394552 - DNA, 30 bp, Artificial Sequence
  Synthetic oligonucleotide
ttgtaatagttcggggaagacagcatcaca

SEQ ID NO: 394553 - DNA, 30 bp, Artificial Sequence
  Synthetic oligonucleotide
cgaccgctgcaggaccacttcagcatcaca

SEQ ID NO: 394554 - DNA, 30 bp, Artificial Sequence
  Synthetic oligonucleotide
gtacacaccttgccgtcgcgaggcatcaca

SEQ ID NO: 394555 - DNA, 30 bp, Artificial Sequence
  Synthetic oligonucleotide
tgccacggaaatgctgaatccgcgatcaca

SEQ ID NO: 394556 - DNA, 30 bp, Artificial Sequence
  Synthetic oligonucleotide
tcgcatgcgttggaaagttaatacctcaca

SEQ ID NO: 394557 - DNA, 30 bp, Artificial Sequence
  Synthetic oligonucleotide
cgctaaggtgatcggtaatcacccctcaca

SEQ ID NO: 394558 - DNA, 30 bp, Artificial Sequence
  Synthetic oligonucleotide
ttaatgtcgtagttaagcatgtccctcaca

SEQ ID NO: 394559 - DNA, 30 bp, Artificial Sequence
  Synthetic oligonucleotide
atagagtcgccacgtaccgcgagcctcaca

SEQ ID NO: 394560 - DNA, 30 bp, Artificial Sequence
  Synthetic oligonucleotide
atatagcatatcaccgctatattcctcaca

SEQ ID NO: 394561 - DNA, 30 bp, Artificial Sequence
  Synthetic oligonucleotide
aagtgtgagaccattgaaataaggctcaca

SEQ ID NO: 394562 - DNA, 30 bp, Artificial Sequence
  Synthetic oligonucleotide
caaacttgttcatattcctgtcctctcaca

SEQ ID NO: 394563 - DNA, 30 bp, Artificial Sequence
  Synthetic oligonucleotide
tctggtcgctgtttatgcgtgcttctcaca

SEQ ID NO: 394564 - DNA, 30 bp, Artificial Sequence
  Synthetic oligonucleotide
gatcaatataggggttatttgtttctcaca

SEQ ID NO: 394565 - DNA, 30 bp, Artificial Sequence
  Synthetic oligonucleotide
actaatcgagtctgtgatagataagtcaca

SEQ ID NO: 394566 - DNA, 30 bp, Artificial Sequence
  Synthetic oligonucleotide
actttaggctcagcagaagggctagtcaca

SEQ ID NO: 394567 - DNA, 30 bp, Artificial Sequence
  Synthetic oligonucleotide
tcacatgctgactacttttcatacgtcaca

SEQ ID NO: 394568 - DNA, 30 bp, Artificial Sequence
  Synthetic oligonucleotide
ctctctgaaagggttctttataccgtcaca

SEQ ID NO: 394569 - DNA, 30 bp, Artificial Sequence
  Synthetic oligonucleotide
gacagttaatcgtatgaataggaggtcaca

SEQ ID NO: 394570 - DNA, 30 bp, Artificial Sequence
  Synthetic oligonucleotide
cggccgcagggttgttacaactgggtcaca

SEQ ID NO: 394571 - DNA, 30 bp, Artificial Sequence
  Synthetic oligonucleotide
ggacgaagaaggtatgtcatcttggtcaca

SEQ ID NO: 394572 - DNA, 30 bp, Artificial Sequence
  Synthetic oligonucleotide
acttttcgtcaagacatgtttccattcaca

SEQ ID NO: 394573 - DNA, 30 bp, Artificial Sequence
  Synthetic oligonucleotide
tctttaggcgggtattcttagagattcaca

SEQ ID NO: 394574 - DNA, 30 bp, Artificial Sequence
  Synthetic oligonucleotide
caattagttcggtggattttgagattcaca

SEQ ID NO: 394575 - DNA, 30 bp, Artificial Sequence
  Synthetic oligonucleotide
tccaatatgattcattagaacaacttcaca

SEQ ID NO: 394576 - DNA, 30 bp, Artificial Sequence
  Synthetic oligonucleotide
tctaatcggtccggggtctatcagttcaca

SEQ ID NO: 394577 - DNA, 30 bp, Artificial Sequence
  Synthetic oligonucleotide
atctgtacttgaatgccatgaacgttcaca

SEQ ID NO: 394578 - DNA, 30 bp, Artificial Sequence
  Synthetic oligonucleotide
tttgatgagttctggctatcaggtttcaca

SEQ ID NO: 394579 - DNA, 30 bp, Artificial Sequence
  Synthetic oligonucleotide
gtgggatctttcgctcattggtgtttcaca

SEQ ID NO: 394580 - DNA, 30 bp, Artificial Sequence
  Synthetic oligonucleotide
gtgatgtacctgatgtgctatgttttcaca

SEQ ID NO: 394581 - DNA, 30 bp, Artificial Sequence
  Synthetic oligonucleotide
cggctcatagattttctatctgtaaagaca

SEQ ID NO: 394582 - DNA, 30 bp, Artificial Sequence
  Synthetic oligonucleotide
tataaagccggagttggttccgtcaagaca

SEQ ID NO: 394583 - DNA, 30 bp, Artificial Sequence
  Synthetic oligonucleotide
atcgtgcaggattgacgacaactgaagaca

SEQ ID NO: 394584 - DNA, 30 bp, Artificial Sequence
  Synthetic oligonucleotide
cccgtcttggtgaggggcgcattgaagaca

SEQ ID NO: 394585 - DNA, 30 bp, Artificial Sequence
  Synthetic oligonucleotide
gtgccaaacctctggcgattcgctaagaca

SEQ ID NO: 394586 - DNA, 30 bp, Artificial Sequence
  Synthetic oligonucleotide
agaggatatgggacccatccgaaacagaca

SEQ ID NO: 394587 - DNA, 30 bp, Artificial Sequence
  Synthetic oligonucleotide
catacagattatcctcaccgcatacagaca

SEQ ID NO: 394588 - DNA, 30 bp, Artificial Sequence
  Synthetic oligonucleotide
aagttcacttaggactacaggacccagaca

SEQ ID NO: 394589 - DNA, 30 bp, Artificial Sequence
  Synthetic oligonucleotide
cctacagcagcatcgttgtccttccagaca

SEQ ID NO: 394590 - DNA, 30 bp, Artificial Sequence
  Synthetic oligonucleotide
acggtttcagttagctcacggaagcagaca

SEQ ID NO: 394591 - DNA, 30 bp, Artificial Sequence
  Synthetic oligonucleotide
tttgggttgcagagtggatcagagcagaca

SEQ ID NO: 394592 - DNA, 30 bp, Artificial Sequence
  Synthetic oligonucleotide
ctcagtcccttgtatagcaagtggcagaca

SEQ ID NO: 394593 - DNA, 30 bp, Artificial Sequence
  Synthetic oligonucleotide
ccccttattacgggaccggtttgtcagaca

SEQ ID NO: 394594 - DNA, 30 bp, Artificial Sequence
  Synthetic oligonucleotide
ccgtttcagatccggggggacattcagaca

SEQ ID NO: 394595 - DNA, 30 bp, Artificial Sequence
  Synthetic oligonucleotide
cccccttatatacaaggggtctacgagaca

SEQ ID NO: 394596 - DNA, 30 bp, Artificial Sequence
  Synthetic oligonucleotide
gcttaaggggactttcgggttccggagaca

SEQ ID NO: 394597 - DNA, 30 bp, Artificial Sequence
  Synthetic oligonucleotide
ttagaaacactggactgtgatgttgagaca

SEQ ID NO: 394598 - DNA, 30 bp, Artificial Sequence
  Synthetic oligonucleotide
attagcataggctggaagttccaatagaca

SEQ ID NO: 394599 - DNA, 30 bp, Artificial Sequence
  Synthetic oligonucleotide
cgggatccctacacccgcgtgcaatagaca

SEQ ID NO: 394600 - DNA, 30 bp, Artificial Sequence
  Synthetic oligonucleotide
ctttacttgtgtctgtcttcggcatagaca

SEQ ID NO: 394601 - DNA, 30 bp, Artificial Sequence
  Synthetic oligonucleotide
ggaattttattaccgttctgaagatagaca

SEQ ID NO: 394602 - DNA, 30 bp, Artificial Sequence
  Synthetic oligonucleotide
gcaaagactagttattcggttatatagaca

SEQ ID NO: 394603 - DNA, 30 bp, Artificial Sequence
  Synthetic oligonucleotide
gacaagtgcgctctgtataatgtctagaca

SEQ ID NO: 394604 - DNA, 30 bp, Artificial Sequence
  Synthetic oligonucleotide
caagtatctatttgcattaacatgtagaca

SEQ ID NO: 394605 - DNA, 30 bp, Artificial Sequence
  Synthetic oligonucleotide
ggttgtgcgtatgtcgccatagtgtagaca

SEQ ID NO: 394606 - DNA, 30 bp, Artificial Sequence
  Synthetic oligonucleotide
ggtgaattacggagctcatgcgtgtagaca

SEQ ID NO: 394607 - DNA, 30 bp, Artificial Sequence
  Synthetic oligonucleotide
aaaagataaacagcaaagtttaattagaca

SEQ ID NO: 394608 - DNA, 30 bp, Artificial Sequence
  Synthetic oligonucleotide
ttcccgacgctccggctaaatcattagaca

SEQ ID NO: 394609 - DNA, 30 bp, Artificial Sequence
  Synthetic oligonucleotide
ttataaagatacgagtttggtgcttagaca

SEQ ID NO: 394610 - DNA, 30 bp, Artificial Sequence
  Synthetic oligonucleotide
cagctagaaaagacgttagtatgttagaca

SEQ ID NO: 394611 - DNA, 30 bp, Artificial Sequence
  Synthetic oligonucleotide
caccgcaatgggcgcgcccaagcaacgaca

SEQ ID NO: 394612 - DNA, 30 bp, Artificial Sequence
  Synthetic oligonucleotide
gatcacaaaaattgaggtggtctaacgaca

SEQ ID NO: 394613 - DNA, 30 bp, Artificial Sequence
  Synthetic oligonucleotide
caccataattatcgttagcgaaccacgaca

SEQ ID NO: 394614 - DNA, 30 bp, Artificial Sequence
  Synthetic oligonucleotide
gttgatattggaaaggtcctggccacgaca

SEQ ID NO: 394615 - DNA, 30 bp, Artificial Sequence
  Synthetic oligonucleotide
gccggaatgtgcgtggaaacgtccacgaca

SEQ ID NO: 394616 - DNA, 30 bp, Artificial Sequence
  Synthetic oligonucleotide
agtgcaggaccgcaagtcgctaggacgaca

SEQ ID NO: 394617 - DNA, 30 bp, Artificial Sequence
  Synthetic oligonucleotide
tgcctaccaatctttcgtctactgacgaca

SEQ ID NO: 394618 - DNA, 30 bp, Artificial Sequence
  Synthetic oligonucleotide
gtcatggttcgttttaaatctcctacgaca

SEQ ID NO: 394619 - DNA, 30 bp, Artificial Sequence
  Synthetic oligonucleotide
cttcagatactatgataagcagacccgaca

SEQ ID NO: 394620 - DNA, 30 bp, Artificial Sequence
  Synthetic oligonucleotide
gataatagggactctaaccgccggccgaca

SEQ ID NO: 394621 - DNA, 30 bp, Artificial Sequence
  Synthetic oligonucleotide
ctagggaatctgcggcaagactatccgaca

SEQ ID NO: 394622 - DNA, 30 bp, Artificial Sequence
  Synthetic oligonucleotide
gagggtagtgcacgaccaccgactccgaca

SEQ ID NO: 394623 - DNA, 30 bp, Artificial Sequence
  Synthetic oligonucleotide
tgccacttccagggatgagtggttccgaca

SEQ ID NO: 394624 - DNA, 30 bp, Artificial Sequence
  Synthetic oligonucleotide
aaacggtcgttatgtctattatttccgaca

SEQ ID NO: 394625 - DNA, 30 bp, Artificial Sequence
  Synthetic oligonucleotide
ctacaactgcattgcagttggcaagcgaca

SEQ ID NO: 394626 - DNA, 30 bp, Artificial Sequence
  Synthetic oligonucleotide
tcattttgcggtaggtaatgttaagcgaca

SEQ ID NO: 394627 - DNA, 30 bp, Artificial Sequence
  Synthetic oligonucleotide
tgtaggtatcacatcctgttcggagcgaca

SEQ ID NO: 394628 - DNA, 30 bp, Artificial Sequence
  Synthetic oligonucleotide
atgcaatttctgttctgcaccaccgcgaca

SEQ ID NO: 394629 - DNA, 30 bp, Artificial Sequence
  Synthetic oligonucleotide
ctcatataaggttcaattggctgcgcgaca

SEQ ID NO: 394630 - DNA, 30 bp, Artificial Sequence
  Synthetic oligonucleotide
tatacttctgaacaattttaactcgcgaca

SEQ ID NO: 394631 - DNA, 30 bp, Artificial Sequence
  Synthetic oligonucleotide
cgcgactggctctactgggttctcgcgaca

SEQ ID NO: 394632 - DNA, 30 bp, Artificial Sequence
  Synthetic oligonucleotide
ttgtggacccaggtacctcgattggcgaca

SEQ ID NO: 394633 - DNA, 30 bp, Artificial Sequence
  Synthetic oligonucleotide
tggactttttactcttaaattaaatcgaca

SEQ ID NO: 394634 - DNA, 30 bp, Artificial Sequence
  Synthetic oligonucleotide
gctttagcatcaacgtatctaggatcgaca

SEQ ID NO: 394635 - DNA, 30 bp, Artificial Sequence
  Synthetic oligonucleotide
tacagggacctttaaggtatgtcctcgaca

SEQ ID NO: 394636 - DNA, 30 bp, Artificial Sequence
  Synthetic oligonucleotide
gcaaatctcttcttggtagacgtctcgaca

SEQ ID NO: 394637 - DNA, 30 bp, Artificial Sequence
  Synthetic oligonucleotide
tctcggtagcaggttcgttccaagtcgaca

SEQ ID NO: 394638 - DNA, 30 bp, Artificial Sequence
  Synthetic oligonucleotide
atgtagactgtgcagcgtcgctattcgaca

SEQ ID NO: 394639 - DNA, 30 bp, Artificial Sequence
  Synthetic oligonucleotide
gatatcaaatcgtgattgaagcgttcgaca

SEQ ID NO: 394640 - DNA, 30 bp, Artificial Sequence
  Synthetic oligonucleotide
tcgcccagtttcgttttcgcttaaaggaca

SEQ ID NO: 394641 - DNA, 30 bp, Artificial Sequence
  Synthetic oligonucleotide
gcgtgcgaagtttagggtctcgcaaggaca

SEQ ID NO: 394642 - DNA, 30 bp, Artificial Sequence
  Synthetic oligonucleotide
ttgacggagcagggcgttgactcaaggaca

SEQ ID NO: 394643 - DNA, 30 bp, Artificial Sequence
  Synthetic oligonucleotide
ttcaatgcgctaatatagtaactcaggaca

SEQ ID NO: 394644 - DNA, 30 bp, Artificial Sequence
  Synthetic oligonucleotide
tcggccgccggaggcgtgttagtcaggaca

SEQ ID NO: 394645 - DNA, 30 bp, Artificial Sequence
  Synthetic oligonucleotide
atgaaacggtgtttaagtgtcattaggaca

SEQ ID NO: 394646 - DNA, 29 bp, Artificial Sequence
  Synthetic oligonucleotide
tagaaggcaatgccgggcacgttaggaca

SEQ ID NO: 394647 - DNA, 30 bp, Artificial Sequence
  Synthetic oligonucleotide
tggagctactcataaaccagatttaggaca

SEQ ID NO: 394648 - DNA, 30 bp, Artificial Sequence
  Synthetic oligonucleotide
caaatgtgatgctctttgtttacacggaca

SEQ ID NO: 394649 - DNA, 30 bp, Artificial Sequence
  Synthetic oligonucleotide
atagattaggtaggtacggtatgacggaca

SEQ ID NO: 394650 - DNA, 30 bp, Artificial Sequence
  Synthetic oligonucleotide
gtagaatggaagtgttttttatgacggaca

SEQ ID NO: 394651 - DNA, 30 bp, Artificial Sequence
  Synthetic oligonucleotide
aaacagggggaaggtttagtgtaccggaca

SEQ ID NO: 394652 - DNA, 30 bp, Artificial Sequence
  Synthetic oligonucleotide
agccgtccgctgcattgttcaatgcggaca

SEQ ID NO: 394653 - DNA, 30 bp, Artificial Sequence
  Synthetic oligonucleotide
ggggggtgaaggtaggtttaactgcggaca

SEQ ID NO: 394654 - DNA, 30 bp, Artificial Sequence
  Synthetic oligonucleotide
gacatgtcagccgccgtctcgcatcggaca

SEQ ID NO: 394655 - DNA, 30 bp, Artificial Sequence
  Synthetic oligonucleotide
gtgctgttgagttcttacgttgttcggaca

SEQ ID NO: 394656 - DNA, 30 bp, Artificial Sequence
  Synthetic oligonucleotide
tatttatgagacgcacgggaaatagggaca

SEQ ID NO: 394657 - DNA, 30 bp, Artificial Sequence
  Synthetic oligonucleotide
cgggatgttccctcaggcttactagggaca

SEQ ID NO: 394658 - DNA, 30 bp, Artificial Sequence
  Synthetic oligonucleotide
atacctctcgacaagtcctgacacgggaca

SEQ ID NO: 394659 - DNA, 30 bp, Artificial Sequence
  Synthetic oligonucleotide
gcttccccaatcaaacaattcgccgggaca

SEQ ID NO: 394660 - DNA, 30 bp, Artificial Sequence
  Synthetic oligonucleotide
tcttataggggacaaggaacctgcgggaca

SEQ ID NO: 394661 - DNA, 30 bp, Artificial Sequence
  Synthetic oligonucleotide
cacaagcccgatcttgttcttccggggaca

SEQ ID NO: 394662 - DNA, 30 bp, Artificial Sequence
  Synthetic oligonucleotide
gagaccgatgtcctccaaggcttggggaca

SEQ ID NO: 394663 - DNA, 30 bp, Artificial Sequence
  Synthetic oligonucleotide
aattggatgtagactcgtgctttggggaca

SEQ ID NO: 394664 - DNA, 30 bp, Artificial Sequence
  Synthetic oligonucleotide
agttaggtaaaatcggttgctattgggaca

SEQ ID NO: 394665 - DNA, 30 bp, Artificial Sequence
  Synthetic oligonucleotide
tcggcctgaaactatacgtatcttgggaca

SEQ ID NO: 394666 - DNA, 30 bp, Artificial Sequence
  Synthetic oligonucleotide
gcagcatgacactggtgcgcacaatggaca

SEQ ID NO: 394667 - DNA, 30 bp, Artificial Sequence
  Synthetic oligonucleotide
attcgcggcgttaggtggtatgcatggaca

SEQ ID NO: 394668 - DNA, 30 bp, Artificial Sequence
  Synthetic oligonucleotide
atattataattttctagagctcgatggaca

SEQ ID NO: 394669 - DNA, 30 bp, Artificial Sequence
  Synthetic oligonucleotide
agttgtttcctagaggggatgtgatggaca

SEQ ID NO: 394670 - DNA, 30 bp, Artificial Sequence
  Synthetic oligonucleotide
gttatgggttaatgtgcaactgactggaca

SEQ ID NO: 394671 - DNA, 30 bp, Artificial Sequence
  Synthetic oligonucleotide
gatctgtcgctggacgcgattatgtggaca

SEQ ID NO: 394672 - DNA, 30 bp, Artificial Sequence
  Synthetic oligonucleotide
tatttacgacatccgacaaccgattggaca

SEQ ID NO: 394673 - DNA, 30 bp, Artificial Sequence
  Synthetic oligonucleotide
ttgtttgtcggattaattacgtattggaca

SEQ ID NO: 394674 - DNA, 30 bp, Artificial Sequence
  Synthetic oligonucleotide
cagacccggccttgtttcaccgtttggaca

SEQ ID NO: 394675 - DNA, 30 bp, Artificial Sequence
  Synthetic oligonucleotide
caggggcggtttatatccagtgtttggaca

SEQ ID NO: 394676 - DNA, 30 bp, Artificial Sequence
  Synthetic oligonucleotide
ggttactacgctacacatggtttttggaca

SEQ ID NO: 394677 - DNA, 30 bp, Artificial Sequence
  Synthetic oligonucleotide
gaaagcaagagtcatgtttaatccatgaca

SEQ ID NO: 394678 - DNA, 30 bp, Artificial Sequence
  Synthetic oligonucleotide
catactcgatccatatggggtagcatgaca

SEQ ID NO: 394679 - DNA, 30 bp, Artificial Sequence
  Synthetic oligonucleotide
taaatgtaatttgaggggggtgtcatgaca

SEQ ID NO: 394680 - DNA, 30 bp, Artificial Sequence
  Synthetic oligonucleotide
ttgctcatgagcggcttcatgtggatgaca

SEQ ID NO: 394681 - DNA, 30 bp, Artificial Sequence
  Synthetic oligonucleotide
caagtttgcaatatatccttgcatatgaca

SEQ ID NO: 394682 - DNA, 30 bp, Artificial Sequence
  Synthetic oligonucleotide
cagccttaacatcccacgcgccctatgaca

SEQ ID NO: 394683 - DNA, 30 bp, Artificial Sequence
  Synthetic oligonucleotide
gtaacttacgacatacgagtggttatgaca

SEQ ID NO: 394684 - DNA, 30 bp, Artificial Sequence
  Synthetic oligonucleotide
agtgtcaaatttcagcagctcacactgaca

SEQ ID NO: 394685 - DNA, 30 bp, Artificial Sequence
  Synthetic oligonucleotide
aacctagggctgggggccaagatcctgaca

SEQ ID NO: 394686 - DNA, 30 bp, Artificial Sequence
  Synthetic oligonucleotide
gtgttactgtttccgaaggtactcctgaca

SEQ ID NO: 394687 - DNA, 30 bp, Artificial Sequence
  Synthetic oligonucleotide
ctagcttacagaccggggatttctctgaca

SEQ ID NO: 394688 - DNA, 30 bp, Artificial Sequence
  Synthetic oligonucleotide
aaggtaaacatctatgaagttgttctgaca

SEQ ID NO: 394689 - DNA, 30 bp, Artificial Sequence
  Synthetic oligonucleotide
tgccgagactcgtattgtaggaaagtgaca

SEQ ID NO: 394690 - DNA, 30 bp, Artificial Sequence
  Synthetic oligonucleotide
gaaatggtgcgaagggattggggagtgaca

SEQ ID NO: 394691 - DNA, 30 bp, Artificial Sequence
  Synthetic oligonucleotide
aacccagttagtgtacaagatgacgtgaca

SEQ ID NO: 394692 - DNA, 30 bp, Artificial Sequence
  Synthetic oligonucleotide
acctacggtattgagacggttcaggtgaca

SEQ ID NO: 394693 - DNA, 30 bp, Artificial Sequence
  Synthetic oligonucleotide
caggaccagtggccccttgtgcgggtgaca

SEQ ID NO: 394694 - DNA, 30 bp, Artificial Sequence
  Synthetic oligonucleotide
ccatgtccttacgaacacgattatgtgaca

SEQ ID NO: 394695 - DNA, 30 bp, Artificial Sequence
  Synthetic oligonucleotide
gggtggaggattagtctgtatcaattgaca

SEQ ID NO: 394696 - DNA, 30 bp, Artificial Sequence
  Synthetic oligonucleotide
gatccaattgcgttcgccgtttaattgaca

SEQ ID NO: 394697 - DNA, 30 bp, Artificial Sequence
  Synthetic oligonucleotide
ttcttattgaacgaagaagatttattgaca

SEQ ID NO: 394698 - DNA, 30 bp, Artificial Sequence
  Synthetic oligonucleotide
gcactattattactattatatcggttgaca

SEQ ID NO: 394699 - DNA, 30 bp, Artificial Sequence
  Synthetic oligonucleotide
cagttcctagttagattgacccgtttgaca

SEQ ID NO: 394700 - DNA, 30 bp, Artificial Sequence
  Synthetic oligonucleotide
gtcttacctatgctagaacgccttttgaca

SEQ ID NO: 394701 - DNA, 30 bp, Artificial Sequence
  Synthetic oligonucleotide
aaaagagtgggccagggcctgcttttgaca

SEQ ID NO: 394702 - DNA, 30 bp, Artificial Sequence
  Synthetic oligonucleotide
gaggtttaaaggtgaactttccaaaataca

SEQ ID NO: 394703 - DNA, 30 bp, Artificial Sequence
  Synthetic oligonucleotide
gctctaatctgctgcggccccgaaaataca

SEQ ID NO: 394704 - DNA, 30 bp, Artificial Sequence
  Synthetic oligonucleotide
gatccatacacgtgtgtggacacgaataca

SEQ ID NO: 394705 - DNA, 30 bp, Artificial Sequence
  Synthetic oligonucleotide
aaccagtccactaaagtgtttgggaataca

SEQ ID NO: 394706 - DNA, 30 bp, Artificial Sequence
  Synthetic oligonucleotide
tattcgccgaacgtcgattctgtgaataca

SEQ ID NO: 394707 - DNA, 30 bp, Artificial Sequence
  Synthetic oligonucleotide
catatgcaggatataaatcagttgaataca

SEQ ID NO: 394708 - DNA, 30 bp, Artificial Sequence
  Synthetic oligonucleotide
tttctacggattccgaccagtaataataca

SEQ ID NO: 394709 - DNA, 30 bp, Artificial Sequence
  Synthetic oligonucleotide
tattaggaagttgtatggtagagtaataca

SEQ ID NO: 394710 - DNA, 30 bp, Artificial Sequence
  Synthetic oligonucleotide
ttgaaccgagagtaatcttgcgttaataca

SEQ ID NO: 394711 - DNA, 30 bp, Artificial Sequence
  Synthetic oligonucleotide
acagcataaaggtatggacctgtccataca

SEQ ID NO: 394712 - DNA, 30 bp, Artificial Sequence
  Synthetic oligonucleotide
ctgggccaagcgagtaacgtttggcataca

SEQ ID NO: 394713 - DNA, 30 bp, Artificial Sequence
  Synthetic oligonucleotide
catagcgacgtagtaggtcactgtcataca

SEQ ID NO: 394714 - DNA, 30 bp, Artificial Sequence
  Synthetic oligonucleotide
acttctatagtgtattttgtgtaagataca

SEQ ID NO: 394715 - DNA, 30 bp, Artificial Sequence
  Synthetic oligonucleotide
ataatacataaactagggtttacagataca

SEQ ID NO: 394716 - DNA, 30 bp, Artificial Sequence
  Synthetic oligonucleotide
gcatgcttccacctttaaaacttagataca

SEQ ID NO: 394717 - DNA, 30 bp, Artificial Sequence
  Synthetic oligonucleotide
ctgggttcatgtattttctcgcacgataca

SEQ ID NO: 394718 - DNA, 30 bp, Artificial Sequence
  Synthetic oligonucleotide
tctatgcttatcgattaatgagccgataca

SEQ ID NO: 394719 - DNA, 30 bp, Artificial Sequence
  Synthetic oligonucleotide
aagcctaagagaggtgccgcaggcgataca

SEQ ID NO: 394720 - DNA, 30 bp, Artificial Sequence
  Synthetic oligonucleotide
agtgtccggctgtcagttaaataggataca

SEQ ID NO: 394721 - DNA, 30 bp, Artificial Sequence
  Synthetic oligonucleotide
ctctcgtagcactaattagactcggataca

SEQ ID NO: 394722 - DNA, 30 bp, Artificial Sequence
  Synthetic oligonucleotide
ttattaatttcgattccagaccgggataca

SEQ ID NO: 394723 - DNA, 30 bp, Artificial Sequence
  Synthetic oligonucleotide
accccatctatggtacttgctggggataca

SEQ ID NO: 394724 - DNA, 30 bp, Artificial Sequence
  Synthetic oligonucleotide
ctagtaggttccgctagagacttggataca

SEQ ID NO: 394725 - DNA, 30 bp, Artificial Sequence
  Synthetic oligonucleotide
caaagtgaaataacgccggtgttggataca

SEQ ID NO: 394726 - DNA, 30 bp, Artificial Sequence
  Synthetic oligonucleotide
gactatcatggcacattcagtcctgataca

SEQ ID NO: 394727 - DNA, 30 bp, Artificial Sequence
  Synthetic oligonucleotide
caattacaaaataggacttattctgataca

SEQ ID NO: 394728 - DNA, 30 bp, Artificial Sequence
  Synthetic oligonucleotide
gacgttttaagatgcatacgctgtgataca

SEQ ID NO: 394729 - DNA, 30 bp, Artificial Sequence
  Synthetic oligonucleotide
gacgcgataggagctttagattttgataca

SEQ ID NO: 394730 - DNA, 30 bp, Artificial Sequence
  Synthetic oligonucleotide
aattttggaaccgtatcaaaaccatataca

SEQ ID NO: 394731 - DNA, 30 bp, Artificial Sequence
  Synthetic oligonucleotide
aaagggcccccaggatattgctactataca

SEQ ID NO: 394732 - DNA, 30 bp, Artificial Sequence
  Synthetic oligonucleotide
cgtagcaacatacaggagacgtcctataca

SEQ ID NO: 394733 - DNA, 30 bp, Artificial Sequence
  Synthetic oligonucleotide
acgctccgagctcactatggtagctataca

SEQ ID NO: 394734 - DNA, 30 bp, Artificial Sequence
  Synthetic oligonucleotide
ttctaaaggtaccggacagtagcgtataca

SEQ ID NO: 394735 - DNA, 30 bp, Artificial Sequence
  Synthetic oligonucleotide
ccttgtcgcggcttatccagtttgtataca

SEQ ID NO: 394736 - DNA, 30 bp, Artificial Sequence
  Synthetic oligonucleotide
cttaacgtaaacactggctaggattataca

SEQ ID NO: 394737 - DNA, 30 bp, Artificial Sequence
  Synthetic oligonucleotide
aggtcgtcgcgagacagcttgtttactaca

SEQ ID NO: 394738 - DNA, 30 bp, Artificial Sequence
  Synthetic oligonucleotide
acaatcatggggatcagtataaaacctaca

SEQ ID NO: 394739 - DNA, 30 bp, Artificial Sequence
  Synthetic oligonucleotide
ggtatccaccatgtgtattctaaacctaca

SEQ ID NO: 394740 - DNA, 30 bp, Artificial Sequence
  Synthetic oligonucleotide
ggatagggatcggcatcggtatcacctaca

SEQ ID NO: 394741 - DNA, 30 bp, Artificial Sequence
  Synthetic oligonucleotide
caggggtcagtacctaggggaaaccctaca

SEQ ID NO: 394742 - DNA, 30 bp, Artificial Sequence
  Synthetic oligonucleotide
taggaaggttcgggaaaccattcccctaca

SEQ ID NO: 394743 - DNA, 30 bp, Artificial Sequence
  Synthetic oligonucleotide
tcggcaaattttgtaagaaatctccctaca

SEQ ID NO: 394744 - DNA, 30 bp, Artificial Sequence
  Synthetic oligonucleotide
gattttgtcaacactcaaaaagggcctaca

SEQ ID NO: 394745 - DNA, 30 bp, Artificial Sequence
  Synthetic oligonucleotide
tgttcaatttttactttggaagttcctaca

SEQ ID NO: 394746 - DNA, 30 bp, Artificial Sequence
  Synthetic oligonucleotide
tcgattattcgagaagcctgagacgctaca

SEQ ID NO: 394747 - DNA, 30 bp, Artificial Sequence
  Synthetic oligonucleotide
tgcaggcgaatcgtgctatagtacgctaca

SEQ ID NO: 394748 - DNA, 30 bp, Artificial Sequence
  Synthetic oligonucleotide
cccgccaaagcgggactactgcgcgctaca

SEQ ID NO: 394749 - DNA, 30 bp, Artificial Sequence
  Synthetic oligonucleotide
taaataggtccggggttcgcaaatgctaca

SEQ ID NO: 394750 - DNA, 30 bp, Artificial Sequence
  Synthetic oligonucleotide
agtcgtaaatacgacttagttactgctaca

SEQ ID NO: 394751 - DNA, 30 bp, Artificial Sequence
  Synthetic oligonucleotide
atgctacgtctgtatcggccgcgtgctaca

SEQ ID NO: 394752 - DNA, 30 bp, Artificial Sequence
  Synthetic oligonucleotide
tccgcgaatgaagtgagcggctcctctaca

SEQ ID NO: 394753 - DNA, 30 bp, Artificial Sequence
  Synthetic oligonucleotide
aaaattttgggcaggacgggactctctaca

SEQ ID NO: 394754 - DNA, 30 bp, Artificial Sequence
  Synthetic oligonucleotide
tgcgtacgcttaatgcaccgcgggtctaca

SEQ ID NO: 394755 - DNA, 30 bp, Artificial Sequence
  Synthetic oligonucleotide
attgaagactttatggcaagtccttctaca

SEQ ID NO: 394756 - DNA, 30 bp, Artificial Sequence
  Synthetic oligonucleotide
atgttggccgcatgagtattggcttctaca

SEQ ID NO: 394757 - DNA, 30 bp, Artificial Sequence
  Synthetic oligonucleotide
aagaaatgcttgcatgacacacgaagtaca

SEQ ID NO: 394758 - DNA, 30 bp, Artificial Sequence
  Synthetic oligonucleotide
cttgtaagtagtgagacggcgcacagtaca

SEQ ID NO: 394759 - DNA, 30 bp, Artificial Sequence
  Synthetic oligonucleotide
aactttgaatctggtgtttgtatgagtaca

SEQ ID NO: 394760 - DNA, 30 bp, Artificial Sequence
  Synthetic oligonucleotide
tagttacgactgcttatttgtggtagtaca

SEQ ID NO: 394761 - DNA, 30 bp, Artificial Sequence
  Synthetic oligonucleotide
ggccaccttcgaccaaattagtaacgtaca

SEQ ID NO: 394762 - DNA, 30 bp, Artificial Sequence
  Synthetic oligonucleotide
tcggcctttgaatcagcgctcacgcgtaca

SEQ ID NO: 394763 - DNA, 30 bp, Artificial Sequence
  Synthetic oligonucleotide
ttctgcccgggtgattcacgaagtcgtaca

SEQ ID NO: 394764 - DNA, 30 bp, Artificial Sequence
  Synthetic oligonucleotide
ccagggagcatacagttgtctggtcgtaca

SEQ ID NO: 394765 - DNA, 30 bp, Artificial Sequence
  Synthetic oligonucleotide
gtcaccaccagtgtatcccccattcgtaca

SEQ ID NO: 394766 - DNA, 30 bp, Artificial Sequence
  Synthetic oligonucleotide
catattacgagtgctggtacccttcgtaca

SEQ ID NO: 394767 - DNA, 30 bp, Artificial Sequence
  Synthetic oligonucleotide
tctcgcttcaacggtatcgtaaaaggtaca

SEQ ID NO: 394768 - DNA, 30 bp, Artificial Sequence
  Synthetic oligonucleotide
cggacgtataagagcctgcgccgcggtaca

SEQ ID NO: 394769 - DNA, 30 bp, Artificial Sequence
  Synthetic oligonucleotide
tgctggcctcgcgttctgctcacatgtaca

SEQ ID NO: 394770 - DNA, 30 bp, Artificial Sequence
  Synthetic oligonucleotide
taaccgagccgagcccgtactcgatgtaca

SEQ ID NO: 394771 - DNA, 30 bp, Artificial Sequence
  Synthetic oligonucleotide
ccatttgctgtgtttaaaagattatgtaca

SEQ ID NO: 394772 - DNA, 30 bp, Artificial Sequence
  Synthetic oligonucleotide
acggtcgatactacgggagcaggctgtaca

SEQ ID NO: 394773 - DNA, 30 bp, Artificial Sequence
  Synthetic oligonucleotide
ctatgaggggggtcctcatgggtttgtaca

SEQ ID NO: 394774 - DNA, 30 bp, Artificial Sequence
  Synthetic oligonucleotide
aagaacttgagacctatggtcttttgtaca

SEQ ID NO: 394775 - DNA, 29 bp, Artificial Sequence
  Synthetic oligonucleotide
atttcggacgtttacaggtgcgtattaca

SEQ ID NO: 394776 - DNA, 30 bp, Artificial Sequence
  Synthetic oligonucleotide
agcctattgtactacgtagtttcacttaca

SEQ ID NO: 394777 - DNA, 30 bp, Artificial Sequence
  Synthetic oligonucleotide
cctcgatcactccagaacgccggacttaca

SEQ ID NO: 394778 - DNA, 30 bp, Artificial Sequence
  Synthetic oligonucleotide
cgtctcgacttagacacgtgccgccttaca

SEQ ID NO: 394779 - DNA, 30 bp, Artificial Sequence
  Synthetic oligonucleotide
gcaaagggttgtcgcgtttttaagcttaca

SEQ ID NO: 394780 - DNA, 30 bp, Artificial Sequence
  Synthetic oligonucleotide
tatgttataatctttaaataagcgcttaca

SEQ ID NO: 394781 - DNA, 30 bp, Artificial Sequence
  Synthetic oligonucleotide
ctcgccgtcgccgggcagaagagtcttaca

SEQ ID NO: 394782 - DNA, 30 bp, Artificial Sequence
  Synthetic oligonucleotide
tgataaacatatatttttgagaaggttaca

SEQ ID NO: 394783 - DNA, 30 bp, Artificial Sequence
  Synthetic oligonucleotide
tagcaagcgctcgtggcatagacggttaca

SEQ ID NO: 394784 - DNA, 30 bp, Artificial Sequence
  Synthetic oligonucleotide
aaaagccgcgcttcgaaatgatcggttaca

SEQ ID NO: 394785 - DNA, 30 bp, Artificial Sequence
  Synthetic oligonucleotide
ggctttggtcagcacgaaatgtcggttaca

SEQ ID NO: 394786 - DNA, 30 bp, Artificial Sequence
  Synthetic oligonucleotide
aatgtaaatctagaacaattatgggttaca

SEQ ID NO: 394787 - DNA, 30 bp, Artificial Sequence
  Synthetic oligonucleotide
ataccctatatcatctcacagaaatttaca

SEQ ID NO: 394788 - DNA, 30 bp, Artificial Sequence
  Synthetic oligonucleotide
tcggaaacttcacgccccttagcatttaca

SEQ ID NO: 394789 - DNA, 30 bp, Artificial Sequence
  Synthetic oligonucleotide
ctggcagctggaatcgcaatgctatttaca

SEQ ID NO: 394790 - DNA, 30 bp, Artificial Sequence
  Synthetic oligonucleotide
acagtacagatgtatgagtacatctttaca

SEQ ID NO: 394791 - DNA, 30 bp, Artificial Sequence
  Synthetic oligonucleotide
tgctaatagcgcccgattcaaaggtttaca

SEQ ID NO: 394792 - DNA, 30 bp, Artificial Sequence
  Synthetic oligonucleotide
agcaacttaacggtctgtcacatgtttaca

SEQ ID NO: 394793 - DNA, 30 bp, Artificial Sequence
  Synthetic oligonucleotide
tagggctatgtaggaccaacgctttttaca

SEQ ID NO: 394794 - DNA, 30 bp, Artificial Sequence
  Synthetic oligonucleotide
ttcgggtattgagtaacctgaccgaaacca

SEQ ID NO: 394795 - DNA, 30 bp, Artificial Sequence
  Synthetic oligonucleotide
gaaatgtatagggagcggcccatgaaacca

SEQ ID NO: 394796 - DNA, 30 bp, Artificial Sequence
  Synthetic oligonucleotide
gcggcagtatgctgacgcccgcataaacca

SEQ ID NO: 394797 - DNA, 30 bp, Artificial Sequence
  Synthetic oligonucleotide
agctggtttgtcgtctttgcttttaaacca

SEQ ID NO: 394798 - DNA, 31 bp, Artificial Sequence
  Synthetic oligonucleotide
gctatttcgtaatatggctacgaaacaacca

SEQ ID NO: 394799 - DNA, 30 bp, Artificial Sequence
  Synthetic oligonucleotide
tagacttctgatacaatagcagtccaacca

SEQ ID NO: 394800 - DNA, 30 bp, Artificial Sequence
  Synthetic oligonucleotide
ctaatgtttctgatttaagtcgagcaacca

SEQ ID NO: 394801 - DNA, 30 bp, Artificial Sequence
  Synthetic oligonucleotide
aagtgtcttgggattttgagtacagaacca

SEQ ID NO: 394802 - DNA, 30 bp, Artificial Sequence
  Synthetic oligonucleotide
acattgggaatcacgtatatgtgagaacca

SEQ ID NO: 394803 - DNA, 30 bp, Artificial Sequence
  Synthetic oligonucleotide
cctgacataagcttcgtgaatcacgaacca

SEQ ID NO: 394804 - DNA, 30 bp, Artificial Sequence
  Synthetic oligonucleotide
tgccatttgcgcggacgacggtacgaacca

SEQ ID NO: 394805 - DNA, 30 bp, Artificial Sequence
  Synthetic oligonucleotide
gatcccgccctgtatatcctgttcgaacca

SEQ ID NO: 394806 - DNA, 30 bp, Artificial Sequence
  Synthetic oligonucleotide
ggtatctctctcgaccgtcgtgaggaacca

SEQ ID NO: 394807 - DNA, 30 bp, Artificial Sequence
  Synthetic oligonucleotide
ccataggagaattgaacatcaggggaacca

SEQ ID NO: 394808 - DNA, 30 bp, Artificial Sequence
  Synthetic oligonucleotide
cgacagacatggtgatatataatggaacca

SEQ ID NO: 394809 - DNA, 30 bp, Artificial Sequence
  Synthetic oligonucleotide
ggagccgacgtaaggcgagctatggaacca

SEQ ID NO: 394810 - DNA, 30 bp, Artificial Sequence
  Synthetic oligonucleotide
acagggttcagtacaattgtaaaataacca

SEQ ID NO: 394811 - DNA, 30 bp, Artificial Sequence
  Synthetic oligonucleotide
atgacgtatgatatgaggctaccataacca

SEQ ID NO: 394812 - DNA, 30 bp, Artificial Sequence
  Synthetic oligonucleotide
ggctggcagggctaggactctttgtaacca

SEQ ID NO: 394813 - DNA, 30 bp, Artificial Sequence
  Synthetic oligonucleotide
ggtgttagacagcgcctcgccgattaacca

SEQ ID NO: 394814 - DNA, 30 bp, Artificial Sequence
  Synthetic oligonucleotide
tgactgaaatggttcaaccaggtttaacca

SEQ ID NO: 394815 - DNA, 30 bp, Artificial Sequence
  Synthetic oligonucleotide
ctatctgtcatcacctggtacaaaacacca

SEQ ID NO: 394816 - DNA, 30 bp, Artificial Sequence
  Synthetic oligonucleotide
ccccttaaatgggtagaacaataaacacca

SEQ ID NO: 394817 - DNA, 30 bp, Artificial Sequence
  Synthetic oligonucleotide
tgctcggaaacatggtcatgattaacacca

SEQ ID NO: 394818 - DNA, 30 bp, Artificial Sequence
  Synthetic oligonucleotide
tttgcccgactcgaatggagtgatacacca

SEQ ID NO: 394819 - DNA, 30 bp, Artificial Sequence
  Synthetic oligonucleotide
ttctgagatgtatttacaaagtatacacca

SEQ ID NO: 394820 - DNA, 30 bp, Artificial Sequence
  Synthetic oligonucleotide
tgtaaagcgtcataaaaggcttttacacca

SEQ ID NO: 394821 - DNA, 30 bp, Artificial Sequence
  Synthetic oligonucleotide
cctcttacaaattgcacaggaaaaccacca

SEQ ID NO: 394822 - DNA, 30 bp, Artificial Sequence
  Synthetic oligonucleotide
ggctaatacctgcaatagggttaaccacca

SEQ ID NO: 394823 - DNA, 30 bp, Artificial Sequence
  Synthetic oligonucleotide
cagcttggcgcgaaaacgcggtcaccacca

SEQ ID NO: 394824 - DNA, 30 bp, Artificial Sequence
  Synthetic oligonucleotide
gtactattcaacgctgtccatgccccacca

SEQ ID NO: 394825 - DNA, 30 bp, Artificial Sequence
  Synthetic oligonucleotide
tctggcataagaaactttgtccgcccacca

SEQ ID NO: 394826 - DNA, 30 bp, Artificial Sequence
  Synthetic oligonucleotide
gtaagtgcatcgtgccttgaagtcccacca

SEQ ID NO: 394827 - DNA, 30 bp, Artificial Sequence
  Synthetic oligonucleotide
ccgctacggccatttacaggccagccacca

SEQ ID NO: 394828 - DNA, 30 bp, Artificial Sequence
  Synthetic oligonucleotide
gaaggtaacggtgcactgattagtccacca

SEQ ID NO: 394829 - DNA, 30 bp, Artificial Sequence
  Synthetic oligonucleotide
gctgatccattaaaaacccgctttccacca

SEQ ID NO: 394830 - DNA, 30 bp, Artificial Sequence
  Synthetic oligonucleotide
tctaatgtctgtaggccggtaggagcacca

SEQ ID NO: 394831 - DNA, 30 bp, Artificial Sequence
  Synthetic oligonucleotide
atgctgagcgagacttgttaaaccgcacca

SEQ ID NO: 394832 - DNA, 30 bp, Artificial Sequence
  Synthetic oligonucleotide
gtcagtggccgctatttgaacgccgcacca

SEQ ID NO: 394833 - DNA, 30 bp, Artificial Sequence
  Synthetic oligonucleotide
aattagaacgcaccccgtgtgtgggcacca

SEQ ID NO: 394834 - DNA, 30 bp, Artificial Sequence
  Synthetic oligonucleotide
caaaaatcaaataagcccgtcgtggcacca

SEQ ID NO: 394835 - DNA, 30 bp, Artificial Sequence
  Synthetic oligonucleotide
cctttacctccacgctagattcttgcacca

SEQ ID NO: 394836 - DNA, 30 bp, Artificial Sequence
  Synthetic oligonucleotide
actacagagaaccggtttgtaaaatcacca

SEQ ID NO: 394837 - DNA, 30 bp, Artificial Sequence
  Synthetic oligonucleotide
ttacacctgacagccgcggcgcgatcacca

SEQ ID NO: 394838 - DNA, 30 bp, Artificial Sequence
  Synthetic oligonucleotide
actcctggaggtatccccttatcctcacca

SEQ ID NO: 394839 - DNA, 30 bp, Artificial Sequence
  Synthetic oligonucleotide
gaatgctcagactgaggcacggtgtcacca

SEQ ID NO: 394840 - DNA, 30 bp, Artificial Sequence
  Synthetic oligonucleotide
gcgctgcccgcagtctagaccgtaagacca

SEQ ID NO: 394841 - DNA, 30 bp, Artificial Sequence
  Synthetic oligonucleotide
aacatctccggtggcacagccttaagacca

SEQ ID NO: 394842 - DNA, 30 bp, Artificial Sequence
  Synthetic oligonucleotide
catagacgttcccgtctatgaatcagacca

SEQ ID NO: 394843 - DNA, 30 bp, Artificial Sequence
  Synthetic oligonucleotide
aggaattggttgtatgcattgttcagacca

SEQ ID NO: 394844 - DNA, 30 bp, Artificial Sequence
  Synthetic oligonucleotide
cgggcaattggtctcatgggatcgagacca

SEQ ID NO: 394845 - DNA, 30 bp, Artificial Sequence
  Synthetic oligonucleotide
gactcttataaactgggtacactgagacca

SEQ ID NO: 394846 - DNA, 30 bp, Artificial Sequence
  Synthetic oligonucleotide
ggacgcaggatctgctatgacagacgacca

SEQ ID NO: 394847 - DNA, 30 bp, Artificial Sequence
  Synthetic oligonucleotide
tgcctcgacattatataaattggacgacca

SEQ ID NO: 394848 - DNA, 30 bp, Artificial Sequence
  Synthetic oligonucleotide
agttacgtgagtcgaatccgtccccgacca

SEQ ID NO: 394849 - DNA, 30 bp, Artificial Sequence
  Synthetic oligonucleotide
ttggtaagatttcatggattgccgcgacca

SEQ ID NO: 394850 - DNA, 30 bp, Artificial Sequence
  Synthetic oligonucleotide
gccgctcactacactagcataattcgacca

SEQ ID NO: 394851 - DNA, 30 bp, Artificial Sequence
  Synthetic oligonucleotide
tagcgatgcctctaacgagtaggaggacca

SEQ ID NO: 394852 - DNA, 30 bp, Artificial Sequence
  Synthetic oligonucleotide
gttccgcgtggaagtggggtgtacggacca

SEQ ID NO: 394853 - DNA, 30 bp, Artificial Sequence
  Synthetic oligonucleotide
aacagtgcgggcgtataattagtcggacca

SEQ ID NO: 394854 - DNA, 30 bp, Artificial Sequence
  Synthetic oligonucleotide
acatgatttctccggatgctaccgggacca

SEQ ID NO: 394855 - DNA, 30 bp, Artificial Sequence
  Synthetic oligonucleotide
tatttgggtagaaagattgctgggggacca

SEQ ID NO: 394856 - DNA, 30 bp, Artificial Sequence
  Synthetic oligonucleotide
ttgaagcttttgattggcgtggatggacca

SEQ ID NO: 394857 - DNA, 30 bp, Artificial Sequence
  Synthetic oligonucleotide
aaaacgactaccctgggtcgtgtatgacca

SEQ ID NO: 394858 - DNA, 30 bp, Artificial Sequence
  Synthetic oligonucleotide
ctaactgcactaagataaacatattgacca

SEQ ID NO: 394859 - DNA, 30 bp, Artificial Sequence
  Synthetic oligonucleotide
gagcaaagcggaataggtcagtattgacca

SEQ ID NO: 394860 - DNA, 30 bp, Artificial Sequence
  Synthetic oligonucleotide
tacatcttatatcagtatgcgcaaatacca

SEQ ID NO: 394861 - DNA, 30 bp, Artificial Sequence
  Synthetic oligonucleotide
acagcgattttatcgatgtggggaatacca

SEQ ID NO: 394862 - DNA, 30 bp, Artificial Sequence
  Synthetic oligonucleotide
tctacgaacaaagcagcccggcgcatacca

SEQ ID NO: 394863 - DNA, 30 bp, Artificial Sequence
  Synthetic oligonucleotide
tcggtccctcgtgcagtttctgagatacca

SEQ ID NO: 394864 - DNA, 30 bp, Artificial Sequence
  Synthetic oligonucleotide
actttgctaacccgaacggcttagatacca

SEQ ID NO: 394865 - DNA, 30 bp, Artificial Sequence
  Synthetic oligonucleotide
ccgctctacatagaagctctgcctatacca

SEQ ID NO: 394866 - DNA, 30 bp, Artificial Sequence
  Synthetic oligonucleotide
gaccacaagatatcggcttcccgtatacca

SEQ ID NO: 394867 - DNA, 29 bp, Artificial Sequence
  Synthetic oligonucleotide
acggattcgtgagtaatgtctgtatacca

SEQ ID NO: 394868 - DNA, 30 bp, Artificial Sequence
  Synthetic oligonucleotide
tacccgtcctctattccgtagaacctacca

SEQ ID NO: 394869 - DNA, 30 bp, Artificial Sequence
  Synthetic oligonucleotide
ctaataatcaaaatgatatgccgcctacca

SEQ ID NO: 394870 - DNA, 30 bp, Artificial Sequence
  Synthetic oligonucleotide
ctggagtaggaatccttaggcggcctacca

SEQ ID NO: 394871 - DNA, 30 bp, Artificial Sequence
  Synthetic oligonucleotide
aacccggtagtgggaaagattctgctacca

SEQ ID NO: 394872 - DNA, 30 bp, Artificial Sequence
  Synthetic oligonucleotide
cttgcccgagcggtacggttacaagtacca

SEQ ID NO: 394873 - DNA, 30 bp, Artificial Sequence
  Synthetic oligonucleotide
gaggcggtacctcctggtcaggaagtacca

SEQ ID NO: 394874 - DNA, 30 bp, Artificial Sequence
  Synthetic oligonucleotide
ggaatcttccaagggaggaccgcagtacca

SEQ ID NO: 394875 - DNA, 30 bp, Artificial Sequence
  Synthetic oligonucleotide
agtaattcattttgtaaacattgagtacca

SEQ ID NO: 394876 - DNA, 30 bp, Artificial Sequence
  Synthetic oligonucleotide
agtttccatattttgcgcaggatagtacca

SEQ ID NO: 394877 - DNA, 30 bp, Artificial Sequence
  Synthetic oligonucleotide
ttgaatggccttttgagtagcgtagtacca

SEQ ID NO: 394878 - DNA, 30 bp, Artificial Sequence
  Synthetic oligonucleotide
ggaggagcggtataccgggcgttagtacca

SEQ ID NO: 394879 - DNA, 30 bp, Artificial Sequence
  Synthetic oligonucleotide
ggtaggtcgggatttattatgcccgtacca

SEQ ID NO: 394880 - DNA, 30 bp, Artificial Sequence
  Synthetic oligonucleotide
cggggcggccggacgcctcgactggtacca

SEQ ID NO: 394881 - DNA, 30 bp, Artificial Sequence
  Synthetic oligonucleotide
tgtaaagttgacttaggttctctggtacca

SEQ ID NO: 394882 - DNA, 30 bp, Artificial Sequence
  Synthetic oligonucleotide
cagttaattccagcctcgattattgtacca

SEQ ID NO: 394883 - DNA, 30 bp, Artificial Sequence
  Synthetic oligonucleotide
ctaaatgccggaacaatgcaataattacca

SEQ ID NO: 394884 - DNA, 30 bp, Artificial Sequence
  Synthetic oligonucleotide
gatattccctctccggcagcataattacca

SEQ ID NO: 394885 - DNA, 30 bp, Artificial Sequence
  Synthetic oligonucleotide
tcaataaaaaatgttcggtggtaattacca

SEQ ID NO: 394886 - DNA, 30 bp, Artificial Sequence
  Synthetic oligonucleotide
ctccagatcgtggaacgtcgggatttacca

SEQ ID NO: 394887 - DNA, 30 bp, Artificial Sequence
  Synthetic oligonucleotide
atgagtcggagggtgacctcctctttacca

SEQ ID NO: 394888 - DNA, 30 bp, Artificial Sequence
  Synthetic oligonucleotide
gaaatgtgaatgacacaaagttgtttacca

SEQ ID NO: 394889 - DNA, 30 bp, Artificial Sequence
  Synthetic oligonucleotide
agtgcaatcgaacgctgtgttattttacca

SEQ ID NO: 394890 - DNA, 30 bp, Artificial Sequence
  Synthetic oligonucleotide
atctaatttagagttgtgcggacaaaccca

SEQ ID NO: 394891 - DNA, 30 bp, Artificial Sequence
  Synthetic oligonucleotide
tggagaactacgtagcccgccttaaaccca

SEQ ID NO: 394892 - DNA, 30 bp, Artificial Sequence
  Synthetic oligonucleotide
aatcagtgacccgtcaacacaagcaaccca

SEQ ID NO: 394893 - DNA, 30 bp, Artificial Sequence
  Synthetic oligonucleotide
gggcaagcactgaatacgaccggcaaccca

SEQ ID NO: 394894 - DNA, 30 bp, Artificial Sequence
  Synthetic oligonucleotide
ccttgaatcctgggctatcgcaagaaccca

SEQ ID NO: 394895 - DNA, 30 bp, Artificial Sequence
  Synthetic oligonucleotide
tcaaaggttcggtgtgtactcacgaaccca

SEQ ID NO: 394896 - DNA, 30 bp, Artificial Sequence
  Synthetic oligonucleotide
gggacgggcacggagtgatctaaacaccca

SEQ ID NO: 394897 - DNA, 30 bp, Artificial Sequence
  Synthetic oligonucleotide
ttgtgggttcacgctacatacgaacaccca

SEQ ID NO: 394898 - DNA, 30 bp, Artificial Sequence
  Synthetic oligonucleotide
aatcatgggcaggcatccaggggccaccca

SEQ ID NO: 394899 - DNA, 30 bp, Artificial Sequence
  Synthetic oligonucleotide
gtattcttctgcccgagggatgaagaccca

SEQ ID NO: 394900 - DNA, 30 bp, Artificial Sequence
  Synthetic oligonucleotide
aaatgactgctaacgggtactgaagaccca

SEQ ID NO: 394901 - DNA, 30 bp, Artificial Sequence
  Synthetic oligonucleotide
taggcagactggtcggtcacaagcgaccca

SEQ ID NO: 394902 - DNA, 30 bp, Artificial Sequence
  Synthetic oligonucleotide
gccgttcatgaaaacgtcttcccggaccca

SEQ ID NO: 394903 - DNA, 30 bp, Artificial Sequence
  Synthetic oligonucleotide
atcggttcaatatcagatctggtggaccca

SEQ ID NO: 394904 - DNA, 30 bp, Artificial Sequence
  Synthetic oligonucleotide
gttcggtatgatagacattaccatgaccca

SEQ ID NO: 394905 - DNA, 30 bp, Artificial Sequence
  Synthetic oligonucleotide
ctgatggggaatgcggaagcttttgaccca

SEQ ID NO: 394906 - DNA, 30 bp, Artificial Sequence
  Synthetic oligonucleotide
cggcttccgtctgcacgggggccataccca

SEQ ID NO: 394907 - DNA, 30 bp, Artificial Sequence
  Synthetic oligonucleotide
agcggttcttactcgggatagttctaccca

SEQ ID NO: 394908 - DNA, 30 bp, Artificial Sequence
  Synthetic oligonucleotide
cagatgctagccgggttcagaaagtaccca

SEQ ID NO: 394909 - DNA, 30 bp, Artificial Sequence
  Synthetic oligonucleotide
ttgcgctagattcccttgcataattaccca

SEQ ID NO: 394910 - DNA, 30 bp, Artificial Sequence
  Synthetic oligonucleotide
atctttgtgagtctgtggaccgcttaccca

SEQ ID NO: 394911 - DNA, 30 bp, Artificial Sequence
  Synthetic oligonucleotide
tcggggttggcttttagctagggttaccca

SEQ ID NO: 394912 - DNA, 30 bp, Artificial Sequence
  Synthetic oligonucleotide
aaggcatttgcgttccatatgatttaccca

SEQ ID NO: 394913 - DNA, 30 bp, Artificial Sequence
  Synthetic oligonucleotide
gcatacggtgtttaactattaaaaacccca

SEQ ID NO: 394914 - DNA, 30 bp, Artificial Sequence
  Synthetic oligonucleotide
acccgcttcgttaggggcgtctaaacccca

SEQ ID NO: 394915 - DNA, 30 bp, Artificial Sequence
  Synthetic oligonucleotide
tttgatagaccttaaacttgctcaacccca

SEQ ID NO: 394916 - DNA, 30 bp, Artificial Sequence
  Synthetic oligonucleotide
ctatatacctaacgccatgcggtaacccca

SEQ ID NO: 394917 - DNA, 30 bp, Artificial Sequence
  Synthetic oligonucleotide
tcgcgggcgccgcatgttcacaccacccca

SEQ ID NO: 394918 - DNA, 30 bp, Artificial Sequence
  Synthetic oligonucleotide
tactacacttgtgtagcgcggaccacccca

SEQ ID NO: 394919 - DNA, 30 bp, Artificial Sequence
  Synthetic oligonucleotide
tgacttgcaggcagagctaacaccccccca

SEQ ID NO: 394920 - DNA, 30 bp, Artificial Sequence
  Synthetic oligonucleotide
ggtctttcggagggcgagaccagcccccca

SEQ ID NO: 394921 - DNA, 30 bp, Artificial Sequence
  Synthetic oligonucleotide
atcacacgtattagacatggctgtccccca

SEQ ID NO: 394922 - DNA, 30 bp, Artificial Sequence
  Synthetic oligonucleotide
gttggttggttgaagactggtcgcgcccca

SEQ ID NO: 394923 - DNA, 30 bp, Artificial Sequence
  Synthetic oligonucleotide
gtttaatagacacgttgtgcgtgcgcccca

SEQ ID NO: 394924 - DNA, 30 bp, Artificial Sequence
  Synthetic oligonucleotide
gcaggattcaggttcacactggtcgcccca

SEQ ID NO: 394925 - DNA, 30 bp, Artificial Sequence
  Synthetic oligonucleotide
ccgcgattacagtttcgtgcatcatcccca

SEQ ID NO: 394926 - DNA, 30 bp, Artificial Sequence
  Synthetic oligonucleotide
ggtagcatgcatccccggcgggactcccca

SEQ ID NO: 394927 - DNA, 30 bp, Artificial Sequence
  Synthetic oligonucleotide
tgattcagagaagcacgggaactctcccca

SEQ ID NO: 394928 - DNA, 30 bp, Artificial Sequence
  Synthetic oligonucleotide
ggcatcttatgaccgctgcggtcgtcccca

SEQ ID NO: 394929 - DNA, 30 bp, Artificial Sequence
  Synthetic oligonucleotide
tgtgtattatgcgcggattgggcttcccca

SEQ ID NO: 394930 - DNA, 30 bp, Artificial Sequence
  Synthetic oligonucleotide
gatttgttgaggcctctcgcgatttcccca

SEQ ID NO: 394931 - DNA, 30 bp, Artificial Sequence
  Synthetic oligonucleotide
tgtcataatgatagattatccggaagccca

SEQ ID NO: 394932 - DNA, 30 bp, Artificial Sequence
  Synthetic oligonucleotide
tgtaaggggctcaagttagatcagagccca

SEQ ID NO: 394933 - DNA, 30 bp, Artificial Sequence
  Synthetic oligonucleotide
ttctggaaatttctacgctccgggagccca

SEQ ID NO: 394934 - DNA, 30 bp, Artificial Sequence
  Synthetic oligonucleotide
ttgaacacaatagtctgatcccgtagccca

SEQ ID NO: 394935 - DNA, 30 bp, Artificial Sequence
  Synthetic oligonucleotide
taagtttctagccatccgtctcttagccca

SEQ ID NO: 394936 - DNA, 30 bp, Artificial Sequence
  Synthetic oligonucleotide
caaaatagagatacgggttgtggacgccca

SEQ ID NO: 394937 - DNA, 30 bp, Artificial Sequence
  Synthetic oligonucleotide
taacggcggggccagcactcgtgacgccca

SEQ ID NO: 394938 - DNA, 30 bp, Artificial Sequence
  Synthetic oligonucleotide
tgctacccgactttcacgttataccgccca

SEQ ID NO: 394939 - DNA, 30 bp, Artificial Sequence
  Synthetic oligonucleotide
tagtccatattgctttctcagtaccgccca

SEQ ID NO: 394940 - DNA, 30 bp, Artificial Sequence
  Synthetic oligonucleotide
ccattttgattctgctgaaccgggcgccca

SEQ ID NO: 394941 - DNA, 30 bp, Artificial Sequence
  Synthetic oligonucleotide
gaatacggcgtattcttagtaaatcgccca

SEQ ID NO: 394942 - DNA, 30 bp, Artificial Sequence
  Synthetic oligonucleotide
agttttgattcagacatctgaattcgccca

SEQ ID NO: 394943 - DNA, 30 bp, Artificial Sequence
  Synthetic oligonucleotide
ggtctgcaagggcatccataaaaaggccca

SEQ ID NO: 394944 - DNA, 30 bp, Artificial Sequence
  Synthetic oligonucleotide
tccagtcgagcgttttacaatcgaggccca

SEQ ID NO: 394945 - DNA, 30 bp, Artificial Sequence
  Synthetic oligonucleotide
ggatttggttatagttccttctgaggccca

SEQ ID NO: 394946 - DNA, 30 bp, Artificial Sequence
  Synthetic oligonucleotide
gacgatgtcagcctttaaaaggccggccca

SEQ ID NO: 394947 - DNA, 30 bp, Artificial Sequence
  Synthetic oligonucleotide
aatactgattccaaccccatggccggccca

SEQ ID NO: 394948 - DNA, 30 bp, Artificial Sequence
  Synthetic oligonucleotide
ataacggccgagccccgacgcctgggccca

SEQ ID NO: 394949 - DNA, 30 bp, Artificial Sequence
  Synthetic oligonucleotide
ccatgcaagtgcttatttcttgtgggccca

SEQ ID NO: 394950 - DNA, 30 bp, Artificial Sequence
  Synthetic oligonucleotide
cgtgtgaagcgtgctacgtacgttggccca

SEQ ID NO: 394951 - DNA, 30 bp, Artificial Sequence
  Synthetic oligonucleotide
caagtgccttgcagacgttttacatgccca

SEQ ID NO: 394952 - DNA, 30 bp, Artificial Sequence
  Synthetic oligonucleotide
cggccctgcacccaggagaatggctgccca

SEQ ID NO: 394953 - DNA, 29 bp, Artificial Sequence
  Synthetic oligonucleotide
tgatactgcgcgtcagctcctgctgccca

SEQ ID NO: 394954 - DNA, 30 bp, Artificial Sequence
  Synthetic oligonucleotide
accggaggcgcatggcatttcttctgccca

SEQ ID NO: 394955 - DNA, 30 bp, Artificial Sequence
  Synthetic oligonucleotide
gtggtcgggccaccacgccgtttgtgccca

SEQ ID NO: 394956 - DNA, 30 bp, Artificial Sequence
  Synthetic oligonucleotide
aggatgtagcttgggcacggattcatccca

SEQ ID NO: 394957 - DNA, 30 bp, Artificial Sequence
  Synthetic oligonucleotide
gtatggtgttttacctgacctaggatccca

SEQ ID NO: 394958 - DNA, 30 bp, Artificial Sequence
  Synthetic oligonucleotide
acggcataccctgcaacaaaagcactccca

SEQ ID NO: 394959 - DNA, 30 bp, Artificial Sequence
  Synthetic oligonucleotide
gaataacgaaagcggctaaatttcctccca

SEQ ID NO: 394960 - DNA, 30 bp, Artificial Sequence
  Synthetic oligonucleotide
tattgtgggtcatgttcgcctaagctccca

SEQ ID NO: 394961 - DNA, 30 bp, Artificial Sequence
  Synthetic oligonucleotide
agtgttgtcgacatttttcgccggctccca

SEQ ID NO: 394962 - DNA, 30 bp, Artificial Sequence
  Synthetic oligonucleotide
ccggcactaccaaacgcaacttggctccca

SEQ ID NO: 394963 - DNA, 30 bp, Artificial Sequence
  Synthetic oligonucleotide
ggtccggggcaacgcttggtaagtctccca

SEQ ID NO: 394964 - DNA, 30 bp, Artificial Sequence
  Synthetic oligonucleotide
aggccgttttcgccccttagggaagtccca

SEQ ID NO: 394965 - DNA, 30 bp, Artificial Sequence
  Synthetic oligonucleotide
tgaggcattttgttgcgggtaggagtccca

SEQ ID NO: 394966 - DNA, 30 bp, Artificial Sequence
  Synthetic oligonucleotide
gggagagacatcaggctatcggtcgtccca

SEQ ID NO: 394967 - DNA, 29 bp, Artificial Sequence
  Synthetic oligonucleotide
atctggggcacatgttcggctgggtccca

SEQ ID NO: 394968 - DNA, 30 bp, Artificial Sequence
  Synthetic oligonucleotide
cagcaacttttacgcccaaaccatgtccca

SEQ ID NO: 394969 - DNA, 30 bp, Artificial Sequence
  Synthetic oligonucleotide
tttctggggggcacgataagccgcttccca

SEQ ID NO: 394970 - DNA, 30 bp, Artificial Sequence
  Synthetic oligonucleotide
gttctggctctcttgatggaactgttccca

SEQ ID NO: 394971 - DNA, 30 bp, Artificial Sequence
  Synthetic oligonucleotide
taaggcgtaaacaaaccgagtttgttccca

SEQ ID NO: 394972 - DNA, 30 bp, Artificial Sequence
  Synthetic oligonucleotide
atagagtatgatagatcggctgatttccca

SEQ ID NO: 394973 - DNA, 30 bp, Artificial Sequence
  Synthetic oligonucleotide
gctagaagggccactgatgccctcaagcca

SEQ ID NO: 394974 - DNA, 30 bp, Artificial Sequence
  Synthetic oligonucleotide
tgatttggcgtacacgcgtacgagaagcca

SEQ ID NO: 394975 - DNA, 30 bp, Artificial Sequence
  Synthetic oligonucleotide
ctcatccggtagaagtcgcaggataagcca

SEQ ID NO: 394976 - DNA, 30 bp, Artificial Sequence
  Synthetic oligonucleotide
cggaaatttgcacttatgcgcccacagcca

SEQ ID NO: 394977 - DNA, 30 bp, Artificial Sequence
  Synthetic oligonucleotide
acaatgggggctggctggcgaaaccagcca

SEQ ID NO: 394978 - DNA, 30 bp, Artificial Sequence
  Synthetic oligonucleotide
gttaaccgctcgggaagcagacagcagcca

SEQ ID NO: 394979 - DNA, 30 bp, Artificial Sequence
  Synthetic oligonucleotide
ggcacacaatttaagtgggtgcagcagcca

SEQ ID NO: 394980 - DNA, 30 bp, Artificial Sequence
  Synthetic oligonucleotide
tttatcgcgtaatttttgagtcatcagcca

SEQ ID NO: 394981 - DNA, 30 bp, Artificial Sequence
  Synthetic oligonucleotide
tcctcgtctaccatgtctagggttcagcca

SEQ ID NO: 394982 - DNA, 30 bp, Artificial Sequence
  Synthetic oligonucleotide
ataagcggatttgttgttgtctttcagcca

SEQ ID NO: 394983 - DNA, 30 bp, Artificial Sequence
  Synthetic oligonucleotide
tacgaatgtctcatcagcgaacacgagcca

SEQ ID NO: 394984 - DNA, 30 bp, Artificial Sequence
  Synthetic oligonucleotide
catattaaaaccaacccttcatacgagcca

SEQ ID NO: 394985 - DNA, 30 bp, Artificial Sequence
  Synthetic oligonucleotide
tcggtgaaggcgaagctagtactcgagcca

SEQ ID NO: 394986 - DNA, 30 bp, Artificial Sequence
  Synthetic oligonucleotide
ggtgtgatccgaagatccgacgtggagcca

SEQ ID NO: 394987 - DNA, 30 bp, Artificial Sequence
  Synthetic oligonucleotide
tttcagattgagtacctttgggaatagcca

SEQ ID NO: 394988 - DNA, 30 bp, Artificial Sequence
  Synthetic oligonucleotide
cacggttaagcatggtgttcactctagcca

SEQ ID NO: 394989 - DNA, 30 bp, Artificial Sequence
  Synthetic oligonucleotide
actaattccagattatttctgtagtagcca

SEQ ID NO: 394990 - DNA, 30 bp, Artificial Sequence
  Synthetic oligonucleotide
ccagcttttgtagtaaaattcacgtagcca

SEQ ID NO: 394991 - DNA, 30 bp, Artificial Sequence
  Synthetic oligonucleotide
actcgttgaggctttatgaacgcgtagcca

SEQ ID NO: 394992 - DNA, 30 bp, Artificial Sequence
  Synthetic oligonucleotide
aacgtcttgaacacgggccctcggtagcca

SEQ ID NO: 394993 - DNA, 30 bp, Artificial Sequence
  Synthetic oligonucleotide
agtttatggattagaaagtatgggtagcca

SEQ ID NO: 394994 - DNA, 30 bp, Artificial Sequence
  Synthetic oligonucleotide
acctgggaaggcccgcgtcactggtagcca

SEQ ID NO: 394995 - DNA, 30 bp, Artificial Sequence
  Synthetic oligonucleotide
gggattttcttgcaaaattcgtaaacgcca

SEQ ID NO: 394996 - DNA, 30 bp, Artificial Sequence
  Synthetic oligonucleotide
atgtataggtatggtgtgctatagacgcca

SEQ ID NO: 394997 - DNA, 30 bp, Artificial Sequence
  Synthetic oligonucleotide
tcgggaaatgggtcgagggtatctacgcca

SEQ ID NO: 394998 - DNA, 30 bp, Artificial Sequence
  Synthetic oligonucleotide
gaattttggggatcggtaggacgaccgcca

SEQ ID NO: 394999 - DNA, 30 bp, Artificial Sequence
  Synthetic oligonucleotide
tcgggcggtatgaggagattcggaccgcca

SEQ ID NO: 395000 - DNA, 30 bp, Artificial Sequence
  Synthetic oligonucleotide
gttagcggctgaaagcattgagccccgcca

SEQ ID NO: 395001 - DNA, 30 bp, Artificial Sequence
  Synthetic oligonucleotide
agtctccagctggattccgtaagcccgcca

SEQ ID NO: 395002 - DNA, 30 bp, Artificial Sequence
  Synthetic oligonucleotide
actctctactgagaaactacgatcccgcca

SEQ ID NO: 395003 - DNA, 30 bp, Artificial Sequence
  Synthetic oligonucleotide
aaattatgctgcctataggtatagccgcca

SEQ ID NO: 395004 - DNA, 30 bp, Artificial Sequence
  Synthetic oligonucleotide
taatatcgtcgcggtgcagagacgccgcca

SEQ ID NO: 395005 - DNA, 30 bp, Artificial Sequence
  Synthetic oligonucleotide
aaacattctagtgcttcatgattgccgcca

SEQ ID NO: 395006 - DNA, 30 bp, Artificial Sequence
  Synthetic oligonucleotide
ggagcccacacgcactacgcttaagcgcca

SEQ ID NO: 395007 - DNA, 30 bp, Artificial Sequence
  Synthetic oligonucleotide
aaatattatgagggttcagctcccgcgcca

SEQ ID NO: 395008 - DNA, 30 bp, Artificial Sequence
  Synthetic oligonucleotide
acgaactctttagcgacgctgtaggcgcca

SEQ ID NO: 395009 - DNA, 30 bp, Artificial Sequence
  Synthetic oligonucleotide
gatggagcaacagaagcccgaatggcgcca

SEQ ID NO: 395010 - DNA, 30 bp, Artificial Sequence
  Synthetic oligonucleotide
ggatacgatagatgcgtcgtgttatcgcca

SEQ ID NO: 395011 - DNA, 30 bp, Artificial Sequence
  Synthetic oligonucleotide
tccacggtgtcgacgcagtcgggctcgcca

SEQ ID NO: 395012 - DNA, 30 bp, Artificial Sequence
  Synthetic oligonucleotide
ggctagaaacggttttcggtcacgtcgcca

SEQ ID NO: 395013 - DNA, 30 bp, Artificial Sequence
  Synthetic oligonucleotide
cactcttggggaacattgtatgcttcgcca

SEQ ID NO: 395014 - DNA, 30 bp, Artificial Sequence
  Synthetic oligonucleotide
aggctcaggtttgattgtttacgttcgcca

SEQ ID NO: 395015 - DNA, 30 bp, Artificial Sequence
  Synthetic oligonucleotide
ctacactccgtctcagctcttcgttcgcca

SEQ ID NO: 395016 - DNA, 30 bp, Artificial Sequence
  Synthetic oligonucleotide
atacggatagatcgcaattaaggttcgcca

SEQ ID NO: 395017 - DNA, 30 bp, Artificial Sequence
  Synthetic oligonucleotide
aattagccaaatcgtggaggtggttcgcca

SEQ ID NO: 395018 - DNA, 30 bp, Artificial Sequence
  Synthetic oligonucleotide
aacaaggggggactagtttgatgttcgcca

SEQ ID NO: 395019 - DNA, 30 bp, Artificial Sequence
  Synthetic oligonucleotide
aaatatgtaaggtagagggatataaggcca

SEQ ID NO: 395020 - DNA, 30 bp, Artificial Sequence
  Synthetic oligonucleotide
ttttcgaatgcgtgacttagtcccaggcca

SEQ ID NO: 395021 - DNA, 30 bp, Artificial Sequence
  Synthetic oligonucleotide
catacgtttctaccaatagtagataggcca

SEQ ID NO: 395022 - DNA, 30 bp, Artificial Sequence
  Synthetic oligonucleotide
cgcctctgaatgtgttcatatagtaggcca

SEQ ID NO: 395023 - DNA, 30 bp, Artificial Sequence
  Synthetic oligonucleotide
aacgcctaccaagtgctagcttttaggcca

SEQ ID NO: 395024 - DNA, 30 bp, Artificial Sequence
  Synthetic oligonucleotide
accccttgtttcgggcgccagtaacggcca

SEQ ID NO: 395025 - DNA, 30 bp, Artificial Sequence
  Synthetic oligonucleotide
tgatagacaggatactgcttgcaccggcca

SEQ ID NO: 395026 - DNA, 30 bp, Artificial Sequence
  Synthetic oligonucleotide
tttgataaattggctacgcaataccggcca

SEQ ID NO: 395027 - DNA, 30 bp, Artificial Sequence
  Synthetic oligonucleotide
gttttcatatctggagtggtcttccggcca

SEQ ID NO: 395028 - DNA, 30 bp, Artificial Sequence
  Synthetic oligonucleotide
agagatactcaaggggtcgattagcggcca

SEQ ID NO: 395029 - DNA, 30 bp, Artificial Sequence
  Synthetic oligonucleotide
gcagttaatatgtgagcgcgagctcggcca

SEQ ID NO: 395030 - DNA, 30 bp, Artificial Sequence
  Synthetic oligonucleotide
tgatagaatgagccgagatcgcaagggcca

SEQ ID NO: 395031 - DNA, 30 bp, Artificial Sequence
  Synthetic oligonucleotide
gttcaaccgggtagtgagctcgaagggcca

SEQ ID NO: 395032 - DNA, 30 bp, Artificial Sequence
  Synthetic oligonucleotide
atgggagtgtcgtaggggggcgtagggcca

SEQ ID NO: 395033 - DNA, 30 bp, Artificial Sequence
  Synthetic oligonucleotide
tagtggctttccagggtctcttcggggcca

SEQ ID NO: 395034 - DNA, 30 bp, Artificial Sequence
  Synthetic oligonucleotide
ccgcggtgggaaaggtcttggggggggcca

SEQ ID NO: 395035 - DNA, 30 bp, Artificial Sequence
  Synthetic oligonucleotide
tccgttcctcatttcaggttgatatggcca

SEQ ID NO: 395036 - DNA, 30 bp, Artificial Sequence
  Synthetic oligonucleotide
agctccgctatttttggggccctatggcca

SEQ ID NO: 395037 - DNA, 30 bp, Artificial Sequence
  Synthetic oligonucleotide
ccgtgatgccgtcatctcgtttcctggcca

SEQ ID NO: 395038 - DNA, 30 bp, Artificial Sequence
  Synthetic oligonucleotide
aatattccgaggagccctgttcggtggcca

SEQ ID NO: 395039 - DNA, 30 bp, Artificial Sequence
  Synthetic oligonucleotide
aatacagatcactcgtgcgcatggtggcca

SEQ ID NO: 395040 - DNA, 30 bp, Artificial Sequence
  Synthetic oligonucleotide
aaaatagaatgtattacattgtggtggcca

SEQ ID NO: 395041 - DNA, 30 bp, Artificial Sequence
  Synthetic oligonucleotide
ggctcacagtagtggtgtcgggattggcca

SEQ ID NO: 395042 - DNA, 30 bp, Artificial Sequence
  Synthetic oligonucleotide
actctatcccagacacttccgagcatgcca

SEQ ID NO: 395043 - DNA, 30 bp, Artificial Sequence
  Synthetic oligonucleotide
gcatgggtgctagggacggggaggatgcca

SEQ ID NO: 395044 - DNA, 30 bp, Artificial Sequence
  Synthetic oligonucleotide
ccgcagcacgatatagcgccgtggatgcca

SEQ ID NO: 395045 - DNA, 30 bp, Artificial Sequence
  Synthetic oligonucleotide
gccattggtgctgtttttttgtatatgcca

SEQ ID NO: 395046 - DNA, 30 bp, Artificial Sequence
  Synthetic oligonucleotide
tgtttaaacgtgcccagataggttatgcca

SEQ ID NO: 395047 - DNA, 30 bp, Artificial Sequence
  Synthetic oligonucleotide
gcactcgaatgcgttttgggctgactgcca

SEQ ID NO: 395048 - DNA, 30 bp, Artificial Sequence
  Synthetic oligonucleotide
ggctactccctatggagataaatactgcca

SEQ ID NO: 395049 - DNA, 30 bp, Artificial Sequence
  Synthetic oligonucleotide
gcttgcatggctcgtttaaggcacctgcca

SEQ ID NO: 395050 - DNA, 30 bp, Artificial Sequence
  Synthetic oligonucleotide
gcataagagcgctccaatggtatgctgcca

SEQ ID NO: 395051 - DNA, 30 bp, Artificial Sequence
  Synthetic oligonucleotide
ctaatccggaccaacattgttaatctgcca

SEQ ID NO: 395052 - DNA, 30 bp, Artificial Sequence
  Synthetic oligonucleotide
ccaatcaggaataatagtcgcgacgtgcca

SEQ ID NO: 395053 - DNA, 30 bp, Artificial Sequence
  Synthetic oligonucleotide
aaagaggcatggcaggcgcgtcccgtgcca

SEQ ID NO: 395054 - DNA, 30 bp, Artificial Sequence
  Synthetic oligonucleotide
tccgtctgccataggaagttgctcgtgcca

SEQ ID NO: 395055 - DNA, 30 bp, Artificial Sequence
  Synthetic oligonucleotide
gggatgttcctgccctcgaacaaggtgcca

SEQ ID NO: 395056 - DNA, 30 bp, Artificial Sequence
  Synthetic oligonucleotide
taagacctgatccggactcagccggtgcca

SEQ ID NO: 395057 - DNA, 30 bp, Artificial Sequence
  Synthetic oligonucleotide
cccattgaactgtgattgaggtgggtgcca

SEQ ID NO: 395058 - DNA, 30 bp, Artificial Sequence
  Synthetic oligonucleotide
tccctagcgtatgcccgctgaaatgtgcca

SEQ ID NO: 395059 - DNA, 30 bp, Artificial Sequence
  Synthetic oligonucleotide
gttttgaggactcccccatcccctgtgcca

SEQ ID NO: 395060 - DNA, 30 bp, Artificial Sequence
  Synthetic oligonucleotide
tacgagagtatgtactgaatctctgtgcca

SEQ ID NO: 395061 - DNA, 30 bp, Artificial Sequence
  Synthetic oligonucleotide
catctctccgtagcccccagcattgtgcca

SEQ ID NO: 395062 - DNA, 30 bp, Artificial Sequence
  Synthetic oligonucleotide
cggttccaggtattggttgtaagattgcca

SEQ ID NO: 395063 - DNA, 30 bp, Artificial Sequence
  Synthetic oligonucleotide
gactgttgatgaatagcgcgcaagttgcca

SEQ ID NO: 395064 - DNA, 30 bp, Artificial Sequence
  Synthetic oligonucleotide
catgattcagacgtttcgcaaacgttgcca

SEQ ID NO: 395065 - DNA, 30 bp, Artificial Sequence
  Synthetic oligonucleotide
cggggggaaattttcattacgactttgcca

SEQ ID NO: 395066 - DNA, 30 bp, Artificial Sequence
  Synthetic oligonucleotide
atcacgaactgagtggagattggaaatcca

SEQ ID NO: 395067 - DNA, 30 bp, Artificial Sequence
  Synthetic oligonucleotide
cctctgtctgcttaggacgtaaacaatcca

SEQ ID NO: 395068 - DNA, 30 bp, Artificial Sequence
  Synthetic oligonucleotide
gaaagtcgcggaatcatagtatgcaatcca

SEQ ID NO: 395069 - DNA, 30 bp, Artificial Sequence
  Synthetic oligonucleotide
catattaaacatgtcatcccgttcaatcca

SEQ ID NO: 395070 - DNA, 30 bp, Artificial Sequence
  Synthetic oligonucleotide
accgcagaccgactactgcttcagaatcca

SEQ ID NO: 395071 - DNA, 30 bp, Artificial Sequence
  Synthetic oligonucleotide
tacagacacgagtggtcccaatggaatcca

SEQ ID NO: 395072 - DNA, 30 bp, Artificial Sequence
  Synthetic oligonucleotide
aaatcatcgctgcagacttgacgtaatcca

SEQ ID NO: 395073 - DNA, 30 bp, Artificial Sequence
  Synthetic oligonucleotide
agagcgtagtatacaggtattcaacatcca

SEQ ID NO: 395074 - DNA, 30 bp, Artificial Sequence
  Synthetic oligonucleotide
aaggtatttatgagttgcttgtcacatcca

SEQ ID NO: 395075 - DNA, 30 bp, Artificial Sequence
  Synthetic oligonucleotide
tcccacatttcatccctaggatgacatcca

SEQ ID NO: 395076 - DNA, 30 bp, Artificial Sequence
  Synthetic oligonucleotide
tcaaaagaaatcgccgcttgacttcatcca

SEQ ID NO: 395077 - DNA, 30 bp, Artificial Sequence
  Synthetic oligonucleotide
tacggcgggtgaagcattctgcccgatcca

SEQ ID NO: 395078 - DNA, 30 bp, Artificial Sequence
  Synthetic oligonucleotide
gttgtgttggttttttatcattccgatcca

SEQ ID NO: 395079 - DNA, 31 bp, Artificial Sequence
  Synthetic oligonucleotide
catgggcaagccagttaatgttctcgatcca

SEQ ID NO: 395080 - DNA, 30 bp, Artificial Sequence
  Synthetic oligonucleotide
gaacgtacatttcgattttagtgtgatcca

SEQ ID NO: 395081 - DNA, 30 bp, Artificial Sequence
  Synthetic oligonucleotide
tacacagaaaccattgccgccagatatcca

SEQ ID NO: 395082 - DNA, 30 bp, Artificial Sequence
  Synthetic oligonucleotide
cccgaacatcgcacctcgctcctatatcca

SEQ ID NO: 395083 - DNA, 30 bp, Artificial Sequence
  Synthetic oligonucleotide
gctgatatggaatggttcccgtactatcca

SEQ ID NO: 395084 - DNA, 30 bp, Artificial Sequence
  Synthetic oligonucleotide
gtgcagcatccaagcttatagacttatcca

SEQ ID NO: 395085 - DNA, 30 bp, Artificial Sequence
  Synthetic oligonucleotide
gtccattaggcttatgcgaacccaactcca

SEQ ID NO: 395086 - DNA, 30 bp, Artificial Sequence
  Synthetic oligonucleotide
atctcttatgtctatagcagtcgtactcca

SEQ ID NO: 395087 - DNA, 30 bp, Artificial Sequence
  Synthetic oligonucleotide
acagttgcagaaatgcttaagcttactcca

SEQ ID NO: 395088 - DNA, 30 bp, Artificial Sequence
  Synthetic oligonucleotide
ggaccgcatccgtggttgtcctgccctcca

SEQ ID NO: 395089 - DNA, 30 bp, Artificial Sequence
  Synthetic oligonucleotide
gttgaaccaagtcatcattcacccgctcca

SEQ ID NO: 395090 - DNA, 30 bp, Artificial Sequence
  Synthetic oligonucleotide
gcatacggataggccaagttctgggctcca

SEQ ID NO: 395091 - DNA, 30 bp, Artificial Sequence
  Synthetic oligonucleotide
ggctcttctgacttgtcaaaacatgctcca

SEQ ID NO: 395092 - DNA, 30 bp, Artificial Sequence
  Synthetic oligonucleotide
cccagacgttagtatacagacagatctcca

SEQ ID NO: 395093 - DNA, 30 bp, Artificial Sequence
  Synthetic oligonucleotide
catatattatggccctggtaattatctcca

SEQ ID NO: 395094 - DNA, 30 bp, Artificial Sequence
  Synthetic oligonucleotide
atcccgccggcacttgccctgaggtctcca

SEQ ID NO: 395095 - DNA, 30 bp, Artificial Sequence
  Synthetic oligonucleotide
ctaaacgcagataacggaatcgggtctcca

SEQ ID NO: 395096 - DNA, 30 bp, Artificial Sequence
  Synthetic oligonucleotide
gctctttgtgtagagccgagtacttctcca

SEQ ID NO: 395097 - DNA, 30 bp, Artificial Sequence
  Synthetic oligonucleotide
gcgctcaacgaattagtgaggggttctcca

SEQ ID NO: 395098 - DNA, 30 bp, Artificial Sequence
  Synthetic oligonucleotide
caggatggatcttctacatagccaagtcca

SEQ ID NO: 395099 - DNA, 30 bp, Artificial Sequence
  Synthetic oligonucleotide
cctggtcagccggctgaacttttaagtcca

SEQ ID NO: 395100 - DNA, 30 bp, Artificial Sequence
  Synthetic oligonucleotide
gtaaagtaatggggcatgcgatccagtcca

SEQ ID NO: 395101 - DNA, 30 bp, Artificial Sequence
  Synthetic oligonucleotide
gctccatggggtaccgaagcattcagtcca

SEQ ID NO: 395102 - DNA, 30 bp, Artificial Sequence
  Synthetic oligonucleotide
ctagttcctagctttttcaatcagagtcca

SEQ ID NO: 395103 - DNA, 30 bp, Artificial Sequence
  Synthetic oligonucleotide
ggctggttccacggcacatgcccgagtcca

SEQ ID NO: 395104 - DNA, 30 bp, Artificial Sequence
  Synthetic oligonucleotide
ggatcatgtctgtgtatcggacatagtcca

SEQ ID NO: 395105 - DNA, 30 bp, Artificial Sequence
  Synthetic oligonucleotide
gatgcatccgctgtttcaaggccccgtcca

SEQ ID NO: 395106 - DNA, 30 bp, Artificial Sequence
  Synthetic oligonucleotide
cgactgacctcggtggcatacgcccgtcca

SEQ ID NO: 395107 - DNA, 30 bp, Artificial Sequence
  Synthetic oligonucleotide
gcggtcgtgccagttagccagtggcgtcca

SEQ ID NO: 395108 - DNA, 30 bp, Artificial Sequence
  Synthetic oligonucleotide
atcgtccacgaggattatccgcctcgtcca

SEQ ID NO: 395109 - DNA, 29 bp, Artificial Sequence
  Synthetic oligonucleotide
ccctgtcccttaggttccactttcgtcca

SEQ ID NO: 395110 - DNA, 30 bp, Artificial Sequence
  Synthetic oligonucleotide
gaagcatgtgccagggcctagtacggtcca

SEQ ID NO: 395111 - DNA, 30 bp, Artificial Sequence
  Synthetic oligonucleotide
gacctttgattcttccatgggttcggtcca

SEQ ID NO: 395112 - DNA, 30 bp, Artificial Sequence
  Synthetic oligonucleotide
agacaaattgttttacactcggagggtcca

SEQ ID NO: 395113 - DNA, 30 bp, Artificial Sequence
  Synthetic oligonucleotide
ctttaaatccaagccgaccaagggggtcca

SEQ ID NO: 395114 - DNA, 30 bp, Artificial Sequence
  Synthetic oligonucleotide
ttcttggtgtgtaaaaatttctatggtcca

SEQ ID NO: 395115 - DNA, 30 bp, Artificial Sequence
  Synthetic oligonucleotide
tgtgagggcctttgatgggccaactgtcca

SEQ ID NO: 395116 - DNA, 30 bp, Artificial Sequence
  Synthetic oligonucleotide
atgcggtagttggactccctttactgtcca

SEQ ID NO: 395117 - DNA, 30 bp, Artificial Sequence
  Synthetic oligonucleotide
ctccccacagcctacaatcgaagctgtcca

SEQ ID NO: 395118 - DNA, 30 bp, Artificial Sequence
  Synthetic oligonucleotide
taggactcgttcgtagtggtgcagtgtcca

SEQ ID NO: 395119 - DNA, 29 bp, Artificial Sequence
  Synthetic oligonucleotide
tttagtacggcggtgtcagggcgtgtcca

SEQ ID NO: 395120 - DNA, 30 bp, Artificial Sequence
  Synthetic oligonucleotide
gcatgttcctgtgcgggagcaaggtgtcca

SEQ ID NO: 395121 - DNA, 30 bp, Artificial Sequence
  Synthetic oligonucleotide
tggattgagttctcattctggctttgtcca

SEQ ID NO: 395122 - DNA, 30 bp, Artificial Sequence
  Synthetic oligonucleotide
agagtgatcatttcttcatgattttgtcca

SEQ ID NO: 395123 - DNA, 30 bp, Artificial Sequence
  Synthetic oligonucleotide
gagtatatgtattcatccatgaaaattcca

SEQ ID NO: 395124 - DNA, 30 bp, Artificial Sequence
  Synthetic oligonucleotide
accgcgccagaaggtagacacgccattcca

SEQ ID NO: 395125 - DNA, 30 bp, Artificial Sequence
  Synthetic oligonucleotide
catggctagtagatacattggtccattcca

SEQ ID NO: 395126 - DNA, 30 bp, Artificial Sequence
  Synthetic oligonucleotide
cgtgagtcgaaacccagactcagcattcca

SEQ ID NO: 395127 - DNA, 30 bp, Artificial Sequence
  Synthetic oligonucleotide
aaggcgctggcagtccggagtaagattcca

SEQ ID NO: 395128 - DNA, 30 bp, Artificial Sequence
  Synthetic oligonucleotide
taggaaggatctgaggcgtctgtgattcca

SEQ ID NO: 395129 - DNA, 30 bp, Artificial Sequence
  Synthetic oligonucleotide
tgataaaagtggttgacagattctattcca

SEQ ID NO: 395130 - DNA, 30 bp, Artificial Sequence
  Synthetic oligonucleotide
aaagcatggttcaagaagtccattattcca

SEQ ID NO: 395131 - DNA, 30 bp, Artificial Sequence
  Synthetic oligonucleotide
aagaaccgcatccagcggtacttacttcca

SEQ ID NO: 395132 - DNA, 30 bp, Artificial Sequence
  Synthetic oligonucleotide
gcacaagcgccagggtggcggtaccttcca

SEQ ID NO: 395133 - DNA, 30 bp, Artificial Sequence
  Synthetic oligonucleotide
taaaatgctgttgcaagtcgcatccttcca

SEQ ID NO: 395134 - DNA, 30 bp, Artificial Sequence
  Synthetic oligonucleotide
tcgctgccacggttgcacggtttagttcca

SEQ ID NO: 395135 - DNA, 30 bp, Artificial Sequence
  Synthetic oligonucleotide
ccgtataccgcaggcggagcttccgttcca

SEQ ID NO: 395136 - DNA, 30 bp, Artificial Sequence
  Synthetic oligonucleotide
tggcattgccggggcgctattaaggttcca

SEQ ID NO: 395137 - DNA, 30 bp, Artificial Sequence
  Synthetic oligonucleotide
agaacgtgtctctggaccctcagggttcca

SEQ ID NO: 395138 - DNA, 30 bp, Artificial Sequence
  Synthetic oligonucleotide
tcatgaaagcacctgggcgtacgtgttcca

SEQ ID NO: 395139 - DNA, 30 bp, Artificial Sequence
  Synthetic oligonucleotide
ccagagcggggccaaacggtttcatttcca

SEQ ID NO: 395140 - DNA, 30 bp, Artificial Sequence
  Synthetic oligonucleotide
aaatgtgtccacataagggtattctttcca

SEQ ID NO: 395141 - DNA, 30 bp, Artificial Sequence
  Synthetic oligonucleotide
actggatacgcgttataaatccggtttcca

SEQ ID NO: 395142 - DNA, 30 bp, Artificial Sequence
  Synthetic oligonucleotide
agttttcaatcgtgccggcccttgtttcca

SEQ ID NO: 395143 - DNA, 30 bp, Artificial Sequence
  Synthetic oligonucleotide
atcaacttgccatatgaggtaacttttcca

SEQ ID NO: 395144 - DNA, 30 bp, Artificial Sequence
  Synthetic oligonucleotide
tttcagattatacgagataccggaaaagca

SEQ ID NO: 395145 - DNA, 30 bp, Artificial Sequence
  Synthetic oligonucleotide
aaaagcttcgcggactaacggtacaaagca

SEQ ID NO: 395146 - DNA, 30 bp, Artificial Sequence
  Synthetic oligonucleotide
ccccatctaatccatactagctccaaagca

SEQ ID NO: 395147 - DNA, 30 bp, Artificial Sequence
  Synthetic oligonucleotide
gcagctagtgagctttacactagcaaagca

SEQ ID NO: 395148 - DNA, 30 bp, Artificial Sequence
  Synthetic oligonucleotide
gaattcgtttcagcgtacacggttaaagca

SEQ ID NO: 395149 - DNA, 30 bp, Artificial Sequence
  Synthetic oligonucleotide
gtatagttattaattccattcatacaagca

SEQ ID NO: 395150 - DNA, 30 bp, Artificial Sequence
  Synthetic oligonucleotide
gtggttccatggataagagagcaccaagca

SEQ ID NO: 395151 - DNA, 30 bp, Artificial Sequence
  Synthetic oligonucleotide
gagtatagggtagaagttttaacccaagca

SEQ ID NO: 395152 - DNA, 30 bp, Artificial Sequence
  Synthetic oligonucleotide
aggagaagtatagacggcgcgtcccaagca

SEQ ID NO: 395153 - DNA, 30 bp, Artificial Sequence
  Synthetic oligonucleotide
tctaatccttatcttatccctctccaagca

SEQ ID NO: 395154 - DNA, 30 bp, Artificial Sequence
  Synthetic oligonucleotide
tagttattagtactccacgctctccaagca

SEQ ID NO: 395155 - DNA, 30 bp, Artificial Sequence
  Synthetic oligonucleotide
acggtcacgggcctgcgttgtttccaagca

SEQ ID NO: 395156 - DNA, 30 bp, Artificial Sequence
  Synthetic oligonucleotide
ccgatggacaggtgtggatgtgggcaagca

SEQ ID NO: 395157 - DNA, 30 bp, Artificial Sequence
  Synthetic oligonucleotide
tgcgggggctgttcccggagcatgcaagca

SEQ ID NO: 395158 - DNA, 30 bp, Artificial Sequence
  Synthetic oligonucleotide
ccgaaccggcgcatgcagtgagatcaagca

SEQ ID NO: 395159 - DNA, 30 bp, Artificial Sequence
  Synthetic oligonucleotide
cccagtatgatctactgacctgatcaagca

SEQ ID NO: 395160 - DNA, 30 bp, Artificial Sequence
  Synthetic oligonucleotide
gggttctacccgataattacccgtcaagca

SEQ ID NO: 395161 - DNA, 30 bp, Artificial Sequence
  Synthetic oligonucleotide
ggatctggtctctacagtgtcgaggaagca

SEQ ID NO: 395162 - DNA, 30 bp, Artificial Sequence
  Synthetic oligonucleotide
aacgcgcttccccacctctatgaggaagca

SEQ ID NO: 395163 - DNA, 30 bp, Artificial Sequence
  Synthetic oligonucleotide
attacttttagtggcagctcaaatgaagca

SEQ ID NO: 395164 - DNA, 30 bp, Artificial Sequence
  Synthetic oligonucleotide
ttctttacaataactgaacactatgaagca

SEQ ID NO: 395165 - DNA, 30 bp, Artificial Sequence
  Synthetic oligonucleotide
taaaggacgcacaagcaacccgcataagca

SEQ ID NO: 395166 - DNA, 30 bp, Artificial Sequence
  Synthetic oligonucleotide
cagcgggcctcgcccgaagtcgtataagca

SEQ ID NO: 395167 - DNA, 30 bp, Artificial Sequence
  Synthetic oligonucleotide
gtcataaatcttccttgggctcagtaagca

SEQ ID NO: 395168 - DNA, 30 bp, Artificial Sequence
  Synthetic oligonucleotide
ttatcgagttatccctcgcaatagtaagca

SEQ ID NO: 395169 - DNA, 30 bp, Artificial Sequence
  Synthetic oligonucleotide
tataggctttaaacagtgaggtagtaagca

SEQ ID NO: 395170 - DNA, 30 bp, Artificial Sequence
  Synthetic oligonucleotide
attcttgtgcaagctgttcgccggtaagca

SEQ ID NO: 395171 - DNA, 30 bp, Artificial Sequence
  Synthetic oligonucleotide
atgagtaggatgctgcaatcgcacacagca

SEQ ID NO: 395172 - DNA, 30 bp, Artificial Sequence
  Synthetic oligonucleotide
ttattgattccagtaataggttccacagca

SEQ ID NO: 395173 - DNA, 30 bp, Artificial Sequence
  Synthetic oligonucleotide
tatttggtgcactgtggtctacgcacagca

SEQ ID NO: 395174 - DNA, 31 bp, Artificial Sequence
  Synthetic oligonucleotide
ttaagacataaagtgggcactgacgacagca

SEQ ID NO: 395175 - DNA, 30 bp, Artificial Sequence
  Synthetic oligonucleotide
tgacagcatgcccacggccaccttacagca

SEQ ID NO: 395176 - DNA, 30 bp, Artificial Sequence
  Synthetic oligonucleotide
ttggtattctatactggacccagaccagca

SEQ ID NO: 395177 - DNA, 30 bp, Artificial Sequence
  Synthetic oligonucleotide
ccaggccaggggagtcaaagactcccagca

SEQ ID NO: 395178 - DNA, 30 bp, Artificial Sequence
  Synthetic oligonucleotide
aattaggtggtattttagtgtacagcagca

SEQ ID NO: 395179 - DNA, 30 bp, Artificial Sequence
  Synthetic oligonucleotide
attccccttgacaacgctcgccgagcagca

SEQ ID NO: 395180 - DNA, 30 bp, Artificial Sequence
  Synthetic oligonucleotide
agaatcccgtcatagacctggcacgcagca

SEQ ID NO: 395181 - DNA, 30 bp, Artificial Sequence
  Synthetic oligonucleotide
cgatcatattctgcagcgtcaagcgcagca

SEQ ID NO: 395182 - DNA, 30 bp, Artificial Sequence
  Synthetic oligonucleotide
ttttggctagatgtaatgcatcgggcagca

SEQ ID NO: 395183 - DNA, 31 bp, Artificial Sequence
  Synthetic oligonucleotide
tttagtgtagaagtttgccagaacgtcagca

SEQ ID NO: 395184 - DNA, 30 bp, Artificial Sequence
  Synthetic oligonucleotide
ctataaaggtccgggccactgccgtcagca

SEQ ID NO: 395185 - DNA, 30 bp, Artificial Sequence
  Synthetic oligonucleotide
cctataacgcggaggggcatggcgtcagca

SEQ ID NO: 395186 - DNA, 30 bp, Artificial Sequence
  Synthetic oligonucleotide
ttaatttgggtcactttagtccattcagca

SEQ ID NO: 395187 - DNA, 30 bp, Artificial Sequence
  Synthetic oligonucleotide
ttccgcttaggtcacacggacacttcagca

SEQ ID NO: 395188 - DNA, 30 bp, Artificial Sequence
  Synthetic oligonucleotide
aaaatctaaaaagtaagcgattcttcagca

SEQ ID NO: 395189 - DNA, 30 bp, Artificial Sequence
  Synthetic oligonucleotide
caataatgatctatctaacgcgtttcagca

SEQ ID NO: 395190 - DNA, 30 bp, Artificial Sequence
  Synthetic oligonucleotide
agacgggagaatgtggatgcagccagagca

SEQ ID NO: 395191 - DNA, 30 bp, Artificial Sequence
  Synthetic oligonucleotide
tttgcgtcacctcaagtggggctcagagca

SEQ ID NO: 395192 - DNA, 30 bp, Artificial Sequence
  Synthetic oligonucleotide
tttctcgtggggtcgtaaggaatgagagca

SEQ ID NO: 395193 - DNA, 30 bp, Artificial Sequence
  Synthetic oligonucleotide
caagtactttcagttatagcttctagagca

SEQ ID NO: 395194 - DNA, 30 bp, Artificial Sequence
  Synthetic oligonucleotide
agcacaagacggacgcaagagattagagca

SEQ ID NO: 395195 - DNA, 30 bp, Artificial Sequence
  Synthetic oligonucleotide
gaccaggccacggagtgtgctacacgagca

SEQ ID NO: 395196 - DNA, 30 bp, Artificial Sequence
  Synthetic oligonucleotide
ctctttcagcggggactttctagccgagca

SEQ ID NO: 395197 - DNA, 30 bp, Artificial Sequence
  Synthetic oligonucleotide
ttgagccattcggacctacattcgcgagca

SEQ ID NO: 395198 - DNA, 30 bp, Artificial Sequence
  Synthetic oligonucleotide
agcgcaattcacggtgccaaagacggagca

SEQ ID NO: 395199 - DNA, 30 bp, Artificial Sequence
  Synthetic oligonucleotide
cccgttgccaaagagccccccgagggagca

SEQ ID NO: 395200 - DNA, 30 bp, Artificial Sequence
  Synthetic oligonucleotide
tcaataccgtgactatacggtccgggagca

SEQ ID NO: 395201 - DNA, 30 bp, Artificial Sequence
  Synthetic oligonucleotide
aagaactcgaaaatctgaattaagtgagca

SEQ ID NO: 395202 - DNA, 31 bp, Artificial Sequence
  Synthetic oligonucleotide
ctggacggccgtatcgcaggagcagtgagca

SEQ ID NO: 395203 - DNA, 30 bp, Artificial Sequence
  Synthetic oligonucleotide
accgtgaggaatcggggatgttcttgagca

SEQ ID NO: 395204 - DNA, 30 bp, Artificial Sequence
  Synthetic oligonucleotide
agatatgggcggggggcttccggtatagca

SEQ ID NO: 395205 - DNA, 30 bp, Artificial Sequence
  Synthetic oligonucleotide
tcctcgggtcttagttatataccactagca

SEQ ID NO: 395206 - DNA, 30 bp, Artificial Sequence
  Synthetic oligonucleotide
atttccgagttaccgattctgctactagca

SEQ ID NO: 395207 - DNA, 30 bp, Artificial Sequence
  Synthetic oligonucleotide
ctaggtaatatcaggcccttcggcctagca

SEQ ID NO: 395208 - DNA, 30 bp, Artificial Sequence
  Synthetic oligonucleotide
gggaatgggctaggcatggattatctagca

SEQ ID NO: 395209 - DNA, 30 bp, Artificial Sequence
  Synthetic oligonucleotide
ttcctgcacatctactcgggatttctagca

SEQ ID NO: 395210 - DNA, 30 bp, Artificial Sequence
  Synthetic oligonucleotide
agacagaacgccagaatacttaaagtagca

SEQ ID NO: 395211 - DNA, 30 bp, Artificial Sequence
  Synthetic oligonucleotide
ttatgggaaactggttgtgctgccgtagca

SEQ ID NO: 395212 - DNA, 30 bp, Artificial Sequence
  Synthetic oligonucleotide
gacgaacacctacgctggcccttggtagca

SEQ ID NO: 395213 - DNA, 30 bp, Artificial Sequence
  Synthetic oligonucleotide
cgcctagcgatttaccggactaatgtagca

SEQ ID NO: 395214 - DNA, 30 bp, Artificial Sequence
  Synthetic oligonucleotide
ggattagttgacaatgtgtaatttgtagca

SEQ ID NO: 395215 - DNA, 30 bp, Artificial Sequence
  Synthetic oligonucleotide
agcctgccgcactggaattcgtgattagca

SEQ ID NO: 395216 - DNA, 30 bp, Artificial Sequence
  Synthetic oligonucleotide
tccagttaggcaatgcgctacggcttagca

SEQ ID NO: 395217 - DNA, 30 bp, Artificial Sequence
  Synthetic oligonucleotide
aatcccatacaaggcgactacggtttagca

SEQ ID NO: 395218 - DNA, 30 bp, Artificial Sequence
  Synthetic oligonucleotide
tttcctcggaaggcaaggtgtggtttagca

SEQ ID NO: 395219 - DNA, 30 bp, Artificial Sequence
  Synthetic oligonucleotide
tatctcgcataacagtaggtaaaaaacgca

SEQ ID NO: 395220 - DNA, 30 bp, Artificial Sequence
  Synthetic oligonucleotide
gatggctgtgcctttgggtatcgaaacgca

SEQ ID NO: 395221 - DNA, 30 bp, Artificial Sequence
  Synthetic oligonucleotide
atgccgtatttaacaaggacgttaaacgca

SEQ ID NO: 395222 - DNA, 30 bp, Artificial Sequence
  Synthetic oligonucleotide
ggtcctctgaatggccctgctatcaacgca

SEQ ID NO: 395223 - DNA, 30 bp, Artificial Sequence
  Synthetic oligonucleotide
cagcaatttgcatcactggggttcaacgca

SEQ ID NO: 395224 - DNA, 30 bp, Artificial Sequence
  Synthetic oligonucleotide
gctagctggtcacaacacaattctaacgca

SEQ ID NO: 395225 - DNA, 30 bp, Artificial Sequence
  Synthetic oligonucleotide
gagtgggaaattaattgtcctagtaacgca

SEQ ID NO: 395226 - DNA, 30 bp, Artificial Sequence
  Synthetic oligonucleotide
catagggccgattacattacgcttaacgca

SEQ ID NO: 395227 - DNA, 30 bp, Artificial Sequence
  Synthetic oligonucleotide
attccccctaatatgacataatcacacgca

SEQ ID NO: 395228 - DNA, 30 bp, Artificial Sequence
  Synthetic oligonucleotide
gggggtggattattcagtaatctacacgca

SEQ ID NO: 395229 - DNA, 30 bp, Artificial Sequence
  Synthetic oligonucleotide
tgtagcatttagaccagcatcgcccacgca

SEQ ID NO: 395230 - DNA, 30 bp, Artificial Sequence
  Synthetic oligonucleotide
gcaatcactattatcgcagatgagcacgca

SEQ ID NO: 395231 - DNA, 30 bp, Artificial Sequence
  Synthetic oligonucleotide
tgaaattcgaaggagccatgtgagcacgca

SEQ ID NO: 395232 - DNA, 30 bp, Artificial Sequence
  Synthetic oligonucleotide
ggtaagtcaaatctgtgaggtatgcacgca

SEQ ID NO: 395233 - DNA, 30 bp, Artificial Sequence
  Synthetic oligonucleotide
atcttacttttttctacccaaagtcacgca

SEQ ID NO: 395234 - DNA, 30 bp, Artificial Sequence
  Synthetic oligonucleotide
ggcgctcatagatggtataaaattcacgca

SEQ ID NO: 395235 - DNA, 30 bp, Artificial Sequence
  Synthetic oligonucleotide
cttcgtcactgctgtccatttcaagacgca

SEQ ID NO: 395236 - DNA, 30 bp, Artificial Sequence
  Synthetic oligonucleotide
caaagctcgagtgcccaagcctgagacgca

SEQ ID NO: 395237 - DNA, 30 bp, Artificial Sequence
  Synthetic oligonucleotide
gatcatgaagaagaaccgtggatagacgca

SEQ ID NO: 395238 - DNA, 30 bp, Artificial Sequence
  Synthetic oligonucleotide
gaactgagaaagacacgtatagacgacgca

SEQ ID NO: 395239 - DNA, 30 bp, Artificial Sequence
  Synthetic oligonucleotide
acgtgctagcctggggtaagtaccgacgca

SEQ ID NO: 395240 - DNA, 30 bp, Artificial Sequence
  Synthetic oligonucleotide
ctacatacaccccgctgctcagccgacgca

SEQ ID NO: 395241 - DNA, 30 bp, Artificial Sequence
  Synthetic oligonucleotide
tctatgcttattgtggtagccggcgacgca

SEQ ID NO: 395242 - DNA, 30 bp, Artificial Sequence
  Synthetic oligonucleotide
aggcgggtagctgtctgccaagtcgacgca

SEQ ID NO: 395243 - DNA, 30 bp, Artificial Sequence
  Synthetic oligonucleotide
ataaataagggaaggtaacttcaggacgca

SEQ ID NO: 395244 - DNA, 30 bp, Artificial Sequence
  Synthetic oligonucleotide
acacgagagaacgcccttcgcgaggacgca

SEQ ID NO: 395245 - DNA, 30 bp, Artificial Sequence
  Synthetic oligonucleotide
ggatttagggacatatcaacccaatacgca

SEQ ID NO: 395246 - DNA, 30 bp, Artificial Sequence
  Synthetic oligonucleotide
gtgactgtcctctcaaagcgagaatacgca

SEQ ID NO: 395247 - DNA, 30 bp, Artificial Sequence
  Synthetic oligonucleotide
agacgttaattttcaatgtctttatacgca

SEQ ID NO: 395248 - DNA, 30 bp, Artificial Sequence
  Synthetic oligonucleotide
accagaggatatttcgaagcggattacgca

SEQ ID NO: 395249 - DNA, 30 bp, Artificial Sequence
  Synthetic oligonucleotide
ttgagcgtgtgagcccttgaataaaccgca

SEQ ID NO: 395250 - DNA, 30 bp, Artificial Sequence
  Synthetic oligonucleotide
tgacgacaaattcgcggcgtttacaccgca

SEQ ID NO: 395251 - DNA, 30 bp, Artificial Sequence
  Synthetic oligonucleotide
tggcattctggccgcctcggcatcaccgca

SEQ ID NO: 395252 - DNA, 30 bp, Artificial Sequence
  Synthetic oligonucleotide
cggtcttgctgtcagcaattgcagaccgca

SEQ ID NO: 395253 - DNA, 30 bp, Artificial Sequence
  Synthetic oligonucleotide
ggtacacggccttcctgttcgacgaccgca

SEQ ID NO: 395254 - DNA, 30 bp, Artificial Sequence
  Synthetic oligonucleotide
cgcgcttgtgatgtgcgtcgttgtaccgca

SEQ ID NO: 395255 - DNA, 30 bp, Artificial Sequence
  Synthetic oligonucleotide
atctttacacgcctggtataaaaacccgca

SEQ ID NO: 395256 - DNA, 30 bp, Artificial Sequence
  Synthetic oligonucleotide
tgcttatttgataggcccgagatccccgca

SEQ ID NO: 395257 - DNA, 30 bp, Artificial Sequence
  Synthetic oligonucleotide
tactattgttgaatgacgtagtagcccgca

SEQ ID NO: 395258 - DNA, 30 bp, Artificial Sequence
  Synthetic oligonucleotide
acaggagataaactaggtaactcagccgca

SEQ ID NO: 395259 - DNA, 30 bp, Artificial Sequence
  Synthetic oligonucleotide
tcaaagccaaataaacgtagctaggccgca

SEQ ID NO: 395260 - DNA, 30 bp, Artificial Sequence
  Synthetic oligonucleotide
gacatcttcaagctgatagggtttgccgca

SEQ ID NO: 395261 - DNA, 30 bp, Artificial Sequence
  Synthetic oligonucleotide
acgctattagggttccgtaggaaatccgca

SEQ ID NO: 395262 - DNA, 30 bp, Artificial Sequence
  Synthetic oligonucleotide
aaacttgtcctcaggaactgaatttccgca

SEQ ID NO: 395263 - DNA, 30 bp, Artificial Sequence
  Synthetic oligonucleotide
cagtttcggagttcactcatgatcagcgca

SEQ ID NO: 395264 - DNA, 30 bp, Artificial Sequence
  Synthetic oligonucleotide
atgccctagggaccggacccggtcagcgca

SEQ ID NO: 395265 - DNA, 30 bp, Artificial Sequence
  Synthetic oligonucleotide
agagtggtgcttattattatgcggagcgca

SEQ ID NO: 395266 - DNA, 30 bp, Artificial Sequence
  Synthetic oligonucleotide
cgtacccttgacaaactatactggagcgca

SEQ ID NO: 395267 - DNA, 29 bp, Artificial Sequence
  Synthetic oligonucleotide
gattagggtccacggggacatttagcgca

SEQ ID NO: 395268 - DNA, 30 bp, Artificial Sequence
  Synthetic oligonucleotide
gattgtaaaccctcttcgtgtaaacgcgca

SEQ ID NO: 395269 - DNA, 30 bp, Artificial Sequence
  Synthetic oligonucleotide
taacgggctaaagctctaaaggcacgcgca

SEQ ID NO: 395270 - DNA, 30 bp, Artificial Sequence
  Synthetic oligonucleotide
aagggacacagctgttactttgcacgcgca

SEQ ID NO: 395271 - DNA, 30 bp, Artificial Sequence
  Synthetic oligonucleotide
aaatttggcttaggatctgggagacgcgca

SEQ ID NO: 395272 - DNA, 30 bp, Artificial Sequence
  Synthetic oligonucleotide
tacatccctatcagtgcgatgggacgcgca

SEQ ID NO: 395273 - DNA, 30 bp, Artificial Sequence
  Synthetic oligonucleotide
tttatcgccgcgtcagagacgaaccgcgca

SEQ ID NO: 395274 - DNA, 30 bp, Artificial Sequence
  Synthetic oligonucleotide
taatggatttgcatcagcgacgaccgcgca

SEQ ID NO: 395275 - DNA, 30 bp, Artificial Sequence
  Synthetic oligonucleotide
tcgcggtcctaaatgacacccacccgcgca

SEQ ID NO: 395276 - DNA, 30 bp, Artificial Sequence
  Synthetic oligonucleotide
gatccatgacacgcgcctcaaagccgcgca

SEQ ID NO: 395277 - DNA, 30 bp, Artificial Sequence
  Synthetic oligonucleotide
ggcgcaagcaatcagcggggaagccgcgca

SEQ ID NO: 395278 - DNA, 30 bp, Artificial Sequence
  Synthetic oligonucleotide
attattcctggcgacagtcaaggccgcgca

SEQ ID NO: 395279 - DNA, 30 bp, Artificial Sequence
  Synthetic oligonucleotide
ttcttatggctataatccgacatccgcgca

SEQ ID NO: 395280 - DNA, 30 bp, Artificial Sequence
  Synthetic oligonucleotide
tgctacgggggcggattcagatgaggcgca

SEQ ID NO: 395281 - DNA, 30 bp, Artificial Sequence
  Synthetic oligonucleotide
tatacagtttaggtgcatcggcacggcgca

SEQ ID NO: 395282 - DNA, 30 bp, Artificial Sequence
  Synthetic oligonucleotide
agggcccacaagactgtgtatcccggcgca

SEQ ID NO: 395283 - DNA, 30 bp, Artificial Sequence
  Synthetic oligonucleotide
gacacgtcgaggggactttacgcgggcgca

SEQ ID NO: 395284 - DNA, 30 bp, Artificial Sequence
  Synthetic oligonucleotide
tctatgatggcacagctggtctcgggcgca

SEQ ID NO: 395285 - DNA, 30 bp, Artificial Sequence
  Synthetic oligonucleotide
tgggctccgtggacagtttagtcgggcgca

SEQ ID NO: 395286 - DNA, 30 bp, Artificial Sequence
  Synthetic oligonucleotide
cccgccttagtctcccatgacaaatgcgca

SEQ ID NO: 395287 - DNA, 30 bp, Artificial Sequence
  Synthetic oligonucleotide
tccaactactgtcatgcgggttgatgcgca

SEQ ID NO: 395288 - DNA, 30 bp, Artificial Sequence
  Synthetic oligonucleotide
aaaatattgggtaaccgcaagacctgcgca

SEQ ID NO: 395289 - DNA, 30 bp, Artificial Sequence
  Synthetic oligonucleotide
tattggcctttaaactgaatggtctgcgca

SEQ ID NO: 395290 - DNA, 30 bp, Artificial Sequence
  Synthetic oligonucleotide
ccatatctaggcagctccagtacgtgcgca

SEQ ID NO: 395291 - DNA, 30 bp, Artificial Sequence
  Synthetic oligonucleotide
gtgacgttcgagcaatctaaagtttgcgca

SEQ ID NO: 395292 - DNA, 30 bp, Artificial Sequence
  Synthetic oligonucleotide
agcgggtcgcgatattgagcacaaatcgca

SEQ ID NO: 395293 - DNA, 30 bp, Artificial Sequence
  Synthetic oligonucleotide
atttgggcgtctggaggaagcccaatcgca

SEQ ID NO: 395294 - DNA, 30 bp, Artificial Sequence
  Synthetic oligonucleotide
aaactcagaactgcgctacaagcaatcgca

SEQ ID NO: 395295 - DNA, 30 bp, Artificial Sequence
  Synthetic oligonucleotide
ggaaaggccgtcgctctgggttcaatcgca

SEQ ID NO: 395296 - DNA, 30 bp, Artificial Sequence
  Synthetic oligonucleotide
ctcgacacttgagtgatcctttcaatcgca

SEQ ID NO: 395297 - DNA, 30 bp, Artificial Sequence
  Synthetic oligonucleotide
ctacaagggtagcgttcataggtaatcgca

SEQ ID NO: 395298 - DNA, 30 bp, Artificial Sequence
  Synthetic oligonucleotide
gctatgtatattctaaaacaatacatcgca

SEQ ID NO: 395299 - DNA, 30 bp, Artificial Sequence
  Synthetic oligonucleotide
gaatgcgatgggggctccagattcatcgca

SEQ ID NO: 395300 - DNA, 30 bp, Artificial Sequence
  Synthetic oligonucleotide
ttagtaatcatgagtttcctggtactcgca

SEQ ID NO: 395301 - DNA, 30 bp, Artificial Sequence
  Synthetic oligonucleotide
atcagcgggacgtatatcccgcacctcgca

SEQ ID NO: 395302 - DNA, 30 bp, Artificial Sequence
  Synthetic oligonucleotide
cttatggtcgtaaaaactgttacgctcgca

SEQ ID NO: 395303 - DNA, 30 bp, Artificial Sequence
  Synthetic oligonucleotide
accacggggtcctatattgagaaagtcgca

SEQ ID NO: 395304 - DNA, 30 bp, Artificial Sequence
  Synthetic oligonucleotide
ttcactccactgtaacgttgctaagtcgca

SEQ ID NO: 395305 - DNA, 30 bp, Artificial Sequence
  Synthetic oligonucleotide
ggcacctgatttaacgttggggtcgtcgca

SEQ ID NO: 395306 - DNA, 30 bp, Artificial Sequence
  Synthetic oligonucleotide
ctgacagctacaccgttcactagggtcgca

SEQ ID NO: 395307 - DNA, 30 bp, Artificial Sequence
  Synthetic oligonucleotide
atatcatcattggacagcggacgtgtcgca

SEQ ID NO: 395308 - DNA, 30 bp, Artificial Sequence
  Synthetic oligonucleotide
ttcgatgtgtcagggatcacaagattcgca

SEQ ID NO: 395309 - DNA, 30 bp, Artificial Sequence
  Synthetic oligonucleotide
gaattgcaggtcagcttggggttattcgca

SEQ ID NO: 395310 - DNA, 30 bp, Artificial Sequence
  Synthetic oligonucleotide
tggtgtcgtcgctgtcgctgcaatttcgca

SEQ ID NO: 395311 - DNA, 30 bp, Artificial Sequence
  Synthetic oligonucleotide
gtagtactaaccacccaacttataaaggca

SEQ ID NO: 395312 - DNA, 30 bp, Artificial Sequence
  Synthetic oligonucleotide
ccttgaaagacgacgtcatggttaaaggca

SEQ ID NO: 395313 - DNA, 30 bp, Artificial Sequence
  Synthetic oligonucleotide
gtgttgcaaatgcgggcctggcacaaggca

SEQ ID NO: 395314 - DNA, 30 bp, Artificial Sequence
  Synthetic oligonucleotide
agagtcatgtcagaaggtagaaccaaggca

SEQ ID NO: 395315 - DNA, 30 bp, Artificial Sequence
  Synthetic oligonucleotide
ttgcagcaaagcgtggaagttcagaaggca

SEQ ID NO: 395316 - DNA, 30 bp, Artificial Sequence
  Synthetic oligonucleotide
cacgggagtgatcgcacatgttcgaaggca

SEQ ID NO: 395317 - DNA, 31 bp, Artificial Sequence
  Synthetic oligonucleotide
tcggagccgtgcctacagtgccgggaaggca

SEQ ID NO: 395318 - DNA, 30 bp, Artificial Sequence
  Synthetic oligonucleotide
atttccgcagacatcgtccatgataaggca

SEQ ID NO: 395319 - DNA, 30 bp, Artificial Sequence
  Synthetic oligonucleotide
ggtttgccgcctgtggtcgggtcgcaggca

SEQ ID NO: 395320 - DNA, 30 bp, Artificial Sequence
  Synthetic oligonucleotide
cctgcaaatatgatactaaataggcaggca

SEQ ID NO: 395321 - DNA, 30 bp, Artificial Sequence
  Synthetic oligonucleotide
gtgtctatttaggccccataacatcaggca

SEQ ID NO: 395322 - DNA, 30 bp, Artificial Sequence
  Synthetic oligonucleotide
ccctgacgctaagagataagggatcaggca

SEQ ID NO: 395323 - DNA, 30 bp, Artificial Sequence
  Synthetic oligonucleotide
aagataatgcgatctcttcaggaagaggca

SEQ ID NO: 395324 - DNA, 30 bp, Artificial Sequence
  Synthetic oligonucleotide
tctcgcgcgtcggtgcctcaaagagaggca

SEQ ID NO: 395325 - DNA, 30 bp, Artificial Sequence
  Synthetic oligonucleotide
ttaatcgatcattttggtggcgtagaggca

SEQ ID NO: 395326 - DNA, 30 bp, Artificial Sequence
  Synthetic oligonucleotide
gcatacggagctagccaaaggcccgaggca

SEQ ID NO: 395327 - DNA, 30 bp, Artificial Sequence
  Synthetic oligonucleotide
aaatgtgcacacttaagtacaggcgaggca

SEQ ID NO: 395328 - DNA, 30 bp, Artificial Sequence
  Synthetic oligonucleotide
atatagctgacggggtcaggtcaggaggca

SEQ ID NO: 395329 - DNA, 30 bp, Artificial Sequence
  Synthetic oligonucleotide
atcgggcccgtagagcccttgtcggaggca

SEQ ID NO: 395330 - DNA, 30 bp, Artificial Sequence
  Synthetic oligonucleotide
cttgtatgatgatcagccggtaatgaggca

SEQ ID NO: 395331 - DNA, 30 bp, Artificial Sequence
  Synthetic oligonucleotide
gccaaattgcacctttgttccactgaggca

SEQ ID NO: 395332 - DNA, 30 bp, Artificial Sequence
  Synthetic oligonucleotide
ccatttatcttcatttaacgaaaataggca

SEQ ID NO: 395333 - DNA, 30 bp, Artificial Sequence
  Synthetic oligonucleotide
cgttgcgctacagtaggacttacataggca

SEQ ID NO: 395334 - DNA, 30 bp, Artificial Sequence
  Synthetic oligonucleotide
agcttgacagctaggattcttaactaggca

SEQ ID NO: 395335 - DNA, 30 bp, Artificial Sequence
  Synthetic oligonucleotide
tcctagatgcatgggagtcgtcgctaggca

SEQ ID NO: 395336 - DNA, 30 bp, Artificial Sequence
  Synthetic oligonucleotide
cactagttcgtgcgtttgtcttgctaggca

SEQ ID NO: 395337 - DNA, 30 bp, Artificial Sequence
  Synthetic oligonucleotide
gtccggctttgtcatcctttcttctaggca

SEQ ID NO: 395338 - DNA, 30 bp, Artificial Sequence
  Synthetic oligonucleotide
ctgattaatccggcacgagcgcagtaggca

SEQ ID NO: 395339 - DNA, 30 bp, Artificial Sequence
  Synthetic oligonucleotide
gggtcgtcattttccctccgatcgtaggca

SEQ ID NO: 395340 - DNA, 30 bp, Artificial Sequence
  Synthetic oligonucleotide
gggtagggttggcacgccttaaggtaggca

SEQ ID NO: 395341 - DNA, 30 bp, Artificial Sequence
  Synthetic oligonucleotide
aacatacatcgacggagagaattgtaggca

SEQ ID NO: 395342 - DNA, 30 bp, Artificial Sequence
  Synthetic oligonucleotide
actattaggccatacttatacttgtaggca

SEQ ID NO: 395343 - DNA, 30 bp, Artificial Sequence
  Synthetic oligonucleotide
attcgctcggtatcgcaacgtttgtaggca

SEQ ID NO: 395344 - DNA, 30 bp, Artificial Sequence
  Synthetic oligonucleotide
tgagtctgtcatggcccatgaccttaggca

SEQ ID NO: 395345 - DNA, 30 bp, Artificial Sequence
  Synthetic oligonucleotide
tagtagtgtagagcccaaggggcttaggca

SEQ ID NO: 395346 - DNA, 30 bp, Artificial Sequence
  Synthetic oligonucleotide
atacaagcgccgatgactgcaagcacggca

SEQ ID NO: 395347 - DNA, 30 bp, Artificial Sequence
  Synthetic oligonucleotide
gctacgaccgctacttagtgtttcacggca

SEQ ID NO: 395348 - DNA, 30 bp, Artificial Sequence
  Synthetic oligonucleotide
tacaaccgttgcgaatgttatacaccggca

SEQ ID NO: 395349 - DNA, 31 bp, Artificial Sequence
  Synthetic oligonucleotide
cgtgcgcagctacgcttgcccgcacccggca

SEQ ID NO: 395350 - DNA, 30 bp, Artificial Sequence
  Synthetic oligonucleotide
gcccagcgatcgggacaaggaagcccggca

SEQ ID NO: 395351 - DNA, 30 bp, Artificial Sequence
  Synthetic oligonucleotide
ggcacggttggagcatatggatgcccggca

SEQ ID NO: 395352 - DNA, 30 bp, Artificial Sequence
  Synthetic oligonucleotide
agcctgcttccggtgctagggtagccggca

SEQ ID NO: 395353 - DNA, 30 bp, Artificial Sequence
  Synthetic oligonucleotide
tacatgtggaacggccgattttatccggca

SEQ ID NO: 395354 - DNA, 30 bp, Artificial Sequence
  Synthetic oligonucleotide
gtcttcggagatatgctctgcacagcggca

SEQ ID NO: 395355 - DNA, 30 bp, Artificial Sequence
  Synthetic oligonucleotide
aattcgccgtatctggcgggacacgcggca

SEQ ID NO: 395356 - DNA, 30 bp, Artificial Sequence
  Synthetic oligonucleotide
ggtagcgaaagtgattcactcaccgcggca

SEQ ID NO: 395357 - DNA, 30 bp, Artificial Sequence
  Synthetic oligonucleotide
ctaagaagagtaagagcctgttccgcggca

SEQ ID NO: 395358 - DNA, 30 bp, Artificial Sequence
  Synthetic oligonucleotide
gggttctgctgtgctaagtccttcgcggca

SEQ ID NO: 395359 - DNA, 30 bp, Artificial Sequence
  Synthetic oligonucleotide
acaggtacgctttcacatcgctggtcggca

SEQ ID NO: 395360 - DNA, 30 bp, Artificial Sequence
  Synthetic oligonucleotide
atactctgtgtggcccagaagagttcggca

SEQ ID NO: 395361 - DNA, 30 bp, Artificial Sequence
  Synthetic oligonucleotide
tgtgcgagaagccgacagttgcgttcggca

SEQ ID NO: 395362 - DNA, 30 bp, Artificial Sequence
  Synthetic oligonucleotide
tgcgggtctatcagtaaaatagtcagggca

SEQ ID NO: 395363 - DNA, 30 bp, Artificial Sequence
  Synthetic oligonucleotide
ggggctattctatcttagaaattgagggca

SEQ ID NO: 395364 - DNA, 30 bp, Artificial Sequence
  Synthetic oligonucleotide
gtggccaatacaggcctaatacatagggca

SEQ ID NO: 395365 - DNA, 30 bp, Artificial Sequence
  Synthetic oligonucleotide
gtgctaagtaaccctgacccgcctagggca

SEQ ID NO: 395366 - DNA, 30 bp, Artificial Sequence
  Synthetic oligonucleotide
tcgcaaggtacaagctttcctatacgggca

SEQ ID NO: 395367 - DNA, 30 bp, Artificial Sequence
  Synthetic oligonucleotide
gcatcctatacttttacccgggcccgggca

SEQ ID NO: 395368 - DNA, 30 bp, Artificial Sequence
  Synthetic oligonucleotide
atgggatacaagttcggcggggtccgggca

SEQ ID NO: 395369 - DNA, 30 bp, Artificial Sequence
  Synthetic oligonucleotide
ttcaacagctctgcgcgagttgagcgggca

SEQ ID NO: 395370 - DNA, 30 bp, Artificial Sequence
  Synthetic oligonucleotide
ccccgctgtcacacgactttttcgcgggca

SEQ ID NO: 395371 - DNA, 30 bp, Artificial Sequence
  Synthetic oligonucleotide
tcattggtttctggaagctctgaaggggca

SEQ ID NO: 395372 - DNA, 30 bp, Artificial Sequence
  Synthetic oligonucleotide
gactcgtaaagagtctagacaacaggggca

SEQ ID NO: 395373 - DNA, 30 bp, Artificial Sequence
  Synthetic oligonucleotide
acattatattcgtgtccgacaccaggggca

SEQ ID NO: 395374 - DNA, 30 bp, Artificial Sequence
  Synthetic oligonucleotide
tcaagtcatcaggggtgttccgtaggggca

SEQ ID NO: 395375 - DNA, 30 bp, Artificial Sequence
  Synthetic oligonucleotide
taaaaaaagaaaggcacttttttaggggca

SEQ ID NO: 395376 - DNA, 30 bp, Artificial Sequence
  Synthetic oligonucleotide
acccgctataagatcccgcatgggggggca

SEQ ID NO: 395377 - DNA, 30 bp, Artificial Sequence
  Synthetic oligonucleotide
cagctgaccctagcaataaagtggggggca

SEQ ID NO: 395378 - DNA, 30 bp, Artificial Sequence
  Synthetic oligonucleotide
ggttttctgggccttgcctatcgtggggca

SEQ ID NO: 395379 - DNA, 30 bp, Artificial Sequence
  Synthetic oligonucleotide
gttatagtgttgtgctttggtcttggggca

SEQ ID NO: 395380 - DNA, 30 bp, Artificial Sequence
  Synthetic oligonucleotide
gtactccgtaaaatcttggttcttggggca

SEQ ID NO: 395381 - DNA, 30 bp, Artificial Sequence
  Synthetic oligonucleotide
cgatgctgtgcttgggaggacaggtgggca

SEQ ID NO: 395382 - DNA, 30 bp, Artificial Sequence
  Synthetic oligonucleotide
tttcatcaatgaatcggctctggttgggca

SEQ ID NO: 395383 - DNA, 30 bp, Artificial Sequence
  Synthetic oligonucleotide
tgccttcacatcgatagcgtttgttgggca

SEQ ID NO: 395384 - DNA, 30 bp, Artificial Sequence
  Synthetic oligonucleotide
tgagcaacgtgtatgaacgctatttgggca

SEQ ID NO: 395385 - DNA, 30 bp, Artificial Sequence
  Synthetic oligonucleotide
agtgtttaaaaacctgaagagctttgggca

SEQ ID NO: 395386 - DNA, 30 bp, Artificial Sequence
  Synthetic oligonucleotide
atatgctacgcttatcaccacaaaatggca

SEQ ID NO: 395387 - DNA, 30 bp, Artificial Sequence
  Synthetic oligonucleotide
cgatgcatctattgttgggccataatggca

SEQ ID NO: 395388 - DNA, 30 bp, Artificial Sequence
  Synthetic oligonucleotide
ggctccccatggcagagcactgcgatggca

SEQ ID NO: 395389 - DNA, 30 bp, Artificial Sequence
  Synthetic oligonucleotide
gtcctaagttcgcgcctctcacctatggca

SEQ ID NO: 395390 - DNA, 30 bp, Artificial Sequence
  Synthetic oligonucleotide
caatccaggccctcttacaaacaactggca

SEQ ID NO: 395391 - DNA, 30 bp, Artificial Sequence
  Synthetic oligonucleotide
aatcgactccgcaaatgggtccaactggca

SEQ ID NO: 395392 - DNA, 30 bp, Artificial Sequence
  Synthetic oligonucleotide
cggggccggccgaatagtgagctactggca

SEQ ID NO: 395393 - DNA, 30 bp, Artificial Sequence
  Synthetic oligonucleotide
tatatgggagattcaggacagtacctggca

SEQ ID NO: 395394 - DNA, 30 bp, Artificial Sequence
  Synthetic oligonucleotide
aattaaaacgcagagttaaccgtgctggca

SEQ ID NO: 395395 - DNA, 30 bp, Artificial Sequence
  Synthetic oligonucleotide
gggcaatcaacgaatcacgcccctctggca

SEQ ID NO: 395396 - DNA, 30 bp, Artificial Sequence
  Synthetic oligonucleotide
ggtccaacgcctcatgggctgtgtctggca

SEQ ID NO: 395397 - DNA, 30 bp, Artificial Sequence
  Synthetic oligonucleotide
gttagttactgtcccaattgccttctggca

SEQ ID NO: 395398 - DNA, 30 bp, Artificial Sequence
  Synthetic oligonucleotide
tacatgatgcgcaatcaaagtcaagtggca

SEQ ID NO: 395399 - DNA, 30 bp, Artificial Sequence
  Synthetic oligonucleotide
gtatttcaggtcaacacatagttagtggca

SEQ ID NO: 395400 - DNA, 30 bp, Artificial Sequence
  Synthetic oligonucleotide
gggtcctaagaggtttgttttcacgtggca

SEQ ID NO: 395401 - DNA, 30 bp, Artificial Sequence
  Synthetic oligonucleotide
gtcccactctcatagcatcggatcgtggca

SEQ ID NO: 395402 - DNA, 30 bp, Artificial Sequence
  Synthetic oligonucleotide
ctcgccttcgacatcttcaggacggtggca

SEQ ID NO: 395403 - DNA, 30 bp, Artificial Sequence
  Synthetic oligonucleotide
gaaaacggacaaatggagaataatgtggca

SEQ ID NO: 395404 - DNA, 30 bp, Artificial Sequence
  Synthetic oligonucleotide
ttatgcgtcccaggcatcaacgcattggca

SEQ ID NO: 395405 - DNA, 30 bp, Artificial Sequence
  Synthetic oligonucleotide
gatgcatgggttgcaataaaatgattggca

SEQ ID NO: 395406 - DNA, 31 bp, Artificial Sequence
  Synthetic oligonucleotide
ggagctaattatgcacgttcccaacttggca

SEQ ID NO: 395407 - DNA, 30 bp, Artificial Sequence
  Synthetic oligonucleotide
actatcatgttcccaaacctccagttggca

SEQ ID NO: 395408 - DNA, 30 bp, Artificial Sequence
  Synthetic oligonucleotide
ctccaggtcctagaggagcttgggttggca

SEQ ID NO: 395409 - DNA, 30 bp, Artificial Sequence
  Synthetic oligonucleotide
tgacgcacgtctttgcgcactatgttggca

SEQ ID NO: 395410 - DNA, 30 bp, Artificial Sequence
  Synthetic oligonucleotide
gtatcccgggtagggcaaaaaaatttggca

SEQ ID NO: 395411 - DNA, 30 bp, Artificial Sequence
  Synthetic oligonucleotide
gtatgacgggcgacatacctttaaaatgca

SEQ ID NO: 395412 - DNA, 30 bp, Artificial Sequence
  Synthetic oligonucleotide
aactcttaggcgcaaaaaaagttaaatgca

SEQ ID NO: 395413 - DNA, 30 bp, Artificial Sequence
  Synthetic oligonucleotide
gtgcccatcagggatttttaatccaatgca

SEQ ID NO: 395414 - DNA, 30 bp, Artificial Sequence
  Synthetic oligonucleotide
gaggcgcgatcctaaagctcttagaatgca

SEQ ID NO: 395415 - DNA, 30 bp, Artificial Sequence
  Synthetic oligonucleotide
cagagttagtttaacgtgtgttttaatgca

SEQ ID NO: 395416 - DNA, 30 bp, Artificial Sequence
  Synthetic oligonucleotide
tgtgatacgcattatttttcttaacatgca

SEQ ID NO: 395417 - DNA, 30 bp, Artificial Sequence
  Synthetic oligonucleotide
gttcaccagttgtaggaaacgggacatgca

SEQ ID NO: 395418 - DNA, 30 bp, Artificial Sequence
  Synthetic oligonucleotide
aacaagctgcgcaaaggaggctagcatgca

SEQ ID NO: 395419 - DNA, 30 bp, Artificial Sequence
  Synthetic oligonucleotide
ctctagaggtattgtaatgttcatcatgca

SEQ ID NO: 395420 - DNA, 30 bp, Artificial Sequence
  Synthetic oligonucleotide
gagagctgcggtcccaccatccgtcatgca

SEQ ID NO: 395421 - DNA, 30 bp, Artificial Sequence
  Synthetic oligonucleotide
gtacacctttagaacaccaagtgagatgca

SEQ ID NO: 395422 - DNA, 30 bp, Artificial Sequence
  Synthetic oligonucleotide
aataagattattagcggtcagggcgatgca

SEQ ID NO: 395423 - DNA, 30 bp, Artificial Sequence
  Synthetic oligonucleotide
agcgaaatcccatcgtcctagggcgatgca

SEQ ID NO: 395424 - DNA, 30 bp, Artificial Sequence
  Synthetic oligonucleotide
gccatggccgctgtcctttatggcgatgca

SEQ ID NO: 395425 - DNA, 30 bp, Artificial Sequence
  Synthetic oligonucleotide
aacatgggtattattactatcatcgatgca

SEQ ID NO: 395426 - DNA, 30 bp, Artificial Sequence
  Synthetic oligonucleotide
aattcagtcataagcgctcctgcggatgca

SEQ ID NO: 395427 - DNA, 30 bp, Artificial Sequence
  Synthetic oligonucleotide
gttagcggcggtaaaagtgtctcggatgca

SEQ ID NO: 395428 - DNA, 30 bp, Artificial Sequence
  Synthetic oligonucleotide
gcaggtaacatatgagcggacgtggatgca

SEQ ID NO: 395429 - DNA, 30 bp, Artificial Sequence
  Synthetic oligonucleotide
ttattaggggaaatcaaatggggtgatgca

SEQ ID NO: 395430 - DNA, 30 bp, Artificial Sequence
  Synthetic oligonucleotide
cgacttaggtgcgcatgcacacaatatgca

SEQ ID NO: 395431 - DNA, 30 bp, Artificial Sequence
  Synthetic oligonucleotide
agcatgatactgcattcattaacctatgca

SEQ ID NO: 395432 - DNA, 30 bp, Artificial Sequence
  Synthetic oligonucleotide
gcagtcttgaggccgtgcgtttcctatgca

SEQ ID NO: 395433 - DNA, 30 bp, Artificial Sequence
  Synthetic oligonucleotide
ctatacgctggcaaatgccaattgtatgca

SEQ ID NO: 395434 - DNA, 30 bp, Artificial Sequence
  Synthetic oligonucleotide
atatcagtctaggttacttggcattatgca

SEQ ID NO: 395435 - DNA, 30 bp, Artificial Sequence
  Synthetic oligonucleotide
ttaaagaagagtagttggggcacttatgca

SEQ ID NO: 395436 - DNA, 30 bp, Artificial Sequence
  Synthetic oligonucleotide
ttaaattaacacggctggtggttaactgca

SEQ ID NO: 395437 - DNA, 30 bp, Artificial Sequence
  Synthetic oligonucleotide
agctttattctggaacggacggccactgca

SEQ ID NO: 395438 - DNA, 30 bp, Artificial Sequence
  Synthetic oligonucleotide
tggcatgtccagaaaaacgtacgcactgca

SEQ ID NO: 395439 - DNA, 30 bp, Artificial Sequence
  Synthetic oligonucleotide
aatgtcattttaagcgtgctcggcactgca

SEQ ID NO: 395440 - DNA, 30 bp, Artificial Sequence
  Synthetic oligonucleotide
attgttccgacgagttggtgatgcactgca

SEQ ID NO: 395441 - DNA, 30 bp, Artificial Sequence
  Synthetic oligonucleotide
gcacccggtgacacgggataagaccctgca

SEQ ID NO: 395442 - DNA, 30 bp, Artificial Sequence
  Synthetic oligonucleotide
gtttgaaaagttatgataataacgcctgca

SEQ ID NO: 395443 - DNA, 30 bp, Artificial Sequence
  Synthetic oligonucleotide
taagctacccctgacttttcagctcctgca

SEQ ID NO: 395444 - DNA, 30 bp, Artificial Sequence
  Synthetic oligonucleotide
tgttaggaagcaggcactgaatgtcctgca

SEQ ID NO: 395445 - DNA, 30 bp, Artificial Sequence
  Synthetic oligonucleotide
acgatatgcagctgtacctcaccagctgca

SEQ ID NO: 395446 - DNA, 30 bp, Artificial Sequence
  Synthetic oligonucleotide
agcagatgcacgcggattattgcagctgca

SEQ ID NO: 395447 - DNA, 30 bp, Artificial Sequence
  Synthetic oligonucleotide
tcccactggtttggtggtcggcaggctgca

SEQ ID NO: 395448 - DNA, 30 bp, Artificial Sequence
  Synthetic oligonucleotide
ggaggccggcggggcatgaatggtgctgca

SEQ ID NO: 395449 - DNA, 30 bp, Artificial Sequence
  Synthetic oligonucleotide
aagttttaatgtagcataattttatctgca

SEQ ID NO: 395450 - DNA, 30 bp, Artificial Sequence
  Synthetic oligonucleotide
atcgctagcacgtagatatctgtgtctgca

SEQ ID NO: 395451 - DNA, 30 bp, Artificial Sequence
  Synthetic oligonucleotide
ccgtcgtgtgacagcaacgcccattctgca

SEQ ID NO: 395452 - DNA, 30 bp, Artificial Sequence
  Synthetic oligonucleotide
caggtcgaattaagaaaccctggttctgca

SEQ ID NO: 395453 - DNA, 30 bp, Artificial Sequence
  Synthetic oligonucleotide
aacgcaatagcacccataaaactttctgca

SEQ ID NO: 395454 - DNA, 30 bp, Artificial Sequence
  Synthetic oligonucleotide
caggtcctgggcgggcaattgaacagtgca

SEQ ID NO: 395455 - DNA, 30 bp, Artificial Sequence
  Synthetic oligonucleotide
cgattgtatgagggttggacgcacagtgca

SEQ ID NO: 395456 - DNA, 30 bp, Artificial Sequence
  Synthetic oligonucleotide
caccgttggcttccctctggtcgcagtgca

SEQ ID NO: 395457 - DNA, 30 bp, Artificial Sequence
  Synthetic oligonucleotide
agagggtgccgacagcattatgctagtgca

SEQ ID NO: 395458 - DNA, 30 bp, Artificial Sequence
  Synthetic oligonucleotide
cagtagagtatggggcgctatgtccgtgca

SEQ ID NO: 395459 - DNA, 30 bp, Artificial Sequence
  Synthetic oligonucleotide
tcgtttcattgtatcgatcgaactcgtgca

SEQ ID NO: 395460 - DNA, 30 bp, Artificial Sequence
  Synthetic oligonucleotide
tccgcctcgtatcacgtcaatcgtcgtgca

SEQ ID NO: 395461 - DNA, 30 bp, Artificial Sequence
  Synthetic oligonucleotide
ctcaaggatcttcaatagccttttcgtgca

SEQ ID NO: 395462 - DNA, 30 bp, Artificial Sequence
  Synthetic oligonucleotide
tttgctggaaatctacaggacacaggtgca

SEQ ID NO: 395463 - DNA, 30 bp, Artificial Sequence
  Synthetic oligonucleotide
tcctgtgcctatttgagtctaataggtgca

SEQ ID NO: 395464 - DNA, 30 bp, Artificial Sequence
  Synthetic oligonucleotide
ttccgtaaacgagagagatctgtaggtgca

SEQ ID NO: 395465 - DNA, 30 bp, Artificial Sequence
  Synthetic oligonucleotide
tccccgagattaggcgcatgtcgcggtgca

SEQ ID NO: 395466 - DNA, 30 bp, Artificial Sequence
  Synthetic oligonucleotide
acgggttcatagttttccacgccgggtgca

SEQ ID NO: 395467 - DNA, 30 bp, Artificial Sequence
  Synthetic oligonucleotide
gcatgttcaagatcccgagatcggggtgca

SEQ ID NO: 395468 - DNA, 30 bp, Artificial Sequence
  Synthetic oligonucleotide
acctaaagcaatatagtccttcttggtgca

SEQ ID NO: 395469 - DNA, 30 bp, Artificial Sequence
  Synthetic oligonucleotide
tggaccgcatgaccgaaactaagatgtgca

SEQ ID NO: 395470 - DNA, 30 bp, Artificial Sequence
  Synthetic oligonucleotide
cttatctcttcaagttcgggacgatgtgca

SEQ ID NO: 395471 - DNA, 30 bp, Artificial Sequence
  Synthetic oligonucleotide
gggtgtgtgagcggttgctcggtatgtgca

SEQ ID NO: 395472 - DNA, 30 bp, Artificial Sequence
  Synthetic oligonucleotide
gcactcaatggctcggtcaattactgtgca

SEQ ID NO: 395473 - DNA, 30 bp, Artificial Sequence
  Synthetic oligonucleotide
gaatttggttgaggcttcgtctagtgtgca

SEQ ID NO: 395474 - DNA, 30 bp, Artificial Sequence
  Synthetic oligonucleotide
ccgcttcccgccatggctaagtagtgtgca

SEQ ID NO: 395475 - DNA, 30 bp, Artificial Sequence
  Synthetic oligonucleotide
gcccgcctctactacattatgggttgtgca

SEQ ID NO: 395476 - DNA, 26 bp, Artificial Sequence
  Synthetic oligonucleotide
gctgtgcataatagtatgtttgtgca

SEQ ID NO: 395477 - DNA, 30 bp, Artificial Sequence
  Synthetic oligonucleotide
taccattgtcgggactgtaataacattgca

SEQ ID NO: 395478 - DNA, 30 bp, Artificial Sequence
  Synthetic oligonucleotide
acaaacattggagcctttagctacattgca

SEQ ID NO: 395479 - DNA, 30 bp, Artificial Sequence
  Synthetic oligonucleotide
tacatgtactcacaaacaggcgagattgca

SEQ ID NO: 395480 - DNA, 30 bp, Artificial Sequence
  Synthetic oligonucleotide
tcgaagccgctaacgcagcggacgattgca

SEQ ID NO: 395481 - DNA, 30 bp, Artificial Sequence
  Synthetic oligonucleotide
caaaccctaaaatgatctactcggattgca

SEQ ID NO: 395482 - DNA, 30 bp, Artificial Sequence
  Synthetic oligonucleotide
aattccctatttctgtacatcgatattgca

SEQ ID NO: 395483 - DNA, 30 bp, Artificial Sequence
  Synthetic oligonucleotide
tcacttatgggggtattaggtattattgca

SEQ ID NO: 395484 - DNA, 30 bp, Artificial Sequence
  Synthetic oligonucleotide
aatgtgtagagtagtaggggccttattgca

SEQ ID NO: 395485 - DNA, 30 bp, Artificial Sequence
  Synthetic oligonucleotide
aggaattatattggaggtgtccttattgca

SEQ ID NO: 395486 - DNA, 30 bp, Artificial Sequence
  Synthetic oligonucleotide
tggggtacccgggatgagagtacacttgca

SEQ ID NO: 395487 - DNA, 30 bp, Artificial Sequence
  Synthetic oligonucleotide
ctttgcgtggtagtctaacataaccttgca

SEQ ID NO: 395488 - DNA, 29 bp, Artificial Sequence
  Synthetic oligonucleotide
gttgaaaaggacctgcaggtgtccttgca

SEQ ID NO: 395489 - DNA, 30 bp, Artificial Sequence
  Synthetic oligonucleotide
caaatctagcctcactgccattatcttgca

SEQ ID NO: 395490 - DNA, 30 bp, Artificial Sequence
  Synthetic oligonucleotide
agaacgtggccgggcgaattcgctcttgca

SEQ ID NO: 395491 - DNA, 30 bp, Artificial Sequence
  Synthetic oligonucleotide
gatgctcagaactcgtatgagagtcttgca

SEQ ID NO: 395492 - DNA, 30 bp, Artificial Sequence
  Synthetic oligonucleotide
aaaagccgagggggattctctgaagttgca

SEQ ID NO: 395493 - DNA, 30 bp, Artificial Sequence
  Synthetic oligonucleotide
gctgtgcccactaaccctctctgagttgca

SEQ ID NO: 395494 - DNA, 30 bp, Artificial Sequence
  Synthetic oligonucleotide
atgcgacatgaatcacacgatatagttgca

SEQ ID NO: 395495 - DNA, 30 bp, Artificial Sequence
  Synthetic oligonucleotide
gccgcattggaaccgcgattactagttgca

SEQ ID NO: 395496 - DNA, 30 bp, Artificial Sequence
  Synthetic oligonucleotide
cggaggccacgttgggattgggacgttgca

SEQ ID NO: 395497 - DNA, 30 bp, Artificial Sequence
  Synthetic oligonucleotide
gtctaggcccgtttttttatctccgttgca

SEQ ID NO: 395498 - DNA, 30 bp, Artificial Sequence
  Synthetic oligonucleotide
ttcatctgcaaaatgctcactgtcgttgca

SEQ ID NO: 395499 - DNA, 30 bp, Artificial Sequence
  Synthetic oligonucleotide
tctgtcttttagtcttattttaaggttgca

SEQ ID NO: 395500 - DNA, 30 bp, Artificial Sequence
  Synthetic oligonucleotide
cggtagcggctggtccggtgtccggttgca

SEQ ID NO: 395501 - DNA, 30 bp, Artificial Sequence
  Synthetic oligonucleotide
gatcatttgtaagattaatggagggttgca

SEQ ID NO: 395502 - DNA, 30 bp, Artificial Sequence
  Synthetic oligonucleotide
tatatgactcgaagtaccgacggggttgca

SEQ ID NO: 395503 - DNA, 30 bp, Artificial Sequence
  Synthetic oligonucleotide
aaattcagtaagggcaaatcagtggttgca

SEQ ID NO: 395504 - DNA, 30 bp, Artificial Sequence
  Synthetic oligonucleotide
tacagtgctgtttatccttgcactgttgca

SEQ ID NO: 395505 - DNA, 30 bp, Artificial Sequence
  Synthetic oligonucleotide
atatcacggtataacaccggctctgttgca

SEQ ID NO: 395506 - DNA, 30 bp, Artificial Sequence
  Synthetic oligonucleotide
tagcggtggggtaccgcctacggtgttgca

SEQ ID NO: 395507 - DNA, 30 bp, Artificial Sequence
  Synthetic oligonucleotide
atagagcacgttcgcagaaggcaatttgca

SEQ ID NO: 395508 - DNA, 30 bp, Artificial Sequence
  Synthetic oligonucleotide
caatgcggccaaattgtgtccgaatttgca

SEQ ID NO: 395509 - DNA, 30 bp, Artificial Sequence
  Synthetic oligonucleotide
gtggcccgacaatatttgccgctatttgca

SEQ ID NO: 395510 - DNA, 30 bp, Artificial Sequence
  Synthetic oligonucleotide
tttcgttccggactaaattttctatttgca

SEQ ID NO: 395511 - DNA, 30 bp, Artificial Sequence
  Synthetic oligonucleotide
agcctgggcccagtagcacatttatttgca

SEQ ID NO: 395512 - DNA, 30 bp, Artificial Sequence
  Synthetic oligonucleotide
tggctcaccgtgtaaggaattaactttgca

SEQ ID NO: 395513 - DNA, 31 bp, Artificial Sequence
  Synthetic oligonucleotide
aaccttggggtgcggtagttaatactttgca

SEQ ID NO: 395514 - DNA, 30 bp, Artificial Sequence
  Synthetic oligonucleotide
aaccgcgcttctgctattgtaccctttgca

SEQ ID NO: 395515 - DNA, 30 bp, Artificial Sequence
  Synthetic oligonucleotide
agaaactgacccttgccaactatctttgca

SEQ ID NO: 395516 - DNA, 30 bp, Artificial Sequence
  Synthetic oligonucleotide
cttctgagattcctttattttaagtttgca

SEQ ID NO: 395517 - DNA, 30 bp, Artificial Sequence
  Synthetic oligonucleotide
gtggcgataccttttgtggcacagtttgca

SEQ ID NO: 395518 - DNA, 30 bp, Artificial Sequence
  Synthetic oligonucleotide
tgaaaatgcaaaataacaggagagtttgca

SEQ ID NO: 395519 - DNA, 30 bp, Artificial Sequence
  Synthetic oligonucleotide
ttagacagtttcgacgcatccgcgtttgca

SEQ ID NO: 395520 - DNA, 30 bp, Artificial Sequence
  Synthetic oligonucleotide
atttgtatagtctcttgtcaagggtttgca

SEQ ID NO: 395521 - DNA, 30 bp, Artificial Sequence
  Synthetic oligonucleotide
tcagggttatcgctagactcagattttgca

SEQ ID NO: 395522 - DNA, 30 bp, Artificial Sequence
  Synthetic oligonucleotide
aatttccaagaatctccgcgacaaaaatca

SEQ ID NO: 395523 - DNA, 30 bp, Artificial Sequence
  Synthetic oligonucleotide
ttgaaagagttcatgtcaggcgcaaaatca

SEQ ID NO: 395524 - DNA, 30 bp, Artificial Sequence
  Synthetic oligonucleotide
tacctgaactgcgccgtgaggtacaaatca

SEQ ID NO: 395525 - DNA, 30 bp, Artificial Sequence
  Synthetic oligonucleotide
tctgccattaagcggagccgagcacaatca

SEQ ID NO: 395526 - DNA, 31 bp, Artificial Sequence
  Synthetic oligonucleotide
ttgcacagatattgagctacttgcacaatca

SEQ ID NO: 395527 - DNA, 30 bp, Artificial Sequence
  Synthetic oligonucleotide
ggccttggggtacatgtgctcgtacaatca

SEQ ID NO: 395528 - DNA, 30 bp, Artificial Sequence
  Synthetic oligonucleotide
aactacttggagttctagggtaagcaatca

SEQ ID NO: 395529 - DNA, 30 bp, Artificial Sequence
  Synthetic oligonucleotide
gggtggtaccagggcgggccacagcaatca

SEQ ID NO: 395530 - DNA, 30 bp, Artificial Sequence
  Synthetic oligonucleotide
tcctccaacgattattatgcctcagaatca

SEQ ID NO: 395531 - DNA, 30 bp, Artificial Sequence
  Synthetic oligonucleotide
tgcatcttagaacgatcgggccacgaatca

SEQ ID NO: 395532 - DNA, 30 bp, Artificial Sequence
  Synthetic oligonucleotide
gctgtaataatattatcggcaaccgaatca

SEQ ID NO: 395533 - DNA, 30 bp, Artificial Sequence
  Synthetic oligonucleotide
tcgtacatgcttgaagcataagtcgaatca

SEQ ID NO: 395534 - DNA, 28 bp, Artificial Sequence
  Synthetic oligonucleotide
tggtgtggcttttattatactggaatca

SEQ ID NO: 395535 - DNA, 30 bp, Artificial Sequence
  Synthetic oligonucleotide
ctcggtgcttgatggcatgtatatgaatca

SEQ ID NO: 395536 - DNA, 30 bp, Artificial Sequence
  Synthetic oligonucleotide
tatcccgtgtactttttctcgagtgaatca

SEQ ID NO: 395537 - DNA, 30 bp, Artificial Sequence
  Synthetic oligonucleotide
tctcgtgttaaggagctgcatgcataatca

SEQ ID NO: 395538 - DNA, 30 bp, Artificial Sequence
  Synthetic oligonucleotide
attgtaccacctaatattcttcgataatca

SEQ ID NO: 395539 - DNA, 30 bp, Artificial Sequence
  Synthetic oligonucleotide
cgtcacgcaaggcctctacccccctaatca

SEQ ID NO: 395540 - DNA, 30 bp, Artificial Sequence
  Synthetic oligonucleotide
atgaaggttattcataaattcttctaatca

SEQ ID NO: 395541 - DNA, 30 bp, Artificial Sequence
  Synthetic oligonucleotide
ccaggcatggaatctctcttggagtaatca

SEQ ID NO: 395542 - DNA, 30 bp, Artificial Sequence
  Synthetic oligonucleotide
tctccagcagcagaaaaacatacgtaatca

SEQ ID NO: 395543 - DNA, 30 bp, Artificial Sequence
  Synthetic oligonucleotide
attatcattaggctaacgccaccgtaatca

SEQ ID NO: 395544 - DNA, 30 bp, Artificial Sequence
  Synthetic oligonucleotide
ctcttgtatcacaatgtgataaggtaatca

SEQ ID NO: 395545 - DNA, 30 bp, Artificial Sequence
  Synthetic oligonucleotide
cgtgcccggtttgaagccgaatggtaatca

SEQ ID NO: 395546 - DNA, 30 bp, Artificial Sequence
  Synthetic oligonucleotide
atttgcgtctcaccttgccactattaatca

SEQ ID NO: 395547 - DNA, 30 bp, Artificial Sequence
  Synthetic oligonucleotide
tgcacactaaaagtattgacaagaacatca

SEQ ID NO: 395548 - DNA, 30 bp, Artificial Sequence
  Synthetic oligonucleotide
tcgataagcgaatggatgttgggaacatca

SEQ ID NO: 395549 - DNA, 30 bp, Artificial Sequence
  Synthetic oligonucleotide
aagcctaaagagcgttcgggccaaccatca

SEQ ID NO: 395550 - DNA, 30 bp, Artificial Sequence
  Synthetic oligonucleotide
tgacgccctaactgcagtgtaggcccatca

SEQ ID NO: 395551 - DNA, 30 bp, Artificial Sequence
  Synthetic oligonucleotide
aacggtttttatgacgagattgttccatca

SEQ ID NO: 395552 - DNA, 30 bp, Artificial Sequence
  Synthetic oligonucleotide
cgggtaatcctgggcagacgctaagcatca

SEQ ID NO: 395553 - DNA, 30 bp, Artificial Sequence
  Synthetic oligonucleotide
aatattatcattggaaagaaaagcgcatca

SEQ ID NO: 395554 - DNA, 30 bp, Artificial Sequence
  Synthetic oligonucleotide
gcgtgggtctaaaattcgtgctgcgcatca

SEQ ID NO: 395555 - DNA, 30 bp, Artificial Sequence
  Synthetic oligonucleotide
accggttactcctctccttaaaatgcatca

SEQ ID NO: 395556 - DNA, 30 bp, Artificial Sequence
  Synthetic oligonucleotide
ggacgttcggtctaggttagccgtgcatca

SEQ ID NO: 395557 - DNA, 30 bp, Artificial Sequence
  Synthetic oligonucleotide
atctcggacatctaattcgggctatcatca

SEQ ID NO: 395558 - DNA, 30 bp, Artificial Sequence
  Synthetic oligonucleotide
ttgtagttaaaatgtttgggagtctcatca

SEQ ID NO: 395559 - DNA, 30 bp, Artificial Sequence
  Synthetic oligonucleotide
gaggcacctgctatcaatgaacgcagatca

SEQ ID NO: 395560 - DNA, 30 bp, Artificial Sequence
  Synthetic oligonucleotide
tggactcagaacgattgatgtgtcagatca

SEQ ID NO: 395561 - DNA, 30 bp, Artificial Sequence
  Synthetic oligonucleotide
aattcttacagttaataggtcaggagatca

SEQ ID NO: 395562 - DNA, 30 bp, Artificial Sequence
  Synthetic oligonucleotide
accccaaaggatcgtgtgttccggagatca

SEQ ID NO: 395563 - DNA, 30 bp, Artificial Sequence
  Synthetic oligonucleotide
ataggggcgcccgcagcccgattgagatca

SEQ ID NO: 395564 - DNA, 30 bp, Artificial Sequence
  Synthetic oligonucleotide
tacgatgggatcccaaatcgctctagatca

SEQ ID NO: 395565 - DNA, 30 bp, Artificial Sequence
  Synthetic oligonucleotide
attccgtagtggtagtcgagcggtagatca

SEQ ID NO: 395566 - DNA, 30 bp, Artificial Sequence
  Synthetic oligonucleotide
tttcattgtacgtacatctaagttagatca

SEQ ID NO: 395567 - DNA, 30 bp, Artificial Sequence
  Synthetic oligonucleotide
gcggtttgataaataactttagtacgatca

SEQ ID NO: 395568 - DNA, 30 bp, Artificial Sequence
  Synthetic oligonucleotide
tccataatctatgcgcaggttacccgatca

SEQ ID NO: 395569 - DNA, 30 bp, Artificial Sequence
  Synthetic oligonucleotide
cgcgagtaatgatatttgagaccgcgatca

SEQ ID NO: 395570 - DNA, 30 bp, Artificial Sequence
  Synthetic oligonucleotide
ttttccatttttggcactcgctggcgatca

SEQ ID NO: 395571 - DNA, 30 bp, Artificial Sequence
  Synthetic oligonucleotide
ctatctttgcgactcattgatgatcgatca

SEQ ID NO: 395572 - DNA, 30 bp, Artificial Sequence
  Synthetic oligonucleotide
aatgaccggcgtatatgtatacctcgatca

SEQ ID NO: 395573 - DNA, 30 bp, Artificial Sequence
  Synthetic oligonucleotide
atagtctagcacagtgttgtaattcgatca

SEQ ID NO: 395574 - DNA, 30 bp, Artificial Sequence
  Synthetic oligonucleotide
ctccctgtacagactgttatgggaggatca

SEQ ID NO: 395575 - DNA, 30 bp, Artificial Sequence
  Synthetic oligonucleotide
gagcgccctgtatcgggtagtaacggatca

SEQ ID NO: 395576 - DNA, 30 bp, Artificial Sequence
  Synthetic oligonucleotide
cgtcagttcggtctcgaaagacgcggatca

SEQ ID NO: 395577 - DNA, 30 bp, Artificial Sequence
  Synthetic oligonucleotide
tccctaaggcacgttgagttaaagggatca

SEQ ID NO: 395578 - DNA, 30 bp, Artificial Sequence
  Synthetic oligonucleotide
ggacggaacaccaattatgcaccgggatca

SEQ ID NO: 395579 - DNA, 30 bp, Artificial Sequence
  Synthetic oligonucleotide
aacccgaaggagtgggtattacggggatca

SEQ ID NO: 395580 - DNA, 30 bp, Artificial Sequence
  Synthetic oligonucleotide
tgcggcgacctgtatggtaattggggatca

SEQ ID NO: 395581 - DNA, 30 bp, Artificial Sequence
  Synthetic oligonucleotide
cggtagtcgttatccacgcaacctggatca

SEQ ID NO: 395582 - DNA, 30 bp, Artificial Sequence
  Synthetic oligonucleotide
gtctcgggtacgacagagctgattggatca

SEQ ID NO: 395583 - DNA, 30 bp, Artificial Sequence
  Synthetic oligonucleotide
tgagtaaactgtacggatgccgaatgatca

SEQ ID NO: 395584 - DNA, 30 bp, Artificial Sequence
  Synthetic oligonucleotide
gtggaatagctaggagccctaacatgatca

SEQ ID NO: 395585 - DNA, 30 bp, Artificial Sequence
  Synthetic oligonucleotide
gtggtgtaaaacgccggtcttctatgatca

SEQ ID NO: 395586 - DNA, 30 bp, Artificial Sequence
  Synthetic oligonucleotide
gggattagacgtatcttgaggacctgatca

SEQ ID NO: 395587 - DNA, 30 bp, Artificial Sequence
  Synthetic oligonucleotide
cctgaacctctgaagctcattaagtgatca

SEQ ID NO: 395588 - DNA, 30 bp, Artificial Sequence
  Synthetic oligonucleotide
gttggttggttttgtgagcacacgtgatca

SEQ ID NO: 395589 - DNA, 30 bp, Artificial Sequence
  Synthetic oligonucleotide
ataagcacaaaccggctaccgtcgtgatca

SEQ ID NO: 395590 - DNA, 30 bp, Artificial Sequence
  Synthetic oligonucleotide
agcgggcatcacgtttaaagtgtgtgatca

SEQ ID NO: 395591 - DNA, 30 bp, Artificial Sequence
  Synthetic oligonucleotide
agttttcggtcgcgtgcatagttgtgatca

SEQ ID NO: 395592 - DNA, 30 bp, Artificial Sequence
  Synthetic oligonucleotide
ccctatttttactttttactctaaatatca

SEQ ID NO: 395593 - DNA, 30 bp, Artificial Sequence
  Synthetic oligonucleotide
actaatgggcaggtatgtttgtaaatatca

SEQ ID NO: 395594 - DNA, 30 bp, Artificial Sequence
  Synthetic oligonucleotide
ctacgcaaataaaacatgctagtaatatca

SEQ ID NO: 395595 - DNA, 30 bp, Artificial Sequence
  Synthetic oligonucleotide
ttaattcaagcctagtgtcgacacatatca

SEQ ID NO: 395596 - DNA, 30 bp, Artificial Sequence
  Synthetic oligonucleotide
aaatcttgaggcgtttcagggcagatatca

SEQ ID NO: 395597 - DNA, 30 bp, Artificial Sequence
  Synthetic oligonucleotide
cattgacgtagtgattgtgacagtatatca

SEQ ID NO: 395598 - DNA, 30 bp, Artificial Sequence
  Synthetic oligonucleotide
taaattgtaaacagggggtttagtatatca

SEQ ID NO: 395599 - DNA, 30 bp, Artificial Sequence
  Synthetic oligonucleotide
gcgagcattgattacgaagattttatatca

SEQ ID NO: 395600 - DNA, 30 bp, Artificial Sequence
  Synthetic oligonucleotide
gagggccctgccaccgttttgttactatca

SEQ ID NO: 395601 - DNA, 30 bp, Artificial Sequence
  Synthetic oligonucleotide
tctgtcaacgatcatatcaagatcctatca

SEQ ID NO: 395602 - DNA, 30 bp, Artificial Sequence
  Synthetic oligonucleotide
aactattaaagactcaagaatatcctatca

SEQ ID NO: 395603 - DNA, 30 bp, Artificial Sequence
  Synthetic oligonucleotide
cgtgtaatttagacgagcatcgtcctatca

SEQ ID NO: 395604 - DNA, 30 bp, Artificial Sequence
  Synthetic oligonucleotide
actcaaaatgagcatactccaaggctatca

SEQ ID NO: 395605 - DNA, 30 bp, Artificial Sequence
  Synthetic oligonucleotide
ttataagttcatgctgactattctctatca

SEQ ID NO: 395606 - DNA, 30 bp, Artificial Sequence
  Synthetic oligonucleotide
tggggtctactagtccttgtatgtctatca

SEQ ID NO: 395607 - DNA, 30 bp, Artificial Sequence
  Synthetic oligonucleotide
agcattacactcgccaaagggattctatca

SEQ ID NO: 395608 - DNA, 30 bp, Artificial Sequence
  Synthetic oligonucleotide
gagccaattttcacattgctttaagtatca

SEQ ID NO: 395609 - DNA, 30 bp, Artificial Sequence
  Synthetic oligonucleotide
gtatatggcttgggatacttcccggtatca

SEQ ID NO: 395610 - DNA, 30 bp, Artificial Sequence
  Synthetic oligonucleotide
ttccagttttcgatgaaggctggggtatca

SEQ ID NO: 395611 - DNA, 30 bp, Artificial Sequence
  Synthetic oligonucleotide
gatataacgcgtaaaagcggatgggtatca

SEQ ID NO: 395612 - DNA, 30 bp, Artificial Sequence
  Synthetic oligonucleotide
gcagcgcttatatatgagctcgtggtatca

SEQ ID NO: 395613 - DNA, 30 bp, Artificial Sequence
  Synthetic oligonucleotide
atactcattcatagccagaacactgtatca

SEQ ID NO: 395614 - DNA, 30 bp, Artificial Sequence
  Synthetic oligonucleotide
ctcagggttacgcctgacgaactcttatca

SEQ ID NO: 395615 - DNA, 30 bp, Artificial Sequence
  Synthetic oligonucleotide
cggggtggactgatatggggcaatttatca

SEQ ID NO: 395616 - DNA, 30 bp, Artificial Sequence
  Synthetic oligonucleotide
tgctggacggataattcgagtgatttatca

SEQ ID NO: 395617 - DNA, 30 bp, Artificial Sequence
  Synthetic oligonucleotide
accgttcggttatgggacgtacctttatca

SEQ ID NO: 395618 - DNA, 30 bp, Artificial Sequence
  Synthetic oligonucleotide
cagtgattgtaaaatgcacagccaaactca

SEQ ID NO: 395619 - DNA, 30 bp, Artificial Sequence
  Synthetic oligonucleotide
cccttacatctgtgacgccaagtcaactca

SEQ ID NO: 395620 - DNA, 30 bp, Artificial Sequence
  Synthetic oligonucleotide
atgaaagctttcaattcccgttagaactca

SEQ ID NO: 395621 - DNA, 30 bp, Artificial Sequence
  Synthetic oligonucleotide
gtctggccggtaacaagaaagcctaactca

SEQ ID NO: 395622 - DNA, 30 bp, Artificial Sequence
  Synthetic oligonucleotide
ttataccaataaaccgcggatagtaactca

SEQ ID NO: 395623 - DNA, 30 bp, Artificial Sequence
  Synthetic oligonucleotide
ccacaagcgtttcgccgggaatttaactca

SEQ ID NO: 395624 - DNA, 30 bp, Artificial Sequence
  Synthetic oligonucleotide
gttcgagaattgattcgagctagacactca

SEQ ID NO: 395625 - DNA, 30 bp, Artificial Sequence
  Synthetic oligonucleotide
ccctattcttaagtatacgcgatacactca

SEQ ID NO: 395626 - DNA, 30 bp, Artificial Sequence
  Synthetic oligonucleotide
ccgtagccttgaaaaggctaggcccactca

SEQ ID NO: 395627 - DNA, 30 bp, Artificial Sequence
  Synthetic oligonucleotide
gatctaagtctgatgtcaatcccgcactca

SEQ ID NO: 395628 - DNA, 30 bp, Artificial Sequence
  Synthetic oligonucleotide
ttttatggagccaatcagtcgcggcactca

SEQ ID NO: 395629 - DNA, 30 bp, Artificial Sequence
  Synthetic oligonucleotide
ggccctcaaccgcactagaggtggcactca

SEQ ID NO: 395630 - DNA, 30 bp, Artificial Sequence
  Synthetic oligonucleotide
ggtagatacgggcgtctatattggcactca

SEQ ID NO: 395631 - DNA, 30 bp, Artificial Sequence
  Synthetic oligonucleotide
ccctatgtggttggctacgagatgcactca

SEQ ID NO: 395632 - DNA, 30 bp, Artificial Sequence
  Synthetic oligonucleotide
taagatttgattcttagggatgtgcactca

SEQ ID NO: 395633 - DNA, 30 bp, Artificial Sequence
  Synthetic oligonucleotide
gcatctggctagcctgtgtacattcactca

SEQ ID NO: 395634 - DNA, 30 bp, Artificial Sequence
  Synthetic oligonucleotide
atttagaccgactttgttattagagactca

SEQ ID NO: 395635 - DNA, 30 bp, Artificial Sequence
  Synthetic oligonucleotide
gtagcgtgatgcagactatttaacgactca

SEQ ID NO: 395636 - DNA, 30 bp, Artificial Sequence
  Synthetic oligonucleotide
ggccgatttcatatttagttttgcgactca

SEQ ID NO: 395637 - DNA, 30 bp, Artificial Sequence
  Synthetic oligonucleotide
tctactaggtgggagggtctcctcgactca

SEQ ID NO: 395638 - DNA, 30 bp, Artificial Sequence
  Synthetic oligonucleotide
gcatccattaccggtcctttgccggactca

SEQ ID NO: 395639 - DNA, 30 bp, Artificial Sequence
  Synthetic oligonucleotide
gagcgcggttgtatatcgtagaatgactca

SEQ ID NO: 395640 - DNA, 30 bp, Artificial Sequence
  Synthetic oligonucleotide
caagactgctcagtttgatgatttgactca

SEQ ID NO: 395641 - DNA, 30 bp, Artificial Sequence
  Synthetic oligonucleotide
gcagtaccactcgcccatggtgaatactca

SEQ ID NO: 395642 - DNA, 30 bp, Artificial Sequence
  Synthetic oligonucleotide
ttcgaacccaccggttatgaaaggtactca

SEQ ID NO: 395643 - DNA, 30 bp, Artificial Sequence
  Synthetic oligonucleotide
atgtccacgtgttattgcatcaggtactca

SEQ ID NO: 395644 - DNA, 30 bp, Artificial Sequence
  Synthetic oligonucleotide
gaaagaaaactttcagaacccatgtactca

SEQ ID NO: 395645 - DNA, 30 bp, Artificial Sequence
  Synthetic oligonucleotide
cgccgctatgagttaagagcggtgtactca

SEQ ID NO: 395646 - DNA, 30 bp, Artificial Sequence
  Synthetic oligonucleotide
atacggagatatgagtttgcgacttactca

SEQ ID NO: 395647 - DNA, 30 bp, Artificial Sequence
  Synthetic oligonucleotide
tgccctccaattagcatgaaaggaacctca

SEQ ID NO: 395648 - DNA, 30 bp, Artificial Sequence
  Synthetic oligonucleotide
ttcactagacctcagccgcataccacctca

SEQ ID NO: 395649 - DNA, 30 bp, Artificial Sequence
  Synthetic oligonucleotide
tattccttgtcggcagtcacctagacctca

SEQ ID NO: 395650 - DNA, 30 bp, Artificial Sequence
  Synthetic oligonucleotide
aactgttggtttcgctacaaaatgacctca

SEQ ID NO: 395651 - DNA, 30 bp, Artificial Sequence
  Synthetic oligonucleotide
ttgagctcaggggacaaatagagtacctca

SEQ ID NO: 395652 - DNA, 30 bp, Artificial Sequence
  Synthetic oligonucleotide
gctaaacttggatggctctagaaaccctca

SEQ ID NO: 395653 - DNA, 29 bp, Artificial Sequence
  Synthetic oligonucleotide
ccaatgtcggactataccggcaaccctca

SEQ ID NO: 395654 - DNA, 30 bp, Artificial Sequence
  Synthetic oligonucleotide
aggtggggggccatgagtgtggtaccctca

SEQ ID NO: 395655 - DNA, 30 bp, Artificial Sequence
  Synthetic oligonucleotide
cgccatgtagcaaaagttgtgtggccctca

SEQ ID NO: 395656 - DNA, 30 bp, Artificial Sequence
  Synthetic oligonucleotide
gtctacatggtgaacttaggaatgccctca

SEQ ID NO: 395657 - DNA, 30 bp, Artificial Sequence
  Synthetic oligonucleotide
taataaaatttgcttgaggtagtgccctca

SEQ ID NO: 395658 - DNA, 30 bp, Artificial Sequence
  Synthetic oligonucleotide
tgacccttttctctgattcttagagcctca

SEQ ID NO: 395659 - DNA, 30 bp, Artificial Sequence
  Synthetic oligonucleotide
atgacgtttcccagggttattcccgcctca

SEQ ID NO: 395660 - DNA, 31 bp, Artificial Sequence
  Synthetic oligonucleotide
acatctattgagactataagtacgcgcctca

SEQ ID NO: 395661 - DNA, 30 bp, Artificial Sequence
  Synthetic oligonucleotide
aagcgtgcctttgggctaggtggtgcctca

SEQ ID NO: 395662 - DNA, 30 bp, Artificial Sequence
  Synthetic oligonucleotide
atagccccacatggcaaaactcttgcctca

SEQ ID NO: 395663 - DNA, 30 bp, Artificial Sequence
  Synthetic oligonucleotide
cgtgtgtatgcattgagcaactaatcctca

SEQ ID NO: 395664 - DNA, 30 bp, Artificial Sequence
  Synthetic oligonucleotide
tatcggagctcccctgtttgtgcatcctca

SEQ ID NO: 395665 - DNA, 30 bp, Artificial Sequence
  Synthetic oligonucleotide
cattaattgatattgagatttagatcctca

SEQ ID NO: 395666 - DNA, 30 bp, Artificial Sequence
  Synthetic oligonucleotide
cgtggaggttgcttttggtagggatcctca

SEQ ID NO: 395667 - DNA, 28 bp, Artificial Sequence
  Synthetic oligonucleotide
tgtaaagtgagtttgcagtggatcctca

SEQ ID NO: 395668 - DNA, 30 bp, Artificial Sequence
  Synthetic oligonucleotide
attacctcgtcccgtatattgtgatcctca

SEQ ID NO: 395669 - DNA, 30 bp, Artificial Sequence
  Synthetic oligonucleotide
gcacgtttttggcatgcttattattcctca

SEQ ID NO: 395670 - DNA, 30 bp, Artificial Sequence
  Synthetic oligonucleotide
tatgctgagcagttaaaagcgatttcctca

SEQ ID NO: 395671 - DNA, 30 bp, Artificial Sequence
  Synthetic oligonucleotide
gagctgtgggttccaaattgactttcctca

SEQ ID NO: 395672 - DNA, 30 bp, Artificial Sequence
  Synthetic oligonucleotide
atttgtagttttgatatttttgtttcctca

SEQ ID NO: 395673 - DNA, 30 bp, Artificial Sequence
  Synthetic oligonucleotide
atcaacgtaatggcaatttatttttcctca

SEQ ID NO: 395674 - DNA, 30 bp, Artificial Sequence
  Synthetic oligonucleotide
agtgcaaaacagcccggccgcttcagctca

SEQ ID NO: 395675 - DNA, 30 bp, Artificial Sequence
  Synthetic oligonucleotide
gatggggtttataacttcctcacgagctca

SEQ ID NO: 395676 - DNA, 30 bp, Artificial Sequence
  Synthetic oligonucleotide
caggtactttgtcacgcattccttagctca

SEQ ID NO: 395677 - DNA, 30 bp, Artificial Sequence
  Synthetic oligonucleotide
gccgatacgaggagtacggagctacgctca

SEQ ID NO: 395678 - DNA, 30 bp, Artificial Sequence
  Synthetic oligonucleotide
aggacaacatactatggacttttccgctca

SEQ ID NO: 395679 - DNA, 30 bp, Artificial Sequence
  Synthetic oligonucleotide
tatactcatgttcttggggcttcgcgctca

SEQ ID NO: 395680 - DNA, 30 bp, Artificial Sequence
  Synthetic oligonucleotide
taagcaagaggagctcggcaacggcgctca

SEQ ID NO: 395681 - DNA, 30 bp, Artificial Sequence
  Synthetic oligonucleotide
cactcaatcgggaatcttgacgggcgctca

SEQ ID NO: 395682 - DNA, 30 bp, Artificial Sequence
  Synthetic oligonucleotide
gttaagctcttgttcccgagggaaggctca

SEQ ID NO: 395683 - DNA, 30 bp, Artificial Sequence
  Synthetic oligonucleotide
gcctgggactgctcggcagtaataggctca

SEQ ID NO: 395684 - DNA, 30 bp, Artificial Sequence
  Synthetic oligonucleotide
cttggatgccaacgcaaccctttaggctca

SEQ ID NO: 395685 - DNA, 30 bp, Artificial Sequence
  Synthetic oligonucleotide
gattggagcaagggcgtaggagacggctca

SEQ ID NO: 395686 - DNA, 30 bp, Artificial Sequence
  Synthetic oligonucleotide
caggcatccaatgtattgaacttcggctca

SEQ ID NO: 395687 - DNA, 30 bp, Artificial Sequence
  Synthetic oligonucleotide
accgcctttttggaagtactaatgggctca

SEQ ID NO: 395688 - DNA, 30 bp, Artificial Sequence
  Synthetic oligonucleotide
tcccggatcgaacgctggaacatgggctca

SEQ ID NO: 395689 - DNA, 30 bp, Artificial Sequence
  Synthetic oligonucleotide
gttacacgccggttgagcggcactggctca

SEQ ID NO: 395690 - DNA, 30 bp, Artificial Sequence
  Synthetic oligonucleotide
caggagagcataattattgttcaatgctca

SEQ ID NO: 395691 - DNA, 30 bp, Artificial Sequence
  Synthetic oligonucleotide
atcttgtttcgaatcctttgcaactgctca

SEQ ID NO: 395692 - DNA, 30 bp, Artificial Sequence
  Synthetic oligonucleotide
tgatcgacggccgcacgctccaaaatctca

SEQ ID NO: 395693 - DNA, 30 bp, Artificial Sequence
  Synthetic oligonucleotide
caatcaaccctggcagttgaaataatctca

SEQ ID NO: 395694 - DNA, 30 bp, Artificial Sequence
  Synthetic oligonucleotide
gcgttcctagtattgtaggagggtatctca

SEQ ID NO: 395695 - DNA, 30 bp, Artificial Sequence
  Synthetic oligonucleotide
ggccggtggggggccctatgcgtcctctca

SEQ ID NO: 395696 - DNA, 30 bp, Artificial Sequence
  Synthetic oligonucleotide
agaattcgtcccgtgttctgttatctctca

SEQ ID NO: 395697 - DNA, 30 bp, Artificial Sequence
  Synthetic oligonucleotide
tggctggggccatcttttggacaagtctca

SEQ ID NO: 395698 - DNA, 30 bp, Artificial Sequence
  Synthetic oligonucleotide
gactgccgatacacggtgtcgtcagtctca

SEQ ID NO: 395699 - DNA, 30 bp, Artificial Sequence
  Synthetic oligonucleotide
agttcgacgtaatatattgcattagtctca

SEQ ID NO: 395700 - DNA, 30 bp, Artificial Sequence
  Synthetic oligonucleotide
tgagtcgaagagtcaaccttgatcgtctca

SEQ ID NO: 395701 - DNA, 30 bp, Artificial Sequence
  Synthetic oligonucleotide
atactttctttgagcgacgggttcgtctca

SEQ ID NO: 395702 - DNA, 30 bp, Artificial Sequence
  Synthetic oligonucleotide
tattatatgaagttgttgttttgggtctca

SEQ ID NO: 395703 - DNA, 30 bp, Artificial Sequence
  Synthetic oligonucleotide
gtatactcaatacatgagtaactattctca

SEQ ID NO: 395704 - DNA, 30 bp, Artificial Sequence
  Synthetic oligonucleotide
ctcatttacgctagatcagtggtcttctca

SEQ ID NO: 395705 - DNA, 30 bp, Artificial Sequence
  Synthetic oligonucleotide
ctatatcgtaagtataaggccgagttctca

SEQ ID NO: 395706 - DNA, 30 bp, Artificial Sequence
  Synthetic oligonucleotide
gaataacgaccgggggttaaacggttctca

SEQ ID NO: 395707 - DNA, 30 bp, Artificial Sequence
  Synthetic oligonucleotide
ttcaagagttgtaacatgagtactttctca

SEQ ID NO: 395708 - DNA, 30 bp, Artificial Sequence
  Synthetic oligonucleotide
aagcaatttgtcattatcgattcaaagtca

SEQ ID NO: 395709 - DNA, 30 bp, Artificial Sequence
  Synthetic oligonucleotide
tggagccaaaacacgcgtcttttaaagtca

SEQ ID NO: 395710 - DNA, 30 bp, Artificial Sequence
  Synthetic oligonucleotide
ggacttaacttatagactgtacagaagtca

SEQ ID NO: 395711 - DNA, 30 bp, Artificial Sequence
  Synthetic oligonucleotide
atgctgggttacagggacttctagaagtca

SEQ ID NO: 395712 - DNA, 30 bp, Artificial Sequence
  Synthetic oligonucleotide
cgtttaattcactatgtgtagcgacagtca

SEQ ID NO: 395713 - DNA, 30 bp, Artificial Sequence
  Synthetic oligonucleotide
tacatagaatggtcaatgtatatacagtca

SEQ ID NO: 395714 - DNA, 30 bp, Artificial Sequence
  Synthetic oligonucleotide
atgctctcgcttctgaaattataccagtca

SEQ ID NO: 395715 - DNA, 30 bp, Artificial Sequence
  Synthetic oligonucleotide
gggccacgaatcttctggtccttccagtca

SEQ ID NO: 395716 - DNA, 30 bp, Artificial Sequence
  Synthetic oligonucleotide
ctcaacgcgcgacgtctttctccgcagtca

SEQ ID NO: 395717 - DNA, 30 bp, Artificial Sequence
  Synthetic oligonucleotide
ttataaggcactgtttactgagggcagtca

SEQ ID NO: 395718 - DNA, 30 bp, Artificial Sequence
  Synthetic oligonucleotide
aacactttagctgggctgcgtgtgcagtca

SEQ ID NO: 395719 - DNA, 30 bp, Artificial Sequence
  Synthetic oligonucleotide
aaaaggcatagaatatttgcggatcagtca

SEQ ID NO: 395720 - DNA, 30 bp, Artificial Sequence
  Synthetic oligonucleotide
atagataatatcggttgcgcctttcagtca

SEQ ID NO: 395721 - DNA, 30 bp, Artificial Sequence
  Synthetic oligonucleotide
cgatacccaattcaccctcaggcagagtca

SEQ ID NO: 395722 - DNA, 30 bp, Artificial Sequence
  Synthetic oligonucleotide
atttgtatgctaaaggtgatacgagagtca

SEQ ID NO: 395723 - DNA, 30 bp, Artificial Sequence
  Synthetic oligonucleotide
aaaaccaacgttacccgttctgatgagtca

SEQ ID NO: 395724 - DNA, 30 bp, Artificial Sequence
  Synthetic oligonucleotide
acagctcctcttttgtcgctatatgagtca

SEQ ID NO: 395725 - DNA, 30 bp, Artificial Sequence
  Synthetic oligonucleotide
tcaccttttggttaggaagaggaatagtca

SEQ ID NO: 395726 - DNA, 30 bp, Artificial Sequence
  Synthetic oligonucleotide
atgtcccctaattatcctcggcactagtca

SEQ ID NO: 395727 - DNA, 30 bp, Artificial Sequence
  Synthetic oligonucleotide
tgggtgttcagatgctacaatcactagtca

SEQ ID NO: 395728 - DNA, 30 bp, Artificial Sequence
  Synthetic oligonucleotide
caatccgaagcttgaaataccgtctagtca

SEQ ID NO: 395729 - DNA, 30 bp, Artificial Sequence
  Synthetic oligonucleotide
cttaccgtacagcataacactcagtagtca

SEQ ID NO: 395730 - DNA, 30 bp, Artificial Sequence
  Synthetic oligonucleotide
atgcgctatgacgggtgtgtcccttagtca

SEQ ID NO: 395731 - DNA, 30 bp, Artificial Sequence
  Synthetic oligonucleotide
ctcagatttgcgtggcctgccaaaacgtca

SEQ ID NO: 395732 - DNA, 30 bp, Artificial Sequence
  Synthetic oligonucleotide
gtgggctgcagtagaagtatttaaacgtca

SEQ ID NO: 395733 - DNA, 30 bp, Artificial Sequence
  Synthetic oligonucleotide
ttggaagttatttatcgacttgtcacgtca

SEQ ID NO: 395734 - DNA, 30 bp, Artificial Sequence
  Synthetic oligonucleotide
ctagctcgctcgaacccgctcattacgtca

SEQ ID NO: 395735 - DNA, 30 bp, Artificial Sequence
  Synthetic oligonucleotide
tatcctcgttctaccaacactaaaccgtca

SEQ ID NO: 395736 - DNA, 30 bp, Artificial Sequence
  Synthetic oligonucleotide
ctgtctggcggattcacgccataaccgtca

SEQ ID NO: 395737 - DNA, 30 bp, Artificial Sequence
  Synthetic oligonucleotide
aattacgtcttcggtccgtggctaccgtca

SEQ ID NO: 395738 - DNA, 30 bp, Artificial Sequence
  Synthetic oligonucleotide
cgagcggcgcagtggcgacgaaacccgtca

SEQ ID NO: 395739 - DNA, 30 bp, Artificial Sequence
  Synthetic oligonucleotide
ggttctcgaccagcattctacatcccgtca

SEQ ID NO: 395740 - DNA, 30 bp, Artificial Sequence
  Synthetic oligonucleotide
gtggtggtgcaggcatggactatcccgtca

SEQ ID NO: 395741 - DNA, 30 bp, Artificial Sequence
  Synthetic oligonucleotide
agcaacattaggtccgcatcacagccgtca

SEQ ID NO: 395742 - DNA, 30 bp, Artificial Sequence
  Synthetic oligonucleotide
gacgatttaaaagtctcacttcatccgtca

SEQ ID NO: 395743 - DNA, 30 bp, Artificial Sequence
  Synthetic oligonucleotide
accatcatctagaagggtctaattccgtca

SEQ ID NO: 395744 - DNA, 30 bp, Artificial Sequence
  Synthetic oligonucleotide
ttttcgagaccgtgttagttgcaagcgtca

SEQ ID NO: 395745 - DNA, 30 bp, Artificial Sequence
  Synthetic oligonucleotide
ctgcgaatggcagatagggattgagcgtca

SEQ ID NO: 395746 - DNA, 30 bp, Artificial Sequence
  Synthetic oligonucleotide
aagttggcttacctgagcgacgtagcgtca

SEQ ID NO: 395747 - DNA, 30 bp, Artificial Sequence
  Synthetic oligonucleotide
taatctttatggattaattgcgaggcgtca

SEQ ID NO: 395748 - DNA, 30 bp, Artificial Sequence
  Synthetic oligonucleotide
cggcataacgcgacccgggcactggcgtca

SEQ ID NO: 395749 - DNA, 30 bp, Artificial Sequence
  Synthetic oligonucleotide
caggaccaccctggtcgcatccttgcgtca

SEQ ID NO: 395750 - DNA, 30 bp, Artificial Sequence
  Synthetic oligonucleotide
tggctcaagactcaactactcgttgcgtca

SEQ ID NO: 395751 - DNA, 30 bp, Artificial Sequence
  Synthetic oligonucleotide
gcctggtagttttttatccgataatcgtca

SEQ ID NO: 395752 - DNA, 30 bp, Artificial Sequence
  Synthetic oligonucleotide
gtgtgctacatggccagggcacgatcgtca

SEQ ID NO: 395753 - DNA, 30 bp, Artificial Sequence
  Synthetic oligonucleotide
aacacgcggttccgcatccaaggatcgtca

SEQ ID NO: 395754 - DNA, 30 bp, Artificial Sequence
  Synthetic oligonucleotide
cttggtttatgctcactagaagtatcgtca

SEQ ID NO: 395755 - DNA, 29 bp, Artificial Sequence
  Synthetic oligonucleotide
gcaccctagaccctaacaaccgctcgtca

SEQ ID NO: 395756 - DNA, 30 bp, Artificial Sequence
  Synthetic oligonucleotide
cttatggggttaaatatcatatgctcgtca

SEQ ID NO: 395757 - DNA, 30 bp, Artificial Sequence
  Synthetic oligonucleotide
ttttacataaggatccacttagagtcgtca

SEQ ID NO: 395758 - DNA, 30 bp, Artificial Sequence
  Synthetic oligonucleotide
tacatacccctaaatcggcaactgtcgtca

SEQ ID NO: 395759 - DNA, 30 bp, Artificial Sequence
  Synthetic oligonucleotide
tccccgagaacgcggaatgagggttcgtca

SEQ ID NO: 395760 - DNA, 31 bp, Artificial Sequence
  Synthetic oligonucleotide
ctgtgcgctttttgactagcggtcaaggtca

SEQ ID NO: 395761 - DNA, 30 bp, Artificial Sequence
  Synthetic oligonucleotide
atctgtgatatggctctaggtgggaggtca

SEQ ID NO: 395762 - DNA, 30 bp, Artificial Sequence
  Synthetic oligonucleotide
gaacaaattatcgagagataatggaggtca

SEQ ID NO: 395763 - DNA, 30 bp, Artificial Sequence
  Synthetic oligonucleotide
ttagcattttatcaccgcgacggtaggtca

SEQ ID NO: 395764 - DNA, 30 bp, Artificial Sequence
  Synthetic oligonucleotide
catagccaaatcttatttggagcacggtca

SEQ ID NO: 395765 - DNA, 30 bp, Artificial Sequence
  Synthetic oligonucleotide
gtagacggtatagcgacgagtcaccggtca

SEQ ID NO: 395766 - DNA, 30 bp, Artificial Sequence
  Synthetic oligonucleotide
gtgttttgaagtggattcaaggagcggtca

SEQ ID NO: 395767 - DNA, 31 bp, Artificial Sequence
  Synthetic oligonucleotide
gcctccagcacgttagcagcagattcggtca

SEQ ID NO: 395768 - DNA, 30 bp, Artificial Sequence
  Synthetic oligonucleotide
tatcgtatgaggtcttagattaaggggtca

SEQ ID NO: 395769 - DNA, 30 bp, Artificial Sequence
  Synthetic oligonucleotide
attataatttctgatgacctactggggtca

SEQ ID NO: 395770 - DNA, 30 bp, Artificial Sequence
  Synthetic oligonucleotide
aaccttacattcccgacctctgtggggtca

SEQ ID NO: 395771 - DNA, 30 bp, Artificial Sequence
  Synthetic oligonucleotide
ataaacggttctctaagtacagatgggtca

SEQ ID NO: 395772 - DNA, 30 bp, Artificial Sequence
  Synthetic oligonucleotide
tcctactctagtgagatagtgtatgggtca

SEQ ID NO: 395773 - DNA, 30 bp, Artificial Sequence
  Synthetic oligonucleotide
tcatgtagtggggcatgcttctcatggtca

SEQ ID NO: 395774 - DNA, 30 bp, Artificial Sequence
  Synthetic oligonucleotide
tgcagttgtcacgtaagcgttgtatggtca

SEQ ID NO: 395775 - DNA, 30 bp, Artificial Sequence
  Synthetic oligonucleotide
ggagtgtttatcgccctggcaacctggtca

SEQ ID NO: 395776 - DNA, 30 bp, Artificial Sequence
  Synthetic oligonucleotide
ggaaccactggtttccctttcgtctggtca

SEQ ID NO: 395777 - DNA, 30 bp, Artificial Sequence
  Synthetic oligonucleotide
gcagtgagcgccccgttacacttctggtca

SEQ ID NO: 395778 - DNA, 30 bp, Artificial Sequence
  Synthetic oligonucleotide
tagggggatgctccacggattccgtggtca

SEQ ID NO: 395779 - DNA, 30 bp, Artificial Sequence
  Synthetic oligonucleotide
atctccacttgggatcgtatatggtggtca

SEQ ID NO: 395780 - DNA, 30 bp, Artificial Sequence
  Synthetic oligonucleotide
tgcgattgattgttactaggtgcttggtca

SEQ ID NO: 395781 - DNA, 30 bp, Artificial Sequence
  Synthetic oligonucleotide
gccagaatttcgtgagtaacacaaatgtca

SEQ ID NO: 395782 - DNA, 30 bp, Artificial Sequence
  Synthetic oligonucleotide
cgacagaacatgacaagcctgtaaatgtca

SEQ ID NO: 395783 - DNA, 30 bp, Artificial Sequence
  Synthetic oligonucleotide
acggaggagcattatgacatggtaatgtca

SEQ ID NO: 395784 - DNA, 30 bp, Artificial Sequence
  Synthetic oligonucleotide
aatttccgggagtaggacaaccacatgtca

SEQ ID NO: 395785 - DNA, 30 bp, Artificial Sequence
  Synthetic oligonucleotide
attaaaaccggctgagatgcaatgatgtca

SEQ ID NO: 395786 - DNA, 30 bp, Artificial Sequence
  Synthetic oligonucleotide
tttgtcactgtagaatatcaacatatgtca

SEQ ID NO: 395787 - DNA, 30 bp, Artificial Sequence
  Synthetic oligonucleotide
gctgtctatcatgcttccgagtatatgtca

SEQ ID NO: 395788 - DNA, 30 bp, Artificial Sequence
  Synthetic oligonucleotide
gacacatcgcgctttataatacctatgtca

SEQ ID NO: 395789 - DNA, 30 bp, Artificial Sequence
  Synthetic oligonucleotide
gccaagcctagggtctgcatccctatgtca

SEQ ID NO: 395790 - DNA, 30 bp, Artificial Sequence
  Synthetic oligonucleotide
tgggataaaccggacctcaaagttatgtca

SEQ ID NO: 395791 - DNA, 30 bp, Artificial Sequence
  Synthetic oligonucleotide
tctgggttttgtatatggttcaaactgtca

SEQ ID NO: 395792 - DNA, 30 bp, Artificial Sequence
  Synthetic oligonucleotide
gattattgaagctaaatttattgactgtca

SEQ ID NO: 395793 - DNA, 30 bp, Artificial Sequence
  Synthetic oligonucleotide
tattcaaaccccggggaacaaatactgtca

SEQ ID NO: 395794 - DNA, 30 bp, Artificial Sequence
  Synthetic oligonucleotide
accagtcagtggaaaatttgggtactgtca

SEQ ID NO: 395795 - DNA, 30 bp, Artificial Sequence
  Synthetic oligonucleotide
ggtccgtacctatcatatacaaacctgtca

SEQ ID NO: 395796 - DNA, 30 bp, Artificial Sequence
  Synthetic oligonucleotide
ggtccctgtgtaatcccagcagagctgtca

SEQ ID NO: 395797 - DNA, 30 bp, Artificial Sequence
  Synthetic oligonucleotide
ttaatttaataattgtaaaattagctgtca

SEQ ID NO: 395798 - DNA, 30 bp, Artificial Sequence
  Synthetic oligonucleotide
tataaaggatacacatttttttggctgtca

SEQ ID NO: 395799 - DNA, 30 bp, Artificial Sequence
  Synthetic oligonucleotide
gttattggcagcgtgtattataaagtgtca

SEQ ID NO: 395800 - DNA, 30 bp, Artificial Sequence
  Synthetic oligonucleotide
gacgcaacttcggggagctctaaagtgtca

SEQ ID NO: 395801 - DNA, 30 bp, Artificial Sequence
  Synthetic oligonucleotide
ggtgcacagaagatgatcagttgagtgtca

SEQ ID NO: 395802 - DNA, 30 bp, Artificial Sequence
  Synthetic oligonucleotide
tagaaacttattcatggatttttagtgtca

SEQ ID NO: 395803 - DNA, 30 bp, Artificial Sequence
  Synthetic oligonucleotide
tcccgggttacagtgcaactttacgtgtca

SEQ ID NO: 395804 - DNA, 30 bp, Artificial Sequence
  Synthetic oligonucleotide
ctggtgccgtcgggttacattcccgtgtca

SEQ ID NO: 395805 - DNA, 30 bp, Artificial Sequence
  Synthetic oligonucleotide
cttgtgaccgtggatacagcacgcgtgtca

SEQ ID NO: 395806 - DNA, 30 bp, Artificial Sequence
  Synthetic oligonucleotide
tgccaaggtacgtttgtgccaggcgtgtca

SEQ ID NO: 395807 - DNA, 30 bp, Artificial Sequence
  Synthetic oligonucleotide
agtttcgcggcgccaatctgctgcgtgtca

SEQ ID NO: 395808 - DNA, 31 bp, Artificial Sequence
  Synthetic oligonucleotide
tttagggtagcgtcagttagacctcgtgtca

SEQ ID NO: 395809 - DNA, 30 bp, Artificial Sequence
  Synthetic oligonucleotide
attgtacaagccatagtacacacggtgtca

SEQ ID NO: 395810 - DNA, 30 bp, Artificial Sequence
  Synthetic oligonucleotide
tgacttatcgtcgggaggtttacggtgtca

SEQ ID NO: 395811 - DNA, 30 bp, Artificial Sequence
  Synthetic oligonucleotide
gctggccgttcaggagtcttaccggtgtca

SEQ ID NO: 395812 - DNA, 30 bp, Artificial Sequence
  Synthetic oligonucleotide
ctttaaataggctaggcagatttggtgtca

SEQ ID NO: 395813 - DNA, 30 bp, Artificial Sequence
  Synthetic oligonucleotide
gcatcctcgcgggaactttgcgaattgtca

SEQ ID NO: 395814 - DNA, 30 bp, Artificial Sequence
  Synthetic oligonucleotide
atagagcttgcgcgggtacagagattgtca

SEQ ID NO: 395815 - DNA, 30 bp, Artificial Sequence
  Synthetic oligonucleotide
ataaaggctaggctattaatgctattgtca

SEQ ID NO: 395816 - DNA, 30 bp, Artificial Sequence
  Synthetic oligonucleotide
aatattgatattgatttaggaaacttgtca

SEQ ID NO: 395817 - DNA, 30 bp, Artificial Sequence
  Synthetic oligonucleotide
aacccacaggtccctaatcgtgacttgtca

SEQ ID NO: 395818 - DNA, 30 bp, Artificial Sequence
  Synthetic oligonucleotide
caacataaaagaccctggggggccttgtca

SEQ ID NO: 395819 - DNA, 30 bp, Artificial Sequence
  Synthetic oligonucleotide
tctctggccagacagtggcatttcttgtca

SEQ ID NO: 395820 - DNA, 30 bp, Artificial Sequence
  Synthetic oligonucleotide
gacaacgcttttacaacctcgaaaaattca

SEQ ID NO: 395821 - DNA, 30 bp, Artificial Sequence
  Synthetic oligonucleotide
cagtataaatatggggcatttgacaattca

SEQ ID NO: 395822 - DNA, 30 bp, Artificial Sequence
  Synthetic oligonucleotide
tagagcgacgcaagggggcaagtgaattca

SEQ ID NO: 395823 - DNA, 30 bp, Artificial Sequence
  Synthetic oligonucleotide
tagcccgcttaacaatgcatcgaacattca

SEQ ID NO: 395824 - DNA, 30 bp, Artificial Sequence
  Synthetic oligonucleotide
gagtcttccatgcccaaagccatacattca

SEQ ID NO: 395825 - DNA, 30 bp, Artificial Sequence
  Synthetic oligonucleotide
cagaaatcagagcctctgctcggccattca

SEQ ID NO: 395826 - DNA, 30 bp, Artificial Sequence
  Synthetic oligonucleotide
ttatcaatatggaatacggacgggcattca

SEQ ID NO: 395827 - DNA, 30 bp, Artificial Sequence
  Synthetic oligonucleotide
aataaaaccgtacccagactatttcattca

SEQ ID NO: 395828 - DNA, 30 bp, Artificial Sequence
  Synthetic oligonucleotide
taattcgtcccccggcgacgccgcgattca

SEQ ID NO: 395829 - DNA, 30 bp, Artificial Sequence
  Synthetic oligonucleotide
taattgatactgcttgcctgatgggattca

SEQ ID NO: 395830 - DNA, 30 bp, Artificial Sequence
  Synthetic oligonucleotide
gactaattcgtgcatcttaacgatgattca

SEQ ID NO: 395831 - DNA, 30 bp, Artificial Sequence
  Synthetic oligonucleotide
aggcgcactccgactcacctggatgattca

SEQ ID NO: 395832 - DNA, 30 bp, Artificial Sequence
  Synthetic oligonucleotide
tctgtgttatatgacattgcccctgattca

SEQ ID NO: 395833 - DNA, 30 bp, Artificial Sequence
  Synthetic oligonucleotide
cattgtcttcgggacgccccaccatattca

SEQ ID NO: 395834 - DNA, 30 bp, Artificial Sequence
  Synthetic oligonucleotide
atggtatcgatttagccgtgctgatattca

SEQ ID NO: 395835 - DNA, 30 bp, Artificial Sequence
  Synthetic oligonucleotide
ggggtagctaattcacgtgggtgatattca

SEQ ID NO: 395836 - DNA, 30 bp, Artificial Sequence
  Synthetic oligonucleotide
ctgccatatagttacccagtggactattca

SEQ ID NO: 395837 - DNA, 30 bp, Artificial Sequence
  Synthetic oligonucleotide
tagcgcccagttctagccactacctattca

SEQ ID NO: 395838 - DNA, 30 bp, Artificial Sequence
  Synthetic oligonucleotide
tttcagtgcttacctcccctggcctattca

SEQ ID NO: 395839 - DNA, 30 bp, Artificial Sequence
  Synthetic oligonucleotide
ggaactggtacgcgctctcagtcctattca

SEQ ID NO: 395840 - DNA, 30 bp, Artificial Sequence
  Synthetic oligonucleotide
ggagtccgggctccaaatggaccgtattca

SEQ ID NO: 395841 - DNA, 30 bp, Artificial Sequence
  Synthetic oligonucleotide
cgcgaataacgttctcgatagctttattca

SEQ ID NO: 395842 - DNA, 30 bp, Artificial Sequence
  Synthetic oligonucleotide
tggagaagggcagttgcttttctttattca

SEQ ID NO: 395843 - DNA, 30 bp, Artificial Sequence
  Synthetic oligonucleotide
ttcatgaacgggtagcaaataaaaacttca

SEQ ID NO: 395844 - DNA, 30 bp, Artificial Sequence
  Synthetic oligonucleotide
agacattttcacgcccattgacaaacttca

SEQ ID NO: 395845 - DNA, 30 bp, Artificial Sequence
  Synthetic oligonucleotide
tgctcatgtttattagcctaaccaacttca

SEQ ID NO: 395846 - DNA, 30 bp, Artificial Sequence
  Synthetic oligonucleotide
attaaaatcgtcggttggcactacacttca

SEQ ID NO: 395847 - DNA, 30 bp, Artificial Sequence
  Synthetic oligonucleotide
gtcgcactacctgaccgaccttgcacttca

SEQ ID NO: 395848 - DNA, 30 bp, Artificial Sequence
  Synthetic oligonucleotide
gttggtcttctcctaacaatttctacttca

SEQ ID NO: 395849 - DNA, 30 bp, Artificial Sequence
  Synthetic oligonucleotide
gagatttgttttaagcgcaaaacaccttca

SEQ ID NO: 395850 - DNA, 30 bp, Artificial Sequence
  Synthetic oligonucleotide
acaagcctcgaaccccgaggagcaccttca

SEQ ID NO: 395851 - DNA, 30 bp, Artificial Sequence
  Synthetic oligonucleotide
acgtagttaggtctcgcgagattaccttca

SEQ ID NO: 395852 - DNA, 30 bp, Artificial Sequence
  Synthetic oligonucleotide
caactggggttggtttctttatccccttca

SEQ ID NO: 395853 - DNA, 30 bp, Artificial Sequence
  Synthetic oligonucleotide
aatgtagtctacatgtctcatggcccttca

SEQ ID NO: 395854 - DNA, 30 bp, Artificial Sequence
  Synthetic oligonucleotide
aagggtccgggtccgttgagcggtccttca

SEQ ID NO: 395855 - DNA, 30 bp, Artificial Sequence
  Synthetic oligonucleotide
attaccatatagttttccgtgtaagcttca

SEQ ID NO: 395856 - DNA, 30 bp, Artificial Sequence
  Synthetic oligonucleotide
tttactgccggcgtgaacggtgcagcttca

SEQ ID NO: 395857 - DNA, 30 bp, Artificial Sequence
  Synthetic oligonucleotide
tcttcgggcagcggggctactatcgcttca

SEQ ID NO: 395858 - DNA, 30 bp, Artificial Sequence
  Synthetic oligonucleotide
gttgcaaatttactgtggggtatcgcttca

SEQ ID NO: 395859 - DNA, 30 bp, Artificial Sequence
  Synthetic oligonucleotide
tgatgacccgtgcgggcttcactcgcttca

SEQ ID NO: 395860 - DNA, 30 bp, Artificial Sequence
  Synthetic oligonucleotide
tagggatgacagcaccaaggtctcgcttca

SEQ ID NO: 395861 - DNA, 30 bp, Artificial Sequence
  Synthetic oligonucleotide
cggtggttatgttcggaaaaccgggcttca

SEQ ID NO: 395862 - DNA, 30 bp, Artificial Sequence
  Synthetic oligonucleotide
tacagagtatatcctagcacctctgcttca

SEQ ID NO: 395863 - DNA, 30 bp, Artificial Sequence
  Synthetic oligonucleotide
cgcctcggttggtcgcagagagactcttca

SEQ ID NO: 395864 - DNA, 30 bp, Artificial Sequence
  Synthetic oligonucleotide
ttcggcgattaaaccggtcattagtcttca

SEQ ID NO: 395865 - DNA, 30 bp, Artificial Sequence
  Synthetic oligonucleotide
ctataggcggttaggcaatagcattcttca

SEQ ID NO: 395866 - DNA, 30 bp, Artificial Sequence
  Synthetic oligonucleotide
gctttgtcgcacgtcttaagcgattcttca

SEQ ID NO: 395867 - DNA, 30 bp, Artificial Sequence
  Synthetic oligonucleotide
ttattgtccagagccgaacaagtttcttca

SEQ ID NO: 395868 - DNA, 30 bp, Artificial Sequence
  Synthetic oligonucleotide
agctgcaaagtggcaggtgggaaaagttca

SEQ ID NO: 395869 - DNA, 30 bp, Artificial Sequence
  Synthetic oligonucleotide
aatctcgcttttccattgatgaaaagttca

SEQ ID NO: 395870 - DNA, 29 bp, Artificial Sequence
  Synthetic oligonucleotide
cgtcactctccagccgacggcaaagttca

SEQ ID NO: 395871 - DNA, 30 bp, Artificial Sequence
  Synthetic oligonucleotide
ttatgattgcaattcccaatggaaagttca

SEQ ID NO: 395872 - DNA, 30 bp, Artificial Sequence
  Synthetic oligonucleotide
gtgtcgtctggcaggctctttagaagttca

SEQ ID NO: 395873 - DNA, 30 bp, Artificial Sequence
  Synthetic oligonucleotide
gcccaaatcaacgcagacatagccagttca

SEQ ID NO: 395874 - DNA, 30 bp, Artificial Sequence
  Synthetic oligonucleotide
agggttactgattataggtagcgcagttca

SEQ ID NO: 395875 - DNA, 30 bp, Artificial Sequence
  Synthetic oligonucleotide
atttcactacagtgctagccaaagagttca

SEQ ID NO: 395876 - DNA, 30 bp, Artificial Sequence
  Synthetic oligonucleotide
gaagaagaaagtactcactcagggagttca

SEQ ID NO: 395877 - DNA, 30 bp, Artificial Sequence
  Synthetic oligonucleotide
ttcatacagtaatagttaaggtgacgttca

SEQ ID NO: 395878 - DNA, 30 bp, Artificial Sequence
  Synthetic oligonucleotide
ctacttgttaggaggcggaaataccgttca

SEQ ID NO: 395879 - DNA, 30 bp, Artificial Sequence
  Synthetic oligonucleotide
atgcctaagaattcgagaccagcgcgttca

SEQ ID NO: 395880 - DNA, 30 bp, Artificial Sequence
  Synthetic oligonucleotide
agatccccggttactacaggcgctcgttca

SEQ ID NO: 395881 - DNA, 30 bp, Artificial Sequence
  Synthetic oligonucleotide
tacgtactatccgctatgcggtctcgttca

SEQ ID NO: 395882 - DNA, 30 bp, Artificial Sequence
  Synthetic oligonucleotide
agggcccgcagctggttttgacgtcgttca

SEQ ID NO: 395883 - DNA, 30 bp, Artificial Sequence
  Synthetic oligonucleotide
atataacaagtaatacgcgatgaaggttca

SEQ ID NO: 395884 - DNA, 30 bp, Artificial Sequence
  Synthetic oligonucleotide
attaagatcgtcccgatgtcttaaggttca

SEQ ID NO: 395885 - DNA, 30 bp, Artificial Sequence
  Synthetic oligonucleotide
cgtacgtgtgttaattttgggttaggttca

SEQ ID NO: 395886 - DNA, 30 bp, Artificial Sequence
  Synthetic oligonucleotide
ggacgcgacatctggatgtgcaacggttca

SEQ ID NO: 395887 - DNA, 30 bp, Artificial Sequence
  Synthetic oligonucleotide
actgggagaagactcgccctgtccggttca

SEQ ID NO: 395888 - DNA, 30 bp, Artificial Sequence
  Synthetic oligonucleotide
gcacaacggtatctgttcagcaagggttca

SEQ ID NO: 395889 - DNA, 30 bp, Artificial Sequence
  Synthetic oligonucleotide
cgggaaccaattaaggctcgcaagggttca

SEQ ID NO: 395890 - DNA, 30 bp, Artificial Sequence
  Synthetic oligonucleotide
agtcggcttcgcgctacatgattgggttca

SEQ ID NO: 395891 - DNA, 30 bp, Artificial Sequence
  Synthetic oligonucleotide
ggtgaaaagttttttgtacaatttggttca

SEQ ID NO: 395892 - DNA, 30 bp, Artificial Sequence
  Synthetic oligonucleotide
aaccacaggaacgaatttgttaaatgttca

SEQ ID NO: 395893 - DNA, 30 bp, Artificial Sequence
  Synthetic oligonucleotide
gtattcgcttttctgttctcaatgtgttca

SEQ ID NO: 395894 - DNA, 30 bp, Artificial Sequence
  Synthetic oligonucleotide
ttctgacgggggttgggcgccttgtgttca

SEQ ID NO: 395895 - DNA, 30 bp, Artificial Sequence
  Synthetic oligonucleotide
gtgtgtagggttttttcagtaaaaatttca

SEQ ID NO: 395896 - DNA, 30 bp, Artificial Sequence
  Synthetic oligonucleotide
ggattaaaggccacttcaacccaaatttca

SEQ ID NO: 395897 - DNA, 30 bp, Artificial Sequence
  Synthetic oligonucleotide
tcatgttcttgcggtacggatataatttca

SEQ ID NO: 395898 - DNA, 30 bp, Artificial Sequence
  Synthetic oligonucleotide
gaagttaatgttaaggaaggcctaatttca

SEQ ID NO: 395899 - DNA, 30 bp, Artificial Sequence
  Synthetic oligonucleotide
tcattcattggcggtcaatcagtaatttca

SEQ ID NO: 395900 - DNA, 30 bp, Artificial Sequence
  Synthetic oligonucleotide
gttaggaggaaccaatgattgcagatttca

SEQ ID NO: 395901 - DNA, 30 bp, Artificial Sequence
  Synthetic oligonucleotide
ttataccaatcaccgatacgcccgatttca

SEQ ID NO: 395902 - DNA, 30 bp, Artificial Sequence
  Synthetic oligonucleotide
atagtattaatgtaattcccgggactttca

SEQ ID NO: 395903 - DNA, 30 bp, Artificial Sequence
  Synthetic oligonucleotide
agtttttgtgctaatatcaccaacctttca

SEQ ID NO: 395904 - DNA, 30 bp, Artificial Sequence
  Synthetic oligonucleotide
ttgtggccccgcggtaatcaggccctttca

SEQ ID NO: 395905 - DNA, 30 bp, Artificial Sequence
  Synthetic oligonucleotide
ttccacagtcgcgcaggcgtttccctttca

SEQ ID NO: 395906 - DNA, 30 bp, Artificial Sequence
  Synthetic oligonucleotide
ggcctcacacttcagtattacaggctttca

SEQ ID NO: 395907 - DNA, 30 bp, Artificial Sequence
  Synthetic oligonucleotide
gcttgactttggacactgtccctgctttca

SEQ ID NO: 395908 - DNA, 30 bp, Artificial Sequence
  Synthetic oligonucleotide
ttaggatgactgtaactgaatacagtttca

SEQ ID NO: 395909 - DNA, 30 bp, Artificial Sequence
  Synthetic oligonucleotide
acagtgaataatgatatcgtcagagtttca

SEQ ID NO: 395910 - DNA, 30 bp, Artificial Sequence
  Synthetic oligonucleotide
aatgcaactaggcgcgggtatggagtttca

SEQ ID NO: 395911 - DNA, 30 bp, Artificial Sequence
  Synthetic oligonucleotide
gcgattaagctggtcgcatgttacgtttca

SEQ ID NO: 395912 - DNA, 30 bp, Artificial Sequence
  Synthetic oligonucleotide
taatagttgattattcggcgtcaggtttca

SEQ ID NO: 395913 - DNA, 30 bp, Artificial Sequence
  Synthetic oligonucleotide
gagagatatggccaagtatacggggtttca

SEQ ID NO: 395914 - DNA, 30 bp, Artificial Sequence
  Synthetic oligonucleotide
acaatatgcagatccttcctgaaattttca

SEQ ID NO: 395915 - DNA, 30 bp, Artificial Sequence
  Synthetic oligonucleotide
tcctggtagcagcgaatgatggcattttca

SEQ ID NO: 395916 - DNA, 30 bp, Artificial Sequence
  Synthetic oligonucleotide
cagaatctaataaaagccgttttattttca

SEQ ID NO: 395917 - DNA, 30 bp, Artificial Sequence
  Synthetic oligonucleotide
gatggagctgttcacctacaatggttttca

SEQ ID NO: 395918 - DNA, 30 bp, Artificial Sequence
  Synthetic oligonucleotide
aaacaatatccgctgaaactgcatttttca

SEQ ID NO: 395919 - DNA, 30 bp, Artificial Sequence
  Synthetic oligonucleotide
agaataccgggtgctgagcaacaaaaaaga

SEQ ID NO: 395920 - DNA, 30 bp, Artificial Sequence
  Synthetic oligonucleotide
cgcctttgcttgccagtgtcatgaaaaaga

SEQ ID NO: 395921 - DNA, 30 bp, Artificial Sequence
  Synthetic oligonucleotide
gagtggagggcttatacgtatcccaaaaga

SEQ ID NO: 395922 - DNA, 30 bp, Artificial Sequence
  Synthetic oligonucleotide
gtgagttgcagttgcattcagtataaaaga

SEQ ID NO: 395923 - DNA, 30 bp, Artificial Sequence
  Synthetic oligonucleotide
actcacttctctttaatggcaaaccaaaga

SEQ ID NO: 395924 - DNA, 30 bp, Artificial Sequence
  Synthetic oligonucleotide
cgcggcctagcgttatctcaagcccaaaga

SEQ ID NO: 395925 - DNA, 30 bp, Artificial Sequence
  Synthetic oligonucleotide
catatttaacttaaggctaccagccaaaga

SEQ ID NO: 395926 - DNA, 30 bp, Artificial Sequence
  Synthetic oligonucleotide
cagtacctttgcaggtgaccgcatcaaaga

SEQ ID NO: 395927 - DNA, 30 bp, Artificial Sequence
  Synthetic oligonucleotide
aagtgtgacagtggtgaactgcctcaaaga

SEQ ID NO: 395928 - DNA, 30 bp, Artificial Sequence
  Synthetic oligonucleotide
aaacccttcatggaaaattcgcgtcaaaga

SEQ ID NO: 395929 - DNA, 30 bp, Artificial Sequence
  Synthetic oligonucleotide
gtgccggaaactctcacgcttacagaaaga

SEQ ID NO: 395930 - DNA, 30 bp, Artificial Sequence
  Synthetic oligonucleotide
gttatacagcgtaaacagttcccagaaaga

SEQ ID NO: 395931 - DNA, 30 bp, Artificial Sequence
  Synthetic oligonucleotide
ggtgaactcaacgcacgaaacttcgaaaga

SEQ ID NO: 395932 - DNA, 30 bp, Artificial Sequence
  Synthetic oligonucleotide
atctcggggcccaggctaattttcgaaaga

SEQ ID NO: 395933 - DNA, 30 bp, Artificial Sequence
  Synthetic oligonucleotide
gtaactggccagtattccgtatctgaaaga

SEQ ID NO: 395934 - DNA, 30 bp, Artificial Sequence
  Synthetic oligonucleotide
tacagtatccggacgactggaattgaaaga

SEQ ID NO: 395935 - DNA, 30 bp, Artificial Sequence
  Synthetic oligonucleotide
gattggtgaattaaatacgtcattgaaaga

SEQ ID NO: 395936 - DNA, 30 bp, Artificial Sequence
  Synthetic oligonucleotide
cggacgtctcacttactgaggtttgaaaga

SEQ ID NO: 395937 - DNA, 30 bp, Artificial Sequence
  Synthetic oligonucleotide
gatcaggaaaatgtgcacaaaatataaaga

SEQ ID NO: 395938 - DNA, 30 bp, Artificial Sequence
  Synthetic oligonucleotide
agcagctgcatccggcataagttataaaga

SEQ ID NO: 395939 - DNA, 30 bp, Artificial Sequence
  Synthetic oligonucleotide
gagcccgtacgttggtctatcccctaaaga

SEQ ID NO: 395940 - DNA, 30 bp, Artificial Sequence
  Synthetic oligonucleotide
aacctctcacaattgtagcccttctaaaga

SEQ ID NO: 395941 - DNA, 30 bp, Artificial Sequence
  Synthetic oligonucleotide
ggttatagcctgatagcctcaaagtaaaga

SEQ ID NO: 395942 - DNA, 30 bp, Artificial Sequence
  Synthetic oligonucleotide
taattaacttcgtgcgtatctttgtaaaga

SEQ ID NO: 395943 - DNA, 30 bp, Artificial Sequence
  Synthetic oligonucleotide
tttacaatgcaagaagttcggttttaaaga

SEQ ID NO: 395944 - DNA, 30 bp, Artificial Sequence
  Synthetic oligonucleotide
tgtgctaaggcacgtgtttacataacaaga

SEQ ID NO: 395945 - DNA, 30 bp, Artificial Sequence
  Synthetic oligonucleotide
gtttcaaatgtggccagcctggacacaaga

SEQ ID NO: 395946 - DNA, 30 bp, Artificial Sequence
  Synthetic oligonucleotide
tatgacctggttaagtacggtgtcacaaga

SEQ ID NO: 395947 - DNA, 30 bp, Artificial Sequence
  Synthetic oligonucleotide
tctgttaagaagaagctactgttcacaaga

SEQ ID NO: 395948 - DNA, 30 bp, Artificial Sequence
  Synthetic oligonucleotide
agtccctgtctacgataccttcagacaaga

SEQ ID NO: 395949 - DNA, 30 bp, Artificial Sequence
  Synthetic oligonucleotide
gccattgcctatgtcccgacccggacaaga

SEQ ID NO: 395950 - DNA, 30 bp, Artificial Sequence
  Synthetic oligonucleotide
gttaaatttaagtcgccccgcattacaaga

SEQ ID NO: 395951 - DNA, 30 bp, Artificial Sequence
  Synthetic oligonucleotide
ggggttaagtggtagctatttacgccaaga

SEQ ID NO: 395952 - DNA, 30 bp, Artificial Sequence
  Synthetic oligonucleotide
gccatcgcgaaagaatgcggtaacgcaaga

SEQ ID NO: 395953 - DNA, 30 bp, Artificial Sequence
  Synthetic oligonucleotide
cttcttgttccgcgaggtaggaaatcaaga

SEQ ID NO: 395954 - DNA, 30 bp, Artificial Sequence
  Synthetic oligonucleotide
tgtcatgctcgccaaagctgaggatcaaga

SEQ ID NO: 395955 - DNA, 30 bp, Artificial Sequence
  Synthetic oligonucleotide
atttattcaactttgctccggccgtcaaga

SEQ ID NO: 395956 - DNA, 30 bp, Artificial Sequence
  Synthetic oligonucleotide
caacaattgtggattggttgagggtcaaga

SEQ ID NO: 395957 - DNA, 30 bp, Artificial Sequence
  Synthetic oligonucleotide
aggtcagagggggtagggttctggtcaaga

SEQ ID NO: 395958 - DNA, 30 bp, Artificial Sequence
  Synthetic oligonucleotide
gtctgagtacttatgaaaagctattcaaga

SEQ ID NO: 395959 - DNA, 30 bp, Artificial Sequence
  Synthetic oligonucleotide
ccgaagcactcgttgaaacatgtttcaaga

SEQ ID NO: 395960 - DNA, 30 bp, Artificial Sequence
  Synthetic oligonucleotide
atttataaatgggcgaaagaacaaagaaga

SEQ ID NO: 395961 - DNA, 28 bp, Artificial Sequence
  Synthetic oligonucleotide
tggcggacaatttaggctacgcagaaga

SEQ ID NO: 395962 - DNA, 30 bp, Artificial Sequence
  Synthetic oligonucleotide
attcctattttggtagggtcatagagaaga

SEQ ID NO: 395963 - DNA, 30 bp, Artificial Sequence
  Synthetic oligonucleotide
gcgcgcacgacccgtgctctatatagaaga

SEQ ID NO: 395964 - DNA, 30 bp, Artificial Sequence
  Synthetic oligonucleotide
ccagtgtgtatggggtcattttctagaaga

SEQ ID NO: 395965 - DNA, 30 bp, Artificial Sequence
  Synthetic oligonucleotide
ctcgtagagactttagcctactaccgaaga

SEQ ID NO: 395966 - DNA, 30 bp, Artificial Sequence
  Synthetic oligonucleotide
ttgcagctctggggcctttgcgtccgaaga

SEQ ID NO: 395967 - DNA, 30 bp, Artificial Sequence
  Synthetic oligonucleotide
gcacttaggtccaactggatctcgcgaaga

SEQ ID NO: 395968 - DNA, 30 bp, Artificial Sequence
  Synthetic oligonucleotide
attgatgtgttggtccggatgcggcgaaga

SEQ ID NO: 395969 - DNA, 30 bp, Artificial Sequence
  Synthetic oligonucleotide
aatagcagccttccgggggagttgcgaaga

SEQ ID NO: 395970 - DNA, 30 bp, Artificial Sequence
  Synthetic oligonucleotide
cgctagtagcgcttttgtgcgcaaggaaga

SEQ ID NO: 395971 - DNA, 30 bp, Artificial Sequence
  Synthetic oligonucleotide
cacccccagctctggctatgaacaggaaga

SEQ ID NO: 395972 - DNA, 30 bp, Artificial Sequence
  Synthetic oligonucleotide
tgtttgccgatggaggtttgcataggaaga

SEQ ID NO: 395973 - DNA, 30 bp, Artificial Sequence
  Synthetic oligonucleotide
agtgtgtaagttgcctttggctccggaaga

SEQ ID NO: 395974 - DNA, 30 bp, Artificial Sequence
  Synthetic oligonucleotide
gcacgttcccgtcgcaacgttagcggaaga

SEQ ID NO: 395975 - DNA, 30 bp, Artificial Sequence
  Synthetic oligonucleotide
acggaaagcttatgagcctttggcggaaga

SEQ ID NO: 395976 - DNA, 30 bp, Artificial Sequence
  Synthetic oligonucleotide
ggagatttctcgagcttcggaactggaaga

SEQ ID NO: 395977 - DNA, 30 bp, Artificial Sequence
  Synthetic oligonucleotide
ttgttgtgtggcttaatgccctctggaaga

SEQ ID NO: 395978 - DNA, 30 bp, Artificial Sequence
  Synthetic oligonucleotide
ccatgtagaccgttgcttgcttcatgaaga

SEQ ID NO: 395979 - DNA, 30 bp, Artificial Sequence
  Synthetic oligonucleotide
tgagtatatgcatagagacggcgatgaaga

SEQ ID NO: 395980 - DNA, 30 bp, Artificial Sequence
  Synthetic oligonucleotide
tcccgttttatagggtcgcagggatgaaga

SEQ ID NO: 395981 - DNA, 30 bp, Artificial Sequence
  Synthetic oligonucleotide
ccacgggccggcggcgtgggtctatgaaga

SEQ ID NO: 395982 - DNA, 30 bp, Artificial Sequence
  Synthetic oligonucleotide
ggcgatggaaatgggcggagcccttgaaga

SEQ ID NO: 395983 - DNA, 30 bp, Artificial Sequence
  Synthetic oligonucleotide
acggttcatagctccgtaattggttgaaga

SEQ ID NO: 395984 - DNA, 30 bp, Artificial Sequence
  Synthetic oligonucleotide
catctggggctgaggtgtcttagaataaga

SEQ ID NO: 395985 - DNA, 30 bp, Artificial Sequence
  Synthetic oligonucleotide
aatacagtttaagtccgatttttaataaga

SEQ ID NO: 395986 - DNA, 30 bp, Artificial Sequence
  Synthetic oligonucleotide
atatctctacgtagttatttttgcataaga

SEQ ID NO: 395987 - DNA, 30 bp, Artificial Sequence
  Synthetic oligonucleotide
catctctacggtgggaccagagtgataaga

SEQ ID NO: 395988 - DNA, 30 bp, Artificial Sequence
  Synthetic oligonucleotide
attcccgacatgtttcttaaaggtataaga

SEQ ID NO: 395989 - DNA, 30 bp, Artificial Sequence
  Synthetic oligonucleotide
gatacatcatacgtcctaccgcttataaga

SEQ ID NO: 395990 - DNA, 30 bp, Artificial Sequence
  Synthetic oligonucleotide
tcagtcgtctaaagattaaggtttataaga

SEQ ID NO: 395991 - DNA, 30 bp, Artificial Sequence
  Synthetic oligonucleotide
ataatagggccgcgggcacaaaaactaaga

SEQ ID NO: 395992 - DNA, 30 bp, Artificial Sequence
  Synthetic oligonucleotide
agagtttatctaagggataagcgactaaga

SEQ ID NO: 395993 - DNA, 30 bp, Artificial Sequence
  Synthetic oligonucleotide
tgggcaggctgttaggttcctcgactaaga

SEQ ID NO: 395994 - DNA, 30 bp, Artificial Sequence
  Synthetic oligonucleotide
tttgcgttgtacccaataagggtactaaga

SEQ ID NO: 395995 - DNA, 30 bp, Artificial Sequence
  Synthetic oligonucleotide
gcaacttgcgtcgattgtagttccctaaga

SEQ ID NO: 395996 - DNA, 30 bp, Artificial Sequence
  Synthetic oligonucleotide
tgggcgcacagaatcttataattgctaaga

SEQ ID NO: 395997 - DNA, 30 bp, Artificial Sequence
  Synthetic oligonucleotide
aaacctggtagacttgcgttttatctaaga

SEQ ID NO: 395998 - DNA, 31 bp, Artificial Sequence
  Synthetic oligonucleotide
acctgtgtaaagccgggcaatcactctaaga

SEQ ID NO: 395999 - DNA, 30 bp, Artificial Sequence
  Synthetic oligonucleotide
gatagacacaggtggtgcatttttctaaga

SEQ ID NO: 396000 - DNA, 30 bp, Artificial Sequence
  Synthetic oligonucleotide
gccttacagttaggactaagaacagtaaga

SEQ ID NO: 396001 - DNA, 30 bp, Artificial Sequence
  Synthetic oligonucleotide
gcatggctggccaggaccggctaggtaaga

SEQ ID NO: 396002 - DNA, 30 bp, Artificial Sequence
  Synthetic oligonucleotide
gccatttaagtatgagacagtctggtaaga

SEQ ID NO: 396003 - DNA, 30 bp, Artificial Sequence
  Synthetic oligonucleotide
ctggccagtatacattgggcaaatgtaaga

SEQ ID NO: 396004 - DNA, 30 bp, Artificial Sequence
  Synthetic oligonucleotide
ccagccagacaacagagaggggatgtaaga

SEQ ID NO: 396005 - DNA, 30 bp, Artificial Sequence
  Synthetic oligonucleotide
tctttatacaggatcaatttgtttgtaaga

SEQ ID NO: 396006 - DNA, 30 bp, Artificial Sequence
  Synthetic oligonucleotide
aagcctcgtatgattaattggtgattaaga

SEQ ID NO: 396007 - DNA, 30 bp, Artificial Sequence
  Synthetic oligonucleotide
gcagccgatgcgtctttcttgtacttaaga

SEQ ID NO: 396008 - DNA, 30 bp, Artificial Sequence
  Synthetic oligonucleotide
ctttcgctcaaatccctcgtgatcttaaga

SEQ ID NO: 396009 - DNA, 30 bp, Artificial Sequence
  Synthetic oligonucleotide
tacatccgatcctattttttgtggttaaga

SEQ ID NO: 396010 - DNA, 30 bp, Artificial Sequence
  Synthetic oligonucleotide
ttagagttagggttcaggtctatgttaaga

SEQ ID NO: 396011 - DNA, 30 bp, Artificial Sequence
  Synthetic oligonucleotide
tatggtcgtacgccttctagagatttaaga

SEQ ID NO: 396012 - DNA, 30 bp, Artificial Sequence
  Synthetic oligonucleotide
ggtatgtgatgtggaatggagtctttaaga

SEQ ID NO: 396013 - DNA, 30 bp, Artificial Sequence
  Synthetic oligonucleotide
gttggttactggtactaaaaaggtttaaga

SEQ ID NO: 396014 - DNA, 30 bp, Artificial Sequence
  Synthetic oligonucleotide
tctacttcttattaagggggctttttaaga

SEQ ID NO: 396015 - DNA, 30 bp, Artificial Sequence
  Synthetic oligonucleotide
actgtccggttgaaggaaaagcggaacaga

SEQ ID NO: 396016 - DNA, 30 bp, Artificial Sequence
  Synthetic oligonucleotide
tcttcaatgcttgaagtgttttataacaga

SEQ ID NO: 396017 - DNA, 30 bp, Artificial Sequence
  Synthetic oligonucleotide
cgtccgctactgactatctgttttaacaga

SEQ ID NO: 396018 - DNA, 30 bp, Artificial Sequence
  Synthetic oligonucleotide
gattacgcacatacgtacatttaacacaga

SEQ ID NO: 396019 - DNA, 30 bp, Artificial Sequence
  Synthetic oligonucleotide
aacaatcaatgagctctctacctacacaga

SEQ ID NO: 396020 - DNA, 30 bp, Artificial Sequence
  Synthetic oligonucleotide
tagttttgacacctgtgtccactccacaga

SEQ ID NO: 396021 - DNA, 30 bp, Artificial Sequence
  Synthetic oligonucleotide
ttggtatgacttgccaagcggccgcacaga

SEQ ID NO: 396022 - DNA, 30 bp, Artificial Sequence
  Synthetic oligonucleotide
tatgggcatgataatattttagggcacaga

SEQ ID NO: 396023 - DNA, 30 bp, Artificial Sequence
  Synthetic oligonucleotide
taacgctacccgtacactgtcaccgacaga

SEQ ID NO: 396024 - DNA, 30 bp, Artificial Sequence
  Synthetic oligonucleotide
tattagaatgaggttttctcgcaggacaga

SEQ ID NO: 396025 - DNA, 30 bp, Artificial Sequence
  Synthetic oligonucleotide
cgttctatttcacaagattctttggacaga

SEQ ID NO: 396026 - DNA, 30 bp, Artificial Sequence
  Synthetic oligonucleotide
agttgtagtatgcgccgttgcaatgacaga

SEQ ID NO: 396027 - DNA, 30 bp, Artificial Sequence
  Synthetic oligonucleotide
ggcataggtacggcatgcaaaaagtacaga

SEQ ID NO: 396028 - DNA, 30 bp, Artificial Sequence
  Synthetic oligonucleotide
aaccgttaatcttatgtttaggtgtacaga

SEQ ID NO: 396029 - DNA, 30 bp, Artificial Sequence
  Synthetic oligonucleotide
gatactgggtctttactggggaattacaga

SEQ ID NO: 396030 - DNA, 30 bp, Artificial Sequence
  Synthetic oligonucleotide
aggaatttgcaaaatgcggtgcgttacaga

SEQ ID NO: 396031 - DNA, 30 bp, Artificial Sequence
  Synthetic oligonucleotide
gagtcagagtttgaaggttttacaaccaga

SEQ ID NO: 396032 - DNA, 30 bp, Artificial Sequence
  Synthetic oligonucleotide
agaaggcgctgctgtttacacaacaccaga

SEQ ID NO: 396033 - DNA, 30 bp, Artificial Sequence
  Synthetic oligonucleotide
ttctgatggaacgggtggatgtagaccaga

SEQ ID NO: 396034 - DNA, 30 bp, Artificial Sequence
  Synthetic oligonucleotide
tcatttctccaagtaagggggcttaccaga

SEQ ID NO: 396035 - DNA, 30 bp, Artificial Sequence
  Synthetic oligonucleotide
gggtttttgtggcgagcgggatatcccaga

SEQ ID NO: 396036 - DNA, 30 bp, Artificial Sequence
  Synthetic oligonucleotide
acaatttaccctggcctgcgacttcccaga

SEQ ID NO: 396037 - DNA, 30 bp, Artificial Sequence
  Synthetic oligonucleotide
tcatggtacacaacgactgcgtttcccaga

SEQ ID NO: 396038 - DNA, 30 bp, Artificial Sequence
  Synthetic oligonucleotide
tgcattagtattctcgattacctcgccaga

SEQ ID NO: 396039 - DNA, 30 bp, Artificial Sequence
  Synthetic oligonucleotide
ccaactccatatcactcctttttggccaga

SEQ ID NO: 396040 - DNA, 30 bp, Artificial Sequence
  Synthetic oligonucleotide
gtttggacccgtcacacttcccatgccaga

SEQ ID NO: 396041 - DNA, 30 bp, Artificial Sequence
  Synthetic oligonucleotide
acgaatagggcttttcgtgttttctccaga

SEQ ID NO: 396042 - DNA, 30 bp, Artificial Sequence
  Synthetic oligonucleotide
cggtgttccacgtttgtctaagggtccaga

SEQ ID NO: 396043 - DNA, 30 bp, Artificial Sequence
  Synthetic oligonucleotide
ggggtttcgttgggtgataattggtccaga

SEQ ID NO: 396044 - DNA, 30 bp, Artificial Sequence
  Synthetic oligonucleotide
agcaagatgggctgcacaattgccagcaga

SEQ ID NO: 396045 - DNA, 30 bp, Artificial Sequence
  Synthetic oligonucleotide
gagctagtgtattaatacaaccgcagcaga

SEQ ID NO: 396046 - DNA, 30 bp, Artificial Sequence
  Synthetic oligonucleotide
cgggattggtgcggcgccagcgtcagcaga

SEQ ID NO: 396047 - DNA, 30 bp, Artificial Sequence
  Synthetic oligonucleotide
ttttctagagggcaggttctaaagagcaga

SEQ ID NO: 396048 - DNA, 30 bp, Artificial Sequence
  Synthetic oligonucleotide
tattcaaattgctaatacgaccatagcaga

SEQ ID NO: 396049 - DNA, 30 bp, Artificial Sequence
  Synthetic oligonucleotide
gagttaaacatgtgcagtgtttaacgcaga

SEQ ID NO: 396050 - DNA, 30 bp, Artificial Sequence
  Synthetic oligonucleotide
aatactaggcagatatgctcagcccgcaga

SEQ ID NO: 396051 - DNA, 30 bp, Artificial Sequence
  Synthetic oligonucleotide
atactaagcggtcagacttggtgccgcaga

SEQ ID NO: 396052 - DNA, 30 bp, Artificial Sequence
  Synthetic oligonucleotide
acctctcaattacacaatacatggcgcaga

SEQ ID NO: 396053 - DNA, 30 bp, Artificial Sequence
  Synthetic oligonucleotide
ggaaggatcaactagcaagtgatgcgcaga

SEQ ID NO: 396054 - DNA, 30 bp, Artificial Sequence
  Synthetic oligonucleotide
aaagtgaaaattcataacctaagtcgcaga

SEQ ID NO: 396055 - DNA, 30 bp, Artificial Sequence
  Synthetic oligonucleotide
ccgcgacgccatgaaggacatccaggcaga

SEQ ID NO: 396056 - DNA, 30 bp, Artificial Sequence
  Synthetic oligonucleotide
catttacacttagtacttacggcaggcaga

SEQ ID NO: 396057 - DNA, 30 bp, Artificial Sequence
  Synthetic oligonucleotide
cggtcccccgtcgtcctagatcgaggcaga

SEQ ID NO: 396058 - DNA, 30 bp, Artificial Sequence
  Synthetic oligonucleotide
aaaaaagatcatggtattcaatgaggcaga

SEQ ID NO: 396059 - DNA, 30 bp, Artificial Sequence
  Synthetic oligonucleotide
tgaatgcgttatttgcccggtctaggcaga

SEQ ID NO: 396060 - DNA, 30 bp, Artificial Sequence
  Synthetic oligonucleotide
taaggaccacggggccagcgacggggcaga

SEQ ID NO: 396061 - DNA, 30 bp, Artificial Sequence
  Synthetic oligonucleotide
aaccaatttactactagctctttgggcaga

SEQ ID NO: 396062 - DNA, 29 bp, Artificial Sequence
  Synthetic oligonucleotide
cagtggtgctttgcaacctgtatggcaga

SEQ ID NO: 396063 - DNA, 30 bp, Artificial Sequence
  Synthetic oligonucleotide
tctgcacgagaaacagcaacgcgatgcaga

SEQ ID NO: 396064 - DNA, 30 bp, Artificial Sequence
  Synthetic oligonucleotide
ttcttgtctagttaatcgttatgatgcaga

SEQ ID NO: 396065 - DNA, 30 bp, Artificial Sequence
  Synthetic oligonucleotide
gcgctaattattcaagcgtgtcgctgcaga

SEQ ID NO: 396066 - DNA, 30 bp, Artificial Sequence
  Synthetic oligonucleotide
atgaatgcccggacgcaatttgtttgcaga

SEQ ID NO: 396067 - DNA, 30 bp, Artificial Sequence
  Synthetic oligonucleotide
atgacgcgctgcgcaaagatccccatcaga

SEQ ID NO: 396068 - DNA, 30 bp, Artificial Sequence
  Synthetic oligonucleotide
tcatcatgaaagcatgttaatctgatcaga

SEQ ID NO: 396069 - DNA, 30 bp, Artificial Sequence
  Synthetic oligonucleotide
agcaatcttgacgctgttgctgctatcaga

SEQ ID NO: 396070 - DNA, 30 bp, Artificial Sequence
  Synthetic oligonucleotide
cgaaacaacagctacaaaagacaactcaga

SEQ ID NO: 396071 - DNA, 30 bp, Artificial Sequence
  Synthetic oligonucleotide
tgtatgttagacacagaaaacttactcaga

SEQ ID NO: 396072 - DNA, 30 bp, Artificial Sequence
  Synthetic oligonucleotide
gtcctccaagtgcaggatgaaaacctcaga

SEQ ID NO: 396073 - DNA, 30 bp, Artificial Sequence
  Synthetic oligonucleotide
gtttgcagtgtttctgctaggactctcaga

SEQ ID NO: 396074 - DNA, 30 bp, Artificial Sequence
  Synthetic oligonucleotide
gaacagcttttagatgcgcaatctctcaga

SEQ ID NO: 396075 - DNA, 30 bp, Artificial Sequence
  Synthetic oligonucleotide
cctttggtagaccattagtacggtctcaga

SEQ ID NO: 396076 - DNA, 30 bp, Artificial Sequence
  Synthetic oligonucleotide
ccccttctggctccatttacccttctcaga

SEQ ID NO: 396077 - DNA, 30 bp, Artificial Sequence
  Synthetic oligonucleotide
gcataagctatgtccgagaatcttctcaga

SEQ ID NO: 396078 - DNA, 25 bp, Artificial Sequence
  Synthetic oligonucleotide
gtcgtcatatggtgagacagtcaga

SEQ ID NO: 396079 - DNA, 30 bp, Artificial Sequence
  Synthetic oligonucleotide
gaagttatagtgcacagaagatcagtcaga

SEQ ID NO: 396080 - DNA, 30 bp, Artificial Sequence
  Synthetic oligonucleotide
tttagataggaagtcgcgctgcacgtcaga

SEQ ID NO: 396081 - DNA, 30 bp, Artificial Sequence
  Synthetic oligonucleotide
acatatctattttgacggctcatcgtcaga

SEQ ID NO: 396082 - DNA, 30 bp, Artificial Sequence
  Synthetic oligonucleotide
acccgattccccgctacctggtatgtcaga

SEQ ID NO: 396083 - DNA, 30 bp, Artificial Sequence
  Synthetic oligonucleotide
cttaataatgaccctttttcaaagaagaga

SEQ ID NO: 396084 - DNA, 30 bp, Artificial Sequence
  Synthetic oligonucleotide
agtatcctccgttcgcacatgtggaagaga

SEQ ID NO: 396085 - DNA, 30 bp, Artificial Sequence
  Synthetic oligonucleotide
tgggtcaaagaaaagatacagacgcagaga

SEQ ID NO: 396086 - DNA, 30 bp, Artificial Sequence
  Synthetic oligonucleotide
tggcaagtttcggctgctatcgggcagaga

SEQ ID NO: 396087 - DNA, 30 bp, Artificial Sequence
  Synthetic oligonucleotide
aattggcgccgagcataactggatcagaga

SEQ ID NO: 396088 - DNA, 30 bp, Artificial Sequence
  Synthetic oligonucleotide
gccagcgctccacggttccgaaccgagaga

SEQ ID NO: 396089 - DNA, 30 bp, Artificial Sequence
  Synthetic oligonucleotide
tattggttacaaggtctctgctaggagaga

SEQ ID NO: 396090 - DNA, 30 bp, Artificial Sequence
  Synthetic oligonucleotide
tagtggtgagttgctcttacaaatgagaga

SEQ ID NO: 396091 - DNA, 30 bp, Artificial Sequence
  Synthetic oligonucleotide
cactgcatacaccgcacggacagctagaga

SEQ ID NO: 396092 - DNA, 30 bp, Artificial Sequence
  Synthetic oligonucleotide
tacgttctattccatgggatgaagtagaga

SEQ ID NO: 396093 - DNA, 30 bp, Artificial Sequence
  Synthetic oligonucleotide
ttgggctgactcggcgagcggtagtagaga

SEQ ID NO: 396094 - DNA, 30 bp, Artificial Sequence
  Synthetic oligonucleotide
accgtacgcacctaaaatctatcttagaga

SEQ ID NO: 396095 - DNA, 30 bp, Artificial Sequence
  Synthetic oligonucleotide
tgatgggctttactttctttcggaacgaga

SEQ ID NO: 396096 - DNA, 30 bp, Artificial Sequence
  Synthetic oligonucleotide
ccttctctgctagtaatagatctaacgaga

SEQ ID NO: 396097 - DNA, 30 bp, Artificial Sequence
  Synthetic oligonucleotide
tccattcatttcgtatacttagtaacgaga

SEQ ID NO: 396098 - DNA, 30 bp, Artificial Sequence
  Synthetic oligonucleotide
cgcactggcctgcttattggggccacgaga

SEQ ID NO: 396099 - DNA, 30 bp, Artificial Sequence
  Synthetic oligonucleotide
gagtcatccactaaaaaaaggggcacgaga

SEQ ID NO: 396100 - DNA, 30 bp, Artificial Sequence
  Synthetic oligonucleotide
tgcccgtatccctgcatgaccatgacgaga

SEQ ID NO: 396101 - DNA, 30 bp, Artificial Sequence
  Synthetic oligonucleotide
ttgatactcaaggttaggacgggcccgaga

SEQ ID NO: 396102 - DNA, 30 bp, Artificial Sequence
  Synthetic oligonucleotide
atctgcatgacggaacgcgttgggccgaga

SEQ ID NO: 396103 - DNA, 30 bp, Artificial Sequence
  Synthetic oligonucleotide
agttttcgaggttctaagtcgaatccgaga

SEQ ID NO: 396104 - DNA, 30 bp, Artificial Sequence
  Synthetic oligonucleotide
ttcctggaggaagtaatcggtgatccgaga

SEQ ID NO: 396105 - DNA, 30 bp, Artificial Sequence
  Synthetic oligonucleotide
tggtttaggacacagctcagtggtccgaga

SEQ ID NO: 396106 - DNA, 30 bp, Artificial Sequence
  Synthetic oligonucleotide
cgcggccgttttttggggcagaaagcgaga

SEQ ID NO: 396107 - DNA, 31 bp, Artificial Sequence
  Synthetic oligonucleotide
cgttgagtacatagagtctcgcgacgcgaga

SEQ ID NO: 396108 - DNA, 30 bp, Artificial Sequence
  Synthetic oligonucleotide
acgggtggtcgaatgattaaaaaggcgaga

SEQ ID NO: 396109 - DNA, 30 bp, Artificial Sequence
  Synthetic oligonucleotide
acgcgcacgcggccgctgcattcggcgaga

SEQ ID NO: 396110 - DNA, 30 bp, Artificial Sequence
  Synthetic oligonucleotide
atcttcgcactgtcgacttttttggcgaga

SEQ ID NO: 396111 - DNA, 30 bp, Artificial Sequence
  Synthetic oligonucleotide
accctattttcgttcaagttatatgcgaga

SEQ ID NO: 396112 - DNA, 30 bp, Artificial Sequence
  Synthetic oligonucleotide
gtcccggatctggcatcctgggtgtcgaga

SEQ ID NO: 396113 - DNA, 30 bp, Artificial Sequence
  Synthetic oligonucleotide
tccgcagttctgtgtgactatctttcgaga

SEQ ID NO: 396114 - DNA, 30 bp, Artificial Sequence
  Synthetic oligonucleotide
ttcccgtatagttattcggggccaaggaga

SEQ ID NO: 396115 - DNA, 30 bp, Artificial Sequence
  Synthetic oligonucleotide
tagaggcccatttggatcttggacaggaga

SEQ ID NO: 396116 - DNA, 30 bp, Artificial Sequence
  Synthetic oligonucleotide
taaaggttatacttgccacgacataggaga

SEQ ID NO: 396117 - DNA, 30 bp, Artificial Sequence
  Synthetic oligonucleotide
ccgctggaaaactggactgcagataggaga

SEQ ID NO: 396118 - DNA, 30 bp, Artificial Sequence
  Synthetic oligonucleotide
tgcactcggacatcgcgtacgtataggaga

SEQ ID NO: 396119 - DNA, 30 bp, Artificial Sequence
  Synthetic oligonucleotide
atgctgtggcgtggtctgatcgttaggaga

SEQ ID NO: 396120 - DNA, 30 bp, Artificial Sequence
  Synthetic oligonucleotide
cttcttcagtccgcgtggcgactacggaga

SEQ ID NO: 396121 - DNA, 30 bp, Artificial Sequence
  Synthetic oligonucleotide
gggtcacaacggcgcataggaaaccggaga

SEQ ID NO: 396122 - DNA, 30 bp, Artificial Sequence
  Synthetic oligonucleotide
gcgaaatcagcttaatgtggctagcggaga

SEQ ID NO: 396123 - DNA, 30 bp, Artificial Sequence
  Synthetic oligonucleotide
ggttcgcagcaaaaaaccacccaagggaga

SEQ ID NO: 396124 - DNA, 30 bp, Artificial Sequence
  Synthetic oligonucleotide
acagaaggcacttacccaaggagagggaga

SEQ ID NO: 396125 - DNA, 30 bp, Artificial Sequence
  Synthetic oligonucleotide
tctaaatcacggtgactaagtgtagggaga

SEQ ID NO: 396126 - DNA, 30 bp, Artificial Sequence
  Synthetic oligonucleotide
gacgcagtccattccattcgtagggggaga

SEQ ID NO: 396127 - DNA, 30 bp, Artificial Sequence
  Synthetic oligonucleotide
attataggttatagccacgtccgggggaga

SEQ ID NO: 396128 - DNA, 30 bp, Artificial Sequence
  Synthetic oligonucleotide
cgggtggcacatacctaacactgggggaga

SEQ ID NO: 396129 - DNA, 30 bp, Artificial Sequence
  Synthetic oligonucleotide
tacctcacgcaagataattcccaatggaga

SEQ ID NO: 396130 - DNA, 30 bp, Artificial Sequence
  Synthetic oligonucleotide
tgatggcctcggacagtcattagatggaga

SEQ ID NO: 396131 - DNA, 30 bp, Artificial Sequence
  Synthetic oligonucleotide
tacattgtttataagcccacccgatggaga

SEQ ID NO: 396132 - DNA, 30 bp, Artificial Sequence
  Synthetic oligonucleotide
cacttgaagttggggtctcggtgatggaga

SEQ ID NO: 396133 - DNA, 30 bp, Artificial Sequence
  Synthetic oligonucleotide
cctgattcaggaagcaatagagtatggaga

SEQ ID NO: 396134 - DNA, 30 bp, Artificial Sequence
  Synthetic oligonucleotide
gtcaaaaaccagtatatcgaatgctggaga

SEQ ID NO: 396135 - DNA, 30 bp, Artificial Sequence
  Synthetic oligonucleotide
acctccgcattagagcagtttatctggaga

SEQ ID NO: 396136 - DNA, 30 bp, Artificial Sequence
  Synthetic oligonucleotide
ggtatgggagagtggagaggctgaatgaga

SEQ ID NO: 396137 - DNA, 30 bp, Artificial Sequence
  Synthetic oligonucleotide
actaccactgggcatagcagcagcatgaga

SEQ ID NO: 396138 - DNA, 30 bp, Artificial Sequence
  Synthetic oligonucleotide
ttaagtaaacggcaggtttaattcatgaga

SEQ ID NO: 396139 - DNA, 30 bp, Artificial Sequence
  Synthetic oligonucleotide
gaatggagtggctcatccgactcgatgaga

SEQ ID NO: 396140 - DNA, 30 bp, Artificial Sequence
  Synthetic oligonucleotide
tgtatgacacggctatgagatcatatgaga

SEQ ID NO: 396141 - DNA, 30 bp, Artificial Sequence
  Synthetic oligonucleotide
gccacctaggatatttctatccgtatgaga

SEQ ID NO: 396142 - DNA, 30 bp, Artificial Sequence
  Synthetic oligonucleotide
aaagagccccatcttcacacctgtatgaga

SEQ ID NO: 396143 - DNA, 30 bp, Artificial Sequence
  Synthetic oligonucleotide
gctctcccatcagaagacgggtcactgaga

SEQ ID NO: 396144 - DNA, 30 bp, Artificial Sequence
  Synthetic oligonucleotide
ttcatatttagcacgtaccaaaacctgaga

SEQ ID NO: 396145 - DNA, 30 bp, Artificial Sequence
  Synthetic oligonucleotide
tgtaattaggtacttcagagattcctgaga

SEQ ID NO: 396146 - DNA, 30 bp, Artificial Sequence
  Synthetic oligonucleotide
agcatacgcgagagcgtaacccagctgaga

SEQ ID NO: 396147 - DNA, 30 bp, Artificial Sequence
  Synthetic oligonucleotide
atgttcccttgggcgacctgggagctgaga

SEQ ID NO: 396148 - DNA, 30 bp, Artificial Sequence
  Synthetic oligonucleotide
ttctagaagttggcgcccttctagctgaga

SEQ ID NO: 396149 - DNA, 30 bp, Artificial Sequence
  Synthetic oligonucleotide
ggcgatatcagtagtccgctagatctgaga

SEQ ID NO: 396150 - DNA, 30 bp, Artificial Sequence
  Synthetic oligonucleotide
gatagttttaacacctcgaagttagtgaga

SEQ ID NO: 396151 - DNA, 30 bp, Artificial Sequence
  Synthetic oligonucleotide
acggggttagaccccccgtccaacgtgaga

SEQ ID NO: 396152 - DNA, 30 bp, Artificial Sequence
  Synthetic oligonucleotide
tgcgagttggatcgtaaacctttcgtgaga

SEQ ID NO: 396153 - DNA, 30 bp, Artificial Sequence
  Synthetic oligonucleotide
agaaatgtagtgttgagagaccctgtgaga

SEQ ID NO: 396154 - DNA, 30 bp, Artificial Sequence
  Synthetic oligonucleotide
cgggtcattgattgtttaaatattgtgaga

SEQ ID NO: 396155 - DNA, 30 bp, Artificial Sequence
  Synthetic oligonucleotide
tcgtcgcatgccttcacaagccttgtgaga

SEQ ID NO: 396156 - DNA, 30 bp, Artificial Sequence
  Synthetic oligonucleotide
cagcaaggccccgggccttccgttgtgaga

SEQ ID NO: 396157 - DNA, 30 bp, Artificial Sequence
  Synthetic oligonucleotide
tgccgtcaagtactcggtatttgattgaga

SEQ ID NO: 396158 - DNA, 30 bp, Artificial Sequence
  Synthetic oligonucleotide
gatactttagcaggcgaaacaaacttgaga

SEQ ID NO: 396159 - DNA, 30 bp, Artificial Sequence
  Synthetic oligonucleotide
gtaccatcgtccaacaaataatgcttgaga

SEQ ID NO: 396160 - DNA, 30 bp, Artificial Sequence
  Synthetic oligonucleotide
gaaaaaggtcgcgggtgagtatatttgaga

SEQ ID NO: 396161 - DNA, 30 bp, Artificial Sequence
  Synthetic oligonucleotide
gaatacccaagatgattgcatattttgaga

SEQ ID NO: 396162 - DNA, 30 bp, Artificial Sequence
  Synthetic oligonucleotide
atcatcgttggtgtggtccaagttttgaga

SEQ ID NO: 396163 - DNA, 30 bp, Artificial Sequence
  Synthetic oligonucleotide
tgttgctattttagcggacgataaaataga

SEQ ID NO: 396164 - DNA, 30 bp, Artificial Sequence
  Synthetic oligonucleotide
tgttgcaggagcgtcgtactattcaataga

SEQ ID NO: 396165 - DNA, 30 bp, Artificial Sequence
  Synthetic oligonucleotide
tgtataatattgtacacctagaataataga

SEQ ID NO: 396166 - DNA, 30 bp, Artificial Sequence
  Synthetic oligonucleotide
ttgtccatcagatacatgcgttataataga

SEQ ID NO: 396167 - DNA, 30 bp, Artificial Sequence
  Synthetic oligonucleotide
tgtaggttcctcaggtggtagactaataga

SEQ ID NO: 396168 - DNA, 30 bp, Artificial Sequence
  Synthetic oligonucleotide
cacactgaatgcgccctatattgtaataga

SEQ ID NO: 396169 - DNA, 30 bp, Artificial Sequence
  Synthetic oligonucleotide
cttttgaatacctagcgatccattaataga

SEQ ID NO: 396170 - DNA, 30 bp, Artificial Sequence
  Synthetic oligonucleotide
cgggtggtgtaggtggccaactttaataga

SEQ ID NO: 396171 - DNA, 30 bp, Artificial Sequence
  Synthetic oligonucleotide
gtattaagagcatcggtagtaagacataga

SEQ ID NO: 396172 - DNA, 30 bp, Artificial Sequence
  Synthetic oligonucleotide
actatcggcgtgactaggttcaaccataga

SEQ ID NO: 396173 - DNA, 30 bp, Artificial Sequence
  Synthetic oligonucleotide
ccaagcatcagggatggggttgcgcataga

SEQ ID NO: 396174 - DNA, 30 bp, Artificial Sequence
  Synthetic oligonucleotide
atgtttaggtatcacaaggccaggcataga

SEQ ID NO: 396175 - DNA, 30 bp, Artificial Sequence
  Synthetic oligonucleotide
aaagcgtccgggaggtcgaacgggcataga

SEQ ID NO: 396176 - DNA, 30 bp, Artificial Sequence
  Synthetic oligonucleotide
catcttgcctaggtcaagggtctgcataga

SEQ ID NO: 396177 - DNA, 30 bp, Artificial Sequence
  Synthetic oligonucleotide
gtgggttcgatcccgatgcgtactcataga

SEQ ID NO: 396178 - DNA, 30 bp, Artificial Sequence
  Synthetic oligonucleotide
tttgcgggtcgagagactgcatgtcataga

SEQ ID NO: 396179 - DNA, 30 bp, Artificial Sequence
  Synthetic oligonucleotide
atattggaaaataacattggagttcataga

SEQ ID NO: 396180 - DNA, 30 bp, Artificial Sequence
  Synthetic oligonucleotide
gcccggacggcgggtcagtaactagataga

SEQ ID NO: 396181 - DNA, 30 bp, Artificial Sequence
  Synthetic oligonucleotide
gtttgaggattcatccgttacgacgataga

SEQ ID NO: 396182 - DNA, 30 bp, Artificial Sequence
  Synthetic oligonucleotide
tcccgccaggacctgtactgggaggataga

SEQ ID NO: 396183 - DNA, 30 bp, Artificial Sequence
  Synthetic oligonucleotide
gcctctgatacgccaagagaaatatataga

SEQ ID NO: 396184 - DNA, 30 bp, Artificial Sequence
  Synthetic oligonucleotide
ttgacagatgtaggataagacaactataga

SEQ ID NO: 396185 - DNA, 30 bp, Artificial Sequence
  Synthetic oligonucleotide
ggtactgcttacgccccaaaagcctataga

SEQ ID NO: 396186 - DNA, 30 bp, Artificial Sequence
  Synthetic oligonucleotide
gcacctgcgcatacgaagatacgctataga

SEQ ID NO: 396187 - DNA, 30 bp, Artificial Sequence
  Synthetic oligonucleotide
ttaatcccggtagcctattatcagtataga

SEQ ID NO: 396188 - DNA, 30 bp, Artificial Sequence
  Synthetic oligonucleotide
ccgccacgagtagactagtcgcggtataga

SEQ ID NO: 396189 - DNA, 30 bp, Artificial Sequence
  Synthetic oligonucleotide
ggtccgtcacagcatcgatagtggtataga

SEQ ID NO: 396190 - DNA, 30 bp, Artificial Sequence
  Synthetic oligonucleotide
gcatttcagtccctgacggtagcttataga

SEQ ID NO: 396191 - DNA, 30 bp, Artificial Sequence
  Synthetic oligonucleotide
agtacggaattttatcgtcagcgttataga

SEQ ID NO: 396192 - DNA, 30 bp, Artificial Sequence
  Synthetic oligonucleotide
agctcagatccgttcgcttagctttataga

SEQ ID NO: 396193 - DNA, 30 bp, Artificial Sequence
  Synthetic oligonucleotide
agcgttaggtccaatcttgacgccactaga

SEQ ID NO: 396194 - DNA, 30 bp, Artificial Sequence
  Synthetic oligonucleotide
actttgcaacccgcaattgtctccactaga

SEQ ID NO: 396195 - DNA, 30 bp, Artificial Sequence
  Synthetic oligonucleotide
ctacttcgggttcatgtaggaagcactaga

SEQ ID NO: 396196 - DNA, 30 bp, Artificial Sequence
  Synthetic oligonucleotide
aaagtcgtctcgcgcgttccgcgcactaga

SEQ ID NO: 396197 - DNA, 30 bp, Artificial Sequence
  Synthetic oligonucleotide
taataggctattcacggcctgcctactaga

SEQ ID NO: 396198 - DNA, 30 bp, Artificial Sequence
  Synthetic oligonucleotide
ggtggtagtcggtaaacggtggtacctaga

SEQ ID NO: 396199 - DNA, 27 bp, Artificial Sequence
  Synthetic oligonucleotide
caggttggccgacgccgatcccctaga

SEQ ID NO: 396200 - DNA, 30 bp, Artificial Sequence
  Synthetic oligonucleotide
tgactccggggttcatacggtcgccctaga

SEQ ID NO: 396201 - DNA, 30 bp, Artificial Sequence
  Synthetic oligonucleotide
gagtctcgattggtttccgtatctcctaga

SEQ ID NO: 396202 - DNA, 30 bp, Artificial Sequence
  Synthetic oligonucleotide
caacttttctgggtaagaccctctcctaga

SEQ ID NO: 396203 - DNA, 30 bp, Artificial Sequence
  Synthetic oligonucleotide
gactatctgaaaaaaagggtttaagctaga

SEQ ID NO: 396204 - DNA, 30 bp, Artificial Sequence
  Synthetic oligonucleotide
acaccgcttatttatggcacagctgctaga

SEQ ID NO: 396205 - DNA, 30 bp, Artificial Sequence
  Synthetic oligonucleotide
aatgcgatctttagagtacgagctgctaga

SEQ ID NO: 396206 - DNA, 30 bp, Artificial Sequence
  Synthetic oligonucleotide
gtgactccttgttctttcgaaggtgctaga

SEQ ID NO: 396207 - DNA, 30 bp, Artificial Sequence
  Synthetic oligonucleotide
agtatttgtcagggctaataggttgctaga

SEQ ID NO: 396208 - DNA, 30 bp, Artificial Sequence
  Synthetic oligonucleotide
taatgttcctgctcgtagtaatcatctaga

SEQ ID NO: 396209 - DNA, 30 bp, Artificial Sequence
  Synthetic oligonucleotide
ccccagtagtgtcctatggtacactctaga

SEQ ID NO: 396210 - DNA, 30 bp, Artificial Sequence
  Synthetic oligonucleotide
tccaaatcagcagagcctgcgggctctaga

SEQ ID NO: 396211 - DNA, 30 bp, Artificial Sequence
  Synthetic oligonucleotide
gtttaggtgatggactaaatgatgtctaga

SEQ ID NO: 396212 - DNA, 28 bp, Artificial Sequence
  Synthetic oligonucleotide
aatactcagggtcactctatcttctaga

SEQ ID NO: 396213 - DNA, 30 bp, Artificial Sequence
  Synthetic oligonucleotide
ttccaggtcattgtatcccatatttctaga

SEQ ID NO: 396214 - DNA, 30 bp, Artificial Sequence
  Synthetic oligonucleotide
acagccacgcgataattaaccgtttctaga

SEQ ID NO: 396215 - DNA, 30 bp, Artificial Sequence
  Synthetic oligonucleotide
cgattcacatttgtaatagctgtaagtaga

SEQ ID NO: 396216 - DNA, 30 bp, Artificial Sequence
  Synthetic oligonucleotide
aagacgaatcgtctggtcgattacagtaga

SEQ ID NO: 396217 - DNA, 30 bp, Artificial Sequence
  Synthetic oligonucleotide
gtaaaccacaggctattttatgtcagtaga

SEQ ID NO: 396218 - DNA, 30 bp, Artificial Sequence
  Synthetic oligonucleotide
caaaacttacacgactctttagagagtaga

SEQ ID NO: 396219 - DNA, 30 bp, Artificial Sequence
  Synthetic oligonucleotide
cggttcaatacgtttggtgtgaggagtaga

SEQ ID NO: 396220 - DNA, 30 bp, Artificial Sequence
  Synthetic oligonucleotide
cctttattgcctagaagcacgatgagtaga

SEQ ID NO: 396221 - DNA, 30 bp, Artificial Sequence
  Synthetic oligonucleotide
tccgctttaagtgatggtgacacacgtaga

SEQ ID NO: 396222 - DNA, 30 bp, Artificial Sequence
  Synthetic oligonucleotide
tcaggctacgttgaggattctcaccgtaga

SEQ ID NO: 396223 - DNA, 30 bp, Artificial Sequence
  Synthetic oligonucleotide
aacgtccttaagttaaggttatgccgtaga

SEQ ID NO: 396224 - DNA, 30 bp, Artificial Sequence
  Synthetic oligonucleotide
ttctaacatactagataagtctgccgtaga

SEQ ID NO: 396225 - DNA, 30 bp, Artificial Sequence
  Synthetic oligonucleotide
tgtgtaaccggatcacagtctttccgtaga

SEQ ID NO: 396226 - DNA, 30 bp, Artificial Sequence
  Synthetic oligonucleotide
tcgtttaccaatcgagccgggaggcgtaga

SEQ ID NO: 396227 - DNA, 30 bp, Artificial Sequence
  Synthetic oligonucleotide
ggattgtgcgcgttcagcgggcctcgtaga

SEQ ID NO: 396228 - DNA, 30 bp, Artificial Sequence
  Synthetic oligonucleotide
ttggctatcgcgggtaattaaagtcgtaga

SEQ ID NO: 396229 - DNA, 30 bp, Artificial Sequence
  Synthetic oligonucleotide
taagtaaatcgcttaccgatgtgtcgtaga

SEQ ID NO: 396230 - DNA, 30 bp, Artificial Sequence
  Synthetic oligonucleotide
gacctgtttatgatgcggtacattcgtaga

SEQ ID NO: 396231 - DNA, 30 bp, Artificial Sequence
  Synthetic oligonucleotide
ttactcgaaaccgtgataacggtaggtaga

SEQ ID NO: 396232 - DNA, 30 bp, Artificial Sequence
  Synthetic oligonucleotide
ttcgattttaggacgttgcgtacgggtaga

SEQ ID NO: 396233 - DNA, 30 bp, Artificial Sequence
  Synthetic oligonucleotide
gattgtggggccggggcaacgtcgggtaga

SEQ ID NO: 396234 - DNA, 30 bp, Artificial Sequence
  Synthetic oligonucleotide
ttcaaatacattgtgtactagatgggtaga

SEQ ID NO: 396235 - DNA, 30 bp, Artificial Sequence
  Synthetic oligonucleotide
tttattagcaactaatgggaacatggtaga

SEQ ID NO: 396236 - DNA, 30 bp, Artificial Sequence
  Synthetic oligonucleotide
ccgaccggaggcctgcgctcggatggtaga

SEQ ID NO: 396237 - DNA, 30 bp, Artificial Sequence
  Synthetic oligonucleotide
tgtgtattggctttgttaaccgttggtaga

SEQ ID NO: 396238 - DNA, 31 bp, Artificial Sequence
  Synthetic oligonucleotide
tccaaggaatcagtgatcagagcaatgtaga

SEQ ID NO: 396239 - DNA, 30 bp, Artificial Sequence
  Synthetic oligonucleotide
gcgtactctcagggatcaattaactgtaga

SEQ ID NO: 396240 - DNA, 30 bp, Artificial Sequence
  Synthetic oligonucleotide
gaatgctatgcgatcgttggtccttgtaga

SEQ ID NO: 396241 - DNA, 30 bp, Artificial Sequence
  Synthetic oligonucleotide
ttgtgcaatacacttacaccctgttgtaga

SEQ ID NO: 396242 - DNA, 30 bp, Artificial Sequence
  Synthetic oligonucleotide
gtaaaaagatatatcagtgtaaaaattaga

SEQ ID NO: 396243 - DNA, 30 bp, Artificial Sequence
  Synthetic oligonucleotide
cgatttacgtaactactatcacacattaga

SEQ ID NO: 396244 - DNA, 30 bp, Artificial Sequence
  Synthetic oligonucleotide
aaaataaggatgacggataagaagattaga

SEQ ID NO: 396245 - DNA, 30 bp, Artificial Sequence
  Synthetic oligonucleotide
ctcgctaacagacgtagtctcgcgattaga

SEQ ID NO: 396246 - DNA, 30 bp, Artificial Sequence
  Synthetic oligonucleotide
agccgttcatgagcacccgttgggattaga

SEQ ID NO: 396247 - DNA, 30 bp, Artificial Sequence
  Synthetic oligonucleotide
ctgatgagtatttaaccggaaaatattaga

SEQ ID NO: 396248 - DNA, 30 bp, Artificial Sequence
  Synthetic oligonucleotide
cctaaagtgtttgcacggggaactattaga

SEQ ID NO: 396249 - DNA, 30 bp, Artificial Sequence
  Synthetic oligonucleotide
gggagtttaacgtgaagccgcactattaga

SEQ ID NO: 396250 - DNA, 30 bp, Artificial Sequence
  Synthetic oligonucleotide
tatgtactagttgaaggtatacaacttaga

SEQ ID NO: 396251 - DNA, 30 bp, Artificial Sequence
  Synthetic oligonucleotide
attcggaactagatgcaccgtgaacttaga

SEQ ID NO: 396252 - DNA, 30 bp, Artificial Sequence
  Synthetic oligonucleotide
atttaatcggacgcaactaacaagcttaga

SEQ ID NO: 396253 - DNA, 30 bp, Artificial Sequence
  Synthetic oligonucleotide
cgtacgtaccgtgtatattcgttgcttaga

SEQ ID NO: 396254 - DNA, 30 bp, Artificial Sequence
  Synthetic oligonucleotide
gccactttctgctccatgtcagctcttaga

SEQ ID NO: 396255 - DNA, 30 bp, Artificial Sequence
  Synthetic oligonucleotide
tatttaatcggtctaaggcttgcagttaga

SEQ ID NO: 396256 - DNA, 30 bp, Artificial Sequence
  Synthetic oligonucleotide
tgagcgtccaaatgctttcagcgcgttaga

SEQ ID NO: 396257 - DNA, 30 bp, Artificial Sequence
  Synthetic oligonucleotide
cgtactactaacgacggcaaatgcgttaga

SEQ ID NO: 396258 - DNA, 30 bp, Artificial Sequence
  Synthetic oligonucleotide
ggcaacgtgagctgcaacattaaggttaga

SEQ ID NO: 396259 - DNA, 30 bp, Artificial Sequence
  Synthetic oligonucleotide
atcaatttgaaacccgtaaggtatgttaga

SEQ ID NO: 396260 - DNA, 30 bp, Artificial Sequence
  Synthetic oligonucleotide
ctaatgtggtcacataataatcctgttaga

SEQ ID NO: 396261 - DNA, 30 bp, Artificial Sequence
  Synthetic oligonucleotide
attatcggcgcatttagcaacgcatttaga

SEQ ID NO: 396262 - DNA, 29 bp, Artificial Sequence
  Synthetic oligonucleotide
cagctggggactcgtggggctactttaga

SEQ ID NO: 396263 - DNA, 30 bp, Artificial Sequence
  Synthetic oligonucleotide
gccacatgtacatcatccaatcattttaga

SEQ ID NO: 396264 - DNA, 30 bp, Artificial Sequence
  Synthetic oligonucleotide
ttcagttatatcgcactgagggattttaga

SEQ ID NO: 396265 - DNA, 30 bp, Artificial Sequence
  Synthetic oligonucleotide
taagtgagaccgcgcctaaatgattttaga

SEQ ID NO: 396266 - DNA, 30 bp, Artificial Sequence
  Synthetic oligonucleotide
gatcactcaaggtactaattcctttttaga

SEQ ID NO: 396267 - DNA, 30 bp, Artificial Sequence
  Synthetic oligonucleotide
tttacgctgccggtgaccgaaagaaaacga

SEQ ID NO: 396268 - DNA, 30 bp, Artificial Sequence
  Synthetic oligonucleotide
tacacttagctgtacgggtctataaaacga

SEQ ID NO: 396269 - DNA, 30 bp, Artificial Sequence
  Synthetic oligonucleotide
cttcttactttgaaatgagaatggaaacga

SEQ ID NO: 396270 - DNA, 30 bp, Artificial Sequence
  Synthetic oligonucleotide
gggaaaccttatatgttacgcggtaaacga

SEQ ID NO: 396271 - DNA, 30 bp, Artificial Sequence
  Synthetic oligonucleotide
cagggcactccgggtaacgctgttaaacga

SEQ ID NO: 396272 - DNA, 30 bp, Artificial Sequence
  Synthetic oligonucleotide
tgatgggattaacgctggccatttaaacga

SEQ ID NO: 396273 - DNA, 30 bp, Artificial Sequence
  Synthetic oligonucleotide
gctcatactaaggctagacatcgtcaacga

SEQ ID NO: 396274 - DNA, 30 bp, Artificial Sequence
  Synthetic oligonucleotide
tacgttttctacattgcccatgttcaacga

SEQ ID NO: 396275 - DNA, 30 bp, Artificial Sequence
  Synthetic oligonucleotide
gttaaggtggtacttaacctgggagaacga

SEQ ID NO: 396276 - DNA, 30 bp, Artificial Sequence
  Synthetic oligonucleotide
ttgtgtaacagccgtgggcttgacgaacga

SEQ ID NO: 396277 - DNA, 30 bp, Artificial Sequence
  Synthetic oligonucleotide
tcatcagagggtctgaatgtacgcgaacga

SEQ ID NO: 396278 - DNA, 30 bp, Artificial Sequence
  Synthetic oligonucleotide
ctcacgttcgcgcgtgttcgtgcggaacga

SEQ ID NO: 396279 - DNA, 30 bp, Artificial Sequence
  Synthetic oligonucleotide
caacactaactagctttgatatgggaacga

SEQ ID NO: 396280 - DNA, 30 bp, Artificial Sequence
  Synthetic oligonucleotide
cttgatggtgcatgtacgagtactgaacga

SEQ ID NO: 396281 - DNA, 30 bp, Artificial Sequence
  Synthetic oligonucleotide
ccgcaccagcgtgagcttttacttgaacga

SEQ ID NO: 396282 - DNA, 30 bp, Artificial Sequence
  Synthetic oligonucleotide
ataacgggtttgtaacggcatttataacga

SEQ ID NO: 396283 - DNA, 30 bp, Artificial Sequence
  Synthetic oligonucleotide
gaatcgtgagactcgtgcgaggcctaacga

SEQ ID NO: 396284 - DNA, 30 bp, Artificial Sequence
  Synthetic oligonucleotide
ctcattggtttcaagtagagtttctaacga

SEQ ID NO: 396285 - DNA, 30 bp, Artificial Sequence
  Synthetic oligonucleotide
tgtcgggtacaacagacccgagggtaacga

SEQ ID NO: 396286 - DNA, 30 bp, Artificial Sequence
  Synthetic oligonucleotide
tggatgaggatcgtatgcaacagttaacga

SEQ ID NO: 396287 - DNA, 30 bp, Artificial Sequence
  Synthetic oligonucleotide
attaggcttcttagacatggacgttaacga

SEQ ID NO: 396288 - DNA, 30 bp, Artificial Sequence
  Synthetic oligonucleotide
tctcacgatagtctcaggaggtgcacacga

SEQ ID NO: 396289 - DNA, 30 bp, Artificial Sequence
  Synthetic oligonucleotide
atagctccggccccgatttcgacgacacga

SEQ ID NO: 396290 - DNA, 30 bp, Artificial Sequence
  Synthetic oligonucleotide
gggtgcgctacataccttgaatggacacga

SEQ ID NO: 396291 - DNA, 30 bp, Artificial Sequence
  Synthetic oligonucleotide
accgccgtctaagttatatgcggtacacga

SEQ ID NO: 396292 - DNA, 30 bp, Artificial Sequence
  Synthetic oligonucleotide
atccgcatcttgcactaaccggcaccacga

SEQ ID NO: 396293 - DNA, 30 bp, Artificial Sequence
  Synthetic oligonucleotide
cgcagaaacggcgttaccgtgtacccacga

SEQ ID NO: 396294 - DNA, 30 bp, Artificial Sequence
  Synthetic oligonucleotide
gatctatggttggcaagtcgcggcccacga

SEQ ID NO: 396295 - DNA, 30 bp, Artificial Sequence
  Synthetic oligonucleotide
cattcgtgtccagtagtccggtcggcacga

SEQ ID NO: 396296 - DNA, 30 bp, Artificial Sequence
  Synthetic oligonucleotide
tatctagacgagcaggtcccataatcacga

SEQ ID NO: 396297 - DNA, 30 bp, Artificial Sequence
  Synthetic oligonucleotide
ctcaaacacgcgccttcacacagatcacga

SEQ ID NO: 396298 - DNA, 30 bp, Artificial Sequence
  Synthetic oligonucleotide
ccggtcaatctcgctcttctaaactcacga

SEQ ID NO: 396299 - DNA, 30 bp, Artificial Sequence
  Synthetic oligonucleotide
tactttctttcgggcagtcaaggctcacga

SEQ ID NO: 396300 - DNA, 30 bp, Artificial Sequence
  Synthetic oligonucleotide
taagcccggtaataccgctgtaagtcacga

SEQ ID NO: 396301 - DNA, 30 bp, Artificial Sequence
  Synthetic oligonucleotide
gaataagttctgaacggcgtaatgtcacga

SEQ ID NO: 396302 - DNA, 30 bp, Artificial Sequence
  Synthetic oligonucleotide
agtgtatcgactattagtcgtaattcacga

SEQ ID NO: 396303 - DNA, 30 bp, Artificial Sequence
  Synthetic oligonucleotide
gggctcaacaccaggacgtcgacttcacga

SEQ ID NO: 396304 - DNA, 30 bp, Artificial Sequence
  Synthetic oligonucleotide
agtgaatcagtgcgacgctaccaaagacga

SEQ ID NO: 396305 - DNA, 30 bp, Artificial Sequence
  Synthetic oligonucleotide
ctgcctcatataataataaagcaaagacga

SEQ ID NO: 396306 - DNA, 30 bp, Artificial Sequence
  Synthetic oligonucleotide
atgtgtagctgcggcatttgtataagacga

SEQ ID NO: 396307 - DNA, 30 bp, Artificial Sequence
  Synthetic oligonucleotide
tcagttagtatatcctacaccggcagacga

SEQ ID NO: 396308 - DNA, 30 bp, Artificial Sequence
  Synthetic oligonucleotide
gtgcgagtattaaataatcgttcgagacga

SEQ ID NO: 396309 - DNA, 30 bp, Artificial Sequence
  Synthetic oligonucleotide
gacacgtggcgtgctgtatcttttagacga

SEQ ID NO: 396310 - DNA, 30 bp, Artificial Sequence
  Synthetic oligonucleotide
gagttatcgcatagggggcgttcacgacga

SEQ ID NO: 396311 - DNA, 30 bp, Artificial Sequence
  Synthetic oligonucleotide
gggaccggtgcgttggctgcgcgacgacga

SEQ ID NO: 396312 - DNA, 30 bp, Artificial Sequence
  Synthetic oligonucleotide
ccctacccggtaactgaggagtgacgacga

SEQ ID NO: 396313 - DNA, 30 bp, Artificial Sequence
  Synthetic oligonucleotide
tcaagttgattattaggtcagctacgacga

SEQ ID NO: 396314 - DNA, 30 bp, Artificial Sequence
  Synthetic oligonucleotide
acgtcgtcctcatcgatctttaaccgacga

SEQ ID NO: 396315 - DNA, 30 bp, Artificial Sequence
  Synthetic oligonucleotide
acgaagagtatttcgatggtgtagcgacga

SEQ ID NO: 396316 - DNA, 30 bp, Artificial Sequence
  Synthetic oligonucleotide
ggtaaacaggacgaaagcttaacgcgacga

SEQ ID NO: 396317 - DNA, 30 bp, Artificial Sequence
  Synthetic oligonucleotide
tcagttcgatcgccaacattcgatcgacga

SEQ ID NO: 396318 - DNA, 30 bp, Artificial Sequence
  Synthetic oligonucleotide
atgttagtcctggccgactattcaggacga

SEQ ID NO: 396319 - DNA, 30 bp, Artificial Sequence
  Synthetic oligonucleotide
ggatcattttagtggatagtcgtaggacga

SEQ ID NO: 396320 - DNA, 30 bp, Artificial Sequence
  Synthetic oligonucleotide
gttgtgcgcagatcaaattcttgcggacga

SEQ ID NO: 396321 - DNA, 30 bp, Artificial Sequence
  Synthetic oligonucleotide
ggtactacactttgtgtggaacatggacga

SEQ ID NO: 396322 - DNA, 30 bp, Artificial Sequence
  Synthetic oligonucleotide
gctttatcagataggtcgcaaggatgacga

SEQ ID NO: 396323 - DNA, 30 bp, Artificial Sequence
  Synthetic oligonucleotide
gattcatccgtcagcactactagctgacga

SEQ ID NO: 396324 - DNA, 30 bp, Artificial Sequence
  Synthetic oligonucleotide
cggggactctataataagagacgctgacga

SEQ ID NO: 396325 - DNA, 30 bp, Artificial Sequence
  Synthetic oligonucleotide
aagagcccacataggtaccttcagtgacga

SEQ ID NO: 396326 - DNA, 30 bp, Artificial Sequence
  Synthetic oligonucleotide
caagatatttaaagttatatagggtgacga

SEQ ID NO: 396327 - DNA, 30 bp, Artificial Sequence
  Synthetic oligonucleotide
cacgaagcatctagtgcgtaatcttgacga

SEQ ID NO: 396328 - DNA, 30 bp, Artificial Sequence
  Synthetic oligonucleotide
tgtgataaggaacaaccaaaaggttgacga

SEQ ID NO: 396329 - DNA, 30 bp, Artificial Sequence
  Synthetic oligonucleotide
gtcagaggcctagagttgggcttttgacga

SEQ ID NO: 396330 - DNA, 30 bp, Artificial Sequence
  Synthetic oligonucleotide
ttaaatttgaaaacgcaatttaaaatacga

SEQ ID NO: 396331 - DNA, 30 bp, Artificial Sequence
  Synthetic oligonucleotide
gcccgccgatagccgggatgcgcaatacga

SEQ ID NO: 396332 - DNA, 30 bp, Artificial Sequence
  Synthetic oligonucleotide
ttcgacttgtgatggctccagcgaatacga

SEQ ID NO: 396333 - DNA, 30 bp, Artificial Sequence
  Synthetic oligonucleotide
aattatcgaaactaacttccgcggatacga

SEQ ID NO: 396334 - DNA, 30 bp, Artificial Sequence
  Synthetic oligonucleotide
gcccttcatactggaaggtcactgatacga

SEQ ID NO: 396335 - DNA, 30 bp, Artificial Sequence
  Synthetic oligonucleotide
tgggtttagggtcggctggatcgtatacga

SEQ ID NO: 396336 - DNA, 30 bp, Artificial Sequence
  Synthetic oligonucleotide
cacgggtagcttcatactgtctgtatacga

SEQ ID NO: 396337 - DNA, 30 bp, Artificial Sequence
  Synthetic oligonucleotide
tgctagattattttctggtatgttatacga

SEQ ID NO: 396338 - DNA, 30 bp, Artificial Sequence
  Synthetic oligonucleotide
cataaaggttctggcaacacctttatacga

SEQ ID NO: 396339 - DNA, 30 bp, Artificial Sequence
  Synthetic oligonucleotide
acgacgcatgctcggacggttatactacga

SEQ ID NO: 396340 - DNA, 30 bp, Artificial Sequence
  Synthetic oligonucleotide
gggttgcggctatcgcgcgcgcagctacga

SEQ ID NO: 396341 - DNA, 30 bp, Artificial Sequence
  Synthetic oligonucleotide
taggatccaaggattctcagggggctacga

SEQ ID NO: 396342 - DNA, 30 bp, Artificial Sequence
  Synthetic oligonucleotide
cgctttgcagccatcggaagtgatctacga

SEQ ID NO: 396343 - DNA, 30 bp, Artificial Sequence
  Synthetic oligonucleotide
agccctgaggtgctaatctcctctctacga

SEQ ID NO: 396344 - DNA, 30 bp, Artificial Sequence
  Synthetic oligonucleotide
gaaacttgtaagtgaccgaaaggtctacga

SEQ ID NO: 396345 - DNA, 30 bp, Artificial Sequence
  Synthetic oligonucleotide
tcccagaggtgggacctcagatttctacga

SEQ ID NO: 396346 - DNA, 30 bp, Artificial Sequence
  Synthetic oligonucleotide
atgggtagtcgttcggtgtatgtcgtacga

SEQ ID NO: 396347 - DNA, 30 bp, Artificial Sequence
  Synthetic oligonucleotide
cagccagtgcgttcctctgaaaaggtacga

SEQ ID NO: 396348 - DNA, 30 bp, Artificial Sequence
  Synthetic oligonucleotide
gaatccgtgaaagtccacgaaagggtacga

SEQ ID NO: 396349 - DNA, 30 bp, Artificial Sequence
  Synthetic oligonucleotide
caccagtgctcggcttgactccgggtacga

SEQ ID NO: 396350 - DNA, 30 bp, Artificial Sequence
  Synthetic oligonucleotide
ggtttttcacatgatgcgaatggggtacga

SEQ ID NO: 396351 - DNA, 30 bp, Artificial Sequence
  Synthetic oligonucleotide
gccgatccacgtttggtaaacactgtacga

SEQ ID NO: 396352 - DNA, 30 bp, Artificial Sequence
  Synthetic oligonucleotide
cgagatacgtacatatcgaaagccttacga

SEQ ID NO: 396353 - DNA, 30 bp, Artificial Sequence
  Synthetic oligonucleotide
ttgtccatcaatcgccaaccaatcttacga

SEQ ID NO: 396354 - DNA, 30 bp, Artificial Sequence
  Synthetic oligonucleotide
ttccctcaatgggaagggttgcctttacga

SEQ ID NO: 396355 - DNA, 30 bp, Artificial Sequence
  Synthetic oligonucleotide
acaacatccgatgactgtgcatgaaaccga

SEQ ID NO: 396356 - DNA, 30 bp, Artificial Sequence
  Synthetic oligonucleotide
ttctacgatatttacgccttatgaaaccga

SEQ ID NO: 396357 - DNA, 30 bp, Artificial Sequence
  Synthetic oligonucleotide
gaatggattcataagttgaagtccaaccga

SEQ ID NO: 396358 - DNA, 30 bp, Artificial Sequence
  Synthetic oligonucleotide
ggtttgactaaaaaaatcacgagcaaccga

SEQ ID NO: 396359 - DNA, 30 bp, Artificial Sequence
  Synthetic oligonucleotide
aataaacgtgtgcccagcctttggaaccga

SEQ ID NO: 396360 - DNA, 30 bp, Artificial Sequence
  Synthetic oligonucleotide
ggtgatctacgtctctggcacaataaccga

SEQ ID NO: 396361 - DNA, 30 bp, Artificial Sequence
  Synthetic oligonucleotide
ggctaatacgaagaatttagtcttaaccga

SEQ ID NO: 396362 - DNA, 30 bp, Artificial Sequence
  Synthetic oligonucleotide
acatcagcaggggattattaattacaccga

SEQ ID NO: 396363 - DNA, 30 bp, Artificial Sequence
  Synthetic oligonucleotide
gcagcagattgtttaatatttacccaccga

SEQ ID NO: 396364 - DNA, 30 bp, Artificial Sequence
  Synthetic oligonucleotide
agtgaagcgtttgcctgtatgtggcaccga

SEQ ID NO: 396365 - DNA, 30 bp, Artificial Sequence
  Synthetic oligonucleotide
gatacaatgtccgcccaaagtaatcaccga

SEQ ID NO: 396366 - DNA, 30 bp, Artificial Sequence
  Synthetic oligonucleotide
gtgcgtctcaacctaccactggatcaccga

SEQ ID NO: 396367 - DNA, 30 bp, Artificial Sequence
  Synthetic oligonucleotide
agcttagcttagctcggcaacggagaccga

SEQ ID NO: 396368 - DNA, 30 bp, Artificial Sequence
  Synthetic oligonucleotide
tcatgttatttatagatagttatagaccga

SEQ ID NO: 396369 - DNA, 30 bp, Artificial Sequence
  Synthetic oligonucleotide
tgttctctttatgtcaggactgggtaccga

SEQ ID NO: 396370 - DNA, 30 bp, Artificial Sequence
  Synthetic oligonucleotide
actactatttgttcatcatattcaacccga

SEQ ID NO: 396371 - DNA, 30 bp, Artificial Sequence
  Synthetic oligonucleotide
ctagtgaccggtgaagatggggtaacccga

SEQ ID NO: 396372 - DNA, 31 bp, Artificial Sequence
  Synthetic oligonucleotide
gtcatgtcagacactgccataaggaccccga

SEQ ID NO: 396373 - DNA, 30 bp, Artificial Sequence
  Synthetic oligonucleotide
aatcaaaacaccccttactaatacccccga

SEQ ID NO: 396374 - DNA, 30 bp, Artificial Sequence
  Synthetic oligonucleotide
ctcatgttctagaatgtatgatagccccga

SEQ ID NO: 396375 - DNA, 30 bp, Artificial Sequence
  Synthetic oligonucleotide
ctgccagttcaatggaagaggtttccccga

SEQ ID NO: 396376 - DNA, 30 bp, Artificial Sequence
  Synthetic oligonucleotide
ggatcctacgttaaggctaggtttccccga

SEQ ID NO: 396377 - DNA, 30 bp, Artificial Sequence
  Synthetic oligonucleotide
attaaaagaggccattcttgatgagcccga

SEQ ID NO: 396378 - DNA, 30 bp, Artificial Sequence
  Synthetic oligonucleotide
ttcttcgtcctcctggtaatacgcgcccga

SEQ ID NO: 396379 - DNA, 30 bp, Artificial Sequence
  Synthetic oligonucleotide
cttcgcgtagatcgtctattcgcggcccga

SEQ ID NO: 396380 - DNA, 30 bp, Artificial Sequence
  Synthetic oligonucleotide
tgcgctgagtgcgcgagaccccgggcccga

SEQ ID NO: 396381 - DNA, 30 bp, Artificial Sequence
  Synthetic oligonucleotide
cgcagagccctggagggtgaactggcccga

SEQ ID NO: 396382 - DNA, 30 bp, Artificial Sequence
  Synthetic oligonucleotide
cgtaagggcttcagtaacgctattgcccga

SEQ ID NO: 396383 - DNA, 30 bp, Artificial Sequence
  Synthetic oligonucleotide
ctgaagacctgcaatcgaccgccatcccga

SEQ ID NO: 396384 - DNA, 30 bp, Artificial Sequence
  Synthetic oligonucleotide
gtcgcatcgggccagccctatgtttcccga

SEQ ID NO: 396385 - DNA, 30 bp, Artificial Sequence
  Synthetic oligonucleotide
gagttataggatccgcgaggtacaagccga

SEQ ID NO: 396386 - DNA, 30 bp, Artificial Sequence
  Synthetic oligonucleotide
ccttaccagtatatccaactgctaagccga

SEQ ID NO: 396387 - DNA, 30 bp, Artificial Sequence
  Synthetic oligonucleotide
aggtcgtttcattcggtcactcagagccga

SEQ ID NO: 396388 - DNA, 30 bp, Artificial Sequence
  Synthetic oligonucleotide
gcagtcggtcctatttctattatgagccga

SEQ ID NO: 396389 - DNA, 30 bp, Artificial Sequence
  Synthetic oligonucleotide
atgtaggcacatgatggggatcatagccga

SEQ ID NO: 396390 - DNA, 30 bp, Artificial Sequence
  Synthetic oligonucleotide
aaaaattctccgtacatcgtcattagccga

SEQ ID NO: 396391 - DNA, 30 bp, Artificial Sequence
  Synthetic oligonucleotide
tgggaatgagtatggcgtatcccacgccga

SEQ ID NO: 396392 - DNA, 30 bp, Artificial Sequence
  Synthetic oligonucleotide
ttccctgccacgggaacaacccgacgccga

SEQ ID NO: 396393 - DNA, 30 bp, Artificial Sequence
  Synthetic oligonucleotide
tcgacctgtgtggctgaaagagaccgccga

SEQ ID NO: 396394 - DNA, 30 bp, Artificial Sequence
  Synthetic oligonucleotide
gcattttcgcggtcgcggatattgcgccga

SEQ ID NO: 396395 - DNA, 30 bp, Artificial Sequence
  Synthetic oligonucleotide
gtgaaaggcaacttttgtaaccgtcgccga

SEQ ID NO: 396396 - DNA, 30 bp, Artificial Sequence
  Synthetic oligonucleotide
ggggcacgcggccaccttttcattcgccga

SEQ ID NO: 396397 - DNA, 30 bp, Artificial Sequence
  Synthetic oligonucleotide
tatattcctcaccgcccagtggaaggccga

SEQ ID NO: 396398 - DNA, 30 bp, Artificial Sequence
  Synthetic oligonucleotide
tagttggctcatgcgaaccgacccggccga

SEQ ID NO: 396399 - DNA, 30 bp, Artificial Sequence
  Synthetic oligonucleotide
ttacactaatcgcagtccaccagcggccga

SEQ ID NO: 396400 - DNA, 30 bp, Artificial Sequence
  Synthetic oligonucleotide
agtagagaggcagggtgctacctcggccga

SEQ ID NO: 396401 - DNA, 30 bp, Artificial Sequence
  Synthetic oligonucleotide
gaacggtttggacatcttcgcttgggccga

SEQ ID NO: 396402 - DNA, 30 bp, Artificial Sequence
  Synthetic oligonucleotide
cccattggtgtagttctagcgtctggccga

SEQ ID NO: 396403 - DNA, 30 bp, Artificial Sequence
  Synthetic oligonucleotide
caactcgggtaatatattagcggtggccga

SEQ ID NO: 396404 - DNA, 30 bp, Artificial Sequence
  Synthetic oligonucleotide
gttgctcataaaagtgttaactttggccga

SEQ ID NO: 396405 - DNA, 30 bp, Artificial Sequence
  Synthetic oligonucleotide
ttctgcatatctgatcaatgcaaatgccga

SEQ ID NO: 396406 - DNA, 30 bp, Artificial Sequence
  Synthetic oligonucleotide
ggacatattacttttttctactggtgccga

SEQ ID NO: 396407 - DNA, 30 bp, Artificial Sequence
  Synthetic oligonucleotide
agggtgctctggtggcagctgttgtgccga

SEQ ID NO: 396408 - DNA, 30 bp, Artificial Sequence
  Synthetic oligonucleotide
gtttggataagcacagtcataggttgccga

SEQ ID NO: 396409 - DNA, 30 bp, Artificial Sequence
  Synthetic oligonucleotide
tgaccgccaggtatacggcgttgttgccga

SEQ ID NO: 396410 - DNA, 30 bp, Artificial Sequence
  Synthetic oligonucleotide
atttaaaccgcgtcgcctgtttaaatccga

SEQ ID NO: 396411 - DNA, 30 bp, Artificial Sequence
  Synthetic oligonucleotide
ccatcttgtacgacgcaaagctgaatccga

SEQ ID NO: 396412 - DNA, 30 bp, Artificial Sequence
  Synthetic oligonucleotide
cgccattcacctcagccaacggagatccga

SEQ ID NO: 396413 - DNA, 30 bp, Artificial Sequence
  Synthetic oligonucleotide
tcgtttatattatacagtaattagatccga

SEQ ID NO: 396414 - DNA, 30 bp, Artificial Sequence
  Synthetic oligonucleotide
tagcaaagagaggaacctctgcctatccga

SEQ ID NO: 396415 - DNA, 30 bp, Artificial Sequence
  Synthetic oligonucleotide
aatcaagttcgcgagctatgtccactccga

SEQ ID NO: 396416 - DNA, 30 bp, Artificial Sequence
  Synthetic oligonucleotide
gtattatacgtaaagggaaatcgtctccga

SEQ ID NO: 396417 - DNA, 30 bp, Artificial Sequence
  Synthetic oligonucleotide
tgaaaattaccgggacgacatcgtctccga

SEQ ID NO: 396418 - DNA, 30 bp, Artificial Sequence
  Synthetic oligonucleotide
cataaagcccttccactgggtcccgtccga

SEQ ID NO: 396419 - DNA, 30 bp, Artificial Sequence
  Synthetic oligonucleotide
gcaattgctttgagtaaatgtacattccga

SEQ ID NO: 396420 - DNA, 30 bp, Artificial Sequence
  Synthetic oligonucleotide
gacggcggtagaacacttatgtgattccga

SEQ ID NO: 396421 - DNA, 30 bp, Artificial Sequence
  Synthetic oligonucleotide
cgcgttagggccttagagtgtatattccga

SEQ ID NO: 396422 - DNA, 30 bp, Artificial Sequence
  Synthetic oligonucleotide
attgaagttaaggctagtactgtattccga

SEQ ID NO: 396423 - DNA, 30 bp, Artificial Sequence
  Synthetic oligonucleotide
aaatcatcagttgtttattagatcttccga

SEQ ID NO: 396424 - DNA, 30 bp, Artificial Sequence
  Synthetic oligonucleotide
caagcacttaggccacgcgccctcttccga

SEQ ID NO: 396425 - DNA, 30 bp, Artificial Sequence
  Synthetic oligonucleotide
agctcgaaatgaagcgacgattcgttccga

SEQ ID NO: 396426 - DNA, 30 bp, Artificial Sequence
  Synthetic oligonucleotide
cgcaccaaacatgagtgctattggttccga

SEQ ID NO: 396427 - DNA, 30 bp, Artificial Sequence
  Synthetic oligonucleotide
tgggacaatgggagccgcaattttttccga

SEQ ID NO: 396428 - DNA, 30 bp, Artificial Sequence
  Synthetic oligonucleotide
gctctcctgtactgttcggcggtaaagcga

SEQ ID NO: 396429 - DNA, 30 bp, Artificial Sequence
  Synthetic oligonucleotide
catcggcgtttgaaacgctacgacaagcga

SEQ ID NO: 396430 - DNA, 30 bp, Artificial Sequence
  Synthetic oligonucleotide
ttgcatgattctctgttcctatccaagcga

SEQ ID NO: 396431 - DNA, 30 bp, Artificial Sequence
  Synthetic oligonucleotide
actctctaccacctcaatatttcgaagcga

SEQ ID NO: 396432 - DNA, 30 bp, Artificial Sequence
  Synthetic oligonucleotide
tatacccgctatgtcagcgggaggaagcga

SEQ ID NO: 396433 - DNA, 29 bp, Artificial Sequence
  Synthetic oligonucleotide
agggttgaacgtagtagcggcgtaagcga

SEQ ID NO: 396434 - DNA, 30 bp, Artificial Sequence
  Synthetic oligonucleotide
ctacagcattaaagggcgcgggaacagcga

SEQ ID NO: 396435 - DNA, 30 bp, Artificial Sequence
  Synthetic oligonucleotide
ttgtgacaactgactacagacccgcagcga

SEQ ID NO: 396436 - DNA, 30 bp, Artificial Sequence
  Synthetic oligonucleotide
aagtgtttcgacagccagactgcgcagcga

SEQ ID NO: 396437 - DNA, 30 bp, Artificial Sequence
  Synthetic oligonucleotide
tatgtatgacagcccatactatggcagcga

SEQ ID NO: 396438 - DNA, 30 bp, Artificial Sequence
  Synthetic oligonucleotide
caaagacgaatttagggcttcattcagcga

SEQ ID NO: 396439 - DNA, 30 bp, Artificial Sequence
  Synthetic oligonucleotide
gtaaaagagatgctctttattgaagagcga

SEQ ID NO: 396440 - DNA, 30 bp, Artificial Sequence
  Synthetic oligonucleotide
gcgatggtcaacggcagttttccggagcga

SEQ ID NO: 396441 - DNA, 30 bp, Artificial Sequence
  Synthetic oligonucleotide
tctagtagcttaatcacacatggggagcga

SEQ ID NO: 396442 - DNA, 30 bp, Artificial Sequence
  Synthetic oligonucleotide
atgcctcggaaatgtcgttgtctggagcga

SEQ ID NO: 396443 - DNA, 30 bp, Artificial Sequence
  Synthetic oligonucleotide
tattacgtagcttaaaatatgattgagcga

SEQ ID NO: 396444 - DNA, 30 bp, Artificial Sequence
  Synthetic oligonucleotide
gttcgcctgtttaatcctggaaaatagcga

SEQ ID NO: 396445 - DNA, 30 bp, Artificial Sequence
  Synthetic oligonucleotide
gtgatgctcacggtatccaaagaatagcga

SEQ ID NO: 396446 - DNA, 30 bp, Artificial Sequence
  Synthetic oligonucleotide
gcggtcatcgttgagaggtcagactagcga

SEQ ID NO: 396447 - DNA, 30 bp, Artificial Sequence
  Synthetic oligonucleotide
ggattccgattgaggccttagggctagcga

SEQ ID NO: 396448 - DNA, 30 bp, Artificial Sequence
  Synthetic oligonucleotide
tggcgagagcatcggatttcagtctagcga

SEQ ID NO: 396449 - DNA, 30 bp, Artificial Sequence
  Synthetic oligonucleotide
tccgctataagtcgagcagacaagtagcga

SEQ ID NO: 396450 - DNA, 30 bp, Artificial Sequence
  Synthetic oligonucleotide
aatccggtctgggtgaagcaggggtagcga

SEQ ID NO: 396451 - DNA, 30 bp, Artificial Sequence
  Synthetic oligonucleotide
ttaagttggctcacggtagtatggtagcga

SEQ ID NO: 396452 - DNA, 30 bp, Artificial Sequence
  Synthetic oligonucleotide
cagttgtcactttgccagtctcaaacgcga

SEQ ID NO: 396453 - DNA, 30 bp, Artificial Sequence
  Synthetic oligonucleotide
acaaagcacgcaggaaaggctgtcacgcga

SEQ ID NO: 396454 - DNA, 30 bp, Artificial Sequence
  Synthetic oligonucleotide
agactccttgggtggtgccgtgtcacgcga

SEQ ID NO: 396455 - DNA, 31 bp, Artificial Sequence
  Synthetic oligonucleotide
agcggcccggaagatagcatactagacgcga

SEQ ID NO: 396456 - DNA, 30 bp, Artificial Sequence
  Synthetic oligonucleotide
cgtaatccgctagcagcccttccgacgcga

SEQ ID NO: 396457 - DNA, 30 bp, Artificial Sequence
  Synthetic oligonucleotide
gtcttcttagaggcgccctcaaatacgcga

SEQ ID NO: 396458 - DNA, 30 bp, Artificial Sequence
  Synthetic oligonucleotide
gtgtgtcggtctcggatatacgctacgcga

SEQ ID NO: 396459 - DNA, 30 bp, Artificial Sequence
  Synthetic oligonucleotide
ctcataagtgaaaccgcaagtattacgcga

SEQ ID NO: 396460 - DNA, 30 bp, Artificial Sequence
  Synthetic oligonucleotide
gtatcctgaatgtgtaactcgtaaccgcga

SEQ ID NO: 396461 - DNA, 30 bp, Artificial Sequence
  Synthetic oligonucleotide
gatgattatcataacccacggtaaccgcga

SEQ ID NO: 396462 - DNA, 30 bp, Artificial Sequence
  Synthetic oligonucleotide
ttcctagatgttacaagtcggcccccgcga

SEQ ID NO: 396463 - DNA, 30 bp, Artificial Sequence
  Synthetic oligonucleotide
gagcgggcagccagatctccccatccgcga

SEQ ID NO: 396464 - DNA, 30 bp, Artificial Sequence
  Synthetic oligonucleotide
atacttggatgtatggattattttccgcga

SEQ ID NO: 396465 - DNA, 30 bp, Artificial Sequence
  Synthetic oligonucleotide
aggatagcgcatcgctgtgccctagcgcga

SEQ ID NO: 396466 - DNA, 30 bp, Artificial Sequence
  Synthetic oligonucleotide
catcattctattacttcaggtatggcgcga

SEQ ID NO: 396467 - DNA, 30 bp, Artificial Sequence
  Synthetic oligonucleotide
catctagcttaagaacccatgtatgcgcga

SEQ ID NO: 396468 - DNA, 30 bp, Artificial Sequence
  Synthetic oligonucleotide
acactagccgccaagcatgtcgctgcgcga

SEQ ID NO: 396469 - DNA, 30 bp, Artificial Sequence
  Synthetic oligonucleotide
gaggaaggaccaatggcccaccgctcgcga

SEQ ID NO: 396470 - DNA, 30 bp, Artificial Sequence
  Synthetic oligonucleotide
gcatcgttgctgagatgcaagagttcgcga

SEQ ID NO: 396471 - DNA, 30 bp, Artificial Sequence
  Synthetic oligonucleotide
ggcatcatcccatgcacacaatgttcgcga

SEQ ID NO: 396472 - DNA, 30 bp, Artificial Sequence
  Synthetic oligonucleotide
cctacttgggaaagcactaccttttcgcga

SEQ ID NO: 396473 - DNA, 30 bp, Artificial Sequence
  Synthetic oligonucleotide
cctttgtttagctgcaaaaattgaaggcga

SEQ ID NO: 396474 - DNA, 30 bp, Artificial Sequence
  Synthetic oligonucleotide
accaacaggggttgactctgttgaaggcga

SEQ ID NO: 396475 - DNA, 30 bp, Artificial Sequence
  Synthetic oligonucleotide
cgcggacattgaccgtcaacgcacaggcga

SEQ ID NO: 396476 - DNA, 30 bp, Artificial Sequence
  Synthetic oligonucleotide
tgaatgccatcgaccaccgggtacaggcga

SEQ ID NO: 396477 - DNA, 30 bp, Artificial Sequence
  Synthetic oligonucleotide
ctgtttcctgtagtgtggaaatgcaggcga

SEQ ID NO: 396478 - DNA, 30 bp, Artificial Sequence
  Synthetic oligonucleotide
ggtttccaatctcgtagctatgtcaggcga

SEQ ID NO: 396479 - DNA, 30 bp, Artificial Sequence
  Synthetic oligonucleotide
tggtctcctcctagtccaacgtaacggcga

SEQ ID NO: 396480 - DNA, 30 bp, Artificial Sequence
  Synthetic oligonucleotide
tgtccggtcaaggactctgcagcacggcga

SEQ ID NO: 396481 - DNA, 31 bp, Artificial Sequence
  Synthetic oligonucleotide
aacgtgcctgccgatatatggaatccggcga

SEQ ID NO: 396482 - DNA, 30 bp, Artificial Sequence
  Synthetic oligonucleotide
ataagctgatcttaaactaagatccggcga

SEQ ID NO: 396483 - DNA, 30 bp, Artificial Sequence
  Synthetic oligonucleotide
cggtcatgttggcgacaacggacgcggcga

SEQ ID NO: 396484 - DNA, 30 bp, Artificial Sequence
  Synthetic oligonucleotide
tcgaatgcatgtcgacgcctggcgcggcga

SEQ ID NO: 396485 - DNA, 30 bp, Artificial Sequence
  Synthetic oligonucleotide
ggaacgtaacttcgctaacagtgtcggcga

SEQ ID NO: 396486 - DNA, 30 bp, Artificial Sequence
  Synthetic oligonucleotide
gatggctctctaaattcaaagattcggcga

SEQ ID NO: 396487 - DNA, 30 bp, Artificial Sequence
  Synthetic oligonucleotide
gatatacgtcgccacgtgcatctagggcga

SEQ ID NO: 396488 - DNA, 30 bp, Artificial Sequence
  Synthetic oligonucleotide
ttgacacgcgtcaggagaggcacggggcga

SEQ ID NO: 396489 - DNA, 30 bp, Artificial Sequence
  Synthetic oligonucleotide
tccacgcttgtctgtgtcgagtttgggcga

SEQ ID NO: 396490 - DNA, 30 bp, Artificial Sequence
  Synthetic oligonucleotide
aaaccacgtgtgagtcgtgtaaaatggcga

SEQ ID NO: 396491 - DNA, 30 bp, Artificial Sequence
  Synthetic oligonucleotide
gacgctagtgtgcaggcttgtgaatggcga

SEQ ID NO: 396492 - DNA, 30 bp, Artificial Sequence
  Synthetic oligonucleotide
gctcgctagctcaccttagacttatggcga

SEQ ID NO: 396493 - DNA, 30 bp, Artificial Sequence
  Synthetic oligonucleotide
gctttgacttttattatatcggcgtggcga

SEQ ID NO: 396494 - DNA, 30 bp, Artificial Sequence
  Synthetic oligonucleotide
gagctagcttttttcaagtctgcttggcga

SEQ ID NO: 396495 - DNA, 30 bp, Artificial Sequence
  Synthetic oligonucleotide
actataggaactccgaggcgtcacatgcga

SEQ ID NO: 396496 - DNA, 30 bp, Artificial Sequence
  Synthetic oligonucleotide
ttcctatgaattttaagtttcatcatgcga

SEQ ID NO: 396497 - DNA, 30 bp, Artificial Sequence
  Synthetic oligonucleotide
gaaaatctaattgcggacatggtcatgcga

SEQ ID NO: 396498 - DNA, 30 bp, Artificial Sequence
  Synthetic oligonucleotide
cctcccagttattctaatcacacgatgcga

SEQ ID NO: 396499 - DNA, 30 bp, Artificial Sequence
  Synthetic oligonucleotide
ttcgtaaagatgaaatgccgccggatgcga

SEQ ID NO: 396500 - DNA, 30 bp, Artificial Sequence
  Synthetic oligonucleotide
tcgcaacaggtaatccaattcgggatgcga

SEQ ID NO: 396501 - DNA, 30 bp, Artificial Sequence
  Synthetic oligonucleotide
gaaatgcgttttaccgacattctgatgcga

SEQ ID NO: 396502 - DNA, 30 bp, Artificial Sequence
  Synthetic oligonucleotide
ctgacattcgtagccgctttagtgatgcga

SEQ ID NO: 396503 - DNA, 30 bp, Artificial Sequence
  Synthetic oligonucleotide
gttagcacctctgcaagatctgatatgcga

SEQ ID NO: 396504 - DNA, 30 bp, Artificial Sequence
  Synthetic oligonucleotide
tcctggtgctcggtggaccggtctatgcga

SEQ ID NO: 396505 - DNA, 30 bp, Artificial Sequence
  Synthetic oligonucleotide
gcattgttgctatcaatatggcttatgcga

SEQ ID NO: 396506 - DNA, 30 bp, Artificial Sequence
  Synthetic oligonucleotide
tcttgttgattttcttggactgttatgcga

SEQ ID NO: 396507 - DNA, 30 bp, Artificial Sequence
  Synthetic oligonucleotide
gtataaaaacaatgggttatgctactgcga

SEQ ID NO: 396508 - DNA, 30 bp, Artificial Sequence
  Synthetic oligonucleotide
tgtagcataatcgtctatttcttactgcga

SEQ ID NO: 396509 - DNA, 30 bp, Artificial Sequence
  Synthetic oligonucleotide
atttggaatttggaggcgactccgctgcga

SEQ ID NO: 396510 - DNA, 30 bp, Artificial Sequence
  Synthetic oligonucleotide
actttggcgttattttttaccgcgctgcga

SEQ ID NO: 396511 - DNA, 30 bp, Artificial Sequence
  Synthetic oligonucleotide
cgtccattcaaattaccgctactgctgcga

SEQ ID NO: 396512 - DNA, 30 bp, Artificial Sequence
  Synthetic oligonucleotide
aatactacctctgacagtatcgtgctgcga

SEQ ID NO: 396513 - DNA, 30 bp, Artificial Sequence
  Synthetic oligonucleotide
attctcttcaatttcacatgaggagtgcga

SEQ ID NO: 396514 - DNA, 30 bp, Artificial Sequence
  Synthetic oligonucleotide
gagcttctctctgacgatcacaatgtgcga

SEQ ID NO: 396515 - DNA, 30 bp, Artificial Sequence
  Synthetic oligonucleotide
agctaggggaattttcgttccgctgtgcga

SEQ ID NO: 396516 - DNA, 30 bp, Artificial Sequence
  Synthetic oligonucleotide
tcgaatcgattttccctgcagcacaatcga

SEQ ID NO: 396517 - DNA, 30 bp, Artificial Sequence
  Synthetic oligonucleotide
aggtgtagtaagccaccttggatcaatcga

SEQ ID NO: 396518 - DNA, 30 bp, Artificial Sequence
  Synthetic oligonucleotide
tgaagcagccaattgcaaggtgcgaatcga

SEQ ID NO: 396519 - DNA, 30 bp, Artificial Sequence
  Synthetic oligonucleotide
cagcaaagtatccgtttctctaggaatcga

SEQ ID NO: 396520 - DNA, 30 bp, Artificial Sequence
  Synthetic oligonucleotide
ctacttgaatgtcttgctctgtagcatcga

SEQ ID NO: 396521 - DNA, 30 bp, Artificial Sequence
  Synthetic oligonucleotide
attggatatagtcctcagcttgttcatcga

SEQ ID NO: 396522 - DNA, 30 bp, Artificial Sequence
  Synthetic oligonucleotide
gcgtcaggggtacacctgccttcagatcga

SEQ ID NO: 396523 - DNA, 30 bp, Artificial Sequence
  Synthetic oligonucleotide
ggccctgctatctaacggtctaacgatcga

SEQ ID NO: 396524 - DNA, 30 bp, Artificial Sequence
  Synthetic oligonucleotide
cggatgcccgaagatcggaacttcgatcga

SEQ ID NO: 396525 - DNA, 30 bp, Artificial Sequence
  Synthetic oligonucleotide
tcatctgccgaggcagcggttcatgatcga

SEQ ID NO: 396526 - DNA, 30 bp, Artificial Sequence
  Synthetic oligonucleotide
ggactcgccaaaggttttaattatgatcga

SEQ ID NO: 396527 - DNA, 30 bp, Artificial Sequence
  Synthetic oligonucleotide
cagagcgtcagcatcctcgtgcgctatcga

SEQ ID NO: 396528 - DNA, 30 bp, Artificial Sequence
  Synthetic oligonucleotide
attttgacatcactagtgaggcgcactcga

SEQ ID NO: 396529 - DNA, 30 bp, Artificial Sequence
  Synthetic oligonucleotide
aaattatgacgatatgagaatgctactcga

SEQ ID NO: 396530 - DNA, 30 bp, Artificial Sequence
  Synthetic oligonucleotide
aattaactagccaccgctccgcttactcga

SEQ ID NO: 396531 - DNA, 30 bp, Artificial Sequence
  Synthetic oligonucleotide
gtaaacgcctacagtatcacgaaacctcga

SEQ ID NO: 396532 - DNA, 30 bp, Artificial Sequence
  Synthetic oligonucleotide
ttgccagattattccgtatctcgacctcga

SEQ ID NO: 396533 - DNA, 30 bp, Artificial Sequence
  Synthetic oligonucleotide
attgctcacaagggacccgaaggagctcga

SEQ ID NO: 396534 - DNA, 30 bp, Artificial Sequence
  Synthetic oligonucleotide
gctcagcgtagccatgaacgctacgctcga

SEQ ID NO: 396535 - DNA, 30 bp, Artificial Sequence
  Synthetic oligonucleotide
acctcttcgtacaagtaattaagggctcga

SEQ ID NO: 396536 - DNA, 30 bp, Artificial Sequence
  Synthetic oligonucleotide
agaagctgtcaggtcgcgcagtgggctcga

SEQ ID NO: 396537 - DNA, 30 bp, Artificial Sequence
  Synthetic oligonucleotide
ttacaggcagcaatcacaaacgctgctcga

SEQ ID NO: 396538 - DNA, 30 bp, Artificial Sequence
  Synthetic oligonucleotide
gttggttagccattatcgttctgtgctcga

SEQ ID NO: 396539 - DNA, 30 bp, Artificial Sequence
  Synthetic oligonucleotide
ctgaataagctcgaggcgggaaaatctcga

SEQ ID NO: 396540 - DNA, 30 bp, Artificial Sequence
  Synthetic oligonucleotide
gcatgaggagtcgatgtatttctatctcga

SEQ ID NO: 396541 - DNA, 30 bp, Artificial Sequence
  Synthetic oligonucleotide
gaaactcgaatgttatctgtacactctcga

SEQ ID NO: 396542 - DNA, 30 bp, Artificial Sequence
  Synthetic oligonucleotide
gatgcatgtatgactcagtgcgactctcga

SEQ ID NO: 396543 - DNA, 30 bp, Artificial Sequence
  Synthetic oligonucleotide
tttgccactaagcgggcttttcgctctcga

SEQ ID NO: 396544 - DNA, 30 bp, Artificial Sequence
  Synthetic oligonucleotide
ttagagcgagatgtagtcacttcgtctcga

SEQ ID NO: 396545 - DNA, 30 bp, Artificial Sequence
  Synthetic oligonucleotide
cattgtcgcaggacagtaaacgcttctcga

SEQ ID NO: 396546 - DNA, 30 bp, Artificial Sequence
  Synthetic oligonucleotide
tgttaccttcgatgggcgttgtaaagtcga

SEQ ID NO: 396547 - DNA, 30 bp, Artificial Sequence
  Synthetic oligonucleotide
tcttcgatctaaagtctgcacccaagtcga

SEQ ID NO: 396548 - DNA, 30 bp, Artificial Sequence
  Synthetic oligonucleotide
ttgtggcataacgagtgcgatggcagtcga

SEQ ID NO: 396549 - DNA, 30 bp, Artificial Sequence
  Synthetic oligonucleotide
aggttggatattgacgattacaagagtcga

SEQ ID NO: 396550 - DNA, 30 bp, Artificial Sequence
  Synthetic oligonucleotide
tagaagttttttaggcaggagacacgtcga

SEQ ID NO: 396551 - DNA, 30 bp, Artificial Sequence
  Synthetic oligonucleotide
gaaatgggctagagtgaggctgtccgtcga

SEQ ID NO: 396552 - DNA, 30 bp, Artificial Sequence
  Synthetic oligonucleotide
cgctagctttgcgcacccttgcaaggtcga

SEQ ID NO: 396553 - DNA, 30 bp, Artificial Sequence
  Synthetic oligonucleotide
tgtatgcagcagtagtaagttcaaggtcga

SEQ ID NO: 396554 - DNA, 30 bp, Artificial Sequence
  Synthetic oligonucleotide
gattacgcacttaaaggactctcaggtcga

SEQ ID NO: 396555 - DNA, 30 bp, Artificial Sequence
  Synthetic oligonucleotide
ctaaggtggatgttggtgggatagggtcga

SEQ ID NO: 396556 - DNA, 30 bp, Artificial Sequence
  Synthetic oligonucleotide
gatgctagtgcatttcaacataatggtcga

SEQ ID NO: 396557 - DNA, 30 bp, Artificial Sequence
  Synthetic oligonucleotide
actcaggggcccggaacgccctatggtcga

SEQ ID NO: 396558 - DNA, 30 bp, Artificial Sequence
  Synthetic oligonucleotide
tggttccgaagcagctcgtaaggtggtcga

SEQ ID NO: 396559 - DNA, 30 bp, Artificial Sequence
  Synthetic oligonucleotide
gtaatatttataaagggctttaaatgtcga

SEQ ID NO: 396560 - DNA, 30 bp, Artificial Sequence
  Synthetic oligonucleotide
ctcgcgtttaatcgtaaggaatactgtcga

SEQ ID NO: 396561 - DNA, 30 bp, Artificial Sequence
  Synthetic oligonucleotide
gccagtaacggtacaacctaatattgtcga

SEQ ID NO: 396562 - DNA, 30 bp, Artificial Sequence
  Synthetic oligonucleotide
aggaattttggtcgacactgttattgtcga

SEQ ID NO: 396563 - DNA, 30 bp, Artificial Sequence
  Synthetic oligonucleotide
agtgttagtagagttagctagatttgtcga

SEQ ID NO: 396564 - DNA, 30 bp, Artificial Sequence
  Synthetic oligonucleotide
atagtgcagtcccgaaatgccaaaattcga

SEQ ID NO: 396565 - DNA, 30 bp, Artificial Sequence
  Synthetic oligonucleotide
ttgtatgagaacgcgcgtggtcgaattcga

SEQ ID NO: 396566 - DNA, 30 bp, Artificial Sequence
  Synthetic oligonucleotide
gcacctgtcatatgctcttttgcgattcga

SEQ ID NO: 396567 - DNA, 30 bp, Artificial Sequence
  Synthetic oligonucleotide
ccggcaaacatcttacgttattatattcga

SEQ ID NO: 396568 - DNA, 30 bp, Artificial Sequence
  Synthetic oligonucleotide
accctctcccagagtaccgcgcctattcga

SEQ ID NO: 396569 - DNA, 30 bp, Artificial Sequence
  Synthetic oligonucleotide
gtggatctaggggacgactgatgtattcga

SEQ ID NO: 396570 - DNA, 30 bp, Artificial Sequence
  Synthetic oligonucleotide
tatacccgagtttcaccgggcggacttcga

SEQ ID NO: 396571 - DNA, 30 bp, Artificial Sequence
  Synthetic oligonucleotide
tttccggtaataagatagtcgtgccttcga

SEQ ID NO: 396572 - DNA, 30 bp, Artificial Sequence
  Synthetic oligonucleotide
ttaacacccgagtgctcattaccgcttcga

SEQ ID NO: 396573 - DNA, 30 bp, Artificial Sequence
  Synthetic oligonucleotide
tcaggactttacacgtttgccccgcttcga

SEQ ID NO: 396574 - DNA, 30 bp, Artificial Sequence
  Synthetic oligonucleotide
gtgagtcctggtaccgtcgacagtcttcga

SEQ ID NO: 396575 - DNA, 30 bp, Artificial Sequence
  Synthetic oligonucleotide
tcaaaattacacgtcgctttctacgttcga

SEQ ID NO: 396576 - DNA, 30 bp, Artificial Sequence
  Synthetic oligonucleotide
ccccctcggcccatcagtggaagcgttcga

SEQ ID NO: 396577 - DNA, 30 bp, Artificial Sequence
  Synthetic oligonucleotide
tgacactaccgttgtcacagatcggttcga

SEQ ID NO: 396578 - DNA, 30 bp, Artificial Sequence
  Synthetic oligonucleotide
attaagtacgttgacagaatagctgttcga

SEQ ID NO: 396579 - DNA, 30 bp, Artificial Sequence
  Synthetic oligonucleotide
tctgaggcgcaaacggaaccacgtgttcga

SEQ ID NO: 396580 - DNA, 30 bp, Artificial Sequence
  Synthetic oligonucleotide
ctaccccatgactcgggcactaaatttcga

SEQ ID NO: 396581 - DNA, 30 bp, Artificial Sequence
  Synthetic oligonucleotide
tccgaccgttgtcagcacaaacaatttcga

SEQ ID NO: 396582 - DNA, 30 bp, Artificial Sequence
  Synthetic oligonucleotide
ctaaagtcttcatagtatatgaactttcga

SEQ ID NO: 396583 - DNA, 30 bp, Artificial Sequence
  Synthetic oligonucleotide
tactaatggattcgaaaggactgctttcga

SEQ ID NO: 396584 - DNA, 30 bp, Artificial Sequence
  Synthetic oligonucleotide
acatctaacgcctgtattctcccgtttcga

SEQ ID NO: 396585 - DNA, 31 bp, Artificial Sequence
  Synthetic oligonucleotide
aacaaagtctatgcgtagaatattgtttcga

SEQ ID NO: 396586 - DNA, 30 bp, Artificial Sequence
  Synthetic oligonucleotide
gtagtgacctaagacgctcgaacttttcga

SEQ ID NO: 396587 - DNA, 30 bp, Artificial Sequence
  Synthetic oligonucleotide
gattccagacgcataccgtcataaaaagga

SEQ ID NO: 396588 - DNA, 30 bp, Artificial Sequence
  Synthetic oligonucleotide
gaagcctgtggtctgcaacggcacaaagga

SEQ ID NO: 396589 - DNA, 30 bp, Artificial Sequence
  Synthetic oligonucleotide
cccttgagataatgcacgtctacgaaagga

SEQ ID NO: 396590 - DNA, 30 bp, Artificial Sequence
  Synthetic oligonucleotide
ttagatgtgcggtcattcggtaggaaagga

SEQ ID NO: 396591 - DNA, 30 bp, Artificial Sequence
  Synthetic oligonucleotide
aacggcttttttgcaattatcgggaaagga

SEQ ID NO: 396592 - DNA, 30 bp, Artificial Sequence
  Synthetic oligonucleotide
cattactgggagctcaccgatgtgaaagga

SEQ ID NO: 396593 - DNA, 30 bp, Artificial Sequence
  Synthetic oligonucleotide
tgttcgtccgtaggacacaagttccaagga

SEQ ID NO: 396594 - DNA, 30 bp, Artificial Sequence
  Synthetic oligonucleotide
tttacaatacgtctctgtgtgcagcaagga

SEQ ID NO: 396595 - DNA, 30 bp, Artificial Sequence
  Synthetic oligonucleotide
tgatccttggggaatataggggagcaagga

SEQ ID NO: 396596 - DNA, 29 bp, Artificial Sequence
  Synthetic oligonucleotide
actatttagaaaatttaagggcgcaagga

SEQ ID NO: 396597 - DNA, 30 bp, Artificial Sequence
  Synthetic oligonucleotide
ttacactaaacatggctaggtgggcaagga

SEQ ID NO: 396598 - DNA, 30 bp, Artificial Sequence
  Synthetic oligonucleotide
taggacctgtgggccggtgccttgcaagga

SEQ ID NO: 396599 - DNA, 30 bp, Artificial Sequence
  Synthetic oligonucleotide
tttagttcacttcgatctagcttgcaagga

SEQ ID NO: 396600 - DNA, 30 bp, Artificial Sequence
  Synthetic oligonucleotide
attcttgaattggaaaatgtcgatcaagga

SEQ ID NO: 396601 - DNA, 30 bp, Artificial Sequence
  Synthetic oligonucleotide
cgcaccggaagccgtccatttagtcaagga

SEQ ID NO: 396602 - DNA, 30 bp, Artificial Sequence
  Synthetic oligonucleotide
gccaacttgtaatgcactctagttcaagga

SEQ ID NO: 396603 - DNA, 30 bp, Artificial Sequence
  Synthetic oligonucleotide
caaaattttgtcggctatggctaagaagga

SEQ ID NO: 396604 - DNA, 30 bp, Artificial Sequence
  Synthetic oligonucleotide
tttggacggggtggatggatagcagaagga

SEQ ID NO: 396605 - DNA, 30 bp, Artificial Sequence
  Synthetic oligonucleotide
gatgttccgctttttctatgatcagaagga

SEQ ID NO: 396606 - DNA, 30 bp, Artificial Sequence
  Synthetic oligonucleotide
atttcaattgtcggttgcgatcaggaagga

SEQ ID NO: 396607 - DNA, 30 bp, Artificial Sequence
  Synthetic oligonucleotide
tgtctgctgtacgagcagcgtcaggaagga

SEQ ID NO: 396608 - DNA, 30 bp, Artificial Sequence
  Synthetic oligonucleotide
ccccgtacataaatagactccatggaagga

SEQ ID NO: 396609 - DNA, 30 bp, Artificial Sequence
  Synthetic oligonucleotide
ccagatgtacacagtgctcgtgttgaagga

SEQ ID NO: 396610 - DNA, 30 bp, Artificial Sequence
  Synthetic oligonucleotide
tggaacctccggtccccgggggcataagga

SEQ ID NO: 396611 - DNA, 30 bp, Artificial Sequence
  Synthetic oligonucleotide
ttcgaggagttttttacagcattctaagga

SEQ ID NO: 396612 - DNA, 30 bp, Artificial Sequence
  Synthetic oligonucleotide
catttcgagtttactcctgacacgtaagga

SEQ ID NO: 396613 - DNA, 30 bp, Artificial Sequence
  Synthetic oligonucleotide
gtttcagcatgtcacgtctagtcgtaagga

SEQ ID NO: 396614 - DNA, 30 bp, Artificial Sequence
  Synthetic oligonucleotide
tgtccgtttgaactttttctacggtaagga

SEQ ID NO: 396615 - DNA, 30 bp, Artificial Sequence
  Synthetic oligonucleotide
aagcagagttcccattggtctatgtaagga

SEQ ID NO: 396616 - DNA, 30 bp, Artificial Sequence
  Synthetic oligonucleotide
aaaggaggttagcactacgcagattaagga

SEQ ID NO: 396617 - DNA, 30 bp, Artificial Sequence
  Synthetic oligonucleotide
aaactaccattgacacacgtacgttaagga

SEQ ID NO: 396618 - DNA, 30 bp, Artificial Sequence
  Synthetic oligonucleotide
tgctgttactatatacaagttaaaacagga

SEQ ID NO: 396619 - DNA, 30 bp, Artificial Sequence
  Synthetic oligonucleotide
cggtccttcgcccgcattagcccaacagga

SEQ ID NO: 396620 - DNA, 30 bp, Artificial Sequence
  Synthetic oligonucleotide
gggcgctgtatttggttgacggcaacagga

SEQ ID NO: 396621 - DNA, 30 bp, Artificial Sequence
  Synthetic oligonucleotide
attttcagaccacttgaactacacacagga

SEQ ID NO: 396622 - DNA, 30 bp, Artificial Sequence
  Synthetic oligonucleotide
tgaggaacgcgtaggtaaaatgacacagga

SEQ ID NO: 396623 - DNA, 30 bp, Artificial Sequence
  Synthetic oligonucleotide
agcagttccacctgcggagtagcgacagga

SEQ ID NO: 396624 - DNA, 30 bp, Artificial Sequence
  Synthetic oligonucleotide
tttcacgtccacccgacatacattacagga

SEQ ID NO: 396625 - DNA, 30 bp, Artificial Sequence
  Synthetic oligonucleotide
gtctcttcatagtgcttctgcattacagga

SEQ ID NO: 396626 - DNA, 30 bp, Artificial Sequence
  Synthetic oligonucleotide
tcacgataacgcggttatcgcttcccagga

SEQ ID NO: 396627 - DNA, 30 bp, Artificial Sequence
  Synthetic oligonucleotide
ttgacggctacgcttggtccaaagccagga

SEQ ID NO: 396628 - DNA, 30 bp, Artificial Sequence
  Synthetic oligonucleotide
accgggggcctgccagcgggggatccagga

SEQ ID NO: 396629 - DNA, 30 bp, Artificial Sequence
  Synthetic oligonucleotide
cagtgctttgtctgccgcgccgaagcagga

SEQ ID NO: 396630 - DNA, 30 bp, Artificial Sequence
  Synthetic oligonucleotide
aaggaaatttttgttcaatgataagcagga

SEQ ID NO: 396631 - DNA, 30 bp, Artificial Sequence
  Synthetic oligonucleotide
atttatagtggggcccataagggagcagga

SEQ ID NO: 396632 - DNA, 30 bp, Artificial Sequence
  Synthetic oligonucleotide
ctcgttgaagctttgtttaagaccgcagga

SEQ ID NO: 396633 - DNA, 30 bp, Artificial Sequence
  Synthetic oligonucleotide
cggtttggacaaggtgcagggcccgcagga

SEQ ID NO: 396634 - DNA, 30 bp, Artificial Sequence
  Synthetic oligonucleotide
cggacacgtcaacccgtggccgccgcagga

SEQ ID NO: 396635 - DNA, 30 bp, Artificial Sequence
  Synthetic oligonucleotide
aaacaaaatactgcgtagggagaggcagga

SEQ ID NO: 396636 - DNA, 30 bp, Artificial Sequence
  Synthetic oligonucleotide
aaatggtcggtactatgagcacttgcagga

SEQ ID NO: 396637 - DNA, 30 bp, Artificial Sequence
  Synthetic oligonucleotide
gtagctaggacccatgcattatttgcagga

SEQ ID NO: 396638 - DNA, 30 bp, Artificial Sequence
  Synthetic oligonucleotide
atagaatccattgtcgtatgtcaatcagga

SEQ ID NO: 396639 - DNA, 31 bp, Artificial Sequence
  Synthetic oligonucleotide
taaagagaatatcgcaattggagcctcagga

SEQ ID NO: 396640 - DNA, 30 bp, Artificial Sequence
  Synthetic oligonucleotide
accagttgggtgagccctcccggctcagga

SEQ ID NO: 396641 - DNA, 30 bp, Artificial Sequence
  Synthetic oligonucleotide
aaactagacttgctacttgtgtgttcagga

SEQ ID NO: 396642 - DNA, 30 bp, Artificial Sequence
  Synthetic oligonucleotide
gagaactgacacaagtatcatgcaagagga

SEQ ID NO: 396643 - DNA, 30 bp, Artificial Sequence
  Synthetic oligonucleotide
cacaggggtttgtaaccgttagtaagagga

SEQ ID NO: 396644 - DNA, 30 bp, Artificial Sequence
  Synthetic oligonucleotide
atcttgcctctcaacggcttgaccagagga

SEQ ID NO: 396645 - DNA, 30 bp, Artificial Sequence
  Synthetic oligonucleotide
gtcatcgggatggggccggtctccagagga

SEQ ID NO: 396646 - DNA, 30 bp, Artificial Sequence
  Synthetic oligonucleotide
taaaggatctagtctatattaggcagagga

SEQ ID NO: 396647 - DNA, 30 bp, Artificial Sequence
  Synthetic oligonucleotide
tcaaatattcgagcttccgtccggagagga

SEQ ID NO: 396648 - DNA, 30 bp, Artificial Sequence
  Synthetic oligonucleotide
ttcccagtgcccttggtgtgcgatagagga

SEQ ID NO: 396649 - DNA, 30 bp, Artificial Sequence
  Synthetic oligonucleotide
tttgttgagtcttccccggtttatagagga

SEQ ID NO: 396650 - DNA, 30 bp, Artificial Sequence
  Synthetic oligonucleotide
cagctgctcaggtcgcggtcaagacgagga

SEQ ID NO: 396651 - DNA, 30 bp, Artificial Sequence
  Synthetic oligonucleotide
cggagggatccttgctatgtcgcccgagga

SEQ ID NO: 396652 - DNA, 30 bp, Artificial Sequence
  Synthetic oligonucleotide
gagtccaaatcttgagtgggactgcgagga

SEQ ID NO: 396653 - DNA, 30 bp, Artificial Sequence
  Synthetic oligonucleotide
gacttcccatctacacaactttctcgagga

SEQ ID NO: 396654 - DNA, 30 bp, Artificial Sequence
  Synthetic oligonucleotide
gggggtccgtattcttgaatcgcaggagga

SEQ ID NO: 396655 - DNA, 30 bp, Artificial Sequence
  Synthetic oligonucleotide
ttgcattccaaactaatccctgacggagga

SEQ ID NO: 396656 - DNA, 30 bp, Artificial Sequence
  Synthetic oligonucleotide
ctacggagcagacaggcccgcttgggagga

SEQ ID NO: 396657 - DNA, 30 bp, Artificial Sequence
  Synthetic oligonucleotide
gtgagagagttaggtggttggggtggagga

SEQ ID NO: 396658 - DNA, 30 bp, Artificial Sequence
  Synthetic oligonucleotide
gattcagaatgtcacaagagcgtatgagga

SEQ ID NO: 396659 - DNA, 30 bp, Artificial Sequence
  Synthetic oligonucleotide
ccagcccacagcatccgtaccttctgagga

SEQ ID NO: 396660 - DNA, 30 bp, Artificial Sequence
  Synthetic oligonucleotide
tgatacacgttacataatcctcattgagga

SEQ ID NO: 396661 - DNA, 30 bp, Artificial Sequence
  Synthetic oligonucleotide
gtgggggtggggtgctagaaattttgagga

SEQ ID NO: 396662 - DNA, 30 bp, Artificial Sequence
  Synthetic oligonucleotide
caaggcgaaaatggtacaacatgaatagga

SEQ ID NO: 396663 - DNA, 30 bp, Artificial Sequence
  Synthetic oligonucleotide
gaaattgcctaacggcaaccatgaatagga

SEQ ID NO: 396664 - DNA, 30 bp, Artificial Sequence
  Synthetic oligonucleotide
gggaagcacgcgcgtacgatgcgcatagga

SEQ ID NO: 396665 - DNA, 30 bp, Artificial Sequence
  Synthetic oligonucleotide
gtcgagcgcccgtaaaaattgttgatagga

SEQ ID NO: 396666 - DNA, 30 bp, Artificial Sequence
  Synthetic oligonucleotide
tgatcgtatttttgacaaccttgtatagga

SEQ ID NO: 396667 - DNA, 30 bp, Artificial Sequence
  Synthetic oligonucleotide
tgtccagatcgtaggaagcacattatagga

SEQ ID NO: 396668 - DNA, 30 bp, Artificial Sequence
  Synthetic oligonucleotide
atgaaggttaccccgggccgtattatagga

SEQ ID NO: 396669 - DNA, 30 bp, Artificial Sequence
  Synthetic oligonucleotide
aaaactcggactaacttgattcttatagga

SEQ ID NO: 396670 - DNA, 30 bp, Artificial Sequence
  Synthetic oligonucleotide
ttaacgtgacaaggagacaacgcactagga

SEQ ID NO: 396671 - DNA, 30 bp, Artificial Sequence
  Synthetic oligonucleotide
acagatcggtgggtaatcgaccacctagga

SEQ ID NO: 396672 - DNA, 30 bp, Artificial Sequence
  Synthetic oligonucleotide
cggccgaacctattagttagttccctagga

SEQ ID NO: 396673 - DNA, 30 bp, Artificial Sequence
  Synthetic oligonucleotide
ttcaatattaactcacacgttgttctagga

SEQ ID NO: 396674 - DNA, 30 bp, Artificial Sequence
  Synthetic oligonucleotide
aaccaacggctccggtttctggaagtagga

SEQ ID NO: 396675 - DNA, 30 bp, Artificial Sequence
  Synthetic oligonucleotide
gagtccgctggtttatgtcgataagtagga

SEQ ID NO: 396676 - DNA, 30 bp, Artificial Sequence
  Synthetic oligonucleotide
gtatgcagggacgacgcgtttttagtagga

SEQ ID NO: 396677 - DNA, 30 bp, Artificial Sequence
  Synthetic oligonucleotide
aaacaacctgtctttcgttcccacgtagga

SEQ ID NO: 396678 - DNA, 30 bp, Artificial Sequence
  Synthetic oligonucleotide
ttccactcttggtcaagtgccggcgtagga

SEQ ID NO: 396679 - DNA, 30 bp, Artificial Sequence
  Synthetic oligonucleotide
ctcgatctcgatatcctatttaaattagga

SEQ ID NO: 396680 - DNA, 30 bp, Artificial Sequence
  Synthetic oligonucleotide
acgagctttgttgataggattgaattagga

SEQ ID NO: 396681 - DNA, 30 bp, Artificial Sequence
  Synthetic oligonucleotide
atgcactcagcgcgaaagcccccattagga

SEQ ID NO: 396682 - DNA, 30 bp, Artificial Sequence
  Synthetic oligonucleotide
aggtcgcacttgtcagccaaagtattagga

SEQ ID NO: 396683 - DNA, 30 bp, Artificial Sequence
  Synthetic oligonucleotide
ctccgaagattaaggtttggcttattagga

SEQ ID NO: 396684 - DNA, 30 bp, Artificial Sequence
  Synthetic oligonucleotide
ctagtgaacctcattagtgtctgtttagga

SEQ ID NO: 396685 - DNA, 30 bp, Artificial Sequence
  Synthetic oligonucleotide
tttgtgaacattagtggatcaccgaacgga

SEQ ID NO: 396686 - DNA, 30 bp, Artificial Sequence
  Synthetic oligonucleotide
ctgtacaccacggggttggagaggaacgga

SEQ ID NO: 396687 - DNA, 30 bp, Artificial Sequence
  Synthetic oligonucleotide
catatatcgcaatggccggcaaaacacgga

SEQ ID NO: 396688 - DNA, 30 bp, Artificial Sequence
  Synthetic oligonucleotide
atttgccacattaatgtgatggcacacgga

SEQ ID NO: 396689 - DNA, 30 bp, Artificial Sequence
  Synthetic oligonucleotide
tgggacgcccgtattcgtcgataccacgga

SEQ ID NO: 396690 - DNA, 30 bp, Artificial Sequence
  Synthetic oligonucleotide
tacagtccataggctccggcaatgcacgga

SEQ ID NO: 396691 - DNA, 30 bp, Artificial Sequence
  Synthetic oligonucleotide
cgtcttaggacatcgcaagcacgtcacgga

SEQ ID NO: 396692 - DNA, 30 bp, Artificial Sequence
  Synthetic oligonucleotide
caactctatggtatcagacggatagacgga

SEQ ID NO: 396693 - DNA, 30 bp, Artificial Sequence
  Synthetic oligonucleotide
aaacgcaacgcgatgcttgatatagacgga

SEQ ID NO: 396694 - DNA, 30 bp, Artificial Sequence
  Synthetic oligonucleotide
gaaagtcgtcgtaagcttggtctcgacgga

SEQ ID NO: 396695 - DNA, 30 bp, Artificial Sequence
  Synthetic oligonucleotide
gatgccactaaacgaattttggaggacgga

SEQ ID NO: 396696 - DNA, 30 bp, Artificial Sequence
  Synthetic oligonucleotide
cccgtgttggtatatggtagccctgacgga

SEQ ID NO: 396697 - DNA, 30 bp, Artificial Sequence
  Synthetic oligonucleotide
gagggtcccggcacaaagccgcgtgacgga

SEQ ID NO: 396698 - DNA, 30 bp, Artificial Sequence
  Synthetic oligonucleotide
ccgcggcgattccttcgtatccttgacgga

SEQ ID NO: 396699 - DNA, 30 bp, Artificial Sequence
  Synthetic oligonucleotide
gatcctctcagggatacatatacctacgga

SEQ ID NO: 396700 - DNA, 30 bp, Artificial Sequence
  Synthetic oligonucleotide
agttagatttaatttatttgagcctacgga

SEQ ID NO: 396701 - DNA, 30 bp, Artificial Sequence
  Synthetic oligonucleotide
tgataggtcatgtatagatggcgctacgga

SEQ ID NO: 396702 - DNA, 30 bp, Artificial Sequence
  Synthetic oligonucleotide
gtgttagggttactcaattgctataccgga

SEQ ID NO: 396703 - DNA, 30 bp, Artificial Sequence
  Synthetic oligonucleotide
aattggtaaggtaccctggtaggtaccgga

SEQ ID NO: 396704 - DNA, 30 bp, Artificial Sequence
  Synthetic oligonucleotide
gatcctggtgtcgatggtacctgtaccgga

SEQ ID NO: 396705 - DNA, 30 bp, Artificial Sequence
  Synthetic oligonucleotide
ttttgggtcaacctatatcttgttaccgga

SEQ ID NO: 396706 - DNA, 30 bp, Artificial Sequence
  Synthetic oligonucleotide
ggttccattttcggattcaagaaacccgga

SEQ ID NO: 396707 - DNA, 30 bp, Artificial Sequence
  Synthetic oligonucleotide
gcccaaggttgacacaccgcatcccccgga

SEQ ID NO: 396708 - DNA, 30 bp, Artificial Sequence
  Synthetic oligonucleotide
ggccaggcttttgcaagtattccgcccgga

SEQ ID NO: 396709 - DNA, 30 bp, Artificial Sequence
  Synthetic oligonucleotide
tagacgagctaacggaaacactatcccgga

SEQ ID NO: 396710 - DNA, 30 bp, Artificial Sequence
  Synthetic oligonucleotide
agatctgtacaccggatctgtgccgccgga

SEQ ID NO: 396711 - DNA, 30 bp, Artificial Sequence
  Synthetic oligonucleotide
ttgcgcgttattttctgcgacgtggccgga

SEQ ID NO: 396712 - DNA, 30 bp, Artificial Sequence
  Synthetic oligonucleotide
ataccatcgcaattttatgatgagtccgga

SEQ ID NO: 396713 - DNA, 30 bp, Artificial Sequence
  Synthetic oligonucleotide
gaccgtaaaccggtcgctgtgaggtccgga

SEQ ID NO: 396714 - DNA, 30 bp, Artificial Sequence
  Synthetic oligonucleotide
tgaggttttctacattttctcacaagcgga

SEQ ID NO: 396715 - DNA, 30 bp, Artificial Sequence
  Synthetic oligonucleotide
tttcaaaagggcacggcagattgaagcgga

SEQ ID NO: 396716 - DNA, 30 bp, Artificial Sequence
  Synthetic oligonucleotide
cccggggccgtctcggctggtgagagcgga

SEQ ID NO: 396717 - DNA, 30 bp, Artificial Sequence
  Synthetic oligonucleotide
cattagtttctgattactaaatgtagcgga

SEQ ID NO: 396718 - DNA, 30 bp, Artificial Sequence
  Synthetic oligonucleotide
gtacggcgtgcggtagagaggtcacgcgga

SEQ ID NO: 396719 - DNA, 30 bp, Artificial Sequence
  Synthetic oligonucleotide
ggggaaaagaatggctcgatagggcgcgga

SEQ ID NO: 396720 - DNA, 30 bp, Artificial Sequence
  Synthetic oligonucleotide
cctggcgccaagatactaggaactcgcgga

SEQ ID NO: 396721 - DNA, 30 bp, Artificial Sequence
  Synthetic oligonucleotide
gagtttgagacgatgtccccagcaggcgga

SEQ ID NO: 396722 - DNA, 30 bp, Artificial Sequence
  Synthetic oligonucleotide
gaggagagggtcattgcaggtctaggcgga

SEQ ID NO: 396723 - DNA, 30 bp, Artificial Sequence
  Synthetic oligonucleotide
tgatgaggcttaatccatctatcgggcgga

SEQ ID NO: 396724 - DNA, 30 bp, Artificial Sequence
  Synthetic oligonucleotide
agtacttagagataagagggccggggcgga

SEQ ID NO: 396725 - DNA, 30 bp, Artificial Sequence
  Synthetic oligonucleotide
gtcctctgcgtgatccaggcgaatggcgga

SEQ ID NO: 396726 - DNA, 30 bp, Artificial Sequence
  Synthetic oligonucleotide
agtaaggggttctaaggacggaaatgcgga

SEQ ID NO: 396727 - DNA, 30 bp, Artificial Sequence
  Synthetic oligonucleotide
gatcgtttctgaccgggatctgtatgcgga

SEQ ID NO: 396728 - DNA, 30 bp, Artificial Sequence
  Synthetic oligonucleotide
ctcacctacgcactagtgacatagtgcgga

SEQ ID NO: 396729 - DNA, 30 bp, Artificial Sequence
  Synthetic oligonucleotide
tttcacgtgtgagtaccacaacggtgcgga

SEQ ID NO: 396730 - DNA, 30 bp, Artificial Sequence
  Synthetic oligonucleotide
agcactccgcccctaaggttacagatcgga

SEQ ID NO: 396731 - DNA, 30 bp, Artificial Sequence
  Synthetic oligonucleotide
aatgatcgttcgtataagagtcagatcgga

SEQ ID NO: 396732 - DNA, 30 bp, Artificial Sequence
  Synthetic oligonucleotide
gttatctaggtcctgaggtccgagatcgga

SEQ ID NO: 396733 - DNA, 30 bp, Artificial Sequence
  Synthetic oligonucleotide
tttataaatccaacaagaatgtatatcgga

SEQ ID NO: 396734 - DNA, 30 bp, Artificial Sequence
  Synthetic oligonucleotide
ataactactttcatggagctccaactcgga

SEQ ID NO: 396735 - DNA, 30 bp, Artificial Sequence
  Synthetic oligonucleotide
taggctcgttctctctagtaggcactcgga

SEQ ID NO: 396736 - DNA, 30 bp, Artificial Sequence
  Synthetic oligonucleotide
ttccgtgacccttcacgattatcactcgga

SEQ ID NO: 396737 - DNA, 30 bp, Artificial Sequence
  Synthetic oligonucleotide
gtggttataaaaattgtgtaagtactcgga

SEQ ID NO: 396738 - DNA, 30 bp, Artificial Sequence
  Synthetic oligonucleotide
tacaactcattacagatcggtttcctcgga

SEQ ID NO: 396739 - DNA, 30 bp, Artificial Sequence
  Synthetic oligonucleotide
gagatctgagctgctcgggtcacgctcgga

SEQ ID NO: 396740 - DNA, 30 bp, Artificial Sequence
  Synthetic oligonucleotide
aagtaatcagtctacggagttgctctcgga

SEQ ID NO: 396741 - DNA, 30 bp, Artificial Sequence
  Synthetic oligonucleotide
ctaggatggagctacctggcccacgtcgga

SEQ ID NO: 396742 - DNA, 30 bp, Artificial Sequence
  Synthetic oligonucleotide
ctcttctataggacactggtaatggtcgga

SEQ ID NO: 396743 - DNA, 30 bp, Artificial Sequence
  Synthetic oligonucleotide
atatgttatcccctgtacgtaaatgtcgga

SEQ ID NO: 396744 - DNA, 30 bp, Artificial Sequence
  Synthetic oligonucleotide
ttcgcggtcttgcttaaaccatgtgtcgga

SEQ ID NO: 396745 - DNA, 30 bp, Artificial Sequence
  Synthetic oligonucleotide
gactggggcgccccggaaaatttattcgga

SEQ ID NO: 396746 - DNA, 30 bp, Artificial Sequence
  Synthetic oligonucleotide
gttcataagtggtccgaagcatacttcgga

SEQ ID NO: 396747 - DNA, 30 bp, Artificial Sequence
  Synthetic oligonucleotide
cggtatggcaagatggtgtccatgttcgga

SEQ ID NO: 396748 - DNA, 30 bp, Artificial Sequence
  Synthetic oligonucleotide
tgacggcagtgttgatacggtggaaaggga

SEQ ID NO: 396749 - DNA, 30 bp, Artificial Sequence
  Synthetic oligonucleotide
ctggttgtcagtaaagcatcggacaaggga

SEQ ID NO: 396750 - DNA, 30 bp, Artificial Sequence
  Synthetic oligonucleotide
cccggctagccagagcagccctggaaggga

SEQ ID NO: 396751 - DNA, 30 bp, Artificial Sequence
  Synthetic oligonucleotide
catagttaaacgcgagacctccttaaggga

SEQ ID NO: 396752 - DNA, 30 bp, Artificial Sequence
  Synthetic oligonucleotide
tgtattgtaatgtttagccattaacaggga

SEQ ID NO: 396753 - DNA, 30 bp, Artificial Sequence
  Synthetic oligonucleotide
ctgtcggggcaatcctttccgctacaggga

SEQ ID NO: 396754 - DNA, 30 bp, Artificial Sequence
  Synthetic oligonucleotide
ttaaaaagaattcatattgtacaccaggga

SEQ ID NO: 396755 - DNA, 30 bp, Artificial Sequence
  Synthetic oligonucleotide
gactgtcttcccggctgggcggaccaggga

SEQ ID NO: 396756 - DNA, 30 bp, Artificial Sequence
  Synthetic oligonucleotide
tacagtctttcgcaataaggttaccaggga

SEQ ID NO: 396757 - DNA, 29 bp, Artificial Sequence
  Synthetic oligonucleotide
atcggctgcgaaagtttgctagtcaggga

SEQ ID NO: 396758 - DNA, 30 bp, Artificial Sequence
  Synthetic oligonucleotide
cagccatcttggtgctgcactagcgaggga

SEQ ID NO: 396759 - DNA, 30 bp, Artificial Sequence
  Synthetic oligonucleotide
ttttcgcaaagctgtatgcgaaaggaggga

SEQ ID NO: 396760 - DNA, 30 bp, Artificial Sequence
  Synthetic oligonucleotide
gtcctgtcttttaaaacagtaaaggaggga

SEQ ID NO: 396761 - DNA, 30 bp, Artificial Sequence
  Synthetic oligonucleotide
cattggcgtcgcatcgctcgcgcggaggga

SEQ ID NO: 396762 - DNA, 30 bp, Artificial Sequence
  Synthetic oligonucleotide
acggattcgggtgctacccaccgggaggga

SEQ ID NO: 396763 - DNA, 30 bp, Artificial Sequence
  Synthetic oligonucleotide
tagatgacaccgggcggggtcggggaggga

SEQ ID NO: 396764 - DNA, 30 bp, Artificial Sequence
  Synthetic oligonucleotide
acttcgttctcaggggcttgccttgaggga

SEQ ID NO: 396765 - DNA, 30 bp, Artificial Sequence
  Synthetic oligonucleotide
ttcgcacggagctatgcggagcaataggga

SEQ ID NO: 396766 - DNA, 30 bp, Artificial Sequence
  Synthetic oligonucleotide
aaagttgtgaagccgcttatcgaataggga

SEQ ID NO: 396767 - DNA, 30 bp, Artificial Sequence
  Synthetic oligonucleotide
aggtcgtgtgacccagcgtcatgataggga

SEQ ID NO: 396768 - DNA, 30 bp, Artificial Sequence
  Synthetic oligonucleotide
ccccggcactacatataggagatataggga

SEQ ID NO: 396769 - DNA, 30 bp, Artificial Sequence
  Synthetic oligonucleotide
gtaagctttggttaatcgattttataggga

SEQ ID NO: 396770 - DNA, 30 bp, Artificial Sequence
  Synthetic oligonucleotide
ttcagggcgcattaccacaagtgctaggga

SEQ ID NO: 396771 - DNA, 30 bp, Artificial Sequence
  Synthetic oligonucleotide
atcccaggtgaactcccaaggatgtaggga

SEQ ID NO: 396772 - DNA, 30 bp, Artificial Sequence
  Synthetic oligonucleotide
gatcaacgatgcgttgtctaaacaacggga

SEQ ID NO: 396773 - DNA, 30 bp, Artificial Sequence
  Synthetic oligonucleotide
tctagcccttccagaaggatcggaacggga

SEQ ID NO: 396774 - DNA, 30 bp, Artificial Sequence
  Synthetic oligonucleotide
gacggcacgctaggtatctgtataacggga

SEQ ID NO: 396775 - DNA, 30 bp, Artificial Sequence
  Synthetic oligonucleotide
tgcacggaacaggaaaggcactacacggga

SEQ ID NO: 396776 - DNA, 30 bp, Artificial Sequence
  Synthetic oligonucleotide
acgcaccatgaacgattacaaaagacggga

SEQ ID NO: 396777 - DNA, 30 bp, Artificial Sequence
  Synthetic oligonucleotide
aacttcgcccgcgtgatagcgaggacggga

SEQ ID NO: 396778 - DNA, 30 bp, Artificial Sequence
  Synthetic oligonucleotide
agttatgtcgtagcaggaggtatgacggga

SEQ ID NO: 396779 - DNA, 30 bp, Artificial Sequence
  Synthetic oligonucleotide
gagcgatcgcatatgccctttaaaccggga

SEQ ID NO: 396780 - DNA, 30 bp, Artificial Sequence
  Synthetic oligonucleotide
tgattttcatgcatatagacgtaaccggga

SEQ ID NO: 396781 - DNA, 30 bp, Artificial Sequence
  Synthetic oligonucleotide
acgttctatgaaccctccgtttgcccggga

SEQ ID NO: 396782 - DNA, 30 bp, Artificial Sequence
  Synthetic oligonucleotide
ataagatactagctacaggagcagccggga

SEQ ID NO: 396783 - DNA, 30 bp, Artificial Sequence
  Synthetic oligonucleotide
agttatcaggttgcaaaggcaacgccggga

SEQ ID NO: 396784 - DNA, 30 bp, Artificial Sequence
  Synthetic oligonucleotide
taggccattgcccctatgggaaatccggga

SEQ ID NO: 396785 - DNA, 30 bp, Artificial Sequence
  Synthetic oligonucleotide
tttagtgtttcacaggtcaagtgtccggga

SEQ ID NO: 396786 - DNA, 30 bp, Artificial Sequence
  Synthetic oligonucleotide
ttatgggcaatttgaattcgtattccggga

SEQ ID NO: 396787 - DNA, 30 bp, Artificial Sequence
  Synthetic oligonucleotide
ggtactcttacttggcggcttgcagcggga

SEQ ID NO: 396788 - DNA, 30 bp, Artificial Sequence
  Synthetic oligonucleotide
tccccatagctggtagcatttcgcgcggga

SEQ ID NO: 396789 - DNA, 30 bp, Artificial Sequence
  Synthetic oligonucleotide
ggtgggtaacccggggcagtctgggcggga

SEQ ID NO: 396790 - DNA, 30 bp, Artificial Sequence
  Synthetic oligonucleotide
ggctttgaatacattcagtagtcatcggga

SEQ ID NO: 396791 - DNA, 30 bp, Artificial Sequence
  Synthetic oligonucleotide
caaattgtagatctttctaatagatcggga

SEQ ID NO: 396792 - DNA, 30 bp, Artificial Sequence
  Synthetic oligonucleotide
agttagcccggagactttttcgactcggga

SEQ ID NO: 396793 - DNA, 30 bp, Artificial Sequence
  Synthetic oligonucleotide
ctcgttctaagtctaggttagaggtcggga

SEQ ID NO: 396794 - DNA, 30 bp, Artificial Sequence
  Synthetic oligonucleotide
gggacagatttgttccggggtaggtcggga

SEQ ID NO: 396795 - DNA, 30 bp, Artificial Sequence
  Synthetic oligonucleotide
gaacggccgtggaccacaggtgggtcggga

SEQ ID NO: 396796 - DNA, 30 bp, Artificial Sequence
  Synthetic oligonucleotide
gagttccatcgctaaggtggagattcggga

SEQ ID NO: 396797 - DNA, 30 bp, Artificial Sequence
  Synthetic oligonucleotide
gatatggagctagtctttcggacttcggga

SEQ ID NO: 396798 - DNA, 30 bp, Artificial Sequence
  Synthetic oligonucleotide
cactatctagcaacgaccagaggttcggga

SEQ ID NO: 396799 - DNA, 30 bp, Artificial Sequence
  Synthetic oligonucleotide
ggtcattagtgtcacaaaccgtccagggga

SEQ ID NO: 396800 - DNA, 30 bp, Artificial Sequence
  Synthetic oligonucleotide
ggaccgagttccaagtatttgggcagggga

SEQ ID NO: 396801 - DNA, 30 bp, Artificial Sequence
  Synthetic oligonucleotide
agtcctcgtccatggattaagactagggga

SEQ ID NO: 396802 - DNA, 30 bp, Artificial Sequence
  Synthetic oligonucleotide
atagttacttcgtaacgtctggaacgggga

SEQ ID NO: 396803 - DNA, 30 bp, Artificial Sequence
  Synthetic oligonucleotide
cgctgatttcgaggatgtttccaccgggga

SEQ ID NO: 396804 - DNA, 30 bp, Artificial Sequence
  Synthetic oligonucleotide
ctaccgctggaactttcacggttccgggga

SEQ ID NO: 396805 - DNA, 30 bp, Artificial Sequence
  Synthetic oligonucleotide
gtgccttcacgctttcgtatcaggcgggga

SEQ ID NO: 396806 - DNA, 37 bp, Artificial Sequence
  Synthetic oligonucleotide
aagataatacattcatggtatggtcggggatcgggga

SEQ ID NO: 396807 - DNA, 30 bp, Artificial Sequence
  Synthetic oligonucleotide
ttcatgttaaatcactatagctgtcgggga

SEQ ID NO: 396808 - DNA, 30 bp, Artificial Sequence
  Synthetic oligonucleotide
aacacttaatgcctccgttagggaggggga

SEQ ID NO: 396809 - DNA, 30 bp, Artificial Sequence
  Synthetic oligonucleotide
gtaggtcttttgagaaagtctttaggggga

SEQ ID NO: 396810 - DNA, 40 bp, Artificial Sequence
  Synthetic oligonucleotide
aagataatacattcatggtatggtcggggaacggggggga

SEQ ID NO: 396811 - DNA, 40 bp, Artificial Sequence
  Synthetic oligonucleotide
aagataatacattcacggtatggtcggggatcggggggga

SEQ ID NO: 396812 - DNA, 40 bp, Artificial Sequence
  Synthetic oligonucleotide
aagacaatacattcatggtatggtcggggatcggggggga

SEQ ID NO: 396813 - DNA, 40 bp, Artificial Sequence
  Synthetic oligonucleotide
aacataatacattcatggtatggtcggggatcggggggga

SEQ ID NO: 396814 - DNA, 30 bp, Artificial Sequence
  Synthetic oligonucleotide
ctttcgtcatgaggtgcattagttggggga

SEQ ID NO: 396815 - DNA, 30 bp, Artificial Sequence
  Synthetic oligonucleotide
ctcctacgtggtcggggcaaataatgggga

SEQ ID NO: 396816 - DNA, 30 bp, Artificial Sequence
  Synthetic oligonucleotide
ggactagactcttgggaccacccatgggga

SEQ ID NO: 396817 - DNA, 30 bp, Artificial Sequence
  Synthetic oligonucleotide
cacgctgacatcacctagaaagcatgggga

SEQ ID NO: 396818 - DNA, 30 bp, Artificial Sequence
  Synthetic oligonucleotide
ttagaactcgtgttgttcgggggatgggga

SEQ ID NO: 396819 - DNA, 30 bp, Artificial Sequence
  Synthetic oligonucleotide
cagagccaccgccccggattggcctgggga

SEQ ID NO: 396820 - DNA, 30 bp, Artificial Sequence
  Synthetic oligonucleotide
gcaggcaaggatctctattaaggctgggga

SEQ ID NO: 396821 - DNA, 30 bp, Artificial Sequence
  Synthetic oligonucleotide
ggactgctgtgggtagacgaggggtgggga

SEQ ID NO: 396822 - DNA, 30 bp, Artificial Sequence
  Synthetic oligonucleotide
cagtttgaacggcccttcaccgattgggga

SEQ ID NO: 396823 - DNA, 30 bp, Artificial Sequence
  Synthetic oligonucleotide
actcatcagtggaccccctacctttgggga

SEQ ID NO: 396824 - DNA, 30 bp, Artificial Sequence
  Synthetic oligonucleotide
gtgttaatatccggaaggcaagcaatggga

SEQ ID NO: 396825 - DNA, 30 bp, Artificial Sequence
  Synthetic oligonucleotide
ggccacagtctattctaaattgcaatggga

SEQ ID NO: 396826 - DNA, 30 bp, Artificial Sequence
  Synthetic oligonucleotide
ttggaacttcttgtgtcatgggacatggga

SEQ ID NO: 396827 - DNA, 30 bp, Artificial Sequence
  Synthetic oligonucleotide
gagtctctctagcacgatctcgccatggga

SEQ ID NO: 396828 - DNA, 30 bp, Artificial Sequence
  Synthetic oligonucleotide
aacacactaagtttatccggccgcatggga

SEQ ID NO: 396829 - DNA, 30 bp, Artificial Sequence
  Synthetic oligonucleotide
ctctggcagctcacgggggtatgcatggga

SEQ ID NO: 396830 - DNA, 30 bp, Artificial Sequence
  Synthetic oligonucleotide
aatatggaaggggtgatccggagactggga

SEQ ID NO: 396831 - DNA, 30 bp, Artificial Sequence
  Synthetic oligonucleotide
aagtcggctgcagggggtatccacctggga

SEQ ID NO: 396832 - DNA, 30 bp, Artificial Sequence
  Synthetic oligonucleotide
aactacaatgtggacgcaaactacctggga

SEQ ID NO: 396833 - DNA, 30 bp, Artificial Sequence
  Synthetic oligonucleotide
gcggcgctgaggcatcgaggatgcctggga

SEQ ID NO: 396834 - DNA, 30 bp, Artificial Sequence
  Synthetic oligonucleotide
cagtctgcacttgggtgaaacgagctggga

SEQ ID NO: 396835 - DNA, 30 bp, Artificial Sequence
  Synthetic oligonucleotide
agctaaggttcaatctgaggttagctggga

SEQ ID NO: 396836 - DNA, 30 bp, Artificial Sequence
  Synthetic oligonucleotide
tcttgcccatgaaggcgcaatagtctggga

SEQ ID NO: 396837 - DNA, 30 bp, Artificial Sequence
  Synthetic oligonucleotide
attatttgtgtggtggttatctcagtggga

SEQ ID NO: 396838 - DNA, 30 bp, Artificial Sequence
  Synthetic oligonucleotide
tgagtcgaatgcaaatatgtttgagtggga

SEQ ID NO: 396839 - DNA, 30 bp, Artificial Sequence
  Synthetic oligonucleotide
acactagccggccacatgcaagacgtggga

SEQ ID NO: 396840 - DNA, 30 bp, Artificial Sequence
  Synthetic oligonucleotide
ggctaaaaaatcctagagacgtgggtggga

SEQ ID NO: 396841 - DNA, 30 bp, Artificial Sequence
  Synthetic oligonucleotide
tgggcttcaacacgcatctcgcttgtggga

SEQ ID NO: 396842 - DNA, 30 bp, Artificial Sequence
  Synthetic oligonucleotide
atacaaatccagtgataggacgttgtggga

SEQ ID NO: 396843 - DNA, 30 bp, Artificial Sequence
  Synthetic oligonucleotide
tagtctgtctatcccacatatgttgtggga

SEQ ID NO: 396844 - DNA, 30 bp, Artificial Sequence
  Synthetic oligonucleotide
ctaggatgtagggatgggggcctcttggga

SEQ ID NO: 396845 - DNA, 30 bp, Artificial Sequence
  Synthetic oligonucleotide
tatttgatggcaggtccaatggggttggga

SEQ ID NO: 396846 - DNA, 30 bp, Artificial Sequence
  Synthetic oligonucleotide
atgcttattttccggtatagcgtaaatgga

SEQ ID NO: 396847 - DNA, 30 bp, Artificial Sequence
  Synthetic oligonucleotide
tttggttttgtcagttgatgtcccaatgga

SEQ ID NO: 396848 - DNA, 30 bp, Artificial Sequence
  Synthetic oligonucleotide
gtattgcgaggacaaccacctgggaatgga

SEQ ID NO: 396849 - DNA, 30 bp, Artificial Sequence
  Synthetic oligonucleotide
gcatgcgatcccgtcttacttttgaatgga

SEQ ID NO: 396850 - DNA, 30 bp, Artificial Sequence
  Synthetic oligonucleotide
acccaccactaggttcatcagagtaatgga

SEQ ID NO: 396851 - DNA, 30 bp, Artificial Sequence
  Synthetic oligonucleotide
tgcattacttgtcggacgttggcacatgga

SEQ ID NO: 396852 - DNA, 30 bp, Artificial Sequence
  Synthetic oligonucleotide
ttagcccatgagcgttctgctggacatgga

SEQ ID NO: 396853 - DNA, 30 bp, Artificial Sequence
  Synthetic oligonucleotide
tcggtgatatattgacgtctatatcatgga

SEQ ID NO: 396854 - DNA, 30 bp, Artificial Sequence
  Synthetic oligonucleotide
tgcgtgatccggatgacgagaactcatgga

SEQ ID NO: 396855 - DNA, 30 bp, Artificial Sequence
  Synthetic oligonucleotide
cgctgtgagatttacgtcctgagtcatgga

SEQ ID NO: 396856 - DNA, 30 bp, Artificial Sequence
  Synthetic oligonucleotide
gagccaatctttgacaacaattgtcatgga

SEQ ID NO: 396857 - DNA, 30 bp, Artificial Sequence
  Synthetic oligonucleotide
ccttgtgagcaatgcgctaatcaagatgga

SEQ ID NO: 396858 - DNA, 30 bp, Artificial Sequence
  Synthetic oligonucleotide
acggttaagactatttgtcaggcagatgga

SEQ ID NO: 396859 - DNA, 30 bp, Artificial Sequence
  Synthetic oligonucleotide
gatgagtatctgtgagctatcggagatgga

SEQ ID NO: 396860 - DNA, 30 bp, Artificial Sequence
  Synthetic oligonucleotide
atggcacaggttcagggaaacatagatgga

SEQ ID NO: 396861 - DNA, 31 bp, Artificial Sequence
  Synthetic oligonucleotide
agcgtcacagctagcgtggtaacgcgatgga

SEQ ID NO: 396862 - DNA, 30 bp, Artificial Sequence
  Synthetic oligonucleotide
cttatgtgacccgacccaacaccggatgga

SEQ ID NO: 396863 - DNA, 30 bp, Artificial Sequence
  Synthetic oligonucleotide
cgtaacatcccggtcgtactccgggatgga

SEQ ID NO: 396864 - DNA, 30 bp, Artificial Sequence
  Synthetic oligonucleotide
tcatttaggtttcacagtgtaatggatgga

SEQ ID NO: 396865 - DNA, 30 bp, Artificial Sequence
  Synthetic oligonucleotide
gcaacatacaaattttacgtttatgatgga

SEQ ID NO: 396866 - DNA, 30 bp, Artificial Sequence
  Synthetic oligonucleotide
ccctcgccaggtgtacatcagaaatatgga

SEQ ID NO: 396867 - DNA, 30 bp, Artificial Sequence
  Synthetic oligonucleotide
aagtctccttatcgcggtgcagaatatgga

SEQ ID NO: 396868 - DNA, 30 bp, Artificial Sequence
  Synthetic oligonucleotide
accgcgcggcttgggctagtgtcatatgga

SEQ ID NO: 396869 - DNA, 30 bp, Artificial Sequence
  Synthetic oligonucleotide
gtatagaaggcgacgggctctgtatatgga

SEQ ID NO: 396870 - DNA, 30 bp, Artificial Sequence
  Synthetic oligonucleotide
ggatggggttactactgagtaaactatgga

SEQ ID NO: 396871 - DNA, 30 bp, Artificial Sequence
  Synthetic oligonucleotide
tggtccttattaaggccaagctcctatgga

SEQ ID NO: 396872 - DNA, 30 bp, Artificial Sequence
  Synthetic oligonucleotide
taagtgtaagcaaaacttacaggctatgga

SEQ ID NO: 396873 - DNA, 30 bp, Artificial Sequence
  Synthetic oligonucleotide
atctctcgatttacaacgggtgcttatgga

SEQ ID NO: 396874 - DNA, 30 bp, Artificial Sequence
  Synthetic oligonucleotide
atataagttggactaggtagtcgttatgga

SEQ ID NO: 396875 - DNA, 30 bp, Artificial Sequence
  Synthetic oligonucleotide
cctgtcgcgtttgtattttgaggaactgga

SEQ ID NO: 396876 - DNA, 30 bp, Artificial Sequence
  Synthetic oligonucleotide
cgctcaggctacatccttgagtacactgga

SEQ ID NO: 396877 - DNA, 30 bp, Artificial Sequence
  Synthetic oligonucleotide
attccaccaagtaacagtagtaccactgga

SEQ ID NO: 396878 - DNA, 30 bp, Artificial Sequence
  Synthetic oligonucleotide
atataaccaaggtatggtcagtccactgga

SEQ ID NO: 396879 - DNA, 31 bp, Artificial Sequence
  Synthetic oligonucleotide
caaatatagttttaattaacggttcactgga

SEQ ID NO: 396880 - DNA, 30 bp, Artificial Sequence
  Synthetic oligonucleotide
ggatcaccatcgaggcttggagctactgga

SEQ ID NO: 396881 - DNA, 30 bp, Artificial Sequence
  Synthetic oligonucleotide
tcccatggtttagggtttaaatttactgga

SEQ ID NO: 396882 - DNA, 30 bp, Artificial Sequence
  Synthetic oligonucleotide
aaacttacattcccatttggagaacctgga

SEQ ID NO: 396883 - DNA, 30 bp, Artificial Sequence
  Synthetic oligonucleotide
cgttccaatctctccgcctcttcacctgga

SEQ ID NO: 396884 - DNA, 30 bp, Artificial Sequence
  Synthetic oligonucleotide
gcaatctgccctctgagcgtcatccctgga

SEQ ID NO: 396885 - DNA, 30 bp, Artificial Sequence
  Synthetic oligonucleotide
ccgcgatgcatcaaactaaaagtccctgga

SEQ ID NO: 396886 - DNA, 30 bp, Artificial Sequence
  Synthetic oligonucleotide
ggcctataggatatgaagatcaagcctgga

SEQ ID NO: 396887 - DNA, 30 bp, Artificial Sequence
  Synthetic oligonucleotide
gggatctgcaagaggcaatccaatcctgga

SEQ ID NO: 396888 - DNA, 30 bp, Artificial Sequence
  Synthetic oligonucleotide
tgaggtgagttacgcctaccgcctcctgga

SEQ ID NO: 396889 - DNA, 30 bp, Artificial Sequence
  Synthetic oligonucleotide
cccaggaaagtaacgattcctgttcctgga

SEQ ID NO: 396890 - DNA, 30 bp, Artificial Sequence
  Synthetic oligonucleotide
gccaccggctcattaatagacatagctgga

SEQ ID NO: 396891 - DNA, 30 bp, Artificial Sequence
  Synthetic oligonucleotide
tccggatcatgattgagtattgtagctgga

SEQ ID NO: 396892 - DNA, 30 bp, Artificial Sequence
  Synthetic oligonucleotide
gttgccttggctcaatcattcaccgctgga

SEQ ID NO: 396893 - DNA, 30 bp, Artificial Sequence
  Synthetic oligonucleotide
ttgtcgtcttaatatagcggtctcgctgga

SEQ ID NO: 396894 - DNA, 30 bp, Artificial Sequence
  Synthetic oligonucleotide
gaggtggccgcctgctaatcaccggctgga

SEQ ID NO: 396895 - DNA, 30 bp, Artificial Sequence
  Synthetic oligonucleotide
tgcgtttattcagcctgccttatggctgga

SEQ ID NO: 396896 - DNA, 30 bp, Artificial Sequence
  Synthetic oligonucleotide
tggctcccccagagacacgaggctgctgga

SEQ ID NO: 396897 - DNA, 30 bp, Artificial Sequence
  Synthetic oligonucleotide
gatagagtcctacatggggcttgtgctgga

SEQ ID NO: 396898 - DNA, 30 bp, Artificial Sequence
  Synthetic oligonucleotide
ttgtcatagtatagagaatgactatctgga

SEQ ID NO: 396899 - DNA, 30 bp, Artificial Sequence
  Synthetic oligonucleotide
ttttgcttgtgacataggccacgctctgga

SEQ ID NO: 396900 - DNA, 30 bp, Artificial Sequence
  Synthetic oligonucleotide
tctgattacgcttgtgttcgcaagtctgga

SEQ ID NO: 396901 - DNA, 30 bp, Artificial Sequence
  Synthetic oligonucleotide
tcttgtttcatcgcattggccacgtctgga

SEQ ID NO: 396902 - DNA, 30 bp, Artificial Sequence
  Synthetic oligonucleotide
tacccacgcatgtgtatggcgacttctgga

SEQ ID NO: 396903 - DNA, 30 bp, Artificial Sequence
  Synthetic oligonucleotide
ataagaacggtgtagacatgattttctgga

SEQ ID NO: 396904 - DNA, 30 bp, Artificial Sequence
  Synthetic oligonucleotide
caccatggatgcttgatagaccaaagtgga

SEQ ID NO: 396905 - DNA, 30 bp, Artificial Sequence
  Synthetic oligonucleotide
aaatgtgacaagtagacttttcgaagtgga

SEQ ID NO: 396906 - DNA, 30 bp, Artificial Sequence
  Synthetic oligonucleotide
ttctctagggtacgctattcaatcagtgga

SEQ ID NO: 396907 - DNA, 30 bp, Artificial Sequence
  Synthetic oligonucleotide
cgcgctaatcgatcaaacaagttcagtgga

SEQ ID NO: 396908 - DNA, 30 bp, Artificial Sequence
  Synthetic oligonucleotide
ggaataagggtttacgttacctatagtgga

SEQ ID NO: 396909 - DNA, 30 bp, Artificial Sequence
  Synthetic oligonucleotide
catgactttctgatgcgaaattttagtgga

SEQ ID NO: 396910 - DNA, 30 bp, Artificial Sequence
  Synthetic oligonucleotide
gttataggtcgtgcagcatgttttagtgga

SEQ ID NO: 396911 - DNA, 30 bp, Artificial Sequence
  Synthetic oligonucleotide
gaggcagatcaagattaggtgttacgtgga

SEQ ID NO: 396912 - DNA, 30 bp, Artificial Sequence
  Synthetic oligonucleotide
ggggcgttctacagggccatgtaccgtgga

SEQ ID NO: 396913 - DNA, 30 bp, Artificial Sequence
  Synthetic oligonucleotide
ttacgaaggtaactttgttttttccgtgga

SEQ ID NO: 396914 - DNA, 30 bp, Artificial Sequence
  Synthetic oligonucleotide
attagacccaggccaccatccgcaggtgga

SEQ ID NO: 396915 - DNA, 30 bp, Artificial Sequence
  Synthetic oligonucleotide
caacatccttcaggctcacgacgaggtgga

SEQ ID NO: 396916 - DNA, 30 bp, Artificial Sequence
  Synthetic oligonucleotide
ggtaaggccagtaatatgaaggtaggtgga

SEQ ID NO: 396917 - DNA, 30 bp, Artificial Sequence
  Synthetic oligonucleotide
ctgttatgcaatcccagccagatcggtgga

SEQ ID NO: 396918 - DNA, 30 bp, Artificial Sequence
  Synthetic oligonucleotide
gtctgtggtaccctctagtattagggtgga

SEQ ID NO: 396919 - DNA, 30 bp, Artificial Sequence
  Synthetic oligonucleotide
gactatcgggcgaagtccactgggggtgga

SEQ ID NO: 396920 - DNA, 30 bp, Artificial Sequence
  Synthetic oligonucleotide
tataaaggcacataatagttgatgggtgga

SEQ ID NO: 396921 - DNA, 30 bp, Artificial Sequence
  Synthetic oligonucleotide
ccatagtgacgtgtcactttttatggtgga

SEQ ID NO: 396922 - DNA, 30 bp, Artificial Sequence
  Synthetic oligonucleotide
accttgtaaggcaacggactaggtggtgga

SEQ ID NO: 396923 - DNA, 30 bp, Artificial Sequence
  Synthetic oligonucleotide
tcatttatagaagtcgtcgctggtggtgga

SEQ ID NO: 396924 - DNA, 30 bp, Artificial Sequence
  Synthetic oligonucleotide
agatcgacagtcagggaacccctatgtgga

SEQ ID NO: 396925 - DNA, 30 bp, Artificial Sequence
  Synthetic oligonucleotide
cagcacagtgcagaatggattatctgtgga

SEQ ID NO: 396926 - DNA, 30 bp, Artificial Sequence
  Synthetic oligonucleotide
aagtgttaacgtaaactaggtgagtgtgga

SEQ ID NO: 396927 - DNA, 30 bp, Artificial Sequence
  Synthetic oligonucleotide
atagaaggacaattcccaataccgtgtgga

SEQ ID NO: 396928 - DNA, 30 bp, Artificial Sequence
  Synthetic oligonucleotide
ccgactggagccgcaagctgcccgtgtgga

SEQ ID NO: 396929 - DNA, 30 bp, Artificial Sequence
  Synthetic oligonucleotide
cccccgcaagtgctgcagccgtgaattgga

SEQ ID NO: 396930 - DNA, 30 bp, Artificial Sequence
  Synthetic oligonucleotide
atgaactgtttgggctctctttgaattgga

SEQ ID NO: 396931 - DNA, 30 bp, Artificial Sequence
  Synthetic oligonucleotide
aaccaacctttgttacaacttgtaattgga

SEQ ID NO: 396932 - DNA, 30 bp, Artificial Sequence
  Synthetic oligonucleotide
cgctttctcaaacagcggtgtaacattgga

SEQ ID NO: 396933 - DNA, 30 bp, Artificial Sequence
  Synthetic oligonucleotide
tatgacgtagagaaacactgtgggattgga

SEQ ID NO: 396934 - DNA, 30 bp, Artificial Sequence
  Synthetic oligonucleotide
ctttgtgtgtaacgtttcgatgtgattgga

SEQ ID NO: 396935 - DNA, 30 bp, Artificial Sequence
  Synthetic oligonucleotide
tgtgagcgcctgcattgtaggcctattgga

SEQ ID NO: 396936 - DNA, 30 bp, Artificial Sequence
  Synthetic oligonucleotide
aaccacaatgcactgtaggatgaacttgga

SEQ ID NO: 396937 - DNA, 30 bp, Artificial Sequence
  Synthetic oligonucleotide
cgtacttcaactaaatccgaaagccttgga

SEQ ID NO: 396938 - DNA, 30 bp, Artificial Sequence
  Synthetic oligonucleotide
gaactagacatcgacgcacaggtccttgga

SEQ ID NO: 396939 - DNA, 30 bp, Artificial Sequence
  Synthetic oligonucleotide
aatgtcatgtcttaggggtgtcctcttgga

SEQ ID NO: 396940 - DNA, 30 bp, Artificial Sequence
  Synthetic oligonucleotide
gttcgagcggagttattaagtaacgttgga

SEQ ID NO: 396941 - DNA, 30 bp, Artificial Sequence
  Synthetic oligonucleotide
ttcacgcatgcgaatcgattcgacgttgga

SEQ ID NO: 396942 - DNA, 30 bp, Artificial Sequence
  Synthetic oligonucleotide
agcgctatgtacgttcctttcgaggttgga

SEQ ID NO: 396943 - DNA, 30 bp, Artificial Sequence
  Synthetic oligonucleotide
tacatcacatttaggggccactatgttgga

SEQ ID NO: 396944 - DNA, 30 bp, Artificial Sequence
  Synthetic oligonucleotide
cgcgcttgcgtaggtttatgttgtgttgga

SEQ ID NO: 396945 - DNA, 30 bp, Artificial Sequence
  Synthetic oligonucleotide
aattgccacgggcaatacgtaaaatttgga

SEQ ID NO: 396946 - DNA, 30 bp, Artificial Sequence
  Synthetic oligonucleotide
tgataccgagggcccctactagaatttgga

SEQ ID NO: 396947 - DNA, 30 bp, Artificial Sequence
  Synthetic oligonucleotide
acagcagcttacagctccctgtaatttgga

SEQ ID NO: 396948 - DNA, 30 bp, Artificial Sequence
  Synthetic oligonucleotide
actgctatagtgattttcgaagcatttgga

SEQ ID NO: 396949 - DNA, 30 bp, Artificial Sequence
  Synthetic oligonucleotide
gttcaacgttaagttccgtagagatttgga

SEQ ID NO: 396950 - DNA, 30 bp, Artificial Sequence
  Synthetic oligonucleotide
gcgcacctccccggggtgctgaactttgga

SEQ ID NO: 396951 - DNA, 30 bp, Artificial Sequence
  Synthetic oligonucleotide
cagcagacgttgagttaggaaagctttgga

SEQ ID NO: 396952 - DNA, 30 bp, Artificial Sequence
  Synthetic oligonucleotide
gagagtgattctttttaatcaagctttgga

SEQ ID NO: 396953 - DNA, 30 bp, Artificial Sequence
  Synthetic oligonucleotide
tgacttcccattgggaggctgcgctttgga

SEQ ID NO: 396954 - DNA, 30 bp, Artificial Sequence
  Synthetic oligonucleotide
cctgcgctttgctacaagaaccggtttgga

SEQ ID NO: 396955 - DNA, 30 bp, Artificial Sequence
  Synthetic oligonucleotide
ttactccaggctcttccggttccttttgga

SEQ ID NO: 396956 - DNA, 30 bp, Artificial Sequence
  Synthetic oligonucleotide
aagaaacacaggttgttacaatgttttgga

SEQ ID NO: 396957 - DNA, 30 bp, Artificial Sequence
  Synthetic oligonucleotide
atcaggaatgaacgcgttactgtttttgga

SEQ ID NO: 396958 - DNA, 30 bp, Artificial Sequence
  Synthetic oligonucleotide
tgaaaaaagccatagcggccaagaaaatga

SEQ ID NO: 396959 - DNA, 30 bp, Artificial Sequence
  Synthetic oligonucleotide
aggacgttgcataggtaaactataaaatga

SEQ ID NO: 396960 - DNA, 29 bp, Artificial Sequence
  Synthetic oligonucleotide
accgtagcgacattaaagggcacaaatga

SEQ ID NO: 396961 - DNA, 30 bp, Artificial Sequence
  Synthetic oligonucleotide
gtctaatacggatgattggaatacaaatga

SEQ ID NO: 396962 - DNA, 30 bp, Artificial Sequence
  Synthetic oligonucleotide
aatgaatggggtatttacccaaataaatga

SEQ ID NO: 396963 - DNA, 30 bp, Artificial Sequence
  Synthetic oligonucleotide
gggtatggtccatgtacgtgcactaaatga

SEQ ID NO: 396964 - DNA, 30 bp, Artificial Sequence
  Synthetic oligonucleotide
tctttacaaacacatccgtgtcgtaaatga

SEQ ID NO: 396965 - DNA, 30 bp, Artificial Sequence
  Synthetic oligonucleotide
gtaaactttatattggcatcttaccaatga

SEQ ID NO: 396966 - DNA, 30 bp, Artificial Sequence
  Synthetic oligonucleotide
agtaaagccgacggacctttatgccaatga

SEQ ID NO: 396967 - DNA, 30 bp, Artificial Sequence
  Synthetic oligonucleotide
tgttaaacctcagtaaggtgtcagcaatga

SEQ ID NO: 396968 - DNA, 30 bp, Artificial Sequence
  Synthetic oligonucleotide
ccattgctagagtgcgcttcgtggcaatga

SEQ ID NO: 396969 - DNA, 30 bp, Artificial Sequence
  Synthetic oligonucleotide
aatcgccgctgtgaaccggtttggcaatga

SEQ ID NO: 396970 - DNA, 30 bp, Artificial Sequence
  Synthetic oligonucleotide
aggtttcagggttcccgggccgctcaatga

SEQ ID NO: 396971 - DNA, 30 bp, Artificial Sequence
  Synthetic oligonucleotide
aaacctgaggcaagctcatcacttcaatga

SEQ ID NO: 396972 - DNA, 30 bp, Artificial Sequence
  Synthetic oligonucleotide
actatatctatgtatacagcggaagaatga

SEQ ID NO: 396973 - DNA, 30 bp, Artificial Sequence
  Synthetic oligonucleotide
ggtctcttgaggaagctaaaatgcgaatga

SEQ ID NO: 396974 - DNA, 30 bp, Artificial Sequence
  Synthetic oligonucleotide
ttatacggatggatcatcgtcaaggaatga

SEQ ID NO: 396975 - DNA, 30 bp, Artificial Sequence
  Synthetic oligonucleotide
tagcagtatgacgacgagtcaacataatga

SEQ ID NO: 396976 - DNA, 30 bp, Artificial Sequence
  Synthetic oligonucleotide
gagcgtggtaggtatttaggcacctaatga

SEQ ID NO: 396977 - DNA, 30 bp, Artificial Sequence
  Synthetic oligonucleotide
aacggaatggtagacagacggctctaatga

SEQ ID NO: 396978 - DNA, 30 bp, Artificial Sequence
  Synthetic oligonucleotide
acattacacggccacgttcaaatgtaatga

SEQ ID NO: 396979 - DNA, 30 bp, Artificial Sequence
  Synthetic oligonucleotide
ttaaggcaagcttccctgacattgtaatga

SEQ ID NO: 396980 - DNA, 30 bp, Artificial Sequence
  Synthetic oligonucleotide
atcacttggatcacattttatgtttaatga

SEQ ID NO: 396981 - DNA, 30 bp, Artificial Sequence
  Synthetic oligonucleotide
tttatggccggcgggtcgtgattaacatga

SEQ ID NO: 396982 - DNA, 30 bp, Artificial Sequence
  Synthetic oligonucleotide
acagcgaacgtattgcgaatgcacacatga

SEQ ID NO: 396983 - DNA, 30 bp, Artificial Sequence
  Synthetic oligonucleotide
ttgaatgtcctcggacgagaggccacatga

SEQ ID NO: 396984 - DNA, 30 bp, Artificial Sequence
  Synthetic oligonucleotide
cctctcggcatgtttctaacgaggacatga

SEQ ID NO: 396985 - DNA, 30 bp, Artificial Sequence
  Synthetic oligonucleotide
aggctgggcgtaccaaccgaagtgacatga

SEQ ID NO: 396986 - DNA, 30 bp, Artificial Sequence
  Synthetic oligonucleotide
tctgcggattccttcggaaccttgacatga

SEQ ID NO: 396987 - DNA, 30 bp, Artificial Sequence
  Synthetic oligonucleotide
ttcgcataatagcatacctctcgtacatga

SEQ ID NO: 396988 - DNA, 30 bp, Artificial Sequence
  Synthetic oligonucleotide
tagcgccaggttcagtgtgctcaaccatga

SEQ ID NO: 396989 - DNA, 30 bp, Artificial Sequence
  Synthetic oligonucleotide
tgtgaggaatttaatggtaggccaccatga

SEQ ID NO: 396990 - DNA, 30 bp, Artificial Sequence
  Synthetic oligonucleotide
catagacccgaagggcttgccagcccatga

SEQ ID NO: 396991 - DNA, 30 bp, Artificial Sequence
  Synthetic oligonucleotide
aaaattcttcgccgatcctcacgcccatga

SEQ ID NO: 396992 - DNA, 30 bp, Artificial Sequence
  Synthetic oligonucleotide
ctgtgtcgggtagcccatcgcctggcatga

SEQ ID NO: 396993 - DNA, 30 bp, Artificial Sequence
  Synthetic oligonucleotide
tgggttcagccgcatggactaaatgcatga

SEQ ID NO: 396994 - DNA, 31 bp, Artificial Sequence
  Synthetic oligonucleotide
tataagctacaatgctggcagcgatgcatga

SEQ ID NO: 396995 - DNA, 30 bp, Artificial Sequence
  Synthetic oligonucleotide
gatcatgtccacattaagcgaagctcatga

SEQ ID NO: 396996 - DNA, 30 bp, Artificial Sequence
  Synthetic oligonucleotide
gacatatgaggcgagccgtagcgctcatga

SEQ ID NO: 396997 - DNA, 30 bp, Artificial Sequence
  Synthetic oligonucleotide
ccgggttttttcagcaacaaattctcatga

SEQ ID NO: 396998 - DNA, 30 bp, Artificial Sequence
  Synthetic oligonucleotide
taggtacacagacggtggactcagtcatga

SEQ ID NO: 396999 - DNA, 30 bp, Artificial Sequence
  Synthetic oligonucleotide
ctgccagtgtctcaatagtattggtcatga

SEQ ID NO: 397000 - DNA, 30 bp, Artificial Sequence
  Synthetic oligonucleotide
gctcttctttaatcgaagagacgttcatga

SEQ ID NO: 397001 - DNA, 30 bp, Artificial Sequence
  Synthetic oligonucleotide
gactccggagatcctgcacaaccaagatga

SEQ ID NO: 397002 - DNA, 30 bp, Artificial Sequence
  Synthetic oligonucleotide
cctgatgcagcacgcattgtctgaagatga

SEQ ID NO: 397003 - DNA, 30 bp, Artificial Sequence
  Synthetic oligonucleotide
tgcgattagacgtgtcatttggcgagatga

SEQ ID NO: 397004 - DNA, 30 bp, Artificial Sequence
  Synthetic oligonucleotide
gtattgacagtaatctctaattggagatga

SEQ ID NO: 397005 - DNA, 30 bp, Artificial Sequence
  Synthetic oligonucleotide
ctagctcaggaaaggggccgtggtagatga

SEQ ID NO: 397006 - DNA, 30 bp, Artificial Sequence
  Synthetic oligonucleotide
ctattacacggcaactatcgcgttagatga

SEQ ID NO: 397007 - DNA, 30 bp, Artificial Sequence
  Synthetic oligonucleotide
tctggtgtccatatgcccggatttagatga

SEQ ID NO: 397008 - DNA, 30 bp, Artificial Sequence
  Synthetic oligonucleotide
cagaagtttcactttcctcggggacgatga

SEQ ID NO: 397009 - DNA, 30 bp, Artificial Sequence
  Synthetic oligonucleotide
gttgtgcctcatcagtggattactcgatga

SEQ ID NO: 397010 - DNA, 30 bp, Artificial Sequence
  Synthetic oligonucleotide
gtgagacgcgacgtacattccattcgatga

SEQ ID NO: 397011 - DNA, 30 bp, Artificial Sequence
  Synthetic oligonucleotide
aaggtgtttaaagcccgcctctttcgatga

SEQ ID NO: 397012 - DNA, 30 bp, Artificial Sequence
  Synthetic oligonucleotide
atgaagcatcttgttgatagctacggatga

SEQ ID NO: 397013 - DNA, 30 bp, Artificial Sequence
  Synthetic oligonucleotide
caccgatatagccgtacctcgttcggatga

SEQ ID NO: 397014 - DNA, 30 bp, Artificial Sequence
  Synthetic oligonucleotide
ttcaactgacggatgacgcttgggggatga

SEQ ID NO: 397015 - DNA, 30 bp, Artificial Sequence
  Synthetic oligonucleotide
cgatgaggggtgtggctaaatgatggatga

SEQ ID NO: 397016 - DNA, 30 bp, Artificial Sequence
  Synthetic oligonucleotide
tttgtcgggattaatgaggagttatgatga

SEQ ID NO: 397017 - DNA, 30 bp, Artificial Sequence
  Synthetic oligonucleotide
ggtacgattccaccgacatggctctgatga

SEQ ID NO: 397018 - DNA, 30 bp, Artificial Sequence
  Synthetic oligonucleotide
ggacaacacccatgatccatgcgttgatga

SEQ ID NO: 397019 - DNA, 30 bp, Artificial Sequence
  Synthetic oligonucleotide
cttgtaagtaattacatagtgcgaatatga

SEQ ID NO: 397020 - DNA, 30 bp, Artificial Sequence
  Synthetic oligonucleotide
cctcatctgggcttgagatagtgaatatga

SEQ ID NO: 397021 - DNA, 30 bp, Artificial Sequence
  Synthetic oligonucleotide
aaggtctttgatgtgagatacaacatatga

SEQ ID NO: 397022 - DNA, 30 bp, Artificial Sequence
  Synthetic oligonucleotide
cttaagggattggttttggctaagatatga

SEQ ID NO: 397023 - DNA, 30 bp, Artificial Sequence
  Synthetic oligonucleotide
agtcgcgacattagtaaatacgcgatatga

SEQ ID NO: 397024 - DNA, 30 bp, Artificial Sequence
  Synthetic oligonucleotide
gtcaaatggaataggtttacgtcgatatga

SEQ ID NO: 397025 - DNA, 30 bp, Artificial Sequence
  Synthetic oligonucleotide
ttagtgcgctgagtgtgaatgtcgatatga

SEQ ID NO: 397026 - DNA, 30 bp, Artificial Sequence
  Synthetic oligonucleotide
gataggaaggttttgtgaggggtgatatga

SEQ ID NO: 397027 - DNA, 30 bp, Artificial Sequence
  Synthetic oligonucleotide
tgctcgggccttcggtatctaattatatga

SEQ ID NO: 397028 - DNA, 30 bp, Artificial Sequence
  Synthetic oligonucleotide
gtttgtacgtagcctgtttacattatatga

SEQ ID NO: 397029 - DNA, 30 bp, Artificial Sequence
  Synthetic oligonucleotide
aaaaattatgtgcgtccaaaattactatga

SEQ ID NO: 397030 - DNA, 30 bp, Artificial Sequence
  Synthetic oligonucleotide
attgatgtagataaggctccagggctatga

SEQ ID NO: 397031 - DNA, 30 bp, Artificial Sequence
  Synthetic oligonucleotide
ccaggtcagccaacccggggtgccgtatga

SEQ ID NO: 397032 - DNA, 30 bp, Artificial Sequence
  Synthetic oligonucleotide
cgctggatctagaggcgtatttgggtatga

SEQ ID NO: 397033 - DNA, 30 bp, Artificial Sequence
  Synthetic oligonucleotide
cgctgtacagtgcccatataaactgtatga

SEQ ID NO: 397034 - DNA, 30 bp, Artificial Sequence
  Synthetic oligonucleotide
ctccagcgcggtttatgttatattgtatga

SEQ ID NO: 397035 - DNA, 30 bp, Artificial Sequence
  Synthetic oligonucleotide
gagtcgcaattgcgagtctaaccattatga

SEQ ID NO: 397036 - DNA, 30 bp, Artificial Sequence
  Synthetic oligonucleotide
gagcagacccggttgagtggttcattatga

SEQ ID NO: 397037 - DNA, 30 bp, Artificial Sequence
  Synthetic oligonucleotide
aaccataacaaaaaatatttgtgattatga

SEQ ID NO: 397038 - DNA, 30 bp, Artificial Sequence
  Synthetic oligonucleotide
tttatgtccaggagtttagagtggttatga

SEQ ID NO: 397039 - DNA, 30 bp, Artificial Sequence
  Synthetic oligonucleotide
ggaaaatttgacttgtgcctgatgttatga

SEQ ID NO: 397040 - DNA, 30 bp, Artificial Sequence
  Synthetic oligonucleotide
tcctttgggtaccaggaccttatgttatga

SEQ ID NO: 397041 - DNA, 30 bp, Artificial Sequence
  Synthetic oligonucleotide
catcctgctcacgaagcacggctgttatga

SEQ ID NO: 397042 - DNA, 30 bp, Artificial Sequence
  Synthetic oligonucleotide
tcaattaggtgctattttgggactttatga

SEQ ID NO: 397043 - DNA, 30 bp, Artificial Sequence
  Synthetic oligonucleotide
aagtgtgttagcccctgctctcgtttatga

SEQ ID NO: 397044 - DNA, 30 bp, Artificial Sequence
  Synthetic oligonucleotide
tatcaactccagctcgatataatcaactga

SEQ ID NO: 397045 - DNA, 30 bp, Artificial Sequence
  Synthetic oligonucleotide
taagccgaatcagctagtcgggtcaactga

SEQ ID NO: 397046 - DNA, 30 bp, Artificial Sequence
  Synthetic oligonucleotide
ggatttaacagtagcacaatgtagaactga

SEQ ID NO: 397047 - DNA, 30 bp, Artificial Sequence
  Synthetic oligonucleotide
attgactcatctttgttcagctgccactga

SEQ ID NO: 397048 - DNA, 30 bp, Artificial Sequence
  Synthetic oligonucleotide
ggtattgcgctgagctatctttagcactga

SEQ ID NO: 397049 - DNA, 30 bp, Artificial Sequence
  Synthetic oligonucleotide
gtttactgaagtgatggaggatcgcactga

SEQ ID NO: 397050 - DNA, 30 bp, Artificial Sequence
  Synthetic oligonucleotide
agaacacccccctaggacgagggtcactga

SEQ ID NO: 397051 - DNA, 30 bp, Artificial Sequence
  Synthetic oligonucleotide
ggtcttaaagaatcctgccacattcactga

SEQ ID NO: 397052 - DNA, 30 bp, Artificial Sequence
  Synthetic oligonucleotide
ggcatatatttttggactgggcgagactga

SEQ ID NO: 397053 - DNA, 30 bp, Artificial Sequence
  Synthetic oligonucleotide
attctgctgagaacgaagggcacggactga

SEQ ID NO: 397054 - DNA, 30 bp, Artificial Sequence
  Synthetic oligonucleotide
gcttcgcacaaccagttgaccggggactga

SEQ ID NO: 397055 - DNA, 30 bp, Artificial Sequence
  Synthetic oligonucleotide
tttgtcgccatagacgcccaggcatactga

SEQ ID NO: 397056 - DNA, 30 bp, Artificial Sequence
  Synthetic oligonucleotide
ccaaccctagttatagctacgtggtactga

SEQ ID NO: 397057 - DNA, 30 bp, Artificial Sequence
  Synthetic oligonucleotide
gtcaatcaatctactgcataaggttactga

SEQ ID NO: 397058 - DNA, 30 bp, Artificial Sequence
  Synthetic oligonucleotide
ccagaaagtgatactaatatttgttactga

SEQ ID NO: 397059 - DNA, 30 bp, Artificial Sequence
  Synthetic oligonucleotide
cagaacagccctggtgaattacaaacctga

SEQ ID NO: 397060 - DNA, 30 bp, Artificial Sequence
  Synthetic oligonucleotide
ctaacctgggggttattacgcccaacctga

SEQ ID NO: 397061 - DNA, 30 bp, Artificial Sequence
  Synthetic oligonucleotide
tgaggtgtgatttattaaaggccaacctga

SEQ ID NO: 397062 - DNA, 30 bp, Artificial Sequence
  Synthetic oligonucleotide
aatgccaagctcgcaggggtaaacacctga

SEQ ID NO: 397063 - DNA, 30 bp, Artificial Sequence
  Synthetic oligonucleotide
cttgcagggctggaagcagtctagacctga

SEQ ID NO: 397064 - DNA, 30 bp, Artificial Sequence
  Synthetic oligonucleotide
agatgcatggggtctcgcctccatacctga

SEQ ID NO: 397065 - DNA, 30 bp, Artificial Sequence
  Synthetic oligonucleotide
taatgaggccttcgctcgtgcattacctga

SEQ ID NO: 397066 - DNA, 30 bp, Artificial Sequence
  Synthetic oligonucleotide
acggggatatacttcatggaggttacctga

SEQ ID NO: 397067 - DNA, 30 bp, Artificial Sequence
  Synthetic oligonucleotide
atttgtccatgaaagaaacccaaaccctga

SEQ ID NO: 397068 - DNA, 30 bp, Artificial Sequence
  Synthetic oligonucleotide
cggtagtttggtgggaggagctcaccctga

SEQ ID NO: 397069 - DNA, 30 bp, Artificial Sequence
  Synthetic oligonucleotide
gcatcccgacttggaaacagtttaccctga

SEQ ID NO: 397070 - DNA, 30 bp, Artificial Sequence
  Synthetic oligonucleotide
cgaccaagcggattgaacattcacccctga

SEQ ID NO: 397071 - DNA, 30 bp, Artificial Sequence
  Synthetic oligonucleotide
gccacgccaaatccgacaacccagccctga

SEQ ID NO: 397072 - DNA, 30 bp, Artificial Sequence
  Synthetic oligonucleotide
taatccgcagaatgttctcatgagccctga

SEQ ID NO: 397073 - DNA, 30 bp, Artificial Sequence
  Synthetic oligonucleotide
agatattgatggatcgactctgtgccctga

SEQ ID NO: 397074 - DNA, 30 bp, Artificial Sequence
  Synthetic oligonucleotide
accgctgcggcatcctaagaaagagcctga

SEQ ID NO: 397075 - DNA, 30 bp, Artificial Sequence
  Synthetic oligonucleotide
ggacagagacaggcactgaacaacgcctga

SEQ ID NO: 397076 - DNA, 30 bp, Artificial Sequence
  Synthetic oligonucleotide
tttttagatagacagtgattttgcgcctga

SEQ ID NO: 397077 - DNA, 30 bp, Artificial Sequence
  Synthetic oligonucleotide
aatcgttttagacaatggaaaatggcctga

SEQ ID NO: 397078 - DNA, 30 bp, Artificial Sequence
  Synthetic oligonucleotide
tccaagttccgatgatgaagatatgcctga

SEQ ID NO: 397079 - DNA, 30 bp, Artificial Sequence
  Synthetic oligonucleotide
gcaaggcaggccttcgcacgctatgcctga

SEQ ID NO: 397080 - DNA, 30 bp, Artificial Sequence
  Synthetic oligonucleotide
gggtgtctaagttagttcggccctgcctga

SEQ ID NO: 397081 - DNA, 30 bp, Artificial Sequence
  Synthetic oligonucleotide
gccttcagtgccaaaattcaagcatcctga

SEQ ID NO: 397082 - DNA, 30 bp, Artificial Sequence
  Synthetic oligonucleotide
aagagttagtggttgtatgtctagtcctga

SEQ ID NO: 397083 - DNA, 30 bp, Artificial Sequence
  Synthetic oligonucleotide
gagcgtctaggtttctgcgtcgattcctga

SEQ ID NO: 397084 - DNA, 30 bp, Artificial Sequence
  Synthetic oligonucleotide
aaagcatcacaaagtgatatcggttcctga

SEQ ID NO: 397085 - DNA, 30 bp, Artificial Sequence
  Synthetic oligonucleotide
gtcttgtctctaaattgttccgtaagctga

SEQ ID NO: 397086 - DNA, 30 bp, Artificial Sequence
  Synthetic oligonucleotide
ccacttggtttggccataggtttaagctga

SEQ ID NO: 397087 - DNA, 30 bp, Artificial Sequence
  Synthetic oligonucleotide
tatagtgtaacgcaggttaatgccagctga

SEQ ID NO: 397088 - DNA, 29 bp, Artificial Sequence
  Synthetic oligonucleotide
ataaggaccttccaccacgctccagctga

SEQ ID NO: 397089 - DNA, 30 bp, Artificial Sequence
  Synthetic oligonucleotide
gtcgccaacctgacctattatacgcgctga

SEQ ID NO: 397090 - DNA, 30 bp, Artificial Sequence
  Synthetic oligonucleotide
gtaatcaatagatgccaagagccgcgctga

SEQ ID NO: 397091 - DNA, 30 bp, Artificial Sequence
  Synthetic oligonucleotide
gcaccgggagagagttatttactgcgctga

SEQ ID NO: 397092 - DNA, 30 bp, Artificial Sequence
  Synthetic oligonucleotide
acagaaggaatattctagggcggtcgctga

SEQ ID NO: 397093 - DNA, 30 bp, Artificial Sequence
  Synthetic oligonucleotide
ttttttgcggggacgaggatataaggctga

SEQ ID NO: 397094 - DNA, 30 bp, Artificial Sequence
  Synthetic oligonucleotide
tttatctgcccgacgtcaacattaggctga

SEQ ID NO: 397095 - DNA, 30 bp, Artificial Sequence
  Synthetic oligonucleotide
atactaagttagaccgggcccttaggctga

SEQ ID NO: 397096 - DNA, 30 bp, Artificial Sequence
  Synthetic oligonucleotide
gcatccaggcgttaaaaaccgtccggctga

SEQ ID NO: 397097 - DNA, 30 bp, Artificial Sequence
  Synthetic oligonucleotide
accctttctcaaatagctccactgggctga

SEQ ID NO: 397098 - DNA, 30 bp, Artificial Sequence
  Synthetic oligonucleotide
gaatgaggcgcgttaaagggaaatggctga

SEQ ID NO: 397099 - DNA, 30 bp, Artificial Sequence
  Synthetic oligonucleotide
gaagcaccccgggacacagcccgtggctga

SEQ ID NO: 397100 - DNA, 30 bp, Artificial Sequence
  Synthetic oligonucleotide
gtcgtcctgccgcaggtaactaaatgctga

SEQ ID NO: 397101 - DNA, 30 bp, Artificial Sequence
  Synthetic oligonucleotide
ctctcgctagtaaaatcagcgacatgctga

SEQ ID NO: 397102 - DNA, 30 bp, Artificial Sequence
  Synthetic oligonucleotide
ttatttggtcatccctgagtaccatgctga

SEQ ID NO: 397103 - DNA, 30 bp, Artificial Sequence
  Synthetic oligonucleotide
ggacgacaggagttgcgttcaagatgctga

SEQ ID NO: 397104 - DNA, 30 bp, Artificial Sequence
  Synthetic oligonucleotide
agtatggagaggacttcacctccgtgctga

SEQ ID NO: 397105 - DNA, 30 bp, Artificial Sequence
  Synthetic oligonucleotide
ctacacatgaagtttagggctgtgtgctga

SEQ ID NO: 397106 - DNA, 30 bp, Artificial Sequence
  Synthetic oligonucleotide
gtaagccaggcgctaatcacgacttgctga

SEQ ID NO: 397107 - DNA, 30 bp, Artificial Sequence
  Synthetic oligonucleotide
agctgatcagccggcgtcatcatttgctga

SEQ ID NO: 397108 - DNA, 30 bp, Artificial Sequence
  Synthetic oligonucleotide
tccaaaggtatgtcagatcgtttaatctga

SEQ ID NO: 397109 - DNA, 30 bp, Artificial Sequence
  Synthetic oligonucleotide
gttgtgaggcaatgcaaacaaaacatctga

SEQ ID NO: 397110 - DNA, 30 bp, Artificial Sequence
  Synthetic oligonucleotide
gtacgatcgatgcattttcgctatatctga

SEQ ID NO: 397111 - DNA, 30 bp, Artificial Sequence
  Synthetic oligonucleotide
gggaattccgggggatctatgttactctga

SEQ ID NO: 397112 - DNA, 30 bp, Artificial Sequence
  Synthetic oligonucleotide
taagtgtgatatatccgctctagcctctga

SEQ ID NO: 397113 - DNA, 30 bp, Artificial Sequence
  Synthetic oligonucleotide
ttaaaaggtacgcacaataggacgctctga

SEQ ID NO: 397114 - DNA, 30 bp, Artificial Sequence
  Synthetic oligonucleotide
atagggattaagagccactgcagtctctga

SEQ ID NO: 397115 - DNA, 28 bp, Artificial Sequence
  Synthetic oligonucleotide
actactatacgggaagtgagcggtctga

SEQ ID NO: 397116 - DNA, 30 bp, Artificial Sequence
  Synthetic oligonucleotide
agacagtttaacatcaggaatcgggtctga

SEQ ID NO: 397117 - DNA, 30 bp, Artificial Sequence
  Synthetic oligonucleotide
tgggactgcttttctgaagcaggggtctga

SEQ ID NO: 397118 - DNA, 30 bp, Artificial Sequence
  Synthetic oligonucleotide
ttggcggctcgtgcaaggcgcctggtctga

SEQ ID NO: 397119 - DNA, 30 bp, Artificial Sequence
  Synthetic oligonucleotide
atgtggcttctgcctaaactcgtggtctga

SEQ ID NO: 397120 - DNA, 30 bp, Artificial Sequence
  Synthetic oligonucleotide
gaacatcagaggtgctaacccgatgtctga

SEQ ID NO: 397121 - DNA, 30 bp, Artificial Sequence
  Synthetic oligonucleotide
tagaactatagggtgctcatcattgtctga

SEQ ID NO: 397122 - DNA, 30 bp, Artificial Sequence
  Synthetic oligonucleotide
ttgtcctcggatccattgaaggaattctga

SEQ ID NO: 397123 - DNA, 30 bp, Artificial Sequence
  Synthetic oligonucleotide
cccgactattcaattgaggcaagattctga

SEQ ID NO: 397124 - DNA, 30 bp, Artificial Sequence
  Synthetic oligonucleotide
ttccatacatcggctcgaaaagtattctga

SEQ ID NO: 397125 - DNA, 30 bp, Artificial Sequence
  Synthetic oligonucleotide
gaataggtcactaattttttacaaaagtga

SEQ ID NO: 397126 - DNA, 30 bp, Artificial Sequence
  Synthetic oligonucleotide
ccacgtttacaggtaggtggcggaaagtga

SEQ ID NO: 397127 - DNA, 30 bp, Artificial Sequence
  Synthetic oligonucleotide
tgaactaatggcgcataccgcttaaagtga

SEQ ID NO: 397128 - DNA, 30 bp, Artificial Sequence
  Synthetic oligonucleotide
ccgggcttggaaaggtaaaattacaagtga

SEQ ID NO: 397129 - DNA, 30 bp, Artificial Sequence
  Synthetic oligonucleotide
gatagtggtaggctatcccaaaccaagtga

SEQ ID NO: 397130 - DNA, 30 bp, Artificial Sequence
  Synthetic oligonucleotide
tggcatttttcataataatggggcaagtga

SEQ ID NO: 397131 - DNA, 30 bp, Artificial Sequence
  Synthetic oligonucleotide
gcatccgaatacatgtaccctttcaagtga

SEQ ID NO: 397132 - DNA, 30 bp, Artificial Sequence
  Synthetic oligonucleotide
aagaaatttcaggatagacaactgaagtga

SEQ ID NO: 397133 - DNA, 30 bp, Artificial Sequence
  Synthetic oligonucleotide
gctgtaagttgcagctttcttgctaagtga

SEQ ID NO: 397134 - DNA, 30 bp, Artificial Sequence
  Synthetic oligonucleotide
tggagtgcactcgcgggtttgttacagtga

SEQ ID NO: 397135 - DNA, 27 bp, Artificial Sequence
  Synthetic oligonucleotide
taatatgttacagtttggtctcagtga

SEQ ID NO: 397136 - DNA, 30 bp, Artificial Sequence
  Synthetic oligonucleotide
tctccgtgataaagttaatattctcagtga

SEQ ID NO: 397137 - DNA, 30 bp, Artificial Sequence
  Synthetic oligonucleotide
atggacccataaattatagggcccgagtga

SEQ ID NO: 397138 - DNA, 30 bp, Artificial Sequence
  Synthetic oligonucleotide
gctcgcgctaccacctatggtgcggagtga

SEQ ID NO: 397139 - DNA, 30 bp, Artificial Sequence
  Synthetic oligonucleotide
agcggtgatttaacttacgggcgggagtga

SEQ ID NO: 397140 - DNA, 30 bp, Artificial Sequence
  Synthetic oligonucleotide
gcaaagcgagtagagaaatgtttggagtga

SEQ ID NO: 397141 - DNA, 30 bp, Artificial Sequence
  Synthetic oligonucleotide
cgcaagaagcgcagtatcttttatgagtga

SEQ ID NO: 397142 - DNA, 30 bp, Artificial Sequence
  Synthetic oligonucleotide
tactacctttttcaaggagtaccatagtga

SEQ ID NO: 397143 - DNA, 30 bp, Artificial Sequence
  Synthetic oligonucleotide
ggagcgcactcagatgtctagtcgtagtga

SEQ ID NO: 397144 - DNA, 30 bp, Artificial Sequence
  Synthetic oligonucleotide
tcctgtcaagattctagtagtgcttagtga

SEQ ID NO: 397145 - DNA, 30 bp, Artificial Sequence
  Synthetic oligonucleotide
tccgaactcggtcattctactgcaacgtga

SEQ ID NO: 397146 - DNA, 30 bp, Artificial Sequence
  Synthetic oligonucleotide
gtcttagttgcggtcaaaatgtcaacgtga

SEQ ID NO: 397147 - DNA, 30 bp, Artificial Sequence
  Synthetic oligonucleotide
atggaattgaaatgtagttgctccacgtga

SEQ ID NO: 397148 - DNA, 30 bp, Artificial Sequence
  Synthetic oligonucleotide
cactaatcattatcggaattccagacgtga

SEQ ID NO: 397149 - DNA, 30 bp, Artificial Sequence
  Synthetic oligonucleotide
ttcgcgacccttcgagacaaatttacgtga

SEQ ID NO: 397150 - DNA, 30 bp, Artificial Sequence
  Synthetic oligonucleotide
cgttaaggtcggtcgcgctggtaaccgtga

SEQ ID NO: 397151 - DNA, 30 bp, Artificial Sequence
  Synthetic oligonucleotide
tagggacctttatgaatacaaacaccgtga

SEQ ID NO: 397152 - DNA, 30 bp, Artificial Sequence
  Synthetic oligonucleotide
agttactccggcacgattagtcgaccgtga

SEQ ID NO: 397153 - DNA, 30 bp, Artificial Sequence
  Synthetic oligonucleotide
aggttttcagggaataacgtgctcccgtga

SEQ ID NO: 397154 - DNA, 30 bp, Artificial Sequence
  Synthetic oligonucleotide
agaacgcctagtttgggaagagatccgtga

SEQ ID NO: 397155 - DNA, 30 bp, Artificial Sequence
  Synthetic oligonucleotide
cggcttttcgctcttgtttaaacggcgtga

SEQ ID NO: 397156 - DNA, 30 bp, Artificial Sequence
  Synthetic oligonucleotide
agaaatcgttaccgagttcgagcatcgtga

SEQ ID NO: 397157 - DNA, 30 bp, Artificial Sequence
  Synthetic oligonucleotide
gtgtctctaaagtacatgttcgcatcgtga

SEQ ID NO: 397158 - DNA, 30 bp, Artificial Sequence
  Synthetic oligonucleotide
ctaaccggtttcaactgaggtagatcgtga

SEQ ID NO: 397159 - DNA, 30 bp, Artificial Sequence
  Synthetic oligonucleotide
tggacctcgaggagtgcagtgcactcgtga

SEQ ID NO: 397160 - DNA, 30 bp, Artificial Sequence
  Synthetic oligonucleotide
ttatcttggtcatccgttgggagctcgtga

SEQ ID NO: 397161 - DNA, 30 bp, Artificial Sequence
  Synthetic oligonucleotide
tacaacacttccttcttaaccttctcgtga

SEQ ID NO: 397162 - DNA, 30 bp, Artificial Sequence
  Synthetic oligonucleotide
catgggcagctggttatgattccgtcgtga

SEQ ID NO: 397163 - DNA, 30 bp, Artificial Sequence
  Synthetic oligonucleotide
aaaaccctctatttacagtctctttcgtga

SEQ ID NO: 397164 - DNA, 30 bp, Artificial Sequence
  Synthetic oligonucleotide
gcgccgggagccatactgtggaaaaggtga

SEQ ID NO: 397165 - DNA, 30 bp, Artificial Sequence
  Synthetic oligonucleotide
attaggcgcgtgtacgcctcggcaaggtga

SEQ ID NO: 397166 - DNA, 30 bp, Artificial Sequence
  Synthetic oligonucleotide
tataccgaggaggctttagcgtcaaggtga

SEQ ID NO: 397167 - DNA, 30 bp, Artificial Sequence
  Synthetic oligonucleotide
agggctaagttccgaccgcagctaaggtga

SEQ ID NO: 397168 - DNA, 30 bp, Artificial Sequence
  Synthetic oligonucleotide
gaatatctgagggcacagtgtgtaaggtga

SEQ ID NO: 397169 - DNA, 30 bp, Artificial Sequence
  Synthetic oligonucleotide
gttaacggcgtggggacttttgcgaggtga

SEQ ID NO: 397170 - DNA, 30 bp, Artificial Sequence
  Synthetic oligonucleotide
tgggtactgacgttctctgagagtaggtga

SEQ ID NO: 397171 - DNA, 30 bp, Artificial Sequence
  Synthetic oligonucleotide
cgtgcaatgatgcgcaatgcaccacggtga

SEQ ID NO: 397172 - DNA, 30 bp, Artificial Sequence
  Synthetic oligonucleotide
cctgcttgtctcctggccagtagacggtga

SEQ ID NO: 397173 - DNA, 30 bp, Artificial Sequence
  Synthetic oligonucleotide
cttgccgcatgatagtaatggtgacggtga

SEQ ID NO: 397174 - DNA, 30 bp, Artificial Sequence
  Synthetic oligonucleotide
ctcagctagctacttaacagttgacggtga

SEQ ID NO: 397175 - DNA, 30 bp, Artificial Sequence
  Synthetic oligonucleotide
gggcgattgatatgtttctatctacggtga

SEQ ID NO: 397176 - DNA, 30 bp, Artificial Sequence
  Synthetic oligonucleotide
aagtttgtgtggcacccagtcttacggtga

SEQ ID NO: 397177 - DNA, 30 bp, Artificial Sequence
  Synthetic oligonucleotide
aaccgatttactataatctcacggcggtga

SEQ ID NO: 397178 - DNA, 30 bp, Artificial Sequence
  Synthetic oligonucleotide
aaacatggcggcacgcatctaaatcggtga

SEQ ID NO: 397179 - DNA, 30 bp, Artificial Sequence
  Synthetic oligonucleotide
ttaagtgcaggccctttggataatcggtga

SEQ ID NO: 397180 - DNA, 30 bp, Artificial Sequence
  Synthetic oligonucleotide
tgcgtttgagcactactttcctatcggtga

SEQ ID NO: 397181 - DNA, 30 bp, Artificial Sequence
  Synthetic oligonucleotide
agacactttttgccgtcttgaggtcggtga

SEQ ID NO: 397182 - DNA, 30 bp, Artificial Sequence
  Synthetic oligonucleotide
ccctcagtaattcgacatctttaagggtga

SEQ ID NO: 397183 - DNA, 30 bp, Artificial Sequence
  Synthetic oligonucleotide
ttcgaggcacctttaattgcgccagggtga

SEQ ID NO: 397184 - DNA, 30 bp, Artificial Sequence
  Synthetic oligonucleotide
taggatacgactatgtacggtgacgggtga

SEQ ID NO: 397185 - DNA, 30 bp, Artificial Sequence
  Synthetic oligonucleotide
gccccacggcatgggttcgacaccgggtga

SEQ ID NO: 397186 - DNA, 30 bp, Artificial Sequence
  Synthetic oligonucleotide
ggtcctttgtttttttctctagaggggtga

SEQ ID NO: 397187 - DNA, 30 bp, Artificial Sequence
  Synthetic oligonucleotide
actaagtcatgtaagttaatcatggggtga

SEQ ID NO: 397188 - DNA, 30 bp, Artificial Sequence
  Synthetic oligonucleotide
atccgcgcggaggtgggttggttggggtga

SEQ ID NO: 397189 - DNA, 30 bp, Artificial Sequence
  Synthetic oligonucleotide
ttcgggggttcattgtggttcaatgggtga

SEQ ID NO: 397190 - DNA, 30 bp, Artificial Sequence
  Synthetic oligonucleotide
tgcgtaatgtccgggccacagcatgggtga

SEQ ID NO: 397191 - DNA, 30 bp, Artificial Sequence
  Synthetic oligonucleotide
tccaccgctaagcaacccacagcatggtga

SEQ ID NO: 397192 - DNA, 30 bp, Artificial Sequence
  Synthetic oligonucleotide
ttagcttctccaatttctaggcgatggtga

SEQ ID NO: 397193 - DNA, 30 bp, Artificial Sequence
  Synthetic oligonucleotide
gcgcttggttcgtggaggcgccagtggtga

SEQ ID NO: 397194 - DNA, 30 bp, Artificial Sequence
  Synthetic oligonucleotide
attgattgttcttacttcatgcggtggtga

SEQ ID NO: 397195 - DNA, 30 bp, Artificial Sequence
  Synthetic oligonucleotide
tctacgcaggcccggagattgacaatgtga

SEQ ID NO: 397196 - DNA, 30 bp, Artificial Sequence
  Synthetic oligonucleotide
tttgctggatcagctggtagtccaatgtga

SEQ ID NO: 397197 - DNA, 30 bp, Artificial Sequence
  Synthetic oligonucleotide
gaccttgaattgggcatcaattcaatgtga

SEQ ID NO: 397198 - DNA, 30 bp, Artificial Sequence
  Synthetic oligonucleotide
ttgtacggttcacgttcactagtaatgtga

SEQ ID NO: 397199 - DNA, 30 bp, Artificial Sequence
  Synthetic oligonucleotide
gcgcttcccaaaggtagtgagttaatgtga

SEQ ID NO: 397200 - DNA, 30 bp, Artificial Sequence
  Synthetic oligonucleotide
ccttgccaggtcccggtcactgccatgtga

SEQ ID NO: 397201 - DNA, 30 bp, Artificial Sequence
  Synthetic oligonucleotide
gaaagacaagattccagcggttccatgtga

SEQ ID NO: 397202 - DNA, 30 bp, Artificial Sequence
  Synthetic oligonucleotide
gcaatggcatgcattgttctaggcatgtga

SEQ ID NO: 397203 - DNA, 31 bp, Artificial Sequence
  Synthetic oligonucleotide
gaatattctcaaccagacatggggcatgtga

SEQ ID NO: 397204 - DNA, 30 bp, Artificial Sequence
  Synthetic oligonucleotide
aatattcagagggaacgttgggtcatgtga

SEQ ID NO: 397205 - DNA, 30 bp, Artificial Sequence
  Synthetic oligonucleotide
ttaacttgaatagagcgctccgggatgtga

SEQ ID NO: 397206 - DNA, 30 bp, Artificial Sequence
  Synthetic oligonucleotide
cgaatgcggccagcttggactattatgtga

SEQ ID NO: 397207 - DNA, 30 bp, Artificial Sequence
  Synthetic oligonucleotide
ccgagtagacgttagcctttttcactgtga

SEQ ID NO: 397208 - DNA, 30 bp, Artificial Sequence
  Synthetic oligonucleotide
atctggaaagctctagtactagtgctgtga

SEQ ID NO: 397209 - DNA, 30 bp, Artificial Sequence
  Synthetic oligonucleotide
gttccgcgactagttaagtccggtctgtga

SEQ ID NO: 397210 - DNA, 30 bp, Artificial Sequence
  Synthetic oligonucleotide
cttcggatcacggtcacatcacacgtgtga

SEQ ID NO: 397211 - DNA, 30 bp, Artificial Sequence
  Synthetic oligonucleotide
ctcgagtgtatttaatgtggtgacgtgtga

SEQ ID NO: 397212 - DNA, 30 bp, Artificial Sequence
  Synthetic oligonucleotide
ggccttggatcggcgccgggagtcgtgtga

SEQ ID NO: 397213 - DNA, 30 bp, Artificial Sequence
  Synthetic oligonucleotide
cctatccggattctgccctcgggggtgtga

SEQ ID NO: 397214 - DNA, 30 bp, Artificial Sequence
  Synthetic oligonucleotide
cgtcctctatctagttatatttctgtgtga

SEQ ID NO: 397215 - DNA, 30 bp, Artificial Sequence
  Synthetic oligonucleotide
tataggcccaaagacccaggacccttgtga

SEQ ID NO: 397216 - DNA, 30 bp, Artificial Sequence
  Synthetic oligonucleotide
taaaggtaggtgataagtacgcgtttgtga

SEQ ID NO: 397217 - DNA, 30 bp, Artificial Sequence
  Synthetic oligonucleotide
aagtctatctcagagtgttacggtttgtga

SEQ ID NO: 397218 - DNA, 30 bp, Artificial Sequence
  Synthetic oligonucleotide
ttcgccgggcaatttgatttgtgtttgtga

SEQ ID NO: 397219 - DNA, 30 bp, Artificial Sequence
  Synthetic oligonucleotide
gcaagactaccatcagagggttgtttgtga

SEQ ID NO: 397220 - DNA, 30 bp, Artificial Sequence
  Synthetic oligonucleotide
gtaccgcgtgacaaatgcaccagaaattga

SEQ ID NO: 397221 - DNA, 30 bp, Artificial Sequence
  Synthetic oligonucleotide
aattgttagttgataggcccaggaaattga

SEQ ID NO: 397222 - DNA, 30 bp, Artificial Sequence
  Synthetic oligonucleotide
ggttgcgggatactgttgggcggaaattga

SEQ ID NO: 397223 - DNA, 30 bp, Artificial Sequence
  Synthetic oligonucleotide
gcccggccgcatggtatggaagtaaattga

SEQ ID NO: 397224 - DNA, 30 bp, Artificial Sequence
  Synthetic oligonucleotide
agtcgcattctgcgtcttaacgacaattga

SEQ ID NO: 397225 - DNA, 30 bp, Artificial Sequence
  Synthetic oligonucleotide
ttgagttcgtcgacaactccctccaattga

SEQ ID NO: 397226 - DNA, 30 bp, Artificial Sequence
  Synthetic oligonucleotide
tacttatacgaagtcgcaatagtcaattga

SEQ ID NO: 397227 - DNA, 30 bp, Artificial Sequence
  Synthetic oligonucleotide
cgtactggtacttattagtttgagaattga

SEQ ID NO: 397228 - DNA, 30 bp, Artificial Sequence
  Synthetic oligonucleotide
acgtactaatgtgtaatttccaggaattga

SEQ ID NO: 397229 - DNA, 30 bp, Artificial Sequence
  Synthetic oligonucleotide
gttcggtcccactacctgctctggaattga

SEQ ID NO: 397230 - DNA, 30 bp, Artificial Sequence
  Synthetic oligonucleotide
ttcatcttctagtgggaggtcagtaattga

SEQ ID NO: 397231 - DNA, 30 bp, Artificial Sequence
  Synthetic oligonucleotide
catcgcgctacatcaattagaaaacattga

SEQ ID NO: 397232 - DNA, 30 bp, Artificial Sequence
  Synthetic oligonucleotide
agtatcgtaaaacttgagttcttacattga

SEQ ID NO: 397233 - DNA, 30 bp, Artificial Sequence
  Synthetic oligonucleotide
gtttaaagttctacggttagataccattga

SEQ ID NO: 397234 - DNA, 30 bp, Artificial Sequence
  Synthetic oligonucleotide
ggtatgtaggagacgggctacgcccattga

SEQ ID NO: 397235 - DNA, 30 bp, Artificial Sequence
  Synthetic oligonucleotide
acgtgaaatctgggttatcgcatccattga

SEQ ID NO: 397236 - DNA, 30 bp, Artificial Sequence
  Synthetic oligonucleotide
ggggcacaccataggtcagtgcctcattga

SEQ ID NO: 397237 - DNA, 30 bp, Artificial Sequence
  Synthetic oligonucleotide
taagtgcgggataaacgacgataagattga

SEQ ID NO: 397238 - DNA, 30 bp, Artificial Sequence
  Synthetic oligonucleotide
aattcattaaaaggtatgctggcagattga

SEQ ID NO: 397239 - DNA, 30 bp, Artificial Sequence
  Synthetic oligonucleotide
tactctatctgctggctagtaaacgattga

SEQ ID NO: 397240 - DNA, 30 bp, Artificial Sequence
  Synthetic oligonucleotide
acttaatattaggacctaagctccgattga

SEQ ID NO: 397241 - DNA, 31 bp, Artificial Sequence
  Synthetic oligonucleotide
agccgtgcctgtccttgcgcgtggcgattga

SEQ ID NO: 397242 - DNA, 30 bp, Artificial Sequence
  Synthetic oligonucleotide
cttcgctggcggatatgatggaaggattga

SEQ ID NO: 397243 - DNA, 30 bp, Artificial Sequence
  Synthetic oligonucleotide
taagggcaacgccttataccgcgggattga

SEQ ID NO: 397244 - DNA, 30 bp, Artificial Sequence
  Synthetic oligonucleotide
attcggtggcaaaaggcttacaatgattga

SEQ ID NO: 397245 - DNA, 30 bp, Artificial Sequence
  Synthetic oligonucleotide
atgtactatgcgtatgttcggtgtgattga

SEQ ID NO: 397246 - DNA, 30 bp, Artificial Sequence
  Synthetic oligonucleotide
aatgcgcgccggttggagctggaatattga

SEQ ID NO: 397247 - DNA, 30 bp, Artificial Sequence
  Synthetic oligonucleotide
tcagtatgctgtggtatgaatttatattga

SEQ ID NO: 397248 - DNA, 30 bp, Artificial Sequence
  Synthetic oligonucleotide
atgagcgatccattagggtcgccctattga

SEQ ID NO: 397249 - DNA, 30 bp, Artificial Sequence
  Synthetic oligonucleotide
atataagatgattcttaggcttgctattga

SEQ ID NO: 397250 - DNA, 30 bp, Artificial Sequence
  Synthetic oligonucleotide
aaggcacgtcccgccgcggcaatctattga

SEQ ID NO: 397251 - DNA, 30 bp, Artificial Sequence
  Synthetic oligonucleotide
aatatgatggtgaaaatgggaaagtattga

SEQ ID NO: 397252 - DNA, 30 bp, Artificial Sequence
  Synthetic oligonucleotide
gttaaagtatgcgaacacgtgccttattga

SEQ ID NO: 397253 - DNA, 30 bp, Artificial Sequence
  Synthetic oligonucleotide
aaagcgggtctacgcgatgaagcttattga

SEQ ID NO: 397254 - DNA, 30 bp, Artificial Sequence
  Synthetic oligonucleotide
ccaaaaggatcacattcattggcttattga

SEQ ID NO: 397255 - DNA, 30 bp, Artificial Sequence
  Synthetic oligonucleotide
tgcggtatattttgttgtgaggacacttga

SEQ ID NO: 397256 - DNA, 30 bp, Artificial Sequence
  Synthetic oligonucleotide
tacggtcatctgttgtaacaggggacttga

SEQ ID NO: 397257 - DNA, 30 bp, Artificial Sequence
  Synthetic oligonucleotide
tccctgtcgacggctttattgaatacttga

SEQ ID NO: 397258 - DNA, 30 bp, Artificial Sequence
  Synthetic oligonucleotide
agaagtcccgtcgagtattcgtatacttga

SEQ ID NO: 397259 - DNA, 30 bp, Artificial Sequence
  Synthetic oligonucleotide
agacctttgatattgcgtctgggaccttga

SEQ ID NO: 397260 - DNA, 30 bp, Artificial Sequence
  Synthetic oligonucleotide
gggggctaacggccgagtgatctaccttga

SEQ ID NO: 397261 - DNA, 30 bp, Artificial Sequence
  Synthetic oligonucleotide
tgtgcgaagggtcctcaaaaggtcccttga

SEQ ID NO: 397262 - DNA, 30 bp, Artificial Sequence
  Synthetic oligonucleotide
ctctgttcgtggaatcgtacagagccttga

SEQ ID NO: 397263 - DNA, 30 bp, Artificial Sequence
  Synthetic oligonucleotide
tatatcagggctggctccgtagcgccttga

SEQ ID NO: 397264 - DNA, 30 bp, Artificial Sequence
  Synthetic oligonucleotide
ctcgcgctgaatcggccgtcttcgccttga

SEQ ID NO: 397265 - DNA, 30 bp, Artificial Sequence
  Synthetic oligonucleotide
tttaccggctttaataaagccctgccttga

SEQ ID NO: 397266 - DNA, 30 bp, Artificial Sequence
  Synthetic oligonucleotide
ttactacctcgtttcgcggcggctccttga

SEQ ID NO: 397267 - DNA, 30 bp, Artificial Sequence
  Synthetic oligonucleotide
ggatttagcacccgcgtccgcaaagcttga

SEQ ID NO: 397268 - DNA, 30 bp, Artificial Sequence
  Synthetic oligonucleotide
atcccagacatttcatttatgtgagcttga

SEQ ID NO: 397269 - DNA, 30 bp, Artificial Sequence
  Synthetic oligonucleotide
tctgtttactcttgaaggggtcaggcttga

SEQ ID NO: 397270 - DNA, 30 bp, Artificial Sequence
  Synthetic oligonucleotide
gcgaatgctgttactgttatgacggcttga

SEQ ID NO: 397271 - DNA, 30 bp, Artificial Sequence
  Synthetic oligonucleotide
atatgattctggtacactcctttggcttga

SEQ ID NO: 397272 - DNA, 30 bp, Artificial Sequence
  Synthetic oligonucleotide
agccccaggaccaacgctatccaatcttga

SEQ ID NO: 397273 - DNA, 30 bp, Artificial Sequence
  Synthetic oligonucleotide
atccgagacgctgtctgtaatcaatcttga

SEQ ID NO: 397274 - DNA, 30 bp, Artificial Sequence
  Synthetic oligonucleotide
tgaaggacgactggttatagacgatcttga

SEQ ID NO: 397275 - DNA, 30 bp, Artificial Sequence
  Synthetic oligonucleotide
tatacagtggatcagttaatccactcttga

SEQ ID NO: 397276 - DNA, 30 bp, Artificial Sequence
  Synthetic oligonucleotide
cttcattgtcgttagtacttgggctcttga

SEQ ID NO: 397277 - DNA, 30 bp, Artificial Sequence
  Synthetic oligonucleotide
tacccaacccgctatcggttgcagtcttga

SEQ ID NO: 397278 - DNA, 30 bp, Artificial Sequence
  Synthetic oligonucleotide
ttcaacgtcgagggatttcgggcgtcttga

SEQ ID NO: 397279 - DNA, 30 bp, Artificial Sequence
  Synthetic oligonucleotide
ttaggccttcaaattaaataccggtcttga

SEQ ID NO: 397280 - DNA, 30 bp, Artificial Sequence
  Synthetic oligonucleotide
aacgcaagggcgggcgcgggtcgttcttga

SEQ ID NO: 397281 - DNA, 28 bp, Artificial Sequence
  Synthetic oligonucleotide
cccccaagcgttcgtataaaaaagttga

SEQ ID NO: 397282 - DNA, 30 bp, Artificial Sequence
  Synthetic oligonucleotide
ttaatcgtatgtagatggcggaaaagttga

SEQ ID NO: 397283 - DNA, 30 bp, Artificial Sequence
  Synthetic oligonucleotide
tttcataagttctgcctcgtcagaagttga

SEQ ID NO: 397284 - DNA, 30 bp, Artificial Sequence
  Synthetic oligonucleotide
tgactcctataggtcacccggaacagttga

SEQ ID NO: 397285 - DNA, 30 bp, Artificial Sequence
  Synthetic oligonucleotide
ttttccagaattggaagacctcgtagttga

SEQ ID NO: 397286 - DNA, 30 bp, Artificial Sequence
  Synthetic oligonucleotide
gagccaactaactgctccgggggtagttga

SEQ ID NO: 397287 - DNA, 30 bp, Artificial Sequence
  Synthetic oligonucleotide
gcggtagtaggaagtactgggggtagttga

SEQ ID NO: 397288 - DNA, 30 bp, Artificial Sequence
  Synthetic oligonucleotide
aataaaccctcacgctatctgagacgttga

SEQ ID NO: 397289 - DNA, 31 bp, Artificial Sequence
  Synthetic oligonucleotide
gcgttcctggtacacaccgtccttacgttga

SEQ ID NO: 397290 - DNA, 30 bp, Artificial Sequence
  Synthetic oligonucleotide
ggctacgactctcgcggggagttacgttga

SEQ ID NO: 397291 - DNA, 30 bp, Artificial Sequence
  Synthetic oligonucleotide
gtcatcaacatgtctagtctaacccgttga

SEQ ID NO: 397292 - DNA, 30 bp, Artificial Sequence
  Synthetic oligonucleotide
taaccagcatgggacttgccgtagcgttga

SEQ ID NO: 397293 - DNA, 30 bp, Artificial Sequence
  Synthetic oligonucleotide
tccgggtttcccaccgtgaaaaggcgttga

SEQ ID NO: 397294 - DNA, 30 bp, Artificial Sequence
  Synthetic oligonucleotide
gccagcggagtgggtatgcggcatcgttga

SEQ ID NO: 397295 - DNA, 30 bp, Artificial Sequence
  Synthetic oligonucleotide
aggcccggtcggtcacaattaattcgttga

SEQ ID NO: 397296 - DNA, 30 bp, Artificial Sequence
  Synthetic oligonucleotide
tgtcggctattccggccaggtaccggttga

SEQ ID NO: 397297 - DNA, 30 bp, Artificial Sequence
  Synthetic oligonucleotide
catgttcccgacacctgctagaggggttga

SEQ ID NO: 397298 - DNA, 30 bp, Artificial Sequence
  Synthetic oligonucleotide
cggttaggaaaggacccacatcggggttga

SEQ ID NO: 397299 - DNA, 30 bp, Artificial Sequence
  Synthetic oligonucleotide
gtcatgactaggggcatcatggggggttga

SEQ ID NO: 397300 - DNA, 30 bp, Artificial Sequence
  Synthetic oligonucleotide
attgctgaccgggcgcttatttggggttga

SEQ ID NO: 397301 - DNA, 30 bp, Artificial Sequence
  Synthetic oligonucleotide
aaattagcaggggattgactaatgggttga

SEQ ID NO: 397302 - DNA, 30 bp, Artificial Sequence
  Synthetic oligonucleotide
cctatccagaatccttgcggcatgggttga

SEQ ID NO: 397303 - DNA, 30 bp, Artificial Sequence
  Synthetic oligonucleotide
cactacaagttgccttaactggatggttga

SEQ ID NO: 397304 - DNA, 30 bp, Artificial Sequence
  Synthetic oligonucleotide
ctccgcagccagctgggtacatatggttga

SEQ ID NO: 397305 - DNA, 30 bp, Artificial Sequence
  Synthetic oligonucleotide
gcctatttagcgatctttactggtggttga

SEQ ID NO: 397306 - DNA, 30 bp, Artificial Sequence
  Synthetic oligonucleotide
ctagaacgaggaggtcatccagttggttga

SEQ ID NO: 397307 - DNA, 30 bp, Artificial Sequence
  Synthetic oligonucleotide
gagggacactagcgtcgcacgacatgttga

SEQ ID NO: 397308 - DNA, 30 bp, Artificial Sequence
  Synthetic oligonucleotide
cagatttcataaaattgaggtcagtgttga

SEQ ID NO: 397309 - DNA, 30 bp, Artificial Sequence
  Synthetic oligonucleotide
atatgagtcggaatattgtaatagtgttga

SEQ ID NO: 397310 - DNA, 30 bp, Artificial Sequence
  Synthetic oligonucleotide
cccacgggatacaactccagggggtgttga

SEQ ID NO: 397311 - DNA, 30 bp, Artificial Sequence
  Synthetic oligonucleotide
ccaggttaccatgacgttcgttggtgttga

SEQ ID NO: 397312 - DNA, 26 bp, Artificial Sequence
  Synthetic oligonucleotide
gagtcaaatgacacatattttgttga

SEQ ID NO: 397313 - DNA, 29 bp, Artificial Sequence
  Synthetic oligonucleotide
agcatggatgtatcaagtcgagaatttga

SEQ ID NO: 397314 - DNA, 30 bp, Artificial Sequence
  Synthetic oligonucleotide
taacaagacggaaaaaaattttccatttga

SEQ ID NO: 397315 - DNA, 30 bp, Artificial Sequence
  Synthetic oligonucleotide
ccatttagctcagaggtcgagcgcatttga

SEQ ID NO: 397316 - DNA, 30 bp, Artificial Sequence
  Synthetic oligonucleotide
caatcttccctgattagccgggtcatttga

SEQ ID NO: 397317 - DNA, 30 bp, Artificial Sequence
  Synthetic oligonucleotide
atccaggagttggaacgatcggagatttga

SEQ ID NO: 397318 - DNA, 30 bp, Artificial Sequence
  Synthetic oligonucleotide
ctttaaaacagaaattaagttccgatttga

SEQ ID NO: 397319 - DNA, 30 bp, Artificial Sequence
  Synthetic oligonucleotide
ggtttctctataccggattcggcgatttga

SEQ ID NO: 397320 - DNA, 30 bp, Artificial Sequence
  Synthetic oligonucleotide
actaggttatgaccccacacgaatatttga

SEQ ID NO: 397321 - DNA, 30 bp, Artificial Sequence
  Synthetic oligonucleotide
tgtaacatgcgaacccaaataactatttga

SEQ ID NO: 397322 - DNA, 30 bp, Artificial Sequence
  Synthetic oligonucleotide
acatatctgactataatatggactatttga

SEQ ID NO: 397323 - DNA, 30 bp, Artificial Sequence
  Synthetic oligonucleotide
ttagcctaacaggcaatatcccctatttga

SEQ ID NO: 397324 - DNA, 30 bp, Artificial Sequence
  Synthetic oligonucleotide
tcagaccgactcgatacgtaatcactttga

SEQ ID NO: 397325 - DNA, 30 bp, Artificial Sequence
  Synthetic oligonucleotide
acatccgctaatgggacatgatcactttga

SEQ ID NO: 397326 - DNA, 30 bp, Artificial Sequence
  Synthetic oligonucleotide
gtctgtgctaccatatctagtggactttga

SEQ ID NO: 397327 - DNA, 30 bp, Artificial Sequence
  Synthetic oligonucleotide
cagttgggcccgtggcagcacatcctttga

SEQ ID NO: 397328 - DNA, 30 bp, Artificial Sequence
  Synthetic oligonucleotide
tatcctattcgtgtcctgagggggctttga

SEQ ID NO: 397329 - DNA, 30 bp, Artificial Sequence
  Synthetic oligonucleotide
tgcaggcaagtaaaaaaccccatgctttga

SEQ ID NO: 397330 - DNA, 30 bp, Artificial Sequence
  Synthetic oligonucleotide
ttcgttacaagggggctaagccaagtttga

SEQ ID NO: 397331 - DNA, 30 bp, Artificial Sequence
  Synthetic oligonucleotide
tctctcagggccatctttttaccagtttga

SEQ ID NO: 397332 - DNA, 30 bp, Artificial Sequence
  Synthetic oligonucleotide
tttgttcaactgaaagggggatcagtttga

SEQ ID NO: 397333 - DNA, 30 bp, Artificial Sequence
  Synthetic oligonucleotide
gccaaacagaatggtttgacagtagtttga

SEQ ID NO: 397334 - DNA, 30 bp, Artificial Sequence
  Synthetic oligonucleotide
actcgtggcgggagatattctcccgtttga

SEQ ID NO: 397335 - DNA, 30 bp, Artificial Sequence
  Synthetic oligonucleotide
taaaggatcgcaagctggacaaaggtttga

SEQ ID NO: 397336 - DNA, 30 bp, Artificial Sequence
  Synthetic oligonucleotide
atcagagctttctactactttccggtttga

SEQ ID NO: 397337 - DNA, 30 bp, Artificial Sequence
  Synthetic oligonucleotide
caagtcttctttgaggcacggagggtttga

SEQ ID NO: 397338 - DNA, 30 bp, Artificial Sequence
  Synthetic oligonucleotide
tagtcgggtatgactatgatacctgtttga

SEQ ID NO: 397339 - DNA, 30 bp, Artificial Sequence
  Synthetic oligonucleotide
tggcatggtactcgcacaacgagtgtttga

SEQ ID NO: 397340 - DNA, 30 bp, Artificial Sequence
  Synthetic oligonucleotide
ttttctcgctcgtgcacggaccgtgtttga

SEQ ID NO: 397341 - DNA, 30 bp, Artificial Sequence
  Synthetic oligonucleotide
tgagttataagatgggttaataacttttga

SEQ ID NO: 397342 - DNA, 29 bp, Artificial Sequence
  Synthetic oligonucleotide
atggcttcggtgcctggcgtagcttttga

SEQ ID NO: 397343 - DNA, 30 bp, Artificial Sequence
  Synthetic oligonucleotide
tttgaggcgacgtgtggccaggtcttttga

SEQ ID NO: 397344 - DNA, 30 bp, Artificial Sequence
  Synthetic oligonucleotide
gtatcttctaagcattgaagaatgttttga

SEQ ID NO: 397345 - DNA, 30 bp, Artificial Sequence
  Synthetic oligonucleotide
tcgtactgtaacacgacaattgtgttttga

SEQ ID NO: 397346 - DNA, 30 bp, Artificial Sequence
  Synthetic oligonucleotide
ggtagatcgaattaacgttggattttttga

SEQ ID NO: 397347 - DNA, 30 bp, Artificial Sequence
  Synthetic oligonucleotide
cgaccgtatttatttatgctcgaaaaaata

SEQ ID NO: 397348 - DNA, 30 bp, Artificial Sequence
  Synthetic oligonucleotide
gctctaaaacaaaatgcaataccaaaaata

SEQ ID NO: 397349 - DNA, 30 bp, Artificial Sequence
  Synthetic oligonucleotide
tccccgatcgggggaggggacggaaaaata

SEQ ID NO: 397350 - DNA, 30 bp, Artificial Sequence
  Synthetic oligonucleotide
gatcgggtctctatactacgactaaaaata

SEQ ID NO: 397351 - DNA, 30 bp, Artificial Sequence
  Synthetic oligonucleotide
ctttcatatattccaaaggtttacaaaata

SEQ ID NO: 397352 - DNA, 30 bp, Artificial Sequence
  Synthetic oligonucleotide
cagagcatagactaaagacgccgcaaaata

SEQ ID NO: 397353 - DNA, 30 bp, Artificial Sequence
  Synthetic oligonucleotide
actctgttgcgtcccacgcaaaagaaaata

SEQ ID NO: 397354 - DNA, 30 bp, Artificial Sequence
  Synthetic oligonucleotide
ggatatgatgcactttggcgttagaaaata

SEQ ID NO: 397355 - DNA, 30 bp, Artificial Sequence
  Synthetic oligonucleotide
gcacataatatagatttcatcgtgaaaata

SEQ ID NO: 397356 - DNA, 30 bp, Artificial Sequence
  Synthetic oligonucleotide
gaaattgatagagactcgaaaggacaaata

SEQ ID NO: 397357 - DNA, 30 bp, Artificial Sequence
  Synthetic oligonucleotide
gtttttgcgaacttacacaggctacaaata

SEQ ID NO: 397358 - DNA, 30 bp, Artificial Sequence
  Synthetic oligonucleotide
aacccgggtgaatatggtattaaccaaata

SEQ ID NO: 397359 - DNA, 30 bp, Artificial Sequence
  Synthetic oligonucleotide
gtaccgtgtggtagtgggggtcaccaaata

SEQ ID NO: 397360 - DNA, 30 bp, Artificial Sequence
  Synthetic oligonucleotide
gcacgcgggataagggctccagaccaaata

SEQ ID NO: 397361 - DNA, 30 bp, Artificial Sequence
  Synthetic oligonucleotide
ggccaatcaattcaccgtggcccccaaata

SEQ ID NO: 397362 - DNA, 30 bp, Artificial Sequence
  Synthetic oligonucleotide
ctagtgatgaaatattttataggccaaata

SEQ ID NO: 397363 - DNA, 30 bp, Artificial Sequence
  Synthetic oligonucleotide
atacgcacgattgagaggtcttgccaaata

SEQ ID NO: 397364 - DNA, 30 bp, Artificial Sequence
  Synthetic oligonucleotide
tgactccttttaaactgtatgtagcaaata

SEQ ID NO: 397365 - DNA, 30 bp, Artificial Sequence
  Synthetic oligonucleotide
aattcggtgttttaagtagcggcgcaaata

SEQ ID NO: 397366 - DNA, 30 bp, Artificial Sequence
  Synthetic oligonucleotide
cctaagcatgcgggcagccctgcgcaaata

SEQ ID NO: 397367 - DNA, 30 bp, Artificial Sequence
  Synthetic oligonucleotide
caaccattttcagtaccgaatgatcaaata

SEQ ID NO: 397368 - DNA, 30 bp, Artificial Sequence
  Synthetic oligonucleotide
ccccagaatccttatcatcttgctcaaata

SEQ ID NO: 397369 - DNA, 30 bp, Artificial Sequence
  Synthetic oligonucleotide
actaacctctcgagatgcgtataagaaata

SEQ ID NO: 397370 - DNA, 30 bp, Artificial Sequence
  Synthetic oligonucleotide
cttctcaatgcggttagcagttgagaaata

SEQ ID NO: 397371 - DNA, 30 bp, Artificial Sequence
  Synthetic oligonucleotide
ttctcctataaaattgtgtttgtagaaata

SEQ ID NO: 397372 - DNA, 30 bp, Artificial Sequence
  Synthetic oligonucleotide
gacatcgcaggatcaccatttcgcgaaata

SEQ ID NO: 397373 - DNA, 30 bp, Artificial Sequence
  Synthetic oligonucleotide
aaattggacaatcagctctagctcgaaata

SEQ ID NO: 397374 - DNA, 30 bp, Artificial Sequence
  Synthetic oligonucleotide
tgtctttgaatcagggcatacaaggaaata

SEQ ID NO: 397375 - DNA, 30 bp, Artificial Sequence
  Synthetic oligonucleotide
tccgttgatggtacccttcttcaggaaata

SEQ ID NO: 397376 - DNA, 30 bp, Artificial Sequence
  Synthetic oligonucleotide
gacctgctgtacggagagtctgcggaaata

SEQ ID NO: 397377 - DNA, 30 bp, Artificial Sequence
  Synthetic oligonucleotide
ccaatgaagtgctctggttgttcggaaata

SEQ ID NO: 397378 - DNA, 30 bp, Artificial Sequence
  Synthetic oligonucleotide
ttcgcgttgtcggcaccgctcctggaaata

SEQ ID NO: 397379 - DNA, 30 bp, Artificial Sequence
  Synthetic oligonucleotide
accaacgcgatacttacgtcgttggaaata

SEQ ID NO: 397380 - DNA, 30 bp, Artificial Sequence
  Synthetic oligonucleotide
cttctggaccgagacggatgctatgaaata

SEQ ID NO: 397381 - DNA, 30 bp, Artificial Sequence
  Synthetic oligonucleotide
tccggggtcgtactggggtctactgaaata

SEQ ID NO: 397382 - DNA, 30 bp, Artificial Sequence
  Synthetic oligonucleotide
tgaatattcagattgcgcaagcctgaaata

SEQ ID NO: 397383 - DNA, 30 bp, Artificial Sequence
  Synthetic oligonucleotide
cgaggcatattggggcgcaaccaataaata

SEQ ID NO: 397384 - DNA, 30 bp, Artificial Sequence
  Synthetic oligonucleotide
gacagagacttcataatagtatcataaata

SEQ ID NO: 397385 - DNA, 30 bp, Artificial Sequence
  Synthetic oligonucleotide
acagaaaaaatttttatcaaagtataaata

SEQ ID NO: 397386 - DNA, 30 bp, Artificial Sequence
  Synthetic oligonucleotide
gagaaatagtcctgtcgtatagtataaata

SEQ ID NO: 397387 - DNA, 30 bp, Artificial Sequence
  Synthetic oligonucleotide
gcgcacgttaaaataattccccactaaata

SEQ ID NO: 397388 - DNA, 30 bp, Artificial Sequence
  Synthetic oligonucleotide
agtgcgcttaaagcgatcacctcctaaata

SEQ ID NO: 397389 - DNA, 30 bp, Artificial Sequence
  Synthetic oligonucleotide
acaaatattcgtttgcgtttctggtaaata

SEQ ID NO: 397390 - DNA, 30 bp, Artificial Sequence
  Synthetic oligonucleotide
atcgtcgtgtctactggttggcattaaata

SEQ ID NO: 397391 - DNA, 30 bp, Artificial Sequence
  Synthetic oligonucleotide
acaatttcgcgcgcaaggatatacacaata

SEQ ID NO: 397392 - DNA, 30 bp, Artificial Sequence
  Synthetic oligonucleotide
ttgcatatgtagccggtgatcggcacaata

SEQ ID NO: 397393 - DNA, 30 bp, Artificial Sequence
  Synthetic oligonucleotide
gagatatcgaaagcgacgttcaagacaata

SEQ ID NO: 397394 - DNA, 30 bp, Artificial Sequence
  Synthetic oligonucleotide
acattcacggcgctgtttccggagacaata

SEQ ID NO: 397395 - DNA, 30 bp, Artificial Sequence
  Synthetic oligonucleotide
acggacacttcctctttggtgaggacaata

SEQ ID NO: 397396 - DNA, 30 bp, Artificial Sequence
  Synthetic oligonucleotide
gtcattgacgaacaaaacgtgtaaccaata

SEQ ID NO: 397397 - DNA, 30 bp, Artificial Sequence
  Synthetic oligonucleotide
atattacgaacaccccagtggggcccaata

SEQ ID NO: 397398 - DNA, 30 bp, Artificial Sequence
  Synthetic oligonucleotide
aatttgagcaccgaaagggcatgcccaata

SEQ ID NO: 397399 - DNA, 30 bp, Artificial Sequence
  Synthetic oligonucleotide
gttagtaataaaagatggatcgggccaata

SEQ ID NO: 397400 - DNA, 30 bp, Artificial Sequence
  Synthetic oligonucleotide
aaagtctaaagctactgaccggtgccaata

SEQ ID NO: 397401 - DNA, 30 bp, Artificial Sequence
  Synthetic oligonucleotide
ccataggccgtcccagcgaattgtccaata

SEQ ID NO: 397402 - DNA, 30 bp, Artificial Sequence
  Synthetic oligonucleotide
cttggttctgtgcgtttcgatattccaata

SEQ ID NO: 397403 - DNA, 30 bp, Artificial Sequence
  Synthetic oligonucleotide
tcctgcaccagatgcactaggggagcaata

SEQ ID NO: 397404 - DNA, 30 bp, Artificial Sequence
  Synthetic oligonucleotide
cttgggtgacagtctattaattgagcaata

SEQ ID NO: 397405 - DNA, 30 bp, Artificial Sequence
  Synthetic oligonucleotide
cattaatatggtattggtatccccgcaata

SEQ ID NO: 397406 - DNA, 30 bp, Artificial Sequence
  Synthetic oligonucleotide
tattatgaagacccggaaccggcggcaata

SEQ ID NO: 397407 - DNA, 30 bp, Artificial Sequence
  Synthetic oligonucleotide
aaaatgtggtactcttgcatcagtgcaata

SEQ ID NO: 397408 - DNA, 30 bp, Artificial Sequence
  Synthetic oligonucleotide
gtccaccctgtacctcagttgacatcaata

SEQ ID NO: 397409 - DNA, 30 bp, Artificial Sequence
  Synthetic oligonucleotide
gataatactgcctacgcatacacctcaata

SEQ ID NO: 397410 - DNA, 30 bp, Artificial Sequence
  Synthetic oligonucleotide
tgggcctgagtcgtgtcttacaggtcaata

SEQ ID NO: 397411 - DNA, 30 bp, Artificial Sequence
  Synthetic oligonucleotide
gcttcatgtcttttaggattagattcaata

SEQ ID NO: 397412 - DNA, 30 bp, Artificial Sequence
  Synthetic oligonucleotide
cttgtatggtaccatggccgaagaagaata

SEQ ID NO: 397413 - DNA, 30 bp, Artificial Sequence
  Synthetic oligonucleotide
ctgacatccctgtcacgacgggtaagaata

SEQ ID NO: 397414 - DNA, 30 bp, Artificial Sequence
  Synthetic oligonucleotide
gttagtctagtatcaaccggatcgagaata

SEQ ID NO: 397415 - DNA, 30 bp, Artificial Sequence
  Synthetic oligonucleotide
gagagaaatgaattaggatatgtgagaata

SEQ ID NO: 397416 - DNA, 30 bp, Artificial Sequence
  Synthetic oligonucleotide
aacgctggctgacaagccgcagatagaata

SEQ ID NO: 397417 - DNA, 30 bp, Artificial Sequence
  Synthetic oligonucleotide
aggccgatcttgttgttaccgcgtagaata

SEQ ID NO: 397418 - DNA, 30 bp, Artificial Sequence
  Synthetic oligonucleotide
cccaagcacagattcagtcgtcttagaata

SEQ ID NO: 397419 - DNA, 30 bp, Artificial Sequence
  Synthetic oligonucleotide
tccggcttcggcctgtatggggtacgaata

SEQ ID NO: 397420 - DNA, 30 bp, Artificial Sequence
  Synthetic oligonucleotide
atgtagaaataatgaggccctacccgaata

SEQ ID NO: 397421 - DNA, 30 bp, Artificial Sequence
  Synthetic oligonucleotide
tgttcgagccccggcgttgagaagcgaata

SEQ ID NO: 397422 - DNA, 30 bp, Artificial Sequence
  Synthetic oligonucleotide
gaactgcaaaatcacgataagttgcgaata

SEQ ID NO: 397423 - DNA, 30 bp, Artificial Sequence
  Synthetic oligonucleotide
gccgttcaagtcaccggcccgcttcgaata

SEQ ID NO: 397424 - DNA, 30 bp, Artificial Sequence
  Synthetic oligonucleotide
tacgatcgtattcgtcacttgaaaggaata

SEQ ID NO: 397425 - DNA, 30 bp, Artificial Sequence
  Synthetic oligonucleotide
gtaagctaaattgtaccacacacaggaata

SEQ ID NO: 397426 - DNA, 30 bp, Artificial Sequence
  Synthetic oligonucleotide
acacatttgccccgacacctgagaggaata

SEQ ID NO: 397427 - DNA, 30 bp, Artificial Sequence
  Synthetic oligonucleotide
ttcacgcatacctacggccagttaggaata

SEQ ID NO: 397428 - DNA, 30 bp, Artificial Sequence
  Synthetic oligonucleotide
ggagaaaacgcagtaaatgttaacggaata

SEQ ID NO: 397429 - DNA, 30 bp, Artificial Sequence
  Synthetic oligonucleotide
gggggttcagcatattaagtcccgggaata

SEQ ID NO: 397430 - DNA, 30 bp, Artificial Sequence
  Synthetic oligonucleotide
tgcactcgcaatggcgccatgcggggaata

SEQ ID NO: 397431 - DNA, 30 bp, Artificial Sequence
  Synthetic oligonucleotide
aattctgccatggtacggtctttgggaata

SEQ ID NO: 397432 - DNA, 30 bp, Artificial Sequence
  Synthetic oligonucleotide
tccggctataaacctcattggaatggaata

SEQ ID NO: 397433 - DNA, 30 bp, Artificial Sequence
  Synthetic oligonucleotide
aagtcagcatcatatgatgcacctggaata

SEQ ID NO: 397434 - DNA, 30 bp, Artificial Sequence
  Synthetic oligonucleotide
ggctatacacagtagcccgtcacatgaata

SEQ ID NO: 397435 - DNA, 30 bp, Artificial Sequence
  Synthetic oligonucleotide
tgttaaccgtcttccgccaagggatgaata

SEQ ID NO: 397436 - DNA, 30 bp, Artificial Sequence
  Synthetic oligonucleotide
gaaggtatggtctcggtccccgtatgaata

SEQ ID NO: 397437 - DNA, 30 bp, Artificial Sequence
  Synthetic oligonucleotide
tacccaactttttccgtgtgtgtatgaata

SEQ ID NO: 397438 - DNA, 30 bp, Artificial Sequence
  Synthetic oligonucleotide
accgcacgcagccccgataccaagtgaata

SEQ ID NO: 397439 - DNA, 30 bp, Artificial Sequence
  Synthetic oligonucleotide
ttggctcgcagcgcgagaatatcgtgaata

SEQ ID NO: 397440 - DNA, 30 bp, Artificial Sequence
  Synthetic oligonucleotide
cgcccatagctaatctgttgtgggtgaata

SEQ ID NO: 397441 - DNA, 30 bp, Artificial Sequence
  Synthetic oligonucleotide
attctccaacactcggttatttggtgaata

SEQ ID NO: 397442 - DNA, 30 bp, Artificial Sequence
  Synthetic oligonucleotide
taatcgatgtggcccgtatcactttgaata

SEQ ID NO: 397443 - DNA, 30 bp, Artificial Sequence
  Synthetic oligonucleotide
gtgccaaaaagtttaggctaggtttgaata

SEQ ID NO: 397444 - DNA, 30 bp, Artificial Sequence
  Synthetic oligonucleotide
gatctttgaaagcagcattccgtaataata

SEQ ID NO: 397445 - DNA, 30 bp, Artificial Sequence
  Synthetic oligonucleotide
cgcattcttaaggcactagcggtaataata

SEQ ID NO: 397446 - DNA, 30 bp, Artificial Sequence
  Synthetic oligonucleotide
ggatcggaatctgccggaaaccgcataata

SEQ ID NO: 397447 - DNA, 30 bp, Artificial Sequence
  Synthetic oligonucleotide
gcacgtacgtgcagagcacgaatcataata

SEQ ID NO: 397448 - DNA, 30 bp, Artificial Sequence
  Synthetic oligonucleotide
accgctggactaaaacaaaagatcataata

SEQ ID NO: 397449 - DNA, 30 bp, Artificial Sequence
  Synthetic oligonucleotide
atcggttgacgcgatcacagaaagataata

SEQ ID NO: 397450 - DNA, 30 bp, Artificial Sequence
  Synthetic oligonucleotide
gggttgactgtggtaactagacagataata

SEQ ID NO: 397451 - DNA, 30 bp, Artificial Sequence
  Synthetic oligonucleotide
gcagttaaacaaatttcagtatagataata

SEQ ID NO: 397452 - DNA, 30 bp, Artificial Sequence
  Synthetic oligonucleotide
aaatggtcattcgacacagcggcgataata

SEQ ID NO: 397453 - DNA, 30 bp, Artificial Sequence
  Synthetic oligonucleotide
tgtcaggcactacgctagcttatgataata

SEQ ID NO: 397454 - DNA, 30 bp, Artificial Sequence
  Synthetic oligonucleotide
gtctttcctcgttggtgtggtcctataata

SEQ ID NO: 397455 - DNA, 30 bp, Artificial Sequence
  Synthetic oligonucleotide
gcttggcacggcggaatagagggtataata

SEQ ID NO: 397456 - DNA, 30 bp, Artificial Sequence
  Synthetic oligonucleotide
tgcaaaccagaaggggaaagtaaactaata

SEQ ID NO: 397457 - DNA, 30 bp, Artificial Sequence
  Synthetic oligonucleotide
taccagcagccattggctagtcgactaata

SEQ ID NO: 397458 - DNA, 30 bp, Artificial Sequence
  Synthetic oligonucleotide
ttcccaactagaaccgattgctgactaata

SEQ ID NO: 397459 - DNA, 30 bp, Artificial Sequence
  Synthetic oligonucleotide
tcacttatcaagctaatgctgcacctaata

SEQ ID NO: 397460 - DNA, 30 bp, Artificial Sequence
  Synthetic oligonucleotide
gcaccatttccgagctcttaggacctaata

SEQ ID NO: 397461 - DNA, 30 bp, Artificial Sequence
  Synthetic oligonucleotide
ggaatcgcccttgttattttggcgctaata

SEQ ID NO: 397462 - DNA, 30 bp, Artificial Sequence
  Synthetic oligonucleotide
actgtgactggatttcagaagctgctaata

SEQ ID NO: 397463 - DNA, 30 bp, Artificial Sequence
  Synthetic oligonucleotide
tctacaaatggtctggaatacagtctaata

SEQ ID NO: 397464 - DNA, 30 bp, Artificial Sequence
  Synthetic oligonucleotide
taacggcacaagttagttaccagtctaata

SEQ ID NO: 397465 - DNA, 30 bp, Artificial Sequence
  Synthetic oligonucleotide
aacaacttgccttctgaattgtaagtaata

SEQ ID NO: 397466 - DNA, 30 bp, Artificial Sequence
  Synthetic oligonucleotide
gggtaatcggagcattggcccccagtaata

SEQ ID NO: 397467 - DNA, 30 bp, Artificial Sequence
  Synthetic oligonucleotide
tatatgagtaaggctataggccgagtaata

SEQ ID NO: 397468 - DNA, 30 bp, Artificial Sequence
  Synthetic oligonucleotide
tattagagacggcctctctatggagtaata

SEQ ID NO: 397469 - DNA, 30 bp, Artificial Sequence
  Synthetic oligonucleotide
gccctttgtatgaaacttgtcatagtaata

SEQ ID NO: 397470 - DNA, 30 bp, Artificial Sequence
  Synthetic oligonucleotide
agttaagacgcaatcaactccgtagtaata

SEQ ID NO: 397471 - DNA, 30 bp, Artificial Sequence
  Synthetic oligonucleotide
ccagttcgttatttagagggctccgtaata

SEQ ID NO: 397472 - DNA, 30 bp, Artificial Sequence
  Synthetic oligonucleotide
cgccagcagttggttactggtagggtaata

SEQ ID NO: 397473 - DNA, 30 bp, Artificial Sequence
  Synthetic oligonucleotide
cctaatcacgggaatgattcgcgggtaata

SEQ ID NO: 397474 - DNA, 30 bp, Artificial Sequence
  Synthetic oligonucleotide
gtttatttgactggatctagtcgggtaata

SEQ ID NO: 397475 - DNA, 30 bp, Artificial Sequence
  Synthetic oligonucleotide
tctacccgtatgggggaattcttggtaata

SEQ ID NO: 397476 - DNA, 30 bp, Artificial Sequence
  Synthetic oligonucleotide
ctagcttcgatccgcagtggtcctgtaata

SEQ ID NO: 397477 - DNA, 30 bp, Artificial Sequence
  Synthetic oligonucleotide
gatggggctcccgcaatttctatattaata

SEQ ID NO: 397478 - DNA, 30 bp, Artificial Sequence
  Synthetic oligonucleotide
actacactcccatgccccggcccgttaata

SEQ ID NO: 397479 - DNA, 30 bp, Artificial Sequence
  Synthetic oligonucleotide
ttcatttctggaacagctaggctgttaata

SEQ ID NO: 397480 - DNA, 30 bp, Artificial Sequence
  Synthetic oligonucleotide
atgcttgcatatatgcgcttagtgttaata

SEQ ID NO: 397481 - DNA, 30 bp, Artificial Sequence
  Synthetic oligonucleotide
cacgaaaagcgcgatagattttttttaata

SEQ ID NO: 397482 - DNA, 30 bp, Artificial Sequence
  Synthetic oligonucleotide
gccccgagcagcattatggacaaaaacata

SEQ ID NO: 397483 - DNA, 30 bp, Artificial Sequence
  Synthetic oligonucleotide
tagtccacgatgcccgagcgtcggaacata

SEQ ID NO: 397484 - DNA, 30 bp, Artificial Sequence
  Synthetic oligonucleotide
ttcatccaccaaagatctcacaataacata

SEQ ID NO: 397485 - DNA, 30 bp, Artificial Sequence
  Synthetic oligonucleotide
tattggccggtcgcatccgtacctaacata

SEQ ID NO: 397486 - DNA, 30 bp, Artificial Sequence
  Synthetic oligonucleotide
cgaccgactatcaatctttggcttaacata

SEQ ID NO: 397487 - DNA, 30 bp, Artificial Sequence
  Synthetic oligonucleotide
ttggatcgcgtcttttcgattctacacata

SEQ ID NO: 397488 - DNA, 30 bp, Artificial Sequence
  Synthetic oligonucleotide
ggaatacatggtggccattggaaccacata

SEQ ID NO: 397489 - DNA, 30 bp, Artificial Sequence
  Synthetic oligonucleotide
gaatcccacgcatggcaggagaatcacata

SEQ ID NO: 397490 - DNA, 30 bp, Artificial Sequence
  Synthetic oligonucleotide
tggatggccatagcctcgtgacatcacata

SEQ ID NO: 397491 - DNA, 30 bp, Artificial Sequence
  Synthetic oligonucleotide
attgtgccgtaattttggcggactcacata

SEQ ID NO: 397492 - DNA, 30 bp, Artificial Sequence
  Synthetic oligonucleotide
gcgatggcttgctgtcatccgtttcacata

SEQ ID NO: 397493 - DNA, 30 bp, Artificial Sequence
  Synthetic oligonucleotide
atagataacgcccgtacatcataagacata

SEQ ID NO: 397494 - DNA, 30 bp, Artificial Sequence
  Synthetic oligonucleotide
ccttaaaccgttacttggatgacagacata

SEQ ID NO: 397495 - DNA, 30 bp, Artificial Sequence
  Synthetic oligonucleotide
ggtctagggtgctcaagctctgtagacata

SEQ ID NO: 397496 - DNA, 30 bp, Artificial Sequence
  Synthetic oligonucleotide
gctgcgaaagttcgtctggatgtcgacata

SEQ ID NO: 397497 - DNA, 30 bp, Artificial Sequence
  Synthetic oligonucleotide
aatttgagcatgggttagataaaggacata

SEQ ID NO: 397498 - DNA, 30 bp, Artificial Sequence
  Synthetic oligonucleotide
ccccactcaaagactgcttcttaggacata

SEQ ID NO: 397499 - DNA, 30 bp, Artificial Sequence
  Synthetic oligonucleotide
ttccgtgatagcgttaatgtcctggacata

SEQ ID NO: 397500 - DNA, 30 bp, Artificial Sequence
  Synthetic oligonucleotide
cctaaatttgttggtgtaagggatgacata

SEQ ID NO: 397501 - DNA, 30 bp, Artificial Sequence
  Synthetic oligonucleotide
tagtgttctagccctggaagtggtgacata

SEQ ID NO: 397502 - DNA, 30 bp, Artificial Sequence
  Synthetic oligonucleotide
tctcgaaattaggtgcggtctcaatacata

SEQ ID NO: 397503 - DNA, 30 bp, Artificial Sequence
  Synthetic oligonucleotide
acgcccaaagagtttacatggtaatacata

SEQ ID NO: 397504 - DNA, 30 bp, Artificial Sequence
  Synthetic oligonucleotide
tgtatgactgcagttcattctgcatacata

SEQ ID NO: 397505 - DNA, 30 bp, Artificial Sequence
  Synthetic oligonucleotide
caggcgcgactctcccacggttcatacata

SEQ ID NO: 397506 - DNA, 30 bp, Artificial Sequence
  Synthetic oligonucleotide
caattatatatcgtacggggtcgatacata

SEQ ID NO: 397507 - DNA, 30 bp, Artificial Sequence
  Synthetic oligonucleotide
acgattgttatcattggatgatcctacata

SEQ ID NO: 397508 - DNA, 30 bp, Artificial Sequence
  Synthetic oligonucleotide
tccataccgtaccgtttatttcgctacata

SEQ ID NO: 397509 - DNA, 30 bp, Artificial Sequence
  Synthetic oligonucleotide
tatgatcctaaactccttatctcgtacata

SEQ ID NO: 397510 - DNA, 30 bp, Artificial Sequence
  Synthetic oligonucleotide
gagatttgtcttaagagtctctggtacata

SEQ ID NO: 397511 - DNA, 30 bp, Artificial Sequence
  Synthetic oligonucleotide
cagcaccagttaaagtttggaatgtacata

SEQ ID NO: 397512 - DNA, 30 bp, Artificial Sequence
  Synthetic oligonucleotide
gctttacgtttgacctggcgagattacata

SEQ ID NO: 397513 - DNA, 30 bp, Artificial Sequence
  Synthetic oligonucleotide
cccctattgacaaactgcgagtattacata

SEQ ID NO: 397514 - DNA, 30 bp, Artificial Sequence
  Synthetic oligonucleotide
cctctagagcacgtaggtacaagttacata

SEQ ID NO: 397515 - DNA, 30 bp, Artificial Sequence
  Synthetic oligonucleotide
gcttcaagcgtaagaagtcttatttacata

SEQ ID NO: 397516 - DNA, 30 bp, Artificial Sequence
  Synthetic oligonucleotide
ctgtcggatctgagcgataggaaaaccata

SEQ ID NO: 397517 - DNA, 30 bp, Artificial Sequence
  Synthetic oligonucleotide
ggctaggactcagctaagccagtaaccata

SEQ ID NO: 397518 - DNA, 30 bp, Artificial Sequence
  Synthetic oligonucleotide
ttgcagcgctgcgttcccagtgcgaccata

SEQ ID NO: 397519 - DNA, 30 bp, Artificial Sequence
  Synthetic oligonucleotide
ggttacttcaatccatgagaattgaccata

SEQ ID NO: 397520 - DNA, 30 bp, Artificial Sequence
  Synthetic oligonucleotide
tccggtgcagtagaaaattgaccacccata

SEQ ID NO: 397521 - DNA, 30 bp, Artificial Sequence
  Synthetic oligonucleotide
aaagggtgccaaagggagacgggacccata

SEQ ID NO: 397522 - DNA, 30 bp, Artificial Sequence
  Synthetic oligonucleotide
caatttaaggatcctttcactatacccata

SEQ ID NO: 397523 - DNA, 30 bp, Artificial Sequence
  Synthetic oligonucleotide
gttattacggctcaattgtacgcgcccata

SEQ ID NO: 397524 - DNA, 30 bp, Artificial Sequence
  Synthetic oligonucleotide
gacttccgcatgtgaccggtcagtcccata

SEQ ID NO: 397525 - DNA, 30 bp, Artificial Sequence
  Synthetic oligonucleotide
gactagctagtgagatgtatgtgagccata

SEQ ID NO: 397526 - DNA, 30 bp, Artificial Sequence
  Synthetic oligonucleotide
ctatccaggtaaaaggaagtctcggccata

SEQ ID NO: 397527 - DNA, 30 bp, Artificial Sequence
  Synthetic oligonucleotide
tgatagggcatttatgatctaagggccata

SEQ ID NO: 397528 - DNA, 30 bp, Artificial Sequence
  Synthetic oligonucleotide
cataacttgctagcaaatactctggccata

SEQ ID NO: 397529 - DNA, 30 bp, Artificial Sequence
  Synthetic oligonucleotide
gagaactgagagcaatgtttgaaatccata

SEQ ID NO: 397530 - DNA, 30 bp, Artificial Sequence
  Synthetic oligonucleotide
gccccttctggcgttgacagaacatccata

SEQ ID NO: 397531 - DNA, 30 bp, Artificial Sequence
  Synthetic oligonucleotide
tgcagtgtcttcacaaaggtcttctccata

SEQ ID NO: 397532 - DNA, 30 bp, Artificial Sequence
  Synthetic oligonucleotide
gcgtatgcaactgcataccgaaggtccata

SEQ ID NO: 397533 - DNA, 30 bp, Artificial Sequence
  Synthetic oligonucleotide
tttcataagaggtgatgcaaatattccata

SEQ ID NO: 397534 - DNA, 30 bp, Artificial Sequence
  Synthetic oligonucleotide
tttcgcaatgtgtagagcatgggttccata

SEQ ID NO: 397535 - DNA, 30 bp, Artificial Sequence
  Synthetic oligonucleotide
tctcagaagctatacatttaaacaagcata

SEQ ID NO: 397536 - DNA, 30 bp, Artificial Sequence
  Synthetic oligonucleotide
actaagcggtcacgcaccgcattaagcata

SEQ ID NO: 397537 - DNA, 30 bp, Artificial Sequence
  Synthetic oligonucleotide
gagtaaccgttactacgggtttccagcata

SEQ ID NO: 397538 - DNA, 30 bp, Artificial Sequence
  Synthetic oligonucleotide
cgcatgcaggtttccgggagcaggagcata

SEQ ID NO: 397539 - DNA, 30 bp, Artificial Sequence
  Synthetic oligonucleotide
ccttccgcccgtcgttttctcgtgagcata

SEQ ID NO: 397540 - DNA, 30 bp, Artificial Sequence
  Synthetic oligonucleotide
aaaaccatttacggagtagctcctagcata

SEQ ID NO: 397541 - DNA, 30 bp, Artificial Sequence
  Synthetic oligonucleotide
agtttagcgccaagttccgcgccacgcata

SEQ ID NO: 397542 - DNA, 30 bp, Artificial Sequence
  Synthetic oligonucleotide
ttatgagtggggccggcgggtagacgcata

SEQ ID NO: 397543 - DNA, 30 bp, Artificial Sequence
  Synthetic oligonucleotide
gttgtgtacgcattgagtacatgacgcata

SEQ ID NO: 397544 - DNA, 30 bp, Artificial Sequence
  Synthetic oligonucleotide
gctcataacagaagattgggttgacgcata

SEQ ID NO: 397545 - DNA, 30 bp, Artificial Sequence
  Synthetic oligonucleotide
gggtaatggcgaagttttacgccccgcata

SEQ ID NO: 397546 - DNA, 30 bp, Artificial Sequence
  Synthetic oligonucleotide
gcctccgtcgctaatgcaaaaggaggcata

SEQ ID NO: 397547 - DNA, 30 bp, Artificial Sequence
  Synthetic oligonucleotide
gattggtccttaggtgtcatggacggcata

SEQ ID NO: 397548 - DNA, 30 bp, Artificial Sequence
  Synthetic oligonucleotide
tcaacagttatatatccgcagtagggcata

SEQ ID NO: 397549 - DNA, 30 bp, Artificial Sequence
  Synthetic oligonucleotide
gccaaaggggagacgtcgaagacgggcata

SEQ ID NO: 397550 - DNA, 30 bp, Artificial Sequence
  Synthetic oligonucleotide
atgatacaaaaaaatccccggcggggcata

SEQ ID NO: 397551 - DNA, 30 bp, Artificial Sequence
  Synthetic oligonucleotide
tagaactgtctttttttagaagatggcata

SEQ ID NO: 397552 - DNA, 30 bp, Artificial Sequence
  Synthetic oligonucleotide
gacttgggcccaacaggccttgatggcata

SEQ ID NO: 397553 - DNA, 30 bp, Artificial Sequence
  Synthetic oligonucleotide
aacggtaagtcgtcgcctctgcgtggcata

SEQ ID NO: 397554 - DNA, 30 bp, Artificial Sequence
  Synthetic oligonucleotide
ttaacgctcgctgatcaagtagttggcata

SEQ ID NO: 397555 - DNA, 30 bp, Artificial Sequence
  Synthetic oligonucleotide
tagacgtgggtacatatcatcgtatgcata

SEQ ID NO: 397556 - DNA, 30 bp, Artificial Sequence
  Synthetic oligonucleotide
ccgctcggatcaaacggtatggtatgcata

SEQ ID NO: 397557 - DNA, 30 bp, Artificial Sequence
  Synthetic oligonucleotide
tgcaatagttttcgtaaggatccctgcata

SEQ ID NO: 397558 - DNA, 30 bp, Artificial Sequence
  Synthetic oligonucleotide
gcatgacgtcagatcatagcaagctgcata

SEQ ID NO: 397559 - DNA, 30 bp, Artificial Sequence
  Synthetic oligonucleotide
gattattttaagaataacactaattgcata

SEQ ID NO: 397560 - DNA, 30 bp, Artificial Sequence
  Synthetic oligonucleotide
attcgccatcgagttcatcgtgattgcata

SEQ ID NO: 397561 - DNA, 30 bp, Artificial Sequence
  Synthetic oligonucleotide
agcaacgcacaggctccttaattttgcata

SEQ ID NO: 397562 - DNA, 30 bp, Artificial Sequence
  Synthetic oligonucleotide
catctatggtcataagcaggagaaatcata

SEQ ID NO: 397563 - DNA, 30 bp, Artificial Sequence
  Synthetic oligonucleotide
ctgtgtacccaggaatcgttggtaatcata

SEQ ID NO: 397564 - DNA, 30 bp, Artificial Sequence
  Synthetic oligonucleotide
cccgggagattacctaaagaatccatcata

SEQ ID NO: 397565 - DNA, 31 bp, Artificial Sequence
  Synthetic oligonucleotide
gacgttccccgtggtaggacgtgctatcata

SEQ ID NO: 397566 - DNA, 30 bp, Artificial Sequence
  Synthetic oligonucleotide
gtgcacttgggtggtcgaactagtatcata

SEQ ID NO: 397567 - DNA, 30 bp, Artificial Sequence
  Synthetic oligonucleotide
gtatggttgaccaagatttggcttatcata

SEQ ID NO: 397568 - DNA, 30 bp, Artificial Sequence
  Synthetic oligonucleotide
tagagattgtattaggggtaacagctcata

SEQ ID NO: 397569 - DNA, 30 bp, Artificial Sequence
  Synthetic oligonucleotide
gaagataagataatttaactctcgctcata

SEQ ID NO: 397570 - DNA, 30 bp, Artificial Sequence
  Synthetic oligonucleotide
atgttgtcatcctcaaatagacaagtcata

SEQ ID NO: 397571 - DNA, 30 bp, Artificial Sequence
  Synthetic oligonucleotide
acaatgacccgagataccgatgaagtcata

SEQ ID NO: 397572 - DNA, 30 bp, Artificial Sequence
  Synthetic oligonucleotide
gatgtttgcccccttactacgacagtcata

SEQ ID NO: 397573 - DNA, 30 bp, Artificial Sequence
  Synthetic oligonucleotide
acctatagccgaagagatacacgcgtcata

SEQ ID NO: 397574 - DNA, 30 bp, Artificial Sequence
  Synthetic oligonucleotide
aactaaaaggagccatttgaccgcgtcata

SEQ ID NO: 397575 - DNA, 30 bp, Artificial Sequence
  Synthetic oligonucleotide
agtatacattctttagagtagatggtcata

SEQ ID NO: 397576 - DNA, 30 bp, Artificial Sequence
  Synthetic oligonucleotide
gaatagacagtggaaaccgaaactgtcata

SEQ ID NO: 397577 - DNA, 30 bp, Artificial Sequence
  Synthetic oligonucleotide
agagtaatcagaagccacgggtctgtcata

SEQ ID NO: 397578 - DNA, 30 bp, Artificial Sequence
  Synthetic oligonucleotide
ccatcacgagatatatgcttcagtgtcata

SEQ ID NO: 397579 - DNA, 30 bp, Artificial Sequence
  Synthetic oligonucleotide
ttatcaggagagtggaatctgaaattcata

SEQ ID NO: 397580 - DNA, 30 bp, Artificial Sequence
  Synthetic oligonucleotide
ctatgatagtagatgtccgtggcattcata

SEQ ID NO: 397581 - DNA, 30 bp, Artificial Sequence
  Synthetic oligonucleotide
taagagcatttgcaatcttaaagattcata

SEQ ID NO: 397582 - DNA, 30 bp, Artificial Sequence
  Synthetic oligonucleotide
aatcacacatggaaaaatttttgattcata

SEQ ID NO: 397583 - DNA, 30 bp, Artificial Sequence
  Synthetic oligonucleotide
agttgtgggagttcgttaactatattcata

SEQ ID NO: 397584 - DNA, 30 bp, Artificial Sequence
  Synthetic oligonucleotide
ccccagtaatctgcgtatggcaacttcata

SEQ ID NO: 397585 - DNA, 30 bp, Artificial Sequence
  Synthetic oligonucleotide
gcggtgttgggacctcccaagtacttcata

SEQ ID NO: 397586 - DNA, 30 bp, Artificial Sequence
  Synthetic oligonucleotide
gctattgggaacaggcgttcgtacttcata

SEQ ID NO: 397587 - DNA, 30 bp, Artificial Sequence
  Synthetic oligonucleotide
ttaggtactgagacgactaagcagttcata

SEQ ID NO: 397588 - DNA, 30 bp, Artificial Sequence
  Synthetic oligonucleotide
gtcccttattaatagggaaaatagttcata

SEQ ID NO: 397589 - DNA, 30 bp, Artificial Sequence
  Synthetic oligonucleotide
agatatgtggtctatttttatccgttcata

SEQ ID NO: 397590 - DNA, 30 bp, Artificial Sequence
  Synthetic oligonucleotide
atagatagtagcgctcattgtaggttcata

SEQ ID NO: 397591 - DNA, 30 bp, Artificial Sequence
  Synthetic oligonucleotide
tattttgaccataactctagggggttcata

SEQ ID NO: 397592 - DNA, 30 bp, Artificial Sequence
  Synthetic oligonucleotide
tcttacaaacagtcaccgccactgttcata

SEQ ID NO: 397593 - DNA, 30 bp, Artificial Sequence
  Synthetic oligonucleotide
cattagcgagagtgggtccaacatttcata

SEQ ID NO: 397594 - DNA, 30 bp, Artificial Sequence
  Synthetic oligonucleotide
tgcaatgggcggagccgcgtgtatttcata

SEQ ID NO: 397595 - DNA, 30 bp, Artificial Sequence
  Synthetic oligonucleotide
ccataactgggcctcaaatagtctttcata

SEQ ID NO: 397596 - DNA, 30 bp, Artificial Sequence
  Synthetic oligonucleotide
gtccggtgacaattcatgggcagtttcata

SEQ ID NO: 397597 - DNA, 30 bp, Artificial Sequence
  Synthetic oligonucleotide
ctttaccggtgctataatttcaaaaagata

SEQ ID NO: 397598 - DNA, 30 bp, Artificial Sequence
  Synthetic oligonucleotide
ttagtactacattgtgttgagacaaagata

SEQ ID NO: 397599 - DNA, 30 bp, Artificial Sequence
  Synthetic oligonucleotide
gctcagtccaagggtgggctgagaaagata

SEQ ID NO: 397600 - DNA, 30 bp, Artificial Sequence
  Synthetic oligonucleotide
gaacattagtagtaactggtgcacaagata

SEQ ID NO: 397601 - DNA, 30 bp, Artificial Sequence
  Synthetic oligonucleotide
gctttacctattctcgtccgtgagaagata

SEQ ID NO: 397602 - DNA, 30 bp, Artificial Sequence
  Synthetic oligonucleotide
cacttcgttgtagatttcgagtctaagata

SEQ ID NO: 397603 - DNA, 30 bp, Artificial Sequence
  Synthetic oligonucleotide
aagagattttgagggcgacggtgtaagata

SEQ ID NO: 397604 - DNA, 30 bp, Artificial Sequence
  Synthetic oligonucleotide
tttatagagttgaccacactaattaagata

SEQ ID NO: 397605 - DNA, 30 bp, Artificial Sequence
  Synthetic oligonucleotide
gtcaccgcgacagtatgatcgggacagata

SEQ ID NO: 397606 - DNA, 30 bp, Artificial Sequence
  Synthetic oligonucleotide
tgacctgttatcactggtaaaacccagata

SEQ ID NO: 397607 - DNA, 30 bp, Artificial Sequence
  Synthetic oligonucleotide
ggtctagctgcccgtgacatcccccagata

SEQ ID NO: 397608 - DNA, 30 bp, Artificial Sequence
  Synthetic oligonucleotide
aaaatcatgataacacagtggcgccagata

SEQ ID NO: 397609 - DNA, 30 bp, Artificial Sequence
  Synthetic oligonucleotide
gagaggcgcgttgtttaaccgaggcagata

SEQ ID NO: 397610 - DNA, 30 bp, Artificial Sequence
  Synthetic oligonucleotide
gaacataatctgaagataaggattcagata

SEQ ID NO: 397611 - DNA, 30 bp, Artificial Sequence
  Synthetic oligonucleotide
aggggttttttgtcactggtaagagagata

SEQ ID NO: 397612 - DNA, 30 bp, Artificial Sequence
  Synthetic oligonucleotide
tctagatggtgtgatggtttggtagagata

SEQ ID NO: 397613 - DNA, 30 bp, Artificial Sequence
  Synthetic oligonucleotide
ttgttgggctctgactacgcgttagagata

SEQ ID NO: 397614 - DNA, 30 bp, Artificial Sequence
  Synthetic oligonucleotide
gaaacatttagagctagggtcgacgagata

SEQ ID NO: 397615 - DNA, 30 bp, Artificial Sequence
  Synthetic oligonucleotide
actctagcagacggccgctccctcgagata

SEQ ID NO: 397616 - DNA, 30 bp, Artificial Sequence
  Synthetic oligonucleotide
gcagccttgcgacgacctgatccggagata

SEQ ID NO: 397617 - DNA, 30 bp, Artificial Sequence
  Synthetic oligonucleotide
tacgtaatggcaacttcagaggctgagata

SEQ ID NO: 397618 - DNA, 29 bp, Artificial Sequence
  Synthetic oligonucleotide
actgatcatctaatgtgacaggtgagata

SEQ ID NO: 397619 - DNA, 30 bp, Artificial Sequence
  Synthetic oligonucleotide
ccgcactgactcatgaagttgacatagata

SEQ ID NO: 397620 - DNA, 30 bp, Artificial Sequence
  Synthetic oligonucleotide
cagtgtcctactattacatttctctagata

SEQ ID NO: 397621 - DNA, 30 bp, Artificial Sequence
  Synthetic oligonucleotide
ggttgtgaggtacgttgctgacagtagata

SEQ ID NO: 397622 - DNA, 30 bp, Artificial Sequence
  Synthetic oligonucleotide
tacgatccgtacgtcaactctccgtagata

SEQ ID NO: 397623 - DNA, 30 bp, Artificial Sequence
  Synthetic oligonucleotide
gaatcgagagacgcccaaaggtcgtagata

SEQ ID NO: 397624 - DNA, 30 bp, Artificial Sequence
  Synthetic oligonucleotide
ttcgcaaaaggagtccttggacggtagata

SEQ ID NO: 397625 - DNA, 30 bp, Artificial Sequence
  Synthetic oligonucleotide
atgcccacagctcttgacaattggtagata

SEQ ID NO: 397626 - DNA, 30 bp, Artificial Sequence
  Synthetic oligonucleotide
aaaagtgttccgttattacgaacttagata

SEQ ID NO: 397627 - DNA, 30 bp, Artificial Sequence
  Synthetic oligonucleotide
ttcgcggggccaaagataaagcgttagata

SEQ ID NO: 397628 - DNA, 30 bp, Artificial Sequence
  Synthetic oligonucleotide
agatccccatccgggtgctgtcgttagata

SEQ ID NO: 397629 - DNA, 30 bp, Artificial Sequence
  Synthetic oligonucleotide
agtttcgctccgttcaatcctcgaacgata

SEQ ID NO: 397630 - DNA, 30 bp, Artificial Sequence
  Synthetic oligonucleotide
taatttgttgaatatgccgaacacacgata

SEQ ID NO: 397631 - DNA, 30 bp, Artificial Sequence
  Synthetic oligonucleotide
ccagttattatcggggcctcgggcacgata

SEQ ID NO: 397632 - DNA, 30 bp, Artificial Sequence
  Synthetic oligonucleotide
atatcttcactcgagcgtagttgtacgata

SEQ ID NO: 397633 - DNA, 30 bp, Artificial Sequence
  Synthetic oligonucleotide
ccgtgtgactccagcatacattttacgata

SEQ ID NO: 397634 - DNA, 30 bp, Artificial Sequence
  Synthetic oligonucleotide
gactgagatattcgaggttcgaaaccgata

SEQ ID NO: 397635 - DNA, 30 bp, Artificial Sequence
  Synthetic oligonucleotide
tttgcctcataatggcgatgcttaccgata

SEQ ID NO: 397636 - DNA, 30 bp, Artificial Sequence
  Synthetic oligonucleotide
acatttcgagaaactcttccggtcccgata

SEQ ID NO: 397637 - DNA, 30 bp, Artificial Sequence
  Synthetic oligonucleotide
tgaaaatcatctggcaactctccgccgata

SEQ ID NO: 397638 - DNA, 30 bp, Artificial Sequence
  Synthetic oligonucleotide
attagactactgatctgatttgcgccgata

SEQ ID NO: 397639 - DNA, 30 bp, Artificial Sequence
  Synthetic oligonucleotide
ctaacacgaggccatgcatagaggccgata

SEQ ID NO: 397640 - DNA, 30 bp, Artificial Sequence
  Synthetic oligonucleotide
acttctgagctctcctgctaatggccgata

SEQ ID NO: 397641 - DNA, 30 bp, Artificial Sequence
  Synthetic oligonucleotide
agcgaggtcattcgcgttcatgcagcgata

SEQ ID NO: 397642 - DNA, 30 bp, Artificial Sequence
  Synthetic oligonucleotide
attggaggacctccggatggaaccgcgata

SEQ ID NO: 397643 - DNA, 30 bp, Artificial Sequence
  Synthetic oligonucleotide
tctctagccccagcgtggggcttggcgata

SEQ ID NO: 397644 - DNA, 30 bp, Artificial Sequence
  Synthetic oligonucleotide
taccgcgttggtggtttgaagaatgcgata

SEQ ID NO: 397645 - DNA, 30 bp, Artificial Sequence
  Synthetic oligonucleotide
gccgactacgtagagcatacttcatcgata

SEQ ID NO: 397646 - DNA, 30 bp, Artificial Sequence
  Synthetic oligonucleotide
ttctgggtgctctggtaaccaggatcgata

SEQ ID NO: 397647 - DNA, 30 bp, Artificial Sequence
  Synthetic oligonucleotide
ccttatcgggggtcgaccctatcgtcgata

SEQ ID NO: 397648 - DNA, 30 bp, Artificial Sequence
  Synthetic oligonucleotide
ggaagatttgcatgcctatcctggtcgata

SEQ ID NO: 397649 - DNA, 30 bp, Artificial Sequence
  Synthetic oligonucleotide
cattggcaggagaacgcggacaattcgata

SEQ ID NO: 397650 - DNA, 30 bp, Artificial Sequence
  Synthetic oligonucleotide
caggtgacccgtgtggccattccttcgata

SEQ ID NO: 397651 - DNA, 30 bp, Artificial Sequence
  Synthetic oligonucleotide
attcaggaacgtgctacacagcgttcgata

SEQ ID NO: 397652 - DNA, 30 bp, Artificial Sequence
  Synthetic oligonucleotide
aaattgcgttacagcccatcctgttcgata

SEQ ID NO: 397653 - DNA, 30 bp, Artificial Sequence
  Synthetic oligonucleotide
caggtaaccggcatttggtaaatttcgata

SEQ ID NO: 397654 - DNA, 30 bp, Artificial Sequence
  Synthetic oligonucleotide
tgtgatctagtctaaagtccgtgaaggata

SEQ ID NO: 397655 - DNA, 30 bp, Artificial Sequence
  Synthetic oligonucleotide
gtcatctgaacagcgtttgcagagaggata

SEQ ID NO: 397656 - DNA, 30 bp, Artificial Sequence
  Synthetic oligonucleotide
tcgtcatacccatatgatttatataggata

SEQ ID NO: 397657 - DNA, 30 bp, Artificial Sequence
  Synthetic oligonucleotide
tgcagccgaggacctacgacaagtaggata

SEQ ID NO: 397658 - DNA, 30 bp, Artificial Sequence
  Synthetic oligonucleotide
tgtagtcctgacataagttccgttaggata

SEQ ID NO: 397659 - DNA, 30 bp, Artificial Sequence
  Synthetic oligonucleotide
gatggggatcggtcgggtttgtctcggata

SEQ ID NO: 397660 - DNA, 30 bp, Artificial Sequence
  Synthetic oligonucleotide
cctaaggactccgcttcatggagtcggata

SEQ ID NO: 397661 - DNA, 30 bp, Artificial Sequence
  Synthetic oligonucleotide
ttggaggcagataacactcacagagggata

SEQ ID NO: 397662 - DNA, 30 bp, Artificial Sequence
  Synthetic oligonucleotide
gcaaaaagttacatgcaggaaggcgggata

SEQ ID NO: 397663 - DNA, 30 bp, Artificial Sequence
  Synthetic oligonucleotide
acagtgatgactggatttccgaaggggata

SEQ ID NO: 397664 - DNA, 30 bp, Artificial Sequence
  Synthetic oligonucleotide
cgacttatgaacgaacgcgtccgtgggata

SEQ ID NO: 397665 - DNA, 30 bp, Artificial Sequence
  Synthetic oligonucleotide
ctataatgggcctgaacgcatcgctggata

SEQ ID NO: 397666 - DNA, 30 bp, Artificial Sequence
  Synthetic oligonucleotide
tcgtttaatcgcttttgtgcctggtggata

SEQ ID NO: 397667 - DNA, 30 bp, Artificial Sequence
  Synthetic oligonucleotide
caatttaatggagttgtgggtatgtggata

SEQ ID NO: 397668 - DNA, 30 bp, Artificial Sequence
  Synthetic oligonucleotide
cttcatattccaagttatagaaattggata

SEQ ID NO: 397669 - DNA, 30 bp, Artificial Sequence
  Synthetic oligonucleotide
tatccatcactatatagtgcccattggata

SEQ ID NO: 397670 - DNA, 30 bp, Artificial Sequence
  Synthetic oligonucleotide
ggggtgagtggttcccggggaatttggata

SEQ ID NO: 397671 - DNA, 30 bp, Artificial Sequence
  Synthetic oligonucleotide
acatatcccgggttggtgcaactttggata

SEQ ID NO: 397672 - DNA, 30 bp, Artificial Sequence
  Synthetic oligonucleotide
tataggggttccggctaacccaaaatgata

SEQ ID NO: 397673 - DNA, 30 bp, Artificial Sequence
  Synthetic oligonucleotide
ctaggcttctacgaactccgactaatgata

SEQ ID NO: 397674 - DNA, 30 bp, Artificial Sequence
  Synthetic oligonucleotide
ctagggggcaatccgcgctgtagcatgata

SEQ ID NO: 397675 - DNA, 30 bp, Artificial Sequence
  Synthetic oligonucleotide
gaaggcgcaaacatattcgaattcatgata

SEQ ID NO: 397676 - DNA, 30 bp, Artificial Sequence
  Synthetic oligonucleotide
ctggcgggcttaacaccgccgcggatgata

SEQ ID NO: 397677 - DNA, 30 bp, Artificial Sequence
  Synthetic oligonucleotide
acgtattacttactctcagcggggatgata

SEQ ID NO: 397678 - DNA, 30 bp, Artificial Sequence
  Synthetic oligonucleotide
cagtccgacctttatcataggatgatgata

SEQ ID NO: 397679 - DNA, 30 bp, Artificial Sequence
  Synthetic oligonucleotide
gaaatccagatttacttcacagtgatgata

SEQ ID NO: 397680 - DNA, 30 bp, Artificial Sequence
  Synthetic oligonucleotide
gaggactctgggcaactccatgaactgata

SEQ ID NO: 397681 - DNA, 30 bp, Artificial Sequence
  Synthetic oligonucleotide
gggccggaagacttgagggttggactgata

SEQ ID NO: 397682 - DNA, 30 bp, Artificial Sequence
  Synthetic oligonucleotide
ggcagctcgtgtactcgcttaagcctgata

SEQ ID NO: 397683 - DNA, 30 bp, Artificial Sequence
  Synthetic oligonucleotide
aagtggactgatttgaatggtaagctgata

SEQ ID NO: 397684 - DNA, 30 bp, Artificial Sequence
  Synthetic oligonucleotide
ggccttacggccagtaggtagaggctgata

SEQ ID NO: 397685 - DNA, 30 bp, Artificial Sequence
  Synthetic oligonucleotide
tcttttaatagaacgacaggtggtctgata

SEQ ID NO: 397686 - DNA, 30 bp, Artificial Sequence
  Synthetic oligonucleotide
ggcgtacgccctacgacttcatttctgata

SEQ ID NO: 397687 - DNA, 30 bp, Artificial Sequence
  Synthetic oligonucleotide
acgcttccgtgtcgagaggcttttctgata

SEQ ID NO: 397688 - DNA, 30 bp, Artificial Sequence
  Synthetic oligonucleotide
tcatttataactaaacggtcaaacgtgata

SEQ ID NO: 397689 - DNA, 30 bp, Artificial Sequence
  Synthetic oligonucleotide
cagggtcgtccctacatttcgcccgtgata

SEQ ID NO: 397690 - DNA, 30 bp, Artificial Sequence
  Synthetic oligonucleotide
ctaggtgttatatgaggatttagcgtgata

SEQ ID NO: 397691 - DNA, 30 bp, Artificial Sequence
  Synthetic oligonucleotide
gatggttccaatatgcatagccgcgtgata

SEQ ID NO: 397692 - DNA, 30 bp, Artificial Sequence
  Synthetic oligonucleotide
tattgacataacgtacggcccgtcgtgata

SEQ ID NO: 397693 - DNA, 30 bp, Artificial Sequence
  Synthetic oligonucleotide
gatcttgtgaaatagcaattgccggtgata

SEQ ID NO: 397694 - DNA, 30 bp, Artificial Sequence
  Synthetic oligonucleotide
caatagtatttgttaatctttcgggtgata

SEQ ID NO: 397695 - DNA, 30 bp, Artificial Sequence
  Synthetic oligonucleotide
gcggtgggatcgcagctgtgtaatgtgata

SEQ ID NO: 397696 - DNA, 30 bp, Artificial Sequence
  Synthetic oligonucleotide
aaggatatcgggctgtggccctatgtgata

SEQ ID NO: 397697 - DNA, 30 bp, Artificial Sequence
  Synthetic oligonucleotide
actcgcttaacctcgcggttagctgtgata

SEQ ID NO: 397698 - DNA, 30 bp, Artificial Sequence
  Synthetic oligonucleotide
gagcagcacttaaagtttacatttgtgata

SEQ ID NO: 397699 - DNA, 30 bp, Artificial Sequence
  Synthetic oligonucleotide
ggcgtcttactcaacgcaccatacttgata

SEQ ID NO: 397700 - DNA, 30 bp, Artificial Sequence
  Synthetic oligonucleotide
gttattgcagacggtcctgagtatttgata

SEQ ID NO: 397701 - DNA, 30 bp, Artificial Sequence
  Synthetic oligonucleotide
agcaggccgtgaagtgtgtagtttttgata

SEQ ID NO: 397702 - DNA, 30 bp, Artificial Sequence
  Synthetic oligonucleotide
acttgtaggcttattagggtgataaatata

SEQ ID NO: 397703 - DNA, 30 bp, Artificial Sequence
  Synthetic oligonucleotide
cctttagggatcacccatataacgaatata

SEQ ID NO: 397704 - DNA, 30 bp, Artificial Sequence
  Synthetic oligonucleotide
atcgctgtgtaccgctaaaggccgaatata

SEQ ID NO: 397705 - DNA, 30 bp, Artificial Sequence
  Synthetic oligonucleotide
aactcatactcatccatgaactcgaatata

SEQ ID NO: 397706 - DNA, 30 bp, Artificial Sequence
  Synthetic oligonucleotide
gtgaccgttgggtatgtcattaggaatata

SEQ ID NO: 397707 - DNA, 30 bp, Artificial Sequence
  Synthetic oligonucleotide
ccacccgggtccgaccgctttatgaatata

SEQ ID NO: 397708 - DNA, 31 bp, Artificial Sequence
  Synthetic oligonucleotide
gggaagacaatagacggcataaaataatata

SEQ ID NO: 397709 - DNA, 30 bp, Artificial Sequence
  Synthetic oligonucleotide
gaaggccagtacatacaggtttataatata

SEQ ID NO: 397710 - DNA, 30 bp, Artificial Sequence
  Synthetic oligonucleotide
tatactggacgtcggatgcgcgctaatata

SEQ ID NO: 397711 - DNA, 30 bp, Artificial Sequence
  Synthetic oligonucleotide
gggaccagacctgacaaatcaggtaatata

SEQ ID NO: 397712 - DNA, 30 bp, Artificial Sequence
  Synthetic oligonucleotide
ttattataaaaaagcggacgactccatata

SEQ ID NO: 397713 - DNA, 30 bp, Artificial Sequence
  Synthetic oligonucleotide
ataggcgatatgtgatatatgcttcatata

SEQ ID NO: 397714 - DNA, 30 bp, Artificial Sequence
  Synthetic oligonucleotide
tgggtaaaaacgtctttaagcaaagatata

SEQ ID NO: 397715 - DNA, 30 bp, Artificial Sequence
  Synthetic oligonucleotide
ccgtactccagctacagctggtgcgatata

SEQ ID NO: 397716 - DNA, 30 bp, Artificial Sequence
  Synthetic oligonucleotide
ctgaagatttgtagtggtggtgtcgatata

SEQ ID NO: 397717 - DNA, 30 bp, Artificial Sequence
  Synthetic oligonucleotide
cgagcatattcaagtctaacattcgatata

SEQ ID NO: 397718 - DNA, 30 bp, Artificial Sequence
  Synthetic oligonucleotide
tcttaattgtgtattagtataaaggatata

SEQ ID NO: 397719 - DNA, 30 bp, Artificial Sequence
  Synthetic oligonucleotide
ccataccctgtagatgctattacggatata

SEQ ID NO: 397720 - DNA, 30 bp, Artificial Sequence
  Synthetic oligonucleotide
ggaactgtccatagattacaaccggatata

SEQ ID NO: 397721 - DNA, 30 bp, Artificial Sequence
  Synthetic oligonucleotide
tgccgggtctctcgagtgtcacgggatata

SEQ ID NO: 397722 - DNA, 30 bp, Artificial Sequence
  Synthetic oligonucleotide
ctcacggcgatttaccgcaaatgggatata

SEQ ID NO: 397723 - DNA, 30 bp, Artificial Sequence
  Synthetic oligonucleotide
gtagttgcgcggcattggagtccatatata

SEQ ID NO: 397724 - DNA, 30 bp, Artificial Sequence
  Synthetic oligonucleotide
acccaggtatcactacttcgaatatatata

SEQ ID NO: 397725 - DNA, 30 bp, Artificial Sequence
  Synthetic oligonucleotide
aggatccctatgcgcacggaagcctatata

SEQ ID NO: 397726 - DNA, 30 bp, Artificial Sequence
  Synthetic oligonucleotide
gactatcgaacaatagcacgaggctatata

SEQ ID NO: 397727 - DNA, 30 bp, Artificial Sequence
  Synthetic oligonucleotide
aaaagcaatagcggtcctttggagtatata

SEQ ID NO: 397728 - DNA, 29 bp, Artificial Sequence
  Synthetic oligonucleotide
tttgttgtgtaggtttactcccgtatata

SEQ ID NO: 397729 - DNA, 30 bp, Artificial Sequence
  Synthetic oligonucleotide
tagtcttttatggatgcctgtgggtatata

SEQ ID NO: 397730 - DNA, 30 bp, Artificial Sequence
  Synthetic oligonucleotide
cactcaatcggcacgctccgatcaactata

SEQ ID NO: 397731 - DNA, 30 bp, Artificial Sequence
  Synthetic oligonucleotide
cagtaccattgggaggtgcttgtaactata

SEQ ID NO: 397732 - DNA, 30 bp, Artificial Sequence
  Synthetic oligonucleotide
aaagccctcggttcttaggcatgcactata

SEQ ID NO: 397733 - DNA, 30 bp, Artificial Sequence
  Synthetic oligonucleotide
tacgggggcctatagttgacagtcactata

SEQ ID NO: 397734 - DNA, 30 bp, Artificial Sequence
  Synthetic oligonucleotide
caacttctccacgaacagggcccgactata

SEQ ID NO: 397735 - DNA, 30 bp, Artificial Sequence
  Synthetic oligonucleotide
gtagctcatccatattccatgccgactata

SEQ ID NO: 397736 - DNA, 30 bp, Artificial Sequence
  Synthetic oligonucleotide
actgtggaggtatactaatgctggactata

SEQ ID NO: 397737 - DNA, 30 bp, Artificial Sequence
  Synthetic oligonucleotide
catgcgcagacaaacccatcgtatactata

SEQ ID NO: 397738 - DNA, 30 bp, Artificial Sequence
  Synthetic oligonucleotide
accgcacagcatttcataaaggctactata

SEQ ID NO: 397739 - DNA, 30 bp, Artificial Sequence
  Synthetic oligonucleotide
caggcggtcgttcgttacctctctactata

SEQ ID NO: 397740 - DNA, 30 bp, Artificial Sequence
  Synthetic oligonucleotide
cagtctagtatgaataaatgacgtactata

SEQ ID NO: 397741 - DNA, 30 bp, Artificial Sequence
  Synthetic oligonucleotide
actaatttctgtgctcggacctgtactata

SEQ ID NO: 397742 - DNA, 30 bp, Artificial Sequence
  Synthetic oligonucleotide
tctcatgagctcaatcacacgcttactata

SEQ ID NO: 397743 - DNA, 30 bp, Artificial Sequence
  Synthetic oligonucleotide
cagtctgttacgttttgggggatacctata

SEQ ID NO: 397744 - DNA, 30 bp, Artificial Sequence
  Synthetic oligonucleotide
gtactcgccggtaaggctcgagtacctata

SEQ ID NO: 397745 - DNA, 30 bp, Artificial Sequence
  Synthetic oligonucleotide
gacatcgatttggagtcgacagaccctata

SEQ ID NO: 397746 - DNA, 30 bp, Artificial Sequence
  Synthetic oligonucleotide
acacgcgttgggctcagtggaagccctata

SEQ ID NO: 397747 - DNA, 30 bp, Artificial Sequence
  Synthetic oligonucleotide
attgtcgtggacgtagttgtgtgccctata

SEQ ID NO: 397748 - DNA, 30 bp, Artificial Sequence
  Synthetic oligonucleotide
gttcaaattattggacacgctctccctata

SEQ ID NO: 397749 - DNA, 30 bp, Artificial Sequence
  Synthetic oligonucleotide
taaaatttgcgtctgccagcaagtcctata

SEQ ID NO: 397750 - DNA, 30 bp, Artificial Sequence
  Synthetic oligonucleotide
tctataaaagggaactatgacgaagctata

SEQ ID NO: 397751 - DNA, 30 bp, Artificial Sequence
  Synthetic oligonucleotide
gcgtgccaagcgcgcactacgctagctata

SEQ ID NO: 397752 - DNA, 30 bp, Artificial Sequence
  Synthetic oligonucleotide
ctagcgtcgcaaaaagtatagttagctata

SEQ ID NO: 397753 - DNA, 30 bp, Artificial Sequence
  Synthetic oligonucleotide
gacgtccactgtgccacgcgtcccgctata

SEQ ID NO: 397754 - DNA, 30 bp, Artificial Sequence
  Synthetic oligonucleotide
gagcgtaacccgtcgggaatactcgctata

SEQ ID NO: 397755 - DNA, 30 bp, Artificial Sequence
  Synthetic oligonucleotide
agtccgatgacaaaactggtgctcgctata

SEQ ID NO: 397756 - DNA, 30 bp, Artificial Sequence
  Synthetic oligonucleotide
gaagttactggaataaacgccttcgctata

SEQ ID NO: 397757 - DNA, 30 bp, Artificial Sequence
  Synthetic oligonucleotide
cgtccgcaccctctggtaatgcaggctata

SEQ ID NO: 397758 - DNA, 30 bp, Artificial Sequence
  Synthetic oligonucleotide
attaataaagcatgtatgatggtggctata

SEQ ID NO: 397759 - DNA, 30 bp, Artificial Sequence
  Synthetic oligonucleotide
tatcctccctatcggtttctgggtgctata

SEQ ID NO: 397760 - DNA, 30 bp, Artificial Sequence
  Synthetic oligonucleotide
taacatgcaactattgtctttattgctata

SEQ ID NO: 397761 - DNA, 30 bp, Artificial Sequence
  Synthetic oligonucleotide
acgtgtagtagttgaggtagggaatctata

SEQ ID NO: 397762 - DNA, 30 bp, Artificial Sequence
  Synthetic oligonucleotide
tttgctaaatgccttggtcgatcctctata

SEQ ID NO: 397763 - DNA, 30 bp, Artificial Sequence
  Synthetic oligonucleotide
gagagggccgatacagggtacctctctata

SEQ ID NO: 397764 - DNA, 30 bp, Artificial Sequence
  Synthetic oligonucleotide
gttggcacagttaagctaaaggagtctata

SEQ ID NO: 397765 - DNA, 30 bp, Artificial Sequence
  Synthetic oligonucleotide
gaatagttcaaagttgaattgttgtctata

SEQ ID NO: 397766 - DNA, 30 bp, Artificial Sequence
  Synthetic oligonucleotide
tcatattcaaagggagggcaatcttctata

SEQ ID NO: 397767 - DNA, 30 bp, Artificial Sequence
  Synthetic oligonucleotide
actaaattcacattgttgcggatttctata

SEQ ID NO: 397768 - DNA, 30 bp, Artificial Sequence
  Synthetic oligonucleotide
actcaactcgaccaacgcaagaaaagtata

SEQ ID NO: 397769 - DNA, 31 bp, Artificial Sequence
  Synthetic oligonucleotide
attcagacattgtaacagagggcaaagtata

SEQ ID NO: 397770 - DNA, 30 bp, Artificial Sequence
  Synthetic oligonucleotide
ctaaggaaccgcgcccaattatgaagtata

SEQ ID NO: 397771 - DNA, 30 bp, Artificial Sequence
  Synthetic oligonucleotide
cagtaagtatccacagatgcacacagtata

SEQ ID NO: 397772 - DNA, 30 bp, Artificial Sequence
  Synthetic oligonucleotide
ttgctatgctttcctagtaccgtcagtata

SEQ ID NO: 397773 - DNA, 30 bp, Artificial Sequence
  Synthetic oligonucleotide
aaggttacgatcgcgtaaggggtcagtata

SEQ ID NO: 397774 - DNA, 30 bp, Artificial Sequence
  Synthetic oligonucleotide
gctcgcgccgttatagtcaatgcgagtata

SEQ ID NO: 397775 - DNA, 30 bp, Artificial Sequence
  Synthetic oligonucleotide
gaatacaggacgctgtgccctcatagtata

SEQ ID NO: 397776 - DNA, 30 bp, Artificial Sequence
  Synthetic oligonucleotide
ttccggagtctagatatttcatatagtata

SEQ ID NO: 397777 - DNA, 30 bp, Artificial Sequence
  Synthetic oligonucleotide
agtactattttgtgacttgtcgaacgtata

SEQ ID NO: 397778 - DNA, 30 bp, Artificial Sequence
  Synthetic oligonucleotide
tagcgaatcttactgctcggggcacgtata

SEQ ID NO: 397779 - DNA, 30 bp, Artificial Sequence
  Synthetic oligonucleotide
cattcattgttagcgaacacgatacgtata

SEQ ID NO: 397780 - DNA, 30 bp, Artificial Sequence
  Synthetic oligonucleotide
gagtataacaatccgcgagtcttacgtata

SEQ ID NO: 397781 - DNA, 30 bp, Artificial Sequence
  Synthetic oligonucleotide
ggtaagggacatggtcaccctgaccgtata

SEQ ID NO: 397782 - DNA, 30 bp, Artificial Sequence
  Synthetic oligonucleotide
atgtcaaagacattcgcatagccccgtata

SEQ ID NO: 397783 - DNA, 30 bp, Artificial Sequence
  Synthetic oligonucleotide
accgaagggtggtgttcattcctccgtata

SEQ ID NO: 397784 - DNA, 30 bp, Artificial Sequence
  Synthetic oligonucleotide
gagtttgcgagggtaaggccagagcgtata

SEQ ID NO: 397785 - DNA, 30 bp, Artificial Sequence
  Synthetic oligonucleotide
acgaccaggttatttaatatcgagcgtata

SEQ ID NO: 397786 - DNA, 30 bp, Artificial Sequence
  Synthetic oligonucleotide
aaggctttgtgtttatgctcatagcgtata

SEQ ID NO: 397787 - DNA, 30 bp, Artificial Sequence
  Synthetic oligonucleotide
taaaagtccgtggtcagagactagcgtata

SEQ ID NO: 397788 - DNA, 30 bp, Artificial Sequence
  Synthetic oligonucleotide
tcgcagaatgtttccgggtagcggcgtata

SEQ ID NO: 397789 - DNA, 30 bp, Artificial Sequence
  Synthetic oligonucleotide
ctccgcactttcgaatgggaggatcgtata

SEQ ID NO: 397790 - DNA, 30 bp, Artificial Sequence
  Synthetic oligonucleotide
ggagtgacacggcctacaagtgaaggtata

SEQ ID NO: 397791 - DNA, 30 bp, Artificial Sequence
  Synthetic oligonucleotide
taaacatggctgtttgggatcgacggtata

SEQ ID NO: 397792 - DNA, 30 bp, Artificial Sequence
  Synthetic oligonucleotide
tgtttagcggacacgcagccgaagggtata

SEQ ID NO: 397793 - DNA, 30 bp, Artificial Sequence
  Synthetic oligonucleotide
tctttaatggatagaagcgacctgggtata

SEQ ID NO: 397794 - DNA, 30 bp, Artificial Sequence
  Synthetic oligonucleotide
gatgtctatatacagctggcaaatggtata

SEQ ID NO: 397795 - DNA, 30 bp, Artificial Sequence
  Synthetic oligonucleotide
ccgttataaattctacgaccggttggtata

SEQ ID NO: 397796 - DNA, 30 bp, Artificial Sequence
  Synthetic oligonucleotide
gaatgctaccgcccgtgattcaaatgtata

SEQ ID NO: 397797 - DNA, 30 bp, Artificial Sequence
  Synthetic oligonucleotide
catactcaatttttactttatcaatgtata

SEQ ID NO: 397798 - DNA, 30 bp, Artificial Sequence
  Synthetic oligonucleotide
catccggatatacgccaataaaactgtata

SEQ ID NO: 397799 - DNA, 30 bp, Artificial Sequence
  Synthetic oligonucleotide
tttcatccggtctcactcagtgcctgtata

SEQ ID NO: 397800 - DNA, 30 bp, Artificial Sequence
  Synthetic oligonucleotide
gatgatcatttcattagttggttctgtata

SEQ ID NO: 397801 - DNA, 30 bp, Artificial Sequence
  Synthetic oligonucleotide
aattacggccgggcatgtaaccagtgtata

SEQ ID NO: 397802 - DNA, 30 bp, Artificial Sequence
  Synthetic oligonucleotide
tgccgccgggggctgtgttcaaggtgtata

SEQ ID NO: 397803 - DNA, 30 bp, Artificial Sequence
  Synthetic oligonucleotide
cggttaggttactgggcagctcggtgtata

SEQ ID NO: 397804 - DNA, 30 bp, Artificial Sequence
  Synthetic oligonucleotide
acaaggaatgcgcgacgcaagccttgtata

SEQ ID NO: 397805 - DNA, 30 bp, Artificial Sequence
  Synthetic oligonucleotide
agcgcatgctgtccagcttagagttgtata

SEQ ID NO: 397806 - DNA, 30 bp, Artificial Sequence
  Synthetic oligonucleotide
tggtataagtaatggagttttctttgtata

SEQ ID NO: 397807 - DNA, 30 bp, Artificial Sequence
  Synthetic oligonucleotide
tcgatcctcctaccaagcaggttttgtata

SEQ ID NO: 397808 - DNA, 30 bp, Artificial Sequence
  Synthetic oligonucleotide
cagcaacgtttaacgtatgggataattata

SEQ ID NO: 397809 - DNA, 30 bp, Artificial Sequence
  Synthetic oligonucleotide
aaacgcatctggtaacaaatgataattata

SEQ ID NO: 397810 - DNA, 30 bp, Artificial Sequence
  Synthetic oligonucleotide
cctacttcacgcggggctcgcctaattata

SEQ ID NO: 397811 - DNA, 30 bp, Artificial Sequence
  Synthetic oligonucleotide
gaataagtccatctcaatggagtaattata

SEQ ID NO: 397812 - DNA, 30 bp, Artificial Sequence
  Synthetic oligonucleotide
aagaagatagctccggtcaccttaattata

SEQ ID NO: 397813 - DNA, 30 bp, Artificial Sequence
  Synthetic oligonucleotide
accaactgggattctgatcaacatattata

SEQ ID NO: 397814 - DNA, 30 bp, Artificial Sequence
  Synthetic oligonucleotide
tcgaatcacctctcatgaattcatattata

SEQ ID NO: 397815 - DNA, 30 bp, Artificial Sequence
  Synthetic oligonucleotide
gtattcgggggaattcataggcaacttata

SEQ ID NO: 397816 - DNA, 30 bp, Artificial Sequence
  Synthetic oligonucleotide
ggatattaatggtccgttctgcaacttata

SEQ ID NO: 397817 - DNA, 30 bp, Artificial Sequence
  Synthetic oligonucleotide
gtataggacgtacaaaggaagcgccttata

SEQ ID NO: 397818 - DNA, 30 bp, Artificial Sequence
  Synthetic oligonucleotide
caggccacactaattaggatctgccttata

SEQ ID NO: 397819 - DNA, 30 bp, Artificial Sequence
  Synthetic oligonucleotide
ggtactacagtgtgtcggaaggtccttata

SEQ ID NO: 397820 - DNA, 30 bp, Artificial Sequence
  Synthetic oligonucleotide
cgggtagtctcgagatttatgtagcttata

SEQ ID NO: 397821 - DNA, 30 bp, Artificial Sequence
  Synthetic oligonucleotide
ctcgacgctctctgttctgtatcgcttata

SEQ ID NO: 397822 - DNA, 30 bp, Artificial Sequence
  Synthetic oligonucleotide
aggcttgattaaataaggtcgacagttata

SEQ ID NO: 397823 - DNA, 30 bp, Artificial Sequence
  Synthetic oligonucleotide
taggcaaccactcggcttggtagagttata

SEQ ID NO: 397824 - DNA, 30 bp, Artificial Sequence
  Synthetic oligonucleotide
gagaggacttaaatactggtcttcgttata

SEQ ID NO: 397825 - DNA, 31 bp, Artificial Sequence
  Synthetic oligonucleotide
atcgtggggccgtggacgacccgtggttata

SEQ ID NO: 397826 - DNA, 30 bp, Artificial Sequence
  Synthetic oligonucleotide
cctcaaactgtctagtgtcggttggttata

SEQ ID NO: 397827 - DNA, 30 bp, Artificial Sequence
  Synthetic oligonucleotide
ggagctcttgcctggtaatggttggttata

SEQ ID NO: 397828 - DNA, 30 bp, Artificial Sequence
  Synthetic oligonucleotide
aagctgccgccagctagtcgtaatgttata

SEQ ID NO: 397829 - DNA, 30 bp, Artificial Sequence
  Synthetic oligonucleotide
tagggggtagtactcccaggtaatgttata

SEQ ID NO: 397830 - DNA, 30 bp, Artificial Sequence
  Synthetic oligonucleotide
cccgtcttcttggccctttggtatgttata

SEQ ID NO: 397831 - DNA, 30 bp, Artificial Sequence
  Synthetic oligonucleotide
taagagccgcgcagcgggccaactgttata

SEQ ID NO: 397832 - DNA, 30 bp, Artificial Sequence
  Synthetic oligonucleotide
cgcactgtccgacctccataaagtgttata

SEQ ID NO: 397833 - DNA, 30 bp, Artificial Sequence
  Synthetic oligonucleotide
gcttctagcagttccaccttgcgtgttata

SEQ ID NO: 397834 - DNA, 30 bp, Artificial Sequence
  Synthetic oligonucleotide
gaccattcaactagtgcccggtaatttata

SEQ ID NO: 397835 - DNA, 30 bp, Artificial Sequence
  Synthetic oligonucleotide
gagctaacgagtggatagttgggctttata

SEQ ID NO: 397836 - DNA, 30 bp, Artificial Sequence
  Synthetic oligonucleotide
agccccccttggaaggcggactgctttata

SEQ ID NO: 397837 - DNA, 30 bp, Artificial Sequence
  Synthetic oligonucleotide
ctctgaggaatagggtctttacggtttata

SEQ ID NO: 397838 - DNA, 30 bp, Artificial Sequence
  Synthetic oligonucleotide
gccggtgcacctggacaggctgggtttata

SEQ ID NO: 397839 - DNA, 30 bp, Artificial Sequence
  Synthetic oligonucleotide
ggaatacaattcctccctgctgattttata

SEQ ID NO: 397840 - DNA, 30 bp, Artificial Sequence
  Synthetic oligonucleotide
ctccgcggacagacgtggtcaggttttata

SEQ ID NO: 397841 - DNA, 30 bp, Artificial Sequence
  Synthetic oligonucleotide
cctttattggactaaggaatctgttttata

SEQ ID NO: 397842 - DNA, 30 bp, Artificial Sequence
  Synthetic oligonucleotide
gcagcgcgcgtttcccgttagtcaaaacta

SEQ ID NO: 397843 - DNA, 30 bp, Artificial Sequence
  Synthetic oligonucleotide
gctgcatcttttgaagtaatactaaaacta

SEQ ID NO: 397844 - DNA, 30 bp, Artificial Sequence
  Synthetic oligonucleotide
tttcaaatcgaaacggtgtgatacaaacta

SEQ ID NO: 397845 - DNA, 30 bp, Artificial Sequence
  Synthetic oligonucleotide
agtactgcaagcttaggaatctacaaacta

SEQ ID NO: 397846 - DNA, 30 bp, Artificial Sequence
  Synthetic oligonucleotide
gggcaggacgacggtttaattctcaaacta

SEQ ID NO: 397847 - DNA, 30 bp, Artificial Sequence
  Synthetic oligonucleotide
tcacgcctaggtgcatatcttgtcaaacta

SEQ ID NO: 397848 - DNA, 30 bp, Artificial Sequence
  Synthetic oligonucleotide
tccgatatgttgaccatgacgtagaaacta

SEQ ID NO: 397849 - DNA, 30 bp, Artificial Sequence
  Synthetic oligonucleotide
agacgttaatatgcacactgtcataaacta

SEQ ID NO: 397850 - DNA, 30 bp, Artificial Sequence
  Synthetic oligonucleotide
atagcctagatcgggattatatctaaacta

SEQ ID NO: 397851 - DNA, 30 bp, Artificial Sequence
  Synthetic oligonucleotide
aatgtccaggtatttttagggggtaaacta

SEQ ID NO: 397852 - DNA, 30 bp, Artificial Sequence
  Synthetic oligonucleotide
ttcttaaatatgtcagaacaggcacaacta

SEQ ID NO: 397853 - DNA, 30 bp, Artificial Sequence
  Synthetic oligonucleotide
tagtagagcggtattaccagacgccaacta

SEQ ID NO: 397854 - DNA, 30 bp, Artificial Sequence
  Synthetic oligonucleotide
aatcattagccggtaggagtcatccaacta

SEQ ID NO: 397855 - DNA, 31 bp, Artificial Sequence
  Synthetic oligonucleotide
cagaaacggtcatcctgagatggggcaacta

SEQ ID NO: 397856 - DNA, 30 bp, Artificial Sequence
  Synthetic oligonucleotide
aggctgacacacggcggttttaatcaacta

SEQ ID NO: 397857 - DNA, 30 bp, Artificial Sequence
  Synthetic oligonucleotide
ttctgtttataagatgacaggtatcaacta

SEQ ID NO: 397858 - DNA, 30 bp, Artificial Sequence
  Synthetic oligonucleotide
attcgctcaccgactcatagcacagaacta

SEQ ID NO: 397859 - DNA, 30 bp, Artificial Sequence
  Synthetic oligonucleotide
ttttcacccccataccgcgaggacgaacta

SEQ ID NO: 397860 - DNA, 30 bp, Artificial Sequence
  Synthetic oligonucleotide
atcatacataggttataaagatgcgaacta

SEQ ID NO: 397861 - DNA, 30 bp, Artificial Sequence
  Synthetic oligonucleotide
tacataggccattgttccagtaaggaacta

SEQ ID NO: 397862 - DNA, 30 bp, Artificial Sequence
  Synthetic oligonucleotide
gtttcgacaagcgaccaatgcgagtaacta

SEQ ID NO: 397863 - DNA, 32 bp, Artificial Sequence
  Synthetic oligonucleotide
ttgaagggtatggacgccaatgaaggtaacta

SEQ ID NO: 397864 - DNA, 30 bp, Artificial Sequence
  Synthetic oligonucleotide
gcagagccttccaagtctgcatggtaacta

SEQ ID NO: 397865 - DNA, 30 bp, Artificial Sequence
  Synthetic oligonucleotide
aatagttgaaacttgaggaatatgtaacta

SEQ ID NO: 397866 - DNA, 30 bp, Artificial Sequence
  Synthetic oligonucleotide
ggacgaggcactttccgaaattaaacacta

SEQ ID NO: 397867 - DNA, 30 bp, Artificial Sequence
  Synthetic oligonucleotide
caaaggtatagattgttaagagacacacta

SEQ ID NO: 397868 - DNA, 30 bp, Artificial Sequence
  Synthetic oligonucleotide
gtctaaggataaccggacctggcgacacta

SEQ ID NO: 397869 - DNA, 30 bp, Artificial Sequence
  Synthetic oligonucleotide
tgatttcagggactctaagtgaatacacta

SEQ ID NO: 397870 - DNA, 30 bp, Artificial Sequence
  Synthetic oligonucleotide
gtcgacgtttgagttagctctaatacacta

SEQ ID NO: 397871 - DNA, 30 bp, Artificial Sequence
  Synthetic oligonucleotide
gcaatcaccgttctcgacgccgttacacta

SEQ ID NO: 397872 - DNA, 30 bp, Artificial Sequence
  Synthetic oligonucleotide
gaagacgggctgtccacagtcgcaccacta

SEQ ID NO: 397873 - DNA, 30 bp, Artificial Sequence
  Synthetic oligonucleotide
tgttttaaccggaactggtgcagaccacta

SEQ ID NO: 397874 - DNA, 30 bp, Artificial Sequence
  Synthetic oligonucleotide
agctagaatcattctagatttgtaccacta

SEQ ID NO: 397875 - DNA, 30 bp, Artificial Sequence
  Synthetic oligonucleotide
ttccactatcccccggttaccgtgccacta

SEQ ID NO: 397876 - DNA, 30 bp, Artificial Sequence
  Synthetic oligonucleotide
tctctggagatgggactgactaatccacta

SEQ ID NO: 397877 - DNA, 30 bp, Artificial Sequence
  Synthetic oligonucleotide
tgcatcgagccagtggactctattccacta

SEQ ID NO: 397878 - DNA, 30 bp, Artificial Sequence
  Synthetic oligonucleotide
atgcggagttacagcgggtaacacgcacta

SEQ ID NO: 397879 - DNA, 30 bp, Artificial Sequence
  Synthetic oligonucleotide
ataggtgaaatgactcattcttacgcacta

SEQ ID NO: 397880 - DNA, 30 bp, Artificial Sequence
  Synthetic oligonucleotide
gatcaattcaagaggtccatgggcgcacta

SEQ ID NO: 397881 - DNA, 30 bp, Artificial Sequence
  Synthetic oligonucleotide
gtacgtttctttacaactagattggcacta

SEQ ID NO: 397882 - DNA, 30 bp, Artificial Sequence
  Synthetic oligonucleotide
gacggacccgtggttcgttcccttgcacta

SEQ ID NO: 397883 - DNA, 30 bp, Artificial Sequence
  Synthetic oligonucleotide
cattaccgtggcccatataaattatcacta

SEQ ID NO: 397884 - DNA, 30 bp, Artificial Sequence
  Synthetic oligonucleotide
tttattaccgttcagtactgggcctcacta

SEQ ID NO: 397885 - DNA, 30 bp, Artificial Sequence
  Synthetic oligonucleotide
agccagattaatgtcatgctactctcacta

SEQ ID NO: 397886 - DNA, 30 bp, Artificial Sequence
  Synthetic oligonucleotide
atttaatggttcatcaaacgctagtcacta

SEQ ID NO: 397887 - DNA, 30 bp, Artificial Sequence
  Synthetic oligonucleotide
acaactgctcttaaaacgagctcttcacta

SEQ ID NO: 397888 - DNA, 30 bp, Artificial Sequence
  Synthetic oligonucleotide
ccatacgtaaaggccgcagaagaaagacta

SEQ ID NO: 397889 - DNA, 30 bp, Artificial Sequence
  Synthetic oligonucleotide
gcaaaggccttggcagcggcgttaagacta

SEQ ID NO: 397890 - DNA, 30 bp, Artificial Sequence
  Synthetic oligonucleotide
aacaagaagtctcaactctatttaagacta

SEQ ID NO: 397891 - DNA, 30 bp, Artificial Sequence
  Synthetic oligonucleotide
agtgtcaggagacgtcacaacgccagacta

SEQ ID NO: 397892 - DNA, 30 bp, Artificial Sequence
  Synthetic oligonucleotide
gcattggaaaggttgaatgccgatagacta

SEQ ID NO: 397893 - DNA, 30 bp, Artificial Sequence
  Synthetic oligonucleotide
gcggtatacgcaacatttatgggtagacta

SEQ ID NO: 397894 - DNA, 30 bp, Artificial Sequence
  Synthetic oligonucleotide
ggatttaaagttgaccagttctgtagacta

SEQ ID NO: 397895 - DNA, 30 bp, Artificial Sequence
  Synthetic oligonucleotide
ttattggtgtagaaaagtacagaacgacta

SEQ ID NO: 397896 - DNA, 30 bp, Artificial Sequence
  Synthetic oligonucleotide
atcaggaggtacgtcactctgacacgacta

SEQ ID NO: 397897 - DNA, 30 bp, Artificial Sequence
  Synthetic oligonucleotide
gacttggtgagcagcgtagtagcccgacta

SEQ ID NO: 397898 - DNA, 30 bp, Artificial Sequence
  Synthetic oligonucleotide
tttcctactcgcggagcccgcacgcgacta

SEQ ID NO: 397899 - DNA, 30 bp, Artificial Sequence
  Synthetic oligonucleotide
attatgtgccctatcgttctcgggcgacta

SEQ ID NO: 397900 - DNA, 30 bp, Artificial Sequence
  Synthetic oligonucleotide
tagtgccggacaactctacggcttcgacta

SEQ ID NO: 397901 - DNA, 30 bp, Artificial Sequence
  Synthetic oligonucleotide
tcaccctatgggtggtttgctaacggacta

SEQ ID NO: 397902 - DNA, 30 bp, Artificial Sequence
  Synthetic oligonucleotide
gcctgttgtgcttacgctattcacggacta

SEQ ID NO: 397903 - DNA, 30 bp, Artificial Sequence
  Synthetic oligonucleotide
aaaacaagcacgacttttgataccggacta

SEQ ID NO: 397904 - DNA, 30 bp, Artificial Sequence
  Synthetic oligonucleotide
aagagggtcttgtgagcccctgcgggacta

SEQ ID NO: 397905 - DNA, 30 bp, Artificial Sequence
  Synthetic oligonucleotide
agcatactcctctgaagacaaactggacta

SEQ ID NO: 397906 - DNA, 30 bp, Artificial Sequence
  Synthetic oligonucleotide
ttagggaacaccccgcgctattcatgacta

SEQ ID NO: 397907 - DNA, 30 bp, Artificial Sequence
  Synthetic oligonucleotide
tttcgcaggcgaatagctattcactgacta

SEQ ID NO: 397908 - DNA, 30 bp, Artificial Sequence
  Synthetic oligonucleotide
attatcgtaagctgatcttaggactgacta

SEQ ID NO: 397909 - DNA, 30 bp, Artificial Sequence
  Synthetic oligonucleotide
gagcctggcagcatcgggaaaaattgacta

SEQ ID NO: 397910 - DNA, 30 bp, Artificial Sequence
  Synthetic oligonucleotide
gtgttccgtggataacgcattccttgacta

SEQ ID NO: 397911 - DNA, 30 bp, Artificial Sequence
  Synthetic oligonucleotide
gtcaatcggagatatttagtcaaaatacta

SEQ ID NO: 397912 - DNA, 30 bp, Artificial Sequence
  Synthetic oligonucleotide
agaactccgcatagcagaataacaatacta

SEQ ID NO: 397913 - DNA, 30 bp, Artificial Sequence
  Synthetic oligonucleotide
tgtaccacatcagcataaccgtagatacta

SEQ ID NO: 397914 - DNA, 30 bp, Artificial Sequence
  Synthetic oligonucleotide
aactctacgggcgatcacaataggatacta

SEQ ID NO: 397915 - DNA, 30 bp, Artificial Sequence
  Synthetic oligonucleotide
ccgtgtggtccattccccggtcggatacta

SEQ ID NO: 397916 - DNA, 30 bp, Artificial Sequence
  Synthetic oligonucleotide
cgtgatatacaagcaaaatgttttatacta

SEQ ID NO: 397917 - DNA, 30 bp, Artificial Sequence
  Synthetic oligonucleotide
gtgtgggggatcggtgattaagaactacta

SEQ ID NO: 397918 - DNA, 30 bp, Artificial Sequence
  Synthetic oligonucleotide
cagtcggcctcacctgacacttaactacta

SEQ ID NO: 397919 - DNA, 30 bp, Artificial Sequence
  Synthetic oligonucleotide
gtggatttctttcgaggggtgacactacta

SEQ ID NO: 397920 - DNA, 30 bp, Artificial Sequence
  Synthetic oligonucleotide
agggactattggcctacgtgcctactacta

SEQ ID NO: 397921 - DNA, 30 bp, Artificial Sequence
  Synthetic oligonucleotide
aatccgcaaaggcgattctgggtactacta

SEQ ID NO: 397922 - DNA, 30 bp, Artificial Sequence
  Synthetic oligonucleotide
gcgccgacccgggcaagtccccacctacta

SEQ ID NO: 397923 - DNA, 30 bp, Artificial Sequence
  Synthetic oligonucleotide
gggtaaggaagacggttggtcaggctacta

SEQ ID NO: 397924 - DNA, 30 bp, Artificial Sequence
  Synthetic oligonucleotide
gacctaggcatctttctggtttggctacta

SEQ ID NO: 397925 - DNA, 30 bp, Artificial Sequence
  Synthetic oligonucleotide
taactaatccacctataatgtttgctacta

SEQ ID NO: 397926 - DNA, 30 bp, Artificial Sequence
  Synthetic oligonucleotide
aatagaacctgaggtttccaactagtacta

SEQ ID NO: 397927 - DNA, 30 bp, Artificial Sequence
  Synthetic oligonucleotide
aagaacctgggtggatatgaccacgtacta

SEQ ID NO: 397928 - DNA, 30 bp, Artificial Sequence
  Synthetic oligonucleotide
ggttgggatccgcgatgatagtaattacta

SEQ ID NO: 397929 - DNA, 30 bp, Artificial Sequence
  Synthetic oligonucleotide
ctcaggttaacgcatagccacggattacta

SEQ ID NO: 397930 - DNA, 30 bp, Artificial Sequence
  Synthetic oligonucleotide
aaatttacatgcgtagcccggaacttacta

SEQ ID NO: 397931 - DNA, 30 bp, Artificial Sequence
  Synthetic oligonucleotide
ctctaggtgtctggaataccatgcttacta

SEQ ID NO: 397932 - DNA, 30 bp, Artificial Sequence
  Synthetic oligonucleotide
cttggagtacactcacgatgaatcttacta

SEQ ID NO: 397933 - DNA, 30 bp, Artificial Sequence
  Synthetic oligonucleotide
cagtccgacaggcagccttgggtcttacta

SEQ ID NO: 397934 - DNA, 30 bp, Artificial Sequence
  Synthetic oligonucleotide
tagcggaacagggccgttttttaaaaccta

SEQ ID NO: 397935 - DNA, 30 bp, Artificial Sequence
  Synthetic oligonucleotide
tccgtagtattcatacgcgacgcaaaccta

SEQ ID NO: 397936 - DNA, 30 bp, Artificial Sequence
  Synthetic oligonucleotide
acaggtgcctttggaggaagtcgcaaccta

SEQ ID NO: 397937 - DNA, 30 bp, Artificial Sequence
  Synthetic oligonucleotide
ttaatcgtagatcgggtatacaagaaccta

SEQ ID NO: 397938 - DNA, 31 bp, Artificial Sequence
  Synthetic oligonucleotide
gagtattaaataatataactatcagaaccta

SEQ ID NO: 397939 - DNA, 30 bp, Artificial Sequence
  Synthetic oligonucleotide
ggggcccgggaaggtcaccaagggaaccta

SEQ ID NO: 397940 - DNA, 30 bp, Artificial Sequence
  Synthetic oligonucleotide
gtcggttctcatatagtagtcttgaaccta

SEQ ID NO: 397941 - DNA, 30 bp, Artificial Sequence
  Synthetic oligonucleotide
cgtcagcgtgcggtaatgcatgctaaccta

SEQ ID NO: 397942 - DNA, 30 bp, Artificial Sequence
  Synthetic oligonucleotide
taacaatgctgttgtcaggtctagcaccta

SEQ ID NO: 397943 - DNA, 30 bp, Artificial Sequence
  Synthetic oligonucleotide
tttatacgaaatttaatcaagtggcaccta

SEQ ID NO: 397944 - DNA, 30 bp, Artificial Sequence
  Synthetic oligonucleotide
atacattacatgaatgcggaaactcaccta

SEQ ID NO: 397945 - DNA, 30 bp, Artificial Sequence
  Synthetic oligonucleotide
atgtgagagtgatggtgtgcacaagaccta

SEQ ID NO: 397946 - DNA, 30 bp, Artificial Sequence
  Synthetic oligonucleotide
atgcttacagacgggttcatagaagaccta

SEQ ID NO: 397947 - DNA, 30 bp, Artificial Sequence
  Synthetic oligonucleotide
gggagttacgtgttattaggtggagaccta

SEQ ID NO: 397948 - DNA, 30 bp, Artificial Sequence
  Synthetic oligonucleotide
gattgtcgaagagcggagatcgtagaccta

SEQ ID NO: 397949 - DNA, 30 bp, Artificial Sequence
  Synthetic oligonucleotide
agtccgtgtttaatgggagtgcccgaccta

SEQ ID NO: 397950 - DNA, 30 bp, Artificial Sequence
  Synthetic oligonucleotide
tagaaatttttatcgaccttcggataccta

SEQ ID NO: 397951 - DNA, 30 bp, Artificial Sequence
  Synthetic oligonucleotide
acactcaagtaattaaatatctactaccta

SEQ ID NO: 397952 - DNA, 30 bp, Artificial Sequence
  Synthetic oligonucleotide
gtagtcgaaatagtgcatcacggctaccta

SEQ ID NO: 397953 - DNA, 30 bp, Artificial Sequence
  Synthetic oligonucleotide
tcttatgacggagacctattttgctaccta

SEQ ID NO: 397954 - DNA, 30 bp, Artificial Sequence
  Synthetic oligonucleotide
gtctcagagatcggggtgtgtatctaccta

SEQ ID NO: 397955 - DNA, 30 bp, Artificial Sequence
  Synthetic oligonucleotide
ttaaagtaggccggctcgtcgaagtaccta

SEQ ID NO: 397956 - DNA, 30 bp, Artificial Sequence
  Synthetic oligonucleotide
tgcctataggttcgatcggtcaacacccta

SEQ ID NO: 397957 - DNA, 30 bp, Artificial Sequence
  Synthetic oligonucleotide
atttcgaggtatgcccgataggtcacccta

SEQ ID NO: 397958 - DNA, 30 bp, Artificial Sequence
  Synthetic oligonucleotide
agagtgatagagttttcgtcctcgacccta

SEQ ID NO: 397959 - DNA, 30 bp, Artificial Sequence
  Synthetic oligonucleotide
gatttttggcgactcacagccctgacccta

SEQ ID NO: 397960 - DNA, 30 bp, Artificial Sequence
  Synthetic oligonucleotide
ctctcactaattattgccgtaagtacccta

SEQ ID NO: 397961 - DNA, 30 bp, Artificial Sequence
  Synthetic oligonucleotide
ttatccatgcatggtccgcttccaccccta

SEQ ID NO: 397962 - DNA, 30 bp, Artificial Sequence
  Synthetic oligonucleotide
gtagcatgggggctcgccggatcaccccta

SEQ ID NO: 397963 - DNA, 30 bp, Artificial Sequence
  Synthetic oligonucleotide
cggactccccactggaggtggaccccccta

SEQ ID NO: 397964 - DNA, 30 bp, Artificial Sequence
  Synthetic oligonucleotide
gtaacgccaaggctaaggtctacgccccta

SEQ ID NO: 397965 - DNA, 30 bp, Artificial Sequence
  Synthetic oligonucleotide
acccaattattggtatgtagaccagcccta

SEQ ID NO: 397966 - DNA, 30 bp, Artificial Sequence
  Synthetic oligonucleotide
acgcagatggtacttctatataccgcccta

SEQ ID NO: 397967 - DNA, 30 bp, Artificial Sequence
  Synthetic oligonucleotide
gccaaagtataatggggtcgacaggcccta

SEQ ID NO: 397968 - DNA, 30 bp, Artificial Sequence
  Synthetic oligonucleotide
aacagcaggcaaagtcttgctcatgcccta

SEQ ID NO: 397969 - DNA, 30 bp, Artificial Sequence
  Synthetic oligonucleotide
aatatgctcgggtaatcattcggtgcccta

SEQ ID NO: 397970 - DNA, 30 bp, Artificial Sequence
  Synthetic oligonucleotide
ggctcatttgtcgatggtgagtgtgcccta

SEQ ID NO: 397971 - DNA, 30 bp, Artificial Sequence
  Synthetic oligonucleotide
ggttagaccaaccttaatatacttgcccta

SEQ ID NO: 397972 - DNA, 30 bp, Artificial Sequence
  Synthetic oligonucleotide
gcaggattgctaaaccatctccttgcccta

SEQ ID NO: 397973 - DNA, 30 bp, Artificial Sequence
  Synthetic oligonucleotide
ctagttgtttcaggtatgtttagatcccta

SEQ ID NO: 397974 - DNA, 30 bp, Artificial Sequence
  Synthetic oligonucleotide
tgtttggctttggttaccgagctatcccta

SEQ ID NO: 397975 - DNA, 30 bp, Artificial Sequence
  Synthetic oligonucleotide
gcgagtttgaataacgacattttatcccta

SEQ ID NO: 397976 - DNA, 30 bp, Artificial Sequence
  Synthetic oligonucleotide
tgtagtcggcatagccaacgagactcccta

SEQ ID NO: 397977 - DNA, 30 bp, Artificial Sequence
  Synthetic oligonucleotide
tagcaaaccctgcaagggcggcgctcccta

SEQ ID NO: 397978 - DNA, 30 bp, Artificial Sequence
  Synthetic oligonucleotide
ttcaagtgtaaccgttatgactattcccta

SEQ ID NO: 397979 - DNA, 30 bp, Artificial Sequence
  Synthetic oligonucleotide
ggctgtatggttgtcaccaacaaaagccta

SEQ ID NO: 397980 - DNA, 30 bp, Artificial Sequence
  Synthetic oligonucleotide
gcaactgcgtagccaatccgcagcagccta

SEQ ID NO: 397981 - DNA, 30 bp, Artificial Sequence
  Synthetic oligonucleotide
gggctaagtgcgggcacgattgttagccta

SEQ ID NO: 397982 - DNA, 30 bp, Artificial Sequence
  Synthetic oligonucleotide
tcccaaggaccgtacgtcatttaacgccta

SEQ ID NO: 397983 - DNA, 31 bp, Artificial Sequence
  Synthetic oligonucleotide
aaaaaagctggggactgtccaaatccgccta

SEQ ID NO: 397984 - DNA, 28 bp, Artificial Sequence
  Synthetic oligonucleotide
gtattccgtacagttaatccggcgccta

SEQ ID NO: 397985 - DNA, 30 bp, Artificial Sequence
  Synthetic oligonucleotide
gtatcacgggcctggagcgaggggcgccta

SEQ ID NO: 397986 - DNA, 30 bp, Artificial Sequence
  Synthetic oligonucleotide
tctgatcggcgcgttcactacgacggccta

SEQ ID NO: 397987 - DNA, 30 bp, Artificial Sequence
  Synthetic oligonucleotide
aatcaggccctccaggtcaccagcggccta

SEQ ID NO: 397988 - DNA, 30 bp, Artificial Sequence
  Synthetic oligonucleotide
gttcgatcgaaacttgataacatcggccta

SEQ ID NO: 397989 - DNA, 30 bp, Artificial Sequence
  Synthetic oligonucleotide
taagggttttgctccccgggcatcggccta

SEQ ID NO: 397990 - DNA, 30 bp, Artificial Sequence
  Synthetic oligonucleotide
cggttgcggatcgatagggtagtcggccta

SEQ ID NO: 397991 - DNA, 30 bp, Artificial Sequence
  Synthetic oligonucleotide
gtccaaaaatctagtctcggcacgggccta

SEQ ID NO: 397992 - DNA, 30 bp, Artificial Sequence
  Synthetic oligonucleotide
tagtcacggtaggtagtactaccgggccta

SEQ ID NO: 397993 - DNA, 30 bp, Artificial Sequence
  Synthetic oligonucleotide
tcgcatggagagctggctcgcaggggccta

SEQ ID NO: 397994 - DNA, 30 bp, Artificial Sequence
  Synthetic oligonucleotide
tccaagggggaaccggtattggctggccta

SEQ ID NO: 397995 - DNA, 30 bp, Artificial Sequence
  Synthetic oligonucleotide
gattagaatacaatacttacaagtggccta

SEQ ID NO: 397996 - DNA, 30 bp, Artificial Sequence
  Synthetic oligonucleotide
tttgacagagccggtaaccgatgatgccta

SEQ ID NO: 397997 - DNA, 30 bp, Artificial Sequence
  Synthetic oligonucleotide
accgggtcggacagttgcgcgtactgccta

SEQ ID NO: 397998 - DNA, 30 bp, Artificial Sequence
  Synthetic oligonucleotide
tttcataagcgcaacgtgaacacctgccta

SEQ ID NO: 397999 - DNA, 30 bp, Artificial Sequence
  Synthetic oligonucleotide
actcttggcccgattggagtacagtgccta

SEQ ID NO: 398000 - DNA, 30 bp, Artificial Sequence
  Synthetic oligonucleotide
agtctatccattaaaaactatgggtgccta

SEQ ID NO: 398001 - DNA, 30 bp, Artificial Sequence
  Synthetic oligonucleotide
tttgcagcacaaccgcagacaggttgccta

SEQ ID NO: 398002 - DNA, 30 bp, Artificial Sequence
  Synthetic oligonucleotide
gcatgtagcattccgaaatcaaaaatccta

SEQ ID NO: 398003 - DNA, 30 bp, Artificial Sequence
  Synthetic oligonucleotide
tcgccgcgtagccaatcaatcacaatccta

SEQ ID NO: 398004 - DNA, 30 bp, Artificial Sequence
  Synthetic oligonucleotide
atcttgagtacgggatttcactcaatccta

SEQ ID NO: 398005 - DNA, 30 bp, Artificial Sequence
  Synthetic oligonucleotide
atcgactaatactttacgaacacgatccta

SEQ ID NO: 398006 - DNA, 30 bp, Artificial Sequence
  Synthetic oligonucleotide
ggagaattttaaatgtctctcccgatccta

SEQ ID NO: 398007 - DNA, 30 bp, Artificial Sequence
  Synthetic oligonucleotide
agcggaacaaaaggatatatacatatccta

SEQ ID NO: 398008 - DNA, 30 bp, Artificial Sequence
  Synthetic oligonucleotide
atgtacctattggactgcaattgactccta

SEQ ID NO: 398009 - DNA, 30 bp, Artificial Sequence
  Synthetic oligonucleotide
atctggatataccgtgacaggatactccta

SEQ ID NO: 398010 - DNA, 30 bp, Artificial Sequence
  Synthetic oligonucleotide
cagtgatcagaagaggcacatttactccta

SEQ ID NO: 398011 - DNA, 30 bp, Artificial Sequence
  Synthetic oligonucleotide
cgttcgtggcacgcgatatggccgctccta

SEQ ID NO: 398012 - DNA, 30 bp, Artificial Sequence
  Synthetic oligonucleotide
aaggagtctcctgaaccatatatagtccta

SEQ ID NO: 398013 - DNA, 30 bp, Artificial Sequence
  Synthetic oligonucleotide
ctacttcgtacctggagctgtctagtccta

SEQ ID NO: 398014 - DNA, 30 bp, Artificial Sequence
  Synthetic oligonucleotide
tcagaagttgggttatgctctggggtccta

SEQ ID NO: 398015 - DNA, 30 bp, Artificial Sequence
  Synthetic oligonucleotide
gagggctacaagaaccacccagtggtccta

SEQ ID NO: 398016 - DNA, 30 bp, Artificial Sequence
  Synthetic oligonucleotide
tgtccggtgactccggaatggggattccta

SEQ ID NO: 398017 - DNA, 30 bp, Artificial Sequence
  Synthetic oligonucleotide
tacgggtacataggacattaggccttccta

SEQ ID NO: 398018 - DNA, 30 bp, Artificial Sequence
  Synthetic oligonucleotide
tagacaggcctagctagatagatgttccta

SEQ ID NO: 398019 - DNA, 30 bp, Artificial Sequence
  Synthetic oligonucleotide
gacctagctttgtgtgtacactaaaagcta

SEQ ID NO: 398020 - DNA, 30 bp, Artificial Sequence
  Synthetic oligonucleotide
tattaagagaactaattttcaaagaagcta

SEQ ID NO: 398021 - DNA, 30 bp, Artificial Sequence
  Synthetic oligonucleotide
tcaggagggtttaagcttactactaagcta

SEQ ID NO: 398022 - DNA, 30 bp, Artificial Sequence
  Synthetic oligonucleotide
agcttctgtattttttcctagggtaagcta

SEQ ID NO: 398023 - DNA, 30 bp, Artificial Sequence
  Synthetic oligonucleotide
tggggtattcaagacccaaggcttaagcta

SEQ ID NO: 398024 - DNA, 30 bp, Artificial Sequence
  Synthetic oligonucleotide
actaaagcatcctaggtccccacacagcta

SEQ ID NO: 398025 - DNA, 30 bp, Artificial Sequence
  Synthetic oligonucleotide
tgaaactaataatcagccaacgcacagcta

SEQ ID NO: 398026 - DNA, 30 bp, Artificial Sequence
  Synthetic oligonucleotide
ctagctcgcccaaaagtcggccgacagcta

SEQ ID NO: 398027 - DNA, 30 bp, Artificial Sequence
  Synthetic oligonucleotide
ttccgcggtgggacaagttgaggacagcta

SEQ ID NO: 398028 - DNA, 30 bp, Artificial Sequence
  Synthetic oligonucleotide
taagtgggcggtaaagcgtctccgcagcta

SEQ ID NO: 398029 - DNA, 30 bp, Artificial Sequence
  Synthetic oligonucleotide
agggaccctctataaagtcgttcgcagcta

SEQ ID NO: 398030 - DNA, 30 bp, Artificial Sequence
  Synthetic oligonucleotide
ggtataacgcggttagtccacgttcagcta

SEQ ID NO: 398031 - DNA, 30 bp, Artificial Sequence
  Synthetic oligonucleotide
aactgatgtaacctgtgctcaaaagagcta

SEQ ID NO: 398032 - DNA, 30 bp, Artificial Sequence
  Synthetic oligonucleotide
tttcgaggcattcacagatttagagagcta

SEQ ID NO: 398033 - DNA, 30 bp, Artificial Sequence
  Synthetic oligonucleotide
gcacaagcctttaccttagacatggagcta

SEQ ID NO: 398034 - DNA, 30 bp, Artificial Sequence
  Synthetic oligonucleotide
gttgaggcgctttaagctggctctgagcta

SEQ ID NO: 398035 - DNA, 30 bp, Artificial Sequence
  Synthetic oligonucleotide
ctttatggtggaactcattatgttgagcta

SEQ ID NO: 398036 - DNA, 30 bp, Artificial Sequence
  Synthetic oligonucleotide
ctgcactaccgtgtcacatttctatagcta

SEQ ID NO: 398037 - DNA, 30 bp, Artificial Sequence
  Synthetic oligonucleotide
aatgttcacatgctctccggtcactagcta

SEQ ID NO: 398038 - DNA, 30 bp, Artificial Sequence
  Synthetic oligonucleotide
acgcgaagcgatactctaatgggctagcta

SEQ ID NO: 398039 - DNA, 30 bp, Artificial Sequence
  Synthetic oligonucleotide
cttcggatccgaggctttagagtgtagcta

SEQ ID NO: 398040 - DNA, 30 bp, Artificial Sequence
  Synthetic oligonucleotide
ttcacgtcctccgagtcaatcgattagcta

SEQ ID NO: 398041 - DNA, 30 bp, Artificial Sequence
  Synthetic oligonucleotide
ggttacaaacgtacggtgctgggttagcta

SEQ ID NO: 398042 - DNA, 30 bp, Artificial Sequence
  Synthetic oligonucleotide
ggtgtttcggtctccaaagccatttagcta

SEQ ID NO: 398043 - DNA, 30 bp, Artificial Sequence
  Synthetic oligonucleotide
agtcacgtaggggtttattatacaacgcta

SEQ ID NO: 398044 - DNA, 30 bp, Artificial Sequence
  Synthetic oligonucleotide
atcgtcgtagggagggtctactgaacgcta

SEQ ID NO: 398045 - DNA, 30 bp, Artificial Sequence
  Synthetic oligonucleotide
aactacggtgcaggatcggtccgcacgcta

SEQ ID NO: 398046 - DNA, 30 bp, Artificial Sequence
  Synthetic oligonucleotide
gcatgaagaggcgggtggtccttcacgcta

SEQ ID NO: 398047 - DNA, 30 bp, Artificial Sequence
  Synthetic oligonucleotide
aacgatgatcttgccggtccgaagacgcta

SEQ ID NO: 398048 - DNA, 30 bp, Artificial Sequence
  Synthetic oligonucleotide
agcttctgtctcagccaccggcagacgcta

SEQ ID NO: 398049 - DNA, 30 bp, Artificial Sequence
  Synthetic oligonucleotide
tcgtttgcttcaatcactggaactacgcta

SEQ ID NO: 398050 - DNA, 30 bp, Artificial Sequence
  Synthetic oligonucleotide
caatgtcgacctgccggccgtactacgcta

SEQ ID NO: 398051 - DNA, 30 bp, Artificial Sequence
  Synthetic oligonucleotide
ttagtaaggaattggggaagcacaccgcta

SEQ ID NO: 398052 - DNA, 30 bp, Artificial Sequence
  Synthetic oligonucleotide
tggactgcagatgtataaaccggaccgcta

SEQ ID NO: 398053 - DNA, 30 bp, Artificial Sequence
  Synthetic oligonucleotide
gtactaagacactgggacttcggaccgcta

SEQ ID NO: 398054 - DNA, 30 bp, Artificial Sequence
  Synthetic oligonucleotide
caccaggatgatggcatcatccgcccgcta

SEQ ID NO: 398055 - DNA, 30 bp, Artificial Sequence
  Synthetic oligonucleotide
gcaggcggatacataataaatggcccgcta

SEQ ID NO: 398056 - DNA, 30 bp, Artificial Sequence
  Synthetic oligonucleotide
tccgtatatttcaaattaccatgcccgcta

SEQ ID NO: 398057 - DNA, 30 bp, Artificial Sequence
  Synthetic oligonucleotide
tccgttactggttggccatatttggcgcta

SEQ ID NO: 398058 - DNA, 30 bp, Artificial Sequence
  Synthetic oligonucleotide
ctgtacctgccccttacattccttgcgcta

SEQ ID NO: 398059 - DNA, 30 bp, Artificial Sequence
  Synthetic oligonucleotide
gcaaacgtatgtacatctcctcttgcgcta

SEQ ID NO: 398060 - DNA, 30 bp, Artificial Sequence
  Synthetic oligonucleotide
taaaattttgtgtgagtccactaatcgcta

SEQ ID NO: 398061 - DNA, 30 bp, Artificial Sequence
  Synthetic oligonucleotide
acccttaggactacctgtgcccactcgcta

SEQ ID NO: 398062 - DNA, 30 bp, Artificial Sequence
  Synthetic oligonucleotide
tgggtatgtgctactccgcactagtcgcta

SEQ ID NO: 398063 - DNA, 30 bp, Artificial Sequence
  Synthetic oligonucleotide
atgatccggagtccgacatgtgcgtcgcta

SEQ ID NO: 398064 - DNA, 30 bp, Artificial Sequence
  Synthetic oligonucleotide
cgaccgaaaactgtgtgacctcggtcgcta

SEQ ID NO: 398065 - DNA, 30 bp, Artificial Sequence
  Synthetic oligonucleotide
tagaagatttagtatagtgtttattcgcta

SEQ ID NO: 398066 - DNA, 30 bp, Artificial Sequence
  Synthetic oligonucleotide
ggttcacgccgagtcctcggctcttcgcta

SEQ ID NO: 398067 - DNA, 30 bp, Artificial Sequence
  Synthetic oligonucleotide
agtcacccctcaataccgttgagttcgcta

SEQ ID NO: 398068 - DNA, 30 bp, Artificial Sequence
  Synthetic oligonucleotide
atcggcgttgcgtgtgttagaatttcgcta

SEQ ID NO: 398069 - DNA, 30 bp, Artificial Sequence
  Synthetic oligonucleotide
gtgatgctttgccatagaaggccaaggcta

SEQ ID NO: 398070 - DNA, 30 bp, Artificial Sequence
  Synthetic oligonucleotide
tcgcgatcccgacgctaataccgaaggcta

SEQ ID NO: 398071 - DNA, 30 bp, Artificial Sequence
  Synthetic oligonucleotide
gtcttcaacacgtggtgagccctcaggcta

SEQ ID NO: 398072 - DNA, 30 bp, Artificial Sequence
  Synthetic oligonucleotide
gatggcccagaagtcttactgctcaggcta

SEQ ID NO: 398073 - DNA, 30 bp, Artificial Sequence
  Synthetic oligonucleotide
ttcgtcgcgggtcagtggcacactaggcta

SEQ ID NO: 398074 - DNA, 30 bp, Artificial Sequence
  Synthetic oligonucleotide
cccgtagtcagtgagccggattgtaggcta

SEQ ID NO: 398075 - DNA, 30 bp, Artificial Sequence
  Synthetic oligonucleotide
cgcaataacgttcgagtcttagaacggcta

SEQ ID NO: 398076 - DNA, 30 bp, Artificial Sequence
  Synthetic oligonucleotide
agtgattttcaatgcaactttggacggcta

SEQ ID NO: 398077 - DNA, 30 bp, Artificial Sequence
  Synthetic oligonucleotide
tcttcgggacgaatagtgttcgaccggcta

SEQ ID NO: 398078 - DNA, 30 bp, Artificial Sequence
  Synthetic oligonucleotide
taatgcgtggcatgcacgcacggccggcta

SEQ ID NO: 398079 - DNA, 30 bp, Artificial Sequence
  Synthetic oligonucleotide
gagttggtttttgagaaacctgtccggcta

SEQ ID NO: 398080 - DNA, 30 bp, Artificial Sequence
  Synthetic oligonucleotide
acgtgttggagttcattatcgcggcggcta

SEQ ID NO: 398081 - DNA, 30 bp, Artificial Sequence
  Synthetic oligonucleotide
tgttactgcaaatacgcatccttgcggcta

SEQ ID NO: 398082 - DNA, 30 bp, Artificial Sequence
  Synthetic oligonucleotide
gagacggacgaagccgagttgactcggcta

SEQ ID NO: 398083 - DNA, 30 bp, Artificial Sequence
  Synthetic oligonucleotide
ttcgatagatcgcagtaaacacaagggcta

SEQ ID NO: 398084 - DNA, 30 bp, Artificial Sequence
  Synthetic oligonucleotide
ccccctcgacaactgtactattaagggcta

SEQ ID NO: 398085 - DNA, 30 bp, Artificial Sequence
  Synthetic oligonucleotide
gtttacggtttcatttcggtttgagggcta

SEQ ID NO: 398086 - DNA, 30 bp, Artificial Sequence
  Synthetic oligonucleotide
agactacgggcctggacagggatagggcta

SEQ ID NO: 398087 - DNA, 30 bp, Artificial Sequence
  Synthetic oligonucleotide
gtgaactcaaatgttccgggtgacgggcta

SEQ ID NO: 398088 - DNA, 30 bp, Artificial Sequence
  Synthetic oligonucleotide
ttatatatatgggccgggcataaggggcta

SEQ ID NO: 398089 - DNA, 30 bp, Artificial Sequence
  Synthetic oligonucleotide
cagccctcgtggccgggcacccaggggcta

SEQ ID NO: 398090 - DNA, 30 bp, Artificial Sequence
  Synthetic oligonucleotide
cggagcgcttcattttgctcacgggggcta

SEQ ID NO: 398091 - DNA, 30 bp, Artificial Sequence
  Synthetic oligonucleotide
tcgggggaactgccagtcttgcgggggcta

SEQ ID NO: 398092 - DNA, 30 bp, Artificial Sequence
  Synthetic oligonucleotide
tggggcgaatagtattggtcgaatgggcta

SEQ ID NO: 398093 - DNA, 30 bp, Artificial Sequence
  Synthetic oligonucleotide
atctatttgtgcgggcggtttaaatggcta

SEQ ID NO: 398094 - DNA, 30 bp, Artificial Sequence
  Synthetic oligonucleotide
aagctaatagtagtgcttggaccatggcta

SEQ ID NO: 398095 - DNA, 30 bp, Artificial Sequence
  Synthetic oligonucleotide
tctaacgatttatttattcttgtctggcta

SEQ ID NO: 398096 - DNA, 30 bp, Artificial Sequence
  Synthetic oligonucleotide
gtagcactgcagtcatgggtttagtggcta

SEQ ID NO: 398097 - DNA, 30 bp, Artificial Sequence
  Synthetic oligonucleotide
ttctgtctgccgccagtcccaaggtggcta

SEQ ID NO: 398098 - DNA, 30 bp, Artificial Sequence
  Synthetic oligonucleotide
attaggtccccgcgacagtgccattggcta

SEQ ID NO: 398099 - DNA, 30 bp, Artificial Sequence
  Synthetic oligonucleotide
agtagttaaagaccgtgcgtttattggcta

SEQ ID NO: 398100 - DNA, 30 bp, Artificial Sequence
  Synthetic oligonucleotide
gccctactagcattctcccgggtttggcta

SEQ ID NO: 398101 - DNA, 30 bp, Artificial Sequence
  Synthetic oligonucleotide
tatctcttcacaatgtcactcagaatgcta

SEQ ID NO: 398102 - DNA, 30 bp, Artificial Sequence
  Synthetic oligonucleotide
gctaggggtagtttggtctaaaacatgcta

SEQ ID NO: 398103 - DNA, 30 bp, Artificial Sequence
  Synthetic oligonucleotide
gctccaggccacgttttcgtacacatgcta

SEQ ID NO: 398104 - DNA, 30 bp, Artificial Sequence
  Synthetic oligonucleotide
aggcggtaaataagttcacttagcatgcta

SEQ ID NO: 398105 - DNA, 30 bp, Artificial Sequence
  Synthetic oligonucleotide
agtatctacgacccgcacatccagatgcta

SEQ ID NO: 398106 - DNA, 30 bp, Artificial Sequence
  Synthetic oligonucleotide
gggatagtacccattaggatttggatgcta

SEQ ID NO: 398107 - DNA, 30 bp, Artificial Sequence
  Synthetic oligonucleotide
aaagtgcaccttcactatctttctatgcta

SEQ ID NO: 398108 - DNA, 30 bp, Artificial Sequence
  Synthetic oligonucleotide
tataaagaagcaccgggttcgatactgcta

SEQ ID NO: 398109 - DNA, 30 bp, Artificial Sequence
  Synthetic oligonucleotide
cctcttgtgtggagtaggtcatagctgcta

SEQ ID NO: 398110 - DNA, 30 bp, Artificial Sequence
  Synthetic oligonucleotide
gatcattaatcgcccgattaggcgctgcta

SEQ ID NO: 398111 - DNA, 30 bp, Artificial Sequence
  Synthetic oligonucleotide
cttgtattgggaggcgttccctatctgcta

SEQ ID NO: 398112 - DNA, 30 bp, Artificial Sequence
  Synthetic oligonucleotide
agttctccttgatacgttattagtctgcta

SEQ ID NO: 398113 - DNA, 30 bp, Artificial Sequence
  Synthetic oligonucleotide
gttgtcaccccatcggggtagggtctgcta

SEQ ID NO: 398114 - DNA, 30 bp, Artificial Sequence
  Synthetic oligonucleotide
tagatgtgttttgtgccgatctccgtgcta

SEQ ID NO: 398115 - DNA, 30 bp, Artificial Sequence
  Synthetic oligonucleotide
attcctttcacgtatataggcccggtgcta

SEQ ID NO: 398116 - DNA, 30 bp, Artificial Sequence
  Synthetic oligonucleotide
ccgtattttaacggctgtgtctaattgcta

SEQ ID NO: 398117 - DNA, 30 bp, Artificial Sequence
  Synthetic oligonucleotide
aatgtacttttctgttcttcctgattgcta

SEQ ID NO: 398118 - DNA, 30 bp, Artificial Sequence
  Synthetic oligonucleotide
ttgactgcttcaataacctatttattgcta

SEQ ID NO: 398119 - DNA, 30 bp, Artificial Sequence
  Synthetic oligonucleotide
gggatggggaaagcatagactcacttgcta

SEQ ID NO: 398120 - DNA, 30 bp, Artificial Sequence
  Synthetic oligonucleotide
taacgcagtctattatacggaatcttgcta

SEQ ID NO: 398121 - DNA, 30 bp, Artificial Sequence
  Synthetic oligonucleotide
gccgaacgattactgtcgcgcaggttgcta

SEQ ID NO: 398122 - DNA, 30 bp, Artificial Sequence
  Synthetic oligonucleotide
atctataggcgataaaccctggggttgcta

SEQ ID NO: 398123 - DNA, 30 bp, Artificial Sequence
  Synthetic oligonucleotide
cttcgactgaagtgatttgggacaaatcta

SEQ ID NO: 398124 - DNA, 30 bp, Artificial Sequence
  Synthetic oligonucleotide
gtaattgagaggctatcgaatgcgaatcta

SEQ ID NO: 398125 - DNA, 30 bp, Artificial Sequence
  Synthetic oligonucleotide
tactcggtcctaagtccggtggggaatcta

SEQ ID NO: 398126 - DNA, 30 bp, Artificial Sequence
  Synthetic oligonucleotide
ccgtaaatgtttcattctgcagtgaatcta

SEQ ID NO: 398127 - DNA, 30 bp, Artificial Sequence
  Synthetic oligonucleotide
acgtcgatactctatctggtagataatcta

SEQ ID NO: 398128 - DNA, 30 bp, Artificial Sequence
  Synthetic oligonucleotide
tccggacttactatttcaatctgtaatcta

SEQ ID NO: 398129 - DNA, 30 bp, Artificial Sequence
  Synthetic oligonucleotide
gcgcagatactaataatcggagaccatcta

SEQ ID NO: 398130 - DNA, 30 bp, Artificial Sequence
  Synthetic oligonucleotide
aactgtcgtagtcgatcgctctcccatcta

SEQ ID NO: 398131 - DNA, 30 bp, Artificial Sequence
  Synthetic oligonucleotide
cgacttcactcttgcttattgtcgcatcta

SEQ ID NO: 398132 - DNA, 30 bp, Artificial Sequence
  Synthetic oligonucleotide
aatagaatgtagtacccgcaaaggcatcta

SEQ ID NO: 398133 - DNA, 30 bp, Artificial Sequence
  Synthetic oligonucleotide
caagtaagttctacgagaccttggcatcta

SEQ ID NO: 398134 - DNA, 30 bp, Artificial Sequence
  Synthetic oligonucleotide
atttgtacttctatcgaagtaggtcatcta

SEQ ID NO: 398135 - DNA, 30 bp, Artificial Sequence
  Synthetic oligonucleotide
cgtcgatccagcccacttaactttcatcta

SEQ ID NO: 398136 - DNA, 30 bp, Artificial Sequence
  Synthetic oligonucleotide
gccggtcttgcaaatattgttcaagatcta

SEQ ID NO: 398137 - DNA, 30 bp, Artificial Sequence
  Synthetic oligonucleotide
ccggctaatttgttgttaagcatagatcta

SEQ ID NO: 398138 - DNA, 30 bp, Artificial Sequence
  Synthetic oligonucleotide
ttggatttgcccgcccttaaatctgatcta

SEQ ID NO: 398139 - DNA, 30 bp, Artificial Sequence
  Synthetic oligonucleotide
gccctgtttcctcacagccaggttgatcta

SEQ ID NO: 398140 - DNA, 30 bp, Artificial Sequence
  Synthetic oligonucleotide
gttgggattccgcttgaattcgaatatcta

SEQ ID NO: 398141 - DNA, 30 bp, Artificial Sequence
  Synthetic oligonucleotide
atttttacgtccatgttcgcccgatatcta

SEQ ID NO: 398142 - DNA, 30 bp, Artificial Sequence
  Synthetic oligonucleotide
gctgacgtagaacacgggttgatatatcta

SEQ ID NO: 398143 - DNA, 30 bp, Artificial Sequence
  Synthetic oligonucleotide
aggtcctatgagaatccatgtgggtatcta

SEQ ID NO: 398144 - DNA, 30 bp, Artificial Sequence
  Synthetic oligonucleotide
tgggcgagaaattgtttatctctgtatcta

SEQ ID NO: 398145 - DNA, 30 bp, Artificial Sequence
  Synthetic oligonucleotide
caaactacttgaaaaggcgttttgtatcta

SEQ ID NO: 398146 - DNA, 30 bp, Artificial Sequence
  Synthetic oligonucleotide
gataaataatcggttggatgatcttatcta

SEQ ID NO: 398147 - DNA, 30 bp, Artificial Sequence
  Synthetic oligonucleotide
gcctgggacaaaagttctacaagttatcta

SEQ ID NO: 398148 - DNA, 30 bp, Artificial Sequence
  Synthetic oligonucleotide
tgttctacatgcaggtgccgtctttatcta

SEQ ID NO: 398149 - DNA, 30 bp, Artificial Sequence
  Synthetic oligonucleotide
tgagtaatggagtatctaggttaaactcta

SEQ ID NO: 398150 - DNA, 30 bp, Artificial Sequence
  Synthetic oligonucleotide
cccgaatctcgttacgttcgagacactcta

SEQ ID NO: 398151 - DNA, 30 bp, Artificial Sequence
  Synthetic oligonucleotide
atgcgacttagctgctttattctcactcta

SEQ ID NO: 398152 - DNA, 30 bp, Artificial Sequence
  Synthetic oligonucleotide
aatggtctgctcctttgtaaacagactcta

SEQ ID NO: 398153 - DNA, 30 bp, Artificial Sequence
  Synthetic oligonucleotide
cccccgacgaccctctacaaggtgactcta

SEQ ID NO: 398154 - DNA, 30 bp, Artificial Sequence
  Synthetic oligonucleotide
ccggcggtcataggggcgccattgactcta

SEQ ID NO: 398155 - DNA, 30 bp, Artificial Sequence
  Synthetic oligonucleotide
ttatgagaacccttcaagtggtctactcta

SEQ ID NO: 398156 - DNA, 29 bp, Artificial Sequence
  Synthetic oligonucleotide
agctgtaatcaggccactttagtactcta

SEQ ID NO: 398157 - DNA, 30 bp, Artificial Sequence
  Synthetic oligonucleotide
aggttgccatcaagcgacttctttactcta

SEQ ID NO: 398158 - DNA, 29 bp, Artificial Sequence
  Synthetic oligonucleotide
ttgttaaagatggcactcacgcacctcta

SEQ ID NO: 398159 - DNA, 30 bp, Artificial Sequence
  Synthetic oligonucleotide
ccatcgttagttgatacctaggcacctcta

SEQ ID NO: 398160 - DNA, 30 bp, Artificial Sequence
  Synthetic oligonucleotide
gtcatcgggatactcaacacgggacctcta

SEQ ID NO: 398161 - DNA, 30 bp, Artificial Sequence
  Synthetic oligonucleotide
aatgttattggggtcttccggatccctcta

SEQ ID NO: 398162 - DNA, 30 bp, Artificial Sequence
  Synthetic oligonucleotide
catactgggttccggattggaaagcctcta

SEQ ID NO: 398163 - DNA, 30 bp, Artificial Sequence
  Synthetic oligonucleotide
tgctcagggtgccaatccgtgcggcctcta

SEQ ID NO: 398164 - DNA, 30 bp, Artificial Sequence
  Synthetic oligonucleotide
tcgaacgcgctacaattggaaaatcctcta

SEQ ID NO: 398165 - DNA, 30 bp, Artificial Sequence
  Synthetic oligonucleotide
cctaagcataggtatgtgtataaagctcta

SEQ ID NO: 398166 - DNA, 30 bp, Artificial Sequence
  Synthetic oligonucleotide
gattgaactccttcgagatctcgagctcta

SEQ ID NO: 398167 - DNA, 30 bp, Artificial Sequence
  Synthetic oligonucleotide
cacgctgcactaagcggttgtttagctcta

SEQ ID NO: 398168 - DNA, 30 bp, Artificial Sequence
  Synthetic oligonucleotide
gggtaaatttattatctattttaggctcta

SEQ ID NO: 398169 - DNA, 30 bp, Artificial Sequence
  Synthetic oligonucleotide
gatggcttctcttacgtccgacctgctcta

SEQ ID NO: 398170 - DNA, 30 bp, Artificial Sequence
  Synthetic oligonucleotide
ggaaccatatttgctttaagattctctcta

SEQ ID NO: 398171 - DNA, 30 bp, Artificial Sequence
  Synthetic oligonucleotide
cttgccaagtgatcaatgtaactttctcta

SEQ ID NO: 398172 - DNA, 30 bp, Artificial Sequence
  Synthetic oligonucleotide
tgtgtgtagaagtagctggtgagaagtcta

SEQ ID NO: 398173 - DNA, 30 bp, Artificial Sequence
  Synthetic oligonucleotide
tttataggttcggaataaataagcagtcta

SEQ ID NO: 398174 - DNA, 30 bp, Artificial Sequence
  Synthetic oligonucleotide
gttcaaaacctcggtgcgttattcagtcta

SEQ ID NO: 398175 - DNA, 30 bp, Artificial Sequence
  Synthetic oligonucleotide
tttgggtgtcaatgtaatcacgagagtcta

SEQ ID NO: 398176 - DNA, 30 bp, Artificial Sequence
  Synthetic oligonucleotide
actcgccgccactagtcgtgagcgagtcta

SEQ ID NO: 398177 - DNA, 30 bp, Artificial Sequence
  Synthetic oligonucleotide
tgctgacccttctaggggggagggagtcta

SEQ ID NO: 398178 - DNA, 30 bp, Artificial Sequence
  Synthetic oligonucleotide
agtgaaacagcttttcttgatcatagtcta

SEQ ID NO: 398179 - DNA, 30 bp, Artificial Sequence
  Synthetic oligonucleotide
aatattcacatgaatgttcatgatagtcta

SEQ ID NO: 398180 - DNA, 30 bp, Artificial Sequence
  Synthetic oligonucleotide
agtaatcccgcgtgtccgttatatagtcta

SEQ ID NO: 398181 - DNA, 30 bp, Artificial Sequence
  Synthetic oligonucleotide
gctgtagtcaacctagtctttcaacgtcta

SEQ ID NO: 398182 - DNA, 30 bp, Artificial Sequence
  Synthetic oligonucleotide
ggatgactattattttaataataacgtcta

SEQ ID NO: 398183 - DNA, 30 bp, Artificial Sequence
  Synthetic oligonucleotide
gtctaaaactgggttagttgaccccgtcta

SEQ ID NO: 398184 - DNA, 30 bp, Artificial Sequence
  Synthetic oligonucleotide
attgatctttgcagggcgatccaaggtcta

SEQ ID NO: 398185 - DNA, 30 bp, Artificial Sequence
  Synthetic oligonucleotide
aacgttgacacgataagtctcgcaggtcta

SEQ ID NO: 398186 - DNA, 30 bp, Artificial Sequence
  Synthetic oligonucleotide
gaacgtaaggaacctccataatgaggtcta

SEQ ID NO: 398187 - DNA, 30 bp, Artificial Sequence
  Synthetic oligonucleotide
gtataccgtaatctgcgtttgaagggtcta

SEQ ID NO: 398188 - DNA, 30 bp, Artificial Sequence
  Synthetic oligonucleotide
ggacgagctttttttccatgggatggtcta

SEQ ID NO: 398189 - DNA, 30 bp, Artificial Sequence
  Synthetic oligonucleotide
gtatcctggatttagcatacttttggtcta

SEQ ID NO: 398190 - DNA, 30 bp, Artificial Sequence
  Synthetic oligonucleotide
tgcatggatagtcacgcatgattatgtcta

SEQ ID NO: 398191 - DNA, 30 bp, Artificial Sequence
  Synthetic oligonucleotide
aaaacgcatgttacggcgaaggagtgtcta

SEQ ID NO: 398192 - DNA, 30 bp, Artificial Sequence
  Synthetic oligonucleotide
acccatccagacatctggataaggtgtcta

SEQ ID NO: 398193 - DNA, 30 bp, Artificial Sequence
  Synthetic oligonucleotide
ttggacaggtccttcctgcgtttaattcta

SEQ ID NO: 398194 - DNA, 30 bp, Artificial Sequence
  Synthetic oligonucleotide
taatatgttgacttacttctcgtcattcta

SEQ ID NO: 398195 - DNA, 30 bp, Artificial Sequence
  Synthetic oligonucleotide
gatcggtctatagaagattaagagattcta

SEQ ID NO: 398196 - DNA, 30 bp, Artificial Sequence
  Synthetic oligonucleotide
tgatataactgccgaggttaagagattcta

SEQ ID NO: 398197 - DNA, 30 bp, Artificial Sequence
  Synthetic oligonucleotide
ataaatggtgcaggagtttgagatattcta

SEQ ID NO: 398198 - DNA, 30 bp, Artificial Sequence
  Synthetic oligonucleotide
tgcgatagagcatgaatcggtgatattcta

SEQ ID NO: 398199 - DNA, 30 bp, Artificial Sequence
  Synthetic oligonucleotide
cgtgctccgaacatttttctgtctattcta

SEQ ID NO: 398200 - DNA, 30 bp, Artificial Sequence
  Synthetic oligonucleotide
gtgacgaattgttatcggaatgttattcta

SEQ ID NO: 398201 - DNA, 30 bp, Artificial Sequence
  Synthetic oligonucleotide
gctctggggcaaaactaatgtacacttcta

SEQ ID NO: 398202 - DNA, 30 bp, Artificial Sequence
  Synthetic oligonucleotide
gctaagtttctgctgcagagtagccttcta

SEQ ID NO: 398203 - DNA, 30 bp, Artificial Sequence
  Synthetic oligonucleotide
agtccagaagcgggtcgaggagagcttcta

SEQ ID NO: 398204 - DNA, 30 bp, Artificial Sequence
  Synthetic oligonucleotide
ttattggtattaaaaaccaaatagcttcta

SEQ ID NO: 398205 - DNA, 30 bp, Artificial Sequence
  Synthetic oligonucleotide
gaggtcttgcaccaacagcgagatcttcta

SEQ ID NO: 398206 - DNA, 30 bp, Artificial Sequence
  Synthetic oligonucleotide
ggcaagctgttcctggagtgttttcttcta

SEQ ID NO: 398207 - DNA, 30 bp, Artificial Sequence
  Synthetic oligonucleotide
cgtgactattaccagtagtttcgagttcta

SEQ ID NO: 398208 - DNA, 30 bp, Artificial Sequence
  Synthetic oligonucleotide
aaatgatacccaactattattagcgttcta

SEQ ID NO: 398209 - DNA, 30 bp, Artificial Sequence
  Synthetic oligonucleotide
cctgcccgcatcggcccaccaggggttcta

SEQ ID NO: 398210 - DNA, 30 bp, Artificial Sequence
  Synthetic oligonucleotide
gtccggctggacggggcgctgggggttcta

SEQ ID NO: 398211 - DNA, 30 bp, Artificial Sequence
  Synthetic oligonucleotide
agtagcagaagacagtcgccttgggttcta

SEQ ID NO: 398212 - DNA, 30 bp, Artificial Sequence
  Synthetic oligonucleotide
gttgcccttcgacttgacgcggtggttcta

SEQ ID NO: 398213 - DNA, 30 bp, Artificial Sequence
  Synthetic oligonucleotide
gtaagcttttagggcgctgagtgtgttcta

SEQ ID NO: 398214 - DNA, 30 bp, Artificial Sequence
  Synthetic oligonucleotide
ccatgtgagtgatcagttgtatcatttcta

SEQ ID NO: 398215 - DNA, 30 bp, Artificial Sequence
  Synthetic oligonucleotide
ggcggtattctcacgtcacgggtatttcta

SEQ ID NO: 398216 - DNA, 30 bp, Artificial Sequence
  Synthetic oligonucleotide
gcacatgctgatagaagtattaggtttcta

SEQ ID NO: 398217 - DNA, 30 bp, Artificial Sequence
  Synthetic oligonucleotide
cgccagcggtacgtacgcgttcattttcta

SEQ ID NO: 398218 - DNA, 30 bp, Artificial Sequence
  Synthetic oligonucleotide
taagttccttcgcgcccctactcttttcta

SEQ ID NO: 398219 - DNA, 30 bp, Artificial Sequence
  Synthetic oligonucleotide
gaaacgcgcatcgtggagactagttttcta

SEQ ID NO: 398220 - DNA, 30 bp, Artificial Sequence
  Synthetic oligonucleotide
acagtccctattcttggggttaaaaaagta

SEQ ID NO: 398221 - DNA, 30 bp, Artificial Sequence
  Synthetic oligonucleotide
aaatccggaacgtcgccatcaggaaaagta

SEQ ID NO: 398222 - DNA, 30 bp, Artificial Sequence
  Synthetic oligonucleotide
atttggtagtttacgccttgcgtaaaagta

SEQ ID NO: 398223 - DNA, 30 bp, Artificial Sequence
  Synthetic oligonucleotide
tcttggttgggttggctcacggacaaagta

SEQ ID NO: 398224 - DNA, 30 bp, Artificial Sequence
  Synthetic oligonucleotide
tatatgttactcttaatagtcagcaaagta

SEQ ID NO: 398225 - DNA, 30 bp, Artificial Sequence
  Synthetic oligonucleotide
cttcactttcacactcaagatctcaaagta

SEQ ID NO: 398226 - DNA, 30 bp, Artificial Sequence
  Synthetic oligonucleotide
gtcatcttatataaatccagacagaaagta

SEQ ID NO: 398227 - DNA, 30 bp, Artificial Sequence
  Synthetic oligonucleotide
agtaatagctcactgctctgggttaaagta

SEQ ID NO: 398228 - DNA, 30 bp, Artificial Sequence
  Synthetic oligonucleotide
aaagtcagttcggccccagcaccacaagta

SEQ ID NO: 398229 - DNA, 30 bp, Artificial Sequence
  Synthetic oligonucleotide
tgtagggatttgctctgggaatcccaagta

SEQ ID NO: 398230 - DNA, 30 bp, Artificial Sequence
  Synthetic oligonucleotide
cctgtcggtggaacatttactggccaagta

SEQ ID NO: 398231 - DNA, 31 bp, Artificial Sequence
  Synthetic oligonucleotide
tagttacgcacatcaggttttttgccaagta

SEQ ID NO: 398232 - DNA, 30 bp, Artificial Sequence
  Synthetic oligonucleotide
ctcatcatgagaccatgcggtttccaagta

SEQ ID NO: 398233 - DNA, 30 bp, Artificial Sequence
  Synthetic oligonucleotide
taaacctgcagcgcttcgtagaagcaagta

SEQ ID NO: 398234 - DNA, 30 bp, Artificial Sequence
  Synthetic oligonucleotide
tacccaatgtgtatacgaggccaagaagta

SEQ ID NO: 398235 - DNA, 30 bp, Artificial Sequence
  Synthetic oligonucleotide
gaggttacatcgtttcacagattagaagta

SEQ ID NO: 398236 - DNA, 30 bp, Artificial Sequence
  Synthetic oligonucleotide
tggtatatgaaaattagtctgaacgaagta

SEQ ID NO: 398237 - DNA, 30 bp, Artificial Sequence
  Synthetic oligonucleotide
ggagtataaagccgttttgattacgaagta

SEQ ID NO: 398238 - DNA, 30 bp, Artificial Sequence
  Synthetic oligonucleotide
tatccatagtaactatatactacggaagta

SEQ ID NO: 398239 - DNA, 30 bp, Artificial Sequence
  Synthetic oligonucleotide
caacacccactctggtttatagtggaagta

SEQ ID NO: 398240 - DNA, 30 bp, Artificial Sequence
  Synthetic oligonucleotide
tggtggactcgacgcaaccttagtgaagta

SEQ ID NO: 398241 - DNA, 30 bp, Artificial Sequence
  Synthetic oligonucleotide
gctcgtgatccttgacaattcaaataagta

SEQ ID NO: 398242 - DNA, 30 bp, Artificial Sequence
  Synthetic oligonucleotide
actcttttctaacgcgtcgcgatataagta

SEQ ID NO: 398243 - DNA, 30 bp, Artificial Sequence
  Synthetic oligonucleotide
cgtacgtctgctccttgatgagactaagta

SEQ ID NO: 398244 - DNA, 30 bp, Artificial Sequence
  Synthetic oligonucleotide
ggtagggtccaaccgggtagcccctaagta

SEQ ID NO: 398245 - DNA, 30 bp, Artificial Sequence
  Synthetic oligonucleotide
gaatataggtagtaggggggttcctaagta

SEQ ID NO: 398246 - DNA, 30 bp, Artificial Sequence
  Synthetic oligonucleotide
cggcaaaggaattagaattcggtgtaagta

SEQ ID NO: 398247 - DNA, 30 bp, Artificial Sequence
  Synthetic oligonucleotide
gatcggaaagctgttatgtgtcattaagta

SEQ ID NO: 398248 - DNA, 30 bp, Artificial Sequence
  Synthetic oligonucleotide
ttaaaatcagatatgtcgcatgcttaagta

SEQ ID NO: 398249 - DNA, 30 bp, Artificial Sequence
  Synthetic oligonucleotide
acatggacatggtgtgatacgtcttaagta

SEQ ID NO: 398250 - DNA, 30 bp, Artificial Sequence
  Synthetic oligonucleotide
agtgcagcagcgaccgagttcgtttaagta

SEQ ID NO: 398251 - DNA, 30 bp, Artificial Sequence
  Synthetic oligonucleotide
gataatagaatggcgtagcgaagaacagta

SEQ ID NO: 398252 - DNA, 30 bp, Artificial Sequence
  Synthetic oligonucleotide
agttcacccggaagaaggccggacacagta

SEQ ID NO: 398253 - DNA, 30 bp, Artificial Sequence
  Synthetic oligonucleotide
cttcttcgtcatctcatggtttccacagta

SEQ ID NO: 398254 - DNA, 30 bp, Artificial Sequence
  Synthetic oligonucleotide
caacttggctgcgttgaagagagcacagta

SEQ ID NO: 398255 - DNA, 30 bp, Artificial Sequence
  Synthetic oligonucleotide
gtcaaatagccaggtcccagcttcacagta

SEQ ID NO: 398256 - DNA, 30 bp, Artificial Sequence
  Synthetic oligonucleotide
ccattgtatgtcggacagggtaatacagta

SEQ ID NO: 398257 - DNA, 30 bp, Artificial Sequence
  Synthetic oligonucleotide
ccttaatgatcaacctcagggcatacagta

SEQ ID NO: 398258 - DNA, 30 bp, Artificial Sequence
  Synthetic oligonucleotide
gttagccctgtactgtatcgtgatacagta

SEQ ID NO: 398259 - DNA, 30 bp, Artificial Sequence
  Synthetic oligonucleotide
atcgctagcctatcagatcgggttacagta

SEQ ID NO: 398260 - DNA, 30 bp, Artificial Sequence
  Synthetic oligonucleotide
ccccctttccagctaattcgctttacagta

SEQ ID NO: 398261 - DNA, 30 bp, Artificial Sequence
  Synthetic oligonucleotide
cattttaggcccctaggggaatgaccagta

SEQ ID NO: 398262 - DNA, 30 bp, Artificial Sequence
  Synthetic oligonucleotide
cttctcttgttccggttatctgcgccagta

SEQ ID NO: 398263 - DNA, 30 bp, Artificial Sequence
  Synthetic oligonucleotide
attcgcgtaagaacatgcgatcatccagta

SEQ ID NO: 398264 - DNA, 30 bp, Artificial Sequence
  Synthetic oligonucleotide
tattgttgcgctattggtggaaccgcagta

SEQ ID NO: 398265 - DNA, 30 bp, Artificial Sequence
  Synthetic oligonucleotide
tctttcggctatacgataaggcgcgcagta

SEQ ID NO: 398266 - DNA, 30 bp, Artificial Sequence
  Synthetic oligonucleotide
gtatgcacggcccagctcctttgggcagta

SEQ ID NO: 398267 - DNA, 30 bp, Artificial Sequence
  Synthetic oligonucleotide
atttaaggatcaggcgttgtcatggcagta

SEQ ID NO: 398268 - DNA, 30 bp, Artificial Sequence
  Synthetic oligonucleotide
atcgaggtacttcaatcgaacgactcagta

SEQ ID NO: 398269 - DNA, 30 bp, Artificial Sequence
  Synthetic oligonucleotide
ataatagtggcatgtccctgtccgtcagta

SEQ ID NO: 398270 - DNA, 30 bp, Artificial Sequence
  Synthetic oligonucleotide
gtctatattgaacacaccaggacttcagta

SEQ ID NO: 398271 - DNA, 30 bp, Artificial Sequence
  Synthetic oligonucleotide
ttcaccggattttactgaggacgttcagta

SEQ ID NO: 398272 - DNA, 30 bp, Artificial Sequence
  Synthetic oligonucleotide
ccgtgtgttctggcaaactgacgttcagta

SEQ ID NO: 398273 - DNA, 30 bp, Artificial Sequence
  Synthetic oligonucleotide
gtatatgtgcgccgacgagagctaagagta

SEQ ID NO: 398274 - DNA, 30 bp, Artificial Sequence
  Synthetic oligonucleotide
acattaatatagcacgcgcctatcagagta

SEQ ID NO: 398275 - DNA, 30 bp, Artificial Sequence
  Synthetic oligonucleotide
gaaatctatgggctcgcacaaccgagagta

SEQ ID NO: 398276 - DNA, 30 bp, Artificial Sequence
  Synthetic oligonucleotide
cccggcatcagctatcgcatgctgagagta

SEQ ID NO: 398277 - DNA, 30 bp, Artificial Sequence
  Synthetic oligonucleotide
cgaagctacgtggtgctgcgtttgagagta

SEQ ID NO: 398278 - DNA, 30 bp, Artificial Sequence
  Synthetic oligonucleotide
ggctggacaccgattcgacgacctagagta

SEQ ID NO: 398279 - DNA, 30 bp, Artificial Sequence
  Synthetic oligonucleotide
agagggacgcttagcgataacattagagta

SEQ ID NO: 398280 - DNA, 30 bp, Artificial Sequence
  Synthetic oligonucleotide
aatctagaaccattagtgcgaatacgagta

SEQ ID NO: 398281 - DNA, 30 bp, Artificial Sequence
  Synthetic oligonucleotide
caacctacatggtagttttatctacgagta

SEQ ID NO: 398282 - DNA, 30 bp, Artificial Sequence
  Synthetic oligonucleotide
taaggttgccggttcggttgcacgcgagta

SEQ ID NO: 398283 - DNA, 30 bp, Artificial Sequence
  Synthetic oligonucleotide
cgcaagttgaccgaaattagcgttcgagta

SEQ ID NO: 398284 - DNA, 30 bp, Artificial Sequence
  Synthetic oligonucleotide
cctcctgaaacattgtctacctgaggagta

SEQ ID NO: 398285 - DNA, 30 bp, Artificial Sequence
  Synthetic oligonucleotide
tcgttatcccccaccgaatgttacggagta

SEQ ID NO: 398286 - DNA, 30 bp, Artificial Sequence
  Synthetic oligonucleotide
ctcaaagggatcggtcagtcgtgcggagta

SEQ ID NO: 398287 - DNA, 30 bp, Artificial Sequence
  Synthetic oligonucleotide
tcggattacggggcggtttacctcggagta

SEQ ID NO: 398288 - DNA, 30 bp, Artificial Sequence
  Synthetic oligonucleotide
gccacggggtgctctagcatagagggagta

SEQ ID NO: 398289 - DNA, 30 bp, Artificial Sequence
  Synthetic oligonucleotide
ccgatttgcttactattccaccctggagta

SEQ ID NO: 398290 - DNA, 30 bp, Artificial Sequence
  Synthetic oligonucleotide
ccactgtaaagaaaacacgacgctggagta

SEQ ID NO: 398291 - DNA, 30 bp, Artificial Sequence
  Synthetic oligonucleotide
gctgtagccggggggccctgtttatgagta

SEQ ID NO: 398292 - DNA, 30 bp, Artificial Sequence
  Synthetic oligonucleotide
ttagcgacgcgggatacaaaaatgtgagta

SEQ ID NO: 398293 - DNA, 30 bp, Artificial Sequence
  Synthetic oligonucleotide
cttaatgggcagacacaaccgctgtgagta

SEQ ID NO: 398294 - DNA, 30 bp, Artificial Sequence
  Synthetic oligonucleotide
aatgggtttattaagcgataccgttgagta

SEQ ID NO: 398295 - DNA, 30 bp, Artificial Sequence
  Synthetic oligonucleotide
gtaaattatgcacgtgccgacggttgagta

SEQ ID NO: 398296 - DNA, 30 bp, Artificial Sequence
  Synthetic oligonucleotide
tgtacgccgatcaacatgtattgttgagta

SEQ ID NO: 398297 - DNA, 30 bp, Artificial Sequence
  Synthetic oligonucleotide
acgcagtggtacctgaggcacgtttgagta

SEQ ID NO: 398298 - DNA, 30 bp, Artificial Sequence
  Synthetic oligonucleotide
ctttgacgagatgagtttatacgaatagta

SEQ ID NO: 398299 - DNA, 30 bp, Artificial Sequence
  Synthetic oligonucleotide
atgccgtattttgaagtcctcaacatagta

SEQ ID NO: 398300 - DNA, 30 bp, Artificial Sequence
  Synthetic oligonucleotide
ggggcctcccatcgtgtgtttaacatagta

SEQ ID NO: 398301 - DNA, 30 bp, Artificial Sequence
  Synthetic oligonucleotide
tgactgacgcaggagcattatgccatagta

SEQ ID NO: 398302 - DNA, 30 bp, Artificial Sequence
  Synthetic oligonucleotide
agtcgtagaacccgaggtctttatatagta

SEQ ID NO: 398303 - DNA, 30 bp, Artificial Sequence
  Synthetic oligonucleotide
aacccgggagtggagttacgaactatagta

SEQ ID NO: 398304 - DNA, 30 bp, Artificial Sequence
  Synthetic oligonucleotide
tagcgtccgtaccgcaccaaggttatagta

SEQ ID NO: 398305 - DNA, 30 bp, Artificial Sequence
  Synthetic oligonucleotide
atcgtttacggggactatgatcgactagta

SEQ ID NO: 398306 - DNA, 30 bp, Artificial Sequence
  Synthetic oligonucleotide
aacttggcagccaacatactacccctagta

SEQ ID NO: 398307 - DNA, 30 bp, Artificial Sequence
  Synthetic oligonucleotide
ttggcaagtcaaacttgtccttccctagta

SEQ ID NO: 398308 - DNA, 30 bp, Artificial Sequence
  Synthetic oligonucleotide
tacgagtcatgccaataaagttccctagta

SEQ ID NO: 398309 - DNA, 30 bp, Artificial Sequence
  Synthetic oligonucleotide
aaagcccctccagtaggagggtagctagta

SEQ ID NO: 398310 - DNA, 30 bp, Artificial Sequence
  Synthetic oligonucleotide
ctgccaatggccgatagcacgaggctagta

SEQ ID NO: 398311 - DNA, 30 bp, Artificial Sequence
  Synthetic oligonucleotide
cctctcagggaccccgtagaagatctagta

SEQ ID NO: 398312 - DNA, 30 bp, Artificial Sequence
  Synthetic oligonucleotide
ggtccctccgacgaacgtcagcctctagta

SEQ ID NO: 398313 - DNA, 30 bp, Artificial Sequence
  Synthetic oligonucleotide
gcatatacgtggcaagtacgtgaagtagta

SEQ ID NO: 398314 - DNA, 30 bp, Artificial Sequence
  Synthetic oligonucleotide
gggcgccccaatgggagcgaccgagtagta

SEQ ID NO: 398315 - DNA, 30 bp, Artificial Sequence
  Synthetic oligonucleotide
actagtgggagtaatcttaaattggtagta

SEQ ID NO: 398316 - DNA, 30 bp, Artificial Sequence
  Synthetic oligonucleotide
atggacgctatgattaccgcgcatgtagta

SEQ ID NO: 398317 - DNA, 30 bp, Artificial Sequence
  Synthetic oligonucleotide
gggatttatagaatcgtggaatatgtagta

SEQ ID NO: 398318 - DNA, 30 bp, Artificial Sequence
  Synthetic oligonucleotide
gggaaagtcgcaaggataacacttgtagta

SEQ ID NO: 398319 - DNA, 30 bp, Artificial Sequence
  Synthetic oligonucleotide
gaagtttagagtttgcgtacgggattagta

SEQ ID NO: 398320 - DNA, 30 bp, Artificial Sequence
  Synthetic oligonucleotide
tcttagcgttgttgcggcgcgtgcttagta

SEQ ID NO: 398321 - DNA, 30 bp, Artificial Sequence
  Synthetic oligonucleotide
gtcattggtttaaggcatggggggttagta

SEQ ID NO: 398322 - DNA, 30 bp, Artificial Sequence
  Synthetic oligonucleotide
ccgactcctgtattttatggtcatttagta

SEQ ID NO: 398323 - DNA, 30 bp, Artificial Sequence
  Synthetic oligonucleotide
aagtccccccttgtccccttgcctttagta

SEQ ID NO: 398324 - DNA, 30 bp, Artificial Sequence
  Synthetic oligonucleotide
gctgtatatccgaaccacggcattttagta

SEQ ID NO: 398325 - DNA, 30 bp, Artificial Sequence
  Synthetic oligonucleotide
gacctgcttgtccatgaagaacttttagta

SEQ ID NO: 398326 - DNA, 30 bp, Artificial Sequence
  Synthetic oligonucleotide
aaagtacagagctctcctggacacaacgta

SEQ ID NO: 398327 - DNA, 30 bp, Artificial Sequence
  Synthetic oligonucleotide
tgattgagcgcgcatgatagcgacaacgta

SEQ ID NO: 398328 - DNA, 30 bp, Artificial Sequence
  Synthetic oligonucleotide
gctttgaactattattggtccgggaacgta

SEQ ID NO: 398329 - DNA, 30 bp, Artificial Sequence
  Synthetic oligonucleotide
tcatcgacccgctagccggagctgaacgta

SEQ ID NO: 398330 - DNA, 30 bp, Artificial Sequence
  Synthetic oligonucleotide
gttgcatgcacattcgtcatttataacgta

SEQ ID NO: 398331 - DNA, 30 bp, Artificial Sequence
  Synthetic oligonucleotide
tatttgtcccccgcgatatttagtaacgta

SEQ ID NO: 398332 - DNA, 30 bp, Artificial Sequence
  Synthetic oligonucleotide
gtattcatgttgtctaagtgagttaacgta

SEQ ID NO: 398333 - DNA, 30 bp, Artificial Sequence
  Synthetic oligonucleotide
gaagtccaggagtcttggtagtcacacgta

SEQ ID NO: 398334 - DNA, 30 bp, Artificial Sequence
  Synthetic oligonucleotide
actacggttctttttaaggtgatccacgta

SEQ ID NO: 398335 - DNA, 30 bp, Artificial Sequence
  Synthetic oligonucleotide
aacatacctatagacttctatctccacgta

SEQ ID NO: 398336 - DNA, 30 bp, Artificial Sequence
  Synthetic oligonucleotide
ggtgacggaccttgtccgaatgagcacgta

SEQ ID NO: 398337 - DNA, 30 bp, Artificial Sequence
  Synthetic oligonucleotide
ataatttggaccacttacggagttcacgta

SEQ ID NO: 398338 - DNA, 30 bp, Artificial Sequence
  Synthetic oligonucleotide
gagctacggaaacggactcccaacgacgta

SEQ ID NO: 398339 - DNA, 30 bp, Artificial Sequence
  Synthetic oligonucleotide
tgctcgatgcacaagctgtccttcgacgta

SEQ ID NO: 398340 - DNA, 30 bp, Artificial Sequence
  Synthetic oligonucleotide
gtacgttaacgctttccggtataggacgta

SEQ ID NO: 398341 - DNA, 30 bp, Artificial Sequence
  Synthetic oligonucleotide
ggacacattgacacgttcgcaatggacgta

SEQ ID NO: 398342 - DNA, 30 bp, Artificial Sequence
  Synthetic oligonucleotide
gagttccagtcatcaccggcactggacgta

SEQ ID NO: 398343 - DNA, 30 bp, Artificial Sequence
  Synthetic oligonucleotide
taatggagagctctacacttgacatacgta

SEQ ID NO: 398344 - DNA, 30 bp, Artificial Sequence
  Synthetic oligonucleotide
agtacgagccgtcaatcaaagccgtacgta

SEQ ID NO: 398345 - DNA, 30 bp, Artificial Sequence
  Synthetic oligonucleotide
tcttacattgggcacacttatgggtacgta

SEQ ID NO: 398346 - DNA, 30 bp, Artificial Sequence
  Synthetic oligonucleotide
ggccggaagcgacatacatcgttgtacgta

SEQ ID NO: 398347 - DNA, 30 bp, Artificial Sequence
  Synthetic oligonucleotide
ctaacgtggtggtaaaagtttttgtacgta

SEQ ID NO: 398348 - DNA, 30 bp, Artificial Sequence
  Synthetic oligonucleotide
gggggtatatctcgcgagctatcaaccgta

SEQ ID NO: 398349 - DNA, 30 bp, Artificial Sequence
  Synthetic oligonucleotide
aattaagcacacggaggggtgctaaccgta

SEQ ID NO: 398350 - DNA, 30 bp, Artificial Sequence
  Synthetic oligonucleotide
tgcctcggggacgtaggaatattaaccgta

SEQ ID NO: 398351 - DNA, 30 bp, Artificial Sequence
  Synthetic oligonucleotide
ttactcttattgagttatcagcggaccgta

SEQ ID NO: 398352 - DNA, 30 bp, Artificial Sequence
  Synthetic oligonucleotide
cctgctcgtttcggtgcgcgagataccgta

SEQ ID NO: 398353 - DNA, 30 bp, Artificial Sequence
  Synthetic oligonucleotide
tcggcatttaggcgtgatagcactaccgta

SEQ ID NO: 398354 - DNA, 30 bp, Artificial Sequence
  Synthetic oligonucleotide
aactttgagcgtcttctctcgggtaccgta

SEQ ID NO: 398355 - DNA, 30 bp, Artificial Sequence
  Synthetic oligonucleotide
aaacatgtcacaactttgttcggacccgta

SEQ ID NO: 398356 - DNA, 30 bp, Artificial Sequence
  Synthetic oligonucleotide
tccggagactgttgtggggcgatccccgta

SEQ ID NO: 398357 - DNA, 30 bp, Artificial Sequence
  Synthetic oligonucleotide
atactagtgtggttaaacagccgagccgta

SEQ ID NO: 398358 - DNA, 30 bp, Artificial Sequence
  Synthetic oligonucleotide
gcaaggttttcggggggtaacacggccgta

SEQ ID NO: 398359 - DNA, 30 bp, Artificial Sequence
  Synthetic oligonucleotide
cggctcgagtatgcaattgtgccggccgta

SEQ ID NO: 398360 - DNA, 30 bp, Artificial Sequence
  Synthetic oligonucleotide
tgggggtattgtacgcggaggttggccgta

SEQ ID NO: 398361 - DNA, 30 bp, Artificial Sequence
  Synthetic oligonucleotide
ctttcagatcgtattcgagttcatgccgta

SEQ ID NO: 398362 - DNA, 30 bp, Artificial Sequence
  Synthetic oligonucleotide
ggaaagcatcagttgtacttcactgccgta

SEQ ID NO: 398363 - DNA, 30 bp, Artificial Sequence
  Synthetic oligonucleotide
aaccacggtgcgacaagtggggaatccgta

SEQ ID NO: 398364 - DNA, 30 bp, Artificial Sequence
  Synthetic oligonucleotide
gagtgcggttcaccagcgctctactccgta

SEQ ID NO: 398365 - DNA, 30 bp, Artificial Sequence
  Synthetic oligonucleotide
ccaaagaaaagagctagtctttcctccgta

SEQ ID NO: 398366 - DNA, 30 bp, Artificial Sequence
  Synthetic oligonucleotide
ctcgagtaacggatgttcccggcgtccgta

SEQ ID NO: 398367 - DNA, 30 bp, Artificial Sequence
  Synthetic oligonucleotide
gagaagatacgctactgctctcggtccgta

SEQ ID NO: 398368 - DNA, 30 bp, Artificial Sequence
  Synthetic oligonucleotide
gtactctcgaggattcggagtcggtccgta

SEQ ID NO: 398369 - DNA, 30 bp, Artificial Sequence
  Synthetic oligonucleotide
aattcggccagtatgagttgaatgtccgta

SEQ ID NO: 398370 - DNA, 30 bp, Artificial Sequence
  Synthetic oligonucleotide
cctgtatgtagtaaccggggcaattccgta

SEQ ID NO: 398371 - DNA, 30 bp, Artificial Sequence
  Synthetic oligonucleotide
gtaacggatgtacgttcggataattccgta

SEQ ID NO: 398372 - DNA, 30 bp, Artificial Sequence
  Synthetic oligonucleotide
agattggcccctttaattagcctttccgta

SEQ ID NO: 398373 - DNA, 30 bp, Artificial Sequence
  Synthetic oligonucleotide
gcgtctaacccacactgttcgaccagcgta

SEQ ID NO: 398374 - DNA, 30 bp, Artificial Sequence
  Synthetic oligonucleotide
gaaaattagatctagaacagatccagcgta

SEQ ID NO: 398375 - DNA, 30 bp, Artificial Sequence
  Synthetic oligonucleotide
tggtccctcaaaacgcgggcggcacgcgta

SEQ ID NO: 398376 - DNA, 30 bp, Artificial Sequence
  Synthetic oligonucleotide
tcactcacgtcccattttcaagcccgcgta

SEQ ID NO: 398377 - DNA, 30 bp, Artificial Sequence
  Synthetic oligonucleotide
gtctgatcatgcaggtgtgtgaatcgcgta

SEQ ID NO: 398378 - DNA, 30 bp, Artificial Sequence
  Synthetic oligonucleotide
ctaaagtcaacggaccacgcgcatcgcgta

SEQ ID NO: 398379 - DNA, 30 bp, Artificial Sequence
  Synthetic oligonucleotide
agggcaactccgatatgtgcctaaggcgta

SEQ ID NO: 398380 - DNA, 30 bp, Artificial Sequence
  Synthetic oligonucleotide
gggatagtggaggggacgacgctaggcgta

SEQ ID NO: 398381 - DNA, 30 bp, Artificial Sequence
  Synthetic oligonucleotide
gtagtcaagacagatgctgggcgcggcgta

SEQ ID NO: 398382 - DNA, 30 bp, Artificial Sequence
  Synthetic oligonucleotide
gtaaaagtgaatttgccgtccaagggcgta

SEQ ID NO: 398383 - DNA, 27 bp, Artificial Sequence
  Synthetic oligonucleotide
tcggggattttcaataacaggggcgta

SEQ ID NO: 398384 - DNA, 30 bp, Artificial Sequence
  Synthetic oligonucleotide
gcgcatggaacggttgagtccgggggcgta

SEQ ID NO: 398385 - DNA, 30 bp, Artificial Sequence
  Synthetic oligonucleotide
gtacttctattaggtaagtcgtgtggcgta

SEQ ID NO: 398386 - DNA, 30 bp, Artificial Sequence
  Synthetic oligonucleotide
ataagaggcagtttgcgaatttttggcgta

SEQ ID NO: 398387 - DNA, 30 bp, Artificial Sequence
  Synthetic oligonucleotide
ctgcctgtaacgccaaatctagtatgcgta

SEQ ID NO: 398388 - DNA, 30 bp, Artificial Sequence
  Synthetic oligonucleotide
tgatccttggccagtctagcatattgcgta

SEQ ID NO: 398389 - DNA, 30 bp, Artificial Sequence
  Synthetic oligonucleotide
caacgtatccttctaacccgccgttgcgta

SEQ ID NO: 398390 - DNA, 30 bp, Artificial Sequence
  Synthetic oligonucleotide
ttccgtctgcaactacgtgaggaaatcgta

SEQ ID NO: 398391 - DNA, 30 bp, Artificial Sequence
  Synthetic oligonucleotide
gtctgcgcatcaggcgcaaatgacatcgta

SEQ ID NO: 398392 - DNA, 30 bp, Artificial Sequence
  Synthetic oligonucleotide
catcgtcaggtggcaagcgtccatatcgta

SEQ ID NO: 398393 - DNA, 30 bp, Artificial Sequence
  Synthetic oligonucleotide
ggccagcttaggggcttgcgccgtatcgta

SEQ ID NO: 398394 - DNA, 30 bp, Artificial Sequence
  Synthetic oligonucleotide
tagtttgtattcgcaaccgaggttatcgta

SEQ ID NO: 398395 - DNA, 30 bp, Artificial Sequence
  Synthetic oligonucleotide
gctagatcccgagccctgcaaacgctcgta

SEQ ID NO: 398396 - DNA, 30 bp, Artificial Sequence
  Synthetic oligonucleotide
taggagtttaccaggaggtacatgctcgta

SEQ ID NO: 398397 - DNA, 30 bp, Artificial Sequence
  Synthetic oligonucleotide
gtatagggaccctaacctatactgctcgta

SEQ ID NO: 398398 - DNA, 30 bp, Artificial Sequence
  Synthetic oligonucleotide
acagccccttagggccagccgtctctcgta

SEQ ID NO: 398399 - DNA, 30 bp, Artificial Sequence
  Synthetic oligonucleotide
ggctctcgattgcccctggtaggagtcgta

SEQ ID NO: 398400 - DNA, 30 bp, Artificial Sequence
  Synthetic oligonucleotide
agttacagaattttcagtagatgagtcgta

SEQ ID NO: 398401 - DNA, 30 bp, Artificial Sequence
  Synthetic oligonucleotide
ggtttgattctcccacgtcgctgcgtcgta

SEQ ID NO: 398402 - DNA, 30 bp, Artificial Sequence
  Synthetic oligonucleotide
tggtcgcttgtaacgtgtttcaatgtcgta

SEQ ID NO: 398403 - DNA, 30 bp, Artificial Sequence
  Synthetic oligonucleotide
agaggttcctttgagttgattaatgtcgta

SEQ ID NO: 398404 - DNA, 30 bp, Artificial Sequence
  Synthetic oligonucleotide
tagaattctggtggcgaaatttgtgtcgta

SEQ ID NO: 398405 - DNA, 30 bp, Artificial Sequence
  Synthetic oligonucleotide
ggatcgtcgtgcataagtgggctattcgta

SEQ ID NO: 398406 - DNA, 30 bp, Artificial Sequence
  Synthetic oligonucleotide
aaatgagattacgaaggacgcctaaaggta

SEQ ID NO: 398407 - DNA, 30 bp, Artificial Sequence
  Synthetic oligonucleotide
taggtatgttcccgtgatccatgcaaggta

SEQ ID NO: 398408 - DNA, 30 bp, Artificial Sequence
  Synthetic oligonucleotide
aatatagaataaggtggacttaggaaggta

SEQ ID NO: 398409 - DNA, 30 bp, Artificial Sequence
  Synthetic oligonucleotide
gccgccaccgcggtgtctatgttgaaggta

SEQ ID NO: 398410 - DNA, 30 bp, Artificial Sequence
  Synthetic oligonucleotide
ccccacgttggagttaagttccaacaggta

SEQ ID NO: 398411 - DNA, 30 bp, Artificial Sequence
  Synthetic oligonucleotide
ccatctgcgactggagctaaaccacaggta

SEQ ID NO: 398412 - DNA, 30 bp, Artificial Sequence
  Synthetic oligonucleotide
taatcccggcagcggaaatgagtacaggta

SEQ ID NO: 398413 - DNA, 30 bp, Artificial Sequence
  Synthetic oligonucleotide
tattcttaggaagggaccgaattacaggta

SEQ ID NO: 398414 - DNA, 30 bp, Artificial Sequence
  Synthetic oligonucleotide
atgacaaactgacgttggatggcgcaggta

SEQ ID NO: 398415 - DNA, 30 bp, Artificial Sequence
  Synthetic oligonucleotide
cgctctatacaaaggacggtcgttcaggta

SEQ ID NO: 398416 - DNA, 30 bp, Artificial Sequence
  Synthetic oligonucleotide
tatatgtgagtggcatcgacgatcgaggta

SEQ ID NO: 398417 - DNA, 30 bp, Artificial Sequence
  Synthetic oligonucleotide
tcataccagaagtttggagccccggaggta

SEQ ID NO: 398418 - DNA, 30 bp, Artificial Sequence
  Synthetic oligonucleotide
aagtgaattgtatgacataggggggaggta

SEQ ID NO: 398419 - DNA, 30 bp, Artificial Sequence
  Synthetic oligonucleotide
tacttgtcttatctgacgaccgtggaggta

SEQ ID NO: 398420 - DNA, 30 bp, Artificial Sequence
  Synthetic oligonucleotide
aatcggacggcggcagggaaggtggaggta

SEQ ID NO: 398421 - DNA, 30 bp, Artificial Sequence
  Synthetic oligonucleotide
cttggcagcatgtttaatgggcatgaggta

SEQ ID NO: 398422 - DNA, 30 bp, Artificial Sequence
  Synthetic oligonucleotide
actccactttaagggtcttatcatgaggta

SEQ ID NO: 398423 - DNA, 30 bp, Artificial Sequence
  Synthetic oligonucleotide
catatggaggttgcgcgatgctatgaggta

SEQ ID NO: 398424 - DNA, 30 bp, Artificial Sequence
  Synthetic oligonucleotide
gtaagcgccagccgatctcaatctgaggta

SEQ ID NO: 398425 - DNA, 30 bp, Artificial Sequence
  Synthetic oligonucleotide
aacatactggttctcgcgacataataggta

SEQ ID NO: 398426 - DNA, 30 bp, Artificial Sequence
  Synthetic oligonucleotide
tggtaagggctgttctgggggggataggta

SEQ ID NO: 398427 - DNA, 30 bp, Artificial Sequence
  Synthetic oligonucleotide
gcatagaaatattttgaagaccgctaggta

SEQ ID NO: 398428 - DNA, 30 bp, Artificial Sequence
  Synthetic oligonucleotide
catttctaacctgaagagcctgtctaggta

SEQ ID NO: 398429 - DNA, 30 bp, Artificial Sequence
  Synthetic oligonucleotide
gccccaaccgatgcaatcgtacggtaggta

SEQ ID NO: 398430 - DNA, 30 bp, Artificial Sequence
  Synthetic oligonucleotide
ggtgcggttgagtgaacggtggtgtaggta

SEQ ID NO: 398431 - DNA, 30 bp, Artificial Sequence
  Synthetic oligonucleotide
gccgatgcggcgtgcgatataacttaggta

SEQ ID NO: 398432 - DNA, 30 bp, Artificial Sequence
  Synthetic oligonucleotide
ttagttgttgtcagtttaaagccttaggta

SEQ ID NO: 398433 - DNA, 30 bp, Artificial Sequence
  Synthetic oligonucleotide
gaaactataaacaacagttgcagttaggta

SEQ ID NO: 398434 - DNA, 30 bp, Artificial Sequence
  Synthetic oligonucleotide
tagcgtctgagataaactcgcgtttaggta

SEQ ID NO: 398435 - DNA, 30 bp, Artificial Sequence
  Synthetic oligonucleotide
ttctagcaggtcacgtctatcgaaacggta

SEQ ID NO: 398436 - DNA, 30 bp, Artificial Sequence
  Synthetic oligonucleotide
cacaaacggctgtgtgttggtctcacggta

SEQ ID NO: 398437 - DNA, 30 bp, Artificial Sequence
  Synthetic oligonucleotide
cgtcgcacaggaactatacctctgacggta

SEQ ID NO: 398438 - DNA, 30 bp, Artificial Sequence
  Synthetic oligonucleotide
tttatgtgtaccgctgtctaggatacggta

SEQ ID NO: 398439 - DNA, 30 bp, Artificial Sequence
  Synthetic oligonucleotide
tatgtgcatgcggctcgtacctctacggta

SEQ ID NO: 398440 - DNA, 30 bp, Artificial Sequence
  Synthetic oligonucleotide
atcttactacggcagtacccatgtacggta

SEQ ID NO: 398441 - DNA, 30 bp, Artificial Sequence
  Synthetic oligonucleotide
cgtacgtctcatttgagttatcaaccggta

SEQ ID NO: 398442 - DNA, 30 bp, Artificial Sequence
  Synthetic oligonucleotide
cgttgtgcgagaccgcggcaaagcccggta

SEQ ID NO: 398443 - DNA, 30 bp, Artificial Sequence
  Synthetic oligonucleotide
tatttatgaaacctcccgcgtgatccggta

SEQ ID NO: 398444 - DNA, 30 bp, Artificial Sequence
  Synthetic oligonucleotide
cttaagtcaccccgggatgagatagcggta

SEQ ID NO: 398445 - DNA, 30 bp, Artificial Sequence
  Synthetic oligonucleotide
aatattgagctctaatagaagggcgcggta

SEQ ID NO: 398446 - DNA, 30 bp, Artificial Sequence
  Synthetic oligonucleotide
actcgtcctggcttagtagcgaaatcggta

SEQ ID NO: 398447 - DNA, 30 bp, Artificial Sequence
  Synthetic oligonucleotide
aaaacggcatggaacgggatcaagtcggta

SEQ ID NO: 398448 - DNA, 30 bp, Artificial Sequence
  Synthetic oligonucleotide
ccatggggggaccatgaatattagtcggta

SEQ ID NO: 398449 - DNA, 30 bp, Artificial Sequence
  Synthetic oligonucleotide
aatgtcaagcgggtctttgaatcgtcggta

SEQ ID NO: 398450 - DNA, 30 bp, Artificial Sequence
  Synthetic oligonucleotide
gcccgaccaaaagatgaatcctcgtcggta

SEQ ID NO: 398451 - DNA, 30 bp, Artificial Sequence
  Synthetic oligonucleotide
ggcaagatagaccttggaaaaagttcggta

SEQ ID NO: 398452 - DNA, 30 bp, Artificial Sequence
  Synthetic oligonucleotide
agaaccctcgtctagacggagggttcggta

SEQ ID NO: 398453 - DNA, 30 bp, Artificial Sequence
  Synthetic oligonucleotide
tacgtaggggttcagccactccaaagggta

SEQ ID NO: 398454 - DNA, 30 bp, Artificial Sequence
  Synthetic oligonucleotide
ggtgtgggagacacagcctagttaagggta

SEQ ID NO: 398455 - DNA, 30 bp, Artificial Sequence
  Synthetic oligonucleotide
ggcttcaccccgagggtgagcaccagggta

SEQ ID NO: 398456 - DNA, 30 bp, Artificial Sequence
  Synthetic oligonucleotide
ggccgcagtccagtacccgaagccagggta

SEQ ID NO: 398457 - DNA, 30 bp, Artificial Sequence
  Synthetic oligonucleotide
cggactgcagtccccatagtttagagggta

SEQ ID NO: 398458 - DNA, 30 bp, Artificial Sequence
  Synthetic oligonucleotide
acatgccttgtatagagagtaacgagggta

SEQ ID NO: 398459 - DNA, 30 bp, Artificial Sequence
  Synthetic oligonucleotide
tttaaatgaaccccggggagtcggagggta

SEQ ID NO: 398460 - DNA, 30 bp, Artificial Sequence
  Synthetic oligonucleotide
atccgccatagtcaggtaacggcgcgggta

SEQ ID NO: 398461 - DNA, 30 bp, Artificial Sequence
  Synthetic oligonucleotide
gtttggtcaatgattagagaaaggcgggta

SEQ ID NO: 398462 - DNA, 30 bp, Artificial Sequence
  Synthetic oligonucleotide
tgcgggaaactgtcgataaagactcgggta

SEQ ID NO: 398463 - DNA, 30 bp, Artificial Sequence
  Synthetic oligonucleotide
gatctttaagctctttactgaaaaggggta

SEQ ID NO: 398464 - DNA, 30 bp, Artificial Sequence
  Synthetic oligonucleotide
tggtttccagtctattgcgatcaaggggta

SEQ ID NO: 398465 - DNA, 30 bp, Artificial Sequence
  Synthetic oligonucleotide
tatatagaccaacagattatgccaggggta

SEQ ID NO: 398466 - DNA, 30 bp, Artificial Sequence
  Synthetic oligonucleotide
gctcatgtactgcttaaagcaagaggggta

SEQ ID NO: 398467 - DNA, 30 bp, Artificial Sequence
  Synthetic oligonucleotide
actctccaggatgggaacctcgtaggggta

SEQ ID NO: 398468 - DNA, 30 bp, Artificial Sequence
  Synthetic oligonucleotide
gagtatagagtaatgataggcaacggggta

SEQ ID NO: 398469 - DNA, 30 bp, Artificial Sequence
  Synthetic oligonucleotide
tttcctggaacgcacgggcgggtcggggta

SEQ ID NO: 398470 - DNA, 30 bp, Artificial Sequence
  Synthetic oligonucleotide
taattgaaatttcgtcctcaggctggggta

SEQ ID NO: 398471 - DNA, 30 bp, Artificial Sequence
  Synthetic oligonucleotide
agtttctgaaatacgccaaactgatgggta

SEQ ID NO: 398472 - DNA, 30 bp, Artificial Sequence
  Synthetic oligonucleotide
attttgccacacccgaaactatactgggta

SEQ ID NO: 398473 - DNA, 30 bp, Artificial Sequence
  Synthetic oligonucleotide
cttccagggtccgagcataagaattgggta

SEQ ID NO: 398474 - DNA, 30 bp, Artificial Sequence
  Synthetic oligonucleotide
gtatttacaattgcgaaggtgctttgggta

SEQ ID NO: 398475 - DNA, 30 bp, Artificial Sequence
  Synthetic oligonucleotide
ccgtattgtaacatgcccatgttttgggta

SEQ ID NO: 398476 - DNA, 30 bp, Artificial Sequence
  Synthetic oligonucleotide
catctggctgcaagcgatacctgaatggta

SEQ ID NO: 398477 - DNA, 30 bp, Artificial Sequence
  Synthetic oligonucleotide
ataggagttagtggacacatgcacatggta

SEQ ID NO: 398478 - DNA, 30 bp, Artificial Sequence
  Synthetic oligonucleotide
agctctcgttgtttaaaaacctacatggta

SEQ ID NO: 398479 - DNA, 30 bp, Artificial Sequence
  Synthetic oligonucleotide
tcatacggacggaatatttattacatggta

SEQ ID NO: 398480 - DNA, 30 bp, Artificial Sequence
  Synthetic oligonucleotide
gtttagcaaccgaggtttatccgcatggta

SEQ ID NO: 398481 - DNA, 30 bp, Artificial Sequence
  Synthetic oligonucleotide
attctgtgcaatggatcaaccatcatggta

SEQ ID NO: 398482 - DNA, 30 bp, Artificial Sequence
  Synthetic oligonucleotide
ggggctcgaacgtatccgactatcatggta

SEQ ID NO: 398483 - DNA, 30 bp, Artificial Sequence
  Synthetic oligonucleotide
aattatcttaaagtaaaagaagtcatggta

SEQ ID NO: 398484 - DNA, 30 bp, Artificial Sequence
  Synthetic oligonucleotide
tcgttcacctgtattcacaattagatggta

SEQ ID NO: 398485 - DNA, 30 bp, Artificial Sequence
  Synthetic oligonucleotide
ttatatagtacgggtacccacctgatggta

SEQ ID NO: 398486 - DNA, 30 bp, Artificial Sequence
  Synthetic oligonucleotide
tgcaccaaacgtgggaaacatcatatggta

SEQ ID NO: 398487 - DNA, 30 bp, Artificial Sequence
  Synthetic oligonucleotide
ttataaaaagtggtataactatctatggta

SEQ ID NO: 398488 - DNA, 30 bp, Artificial Sequence
  Synthetic oligonucleotide
gttaagggcctctcgaggtgccgtatggta

SEQ ID NO: 398489 - DNA, 30 bp, Artificial Sequence
  Synthetic oligonucleotide
tctgtcatggaaatgtggccatcactggta

SEQ ID NO: 398490 - DNA, 30 bp, Artificial Sequence
  Synthetic oligonucleotide
cgtttttgaaaataaaaactaatactggta

SEQ ID NO: 398491 - DNA, 30 bp, Artificial Sequence
  Synthetic oligonucleotide
cttagccacgctgttttaagtgtactggta

SEQ ID NO: 398492 - DNA, 30 bp, Artificial Sequence
  Synthetic oligonucleotide
tggtaatcgcggtcaaacagagtcctggta

SEQ ID NO: 398493 - DNA, 30 bp, Artificial Sequence
  Synthetic oligonucleotide
tgttgtgacacgcacctggaacagctggta

SEQ ID NO: 398494 - DNA, 30 bp, Artificial Sequence
  Synthetic oligonucleotide
gagtccattgattatttggatacgctggta

SEQ ID NO: 398495 - DNA, 30 bp, Artificial Sequence
  Synthetic oligonucleotide
gtgctatacttggcaggtcccccgctggta

SEQ ID NO: 398496 - DNA, 30 bp, Artificial Sequence
  Synthetic oligonucleotide
tccagttggagagggcgtcgggcgctggta

SEQ ID NO: 398497 - DNA, 30 bp, Artificial Sequence
  Synthetic oligonucleotide
aacgctaggtctgacgaattgaaagtggta

SEQ ID NO: 398498 - DNA, 30 bp, Artificial Sequence
  Synthetic oligonucleotide
cacggtagaattccttaaattcacgtggta

SEQ ID NO: 398499 - DNA, 30 bp, Artificial Sequence
  Synthetic oligonucleotide
ccagcttactacgtgtatcacgacgtggta

SEQ ID NO: 398500 - DNA, 30 bp, Artificial Sequence
  Synthetic oligonucleotide
aaagttacggacccgtgtttgggcgtggta

SEQ ID NO: 398501 - DNA, 30 bp, Artificial Sequence
  Synthetic oligonucleotide
tagatgttgtaacgctacactttcgtggta

SEQ ID NO: 398502 - DNA, 30 bp, Artificial Sequence
  Synthetic oligonucleotide
caaccggtcaggtccaaatgaaaggtggta

SEQ ID NO: 398503 - DNA, 30 bp, Artificial Sequence
  Synthetic oligonucleotide
tttgatgcaaagcatggtctggcggtggta

SEQ ID NO: 398504 - DNA, 30 bp, Artificial Sequence
  Synthetic oligonucleotide
tgtatattgtgttatcgtactgaattggta

SEQ ID NO: 398505 - DNA, 30 bp, Artificial Sequence
  Synthetic oligonucleotide
ataagtcattaatgcatttaaatcttggta

SEQ ID NO: 398506 - DNA, 30 bp, Artificial Sequence
  Synthetic oligonucleotide
gtggtcattaataactgatgcgggttggta

SEQ ID NO: 398507 - DNA, 30 bp, Artificial Sequence
  Synthetic oligonucleotide
ttacgagtcatctcgttttggactttggta

SEQ ID NO: 398508 - DNA, 30 bp, Artificial Sequence
  Synthetic oligonucleotide
gcagtagggagctgttctaaagctttggta

SEQ ID NO: 398509 - DNA, 30 bp, Artificial Sequence
  Synthetic oligonucleotide
cccgaagtatgctggtttttatttttggta

SEQ ID NO: 398510 - DNA, 30 bp, Artificial Sequence
  Synthetic oligonucleotide
ggccgcttcctcgtgcagcaaagaaatgta

SEQ ID NO: 398511 - DNA, 30 bp, Artificial Sequence
  Synthetic oligonucleotide
tgacctgagtctatgtcaacattaaatgta

SEQ ID NO: 398512 - DNA, 30 bp, Artificial Sequence
  Synthetic oligonucleotide
gcgcacttgggcggttattgcggcaatgta

SEQ ID NO: 398513 - DNA, 30 bp, Artificial Sequence
  Synthetic oligonucleotide
gagcatctgttggtatccacaacgaatgta

SEQ ID NO: 398514 - DNA, 30 bp, Artificial Sequence
  Synthetic oligonucleotide
gttcatgagatcacaaatgtcatgaatgta

SEQ ID NO: 398515 - DNA, 31 bp, Artificial Sequence
  Synthetic oligonucleotide
tattccgccaggaaattctcgcgataatgta

SEQ ID NO: 398516 - DNA, 30 bp, Artificial Sequence
  Synthetic oligonucleotide
ccataaaaaggtaggtcaaaacttaatgta

SEQ ID NO: 398517 - DNA, 30 bp, Artificial Sequence
  Synthetic oligonucleotide
gagcagctggaaattcgaattaaccatgta

SEQ ID NO: 398518 - DNA, 30 bp, Artificial Sequence
  Synthetic oligonucleotide
cctattgtgattggtcttgccggccatgta

SEQ ID NO: 398519 - DNA, 30 bp, Artificial Sequence
  Synthetic oligonucleotide
agaaacggctagggtgcggcacgggatgta

SEQ ID NO: 398520 - DNA, 30 bp, Artificial Sequence
  Synthetic oligonucleotide
ggggttacgtgcggaccgcacggggatgta

SEQ ID NO: 398521 - DNA, 30 bp, Artificial Sequence
  Synthetic oligonucleotide
atagtactatattgtgcagcgggggatgta

SEQ ID NO: 398522 - DNA, 30 bp, Artificial Sequence
  Synthetic oligonucleotide
tataggtacgccctctatccttttgatgta

SEQ ID NO: 398523 - DNA, 30 bp, Artificial Sequence
  Synthetic oligonucleotide
ctccgctggccgcggatagccgcatatgta

SEQ ID NO: 398524 - DNA, 30 bp, Artificial Sequence
  Synthetic oligonucleotide
tgttctgtttggtaacaacctcgatatgta

SEQ ID NO: 398525 - DNA, 30 bp, Artificial Sequence
  Synthetic oligonucleotide
gtaatgtttagtattttccctcgctatgta

SEQ ID NO: 398526 - DNA, 30 bp, Artificial Sequence
  Synthetic oligonucleotide
gacctaacatttaaggacactttgtatgta

SEQ ID NO: 398527 - DNA, 30 bp, Artificial Sequence
  Synthetic oligonucleotide
tcttagttgcaaacgccaacgaattatgta

SEQ ID NO: 398528 - DNA, 30 bp, Artificial Sequence
  Synthetic oligonucleotide
ttatcaagtgggtcaccacgcagttatgta

SEQ ID NO: 398529 - DNA, 31 bp, Artificial Sequence
  Synthetic oligonucleotide
agcgctcctcggtatatacgggcacactgta

SEQ ID NO: 398530 - DNA, 30 bp, Artificial Sequence
  Synthetic oligonucleotide
ggtatcaggggacgtagacctggcactgta

SEQ ID NO: 398531 - DNA, 30 bp, Artificial Sequence
  Synthetic oligonucleotide
ggggaccgccaggtctctcatatcactgta

SEQ ID NO: 398532 - DNA, 30 bp, Artificial Sequence
  Synthetic oligonucleotide
ccgtatgattctagtatcaataggactgta

SEQ ID NO: 398533 - DNA, 30 bp, Artificial Sequence
  Synthetic oligonucleotide
ctgccgcaagagctacaggcctggactgta

SEQ ID NO: 398534 - DNA, 30 bp, Artificial Sequence
  Synthetic oligonucleotide
ggagattcgcttttggaggttttgactgta

SEQ ID NO: 398535 - DNA, 30 bp, Artificial Sequence
  Synthetic oligonucleotide
ggggctacagtaccacacagtactactgta

SEQ ID NO: 398536 - DNA, 29 bp, Artificial Sequence
  Synthetic oligonucleotide
gcttttagggcagaagctacattactgta

SEQ ID NO: 398537 - DNA, 30 bp, Artificial Sequence
  Synthetic oligonucleotide
gctatgcttcggttaaagatatgacctgta

SEQ ID NO: 398538 - DNA, 30 bp, Artificial Sequence
  Synthetic oligonucleotide
gttagggattttaaaattggtcgccctgta

SEQ ID NO: 398539 - DNA, 30 bp, Artificial Sequence
  Synthetic oligonucleotide
acgtattacggctggcttatacagcctgta

SEQ ID NO: 398540 - DNA, 30 bp, Artificial Sequence
  Synthetic oligonucleotide
aggtcgtagccagttctcctacaagctgta

SEQ ID NO: 398541 - DNA, 30 bp, Artificial Sequence
  Synthetic oligonucleotide
cctttcatcgtaacgaggcggttagctgta

SEQ ID NO: 398542 - DNA, 30 bp, Artificial Sequence
  Synthetic oligonucleotide
gtgtaaagttcaataccgaaagacgctgta

SEQ ID NO: 398543 - DNA, 30 bp, Artificial Sequence
  Synthetic oligonucleotide
agaagtaactattcgcgttcgaccgctgta

SEQ ID NO: 398544 - DNA, 30 bp, Artificial Sequence
  Synthetic oligonucleotide
aggagttctggacggcctatcagcgctgta

SEQ ID NO: 398545 - DNA, 30 bp, Artificial Sequence
  Synthetic oligonucleotide
acagcaggcgccggtccggagagcgctgta

SEQ ID NO: 398546 - DNA, 30 bp, Artificial Sequence
  Synthetic oligonucleotide
cagactgtaatttggtaattaacggctgta

SEQ ID NO: 398547 - DNA, 30 bp, Artificial Sequence
  Synthetic oligonucleotide
gctccagtccggtatttcatcgctgctgta

SEQ ID NO: 398548 - DNA, 30 bp, Artificial Sequence
  Synthetic oligonucleotide
tgaaagtgcattgggagagcttcatctgta

SEQ ID NO: 398549 - DNA, 30 bp, Artificial Sequence
  Synthetic oligonucleotide
gacgctggattttgacgtagtttatctgta

SEQ ID NO: 398550 - DNA, 30 bp, Artificial Sequence
  Synthetic oligonucleotide
tcaaagttgagcttaatatcgccgtctgta

SEQ ID NO: 398551 - DNA, 30 bp, Artificial Sequence
  Synthetic oligonucleotide
gtccaagttccgagtggtttgccgtctgta

SEQ ID NO: 398552 - DNA, 30 bp, Artificial Sequence
  Synthetic oligonucleotide
cgtgaacaatgtcgcgcgtctccttctgta

SEQ ID NO: 398553 - DNA, 30 bp, Artificial Sequence
  Synthetic oligonucleotide
cttaactaggagctacatatatgttctgta

SEQ ID NO: 398554 - DNA, 30 bp, Artificial Sequence
  Synthetic oligonucleotide
gtctatatgtcgagcgagctaacaagtgta

SEQ ID NO: 398555 - DNA, 30 bp, Artificial Sequence
  Synthetic oligonucleotide
ttcgtaaggattatcattcctccaagtgta

SEQ ID NO: 398556 - DNA, 30 bp, Artificial Sequence
  Synthetic oligonucleotide
attgaatacagctccgcaggaaccagtgta

SEQ ID NO: 398557 - DNA, 30 bp, Artificial Sequence
  Synthetic oligonucleotide
gactcagggctgctcatccggaggagtgta

SEQ ID NO: 398558 - DNA, 30 bp, Artificial Sequence
  Synthetic oligonucleotide
acgggacccgcagcgttacgtatgagtgta

SEQ ID NO: 398559 - DNA, 30 bp, Artificial Sequence
  Synthetic oligonucleotide
aaggagttcaagtgtcatgacttgagtgta

SEQ ID NO: 398560 - DNA, 30 bp, Artificial Sequence
  Synthetic oligonucleotide
gcaaatcgattcatcgtaagctctagtgta

SEQ ID NO: 398561 - DNA, 30 bp, Artificial Sequence
  Synthetic oligonucleotide
acacattagtcgcttcttcagcgtagtgta

SEQ ID NO: 398562 - DNA, 30 bp, Artificial Sequence
  Synthetic oligonucleotide
ggaattcggtagtcccccctagttagtgta

SEQ ID NO: 398563 - DNA, 30 bp, Artificial Sequence
  Synthetic oligonucleotide
tatggaccggtcaagaaaccgtaacgtgta

SEQ ID NO: 398564 - DNA, 30 bp, Artificial Sequence
  Synthetic oligonucleotide
aagcaataggatcatctaatgaaccgtgta

SEQ ID NO: 398565 - DNA, 30 bp, Artificial Sequence
  Synthetic oligonucleotide
gcataatacaagaggtaagcctcgcgtgta

SEQ ID NO: 398566 - DNA, 30 bp, Artificial Sequence
  Synthetic oligonucleotide
aagtgagtgctcgtaagattgaatcgtgta

SEQ ID NO: 398567 - DNA, 30 bp, Artificial Sequence
  Synthetic oligonucleotide
gagaaaggaaaaggttgttaatatcgtgta

SEQ ID NO: 398568 - DNA, 30 bp, Artificial Sequence
  Synthetic oligonucleotide
agccgtgtcggttggatggcgcttcgtgta

SEQ ID NO: 398569 - DNA, 30 bp, Artificial Sequence
  Synthetic oligonucleotide
tttatagcctgagtcatcagggaaggtgta

SEQ ID NO: 398570 - DNA, 30 bp, Artificial Sequence
  Synthetic oligonucleotide
ggccccagatctgactctggagtaggtgta

SEQ ID NO: 398571 - DNA, 30 bp, Artificial Sequence
  Synthetic oligonucleotide
ttcggtacatttgttgatcaattaggtgta

SEQ ID NO: 398572 - DNA, 30 bp, Artificial Sequence
  Synthetic oligonucleotide
tccaggacaaatgtccgtccccccggtgta

SEQ ID NO: 398573 - DNA, 30 bp, Artificial Sequence
  Synthetic oligonucleotide
tgcgttcgacaacgctgtataaagggtgta

SEQ ID NO: 398574 - DNA, 30 bp, Artificial Sequence
  Synthetic oligonucleotide
tactcggcgacttgcaactaattgggtgta

SEQ ID NO: 398575 - DNA, 30 bp, Artificial Sequence
  Synthetic oligonucleotide
tggaagtaatgcatatctccttatggtgta

SEQ ID NO: 398576 - DNA, 30 bp, Artificial Sequence
  Synthetic oligonucleotide
attcttctggcctaagtcggtcgtggtgta

SEQ ID NO: 398577 - DNA, 30 bp, Artificial Sequence
  Synthetic oligonucleotide
ttcggtacttcaatcacgtcttgtggtgta

SEQ ID NO: 398578 - DNA, 30 bp, Artificial Sequence
  Synthetic oligonucleotide
tcggaattaccaggcgcaggacttggtgta

SEQ ID NO: 398579 - DNA, 30 bp, Artificial Sequence
  Synthetic oligonucleotide
acttgatttctacacttactcaaatgtgta

SEQ ID NO: 398580 - DNA, 30 bp, Artificial Sequence
  Synthetic oligonucleotide
ttgctgcgccatgccaaatttcaatgtgta

SEQ ID NO: 398581 - DNA, 30 bp, Artificial Sequence
  Synthetic oligonucleotide
gagtggtaatcgctacactccgaatgtgta

SEQ ID NO: 398582 - DNA, 30 bp, Artificial Sequence
  Synthetic oligonucleotide
ggctagggagagggttcgcgattatgtgta

SEQ ID NO: 398583 - DNA, 30 bp, Artificial Sequence
  Synthetic oligonucleotide
accccggttcattaaaagcgcatctgtgta

SEQ ID NO: 398584 - DNA, 30 bp, Artificial Sequence
  Synthetic oligonucleotide
ggacggtaatcctgcatacgtaggtgtgta

SEQ ID NO: 398585 - DNA, 30 bp, Artificial Sequence
  Synthetic oligonucleotide
ggggccggcaacaaaaagctagggtgtgta

SEQ ID NO: 398586 - DNA, 30 bp, Artificial Sequence
  Synthetic oligonucleotide
cacaacggtccgccctgttatgtgtgtgta

SEQ ID NO: 398587 - DNA, 30 bp, Artificial Sequence
  Synthetic oligonucleotide
tgaacttcctagcattggtggatttgtgta

SEQ ID NO: 398588 - DNA, 30 bp, Artificial Sequence
  Synthetic oligonucleotide
ttccgagaaatggggttctacttttgtgta

SEQ ID NO: 398589 - DNA, 30 bp, Artificial Sequence
  Synthetic oligonucleotide
aattctcaatcgttctgcatacaaattgta

SEQ ID NO: 398590 - DNA, 30 bp, Artificial Sequence
  Synthetic oligonucleotide
ccataattagtaccgtctggctaaattgta

SEQ ID NO: 398591 - DNA, 30 bp, Artificial Sequence
  Synthetic oligonucleotide
atggcgttagttctagcaaataacattgta

SEQ ID NO: 398592 - DNA, 30 bp, Artificial Sequence
  Synthetic oligonucleotide
cgttcggaacatgccacgttcagcattgta

SEQ ID NO: 398593 - DNA, 30 bp, Artificial Sequence
  Synthetic oligonucleotide
atgaatggttcgctgatggtagggattgta

SEQ ID NO: 398594 - DNA, 30 bp, Artificial Sequence
  Synthetic oligonucleotide
gttatgtttgctgctatggtaatgattgta

SEQ ID NO: 398595 - DNA, 30 bp, Artificial Sequence
  Synthetic oligonucleotide
accgaagcccatccaccagttcctattgta

SEQ ID NO: 398596 - DNA, 30 bp, Artificial Sequence
  Synthetic oligonucleotide
tccatacaactatataataattctattgta

SEQ ID NO: 398597 - DNA, 30 bp, Artificial Sequence
  Synthetic oligonucleotide
cttcactttgaccgtagtgggagtattgta

SEQ ID NO: 398598 - DNA, 30 bp, Artificial Sequence
  Synthetic oligonucleotide
acggtagttgtagctgcattacgtattgta

SEQ ID NO: 398599 - DNA, 30 bp, Artificial Sequence
  Synthetic oligonucleotide
gcgtctttcctacatagtggccttattgta

SEQ ID NO: 398600 - DNA, 30 bp, Artificial Sequence
  Synthetic oligonucleotide
gactctcgttttgtgctattaaaacttgta

SEQ ID NO: 398601 - DNA, 30 bp, Artificial Sequence
  Synthetic oligonucleotide
gtgaagcttggtacaggcagccaacttgta

SEQ ID NO: 398602 - DNA, 30 bp, Artificial Sequence
  Synthetic oligonucleotide
gtggtagccacgcagaatgctgtacttgta

SEQ ID NO: 398603 - DNA, 30 bp, Artificial Sequence
  Synthetic oligonucleotide
cttgtcagtacggcaatctgattacttgta

SEQ ID NO: 398604 - DNA, 30 bp, Artificial Sequence
  Synthetic oligonucleotide
tttgcctgtcggttgacaaaaaaccttgta

SEQ ID NO: 398605 - DNA, 30 bp, Artificial Sequence
  Synthetic oligonucleotide
cttcggtgcataagctagatgtgccttgta

SEQ ID NO: 398606 - DNA, 30 bp, Artificial Sequence
  Synthetic oligonucleotide
tacccgtagaacggaccccgatatcttgta

SEQ ID NO: 398607 - DNA, 30 bp, Artificial Sequence
  Synthetic oligonucleotide
gctattcatgactcaatgagaggtcttgta

SEQ ID NO: 398608 - DNA, 30 bp, Artificial Sequence
  Synthetic oligonucleotide
aatataggttgtagtgggctcattcttgta

SEQ ID NO: 398609 - DNA, 30 bp, Artificial Sequence
  Synthetic oligonucleotide
gaaaggcactgtatacgggtagttcttgta

SEQ ID NO: 398610 - DNA, 30 bp, Artificial Sequence
  Synthetic oligonucleotide
gttgtccaataggggaccagttcagttgta

SEQ ID NO: 398611 - DNA, 30 bp, Artificial Sequence
  Synthetic oligonucleotide
agtgtccgattcgccttatgaatagttgta

SEQ ID NO: 398612 - DNA, 30 bp, Artificial Sequence
  Synthetic oligonucleotide
agttctgtatataatcctggctacgttgta

SEQ ID NO: 398613 - DNA, 30 bp, Artificial Sequence
  Synthetic oligonucleotide
cattagctaagcgaagcccttagcgttgta

SEQ ID NO: 398614 - DNA, 30 bp, Artificial Sequence
  Synthetic oligonucleotide
ccccattgctgagtgttccaaatcgttgta

SEQ ID NO: 398615 - DNA, 30 bp, Artificial Sequence
  Synthetic oligonucleotide
tctgtacggcatgggagcggacaggttgta

SEQ ID NO: 398616 - DNA, 30 bp, Artificial Sequence
  Synthetic oligonucleotide
agtcttaatctaagctagtctacggttgta

SEQ ID NO: 398617 - DNA, 30 bp, Artificial Sequence
  Synthetic oligonucleotide
actccagccagctggtgccgttcggttgta

SEQ ID NO: 398618 - DNA, 30 bp, Artificial Sequence
  Synthetic oligonucleotide
tgcaggaaaaactcgcatccaggggttgta

SEQ ID NO: 398619 - DNA, 29 bp, Artificial Sequence
  Synthetic oligonucleotide
gattccgggtgagggagtggtgggttgta

SEQ ID NO: 398620 - DNA, 30 bp, Artificial Sequence
  Synthetic oligonucleotide
aacccggagatcaccgttgcgctggttgta

SEQ ID NO: 398621 - DNA, 30 bp, Artificial Sequence
  Synthetic oligonucleotide
ggagcttgtttaaattaggatcctgttgta

SEQ ID NO: 398622 - DNA, 30 bp, Artificial Sequence
  Synthetic oligonucleotide
tatcacgaacctcagatacagagtgttgta

SEQ ID NO: 398623 - DNA, 30 bp, Artificial Sequence
  Synthetic oligonucleotide
taggaaaacagcaggctttcaaaatttgta

SEQ ID NO: 398624 - DNA, 30 bp, Artificial Sequence
  Synthetic oligonucleotide
ctcccgtcactgttcatatgcaaatttgta

SEQ ID NO: 398625 - DNA, 30 bp, Artificial Sequence
  Synthetic oligonucleotide
atggagggattatcggattttcaatttgta

SEQ ID NO: 398626 - DNA, 30 bp, Artificial Sequence
  Synthetic oligonucleotide
cggccgagcgcctcaggcgatacatttgta

SEQ ID NO: 398627 - DNA, 30 bp, Artificial Sequence
  Synthetic oligonucleotide
catgtttaaccgtccgtagactgctttgta

SEQ ID NO: 398628 - DNA, 30 bp, Artificial Sequence
  Synthetic oligonucleotide
ctactcgtaatgacaacatcctagtttgta

SEQ ID NO: 398629 - DNA, 30 bp, Artificial Sequence
  Synthetic oligonucleotide
gtggattcggcgctcgccattaattttgta

SEQ ID NO: 398630 - DNA, 30 bp, Artificial Sequence
  Synthetic oligonucleotide
gatggagcttgacggctatagttaaaatta

SEQ ID NO: 398631 - DNA, 30 bp, Artificial Sequence
  Synthetic oligonucleotide
accgtcttgcgtaatttactttacaaatta

SEQ ID NO: 398632 - DNA, 30 bp, Artificial Sequence
  Synthetic oligonucleotide
taggattcagaaccagtatggtccaaatta

SEQ ID NO: 398633 - DNA, 30 bp, Artificial Sequence
  Synthetic oligonucleotide
gtagtccatgcgctacttgcggtcaaatta

SEQ ID NO: 398634 - DNA, 30 bp, Artificial Sequence
  Synthetic oligonucleotide
taaagaccaagtggggtcggtacgaaatta

SEQ ID NO: 398635 - DNA, 30 bp, Artificial Sequence
  Synthetic oligonucleotide
tgaaccgattgtcagcaatttcaacaatta

SEQ ID NO: 398636 - DNA, 30 bp, Artificial Sequence
  Synthetic oligonucleotide
ctccgcgcaatacaaggtccgcgacaatta

SEQ ID NO: 398637 - DNA, 30 bp, Artificial Sequence
  Synthetic oligonucleotide
ccgcagttccctacacgatgattccaatta

SEQ ID NO: 398638 - DNA, 30 bp, Artificial Sequence
  Synthetic oligonucleotide
agcatgacttgtctcagcggatagcaatta

SEQ ID NO: 398639 - DNA, 30 bp, Artificial Sequence
  Synthetic oligonucleotide
actagtatatgcgacgaacataggcaatta

SEQ ID NO: 398640 - DNA, 30 bp, Artificial Sequence
  Synthetic oligonucleotide
ttcgggaacaagtgtgtatcgtttcaatta

SEQ ID NO: 398641 - DNA, 30 bp, Artificial Sequence
  Synthetic oligonucleotide
aacccattataagcagctgctgaagaatta

SEQ ID NO: 398642 - DNA, 30 bp, Artificial Sequence
  Synthetic oligonucleotide
ttattaattgggaaaggctgggcagaatta

SEQ ID NO: 398643 - DNA, 30 bp, Artificial Sequence
  Synthetic oligonucleotide
gagatatgacaagctgcaggcttagaatta

SEQ ID NO: 398644 - DNA, 30 bp, Artificial Sequence
  Synthetic oligonucleotide
ggtatacgcgtaggaatgaagcgcgaatta

SEQ ID NO: 398645 - DNA, 30 bp, Artificial Sequence
  Synthetic oligonucleotide
ccttttcggcaggaaataaatgtcgaatta

SEQ ID NO: 398646 - DNA, 28 bp, Artificial Sequence
  Synthetic oligonucleotide
agtgaggttctttgcgctttcggaatta

SEQ ID NO: 398647 - DNA, 30 bp, Artificial Sequence
  Synthetic oligonucleotide
aaaaatttatatcagccgaccggggaatta

SEQ ID NO: 398648 - DNA, 30 bp, Artificial Sequence
  Synthetic oligonucleotide
gacacgcagtaaatataaatgttggaatta

SEQ ID NO: 398649 - DNA, 30 bp, Artificial Sequence
  Synthetic oligonucleotide
atctttgtcttggattgtactactgaatta

SEQ ID NO: 398650 - DNA, 30 bp, Artificial Sequence
  Synthetic oligonucleotide
atctctaattgggctagatcttttgaatta

SEQ ID NO: 398651 - DNA, 30 bp, Artificial Sequence
  Synthetic oligonucleotide
ataatgtcatcggtcatgaacttataatta

SEQ ID NO: 398652 - DNA, 30 bp, Artificial Sequence
  Synthetic oligonucleotide
ctctaatactcaagggtgagagtctaatta

SEQ ID NO: 398653 - DNA, 30 bp, Artificial Sequence
  Synthetic oligonucleotide
tattgaacagcttgtgtattatagtaatta

SEQ ID NO: 398654 - DNA, 30 bp, Artificial Sequence
  Synthetic oligonucleotide
ttcggtgatactagacaattacggtaatta

SEQ ID NO: 398655 - DNA, 30 bp, Artificial Sequence
  Synthetic oligonucleotide
ttactgaaatccttagacaacaattaatta

SEQ ID NO: 398656 - DNA, 30 bp, Artificial Sequence
  Synthetic oligonucleotide
tctctaggcgatgtgcgttagtcaacatta

SEQ ID NO: 398657 - DNA, 30 bp, Artificial Sequence
  Synthetic oligonucleotide
ctaaatccatgggctattaagagaacatta

SEQ ID NO: 398658 - DNA, 30 bp, Artificial Sequence
  Synthetic oligonucleotide
gtgaaatcagcttcaaagttgagaacatta

SEQ ID NO: 398659 - DNA, 30 bp, Artificial Sequence
  Synthetic oligonucleotide
tgtgttttaattagactatgtagaacatta

SEQ ID NO: 398660 - DNA, 30 bp, Artificial Sequence
  Synthetic oligonucleotide
gtacaaacaactagtcgcgagttaacatta

SEQ ID NO: 398661 - DNA, 30 bp, Artificial Sequence
  Synthetic oligonucleotide
caggttgatacaatttctgcggagacatta

SEQ ID NO: 398662 - DNA, 30 bp, Artificial Sequence
  Synthetic oligonucleotide
acgttatggtgaccctcttaacggacatta

SEQ ID NO: 398663 - DNA, 30 bp, Artificial Sequence
  Synthetic oligonucleotide
gattaaatacaacattatgaagggacatta

SEQ ID NO: 398664 - DNA, 30 bp, Artificial Sequence
  Synthetic oligonucleotide
cgcggttcagaatcgacggtgcttacatta

SEQ ID NO: 398665 - DNA, 30 bp, Artificial Sequence
  Synthetic oligonucleotide
gcctcaatgtatctattcggcgaaccatta

SEQ ID NO: 398666 - DNA, 30 bp, Artificial Sequence
  Synthetic oligonucleotide
gataataagcagtaagcctaaataccatta

SEQ ID NO: 398667 - DNA, 30 bp, Artificial Sequence
  Synthetic oligonucleotide
gggaaccagccaagtggcaagggcccatta

SEQ ID NO: 398668 - DNA, 30 bp, Artificial Sequence
  Synthetic oligonucleotide
ttgagcagatcccggaatccgggcccatta

SEQ ID NO: 398669 - DNA, 30 bp, Artificial Sequence
  Synthetic oligonucleotide
gcatttcaatgggaatattaaccagcatta

SEQ ID NO: 398670 - DNA, 30 bp, Artificial Sequence
  Synthetic oligonucleotide
ggggcgcgcgctaatggcgcgtgagcatta

SEQ ID NO: 398671 - DNA, 30 bp, Artificial Sequence
  Synthetic oligonucleotide
gtagagcattcgacctaagtccacgcatta

SEQ ID NO: 398672 - DNA, 30 bp, Artificial Sequence
  Synthetic oligonucleotide
attaagaggtgtgtaatggatgacgcatta

SEQ ID NO: 398673 - DNA, 30 bp, Artificial Sequence
  Synthetic oligonucleotide
taattatcccctgcgttgagtagcgcatta

SEQ ID NO: 398674 - DNA, 30 bp, Artificial Sequence
  Synthetic oligonucleotide
gaggcgcaatatcgtggttttggcgcatta

SEQ ID NO: 398675 - DNA, 30 bp, Artificial Sequence
  Synthetic oligonucleotide
tcgcgagaatgtgtgaaccccggggcatta

SEQ ID NO: 398676 - DNA, 30 bp, Artificial Sequence
  Synthetic oligonucleotide
taatcggggaacacatgggagaatgcatta

SEQ ID NO: 398677 - DNA, 30 bp, Artificial Sequence
  Synthetic oligonucleotide
aattgtacctcaaagtccttgcatgcatta

SEQ ID NO: 398678 - DNA, 30 bp, Artificial Sequence
  Synthetic oligonucleotide
actttggcgcggtaaacaatggttgcatta

SEQ ID NO: 398679 - DNA, 30 bp, Artificial Sequence
  Synthetic oligonucleotide
ggattggtttcatgtcgtcgatttgcatta

SEQ ID NO: 398680 - DNA, 31 bp, Artificial Sequence
  Synthetic oligonucleotide
gcttgcatacttacgcgcgcacgactcatta

SEQ ID NO: 398681 - DNA, 30 bp, Artificial Sequence
  Synthetic oligonucleotide
gtatctcaactatgatgctgggactcatta

SEQ ID NO: 398682 - DNA, 30 bp, Artificial Sequence
  Synthetic oligonucleotide
cagaataagttcatgggtgtgggctcatta

SEQ ID NO: 398683 - DNA, 30 bp, Artificial Sequence
  Synthetic oligonucleotide
acactctcaactatcattgaactctcatta

SEQ ID NO: 398684 - DNA, 30 bp, Artificial Sequence
  Synthetic oligonucleotide
aaagtactgccaggataaaatgagtcatta

SEQ ID NO: 398685 - DNA, 30 bp, Artificial Sequence
  Synthetic oligonucleotide
tgcatccgaccatatggcgactagtcatta

SEQ ID NO: 398686 - DNA, 30 bp, Artificial Sequence
  Synthetic oligonucleotide
ggtgagtgtgcctgagtcgtgacgtcatta

SEQ ID NO: 398687 - DNA, 30 bp, Artificial Sequence
  Synthetic oligonucleotide
acattgcatgaaaacgccttgttgtcatta

SEQ ID NO: 398688 - DNA, 30 bp, Artificial Sequence
  Synthetic oligonucleotide
atccatcaatggcggcattaatattcatta

SEQ ID NO: 398689 - DNA, 30 bp, Artificial Sequence
  Synthetic oligonucleotide
aagaagtgctattaaaacgcatcttcatta

SEQ ID NO: 398690 - DNA, 30 bp, Artificial Sequence
  Synthetic oligonucleotide
tgtaatcgtttaccgcgctagatttcatta

SEQ ID NO: 398691 - DNA, 30 bp, Artificial Sequence
  Synthetic oligonucleotide
agcttatacataccggttatcgtttcatta

SEQ ID NO: 398692 - DNA, 30 bp, Artificial Sequence
  Synthetic oligonucleotide
cgccgcggctagttctaagcaacaagatta

SEQ ID NO: 398693 - DNA, 30 bp, Artificial Sequence
  Synthetic oligonucleotide
agctccagtagggtacgagcatgaagatta

SEQ ID NO: 398694 - DNA, 30 bp, Artificial Sequence
  Synthetic oligonucleotide
aagaaaattaatatgagatttctaagatta

SEQ ID NO: 398695 - DNA, 30 bp, Artificial Sequence
  Synthetic oligonucleotide
cacagcgcattcaagagcgatagcagatta

SEQ ID NO: 398696 - DNA, 30 bp, Artificial Sequence
  Synthetic oligonucleotide
acgcgccgaaaccttagattctgcagatta

SEQ ID NO: 398697 - DNA, 30 bp, Artificial Sequence
  Synthetic oligonucleotide
tgtagatgaagaaaaagtggcttcagatta

SEQ ID NO: 398698 - DNA, 30 bp, Artificial Sequence
  Synthetic oligonucleotide
ttgaacttacaattgccgccactgagatta

SEQ ID NO: 398699 - DNA, 30 bp, Artificial Sequence
  Synthetic oligonucleotide
gtgtgaatagccgtcaccggaaatagatta

SEQ ID NO: 398700 - DNA, 30 bp, Artificial Sequence
  Synthetic oligonucleotide
aatcataatcatacgtgcacagaccgatta

SEQ ID NO: 398701 - DNA, 30 bp, Artificial Sequence
  Synthetic oligonucleotide
ttcaaggaccggtcacgagagacgcgatta

SEQ ID NO: 398702 - DNA, 30 bp, Artificial Sequence
  Synthetic oligonucleotide
ctcacttcttgccaaaacgctgtgcgatta

SEQ ID NO: 398703 - DNA, 30 bp, Artificial Sequence
  Synthetic oligonucleotide
gatcttttggtaaaaaaagggcatcgatta

SEQ ID NO: 398704 - DNA, 30 bp, Artificial Sequence
  Synthetic oligonucleotide
ttaatgttataaatggagatgcatcgatta

SEQ ID NO: 398705 - DNA, 30 bp, Artificial Sequence
  Synthetic oligonucleotide
ctcttctgatgaagggcggctgatcgatta

SEQ ID NO: 398706 - DNA, 30 bp, Artificial Sequence
  Synthetic oligonucleotide
cttgacagacggcagagagagagtcgatta

SEQ ID NO: 398707 - DNA, 30 bp, Artificial Sequence
  Synthetic oligonucleotide
agacgagatcccatggtcaaaagaggatta

SEQ ID NO: 398708 - DNA, 30 bp, Artificial Sequence
  Synthetic oligonucleotide
atcatcctaagccctgcccgtcgcggatta

SEQ ID NO: 398709 - DNA, 30 bp, Artificial Sequence
  Synthetic oligonucleotide
ccgtccctagacataagacttgtcggatta

SEQ ID NO: 398710 - DNA, 30 bp, Artificial Sequence
  Synthetic oligonucleotide
gtataaagacatacgctgtttcggggatta

SEQ ID NO: 398711 - DNA, 30 bp, Artificial Sequence
  Synthetic oligonucleotide
tgatgattggtagtaaaaggtctgggatta

SEQ ID NO: 398712 - DNA, 30 bp, Artificial Sequence
  Synthetic oligonucleotide
ggtccagggctggcctatatgtatggatta

SEQ ID NO: 398713 - DNA, 30 bp, Artificial Sequence
  Synthetic oligonucleotide
cgaagcgccgcactggtacaaattggatta

SEQ ID NO: 398714 - DNA, 30 bp, Artificial Sequence
  Synthetic oligonucleotide
tatataggggatacccatgtaaaatgatta

SEQ ID NO: 398715 - DNA, 30 bp, Artificial Sequence
  Synthetic oligonucleotide
cttaatgcgcacggagcgaggaactgatta

SEQ ID NO: 398716 - DNA, 30 bp, Artificial Sequence
  Synthetic oligonucleotide
aactatagaacgcatggtatacactgatta

SEQ ID NO: 398717 - DNA, 30 bp, Artificial Sequence
  Synthetic oligonucleotide
cccacagctctatcacgctatacctgatta

SEQ ID NO: 398718 - DNA, 30 bp, Artificial Sequence
  Synthetic oligonucleotide
ataagcttagtaatacaacttgcgtgatta

SEQ ID NO: 398719 - DNA, 30 bp, Artificial Sequence
  Synthetic oligonucleotide
cgccgaacctgagccccatcacggtgatta

SEQ ID NO: 398720 - DNA, 30 bp, Artificial Sequence
  Synthetic oligonucleotide
atacttgacgcatacggtgaattgtgatta

SEQ ID NO: 398721 - DNA, 30 bp, Artificial Sequence
  Synthetic oligonucleotide
tttagaggtgtgtcgaggattcattgatta

SEQ ID NO: 398722 - DNA, 30 bp, Artificial Sequence
  Synthetic oligonucleotide
tctatcttggcctctgagcccacttgatta

SEQ ID NO: 398723 - DNA, 30 bp, Artificial Sequence
  Synthetic oligonucleotide
tacaaagctagcgctgtaggtgaaatatta

SEQ ID NO: 398724 - DNA, 30 bp, Artificial Sequence
  Synthetic oligonucleotide
agaggttgatgaccgcctgactcaatatta

SEQ ID NO: 398725 - DNA, 30 bp, Artificial Sequence
  Synthetic oligonucleotide
aagtgggtatgcaaagacgctcgaatatta

SEQ ID NO: 398726 - DNA, 30 bp, Artificial Sequence
  Synthetic oligonucleotide
tcgatgacacgtttacggatttgcatatta

SEQ ID NO: 398727 - DNA, 30 bp, Artificial Sequence
  Synthetic oligonucleotide
tagtccaggggtataggtgttgtcatatta

SEQ ID NO: 398728 - DNA, 30 bp, Artificial Sequence
  Synthetic oligonucleotide
tattagagtatagcagcgcagttgatatta

SEQ ID NO: 398729 - DNA, 30 bp, Artificial Sequence
  Synthetic oligonucleotide
tctgctgaggcgtttggcacgcatatatta

SEQ ID NO: 398730 - DNA, 31 bp, Artificial Sequence
  Synthetic oligonucleotide
ttctatatggatagccaaatcgcctatatta

SEQ ID NO: 398731 - DNA, 30 bp, Artificial Sequence
  Synthetic oligonucleotide
ggaccgtaatctaacggtcgagcactatta

SEQ ID NO: 398732 - DNA, 30 bp, Artificial Sequence
  Synthetic oligonucleotide
ctccgccgcactcgagcgagtcgactatta

SEQ ID NO: 398733 - DNA, 30 bp, Artificial Sequence
  Synthetic oligonucleotide
acgggggtttgtcgcaagcttttactatta

SEQ ID NO: 398734 - DNA, 30 bp, Artificial Sequence
  Synthetic oligonucleotide
acgcacgcagtgtaatcaggtatcctatta

SEQ ID NO: 398735 - DNA, 30 bp, Artificial Sequence
  Synthetic oligonucleotide
taatcttggcacttgggggcaacgctatta

SEQ ID NO: 398736 - DNA, 30 bp, Artificial Sequence
  Synthetic oligonucleotide
actggactgtcgagtatctttacgctatta

SEQ ID NO: 398737 - DNA, 30 bp, Artificial Sequence
  Synthetic oligonucleotide
tattacctctgatgtatctgcaggctatta

SEQ ID NO: 398738 - DNA, 30 bp, Artificial Sequence
  Synthetic oligonucleotide
agggtcaaatctttgaccgggatgctatta

SEQ ID NO: 398739 - DNA, 30 bp, Artificial Sequence
  Synthetic oligonucleotide
gtagcaacgctatcgttttgtttgctatta

SEQ ID NO: 398740 - DNA, 30 bp, Artificial Sequence
  Synthetic oligonucleotide
tgatcttaccagcagccgagagatctatta

SEQ ID NO: 398741 - DNA, 30 bp, Artificial Sequence
  Synthetic oligonucleotide
caagttggggggaagccccgtcctctatta

SEQ ID NO: 398742 - DNA, 30 bp, Artificial Sequence
  Synthetic oligonucleotide
gtgccgtagctgctagcgtatgaagtatta

SEQ ID NO: 398743 - DNA, 30 bp, Artificial Sequence
  Synthetic oligonucleotide
gtgataagtcaccaccgtgtcacagtatta

SEQ ID NO: 398744 - DNA, 30 bp, Artificial Sequence
  Synthetic oligonucleotide
gcggacacagttacgatgaagtacgtatta

SEQ ID NO: 398745 - DNA, 30 bp, Artificial Sequence
  Synthetic oligonucleotide
agccgcaataagtaccttgaccgcgtatta

SEQ ID NO: 398746 - DNA, 30 bp, Artificial Sequence
  Synthetic oligonucleotide
caccattttatcggtctctgctgcgtatta

SEQ ID NO: 398747 - DNA, 30 bp, Artificial Sequence
  Synthetic oligonucleotide
cgccgcccgcatgctcgagagttcgtatta

SEQ ID NO: 398748 - DNA, 31 bp, Artificial Sequence
  Synthetic oligonucleotide
tgtggattcattggaataaagaatggtatta

SEQ ID NO: 398749 - DNA, 30 bp, Artificial Sequence
  Synthetic oligonucleotide
cctgtctaactcacgccgccggctgtatta

SEQ ID NO: 398750 - DNA, 30 bp, Artificial Sequence
  Synthetic oligonucleotide
gtctgtttaaatgtacaagaaattgtatta

SEQ ID NO: 398751 - DNA, 30 bp, Artificial Sequence
  Synthetic oligonucleotide
ttggtgtatgttttttaaacaattgtatta

SEQ ID NO: 398752 - DNA, 30 bp, Artificial Sequence
  Synthetic oligonucleotide
atttggtctcctgatacttggtttgtatta

SEQ ID NO: 398753 - DNA, 31 bp, Artificial Sequence
  Synthetic oligonucleotide
tgtactccctggtgtaggcctagcattatta

SEQ ID NO: 398754 - DNA, 30 bp, Artificial Sequence
  Synthetic oligonucleotide
gaaccgctacgggatattccaatattatta

SEQ ID NO: 398755 - DNA, 30 bp, Artificial Sequence
  Synthetic oligonucleotide
agccgtagcatcgatcgaaatcgcttatta

SEQ ID NO: 398756 - DNA, 30 bp, Artificial Sequence
  Synthetic oligonucleotide
aacagtcctcgatggttagcccggttatta

SEQ ID NO: 398757 - DNA, 30 bp, Artificial Sequence
  Synthetic oligonucleotide
gccaatgcatacgaagcgcgttggttatta

SEQ ID NO: 398758 - DNA, 30 bp, Artificial Sequence
  Synthetic oligonucleotide
ttattagaatttaggacaagacccaactta

SEQ ID NO: 398759 - DNA, 30 bp, Artificial Sequence
  Synthetic oligonucleotide
cggctgatacgagcacagtcttccaactta

SEQ ID NO: 398760 - DNA, 30 bp, Artificial Sequence
  Synthetic oligonucleotide
tagatcttcgactaggggtccggcaactta

SEQ ID NO: 398761 - DNA, 30 bp, Artificial Sequence
  Synthetic oligonucleotide
aagcagcccagtgttggggtgcagaactta

SEQ ID NO: 398762 - DNA, 30 bp, Artificial Sequence
  Synthetic oligonucleotide
tcatctggatacttgaccctacataactta

SEQ ID NO: 398763 - DNA, 30 bp, Artificial Sequence
  Synthetic oligonucleotide
ctagccttgccagatagcaatcctaactta

SEQ ID NO: 398764 - DNA, 30 bp, Artificial Sequence
  Synthetic oligonucleotide
accccgtatcccctgtagattgttaactta

SEQ ID NO: 398765 - DNA, 30 bp, Artificial Sequence
  Synthetic oligonucleotide
accaacgtaagcgaagctcggtttaactta

SEQ ID NO: 398766 - DNA, 30 bp, Artificial Sequence
  Synthetic oligonucleotide
cgcctgtcacatgcagtaagataacactta

SEQ ID NO: 398767 - DNA, 30 bp, Artificial Sequence
  Synthetic oligonucleotide
aggggctcttggcattcctccaaggactta

SEQ ID NO: 398768 - DNA, 30 bp, Artificial Sequence
  Synthetic oligonucleotide
cgagtcggagcgcagtcccagacggactta

SEQ ID NO: 398769 - DNA, 30 bp, Artificial Sequence
  Synthetic oligonucleotide
tcgccccactttcaacccaggattgactta

SEQ ID NO: 398770 - DNA, 30 bp, Artificial Sequence
  Synthetic oligonucleotide
gcctcccctgatgcactgagataatactta

SEQ ID NO: 398771 - DNA, 30 bp, Artificial Sequence
  Synthetic oligonucleotide
agcctctaagctgccttgatactatactta

SEQ ID NO: 398772 - DNA, 30 bp, Artificial Sequence
  Synthetic oligonucleotide
aacctgctgaaagccaggaactactactta

SEQ ID NO: 398773 - DNA, 30 bp, Artificial Sequence
  Synthetic oligonucleotide
aaataggggaatgcgattctcgcctactta

SEQ ID NO: 398774 - DNA, 30 bp, Artificial Sequence
  Synthetic oligonucleotide
ggcgacatcagttgtgtcttgtggtactta

SEQ ID NO: 398775 - DNA, 30 bp, Artificial Sequence
  Synthetic oligonucleotide
aaaggaggagtacctgttctcttgtactta

SEQ ID NO: 398776 - DNA, 30 bp, Artificial Sequence
  Synthetic oligonucleotide
tttaatccaagttctacatggctttactta

SEQ ID NO: 398777 - DNA, 30 bp, Artificial Sequence
  Synthetic oligonucleotide
gatgtgggtaaagcacaactcccaacctta

SEQ ID NO: 398778 - DNA, 30 bp, Artificial Sequence
  Synthetic oligonucleotide
atatgaggtcgaacgaatccgataacctta

SEQ ID NO: 398779 - DNA, 30 bp, Artificial Sequence
  Synthetic oligonucleotide
gttctagagtcggtagtatgcgtcacctta

SEQ ID NO: 398780 - DNA, 30 bp, Artificial Sequence
  Synthetic oligonucleotide
ccggattagagtacgccgtaattcacctta

SEQ ID NO: 398781 - DNA, 30 bp, Artificial Sequence
  Synthetic oligonucleotide
tcagccaaagggtttgttggcgggacctta

SEQ ID NO: 398782 - DNA, 30 bp, Artificial Sequence
  Synthetic oligonucleotide
gggttcctctaacatacgtcaaatacctta

SEQ ID NO: 398783 - DNA, 30 bp, Artificial Sequence
  Synthetic oligonucleotide
ttaggtgtatgtactttcccggatacctta

SEQ ID NO: 398784 - DNA, 30 bp, Artificial Sequence
  Synthetic oligonucleotide
tgcccacatagacgcatgatcaaaccctta

SEQ ID NO: 398785 - DNA, 30 bp, Artificial Sequence
  Synthetic oligonucleotide
agtgggtcgtggggtggtgggtaaccctta

SEQ ID NO: 398786 - DNA, 29 bp, Artificial Sequence
  Synthetic oligonucleotide
gggagcacgctgagttgtccccgccctta

SEQ ID NO: 398787 - DNA, 30 bp, Artificial Sequence
  Synthetic oligonucleotide
gcccccattaattattactcctgtccctta

SEQ ID NO: 398788 - DNA, 30 bp, Artificial Sequence
  Synthetic oligonucleotide
taaagcagcatttgctgaaataaagcctta

SEQ ID NO: 398789 - DNA, 30 bp, Artificial Sequence
  Synthetic oligonucleotide
cggatattgtgccatacagcataagcctta

SEQ ID NO: 398790 - DNA, 38 bp, Artificial Sequence
  Synthetic oligonucleotide
agttaccaacaatgagtcatcgcggcccgaaggcctta

SEQ ID NO: 398791 - DNA, 30 bp, Artificial Sequence
  Synthetic oligonucleotide
gctccccgaaagtacaaggccagggcctta

SEQ ID NO: 398792 - DNA, 30 bp, Artificial Sequence
  Synthetic oligonucleotide
gcaagtgccatggccagatctcgggcctta

SEQ ID NO: 398793 - DNA, 30 bp, Artificial Sequence
  Synthetic oligonucleotide
tggattccgaattgcgaacgaagctcctta

SEQ ID NO: 398794 - DNA, 30 bp, Artificial Sequence
  Synthetic oligonucleotide
ataagaggtccggtggagcatgagtcctta

SEQ ID NO: 398795 - DNA, 30 bp, Artificial Sequence
  Synthetic oligonucleotide
tggtctactaaaagggatcatgggtcctta

SEQ ID NO: 398796 - DNA, 30 bp, Artificial Sequence
  Synthetic oligonucleotide
tcaaacgttggaggtattatttattcctta

SEQ ID NO: 398797 - DNA, 30 bp, Artificial Sequence
  Synthetic oligonucleotide
tgatcagaaaatcacctatacaaaagctta

SEQ ID NO: 398798 - DNA, 30 bp, Artificial Sequence
  Synthetic oligonucleotide
acatacctgcctctggggcagtacagctta

SEQ ID NO: 398799 - DNA, 30 bp, Artificial Sequence
  Synthetic oligonucleotide
aaggtttgcgggtagagtcactccagctta

SEQ ID NO: 398800 - DNA, 30 bp, Artificial Sequence
  Synthetic oligonucleotide
ctgatcttatcgcgagcttcgccgagctta

SEQ ID NO: 398801 - DNA, 30 bp, Artificial Sequence
  Synthetic oligonucleotide
atgctatatagcccgttccaatcgagctta

SEQ ID NO: 398802 - DNA, 30 bp, Artificial Sequence
  Synthetic oligonucleotide
agtcattgtggtaaaacacgacatagctta

SEQ ID NO: 398803 - DNA, 30 bp, Artificial Sequence
  Synthetic oligonucleotide
ataaatgtggggttagctcattgtagctta

SEQ ID NO: 398804 - DNA, 30 bp, Artificial Sequence
  Synthetic oligonucleotide
cgacacggtatacctagggattaacgctta

SEQ ID NO: 398805 - DNA, 30 bp, Artificial Sequence
  Synthetic oligonucleotide
gatctccgttggcctcatttagagcgctta

SEQ ID NO: 398806 - DNA, 30 bp, Artificial Sequence
  Synthetic oligonucleotide
tatttccgattcggtagcctagtgcgctta

SEQ ID NO: 398807 - DNA, 30 bp, Artificial Sequence
  Synthetic oligonucleotide
ttgcccatagagatccgcaggttaggctta

SEQ ID NO: 398808 - DNA, 30 bp, Artificial Sequence
  Synthetic oligonucleotide
atcccgttagaatttagtataaacggctta

SEQ ID NO: 398809 - DNA, 30 bp, Artificial Sequence
  Synthetic oligonucleotide
ggtgtgggcctaggaacagcctccggctta

SEQ ID NO: 398810 - DNA, 30 bp, Artificial Sequence
  Synthetic oligonucleotide
aacctcgctaacggcgacggaatcggctta

SEQ ID NO: 398811 - DNA, 30 bp, Artificial Sequence
  Synthetic oligonucleotide
actgaacacgcgttttggaaggtcggctta

SEQ ID NO: 398812 - DNA, 30 bp, Artificial Sequence
  Synthetic oligonucleotide
tcggcggtgactggtatacagtcgggctta

SEQ ID NO: 398813 - DNA, 30 bp, Artificial Sequence
  Synthetic oligonucleotide
agagtgcattttcattctgctaggggctta

SEQ ID NO: 398814 - DNA, 30 bp, Artificial Sequence
  Synthetic oligonucleotide
ttccgcgtgataggacttaggttgggctta

SEQ ID NO: 398815 - DNA, 30 bp, Artificial Sequence
  Synthetic oligonucleotide
gcacctcgtgagcacacttaatgtggctta

SEQ ID NO: 398816 - DNA, 30 bp, Artificial Sequence
  Synthetic oligonucleotide
ccgttcttggtcgaagtgcaataatgctta

SEQ ID NO: 398817 - DNA, 30 bp, Artificial Sequence
  Synthetic oligonucleotide
caacataaactgattggcgatttatgctta

SEQ ID NO: 398818 - DNA, 30 bp, Artificial Sequence
  Synthetic oligonucleotide
tgcgtaagcatcatgtcggcacattgctta

SEQ ID NO: 398819 - DNA, 30 bp, Artificial Sequence
  Synthetic oligonucleotide
gtttaaggaagaacgtgtgatcattgctta

SEQ ID NO: 398820 - DNA, 30 bp, Artificial Sequence
  Synthetic oligonucleotide
tgtacatagcagtcgtctaaaacttgctta

SEQ ID NO: 398821 - DNA, 30 bp, Artificial Sequence
  Synthetic oligonucleotide
gtgtcgatttctgagtaagaaaaaatctta

SEQ ID NO: 398822 - DNA, 30 bp, Artificial Sequence
  Synthetic oligonucleotide
gcccccggccatgcccgacacaaaatctta

SEQ ID NO: 398823 - DNA, 30 bp, Artificial Sequence
  Synthetic oligonucleotide
ttacatttaaatggactgtgagaaatctta

SEQ ID NO: 398824 - DNA, 30 bp, Artificial Sequence
  Synthetic oligonucleotide
ggaactacatgcggcttttttggcatctta

SEQ ID NO: 398825 - DNA, 30 bp, Artificial Sequence
  Synthetic oligonucleotide
cagttgtggcaaagcaaaaatcagatctta

SEQ ID NO: 398826 - DNA, 30 bp, Artificial Sequence
  Synthetic oligonucleotide
tgatgcaggtaattggctaagtatatctta

SEQ ID NO: 398827 - DNA, 30 bp, Artificial Sequence
  Synthetic oligonucleotide
tgggagcagaccctcgaaggctttatctta

SEQ ID NO: 398828 - DNA, 30 bp, Artificial Sequence
  Synthetic oligonucleotide
cgtccaagttcggggttacagaaactctta

SEQ ID NO: 398829 - DNA, 30 bp, Artificial Sequence
  Synthetic oligonucleotide
gtatagagagcacaagcgtaggcactctta

SEQ ID NO: 398830 - DNA, 30 bp, Artificial Sequence
  Synthetic oligonucleotide
cttgggaccgtgcgttaacgccacctctta

SEQ ID NO: 398831 - DNA, 30 bp, Artificial Sequence
  Synthetic oligonucleotide
gtttgatgttacgtgcgacgtgacctctta

SEQ ID NO: 398832 - DNA, 30 bp, Artificial Sequence
  Synthetic oligonucleotide
ggagttaggaaataatttttgtccctctta

SEQ ID NO: 398833 - DNA, 30 bp, Artificial Sequence
  Synthetic oligonucleotide
cccctgtaaaagcgagaccttaggctctta

SEQ ID NO: 398834 - DNA, 30 bp, Artificial Sequence
  Synthetic oligonucleotide
gggaaaaactactatctttgagatctctta

SEQ ID NO: 398835 - DNA, 30 bp, Artificial Sequence
  Synthetic oligonucleotide
atatacctacctattaaagccgatctctta

SEQ ID NO: 398836 - DNA, 30 bp, Artificial Sequence
  Synthetic oligonucleotide
cgttttgtttatcggggaagttatctctta

SEQ ID NO: 398837 - DNA, 30 bp, Artificial Sequence
  Synthetic oligonucleotide
tgatacttatgaagacgtcacgctctctta

SEQ ID NO: 398838 - DNA, 30 bp, Artificial Sequence
  Synthetic oligonucleotide
cgcaaagttttatcatccgcccaagtctta

SEQ ID NO: 398839 - DNA, 30 bp, Artificial Sequence
  Synthetic oligonucleotide
gtgtaattgtagagatgacttaacgtctta

SEQ ID NO: 398840 - DNA, 30 bp, Artificial Sequence
  Synthetic oligonucleotide
cacactggcatattagtttctcgcgtctta

SEQ ID NO: 398841 - DNA, 30 bp, Artificial Sequence
  Synthetic oligonucleotide
gtcgagactgattcatcatcgctcgtctta

SEQ ID NO: 398842 - DNA, 30 bp, Artificial Sequence
  Synthetic oligonucleotide
ggtagatgcggactctgttccccggtctta

SEQ ID NO: 398843 - DNA, 30 bp, Artificial Sequence
  Synthetic oligonucleotide
ctttatatactggtagagttaagggtctta

SEQ ID NO: 398844 - DNA, 30 bp, Artificial Sequence
  Synthetic oligonucleotide
ttctacgttgaacataacaggttggtctta

SEQ ID NO: 398845 - DNA, 30 bp, Artificial Sequence
  Synthetic oligonucleotide
gattaaaagtacgtctaccttattgtctta

SEQ ID NO: 398846 - DNA, 30 bp, Artificial Sequence
  Synthetic oligonucleotide
tctagggtagccaaacagcagcaattctta

SEQ ID NO: 398847 - DNA, 30 bp, Artificial Sequence
  Synthetic oligonucleotide
ttgaggaagcatgacgacaacgaattctta

SEQ ID NO: 398848 - DNA, 30 bp, Artificial Sequence
  Synthetic oligonucleotide
gatatccgtgttcgagtggtcctgttctta

SEQ ID NO: 398849 - DNA, 30 bp, Artificial Sequence
  Synthetic oligonucleotide
aaatggaggtgatggtggaaattgttctta

SEQ ID NO: 398850 - DNA, 30 bp, Artificial Sequence
  Synthetic oligonucleotide
cggccgacactccggcagcctggtttctta

SEQ ID NO: 398851 - DNA, 30 bp, Artificial Sequence
  Synthetic oligonucleotide
aagggatttcgctgtgcggaccccaagtta

SEQ ID NO: 398852 - DNA, 30 bp, Artificial Sequence
  Synthetic oligonucleotide
tggggacacgaaggcccaacccgcaagtta

SEQ ID NO: 398853 - DNA, 30 bp, Artificial Sequence
  Synthetic oligonucleotide
acgcatatttagcattcgcgatagaagtta

SEQ ID NO: 398854 - DNA, 30 bp, Artificial Sequence
  Synthetic oligonucleotide
tggcccgcccacgtagcaggcacgaagtta

SEQ ID NO: 398855 - DNA, 30 bp, Artificial Sequence
  Synthetic oligonucleotide
tagttatgtcatatagacgtcgggaagtta

SEQ ID NO: 398856 - DNA, 30 bp, Artificial Sequence
  Synthetic oligonucleotide
ttcacgtttttaaattttagcctgaagtta

SEQ ID NO: 398857 - DNA, 30 bp, Artificial Sequence
  Synthetic oligonucleotide
tttgagccggactccgggtaaggacagtta

SEQ ID NO: 398858 - DNA, 30 bp, Artificial Sequence
  Synthetic oligonucleotide
gttaggttcttgggagggagatgtcagtta

SEQ ID NO: 398859 - DNA, 30 bp, Artificial Sequence
  Synthetic oligonucleotide
gtcaccgctgcttgtaaacgctgtcagtta

SEQ ID NO: 398860 - DNA, 30 bp, Artificial Sequence
  Synthetic oligonucleotide
ctccctagtcgcatgtacgaagaagagtta

SEQ ID NO: 398861 - DNA, 30 bp, Artificial Sequence
  Synthetic oligonucleotide
gatgagtaagtttccatgtcgttagagtta

SEQ ID NO: 398862 - DNA, 30 bp, Artificial Sequence
  Synthetic oligonucleotide
gaatcgtctcgagtcaatttcaacgagtta

SEQ ID NO: 398863 - DNA, 30 bp, Artificial Sequence
  Synthetic oligonucleotide
ggtttgaaaaaagcagttgtgtgcgagtta

SEQ ID NO: 398864 - DNA, 30 bp, Artificial Sequence
  Synthetic oligonucleotide
ctgtttgtttgcccagatgataaggagtta

SEQ ID NO: 398865 - DNA, 29 bp, Artificial Sequence
  Synthetic oligonucleotide
ttttcggcaagggctttggatctgagtta

SEQ ID NO: 398866 - DNA, 30 bp, Artificial Sequence
  Synthetic oligonucleotide
gcaatgcaggccagaactcctggtgagtta

SEQ ID NO: 398867 - DNA, 30 bp, Artificial Sequence
  Synthetic oligonucleotide
ccgaacttatccgggccctactaatagtta

SEQ ID NO: 398868 - DNA, 30 bp, Artificial Sequence
  Synthetic oligonucleotide
ccctgctaaagctaacttggtgggtagtta

SEQ ID NO: 398869 - DNA, 30 bp, Artificial Sequence
  Synthetic oligonucleotide
caagaaggttacaatgcatgcgtgtagtta

SEQ ID NO: 398870 - DNA, 30 bp, Artificial Sequence
  Synthetic oligonucleotide
gacgtaatcaacattttcaggtattagtta

SEQ ID NO: 398871 - DNA, 30 bp, Artificial Sequence
  Synthetic oligonucleotide
gcctgatacactatcaatctcctttagtta

SEQ ID NO: 398872 - DNA, 30 bp, Artificial Sequence
  Synthetic oligonucleotide
ggtctagcagaatactacgacttcacgtta

SEQ ID NO: 398873 - DNA, 30 bp, Artificial Sequence
  Synthetic oligonucleotide
aagcgtaggattaatatggaggtgacgtta

SEQ ID NO: 398874 - DNA, 30 bp, Artificial Sequence
  Synthetic oligonucleotide
tgtcattctcgggtgcacgaaactacgtta

SEQ ID NO: 398875 - DNA, 30 bp, Artificial Sequence
  Synthetic oligonucleotide
ggaagtttatttagaacttcgcgtacgtta

SEQ ID NO: 398876 - DNA, 30 bp, Artificial Sequence
  Synthetic oligonucleotide
cggagaataaggaggggtacgttaccgtta

SEQ ID NO: 398877 - DNA, 30 bp, Artificial Sequence
  Synthetic oligonucleotide
ggagagctaatgctcttatcttacccgtta

SEQ ID NO: 398878 - DNA, 30 bp, Artificial Sequence
  Synthetic oligonucleotide
aagcttacctttgtagtttcagccccgtta

SEQ ID NO: 398879 - DNA, 30 bp, Artificial Sequence
  Synthetic oligonucleotide
tgcatagtgcatcctatcttggatccgtta

SEQ ID NO: 398880 - DNA, 30 bp, Artificial Sequence
  Synthetic oligonucleotide
cagccgtgtcatgtagcctttctcgcgtta

SEQ ID NO: 398881 - DNA, 30 bp, Artificial Sequence
  Synthetic oligonucleotide
agcaataaagtaccggccgacctggcgtta

SEQ ID NO: 398882 - DNA, 30 bp, Artificial Sequence
  Synthetic oligonucleotide
gctgtggatgtcactattcctgctgcgtta

SEQ ID NO: 398883 - DNA, 30 bp, Artificial Sequence
  Synthetic oligonucleotide
gactttataaatgggcagccttgtgcgtta

SEQ ID NO: 398884 - DNA, 30 bp, Artificial Sequence
  Synthetic oligonucleotide
tggaacaagctgtgtaacagttttgcgtta

SEQ ID NO: 398885 - DNA, 30 bp, Artificial Sequence
  Synthetic oligonucleotide
gttacacacaactgtatgtatggatcgtta

SEQ ID NO: 398886 - DNA, 30 bp, Artificial Sequence
  Synthetic oligonucleotide
gagtggtcgatcgctcttaggcactcgtta

SEQ ID NO: 398887 - DNA, 30 bp, Artificial Sequence
  Synthetic oligonucleotide
gggacctgacaagttctgttgtcctcgtta

SEQ ID NO: 398888 - DNA, 30 bp, Artificial Sequence
  Synthetic oligonucleotide
gatgactcataaatcgactaccgctcgtta

SEQ ID NO: 398889 - DNA, 30 bp, Artificial Sequence
  Synthetic oligonucleotide
cttcacgtgatactaccacctgtctcgtta

SEQ ID NO: 398890 - DNA, 30 bp, Artificial Sequence
  Synthetic oligonucleotide
ggagtcgcgccatcgcttgcgccaaggtta

SEQ ID NO: 398891 - DNA, 30 bp, Artificial Sequence
  Synthetic oligonucleotide
tctgagaattcggcatatacatgaaggtta

SEQ ID NO: 398892 - DNA, 30 bp, Artificial Sequence
  Synthetic oligonucleotide
tggggaattactaatctgaacataaggtta

SEQ ID NO: 398893 - DNA, 30 bp, Artificial Sequence
  Synthetic oligonucleotide
ctatgcagacagtctagcccggtaaggtta

SEQ ID NO: 398894 - DNA, 30 bp, Artificial Sequence
  Synthetic oligonucleotide
ggcggtgtaaccttggtctagttaaggtta

SEQ ID NO: 398895 - DNA, 30 bp, Artificial Sequence
  Synthetic oligonucleotide
ctatacaatgggagtattgtggtcaggtta

SEQ ID NO: 398896 - DNA, 30 bp, Artificial Sequence
  Synthetic oligonucleotide
ctacggaggaagataatcgactagaggtta

SEQ ID NO: 398897 - DNA, 30 bp, Artificial Sequence
  Synthetic oligonucleotide
gttacaattcacggtatcggagttaggtta

SEQ ID NO: 398898 - DNA, 30 bp, Artificial Sequence
  Synthetic oligonucleotide
agttgggcgccccatctatttacacggtta

SEQ ID NO: 398899 - DNA, 30 bp, Artificial Sequence
  Synthetic oligonucleotide
accatttgtgcaatttatcaggaccggtta

SEQ ID NO: 398900 - DNA, 30 bp, Artificial Sequence
  Synthetic oligonucleotide
cctctctagtctaaggagaagctccggtta

SEQ ID NO: 398901 - DNA, 30 bp, Artificial Sequence
  Synthetic oligonucleotide
tgaagtactttctttcggccatcgcggtta

SEQ ID NO: 398902 - DNA, 30 bp, Artificial Sequence
  Synthetic oligonucleotide
gaagtcaatcctccattggtctatcggtta

SEQ ID NO: 398903 - DNA, 30 bp, Artificial Sequence
  Synthetic oligonucleotide
ccccttatttcgaatccgtctcctcggtta

SEQ ID NO: 398904 - DNA, 30 bp, Artificial Sequence
  Synthetic oligonucleotide
gtaagaaaactggtctcataatctcggtta

SEQ ID NO: 398905 - DNA, 31 bp, Artificial Sequence
  Synthetic oligonucleotide
gagctgggcaaccgcgggggccggtcggtta

SEQ ID NO: 398906 - DNA, 30 bp, Artificial Sequence
  Synthetic oligonucleotide
gtccaaaattcgagcgcccacgcagggtta

SEQ ID NO: 398907 - DNA, 30 bp, Artificial Sequence
  Synthetic oligonucleotide
gggaccgtctctacaggaatgatagggtta

SEQ ID NO: 398908 - DNA, 30 bp, Artificial Sequence
  Synthetic oligonucleotide
cggattcactctcaagcggacgtagggtta

SEQ ID NO: 398909 - DNA, 30 bp, Artificial Sequence
  Synthetic oligonucleotide
gaatttgtgatactcttcacccaggggtta

SEQ ID NO: 398910 - DNA, 30 bp, Artificial Sequence
  Synthetic oligonucleotide
gatagacgcgtcacagatagccaggggtta

SEQ ID NO: 398911 - DNA, 30 bp, Artificial Sequence
  Synthetic oligonucleotide
ataggagtttgtgtgatctatcaggggtta

SEQ ID NO: 398912 - DNA, 30 bp, Artificial Sequence
  Synthetic oligonucleotide
gaaatagaggagtctttagttacggggtta

SEQ ID NO: 398913 - DNA, 30 bp, Artificial Sequence
  Synthetic oligonucleotide
ggtggctccggcacccaataccgggggtta

SEQ ID NO: 398914 - DNA, 30 bp, Artificial Sequence
  Synthetic oligonucleotide
gtttagctaattagcctatgcactgggtta

SEQ ID NO: 398915 - DNA, 30 bp, Artificial Sequence
  Synthetic oligonucleotide
ggtatgtgtaagctcgatatcgcctggtta

SEQ ID NO: 398916 - DNA, 30 bp, Artificial Sequence
  Synthetic oligonucleotide
tcctccagcagcgcgggatgggcctggtta

SEQ ID NO: 398917 - DNA, 30 bp, Artificial Sequence
  Synthetic oligonucleotide
attattttcacgaacatttcgtgctggtta

SEQ ID NO: 398918 - DNA, 30 bp, Artificial Sequence
  Synthetic oligonucleotide
aagataatgcataatgccttccagtggtta

SEQ ID NO: 398919 - DNA, 30 bp, Artificial Sequence
  Synthetic oligonucleotide
cttttttcagtgcagagatgccggtggtta

SEQ ID NO: 398920 - DNA, 30 bp, Artificial Sequence
  Synthetic oligonucleotide
agcccaagtattcgtttcgggctgtggtta

SEQ ID NO: 398921 - DNA, 30 bp, Artificial Sequence
  Synthetic oligonucleotide
gccggcactctcgtagcgtgcttgtggtta

SEQ ID NO: 398922 - DNA, 30 bp, Artificial Sequence
  Synthetic oligonucleotide
tcaaaccaactactcaagtagaattggtta

SEQ ID NO: 398923 - DNA, 30 bp, Artificial Sequence
  Synthetic oligonucleotide
gggcacgtgttagggacacactgttggtta

SEQ ID NO: 398924 - DNA, 30 bp, Artificial Sequence
  Synthetic oligonucleotide
atactagcaagaggccgcggcgtttggtta

SEQ ID NO: 398925 - DNA, 30 bp, Artificial Sequence
  Synthetic oligonucleotide
cctaactgtacgctatgtagtcaaatgtta

SEQ ID NO: 398926 - DNA, 30 bp, Artificial Sequence
  Synthetic oligonucleotide
tgaaaaggcaattttttgtagaacatgtta

SEQ ID NO: 398927 - DNA, 30 bp, Artificial Sequence
  Synthetic oligonucleotide
tgcagcgaaagcgatcgacgtagcatgtta

SEQ ID NO: 398928 - DNA, 30 bp, Artificial Sequence
  Synthetic oligonucleotide
gaatgccccttggcgcggttagagatgtta

SEQ ID NO: 398929 - DNA, 30 bp, Artificial Sequence
  Synthetic oligonucleotide
aatgcacaaattaagagatgttatatgtta

SEQ ID NO: 398930 - DNA, 31 bp, Artificial Sequence
  Synthetic oligonucleotide
gcccttagggacagtcgatcaatctatgtta

SEQ ID NO: 398931 - DNA, 30 bp, Artificial Sequence
  Synthetic oligonucleotide
ataactcagttagttacagtaggtatgtta

SEQ ID NO: 398932 - DNA, 30 bp, Artificial Sequence
  Synthetic oligonucleotide
ctgtgtccgatggtattttatatactgtta

SEQ ID NO: 398933 - DNA, 30 bp, Artificial Sequence
  Synthetic oligonucleotide
ggctgaaagacgcaacctggtctactgtta

SEQ ID NO: 398934 - DNA, 30 bp, Artificial Sequence
  Synthetic oligonucleotide
catcttctgtgaaggcagacgcccctgtta

SEQ ID NO: 398935 - DNA, 30 bp, Artificial Sequence
  Synthetic oligonucleotide
cattagggggggtcacgatagggcctgtta

SEQ ID NO: 398936 - DNA, 30 bp, Artificial Sequence
  Synthetic oligonucleotide
ttactatagtaaccttcaaaggagctgtta

SEQ ID NO: 398937 - DNA, 30 bp, Artificial Sequence
  Synthetic oligonucleotide
aatccgtttagtcgctacacttcgctgtta

SEQ ID NO: 398938 - DNA, 30 bp, Artificial Sequence
  Synthetic oligonucleotide
atgatccagtggacaggtctcactctgtta

SEQ ID NO: 398939 - DNA, 30 bp, Artificial Sequence
  Synthetic oligonucleotide
tcgggtcacggagggtctcatactctgtta

SEQ ID NO: 398940 - DNA, 30 bp, Artificial Sequence
  Synthetic oligonucleotide
cggtccctgtaattgggtttcggagtgtta

SEQ ID NO: 398941 - DNA, 30 bp, Artificial Sequence
  Synthetic oligonucleotide
gctgcgcactgtttagcattaatagtgtta

SEQ ID NO: 398942 - DNA, 30 bp, Artificial Sequence
  Synthetic oligonucleotide
taaatgcgcggggcatttcagcacgtgtta

SEQ ID NO: 398943 - DNA, 30 bp, Artificial Sequence
  Synthetic oligonucleotide
gcgttcaaatacctacatctgagggtgtta

SEQ ID NO: 398944 - DNA, 30 bp, Artificial Sequence
  Synthetic oligonucleotide
actcacgcagcttgaccatacaaattgtta

SEQ ID NO: 398945 - DNA, 30 bp, Artificial Sequence
  Synthetic oligonucleotide
aggtttaagtataacaggaaccaattgtta

SEQ ID NO: 398946 - DNA, 30 bp, Artificial Sequence
  Synthetic oligonucleotide
catcgacgtctcctagattgtgaattgtta

SEQ ID NO: 398947 - DNA, 30 bp, Artificial Sequence
  Synthetic oligonucleotide
ctaagcgtcgttatgtatttcagattgtta

SEQ ID NO: 398948 - DNA, 30 bp, Artificial Sequence
  Synthetic oligonucleotide
gggagggccgttaggagggtgagattgtta

SEQ ID NO: 398949 - DNA, 30 bp, Artificial Sequence
  Synthetic oligonucleotide
agggacctattgtaggatgcaatgttgtta

SEQ ID NO: 398950 - DNA, 30 bp, Artificial Sequence
  Synthetic oligonucleotide
gacgaatctgagacgggtccggatttgtta

SEQ ID NO: 398951 - DNA, 30 bp, Artificial Sequence
  Synthetic oligonucleotide
tgatcatttatacggtgtactcttttgtta

SEQ ID NO: 398952 - DNA, 30 bp, Artificial Sequence
  Synthetic oligonucleotide
actaggcatatgccgggtgcgaaaaattta

SEQ ID NO: 398953 - DNA, 29 bp, Artificial Sequence
  Synthetic oligonucleotide
ttggcggaaggccaggggcgtcaaattta

SEQ ID NO: 398954 - DNA, 30 bp, Artificial Sequence
  Synthetic oligonucleotide
ccatcgggggtttttataacatgaaattta

SEQ ID NO: 398955 - DNA, 30 bp, Artificial Sequence
  Synthetic oligonucleotide
gtaagcccgtcaaagacggctgtaaattta

SEQ ID NO: 398956 - DNA, 30 bp, Artificial Sequence
  Synthetic oligonucleotide
gtactcctgcaatgctcgcggttaaattta

SEQ ID NO: 398957 - DNA, 30 bp, Artificial Sequence
  Synthetic oligonucleotide
agttgcaggaaaaattcatggcccaattta

SEQ ID NO: 398958 - DNA, 30 bp, Artificial Sequence
  Synthetic oligonucleotide
aagactacacgggctcgtaacagcaattta

SEQ ID NO: 398959 - DNA, 30 bp, Artificial Sequence
  Synthetic oligonucleotide
gaaacccaaaagcggaactaccgcaattta

SEQ ID NO: 398960 - DNA, 30 bp, Artificial Sequence
  Synthetic oligonucleotide
gcgttagcaggtttggcagctcgcaattta

SEQ ID NO: 398961 - DNA, 30 bp, Artificial Sequence
  Synthetic oligonucleotide
attatgtaacagttagccatatagaattta

SEQ ID NO: 398962 - DNA, 30 bp, Artificial Sequence
  Synthetic oligonucleotide
taacagaagagacaaccatctacgaattta

SEQ ID NO: 398963 - DNA, 30 bp, Artificial Sequence
  Synthetic oligonucleotide
aatggtgtacatcggtcaagtgttaattta

SEQ ID NO: 398964 - DNA, 30 bp, Artificial Sequence
  Synthetic oligonucleotide
aattcagacctaagaatggctatacattta

SEQ ID NO: 398965 - DNA, 30 bp, Artificial Sequence
  Synthetic oligonucleotide
cctgtggatactgttcagatgaaccattta

SEQ ID NO: 398966 - DNA, 30 bp, Artificial Sequence
  Synthetic oligonucleotide
aagtatttacgttaggtgcttacccattta

SEQ ID NO: 398967 - DNA, 30 bp, Artificial Sequence
  Synthetic oligonucleotide
ggagcccgtgcactgaactcaccgcattta

SEQ ID NO: 398968 - DNA, 30 bp, Artificial Sequence
  Synthetic oligonucleotide
gggatgaggtttagctcaactgttcattta

SEQ ID NO: 398969 - DNA, 30 bp, Artificial Sequence
  Synthetic oligonucleotide
atggctaaatcgtcttcagggccagattta

SEQ ID NO: 398970 - DNA, 30 bp, Artificial Sequence
  Synthetic oligonucleotide
agcattgtaccgctcattataagggattta

SEQ ID NO: 398971 - DNA, 30 bp, Artificial Sequence
  Synthetic oligonucleotide
ggacactcggactgcgcgcgcgtggattta

SEQ ID NO: 398972 - DNA, 30 bp, Artificial Sequence
  Synthetic oligonucleotide
gaaattgcacatggcgattaatatgattta

SEQ ID NO: 398973 - DNA, 30 bp, Artificial Sequence
  Synthetic oligonucleotide
ctataccaccgaggattggagcgtgattta

SEQ ID NO: 398974 - DNA, 30 bp, Artificial Sequence
  Synthetic oligonucleotide
ctgtgcaacgcctagggcaatagatattta

SEQ ID NO: 398975 - DNA, 30 bp, Artificial Sequence
  Synthetic oligonucleotide
gagcgggactatgctaattaaggatattta

SEQ ID NO: 398976 - DNA, 30 bp, Artificial Sequence
  Synthetic oligonucleotide
aacatcgcttggtcacgaacatgatattta

SEQ ID NO: 398977 - DNA, 30 bp, Artificial Sequence
  Synthetic oligonucleotide
tgtacgatattcttggtgaacgtatattta

SEQ ID NO: 398978 - DNA, 30 bp, Artificial Sequence
  Synthetic oligonucleotide
ctgctcgcgtgcgggtggattggctattta

SEQ ID NO: 398979 - DNA, 30 bp, Artificial Sequence
  Synthetic oligonucleotide
agaagcgggcatgagggatgggtctattta

SEQ ID NO: 398980 - DNA, 30 bp, Artificial Sequence
  Synthetic oligonucleotide
taggcatatgggcggggtcaaaggtattta

SEQ ID NO: 398981 - DNA, 30 bp, Artificial Sequence
  Synthetic oligonucleotide
tttgtgggccgttgattagtagggtattta

SEQ ID NO: 398982 - DNA, 30 bp, Artificial Sequence
  Synthetic oligonucleotide
cctaaccagaggacgttccgtaattattta

SEQ ID NO: 398983 - DNA, 30 bp, Artificial Sequence
  Synthetic oligonucleotide
tagctatggggcccgcgaacggcttattta

SEQ ID NO: 398984 - DNA, 30 bp, Artificial Sequence
  Synthetic oligonucleotide
aagcgtcgcactacctggatactttattta

SEQ ID NO: 398985 - DNA, 30 bp, Artificial Sequence
  Synthetic oligonucleotide
taaagtaagtaatttcttggaacaacttta

SEQ ID NO: 398986 - DNA, 30 bp, Artificial Sequence
  Synthetic oligonucleotide
taagtgccctagatgccggcgacaacttta

SEQ ID NO: 398987 - DNA, 30 bp, Artificial Sequence
  Synthetic oligonucleotide
tcatcatcgttttgtatgttaataacttta

SEQ ID NO: 398988 - DNA, 30 bp, Artificial Sequence
  Synthetic oligonucleotide
ggcacgggctattgtctactactcacttta

SEQ ID NO: 398989 - DNA, 30 bp, Artificial Sequence
  Synthetic oligonucleotide
ttgtgcggcgattaagcaatcgagacttta

SEQ ID NO: 398990 - DNA, 30 bp, Artificial Sequence
  Synthetic oligonucleotide
atgtgataattaggataacaacttacttta

SEQ ID NO: 398991 - DNA, 30 bp, Artificial Sequence
  Synthetic oligonucleotide
gcgggtcctaacagcacgcggaagccttta

SEQ ID NO: 398992 - DNA, 30 bp, Artificial Sequence
  Synthetic oligonucleotide
ctttatgccttggaaatattatagccttta

SEQ ID NO: 398993 - DNA, 30 bp, Artificial Sequence
  Synthetic oligonucleotide
ctatatctccaggcttgagtgtagccttta

SEQ ID NO: 398994 - DNA, 30 bp, Artificial Sequence
  Synthetic oligonucleotide
cgcgcaaggggcaatccgttttggccttta

SEQ ID NO: 398995 - DNA, 30 bp, Artificial Sequence
  Synthetic oligonucleotide
actcggggtcatatgagttaaaaagcttta

SEQ ID NO: 398996 - DNA, 30 bp, Artificial Sequence
  Synthetic oligonucleotide
gctatgtccgcgtgctttgagtaagcttta

SEQ ID NO: 398997 - DNA, 30 bp, Artificial Sequence
  Synthetic oligonucleotide
ggctaacgtacggtcgtgtacccagcttta

SEQ ID NO: 398998 - DNA, 30 bp, Artificial Sequence
  Synthetic oligonucleotide
ctcccttcatggcctgcgctctgcgcttta

SEQ ID NO: 398999 - DNA, 30 bp, Artificial Sequence
  Synthetic oligonucleotide
tatgggtacaccgggcttatgtcggcttta

SEQ ID NO: 399000 - DNA, 30 bp, Artificial Sequence
  Synthetic oligonucleotide
gtctgcgggtacttaacactttgggcttta

SEQ ID NO: 399001 - DNA, 30 bp, Artificial Sequence
  Synthetic oligonucleotide
aacaatctttcaatatatggctttgcttta

SEQ ID NO: 399002 - DNA, 30 bp, Artificial Sequence
  Synthetic oligonucleotide
ggactaaggttcatattagaccaatcttta

SEQ ID NO: 399003 - DNA, 30 bp, Artificial Sequence
  Synthetic oligonucleotide
accgcccggtctcagtgacacacatcttta

SEQ ID NO: 399004 - DNA, 30 bp, Artificial Sequence
  Synthetic oligonucleotide
gcgtcaagttcgcagtcgaggaactcttta

SEQ ID NO: 399005 - DNA, 30 bp, Artificial Sequence
  Synthetic oligonucleotide
atgactcctcacccgacactgccctcttta

SEQ ID NO: 399006 - DNA, 30 bp, Artificial Sequence
  Synthetic oligonucleotide
atcagcccacaagcagctaagagctcttta

SEQ ID NO: 399007 - DNA, 30 bp, Artificial Sequence
  Synthetic oligonucleotide
tacgccttataaagtgatagcgcgtcttta

SEQ ID NO: 399008 - DNA, 30 bp, Artificial Sequence
  Synthetic oligonucleotide
acactgcaaggcatgcgtataaattcttta

SEQ ID NO: 399009 - DNA, 30 bp, Artificial Sequence
  Synthetic oligonucleotide
cagcgcgatactgtcgctccttcttcttta

SEQ ID NO: 399010 - DNA, 30 bp, Artificial Sequence
  Synthetic oligonucleotide
aatggggttgaatggatgaatttttcttta

SEQ ID NO: 399011 - DNA, 30 bp, Artificial Sequence
  Synthetic oligonucleotide
ccctcctccatataagcaattaccagttta

SEQ ID NO: 399012 - DNA, 30 bp, Artificial Sequence
  Synthetic oligonucleotide
gaccataactggctatcagttgccagttta

SEQ ID NO: 399013 - DNA, 30 bp, Artificial Sequence
  Synthetic oligonucleotide
aagtaggcttgctaaaatgtagggagttta

SEQ ID NO: 399014 - DNA, 30 bp, Artificial Sequence
  Synthetic oligonucleotide
ttacaattttatcgcctctcgtggagttta

SEQ ID NO: 399015 - DNA, 30 bp, Artificial Sequence
  Synthetic oligonucleotide
aggcaagatagggctatttagccccgttta

SEQ ID NO: 399016 - DNA, 30 bp, Artificial Sequence
  Synthetic oligonucleotide
taacaactagcaatcgcaataaagcgttta

SEQ ID NO: 399017 - DNA, 30 bp, Artificial Sequence
  Synthetic oligonucleotide
gaattgcggtgaaatgtctcttggcgttta

SEQ ID NO: 399018 - DNA, 30 bp, Artificial Sequence
  Synthetic oligonucleotide
ttaaaggccggattttatctgcctcgttta

SEQ ID NO: 399019 - DNA, 30 bp, Artificial Sequence
  Synthetic oligonucleotide
ggctactttacactaccttgtagtcgttta

SEQ ID NO: 399020 - DNA, 30 bp, Artificial Sequence
  Synthetic oligonucleotide
gtgacatgatgaatagcttgccaaggttta

SEQ ID NO: 399021 - DNA, 30 bp, Artificial Sequence
  Synthetic oligonucleotide
acagacttaggtgtcttgtattaaggttta

SEQ ID NO: 399022 - DNA, 30 bp, Artificial Sequence
  Synthetic oligonucleotide
tcttgtaatgaatcaacgtctagaggttta

SEQ ID NO: 399023 - DNA, 30 bp, Artificial Sequence
  Synthetic oligonucleotide
atggagacggggaccgacgttgtcggttta

SEQ ID NO: 399024 - DNA, 30 bp, Artificial Sequence
  Synthetic oligonucleotide
gaaccagtagaattgattattccgggttta

SEQ ID NO: 399025 - DNA, 30 bp, Artificial Sequence
  Synthetic oligonucleotide
tgctactgtgtttcaaggtttgcgggttta

SEQ ID NO: 399026 - DNA, 30 bp, Artificial Sequence
  Synthetic oligonucleotide
taaactacgccgacgtggctggtgggttta

SEQ ID NO: 399027 - DNA, 30 bp, Artificial Sequence
  Synthetic oligonucleotide
gggttaacacataataagccgcatggttta

SEQ ID NO: 399028 - DNA, 30 bp, Artificial Sequence
  Synthetic oligonucleotide
tctctcgtggcggctggtatgtatggttta

SEQ ID NO: 399029 - DNA, 30 bp, Artificial Sequence
  Synthetic oligonucleotide
acttcctgctgtataacgatgagtggttta

SEQ ID NO: 399030 - DNA, 30 bp, Artificial Sequence
  Synthetic oligonucleotide
gcgcgcacgatcaagcaagatcgtggttta

SEQ ID NO: 399031 - DNA, 30 bp, Artificial Sequence
  Synthetic oligonucleotide
aaatacccggaatgtccagatattggttta

SEQ ID NO: 399032 - DNA, 30 bp, Artificial Sequence
  Synthetic oligonucleotide
agcaccatagttgagaattttagatgttta

SEQ ID NO: 399033 - DNA, 30 bp, Artificial Sequence
  Synthetic oligonucleotide
aggctcagggttacttataaatactgttta

SEQ ID NO: 399034 - DNA, 30 bp, Artificial Sequence
  Synthetic oligonucleotide
tactcaaagtattggatgtatacctgttta

SEQ ID NO: 399035 - DNA, 30 bp, Artificial Sequence
  Synthetic oligonucleotide
gcatttatttcagtgattacaccctgttta

SEQ ID NO: 399036 - DNA, 30 bp, Artificial Sequence
  Synthetic oligonucleotide
ctcgtaggcgcttacgctccggggtgttta

SEQ ID NO: 399037 - DNA, 29 bp, Artificial Sequence
  Synthetic oligonucleotide
gcatacgcgcgttatactacctgtgttta

SEQ ID NO: 399038 - DNA, 30 bp, Artificial Sequence
  Synthetic oligonucleotide
aaacacagatcattcccaatggattgttta

SEQ ID NO: 399039 - DNA, 30 bp, Artificial Sequence
  Synthetic oligonucleotide
tttggccgactctcagcagtaagttgttta

SEQ ID NO: 399040 - DNA, 30 bp, Artificial Sequence
  Synthetic oligonucleotide
aaggttcaatgctgcactgaaggttgttta

SEQ ID NO: 399041 - DNA, 30 bp, Artificial Sequence
  Synthetic oligonucleotide
atgatctcggtgttaacgtgaatttgttta

SEQ ID NO: 399042 - DNA, 30 bp, Artificial Sequence
  Synthetic oligonucleotide
gtgggtattcaacacggcatataaatttta

SEQ ID NO: 399043 - DNA, 30 bp, Artificial Sequence
  Synthetic oligonucleotide
accccatttccatggaactagataatttta

SEQ ID NO: 399044 - DNA, 30 bp, Artificial Sequence
  Synthetic oligonucleotide
gtacctcgttgagctaaaatagtaatttta

SEQ ID NO: 399045 - DNA, 30 bp, Artificial Sequence
  Synthetic oligonucleotide
cgtctagcgcttgaattttatcacatttta

SEQ ID NO: 399046 - DNA, 30 bp, Artificial Sequence
  Synthetic oligonucleotide
atgaaggcggtggtatgccccgacatttta

SEQ ID NO: 399047 - DNA, 30 bp, Artificial Sequence
  Synthetic oligonucleotide
atttgccctccgtcaagcgacatcatttta

SEQ ID NO: 399048 - DNA, 30 bp, Artificial Sequence
  Synthetic oligonucleotide
gtatgctacatatggattctcttcatttta

SEQ ID NO: 399049 - DNA, 30 bp, Artificial Sequence
  Synthetic oligonucleotide
ccgaagcaaattcacgcgtggtggatttta

SEQ ID NO: 399050 - DNA, 30 bp, Artificial Sequence
  Synthetic oligonucleotide
agtgtctgagatgtattgtgttggatttta

SEQ ID NO: 399051 - DNA, 30 bp, Artificial Sequence
  Synthetic oligonucleotide
gcgtattattcgcgatacgttggtatttta

SEQ ID NO: 399052 - DNA, 30 bp, Artificial Sequence
  Synthetic oligonucleotide
ggggatggttacgagtaatcaaacctttta

SEQ ID NO: 399053 - DNA, 30 bp, Artificial Sequence
  Synthetic oligonucleotide
cggtggggtaaacttacatctaacctttta

SEQ ID NO: 399054 - DNA, 30 bp, Artificial Sequence
  Synthetic oligonucleotide
aaaagtgcccgctgaaaataatgcctttta

SEQ ID NO: 399055 - DNA, 30 bp, Artificial Sequence
  Synthetic oligonucleotide
ttccaaatgcagagaatcatctgcctttta

SEQ ID NO: 399056 - DNA, 30 bp, Artificial Sequence
  Synthetic oligonucleotide
agttacaaaggaataggaagtttcctttta

SEQ ID NO: 399057 - DNA, 30 bp, Artificial Sequence
  Synthetic oligonucleotide
ttatgggctcgggctcctttggcgctttta

SEQ ID NO: 399058 - DNA, 30 bp, Artificial Sequence
  Synthetic oligonucleotide
ttgagcaggatggtatcgctcgggctttta

SEQ ID NO: 399059 - DNA, 30 bp, Artificial Sequence
  Synthetic oligonucleotide
ggcgtggaaactggaagcagctatctttta

SEQ ID NO: 399060 - DNA, 30 bp, Artificial Sequence
  Synthetic oligonucleotide
gagcaagaacagattcagcttcgtctttta

SEQ ID NO: 399061 - DNA, 30 bp, Artificial Sequence
  Synthetic oligonucleotide
gaaaccatgtacgtgcggtacattctttta

SEQ ID NO: 399062 - DNA, 30 bp, Artificial Sequence
  Synthetic oligonucleotide
gaggcccgaaatatagcggggcttctttta

SEQ ID NO: 399063 - DNA, 30 bp, Artificial Sequence
  Synthetic oligonucleotide
gcatatcggaacgctgatgtctgcgtttta

SEQ ID NO: 399064 - DNA, 30 bp, Artificial Sequence
  Synthetic oligonucleotide
caactctgtttagcagtatttcaggtttta

SEQ ID NO: 399065 - DNA, 30 bp, Artificial Sequence
  Synthetic oligonucleotide
atttggatggggcgcccctaggaggtttta

SEQ ID NO: 399066 - DNA, 30 bp, Artificial Sequence
  Synthetic oligonucleotide
taagctcgcgatggatcttcttcggtttta

SEQ ID NO: 399067 - DNA, 30 bp, Artificial Sequence
  Synthetic oligonucleotide
tcacgtaagaagaagagcaaaaatgtttta

SEQ ID NO: 399068 - DNA, 30 bp, Artificial Sequence
  Synthetic oligonucleotide
ggtagtgtttcctcagcgagtcttgtttta

SEQ ID NO: 399069 - DNA, 30 bp, Artificial Sequence
  Synthetic oligonucleotide
cagccatccatatttcgatcgtttgtttta

SEQ ID NO: 399070 - DNA, 30 bp, Artificial Sequence
  Synthetic oligonucleotide
gaaatggcagtattgacctagtgattttta

SEQ ID NO: 399071 - DNA, 30 bp, Artificial Sequence
  Synthetic oligonucleotide
agttgatgttcaaagggcgggagcttttta

SEQ ID NO: 399072 - DNA, 30 bp, Artificial Sequence
  Synthetic oligonucleotide
gtttgtggtttacgtttgttaccgttttta

SEQ ID NO: 399073 - DNA, 30 bp, Artificial Sequence
  Synthetic oligonucleotide
aaaaatcgcaacctgcatcgttcgttttta

SEQ ID NO: 399074 - DNA, 30 bp, Artificial Sequence
  Synthetic oligonucleotide
ccgtagctttggctagcattactgttttta

SEQ ID NO: 399075 - DNA, 30 bp, Artificial Sequence
  Synthetic oligonucleotide
taagcgagtcaacatgcgacaggtttttta

SEQ ID NO: 399076 - DNA, 30 bp, Artificial Sequence
  Synthetic oligonucleotide
gctacattagggagcttagtaccaaaaaac

SEQ ID NO: 399077 - DNA, 30 bp, Artificial Sequence
  Synthetic oligonucleotide
cgttggtatggtttgaaatagccaaaaaac

SEQ ID NO: 399078 - DNA, 30 bp, Artificial Sequence
  Synthetic oligonucleotide
gtacatccaagctcacactacagaaaaaac

SEQ ID NO: 399079 - DNA, 30 bp, Artificial Sequence
  Synthetic oligonucleotide
gctgcattccgagcatttatgcgaaaaaac

SEQ ID NO: 399080 - DNA, 30 bp, Artificial Sequence
  Synthetic oligonucleotide
gcctccggtacaagcaggtcattaaaaaac

SEQ ID NO: 399081 - DNA, 30 bp, Artificial Sequence
  Synthetic oligonucleotide
cgtcacatcgcgggccacatggccaaaaac

SEQ ID NO: 399082 - DNA, 30 bp, Artificial Sequence
  Synthetic oligonucleotide
aatcttgtacgacggagcggcgtcaaaaac

SEQ ID NO: 399083 - DNA, 30 bp, Artificial Sequence
  Synthetic oligonucleotide
gggggttttggagcctcggattagaaaaac

SEQ ID NO: 399084 - DNA, 30 bp, Artificial Sequence
  Synthetic oligonucleotide
gttggggttacgaaagtgtaatcgaaaaac

SEQ ID NO: 399085 - DNA, 30 bp, Artificial Sequence
  Synthetic oligonucleotide
gactaactgtcattgtgagcgtggaaaaac

SEQ ID NO: 399086 - DNA, 30 bp, Artificial Sequence
  Synthetic oligonucleotide
acgaacggacgctcttacaattataaaaac

SEQ ID NO: 399087 - DNA, 30 bp, Artificial Sequence
  Synthetic oligonucleotide
tgttacaagtaatcgcgttttcaccaaaac

SEQ ID NO: 399088 - DNA, 30 bp, Artificial Sequence
  Synthetic oligonucleotide
cctgtattatactcgccgcacgagcaaaac

SEQ ID NO: 399089 - DNA, 30 bp, Artificial Sequence
  Synthetic oligonucleotide
tcccgtataaggtcccgaccatcgcaaaac

SEQ ID NO: 399090 - DNA, 30 bp, Artificial Sequence
  Synthetic oligonucleotide
acagtttccgtcaaagaattatggcaaaac

SEQ ID NO: 399091 - DNA, 30 bp, Artificial Sequence
  Synthetic oligonucleotide
caagttttatagtgactattcttgcaaaac

SEQ ID NO: 399092 - DNA, 30 bp, Artificial Sequence
  Synthetic oligonucleotide
cgtccaccggcaccgtagtaagaagaaaac

SEQ ID NO: 399093 - DNA, 30 bp, Artificial Sequence
  Synthetic oligonucleotide
ccgaagcatgtttgtacgctcctagaaaac

SEQ ID NO: 399094 - DNA, 30 bp, Artificial Sequence
  Synthetic oligonucleotide
tactcacacaacgagccctcgttagaaaac

SEQ ID NO: 399095 - DNA, 30 bp, Artificial Sequence
  Synthetic oligonucleotide
atctatgcgttagtcggcatataggaaaac

SEQ ID NO: 399096 - DNA, 30 bp, Artificial Sequence
  Synthetic oligonucleotide
tcccactacgagtcggatcggtaggaaaac

SEQ ID NO: 399097 - DNA, 30 bp, Artificial Sequence
  Synthetic oligonucleotide
tcgccggtgtcaagcacatgcccggaaaac

SEQ ID NO: 399098 - DNA, 30 bp, Artificial Sequence
  Synthetic oligonucleotide
tgtatgtcttagcaaatcgttagtgaaaac

SEQ ID NO: 399099 - DNA, 30 bp, Artificial Sequence
  Synthetic oligonucleotide
ggcgagccgtatatcagtccagactaaaac

SEQ ID NO: 399100 - DNA, 30 bp, Artificial Sequence
  Synthetic oligonucleotide
gtaatggtagttgtcgtggcggactaaaac

SEQ ID NO: 399101 - DNA, 30 bp, Artificial Sequence
  Synthetic oligonucleotide
cgtaagcaagttcttaatcacccgtaaaac

SEQ ID NO: 399102 - DNA, 30 bp, Artificial Sequence
  Synthetic oligonucleotide
ggaaatacgccttgaagtcataattaaaac

SEQ ID NO: 399103 - DNA, 30 bp, Artificial Sequence
  Synthetic oligonucleotide
tctattcggagtatatcatatcattaaaac

SEQ ID NO: 399104 - DNA, 30 bp, Artificial Sequence
  Synthetic oligonucleotide
gaagaagcttgttggtgcattgattaaaac

SEQ ID NO: 399105 - DNA, 30 bp, Artificial Sequence
  Synthetic oligonucleotide
aaaatgcacccgcacagcttgtattaaaac

SEQ ID NO: 399106 - DNA, 30 bp, Artificial Sequence
  Synthetic oligonucleotide
ggtaattaaacaatcattgcttattaaaac

SEQ ID NO: 399107 - DNA, 30 bp, Artificial Sequence
  Synthetic oligonucleotide
gaccctaggctccggaatgcatgttaaaac

SEQ ID NO: 399108 - DNA, 30 bp, Artificial Sequence
  Synthetic oligonucleotide
gtgacatcgccggtaccctaggacacaaac

SEQ ID NO: 399109 - DNA, 30 bp, Artificial Sequence
  Synthetic oligonucleotide
tcgggttgagcttaactggctgctacaaac

SEQ ID NO: 399110 - DNA, 30 bp, Artificial Sequence
  Synthetic oligonucleotide
gcagttagatgttcttgcttgattacaaac

SEQ ID NO: 399111 - DNA, 30 bp, Artificial Sequence
  Synthetic oligonucleotide
tgcgaccggaaacccacggtttttacaaac

SEQ ID NO: 399112 - DNA, 30 bp, Artificial Sequence
  Synthetic oligonucleotide
gtgcaggatgtttttacgggggccccaaac

SEQ ID NO: 399113 - DNA, 31 bp, Artificial Sequence
  Synthetic oligonucleotide
actttgccatcaggcttaccctgtcccaaac

SEQ ID NO: 399114 - DNA, 30 bp, Artificial Sequence
  Synthetic oligonucleotide
aaaagtatggaagcctggaactcgccaaac

SEQ ID NO: 399115 - DNA, 30 bp, Artificial Sequence
  Synthetic oligonucleotide
acagattggagcttaatgccatttccaaac

SEQ ID NO: 399116 - DNA, 30 bp, Artificial Sequence
  Synthetic oligonucleotide
tgtttggcaacgacgtcttcgccagcaaac

SEQ ID NO: 399117 - DNA, 30 bp, Artificial Sequence
  Synthetic oligonucleotide
tgtaggaaactacgtgtggacaacgcaaac

SEQ ID NO: 399118 - DNA, 30 bp, Artificial Sequence
  Synthetic oligonucleotide
acctctcaagtttggatctcgaacgcaaac

SEQ ID NO: 399119 - DNA, 30 bp, Artificial Sequence
  Synthetic oligonucleotide
tcgaagttttcttcggcggacaaggcaaac

SEQ ID NO: 399120 - DNA, 30 bp, Artificial Sequence
  Synthetic oligonucleotide
acaagttccctggcgataacaccggcaaac

SEQ ID NO: 399121 - DNA, 30 bp, Artificial Sequence
  Synthetic oligonucleotide
cttcaccatataatgactcctttggcaaac

SEQ ID NO: 399122 - DNA, 30 bp, Artificial Sequence
  Synthetic oligonucleotide
aagcttttgatactcggatttagtgcaaac

SEQ ID NO: 399123 - DNA, 30 bp, Artificial Sequence
  Synthetic oligonucleotide
ctgtttaagccaggtgattttgcatcaaac

SEQ ID NO: 399124 - DNA, 30 bp, Artificial Sequence
  Synthetic oligonucleotide
tgagggcaggtatcgggccaaaagtcaaac

SEQ ID NO: 399125 - DNA, 30 bp, Artificial Sequence
  Synthetic oligonucleotide
gtttggagtgggtatctggagtagtcaaac

SEQ ID NO: 399126 - DNA, 30 bp, Artificial Sequence
  Synthetic oligonucleotide
gaacgattaggcctctggggtacaagaaac

SEQ ID NO: 399127 - DNA, 30 bp, Artificial Sequence
  Synthetic oligonucleotide
ggggcctctatttcaaccaaggacagaaac

SEQ ID NO: 399128 - DNA, 30 bp, Artificial Sequence
  Synthetic oligonucleotide
tgcgtagtcaggactactataggcagaaac

SEQ ID NO: 399129 - DNA, 30 bp, Artificial Sequence
  Synthetic oligonucleotide
aacaagcgtccgcatttatggttcagaaac

SEQ ID NO: 399130 - DNA, 30 bp, Artificial Sequence
  Synthetic oligonucleotide
cttgggttaaagagctgagcacggagaaac

SEQ ID NO: 399131 - DNA, 30 bp, Artificial Sequence
  Synthetic oligonucleotide
atggacacgctttgctacgtactgagaaac

SEQ ID NO: 399132 - DNA, 30 bp, Artificial Sequence
  Synthetic oligonucleotide
tacatttggtttgaaaggatagatagaaac

SEQ ID NO: 399133 - DNA, 30 bp, Artificial Sequence
  Synthetic oligonucleotide
atggaagcaacatcttagaaatctagaaac

SEQ ID NO: 399134 - DNA, 30 bp, Artificial Sequence
  Synthetic oligonucleotide
acgttggtgacgctctaaggaagtagaaac

SEQ ID NO: 399135 - DNA, 30 bp, Artificial Sequence
  Synthetic oligonucleotide
agaacgtgcaggtgttctctccgtagaaac

SEQ ID NO: 399136 - DNA, 30 bp, Artificial Sequence
  Synthetic oligonucleotide
tatagtggtattggtcaccgtgcccgaaac

SEQ ID NO: 399137 - DNA, 30 bp, Artificial Sequence
  Synthetic oligonucleotide
ggttaagactgcgtccgcaggattcgaaac

SEQ ID NO: 399138 - DNA, 30 bp, Artificial Sequence
  Synthetic oligonucleotide
tggtgctcaaaggcccctctcgttcgaaac

SEQ ID NO: 399139 - DNA, 30 bp, Artificial Sequence
  Synthetic oligonucleotide
cagattttccgttcggacccacaaggaaac

SEQ ID NO: 399140 - DNA, 30 bp, Artificial Sequence
  Synthetic oligonucleotide
agacttagtctggtatctcatacaggaaac

SEQ ID NO: 399141 - DNA, 30 bp, Artificial Sequence
  Synthetic oligonucleotide
cgcctccgtatcagcatatgcaacggaaac

SEQ ID NO: 399142 - DNA, 30 bp, Artificial Sequence
  Synthetic oligonucleotide
tgcaaggttcaacgtgcaatgctcggaaac

SEQ ID NO: 399143 - DNA, 30 bp, Artificial Sequence
  Synthetic oligonucleotide
attacttggtgaacgaataatctcggaaac

SEQ ID NO: 399144 - DNA, 30 bp, Artificial Sequence
  Synthetic oligonucleotide
gatggtccgaccgtcattggtacgggaaac

SEQ ID NO: 399145 - DNA, 30 bp, Artificial Sequence
  Synthetic oligonucleotide
agaccacgcataagctgcgtaaatggaaac

SEQ ID NO: 399146 - DNA, 30 bp, Artificial Sequence
  Synthetic oligonucleotide
ctgagtaaatattgtatagctcctggaaac

SEQ ID NO: 399147 - DNA, 30 bp, Artificial Sequence
  Synthetic oligonucleotide
tggattctacatagcgtggcataatgaaac

SEQ ID NO: 399148 - DNA, 30 bp, Artificial Sequence
  Synthetic oligonucleotide
gaattggctagcgacacatgttgatgaaac

SEQ ID NO: 399149 - DNA, 30 bp, Artificial Sequence
  Synthetic oligonucleotide
gaaatttcacccacatgaaagttatgaaac

SEQ ID NO: 399150 - DNA, 30 bp, Artificial Sequence
  Synthetic oligonucleotide
attaggtgggaaggtcatgtggtctgaaac

SEQ ID NO: 399151 - DNA, 30 bp, Artificial Sequence
  Synthetic oligonucleotide
gcaaacatcgttaaactagccaattgaaac

SEQ ID NO: 399152 - DNA, 30 bp, Artificial Sequence
  Synthetic oligonucleotide
gtcggataagttggtacatttaaaataaac

SEQ ID NO: 399153 - DNA, 30 bp, Artificial Sequence
  Synthetic oligonucleotide
ctgtctcacggaggggttcatccaataaac

SEQ ID NO: 399154 - DNA, 30 bp, Artificial Sequence
  Synthetic oligonucleotide
ttgatgaaatcacattactctcgaataaac

SEQ ID NO: 399155 - DNA, 30 bp, Artificial Sequence
  Synthetic oligonucleotide
tgatttaattaatatatcgcattaataaac

SEQ ID NO: 399156 - DNA, 30 bp, Artificial Sequence
  Synthetic oligonucleotide
gttctcctcacagaatatgccagcataaac

SEQ ID NO: 399157 - DNA, 30 bp, Artificial Sequence
  Synthetic oligonucleotide
gttgatccctgaattgccaaaggcataaac

SEQ ID NO: 399158 - DNA, 30 bp, Artificial Sequence
  Synthetic oligonucleotide
gtagtcaattctctaaagtcagtcataaac

SEQ ID NO: 399159 - DNA, 29 bp, Artificial Sequence
  Synthetic oligonucleotide
tcgtaactttgagtgctgcagctataaac

SEQ ID NO: 399160 - DNA, 30 bp, Artificial Sequence
  Synthetic oligonucleotide
taataatggtcaggcggcgacgctataaac

SEQ ID NO: 399161 - DNA, 30 bp, Artificial Sequence
  Synthetic oligonucleotide
gtaaaacgcgggacacagtcgcgtataaac

SEQ ID NO: 399162 - DNA, 30 bp, Artificial Sequence
  Synthetic oligonucleotide
actcatatgaaccgcccttccggtataaac

SEQ ID NO: 399163 - DNA, 30 bp, Artificial Sequence
  Synthetic oligonucleotide
caggccccgaatacctcaggcattataaac

SEQ ID NO: 399164 - DNA, 30 bp, Artificial Sequence
  Synthetic oligonucleotide
aaagactgttattcactcgaatttataaac

SEQ ID NO: 399165 - DNA, 30 bp, Artificial Sequence
  Synthetic oligonucleotide
actctgtgttggccggggactgaactaaac

SEQ ID NO: 399166 - DNA, 30 bp, Artificial Sequence
  Synthetic oligonucleotide
tatccatcactgtccagcggctaactaaac

SEQ ID NO: 399167 - DNA, 30 bp, Artificial Sequence
  Synthetic oligonucleotide
cacagccgagcggttaccgacgtcctaaac

SEQ ID NO: 399168 - DNA, 30 bp, Artificial Sequence
  Synthetic oligonucleotide
tcgcgtattactggataatagcagctaaac

SEQ ID NO: 399169 - DNA, 30 bp, Artificial Sequence
  Synthetic oligonucleotide
tgctcgtgcggacattatttaatgctaaac

SEQ ID NO: 399170 - DNA, 30 bp, Artificial Sequence
  Synthetic oligonucleotide
ccatacgttgaataggtctcgcttctaaac

SEQ ID NO: 399171 - DNA, 30 bp, Artificial Sequence
  Synthetic oligonucleotide
tggccacaacgatcctcgttggaagtaaac

SEQ ID NO: 399172 - DNA, 30 bp, Artificial Sequence
  Synthetic oligonucleotide
cagaatgtttgagagtgaatgccagtaaac

SEQ ID NO: 399173 - DNA, 30 bp, Artificial Sequence
  Synthetic oligonucleotide
gcgtacattgggatttctagaagagtaaac

SEQ ID NO: 399174 - DNA, 30 bp, Artificial Sequence
  Synthetic oligonucleotide
tgagagcagagtattaacgtaagagtaaac

SEQ ID NO: 399175 - DNA, 30 bp, Artificial Sequence
  Synthetic oligonucleotide
aaggattgttgagcgtcaaacgcggtaaac

SEQ ID NO: 399176 - DNA, 30 bp, Artificial Sequence
  Synthetic oligonucleotide
acttggtaacatcgggcggttgcggtaaac

SEQ ID NO: 399177 - DNA, 30 bp, Artificial Sequence
  Synthetic oligonucleotide
atttggtggagaggagcgcgaatggtaaac

SEQ ID NO: 399178 - DNA, 30 bp, Artificial Sequence
  Synthetic oligonucleotide
tgagcagagcagcaacggccagttgtaaac

SEQ ID NO: 399179 - DNA, 30 bp, Artificial Sequence
  Synthetic oligonucleotide
agatattggtgatcggtaaaataattaaac

SEQ ID NO: 399180 - DNA, 30 bp, Artificial Sequence
  Synthetic oligonucleotide
ccacaggtatttccagaaatggtattaaac

SEQ ID NO: 399181 - DNA, 30 bp, Artificial Sequence
  Synthetic oligonucleotide
caacccttgaccttactttagcacttaaac

SEQ ID NO: 399182 - DNA, 30 bp, Artificial Sequence
  Synthetic oligonucleotide
acatttgataatcatcggtgtatcttaaac

SEQ ID NO: 399183 - DNA, 30 bp, Artificial Sequence
  Synthetic oligonucleotide
atgtgtccgcaatttcccccgaggttaaac

SEQ ID NO: 399184 - DNA, 30 bp, Artificial Sequence
  Synthetic oligonucleotide
cactaaagacagaggcgcggtaggttaaac

SEQ ID NO: 399185 - DNA, 30 bp, Artificial Sequence
  Synthetic oligonucleotide
cacgagaatgatgttccggtagggttaaac

SEQ ID NO: 399186 - DNA, 30 bp, Artificial Sequence
  Synthetic oligonucleotide
taagtggattggcgtcacttcgggttaaac

SEQ ID NO: 399187 - DNA, 30 bp, Artificial Sequence
  Synthetic oligonucleotide
gtgtgttatgttcgtgaacgatatttaaac

SEQ ID NO: 399188 - DNA, 30 bp, Artificial Sequence
  Synthetic oligonucleotide
gcacgatctgaaaagggcgggacaaacaac

SEQ ID NO: 399189 - DNA, 30 bp, Artificial Sequence
  Synthetic oligonucleotide
cgattctcgttgtatggtgccgtgaacaac

SEQ ID NO: 399190 - DNA, 30 bp, Artificial Sequence
  Synthetic oligonucleotide
aaaaaacagaggggtggttgtccccacaac

SEQ ID NO: 399191 - DNA, 30 bp, Artificial Sequence
  Synthetic oligonucleotide
tccgacttgtattattggttagagcacaac

SEQ ID NO: 399192 - DNA, 30 bp, Artificial Sequence
  Synthetic oligonucleotide
tagcagtccgagtccttaccggggcacaac

SEQ ID NO: 399193 - DNA, 30 bp, Artificial Sequence
  Synthetic oligonucleotide
cgagtttgtcaggatactccgtggcacaac

SEQ ID NO: 399194 - DNA, 30 bp, Artificial Sequence
  Synthetic oligonucleotide
tcagcccagctatcctgcttttggcacaac

SEQ ID NO: 399195 - DNA, 30 bp, Artificial Sequence
  Synthetic oligonucleotide
aggggataaggacgcaaagcaatgcacaac

SEQ ID NO: 399196 - DNA, 30 bp, Artificial Sequence
  Synthetic oligonucleotide
tcactaggtgatttagcgataatgcacaac

SEQ ID NO: 399197 - DNA, 30 bp, Artificial Sequence
  Synthetic oligonucleotide
cgacgttagcagcctcattgagctcacaac

SEQ ID NO: 399198 - DNA, 30 bp, Artificial Sequence
  Synthetic oligonucleotide
tccaacgacatttttctcgccgaagacaac

SEQ ID NO: 399199 - DNA, 30 bp, Artificial Sequence
  Synthetic oligonucleotide
attcgctgcgcccggaagtctatagacaac

SEQ ID NO: 399200 - DNA, 30 bp, Artificial Sequence
  Synthetic oligonucleotide
aattgaccggggagaataaccttagacaac

SEQ ID NO: 399201 - DNA, 30 bp, Artificial Sequence
  Synthetic oligonucleotide
cagtggaatcaaatcctgttttacgacaac

SEQ ID NO: 399202 - DNA, 30 bp, Artificial Sequence
  Synthetic oligonucleotide
gaaggcggaactcggtgtagttccgacaac

SEQ ID NO: 399203 - DNA, 30 bp, Artificial Sequence
  Synthetic oligonucleotide
ctcagcagggtatgatttggtatggacaac

SEQ ID NO: 399204 - DNA, 30 bp, Artificial Sequence
  Synthetic oligonucleotide
ccctttcaccaccctggtaataaatacaac

SEQ ID NO: 399205 - DNA, 30 bp, Artificial Sequence
  Synthetic oligonucleotide
gggttcaatgcatctggaagtaaatacaac

SEQ ID NO: 399206 - DNA, 30 bp, Artificial Sequence
  Synthetic oligonucleotide
agggaaaggctttttaagtttgtatacaac

SEQ ID NO: 399207 - DNA, 30 bp, Artificial Sequence
  Synthetic oligonucleotide
ttgcgcggacagcacctttgtaagtacaac

SEQ ID NO: 399208 - DNA, 30 bp, Artificial Sequence
  Synthetic oligonucleotide
gcgaggaagccataaagttaatggtacaac

SEQ ID NO: 399209 - DNA, 30 bp, Artificial Sequence
  Synthetic oligonucleotide
cactgaaaaaagtgccattgtgattacaac

SEQ ID NO: 399210 - DNA, 30 bp, Artificial Sequence
  Synthetic oligonucleotide
atcgtatgcggaaaggttcgtatttacaac

SEQ ID NO: 399211 - DNA, 30 bp, Artificial Sequence
  Synthetic oligonucleotide
tcgctggagctttagagggatttttacaac

SEQ ID NO: 399212 - DNA, 30 bp, Artificial Sequence
  Synthetic oligonucleotide
gtaacctaagccttttcgctaacaaccaac

SEQ ID NO: 399213 - DNA, 30 bp, Artificial Sequence
  Synthetic oligonucleotide
tcgattgaccgcaagataatttgaaccaac

SEQ ID NO: 399214 - DNA, 30 bp, Artificial Sequence
  Synthetic oligonucleotide
aaccgcaacatgtacagtgttcccaccaac

SEQ ID NO: 399215 - DNA, 30 bp, Artificial Sequence
  Synthetic oligonucleotide
tgaaacctcattggtgtggatatcaccaac

SEQ ID NO: 399216 - DNA, 30 bp, Artificial Sequence
  Synthetic oligonucleotide
cgctaacgatccgctctgcttgataccaac

SEQ ID NO: 399217 - DNA, 30 bp, Artificial Sequence
  Synthetic oligonucleotide
ggacgcccccacgttgggcactctaccaac

SEQ ID NO: 399218 - DNA, 30 bp, Artificial Sequence
  Synthetic oligonucleotide
agagatgaggcaatggaacggcgtaccaac

SEQ ID NO: 399219 - DNA, 30 bp, Artificial Sequence
  Synthetic oligonucleotide
gatgaattgatgcaagtatgtctacccaac

SEQ ID NO: 399220 - DNA, 30 bp, Artificial Sequence
  Synthetic oligonucleotide
gcttctggtgagtccatcggcctccccaac

SEQ ID NO: 399221 - DNA, 30 bp, Artificial Sequence
  Synthetic oligonucleotide
aaaagacggaaatacctgggccggcccaac

SEQ ID NO: 399222 - DNA, 30 bp, Artificial Sequence
  Synthetic oligonucleotide
acgttgatgcttgatagcggatggcccaac

SEQ ID NO: 399223 - DNA, 30 bp, Artificial Sequence
  Synthetic oligonucleotide
cgtaagagtggagggctattatggcccaac

SEQ ID NO: 399224 - DNA, 30 bp, Artificial Sequence
  Synthetic oligonucleotide
tgaaagggctattggaatttcttgcccaac

SEQ ID NO: 399225 - DNA, 30 bp, Artificial Sequence
  Synthetic oligonucleotide
gagagtcttggtattgcaaaggctcccaac

SEQ ID NO: 399226 - DNA, 30 bp, Artificial Sequence
  Synthetic oligonucleotide
cgcatatcattgacagacacttgtcccaac

SEQ ID NO: 399227 - DNA, 31 bp, Artificial Sequence
  Synthetic oligonucleotide
gggataggtactacggcattggacagccaac

SEQ ID NO: 399228 - DNA, 30 bp, Artificial Sequence
  Synthetic oligonucleotide
cgcgatgggcatttgcattgcatagccaac

SEQ ID NO: 399229 - DNA, 30 bp, Artificial Sequence
  Synthetic oligonucleotide
cagtcgagcagtctcataatatgggccaac

SEQ ID NO: 399230 - DNA, 30 bp, Artificial Sequence
  Synthetic oligonucleotide
aatctttaaggcatcaagaggaatgccaac

SEQ ID NO: 399231 - DNA, 30 bp, Artificial Sequence
  Synthetic oligonucleotide
gtaccacgggtgcattaactcattgccaac

SEQ ID NO: 399232 - DNA, 30 bp, Artificial Sequence
  Synthetic oligonucleotide
atggcatttcaacctaagccagtatccaac

SEQ ID NO: 399233 - DNA, 30 bp, Artificial Sequence
  Synthetic oligonucleotide
gtcgcagtagatccgatcattaactccaac

SEQ ID NO: 399234 - DNA, 30 bp, Artificial Sequence
  Synthetic oligonucleotide
gtacacgcgttgttttggaagtagtccaac

SEQ ID NO: 399235 - DNA, 30 bp, Artificial Sequence
  Synthetic oligonucleotide
atccgttgctccggtaggtcgctaagcaac

SEQ ID NO: 399236 - DNA, 30 bp, Artificial Sequence
  Synthetic oligonucleotide
aatagccccgtaatggttgaagacagcaac

SEQ ID NO: 399237 - DNA, 30 bp, Artificial Sequence
  Synthetic oligonucleotide
cctttacaatggttgaagttttacagcaac

SEQ ID NO: 399238 - DNA, 30 bp, Artificial Sequence
  Synthetic oligonucleotide
agtggaacgttaaatccctcgaccagcaac

SEQ ID NO: 399239 - DNA, 30 bp, Artificial Sequence
  Synthetic oligonucleotide
agcgcacagtagtgcatgcggggcagcaac

SEQ ID NO: 399240 - DNA, 30 bp, Artificial Sequence
  Synthetic oligonucleotide
caggatagcgtgtttggccctggcagcaac

SEQ ID NO: 399241 - DNA, 30 bp, Artificial Sequence
  Synthetic oligonucleotide
cttaagaacacgggtgtttacgtcagcaac

SEQ ID NO: 399242 - DNA, 30 bp, Artificial Sequence
  Synthetic oligonucleotide
agcttattcgcatgcggtatagcgagcaac

SEQ ID NO: 399243 - DNA, 30 bp, Artificial Sequence
  Synthetic oligonucleotide
tgaggcaaaaggatgattatgatgagcaac

SEQ ID NO: 399244 - DNA, 30 bp, Artificial Sequence
  Synthetic oligonucleotide
gttataactgctacatagattactagcaac

SEQ ID NO: 399245 - DNA, 30 bp, Artificial Sequence
  Synthetic oligonucleotide
ccgagttcaggctactaacgccgtagcaac

SEQ ID NO: 399246 - DNA, 30 bp, Artificial Sequence
  Synthetic oligonucleotide
atcttcaggcctcaaagatgtcaacgcaac

SEQ ID NO: 399247 - DNA, 30 bp, Artificial Sequence
  Synthetic oligonucleotide
ctacttcaagcagggatgttaggacgcaac

SEQ ID NO: 399248 - DNA, 30 bp, Artificial Sequence
  Synthetic oligonucleotide
gaaatgtcacggagttgctcagaccgcaac

SEQ ID NO: 399249 - DNA, 30 bp, Artificial Sequence
  Synthetic oligonucleotide
agagggtcaccccaggcaccgacccgcaac

SEQ ID NO: 399250 - DNA, 30 bp, Artificial Sequence
  Synthetic oligonucleotide
cgatttttggcgttcaggaatagccgcaac

SEQ ID NO: 399251 - DNA, 30 bp, Artificial Sequence
  Synthetic oligonucleotide
tgagcaatttgcacgccacgtgtccgcaac

SEQ ID NO: 399252 - DNA, 30 bp, Artificial Sequence
  Synthetic oligonucleotide
cggtacggcccttaaaggccgtgtcgcaac

SEQ ID NO: 399253 - DNA, 30 bp, Artificial Sequence
  Synthetic oligonucleotide
taagcgtttccggagtcgttggttcgcaac

SEQ ID NO: 399254 - DNA, 30 bp, Artificial Sequence
  Synthetic oligonucleotide
catcagccaccgcaagtgccagccggcaac

SEQ ID NO: 399255 - DNA, 30 bp, Artificial Sequence
  Synthetic oligonucleotide
cgctcacccgagtacagggggacgggcaac

SEQ ID NO: 399256 - DNA, 30 bp, Artificial Sequence
  Synthetic oligonucleotide
aaacagattatggggtttagcaggggcaac

SEQ ID NO: 399257 - DNA, 30 bp, Artificial Sequence
  Synthetic oligonucleotide
acaggtatatcaccattacggcatggcaac

SEQ ID NO: 399258 - DNA, 30 bp, Artificial Sequence
  Synthetic oligonucleotide
gtacatcgttacgccattcatgatggcaac

SEQ ID NO: 399259 - DNA, 30 bp, Artificial Sequence
  Synthetic oligonucleotide
atgactctcagggatggataaactggcaac

SEQ ID NO: 399260 - DNA, 30 bp, Artificial Sequence
  Synthetic oligonucleotide
tgagaggctctgcctgtgtggagtggcaac

SEQ ID NO: 399261 - DNA, 30 bp, Artificial Sequence
  Synthetic oligonucleotide
gcttgattcgcccgtacttacgaatgcaac

SEQ ID NO: 399262 - DNA, 30 bp, Artificial Sequence
  Synthetic oligonucleotide
ctgagtgcagctgaccgcttcgtatgcaac

SEQ ID NO: 399263 - DNA, 30 bp, Artificial Sequence
  Synthetic oligonucleotide
ttatttcatccgtttgattctccgtgcaac

SEQ ID NO: 399264 - DNA, 30 bp, Artificial Sequence
  Synthetic oligonucleotide
tactctatcggtcaataagagaggtgcaac

SEQ ID NO: 399265 - DNA, 30 bp, Artificial Sequence
  Synthetic oligonucleotide
acgaaaccctgcccgcaactgaattgcaac

SEQ ID NO: 399266 - DNA, 30 bp, Artificial Sequence
  Synthetic oligonucleotide
cgatgaggttgaatttggtgtgaaatcaac

SEQ ID NO: 399267 - DNA, 30 bp, Artificial Sequence
  Synthetic oligonucleotide
gttctaaggagcactatgtatacaatcaac

SEQ ID NO: 399268 - DNA, 30 bp, Artificial Sequence
  Synthetic oligonucleotide
gtcccaatcgtggagtaacgctacatcaac

SEQ ID NO: 399269 - DNA, 30 bp, Artificial Sequence
  Synthetic oligonucleotide
tcaaattcctatttgattcttaccatcaac

SEQ ID NO: 399270 - DNA, 30 bp, Artificial Sequence
  Synthetic oligonucleotide
aacatttagctagggttaaagtccatcaac

SEQ ID NO: 399271 - DNA, 30 bp, Artificial Sequence
  Synthetic oligonucleotide
atttctatgcaagcttgtatctgcatcaac

SEQ ID NO: 399272 - DNA, 30 bp, Artificial Sequence
  Synthetic oligonucleotide
caatgatatcgcagatgtgtaaatatcaac

SEQ ID NO: 399273 - DNA, 30 bp, Artificial Sequence
  Synthetic oligonucleotide
tactgtaagttttcgatcaggtatatcaac

SEQ ID NO: 399274 - DNA, 30 bp, Artificial Sequence
  Synthetic oligonucleotide
gcggctgtagatcataaaaatcctatcaac

SEQ ID NO: 399275 - DNA, 30 bp, Artificial Sequence
  Synthetic oligonucleotide
gtgacccgcttgtaagtggccgctatcaac

SEQ ID NO: 399276 - DNA, 30 bp, Artificial Sequence
  Synthetic oligonucleotide
tatgcaccacgtgttgaataaagtatcaac

SEQ ID NO: 399277 - DNA, 30 bp, Artificial Sequence
  Synthetic oligonucleotide
tggtatcgttaatagtgaatgaaactcaac

SEQ ID NO: 399278 - DNA, 30 bp, Artificial Sequence
  Synthetic oligonucleotide
gggcattagctctttgagcgacaactcaac

SEQ ID NO: 399279 - DNA, 30 bp, Artificial Sequence
  Synthetic oligonucleotide
tgggaaatttttttaaaagagacactcaac

SEQ ID NO: 399280 - DNA, 30 bp, Artificial Sequence
  Synthetic oligonucleotide
cagataattaattactctcttgcactcaac

SEQ ID NO: 399281 - DNA, 30 bp, Artificial Sequence
  Synthetic oligonucleotide
gccatagggcaggcgcccagcagactcaac

SEQ ID NO: 399282 - DNA, 30 bp, Artificial Sequence
  Synthetic oligonucleotide
tattgtcctctcggacgcgggcgtctcaac

SEQ ID NO: 399283 - DNA, 30 bp, Artificial Sequence
  Synthetic oligonucleotide
ggcccatgacagcttagatacccagtcaac

SEQ ID NO: 399284 - DNA, 30 bp, Artificial Sequence
  Synthetic oligonucleotide
cttgtactcttgacaatggtcggagtcaac

SEQ ID NO: 399285 - DNA, 30 bp, Artificial Sequence
  Synthetic oligonucleotide
ctgtctcctaatacgctcattaacgtcaac

SEQ ID NO: 399286 - DNA, 30 bp, Artificial Sequence
  Synthetic oligonucleotide
gaacttagaatgaatattcaagacgtcaac

SEQ ID NO: 399287 - DNA, 30 bp, Artificial Sequence
  Synthetic oligonucleotide
atgccgacgcccgaatgtattggcgtcaac

SEQ ID NO: 399288 - DNA, 30 bp, Artificial Sequence
  Synthetic oligonucleotide
gaaatcatttagactgggctgggggtcaac

SEQ ID NO: 399289 - DNA, 30 bp, Artificial Sequence
  Synthetic oligonucleotide
caaacgacagcgtgtcctgacctattcaac

SEQ ID NO: 399290 - DNA, 30 bp, Artificial Sequence
  Synthetic oligonucleotide
tttggacagccactcgcgattttattcaac

SEQ ID NO: 399291 - DNA, 30 bp, Artificial Sequence
  Synthetic oligonucleotide
gcggggagttaacggccaaagacgttcaac

SEQ ID NO: 399292 - DNA, 30 bp, Artificial Sequence
  Synthetic oligonucleotide
tggcaccgacgaaatcggcgttcgttcaac

SEQ ID NO: 399293 - DNA, 30 bp, Artificial Sequence
  Synthetic oligonucleotide
tttaagcgcggggatgtacatcatttcaac

SEQ ID NO: 399294 - DNA, 30 bp, Artificial Sequence
  Synthetic oligonucleotide
ttaagaacccctacaagtatccgtttcaac

SEQ ID NO: 399295 - DNA, 30 bp, Artificial Sequence
  Synthetic oligonucleotide
gatgccaaacgaagagcaggctttttcaac

SEQ ID NO: 399296 - DNA, 30 bp, Artificial Sequence
  Synthetic oligonucleotide
gcgtagtcagtaacacagtttcgaaagaac

SEQ ID NO: 399297 - DNA, 30 bp, Artificial Sequence
  Synthetic oligonucleotide
gtccacagttttgtttgatccctcaagaac

SEQ ID NO: 399298 - DNA, 30 bp, Artificial Sequence
  Synthetic oligonucleotide
catgacgatagtgtatgggtttcgaagaac

SEQ ID NO: 399299 - DNA, 30 bp, Artificial Sequence
  Synthetic oligonucleotide
gagtgcgactccgtaccatcactgaagaac

SEQ ID NO: 399300 - DNA, 30 bp, Artificial Sequence
  Synthetic oligonucleotide
tgattgaatcttcacaggtaatctaagaac

SEQ ID NO: 399301 - DNA, 30 bp, Artificial Sequence
  Synthetic oligonucleotide
gacttgaggaacactttcagtgaacagaac

SEQ ID NO: 399302 - DNA, 30 bp, Artificial Sequence
  Synthetic oligonucleotide
ataagggcgtaggctgtacgttaacagaac

SEQ ID NO: 399303 - DNA, 30 bp, Artificial Sequence
  Synthetic oligonucleotide
acgacctggtaacgcaaccagagacagaac

SEQ ID NO: 399304 - DNA, 30 bp, Artificial Sequence
  Synthetic oligonucleotide
gttagtccaattcggggtcggggacagaac

SEQ ID NO: 399305 - DNA, 30 bp, Artificial Sequence
  Synthetic oligonucleotide
gccgtgctgccacgtagacagattcagaac

SEQ ID NO: 399306 - DNA, 30 bp, Artificial Sequence
  Synthetic oligonucleotide
agaacttagaagcgtggcggctaagagaac

SEQ ID NO: 399307 - DNA, 30 bp, Artificial Sequence
  Synthetic oligonucleotide
agggcgggttaggggtgccttagagagaac

SEQ ID NO: 399308 - DNA, 30 bp, Artificial Sequence
  Synthetic oligonucleotide
tgccaaaggggtttcgtcgtggaggagaac

SEQ ID NO: 399309 - DNA, 30 bp, Artificial Sequence
  Synthetic oligonucleotide
caagtaccgcacgcccagggcgtggagaac

SEQ ID NO: 399310 - DNA, 30 bp, Artificial Sequence
  Synthetic oligonucleotide
gaggaacggcttcacatccccaatgagaac

SEQ ID NO: 399311 - DNA, 30 bp, Artificial Sequence
  Synthetic oligonucleotide
gcccaaaagtataattttgtacatgagaac

SEQ ID NO: 399312 - DNA, 30 bp, Artificial Sequence
  Synthetic oligonucleotide
gggctccccttttaaggataaattgagaac

SEQ ID NO: 399313 - DNA, 30 bp, Artificial Sequence
  Synthetic oligonucleotide
acctcgtttaaagtacgctcgtttgagaac

SEQ ID NO: 399314 - DNA, 30 bp, Artificial Sequence
  Synthetic oligonucleotide
tacagtaataataacggggtgaaatagaac

SEQ ID NO: 399315 - DNA, 30 bp, Artificial Sequence
  Synthetic oligonucleotide
aacaaagacgccagaggtatccgatagaac

SEQ ID NO: 399316 - DNA, 30 bp, Artificial Sequence
  Synthetic oligonucleotide
tgctacatgacgaataagtattgatagaac

SEQ ID NO: 399317 - DNA, 30 bp, Artificial Sequence
  Synthetic oligonucleotide
aactaagccacactttggctgtactagaac

SEQ ID NO: 399318 - DNA, 30 bp, Artificial Sequence
  Synthetic oligonucleotide
gttagcgttcgaaatggcttgtcctagaac

SEQ ID NO: 399319 - DNA, 30 bp, Artificial Sequence
  Synthetic oligonucleotide
tcccaagtgggtatcgcttacagctagaac

SEQ ID NO: 399320 - DNA, 30 bp, Artificial Sequence
  Synthetic oligonucleotide
gggattgattatagatccagacgctagaac

SEQ ID NO: 399321 - DNA, 30 bp, Artificial Sequence
  Synthetic oligonucleotide
attatacatccgttcggaatggtctagaac

SEQ ID NO: 399322 - DNA, 30 bp, Artificial Sequence
  Synthetic oligonucleotide
ggccaagtatatctgaataaccagtagaac

SEQ ID NO: 399323 - DNA, 30 bp, Artificial Sequence
  Synthetic oligonucleotide
cagaagtagtcgctagcttcctggtagaac

SEQ ID NO: 399324 - DNA, 30 bp, Artificial Sequence
  Synthetic oligonucleotide
tatagctagagtgaccgttcgatgtagaac

SEQ ID NO: 399325 - DNA, 30 bp, Artificial Sequence
  Synthetic oligonucleotide
gtgtcgctttgtcaggcagttccttagaac

SEQ ID NO: 399326 - DNA, 30 bp, Artificial Sequence
  Synthetic oligonucleotide
cgttccagtattaagctccctagttagaac

SEQ ID NO: 399327 - DNA, 30 bp, Artificial Sequence
  Synthetic oligonucleotide
ataacgcgctcttccaggtatagaacgaac

SEQ ID NO: 399328 - DNA, 30 bp, Artificial Sequence
  Synthetic oligonucleotide
gatacctttgaactctgaaaaggaacgaac

SEQ ID NO: 399329 - DNA, 30 bp, Artificial Sequence
  Synthetic oligonucleotide
gcaacaacggtagtactgtacagcacgaac

SEQ ID NO: 399330 - DNA, 30 bp, Artificial Sequence
  Synthetic oligonucleotide
actacccgtgacgttactgtacgtacgaac

SEQ ID NO: 399331 - DNA, 30 bp, Artificial Sequence
  Synthetic oligonucleotide
gctcacgccttcgagctcttgtgtacgaac

SEQ ID NO: 399332 - DNA, 30 bp, Artificial Sequence
  Synthetic oligonucleotide
agatttatcgtagctttcttcgttacgaac

SEQ ID NO: 399333 - DNA, 30 bp, Artificial Sequence
  Synthetic oligonucleotide
agcatgagagacttgcgaggagaaccgaac

SEQ ID NO: 399334 - DNA, 30 bp, Artificial Sequence
  Synthetic oligonucleotide
ctgttgttgatgaataaggcgacgccgaac

SEQ ID NO: 399335 - DNA, 30 bp, Artificial Sequence
  Synthetic oligonucleotide
agtaattcggctatgtgcaatctgccgaac

SEQ ID NO: 399336 - DNA, 30 bp, Artificial Sequence
  Synthetic oligonucleotide
tcatgcctagttacggatagtacagcgaac

SEQ ID NO: 399337 - DNA, 30 bp, Artificial Sequence
  Synthetic oligonucleotide
ttttcaacgttcgaagtgctagcagcgaac

SEQ ID NO: 399338 - DNA, 30 bp, Artificial Sequence
  Synthetic oligonucleotide
gtactgtggagtaccgatgtcatagcgaac

SEQ ID NO: 399339 - DNA, 31 bp, Artificial Sequence
  Synthetic oligonucleotide
catcgtctctaatgacatgagcgacgcgaac

SEQ ID NO: 399340 - DNA, 30 bp, Artificial Sequence
  Synthetic oligonucleotide
gacagttaacatctctcggaacccgcgaac

SEQ ID NO: 399341 - DNA, 30 bp, Artificial Sequence
  Synthetic oligonucleotide
ggagccccattgccgtagcatgatgcgaac

SEQ ID NO: 399342 - DNA, 30 bp, Artificial Sequence
  Synthetic oligonucleotide
taaggccgatgttcttggtccttatcgaac

SEQ ID NO: 399343 - DNA, 30 bp, Artificial Sequence
  Synthetic oligonucleotide
ttccaatttcgcctcgacgcctactcgaac

SEQ ID NO: 399344 - DNA, 30 bp, Artificial Sequence
  Synthetic oligonucleotide
gcacgggtgtctatgttaaaagtctcgaac

SEQ ID NO: 399345 - DNA, 30 bp, Artificial Sequence
  Synthetic oligonucleotide
ttattagagagaaaggcggaggagtcgaac

SEQ ID NO: 399346 - DNA, 30 bp, Artificial Sequence
  Synthetic oligonucleotide
gagggcttccgctatgcagtcccgtcgaac

SEQ ID NO: 399347 - DNA, 30 bp, Artificial Sequence
  Synthetic oligonucleotide
tagacagcggctgttgtggcttgaaggaac

SEQ ID NO: 399348 - DNA, 30 bp, Artificial Sequence
  Synthetic oligonucleotide
cacccgggtaaatgtaaggaccgcaggaac

SEQ ID NO: 399349 - DNA, 30 bp, Artificial Sequence
  Synthetic oligonucleotide
atacctgattgagtaaattcgttcaggaac

SEQ ID NO: 399350 - DNA, 30 bp, Artificial Sequence
  Synthetic oligonucleotide
cgggggctcctaggtgatttgtataggaac

SEQ ID NO: 399351 - DNA, 30 bp, Artificial Sequence
  Synthetic oligonucleotide
ggcttatgacttatagctatccttaggaac

SEQ ID NO: 399352 - DNA, 30 bp, Artificial Sequence
  Synthetic oligonucleotide
gtcacttaattcagaatgaattcacggaac

SEQ ID NO: 399353 - DNA, 30 bp, Artificial Sequence
  Synthetic oligonucleotide
ggtgttcgggcgtccgacatagcccggaac

SEQ ID NO: 399354 - DNA, 30 bp, Artificial Sequence
  Synthetic oligonucleotide
agttcgtttgttcgatgggaagctcggaac

SEQ ID NO: 399355 - DNA, 30 bp, Artificial Sequence
  Synthetic oligonucleotide
aaagttgccgagtctctctacctagggaac

SEQ ID NO: 399356 - DNA, 30 bp, Artificial Sequence
  Synthetic oligonucleotide
gatggcccatccgaccaaccctaggggaac

SEQ ID NO: 399357 - DNA, 30 bp, Artificial Sequence
  Synthetic oligonucleotide
aggtccaggcctatggcctagaaatggaac

SEQ ID NO: 399358 - DNA, 30 bp, Artificial Sequence
  Synthetic oligonucleotide
attaactaaaaaggggttagggcatggaac

SEQ ID NO: 399359 - DNA, 30 bp, Artificial Sequence
  Synthetic oligonucleotide
tttccacatacaaatagtgagtggtggaac

SEQ ID NO: 399360 - DNA, 30 bp, Artificial Sequence
  Synthetic oligonucleotide
gttcttgcatccccagggaaacattggaac

SEQ ID NO: 399361 - DNA, 30 bp, Artificial Sequence
  Synthetic oligonucleotide
caccattcaggaggtgcggtggccatgaac

SEQ ID NO: 399362 - DNA, 30 bp, Artificial Sequence
  Synthetic oligonucleotide
atgcaagtgattcgcaataatttcatgaac

SEQ ID NO: 399363 - DNA, 30 bp, Artificial Sequence
  Synthetic oligonucleotide
tttcgcactggtgtaaggaatacgatgaac

SEQ ID NO: 399364 - DNA, 30 bp, Artificial Sequence
  Synthetic oligonucleotide
tggttaagattcatgcaacaggatatgaac

SEQ ID NO: 399365 - DNA, 30 bp, Artificial Sequence
  Synthetic oligonucleotide
aatcgtgcaaagtccctcagggatatgaac

SEQ ID NO: 399366 - DNA, 30 bp, Artificial Sequence
  Synthetic oligonucleotide
tcccttcggttggaaccttacggtatgaac

SEQ ID NO: 399367 - DNA, 30 bp, Artificial Sequence
  Synthetic oligonucleotide
tatctgagtgacggcccgacacttatgaac

SEQ ID NO: 399368 - DNA, 30 bp, Artificial Sequence
  Synthetic oligonucleotide
gaagttagtggatggggcgttagactgaac

SEQ ID NO: 399369 - DNA, 30 bp, Artificial Sequence
  Synthetic oligonucleotide
ttccaaatgactatctaaagtaccctgaac

SEQ ID NO: 399370 - DNA, 29 bp, Artificial Sequence
  Synthetic oligonucleotide
gcgaggtttcccaccacgacgcgctgaac

SEQ ID NO: 399371 - DNA, 30 bp, Artificial Sequence
  Synthetic oligonucleotide
taggttctcactgagggttactcggtgaac

SEQ ID NO: 399372 - DNA, 30 bp, Artificial Sequence
  Synthetic oligonucleotide
tggacgtggttaacagccataactgtgaac

SEQ ID NO: 399373 - DNA, 30 bp, Artificial Sequence
  Synthetic oligonucleotide
attaaatcagttggtatccccggtgtgaac

SEQ ID NO: 399374 - DNA, 30 bp, Artificial Sequence
  Synthetic oligonucleotide
catcactgactacagacgtttattgtgaac

SEQ ID NO: 399375 - DNA, 30 bp, Artificial Sequence
  Synthetic oligonucleotide
ccgcggtttcgaatcagattatgattgaac

SEQ ID NO: 399376 - DNA, 30 bp, Artificial Sequence
  Synthetic oligonucleotide
tgcatgctgcctgaagcacgtatattgaac

SEQ ID NO: 399377 - DNA, 30 bp, Artificial Sequence
  Synthetic oligonucleotide
ccgtggtaagatttctgagttttcttgaac

SEQ ID NO: 399378 - DNA, 30 bp, Artificial Sequence
  Synthetic oligonucleotide
attcgtggatggccaccggatgcgttgaac

SEQ ID NO: 399379 - DNA, 30 bp, Artificial Sequence
  Synthetic oligonucleotide
aagtttatgccgccttatatcatgttgaac

SEQ ID NO: 399380 - DNA, 30 bp, Artificial Sequence
  Synthetic oligonucleotide
cgtgggtgggacttctagtctatgttgaac

SEQ ID NO: 399381 - DNA, 30 bp, Artificial Sequence
  Synthetic oligonucleotide
gtatcacaagaactcctgtatttgttgaac

SEQ ID NO: 399382 - DNA, 30 bp, Artificial Sequence
  Synthetic oligonucleotide
tacggctgtcctataccgtataaaaataac

SEQ ID NO: 399383 - DNA, 30 bp, Artificial Sequence
  Synthetic oligonucleotide
aagttaaccgtccggcggggagaaaataac

SEQ ID NO: 399384 - DNA, 30 bp, Artificial Sequence
  Synthetic oligonucleotide
gggcgcaagacggcgaaaggggaaaataac

SEQ ID NO: 399385 - DNA, 30 bp, Artificial Sequence
  Synthetic oligonucleotide
ttcgttgccttatgtaaacgggacaataac

SEQ ID NO: 399386 - DNA, 30 bp, Artificial Sequence
  Synthetic oligonucleotide
ggtaattatccgctcgccgtagagaataac

SEQ ID NO: 399387 - DNA, 30 bp, Artificial Sequence
  Synthetic oligonucleotide
ttgagcatgcaaagaccgtaatagaataac

SEQ ID NO: 399388 - DNA, 30 bp, Artificial Sequence
  Synthetic oligonucleotide
taaagtcgccaggttactttgcggaataac

SEQ ID NO: 399389 - DNA, 30 bp, Artificial Sequence
  Synthetic oligonucleotide
gactggtacacccgaactcgggggaataac

SEQ ID NO: 399390 - DNA, 30 bp, Artificial Sequence
  Synthetic oligonucleotide
gcccgggcagtggcagttctatggaataac

SEQ ID NO: 399391 - DNA, 30 bp, Artificial Sequence
  Synthetic oligonucleotide
caagcattgagggttcgaattctgaataac

SEQ ID NO: 399392 - DNA, 30 bp, Artificial Sequence
  Synthetic oligonucleotide
cgacagcaggtgagaaatagccctaataac

SEQ ID NO: 399393 - DNA, 30 bp, Artificial Sequence
  Synthetic oligonucleotide
ggagtcaacatatggcatagttctaataac

SEQ ID NO: 399394 - DNA, 30 bp, Artificial Sequence
  Synthetic oligonucleotide
ccaggaattatggcccaagaaattaataac

SEQ ID NO: 399395 - DNA, 30 bp, Artificial Sequence
  Synthetic oligonucleotide
tgtaaaggcgtcgcgtttatatttaataac

SEQ ID NO: 399396 - DNA, 30 bp, Artificial Sequence
  Synthetic oligonucleotide
acctgaataggcatcgtttgagaacataac

SEQ ID NO: 399397 - DNA, 30 bp, Artificial Sequence
  Synthetic oligonucleotide
agcggccggtacggaaactttcagcataac

SEQ ID NO: 399398 - DNA, 30 bp, Artificial Sequence
  Synthetic oligonucleotide
ctacagttagcggtggtaatgacgcataac

SEQ ID NO: 399399 - DNA, 30 bp, Artificial Sequence
  Synthetic oligonucleotide
tacctcggccccaacgcacgatcgcataac

SEQ ID NO: 399400 - DNA, 30 bp, Artificial Sequence
  Synthetic oligonucleotide
gtcttgatttacattcccacgcggcataac

SEQ ID NO: 399401 - DNA, 30 bp, Artificial Sequence
  Synthetic oligonucleotide
gtgtatggacaatccgaaaggagtcataac

SEQ ID NO: 399402 - DNA, 30 bp, Artificial Sequence
  Synthetic oligonucleotide
aatgctcatgtgagcaccaggcgtcataac

SEQ ID NO: 399403 - DNA, 30 bp, Artificial Sequence
  Synthetic oligonucleotide
aaggttaactagatgttaaaaagagataac

SEQ ID NO: 399404 - DNA, 30 bp, Artificial Sequence
  Synthetic oligonucleotide
atcccagtaaggtcgttgtcaagcgataac

SEQ ID NO: 399405 - DNA, 30 bp, Artificial Sequence
  Synthetic oligonucleotide
taatctctttagtaataagtgcaggataac

SEQ ID NO: 399406 - DNA, 30 bp, Artificial Sequence
  Synthetic oligonucleotide
gtcgacttttaccctcgctgtacggataac

SEQ ID NO: 399407 - DNA, 30 bp, Artificial Sequence
  Synthetic oligonucleotide
gattgctattcaactaaccgtcgggataac

SEQ ID NO: 399408 - DNA, 30 bp, Artificial Sequence
  Synthetic oligonucleotide
cagcgttctacaaagttcgattatgataac

SEQ ID NO: 399409 - DNA, 30 bp, Artificial Sequence
  Synthetic oligonucleotide
ctatcctagcttccactaagccctgataac

SEQ ID NO: 399410 - DNA, 30 bp, Artificial Sequence
  Synthetic oligonucleotide
gcctgtacccagggcgtaatgggtgataac

SEQ ID NO: 399411 - DNA, 30 bp, Artificial Sequence
  Synthetic oligonucleotide
ttcagggagcgcgccccggatggtgataac

SEQ ID NO: 399412 - DNA, 30 bp, Artificial Sequence
  Synthetic oligonucleotide
gacttcaatagttgaactgtcgcatataac

SEQ ID NO: 399413 - DNA, 30 bp, Artificial Sequence
  Synthetic oligonucleotide
ctagtccggtacatccgcaccgagtataac

SEQ ID NO: 399414 - DNA, 30 bp, Artificial Sequence
  Synthetic oligonucleotide
gggctctcttggatgctgaataggtataac

SEQ ID NO: 399415 - DNA, 30 bp, Artificial Sequence
  Synthetic oligonucleotide
ttggtacgctctcgttcatcggcaactaac

SEQ ID NO: 399416 - DNA, 30 bp, Artificial Sequence
  Synthetic oligonucleotide
aagcagttgccaaagctatgcgtaactaac

SEQ ID NO: 399417 - DNA, 30 bp, Artificial Sequence
  Synthetic oligonucleotide
gattacaccgtattcaaaaataggactaac

SEQ ID NO: 399418 - DNA, 30 bp, Artificial Sequence
  Synthetic oligonucleotide
aacctttcaggactttggaatcggactaac

SEQ ID NO: 399419 - DNA, 30 bp, Artificial Sequence
  Synthetic oligonucleotide
tcccgtcgtggtattgggttcgaacctaac

SEQ ID NO: 399420 - DNA, 30 bp, Artificial Sequence
  Synthetic oligonucleotide
tcttacaggaaagtccgttccgagcctaac

SEQ ID NO: 399421 - DNA, 30 bp, Artificial Sequence
  Synthetic oligonucleotide
ccgaggcttaattacttggtaagtcctaac

SEQ ID NO: 399422 - DNA, 30 bp, Artificial Sequence
  Synthetic oligonucleotide
atgccctaccgaagatagcactgtcctaac

SEQ ID NO: 399423 - DNA, 30 bp, Artificial Sequence
  Synthetic oligonucleotide
cgacatattggttcttaaacaaaagctaac

SEQ ID NO: 399424 - DNA, 30 bp, Artificial Sequence
  Synthetic oligonucleotide
gttggaagtcgttttaacttaaacgctaac

SEQ ID NO: 399425 - DNA, 30 bp, Artificial Sequence
  Synthetic oligonucleotide
cctagtaacgtgtgtctagtgtccgctaac

SEQ ID NO: 399426 - DNA, 30 bp, Artificial Sequence
  Synthetic oligonucleotide
aatttaagaagggatacgagcggtgctaac

SEQ ID NO: 399427 - DNA, 30 bp, Artificial Sequence
  Synthetic oligonucleotide
gtgaatttttcatcctatgaaattgctaac

SEQ ID NO: 399428 - DNA, 30 bp, Artificial Sequence
  Synthetic oligonucleotide
ggttgcatacgtgagcgatcagaatctaac

SEQ ID NO: 399429 - DNA, 30 bp, Artificial Sequence
  Synthetic oligonucleotide
aatctgcaggcctacacgaaaacatctaac

SEQ ID NO: 399430 - DNA, 30 bp, Artificial Sequence
  Synthetic oligonucleotide
ggtccctcaagaccgaaatatttatctaac

SEQ ID NO: 399431 - DNA, 30 bp, Artificial Sequence
  Synthetic oligonucleotide
gtcgcagcacgataattagctagctctaac

SEQ ID NO: 399432 - DNA, 30 bp, Artificial Sequence
  Synthetic oligonucleotide
gagaaggcgccagctaccgcggcgtctaac

SEQ ID NO: 399433 - DNA, 30 bp, Artificial Sequence
  Synthetic oligonucleotide
ctatgcctacttacgcttttagattctaac

SEQ ID NO: 399434 - DNA, 30 bp, Artificial Sequence
  Synthetic oligonucleotide
tcttctctttcgattaccggattttctaac

SEQ ID NO: 399435 - DNA, 30 bp, Artificial Sequence
  Synthetic oligonucleotide
tgagttgaagtacatcgagttttttctaac

SEQ ID NO: 399436 - DNA, 30 bp, Artificial Sequence
  Synthetic oligonucleotide
ccggagacttacaatctgcacggaagtaac

SEQ ID NO: 399437 - DNA, 30 bp, Artificial Sequence
  Synthetic oligonucleotide
gggtgtccgcgccgtccgtcattaagtaac

SEQ ID NO: 399438 - DNA, 30 bp, Artificial Sequence
  Synthetic oligonucleotide
ttgcgactgcaactaatcagttacagtaac

SEQ ID NO: 399439 - DNA, 30 bp, Artificial Sequence
  Synthetic oligonucleotide
cactacgccacgctgccacaacgcagtaac

SEQ ID NO: 399440 - DNA, 30 bp, Artificial Sequence
  Synthetic oligonucleotide
gacattgcggtgaaaagtatgcgccgtaac

SEQ ID NO: 399441 - DNA, 30 bp, Artificial Sequence
  Synthetic oligonucleotide
cacgagataagtccccaaggaggccgtaac

SEQ ID NO: 399442 - DNA, 30 bp, Artificial Sequence
  Synthetic oligonucleotide
gctggctgagcccctccgcagttccgtaac

SEQ ID NO: 399443 - DNA, 30 bp, Artificial Sequence
  Synthetic oligonucleotide
gggggctaagtacgctttcaccagcgtaac

SEQ ID NO: 399444 - DNA, 30 bp, Artificial Sequence
  Synthetic oligonucleotide
ataagtcttcgtcagacacttatgcgtaac

SEQ ID NO: 399445 - DNA, 30 bp, Artificial Sequence
  Synthetic oligonucleotide
ccttatcttactaaagccatctgtcgtaac

SEQ ID NO: 399446 - DNA, 30 bp, Artificial Sequence
  Synthetic oligonucleotide
agtaccgagtctaagggtgaagcaggtaac

SEQ ID NO: 399447 - DNA, 30 bp, Artificial Sequence
  Synthetic oligonucleotide
tgagatgtcggcgccggcggtatcggtaac

SEQ ID NO: 399448 - DNA, 30 bp, Artificial Sequence
  Synthetic oligonucleotide
ctcaggttaggtaattacggaaagggtaac

SEQ ID NO: 399449 - DNA, 30 bp, Artificial Sequence
  Synthetic oligonucleotide
tctttacgaggccttaagtaaccgggtaac

SEQ ID NO: 399450 - DNA, 30 bp, Artificial Sequence
  Synthetic oligonucleotide
tggggatatgcgatgggtttctctggtaac

SEQ ID NO: 399451 - DNA, 30 bp, Artificial Sequence
  Synthetic oligonucleotide
gccgcagcgtaatactgtcgatgtggtaac

SEQ ID NO: 399452 - DNA, 30 bp, Artificial Sequence
  Synthetic oligonucleotide
ttatactaggttacgcctatgtgtggtaac

SEQ ID NO: 399453 - DNA, 30 bp, Artificial Sequence
  Synthetic oligonucleotide
gcctatttttcagtctgctagcttggtaac

SEQ ID NO: 399454 - DNA, 30 bp, Artificial Sequence
  Synthetic oligonucleotide
tattgtgtccggggtaaaagctttggtaac

SEQ ID NO: 399455 - DNA, 30 bp, Artificial Sequence
  Synthetic oligonucleotide
ataattgtagaggcgggattccactgtaac

SEQ ID NO: 399456 - DNA, 30 bp, Artificial Sequence
  Synthetic oligonucleotide
cgcgttggttcaggtttagacctgtgtaac

SEQ ID NO: 399457 - DNA, 30 bp, Artificial Sequence
  Synthetic oligonucleotide
tcagcttagttcactttatgtctgtgtaac

SEQ ID NO: 399458 - DNA, 30 bp, Artificial Sequence
  Synthetic oligonucleotide
ttgctatagtacagtgtacaacgttgtaac

SEQ ID NO: 399459 - DNA, 30 bp, Artificial Sequence
  Synthetic oligonucleotide
gtatacgctaagcgtaggtcgggttgtaac

SEQ ID NO: 399460 - DNA, 30 bp, Artificial Sequence
  Synthetic oligonucleotide
aggaagatatctgatggcggctgttgtaac

SEQ ID NO: 399461 - DNA, 30 bp, Artificial Sequence
  Synthetic oligonucleotide
taataatctgttcaagaaacgcaaattaac

SEQ ID NO: 399462 - DNA, 30 bp, Artificial Sequence
  Synthetic oligonucleotide
aagccgtgaatatatgttttcgaaattaac

SEQ ID NO: 399463 - DNA, 30 bp, Artificial Sequence
  Synthetic oligonucleotide
tggtttgcatcattctaagtctaaattaac

SEQ ID NO: 399464 - DNA, 30 bp, Artificial Sequence
  Synthetic oligonucleotide
gctattacgcaactacgtccgccaattaac

SEQ ID NO: 399465 - DNA, 30 bp, Artificial Sequence
  Synthetic oligonucleotide
tgtcaggacagtaacggcctagtgattaac

SEQ ID NO: 399466 - DNA, 30 bp, Artificial Sequence
  Synthetic oligonucleotide
catgcacgagaaactgttgacccacttaac

SEQ ID NO: 399467 - DNA, 30 bp, Artificial Sequence
  Synthetic oligonucleotide
ccatctacgttctctacaacataccttaac

SEQ ID NO: 399468 - DNA, 30 bp, Artificial Sequence
  Synthetic oligonucleotide
cagcgaatcaaattgtagtgtaaagttaac

SEQ ID NO: 399469 - DNA, 30 bp, Artificial Sequence
  Synthetic oligonucleotide
ataaggcacgggatgcataacgcagttaac

SEQ ID NO: 399470 - DNA, 30 bp, Artificial Sequence
  Synthetic oligonucleotide
cgtttgtccgttcattaaaccagagttaac

SEQ ID NO: 399471 - DNA, 30 bp, Artificial Sequence
  Synthetic oligonucleotide
ggccggcaggtacgaatggagggagttaac

SEQ ID NO: 399472 - DNA, 30 bp, Artificial Sequence
  Synthetic oligonucleotide
aaataaagccccgtgatttaaacggttaac

SEQ ID NO: 399473 - DNA, 30 bp, Artificial Sequence
  Synthetic oligonucleotide
gccagataaattccgaacctgacggttaac

SEQ ID NO: 399474 - DNA, 30 bp, Artificial Sequence
  Synthetic oligonucleotide
acgctcggctttccgggttttccggttaac

SEQ ID NO: 399475 - DNA, 30 bp, Artificial Sequence
  Synthetic oligonucleotide
gaatattgcccattaagtgatagggttaac

SEQ ID NO: 399476 - DNA, 30 bp, Artificial Sequence
  Synthetic oligonucleotide
aaacccaagtgtgcctatcaattggttaac

SEQ ID NO: 399477 - DNA, 30 bp, Artificial Sequence
  Synthetic oligonucleotide
gaaagtttaattataaagggcactgttaac

SEQ ID NO: 399478 - DNA, 30 bp, Artificial Sequence
  Synthetic oligonucleotide
tctctgctagagagacagagatgatttaac

SEQ ID NO: 399479 - DNA, 30 bp, Artificial Sequence
  Synthetic oligonucleotide
tgactctggattatacaatattgatttaac

SEQ ID NO: 399480 - DNA, 30 bp, Artificial Sequence
  Synthetic oligonucleotide
acctactgcactatgtcggtcagctttaac

SEQ ID NO: 399481 - DNA, 30 bp, Artificial Sequence
  Synthetic oligonucleotide
gctacttaaatgggttgtcatgattttaac

SEQ ID NO: 399482 - DNA, 30 bp, Artificial Sequence
  Synthetic oligonucleotide
tcgaacagcggttattccgaatcttttaac

SEQ ID NO: 399483 - DNA, 30 bp, Artificial Sequence
  Synthetic oligonucleotide
cgtcggaatgacgctgccgcaagttttaac

SEQ ID NO: 399484 - DNA, 30 bp, Artificial Sequence
  Synthetic oligonucleotide
ccgcgacctcaaggaatttccctttttaac

SEQ ID NO: 399485 - DNA, 30 bp, Artificial Sequence
  Synthetic oligonucleotide
cggttctgtgcaagacgaggtctaaaacac

SEQ ID NO: 399486 - DNA, 30 bp, Artificial Sequence
  Synthetic oligonucleotide
gaatttaacgggtctggtctagtcaaacac

SEQ ID NO: 399487 - DNA, 30 bp, Artificial Sequence
  Synthetic oligonucleotide
aggcactaggggttggaacattcgaaacac

SEQ ID NO: 399488 - DNA, 30 bp, Artificial Sequence
  Synthetic oligonucleotide
atgttcgtcgtatggcgttaaatgaaacac

SEQ ID NO: 399489 - DNA, 30 bp, Artificial Sequence
  Synthetic oligonucleotide
gaatgctcagaattgatctgacttaaacac

SEQ ID NO: 399490 - DNA, 30 bp, Artificial Sequence
  Synthetic oligonucleotide
atctgggtaagtgttggggtggttaaacac

SEQ ID NO: 399491 - DNA, 30 bp, Artificial Sequence
  Synthetic oligonucleotide
actgcttctgttaaggtacaagcacaacac

SEQ ID NO: 399492 - DNA, 30 bp, Artificial Sequence
  Synthetic oligonucleotide
ccccacaattaggggtcggctgcccaacac

SEQ ID NO: 399493 - DNA, 30 bp, Artificial Sequence
  Synthetic oligonucleotide
cgtatacgttggggaggaatacgccaacac

SEQ ID NO: 399494 - DNA, 30 bp, Artificial Sequence
  Synthetic oligonucleotide
atgctctggtggccacaaactggccaacac

SEQ ID NO: 399495 - DNA, 30 bp, Artificial Sequence
  Synthetic oligonucleotide
ggctagaagactgatttgaggttccaacac

SEQ ID NO: 399496 - DNA, 30 bp, Artificial Sequence
  Synthetic oligonucleotide
taaactggcctggtagctgcttagcaacac

SEQ ID NO: 399497 - DNA, 30 bp, Artificial Sequence
  Synthetic oligonucleotide
aaccccctagttaacaaataaactcaacac

SEQ ID NO: 399498 - DNA, 30 bp, Artificial Sequence
  Synthetic oligonucleotide
agcgggactttatgccctgctccagaacac

SEQ ID NO: 399499 - DNA, 30 bp, Artificial Sequence
  Synthetic oligonucleotide
gttgtatggagtggatacgctttagaacac

SEQ ID NO: 399500 - DNA, 30 bp, Artificial Sequence
  Synthetic oligonucleotide
tggttatctcgtacagaaaagaatgaacac

SEQ ID NO: 399501 - DNA, 30 bp, Artificial Sequence
  Synthetic oligonucleotide
atactgatcccaaccagctataatgaacac

SEQ ID NO: 399502 - DNA, 30 bp, Artificial Sequence
  Synthetic oligonucleotide
acgggacgctaattttgttcgcatgaacac

SEQ ID NO: 399503 - DNA, 30 bp, Artificial Sequence
  Synthetic oligonucleotide
ccttagtgtttttcctgggcatatgaacac

SEQ ID NO: 399504 - DNA, 30 bp, Artificial Sequence
  Synthetic oligonucleotide
ccagcatcattactgcatcaaggtgaacac

SEQ ID NO: 399505 - DNA, 30 bp, Artificial Sequence
  Synthetic oligonucleotide
gcgaatagttcacgcagtgacattgaacac

SEQ ID NO: 399506 - DNA, 30 bp, Artificial Sequence
  Synthetic oligonucleotide
cttatgagctgtttaaagcgttactaacac

SEQ ID NO: 399507 - DNA, 30 bp, Artificial Sequence
  Synthetic oligonucleotide
agctgggcaacggaatgttgcgcctaacac

SEQ ID NO: 399508 - DNA, 30 bp, Artificial Sequence
  Synthetic oligonucleotide
attgacactagttatttttacgcgtaacac

SEQ ID NO: 399509 - DNA, 30 bp, Artificial Sequence
  Synthetic oligonucleotide
gcacctgcttgaaatccgcagttgtaacac

SEQ ID NO: 399510 - DNA, 30 bp, Artificial Sequence
  Synthetic oligonucleotide
gataaagttgcggaacctgtcaattaacac

SEQ ID NO: 399511 - DNA, 30 bp, Artificial Sequence
  Synthetic oligonucleotide
aaagtgacatccgcttgcgcaccttaacac

SEQ ID NO: 399512 - DNA, 30 bp, Artificial Sequence
  Synthetic oligonucleotide
gccattacatgcgcgaagtttatttaacac

SEQ ID NO: 399513 - DNA, 30 bp, Artificial Sequence
  Synthetic oligonucleotide
gatttgacaagtgatctatgtgaaacacac

SEQ ID NO: 399514 - DNA, 30 bp, Artificial Sequence
  Synthetic oligonucleotide
ttccgattctcaatagagcaaggcacacac

SEQ ID NO: 399515 - DNA, 30 bp, Artificial Sequence
  Synthetic oligonucleotide
atactcggcgcctcgaatatgcccccacac

SEQ ID NO: 399516 - DNA, 30 bp, Artificial Sequence
  Synthetic oligonucleotide
gtacccgcagagaaaagtgccttcccacac

SEQ ID NO: 399517 - DNA, 30 bp, Artificial Sequence
  Synthetic oligonucleotide
ttgagaggaaacagtcgaacgcagccacac

SEQ ID NO: 399518 - DNA, 30 bp, Artificial Sequence
  Synthetic oligonucleotide
gtctggggcattgccgggctggtgccacac

SEQ ID NO: 399519 - DNA, 30 bp, Artificial Sequence
  Synthetic oligonucleotide
cgctttagtgtatgtacagtggttccacac

SEQ ID NO: 399520 - DNA, 30 bp, Artificial Sequence
  Synthetic oligonucleotide
ccccctagcggttcgtaggcctgagcacac

SEQ ID NO: 399521 - DNA, 30 bp, Artificial Sequence
  Synthetic oligonucleotide
cacggtagataggctgcgatcgacgcacac

SEQ ID NO: 399522 - DNA, 30 bp, Artificial Sequence
  Synthetic oligonucleotide
acaatgcctggtgaagaaactcaggcacac

SEQ ID NO: 399523 - DNA, 30 bp, Artificial Sequence
  Synthetic oligonucleotide
cccaacataacagttatgtttgtggcacac

SEQ ID NO: 399524 - DNA, 30 bp, Artificial Sequence
  Synthetic oligonucleotide
tccctacttgcgatacctcaaaatgcacac

SEQ ID NO: 399525 - DNA, 30 bp, Artificial Sequence
  Synthetic oligonucleotide
ccaccagaaccctttataacaattgcacac

SEQ ID NO: 399526 - DNA, 30 bp, Artificial Sequence
  Synthetic oligonucleotide
gttagttgtaggttcgcttgccttgcacac

SEQ ID NO: 399527 - DNA, 30 bp, Artificial Sequence
  Synthetic oligonucleotide
gatggccgatacgtacgctgggcatcacac

SEQ ID NO: 399528 - DNA, 30 bp, Artificial Sequence
  Synthetic oligonucleotide
cgtggatagctttatgacaaggtatcacac

SEQ ID NO: 399529 - DNA, 30 bp, Artificial Sequence
  Synthetic oligonucleotide
ctccttttgaaggaaaggcggttatcacac

SEQ ID NO: 399530 - DNA, 30 bp, Artificial Sequence
  Synthetic oligonucleotide
ttgacaagaccacagcaataaaactcacac

SEQ ID NO: 399531 - DNA, 30 bp, Artificial Sequence
  Synthetic oligonucleotide
aggcgtttttggactctgcctgtgtcacac

SEQ ID NO: 399532 - DNA, 30 bp, Artificial Sequence
  Synthetic oligonucleotide
ccagcctcaggctcctacggggcttcacac

SEQ ID NO: 399533 - DNA, 30 bp, Artificial Sequence
  Synthetic oligonucleotide
ttcggctatcacgtgtccgtccaaagacac

SEQ ID NO: 399534 - DNA, 30 bp, Artificial Sequence
  Synthetic oligonucleotide
cagaaacaactaaaatccgagacaagacac

SEQ ID NO: 399535 - DNA, 30 bp, Artificial Sequence
  Synthetic oligonucleotide
ccaaaaacatatactagatagacaagacac

SEQ ID NO: 399536 - DNA, 30 bp, Artificial Sequence
  Synthetic oligonucleotide
gtcggctcccttaggcgtcaccgaagacac

SEQ ID NO: 399537 - DNA, 30 bp, Artificial Sequence
  Synthetic oligonucleotide
cccgaaaggaaaattctatctgacagacac

SEQ ID NO: 399538 - DNA, 30 bp, Artificial Sequence
  Synthetic oligonucleotide
caccgatagccaaatcggttgctgagacac

SEQ ID NO: 399539 - DNA, 30 bp, Artificial Sequence
  Synthetic oligonucleotide
ctcgctattcatgggttgacttaacgacac

SEQ ID NO: 399540 - DNA, 30 bp, Artificial Sequence
  Synthetic oligonucleotide
ctttacgaaaaaaattagttttgacgacac

SEQ ID NO: 399541 - DNA, 30 bp, Artificial Sequence
  Synthetic oligonucleotide
ttgtgtagttggctgtctttcccccgacac

SEQ ID NO: 399542 - DNA, 30 bp, Artificial Sequence
  Synthetic oligonucleotide
gcgcacactgacgccgtataaggccgacac

SEQ ID NO: 399543 - DNA, 30 bp, Artificial Sequence
  Synthetic oligonucleotide
atctcacggaagatgcggcatccgcgacac

SEQ ID NO: 399544 - DNA, 30 bp, Artificial Sequence
  Synthetic oligonucleotide
tacaagatccaccatggacgctctcgacac

SEQ ID NO: 399545 - DNA, 30 bp, Artificial Sequence
  Synthetic oligonucleotide
gcggtccatagctacatttacgaaggacac

SEQ ID NO: 399546 - DNA, 30 bp, Artificial Sequence
  Synthetic oligonucleotide
ataacatgacgcaatcattcatgcggacac

SEQ ID NO: 399547 - DNA, 30 bp, Artificial Sequence
  Synthetic oligonucleotide
ccacgctccacagggtgagtagtcggacac

SEQ ID NO: 399548 - DNA, 30 bp, Artificial Sequence
  Synthetic oligonucleotide
tggtttaacaaccaacttgtaccgggacac

SEQ ID NO: 399549 - DNA, 31 bp, Artificial Sequence
  Synthetic oligonucleotide
ttgggaggcctatatttggctaaggggacac

SEQ ID NO: 399550 - DNA, 30 bp, Artificial Sequence
  Synthetic oligonucleotide
gtaactcctgcttatattcggtggggacac

SEQ ID NO: 399551 - DNA, 30 bp, Artificial Sequence
  Synthetic oligonucleotide
tagattccggaatgctagtgattgggacac

SEQ ID NO: 399552 - DNA, 30 bp, Artificial Sequence
  Synthetic oligonucleotide
ccctcgcatggaacactttggaatggacac

SEQ ID NO: 399553 - DNA, 30 bp, Artificial Sequence
  Synthetic oligonucleotide
gacaggggtacactggggcatgatggacac

SEQ ID NO: 399554 - DNA, 30 bp, Artificial Sequence
  Synthetic oligonucleotide
aaacgttaacgtgagacttgggctggacac

SEQ ID NO: 399555 - DNA, 30 bp, Artificial Sequence
  Synthetic oligonucleotide
gagcgcagccgataaagagccgaatgacac

SEQ ID NO: 399556 - DNA, 30 bp, Artificial Sequence
  Synthetic oligonucleotide
acaactgggcagagcggcgaggactgacac

SEQ ID NO: 399557 - DNA, 30 bp, Artificial Sequence
  Synthetic oligonucleotide
tttaaggataattggtgttcatactgacac

SEQ ID NO: 399558 - DNA, 30 bp, Artificial Sequence
  Synthetic oligonucleotide
cgacttaggttcctgccaactccctgacac

SEQ ID NO: 399559 - DNA, 30 bp, Artificial Sequence
  Synthetic oligonucleotide
agaccctgttcatattacagcttctgacac

SEQ ID NO: 399560 - DNA, 30 bp, Artificial Sequence
  Synthetic oligonucleotide
tagaagaccgggtctgtaaattcgtgacac

SEQ ID NO: 399561 - DNA, 30 bp, Artificial Sequence
  Synthetic oligonucleotide
ttcagctgaagcggaatcatttattgacac

SEQ ID NO: 399562 - DNA, 30 bp, Artificial Sequence
  Synthetic oligonucleotide
gtaaaaggactccggtgtttgacttgacac

SEQ ID NO: 399563 - DNA, 30 bp, Artificial Sequence
  Synthetic oligonucleotide
ggtattgtgcttacggtcacaccttgacac

SEQ ID NO: 399564 - DNA, 30 bp, Artificial Sequence
  Synthetic oligonucleotide
agtgaaatgacaccactggggggcatacac

SEQ ID NO: 399565 - DNA, 30 bp, Artificial Sequence
  Synthetic oligonucleotide
cgctccgcggtgtggtagcgtgggatacac

SEQ ID NO: 399566 - DNA, 30 bp, Artificial Sequence
  Synthetic oligonucleotide
taaaagaggctgtatagcgcattgatacac

SEQ ID NO: 399567 - DNA, 30 bp, Artificial Sequence
  Synthetic oligonucleotide
ctattgcgttcgttgcctaggactatacac

SEQ ID NO: 399568 - DNA, 30 bp, Artificial Sequence
  Synthetic oligonucleotide
tgtagggcatcaaatgtttaccctatacac

SEQ ID NO: 399569 - DNA, 30 bp, Artificial Sequence
  Synthetic oligonucleotide
aggtccaaacgccgctatggaaaactacac

SEQ ID NO: 399570 - DNA, 30 bp, Artificial Sequence
  Synthetic oligonucleotide
gagtggttgtaattcagaaagtcactacac

SEQ ID NO: 399571 - DNA, 30 bp, Artificial Sequence
  Synthetic oligonucleotide
ataattagcatgcgcacctatcacctacac

SEQ ID NO: 399572 - DNA, 30 bp, Artificial Sequence
  Synthetic oligonucleotide
ccgtattggcatgccttatggcagctacac

SEQ ID NO: 399573 - DNA, 30 bp, Artificial Sequence
  Synthetic oligonucleotide
atcggcactttgttaagttcacggctacac

SEQ ID NO: 399574 - DNA, 30 bp, Artificial Sequence
  Synthetic oligonucleotide
taccggcagttgataaaaggctctctacac

SEQ ID NO: 399575 - DNA, 30 bp, Artificial Sequence
  Synthetic oligonucleotide
atgacgcagtgcggataatcgcgtctacac

SEQ ID NO: 399576 - DNA, 30 bp, Artificial Sequence
  Synthetic oligonucleotide
acactgcttatcggtatggtctaagtacac

SEQ ID NO: 399577 - DNA, 30 bp, Artificial Sequence
  Synthetic oligonucleotide
aagtcgtactcgacctttttttgagtacac

SEQ ID NO: 399578 - DNA, 30 bp, Artificial Sequence
  Synthetic oligonucleotide
cccggagagatagtcaacatattagtacac

SEQ ID NO: 399579 - DNA, 30 bp, Artificial Sequence
  Synthetic oligonucleotide
ccaatttttaagcgatatagggacgtacac

SEQ ID NO: 399580 - DNA, 30 bp, Artificial Sequence
  Synthetic oligonucleotide
tgtttaggctagagtattttggacgtacac

SEQ ID NO: 399581 - DNA, 31 bp, Artificial Sequence
  Synthetic oligonucleotide
gatggacgagggtagagtttatcccgtacac

SEQ ID NO: 399582 - DNA, 30 bp, Artificial Sequence
  Synthetic oligonucleotide
ttggagagtgttcgtatgctcagcgtacac

SEQ ID NO: 399583 - DNA, 30 bp, Artificial Sequence
  Synthetic oligonucleotide
aattactcaggcggcgttggaaaggtacac

SEQ ID NO: 399584 - DNA, 30 bp, Artificial Sequence
  Synthetic oligonucleotide
ctaaaccgagtgctaacttcgaaggtacac

SEQ ID NO: 399585 - DNA, 30 bp, Artificial Sequence
  Synthetic oligonucleotide
tgaatatataacgcgtgcgctggggtacac

SEQ ID NO: 399586 - DNA, 30 bp, Artificial Sequence
  Synthetic oligonucleotide
caggggccgcataagccgcaaggtgtacac

SEQ ID NO: 399587 - DNA, 30 bp, Artificial Sequence
  Synthetic oligonucleotide
tatttggtccagggactattaacattacac

SEQ ID NO: 399588 - DNA, 30 bp, Artificial Sequence
  Synthetic oligonucleotide
tctccctgtcttcggaatgtgcacttacac

SEQ ID NO: 399589 - DNA, 30 bp, Artificial Sequence
  Synthetic oligonucleotide
ggttctggtcttcggcctgaatacttacac

SEQ ID NO: 399590 - DNA, 30 bp, Artificial Sequence
  Synthetic oligonucleotide
gtaccgggttgagggccgagtttcttacac

SEQ ID NO: 399591 - DNA, 30 bp, Artificial Sequence
  Synthetic oligonucleotide
gagtcagctacaaggcgtccgcagttacac

SEQ ID NO: 399592 - DNA, 30 bp, Artificial Sequence
  Synthetic oligonucleotide
tattctaattcctgtatcgttaaaaaccac

SEQ ID NO: 399593 - DNA, 30 bp, Artificial Sequence
  Synthetic oligonucleotide
cacatttgtgaaaaactcggcacaaaccac

SEQ ID NO: 399594 - DNA, 30 bp, Artificial Sequence
  Synthetic oligonucleotide
ggagttcttcggaagaatgaaggaaaccac

SEQ ID NO: 399595 - DNA, 30 bp, Artificial Sequence
  Synthetic oligonucleotide
ggagctttatgattacgcatgcacaaccac

SEQ ID NO: 399596 - DNA, 30 bp, Artificial Sequence
  Synthetic oligonucleotide
ggagtaaattcatggctcttaaccaaccac

SEQ ID NO: 399597 - DNA, 30 bp, Artificial Sequence
  Synthetic oligonucleotide
agaatcgatgacttggcatgtaggaaccac

SEQ ID NO: 399598 - DNA, 30 bp, Artificial Sequence
  Synthetic oligonucleotide
accgctcacctacacagcaaccggaaccac

SEQ ID NO: 399599 - DNA, 30 bp, Artificial Sequence
  Synthetic oligonucleotide
gttgtattagtgaaggccctgcggaaccac

SEQ ID NO: 399600 - DNA, 30 bp, Artificial Sequence
  Synthetic oligonucleotide
tgcgaaacggattacgtgccggataaccac

SEQ ID NO: 399601 - DNA, 30 bp, Artificial Sequence
  Synthetic oligonucleotide
ctgtaaagacgggcgaaggatgataaccac

SEQ ID NO: 399602 - DNA, 30 bp, Artificial Sequence
  Synthetic oligonucleotide
aaatccacatggatgatttaagttaaccac

SEQ ID NO: 399603 - DNA, 30 bp, Artificial Sequence
  Synthetic oligonucleotide
tttcgcacttaagcatcttaaggacaccac

SEQ ID NO: 399604 - DNA, 30 bp, Artificial Sequence
  Synthetic oligonucleotide
ctcttttggtatttccgtcgtctgcaccac

SEQ ID NO: 399605 - DNA, 30 bp, Artificial Sequence
  Synthetic oligonucleotide
ggctacgcaggtagcactacaccggaccac

SEQ ID NO: 399606 - DNA, 30 bp, Artificial Sequence
  Synthetic oligonucleotide
catacgcgcatttagataaccgtggaccac

SEQ ID NO: 399607 - DNA, 30 bp, Artificial Sequence
  Synthetic oligonucleotide
ttcgtgggcaggaatttcgatttgtaccac

SEQ ID NO: 399608 - DNA, 30 bp, Artificial Sequence
  Synthetic oligonucleotide
taagtaatcagaggctccaacagaacccac

SEQ ID NO: 399609 - DNA, 30 bp, Artificial Sequence
  Synthetic oligonucleotide
gcatctggcgatccaacctgacgcacccac

SEQ ID NO: 399610 - DNA, 30 bp, Artificial Sequence
  Synthetic oligonucleotide
agtcttgaagcgcccttcccgcctacccac

SEQ ID NO: 399611 - DNA, 30 bp, Artificial Sequence
  Synthetic oligonucleotide
tatacatacaatgcgctaggtcttacccac

SEQ ID NO: 399612 - DNA, 30 bp, Artificial Sequence
  Synthetic oligonucleotide
gagatcatattgcgatagcacagaccccac

SEQ ID NO: 399613 - DNA, 30 bp, Artificial Sequence
  Synthetic oligonucleotide
gggatatcaggtccggatggcgtaccccac

SEQ ID NO: 399614 - DNA, 30 bp, Artificial Sequence
  Synthetic oligonucleotide
gttccaggggtaggaacaatagaagcccac

SEQ ID NO: 399615 - DNA, 30 bp, Artificial Sequence
  Synthetic oligonucleotide
atgcgaatcacagggccctaggacgcccac

SEQ ID NO: 399616 - DNA, 30 bp, Artificial Sequence
  Synthetic oligonucleotide
gtaattccacgtgagtgttagaccgcccac

SEQ ID NO: 399617 - DNA, 30 bp, Artificial Sequence
  Synthetic oligonucleotide
accaactactccgctccactttccgcccac

SEQ ID NO: 399618 - DNA, 30 bp, Artificial Sequence
  Synthetic oligonucleotide
gagacgctgtcggagctgcggggcgcccac

SEQ ID NO: 399619 - DNA, 30 bp, Artificial Sequence
  Synthetic oligonucleotide
acgtattataagacgcatcgaatcgcccac

SEQ ID NO: 399620 - DNA, 30 bp, Artificial Sequence
  Synthetic oligonucleotide
catatgggggagatcgtcataccggcccac

SEQ ID NO: 399621 - DNA, 30 bp, Artificial Sequence
  Synthetic oligonucleotide
gtaaggtttgcattggtgcggagggcccac

SEQ ID NO: 399622 - DNA, 30 bp, Artificial Sequence
  Synthetic oligonucleotide
caggcaagtaatgtgaggaactatgcccac

SEQ ID NO: 399623 - DNA, 30 bp, Artificial Sequence
  Synthetic oligonucleotide
caggacactacgttatgctcgactgcccac

SEQ ID NO: 399624 - DNA, 30 bp, Artificial Sequence
  Synthetic oligonucleotide
tggcccttaaagacattccagcattcccac

SEQ ID NO: 399625 - DNA, 30 bp, Artificial Sequence
  Synthetic oligonucleotide
ccgcgtgctattgacccgttgcgttcccac

SEQ ID NO: 399626 - DNA, 30 bp, Artificial Sequence
  Synthetic oligonucleotide
acttctagggcgattcagagtagaagccac

SEQ ID NO: 399627 - DNA, 30 bp, Artificial Sequence
  Synthetic oligonucleotide
gcatgccgctgcgtcgagtctgacagccac

SEQ ID NO: 399628 - DNA, 30 bp, Artificial Sequence
  Synthetic oligonucleotide
gtggtgattgacggggccattacgagccac

SEQ ID NO: 399629 - DNA, 30 bp, Artificial Sequence
  Synthetic oligonucleotide
taaggagctccagcctactggtttagccac

SEQ ID NO: 399630 - DNA, 30 bp, Artificial Sequence
  Synthetic oligonucleotide
accgcacacggcttcgaagctagacgccac

SEQ ID NO: 399631 - DNA, 30 bp, Artificial Sequence
  Synthetic oligonucleotide
tcatacgtaacgcagaaatctcgacgccac

SEQ ID NO: 399632 - DNA, 30 bp, Artificial Sequence
  Synthetic oligonucleotide
aaaggaatgagggctttattcgtacgccac

SEQ ID NO: 399633 - DNA, 30 bp, Artificial Sequence
  Synthetic oligonucleotide
aagtttcacggggcgaacgtaccgcgccac

SEQ ID NO: 399634 - DNA, 30 bp, Artificial Sequence
  Synthetic oligonucleotide
aaaattgtcgtttttggcgagaggcgccac

SEQ ID NO: 399635 - DNA, 30 bp, Artificial Sequence
  Synthetic oligonucleotide
gccgcgagtaaacccgtccgggcaggccac

SEQ ID NO: 399636 - DNA, 30 bp, Artificial Sequence
  Synthetic oligonucleotide
gtgaatagcggttgattcggacacggccac

SEQ ID NO: 399637 - DNA, 30 bp, Artificial Sequence
  Synthetic oligonucleotide
ggttggtttatggtatgccatgagggccac

SEQ ID NO: 399638 - DNA, 30 bp, Artificial Sequence
  Synthetic oligonucleotide
tatagcctcagacgacgggatgcgggccac

SEQ ID NO: 399639 - DNA, 30 bp, Artificial Sequence
  Synthetic oligonucleotide
ttctgccacctttcaggacggttgggccac

SEQ ID NO: 399640 - DNA, 30 bp, Artificial Sequence
  Synthetic oligonucleotide
cccgttagagcattgtatcagcgtggccac

SEQ ID NO: 399641 - DNA, 30 bp, Artificial Sequence
  Synthetic oligonucleotide
tagatgtctgtttttgtaggtgttggccac

SEQ ID NO: 399642 - DNA, 30 bp, Artificial Sequence
  Synthetic oligonucleotide
agattataggatgtttcaagacgctgccac

SEQ ID NO: 399643 - DNA, 30 bp, Artificial Sequence
  Synthetic oligonucleotide
gatagcttatttgttgctggagagtgccac

SEQ ID NO: 399644 - DNA, 30 bp, Artificial Sequence
  Synthetic oligonucleotide
aacaaggatctaggcccttcctggtgccac

SEQ ID NO: 399645 - DNA, 30 bp, Artificial Sequence
  Synthetic oligonucleotide
cagtgcaaacattagcatcgcttgtgccac

SEQ ID NO: 399646 - DNA, 30 bp, Artificial Sequence
  Synthetic oligonucleotide
atgaagtgtctattgggttcttgttgccac

SEQ ID NO: 399647 - DNA, 30 bp, Artificial Sequence
  Synthetic oligonucleotide
cggtgctccctgggagtaggtcacatccac

SEQ ID NO: 399648 - DNA, 30 bp, Artificial Sequence
  Synthetic oligonucleotide
tcctgccggtttagaccttgggcgatccac

SEQ ID NO: 399649 - DNA, 30 bp, Artificial Sequence
  Synthetic oligonucleotide
gtttgtgatacccgctcaaggtggatccac

SEQ ID NO: 399650 - DNA, 30 bp, Artificial Sequence
  Synthetic oligonucleotide
ctaatccaggcaacgcgtatttggatccac

SEQ ID NO: 399651 - DNA, 30 bp, Artificial Sequence
  Synthetic oligonucleotide
tcaagtcgtagacccggcggtcctatccac

SEQ ID NO: 399652 - DNA, 30 bp, Artificial Sequence
  Synthetic oligonucleotide
ccgcaccgcatgaaggtgcggggtatccac

SEQ ID NO: 399653 - DNA, 30 bp, Artificial Sequence
  Synthetic oligonucleotide
gcccgtacggtaatttcaagaattatccac

SEQ ID NO: 399654 - DNA, 30 bp, Artificial Sequence
  Synthetic oligonucleotide
ctctgtatcagaactggttttgccctccac

SEQ ID NO: 399655 - DNA, 30 bp, Artificial Sequence
  Synthetic oligonucleotide
ttctatggatcctggggaggctgcctccac

SEQ ID NO: 399656 - DNA, 30 bp, Artificial Sequence
  Synthetic oligonucleotide
gagaacaagcctgcgacacatgtcctccac

SEQ ID NO: 399657 - DNA, 30 bp, Artificial Sequence
  Synthetic oligonucleotide
cgatagtagaagcggagctccaggctccac

SEQ ID NO: 399658 - DNA, 30 bp, Artificial Sequence
  Synthetic oligonucleotide
ctgcgaatcccccacgccctcagtctccac

SEQ ID NO: 399659 - DNA, 30 bp, Artificial Sequence
  Synthetic oligonucleotide
gaaccctccggatttggtcactgagtccac

SEQ ID NO: 399660 - DNA, 30 bp, Artificial Sequence
  Synthetic oligonucleotide
ggtaagttacccgttttaagcttagtccac

SEQ ID NO: 399661 - DNA, 30 bp, Artificial Sequence
  Synthetic oligonucleotide
cactcatagccggggcagagcgaggtccac

SEQ ID NO: 399662 - DNA, 30 bp, Artificial Sequence
  Synthetic oligonucleotide
gtttcgagctggcactaccataaattccac

SEQ ID NO: 399663 - DNA, 30 bp, Artificial Sequence
  Synthetic oligonucleotide
tttaaatcatccgcgcgcggctccttccac

SEQ ID NO: 399664 - DNA, 30 bp, Artificial Sequence
  Synthetic oligonucleotide
ggggtttgttgcatgcagaagtcgttccac

SEQ ID NO: 399665 - DNA, 30 bp, Artificial Sequence
  Synthetic oligonucleotide
ggccataaggtagcctgtcattcgttccac

SEQ ID NO: 399666 - DNA, 30 bp, Artificial Sequence
  Synthetic oligonucleotide
gtcgttggcggaaacagtttcagtttccac

SEQ ID NO: 399667 - DNA, 30 bp, Artificial Sequence
  Synthetic oligonucleotide
ttaccgttaacgtagactcgaggtttccac

SEQ ID NO: 399668 - DNA, 30 bp, Artificial Sequence
  Synthetic oligonucleotide
gactatgactctggctcttgatgtttccac

SEQ ID NO: 399669 - DNA, 30 bp, Artificial Sequence
  Synthetic oligonucleotide
atccagacgatacgtttgtacattttccac

SEQ ID NO: 399670 - DNA, 30 bp, Artificial Sequence
  Synthetic oligonucleotide
acggttgcacgtgagtctactattttccac

SEQ ID NO: 399671 - DNA, 30 bp, Artificial Sequence
  Synthetic oligonucleotide
aagcgatcctaagtcgtcgctaccaagcac

SEQ ID NO: 399672 - DNA, 30 bp, Artificial Sequence
  Synthetic oligonucleotide
gctcatacctgtgcgggatgttataagcac

SEQ ID NO: 399673 - DNA, 30 bp, Artificial Sequence
  Synthetic oligonucleotide
cggacgatcccctcactcagcattaagcac

SEQ ID NO: 399674 - DNA, 30 bp, Artificial Sequence
  Synthetic oligonucleotide
ctttagatcgtaagattcctgcgacagcac

SEQ ID NO: 399675 - DNA, 30 bp, Artificial Sequence
  Synthetic oligonucleotide
cagatccttttacgttcacaccaccagcac

SEQ ID NO: 399676 - DNA, 30 bp, Artificial Sequence
  Synthetic oligonucleotide
ggttttatccaagcaagggatgtgcagcac

SEQ ID NO: 399677 - DNA, 30 bp, Artificial Sequence
  Synthetic oligonucleotide
ttttctcccatacgaaactaacgagagcac

SEQ ID NO: 399678 - DNA, 30 bp, Artificial Sequence
  Synthetic oligonucleotide
gcagagcgttgttaagatcggatagagcac

SEQ ID NO: 399679 - DNA, 30 bp, Artificial Sequence
  Synthetic oligonucleotide
tttacaaccaagtaacttatttcggagcac

SEQ ID NO: 399680 - DNA, 30 bp, Artificial Sequence
  Synthetic oligonucleotide
atggcattctccgcttcaaatatatagcac

SEQ ID NO: 399681 - DNA, 30 bp, Artificial Sequence
  Synthetic oligonucleotide
attataggatagtgcgtgttgaactagcac

SEQ ID NO: 399682 - DNA, 30 bp, Artificial Sequence
  Synthetic oligonucleotide
cggacacagtgcaggcacgccgactagcac

SEQ ID NO: 399683 - DNA, 30 bp, Artificial Sequence
  Synthetic oligonucleotide
agttcaataactggcacgagcggctagcac

SEQ ID NO: 399684 - DNA, 30 bp, Artificial Sequence
  Synthetic oligonucleotide
gtttcagcgctctccaacccctgctagcac

SEQ ID NO: 399685 - DNA, 30 bp, Artificial Sequence
  Synthetic oligonucleotide
caaaggttccggtcatgatgtatctagcac

SEQ ID NO: 399686 - DNA, 30 bp, Artificial Sequence
  Synthetic oligonucleotide
cggatgtactggggcatatttttgtagcac

SEQ ID NO: 399687 - DNA, 30 bp, Artificial Sequence
  Synthetic oligonucleotide
acttgcgcactaagaaacgggtcttagcac

SEQ ID NO: 399688 - DNA, 30 bp, Artificial Sequence
  Synthetic oligonucleotide
gagcgggagtgctgtacagttatttagcac

SEQ ID NO: 399689 - DNA, 30 bp, Artificial Sequence
  Synthetic oligonucleotide
agaacgtttgtccgccgttctgaaacgcac

SEQ ID NO: 399690 - DNA, 30 bp, Artificial Sequence
  Synthetic oligonucleotide
aacaagacaacatacgacggcgcaacgcac

SEQ ID NO: 399691 - DNA, 30 bp, Artificial Sequence
  Synthetic oligonucleotide
tacataaactcccgaccagcggcaacgcac

SEQ ID NO: 399692 - DNA, 30 bp, Artificial Sequence
  Synthetic oligonucleotide
agcattacacgaagtcttcccataacgcac

SEQ ID NO: 399693 - DNA, 30 bp, Artificial Sequence
  Synthetic oligonucleotide
cccaagcgggttgtaagggcggacacgcac

SEQ ID NO: 399694 - DNA, 30 bp, Artificial Sequence
  Synthetic oligonucleotide
tactgcgcgattgtctaagcgggcacgcac

SEQ ID NO: 399695 - DNA, 30 bp, Artificial Sequence
  Synthetic oligonucleotide
cctcgtagactacgagcgcaaccgacgcac

SEQ ID NO: 399696 - DNA, 30 bp, Artificial Sequence
  Synthetic oligonucleotide
tcaagctgtcgcttgggagtggctacgcac

SEQ ID NO: 399697 - DNA, 30 bp, Artificial Sequence
  Synthetic oligonucleotide
ttgcgtacgtctcttcgttcggttacgcac

SEQ ID NO: 399698 - DNA, 30 bp, Artificial Sequence
  Synthetic oligonucleotide
catgcgtattattccactattagaccgcac

SEQ ID NO: 399699 - DNA, 30 bp, Artificial Sequence
  Synthetic oligonucleotide
agatctttgtataccggttgattaccgcac

SEQ ID NO: 399700 - DNA, 30 bp, Artificial Sequence
  Synthetic oligonucleotide
ttgactggtagggcaatactaaacccgcac

SEQ ID NO: 399701 - DNA, 30 bp, Artificial Sequence
  Synthetic oligonucleotide
gacagaaatgcagcacgacgggatccgcac

SEQ ID NO: 399702 - DNA, 30 bp, Artificial Sequence
  Synthetic oligonucleotide
gaggtctgtaatacgtgagcaattccgcac

SEQ ID NO: 399703 - DNA, 31 bp, Artificial Sequence
  Synthetic oligonucleotide
cttgttcatttcacaggagtccattccgcac

SEQ ID NO: 399704 - DNA, 28 bp, Artificial Sequence
  Synthetic oligonucleotide
attgtaaatgctcgggatggttccgcac

SEQ ID NO: 399705 - DNA, 30 bp, Artificial Sequence
  Synthetic oligonucleotide
ccatatttggcaccgcttgctggggcgcac

SEQ ID NO: 399706 - DNA, 30 bp, Artificial Sequence
  Synthetic oligonucleotide
tctaactctgaattcgtcttatatgcgcac

SEQ ID NO: 399707 - DNA, 30 bp, Artificial Sequence
  Synthetic oligonucleotide
cgaacacgggctcgtagtctacgtgcgcac

SEQ ID NO: 399708 - DNA, 30 bp, Artificial Sequence
  Synthetic oligonucleotide
gcgttcagcgcgtcccaagagggtgcgcac

SEQ ID NO: 399709 - DNA, 30 bp, Artificial Sequence
  Synthetic oligonucleotide
aaagtagagtgacgacggatcctatcgcac

SEQ ID NO: 399710 - DNA, 30 bp, Artificial Sequence
  Synthetic oligonucleotide
gttattactgtgcgttatagaggctcgcac

SEQ ID NO: 399711 - DNA, 30 bp, Artificial Sequence
  Synthetic oligonucleotide
ctaatggagccgttggcccttataaggcac

SEQ ID NO: 399712 - DNA, 30 bp, Artificial Sequence
  Synthetic oligonucleotide
tttggtactgtggtgggaccggacaggcac

SEQ ID NO: 399713 - DNA, 30 bp, Artificial Sequence
  Synthetic oligonucleotide
ttcgtttcttgcatgtcgggccataggcac

SEQ ID NO: 399714 - DNA, 30 bp, Artificial Sequence
  Synthetic oligonucleotide
tgtgcaaaattctgatgcgtccgtaggcac

SEQ ID NO: 399715 - DNA, 30 bp, Artificial Sequence
  Synthetic oligonucleotide
gaggcttacgcatttgcgacggttaggcac

SEQ ID NO: 399716 - DNA, 30 bp, Artificial Sequence
  Synthetic oligonucleotide
ttatctccctaggccgtagactcacggcac

SEQ ID NO: 399717 - DNA, 30 bp, Artificial Sequence
  Synthetic oligonucleotide
gccgcgtgtagtcgttgcgtccgacggcac

SEQ ID NO: 399718 - DNA, 30 bp, Artificial Sequence
  Synthetic oligonucleotide
agctattggattatcatgcatttccggcac

SEQ ID NO: 399719 - DNA, 30 bp, Artificial Sequence
  Synthetic oligonucleotide
gtaaggcccttccagcctcctgagcggcac

SEQ ID NO: 399720 - DNA, 30 bp, Artificial Sequence
  Synthetic oligonucleotide
aatatggtacctttaggattccatcggcac

SEQ ID NO: 399721 - DNA, 30 bp, Artificial Sequence
  Synthetic oligonucleotide
ctttctctacccggtttgcagcgagggcac

SEQ ID NO: 399722 - DNA, 30 bp, Artificial Sequence
  Synthetic oligonucleotide
aagtcgctacaaaattctcttcgagggcac

SEQ ID NO: 399723 - DNA, 30 bp, Artificial Sequence
  Synthetic oligonucleotide
ccaaccttctagagggtatcaaacgggcac

SEQ ID NO: 399724 - DNA, 30 bp, Artificial Sequence
  Synthetic oligonucleotide
tcggcagtatcgccgtattactacgggcac

SEQ ID NO: 399725 - DNA, 30 bp, Artificial Sequence
  Synthetic oligonucleotide
gaacattgtatttcaaatttaatggggcac

SEQ ID NO: 399726 - DNA, 30 bp, Artificial Sequence
  Synthetic oligonucleotide
acgtgttcattgatttaacgcgctgggcac

SEQ ID NO: 399727 - DNA, 30 bp, Artificial Sequence
  Synthetic oligonucleotide
gaggacttgtgcacaattcctgctgggcac

SEQ ID NO: 399728 - DNA, 30 bp, Artificial Sequence
  Synthetic oligonucleotide
ttcacgattgtattatcgcgacactggcac

SEQ ID NO: 399729 - DNA, 30 bp, Artificial Sequence
  Synthetic oligonucleotide
gaaatggtggacgctaaatcccactggcac

SEQ ID NO: 399730 - DNA, 30 bp, Artificial Sequence
  Synthetic oligonucleotide
gtctctccttgagtttgatcccattggcac

SEQ ID NO: 399731 - DNA, 30 bp, Artificial Sequence
  Synthetic oligonucleotide
ttggattatcttcgcccaacttcttggcac

SEQ ID NO: 399732 - DNA, 30 bp, Artificial Sequence
  Synthetic oligonucleotide
aggttggttaggcctttcggaatgatgcac

SEQ ID NO: 399733 - DNA, 30 bp, Artificial Sequence
  Synthetic oligonucleotide
tctctgagtagagtgccttgcctgatgcac

SEQ ID NO: 399734 - DNA, 30 bp, Artificial Sequence
  Synthetic oligonucleotide
gaaacatctggtgctatgtcgattatgcac

SEQ ID NO: 399735 - DNA, 30 bp, Artificial Sequence
  Synthetic oligonucleotide
ctctgggtattgtccgggcggattatgcac

SEQ ID NO: 399736 - DNA, 30 bp, Artificial Sequence
  Synthetic oligonucleotide
atttcgcacaactctcatgtgaaactgcac

SEQ ID NO: 399737 - DNA, 30 bp, Artificial Sequence
  Synthetic oligonucleotide
cactccgattattcacctgctaaactgcac

SEQ ID NO: 399738 - DNA, 29 bp, Artificial Sequence
  Synthetic oligonucleotide
caatgcaacccgattgtaccagcctgcac

SEQ ID NO: 399739 - DNA, 30 bp, Artificial Sequence
  Synthetic oligonucleotide
tatatgtgggtttgccttgattagctgcac

SEQ ID NO: 399740 - DNA, 30 bp, Artificial Sequence
  Synthetic oligonucleotide
gctgggcaggggtctctcctaaatctgcac

SEQ ID NO: 399741 - DNA, 30 bp, Artificial Sequence
  Synthetic oligonucleotide
gagacgctaataagtttggagattctgcac

SEQ ID NO: 399742 - DNA, 30 bp, Artificial Sequence
  Synthetic oligonucleotide
attgctgtcaccaaacgactatgggtgcac

SEQ ID NO: 399743 - DNA, 30 bp, Artificial Sequence
  Synthetic oligonucleotide
tcttcttcaagtgtggtaagagctgtgcac

SEQ ID NO: 399744 - DNA, 30 bp, Artificial Sequence
  Synthetic oligonucleotide
gcgtgccagccccggcacatcattgtgcac

SEQ ID NO: 399745 - DNA, 30 bp, Artificial Sequence
  Synthetic oligonucleotide
gtgcaagatggcagcaccgttgcattgcac

SEQ ID NO: 399746 - DNA, 30 bp, Artificial Sequence
  Synthetic oligonucleotide
cgtgcaatattactgagtagtaagttgcac

SEQ ID NO: 399747 - DNA, 30 bp, Artificial Sequence
  Synthetic oligonucleotide
gaatcaccaaacggccgttagacgttgcac

SEQ ID NO: 399748 - DNA, 30 bp, Artificial Sequence
  Synthetic oligonucleotide
ctcagacggtcggtataaatccggttgcac

SEQ ID NO: 399749 - DNA, 30 bp, Artificial Sequence
  Synthetic oligonucleotide
tatcttgggtggtttcggtgccgtttgcac

SEQ ID NO: 399750 - DNA, 30 bp, Artificial Sequence
  Synthetic oligonucleotide
gatccatgtatatggtgcttttaaaatcac

SEQ ID NO: 399751 - DNA, 30 bp, Artificial Sequence
  Synthetic oligonucleotide
atttgtcagaaaacatatagaacaaatcac

SEQ ID NO: 399752 - DNA, 30 bp, Artificial Sequence
  Synthetic oligonucleotide
aatatgtgtggttcacaaagttccaatcac

SEQ ID NO: 399753 - DNA, 30 bp, Artificial Sequence
  Synthetic oligonucleotide
atctggataagtatcctggccgtgaatcac

SEQ ID NO: 399754 - DNA, 30 bp, Artificial Sequence
  Synthetic oligonucleotide
aattgtaaaagctgctggaatgtgaatcac

SEQ ID NO: 399755 - DNA, 30 bp, Artificial Sequence
  Synthetic oligonucleotide
tgccgggtcgacacctttctggataatcac

SEQ ID NO: 399756 - DNA, 30 bp, Artificial Sequence
  Synthetic oligonucleotide
ttgcctacgccaatcactgtcattaatcac

SEQ ID NO: 399757 - DNA, 30 bp, Artificial Sequence
  Synthetic oligonucleotide
tccactcgcgacctgcagcgctatcatcac

SEQ ID NO: 399758 - DNA, 30 bp, Artificial Sequence
  Synthetic oligonucleotide
ttgcggtttgaagatggataacttcatcac

SEQ ID NO: 399759 - DNA, 30 bp, Artificial Sequence
  Synthetic oligonucleotide
cagtgacgcaagatcaagggacgagatcac

SEQ ID NO: 399760 - DNA, 30 bp, Artificial Sequence
  Synthetic oligonucleotide
accaatagatgcaatgctgcttacgatcac

SEQ ID NO: 399761 - DNA, 30 bp, Artificial Sequence
  Synthetic oligonucleotide
ccaacgaggagagaatcagctggcgatcac

SEQ ID NO: 399762 - DNA, 30 bp, Artificial Sequence
  Synthetic oligonucleotide
cagcgtcatatttggatttgtcttgatcac

SEQ ID NO: 399763 - DNA, 30 bp, Artificial Sequence
  Synthetic oligonucleotide
tggccgaagcgcgtaagataataatatcac

SEQ ID NO: 399764 - DNA, 30 bp, Artificial Sequence
  Synthetic oligonucleotide
ggccccccattcttatcaggcgcatatcac

SEQ ID NO: 399765 - DNA, 30 bp, Artificial Sequence
  Synthetic oligonucleotide
ttaatttgcgtagagtcgtcctgatatcac

SEQ ID NO: 399766 - DNA, 30 bp, Artificial Sequence
  Synthetic oligonucleotide
ggtactaatatagcgctgggtttctatcac

SEQ ID NO: 399767 - DNA, 30 bp, Artificial Sequence
  Synthetic oligonucleotide
ttgcggttttaagaggtgatcaggtatcac

SEQ ID NO: 399768 - DNA, 30 bp, Artificial Sequence
  Synthetic oligonucleotide
atactcaaagctacgagcgcctcttatcac

SEQ ID NO: 399769 - DNA, 30 bp, Artificial Sequence
  Synthetic oligonucleotide
gaagtacgcacctcccaggatataactcac

SEQ ID NO: 399770 - DNA, 30 bp, Artificial Sequence
  Synthetic oligonucleotide
ttgtggaaaggtagagttttgttaactcac

SEQ ID NO: 399771 - DNA, 30 bp, Artificial Sequence
  Synthetic oligonucleotide
gcgtgcttataacgcgaattacgcactcac

SEQ ID NO: 399772 - DNA, 30 bp, Artificial Sequence
  Synthetic oligonucleotide
attgctcatttccagacagccatcactcac

SEQ ID NO: 399773 - DNA, 30 bp, Artificial Sequence
  Synthetic oligonucleotide
acaggagttctaacactcactagtactcac

SEQ ID NO: 399774 - DNA, 30 bp, Artificial Sequence
  Synthetic oligonucleotide
gcacgcggagggtcacggacgggtactcac

SEQ ID NO: 399775 - DNA, 30 bp, Artificial Sequence
  Synthetic oligonucleotide
ccgtcaggttgttgtcactgtggtactcac

SEQ ID NO: 399776 - DNA, 30 bp, Artificial Sequence
  Synthetic oligonucleotide
atctgagtcatgtttatcattgcccctcac

SEQ ID NO: 399777 - DNA, 30 bp, Artificial Sequence
  Synthetic oligonucleotide
cggtttgcagacaacctcattctccctcac

SEQ ID NO: 399778 - DNA, 30 bp, Artificial Sequence
  Synthetic oligonucleotide
ctgcccatccaacgagcagcctatcctcac

SEQ ID NO: 399779 - DNA, 30 bp, Artificial Sequence
  Synthetic oligonucleotide
ttgttgaacgtaaaggtatatgctcctcac

SEQ ID NO: 399780 - DNA, 30 bp, Artificial Sequence
  Synthetic oligonucleotide
ttaaacgtaggcatgccttgcaccgctcac

SEQ ID NO: 399781 - DNA, 30 bp, Artificial Sequence
  Synthetic oligonucleotide
cttggccctgcccggccgcttggcgctcac

SEQ ID NO: 399782 - DNA, 30 bp, Artificial Sequence
  Synthetic oligonucleotide
tatcactctggattttactcttgcgctcac

SEQ ID NO: 399783 - DNA, 30 bp, Artificial Sequence
  Synthetic oligonucleotide
accggccgaactatggcgcgagaggctcac

SEQ ID NO: 399784 - DNA, 30 bp, Artificial Sequence
  Synthetic oligonucleotide
tgaaagcgctgaaagttatcataggctcac

SEQ ID NO: 399785 - DNA, 30 bp, Artificial Sequence
  Synthetic oligonucleotide
cctctcttgctttgcaccatgtaggctcac

SEQ ID NO: 399786 - DNA, 30 bp, Artificial Sequence
  Synthetic oligonucleotide
agctttctgatgaaagcgctagcatctcac

SEQ ID NO: 399787 - DNA, 30 bp, Artificial Sequence
  Synthetic oligonucleotide
ttaagaatagcatgtatattaaggtctcac

SEQ ID NO: 399788 - DNA, 30 bp, Artificial Sequence
  Synthetic oligonucleotide
aattcagaacctccaatgagctggtctcac

SEQ ID NO: 399789 - DNA, 30 bp, Artificial Sequence
  Synthetic oligonucleotide
aacacgtttaattccgtctaacattctcac

SEQ ID NO: 399790 - DNA, 30 bp, Artificial Sequence
  Synthetic oligonucleotide
gataccgatctaaaagttactgtttctcac

SEQ ID NO: 399791 - DNA, 30 bp, Artificial Sequence
  Synthetic oligonucleotide
tcctaccttcaccggtaccttccaagtcac

SEQ ID NO: 399792 - DNA, 30 bp, Artificial Sequence
  Synthetic oligonucleotide
aaaaagtaccgagttaaagcgtcaagtcac

SEQ ID NO: 399793 - DNA, 30 bp, Artificial Sequence
  Synthetic oligonucleotide
tttacgctgttagcaatacgctgaagtcac

SEQ ID NO: 399794 - DNA, 30 bp, Artificial Sequence
  Synthetic oligonucleotide
agcgactggtccccaacgcggataagtcac

SEQ ID NO: 399795 - DNA, 30 bp, Artificial Sequence
  Synthetic oligonucleotide
atcgagcgtctcggagttgaacttagtcac

SEQ ID NO: 399796 - DNA, 30 bp, Artificial Sequence
  Synthetic oligonucleotide
agtatcggttctatgatatgaccacgtcac

SEQ ID NO: 399797 - DNA, 30 bp, Artificial Sequence
  Synthetic oligonucleotide
ataagaaaacactgcgcaggcgcacgtcac

SEQ ID NO: 399798 - DNA, 30 bp, Artificial Sequence
  Synthetic oligonucleotide
ctggttaatacagagccacttcaccgtcac

SEQ ID NO: 399799 - DNA, 30 bp, Artificial Sequence
  Synthetic oligonucleotide
ctcttgaactgtgttgtaagacaaggtcac

SEQ ID NO: 399800 - DNA, 30 bp, Artificial Sequence
  Synthetic oligonucleotide
gcaaccagcagttcacccttaaacggtcac

SEQ ID NO: 399801 - DNA, 30 bp, Artificial Sequence
  Synthetic oligonucleotide
tccggacacttacagggtggaaccggtcac

SEQ ID NO: 399802 - DNA, 30 bp, Artificial Sequence
  Synthetic oligonucleotide
tagaagcaattgtgttgcacaatcggtcac

SEQ ID NO: 399803 - DNA, 30 bp, Artificial Sequence
  Synthetic oligonucleotide
gagtcagccggtgaacctaggtagggtcac

SEQ ID NO: 399804 - DNA, 30 bp, Artificial Sequence
  Synthetic oligonucleotide
gtatttagggggcagctcatgtagggtcac

SEQ ID NO: 399805 - DNA, 30 bp, Artificial Sequence
  Synthetic oligonucleotide
cgttgtcctttcctcggaattacgggtcac

SEQ ID NO: 399806 - DNA, 30 bp, Artificial Sequence
  Synthetic oligonucleotide
tagggtgctgtactgtcttcgaggggtcac

SEQ ID NO: 399807 - DNA, 30 bp, Artificial Sequence
  Synthetic oligonucleotide
acaacttcggacggcataggcatgggtcac

SEQ ID NO: 399808 - DNA, 30 bp, Artificial Sequence
  Synthetic oligonucleotide
tctcttaacaagacctgtgccttgggtcac

SEQ ID NO: 399809 - DNA, 30 bp, Artificial Sequence
  Synthetic oligonucleotide
tgtacatatatggtgtattattctggtcac

SEQ ID NO: 399810 - DNA, 30 bp, Artificial Sequence
  Synthetic oligonucleotide
ggtgcattggttaagtaagtatgtggtcac

SEQ ID NO: 399811 - DNA, 30 bp, Artificial Sequence
  Synthetic oligonucleotide
acccaaccgatggccacagcggaatgtcac

SEQ ID NO: 399812 - DNA, 30 bp, Artificial Sequence
  Synthetic oligonucleotide
taatgtgtgatatgttttgcaggatgtcac

SEQ ID NO: 399813 - DNA, 30 bp, Artificial Sequence
  Synthetic oligonucleotide
gaagaacataagcttttaggctgatgtcac

SEQ ID NO: 399814 - DNA, 30 bp, Artificial Sequence
  Synthetic oligonucleotide
ttgcccgcgacgatcgatccccactgtcac

SEQ ID NO: 399815 - DNA, 30 bp, Artificial Sequence
  Synthetic oligonucleotide
taccgacatctgacttactcactctgtcac

SEQ ID NO: 399816 - DNA, 30 bp, Artificial Sequence
  Synthetic oligonucleotide
cgcggcgaggcaggggccggttagtgtcac

SEQ ID NO: 399817 - DNA, 30 bp, Artificial Sequence
  Synthetic oligonucleotide
gggaatgatgcgggaagtggctccattcac

SEQ ID NO: 399818 - DNA, 30 bp, Artificial Sequence
  Synthetic oligonucleotide
cgctgatcaccagtgccgggaggcattcac

SEQ ID NO: 399819 - DNA, 30 bp, Artificial Sequence
  Synthetic oligonucleotide
gccaggttatacgtatatggcctcattcac

SEQ ID NO: 399820 - DNA, 30 bp, Artificial Sequence
  Synthetic oligonucleotide
cggcgactgaacctaacgcagacgattcac

SEQ ID NO: 399821 - DNA, 30 bp, Artificial Sequence
  Synthetic oligonucleotide
catatggcgcggaagtatagagctattcac

SEQ ID NO: 399822 - DNA, 30 bp, Artificial Sequence
  Synthetic oligonucleotide
gcattccacctgccgtgcgagggtattcac

SEQ ID NO: 399823 - DNA, 30 bp, Artificial Sequence
  Synthetic oligonucleotide
agggtcgacacgccttcttattttattcac

SEQ ID NO: 399824 - DNA, 30 bp, Artificial Sequence
  Synthetic oligonucleotide
ggccgtccaccaatagattcgtaacttcac

SEQ ID NO: 399825 - DNA, 30 bp, Artificial Sequence
  Synthetic oligonucleotide
attgaacgttcacccaatcagttccttcac

SEQ ID NO: 399826 - DNA, 30 bp, Artificial Sequence
  Synthetic oligonucleotide
ccgtcccagatacgtatcctgaggcttcac

SEQ ID NO: 399827 - DNA, 30 bp, Artificial Sequence
  Synthetic oligonucleotide
tctggataatgacggtcttcgggtcttcac

SEQ ID NO: 399828 - DNA, 30 bp, Artificial Sequence
  Synthetic oligonucleotide
ctatttaatagccctcattcgaaagttcac

SEQ ID NO: 399829 - DNA, 30 bp, Artificial Sequence
  Synthetic oligonucleotide
aatccgcttttgtttacatgagtagttcac

SEQ ID NO: 399830 - DNA, 30 bp, Artificial Sequence
  Synthetic oligonucleotide
tcccgcggacacttttatgtactcgttcac

SEQ ID NO: 399831 - DNA, 30 bp, Artificial Sequence
  Synthetic oligonucleotide
tgcaagttattcgaggattaataggttcac

SEQ ID NO: 399832 - DNA, 30 bp, Artificial Sequence
  Synthetic oligonucleotide
gccgcgatccacaattaacaggcggttcac

SEQ ID NO: 399833 - DNA, 30 bp, Artificial Sequence
  Synthetic oligonucleotide
ataggagagatttaagatcatactgttcac

SEQ ID NO: 399834 - DNA, 30 bp, Artificial Sequence
  Synthetic oligonucleotide
gagttcaaacgacatttgaaggctgttcac

SEQ ID NO: 399835 - DNA, 30 bp, Artificial Sequence
  Synthetic oligonucleotide
attgttcagataccgtcactgatatttcac

SEQ ID NO: 399836 - DNA, 30 bp, Artificial Sequence
  Synthetic oligonucleotide
ctgaagacttgtggtagtctaagctttcac

SEQ ID NO: 399837 - DNA, 30 bp, Artificial Sequence
  Synthetic oligonucleotide
cccgtgaaggcgagctctgtaagctttcac

SEQ ID NO: 399838 - DNA, 30 bp, Artificial Sequence
  Synthetic oligonucleotide
atgccattagttgaccgtctattgtttcac

SEQ ID NO: 399839 - DNA, 30 bp, Artificial Sequence
  Synthetic oligonucleotide
gttttaattaggggagatcgacattttcac

SEQ ID NO: 399840 - DNA, 30 bp, Artificial Sequence
  Synthetic oligonucleotide
tggtgctggttcttgcctcctgaaaaagac

SEQ ID NO: 399841 - DNA, 34 bp, Artificial Sequence
  Synthetic oligonucleotide
gatactagaccaccacgtgtccataagaaaagac

SEQ ID NO: 399842 - DNA, 34 bp, Artificial Sequence
  Synthetic oligonucleotide
gagactagaccaccacgtgtccatcagaaaagac

SEQ ID NO: 399843 - DNA, 34 bp, Artificial Sequence
  Synthetic oligonucleotide
gatactaggccaccacgtgtccatcagaaaagac

SEQ ID NO: 399844 - DNA, 34 bp, Artificial Sequence
  Synthetic oligonucleotide
gatactagaccaccacgggtcccttagaaaagac

SEQ ID NO: 399845 - DNA, 30 bp, Artificial Sequence
  Synthetic oligonucleotide
gcatgtttactgcgtggatgtaacaaagac

SEQ ID NO: 399846 - DNA, 30 bp, Artificial Sequence
  Synthetic oligonucleotide
aagtaggtcagctcatagggcttcaaagac

SEQ ID NO: 399847 - DNA, 30 bp, Artificial Sequence
  Synthetic oligonucleotide
aaagggatgtgactacaaattgagaaagac

SEQ ID NO: 399848 - DNA, 30 bp, Artificial Sequence
  Synthetic oligonucleotide
tacgtttggccaccgtaaggggggaaagac

SEQ ID NO: 399849 - DNA, 30 bp, Artificial Sequence
  Synthetic oligonucleotide
gcgtggacacactttatcgtgtataaagac

SEQ ID NO: 399850 - DNA, 30 bp, Artificial Sequence
  Synthetic oligonucleotide
cgaggcaaaccttagctcaatcttaaagac

SEQ ID NO: 399851 - DNA, 30 bp, Artificial Sequence
  Synthetic oligonucleotide
aggtccgttttacctggttcgtttaaagac

SEQ ID NO: 399852 - DNA, 30 bp, Artificial Sequence
  Synthetic oligonucleotide
ggccttcgtacttatggcagttttaaagac

SEQ ID NO: 399853 - DNA, 30 bp, Artificial Sequence
  Synthetic oligonucleotide
ttgacggacgtgggagaccgttaacaagac

SEQ ID NO: 399854 - DNA, 30 bp, Artificial Sequence
  Synthetic oligonucleotide
cacctgatagctacggattagacacaagac

SEQ ID NO: 399855 - DNA, 30 bp, Artificial Sequence
  Synthetic oligonucleotide
ctgaaatagaccgcggttctcgcacaagac

SEQ ID NO: 399856 - DNA, 30 bp, Artificial Sequence
  Synthetic oligonucleotide
tgtggcactgggctgttacaagggcaagac

SEQ ID NO: 399857 - DNA, 30 bp, Artificial Sequence
  Synthetic oligonucleotide
tagtgtctacggtccggaacccttcaagac

SEQ ID NO: 399858 - DNA, 30 bp, Artificial Sequence
  Synthetic oligonucleotide
gacatgtgcgtttaagttccgttagaagac

SEQ ID NO: 399859 - DNA, 30 bp, Artificial Sequence
  Synthetic oligonucleotide
gtaacaaacaggcgtcagtggcatgaagac

SEQ ID NO: 399860 - DNA, 30 bp, Artificial Sequence
  Synthetic oligonucleotide
gtgggaccacaacgaagtgtccctgaagac

SEQ ID NO: 399861 - DNA, 30 bp, Artificial Sequence
  Synthetic oligonucleotide
ttatgtgatgtaagggatgctcgtgaagac

SEQ ID NO: 399862 - DNA, 34 bp, Artificial Sequence
  Synthetic oligonucleotide
gatactagaccaccacgtgtccatcagataagac

SEQ ID NO: 399863 - DNA, 30 bp, Artificial Sequence
  Synthetic oligonucleotide
gaaatcggcagatataagtttttataagac

SEQ ID NO: 399864 - DNA, 30 bp, Artificial Sequence
  Synthetic oligonucleotide
cgtgtcaacatgaacgtacgttactaagac

SEQ ID NO: 399865 - DNA, 30 bp, Artificial Sequence
  Synthetic oligonucleotide
cttattgcctttgagtgttatgcgtaagac

SEQ ID NO: 399866 - DNA, 30 bp, Artificial Sequence
  Synthetic oligonucleotide
gtgtgatcgggaacttgaagtctaacagac

SEQ ID NO: 399867 - DNA, 30 bp, Artificial Sequence
  Synthetic oligonucleotide
attgggctgataacacgcactgtaacagac

SEQ ID NO: 399868 - DNA, 30 bp, Artificial Sequence
  Synthetic oligonucleotide
ttacaggttgggattaagtagttcacagac

SEQ ID NO: 399869 - DNA, 30 bp, Artificial Sequence
  Synthetic oligonucleotide
gcatcggaagggtctgtaaggtagacagac

SEQ ID NO: 399870 - DNA, 30 bp, Artificial Sequence
  Synthetic oligonucleotide
ggtgtaactcaggtttcacaatggacagac

SEQ ID NO: 399871 - DNA, 30 bp, Artificial Sequence
  Synthetic oligonucleotide
tgaatagtagctactcggggagatacagac

SEQ ID NO: 399872 - DNA, 30 bp, Artificial Sequence
  Synthetic oligonucleotide
ctccactaacgggaacctcattcaccagac

SEQ ID NO: 399873 - DNA, 30 bp, Artificial Sequence
  Synthetic oligonucleotide
attgcatgcatgtcctctcgagacccagac

SEQ ID NO: 399874 - DNA, 30 bp, Artificial Sequence
  Synthetic oligonucleotide
aatacttggagtgggacgctcttcccagac

SEQ ID NO: 399875 - DNA, 30 bp, Artificial Sequence
  Synthetic oligonucleotide
ggttaatcttattttggtggagcgccagac

SEQ ID NO: 399876 - DNA, 30 bp, Artificial Sequence
  Synthetic oligonucleotide
ctggaggttccgcttggcaagtcgccagac

SEQ ID NO: 399877 - DNA, 30 bp, Artificial Sequence
  Synthetic oligonucleotide
tacagctacccgtcgccggagttgccagac

SEQ ID NO: 399878 - DNA, 30 bp, Artificial Sequence
  Synthetic oligonucleotide
aagggaaaagcgccagtcgctaatccagac

SEQ ID NO: 399879 - DNA, 30 bp, Artificial Sequence
  Synthetic oligonucleotide
gcaacaaaactaaggcaccctcctccagac

SEQ ID NO: 399880 - DNA, 30 bp, Artificial Sequence
  Synthetic oligonucleotide
gtccgatgtgaggcgagaagtagtccagac

SEQ ID NO: 399881 - DNA, 30 bp, Artificial Sequence
  Synthetic oligonucleotide
tatctagccctcaaggaagaggaagcagac

SEQ ID NO: 399882 - DNA, 30 bp, Artificial Sequence
  Synthetic oligonucleotide
gtgatcccggtaagtattgcccgagcagac

SEQ ID NO: 399883 - DNA, 30 bp, Artificial Sequence
  Synthetic oligonucleotide
agaacccttaaggattataggggggcagac

SEQ ID NO: 399884 - DNA, 31 bp, Artificial Sequence
  Synthetic oligonucleotide
tatacgtattgaggcgcgtcttggggcagac

SEQ ID NO: 399885 - DNA, 30 bp, Artificial Sequence
  Synthetic oligonucleotide
aaggaggtttgatgtaaccaaactgcagac

SEQ ID NO: 399886 - DNA, 30 bp, Artificial Sequence
  Synthetic oligonucleotide
caggagtactaatgcgtggtctaatcagac

SEQ ID NO: 399887 - DNA, 30 bp, Artificial Sequence
  Synthetic oligonucleotide
tatatcatatgtgaaaaatgaacatcagac

SEQ ID NO: 399888 - DNA, 30 bp, Artificial Sequence
  Synthetic oligonucleotide
ccattaggtcccgagccgattacatcagac

SEQ ID NO: 399889 - DNA, 30 bp, Artificial Sequence
  Synthetic oligonucleotide
ggccgtaaagcatgatgagccgggtcagac

SEQ ID NO: 399890 - DNA, 30 bp, Artificial Sequence
  Synthetic oligonucleotide
ggaaatcattgtatagtgggcttttcagac

SEQ ID NO: 399891 - DNA, 30 bp, Artificial Sequence
  Synthetic oligonucleotide
ttaccggagatgcttggtgcgccaagagac

SEQ ID NO: 399892 - DNA, 30 bp, Artificial Sequence
  Synthetic oligonucleotide
tgatggacatctatactacactcaagagac

SEQ ID NO: 399893 - DNA, 30 bp, Artificial Sequence
  Synthetic oligonucleotide
ttcggccatctggccatgtactccagagac

SEQ ID NO: 399894 - DNA, 30 bp, Artificial Sequence
  Synthetic oligonucleotide
tgagggttcattgattcgggctgcagagac

SEQ ID NO: 399895 - DNA, 30 bp, Artificial Sequence
  Synthetic oligonucleotide
gaaccaatgcgatccgcactagggagagac

SEQ ID NO: 399896 - DNA, 30 bp, Artificial Sequence
  Synthetic oligonucleotide
catcagtgttgtaaaacaccactgagagac

SEQ ID NO: 399897 - DNA, 30 bp, Artificial Sequence
  Synthetic oligonucleotide
cttacgggtagtaacatgatgtctagagac

SEQ ID NO: 399898 - DNA, 30 bp, Artificial Sequence
  Synthetic oligonucleotide
atcctgtgtctctccgattcgggacgagac

SEQ ID NO: 399899 - DNA, 30 bp, Artificial Sequence
  Synthetic oligonucleotide
tgcgccggcctttactgtttaaaccgagac

SEQ ID NO: 399900 - DNA, 30 bp, Artificial Sequence
  Synthetic oligonucleotide
tatcgaacaaacttgccttaggttcgagac

SEQ ID NO: 399901 - DNA, 30 bp, Artificial Sequence
  Synthetic oligonucleotide
ccaaagtgtgggtaagcatcgaccggagac

SEQ ID NO: 399902 - DNA, 30 bp, Artificial Sequence
  Synthetic oligonucleotide
tgccggtcatccaggacaggttccggagac

SEQ ID NO: 399903 - DNA, 31 bp, Artificial Sequence
  Synthetic oligonucleotide
aaaagtatagaggtgtacatccatcggagac

SEQ ID NO: 399904 - DNA, 30 bp, Artificial Sequence
  Synthetic oligonucleotide
taccaattacactgccgacattctggagac

SEQ ID NO: 399905 - DNA, 30 bp, Artificial Sequence
  Synthetic oligonucleotide
gggatccactcgttttttcgaagtggagac

SEQ ID NO: 399906 - DNA, 30 bp, Artificial Sequence
  Synthetic oligonucleotide
ctgtctgttctcattaagagtcgtggagac

SEQ ID NO: 399907 - DNA, 30 bp, Artificial Sequence
  Synthetic oligonucleotide
gaagtgcttatgtgtttagcaggtggagac

SEQ ID NO: 399908 - DNA, 30 bp, Artificial Sequence
  Synthetic oligonucleotide
tagttcggattaatgtgacggccctgagac

SEQ ID NO: 399909 - DNA, 30 bp, Artificial Sequence
  Synthetic oligonucleotide
tacagggtgggcattactggtggctgagac

SEQ ID NO: 399910 - DNA, 30 bp, Artificial Sequence
  Synthetic oligonucleotide
gcatcacttgtagttttcgcttagtgagac

SEQ ID NO: 399911 - DNA, 30 bp, Artificial Sequence
  Synthetic oligonucleotide
tattgaagtttctgtaaattgaattgagac

SEQ ID NO: 399912 - DNA, 30 bp, Artificial Sequence
  Synthetic oligonucleotide
cgttgggtggctatctcaggatattgagac

SEQ ID NO: 399913 - DNA, 30 bp, Artificial Sequence
  Synthetic oligonucleotide
ggtagtcggtcacagggcgacttttgagac

SEQ ID NO: 399914 - DNA, 30 bp, Artificial Sequence
  Synthetic oligonucleotide
aactcgtaatatagtcctttagcaatagac

SEQ ID NO: 399915 - DNA, 30 bp, Artificial Sequence
  Synthetic oligonucleotide
agaagtcgcatagctacaactgcaatagac

SEQ ID NO: 399916 - DNA, 30 bp, Artificial Sequence
  Synthetic oligonucleotide
gccacgtatgaatactagaaatgaatagac

SEQ ID NO: 399917 - DNA, 30 bp, Artificial Sequence
  Synthetic oligonucleotide
tgaccgtgatatagctatcactgaatagac

SEQ ID NO: 399918 - DNA, 30 bp, Artificial Sequence
  Synthetic oligonucleotide
cccaggcctagtgccaggggaaagatagac

SEQ ID NO: 399919 - DNA, 30 bp, Artificial Sequence
  Synthetic oligonucleotide
cccaagagctgggcaatgaactagatagac

SEQ ID NO: 399920 - DNA, 30 bp, Artificial Sequence
  Synthetic oligonucleotide
gatataggggcgcgctcgacgagtatagac

SEQ ID NO: 399921 - DNA, 30 bp, Artificial Sequence
  Synthetic oligonucleotide
aacactacacacttggacattatactagac

SEQ ID NO: 399922 - DNA, 30 bp, Artificial Sequence
  Synthetic oligonucleotide
ggttctccatgtgggtttgtcgagctagac

SEQ ID NO: 399923 - DNA, 30 bp, Artificial Sequence
  Synthetic oligonucleotide
atgtataaccgtatatgattatctctagac

SEQ ID NO: 399924 - DNA, 30 bp, Artificial Sequence
  Synthetic oligonucleotide
gtttatagttgtttctcagggagtctagac

SEQ ID NO: 399925 - DNA, 30 bp, Artificial Sequence
  Synthetic oligonucleotide
tgtctgaagagcgatttttatggggtagac

SEQ ID NO: 399926 - DNA, 30 bp, Artificial Sequence
  Synthetic oligonucleotide
gactttctggaatttgcgaagattgtagac

SEQ ID NO: 399927 - DNA, 30 bp, Artificial Sequence
  Synthetic oligonucleotide
tcgactacgatatgtcactttattgtagac

SEQ ID NO: 399928 - DNA, 30 bp, Artificial Sequence
  Synthetic oligonucleotide
acgcctcatcgatccggggtagtattagac

SEQ ID NO: 399929 - DNA, 30 bp, Artificial Sequence
  Synthetic oligonucleotide
gtgtgcagagtgtttgccaattacttagac

SEQ ID NO: 399930 - DNA, 30 bp, Artificial Sequence
  Synthetic oligonucleotide
ttactgttttcagatacatgccccttagac

SEQ ID NO: 399931 - DNA, 30 bp, Artificial Sequence
  Synthetic oligonucleotide
cagggtcaattacgtactaacgcgttagac

SEQ ID NO: 399932 - DNA, 30 bp, Artificial Sequence
  Synthetic oligonucleotide
tcagagtagggtgctaactcccctttagac

SEQ ID NO: 399933 - DNA, 30 bp, Artificial Sequence
  Synthetic oligonucleotide
tttagctgcccggtgaagcgatctttagac

SEQ ID NO: 399934 - DNA, 30 bp, Artificial Sequence
  Synthetic oligonucleotide
caatccccagcctcagattggcgtttagac

SEQ ID NO: 399935 - DNA, 30 bp, Artificial Sequence
  Synthetic oligonucleotide
ggccacatggagctagagcccgttttagac

SEQ ID NO: 399936 - DNA, 30 bp, Artificial Sequence
  Synthetic oligonucleotide
aaaagatacgacttcggatgctttttagac

SEQ ID NO: 399937 - DNA, 30 bp, Artificial Sequence
  Synthetic oligonucleotide
acggttcactacccccgcgtttaaaacgac

SEQ ID NO: 399938 - DNA, 30 bp, Artificial Sequence
  Synthetic oligonucleotide
ggctaggtcatgtaaacttgaagaaacgac

SEQ ID NO: 399939 - DNA, 30 bp, Artificial Sequence
  Synthetic oligonucleotide
atgggattgatccagtaagccggaaacgac

SEQ ID NO: 399940 - DNA, 30 bp, Artificial Sequence
  Synthetic oligonucleotide
cccctcccgccctctgataggtacaacgac

SEQ ID NO: 399941 - DNA, 30 bp, Artificial Sequence
  Synthetic oligonucleotide
gaatcttttcgaggacaagccgataacgac

SEQ ID NO: 399942 - DNA, 30 bp, Artificial Sequence
  Synthetic oligonucleotide
ggtccgagcgccgggatgcagattaacgac

SEQ ID NO: 399943 - DNA, 30 bp, Artificial Sequence
  Synthetic oligonucleotide
tttgtactaaaccggagtgttcgacacgac

SEQ ID NO: 399944 - DNA, 30 bp, Artificial Sequence
  Synthetic oligonucleotide
agatccaggcatcctcgtgtcttacacgac

SEQ ID NO: 399945 - DNA, 30 bp, Artificial Sequence
  Synthetic oligonucleotide
aagtctttgatcctgcggatgttacacgac

SEQ ID NO: 399946 - DNA, 30 bp, Artificial Sequence
  Synthetic oligonucleotide
tcaccggcaaggtagaaggtccgccacgac

SEQ ID NO: 399947 - DNA, 30 bp, Artificial Sequence
  Synthetic oligonucleotide
ggttaggtcgttgctcctaaagtccacgac

SEQ ID NO: 399948 - DNA, 30 bp, Artificial Sequence
  Synthetic oligonucleotide
ggcggaggctattattgctcgacgcacgac

SEQ ID NO: 399949 - DNA, 30 bp, Artificial Sequence
  Synthetic oligonucleotide
ggggggttacacatgcaaccctggcacgac

SEQ ID NO: 399950 - DNA, 30 bp, Artificial Sequence
  Synthetic oligonucleotide
caagttcttgcgtctatggagagtcacgac

SEQ ID NO: 399951 - DNA, 30 bp, Artificial Sequence
  Synthetic oligonucleotide
gagcaggcgcaaatctagggtccagacgac

SEQ ID NO: 399952 - DNA, 30 bp, Artificial Sequence
  Synthetic oligonucleotide
gtttcaggcttacgcacgtattccgacgac

SEQ ID NO: 399953 - DNA, 30 bp, Artificial Sequence
  Synthetic oligonucleotide
tatcggaacgcacgggcgcgcacggacgac

SEQ ID NO: 399954 - DNA, 30 bp, Artificial Sequence
  Synthetic oligonucleotide
ggaattataggtaggatggattcggacgac

SEQ ID NO: 399955 - DNA, 30 bp, Artificial Sequence
  Synthetic oligonucleotide
tagcgtcctgcaatgtcagtcagggacgac

SEQ ID NO: 399956 - DNA, 30 bp, Artificial Sequence
  Synthetic oligonucleotide
attaagggtgttataattcaccgggacgac

SEQ ID NO: 399957 - DNA, 30 bp, Artificial Sequence
  Synthetic oligonucleotide
gatagcgcggggtcccgcgagggggacgac

SEQ ID NO: 399958 - DNA, 30 bp, Artificial Sequence
  Synthetic oligonucleotide
attgggcacggcttgacttaggatgacgac

SEQ ID NO: 399959 - DNA, 30 bp, Artificial Sequence
  Synthetic oligonucleotide
accctcagactaaccgcggaagctgacgac

SEQ ID NO: 399960 - DNA, 30 bp, Artificial Sequence
  Synthetic oligonucleotide
gaagtccccattgattccaattaatacgac

SEQ ID NO: 399961 - DNA, 30 bp, Artificial Sequence
  Synthetic oligonucleotide
cttaggctcatacgcacataacgatacgac

SEQ ID NO: 399962 - DNA, 30 bp, Artificial Sequence
  Synthetic oligonucleotide
gccgactacggtcgtactgttttatacgac

SEQ ID NO: 399963 - DNA, 30 bp, Artificial Sequence
  Synthetic oligonucleotide
tagtagaatcaaccggcgttcggctacgac

SEQ ID NO: 399964 - DNA, 30 bp, Artificial Sequence
  Synthetic oligonucleotide
gttgtgtcgtgagagaacaaaaggtacgac

SEQ ID NO: 399965 - DNA, 30 bp, Artificial Sequence
  Synthetic oligonucleotide
ttattttatcttcgttaacgtctgtacgac

SEQ ID NO: 399966 - DNA, 30 bp, Artificial Sequence
  Synthetic oligonucleotide
cgtggcggcaaaaagagaactggttacgac

SEQ ID NO: 399967 - DNA, 30 bp, Artificial Sequence
  Synthetic oligonucleotide
tggtgctttcgactcttcattggttacgac

SEQ ID NO: 399968 - DNA, 30 bp, Artificial Sequence
  Synthetic oligonucleotide
cctggtattaaggccgcattaggcaccgac

SEQ ID NO: 399969 - DNA, 30 bp, Artificial Sequence
  Synthetic oligonucleotide
ttactcgtaaatattatgcttcagaccgac

SEQ ID NO: 399970 - DNA, 30 bp, Artificial Sequence
  Synthetic oligonucleotide
taaaggccttgctcattagtttcgaccgac

SEQ ID NO: 399971 - DNA, 30 bp, Artificial Sequence
  Synthetic oligonucleotide
ggtttaatcaaacattccggctgtaccgac

SEQ ID NO: 399972 - DNA, 30 bp, Artificial Sequence
  Synthetic oligonucleotide
tagaacactaggtccatatgagtacccgac

SEQ ID NO: 399973 - DNA, 30 bp, Artificial Sequence
  Synthetic oligonucleotide
cgcgtagggtactctgttgtttaccccgac

SEQ ID NO: 399974 - DNA, 30 bp, Artificial Sequence
  Synthetic oligonucleotide
cttaatgatgttaccgaggtgggccccgac

SEQ ID NO: 399975 - DNA, 30 bp, Artificial Sequence
  Synthetic oligonucleotide
taaatagcagtcaggtcgcgaaagcccgac

SEQ ID NO: 399976 - DNA, 30 bp, Artificial Sequence
  Synthetic oligonucleotide
gcaggtccttgcgtatggtcggcgcccgac

SEQ ID NO: 399977 - DNA, 30 bp, Artificial Sequence
  Synthetic oligonucleotide
ctgccggaaattttcgagtttgaggccgac

SEQ ID NO: 399978 - DNA, 30 bp, Artificial Sequence
  Synthetic oligonucleotide
tggaacgcgacctaggctggccgtgccgac

SEQ ID NO: 399979 - DNA, 30 bp, Artificial Sequence
  Synthetic oligonucleotide
tgacattttaaaaagtggccacaatccgac

SEQ ID NO: 399980 - DNA, 30 bp, Artificial Sequence
  Synthetic oligonucleotide
gtccacagaacatcccttcccgaatccgac

SEQ ID NO: 399981 - DNA, 30 bp, Artificial Sequence
  Synthetic oligonucleotide
ctagttggtgaagatttgtcgccctccgac

SEQ ID NO: 399982 - DNA, 30 bp, Artificial Sequence
  Synthetic oligonucleotide
ccatcaccacagggatgaatctgttccgac

SEQ ID NO: 399983 - DNA, 30 bp, Artificial Sequence
  Synthetic oligonucleotide
ggacgaattagcgcgattttcagaagcgac

SEQ ID NO: 399984 - DNA, 30 bp, Artificial Sequence
  Synthetic oligonucleotide
cagaaaggtagtgggttgtaactaagcgac

SEQ ID NO: 399985 - DNA, 30 bp, Artificial Sequence
  Synthetic oligonucleotide
atcgctggtcagtactgcctagtaagcgac

SEQ ID NO: 399986 - DNA, 30 bp, Artificial Sequence
  Synthetic oligonucleotide
cggcaccctccctgtcccgcattgagcgac

SEQ ID NO: 399987 - DNA, 30 bp, Artificial Sequence
  Synthetic oligonucleotide
gcgtcgacgaatgggggcactcatagcgac

SEQ ID NO: 399988 - DNA, 30 bp, Artificial Sequence
  Synthetic oligonucleotide
ttatgtttgacccgagcggcctcacgcgac

SEQ ID NO: 399989 - DNA, 30 bp, Artificial Sequence
  Synthetic oligonucleotide
gtggccgtagagggccgtgagaaccgcgac

SEQ ID NO: 399990 - DNA, 30 bp, Artificial Sequence
  Synthetic oligonucleotide
cgtttattcttgacgcgtgagccccgcgac

SEQ ID NO: 399991 - DNA, 30 bp, Artificial Sequence
  Synthetic oligonucleotide
caatgggttagcaagcgtctggtccgcgac

SEQ ID NO: 399992 - DNA, 30 bp, Artificial Sequence
  Synthetic oligonucleotide
tcgttgaccaggcggcgccggcagcgcgac

SEQ ID NO: 399993 - DNA, 30 bp, Artificial Sequence
  Synthetic oligonucleotide
ggctcagacgcaaaaggtattatgcgcgac

SEQ ID NO: 399994 - DNA, 30 bp, Artificial Sequence
  Synthetic oligonucleotide
gatccagttaaacagttttccccaggcgac

SEQ ID NO: 399995 - DNA, 30 bp, Artificial Sequence
  Synthetic oligonucleotide
actacaatgagacgtttccttggaggcgac

SEQ ID NO: 399996 - DNA, 30 bp, Artificial Sequence
  Synthetic oligonucleotide
gagactagcgtaatggatccatgaggcgac

SEQ ID NO: 399997 - DNA, 30 bp, Artificial Sequence
  Synthetic oligonucleotide
caaaggtgtactgtttcggttggcggcgac

SEQ ID NO: 399998 - DNA, 30 bp, Artificial Sequence
  Synthetic oligonucleotide
gcgagcaacgatgtcgccaactagggcgac

SEQ ID NO: 399999 - DNA, 30 bp, Artificial Sequence
  Synthetic oligonucleotide
tacttcattaagagttaatttgatggcgac

SEQ ID NO: 400000 - DNA, 30 bp, Artificial Sequence
  Synthetic oligonucleotide
gtgtgatggaaagccgttctttctggcgac

SEQ ID NO: 400001 - DNA, 30 bp, Artificial Sequence
  Synthetic oligonucleotide
gaccgggtacgccaaaggcttggtggcgac

SEQ ID NO: 400002 - DNA, 30 bp, Artificial Sequence
  Synthetic oligonucleotide
tggtttggcgtatcttcgtcagttggcgac

SEQ ID NO: 400003 - DNA, 30 bp, Artificial Sequence
  Synthetic oligonucleotide
agaccagtcgtctcccactcgcaatgcgac

SEQ ID NO: 400004 - DNA, 30 bp, Artificial Sequence
  Synthetic oligonucleotide
gggaatcatgtcggatatgtcccatgcgac

SEQ ID NO: 400005 - DNA, 30 bp, Artificial Sequence
  Synthetic oligonucleotide
atgtttgctgcagaaggcttgtgctgcgac

SEQ ID NO: 400006 - DNA, 30 bp, Artificial Sequence
  Synthetic oligonucleotide
catcctaagtcgccagtttaaacgtgcgac

SEQ ID NO: 400007 - DNA, 30 bp, Artificial Sequence
  Synthetic oligonucleotide
attggcaatactgcaaggttattgtgcgac

SEQ ID NO: 400008 - DNA, 30 bp, Artificial Sequence
  Synthetic oligonucleotide
gaaaatagccctgatgagttcttgtgcgac

SEQ ID NO: 400009 - DNA, 30 bp, Artificial Sequence
  Synthetic oligonucleotide
tgtaaagtcattatgtgttggcattgcgac

SEQ ID NO: 400010 - DNA, 30 bp, Artificial Sequence
  Synthetic oligonucleotide
ggaaaagtagcggaatttcccacttgcgac

SEQ ID NO: 400011 - DNA, 30 bp, Artificial Sequence
  Synthetic oligonucleotide
gattatgaagcgagtcgcgagagaatcgac

SEQ ID NO: 400012 - DNA, 30 bp, Artificial Sequence
  Synthetic oligonucleotide
ctgataaaaccagtaatttttatcatcgac

SEQ ID NO: 400013 - DNA, 30 bp, Artificial Sequence
  Synthetic oligonucleotide
atgttacggtagttacagtcgacgatcgac

SEQ ID NO: 400014 - DNA, 30 bp, Artificial Sequence
  Synthetic oligonucleotide
atgcccacctgcgctctatggccgatcgac

SEQ ID NO: 400015 - DNA, 30 bp, Artificial Sequence
  Synthetic oligonucleotide
ccagcccgctggggatatcaccggatcgac

SEQ ID NO: 400016 - DNA, 30 bp, Artificial Sequence
  Synthetic oligonucleotide
taattgcgcagacactatatctggatcgac

SEQ ID NO: 400017 - DNA, 30 bp, Artificial Sequence
  Synthetic oligonucleotide
tagaagtaaatcagtcgctaaggtatcgac

SEQ ID NO: 400018 - DNA, 30 bp, Artificial Sequence
  Synthetic oligonucleotide
ctgaagtcgtgtgtgtaatactttatcgac

SEQ ID NO: 400019 - DNA, 30 bp, Artificial Sequence
  Synthetic oligonucleotide
acctgtgagtgttttagggttccactcgac

SEQ ID NO: 400020 - DNA, 30 bp, Artificial Sequence
  Synthetic oligonucleotide
ctgttgtggaaagctgcactcgtcctcgac

SEQ ID NO: 400021 - DNA, 30 bp, Artificial Sequence
  Synthetic oligonucleotide
attattcgaggcaaggataaggtcctcgac

SEQ ID NO: 400022 - DNA, 30 bp, Artificial Sequence
  Synthetic oligonucleotide
gatgagctctgaagtcatgtcaaagtcgac

SEQ ID NO: 400023 - DNA, 30 bp, Artificial Sequence
  Synthetic oligonucleotide
tattcttggtaggtccaaagtctagtcgac

SEQ ID NO: 400024 - DNA, 30 bp, Artificial Sequence
  Synthetic oligonucleotide
gtcgaccccagcgtctggttagtagtcgac

SEQ ID NO: 400025 - DNA, 30 bp, Artificial Sequence
  Synthetic oligonucleotide
gtcgggcagtcggacaaacccaacgtcgac

SEQ ID NO: 400026 - DNA, 30 bp, Artificial Sequence
  Synthetic oligonucleotide
cgttagttccgccaaaggtctatcgtcgac

SEQ ID NO: 400027 - DNA, 30 bp, Artificial Sequence
  Synthetic oligonucleotide
aagaaaaattcctgtttacaatttgtcgac

SEQ ID NO: 400028 - DNA, 30 bp, Artificial Sequence
  Synthetic oligonucleotide
ggcccactcgaatatttgcatagattcgac

SEQ ID NO: 400029 - DNA, 31 bp, Artificial Sequence
  Synthetic oligonucleotide
ttatgaagatggggcactgcgaagcttcgac

SEQ ID NO: 400030 - DNA, 30 bp, Artificial Sequence
  Synthetic oligonucleotide
tctttccataaatgcaacgacaggttcgac

SEQ ID NO: 400031 - DNA, 30 bp, Artificial Sequence
  Synthetic oligonucleotide
ttctttctctgcgcgtactggagtttcgac

SEQ ID NO: 400032 - DNA, 30 bp, Artificial Sequence
  Synthetic oligonucleotide
tacagatgataatatgtgtaccccaaggac

SEQ ID NO: 400033 - DNA, 30 bp, Artificial Sequence
  Synthetic oligonucleotide
gctagaataattgtgcttcgtatcaaggac

SEQ ID NO: 400034 - DNA, 30 bp, Artificial Sequence
  Synthetic oligonucleotide
catatgtttgcacatcgcaggctgaaggac

SEQ ID NO: 400035 - DNA, 30 bp, Artificial Sequence
  Synthetic oligonucleotide
aagtcgaccgcggtcaagtaggataaggac

SEQ ID NO: 400036 - DNA, 30 bp, Artificial Sequence
  Synthetic oligonucleotide
acacaccgagcgtttcaacctgcccaggac

SEQ ID NO: 400037 - DNA, 30 bp, Artificial Sequence
  Synthetic oligonucleotide
ttctggcataccaactagccgtcccaggac

SEQ ID NO: 400038 - DNA, 30 bp, Artificial Sequence
  Synthetic oligonucleotide
tttggtcgtgattccctagcgaagcaggac

SEQ ID NO: 400039 - DNA, 30 bp, Artificial Sequence
  Synthetic oligonucleotide
cgtgtcctaaccctcaggccccggcaggac

SEQ ID NO: 400040 - DNA, 30 bp, Artificial Sequence
  Synthetic oligonucleotide
aatattcggccatctatatcagggcaggac

SEQ ID NO: 400041 - DNA, 30 bp, Artificial Sequence
  Synthetic oligonucleotide
caatctggggagatgggctgggacgaggac

SEQ ID NO: 400042 - DNA, 30 bp, Artificial Sequence
  Synthetic oligonucleotide
gaaagcctttcaggaaactatcaggaggac

SEQ ID NO: 400043 - DNA, 30 bp, Artificial Sequence
  Synthetic oligonucleotide
tgtgaagacgtcggctccacgtcggaggac

SEQ ID NO: 400044 - DNA, 30 bp, Artificial Sequence
  Synthetic oligonucleotide
aacacccataggtccgtctggcgggaggac

SEQ ID NO: 400045 - DNA, 30 bp, Artificial Sequence
  Synthetic oligonucleotide
ggcagagggccggagggttgtgctgaggac

SEQ ID NO: 400046 - DNA, 30 bp, Artificial Sequence
  Synthetic oligonucleotide
actcttggacgggcgcttccaggataggac

SEQ ID NO: 400047 - DNA, 30 bp, Artificial Sequence
  Synthetic oligonucleotide
ttatagcgtgccatgatacgtgtataggac

SEQ ID NO: 400048 - DNA, 30 bp, Artificial Sequence
  Synthetic oligonucleotide
ctatagttagtgggatcggtacggtaggac

SEQ ID NO: 400049 - DNA, 30 bp, Artificial Sequence
  Synthetic oligonucleotide
gaagcggtaggtgtagtctccgtgtaggac

SEQ ID NO: 400050 - DNA, 30 bp, Artificial Sequence
  Synthetic oligonucleotide
gaagtggacgatattgttagtacttaggac

SEQ ID NO: 400051 - DNA, 30 bp, Artificial Sequence
  Synthetic oligonucleotide
ataaagagaaatgggctcgcttgttaggac

SEQ ID NO: 400052 - DNA, 30 bp, Artificial Sequence
  Synthetic oligonucleotide
tcgatagcgacggcatagatttgttaggac

SEQ ID NO: 400053 - DNA, 30 bp, Artificial Sequence
  Synthetic oligonucleotide
tgctaacatccgcggggtggcttttaggac

SEQ ID NO: 400054 - DNA, 30 bp, Artificial Sequence
  Synthetic oligonucleotide
tttcttgaatagcacaattcttaaacggac

SEQ ID NO: 400055 - DNA, 30 bp, Artificial Sequence
  Synthetic oligonucleotide
tgttgttttctaccactagaaacaacggac

SEQ ID NO: 400056 - DNA, 30 bp, Artificial Sequence
  Synthetic oligonucleotide
tctttcaagtttgacaagagctcaacggac

SEQ ID NO: 400057 - DNA, 30 bp, Artificial Sequence
  Synthetic oligonucleotide
gcccttcgggggtctcgcgcctgcacggac

SEQ ID NO: 400058 - DNA, 30 bp, Artificial Sequence
  Synthetic oligonucleotide
ttctgcggataattgtatgaactcacggac

SEQ ID NO: 400059 - DNA, 30 bp, Artificial Sequence
  Synthetic oligonucleotide
cgggatatttaggggataatcccgacggac

SEQ ID NO: 400060 - DNA, 30 bp, Artificial Sequence
  Synthetic oligonucleotide
aatcttactgttcagccctcccggacggac

SEQ ID NO: 400061 - DNA, 30 bp, Artificial Sequence
  Synthetic oligonucleotide
gttagtttaggtagggtttattggacggac

SEQ ID NO: 400062 - DNA, 30 bp, Artificial Sequence
  Synthetic oligonucleotide
accatgaaacgaatacgctctttgacggac

SEQ ID NO: 400063 - DNA, 30 bp, Artificial Sequence
  Synthetic oligonucleotide
acgtcgtgggtttaatcgtaagatacggac

SEQ ID NO: 400064 - DNA, 30 bp, Artificial Sequence
  Synthetic oligonucleotide
ttgccgataacctagtgttgagatacggac

SEQ ID NO: 400065 - DNA, 30 bp, Artificial Sequence
  Synthetic oligonucleotide
gtcgatgcgattaaagaatcaaaaccggac

SEQ ID NO: 400066 - DNA, 30 bp, Artificial Sequence
  Synthetic oligonucleotide
ctagagtttcagtaaacgggcccaccggac

SEQ ID NO: 400067 - DNA, 30 bp, Artificial Sequence
  Synthetic oligonucleotide
cggtatttgttcatgatatggatcccggac

SEQ ID NO: 400068 - DNA, 30 bp, Artificial Sequence
  Synthetic oligonucleotide
ccggccaatccttaaatactcaggccggac

SEQ ID NO: 400069 - DNA, 30 bp, Artificial Sequence
  Synthetic oligonucleotide
gtttagccgcggagctagtggtgtccggac

SEQ ID NO: 400070 - DNA, 30 bp, Artificial Sequence
  Synthetic oligonucleotide
aacccttagctactataatatcacgcggac

SEQ ID NO: 400071 - DNA, 30 bp, Artificial Sequence
  Synthetic oligonucleotide
atgatttcccggtaaagatcaaccgcggac

SEQ ID NO: 400072 - DNA, 30 bp, Artificial Sequence
  Synthetic oligonucleotide
agttataggacggatcaagtccccgcggac

SEQ ID NO: 400073 - DNA, 30 bp, Artificial Sequence
  Synthetic oligonucleotide
ataaaaatggagcgctcgaggaaggcggac

SEQ ID NO: 400074 - DNA, 30 bp, Artificial Sequence
  Synthetic oligonucleotide
gacgaaccgacggcttcatagtcggcggac

SEQ ID NO: 400075 - DNA, 30 bp, Artificial Sequence
  Synthetic oligonucleotide
gtctagtagctgctactaggcatggcggac

SEQ ID NO: 400076 - DNA, 30 bp, Artificial Sequence
  Synthetic oligonucleotide
actttacgcactgtaccgtggggatcggac

SEQ ID NO: 400077 - DNA, 30 bp, Artificial Sequence
  Synthetic oligonucleotide
atacaacacagtcgtgccccgttctcggac

SEQ ID NO: 400078 - DNA, 30 bp, Artificial Sequence
  Synthetic oligonucleotide
gctgattagttttgaccgccgaattcggac

SEQ ID NO: 400079 - DNA, 30 bp, Artificial Sequence
  Synthetic oligonucleotide
aacagagttatctatttatcttcttcggac

SEQ ID NO: 400080 - DNA, 30 bp, Artificial Sequence
  Synthetic oligonucleotide
tcacatagtgagacaatccgtcgcagggac

SEQ ID NO: 400081 - DNA, 30 bp, Artificial Sequence
  Synthetic oligonucleotide
gtacttgtttagaggtctgaattgagggac

SEQ ID NO: 400082 - DNA, 30 bp, Artificial Sequence
  Synthetic oligonucleotide
tagataatcgctattatccagcttagggac

SEQ ID NO: 400083 - DNA, 30 bp, Artificial Sequence
  Synthetic oligonucleotide
ctcccgtacttcatcaatggagttagggac

SEQ ID NO: 400084 - DNA, 30 bp, Artificial Sequence
  Synthetic oligonucleotide
aatgattgtttactgaacctgtttagggac

SEQ ID NO: 400085 - DNA, 30 bp, Artificial Sequence
  Synthetic oligonucleotide
acaatagataaatcagtacgcaaacgggac

SEQ ID NO: 400086 - DNA, 30 bp, Artificial Sequence
  Synthetic oligonucleotide
aaaacccgacgcattggatggtgacgggac

SEQ ID NO: 400087 - DNA, 30 bp, Artificial Sequence
  Synthetic oligonucleotide
tcgaccggctctttttttactcaccgggac

SEQ ID NO: 400088 - DNA, 30 bp, Artificial Sequence
  Synthetic oligonucleotide
cggcctgttagttgttcggtgtgccgggac

SEQ ID NO: 400089 - DNA, 30 bp, Artificial Sequence
  Synthetic oligonucleotide
gcgcctgcgggcgtggatgctcagcgggac

SEQ ID NO: 400090 - DNA, 30 bp, Artificial Sequence
  Synthetic oligonucleotide
tgtatactaatgtctcgcggtttgcgggac

SEQ ID NO: 400091 - DNA, 30 bp, Artificial Sequence
  Synthetic oligonucleotide
tttttgtagtaggaaagaatgaaaggggac

SEQ ID NO: 400092 - DNA, 30 bp, Artificial Sequence
  Synthetic oligonucleotide
tgttaactacgattggctcgcctcggggac

SEQ ID NO: 400093 - DNA, 30 bp, Artificial Sequence
  Synthetic oligonucleotide
ctttcccgacggaaagaatccaggggggac

SEQ ID NO: 400094 - DNA, 30 bp, Artificial Sequence
  Synthetic oligonucleotide
ctagtctctgacgggattcaggtgggggac

SEQ ID NO: 400095 - DNA, 30 bp, Artificial Sequence
  Synthetic oligonucleotide
aagtctttagcattcggggtagttggggac

SEQ ID NO: 400096 - DNA, 30 bp, Artificial Sequence
  Synthetic oligonucleotide
ttctgacagaaccaagtagagtttggggac

SEQ ID NO: 400097 - DNA, 30 bp, Artificial Sequence
  Synthetic oligonucleotide
taaagtgggcccggtttatcataatgggac

SEQ ID NO: 400098 - DNA, 30 bp, Artificial Sequence
  Synthetic oligonucleotide
gaatcctagatacacgtttcccgatgggac

SEQ ID NO: 400099 - DNA, 30 bp, Artificial Sequence
  Synthetic oligonucleotide
tgaatgccttctccaggcataggatgggac

SEQ ID NO: 400100 - DNA, 30 bp, Artificial Sequence
  Synthetic oligonucleotide
tcgaaatacgcagcataaaggtactgggac

SEQ ID NO: 400101 - DNA, 30 bp, Artificial Sequence
  Synthetic oligonucleotide
ccgtgttgtcttcgctgatggtcctgggac

SEQ ID NO: 400102 - DNA, 30 bp, Artificial Sequence
  Synthetic oligonucleotide
ttcagcgctttaattcaagaaacgtgggac

SEQ ID NO: 400103 - DNA, 30 bp, Artificial Sequence
  Synthetic oligonucleotide
gataccatttgtggcgttgacttgtgggac

SEQ ID NO: 400104 - DNA, 30 bp, Artificial Sequence
  Synthetic oligonucleotide
actctattctgcattactcaaaattgggac

SEQ ID NO: 400105 - DNA, 30 bp, Artificial Sequence
  Synthetic oligonucleotide
ctccggggaatcaaggagcaagaaatggac

SEQ ID NO: 400106 - DNA, 30 bp, Artificial Sequence
  Synthetic oligonucleotide
atagtcgccgcgaaatgctttagaatggac

SEQ ID NO: 400107 - DNA, 30 bp, Artificial Sequence
  Synthetic oligonucleotide
gtcgaagatacggatgagccccccatggac

SEQ ID NO: 400108 - DNA, 30 bp, Artificial Sequence
  Synthetic oligonucleotide
agagtgagacttgtcgaggggtgcatggac

SEQ ID NO: 400109 - DNA, 30 bp, Artificial Sequence
  Synthetic oligonucleotide
acagggtcgtctaagtacctgtagatggac

SEQ ID NO: 400110 - DNA, 30 bp, Artificial Sequence
  Synthetic oligonucleotide
ctgctttatggagagaataaacatatggac

SEQ ID NO: 400111 - DNA, 30 bp, Artificial Sequence
  Synthetic oligonucleotide
tttctctctcagagtcactaagctatggac

SEQ ID NO: 400112 - DNA, 30 bp, Artificial Sequence
  Synthetic oligonucleotide
gactccggatactacttaacccaactggac

SEQ ID NO: 400113 - DNA, 30 bp, Artificial Sequence
  Synthetic oligonucleotide
gtgtagtcgcttcaatttctcgaactggac

SEQ ID NO: 400114 - DNA, 30 bp, Artificial Sequence
  Synthetic oligonucleotide
atagttaatttttgcagggaacgcctggac

SEQ ID NO: 400115 - DNA, 30 bp, Artificial Sequence
  Synthetic oligonucleotide
actattttatcctcatctgtaaggctggac

SEQ ID NO: 400116 - DNA, 30 bp, Artificial Sequence
  Synthetic oligonucleotide
tggtagtcgcgaaagaccattggtctggac

SEQ ID NO: 400117 - DNA, 30 bp, Artificial Sequence
  Synthetic oligonucleotide
taaatgctacactttaagctataagtggac

SEQ ID NO: 400118 - DNA, 30 bp, Artificial Sequence
  Synthetic oligonucleotide
gatcgagcagggtccctgattgcagtggac

SEQ ID NO: 400119 - DNA, 30 bp, Artificial Sequence
  Synthetic oligonucleotide
tatagtctccttggtttatagtgcgtggac

SEQ ID NO: 400120 - DNA, 30 bp, Artificial Sequence
  Synthetic oligonucleotide
gtgggcctctttatacacccacaggtggac

SEQ ID NO: 400121 - DNA, 30 bp, Artificial Sequence
  Synthetic oligonucleotide
acgcgtacgctcaatgctttgacggtggac

SEQ ID NO: 400122 - DNA, 30 bp, Artificial Sequence
  Synthetic oligonucleotide
attcaaacgtacctaactacagcggtggac

SEQ ID NO: 400123 - DNA, 30 bp, Artificial Sequence
  Synthetic oligonucleotide
tctttgcctgtctgatcgaagcgattggac

SEQ ID NO: 400124 - DNA, 30 bp, Artificial Sequence
  Synthetic oligonucleotide
agtttgtaactacttgtccgaggcttggac

SEQ ID NO: 400125 - DNA, 30 bp, Artificial Sequence
  Synthetic oligonucleotide
gctataggaccggtaggctcgaagttggac

SEQ ID NO: 400126 - DNA, 30 bp, Artificial Sequence
  Synthetic oligonucleotide
atcgtaaccaacgacataacaatgttggac

SEQ ID NO: 400127 - DNA, 30 bp, Artificial Sequence
  Synthetic oligonucleotide
accacctccgtttttgtcgcattgttggac

SEQ ID NO: 400128 - DNA, 30 bp, Artificial Sequence
  Synthetic oligonucleotide
tagtgcactagacagtttgctagtttggac

SEQ ID NO: 400129 - DNA, 30 bp, Artificial Sequence
  Synthetic oligonucleotide
tacttcagtttgaagaccgacaaaaatgac

SEQ ID NO: 400130 - DNA, 30 bp, Artificial Sequence
  Synthetic oligonucleotide
tttgtctacctggcctatgtaacaaatgac

SEQ ID NO: 400131 - DNA, 30 bp, Artificial Sequence
  Synthetic oligonucleotide
gggctagggttgttagcccttacaaatgac

SEQ ID NO: 400132 - DNA, 30 bp, Artificial Sequence
  Synthetic oligonucleotide
attcctgtgtactcaagaggcccaaatgac

SEQ ID NO: 400133 - DNA, 30 bp, Artificial Sequence
  Synthetic oligonucleotide
gcaaggattggttgagggggcagaaatgac

SEQ ID NO: 400134 - DNA, 30 bp, Artificial Sequence
  Synthetic oligonucleotide
tgtggcgctattgacgaccctggaaatgac

SEQ ID NO: 400135 - DNA, 30 bp, Artificial Sequence
  Synthetic oligonucleotide
cctgatacattgcacaatttggggaatgac

SEQ ID NO: 400136 - DNA, 30 bp, Artificial Sequence
  Synthetic oligonucleotide
gcttatgataaggacaccttctggaatgac

SEQ ID NO: 400137 - DNA, 30 bp, Artificial Sequence
  Synthetic oligonucleotide
tgacgctaatcagattctggccctaatgac

SEQ ID NO: 400138 - DNA, 30 bp, Artificial Sequence
  Synthetic oligonucleotide
ctcgagctataagttaacttggaacatgac

SEQ ID NO: 400139 - DNA, 30 bp, Artificial Sequence
  Synthetic oligonucleotide
tcggtcaccgccggctacggttgacatgac

SEQ ID NO: 400140 - DNA, 30 bp, Artificial Sequence
  Synthetic oligonucleotide
atggtatcgggttatgggattatacatgac

SEQ ID NO: 400141 - DNA, 30 bp, Artificial Sequence
  Synthetic oligonucleotide
aaaatccactaggattggagtcaccatgac

SEQ ID NO: 400142 - DNA, 30 bp, Artificial Sequence
  Synthetic oligonucleotide
cttatgaggattcgcgcaaaggaccatgac

SEQ ID NO: 400143 - DNA, 30 bp, Artificial Sequence
  Synthetic oligonucleotide
cataagatccctgaagatataacgcatgac

SEQ ID NO: 400144 - DNA, 29 bp, Artificial Sequence
  Synthetic oligonucleotide
ccgctctagccggcacttagcgtcatgac

SEQ ID NO: 400145 - DNA, 30 bp, Artificial Sequence
  Synthetic oligonucleotide
cataccctcaaacaggcgcgggcagatgac

SEQ ID NO: 400146 - DNA, 30 bp, Artificial Sequence
  Synthetic oligonucleotide
ttgtgtcacgttgccaagtttcaggatgac

SEQ ID NO: 400147 - DNA, 30 bp, Artificial Sequence
  Synthetic oligonucleotide
ccccaaactggtgtaacaactagggatgac

SEQ ID NO: 400148 - DNA, 30 bp, Artificial Sequence
  Synthetic oligonucleotide
gcaaagttcaaacaagctcgtgaatatgac

SEQ ID NO: 400149 - DNA, 30 bp, Artificial Sequence
  Synthetic oligonucleotide
gttcttcgcggcattgtaagttgatatgac

SEQ ID NO: 400150 - DNA, 30 bp, Artificial Sequence
  Synthetic oligonucleotide
tttgaccatggatatcgtgtcatatatgac

SEQ ID NO: 400151 - DNA, 30 bp, Artificial Sequence
  Synthetic oligonucleotide
tttaacaaagccccgtagatgacctatgac

SEQ ID NO: 400152 - DNA, 30 bp, Artificial Sequence
  Synthetic oligonucleotide
gtcgatcgagataccgcacctgcctatgac

SEQ ID NO: 400153 - DNA, 30 bp, Artificial Sequence
  Synthetic oligonucleotide
tgcagtgtcattgcttacagtgcctatgac

SEQ ID NO: 400154 - DNA, 30 bp, Artificial Sequence
  Synthetic oligonucleotide
aaaaagccgcccagcgtatagttctatgac

SEQ ID NO: 400155 - DNA, 30 bp, Artificial Sequence
  Synthetic oligonucleotide
ttagggtcccccttcttccgggagtatgac

SEQ ID NO: 400156 - DNA, 30 bp, Artificial Sequence
  Synthetic oligonucleotide
tgtcgggttaatttatccagtacgtatgac

SEQ ID NO: 400157 - DNA, 30 bp, Artificial Sequence
  Synthetic oligonucleotide
aaggagtagcagttcatcataaggtatgac

SEQ ID NO: 400158 - DNA, 30 bp, Artificial Sequence
  Synthetic oligonucleotide
tgcctggtgtagtagtgtagtaaaactgac

SEQ ID NO: 400159 - DNA, 30 bp, Artificial Sequence
  Synthetic oligonucleotide
ccttagtgctatttagagcctgcaactgac

SEQ ID NO: 400160 - DNA, 30 bp, Artificial Sequence
  Synthetic oligonucleotide
atcgacccaagcgccgtgtctgtcactgac

SEQ ID NO: 400161 - DNA, 30 bp, Artificial Sequence
  Synthetic oligonucleotide
gccttcgaaaggaggccttcgggtactgac

SEQ ID NO: 400162 - DNA, 30 bp, Artificial Sequence
  Synthetic oligonucleotide
gattacatcgaggtaatatgctgtactgac

SEQ ID NO: 400163 - DNA, 30 bp, Artificial Sequence
  Synthetic oligonucleotide
gctagatatatgactcacgatagacctgac

SEQ ID NO: 400164 - DNA, 31 bp, Artificial Sequence
  Synthetic oligonucleotide
gctagtaggatacacctgactggaccctgac

SEQ ID NO: 400165 - DNA, 30 bp, Artificial Sequence
  Synthetic oligonucleotide
aaacccaaccgatatttttggatgcctgac

SEQ ID NO: 400166 - DNA, 30 bp, Artificial Sequence
  Synthetic oligonucleotide
caagggatggttgggggacctctgcctgac

SEQ ID NO: 400167 - DNA, 30 bp, Artificial Sequence
  Synthetic oligonucleotide
tgttaagcactggatggcgagcatcctgac

SEQ ID NO: 400168 - DNA, 30 bp, Artificial Sequence
  Synthetic oligonucleotide
tacatacaagtttagacgcgatgagctgac

SEQ ID NO: 400169 - DNA, 30 bp, Artificial Sequence
  Synthetic oligonucleotide
atctagcctgaccgcgtctatagcgctgac

SEQ ID NO: 400170 - DNA, 30 bp, Artificial Sequence
  Synthetic oligonucleotide
gaggctaagttcggcccctggggcgctgac

SEQ ID NO: 400171 - DNA, 30 bp, Artificial Sequence
  Synthetic oligonucleotide
cgaatacaagcatggttggcgggggctgac

SEQ ID NO: 400172 - DNA, 30 bp, Artificial Sequence
  Synthetic oligonucleotide
gcgcaattaacagtctggaaatatgctgac

SEQ ID NO: 400173 - DNA, 30 bp, Artificial Sequence
  Synthetic oligonucleotide
tcctgtgctggagacagtgacaactctgac

SEQ ID NO: 400174 - DNA, 30 bp, Artificial Sequence
  Synthetic oligonucleotide
gcatggccgtcgttgcgcccccggtctgac

SEQ ID NO: 400175 - DNA, 30 bp, Artificial Sequence
  Synthetic oligonucleotide
cagaacgatcgtgctgttcccgattctgac

SEQ ID NO: 400176 - DNA, 30 bp, Artificial Sequence
  Synthetic oligonucleotide
gtgtttacttttggggagcactaaagtgac

SEQ ID NO: 400177 - DNA, 30 bp, Artificial Sequence
  Synthetic oligonucleotide
gctagatttaatttgattgatacaagtgac

SEQ ID NO: 400178 - DNA, 30 bp, Artificial Sequence
  Synthetic oligonucleotide
aacccaaaacccctacactctacaagtgac

SEQ ID NO: 400179 - DNA, 30 bp, Artificial Sequence
  Synthetic oligonucleotide
caaaagcgacgctgaccccagcgcagtgac

SEQ ID NO: 400180 - DNA, 30 bp, Artificial Sequence
  Synthetic oligonucleotide
agcgtactctcacggtgcttcgagagtgac

SEQ ID NO: 400181 - DNA, 30 bp, Artificial Sequence
  Synthetic oligonucleotide
ttcccttcgcacttttaacggacgagtgac

SEQ ID NO: 400182 - DNA, 30 bp, Artificial Sequence
  Synthetic oligonucleotide
cccgctttaggtcgactagggtcgagtgac

SEQ ID NO: 400183 - DNA, 30 bp, Artificial Sequence
  Synthetic oligonucleotide
agaattattatacccacaaatgtgagtgac

SEQ ID NO: 400184 - DNA, 30 bp, Artificial Sequence
  Synthetic oligonucleotide
ttagaccggttccaggtttagagtagtgac

SEQ ID NO: 400185 - DNA, 30 bp, Artificial Sequence
  Synthetic oligonucleotide
atataaaatacgcgtgataatattagtgac

SEQ ID NO: 400186 - DNA, 30 bp, Artificial Sequence
  Synthetic oligonucleotide
gatgtcgctagcgcaaaattttttagtgac

SEQ ID NO: 400187 - DNA, 30 bp, Artificial Sequence
  Synthetic oligonucleotide
ataagttgcggctagttagtggtacgtgac

SEQ ID NO: 400188 - DNA, 30 bp, Artificial Sequence
  Synthetic oligonucleotide
ggatatttagcgagcgcataaatgcgtgac

SEQ ID NO: 400189 - DNA, 30 bp, Artificial Sequence
  Synthetic oligonucleotide
acagtgagcgcttagtttatcagaggtgac

SEQ ID NO: 400190 - DNA, 30 bp, Artificial Sequence
  Synthetic oligonucleotide
cttgtgctgaacggccctttttgaggtgac

SEQ ID NO: 400191 - DNA, 30 bp, Artificial Sequence
  Synthetic oligonucleotide
aaccgcgcgtagctgcttccttgcggtgac

SEQ ID NO: 400192 - DNA, 30 bp, Artificial Sequence
  Synthetic oligonucleotide
agtgcgcgatcaatgggttatgggggtgac

SEQ ID NO: 400193 - DNA, 30 bp, Artificial Sequence
  Synthetic oligonucleotide
atgctgtccagtgatagctggattggtgac

SEQ ID NO: 400194 - DNA, 30 bp, Artificial Sequence
  Synthetic oligonucleotide
caggcaggttcgggggcgcgcgcctgtgac

SEQ ID NO: 400195 - DNA, 30 bp, Artificial Sequence
  Synthetic oligonucleotide
ggttgcatgtacagtccaggtatgtgtgac

SEQ ID NO: 400196 - DNA, 30 bp, Artificial Sequence
  Synthetic oligonucleotide
cggtgcgccaaaactacacaattttgtgac

SEQ ID NO: 400197 - DNA, 30 bp, Artificial Sequence
  Synthetic oligonucleotide
actttgtataaatcgatatgtacaattgac

SEQ ID NO: 400198 - DNA, 30 bp, Artificial Sequence
  Synthetic oligonucleotide
ctgtcgatcactactgacgtgccaattgac

SEQ ID NO: 400199 - DNA, 30 bp, Artificial Sequence
  Synthetic oligonucleotide
cgctgttctggggtactcgtaaacattgac

SEQ ID NO: 400200 - DNA, 30 bp, Artificial Sequence
  Synthetic oligonucleotide
acttttgccgggtgcggagccaacattgac

SEQ ID NO: 400201 - DNA, 30 bp, Artificial Sequence
  Synthetic oligonucleotide
gacactcagccaatccgctgtgccattgac

SEQ ID NO: 400202 - DNA, 30 bp, Artificial Sequence
  Synthetic oligonucleotide
acgttgatgcccggtcgggttttcattgac

SEQ ID NO: 400203 - DNA, 30 bp, Artificial Sequence
  Synthetic oligonucleotide
tagaaccggtgtggttggtcttatattgac

SEQ ID NO: 400204 - DNA, 30 bp, Artificial Sequence
  Synthetic oligonucleotide
acgcccgtggatggctaacgttgtattgac

SEQ ID NO: 400205 - DNA, 30 bp, Artificial Sequence
  Synthetic oligonucleotide
ctcgcactgatctttgaccagcttattgac

SEQ ID NO: 400206 - DNA, 30 bp, Artificial Sequence
  Synthetic oligonucleotide
cggtctctgaaataattgagtaaccttgac

SEQ ID NO: 400207 - DNA, 30 bp, Artificial Sequence
  Synthetic oligonucleotide
gaggccgctaaagagggccatcaccttgac

SEQ ID NO: 400208 - DNA, 30 bp, Artificial Sequence
  Synthetic oligonucleotide
gatggctacggcgatccttgcacgcttgac

SEQ ID NO: 400209 - DNA, 30 bp, Artificial Sequence
  Synthetic oligonucleotide
gctaggtttcaagttgaagttattcttgac

SEQ ID NO: 400210 - DNA, 29 bp, Artificial Sequence
  Synthetic oligonucleotide
tcctaggaatcgaactccttcttcttgac

SEQ ID NO: 400211 - DNA, 30 bp, Artificial Sequence
  Synthetic oligonucleotide
aagtagctggtctgtttctttgttcttgac

SEQ ID NO: 400212 - DNA, 30 bp, Artificial Sequence
  Synthetic oligonucleotide
gagaattcagaacttaattaatttcttgac

SEQ ID NO: 400213 - DNA, 30 bp, Artificial Sequence
  Synthetic oligonucleotide
gattaatgtaatagacagtaaaaagttgac

SEQ ID NO: 400214 - DNA, 30 bp, Artificial Sequence
  Synthetic oligonucleotide
aaactgagggttggatgggcatgagttgac

SEQ ID NO: 400215 - DNA, 30 bp, Artificial Sequence
  Synthetic oligonucleotide
ttacggtcgttgatcaaaattcacgttgac

SEQ ID NO: 400216 - DNA, 30 bp, Artificial Sequence
  Synthetic oligonucleotide
gaactgtttcaaggagagaggtgcgttgac

SEQ ID NO: 400217 - DNA, 30 bp, Artificial Sequence
  Synthetic oligonucleotide
agttatttaaagaagcaaatcctcgttgac

SEQ ID NO: 400218 - DNA, 30 bp, Artificial Sequence
  Synthetic oligonucleotide
aaacggcacagttatcacgtcccggttgac

SEQ ID NO: 400219 - DNA, 30 bp, Artificial Sequence
  Synthetic oligonucleotide
ttagacacctgcagggccctccgggttgac

SEQ ID NO: 400220 - DNA, 30 bp, Artificial Sequence
  Synthetic oligonucleotide
acggcgcttcttgaatttctccgggttgac

SEQ ID NO: 400221 - DNA, 30 bp, Artificial Sequence
  Synthetic oligonucleotide
gcaatgacccgaataatagttcgggttgac

SEQ ID NO: 400222 - DNA, 30 bp, Artificial Sequence
  Synthetic oligonucleotide
actgggcggttctgcaggtttatggttgac

SEQ ID NO: 400223 - DNA, 30 bp, Artificial Sequence
  Synthetic oligonucleotide
aactccatagcttccatggaacatgttgac

SEQ ID NO: 400224 - DNA, 30 bp, Artificial Sequence
  Synthetic oligonucleotide
gccccgcagtccgggacgtgttatgttgac

SEQ ID NO: 400225 - DNA, 30 bp, Artificial Sequence
  Synthetic oligonucleotide
aaggtaatagatcggtgttacaactttgac

SEQ ID NO: 400226 - DNA, 30 bp, Artificial Sequence
  Synthetic oligonucleotide
gttaacaaccagtacctatcacgctttgac

SEQ ID NO: 400227 - DNA, 30 bp, Artificial Sequence
  Synthetic oligonucleotide
ctgtagttgcgtgccaaggatggctttgac

SEQ ID NO: 400228 - DNA, 30 bp, Artificial Sequence
  Synthetic oligonucleotide
cttaaataagcccttggtacgacgtttgac

SEQ ID NO: 400229 - DNA, 30 bp, Artificial Sequence
  Synthetic oligonucleotide
gttataggaactaggaccggacattttgac

SEQ ID NO: 400230 - DNA, 30 bp, Artificial Sequence
  Synthetic oligonucleotide
ttcctgtcacggaaacagaagtcttttgac

SEQ ID NO: 400231 - DNA, 30 bp, Artificial Sequence
  Synthetic oligonucleotide
catgcatatgccaaggtcaggttttttgac

SEQ ID NO: 400232 - DNA, 30 bp, Artificial Sequence
  Synthetic oligonucleotide
atatcagtatgataaagccaacacaaatac

SEQ ID NO: 400233 - DNA, 30 bp, Artificial Sequence
  Synthetic oligonucleotide
tctctattgctgtgcatcggacccaaatac

SEQ ID NO: 400234 - DNA, 30 bp, Artificial Sequence
  Synthetic oligonucleotide
acagggtttatgcaagctgtctccaaatac

SEQ ID NO: 400235 - DNA, 30 bp, Artificial Sequence
  Synthetic oligonucleotide
gtatgggccagcgttttaagccctaaatac

SEQ ID NO: 400236 - DNA, 30 bp, Artificial Sequence
  Synthetic oligonucleotide
cgttcagactcgttgctaccatctaaatac

SEQ ID NO: 400237 - DNA, 30 bp, Artificial Sequence
  Synthetic oligonucleotide
agcctcgtggcagagtttactcttaaatac

SEQ ID NO: 400238 - DNA, 30 bp, Artificial Sequence
  Synthetic oligonucleotide
gaggcttctgccgttattacgtttaaatac

SEQ ID NO: 400239 - DNA, 30 bp, Artificial Sequence
  Synthetic oligonucleotide
tttattgatcaagtaaagacttcacaatac

SEQ ID NO: 400240 - DNA, 30 bp, Artificial Sequence
  Synthetic oligonucleotide
aagaacttctggtggcaatatttccaatac

SEQ ID NO: 400241 - DNA, 30 bp, Artificial Sequence
  Synthetic oligonucleotide
ggtcaggcgtgaggtgcacggacgcaatac

SEQ ID NO: 400242 - DNA, 30 bp, Artificial Sequence
  Synthetic oligonucleotide
cccgtctacatggccaattggccgcaatac

SEQ ID NO: 400243 - DNA, 30 bp, Artificial Sequence
  Synthetic oligonucleotide
tatcgttctgctttattgactaatcaatac

SEQ ID NO: 400244 - DNA, 30 bp, Artificial Sequence
  Synthetic oligonucleotide
cccagggcggttacggaccaatgtcaatac

SEQ ID NO: 400245 - DNA, 30 bp, Artificial Sequence
  Synthetic oligonucleotide
cccagtggctttggggaacgcgaagaatac

SEQ ID NO: 400246 - DNA, 30 bp, Artificial Sequence
  Synthetic oligonucleotide
gttaaaacctcgaatttatttgaagaatac

SEQ ID NO: 400247 - DNA, 30 bp, Artificial Sequence
  Synthetic oligonucleotide
ggtgaacttctcactttcgagcgagaatac

SEQ ID NO: 400248 - DNA, 30 bp, Artificial Sequence
  Synthetic oligonucleotide
ctcccaggaattcatctgggtatagaatac

SEQ ID NO: 400249 - DNA, 30 bp, Artificial Sequence
  Synthetic oligonucleotide
agaattaaactcaattatgtagtagaatac

SEQ ID NO: 400250 - DNA, 30 bp, Artificial Sequence
  Synthetic oligonucleotide
atctgtccggcaagaattcctttagaatac

SEQ ID NO: 400251 - DNA, 30 bp, Artificial Sequence
  Synthetic oligonucleotide
ataattaaggcggggacaggtcgcgaatac

SEQ ID NO: 400252 - DNA, 30 bp, Artificial Sequence
  Synthetic oligonucleotide
aattatttgacagatgcgcagctcgaatac

SEQ ID NO: 400253 - DNA, 30 bp, Artificial Sequence
  Synthetic oligonucleotide
tacgctttaaagagcatgacagaataatac

SEQ ID NO: 400254 - DNA, 30 bp, Artificial Sequence
  Synthetic oligonucleotide
cagtccgatgacctcgacgctatataatac

SEQ ID NO: 400255 - DNA, 30 bp, Artificial Sequence
  Synthetic oligonucleotide
cacacttgtgtctgggtttcaaactaatac

SEQ ID NO: 400256 - DNA, 30 bp, Artificial Sequence
  Synthetic oligonucleotide
gtttgaagttagtttgggggtaactaatac

SEQ ID NO: 400257 - DNA, 30 bp, Artificial Sequence
  Synthetic oligonucleotide
gagacgcgtgagatacctagtatctaatac

SEQ ID NO: 400258 - DNA, 30 bp, Artificial Sequence
  Synthetic oligonucleotide
gaaaacggcatgaatatcttgcagtaatac

SEQ ID NO: 400259 - DNA, 30 bp, Artificial Sequence
  Synthetic oligonucleotide
gatgtggaattgccagcttaaacgtaatac

SEQ ID NO: 400260 - DNA, 30 bp, Artificial Sequence
  Synthetic oligonucleotide
aacaagcgcttggcacgcgtctcgtaatac

SEQ ID NO: 400261 - DNA, 30 bp, Artificial Sequence
  Synthetic oligonucleotide
aaatttcagcgttggtgggaactgtaatac

SEQ ID NO: 400262 - DNA, 30 bp, Artificial Sequence
  Synthetic oligonucleotide
gccaaggggctcatggcccatttgtaatac

SEQ ID NO: 400263 - DNA, 30 bp, Artificial Sequence
  Synthetic oligonucleotide
taaaccaagcgtataacatttaattaatac

SEQ ID NO: 400264 - DNA, 30 bp, Artificial Sequence
  Synthetic oligonucleotide
gctgatctaacagtagctctacgttaatac

SEQ ID NO: 400265 - DNA, 30 bp, Artificial Sequence
  Synthetic oligonucleotide
tgggtccacgtgggttaagtgtgttaatac

SEQ ID NO: 400266 - DNA, 30 bp, Artificial Sequence
  Synthetic oligonucleotide
ggctcagctcgcgctcgatatgcgacatac

SEQ ID NO: 400267 - DNA, 30 bp, Artificial Sequence
  Synthetic oligonucleotide
taaccagcgatttacttcggcagtacatac

SEQ ID NO: 400268 - DNA, 30 bp, Artificial Sequence
  Synthetic oligonucleotide
gtggtgattgagttagtatgtagaccatac

SEQ ID NO: 400269 - DNA, 30 bp, Artificial Sequence
  Synthetic oligonucleotide
ctaaacatgaacgagatactgactccatac

SEQ ID NO: 400270 - DNA, 30 bp, Artificial Sequence
  Synthetic oligonucleotide
actacgaacgcactcagtcatggtccatac

SEQ ID NO: 400271 - DNA, 30 bp, Artificial Sequence
  Synthetic oligonucleotide
gagtcccggggaatatatcggaaagcatac

SEQ ID NO: 400272 - DNA, 30 bp, Artificial Sequence
  Synthetic oligonucleotide
gtcgtacattacaatgtatggtacgcatac

SEQ ID NO: 400273 - DNA, 30 bp, Artificial Sequence
  Synthetic oligonucleotide
ctttttatccatggtgtagtgcccgcatac

SEQ ID NO: 400274 - DNA, 30 bp, Artificial Sequence
  Synthetic oligonucleotide
accgataataactcttgaacagaggcatac

SEQ ID NO: 400275 - DNA, 30 bp, Artificial Sequence
  Synthetic oligonucleotide
tgatttcttcggacgggcgctggggcatac

SEQ ID NO: 400276 - DNA, 30 bp, Artificial Sequence
  Synthetic oligonucleotide
caatgaattaatccattcttaccatcatac

SEQ ID NO: 400277 - DNA, 30 bp, Artificial Sequence
  Synthetic oligonucleotide
atttaggcgccatcaacagtgtgatcatac

SEQ ID NO: 400278 - DNA, 30 bp, Artificial Sequence
  Synthetic oligonucleotide
atgaaaacgacgtgctatctattatcatac

SEQ ID NO: 400279 - DNA, 30 bp, Artificial Sequence
  Synthetic oligonucleotide
catcgtaccacgtcataggtcgcctcatac

SEQ ID NO: 400280 - DNA, 30 bp, Artificial Sequence
  Synthetic oligonucleotide
cggtgcgttgctccaagtaccgagtcatac

SEQ ID NO: 400281 - DNA, 30 bp, Artificial Sequence
  Synthetic oligonucleotide
atcagcacatgttcggacatggggtcatac

SEQ ID NO: 400282 - DNA, 30 bp, Artificial Sequence
  Synthetic oligonucleotide
gatctgcctgctgtgttgtctctgtcatac

SEQ ID NO: 400283 - DNA, 30 bp, Artificial Sequence
  Synthetic oligonucleotide
gggcgtaggggtaggtaaacgaattcatac

SEQ ID NO: 400284 - DNA, 30 bp, Artificial Sequence
  Synthetic oligonucleotide
tgcatatggctccccagggacgattcatac

SEQ ID NO: 400285 - DNA, 30 bp, Artificial Sequence
  Synthetic oligonucleotide
gcagtctctaacgttaacattacttcatac

SEQ ID NO: 400286 - DNA, 30 bp, Artificial Sequence
  Synthetic oligonucleotide
tcgggttagacgcacgttcgcctttcatac

SEQ ID NO: 400287 - DNA, 30 bp, Artificial Sequence
  Synthetic oligonucleotide
taaaagcgaacgagacagaatcaaagatac

SEQ ID NO: 400288 - DNA, 30 bp, Artificial Sequence
  Synthetic oligonucleotide
aagatgagctctaaagccgcgcacagatac

SEQ ID NO: 400289 - DNA, 30 bp, Artificial Sequence
  Synthetic oligonucleotide
tgtggcgaactggtcacggtgaagagatac

SEQ ID NO: 400290 - DNA, 30 bp, Artificial Sequence
  Synthetic oligonucleotide
ttgctctcatgccattgtgttccgagatac

SEQ ID NO: 400291 - DNA, 30 bp, Artificial Sequence
  Synthetic oligonucleotide
aatatacaaatatattatttggcgagatac

SEQ ID NO: 400292 - DNA, 30 bp, Artificial Sequence
  Synthetic oligonucleotide
tggcctttcttatgagccaacaggagatac

SEQ ID NO: 400293 - DNA, 30 bp, Artificial Sequence
  Synthetic oligonucleotide
gcctattaaatactgagctctgtgagatac

SEQ ID NO: 400294 - DNA, 30 bp, Artificial Sequence
  Synthetic oligonucleotide
ttggtgcacattctacagaataaccgatac

SEQ ID NO: 400295 - DNA, 30 bp, Artificial Sequence
  Synthetic oligonucleotide
taacacccagcgtatcaggcgcagcgatac

SEQ ID NO: 400296 - DNA, 30 bp, Artificial Sequence
  Synthetic oligonucleotide
tgcccggatcgtatagcgataagaggatac

SEQ ID NO: 400297 - DNA, 30 bp, Artificial Sequence
  Synthetic oligonucleotide
cagctcgctagacctataaaaggaggatac

SEQ ID NO: 400298 - DNA, 30 bp, Artificial Sequence
  Synthetic oligonucleotide
tatcaatcattctctcgtgcactcggatac

SEQ ID NO: 400299 - DNA, 30 bp, Artificial Sequence
  Synthetic oligonucleotide
gagtcagttacagtatggttcaggggatac

SEQ ID NO: 400300 - DNA, 30 bp, Artificial Sequence
  Synthetic oligonucleotide
tctttcctactagaagtagggaatggatac

SEQ ID NO: 400301 - DNA, 30 bp, Artificial Sequence
  Synthetic oligonucleotide
cttctatagatgatgtctcggattggatac

SEQ ID NO: 400302 - DNA, 31 bp, Artificial Sequence
  Synthetic oligonucleotide
gccgcggttgggttcaaggtttgttggatac

SEQ ID NO: 400303 - DNA, 30 bp, Artificial Sequence
  Synthetic oligonucleotide
ttaggccatcttgtctgcctcagctgatac

SEQ ID NO: 400304 - DNA, 30 bp, Artificial Sequence
  Synthetic oligonucleotide
tcttcttccgccagggggggccgctgatac

SEQ ID NO: 400305 - DNA, 30 bp, Artificial Sequence
  Synthetic oligonucleotide
tatttacaacacgagaggaggtggtgatac

SEQ ID NO: 400306 - DNA, 30 bp, Artificial Sequence
  Synthetic oligonucleotide
gcagtacatagttctcttccgacttgatac

SEQ ID NO: 400307 - DNA, 30 bp, Artificial Sequence
  Synthetic oligonucleotide
acgaccatcgtcaaggccattacttgatac

SEQ ID NO: 400308 - DNA, 30 bp, Artificial Sequence
  Synthetic oligonucleotide
ccatttcacttccgatactaccacatatac

SEQ ID NO: 400309 - DNA, 31 bp, Artificial Sequence
  Synthetic oligonucleotide
ccccaatgtaagtctcgggggcaccatatac

SEQ ID NO: 400310 - DNA, 30 bp, Artificial Sequence
  Synthetic oligonucleotide
tatacagctttttatcagtcccccatatac

SEQ ID NO: 400311 - DNA, 30 bp, Artificial Sequence
  Synthetic oligonucleotide
tcgcattacaaagcgatgctaaggatatac

SEQ ID NO: 400312 - DNA, 30 bp, Artificial Sequence
  Synthetic oligonucleotide
attgtacggttggtactcaccgtgatatac

SEQ ID NO: 400313 - DNA, 30 bp, Artificial Sequence
  Synthetic oligonucleotide
gagaaaaccgtgtgacggtactctatatac

SEQ ID NO: 400314 - DNA, 30 bp, Artificial Sequence
  Synthetic oligonucleotide
actaagccttctacacacgcatcactatac

SEQ ID NO: 400315 - DNA, 30 bp, Artificial Sequence
  Synthetic oligonucleotide
cctttccgcaccactatatttaagctatac

SEQ ID NO: 400316 - DNA, 30 bp, Artificial Sequence
  Synthetic oligonucleotide
cgaagcatcacagtatttcaaacgctatac

SEQ ID NO: 400317 - DNA, 30 bp, Artificial Sequence
  Synthetic oligonucleotide
gagtaacctgccatgtatatcacgctatac

SEQ ID NO: 400318 - DNA, 30 bp, Artificial Sequence
  Synthetic oligonucleotide
cggcttgtagaacatacccttacgctatac

SEQ ID NO: 400319 - DNA, 30 bp, Artificial Sequence
  Synthetic oligonucleotide
actatattagtctgaccgttccggctatac

SEQ ID NO: 400320 - DNA, 30 bp, Artificial Sequence
  Synthetic oligonucleotide
atagatgtttgtaagagccgccgtctatac

SEQ ID NO: 400321 - DNA, 30 bp, Artificial Sequence
  Synthetic oligonucleotide
gttataggacgttaggtagccatagtatac

SEQ ID NO: 400322 - DNA, 30 bp, Artificial Sequence
  Synthetic oligonucleotide
gaactctggttggctacgaatgtcgtatac

SEQ ID NO: 400323 - DNA, 30 bp, Artificial Sequence
  Synthetic oligonucleotide
cggttaatgaatctggccacataggtatac

SEQ ID NO: 400324 - DNA, 30 bp, Artificial Sequence
  Synthetic oligonucleotide
aaaccagtggttcgcgctagataggtatac

SEQ ID NO: 400325 - DNA, 30 bp, Artificial Sequence
  Synthetic oligonucleotide
tcaacggccatttcttcctcgtaggtatac

SEQ ID NO: 400326 - DNA, 30 bp, Artificial Sequence
  Synthetic oligonucleotide
cggggcaacctaattctataaccggtatac

SEQ ID NO: 400327 - DNA, 30 bp, Artificial Sequence
  Synthetic oligonucleotide
actcacatatgacctgtcaagaatgtatac

SEQ ID NO: 400328 - DNA, 30 bp, Artificial Sequence
  Synthetic oligonucleotide
aaggtttgtaaaatgttggagtgtgtatac

SEQ ID NO: 400329 - DNA, 30 bp, Artificial Sequence
  Synthetic oligonucleotide
cggggcaactgctcaacgcacttattatac

SEQ ID NO: 400330 - DNA, 31 bp, Artificial Sequence
  Synthetic oligonucleotide
agatttatcaacgttaccttccaagttatac

SEQ ID NO: 400331 - DNA, 30 bp, Artificial Sequence
  Synthetic oligonucleotide
tgtaccgactaacggcgtctttagttatac

SEQ ID NO: 400332 - DNA, 30 bp, Artificial Sequence
  Synthetic oligonucleotide
atgcatgtgtgttctgcgtgagggttatac

SEQ ID NO: 400333 - DNA, 30 bp, Artificial Sequence
  Synthetic oligonucleotide
atggtatgcggctggttcacgtctttatac

SEQ ID NO: 400334 - DNA, 30 bp, Artificial Sequence
  Synthetic oligonucleotide
tcgcaacggtacccttgggaaagtttatac

SEQ ID NO: 400335 - DNA, 30 bp, Artificial Sequence
  Synthetic oligonucleotide
ctagcttttgcgtgcccaccacaaaactac

SEQ ID NO: 400336 - DNA, 30 bp, Artificial Sequence
  Synthetic oligonucleotide
taaactgctgagggcttcgttgcaaactac

SEQ ID NO: 400337 - DNA, 30 bp, Artificial Sequence
  Synthetic oligonucleotide
cccccattgaacatggtacggataaactac

SEQ ID NO: 400338 - DNA, 30 bp, Artificial Sequence
  Synthetic oligonucleotide
aattatgaccaggatccgtacgtcaactac

SEQ ID NO: 400339 - DNA, 30 bp, Artificial Sequence
  Synthetic oligonucleotide
cacgtcgagtaagggatgcagcataactac

SEQ ID NO: 400340 - DNA, 30 bp, Artificial Sequence
  Synthetic oligonucleotide
accctttaaaacctatcacactttaactac

SEQ ID NO: 400341 - DNA, 30 bp, Artificial Sequence
  Synthetic oligonucleotide
ttcatccatgactcggcggcgtttaactac

SEQ ID NO: 400342 - DNA, 30 bp, Artificial Sequence
  Synthetic oligonucleotide
gagaattggcacccatacgttcgacactac

SEQ ID NO: 400343 - DNA, 30 bp, Artificial Sequence
  Synthetic oligonucleotide
ctagaatatataggaagtcgtctgcactac

SEQ ID NO: 400344 - DNA, 30 bp, Artificial Sequence
  Synthetic oligonucleotide
ggggcagcgtaaaaggagtctttagactac

SEQ ID NO: 400345 - DNA, 30 bp, Artificial Sequence
  Synthetic oligonucleotide
ctagacgctgtattctgaagtttagactac

SEQ ID NO: 400346 - DNA, 30 bp, Artificial Sequence
  Synthetic oligonucleotide
aattggggttatgttcgagccatcgactac

SEQ ID NO: 400347 - DNA, 30 bp, Artificial Sequence
  Synthetic oligonucleotide
gtcgcgcgagatctaagttccgcggactac

SEQ ID NO: 400348 - DNA, 30 bp, Artificial Sequence
  Synthetic oligonucleotide
tgttcgctggcttgtataatatcggactac

SEQ ID NO: 400349 - DNA, 30 bp, Artificial Sequence
  Synthetic oligonucleotide
ctacatgggtccgcacacggaagggactac

SEQ ID NO: 400350 - DNA, 30 bp, Artificial Sequence
  Synthetic oligonucleotide
atataataattgtctagactttgtgactac

SEQ ID NO: 400351 - DNA, 30 bp, Artificial Sequence
  Synthetic oligonucleotide
ctggggagcatctcgcggggtcgatactac

SEQ ID NO: 400352 - DNA, 30 bp, Artificial Sequence
  Synthetic oligonucleotide
cccaagcttaccgccctctgagactactac

SEQ ID NO: 400353 - DNA, 30 bp, Artificial Sequence
  Synthetic oligonucleotide
cttaaagcggcaagagatgcacagtactac

SEQ ID NO: 400354 - DNA, 30 bp, Artificial Sequence
  Synthetic oligonucleotide
acgcgcaaggcgcgagttcttgattactac

SEQ ID NO: 400355 - DNA, 30 bp, Artificial Sequence
  Synthetic oligonucleotide
tatttatggtctcatcgactgtaaacctac

SEQ ID NO: 400356 - DNA, 30 bp, Artificial Sequence
  Synthetic oligonucleotide
caaggttgcgttttatgatctgcaacctac

SEQ ID NO: 400357 - DNA, 30 bp, Artificial Sequence
  Synthetic oligonucleotide
tcagaagtactccatatactctagacctac

SEQ ID NO: 400358 - DNA, 30 bp, Artificial Sequence
  Synthetic oligonucleotide
tggcctctttatccacacgacgtgacctac

SEQ ID NO: 400359 - DNA, 30 bp, Artificial Sequence
  Synthetic oligonucleotide
aatatataacatgtcggcttatctacctac

SEQ ID NO: 400360 - DNA, 30 bp, Artificial Sequence
  Synthetic oligonucleotide
ttagagaatgccgtacagaaaggtacctac

SEQ ID NO: 400361 - DNA, 30 bp, Artificial Sequence
  Synthetic oligonucleotide
ttcggcgtcggactgtcactggaaccctac

SEQ ID NO: 400362 - DNA, 30 bp, Artificial Sequence
  Synthetic oligonucleotide
taaaaggtcgtacgattgtacacaccctac

SEQ ID NO: 400363 - DNA, 30 bp, Artificial Sequence
  Synthetic oligonucleotide
gattaccagctgtatggaggcaagccctac

SEQ ID NO: 400364 - DNA, 30 bp, Artificial Sequence
  Synthetic oligonucleotide
aaaatgagagcgctggactatgtgccctac

SEQ ID NO: 400365 - DNA, 30 bp, Artificial Sequence
  Synthetic oligonucleotide
aaaatccctggcatgatgcttggtccctac

SEQ ID NO: 400366 - DNA, 30 bp, Artificial Sequence
  Synthetic oligonucleotide
tgagctctatagattgtgtagcttccctac

SEQ ID NO: 400367 - DNA, 30 bp, Artificial Sequence
  Synthetic oligonucleotide
catgcgccgggatatggatgacaagcctac

SEQ ID NO: 400368 - DNA, 30 bp, Artificial Sequence
  Synthetic oligonucleotide
ctttgaaataaatggttgaacatagcctac

SEQ ID NO: 400369 - DNA, 30 bp, Artificial Sequence
  Synthetic oligonucleotide
caagtaggacatttataaatcagggcctac

SEQ ID NO: 400370 - DNA, 30 bp, Artificial Sequence
  Synthetic oligonucleotide
ggcctgagtttggtaatgtcgcgggcctac

SEQ ID NO: 400371 - DNA, 30 bp, Artificial Sequence
  Synthetic oligonucleotide
cctccggagtggagcacgcaactggcctac

SEQ ID NO: 400372 - DNA, 30 bp, Artificial Sequence
  Synthetic oligonucleotide
attgctcaaggtacatgcgacagatcctac

SEQ ID NO: 400373 - DNA, 30 bp, Artificial Sequence
  Synthetic oligonucleotide
tatctggtcttctaagggtgcttatcctac

SEQ ID NO: 400374 - DNA, 30 bp, Artificial Sequence
  Synthetic oligonucleotide
aagatccataatccttaattcgactcctac

SEQ ID NO: 400375 - DNA, 30 bp, Artificial Sequence
  Synthetic oligonucleotide
aggactttatcggaacagataggctcctac

SEQ ID NO: 400376 - DNA, 30 bp, Artificial Sequence
  Synthetic oligonucleotide
acttaaacttgcgtcgttttagcgtcctac

SEQ ID NO: 400377 - DNA, 30 bp, Artificial Sequence
  Synthetic oligonucleotide
ccggctttacgagtcttttaacggtcctac

SEQ ID NO: 400378 - DNA, 30 bp, Artificial Sequence
  Synthetic oligonucleotide
gactacgcaaagcagtgatgacggtcctac

SEQ ID NO: 400379 - DNA, 30 bp, Artificial Sequence
  Synthetic oligonucleotide
ctggacacgttaaagggaagtcggtcctac

SEQ ID NO: 400380 - DNA, 30 bp, Artificial Sequence
  Synthetic oligonucleotide
cccacgacacaatactaacaggtgtcctac

SEQ ID NO: 400381 - DNA, 30 bp, Artificial Sequence
  Synthetic oligonucleotide
ttgttgtgttctctttttgtgttttcctac

SEQ ID NO: 400382 - DNA, 30 bp, Artificial Sequence
  Synthetic oligonucleotide
aaaatcggtcaaaacagcggaaaaagctac

SEQ ID NO: 400383 - DNA, 30 bp, Artificial Sequence
  Synthetic oligonucleotide
aacaggagtctcattggaagctaaagctac

SEQ ID NO: 400384 - DNA, 30 bp, Artificial Sequence
  Synthetic oligonucleotide
gaacctgttgccagcgagtcaatgagctac

SEQ ID NO: 400385 - DNA, 31 bp, Artificial Sequence
  Synthetic oligonucleotide
cggttattcgtcagctgggggagctagctac

SEQ ID NO: 400386 - DNA, 30 bp, Artificial Sequence
  Synthetic oligonucleotide
taagtctcgctcgcccggtgttcacgctac

SEQ ID NO: 400387 - DNA, 30 bp, Artificial Sequence
  Synthetic oligonucleotide
cctctttgggctttaaaagacccccgctac

SEQ ID NO: 400388 - DNA, 30 bp, Artificial Sequence
  Synthetic oligonucleotide
caagccaatgtagttcgcgtttcgcgctac

SEQ ID NO: 400389 - DNA, 30 bp, Artificial Sequence
  Synthetic oligonucleotide
aataaatcctggcccattgcacggcgctac

SEQ ID NO: 400390 - DNA, 30 bp, Artificial Sequence
  Synthetic oligonucleotide
caaggaagcgcaacaaaccttgggcgctac

SEQ ID NO: 400391 - DNA, 30 bp, Artificial Sequence
  Synthetic oligonucleotide
attacacgtcatgatgcacgactgcgctac

SEQ ID NO: 400392 - DNA, 30 bp, Artificial Sequence
  Synthetic oligonucleotide
cgtctctcaatagctaggtcctctcgctac

SEQ ID NO: 400393 - DNA, 30 bp, Artificial Sequence
  Synthetic oligonucleotide
ttgggaactttactcctaaaacccggctac

SEQ ID NO: 400394 - DNA, 30 bp, Artificial Sequence
  Synthetic oligonucleotide
caaattataacattcaaccattgatgctac

SEQ ID NO: 400395 - DNA, 30 bp, Artificial Sequence
  Synthetic oligonucleotide
aggcatagtagcgttgtctacaagtgctac

SEQ ID NO: 400396 - DNA, 30 bp, Artificial Sequence
  Synthetic oligonucleotide
ggccgcatcatctctagtcgatagtgctac

SEQ ID NO: 400397 - DNA, 30 bp, Artificial Sequence
  Synthetic oligonucleotide
caggaaagtcctctcgtatatcggtgctac

SEQ ID NO: 400398 - DNA, 30 bp, Artificial Sequence
  Synthetic oligonucleotide
gggttatgattaatcctttatcggtgctac

SEQ ID NO: 400399 - DNA, 30 bp, Artificial Sequence
  Synthetic oligonucleotide
cgcctcgtaattattattagtacttgctac

SEQ ID NO: 400400 - DNA, 30 bp, Artificial Sequence
  Synthetic oligonucleotide
catcacatctacttatgttctataatctac

SEQ ID NO: 400401 - DNA, 30 bp, Artificial Sequence
  Synthetic oligonucleotide
gaacagacgtgctatgccatatacatctac

SEQ ID NO: 400402 - DNA, 30 bp, Artificial Sequence
  Synthetic oligonucleotide
tagatgcccctaccaaaggtattcatctac

SEQ ID NO: 400403 - DNA, 30 bp, Artificial Sequence
  Synthetic oligonucleotide
aaaccttccgaccgatcgtgagggatctac

SEQ ID NO: 400404 - DNA, 30 bp, Artificial Sequence
  Synthetic oligonucleotide
gcctttgtcgcgactgagtcctgtatctac

SEQ ID NO: 400405 - DNA, 30 bp, Artificial Sequence
  Synthetic oligonucleotide
gcagttaatgttgggcgcttcaaactctac

SEQ ID NO: 400406 - DNA, 30 bp, Artificial Sequence
  Synthetic oligonucleotide
gatgtaacgctacttagggccccactctac

SEQ ID NO: 400407 - DNA, 30 bp, Artificial Sequence
  Synthetic oligonucleotide
gccgagattggcacgctgcctcagctctac

SEQ ID NO: 400408 - DNA, 30 bp, Artificial Sequence
  Synthetic oligonucleotide
tcagatttgctgaattcaggcgggctctac

SEQ ID NO: 400409 - DNA, 30 bp, Artificial Sequence
  Synthetic oligonucleotide
gatcgtaattttattagccgtgggctctac

SEQ ID NO: 400410 - DNA, 30 bp, Artificial Sequence
  Synthetic oligonucleotide
gctagatcaccaaagagattctggctctac

SEQ ID NO: 400411 - DNA, 30 bp, Artificial Sequence
  Synthetic oligonucleotide
tgggggttcaaccgttgtgagactctctac

SEQ ID NO: 400412 - DNA, 30 bp, Artificial Sequence
  Synthetic oligonucleotide
tagccagcacgccagtcgtctaaagtctac

SEQ ID NO: 400413 - DNA, 30 bp, Artificial Sequence
  Synthetic oligonucleotide
tcgggagggcttgttaaaagacaggtctac

SEQ ID NO: 400414 - DNA, 30 bp, Artificial Sequence
  Synthetic oligonucleotide
gttccagttgtgggatcctgggcattctac

SEQ ID NO: 400415 - DNA, 30 bp, Artificial Sequence
  Synthetic oligonucleotide
caagggctttattgcgcaccatcattctac

SEQ ID NO: 400416 - DNA, 30 bp, Artificial Sequence
  Synthetic oligonucleotide
ctcgacttcttagtttggattatcttctac

SEQ ID NO: 400417 - DNA, 30 bp, Artificial Sequence
  Synthetic oligonucleotide
accccgtatcgcggatgcaaggaaaagtac

SEQ ID NO: 400418 - DNA, 30 bp, Artificial Sequence
  Synthetic oligonucleotide
gttaatcatgacagtctggggtcaaagtac

SEQ ID NO: 400419 - DNA, 30 bp, Artificial Sequence
  Synthetic oligonucleotide
gctcttggactcgcccatagtgtaaagtac

SEQ ID NO: 400420 - DNA, 30 bp, Artificial Sequence
  Synthetic oligonucleotide
gtagctagatgaattggcctcagcaagtac

SEQ ID NO: 400421 - DNA, 30 bp, Artificial Sequence
  Synthetic oligonucleotide
acctttgttaagatttgacaccggaagtac

SEQ ID NO: 400422 - DNA, 30 bp, Artificial Sequence
  Synthetic oligonucleotide
agggcgtttaggtctgggatttggaagtac

SEQ ID NO: 400423 - DNA, 30 bp, Artificial Sequence
  Synthetic oligonucleotide
gccagctattttgcgaatcaaaataagtac

SEQ ID NO: 400424 - DNA, 30 bp, Artificial Sequence
  Synthetic oligonucleotide
ccagtaaaatgccgctcattaggtaagtac

SEQ ID NO: 400425 - DNA, 30 bp, Artificial Sequence
  Synthetic oligonucleotide
tatagatgatcaggctgtttatttaagtac

SEQ ID NO: 400426 - DNA, 30 bp, Artificial Sequence
  Synthetic oligonucleotide
gttcaaattggagtgcggttgtttaagtac

SEQ ID NO: 400427 - DNA, 30 bp, Artificial Sequence
  Synthetic oligonucleotide
taggacactacgtcacacgacggacagtac

SEQ ID NO: 400428 - DNA, 30 bp, Artificial Sequence
  Synthetic oligonucleotide
atgatacgtgatcgttaccgcctccagtac

SEQ ID NO: 400429 - DNA, 30 bp, Artificial Sequence
  Synthetic oligonucleotide
aggctacccatggggtattatgtccagtac

SEQ ID NO: 400430 - DNA, 30 bp, Artificial Sequence
  Synthetic oligonucleotide
gatcatgaaaagacctaaatattccagtac

SEQ ID NO: 400431 - DNA, 30 bp, Artificial Sequence
  Synthetic oligonucleotide
tgtgggatggtacggccaggccatcagtac

SEQ ID NO: 400432 - DNA, 30 bp, Artificial Sequence
  Synthetic oligonucleotide
tagaaagttccgcgatgcagatatcagtac

SEQ ID NO: 400433 - DNA, 30 bp, Artificial Sequence
  Synthetic oligonucleotide
ggtatagcaagacatcgggtgtatcagtac

SEQ ID NO: 400434 - DNA, 30 bp, Artificial Sequence
  Synthetic oligonucleotide
actttgaggtaccgccgtataacagagtac

SEQ ID NO: 400435 - DNA, 30 bp, Artificial Sequence
  Synthetic oligonucleotide
tgatatacggagtgatatgttagggagtac

SEQ ID NO: 400436 - DNA, 30 bp, Artificial Sequence
  Synthetic oligonucleotide
tcaggttaaagctccgggaacctggagtac

SEQ ID NO: 400437 - DNA, 30 bp, Artificial Sequence
  Synthetic oligonucleotide
tgatgcgtgttgaaaggtacccttgagtac

SEQ ID NO: 400438 - DNA, 30 bp, Artificial Sequence
  Synthetic oligonucleotide
gcaaccaggctagactttgctgactagtac

SEQ ID NO: 400439 - DNA, 30 bp, Artificial Sequence
  Synthetic oligonucleotide
tggatcgtggcccaagcggccatctagtac

SEQ ID NO: 400440 - DNA, 30 bp, Artificial Sequence
  Synthetic oligonucleotide
acaattgtaacgtttacacttgggtagtac

SEQ ID NO: 400441 - DNA, 30 bp, Artificial Sequence
  Synthetic oligonucleotide
tactaaccgaagcgttctcttatgtagtac

SEQ ID NO: 400442 - DNA, 30 bp, Artificial Sequence
  Synthetic oligonucleotide
atgtcgctgggacacgtaatcgattagtac

SEQ ID NO: 400443 - DNA, 30 bp, Artificial Sequence
  Synthetic oligonucleotide
agtaggcgtggtgcagttatgacttagtac

SEQ ID NO: 400444 - DNA, 30 bp, Artificial Sequence
  Synthetic oligonucleotide
gagtacagttttcagcgaacagtttagtac

SEQ ID NO: 400445 - DNA, 30 bp, Artificial Sequence
  Synthetic oligonucleotide
ggtatcacactaagtctttttccaacgtac

SEQ ID NO: 400446 - DNA, 30 bp, Artificial Sequence
  Synthetic oligonucleotide
caatgccgattagacgaccaatcaacgtac

SEQ ID NO: 400447 - DNA, 30 bp, Artificial Sequence
  Synthetic oligonucleotide
ttatagcccaaccccgcatctcgaacgtac

SEQ ID NO: 400448 - DNA, 30 bp, Artificial Sequence
  Synthetic oligonucleotide
taatgttgatttatctgaaacaacacgtac

SEQ ID NO: 400449 - DNA, 30 bp, Artificial Sequence
  Synthetic oligonucleotide
ctcttcgaagccataagacgtaacacgtac

SEQ ID NO: 400450 - DNA, 30 bp, Artificial Sequence
  Synthetic oligonucleotide
aagtctctttaggagaaccgcatcacgtac

SEQ ID NO: 400451 - DNA, 30 bp, Artificial Sequence
  Synthetic oligonucleotide
gtttatggatttgcaggggttggaccgtac

SEQ ID NO: 400452 - DNA, 30 bp, Artificial Sequence
  Synthetic oligonucleotide
aggctctgtgcgtgccttgccagtccgtac

SEQ ID NO: 400453 - DNA, 30 bp, Artificial Sequence
  Synthetic oligonucleotide
attagtagcagaactgtataacaagcgtac

SEQ ID NO: 400454 - DNA, 30 bp, Artificial Sequence
  Synthetic oligonucleotide
agctgctggtaactgccccgcatagcgtac

SEQ ID NO: 400455 - DNA, 30 bp, Artificial Sequence
  Synthetic oligonucleotide
gagcaccgggttaaaatgaacagcgcgtac

SEQ ID NO: 400456 - DNA, 30 bp, Artificial Sequence
  Synthetic oligonucleotide
cttgacgggtgtatcaaggccacggcgtac

SEQ ID NO: 400457 - DNA, 30 bp, Artificial Sequence
  Synthetic oligonucleotide
aacttgaatatcgcagaaggtccggcgtac

SEQ ID NO: 400458 - DNA, 30 bp, Artificial Sequence
  Synthetic oligonucleotide
gatggctttccggggcgggtaaatgcgtac

SEQ ID NO: 400459 - DNA, 30 bp, Artificial Sequence
  Synthetic oligonucleotide
agggccgccaattcgtcgttgcgtgcgtac

SEQ ID NO: 400460 - DNA, 30 bp, Artificial Sequence
  Synthetic oligonucleotide
gtctattaacagttgttgattatttcgtac

SEQ ID NO: 400461 - DNA, 30 bp, Artificial Sequence
  Synthetic oligonucleotide
taggcatctctggggagtcgaacaaggtac

SEQ ID NO: 400462 - DNA, 30 bp, Artificial Sequence
  Synthetic oligonucleotide
ttaatacgtacgggagcttagagaaggtac

SEQ ID NO: 400463 - DNA, 30 bp, Artificial Sequence
  Synthetic oligonucleotide
agccaaataacatttaggtctggaaggtac

SEQ ID NO: 400464 - DNA, 30 bp, Artificial Sequence
  Synthetic oligonucleotide
acacggtcgggactgtcggcggacaggtac

SEQ ID NO: 400465 - DNA, 30 bp, Artificial Sequence
  Synthetic oligonucleotide
gcggacactgaaaagaggctattcaggtac

SEQ ID NO: 400466 - DNA, 30 bp, Artificial Sequence
  Synthetic oligonucleotide
gtcagctctatcttggtcttagagaggtac

SEQ ID NO: 400467 - DNA, 30 bp, Artificial Sequence
  Synthetic oligonucleotide
atgctacagaaccttcaaagaatgaggtac

SEQ ID NO: 400468 - DNA, 30 bp, Artificial Sequence
  Synthetic oligonucleotide
tctccgcgaatgtaggtaaccttgaggtac

SEQ ID NO: 400469 - DNA, 30 bp, Artificial Sequence
  Synthetic oligonucleotide
gaagtggcctcacgcaatcacactaggtac

SEQ ID NO: 400470 - DNA, 30 bp, Artificial Sequence
  Synthetic oligonucleotide
taacagcatacgcaaatacgaatacggtac

SEQ ID NO: 400471 - DNA, 30 bp, Artificial Sequence
  Synthetic oligonucleotide
atatccaatttcgaagggacacaccggtac

SEQ ID NO: 400472 - DNA, 30 bp, Artificial Sequence
  Synthetic oligonucleotide
tttggctacgatgatttgttagagcggtac

SEQ ID NO: 400473 - DNA, 30 bp, Artificial Sequence
  Synthetic oligonucleotide
tgttattgggtggacctcatgttgcggtac

SEQ ID NO: 400474 - DNA, 30 bp, Artificial Sequence
  Synthetic oligonucleotide
tcagtgcttggcataatacgcgatcggtac

SEQ ID NO: 400475 - DNA, 30 bp, Artificial Sequence
  Synthetic oligonucleotide
atatccctggttaacgcaggaccagggtac

SEQ ID NO: 400476 - DNA, 30 bp, Artificial Sequence
  Synthetic oligonucleotide
acggcatcggtgagttacctacccgggtac

SEQ ID NO: 400477 - DNA, 31 bp, Artificial Sequence
  Synthetic oligonucleotide
ttcagagccccgttccgtcctaaaggggtac

SEQ ID NO: 400478 - DNA, 30 bp, Artificial Sequence
  Synthetic oligonucleotide
gggccagacccgcgtataatatgggggtac

SEQ ID NO: 400479 - DNA, 30 bp, Artificial Sequence
  Synthetic oligonucleotide
ctttgagcacagatgcagttatgggggtac

SEQ ID NO: 400480 - DNA, 30 bp, Artificial Sequence
  Synthetic oligonucleotide
ctgttgatattaagagtatggttggggtac

SEQ ID NO: 400481 - DNA, 30 bp, Artificial Sequence
  Synthetic oligonucleotide
caccaggccgttaaaggccaacatgggtac

SEQ ID NO: 400482 - DNA, 30 bp, Artificial Sequence
  Synthetic oligonucleotide
agacgggttatacggctttctagctggtac

SEQ ID NO: 400483 - DNA, 30 bp, Artificial Sequence
  Synthetic oligonucleotide
aagagtgtgtatagacgtacagcttggtac

SEQ ID NO: 400484 - DNA, 30 bp, Artificial Sequence
  Synthetic oligonucleotide
cattagggagtagtggggagtctttggtac

SEQ ID NO: 400485 - DNA, 30 bp, Artificial Sequence
  Synthetic oligonucleotide
tgagaaagggttctgcccagggtttggtac

SEQ ID NO: 400486 - DNA, 30 bp, Artificial Sequence
  Synthetic oligonucleotide
tgcggacattcacggaggtttctaatgtac

SEQ ID NO: 400487 - DNA, 30 bp, Artificial Sequence
  Synthetic oligonucleotide
tttgattcggagccaccatatgtcatgtac

SEQ ID NO: 400488 - DNA, 30 bp, Artificial Sequence
  Synthetic oligonucleotide
taatgtatcgctaggtctaaaacgatgtac

SEQ ID NO: 400489 - DNA, 30 bp, Artificial Sequence
  Synthetic oligonucleotide
cacggacgcttcgaccctaggtcgatgtac

SEQ ID NO: 400490 - DNA, 30 bp, Artificial Sequence
  Synthetic oligonucleotide
gggagataaccgtaaagcctgtggatgtac

SEQ ID NO: 400491 - DNA, 30 bp, Artificial Sequence
  Synthetic oligonucleotide
ttatatcgagaccagccttcttggatgtac

SEQ ID NO: 400492 - DNA, 30 bp, Artificial Sequence
  Synthetic oligonucleotide
caaagcagggtagatgtgcagatactgtac

SEQ ID NO: 400493 - DNA, 30 bp, Artificial Sequence
  Synthetic oligonucleotide
acctatttggggactcccttgttactgtac

SEQ ID NO: 400494 - DNA, 30 bp, Artificial Sequence
  Synthetic oligonucleotide
acaggaaatcgagcatagtgttgcctgtac

SEQ ID NO: 400495 - DNA, 30 bp, Artificial Sequence
  Synthetic oligonucleotide
agtcccctaggcctactggggtatctgtac

SEQ ID NO: 400496 - DNA, 30 bp, Artificial Sequence
  Synthetic oligonucleotide
ccggcccaggaaaagccaccatctctgtac

SEQ ID NO: 400497 - DNA, 30 bp, Artificial Sequence
  Synthetic oligonucleotide
attcagagacaatatccggtcaaagtgtac

SEQ ID NO: 400498 - DNA, 30 bp, Artificial Sequence
  Synthetic oligonucleotide
cgggataacggatagacctgtccagtgtac

SEQ ID NO: 400499 - DNA, 30 bp, Artificial Sequence
  Synthetic oligonucleotide
cccggtcgggacccctgcggtgcagtgtac

SEQ ID NO: 400500 - DNA, 30 bp, Artificial Sequence
  Synthetic oligonucleotide
ttttgtgaaacattgctataccacgtgtac

SEQ ID NO: 400501 - DNA, 30 bp, Artificial Sequence
  Synthetic oligonucleotide
ttcaagattttgattaggcgtcgcgtgtac

SEQ ID NO: 400502 - DNA, 30 bp, Artificial Sequence
  Synthetic oligonucleotide
gcacggggccccgcggattcctgggtgtac

SEQ ID NO: 400503 - DNA, 30 bp, Artificial Sequence
  Synthetic oligonucleotide
tcattcggggtctgtgagcggatggtgtac

SEQ ID NO: 400504 - DNA, 30 bp, Artificial Sequence
  Synthetic oligonucleotide
ggtgactacagatgcacggccgatgtgtac

SEQ ID NO: 400505 - DNA, 30 bp, Artificial Sequence
  Synthetic oligonucleotide
tcgtcctattcggacagcaaacgtgtgtac

SEQ ID NO: 400506 - DNA, 30 bp, Artificial Sequence
  Synthetic oligonucleotide
tccgtactacgattaactgtttttgtgtac

SEQ ID NO: 400507 - DNA, 30 bp, Artificial Sequence
  Synthetic oligonucleotide
ttaaatagtgatcagtacgattcattgtac

SEQ ID NO: 400508 - DNA, 30 bp, Artificial Sequence
  Synthetic oligonucleotide
ggactacggtcggcaccccactccttgtac

SEQ ID NO: 400509 - DNA, 30 bp, Artificial Sequence
  Synthetic oligonucleotide
tgatccagatatatacttagacacaattac

SEQ ID NO: 400510 - DNA, 30 bp, Artificial Sequence
  Synthetic oligonucleotide
gcggcctaattgggagactattccaattac

SEQ ID NO: 400511 - DNA, 30 bp, Artificial Sequence
  Synthetic oligonucleotide
ctcgcgccatcttctggtctcgtcaattac

SEQ ID NO: 400512 - DNA, 30 bp, Artificial Sequence
  Synthetic oligonucleotide
atatagaattgtcctgttgaacggaattac

SEQ ID NO: 400513 - DNA, 30 bp, Artificial Sequence
  Synthetic oligonucleotide
accagaactgtactttacgaacataattac

SEQ ID NO: 400514 - DNA, 30 bp, Artificial Sequence
  Synthetic oligonucleotide
tttgtcaactactaaggccaggataattac

SEQ ID NO: 400515 - DNA, 30 bp, Artificial Sequence
  Synthetic oligonucleotide
tattttggaaccggtgagcaggataattac

SEQ ID NO: 400516 - DNA, 30 bp, Artificial Sequence
  Synthetic oligonucleotide
taatggttcatacgaccaaggactaattac

SEQ ID NO: 400517 - DNA, 30 bp, Artificial Sequence
  Synthetic oligonucleotide
cccaccacgcggtccatcacgggtaattac

SEQ ID NO: 400518 - DNA, 30 bp, Artificial Sequence
  Synthetic oligonucleotide
tttcggatactcgagatcttttgtaattac

SEQ ID NO: 400519 - DNA, 30 bp, Artificial Sequence
  Synthetic oligonucleotide
tagtagtaatgccacctcttggttaattac

SEQ ID NO: 400520 - DNA, 30 bp, Artificial Sequence
  Synthetic oligonucleotide
gttctcagacgtggagtgagaagacattac

SEQ ID NO: 400521 - DNA, 30 bp, Artificial Sequence
  Synthetic oligonucleotide
gagcattaatgtttttgtcaaacgcattac

SEQ ID NO: 400522 - DNA, 30 bp, Artificial Sequence
  Synthetic oligonucleotide
gatgactgggctgccgggatgtggcattac

SEQ ID NO: 400523 - DNA, 30 bp, Artificial Sequence
  Synthetic oligonucleotide
aatagagccttctgcgtatctagtcattac

SEQ ID NO: 400524 - DNA, 30 bp, Artificial Sequence
  Synthetic oligonucleotide
cagtagattctccggaaatatagagattac

SEQ ID NO: 400525 - DNA, 30 bp, Artificial Sequence
  Synthetic oligonucleotide
ggctctatgcggtgtcgttgttacgattac

SEQ ID NO: 400526 - DNA, 30 bp, Artificial Sequence
  Synthetic oligonucleotide
gaagagaattcacaggcgtaatccgattac

SEQ ID NO: 400527 - DNA, 30 bp, Artificial Sequence
  Synthetic oligonucleotide
tccgaatctggacattatgaactcgattac

SEQ ID NO: 400528 - DNA, 30 bp, Artificial Sequence
  Synthetic oligonucleotide
cttgcaatacgggaaaggtatccggattac

SEQ ID NO: 400529 - DNA, 30 bp, Artificial Sequence
  Synthetic oligonucleotide
ttcactgacagtagaaaagtcgctgattac

SEQ ID NO: 400530 - DNA, 30 bp, Artificial Sequence
  Synthetic oligonucleotide
ttcctgggccaatcaaatggtagtgattac

SEQ ID NO: 400531 - DNA, 30 bp, Artificial Sequence
  Synthetic oligonucleotide
gaacatctatgctgttcggtaaaatattac

SEQ ID NO: 400532 - DNA, 30 bp, Artificial Sequence
  Synthetic oligonucleotide
gatgtgggtcgatggtgagttgcatattac

SEQ ID NO: 400533 - DNA, 30 bp, Artificial Sequence
  Synthetic oligonucleotide
acaggatcgggcgtcggacagggatattac

SEQ ID NO: 400534 - DNA, 30 bp, Artificial Sequence
  Synthetic oligonucleotide
tcgacgaatagcgtccgcagtatatattac

SEQ ID NO: 400535 - DNA, 30 bp, Artificial Sequence
  Synthetic oligonucleotide
ttcatgttccgagtcctagtggactattac

SEQ ID NO: 400536 - DNA, 30 bp, Artificial Sequence
  Synthetic oligonucleotide
acgggctacttattgagttcacgctattac

SEQ ID NO: 400537 - DNA, 30 bp, Artificial Sequence
  Synthetic oligonucleotide
tttcctatgtgctcgagactaaggtattac

SEQ ID NO: 400538 - DNA, 30 bp, Artificial Sequence
  Synthetic oligonucleotide
acagataggaattcaaagctcttttattac

SEQ ID NO: 400539 - DNA, 30 bp, Artificial Sequence
  Synthetic oligonucleotide
gagtcgatggacggggcccgacgcacttac

SEQ ID NO: 400540 - DNA, 30 bp, Artificial Sequence
  Synthetic oligonucleotide
ccatatacttatggtggttaatcgacttac

SEQ ID NO: 400541 - DNA, 30 bp, Artificial Sequence
  Synthetic oligonucleotide
gcggtcatgcattaccatataatgacttac

SEQ ID NO: 400542 - DNA, 30 bp, Artificial Sequence
  Synthetic oligonucleotide
ctataaatccgcaaggttgagcttacttac

SEQ ID NO: 400543 - DNA, 30 bp, Artificial Sequence
  Synthetic oligonucleotide
gtacggctatcgcatggtttataaccttac

SEQ ID NO: 400544 - DNA, 30 bp, Artificial Sequence
  Synthetic oligonucleotide
gtctatcgtttgggattagcacttccttac

SEQ ID NO: 400545 - DNA, 30 bp, Artificial Sequence
  Synthetic oligonucleotide
tgtgcagtacagaatattcgttttccttac

SEQ ID NO: 400546 - DNA, 30 bp, Artificial Sequence
  Synthetic oligonucleotide
cgctaactattcaccctttcgctagcttac

SEQ ID NO: 400547 - DNA, 30 bp, Artificial Sequence
  Synthetic oligonucleotide
ccgctcctgtccttagattcagaggcttac

SEQ ID NO: 400548 - DNA, 30 bp, Artificial Sequence
  Synthetic oligonucleotide
catttgaagcgactatattaactatcttac

SEQ ID NO: 400549 - DNA, 30 bp, Artificial Sequence
  Synthetic oligonucleotide
aattcgttccacggaagtgcttagtcttac

SEQ ID NO: 400550 - DNA, 30 bp, Artificial Sequence
  Synthetic oligonucleotide
tccccgaccctttatcccggtaggtcttac

SEQ ID NO: 400551 - DNA, 30 bp, Artificial Sequence
  Synthetic oligonucleotide
ttgtttcccggcctggtcccgatgtcttac

SEQ ID NO: 400552 - DNA, 30 bp, Artificial Sequence
  Synthetic oligonucleotide
ggaagtattactagtagggactattcttac

SEQ ID NO: 400553 - DNA, 30 bp, Artificial Sequence
  Synthetic oligonucleotide
gtagtgcgggggccggcgtcctattcttac

SEQ ID NO: 400554 - DNA, 30 bp, Artificial Sequence
  Synthetic oligonucleotide
attgtgagagaggttgtagggccttcttac

SEQ ID NO: 400555 - DNA, 30 bp, Artificial Sequence
  Synthetic oligonucleotide
cataccctacggagttatgatctaagttac

SEQ ID NO: 400556 - DNA, 30 bp, Artificial Sequence
  Synthetic oligonucleotide
atggcggtttctcgcgatcccaacagttac

SEQ ID NO: 400557 - DNA, 30 bp, Artificial Sequence
  Synthetic oligonucleotide
ccacgctgcttcatccgctcgatcagttac

SEQ ID NO: 400558 - DNA, 30 bp, Artificial Sequence
  Synthetic oligonucleotide
atagataggattgagcatgttacgagttac

SEQ ID NO: 400559 - DNA, 30 bp, Artificial Sequence
  Synthetic oligonucleotide
tagtataaccgagaataatgggttagttac

SEQ ID NO: 400560 - DNA, 30 bp, Artificial Sequence
  Synthetic oligonucleotide
gctgcgttaactacatctctcgcacgttac

SEQ ID NO: 400561 - DNA, 30 bp, Artificial Sequence
  Synthetic oligonucleotide
gcgtgaacgctagcgttagaattccgttac

SEQ ID NO: 400562 - DNA, 30 bp, Artificial Sequence
  Synthetic oligonucleotide
actgtatttttcaccgttgcaccgcgttac

SEQ ID NO: 400563 - DNA, 30 bp, Artificial Sequence
  Synthetic oligonucleotide
cgataaactaacccaacttgttgaggttac

SEQ ID NO: 400564 - DNA, 30 bp, Artificial Sequence
  Synthetic oligonucleotide
gatcgcggtcatattacattactaggttac

SEQ ID NO: 400565 - DNA, 30 bp, Artificial Sequence
  Synthetic oligonucleotide
ccggcattagataacaggtccatcggttac

SEQ ID NO: 400566 - DNA, 30 bp, Artificial Sequence
  Synthetic oligonucleotide
ctatgcgtccctagttctttggagggttac

SEQ ID NO: 400567 - DNA, 30 bp, Artificial Sequence
  Synthetic oligonucleotide
cagggtgtctggagttagactgagggttac

SEQ ID NO: 400568 - DNA, 30 bp, Artificial Sequence
  Synthetic oligonucleotide
gaacagggggtactatgaaattctggttac

SEQ ID NO: 400569 - DNA, 30 bp, Artificial Sequence
  Synthetic oligonucleotide
tatcggagaacgccccgggccgttggttac

SEQ ID NO: 400570 - DNA, 30 bp, Artificial Sequence
  Synthetic oligonucleotide
tttatgtcctgggtcggagcacaatgttac

SEQ ID NO: 400571 - DNA, 30 bp, Artificial Sequence
  Synthetic oligonucleotide
atgtcgggaggtgaatttcggagatgttac

SEQ ID NO: 400572 - DNA, 30 bp, Artificial Sequence
  Synthetic oligonucleotide
caaaatggatttttcttattgctctgttac

SEQ ID NO: 400573 - DNA, 30 bp, Artificial Sequence
  Synthetic oligonucleotide
tccattgggatttcaggactttcgtgttac

SEQ ID NO: 400574 - DNA, 30 bp, Artificial Sequence
  Synthetic oligonucleotide
gggagcttgcgaatgtgttatcggtgttac

SEQ ID NO: 400575 - DNA, 30 bp, Artificial Sequence
  Synthetic oligonucleotide
tagtaaatgagatgaactaccgattgttac

SEQ ID NO: 400576 - DNA, 30 bp, Artificial Sequence
  Synthetic oligonucleotide
atacagacaagatccgggtgcatttgttac

SEQ ID NO: 400577 - DNA, 30 bp, Artificial Sequence
  Synthetic oligonucleotide
agccacaaggtcatatataccagaatttac

SEQ ID NO: 400578 - DNA, 30 bp, Artificial Sequence
  Synthetic oligonucleotide
tcaaaaagccccgatggtgtcagaatttac

SEQ ID NO: 400579 - DNA, 30 bp, Artificial Sequence
  Synthetic oligonucleotide
gcgaaacgactcccctgaaatttaatttac

SEQ ID NO: 400580 - DNA, 29 bp, Artificial Sequence
  Synthetic oligonucleotide
tctaagtcttcaccgacctggccatttac

SEQ ID NO: 400581 - DNA, 30 bp, Artificial Sequence
  Synthetic oligonucleotide
gatgaattatgtaagtaagctgccatttac

SEQ ID NO: 400582 - DNA, 30 bp, Artificial Sequence
  Synthetic oligonucleotide
ttagcaaaacgacgcgtcagacagatttac

SEQ ID NO: 400583 - DNA, 30 bp, Artificial Sequence
  Synthetic oligonucleotide
tggttctatgagatcattgtaacgatttac

SEQ ID NO: 400584 - DNA, 30 bp, Artificial Sequence
  Synthetic oligonucleotide
gcactaaaaacatacgggctttatatttac

SEQ ID NO: 400585 - DNA, 30 bp, Artificial Sequence
  Synthetic oligonucleotide
ttatttagagctcagtcatccgctatttac

SEQ ID NO: 400586 - DNA, 30 bp, Artificial Sequence
  Synthetic oligonucleotide
actgaaaacttttttccagagatcctttac

SEQ ID NO: 400587 - DNA, 30 bp, Artificial Sequence
  Synthetic oligonucleotide
ggcagatatgaagtccggtataatctttac

SEQ ID NO: 400588 - DNA, 30 bp, Artificial Sequence
  Synthetic oligonucleotide
cgcgccgtatacttcgcaaaaactctttac

SEQ ID NO: 400589 - DNA, 30 bp, Artificial Sequence
  Synthetic oligonucleotide
aatggatgtaatcaattcgtgactctttac

SEQ ID NO: 400590 - DNA, 30 bp, Artificial Sequence
  Synthetic oligonucleotide
gcgtctctaactggaaagatcgctctttac

SEQ ID NO: 400591 - DNA, 30 bp, Artificial Sequence
  Synthetic oligonucleotide
ccatatgacaaaggacagatgattctttac

SEQ ID NO: 400592 - DNA, 30 bp, Artificial Sequence
  Synthetic oligonucleotide
agttagtgccgaaggaattatgaagtttac

SEQ ID NO: 400593 - DNA, 30 bp, Artificial Sequence
  Synthetic oligonucleotide
gtttctcgttgacgcgttcacagagtttac

SEQ ID NO: 400594 - DNA, 30 bp, Artificial Sequence
  Synthetic oligonucleotide
cttatgcggggtagacccgttctagtttac

SEQ ID NO: 400595 - DNA, 30 bp, Artificial Sequence
  Synthetic oligonucleotide
gctggtaaacacgatcaaaccttggtttac

SEQ ID NO: 400596 - DNA, 30 bp, Artificial Sequence
  Synthetic oligonucleotide
gattcgaatcaggtgcgaatcagcttttac

SEQ ID NO: 400597 - DNA, 30 bp, Artificial Sequence
  Synthetic oligonucleotide
ctattggaccagtactactacatcttttac

SEQ ID NO: 400598 - DNA, 30 bp, Artificial Sequence
  Synthetic oligonucleotide
acgcacggcgaggcgggtccaccgttttac

SEQ ID NO: 400599 - DNA, 30 bp, Artificial Sequence
  Synthetic oligonucleotide
gctgttagtgattctaacttatcgttttac

SEQ ID NO: 400600 - DNA, 30 bp, Artificial Sequence
  Synthetic oligonucleotide
gtggtgcaccggcgatcagcaaggttttac

SEQ ID NO: 400601 - DNA, 30 bp, Artificial Sequence
  Synthetic oligonucleotide
cagggccaagacgagtgattaaatttttac

SEQ ID NO: 400602 - DNA, 30 bp, Artificial Sequence
  Synthetic oligonucleotide
tagtactggcccagtatacactatttttac

SEQ ID NO: 400603 - DNA, 30 bp, Artificial Sequence
  Synthetic oligonucleotide
tagtgggccactgcgcatctcagtttttac

SEQ ID NO: 400604 - DNA, 30 bp, Artificial Sequence
  Synthetic oligonucleotide
ccaaagaacgacctataatttagaaaaacc

SEQ ID NO: 400605 - DNA, 30 bp, Artificial Sequence
  Synthetic oligonucleotide
gcgggaccccacaggggcgcttgaaaaacc

SEQ ID NO: 400606 - DNA, 30 bp, Artificial Sequence
  Synthetic oligonucleotide
gcttgggttttttccaaaaagctaaaaacc

SEQ ID NO: 400607 - DNA, 30 bp, Artificial Sequence
  Synthetic oligonucleotide
cctccgcgtatagacatctaggtaaaaacc

SEQ ID NO: 400608 - DNA, 30 bp, Artificial Sequence
  Synthetic oligonucleotide
gaactcatataaggcgtaagtaccaaaacc

SEQ ID NO: 400609 - DNA, 30 bp, Artificial Sequence
  Synthetic oligonucleotide
tgaagcttatgacaaatcaatgtcaaaacc

SEQ ID NO: 400610 - DNA, 30 bp, Artificial Sequence
  Synthetic oligonucleotide
actccacggttaagagcgcaaaataaaacc

SEQ ID NO: 400611 - DNA, 30 bp, Artificial Sequence
  Synthetic oligonucleotide
gagtaatagacaccttccagatataaaacc

SEQ ID NO: 400612 - DNA, 30 bp, Artificial Sequence
  Synthetic oligonucleotide
agtttcaaattctctagtctaacacaaacc

SEQ ID NO: 400613 - DNA, 30 bp, Artificial Sequence
  Synthetic oligonucleotide
cccatgttcacctggcaagttggacaaacc

SEQ ID NO: 400614 - DNA, 30 bp, Artificial Sequence
  Synthetic oligonucleotide
gccctacaaccctttcctgcatcccaaacc

SEQ ID NO: 400615 - DNA, 30 bp, Artificial Sequence
  Synthetic oligonucleotide
aagtacgtattaaattagacgcgccaaacc

SEQ ID NO: 400616 - DNA, 30 bp, Artificial Sequence
  Synthetic oligonucleotide
gacttcgttaagtcaaaagttatccaaacc

SEQ ID NO: 400617 - DNA, 30 bp, Artificial Sequence
  Synthetic oligonucleotide
cccacaccttccgcaactaagcagcaaacc

SEQ ID NO: 400618 - DNA, 30 bp, Artificial Sequence
  Synthetic oligonucleotide
ggtcttcgcttaacatctctgtcgcaaacc

SEQ ID NO: 400619 - DNA, 31 bp, Artificial Sequence
  Synthetic oligonucleotide
gttttggtgacaaaagactccacggcaaacc

SEQ ID NO: 400620 - DNA, 31 bp, Artificial Sequence
  Synthetic oligonucleotide
ggggcgacacctttggggttaagctcaaacc

SEQ ID NO: 400621 - DNA, 30 bp, Artificial Sequence
  Synthetic oligonucleotide
gaaatataataataaggctcacgtcaaacc

SEQ ID NO: 400622 - DNA, 30 bp, Artificial Sequence
  Synthetic oligonucleotide
tctaggcggcccagacggagtaaagaaacc

SEQ ID NO: 400623 - DNA, 30 bp, Artificial Sequence
  Synthetic oligonucleotide
gtctggagcaagcccctatgtaaagaaacc

SEQ ID NO: 400624 - DNA, 30 bp, Artificial Sequence
  Synthetic oligonucleotide
gcgtagtaatgcctttggtccgccgaaacc

SEQ ID NO: 400625 - DNA, 30 bp, Artificial Sequence
  Synthetic oligonucleotide
gcgacgacagtcgcggtggtggaggaaacc

SEQ ID NO: 400626 - DNA, 30 bp, Artificial Sequence
  Synthetic oligonucleotide
ttgtaattataatgccacttttcggaaacc

SEQ ID NO: 400627 - DNA, 30 bp, Artificial Sequence
  Synthetic oligonucleotide
ccggaaacgcaccacaggcaacatgaaacc

SEQ ID NO: 400628 - DNA, 30 bp, Artificial Sequence
  Synthetic oligonucleotide
ttcgactgcctgacaaggcatagtgaaacc

SEQ ID NO: 400629 - DNA, 30 bp, Artificial Sequence
  Synthetic oligonucleotide
gattcgttgcggtggctcgagatataaacc

SEQ ID NO: 400630 - DNA, 30 bp, Artificial Sequence
  Synthetic oligonucleotide
ttgcaaggttggtaacggcaacactaaacc

SEQ ID NO: 400631 - DNA, 30 bp, Artificial Sequence
  Synthetic oligonucleotide
ttcagtattcattcttggggagtctaaacc

SEQ ID NO: 400632 - DNA, 30 bp, Artificial Sequence
  Synthetic oligonucleotide
gcttagggacctggtcgctgtccgtaaacc

SEQ ID NO: 400633 - DNA, 30 bp, Artificial Sequence
  Synthetic oligonucleotide
attggtgtaagttagcaaggccattaaacc

SEQ ID NO: 400634 - DNA, 31 bp, Artificial Sequence
  Synthetic oligonucleotide
atctgagaagtgttccagactaccttaaacc

SEQ ID NO: 400635 - DNA, 30 bp, Artificial Sequence
  Synthetic oligonucleotide
tgccatgaaaacgatttatgcgcttaaacc

SEQ ID NO: 400636 - DNA, 30 bp, Artificial Sequence
  Synthetic oligonucleotide
gtctctactgtggcagttgctcaaacaacc

SEQ ID NO: 400637 - DNA, 30 bp, Artificial Sequence
  Synthetic oligonucleotide
gatatttggaaacgacggtacccaacaacc

SEQ ID NO: 400638 - DNA, 30 bp, Artificial Sequence
  Synthetic oligonucleotide
gtccacgccaggcaactattccgaacaacc

SEQ ID NO: 400639 - DNA, 30 bp, Artificial Sequence
  Synthetic oligonucleotide
ggtatacaccttgacgaactaaccacaacc

SEQ ID NO: 400640 - DNA, 30 bp, Artificial Sequence
  Synthetic oligonucleotide
ggtttgggatgcctaagaaaccgcacaacc

SEQ ID NO: 400641 - DNA, 28 bp, Artificial Sequence
  Synthetic oligonucleotide
cctccagtatagcggagacatcacaacc

SEQ ID NO: 400642 - DNA, 30 bp, Artificial Sequence
  Synthetic oligonucleotide
taagattgatcgcaacgtacgaggacaacc

SEQ ID NO: 400643 - DNA, 30 bp, Artificial Sequence
  Synthetic oligonucleotide
tcgtttccaatacgtaaacggaatacaacc

SEQ ID NO: 400644 - DNA, 30 bp, Artificial Sequence
  Synthetic oligonucleotide
cctgctctttgtgcaggtcaggcaccaacc

SEQ ID NO: 400645 - DNA, 30 bp, Artificial Sequence
  Synthetic oligonucleotide
ccagatagacggccgcaaagcggaccaacc

SEQ ID NO: 400646 - DNA, 30 bp, Artificial Sequence
  Synthetic oligonucleotide
taaccgtacgacggcccaggccgcccaacc

SEQ ID NO: 400647 - DNA, 30 bp, Artificial Sequence
  Synthetic oligonucleotide
gctctgtactaagacgatgggtcgccaacc

SEQ ID NO: 400648 - DNA, 30 bp, Artificial Sequence
  Synthetic oligonucleotide
gttggtgagacggcacttcatttgccaacc

SEQ ID NO: 400649 - DNA, 30 bp, Artificial Sequence
  Synthetic oligonucleotide
gagttacataagtgcaaccttcaagcaacc

SEQ ID NO: 400650 - DNA, 30 bp, Artificial Sequence
  Synthetic oligonucleotide
tgagttttcgcccagtgcacttaagcaacc

SEQ ID NO: 400651 - DNA, 30 bp, Artificial Sequence
  Synthetic oligonucleotide
tacttacaaatagggtatcgggcagcaacc

SEQ ID NO: 400652 - DNA, 30 bp, Artificial Sequence
  Synthetic oligonucleotide
acgggtagggttgccctgacgggagcaacc

SEQ ID NO: 400653 - DNA, 30 bp, Artificial Sequence
  Synthetic oligonucleotide
gttaaggataattgcgtaatattagcaacc

SEQ ID NO: 400654 - DNA, 30 bp, Artificial Sequence
  Synthetic oligonucleotide
gtgaaacgatatgaatagatagtcgcaacc

SEQ ID NO: 400655 - DNA, 30 bp, Artificial Sequence
  Synthetic oligonucleotide
attggtctgcgatatatggattaggcaacc

SEQ ID NO: 400656 - DNA, 30 bp, Artificial Sequence
  Synthetic oligonucleotide
ccggttggatggctcagacgttttgcaacc

SEQ ID NO: 400657 - DNA, 30 bp, Artificial Sequence
  Synthetic oligonucleotide
ggaaaggtgtcgtactgcaagacgtcaacc

SEQ ID NO: 400658 - DNA, 30 bp, Artificial Sequence
  Synthetic oligonucleotide
cccattaagttaccttactacccgtcaacc

SEQ ID NO: 400659 - DNA, 30 bp, Artificial Sequence
  Synthetic oligonucleotide
aatttggagtgttaaacggttgcgtcaacc

SEQ ID NO: 400660 - DNA, 30 bp, Artificial Sequence
  Synthetic oligonucleotide
cctagagtcgccacgtcaattatgtcaacc

SEQ ID NO: 400661 - DNA, 30 bp, Artificial Sequence
  Synthetic oligonucleotide
gtatatatgattgacggcaatgtgtcaacc

SEQ ID NO: 400662 - DNA, 30 bp, Artificial Sequence
  Synthetic oligonucleotide
ttgaggaaagccggcacgataaattcaacc

SEQ ID NO: 400663 - DNA, 30 bp, Artificial Sequence
  Synthetic oligonucleotide
gacagacccctccggcgctaaaaaagaacc

SEQ ID NO: 400664 - DNA, 30 bp, Artificial Sequence
  Synthetic oligonucleotide
agcacaatggaatcggtgtctaaaagaacc

SEQ ID NO: 400665 - DNA, 30 bp, Artificial Sequence
  Synthetic oligonucleotide
ctttgaacttctgtgttcgctagcagaacc

SEQ ID NO: 400666 - DNA, 30 bp, Artificial Sequence
  Synthetic oligonucleotide
tcgattatatcaaacatggtattcagaacc

SEQ ID NO: 400667 - DNA, 30 bp, Artificial Sequence
  Synthetic oligonucleotide
gcaaaagtttcactcttacatgatagaacc

SEQ ID NO: 400668 - DNA, 30 bp, Artificial Sequence
  Synthetic oligonucleotide
tgagttggcgcgaaagttgtagctagaacc

SEQ ID NO: 400669 - DNA, 30 bp, Artificial Sequence
  Synthetic oligonucleotide
gagaagtatacgggcatctgcagtagaacc

SEQ ID NO: 400670 - DNA, 30 bp, Artificial Sequence
  Synthetic oligonucleotide
gattggtttggtcgtctgcgtcgacgaacc

SEQ ID NO: 400671 - DNA, 30 bp, Artificial Sequence
  Synthetic oligonucleotide
gccttgtcgttagatattaatggccgaacc

SEQ ID NO: 400672 - DNA, 30 bp, Artificial Sequence
  Synthetic oligonucleotide
gtcaacgtagcattatctctccggcgaacc

SEQ ID NO: 400673 - DNA, 30 bp, Artificial Sequence
  Synthetic oligonucleotide
aagcggcggaccgcgagaggtttgcgaacc

SEQ ID NO: 400674 - DNA, 30 bp, Artificial Sequence
  Synthetic oligonucleotide
ttttatgaaaacatgcctaagactcgaacc

SEQ ID NO: 400675 - DNA, 30 bp, Artificial Sequence
  Synthetic oligonucleotide
gttgccacttaccgcaggaatagaggaacc

SEQ ID NO: 400676 - DNA, 30 bp, Artificial Sequence
  Synthetic oligonucleotide
gacccgaggtcctgtgtgggtctaggaacc

SEQ ID NO: 400677 - DNA, 30 bp, Artificial Sequence
  Synthetic oligonucleotide
actcgaatcagaagatcttttcgcggaacc

SEQ ID NO: 400678 - DNA, 30 bp, Artificial Sequence
  Synthetic oligonucleotide
gcttgacagattagttcctatcagggaacc

SEQ ID NO: 400679 - DNA, 30 bp, Artificial Sequence
  Synthetic oligonucleotide
cagtagcgagcgcacatctgctctggaacc

SEQ ID NO: 400680 - DNA, 30 bp, Artificial Sequence
  Synthetic oligonucleotide
ctagcgattgcttttatcctccttggaacc

SEQ ID NO: 400681 - DNA, 30 bp, Artificial Sequence
  Synthetic oligonucleotide
aagccatttttttgtagacgttttggaacc

SEQ ID NO: 400682 - DNA, 30 bp, Artificial Sequence
  Synthetic oligonucleotide
actagatccgcaatataggctcactgaacc

SEQ ID NO: 400683 - DNA, 30 bp, Artificial Sequence
  Synthetic oligonucleotide
caactatatttaataagcaataattgaacc

SEQ ID NO: 400684 - DNA, 30 bp, Artificial Sequence
  Synthetic oligonucleotide
cgggaaaattgttcgatggcaacttgaacc

SEQ ID NO: 400685 - DNA, 30 bp, Artificial Sequence
  Synthetic oligonucleotide
gtgtttagtagcacttgttatcgaataacc

SEQ ID NO: 400686 - DNA, 30 bp, Artificial Sequence
  Synthetic oligonucleotide
agtctcgggctattagcggaccggataacc

SEQ ID NO: 400687 - DNA, 30 bp, Artificial Sequence
  Synthetic oligonucleotide
tataccaatcataagagctagatgataacc

SEQ ID NO: 400688 - DNA, 30 bp, Artificial Sequence
  Synthetic oligonucleotide
accatcatcatcctgctttaatatataacc

SEQ ID NO: 400689 - DNA, 30 bp, Artificial Sequence
  Synthetic oligonucleotide
gtgccagcgtcggccacgcattatataacc

SEQ ID NO: 400690 - DNA, 30 bp, Artificial Sequence
  Synthetic oligonucleotide
gtaggtttgaaataatcttgatctataacc

SEQ ID NO: 400691 - DNA, 30 bp, Artificial Sequence
  Synthetic oligonucleotide
tagggtggtgtcacctttattggtataacc

SEQ ID NO: 400692 - DNA, 30 bp, Artificial Sequence
  Synthetic oligonucleotide
agaaaatagttgtacagatgagttataacc

SEQ ID NO: 400693 - DNA, 30 bp, Artificial Sequence
  Synthetic oligonucleotide
catctggcgactttaacgcacgaactaacc

SEQ ID NO: 400694 - DNA, 30 bp, Artificial Sequence
  Synthetic oligonucleotide
gccttttggttccaacaagaagcactaacc

SEQ ID NO: 400695 - DNA, 30 bp, Artificial Sequence
  Synthetic oligonucleotide
aatctgacaacagtgggtacaggactaacc

SEQ ID NO: 400696 - DNA, 30 bp, Artificial Sequence
  Synthetic oligonucleotide
ctcatacagaggtccgtaacgcacctaacc

SEQ ID NO: 400697 - DNA, 30 bp, Artificial Sequence
  Synthetic oligonucleotide
cgagtagtctgggttcttgggtacctaacc

SEQ ID NO: 400698 - DNA, 30 bp, Artificial Sequence
  Synthetic oligonucleotide
ggacttgatgatcgcccagataccctaacc

SEQ ID NO: 400699 - DNA, 30 bp, Artificial Sequence
  Synthetic oligonucleotide
ggcttacactatttctcgacaatcctaacc

SEQ ID NO: 400700 - DNA, 30 bp, Artificial Sequence
  Synthetic oligonucleotide
cacggcatcctagtatcttgggagctaacc

SEQ ID NO: 400701 - DNA, 30 bp, Artificial Sequence
  Synthetic oligonucleotide
accgggattttgcggaggatgcggctaacc

SEQ ID NO: 400702 - DNA, 30 bp, Artificial Sequence
  Synthetic oligonucleotide
tgtattgggggcaagaggcaagtgctaacc

SEQ ID NO: 400703 - DNA, 30 bp, Artificial Sequence
  Synthetic oligonucleotide
ctatcgtaccataccatggtctatctaacc

SEQ ID NO: 400704 - DNA, 30 bp, Artificial Sequence
  Synthetic oligonucleotide
aaagcattcctccccaaggcacaagtaacc

SEQ ID NO: 400705 - DNA, 30 bp, Artificial Sequence
  Synthetic oligonucleotide
tgccaacagattttactgggaggagtaacc

SEQ ID NO: 400706 - DNA, 30 bp, Artificial Sequence
  Synthetic oligonucleotide
agagtccgaatataggtattgggcgtaacc

SEQ ID NO: 400707 - DNA, 30 bp, Artificial Sequence
  Synthetic oligonucleotide
cgtacaacttatagcgggagaccggtaacc

SEQ ID NO: 400708 - DNA, 30 bp, Artificial Sequence
  Synthetic oligonucleotide
aggcgggggcccttgcagcggagggtaacc

SEQ ID NO: 400709 - DNA, 30 bp, Artificial Sequence
  Synthetic oligonucleotide
ccagactgaatccccccggtcatggtaacc

SEQ ID NO: 400710 - DNA, 30 bp, Artificial Sequence
  Synthetic oligonucleotide
cttccaacggtttctacacttactgtaacc

SEQ ID NO: 400711 - DNA, 30 bp, Artificial Sequence
  Synthetic oligonucleotide
gaggccgcatgaggcatccattacttaacc

SEQ ID NO: 400712 - DNA, 30 bp, Artificial Sequence
  Synthetic oligonucleotide
agaacgcaggcattcgtgggttgcttaacc

SEQ ID NO: 400713 - DNA, 30 bp, Artificial Sequence
  Synthetic oligonucleotide
taatggagtatccacgatttttcgttaacc

SEQ ID NO: 400714 - DNA, 30 bp, Artificial Sequence
  Synthetic oligonucleotide
agccgcttggagggttgctggaggttaacc

SEQ ID NO: 400715 - DNA, 30 bp, Artificial Sequence
  Synthetic oligonucleotide
ccttcagaaacgcgcctcacccgtttaacc

SEQ ID NO: 400716 - DNA, 30 bp, Artificial Sequence
  Synthetic oligonucleotide
gagaagccccgatgcttgaacgttttaacc

SEQ ID NO: 400717 - DNA, 30 bp, Artificial Sequence
  Synthetic oligonucleotide
tcccaggttatagtaacgagcggaaacacc

SEQ ID NO: 400718 - DNA, 30 bp, Artificial Sequence
  Synthetic oligonucleotide
atcttaagtaatttagcgctcgtaaacacc

SEQ ID NO: 400719 - DNA, 30 bp, Artificial Sequence
  Synthetic oligonucleotide
aacggcagaccggtaaaacccgtcaacacc

SEQ ID NO: 400720 - DNA, 30 bp, Artificial Sequence
  Synthetic oligonucleotide
ccagtttagcaagctggagaccagaacacc

SEQ ID NO: 400721 - DNA, 30 bp, Artificial Sequence
  Synthetic oligonucleotide
agtgactgcgagctagttcggcgtaacacc

SEQ ID NO: 400722 - DNA, 30 bp, Artificial Sequence
  Synthetic oligonucleotide
gttatcctaggccttgtctcataacacacc

SEQ ID NO: 400723 - DNA, 30 bp, Artificial Sequence
  Synthetic oligonucleotide
cttttgagaatgcctgttacgttacacacc

SEQ ID NO: 400724 - DNA, 30 bp, Artificial Sequence
  Synthetic oligonucleotide
gacgcgccatacccgagtctacggcacacc

SEQ ID NO: 400725 - DNA, 30 bp, Artificial Sequence
  Synthetic oligonucleotide
ttaataaccgtcgtggccggaatgcacacc

SEQ ID NO: 400726 - DNA, 30 bp, Artificial Sequence
  Synthetic oligonucleotide
ggttcggttcattgactcctactgcacacc

SEQ ID NO: 400727 - DNA, 30 bp, Artificial Sequence
  Synthetic oligonucleotide
agcacccgtgaatgacatgtttttcacacc

SEQ ID NO: 400728 - DNA, 30 bp, Artificial Sequence
  Synthetic oligonucleotide
tatctccgtaactggacattataagacacc

SEQ ID NO: 400729 - DNA, 30 bp, Artificial Sequence
  Synthetic oligonucleotide
aaagtaaactgccgtgggggaatagacacc

SEQ ID NO: 400730 - DNA, 30 bp, Artificial Sequence
  Synthetic oligonucleotide
cgcgcgacatagcgcggtcagatcgacacc

SEQ ID NO: 400731 - DNA, 30 bp, Artificial Sequence
  Synthetic oligonucleotide
tgaagtattagattggaatataaggacacc

SEQ ID NO: 400732 - DNA, 30 bp, Artificial Sequence
  Synthetic oligonucleotide
cagctatgcatcttttgaacgccggacacc

SEQ ID NO: 400733 - DNA, 30 bp, Artificial Sequence
  Synthetic oligonucleotide
ctccctccaagtctgaacacgatggacacc

SEQ ID NO: 400734 - DNA, 30 bp, Artificial Sequence
  Synthetic oligonucleotide
gtttggcggtagtacgctacggatgacacc

SEQ ID NO: 400735 - DNA, 30 bp, Artificial Sequence
  Synthetic oligonucleotide
caaatcttctgtaattccgggcgtgacacc

SEQ ID NO: 400736 - DNA, 30 bp, Artificial Sequence
  Synthetic oligonucleotide
ccatagcatcgtgtgaaaatcaaatacacc

SEQ ID NO: 400737 - DNA, 30 bp, Artificial Sequence
  Synthetic oligonucleotide
atcgtcacttataaaggttggagatacacc

SEQ ID NO: 400738 - DNA, 30 bp, Artificial Sequence
  Synthetic oligonucleotide
gggagtattcgtgtttagtggcactacacc

SEQ ID NO: 400739 - DNA, 30 bp, Artificial Sequence
  Synthetic oligonucleotide
gcaccactttgttaacagattttctacacc

SEQ ID NO: 400740 - DNA, 30 bp, Artificial Sequence
  Synthetic oligonucleotide
ttgcgcgtgcactgagagatttcgtacacc

SEQ ID NO: 400741 - DNA, 30 bp, Artificial Sequence
  Synthetic oligonucleotide
acttataacagcccacgcttaatttacacc

SEQ ID NO: 400742 - DNA, 30 bp, Artificial Sequence
  Synthetic oligonucleotide
aaccagggtacactggtagccctttacacc

SEQ ID NO: 400743 - DNA, 30 bp, Artificial Sequence
  Synthetic oligonucleotide
gttagtaaacgctcacccgcagaaaccacc

SEQ ID NO: 400744 - DNA, 30 bp, Artificial Sequence
  Synthetic oligonucleotide
atggtcaaaatgcaagacacttaaaccacc

SEQ ID NO: 400745 - DNA, 30 bp, Artificial Sequence
  Synthetic oligonucleotide
tatccgtacatcttccgggttataaccacc

SEQ ID NO: 400746 - DNA, 30 bp, Artificial Sequence
  Synthetic oligonucleotide
caacagccggtgaatattaagtacaccacc

SEQ ID NO: 400747 - DNA, 30 bp, Artificial Sequence
  Synthetic oligonucleotide
aatgttaaaggcccaaaagggtggaccacc

SEQ ID NO: 400748 - DNA, 30 bp, Artificial Sequence
  Synthetic oligonucleotide
tgcccagttacaccctgcacttataccacc

SEQ ID NO: 400749 - DNA, 30 bp, Artificial Sequence
  Synthetic oligonucleotide
gtcatggcctgacattgcttatttaccacc

SEQ ID NO: 400750 - DNA, 30 bp, Artificial Sequence
  Synthetic oligonucleotide
tagttgttggcaccatatggcgaacccacc

SEQ ID NO: 400751 - DNA, 30 bp, Artificial Sequence
  Synthetic oligonucleotide
gtacaaccgtggcttgtcaactaacccacc

SEQ ID NO: 400752 - DNA, 30 bp, Artificial Sequence
  Synthetic oligonucleotide
ccaaatccaccctgacttagttcacccacc

SEQ ID NO: 400753 - DNA, 30 bp, Artificial Sequence
  Synthetic oligonucleotide
atgcaggggtacagagccacaccgcccacc

SEQ ID NO: 400754 - DNA, 30 bp, Artificial Sequence
  Synthetic oligonucleotide
agctcatagaccagggggttacctcccacc

SEQ ID NO: 400755 - DNA, 30 bp, Artificial Sequence
  Synthetic oligonucleotide
ttctcacgggcgcgcgtcaagcaagccacc

SEQ ID NO: 400756 - DNA, 30 bp, Artificial Sequence
  Synthetic oligonucleotide
ctttaccgacctagccttaaagaagccacc

SEQ ID NO: 400757 - DNA, 30 bp, Artificial Sequence
  Synthetic oligonucleotide
actcacgagactgcggacgactcagccacc

SEQ ID NO: 400758 - DNA, 30 bp, Artificial Sequence
  Synthetic oligonucleotide
ctaattgtggcaataaatcttaaggccacc

SEQ ID NO: 400759 - DNA, 30 bp, Artificial Sequence
  Synthetic oligonucleotide
atctaacgctgtagccacgggggggccacc

SEQ ID NO: 400760 - DNA, 30 bp, Artificial Sequence
  Synthetic oligonucleotide
catggcgctctcacacactcattggccacc

SEQ ID NO: 400761 - DNA, 30 bp, Artificial Sequence
  Synthetic oligonucleotide
aaaggaaaaagttataatctatcctccacc

SEQ ID NO: 400762 - DNA, 30 bp, Artificial Sequence
  Synthetic oligonucleotide
aaataagtctcagtttctggcagctccacc

SEQ ID NO: 400763 - DNA, 30 bp, Artificial Sequence
  Synthetic oligonucleotide
tcggctagggactcagtgcaagtctccacc

SEQ ID NO: 400764 - DNA, 30 bp, Artificial Sequence
  Synthetic oligonucleotide
ctaggactttcaaatgtttcgccgtccacc

SEQ ID NO: 400765 - DNA, 30 bp, Artificial Sequence
  Synthetic oligonucleotide
gcatacgctagaagatacgactattccacc

SEQ ID NO: 400766 - DNA, 30 bp, Artificial Sequence
  Synthetic oligonucleotide
gctttcaaggacattcgcacggaaagcacc

SEQ ID NO: 400767 - DNA, 30 bp, Artificial Sequence
  Synthetic oligonucleotide
tgatgactcacgctgtccctcaacagcacc

SEQ ID NO: 400768 - DNA, 30 bp, Artificial Sequence
  Synthetic oligonucleotide
gcggctacgcttaattgatctatcagcacc

SEQ ID NO: 400769 - DNA, 30 bp, Artificial Sequence
  Synthetic oligonucleotide
ttctgcgtttgctctacaacaacgagcacc

SEQ ID NO: 400770 - DNA, 30 bp, Artificial Sequence
  Synthetic oligonucleotide
ccttggacttaacctggtcggcatagcacc

SEQ ID NO: 400771 - DNA, 30 bp, Artificial Sequence
  Synthetic oligonucleotide
tagtaataatgggccgattcggcacgcacc

SEQ ID NO: 400772 - DNA, 30 bp, Artificial Sequence
  Synthetic oligonucleotide
actgcgttggaacattcaggtatacgcacc

SEQ ID NO: 400773 - DNA, 30 bp, Artificial Sequence
  Synthetic oligonucleotide
ccgggtaccttaataagtccgacccgcacc

SEQ ID NO: 400774 - DNA, 31 bp, Artificial Sequence
  Synthetic oligonucleotide
aatgtcacgtgccagtcttggctggcgcacc

SEQ ID NO: 400775 - DNA, 30 bp, Artificial Sequence
  Synthetic oligonucleotide
ttagagtaggatcaggcaaggattcgcacc

SEQ ID NO: 400776 - DNA, 30 bp, Artificial Sequence
  Synthetic oligonucleotide
cggtaggggttgccagggaaggttcgcacc

SEQ ID NO: 400777 - DNA, 30 bp, Artificial Sequence
  Synthetic oligonucleotide
ggtaaagggtgtgaaaaagtttttcgcacc

SEQ ID NO: 400778 - DNA, 30 bp, Artificial Sequence
  Synthetic oligonucleotide
caaatatgaccacaactgacgcaaggcacc

SEQ ID NO: 400779 - DNA, 30 bp, Artificial Sequence
  Synthetic oligonucleotide
actagtgtcctttcaatgggggccggcacc

SEQ ID NO: 400780 - DNA, 30 bp, Artificial Sequence
  Synthetic oligonucleotide
tgcgctatgagaggcctacgttgcggcacc

SEQ ID NO: 400781 - DNA, 30 bp, Artificial Sequence
  Synthetic oligonucleotide
tctcccttgtcgtctaggaggatcggcacc

SEQ ID NO: 400782 - DNA, 30 bp, Artificial Sequence
  Synthetic oligonucleotide
acacccttcccttaatgaagtctcggcacc

SEQ ID NO: 400783 - DNA, 30 bp, Artificial Sequence
  Synthetic oligonucleotide
gcggaagttcctcggcaccggatgggcacc

SEQ ID NO: 400784 - DNA, 30 bp, Artificial Sequence
  Synthetic oligonucleotide
tatgattcttgcagcgtttgtcatggcacc

SEQ ID NO: 400785 - DNA, 30 bp, Artificial Sequence
  Synthetic oligonucleotide
gagagattctggttccagggaacatgcacc

SEQ ID NO: 400786 - DNA, 30 bp, Artificial Sequence
  Synthetic oligonucleotide
ggttataaacccgagcttaaatgatgcacc

SEQ ID NO: 400787 - DNA, 30 bp, Artificial Sequence
  Synthetic oligonucleotide
gtaatttcggaatcgctcccggtatgcacc

SEQ ID NO: 400788 - DNA, 30 bp, Artificial Sequence
  Synthetic oligonucleotide
cttattcggcaataagtcgtctactgcacc

SEQ ID NO: 400789 - DNA, 30 bp, Artificial Sequence
  Synthetic oligonucleotide
acggtaatagccgccagctagagctgcacc

SEQ ID NO: 400790 - DNA, 30 bp, Artificial Sequence
  Synthetic oligonucleotide
aacacagcctatacgtatctgcggtgcacc

SEQ ID NO: 400791 - DNA, 30 bp, Artificial Sequence
  Synthetic oligonucleotide
gaagaattggtctatggcaaattgtgcacc

SEQ ID NO: 400792 - DNA, 30 bp, Artificial Sequence
  Synthetic oligonucleotide
agtaattcccacccgcccatattttgcacc

SEQ ID NO: 400793 - DNA, 30 bp, Artificial Sequence
  Synthetic oligonucleotide
aggcccgtgataattcaatcgtgaatcacc

SEQ ID NO: 400794 - DNA, 30 bp, Artificial Sequence
  Synthetic oligonucleotide
ctgatatgtgaaggtgctcaagacatcacc

SEQ ID NO: 400795 - DNA, 30 bp, Artificial Sequence
  Synthetic oligonucleotide
ttagtcccagccggctctggcttcatcacc

SEQ ID NO: 400796 - DNA, 30 bp, Artificial Sequence
  Synthetic oligonucleotide
gtagctcctttaacgtgagtctagatcacc

SEQ ID NO: 400797 - DNA, 30 bp, Artificial Sequence
  Synthetic oligonucleotide
tcacgccattcacaacattggcgtatcacc

SEQ ID NO: 400798 - DNA, 30 bp, Artificial Sequence
  Synthetic oligonucleotide
ggttgaagcaattagatggatgaactcacc

SEQ ID NO: 400799 - DNA, 30 bp, Artificial Sequence
  Synthetic oligonucleotide
acgattcacgtgagccttcgtgtactcacc

SEQ ID NO: 400800 - DNA, 30 bp, Artificial Sequence
  Synthetic oligonucleotide
cctgcgttcatacggagtaggccgctcacc

SEQ ID NO: 400801 - DNA, 30 bp, Artificial Sequence
  Synthetic oligonucleotide
tctgtgaggctgcggctgcagatgctcacc

SEQ ID NO: 400802 - DNA, 30 bp, Artificial Sequence
  Synthetic oligonucleotide
atatggactcgcaggacataaactctcacc

SEQ ID NO: 400803 - DNA, 30 bp, Artificial Sequence
  Synthetic oligonucleotide
attagcgccagcaattgacatagtctcacc

SEQ ID NO: 400804 - DNA, 30 bp, Artificial Sequence
  Synthetic oligonucleotide
caccgttttaattgtcagcagcttctcacc

SEQ ID NO: 400805 - DNA, 30 bp, Artificial Sequence
  Synthetic oligonucleotide
caattttgtacggtgcaagtaggagtcacc

SEQ ID NO: 400806 - DNA, 30 bp, Artificial Sequence
  Synthetic oligonucleotide
gatgtatgtccgttaggctggggagtcacc

SEQ ID NO: 400807 - DNA, 30 bp, Artificial Sequence
  Synthetic oligonucleotide
tcttcgctcaaatgcatcaacaacgtcacc

SEQ ID NO: 400808 - DNA, 30 bp, Artificial Sequence
  Synthetic oligonucleotide
caaatttggaagtgatcttcatctgtcacc

SEQ ID NO: 400809 - DNA, 30 bp, Artificial Sequence
  Synthetic oligonucleotide
aacaaagggggtgaagacgagaaattcacc

SEQ ID NO: 400810 - DNA, 30 bp, Artificial Sequence
  Synthetic oligonucleotide
caaccttgatgttatgctccacacttcacc

SEQ ID NO: 400811 - DNA, 30 bp, Artificial Sequence
  Synthetic oligonucleotide
ccatgtcacggacgttgagacacgttcacc

SEQ ID NO: 400812 - DNA, 30 bp, Artificial Sequence
  Synthetic oligonucleotide
gcatcgccggcttttcaaggcccgttcacc

SEQ ID NO: 400813 - DNA, 30 bp, Artificial Sequence
  Synthetic oligonucleotide
gcagggtactgggggacatcacttttcacc

SEQ ID NO: 400814 - DNA, 30 bp, Artificial Sequence
  Synthetic oligonucleotide
ttatctgaaccaaggcgccatgccaagacc

SEQ ID NO: 400815 - DNA, 30 bp, Artificial Sequence
  Synthetic oligonucleotide
gaaaatcgtactttcgatctgtataagacc

SEQ ID NO: 400816 - DNA, 30 bp, Artificial Sequence
  Synthetic oligonucleotide
catgctggtgttcggatataggaacagacc

SEQ ID NO: 400817 - DNA, 30 bp, Artificial Sequence
  Synthetic oligonucleotide
gtgcctcaagatcagcctgaccaccagacc

SEQ ID NO: 400818 - DNA, 30 bp, Artificial Sequence
  Synthetic oligonucleotide
acacagcgttacgctggacgaatccagacc

SEQ ID NO: 400819 - DNA, 30 bp, Artificial Sequence
  Synthetic oligonucleotide
gaccgtttgtctgcgatcgaagtccagacc

SEQ ID NO: 400820 - DNA, 30 bp, Artificial Sequence
  Synthetic oligonucleotide
gtatcctggatatgcatgagaatgcagacc

SEQ ID NO: 400821 - DNA, 30 bp, Artificial Sequence
  Synthetic oligonucleotide
attgtgctctagggcggaaccttagagacc

SEQ ID NO: 400822 - DNA, 30 bp, Artificial Sequence
  Synthetic oligonucleotide
attgggtttcttacaataactgacgagacc

SEQ ID NO: 400823 - DNA, 30 bp, Artificial Sequence
  Synthetic oligonucleotide
gttggttcgatggactgggtatgggagacc

SEQ ID NO: 400824 - DNA, 30 bp, Artificial Sequence
  Synthetic oligonucleotide
agcatcagaggtttgctacaactggagacc

SEQ ID NO: 400825 - DNA, 30 bp, Artificial Sequence
  Synthetic oligonucleotide
aagcgttgtactacgttaacgaatgagacc

SEQ ID NO: 400826 - DNA, 30 bp, Artificial Sequence
  Synthetic oligonucleotide
gaggtattcgggtacctggaatatgagacc

SEQ ID NO: 400827 - DNA, 30 bp, Artificial Sequence
  Synthetic oligonucleotide
gaggacgcaactctgaaccgacaatagacc

SEQ ID NO: 400828 - DNA, 30 bp, Artificial Sequence
  Synthetic oligonucleotide
ataaagaccatgacgcttcttttatagacc

SEQ ID NO: 400829 - DNA, 30 bp, Artificial Sequence
  Synthetic oligonucleotide
tagaacttgaggcaacaatcgaactagacc

SEQ ID NO: 400830 - DNA, 30 bp, Artificial Sequence
  Synthetic oligonucleotide
gaattccaaagctaggcccaatactagacc

SEQ ID NO: 400831 - DNA, 30 bp, Artificial Sequence
  Synthetic oligonucleotide
agcttggcgggaggcttaaactactagacc

SEQ ID NO: 400832 - DNA, 30 bp, Artificial Sequence
  Synthetic oligonucleotide
gccatatttaacgtgcttgcgccctagacc

SEQ ID NO: 400833 - DNA, 30 bp, Artificial Sequence
  Synthetic oligonucleotide
caaatacaaacggctacttccacgtagacc

SEQ ID NO: 400834 - DNA, 30 bp, Artificial Sequence
  Synthetic oligonucleotide
gtcgccgagcctttaggcagaccgtagacc

SEQ ID NO: 400835 - DNA, 30 bp, Artificial Sequence
  Synthetic oligonucleotide
gtcggttgatgacgtaccatagtgtagacc

SEQ ID NO: 400836 - DNA, 30 bp, Artificial Sequence
  Synthetic oligonucleotide
ccctcaaggtctgcacacacgtcaacgacc

SEQ ID NO: 400837 - DNA, 30 bp, Artificial Sequence
  Synthetic oligonucleotide
tgcgcgagaggtgcctatatttctacgacc

SEQ ID NO: 400838 - DNA, 30 bp, Artificial Sequence
  Synthetic oligonucleotide
taccttgtggatggcaacctagaaccgacc

SEQ ID NO: 400839 - DNA, 30 bp, Artificial Sequence
  Synthetic oligonucleotide
gtagtcgaaacaagatcatgtctcccgacc

SEQ ID NO: 400840 - DNA, 30 bp, Artificial Sequence
  Synthetic oligonucleotide
aaactttcggaagtgacacgcacgccgacc

SEQ ID NO: 400841 - DNA, 30 bp, Artificial Sequence
  Synthetic oligonucleotide
cttccatcggtttgtacgatgatgccgacc

SEQ ID NO: 400842 - DNA, 30 bp, Artificial Sequence
  Synthetic oligonucleotide
tgtgaaagattgtgatgaattgttccgacc

SEQ ID NO: 400843 - DNA, 30 bp, Artificial Sequence
  Synthetic oligonucleotide
gtagagacggtggaggagacacgagcgacc

SEQ ID NO: 400844 - DNA, 30 bp, Artificial Sequence
  Synthetic oligonucleotide
agtggttagagacgtagcaagcgagcgacc

SEQ ID NO: 400845 - DNA, 30 bp, Artificial Sequence
  Synthetic oligonucleotide
cgcctttatcgcagaagacgtcgggcgacc

SEQ ID NO: 400846 - DNA, 30 bp, Artificial Sequence
  Synthetic oligonucleotide
gcctttgctcccctcctcaagatggcgacc

SEQ ID NO: 400847 - DNA, 30 bp, Artificial Sequence
  Synthetic oligonucleotide
aatgggtgatttactagtttatgatcgacc

SEQ ID NO: 400848 - DNA, 30 bp, Artificial Sequence
  Synthetic oligonucleotide
aggggctacgcctggctctcggtatcgacc

SEQ ID NO: 400849 - DNA, 30 bp, Artificial Sequence
  Synthetic oligonucleotide
aacgtgaataatcaacggattcgctcgacc

SEQ ID NO: 400850 - DNA, 30 bp, Artificial Sequence
  Synthetic oligonucleotide
tcctcctgtgtaacttggaaactctcgacc

SEQ ID NO: 400851 - DNA, 30 bp, Artificial Sequence
  Synthetic oligonucleotide
gtcggggacgtttagagtggtgggtcgacc

SEQ ID NO: 400852 - DNA, 30 bp, Artificial Sequence
  Synthetic oligonucleotide
aatcaagcatgcccgcttgctcattcgacc

SEQ ID NO: 400853 - DNA, 30 bp, Artificial Sequence
  Synthetic oligonucleotide
gggggcaccgacccggtctgatcttcgacc

SEQ ID NO: 400854 - DNA, 30 bp, Artificial Sequence
  Synthetic oligonucleotide
gaaatatgactacctactcgttcttcgacc

SEQ ID NO: 400855 - DNA, 30 bp, Artificial Sequence
  Synthetic oligonucleotide
gcatacagtaatttaaaattatgcaggacc

SEQ ID NO: 400856 - DNA, 30 bp, Artificial Sequence
  Synthetic oligonucleotide
tcacacggtgaatttggtgataagaggacc

SEQ ID NO: 400857 - DNA, 29 bp, Artificial Sequence
  Synthetic oligonucleotide
actgtacgcaaggaattacccataggacc

SEQ ID NO: 400858 - DNA, 30 bp, Artificial Sequence
  Synthetic oligonucleotide
atctaatttgattaatcaatgtgtaggacc

SEQ ID NO: 400859 - DNA, 30 bp, Artificial Sequence
  Synthetic oligonucleotide
aaattgagtaagttatcttccagccggacc

SEQ ID NO: 400860 - DNA, 30 bp, Artificial Sequence
  Synthetic oligonucleotide
gccaagagtactgagtcagcaggccggacc

SEQ ID NO: 400861 - DNA, 30 bp, Artificial Sequence
  Synthetic oligonucleotide
agtccgggtccataggaatgagcgcggacc

SEQ ID NO: 400862 - DNA, 30 bp, Artificial Sequence
  Synthetic oligonucleotide
tttcaacaaagatgacatgggctgcggacc

SEQ ID NO: 400863 - DNA, 30 bp, Artificial Sequence
  Synthetic oligonucleotide
ttttcaatccgtacgaacaatcgtcggacc

SEQ ID NO: 400864 - DNA, 30 bp, Artificial Sequence
  Synthetic oligonucleotide
cagtggagctgcggcaccggaaaggggacc

SEQ ID NO: 400865 - DNA, 30 bp, Artificial Sequence
  Synthetic oligonucleotide
gtagaggggctgacgttagcagcggggacc

SEQ ID NO: 400866 - DNA, 30 bp, Artificial Sequence
  Synthetic oligonucleotide
agatgttacctgtgacccatatgggggacc

SEQ ID NO: 400867 - DNA, 30 bp, Artificial Sequence
  Synthetic oligonucleotide
ctcaagcgtataaaaacagctttggggacc

SEQ ID NO: 400868 - DNA, 31 bp, Artificial Sequence
  Synthetic oligonucleotide
gaaggacctttacattattaaagttgggacc

SEQ ID NO: 400869 - DNA, 30 bp, Artificial Sequence
  Synthetic oligonucleotide
ggccgttgatctgatgctgacaaatggacc

SEQ ID NO: 400870 - DNA, 30 bp, Artificial Sequence
  Synthetic oligonucleotide
ctaagatatatcctttgacaaaggtggacc

SEQ ID NO: 400871 - DNA, 30 bp, Artificial Sequence
  Synthetic oligonucleotide
catctgggtcgctggcgtactctgtggacc

SEQ ID NO: 400872 - DNA, 30 bp, Artificial Sequence
  Synthetic oligonucleotide
aagagaaagggtgcgacccactcttggacc

SEQ ID NO: 400873 - DNA, 30 bp, Artificial Sequence
  Synthetic oligonucleotide
atgatgctccctccgatgcatccaatgacc

SEQ ID NO: 400874 - DNA, 30 bp, Artificial Sequence
  Synthetic oligonucleotide
ataatcgaacacgtggctagtagaatgacc

SEQ ID NO: 400875 - DNA, 30 bp, Artificial Sequence
  Synthetic oligonucleotide
agtggatttccgctattctcactcatgacc

SEQ ID NO: 400876 - DNA, 30 bp, Artificial Sequence
  Synthetic oligonucleotide
ccatagttccacgtaacagtattgatgacc

SEQ ID NO: 400877 - DNA, 30 bp, Artificial Sequence
  Synthetic oligonucleotide
ccatacgacgatatacttttagttatgacc

SEQ ID NO: 400878 - DNA, 30 bp, Artificial Sequence
  Synthetic oligonucleotide
gatgagtcaaaatttcagactggactgacc

SEQ ID NO: 400879 - DNA, 30 bp, Artificial Sequence
  Synthetic oligonucleotide
ttagcactcatacgtcatcccgacctgacc

SEQ ID NO: 400880 - DNA, 30 bp, Artificial Sequence
  Synthetic oligonucleotide
ggccgatacgccacactaacacccctgacc

SEQ ID NO: 400881 - DNA, 30 bp, Artificial Sequence
  Synthetic oligonucleotide
aactatcggcttggtggttaaggcctgacc

SEQ ID NO: 400882 - DNA, 30 bp, Artificial Sequence
  Synthetic oligonucleotide
taagaataaactcgttaatctctcctgacc

SEQ ID NO: 400883 - DNA, 30 bp, Artificial Sequence
  Synthetic oligonucleotide
atacaactctagggtagttgtaggctgacc

SEQ ID NO: 400884 - DNA, 30 bp, Artificial Sequence
  Synthetic oligonucleotide
tcacgggccaatagaggttttactctgacc

SEQ ID NO: 400885 - DNA, 30 bp, Artificial Sequence
  Synthetic oligonucleotide
ggaatgttgttgatcagcagcttagtgacc

SEQ ID NO: 400886 - DNA, 30 bp, Artificial Sequence
  Synthetic oligonucleotide
agcccgataggtcctgtcgttgacgtgacc

SEQ ID NO: 400887 - DNA, 30 bp, Artificial Sequence
  Synthetic oligonucleotide
tttgactgtacctatggatgctgcgtgacc

SEQ ID NO: 400888 - DNA, 30 bp, Artificial Sequence
  Synthetic oligonucleotide
ataactaagcctttatgttgctaggtgacc

SEQ ID NO: 400889 - DNA, 30 bp, Artificial Sequence
  Synthetic oligonucleotide
gactaaaaagtctacaagtaaatggtgacc

SEQ ID NO: 400890 - DNA, 30 bp, Artificial Sequence
  Synthetic oligonucleotide
accctggtaccaaggaagaaggtggtgacc

SEQ ID NO: 400891 - DNA, 30 bp, Artificial Sequence
  Synthetic oligonucleotide
attaccattaaactgcatactcctgtgacc

SEQ ID NO: 400892 - DNA, 30 bp, Artificial Sequence
  Synthetic oligonucleotide
caatatagtttgattgcaggcaaattgacc

SEQ ID NO: 400893 - DNA, 30 bp, Artificial Sequence
  Synthetic oligonucleotide
aacacggggctggattgttgaaacttgacc

SEQ ID NO: 400894 - DNA, 30 bp, Artificial Sequence
  Synthetic oligonucleotide
ggtgttggtcgacagtggaggaccttgacc

SEQ ID NO: 400895 - DNA, 31 bp, Artificial Sequence
  Synthetic oligonucleotide
tatctaacgttaagtgcacttaccaaatacc

SEQ ID NO: 400896 - DNA, 30 bp, Artificial Sequence
  Synthetic oligonucleotide
agtctaaccacttagaggcgccgaaatacc

SEQ ID NO: 400897 - DNA, 30 bp, Artificial Sequence
  Synthetic oligonucleotide
tctggatgtcgacaggaaggtcgcaatacc

SEQ ID NO: 400898 - DNA, 30 bp, Artificial Sequence
  Synthetic oligonucleotide
atctgcgccccgggatgatatgggaatacc

SEQ ID NO: 400899 - DNA, 30 bp, Artificial Sequence
  Synthetic oligonucleotide
ggagggctatcagctcgggcgtctaatacc

SEQ ID NO: 400900 - DNA, 30 bp, Artificial Sequence
  Synthetic oligonucleotide
taattgcggaactcttatggtggacatacc

SEQ ID NO: 400901 - DNA, 30 bp, Artificial Sequence
  Synthetic oligonucleotide
gagatcgtcagcaaaaagtagatgcatacc

SEQ ID NO: 400902 - DNA, 30 bp, Artificial Sequence
  Synthetic oligonucleotide
ggacgcgaaccaaaatgatgttatcatacc

SEQ ID NO: 400903 - DNA, 30 bp, Artificial Sequence
  Synthetic oligonucleotide
cggagtagaatatccaacagttttcatacc

SEQ ID NO: 400904 - DNA, 30 bp, Artificial Sequence
  Synthetic oligonucleotide
gcccggtaaactgtcacgataacagatacc

SEQ ID NO: 400905 - DNA, 29 bp, Artificial Sequence
  Synthetic oligonucleotide
ggttccgtcatatgcagtcgatagatacc

SEQ ID NO: 400906 - DNA, 30 bp, Artificial Sequence
  Synthetic oligonucleotide
ataaaagcctcggcatccacaaacgatacc

SEQ ID NO: 400907 - DNA, 30 bp, Artificial Sequence
  Synthetic oligonucleotide
aagcaatggactgaggctcagtccgatacc

SEQ ID NO: 400908 - DNA, 30 bp, Artificial Sequence
  Synthetic oligonucleotide
gaggtacccgccgtggcaaacagggatacc

SEQ ID NO: 400909 - DNA, 30 bp, Artificial Sequence
  Synthetic oligonucleotide
actccatttttatcggattacagggatacc

SEQ ID NO: 400910 - DNA, 30 bp, Artificial Sequence
  Synthetic oligonucleotide
aggagtgccacatgcccgtatcgggatacc

SEQ ID NO: 400911 - DNA, 30 bp, Artificial Sequence
  Synthetic oligonucleotide
atgtaaacatatacgtactacgtggatacc

SEQ ID NO: 400912 - DNA, 30 bp, Artificial Sequence
  Synthetic oligonucleotide
cacttaacagacatcgctcagaatgatacc

SEQ ID NO: 400913 - DNA, 30 bp, Artificial Sequence
  Synthetic oligonucleotide
tgtaagtcggtgggaatatcgactgatacc

SEQ ID NO: 400914 - DNA, 30 bp, Artificial Sequence
  Synthetic oligonucleotide
gtacgagatggttagtttacgcactatacc

SEQ ID NO: 400915 - DNA, 30 bp, Artificial Sequence
  Synthetic oligonucleotide
agaccatggaacaccagacgggggtatacc

SEQ ID NO: 400916 - DNA, 30 bp, Artificial Sequence
  Synthetic oligonucleotide
gcctcatgttaaagggagttttgttatacc

SEQ ID NO: 400917 - DNA, 30 bp, Artificial Sequence
  Synthetic oligonucleotide
gacgttcagtggggccttgacataactacc

SEQ ID NO: 400918 - DNA, 30 bp, Artificial Sequence
  Synthetic oligonucleotide
aggagcagcctacgcgtgtgacacactacc

SEQ ID NO: 400919 - DNA, 30 bp, Artificial Sequence
  Synthetic oligonucleotide
gctaggtagaggctttctatacggactacc

SEQ ID NO: 400920 - DNA, 30 bp, Artificial Sequence
  Synthetic oligonucleotide
agtaaggatcgctaggcactagatactacc

SEQ ID NO: 400921 - DNA, 30 bp, Artificial Sequence
  Synthetic oligonucleotide
actagaagatgcagttatatatctactacc

SEQ ID NO: 400922 - DNA, 30 bp, Artificial Sequence
  Synthetic oligonucleotide
taatttatttcatggttgtagcgtactacc

SEQ ID NO: 400923 - DNA, 30 bp, Artificial Sequence
  Synthetic oligonucleotide
atttcgacggagtctaccagatgtactacc

SEQ ID NO: 400924 - DNA, 30 bp, Artificial Sequence
  Synthetic oligonucleotide
agctgagcccagggtaaaagtcaccctacc

SEQ ID NO: 400925 - DNA, 30 bp, Artificial Sequence
  Synthetic oligonucleotide
agtgtacgcagattgcatccgttccctacc

SEQ ID NO: 400926 - DNA, 30 bp, Artificial Sequence
  Synthetic oligonucleotide
cagaaaattcggtactgcacaaatcctacc

SEQ ID NO: 400927 - DNA, 30 bp, Artificial Sequence
  Synthetic oligonucleotide
actgtattgtgaggatctgggtacgctacc

SEQ ID NO: 400928 - DNA, 30 bp, Artificial Sequence
  Synthetic oligonucleotide
gcaaacactctcactggtagttccgctacc

SEQ ID NO: 400929 - DNA, 30 bp, Artificial Sequence
  Synthetic oligonucleotide
ggcaggaaccaagaagcttctcgcgctacc

SEQ ID NO: 400930 - DNA, 30 bp, Artificial Sequence
  Synthetic oligonucleotide
gcgcagccaattcttaagataaaggctacc

SEQ ID NO: 400931 - DNA, 30 bp, Artificial Sequence
  Synthetic oligonucleotide
gcgccaatgctactcttaggctaggctacc

SEQ ID NO: 400932 - DNA, 30 bp, Artificial Sequence
  Synthetic oligonucleotide
cctaacacggtcagtttcgtctgctctacc

SEQ ID NO: 400933 - DNA, 30 bp, Artificial Sequence
  Synthetic oligonucleotide
ctccgtcgatatatgaggggacattctacc

SEQ ID NO: 400934 - DNA, 30 bp, Artificial Sequence
  Synthetic oligonucleotide
ttcagcctcctaaaattgtaattttctacc

SEQ ID NO: 400935 - DNA, 30 bp, Artificial Sequence
  Synthetic oligonucleotide
gtttaactagatcctaatagtataagtacc

SEQ ID NO: 400936 - DNA, 30 bp, Artificial Sequence
  Synthetic oligonucleotide
acatagctaaggtagctctcactcagtacc

SEQ ID NO: 400937 - DNA, 30 bp, Artificial Sequence
  Synthetic oligonucleotide
ccaggggtatatttttgtaccttcagtacc

SEQ ID NO: 400938 - DNA, 30 bp, Artificial Sequence
  Synthetic oligonucleotide
tgcgatgaggggtacactacgcggagtacc

SEQ ID NO: 400939 - DNA, 30 bp, Artificial Sequence
  Synthetic oligonucleotide
tttggttatgacaggctcgaggggagtacc

SEQ ID NO: 400940 - DNA, 30 bp, Artificial Sequence
  Synthetic oligonucleotide
atggcaggacgtcctagctggttgagtacc

SEQ ID NO: 400941 - DNA, 30 bp, Artificial Sequence
  Synthetic oligonucleotide
gtaactaagtcaggcatagtctatagtacc

SEQ ID NO: 400942 - DNA, 30 bp, Artificial Sequence
  Synthetic oligonucleotide
tctgtcacagaacatcttgaaaaacgtacc

SEQ ID NO: 400943 - DNA, 30 bp, Artificial Sequence
  Synthetic oligonucleotide
tcgcctcttgagaatttgccatcacgtacc

SEQ ID NO: 400944 - DNA, 30 bp, Artificial Sequence
  Synthetic oligonucleotide
acacactccgatttccaacgcagacgtacc

SEQ ID NO: 400945 - DNA, 30 bp, Artificial Sequence
  Synthetic oligonucleotide
ttgcatctagtcgatcactgccgccgtacc

SEQ ID NO: 400946 - DNA, 30 bp, Artificial Sequence
  Synthetic oligonucleotide
tgggggttatgagactggataggccgtacc

SEQ ID NO: 400947 - DNA, 30 bp, Artificial Sequence
  Synthetic oligonucleotide
gtacctgtagcgcgagatcattgccgtacc

SEQ ID NO: 400948 - DNA, 30 bp, Artificial Sequence
  Synthetic oligonucleotide
agaattcgtcatgctagaacaaatcgtacc

SEQ ID NO: 400949 - DNA, 30 bp, Artificial Sequence
  Synthetic oligonucleotide
cgacttgggttatatacgtttgttcgtacc

SEQ ID NO: 400950 - DNA, 30 bp, Artificial Sequence
  Synthetic oligonucleotide
gggcctgcttttacttaactagcaggtacc

SEQ ID NO: 400951 - DNA, 31 bp, Artificial Sequence
  Synthetic oligonucleotide
aaaatgatacctcgtctttgatttaggtacc

SEQ ID NO: 400952 - DNA, 30 bp, Artificial Sequence
  Synthetic oligonucleotide
gcgcggagcgatgactggggtgccggtacc

SEQ ID NO: 400953 - DNA, 30 bp, Artificial Sequence
  Synthetic oligonucleotide
ggtagatgtgagagacttatcctcggtacc

SEQ ID NO: 400954 - DNA, 30 bp, Artificial Sequence
  Synthetic oligonucleotide
ttttgttcagtaagcaagattgggggtacc

SEQ ID NO: 400955 - DNA, 30 bp, Artificial Sequence
  Synthetic oligonucleotide
gactctgaccatgacatttccatgggtacc

SEQ ID NO: 400956 - DNA, 30 bp, Artificial Sequence
  Synthetic oligonucleotide
cgacatttggtttgcactcgcttgggtacc

SEQ ID NO: 400957 - DNA, 30 bp, Artificial Sequence
  Synthetic oligonucleotide
catcgtcccagttattacagatttggtacc

SEQ ID NO: 400958 - DNA, 30 bp, Artificial Sequence
  Synthetic oligonucleotide
gggcgttccggttgatcgcattttggtacc

SEQ ID NO: 400959 - DNA, 30 bp, Artificial Sequence
  Synthetic oligonucleotide
gctatatagctatgccacacgatctgtacc

SEQ ID NO: 400960 - DNA, 30 bp, Artificial Sequence
  Synthetic oligonucleotide
attgcttagtgctccctgagtcagtgtacc

SEQ ID NO: 400961 - DNA, 30 bp, Artificial Sequence
  Synthetic oligonucleotide
tacgcgttgtcaagctcttcgccgtgtacc

SEQ ID NO: 400962 - DNA, 30 bp, Artificial Sequence
  Synthetic oligonucleotide
tctaccgccgactcgtggtattggtgtacc

SEQ ID NO: 400963 - DNA, 30 bp, Artificial Sequence
  Synthetic oligonucleotide
cgacggaaaaccaaacacggaaattgtacc

SEQ ID NO: 400964 - DNA, 30 bp, Artificial Sequence
  Synthetic oligonucleotide
tgtatgatgtgtgcacattgggcttgtacc

SEQ ID NO: 400965 - DNA, 30 bp, Artificial Sequence
  Synthetic oligonucleotide
gcttctcgagttagtatattcgtttgtacc

SEQ ID NO: 400966 - DNA, 30 bp, Artificial Sequence
  Synthetic oligonucleotide
gtagtagtacaattgagcctttcaattacc

SEQ ID NO: 400967 - DNA, 30 bp, Artificial Sequence
  Synthetic oligonucleotide
attcgtcgccgtgatgtcgcgtacattacc

SEQ ID NO: 400968 - DNA, 30 bp, Artificial Sequence
  Synthetic oligonucleotide
cgctgcacagtcagttagatgcccattacc

SEQ ID NO: 400969 - DNA, 30 bp, Artificial Sequence
  Synthetic oligonucleotide
gaatgcgagtagtcaattcggtagattacc

SEQ ID NO: 400970 - DNA, 30 bp, Artificial Sequence
  Synthetic oligonucleotide
tcactaattaatgaacggagttagattacc

SEQ ID NO: 400971 - DNA, 30 bp, Artificial Sequence
  Synthetic oligonucleotide
aaacaacccaaatggatatgcaatattacc

SEQ ID NO: 400972 - DNA, 30 bp, Artificial Sequence
  Synthetic oligonucleotide
ttatagaatgttcaaagcgtagaccttacc

SEQ ID NO: 400973 - DNA, 30 bp, Artificial Sequence
  Synthetic oligonucleotide
tttctgctcgtccgccgcgccccccttacc

SEQ ID NO: 400974 - DNA, 30 bp, Artificial Sequence
  Synthetic oligonucleotide
ttaatggagagcggccgggcgctccttacc

SEQ ID NO: 400975 - DNA, 30 bp, Artificial Sequence
  Synthetic oligonucleotide
aaggtagtttggaaggctcctttccttacc

SEQ ID NO: 400976 - DNA, 30 bp, Artificial Sequence
  Synthetic oligonucleotide
ggggccgggttccccgaggcacatcttacc

SEQ ID NO: 400977 - DNA, 30 bp, Artificial Sequence
  Synthetic oligonucleotide
ctagaggcgcttctacaatccattcttacc

SEQ ID NO: 400978 - DNA, 30 bp, Artificial Sequence
  Synthetic oligonucleotide
gtaaatccggttgtccagagctacgttacc

SEQ ID NO: 400979 - DNA, 30 bp, Artificial Sequence
  Synthetic oligonucleotide
gataggaagtcgatacggatatccgttacc

SEQ ID NO: 400980 - DNA, 30 bp, Artificial Sequence
  Synthetic oligonucleotide
cagcgactccggcgccactgtcgggttacc

SEQ ID NO: 400981 - DNA, 30 bp, Artificial Sequence
  Synthetic oligonucleotide
tcactatttggagtaagggaatgtgttacc

SEQ ID NO: 400982 - DNA, 30 bp, Artificial Sequence
  Synthetic oligonucleotide
actgaccgctgggatgttcagattgttacc

SEQ ID NO: 400983 - DNA, 30 bp, Artificial Sequence
  Synthetic oligonucleotide
gactcggggtcatccccaaacacctttacc

SEQ ID NO: 400984 - DNA, 30 bp, Artificial Sequence
  Synthetic oligonucleotide
tcacagtcagagggcgagttgtattttacc

SEQ ID NO: 400985 - DNA, 30 bp, Artificial Sequence
  Synthetic oligonucleotide
agtattgtccttaatcatatcccttttacc

SEQ ID NO: 400986 - DNA, 30 bp, Artificial Sequence
  Synthetic oligonucleotide
taggcacagtgctctacaccggcaaaaccc

SEQ ID NO: 400987 - DNA, 30 bp, Artificial Sequence
  Synthetic oligonucleotide
tggatagaatagacactggtatcaaaaccc

SEQ ID NO: 400988 - DNA, 30 bp, Artificial Sequence
  Synthetic oligonucleotide
ggtgactggattttacccatcaacaaaccc

SEQ ID NO: 400989 - DNA, 30 bp, Artificial Sequence
  Synthetic oligonucleotide
tccttcttgggaatattgtaccagaaaccc

SEQ ID NO: 400990 - DNA, 30 bp, Artificial Sequence
  Synthetic oligonucleotide
acctgtgtggcacgtgagatggagaaaccc

SEQ ID NO: 400991 - DNA, 30 bp, Artificial Sequence
  Synthetic oligonucleotide
gtctttaatcaatctgtcatagcgaaaccc

SEQ ID NO: 400992 - DNA, 30 bp, Artificial Sequence
  Synthetic oligonucleotide
atagtgttgaaggaacgtttccggaaaccc

SEQ ID NO: 400993 - DNA, 30 bp, Artificial Sequence
  Synthetic oligonucleotide
ttagcagacttgattgcaaggatgaaaccc

SEQ ID NO: 400994 - DNA, 30 bp, Artificial Sequence
  Synthetic oligonucleotide
gtatgatggctttggaggatcctgaaaccc

SEQ ID NO: 400995 - DNA, 30 bp, Artificial Sequence
  Synthetic oligonucleotide
ccaaatggcaatagcatggtataccaaccc

SEQ ID NO: 400996 - DNA, 30 bp, Artificial Sequence
  Synthetic oligonucleotide
caccaatgtaacttgtaaaagtcccaaccc

SEQ ID NO: 400997 - DNA, 30 bp, Artificial Sequence
  Synthetic oligonucleotide
actaggtttttaagagggatgtatcaaccc

SEQ ID NO: 400998 - DNA, 30 bp, Artificial Sequence
  Synthetic oligonucleotide
atgctcggtcttctgggtatccctcaaccc

SEQ ID NO: 400999 - DNA, 30 bp, Artificial Sequence
  Synthetic oligonucleotide
gggcgcctaactgagtctggtgctcaaccc

SEQ ID NO: 401000 - DNA, 30 bp, Artificial Sequence
  Synthetic oligonucleotide
tacgcggagtaggtcagaaactctcaaccc

SEQ ID NO: 401001 - DNA, 30 bp, Artificial Sequence
  Synthetic oligonucleotide
gcgagggggatagacaggggatgtcaaccc

SEQ ID NO: 401002 - DNA, 30 bp, Artificial Sequence
  Synthetic oligonucleotide
gagtgtaaaatacggttgagcaaagaaccc

SEQ ID NO: 401003 - DNA, 30 bp, Artificial Sequence
  Synthetic oligonucleotide
acgtgtatcctcgcttttcacgcggaaccc

SEQ ID NO: 401004 - DNA, 30 bp, Artificial Sequence
  Synthetic oligonucleotide
catgctcgggttcataatcctagggaaccc

SEQ ID NO: 401005 - DNA, 30 bp, Artificial Sequence
  Synthetic oligonucleotide
cactatctggaaagtacccagcgggaaccc

SEQ ID NO: 401006 - DNA, 30 bp, Artificial Sequence
  Synthetic oligonucleotide
gatgctaagtatttctgtgttggggaaccc

SEQ ID NO: 401007 - DNA, 30 bp, Artificial Sequence
  Synthetic oligonucleotide
cgatagtaacctgttcgttaacgtgaaccc

SEQ ID NO: 401008 - DNA, 30 bp, Artificial Sequence
  Synthetic oligonucleotide
taagccgccacccccacactagaataaccc

SEQ ID NO: 401009 - DNA, 30 bp, Artificial Sequence
  Synthetic oligonucleotide
gaggctttaatcggtacactctactaaccc

SEQ ID NO: 401010 - DNA, 30 bp, Artificial Sequence
  Synthetic oligonucleotide
gggtaagtctttataggcgtgccgtaaccc

SEQ ID NO: 401011 - DNA, 30 bp, Artificial Sequence
  Synthetic oligonucleotide
ccagcgtgtacgttatacttacggtaaccc

SEQ ID NO: 401012 - DNA, 30 bp, Artificial Sequence
  Synthetic oligonucleotide
tagggatctgtgaggcttgctgggtaaccc

SEQ ID NO: 401013 - DNA, 30 bp, Artificial Sequence
  Synthetic oligonucleotide
tctattcctcgtagaaggggcctgtaaccc

SEQ ID NO: 401014 - DNA, 30 bp, Artificial Sequence
  Synthetic oligonucleotide
cttgggcacactccttgtgcacgaacaccc

SEQ ID NO: 401015 - DNA, 30 bp, Artificial Sequence
  Synthetic oligonucleotide
agtaatgatgtgatcaatttttgaacaccc

SEQ ID NO: 401016 - DNA, 30 bp, Artificial Sequence
  Synthetic oligonucleotide
acacctaaagtacacacaggaataacaccc

SEQ ID NO: 401017 - DNA, 30 bp, Artificial Sequence
  Synthetic oligonucleotide
gaccgggtctagtagggagccgagacaccc

SEQ ID NO: 401018 - DNA, 30 bp, Artificial Sequence
  Synthetic oligonucleotide
aggtgggaacatgggtccggccctacaccc

SEQ ID NO: 401019 - DNA, 30 bp, Artificial Sequence
  Synthetic oligonucleotide
acccgaagacccgatgactcggctacaccc

SEQ ID NO: 401020 - DNA, 30 bp, Artificial Sequence
  Synthetic oligonucleotide
gagttgttgagtatggcattcagtacaccc

SEQ ID NO: 401021 - DNA, 30 bp, Artificial Sequence
  Synthetic oligonucleotide
atatgttcggccatagcttagagtacaccc

SEQ ID NO: 401022 - DNA, 30 bp, Artificial Sequence
  Synthetic oligonucleotide
tgcatactctcctttgcttttgagccaccc

SEQ ID NO: 401023 - DNA, 30 bp, Artificial Sequence
  Synthetic oligonucleotide
aatcgaccatataaattgtcgaatccaccc

SEQ ID NO: 401024 - DNA, 30 bp, Artificial Sequence
  Synthetic oligonucleotide
gaaagctccttggtctactaacaagcaccc

SEQ ID NO: 401025 - DNA, 30 bp, Artificial Sequence
  Synthetic oligonucleotide
atcatagattatgttaagtacaccgcaccc

SEQ ID NO: 401026 - DNA, 30 bp, Artificial Sequence
  Synthetic oligonucleotide
acataacggtatgattaagacagggcaccc

SEQ ID NO: 401027 - DNA, 30 bp, Artificial Sequence
  Synthetic oligonucleotide
gtccgctccctatatggtgcagatgcaccc

SEQ ID NO: 401028 - DNA, 30 bp, Artificial Sequence
  Synthetic oligonucleotide
tttctagtgcacgagctaagaggtgcaccc

SEQ ID NO: 401029 - DNA, 30 bp, Artificial Sequence
  Synthetic oligonucleotide
taaccattacgcttgcttggtccatcaccc

SEQ ID NO: 401030 - DNA, 30 bp, Artificial Sequence
  Synthetic oligonucleotide
cgataatgtttagtccgacgatcatcaccc

SEQ ID NO: 401031 - DNA, 30 bp, Artificial Sequence
  Synthetic oligonucleotide
atcccgcccgcttaggttatggtatcaccc

SEQ ID NO: 401032 - DNA, 30 bp, Artificial Sequence
  Synthetic oligonucleotide
ggttctaaaggacggttcaaagactcaccc

SEQ ID NO: 401033 - DNA, 25 bp, Artificial Sequence
  Synthetic oligonucleotide
taggccggtattatactcctcaccc

SEQ ID NO: 401034 - DNA, 30 bp, Artificial Sequence
  Synthetic oligonucleotide
aattcaccatctcctagacctggctcaccc

SEQ ID NO: 401035 - DNA, 30 bp, Artificial Sequence
  Synthetic oligonucleotide
tccagcgaatgttacatactagtctcaccc

SEQ ID NO: 401036 - DNA, 30 bp, Artificial Sequence
  Synthetic oligonucleotide
tcgaattgtattacagaggtctagtcaccc

SEQ ID NO: 401037 - DNA, 30 bp, Artificial Sequence
  Synthetic oligonucleotide
ccagtatgcgtcatccacgcggcgtcaccc

SEQ ID NO: 401038 - DNA, 30 bp, Artificial Sequence
  Synthetic oligonucleotide
atgggttaagtctacattttaccaagaccc

SEQ ID NO: 401039 - DNA, 30 bp, Artificial Sequence
  Synthetic oligonucleotide
ggatggacgttcttctaggacgcaagaccc

SEQ ID NO: 401040 - DNA, 30 bp, Artificial Sequence
  Synthetic oligonucleotide
taaaaatgtaagttttagccagacagaccc

SEQ ID NO: 401041 - DNA, 31 bp, Artificial Sequence
  Synthetic oligonucleotide
ttcacttggggctcgtagtcataccagaccc

SEQ ID NO: 401042 - DNA, 30 bp, Artificial Sequence
  Synthetic oligonucleotide
ggagtcgcattaggtaaactaacgagaccc

SEQ ID NO: 401043 - DNA, 30 bp, Artificial Sequence
  Synthetic oligonucleotide
cttgggagtttcacccggtcttcgagaccc

SEQ ID NO: 401044 - DNA, 30 bp, Artificial Sequence
  Synthetic oligonucleotide
ctcatgagaggatttcacaaaccacgaccc

SEQ ID NO: 401045 - DNA, 30 bp, Artificial Sequence
  Synthetic oligonucleotide
aaagaatatcgacttcggttatcacgaccc

SEQ ID NO: 401046 - DNA, 31 bp, Artificial Sequence
  Synthetic oligonucleotide
agatcgcaagcctcaggtaatctcacgaccc

SEQ ID NO: 401047 - DNA, 30 bp, Artificial Sequence
  Synthetic oligonucleotide
aacaccgtatctctgcagtggatacgaccc

SEQ ID NO: 401048 - DNA, 30 bp, Artificial Sequence
  Synthetic oligonucleotide
tgctattcgcaactcgtagttttacgaccc

SEQ ID NO: 401049 - DNA, 30 bp, Artificial Sequence
  Synthetic oligonucleotide
cgtattttaagtcctcagcaaaggcgaccc

SEQ ID NO: 401050 - DNA, 30 bp, Artificial Sequence
  Synthetic oligonucleotide
tcagtaaggtagccttacttccttcgaccc

SEQ ID NO: 401051 - DNA, 30 bp, Artificial Sequence
  Synthetic oligonucleotide
ttgacgcgattgtaacgcacagcaggaccc

SEQ ID NO: 401052 - DNA, 30 bp, Artificial Sequence
  Synthetic oligonucleotide
cggtcccaagcggttatgcggggaggaccc

SEQ ID NO: 401053 - DNA, 30 bp, Artificial Sequence
  Synthetic oligonucleotide
atgttcgaagatagaggtgtacagggaccc

SEQ ID NO: 401054 - DNA, 30 bp, Artificial Sequence
  Synthetic oligonucleotide
gcagcggggttggtaccaactaggggaccc

SEQ ID NO: 401055 - DNA, 30 bp, Artificial Sequence
  Synthetic oligonucleotide
gcggtgaaaatccacgtgtgtatgggaccc

SEQ ID NO: 401056 - DNA, 30 bp, Artificial Sequence
  Synthetic oligonucleotide
atcctccatagctgcaagcaacctggaccc

SEQ ID NO: 401057 - DNA, 30 bp, Artificial Sequence
  Synthetic oligonucleotide
tttacgttgcctcttggttattctggaccc

SEQ ID NO: 401058 - DNA, 29 bp, Artificial Sequence
  Synthetic oligonucleotide
ccccgtcaatacggatgggctcatgaccc

SEQ ID NO: 401059 - DNA, 30 bp, Artificial Sequence
  Synthetic oligonucleotide
agacgctgcggcctttccaaaggatgaccc

SEQ ID NO: 401060 - DNA, 30 bp, Artificial Sequence
  Synthetic oligonucleotide
ttaacctgaaatggcaggaaagagtgaccc

SEQ ID NO: 401061 - DNA, 30 bp, Artificial Sequence
  Synthetic oligonucleotide
accatagcacgcatcggaaacaaaataccc

SEQ ID NO: 401062 - DNA, 30 bp, Artificial Sequence
  Synthetic oligonucleotide
atagtacattgtaaggcctacaaaataccc

SEQ ID NO: 401063 - DNA, 30 bp, Artificial Sequence
  Synthetic oligonucleotide
atcacgggtctctacattggataaataccc

SEQ ID NO: 401064 - DNA, 30 bp, Artificial Sequence
  Synthetic oligonucleotide
taggtacatttcttctgtacaacaataccc

SEQ ID NO: 401065 - DNA, 30 bp, Artificial Sequence
  Synthetic oligonucleotide
accaagtagtatcaaacggaatcaataccc

SEQ ID NO: 401066 - DNA, 30 bp, Artificial Sequence
  Synthetic oligonucleotide
atgattataaaggctagtggaggaataccc

SEQ ID NO: 401067 - DNA, 30 bp, Artificial Sequence
  Synthetic oligonucleotide
tatgcatttggtttgacgccatcgataccc

SEQ ID NO: 401068 - DNA, 30 bp, Artificial Sequence
  Synthetic oligonucleotide
gcacaagtctacaatagagaccatataccc

SEQ ID NO: 401069 - DNA, 30 bp, Artificial Sequence
  Synthetic oligonucleotide
taaccttaactgaagaaagttgttataccc

SEQ ID NO: 401070 - DNA, 30 bp, Artificial Sequence
  Synthetic oligonucleotide
gatctcatttctctggctaaataactaccc

SEQ ID NO: 401071 - DNA, 30 bp, Artificial Sequence
  Synthetic oligonucleotide
aaggtgcaaaactaagcaatggacctaccc

SEQ ID NO: 401072 - DNA, 30 bp, Artificial Sequence
  Synthetic oligonucleotide
ttcgacacgttagtggtagaaaggctaccc

SEQ ID NO: 401073 - DNA, 30 bp, Artificial Sequence
  Synthetic oligonucleotide
ttctcacctgaaaaggggtcatatctaccc

SEQ ID NO: 401074 - DNA, 30 bp, Artificial Sequence
  Synthetic oligonucleotide
gtacaactgtatcggagcgctggtctaccc

SEQ ID NO: 401075 - DNA, 30 bp, Artificial Sequence
  Synthetic oligonucleotide
gcaaagacgaaaaatatgtagattctaccc

SEQ ID NO: 401076 - DNA, 30 bp, Artificial Sequence
  Synthetic oligonucleotide
tgcgggccattctaatgattgtttctaccc

SEQ ID NO: 401077 - DNA, 30 bp, Artificial Sequence
  Synthetic oligonucleotide
tttggagtgtcgccaacacgaaaagtaccc

SEQ ID NO: 401078 - DNA, 30 bp, Artificial Sequence
  Synthetic oligonucleotide
attcatgggtcttcccgaaaatgagtaccc

SEQ ID NO: 401079 - DNA, 30 bp, Artificial Sequence
  Synthetic oligonucleotide
aaaggcggttagaagttgtgtgacgtaccc

SEQ ID NO: 401080 - DNA, 30 bp, Artificial Sequence
  Synthetic oligonucleotide
tggggcactggctacgaaggatcggtaccc

SEQ ID NO: 401081 - DNA, 30 bp, Artificial Sequence
  Synthetic oligonucleotide
gcagatatgtctataaaagttcgggtaccc

SEQ ID NO: 401082 - DNA, 30 bp, Artificial Sequence
  Synthetic oligonucleotide
gcaggcgctctttcaagaattattgtaccc

SEQ ID NO: 401083 - DNA, 30 bp, Artificial Sequence
  Synthetic oligonucleotide
atgggaacctgcattgttgtggcattaccc

SEQ ID NO: 401084 - DNA, 31 bp, Artificial Sequence
  Synthetic oligonucleotide
attgatagcctagagacatatgcagttaccc

SEQ ID NO: 401085 - DNA, 30 bp, Artificial Sequence
  Synthetic oligonucleotide
cagattttcatcggccagtctcagttaccc

SEQ ID NO: 401086 - DNA, 30 bp, Artificial Sequence
  Synthetic oligonucleotide
tggcagcggcgcgagtaaacaatcaacccc

SEQ ID NO: 401087 - DNA, 30 bp, Artificial Sequence
  Synthetic oligonucleotide
cagggtggatacagttaactcgtcaacccc

SEQ ID NO: 401088 - DNA, 30 bp, Artificial Sequence
  Synthetic oligonucleotide
tttgacgaaagcggtatctcatataacccc

SEQ ID NO: 401089 - DNA, 30 bp, Artificial Sequence
  Synthetic oligonucleotide
gagagccctgaacgtcgagtgcaacacccc

SEQ ID NO: 401090 - DNA, 30 bp, Artificial Sequence
  Synthetic oligonucleotide
gggactaggggtttttcgacttgacacccc

SEQ ID NO: 401091 - DNA, 30 bp, Artificial Sequence
  Synthetic oligonucleotide
gtatcgggggaatagttctatacccacccc

SEQ ID NO: 401092 - DNA, 31 bp, Artificial Sequence
  Synthetic oligonucleotide
ctagataacaggggcttcacacgctcacccc

SEQ ID NO: 401093 - DNA, 30 bp, Artificial Sequence
  Synthetic oligonucleotide
ttaagattcgggggaaggaatgaagacccc

SEQ ID NO: 401094 - DNA, 30 bp, Artificial Sequence
  Synthetic oligonucleotide
cactcacggtcactatgggcattagacccc

SEQ ID NO: 401095 - DNA, 30 bp, Artificial Sequence
  Synthetic oligonucleotide
gcactttatcccgttaggggcaccgacccc

SEQ ID NO: 401096 - DNA, 30 bp, Artificial Sequence
  Synthetic oligonucleotide
ggggctcacgtcttcgagattatcgacccc

SEQ ID NO: 401097 - DNA, 30 bp, Artificial Sequence
  Synthetic oligonucleotide
atccaaggatctggtagaggctaggacccc

SEQ ID NO: 401098 - DNA, 30 bp, Artificial Sequence
  Synthetic oligonucleotide
cctgtggggaaggagcttcagacggacccc

SEQ ID NO: 401099 - DNA, 30 bp, Artificial Sequence
  Synthetic oligonucleotide
gagatgcctcgatgactcaatcgggacccc

SEQ ID NO: 401100 - DNA, 30 bp, Artificial Sequence
  Synthetic oligonucleotide
atatagtaacagaaagtcatgtgggacccc

SEQ ID NO: 401101 - DNA, 30 bp, Artificial Sequence
  Synthetic oligonucleotide
tgaccgacaggggggtccacatgtgacccc

SEQ ID NO: 401102 - DNA, 30 bp, Artificial Sequence
  Synthetic oligonucleotide
agcagagttaaagagcatgtgcaatacccc

SEQ ID NO: 401103 - DNA, 30 bp, Artificial Sequence
  Synthetic oligonucleotide
taagttatatataaacggatgctatacccc

SEQ ID NO: 401104 - DNA, 30 bp, Artificial Sequence
  Synthetic oligonucleotide
ttaaacccataattctgagccaagtacccc

SEQ ID NO: 401105 - DNA, 30 bp, Artificial Sequence
  Synthetic oligonucleotide
atccaccgtattccgtcagttaggtacccc

SEQ ID NO: 401106 - DNA, 30 bp, Artificial Sequence
  Synthetic oligonucleotide
tagagactttccatttaaagctggtacccc

SEQ ID NO: 401107 - DNA, 30 bp, Artificial Sequence
  Synthetic oligonucleotide
ctggggtcattcgcgtccgccacaaccccc

SEQ ID NO: 401108 - DNA, 30 bp, Artificial Sequence
  Synthetic oligonucleotide
tagtacctggatattatttcttcgaccccc

SEQ ID NO: 401109 - DNA, 30 bp, Artificial Sequence
  Synthetic oligonucleotide
gcgggtacaagtccaatgtctgataccccc

SEQ ID NO: 401110 - DNA, 31 bp, Artificial Sequence
  Synthetic oligonucleotide
gatccaggaaaaacatgttaacgaccccccc

SEQ ID NO: 401111 - DNA, 30 bp, Artificial Sequence
  Synthetic oligonucleotide
gcctggtgacccgtactggtatcagccccc

SEQ ID NO: 401112 - DNA, 30 bp, Artificial Sequence
  Synthetic oligonucleotide
cttcaatggatgatctgtccaggagccccc

SEQ ID NO: 401113 - DNA, 30 bp, Artificial Sequence
  Synthetic oligonucleotide
tccggttgggatttagatagcagcgccccc

SEQ ID NO: 401114 - DNA, 30 bp, Artificial Sequence
  Synthetic oligonucleotide
gcgcgagccgatatgggagataaggccccc

SEQ ID NO: 401115 - DNA, 30 bp, Artificial Sequence
  Synthetic oligonucleotide
ggagtgaaattgtggtatacggaggccccc

SEQ ID NO: 401116 - DNA, 30 bp, Artificial Sequence
  Synthetic oligonucleotide
gaattttaaggtgaatgggtgcgctccccc

SEQ ID NO: 401117 - DNA, 30 bp, Artificial Sequence
  Synthetic oligonucleotide
cgacgacgatgctaatccatatgctccccc

SEQ ID NO: 401118 - DNA, 30 bp, Artificial Sequence
  Synthetic oligonucleotide
gggttgcgcacaggtgcccctaagtccccc

SEQ ID NO: 401119 - DNA, 30 bp, Artificial Sequence
  Synthetic oligonucleotide
tgtcgagtggccgccttttatgggtccccc

SEQ ID NO: 401120 - DNA, 30 bp, Artificial Sequence
  Synthetic oligonucleotide
ataagacgcaactctctagattattccccc

SEQ ID NO: 401121 - DNA, 30 bp, Artificial Sequence
  Synthetic oligonucleotide
tgggtgcgcctcccatggtgttcttccccc

SEQ ID NO: 401122 - DNA, 30 bp, Artificial Sequence
  Synthetic oligonucleotide
cggagccctcatcagaggcagctaagcccc

SEQ ID NO: 401123 - DNA, 30 bp, Artificial Sequence
  Synthetic oligonucleotide
gctggcttcacccgaggcaatgtaagcccc

SEQ ID NO: 401124 - DNA, 30 bp, Artificial Sequence
  Synthetic oligonucleotide
gggaaaccgggagattcaactatgagcccc

SEQ ID NO: 401125 - DNA, 30 bp, Artificial Sequence
  Synthetic oligonucleotide
atgatcatccgcatcacgcggtatagcccc

SEQ ID NO: 401126 - DNA, 30 bp, Artificial Sequence
  Synthetic oligonucleotide
tttacatcgacggtgccgaattatagcccc

SEQ ID NO: 401127 - DNA, 30 bp, Artificial Sequence
  Synthetic oligonucleotide
attagtgtacatcaagcactctcacgcccc

SEQ ID NO: 401128 - DNA, 30 bp, Artificial Sequence
  Synthetic oligonucleotide
cacttggttgtttgctttgcaattcgcccc

SEQ ID NO: 401129 - DNA, 30 bp, Artificial Sequence
  Synthetic oligonucleotide
cacacacgcgtggggtgcgagattcgcccc

SEQ ID NO: 401130 - DNA, 30 bp, Artificial Sequence
  Synthetic oligonucleotide
tctccccggttataccgacggcaaggcccc

SEQ ID NO: 401131 - DNA, 30 bp, Artificial Sequence
  Synthetic oligonucleotide
ggcctagaatgtggtaacgccgtaggcccc

SEQ ID NO: 401132 - DNA, 30 bp, Artificial Sequence
  Synthetic oligonucleotide
gtgttgattcttatcttaatcaacggcccc

SEQ ID NO: 401133 - DNA, 30 bp, Artificial Sequence
  Synthetic oligonucleotide
agaatacccacgtacccaatgcatggcccc

SEQ ID NO: 401134 - DNA, 30 bp, Artificial Sequence
  Synthetic oligonucleotide
atggaaccttcgcgtgtcttcgatggcccc

SEQ ID NO: 401135 - DNA, 30 bp, Artificial Sequence
  Synthetic oligonucleotide
gcgaggataagagggtctcctgctggcccc

SEQ ID NO: 401136 - DNA, 30 bp, Artificial Sequence
  Synthetic oligonucleotide
taatgacccaggaggatatactactgcccc

SEQ ID NO: 401137 - DNA, 30 bp, Artificial Sequence
  Synthetic oligonucleotide
gtccctggcgcgctggatcacccgatcccc

SEQ ID NO: 401138 - DNA, 30 bp, Artificial Sequence
  Synthetic oligonucleotide
ttaagctgagcaccctgcggagctatcccc

SEQ ID NO: 401139 - DNA, 30 bp, Artificial Sequence
  Synthetic oligonucleotide
accgttgacaaatacataccggctatcccc

SEQ ID NO: 401140 - DNA, 30 bp, Artificial Sequence
  Synthetic oligonucleotide
attgaatcgttctgacagcggatgctcccc

SEQ ID NO: 401141 - DNA, 30 bp, Artificial Sequence
  Synthetic oligonucleotide
tttgatgaaaattggtaattttatctcccc

SEQ ID NO: 401142 - DNA, 30 bp, Artificial Sequence
  Synthetic oligonucleotide
ccagtcaggccggctggacttcaagtcccc

SEQ ID NO: 401143 - DNA, 30 bp, Artificial Sequence
  Synthetic oligonucleotide
tagatgggccgggaaggcaggagagtcccc

SEQ ID NO: 401144 - DNA, 30 bp, Artificial Sequence
  Synthetic oligonucleotide
cttgacggacacagtcaaaagtcggtcccc

SEQ ID NO: 401145 - DNA, 30 bp, Artificial Sequence
  Synthetic oligonucleotide
ggcattcctacgaaggaaaatcatgtcccc

SEQ ID NO: 401146 - DNA, 30 bp, Artificial Sequence
  Synthetic oligonucleotide
aggacctattgtctatgaactcaattcccc

SEQ ID NO: 401147 - DNA, 30 bp, Artificial Sequence
  Synthetic oligonucleotide
gatatcctataaggagtacggttattcccc

SEQ ID NO: 401148 - DNA, 30 bp, Artificial Sequence
  Synthetic oligonucleotide
ttttagcgaatccttcaagctcacttcccc

SEQ ID NO: 401149 - DNA, 30 bp, Artificial Sequence
  Synthetic oligonucleotide
acccggtgcttattaccgaacgcgttcccc

SEQ ID NO: 401150 - DNA, 30 bp, Artificial Sequence
  Synthetic oligonucleotide
atatatacctgtatgctctccgatttcccc

SEQ ID NO: 401151 - DNA, 30 bp, Artificial Sequence
  Synthetic oligonucleotide
cccgtctgttcgctccgacctgaaaagccc

SEQ ID NO: 401152 - DNA, 30 bp, Artificial Sequence
  Synthetic oligonucleotide
gtgcggctgactgtcctggagggaaagccc

SEQ ID NO: 401153 - DNA, 30 bp, Artificial Sequence
  Synthetic oligonucleotide
tatacagcaaacgtcagcatcataaagccc

SEQ ID NO: 401154 - DNA, 30 bp, Artificial Sequence
  Synthetic oligonucleotide
gttaggctgtgggattagtatataaagccc

SEQ ID NO: 401155 - DNA, 30 bp, Artificial Sequence
  Synthetic oligonucleotide
gacaggatatgtcgatcggatgacaagccc

SEQ ID NO: 401156 - DNA, 30 bp, Artificial Sequence
  Synthetic oligonucleotide
tatgagtgcttacgccggagcgagaagccc

SEQ ID NO: 401157 - DNA, 30 bp, Artificial Sequence
  Synthetic oligonucleotide
aagaagctatcacaagtagtgtaacagccc

SEQ ID NO: 401158 - DNA, 30 bp, Artificial Sequence
  Synthetic oligonucleotide
ggagtgcggggtttctcttgaggacagccc

SEQ ID NO: 401159 - DNA, 30 bp, Artificial Sequence
  Synthetic oligonucleotide
tctggtcacccgagtggttgggaccagccc

SEQ ID NO: 401160 - DNA, 30 bp, Artificial Sequence
  Synthetic oligonucleotide
ggcggatctctggggccgtagcagcagccc

SEQ ID NO: 401161 - DNA, 30 bp, Artificial Sequence
  Synthetic oligonucleotide
aaactcttcgaggtgcaaatgcggcagccc

SEQ ID NO: 401162 - DNA, 30 bp, Artificial Sequence
  Synthetic oligonucleotide
ctaacagttcaccctgtaaagcgtcagccc

SEQ ID NO: 401163 - DNA, 30 bp, Artificial Sequence
  Synthetic oligonucleotide
ccatctgctctcttagcagaatcagagccc

SEQ ID NO: 401164 - DNA, 30 bp, Artificial Sequence
  Synthetic oligonucleotide
ttagccctttaccaggtcatctgagagccc

SEQ ID NO: 401165 - DNA, 30 bp, Artificial Sequence
  Synthetic oligonucleotide
cggcatccgggccgtgtcttattagagccc

SEQ ID NO: 401166 - DNA, 30 bp, Artificial Sequence
  Synthetic oligonucleotide
tgttgtgatactcgcaggggtaccgagccc

SEQ ID NO: 401167 - DNA, 30 bp, Artificial Sequence
  Synthetic oligonucleotide
cagaatccacttcggcgcgacagcgagccc

SEQ ID NO: 401168 - DNA, 30 bp, Artificial Sequence
  Synthetic oligonucleotide
tcgcgtgcctcatgaatggtaaaatagccc

SEQ ID NO: 401169 - DNA, 30 bp, Artificial Sequence
  Synthetic oligonucleotide
acggtcccgtacgctcacgttaaatagccc

SEQ ID NO: 401170 - DNA, 30 bp, Artificial Sequence
  Synthetic oligonucleotide
ggtcgatcacccgccacctaataatagccc

SEQ ID NO: 401171 - DNA, 30 bp, Artificial Sequence
  Synthetic oligonucleotide
cattgggttcagtggtttacaatatagccc

SEQ ID NO: 401172 - DNA, 30 bp, Artificial Sequence
  Synthetic oligonucleotide
gtcttacaggaggggaagctattatagccc

SEQ ID NO: 401173 - DNA, 30 bp, Artificial Sequence
  Synthetic oligonucleotide
accctgatacgttacggcttcgcgtagccc

SEQ ID NO: 401174 - DNA, 30 bp, Artificial Sequence
  Synthetic oligonucleotide
actgtagttatattaagcaaatggtagccc

SEQ ID NO: 401175 - DNA, 30 bp, Artificial Sequence
  Synthetic oligonucleotide
tactgggtcatacttccaggaatttagccc

SEQ ID NO: 401176 - DNA, 30 bp, Artificial Sequence
  Synthetic oligonucleotide
tctggggagcacaaaaggttttgaacgccc

SEQ ID NO: 401177 - DNA, 30 bp, Artificial Sequence
  Synthetic oligonucleotide
tgagttattcacgggagcaatggcacgccc

SEQ ID NO: 401178 - DNA, 30 bp, Artificial Sequence
  Synthetic oligonucleotide
ttcgtattgcgcttctctctagatacgccc

SEQ ID NO: 401179 - DNA, 30 bp, Artificial Sequence
  Synthetic oligonucleotide
gaggattgattgacgttggctctaccgccc

SEQ ID NO: 401180 - DNA, 30 bp, Artificial Sequence
  Synthetic oligonucleotide
atcgttcgcgaggtaagtcgggtaccgccc

SEQ ID NO: 401181 - DNA, 30 bp, Artificial Sequence
  Synthetic oligonucleotide
gtgacgtggcgtgtagggttatttccgccc

SEQ ID NO: 401182 - DNA, 30 bp, Artificial Sequence
  Synthetic oligonucleotide
gtatagggctacgctagtaaataagcgccc

SEQ ID NO: 401183 - DNA, 30 bp, Artificial Sequence
  Synthetic oligonucleotide
ataccttaacggaaactgcgcagagcgccc

SEQ ID NO: 401184 - DNA, 30 bp, Artificial Sequence
  Synthetic oligonucleotide
tgatcgacgccagatagctcatgtgcgccc

SEQ ID NO: 401185 - DNA, 30 bp, Artificial Sequence
  Synthetic oligonucleotide
gctctaccctcggtaataggcggttcgccc

SEQ ID NO: 401186 - DNA, 30 bp, Artificial Sequence
  Synthetic oligonucleotide
acctggctttgacagtctatttcaaggccc

SEQ ID NO: 401187 - DNA, 30 bp, Artificial Sequence
  Synthetic oligonucleotide
cacgggcccctaacgttcatgtataggccc

SEQ ID NO: 401188 - DNA, 30 bp, Artificial Sequence
  Synthetic oligonucleotide
ggcgtaccttgaagcggcggaccacggccc

SEQ ID NO: 401189 - DNA, 30 bp, Artificial Sequence
  Synthetic oligonucleotide
atgtttctgcacctagttttctcacggccc

SEQ ID NO: 401190 - DNA, 30 bp, Artificial Sequence
  Synthetic oligonucleotide
acgctacccagatcggacaggcgacggccc

SEQ ID NO: 401191 - DNA, 30 bp, Artificial Sequence
  Synthetic oligonucleotide
tttgaaggcggaggatatttcagccggccc

SEQ ID NO: 401192 - DNA, 30 bp, Artificial Sequence
  Synthetic oligonucleotide
agtcacccgcatatgtacttgaggcggccc

SEQ ID NO: 401193 - DNA, 30 bp, Artificial Sequence
  Synthetic oligonucleotide
ggtctgcggagtgagaataggtcagggccc

SEQ ID NO: 401194 - DNA, 30 bp, Artificial Sequence
  Synthetic oligonucleotide
attataccgacgatctgccattgagggccc

SEQ ID NO: 401195 - DNA, 30 bp, Artificial Sequence
  Synthetic oligonucleotide
cacatttgctatgtgataacaaacgggccc

SEQ ID NO: 401196 - DNA, 30 bp, Artificial Sequence
  Synthetic oligonucleotide
cgggttacgccctctgtgtcgtgcgggccc

SEQ ID NO: 401197 - DNA, 30 bp, Artificial Sequence
  Synthetic oligonucleotide
gttttctcgtccgctgtgagataggggccc

SEQ ID NO: 401198 - DNA, 30 bp, Artificial Sequence
  Synthetic oligonucleotide
taatgtcggcgggggcctgctcttgggccc

SEQ ID NO: 401199 - DNA, 30 bp, Artificial Sequence
  Synthetic oligonucleotide
gggtagtggcctccgataacgaaatggccc

SEQ ID NO: 401200 - DNA, 30 bp, Artificial Sequence
  Synthetic oligonucleotide
gtcaccgctgcccgcgatacgtggtggccc

SEQ ID NO: 401201 - DNA, 30 bp, Artificial Sequence
  Synthetic oligonucleotide
ccaagcaacccgcggcgcccatgttggccc

SEQ ID NO: 401202 - DNA, 30 bp, Artificial Sequence
  Synthetic oligonucleotide
tggacatttccagctaactactacatgccc

SEQ ID NO: 401203 - DNA, 30 bp, Artificial Sequence
  Synthetic oligonucleotide
taatggttacgcgatatgggtggtatgccc

SEQ ID NO: 401204 - DNA, 30 bp, Artificial Sequence
  Synthetic oligonucleotide
aggtgatcgggcatcatctcaattatgccc

SEQ ID NO: 401205 - DNA, 30 bp, Artificial Sequence
  Synthetic oligonucleotide
gtgagtctgggtttcccgcgggaactgccc

SEQ ID NO: 401206 - DNA, 30 bp, Artificial Sequence
  Synthetic oligonucleotide
cttgaacggtcgaagcggatatacctgccc

SEQ ID NO: 401207 - DNA, 30 bp, Artificial Sequence
  Synthetic oligonucleotide
ccgggttcaatgcgtcgcgcgtgcctgccc

SEQ ID NO: 401208 - DNA, 30 bp, Artificial Sequence
  Synthetic oligonucleotide
gtacatgttgtgcgacgggatccgctgccc

SEQ ID NO: 401209 - DNA, 30 bp, Artificial Sequence
  Synthetic oligonucleotide
aacggagcaacggagaaattccctctgccc

SEQ ID NO: 401210 - DNA, 30 bp, Artificial Sequence
  Synthetic oligonucleotide
tcacctgatcgtagtcgatagcacgtgccc

SEQ ID NO: 401211 - DNA, 30 bp, Artificial Sequence
  Synthetic oligonucleotide
ctctgggatggagtacttgtccgggtgccc

SEQ ID NO: 401212 - DNA, 30 bp, Artificial Sequence
  Synthetic oligonucleotide
gtttttctttgattggggaggggggtgccc

SEQ ID NO: 401213 - DNA, 30 bp, Artificial Sequence
  Synthetic oligonucleotide
gctcattcattgataccatgggctgtgccc

SEQ ID NO: 401214 - DNA, 30 bp, Artificial Sequence
  Synthetic oligonucleotide
cacttcctctatgagtgaaccgttgtgccc

SEQ ID NO: 401215 - DNA, 30 bp, Artificial Sequence
  Synthetic oligonucleotide
atctatttcagtctcttattgcgtttgccc

SEQ ID NO: 401216 - DNA, 30 bp, Artificial Sequence
  Synthetic oligonucleotide
acggaagagattctgtttgactgtttgccc

SEQ ID NO: 401217 - DNA, 30 bp, Artificial Sequence
  Synthetic oligonucleotide
ttagcggcgcctaggaatgtacttttgccc

SEQ ID NO: 401218 - DNA, 30 bp, Artificial Sequence
  Synthetic oligonucleotide
caggatctgaaggggcatcttccaaatccc

SEQ ID NO: 401219 - DNA, 30 bp, Artificial Sequence
  Synthetic oligonucleotide
aagtaagggatttagtggggctacaatccc

SEQ ID NO: 401220 - DNA, 30 bp, Artificial Sequence
  Synthetic oligonucleotide
ggtcacgatttgcagcgaggatccaatccc

SEQ ID NO: 401221 - DNA, 30 bp, Artificial Sequence
  Synthetic oligonucleotide
cccggctctggtgctctagtggtcaatccc

SEQ ID NO: 401222 - DNA, 30 bp, Artificial Sequence
  Synthetic oligonucleotide
catacaaaacctaacagggattcgaatccc

SEQ ID NO: 401223 - DNA, 30 bp, Artificial Sequence
  Synthetic oligonucleotide
ttggattattgtgggaaagggtggaatccc

SEQ ID NO: 401224 - DNA, 30 bp, Artificial Sequence
  Synthetic oligonucleotide
tgtcgtattgtctagacatattaacatccc

SEQ ID NO: 401225 - DNA, 30 bp, Artificial Sequence
  Synthetic oligonucleotide
gacgttccgatatgcttcgttgcacatccc

SEQ ID NO: 401226 - DNA, 30 bp, Artificial Sequence
  Synthetic oligonucleotide
atcccattgggggtgttagctagacatccc

SEQ ID NO: 401227 - DNA, 30 bp, Artificial Sequence
  Synthetic oligonucleotide
gtgtggaacccgcacatgttgagccatccc

SEQ ID NO: 401228 - DNA, 30 bp, Artificial Sequence
  Synthetic oligonucleotide
cttgaacccaatactcggttaggccatccc

SEQ ID NO: 401229 - DNA, 30 bp, Artificial Sequence
  Synthetic oligonucleotide
tctaccaaagataccatacacggccatccc

SEQ ID NO: 401230 - DNA, 30 bp, Artificial Sequence
  Synthetic oligonucleotide
ggacgagaccacttggcggggatccatccc

SEQ ID NO: 401231 - DNA, 30 bp, Artificial Sequence
  Synthetic oligonucleotide
ctgaacttgaaaaggtgtgtgtcgcatccc

SEQ ID NO: 401232 - DNA, 30 bp, Artificial Sequence
  Synthetic oligonucleotide
ttatattagcgtgagtaggtatcagatccc

SEQ ID NO: 401233 - DNA, 30 bp, Artificial Sequence
  Synthetic oligonucleotide
gatggaaggcagcccgctgatccggatccc

SEQ ID NO: 401234 - DNA, 30 bp, Artificial Sequence
  Synthetic oligonucleotide
ctgatatttctccgtgaccggtcggatccc

SEQ ID NO: 401235 - DNA, 30 bp, Artificial Sequence
  Synthetic oligonucleotide
ggacgttgtctaagctccctatgggatccc

SEQ ID NO: 401236 - DNA, 30 bp, Artificial Sequence
  Synthetic oligonucleotide
tgagggcgctataagcttatagttgatccc

SEQ ID NO: 401237 - DNA, 30 bp, Artificial Sequence
  Synthetic oligonucleotide
acattgattcacacccaggcgaaatatccc

SEQ ID NO: 401238 - DNA, 30 bp, Artificial Sequence
  Synthetic oligonucleotide
tctcgtttggttaagctccatagatatccc

SEQ ID NO: 401239 - DNA, 30 bp, Artificial Sequence
  Synthetic oligonucleotide
actccgaatttgcattcgccccactatccc

SEQ ID NO: 401240 - DNA, 30 bp, Artificial Sequence
  Synthetic oligonucleotide
cgctcgcaaccacttccgcacccgtatccc

SEQ ID NO: 401241 - DNA, 30 bp, Artificial Sequence
  Synthetic oligonucleotide
ccagatgatgtaataatgatgatgtatccc

SEQ ID NO: 401242 - DNA, 30 bp, Artificial Sequence
  Synthetic oligonucleotide
cagacgctttactcgtatgaggtgtatccc

SEQ ID NO: 401243 - DNA, 30 bp, Artificial Sequence
  Synthetic oligonucleotide
tggggtctgaggtcgccggttttttatccc

SEQ ID NO: 401244 - DNA, 30 bp, Artificial Sequence
  Synthetic oligonucleotide
tgataacccttatttggtcgttagactccc

SEQ ID NO: 401245 - DNA, 30 bp, Artificial Sequence
  Synthetic oligonucleotide
agtctgctcaggtaaaggtagcgtactccc

SEQ ID NO: 401246 - DNA, 30 bp, Artificial Sequence
  Synthetic oligonucleotide
tgagtaaactttcgaggcatgtagcctccc

SEQ ID NO: 401247 - DNA, 30 bp, Artificial Sequence
  Synthetic oligonucleotide
aaaagtttcgggctccgggggcaagctccc

SEQ ID NO: 401248 - DNA, 30 bp, Artificial Sequence
  Synthetic oligonucleotide
gctagcgcatccctcgcttagagagctccc

SEQ ID NO: 401249 - DNA, 30 bp, Artificial Sequence
  Synthetic oligonucleotide
tgtgtttggtcagaccagactatggctccc

SEQ ID NO: 401250 - DNA, 30 bp, Artificial Sequence
  Synthetic oligonucleotide
caaaaaagcagggtcagcttgacttctccc

SEQ ID NO: 401251 - DNA, 30 bp, Artificial Sequence
  Synthetic oligonucleotide
gagcggcttgggggtaactggggttctccc

SEQ ID NO: 401252 - DNA, 30 bp, Artificial Sequence
  Synthetic oligonucleotide
gagttcctctcgatgtgctaccaaagtccc

SEQ ID NO: 401253 - DNA, 30 bp, Artificial Sequence
  Synthetic oligonucleotide
gagacccttgggttgtactgagaaagtccc

SEQ ID NO: 401254 - DNA, 30 bp, Artificial Sequence
  Synthetic oligonucleotide
acttacactatgatatcaggggcgagtccc

SEQ ID NO: 401255 - DNA, 30 bp, Artificial Sequence
  Synthetic oligonucleotide
accggtccgtgccctaagggtcctagtccc

SEQ ID NO: 401256 - DNA, 30 bp, Artificial Sequence
  Synthetic oligonucleotide
ttgtgttaagctatgctcatacgtagtccc

SEQ ID NO: 401257 - DNA, 30 bp, Artificial Sequence
  Synthetic oligonucleotide
caatcacgtcttcgatcggcctttagtccc

SEQ ID NO: 401258 - DNA, 30 bp, Artificial Sequence
  Synthetic oligonucleotide
agagggaactgcctgtcaatcacccgtccc

SEQ ID NO: 401259 - DNA, 30 bp, Artificial Sequence
  Synthetic oligonucleotide
tttcagcgcaagaagccaccgcggcgtccc

SEQ ID NO: 401260 - DNA, 30 bp, Artificial Sequence
  Synthetic oligonucleotide
ccattggtcgtgaaaccacctcctcgtccc

SEQ ID NO: 401261 - DNA, 30 bp, Artificial Sequence
  Synthetic oligonucleotide
tttggttaagaggcttagacgcgcggtccc

SEQ ID NO: 401262 - DNA, 30 bp, Artificial Sequence
  Synthetic oligonucleotide
tcgctaggtttaattaaatctggcggtccc

SEQ ID NO: 401263 - DNA, 30 bp, Artificial Sequence
  Synthetic oligonucleotide
tgatagctatacccataaccctggggtccc

SEQ ID NO: 401264 - DNA, 30 bp, Artificial Sequence
  Synthetic oligonucleotide
cttagtcaggggcgtgcttgtggtggtccc

SEQ ID NO: 401265 - DNA, 30 bp, Artificial Sequence
  Synthetic oligonucleotide
acacagcacgccaaacatagcattggtccc

SEQ ID NO: 401266 - DNA, 30 bp, Artificial Sequence
  Synthetic oligonucleotide
agaaatggtcattttggaacgtcatgtccc

SEQ ID NO: 401267 - DNA, 30 bp, Artificial Sequence
  Synthetic oligonucleotide
ataggttgttagtagatgatagtatgtccc

SEQ ID NO: 401268 - DNA, 30 bp, Artificial Sequence
  Synthetic oligonucleotide
gcaggagctgaggtcgagttaccctgtccc

SEQ ID NO: 401269 - DNA, 30 bp, Artificial Sequence
  Synthetic oligonucleotide
cttgcttgggtaggtggttataggtgtccc

SEQ ID NO: 401270 - DNA, 30 bp, Artificial Sequence
  Synthetic oligonucleotide
gtctgcacattatttttcaatgcaattccc

SEQ ID NO: 401271 - DNA, 30 bp, Artificial Sequence
  Synthetic oligonucleotide
gttaggcgactatcaaatgagaccattccc

SEQ ID NO: 401272 - DNA, 30 bp, Artificial Sequence
  Synthetic oligonucleotide
cacgatgccgcaggcgcttctcatattccc

SEQ ID NO: 401273 - DNA, 30 bp, Artificial Sequence
  Synthetic oligonucleotide
taagtgctatccgttgactagagccttccc

SEQ ID NO: 401274 - DNA, 30 bp, Artificial Sequence
  Synthetic oligonucleotide
gcgcattctattgggaggatgatccttccc

SEQ ID NO: 401275 - DNA, 30 bp, Artificial Sequence
  Synthetic oligonucleotide
tctgcagcgtcagggagaccagtccttccc

SEQ ID NO: 401276 - DNA, 30 bp, Artificial Sequence
  Synthetic oligonucleotide
gcacctgtatctaggcggtccttccttccc

SEQ ID NO: 401277 - DNA, 30 bp, Artificial Sequence
  Synthetic oligonucleotide
cttaggaggacaccgtcctcaagtcttccc

SEQ ID NO: 401278 - DNA, 30 bp, Artificial Sequence
  Synthetic oligonucleotide
cacgttagtattggtgtggacgaagttccc

SEQ ID NO: 401279 - DNA, 30 bp, Artificial Sequence
  Synthetic oligonucleotide
gtatagttaaagtggcactcctcagttccc

SEQ ID NO: 401280 - DNA, 30 bp, Artificial Sequence
  Synthetic oligonucleotide
tagtattgtgagtcccgcggtcacgttccc

SEQ ID NO: 401281 - DNA, 30 bp, Artificial Sequence
  Synthetic oligonucleotide
ggccgtgggaccgggctattctgcgttccc

SEQ ID NO: 401282 - DNA, 30 bp, Artificial Sequence
  Synthetic oligonucleotide
gaggaatgccttaaaggaagcattgttccc

SEQ ID NO: 401283 - DNA, 30 bp, Artificial Sequence
  Synthetic oligonucleotide
gtcttaagtcaggcgtagtgcaaatttccc

SEQ ID NO: 401284 - DNA, 30 bp, Artificial Sequence
  Synthetic oligonucleotide
tcgcttagctctcctccggagctatttccc

SEQ ID NO: 401285 - DNA, 30 bp, Artificial Sequence
  Synthetic oligonucleotide
tctgttaggctaaaccttcttacctttccc

SEQ ID NO: 401286 - DNA, 30 bp, Artificial Sequence
  Synthetic oligonucleotide
tggggccgcattgttgcccgagagtttccc

SEQ ID NO: 401287 - DNA, 30 bp, Artificial Sequence
  Synthetic oligonucleotide
tgtctatgtcgggagaataaaatttttccc

SEQ ID NO: 401288 - DNA, 30 bp, Artificial Sequence
  Synthetic oligonucleotide
cctcttccggtcagttcgatcatttttccc

SEQ ID NO: 401289 - DNA, 30 bp, Artificial Sequence
  Synthetic oligonucleotide
accttatcgatgagtaactgatcaaaagcc

SEQ ID NO: 401290 - DNA, 30 bp, Artificial Sequence
  Synthetic oligonucleotide
tcgattttggttcaggaagagctaaaagcc

SEQ ID NO: 401291 - DNA, 30 bp, Artificial Sequence
  Synthetic oligonucleotide
atgtcggtgtcagggtagctcgtaaaagcc

SEQ ID NO: 401292 - DNA, 30 bp, Artificial Sequence
  Synthetic oligonucleotide
aggccagatttatggtctgtattaaaagcc

SEQ ID NO: 401293 - DNA, 30 bp, Artificial Sequence
  Synthetic oligonucleotide
ttccggactgaatgaaattgctccaaagcc

SEQ ID NO: 401294 - DNA, 30 bp, Artificial Sequence
  Synthetic oligonucleotide
cggacctttaatgggctttagagcaaagcc

SEQ ID NO: 401295 - DNA, 30 bp, Artificial Sequence
  Synthetic oligonucleotide
gcggcacttcgatcaggccgtggcaaagcc

SEQ ID NO: 401296 - DNA, 30 bp, Artificial Sequence
  Synthetic oligonucleotide
gttgatgtaatggctcaggggcagaaagcc

SEQ ID NO: 401297 - DNA, 30 bp, Artificial Sequence
  Synthetic oligonucleotide
agcctttacggtcagtcataacggaaagcc

SEQ ID NO: 401298 - DNA, 30 bp, Artificial Sequence
  Synthetic oligonucleotide
ttagcccccaggtatgttttggaccaagcc

SEQ ID NO: 401299 - DNA, 30 bp, Artificial Sequence
  Synthetic oligonucleotide
gtgcttcagggttgaaatcctcagcaagcc

SEQ ID NO: 401300 - DNA, 30 bp, Artificial Sequence
  Synthetic oligonucleotide
agtttaatgattgatcgttacgtgcaagcc

SEQ ID NO: 401301 - DNA, 31 bp, Artificial Sequence
  Synthetic oligonucleotide
accccgtaacgaggctcctgcgactcaagcc

SEQ ID NO: 401302 - DNA, 30 bp, Artificial Sequence
  Synthetic oligonucleotide
gcaaattcgtattacagagtcattcaagcc

SEQ ID NO: 401303 - DNA, 30 bp, Artificial Sequence
  Synthetic oligonucleotide
gctattttcggagctaggggacaagaagcc

SEQ ID NO: 401304 - DNA, 30 bp, Artificial Sequence
  Synthetic oligonucleotide
gacgtcgtagcgtgggatctttgcgaagcc

SEQ ID NO: 401305 - DNA, 30 bp, Artificial Sequence
  Synthetic oligonucleotide
gaactcgatattacaggcgattaggaagcc

SEQ ID NO: 401306 - DNA, 30 bp, Artificial Sequence
  Synthetic oligonucleotide
ttgactactgaggaccaggcgcatgaagcc

SEQ ID NO: 401307 - DNA, 28 bp, Artificial Sequence
  Synthetic oligonucleotide
acacttaccgcgctagtacggtgaagcc

SEQ ID NO: 401308 - DNA, 30 bp, Artificial Sequence
  Synthetic oligonucleotide
gcggcttttaacaagtcgcacagataagcc

SEQ ID NO: 401309 - DNA, 30 bp, Artificial Sequence
  Synthetic oligonucleotide
cgctttcacgcacgtattgaggactaagcc

SEQ ID NO: 401310 - DNA, 30 bp, Artificial Sequence
  Synthetic oligonucleotide
aatcaaaacaactctgtcaaaagctaagcc

SEQ ID NO: 401311 - DNA, 30 bp, Artificial Sequence
  Synthetic oligonucleotide
cttcccttggggcatctcgggtcgtaagcc

SEQ ID NO: 401312 - DNA, 30 bp, Artificial Sequence
  Synthetic oligonucleotide
taaaagagtcagtgagataacaggtaagcc

SEQ ID NO: 401313 - DNA, 30 bp, Artificial Sequence
  Synthetic oligonucleotide
atatagtttagagcctgtggctattaagcc

SEQ ID NO: 401314 - DNA, 30 bp, Artificial Sequence
  Synthetic oligonucleotide
gcggtgagatcacggttgtgatcaacagcc

SEQ ID NO: 401315 - DNA, 30 bp, Artificial Sequence
  Synthetic oligonucleotide
tgaaaggttacccgttatgactggacagcc

SEQ ID NO: 401316 - DNA, 30 bp, Artificial Sequence
  Synthetic oligonucleotide
gggctttttgtccgctgtaatgatacagcc

SEQ ID NO: 401317 - DNA, 30 bp, Artificial Sequence
  Synthetic oligonucleotide
gtggttgaagcaggaatgacgactacagcc

SEQ ID NO: 401318 - DNA, 30 bp, Artificial Sequence
  Synthetic oligonucleotide
tatctcggatcacgagcctggaacccagcc

SEQ ID NO: 401319 - DNA, 30 bp, Artificial Sequence
  Synthetic oligonucleotide
aaatgccgacatatattctcccccccagcc

SEQ ID NO: 401320 - DNA, 30 bp, Artificial Sequence
  Synthetic oligonucleotide
aatctatgaagggtcgcagagatgccagcc

SEQ ID NO: 401321 - DNA, 30 bp, Artificial Sequence
  Synthetic oligonucleotide
taaactctactctgtgatgatgctccagcc

SEQ ID NO: 401322 - DNA, 30 bp, Artificial Sequence
  Synthetic oligonucleotide
aaagttgtaaacaaagcacactcagcagcc

SEQ ID NO: 401323 - DNA, 30 bp, Artificial Sequence
  Synthetic oligonucleotide
cgcggcatagagaaatacttgttagcagcc

SEQ ID NO: 401324 - DNA, 30 bp, Artificial Sequence
  Synthetic oligonucleotide
gatgtggtacctcggcgagagcaggcagcc

SEQ ID NO: 401325 - DNA, 30 bp, Artificial Sequence
  Synthetic oligonucleotide
tatagtgagttatctaatgatactgcagcc

SEQ ID NO: 401326 - DNA, 30 bp, Artificial Sequence
  Synthetic oligonucleotide
cctgcaaaccagctacggccactgtcagcc

SEQ ID NO: 401327 - DNA, 30 bp, Artificial Sequence
  Synthetic oligonucleotide
gggagggtatacacgtgtcgtcgttcagcc

SEQ ID NO: 401328 - DNA, 30 bp, Artificial Sequence
  Synthetic oligonucleotide
tggcatttaaagaagcccgattcaagagcc

SEQ ID NO: 401329 - DNA, 30 bp, Artificial Sequence
  Synthetic oligonucleotide
aaatgctttcttctctagatcctaagagcc

SEQ ID NO: 401330 - DNA, 30 bp, Artificial Sequence
  Synthetic oligonucleotide
gacgcaaagatagttacgttcccgagagcc

SEQ ID NO: 401331 - DNA, 30 bp, Artificial Sequence
  Synthetic oligonucleotide
attgttacgagaagcaccaacaggagagcc

SEQ ID NO: 401332 - DNA, 30 bp, Artificial Sequence
  Synthetic oligonucleotide
ttaaggtcggttcgtggaccgttgagagcc

SEQ ID NO: 401333 - DNA, 29 bp, Artificial Sequence
  Synthetic oligonucleotide
tcgcctttgggctgatgtagggccgagcc

SEQ ID NO: 401334 - DNA, 30 bp, Artificial Sequence
  Synthetic oligonucleotide
cccggcattttgtatgctgtgatccgagcc

SEQ ID NO: 401335 - DNA, 30 bp, Artificial Sequence
  Synthetic oligonucleotide
ataggtccggatagtagttctcatcgagcc

SEQ ID NO: 401336 - DNA, 30 bp, Artificial Sequence
  Synthetic oligonucleotide
gcgatttgtgggttagtcagttacggagcc

SEQ ID NO: 401337 - DNA, 30 bp, Artificial Sequence
  Synthetic oligonucleotide
ggcgtgtcatccaagtccggccccggagcc

SEQ ID NO: 401338 - DNA, 30 bp, Artificial Sequence
  Synthetic oligonucleotide
taagtcctagctactttgtgtggcggagcc

SEQ ID NO: 401339 - DNA, 30 bp, Artificial Sequence
  Synthetic oligonucleotide
gagcgccaaacgcggttctttaagggagcc

SEQ ID NO: 401340 - DNA, 30 bp, Artificial Sequence
  Synthetic oligonucleotide
cgcacatggcagcctcaggtgcggggagcc

SEQ ID NO: 401341 - DNA, 30 bp, Artificial Sequence
  Synthetic oligonucleotide
ccgttggggttctgctacataaaatgagcc

SEQ ID NO: 401342 - DNA, 30 bp, Artificial Sequence
  Synthetic oligonucleotide
tgaacagtgtccggttgatgggtctgagcc

SEQ ID NO: 401343 - DNA, 30 bp, Artificial Sequence
  Synthetic oligonucleotide
ttattatgaataccgctcaatttctgagcc

SEQ ID NO: 401344 - DNA, 30 bp, Artificial Sequence
  Synthetic oligonucleotide
cctaataaatttcaatggcggacttgagcc

SEQ ID NO: 401345 - DNA, 30 bp, Artificial Sequence
  Synthetic oligonucleotide
tggaaaatgtgggtcctaaagctttgagcc

SEQ ID NO: 401346 - DNA, 30 bp, Artificial Sequence
  Synthetic oligonucleotide
ccaggaagcgacatgcgttggggaatagcc

SEQ ID NO: 401347 - DNA, 30 bp, Artificial Sequence
  Synthetic oligonucleotide
tgcgggagtactagcttttcgtgaatagcc

SEQ ID NO: 401348 - DNA, 30 bp, Artificial Sequence
  Synthetic oligonucleotide
tgatttccaccgtgagcgcaatttatagcc

SEQ ID NO: 401349 - DNA, 30 bp, Artificial Sequence
  Synthetic oligonucleotide
tcaacacccgtttgttagtggacactagcc

SEQ ID NO: 401350 - DNA, 30 bp, Artificial Sequence
  Synthetic oligonucleotide
ttgagacattcgtggcaacaggccctagcc

SEQ ID NO: 401351 - DNA, 30 bp, Artificial Sequence
  Synthetic oligonucleotide
cgggcatagagcctattatggttgctagcc

SEQ ID NO: 401352 - DNA, 30 bp, Artificial Sequence
  Synthetic oligonucleotide
cggggtggggtcgccaggcggagtctagcc

SEQ ID NO: 401353 - DNA, 30 bp, Artificial Sequence
  Synthetic oligonucleotide
tccagtagtgccgtagcatgcacagtagcc

SEQ ID NO: 401354 - DNA, 30 bp, Artificial Sequence
  Synthetic oligonucleotide
cagcaacacacttctcaggggtcagtagcc

SEQ ID NO: 401355 - DNA, 30 bp, Artificial Sequence
  Synthetic oligonucleotide
tcatacggcgctccgggatccgatgtagcc

SEQ ID NO: 401356 - DNA, 30 bp, Artificial Sequence
  Synthetic oligonucleotide
tacacactgaccaggcaaacttatgtagcc

SEQ ID NO: 401357 - DNA, 30 bp, Artificial Sequence
  Synthetic oligonucleotide
tacagacaaacgttctaagcccttgtagcc

SEQ ID NO: 401358 - DNA, 30 bp, Artificial Sequence
  Synthetic oligonucleotide
gtcggctgacttgttcaagtcggattagcc

SEQ ID NO: 401359 - DNA, 30 bp, Artificial Sequence
  Synthetic oligonucleotide
gctgtactgaaagcaaacagggtcttagcc

SEQ ID NO: 401360 - DNA, 30 bp, Artificial Sequence
  Synthetic oligonucleotide
gagcgcgacaggaggattgctcggttagcc

SEQ ID NO: 401361 - DNA, 30 bp, Artificial Sequence
  Synthetic oligonucleotide
ctatgcacgtgtgtgacgcataatttagcc

SEQ ID NO: 401362 - DNA, 30 bp, Artificial Sequence
  Synthetic oligonucleotide
aggcctatcctgtgcagagcgggtttagcc

SEQ ID NO: 401363 - DNA, 30 bp, Artificial Sequence
  Synthetic oligonucleotide
agaaaagtctggcttggattatgtttagcc

SEQ ID NO: 401364 - DNA, 30 bp, Artificial Sequence
  Synthetic oligonucleotide
tctttacggacaaatcgtcttgttttagcc

SEQ ID NO: 401365 - DNA, 30 bp, Artificial Sequence
  Synthetic oligonucleotide
ggctccaatctgagcgccttaggaaacgcc

SEQ ID NO: 401366 - DNA, 30 bp, Artificial Sequence
  Synthetic oligonucleotide
tagcgcccactcacctagtggcagaacgcc

SEQ ID NO: 401367 - DNA, 30 bp, Artificial Sequence
  Synthetic oligonucleotide
aaaagattggcgttgggcgcgatacacgcc

SEQ ID NO: 401368 - DNA, 30 bp, Artificial Sequence
  Synthetic oligonucleotide
catcgttttgattcaaacttccaccacgcc

SEQ ID NO: 401369 - DNA, 30 bp, Artificial Sequence
  Synthetic oligonucleotide
atgtaattcaatttagagtgttcccacgcc

SEQ ID NO: 401370 - DNA, 30 bp, Artificial Sequence
  Synthetic oligonucleotide
acgttgcgtcaggcactttgactccacgcc

SEQ ID NO: 401371 - DNA, 30 bp, Artificial Sequence
  Synthetic oligonucleotide
ctacagcatggattgataacccggcacgcc

SEQ ID NO: 401372 - DNA, 30 bp, Artificial Sequence
  Synthetic oligonucleotide
accaagccggggctacgtccaacagacgcc

SEQ ID NO: 401373 - DNA, 30 bp, Artificial Sequence
  Synthetic oligonucleotide
ttaataatccaaaatgtcttatgagacgcc

SEQ ID NO: 401374 - DNA, 30 bp, Artificial Sequence
  Synthetic oligonucleotide
tatattgcccatcggacatgcgtagacgcc

SEQ ID NO: 401375 - DNA, 30 bp, Artificial Sequence
  Synthetic oligonucleotide
tgatccattgagtcacaaaatggcgacgcc

SEQ ID NO: 401376 - DNA, 30 bp, Artificial Sequence
  Synthetic oligonucleotide
acggggggttcagaggtgcagttggacgcc

SEQ ID NO: 401377 - DNA, 30 bp, Artificial Sequence
  Synthetic oligonucleotide
gagccgtgcgcattagtagcgaatgacgcc

SEQ ID NO: 401378 - DNA, 30 bp, Artificial Sequence
  Synthetic oligonucleotide
ggtaatatggcgttgctatccactgacgcc

SEQ ID NO: 401379 - DNA, 30 bp, Artificial Sequence
  Synthetic oligonucleotide
ctgcactcggactgtacccttgaatacgcc

SEQ ID NO: 401380 - DNA, 30 bp, Artificial Sequence
  Synthetic oligonucleotide
tactatgtaagataccctatgtaatacgcc

SEQ ID NO: 401381 - DNA, 30 bp, Artificial Sequence
  Synthetic oligonucleotide
gtgacttgttggatcccgtgtcgatacgcc

SEQ ID NO: 401382 - DNA, 30 bp, Artificial Sequence
  Synthetic oligonucleotide
agactacaggaagcgtaaaataagtacgcc

SEQ ID NO: 401383 - DNA, 30 bp, Artificial Sequence
  Synthetic oligonucleotide
ctagacccgtggcgggctggacacaccgcc

SEQ ID NO: 401384 - DNA, 30 bp, Artificial Sequence
  Synthetic oligonucleotide
ctctgcatacttaggaacattgacaccgcc

SEQ ID NO: 401385 - DNA, 30 bp, Artificial Sequence
  Synthetic oligonucleotide
atccgggcacgcggctcgcaggccaccgcc

SEQ ID NO: 401386 - DNA, 30 bp, Artificial Sequence
  Synthetic oligonucleotide
gcggtgccgacatgcctcccgatgaccgcc

SEQ ID NO: 401387 - DNA, 30 bp, Artificial Sequence
  Synthetic oligonucleotide
ctaaagcgacaggtggtggatgtgaccgcc

SEQ ID NO: 401388 - DNA, 30 bp, Artificial Sequence
  Synthetic oligonucleotide
tacatgtctcaactaaggtggaataccgcc

SEQ ID NO: 401389 - DNA, 30 bp, Artificial Sequence
  Synthetic oligonucleotide
gggattacttatggccgcatgcataccgcc

SEQ ID NO: 401390 - DNA, 30 bp, Artificial Sequence
  Synthetic oligonucleotide
gtctgttgccgcgttaaagatgataccgcc

SEQ ID NO: 401391 - DNA, 30 bp, Artificial Sequence
  Synthetic oligonucleotide
ccccatcaagtccgattgaatccggccgcc

SEQ ID NO: 401392 - DNA, 30 bp, Artificial Sequence
  Synthetic oligonucleotide
atacgtacgtcccatacctaaagatccgcc

SEQ ID NO: 401393 - DNA, 30 bp, Artificial Sequence
  Synthetic oligonucleotide
gggtttcgagcgttctaggatcgctccgcc

SEQ ID NO: 401394 - DNA, 30 bp, Artificial Sequence
  Synthetic oligonucleotide
catttacgctttcgtgcctagccgtccgcc

SEQ ID NO: 401395 - DNA, 30 bp, Artificial Sequence
  Synthetic oligonucleotide
cacatcgttggcctactagtctggtccgcc

SEQ ID NO: 401396 - DNA, 30 bp, Artificial Sequence
  Synthetic oligonucleotide
tggttaaagagagccgcagggccttccgcc

SEQ ID NO: 401397 - DNA, 30 bp, Artificial Sequence
  Synthetic oligonucleotide
gaagcgtagtcgtaacatacatgttccgcc

SEQ ID NO: 401398 - DNA, 30 bp, Artificial Sequence
  Synthetic oligonucleotide
ctgcacgtttatttctgcacacctagcgcc

SEQ ID NO: 401399 - DNA, 30 bp, Artificial Sequence
  Synthetic oligonucleotide
cgaatatttaattagcaaccaggtagcgcc

SEQ ID NO: 401400 - DNA, 30 bp, Artificial Sequence
  Synthetic oligonucleotide
gacttactatcaacgacaactcaacgcgcc

SEQ ID NO: 401401 - DNA, 30 bp, Artificial Sequence
  Synthetic oligonucleotide
cattgaccggagcctgttcaggaacgcgcc

SEQ ID NO: 401402 - DNA, 30 bp, Artificial Sequence
  Synthetic oligonucleotide
cgatataccgtgattggtggacaccgcgcc

SEQ ID NO: 401403 - DNA, 30 bp, Artificial Sequence
  Synthetic oligonucleotide
agaaactttctgcattttacactccgcgcc

SEQ ID NO: 401404 - DNA, 30 bp, Artificial Sequence
  Synthetic oligonucleotide
ttcagggcaaattgcgtaaaagggcgcgcc

SEQ ID NO: 401405 - DNA, 30 bp, Artificial Sequence
  Synthetic oligonucleotide
tgtatggccttattaactacctggcgcgcc

SEQ ID NO: 401406 - DNA, 30 bp, Artificial Sequence
  Synthetic oligonucleotide
tactctagtcccatctcatccctgcgcgcc

SEQ ID NO: 401407 - DNA, 30 bp, Artificial Sequence
  Synthetic oligonucleotide
ccaacttaactcttaaagcgttgtcgcgcc

SEQ ID NO: 401408 - DNA, 30 bp, Artificial Sequence
  Synthetic oligonucleotide
aaaaacacagtcggcagccgaataggcgcc

SEQ ID NO: 401409 - DNA, 30 bp, Artificial Sequence
  Synthetic oligonucleotide
gtcagcatgatcaggcgtaaagtaggcgcc

SEQ ID NO: 401410 - DNA, 30 bp, Artificial Sequence
  Synthetic oligonucleotide
aagtagttaatacgcttcttgtagggcgcc

SEQ ID NO: 401411 - DNA, 30 bp, Artificial Sequence
  Synthetic oligonucleotide
ggttatagcgtgcagcagaatccgggcgcc

SEQ ID NO: 401412 - DNA, 30 bp, Artificial Sequence
  Synthetic oligonucleotide
ggaataaggtcacgcctaaaagcgggcgcc

SEQ ID NO: 401413 - DNA, 30 bp, Artificial Sequence
  Synthetic oligonucleotide
cggtacgacgaatacgcgtagtggggcgcc

SEQ ID NO: 401414 - DNA, 30 bp, Artificial Sequence
  Synthetic oligonucleotide
atgcttatcggaacgtctggtattggcgcc

SEQ ID NO: 401415 - DNA, 30 bp, Artificial Sequence
  Synthetic oligonucleotide
atgaaaacgtggcccacccggtcatgcgcc

SEQ ID NO: 401416 - DNA, 30 bp, Artificial Sequence
  Synthetic oligonucleotide
gctataggagcattactgtaaaggtgcgcc

SEQ ID NO: 401417 - DNA, 30 bp, Artificial Sequence
  Synthetic oligonucleotide
gccattcattggaaccaccgcaaaatcgcc

SEQ ID NO: 401418 - DNA, 30 bp, Artificial Sequence
  Synthetic oligonucleotide
tcaaactaacctttgttttcggaaatcgcc

SEQ ID NO: 401419 - DNA, 30 bp, Artificial Sequence
  Synthetic oligonucleotide
tatttagaccgccttagcaagagaatcgcc

SEQ ID NO: 401420 - DNA, 30 bp, Artificial Sequence
  Synthetic oligonucleotide
ttaagtattgtaaggtctgcattcatcgcc

SEQ ID NO: 401421 - DNA, 28 bp, Artificial Sequence
  Synthetic oligonucleotide
cgagagtcaccttgctcttcttatcgcc

SEQ ID NO: 401422 - DNA, 30 bp, Artificial Sequence
  Synthetic oligonucleotide
cgaaactgcccaactgtttggtttatcgcc

SEQ ID NO: 401423 - DNA, 30 bp, Artificial Sequence
  Synthetic oligonucleotide
aaaaattagaatgaatacccatgactcgcc

SEQ ID NO: 401424 - DNA, 30 bp, Artificial Sequence
  Synthetic oligonucleotide
gagtcagaactccgcgcagcatagctcgcc

SEQ ID NO: 401425 - DNA, 30 bp, Artificial Sequence
  Synthetic oligonucleotide
gtttgtgcgttttttttgaaacacgtcgcc

SEQ ID NO: 401426 - DNA, 29 bp, Artificial Sequence
  Synthetic oligonucleotide
gtccctcatccatatgggtggacgtcgcc

SEQ ID NO: 401427 - DNA, 30 bp, Artificial Sequence
  Synthetic oligonucleotide
aggcagagacacccagattcaggcgtcgcc

SEQ ID NO: 401428 - DNA, 30 bp, Artificial Sequence
  Synthetic oligonucleotide
ttaacgagtaatactcgctaaattttcgcc

SEQ ID NO: 401429 - DNA, 30 bp, Artificial Sequence
  Synthetic oligonucleotide
gcaacgagtctgaagaatctggcaaaggcc

SEQ ID NO: 401430 - DNA, 30 bp, Artificial Sequence
  Synthetic oligonucleotide
ttaggacaatctcaaaagcgtggaaaggcc

SEQ ID NO: 401431 - DNA, 29 bp, Artificial Sequence
  Synthetic oligonucleotide
cgtgctcacagccgtggatccgcaaggcc

SEQ ID NO: 401432 - DNA, 30 bp, Artificial Sequence
  Synthetic oligonucleotide
ttggtcaaaacgccgtgcaccttcaaggcc

SEQ ID NO: 401433 - DNA, 30 bp, Artificial Sequence
  Synthetic oligonucleotide
catgaggtgccaacgccacaggataaggcc

SEQ ID NO: 401434 - DNA, 30 bp, Artificial Sequence
  Synthetic oligonucleotide
agattgggcggcgtgttccacactaaggcc

SEQ ID NO: 401435 - DNA, 30 bp, Artificial Sequence
  Synthetic oligonucleotide
cacaaggcaggcagggggacataacaggcc

SEQ ID NO: 401436 - DNA, 30 bp, Artificial Sequence
  Synthetic oligonucleotide
cagtatgacttacatcaaggcatacaggcc

SEQ ID NO: 401437 - DNA, 26 bp, Artificial Sequence
  Synthetic oligonucleotide
ccttgaacgaactagggcaagaggcc

SEQ ID NO: 401438 - DNA, 30 bp, Artificial Sequence
  Synthetic oligonucleotide
aattggttccggatattccgcatggaggcc

SEQ ID NO: 401439 - DNA, 30 bp, Artificial Sequence
  Synthetic oligonucleotide
ggagctcactcacatcggacgattgaggcc

SEQ ID NO: 401440 - DNA, 30 bp, Artificial Sequence
  Synthetic oligonucleotide
agagatgtaaatcaacctggttttgaggcc

SEQ ID NO: 401441 - DNA, 30 bp, Artificial Sequence
  Synthetic oligonucleotide
gaggcatttaactccaatcagtgctaggcc

SEQ ID NO: 401442 - DNA, 30 bp, Artificial Sequence
  Synthetic oligonucleotide
tatacagtcagctcctccccggtctaggcc

SEQ ID NO: 401443 - DNA, 30 bp, Artificial Sequence
  Synthetic oligonucleotide
aagtaaataagttaaatgcatcagtaggcc

SEQ ID NO: 401444 - DNA, 30 bp, Artificial Sequence
  Synthetic oligonucleotide
aatctttgtacgagcatgagagggtaggcc

SEQ ID NO: 401445 - DNA, 30 bp, Artificial Sequence
  Synthetic oligonucleotide
ttttggacaagatttattgaccattaggcc

SEQ ID NO: 401446 - DNA, 30 bp, Artificial Sequence
  Synthetic oligonucleotide
ggctcttgggctcggaacaccagttaggcc

SEQ ID NO: 401447 - DNA, 30 bp, Artificial Sequence
  Synthetic oligonucleotide
acatgagtttctattggaaagctcacggcc

SEQ ID NO: 401448 - DNA, 30 bp, Artificial Sequence
  Synthetic oligonucleotide
cgttgagggccgattccgggcaagacggcc

SEQ ID NO: 401449 - DNA, 30 bp, Artificial Sequence
  Synthetic oligonucleotide
atattggaggtccataaggatatgacggcc

SEQ ID NO: 401450 - DNA, 30 bp, Artificial Sequence
  Synthetic oligonucleotide
cgtaactgactacctcgccgctatacggcc

SEQ ID NO: 401451 - DNA, 30 bp, Artificial Sequence
  Synthetic oligonucleotide
atctgagggacacagcgagtgactacggcc

SEQ ID NO: 401452 - DNA, 30 bp, Artificial Sequence
  Synthetic oligonucleotide
ttgtcagatattgggccgctaagtacggcc

SEQ ID NO: 401453 - DNA, 30 bp, Artificial Sequence
  Synthetic oligonucleotide
tgtttttggaggtccttaaccggtacggcc

SEQ ID NO: 401454 - DNA, 30 bp, Artificial Sequence
  Synthetic oligonucleotide
ggtcgtccactttagaggatgggtacggcc

SEQ ID NO: 401455 - DNA, 30 bp, Artificial Sequence
  Synthetic oligonucleotide
atacgcccgggaggtttcatagtaccggcc

SEQ ID NO: 401456 - DNA, 30 bp, Artificial Sequence
  Synthetic oligonucleotide
ggccctcggtaacgacatagtgacccggcc

SEQ ID NO: 401457 - DNA, 29 bp, Artificial Sequence
  Synthetic oligonucleotide
tggggaggcggtgcgggcctccgccggcc

SEQ ID NO: 401458 - DNA, 30 bp, Artificial Sequence
  Synthetic oligonucleotide
tctcgtatcgggtggtcccgatcgccggcc

SEQ ID NO: 401459 - DNA, 30 bp, Artificial Sequence
  Synthetic oligonucleotide
cagatcacacgtggatttagttatccggcc

SEQ ID NO: 401460 - DNA, 30 bp, Artificial Sequence
  Synthetic oligonucleotide
gcaagtcctaggaaggtgttttatccggcc

SEQ ID NO: 401461 - DNA, 30 bp, Artificial Sequence
  Synthetic oligonucleotide
aggagtatgttctaatctaatactccggcc

SEQ ID NO: 401462 - DNA, 30 bp, Artificial Sequence
  Synthetic oligonucleotide
ctgaacgggaaacgggcgcggcgagcggcc

SEQ ID NO: 401463 - DNA, 30 bp, Artificial Sequence
  Synthetic oligonucleotide
agcgtctcggcggagcgccaggccgcggcc

SEQ ID NO: 401464 - DNA, 30 bp, Artificial Sequence
  Synthetic oligonucleotide
ttcgtaatctgaaatctgcatgtggcggcc

SEQ ID NO: 401465 - DNA, 30 bp, Artificial Sequence
  Synthetic oligonucleotide
aaggcgcgttaccaccaggtccatgcggcc

SEQ ID NO: 401466 - DNA, 30 bp, Artificial Sequence
  Synthetic oligonucleotide
cgccgacggcatctgcaggtgcctgcggcc

SEQ ID NO: 401467 - DNA, 30 bp, Artificial Sequence
  Synthetic oligonucleotide
agtaaatgccgcggtacgttgtgatcggcc

SEQ ID NO: 401468 - DNA, 30 bp, Artificial Sequence
  Synthetic oligonucleotide
tgcaattaagtttggcgacttttatcggcc

SEQ ID NO: 401469 - DNA, 30 bp, Artificial Sequence
  Synthetic oligonucleotide
cgggaagggggggagagtgttaactcggcc

SEQ ID NO: 401470 - DNA, 30 bp, Artificial Sequence
  Synthetic oligonucleotide
caatggcacttactcgcaggcagctcggcc

SEQ ID NO: 401471 - DNA, 30 bp, Artificial Sequence
  Synthetic oligonucleotide
cccctacctgtgtcttacgcgtgctcggcc

SEQ ID NO: 401472 - DNA, 30 bp, Artificial Sequence
  Synthetic oligonucleotide
agacattggatttatcgatcccagtcggcc

SEQ ID NO: 401473 - DNA, 29 bp, Artificial Sequence
  Synthetic oligonucleotide
atgcaccctttattccagacctgtcggcc

SEQ ID NO: 401474 - DNA, 30 bp, Artificial Sequence
  Synthetic oligonucleotide
accatgctataccctgattatgtgtcggcc

SEQ ID NO: 401475 - DNA, 30 bp, Artificial Sequence
  Synthetic oligonucleotide
taggggacggtcggtgaaacccgttcggcc

SEQ ID NO: 401476 - DNA, 30 bp, Artificial Sequence
  Synthetic oligonucleotide
cgccatggtctgaagttactcgacagggcc

SEQ ID NO: 401477 - DNA, 30 bp, Artificial Sequence
  Synthetic oligonucleotide
ctcaataactgtgatgcttgcgccagggcc

SEQ ID NO: 401478 - DNA, 30 bp, Artificial Sequence
  Synthetic oligonucleotide
attgtgtagagtctggtgttctatagggcc

SEQ ID NO: 401479 - DNA, 30 bp, Artificial Sequence
  Synthetic oligonucleotide
ttttcacattgatgggttcgatctagggcc

SEQ ID NO: 401480 - DNA, 30 bp, Artificial Sequence
  Synthetic oligonucleotide
tttgataagcgtgcccacggaagtagggcc

SEQ ID NO: 401481 - DNA, 30 bp, Artificial Sequence
  Synthetic oligonucleotide
atcgttgaccggtgacctacatgtagggcc

SEQ ID NO: 401482 - DNA, 30 bp, Artificial Sequence
  Synthetic oligonucleotide
ctgcagcactacgaggagaatagccgggcc

SEQ ID NO: 401483 - DNA, 30 bp, Artificial Sequence
  Synthetic oligonucleotide
cgggcgcccaggcggaaggaacagcgggcc

SEQ ID NO: 401484 - DNA, 30 bp, Artificial Sequence
  Synthetic oligonucleotide
ggccaggacgaacaacgcctaccgcgggcc

SEQ ID NO: 401485 - DNA, 30 bp, Artificial Sequence
  Synthetic oligonucleotide
cagcaataaccggccaacaaaaggcgggcc

SEQ ID NO: 401486 - DNA, 30 bp, Artificial Sequence
  Synthetic oligonucleotide
ttatcgcactagcactactagatgcgggcc

SEQ ID NO: 401487 - DNA, 30 bp, Artificial Sequence
  Synthetic oligonucleotide
attccgatgtatagtcggaacaatcgggcc

SEQ ID NO: 401488 - DNA, 30 bp, Artificial Sequence
  Synthetic oligonucleotide
ggcttgtagacggggggacgttctcgggcc

SEQ ID NO: 401489 - DNA, 30 bp, Artificial Sequence
  Synthetic oligonucleotide
gtcggctagcaccggcacggtagtcgggcc

SEQ ID NO: 401490 - DNA, 30 bp, Artificial Sequence
  Synthetic oligonucleotide
tacaggttacggtctcaaatataaggggcc

SEQ ID NO: 401491 - DNA, 30 bp, Artificial Sequence
  Synthetic oligonucleotide
cttcttatggtgttcactggtccaggggcc

SEQ ID NO: 401492 - DNA, 30 bp, Artificial Sequence
  Synthetic oligonucleotide
cgattgcattctcttaagctcaacggggcc

SEQ ID NO: 401493 - DNA, 30 bp, Artificial Sequence
  Synthetic oligonucleotide
agtcgatctgggttcccggcattgggggcc

SEQ ID NO: 401494 - DNA, 30 bp, Artificial Sequence
  Synthetic oligonucleotide
actggggggcgggaattacgcaatggggcc

SEQ ID NO: 401495 - DNA, 30 bp, Artificial Sequence
  Synthetic oligonucleotide
gtgcactgtgatggtggggggcgtggggcc

SEQ ID NO: 401496 - DNA, 30 bp, Artificial Sequence
  Synthetic oligonucleotide
aaagcgcggttccagcagcctcgtggggcc

SEQ ID NO: 401497 - DNA, 30 bp, Artificial Sequence
  Synthetic oligonucleotide
gggtggggcacatgcttatgctttggggcc

SEQ ID NO: 401498 - DNA, 30 bp, Artificial Sequence
  Synthetic oligonucleotide
cttaactagaaatttcctgtatgatgggcc

SEQ ID NO: 401499 - DNA, 30 bp, Artificial Sequence
  Synthetic oligonucleotide
aagcccttgaaggtcgaaagtatatgggcc

SEQ ID NO: 401500 - DNA, 30 bp, Artificial Sequence
  Synthetic oligonucleotide
gccgcccaacagcccattgcagagtgggcc

SEQ ID NO: 401501 - DNA, 30 bp, Artificial Sequence
  Synthetic oligonucleotide
gatgcaaagacccccttactcaattgggcc

SEQ ID NO: 401502 - DNA, 30 bp, Artificial Sequence
  Synthetic oligonucleotide
agacgcttgggcgttctgtcgaattgggcc

SEQ ID NO: 401503 - DNA, 30 bp, Artificial Sequence
  Synthetic oligonucleotide
atcccagagtacaagttaaataattgggcc

SEQ ID NO: 401504 - DNA, 30 bp, Artificial Sequence
  Synthetic oligonucleotide
gttccagtgggtattaaactggtttgggcc

SEQ ID NO: 401505 - DNA, 30 bp, Artificial Sequence
  Synthetic oligonucleotide
attcgtgagaacgctgtatctacaatggcc

SEQ ID NO: 401506 - DNA, 30 bp, Artificial Sequence
  Synthetic oligonucleotide
aatgtccacggattaacgaacatgatggcc

SEQ ID NO: 401507 - DNA, 30 bp, Artificial Sequence
  Synthetic oligonucleotide
aagacaaatctatccctatgaaatatggcc

SEQ ID NO: 401508 - DNA, 30 bp, Artificial Sequence
  Synthetic oligonucleotide
atgaaaactcagaatgtttggcaactggcc

SEQ ID NO: 401509 - DNA, 30 bp, Artificial Sequence
  Synthetic oligonucleotide
ataggagtgcctccaggcaggagcctggcc

SEQ ID NO: 401510 - DNA, 30 bp, Artificial Sequence
  Synthetic oligonucleotide
ctcgtcattaagccccgtggtagcctggcc

SEQ ID NO: 401511 - DNA, 30 bp, Artificial Sequence
  Synthetic oligonucleotide
tttttcgatgggggttcctgtcgcctggcc

SEQ ID NO: 401512 - DNA, 30 bp, Artificial Sequence
  Synthetic oligonucleotide
ccactgatctaatcgacggttctcctggcc

SEQ ID NO: 401513 - DNA, 30 bp, Artificial Sequence
  Synthetic oligonucleotide
acgacggtgctttctatatctgcgctggcc

SEQ ID NO: 401514 - DNA, 30 bp, Artificial Sequence
  Synthetic oligonucleotide
aacatttcgtgacccatcccggtgctggcc

SEQ ID NO: 401515 - DNA, 30 bp, Artificial Sequence
  Synthetic oligonucleotide
aggaatgttgcatctgattttcctctggcc

SEQ ID NO: 401516 - DNA, 30 bp, Artificial Sequence
  Synthetic oligonucleotide
gttctgaatccggaaacatttgcagtggcc

SEQ ID NO: 401517 - DNA, 30 bp, Artificial Sequence
  Synthetic oligonucleotide
ccccttcaatcctcggtatgttctgtggcc

SEQ ID NO: 401518 - DNA, 30 bp, Artificial Sequence
  Synthetic oligonucleotide
tgcgtcgaggtatccggttagttattggcc

SEQ ID NO: 401519 - DNA, 30 bp, Artificial Sequence
  Synthetic oligonucleotide
tctgtcattatattctgaatgttgttggcc

SEQ ID NO: 401520 - DNA, 30 bp, Artificial Sequence
  Synthetic oligonucleotide
gcatacttatagttttataccactttggcc

SEQ ID NO: 401521 - DNA, 30 bp, Artificial Sequence
  Synthetic oligonucleotide
tcgccaatgtttgctgttaatcttttggcc

SEQ ID NO: 401522 - DNA, 30 bp, Artificial Sequence
  Synthetic oligonucleotide
gacaacgaggctgtggggtgccaaaatgcc

SEQ ID NO: 401523 - DNA, 30 bp, Artificial Sequence
  Synthetic oligonucleotide
tggcaggcctaatcgaattcgtgaaatgcc

SEQ ID NO: 401524 - DNA, 30 bp, Artificial Sequence
  Synthetic oligonucleotide
aaccgaggtacagaatgttaggtcaatgcc

SEQ ID NO: 401525 - DNA, 30 bp, Artificial Sequence
  Synthetic oligonucleotide
cggacacggattcgcccgaatgcgaatgcc

SEQ ID NO: 401526 - DNA, 30 bp, Artificial Sequence
  Synthetic oligonucleotide
tttcaggacaggtagggaatttggaatgcc

SEQ ID NO: 401527 - DNA, 30 bp, Artificial Sequence
  Synthetic oligonucleotide
ctttaaagaattcgttcccgtatgaatgcc

SEQ ID NO: 401528 - DNA, 30 bp, Artificial Sequence
  Synthetic oligonucleotide
tcggtcttttagcaaatgccgacacatgcc

SEQ ID NO: 401529 - DNA, 30 bp, Artificial Sequence
  Synthetic oligonucleotide
tggtggagcttgcggcgcacttggcatgcc

SEQ ID NO: 401530 - DNA, 30 bp, Artificial Sequence
  Synthetic oligonucleotide
gaatagccttaaataaccctagctcatgcc

SEQ ID NO: 401531 - DNA, 30 bp, Artificial Sequence
  Synthetic oligonucleotide
ccctctacaaggttcggtcttaaagatgcc

SEQ ID NO: 401532 - DNA, 30 bp, Artificial Sequence
  Synthetic oligonucleotide
gctatcagccttaattagcgcgaagatgcc

SEQ ID NO: 401533 - DNA, 30 bp, Artificial Sequence
  Synthetic oligonucleotide
aatgagctgccattggtcgatcacgatgcc

SEQ ID NO: 401534 - DNA, 30 bp, Artificial Sequence
  Synthetic oligonucleotide
gtttgaccgactcttccgtacccggatgcc

SEQ ID NO: 401535 - DNA, 30 bp, Artificial Sequence
  Synthetic oligonucleotide
gaaagcaggtcggccgattatggggatgcc

SEQ ID NO: 401536 - DNA, 30 bp, Artificial Sequence
  Synthetic oligonucleotide
gcttagattctgtcaaacgattgggatgcc

SEQ ID NO: 401537 - DNA, 30 bp, Artificial Sequence
  Synthetic oligonucleotide
agactatcgccgtggaagctggtggatgcc

SEQ ID NO: 401538 - DNA, 30 bp, Artificial Sequence
  Synthetic oligonucleotide
tacagagccctacatgcccgctatgatgcc

SEQ ID NO: 401539 - DNA, 30 bp, Artificial Sequence
  Synthetic oligonucleotide
ctgcgacatgaagtctctactggtgatgcc

SEQ ID NO: 401540 - DNA, 30 bp, Artificial Sequence
  Synthetic oligonucleotide
acgagatgtatgatcgcggactaatatgcc

SEQ ID NO: 401541 - DNA, 30 bp, Artificial Sequence
  Synthetic oligonucleotide
acccgaccatgcagtacccggtaatatgcc

SEQ ID NO: 401542 - DNA, 30 bp, Artificial Sequence
  Synthetic oligonucleotide
aataccgttggctaaacattggcatatgcc

SEQ ID NO: 401543 - DNA, 30 bp, Artificial Sequence
  Synthetic oligonucleotide
agcctaaatagctccttctcgcgatatgcc

SEQ ID NO: 401544 - DNA, 30 bp, Artificial Sequence
  Synthetic oligonucleotide
ctcaaagtatctcggatttcggggtatgcc

SEQ ID NO: 401545 - DNA, 30 bp, Artificial Sequence
  Synthetic oligonucleotide
gtgccactatatagcttagacgattatgcc

SEQ ID NO: 401546 - DNA, 30 bp, Artificial Sequence
  Synthetic oligonucleotide
taagatttgatggtccagttaaaaactgcc

SEQ ID NO: 401547 - DNA, 30 bp, Artificial Sequence
  Synthetic oligonucleotide
gaggccgtcgcacttagaggatgaactgcc

SEQ ID NO: 401548 - DNA, 30 bp, Artificial Sequence
  Synthetic oligonucleotide
tagaatttcaatgcgagttatgagactgcc

SEQ ID NO: 401549 - DNA, 30 bp, Artificial Sequence
  Synthetic oligonucleotide
aaccctgccggcccaaggcggcctactgcc

SEQ ID NO: 401550 - DNA, 30 bp, Artificial Sequence
  Synthetic oligonucleotide
ggattaggttttgcccggggcatccctgcc

SEQ ID NO: 401551 - DNA, 30 bp, Artificial Sequence
  Synthetic oligonucleotide
agtgatattcgccagactatcatccctgcc

SEQ ID NO: 401552 - DNA, 30 bp, Artificial Sequence
  Synthetic oligonucleotide
gggcagtagaggtacccgcccgggcctgcc

SEQ ID NO: 401553 - DNA, 30 bp, Artificial Sequence
  Synthetic oligonucleotide
ttatagtaagtattatttctagatcctgcc

SEQ ID NO: 401554 - DNA, 30 bp, Artificial Sequence
  Synthetic oligonucleotide
gattgattgtctgcaggtgcttctcctgcc

SEQ ID NO: 401555 - DNA, 30 bp, Artificial Sequence
  Synthetic oligonucleotide
gtcgccatggggaatcccaaatttcctgcc

SEQ ID NO: 401556 - DNA, 30 bp, Artificial Sequence
  Synthetic oligonucleotide
accttgcaaattaaggttgcatacgctgcc

SEQ ID NO: 401557 - DNA, 30 bp, Artificial Sequence
  Synthetic oligonucleotide
taactcgcgtatccggtgtgaatcgctgcc

SEQ ID NO: 401558 - DNA, 30 bp, Artificial Sequence
  Synthetic oligonucleotide
tttccaaagtggggctcttccttggctgcc

SEQ ID NO: 401559 - DNA, 30 bp, Artificial Sequence
  Synthetic oligonucleotide
ggctgctgaaatatactcaataaatctgcc

SEQ ID NO: 401560 - DNA, 30 bp, Artificial Sequence
  Synthetic oligonucleotide
ggcccggagatagttcccccatcatctgcc

SEQ ID NO: 401561 - DNA, 30 bp, Artificial Sequence
  Synthetic oligonucleotide
tgtacaatatttagcgcaaaaccctctgcc

SEQ ID NO: 401562 - DNA, 30 bp, Artificial Sequence
  Synthetic oligonucleotide
agtaaggcgagcgggaacaggcgctctgcc

SEQ ID NO: 401563 - DNA, 30 bp, Artificial Sequence
  Synthetic oligonucleotide
ttacggatgcatgtgagatgcctctctgcc

SEQ ID NO: 401564 - DNA, 30 bp, Artificial Sequence
  Synthetic oligonucleotide
acgtgtccgcatgtgaagacgaggtctgcc

SEQ ID NO: 401565 - DNA, 30 bp, Artificial Sequence
  Synthetic oligonucleotide
tttatcaacatgtccacagaaatgtctgcc

SEQ ID NO: 401566 - DNA, 30 bp, Artificial Sequence
  Synthetic oligonucleotide
tcaccctttatcactgaccaataaagtgcc

SEQ ID NO: 401567 - DNA, 30 bp, Artificial Sequence
  Synthetic oligonucleotide
cggacgtttccttgcgaatgcaacagtgcc

SEQ ID NO: 401568 - DNA, 30 bp, Artificial Sequence
  Synthetic oligonucleotide
cagcatttcccgtcacagaagtccagtgcc

SEQ ID NO: 401569 - DNA, 30 bp, Artificial Sequence
  Synthetic oligonucleotide
tcggcgaaatctggtcaggcgggacgtgcc

SEQ ID NO: 401570 - DNA, 30 bp, Artificial Sequence
  Synthetic oligonucleotide
aatatccataccgttgatatcgtacgtgcc

SEQ ID NO: 401571 - DNA, 30 bp, Artificial Sequence
  Synthetic oligonucleotide
actcttctcgatttgacaagcaaccgtgcc

SEQ ID NO: 401572 - DNA, 30 bp, Artificial Sequence
  Synthetic oligonucleotide
tcgctggtcgattccggaatagtccgtgcc

SEQ ID NO: 401573 - DNA, 30 bp, Artificial Sequence
  Synthetic oligonucleotide
tggaattcaacagtcaaccgtcgtcgtgcc

SEQ ID NO: 401574 - DNA, 30 bp, Artificial Sequence
  Synthetic oligonucleotide
cttacactataggccagacctcgaggtgcc

SEQ ID NO: 401575 - DNA, 30 bp, Artificial Sequence
  Synthetic oligonucleotide
atgcgcgaccaccgcacgaacgccggtgcc

SEQ ID NO: 401576 - DNA, 30 bp, Artificial Sequence
  Synthetic oligonucleotide
ttatccccgtcttaatttactcgcggtgcc

SEQ ID NO: 401577 - DNA, 30 bp, Artificial Sequence
  Synthetic oligonucleotide
gtttattgaacgtcggacggcaaatgtgcc

SEQ ID NO: 401578 - DNA, 29 bp, Artificial Sequence
  Synthetic oligonucleotide
caacccgtaaaaagtcacgtcaatgtgcc

SEQ ID NO: 401579 - DNA, 30 bp, Artificial Sequence
  Synthetic oligonucleotide
gcttaacgagcccgcctgagcacctgtgcc

SEQ ID NO: 401580 - DNA, 30 bp, Artificial Sequence
  Synthetic oligonucleotide
aacacacggtagtagggcctctcctgtgcc

SEQ ID NO: 401581 - DNA, 30 bp, Artificial Sequence
  Synthetic oligonucleotide
caacagctaacggcgtttcagccgtgtgcc

SEQ ID NO: 401582 - DNA, 30 bp, Artificial Sequence
  Synthetic oligonucleotide
ccggtaccttccaatagttctgggtgtgcc

SEQ ID NO: 401583 - DNA, 30 bp, Artificial Sequence
  Synthetic oligonucleotide
ttaaacgcatatcggtggtttatgtgtgcc

SEQ ID NO: 401584 - DNA, 30 bp, Artificial Sequence
  Synthetic oligonucleotide
atttagcaagccagccgaggcctgtgtgcc

SEQ ID NO: 401585 - DNA, 30 bp, Artificial Sequence
  Synthetic oligonucleotide
catagaatacagagtttttaggtttgtgcc

SEQ ID NO: 401586 - DNA, 30 bp, Artificial Sequence
  Synthetic oligonucleotide
aacgtttgatgcacagtttctttaattgcc

SEQ ID NO: 401587 - DNA, 30 bp, Artificial Sequence
  Synthetic oligonucleotide
atatagtgcaaactctgctgcaaacttgcc

SEQ ID NO: 401588 - DNA, 30 bp, Artificial Sequence
  Synthetic oligonucleotide
gtgctggcatactttttttttgaacttgcc

SEQ ID NO: 401589 - DNA, 30 bp, Artificial Sequence
  Synthetic oligonucleotide
ccgggtttcccatctgcatgcgcccttgcc

SEQ ID NO: 401590 - DNA, 30 bp, Artificial Sequence
  Synthetic oligonucleotide
gctctccagaagctattaataaggcttgcc

SEQ ID NO: 401591 - DNA, 30 bp, Artificial Sequence
  Synthetic oligonucleotide
actgaaggtactgcgcgagcacggcttgcc

SEQ ID NO: 401592 - DNA, 30 bp, Artificial Sequence
  Synthetic oligonucleotide
taattacatggtttccgcaggcctcttgcc

SEQ ID NO: 401593 - DNA, 30 bp, Artificial Sequence
  Synthetic oligonucleotide
ctctctaccggcaagggcaaccttcttgcc

SEQ ID NO: 401594 - DNA, 30 bp, Artificial Sequence
  Synthetic oligonucleotide
acggtatgaacttgacgggctgaagttgcc

SEQ ID NO: 401595 - DNA, 30 bp, Artificial Sequence
  Synthetic oligonucleotide
ggatgaaacctccttggcaggacagttgcc

SEQ ID NO: 401596 - DNA, 30 bp, Artificial Sequence
  Synthetic oligonucleotide
ctagtcgtgcagtttcaggcgagggttgcc

SEQ ID NO: 401597 - DNA, 30 bp, Artificial Sequence
  Synthetic oligonucleotide
tgaatacctagagtccaacagttggttgcc

SEQ ID NO: 401598 - DNA, 30 bp, Artificial Sequence
  Synthetic oligonucleotide
aagagtctggttcgcatcattcatgttgcc

SEQ ID NO: 401599 - DNA, 30 bp, Artificial Sequence
  Synthetic oligonucleotide
acgatccccaacgagggaggatactttgcc

SEQ ID NO: 401600 - DNA, 30 bp, Artificial Sequence
  Synthetic oligonucleotide
gtagtattaacgcgctaattcccctttgcc

SEQ ID NO: 401601 - DNA, 30 bp, Artificial Sequence
  Synthetic oligonucleotide
atgcagttatatgatggttgggcaaaatcc

SEQ ID NO: 401602 - DNA, 30 bp, Artificial Sequence
  Synthetic oligonucleotide
aatctcacgctcacgggtgcaaacaaatcc

SEQ ID NO: 401603 - DNA, 30 bp, Artificial Sequence
  Synthetic oligonucleotide
cgacgtggcagaaagctcggccacaaatcc

SEQ ID NO: 401604 - DNA, 30 bp, Artificial Sequence
  Synthetic oligonucleotide
cactatgatgaatagcagggttccaaatcc

SEQ ID NO: 401605 - DNA, 30 bp, Artificial Sequence
  Synthetic oligonucleotide
caggataagatatccgtaagtgtcaaatcc

SEQ ID NO: 401606 - DNA, 30 bp, Artificial Sequence
  Synthetic oligonucleotide
ctttatgtaagcctatccggtttcaaatcc

SEQ ID NO: 401607 - DNA, 30 bp, Artificial Sequence
  Synthetic oligonucleotide
agtacgctaagcagagcagcgcagaaatcc

SEQ ID NO: 401608 - DNA, 30 bp, Artificial Sequence
  Synthetic oligonucleotide
ataaagcgcaaagcacagtatgggaaatcc

SEQ ID NO: 401609 - DNA, 30 bp, Artificial Sequence
  Synthetic oligonucleotide
tctgtaaagtttcggtgcgatccacaatcc

SEQ ID NO: 401610 - DNA, 30 bp, Artificial Sequence
  Synthetic oligonucleotide
tataccggagcttcctgctcattccaatcc

SEQ ID NO: 401611 - DNA, 30 bp, Artificial Sequence
  Synthetic oligonucleotide
agtgagtactgcattggctcttggcaatcc

SEQ ID NO: 401612 - DNA, 30 bp, Artificial Sequence
  Synthetic oligonucleotide
cacttgttatagggactctgaaatcaatcc

SEQ ID NO: 401613 - DNA, 30 bp, Artificial Sequence
  Synthetic oligonucleotide
ggagtcgtttgttatatcgaaacagaatcc

SEQ ID NO: 401614 - DNA, 30 bp, Artificial Sequence
  Synthetic oligonucleotide
ggtatccaggaacggggcttattagaatcc

SEQ ID NO: 401615 - DNA, 30 bp, Artificial Sequence
  Synthetic oligonucleotide
cgggcgacgaaatgagtttcacccgaatcc

SEQ ID NO: 401616 - DNA, 30 bp, Artificial Sequence
  Synthetic oligonucleotide
agcctcttctaatatagagtgggcgaatcc

SEQ ID NO: 401617 - DNA, 30 bp, Artificial Sequence
  Synthetic oligonucleotide
atacttatacttggagccaaatgcgaatcc

SEQ ID NO: 401618 - DNA, 30 bp, Artificial Sequence
  Synthetic oligonucleotide
gtatagcctgattgacaggaacgggaatcc

SEQ ID NO: 401619 - DNA, 30 bp, Artificial Sequence
  Synthetic oligonucleotide
gcatgtttggggtaagtccataatgaatcc

SEQ ID NO: 401620 - DNA, 30 bp, Artificial Sequence
  Synthetic oligonucleotide
cggttcggtcatcaggtgttcggtgaatcc

SEQ ID NO: 401621 - DNA, 30 bp, Artificial Sequence
  Synthetic oligonucleotide
ttgctgtggtgtacagacgcatgtgaatcc

SEQ ID NO: 401622 - DNA, 30 bp, Artificial Sequence
  Synthetic oligonucleotide
aggacgggcaggtttgtatctcgataatcc

SEQ ID NO: 401623 - DNA, 30 bp, Artificial Sequence
  Synthetic oligonucleotide
aaagtccggacggagcacagttactaatcc

SEQ ID NO: 401624 - DNA, 30 bp, Artificial Sequence
  Synthetic oligonucleotide
tgagagacaatacccaacattgtctaatcc

SEQ ID NO: 401625 - DNA, 30 bp, Artificial Sequence
  Synthetic oligonucleotide
gcatacttgaaccattaacacaagtaatcc

SEQ ID NO: 401626 - DNA, 30 bp, Artificial Sequence
  Synthetic oligonucleotide
gttatataataacgtaccatcgggtaatcc

SEQ ID NO: 401627 - DNA, 30 bp, Artificial Sequence
  Synthetic oligonucleotide
caccctcgaccttaagcctctgggtaatcc

SEQ ID NO: 401628 - DNA, 30 bp, Artificial Sequence
  Synthetic oligonucleotide
aatgtgctagatcatcatacattgtaatcc

SEQ ID NO: 401629 - DNA, 30 bp, Artificial Sequence
  Synthetic oligonucleotide
aatgcgataaatatcagtttgcaaacatcc

SEQ ID NO: 401630 - DNA, 30 bp, Artificial Sequence
  Synthetic oligonucleotide
ctcattttaagtctccgtacctagacatcc

SEQ ID NO: 401631 - DNA, 30 bp, Artificial Sequence
  Synthetic oligonucleotide
cgtttctacaatagacgcacaactacatcc

SEQ ID NO: 401632 - DNA, 30 bp, Artificial Sequence
  Synthetic oligonucleotide
ggccggcaattatcctacgggcgaccatcc

SEQ ID NO: 401633 - DNA, 30 bp, Artificial Sequence
  Synthetic oligonucleotide
gcagttcgttatatttttcaaggaccatcc

SEQ ID NO: 401634 - DNA, 30 bp, Artificial Sequence
  Synthetic oligonucleotide
ttaatggcacatatcgccaacaacccatcc

SEQ ID NO: 401635 - DNA, 30 bp, Artificial Sequence
  Synthetic oligonucleotide
agctgttaatttacatctgcctgtccatcc

SEQ ID NO: 401636 - DNA, 30 bp, Artificial Sequence
  Synthetic oligonucleotide
atatcattcagttgacgcctagaagcatcc

SEQ ID NO: 401637 - DNA, 30 bp, Artificial Sequence
  Synthetic oligonucleotide
aggttagaaggtcttagttagggggcatcc

SEQ ID NO: 401638 - DNA, 30 bp, Artificial Sequence
  Synthetic oligonucleotide
actgaagttgatcatggaccaattgcatcc

SEQ ID NO: 401639 - DNA, 30 bp, Artificial Sequence
  Synthetic oligonucleotide
gaactttaagttaaaagcaccattgcatcc

SEQ ID NO: 401640 - DNA, 30 bp, Artificial Sequence
  Synthetic oligonucleotide
gggctcaatttgcaatcgttcggctcatcc

SEQ ID NO: 401641 - DNA, 30 bp, Artificial Sequence
  Synthetic oligonucleotide
aaatcctatgcttgtgtttgcacttcatcc

SEQ ID NO: 401642 - DNA, 30 bp, Artificial Sequence
  Synthetic oligonucleotide
cagcaaaggaggatcaatcgggaaagatcc

SEQ ID NO: 401643 - DNA, 30 bp, Artificial Sequence
  Synthetic oligonucleotide
tacaaactaccgcttacactttgaagatcc

SEQ ID NO: 401644 - DNA, 30 bp, Artificial Sequence
  Synthetic oligonucleotide
tcgtgggtctaggtacaacgttacagatcc

SEQ ID NO: 401645 - DNA, 30 bp, Artificial Sequence
  Synthetic oligonucleotide
taccggtcgaagcactacgtagccagatcc

SEQ ID NO: 401646 - DNA, 30 bp, Artificial Sequence
  Synthetic oligonucleotide
tcagctgaacatggcagagtctccagatcc

SEQ ID NO: 401647 - DNA, 30 bp, Artificial Sequence
  Synthetic oligonucleotide
aaaatccatttgtcgtgggtctgcagatcc

SEQ ID NO: 401648 - DNA, 30 bp, Artificial Sequence
  Synthetic oligonucleotide
atcgaaccttggggtccgctctcgagatcc

SEQ ID NO: 401649 - DNA, 30 bp, Artificial Sequence
  Synthetic oligonucleotide
cggatctcctgcataaggttcaggagatcc

SEQ ID NO: 401650 - DNA, 30 bp, Artificial Sequence
  Synthetic oligonucleotide
cacctcaaaagcatgcgtattgggagatcc

SEQ ID NO: 401651 - DNA, 30 bp, Artificial Sequence
  Synthetic oligonucleotide
tatcacaccaaacggttaggccatagatcc

SEQ ID NO: 401652 - DNA, 30 bp, Artificial Sequence
  Synthetic oligonucleotide
acctttttcgaagggtacaaaagacgatcc

SEQ ID NO: 401653 - DNA, 30 bp, Artificial Sequence
  Synthetic oligonucleotide
gccacgtgtttagtgcgtgcactacgatcc

SEQ ID NO: 401654 - DNA, 30 bp, Artificial Sequence
  Synthetic oligonucleotide
cagtcggcagcacatttgccgagccgatcc

SEQ ID NO: 401655 - DNA, 30 bp, Artificial Sequence
  Synthetic oligonucleotide
tctgatgcagtacaacgccttaagcgatcc

SEQ ID NO: 401656 - DNA, 30 bp, Artificial Sequence
  Synthetic oligonucleotide
tgattaacccaacgcggactatgcggatcc

SEQ ID NO: 401657 - DNA, 31 bp, Artificial Sequence
  Synthetic oligonucleotide
tacacggcgccggacgggggctatcggatcc

SEQ ID NO: 401658 - DNA, 30 bp, Artificial Sequence
  Synthetic oligonucleotide
ctggatcaacctaggcgctccaggggatcc

SEQ ID NO: 401659 - DNA, 30 bp, Artificial Sequence
  Synthetic oligonucleotide
cacccgcaacgtagatacccggggggatcc

SEQ ID NO: 401660 - DNA, 30 bp, Artificial Sequence
  Synthetic oligonucleotide
atagggggtggacgatcggggtgtggatcc

SEQ ID NO: 401661 - DNA, 30 bp, Artificial Sequence
  Synthetic oligonucleotide
tacacttcggctctaggcgccagatgatcc

SEQ ID NO: 401662 - DNA, 30 bp, Artificial Sequence
  Synthetic oligonucleotide
ccgaagacgcttagggtgtccatatgatcc

SEQ ID NO: 401663 - DNA, 30 bp, Artificial Sequence
  Synthetic oligonucleotide
cggggatttctaagatatgtccactgatcc

SEQ ID NO: 401664 - DNA, 30 bp, Artificial Sequence
  Synthetic oligonucleotide
agcgacttacacagatgagcgtcgtgatcc

SEQ ID NO: 401665 - DNA, 30 bp, Artificial Sequence
  Synthetic oligonucleotide
acagtacggctgttgggccatccttgatcc

SEQ ID NO: 401666 - DNA, 30 bp, Artificial Sequence
  Synthetic oligonucleotide
cagagagcagtcatgctataatcttgatcc

SEQ ID NO: 401667 - DNA, 30 bp, Artificial Sequence
  Synthetic oligonucleotide
ttgccgcaaccaccgtctggtagttgatcc

SEQ ID NO: 401668 - DNA, 30 bp, Artificial Sequence
  Synthetic oligonucleotide
tatccatgtctcttgttcatacgttgatcc

SEQ ID NO: 401669 - DNA, 30 bp, Artificial Sequence
  Synthetic oligonucleotide
tctaatttattcagattactgtgttgatcc

SEQ ID NO: 401670 - DNA, 30 bp, Artificial Sequence
  Synthetic oligonucleotide
ggtattagataataccgagcactttgatcc

SEQ ID NO: 401671 - DNA, 30 bp, Artificial Sequence
  Synthetic oligonucleotide
taaagacgctttagttgtcaattttgatcc

SEQ ID NO: 401672 - DNA, 30 bp, Artificial Sequence
  Synthetic oligonucleotide
ccttttcccttcagtatgcgaaaaatatcc

SEQ ID NO: 401673 - DNA, 30 bp, Artificial Sequence
  Synthetic oligonucleotide
agtagcgtaagtgggtattgtacaatatcc

SEQ ID NO: 401674 - DNA, 30 bp, Artificial Sequence
  Synthetic oligonucleotide
taaacttactacggtcctaactgcatatcc

SEQ ID NO: 401675 - DNA, 30 bp, Artificial Sequence
  Synthetic oligonucleotide
tcatttccttaatgtggaacatcgatatcc

SEQ ID NO: 401676 - DNA, 30 bp, Artificial Sequence
  Synthetic oligonucleotide
aatcgaatccacgcacatgggtggatatcc

SEQ ID NO: 401677 - DNA, 30 bp, Artificial Sequence
  Synthetic oligonucleotide
atcaccagcctcacatgggagctgatatcc

SEQ ID NO: 401678 - DNA, 30 bp, Artificial Sequence
  Synthetic oligonucleotide
tataattggttcaaggtgcaccatatatcc

SEQ ID NO: 401679 - DNA, 30 bp, Artificial Sequence
  Synthetic oligonucleotide
gcagtttgatgccctgtttgtgatatatcc

SEQ ID NO: 401680 - DNA, 30 bp, Artificial Sequence
  Synthetic oligonucleotide
ttatcagaaaggggacgttcatatatatcc

SEQ ID NO: 401681 - DNA, 30 bp, Artificial Sequence
  Synthetic oligonucleotide
aaccaacccaaccaggaagtggctatatcc

SEQ ID NO: 401682 - DNA, 27 bp, Artificial Sequence
  Synthetic oligonucleotide
atggagggtatctaaaatcaactatcc

SEQ ID NO: 401683 - DNA, 30 bp, Artificial Sequence
  Synthetic oligonucleotide
taatctgtgccaggattaggacacctatcc

SEQ ID NO: 401684 - DNA, 30 bp, Artificial Sequence
  Synthetic oligonucleotide
aattcaaataatgatttgctatagctatcc

SEQ ID NO: 401685 - DNA, 30 bp, Artificial Sequence
  Synthetic oligonucleotide
atataatatgtattagggctacttctatcc

SEQ ID NO: 401686 - DNA, 30 bp, Artificial Sequence
  Synthetic oligonucleotide
gctggcggcagaatgtaggccgacgtatcc

SEQ ID NO: 401687 - DNA, 30 bp, Artificial Sequence
  Synthetic oligonucleotide
tagatatagatgttacttgtcagcgtatcc

SEQ ID NO: 401688 - DNA, 30 bp, Artificial Sequence
  Synthetic oligonucleotide
cttcttaattcgttaagctatagcgtatcc

SEQ ID NO: 401689 - DNA, 30 bp, Artificial Sequence
  Synthetic oligonucleotide
accacgagcgacattgggccgggcgtatcc

SEQ ID NO: 401690 - DNA, 30 bp, Artificial Sequence
  Synthetic oligonucleotide
ctttacgaagtagggaatgacaaggtatcc

SEQ ID NO: 401691 - DNA, 30 bp, Artificial Sequence
  Synthetic oligonucleotide
gaaagatttacataacataggggggtatcc

SEQ ID NO: 401692 - DNA, 30 bp, Artificial Sequence
  Synthetic oligonucleotide
atcgtcaacaggtccgttgatggtgtatcc

SEQ ID NO: 401693 - DNA, 30 bp, Artificial Sequence
  Synthetic oligonucleotide
ttcagcgataatgtatgccgaccattatcc

SEQ ID NO: 401694 - DNA, 30 bp, Artificial Sequence
  Synthetic oligonucleotide
ctaaagtgtactcagcatgcaagcttatcc

SEQ ID NO: 401695 - DNA, 30 bp, Artificial Sequence
  Synthetic oligonucleotide
gtactagtgaggtgtaaccccttgttatcc

SEQ ID NO: 401696 - DNA, 30 bp, Artificial Sequence
  Synthetic oligonucleotide
acgacaattatacgggcggattctttatcc

SEQ ID NO: 401697 - DNA, 30 bp, Artificial Sequence
  Synthetic oligonucleotide
gcgaaatatttctaagagtaacccaactcc

SEQ ID NO: 401698 - DNA, 30 bp, Artificial Sequence
  Synthetic oligonucleotide
cagtatcatcaatgcggctcggctaactcc

SEQ ID NO: 401699 - DNA, 30 bp, Artificial Sequence
  Synthetic oligonucleotide
tagggataacgagcaactctcggtaactcc

SEQ ID NO: 401700 - DNA, 30 bp, Artificial Sequence
  Synthetic oligonucleotide
accaattctaatataggttgctgtaactcc

SEQ ID NO: 401701 - DNA, 30 bp, Artificial Sequence
  Synthetic oligonucleotide
tgggacccactagttatcggttaacactcc

SEQ ID NO: 401702 - DNA, 30 bp, Artificial Sequence
  Synthetic oligonucleotide
tgcaaatgtgccgccacttagtcacactcc

SEQ ID NO: 401703 - DNA, 30 bp, Artificial Sequence
  Synthetic oligonucleotide
tgcgttagacgcctgaacgtcagccactcc

SEQ ID NO: 401704 - DNA, 30 bp, Artificial Sequence
  Synthetic oligonucleotide
taagcgtttgtagtgtttcagttccactcc

SEQ ID NO: 401705 - DNA, 30 bp, Artificial Sequence
  Synthetic oligonucleotide
gtacacgtatgaaaaattttatttcactcc

SEQ ID NO: 401706 - DNA, 30 bp, Artificial Sequence
  Synthetic oligonucleotide
tcgcttaacgcgattggcggtaaagactcc

SEQ ID NO: 401707 - DNA, 30 bp, Artificial Sequence
  Synthetic oligonucleotide
aaaacgtgatgctcggacgtttaagactcc

SEQ ID NO: 401708 - DNA, 30 bp, Artificial Sequence
  Synthetic oligonucleotide
tgttcggttgaagcagaatgaatagactcc

SEQ ID NO: 401709 - DNA, 30 bp, Artificial Sequence
  Synthetic oligonucleotide
atcacaacgttggtaggacaatcggactcc

SEQ ID NO: 401710 - DNA, 30 bp, Artificial Sequence
  Synthetic oligonucleotide
tgcaaatctgtttacatttcacaatactcc

SEQ ID NO: 401711 - DNA, 30 bp, Artificial Sequence
  Synthetic oligonucleotide
gataacaagcacagccaggacgtatactcc

SEQ ID NO: 401712 - DNA, 30 bp, Artificial Sequence
  Synthetic oligonucleotide
agcaaaacgccagtctcggactagtactcc

SEQ ID NO: 401713 - DNA, 30 bp, Artificial Sequence
  Synthetic oligonucleotide
ggatctcaacggttagcctgatggtactcc

SEQ ID NO: 401714 - DNA, 30 bp, Artificial Sequence
  Synthetic oligonucleotide
gtcaagccctaggagcacacgtggtactcc

SEQ ID NO: 401715 - DNA, 30 bp, Artificial Sequence
  Synthetic oligonucleotide
aaaatagacgagtctctccagatgtactcc

SEQ ID NO: 401716 - DNA, 30 bp, Artificial Sequence
  Synthetic oligonucleotide
tgattctgctgcgcgcatgtcatttactcc

SEQ ID NO: 401717 - DNA, 30 bp, Artificial Sequence
  Synthetic oligonucleotide
gtatagtgttgcatattaaaagtttactcc

SEQ ID NO: 401718 - DNA, 30 bp, Artificial Sequence
  Synthetic oligonucleotide
gcgattcgtaaacatcatcaattttactcc

SEQ ID NO: 401719 - DNA, 30 bp, Artificial Sequence
  Synthetic oligonucleotide
cggaataactaagtagccccgttttactcc

SEQ ID NO: 401720 - DNA, 30 bp, Artificial Sequence
  Synthetic oligonucleotide
ttaaggatcaatactgctaggactacctcc

SEQ ID NO: 401721 - DNA, 30 bp, Artificial Sequence
  Synthetic oligonucleotide
cccactacgctcttaatgaatgctacctcc

SEQ ID NO: 401722 - DNA, 30 bp, Artificial Sequence
  Synthetic oligonucleotide
acattcgttgttgatgacgattttacctcc

SEQ ID NO: 401723 - DNA, 30 bp, Artificial Sequence
  Synthetic oligonucleotide
gaggccggttttataaatccgatcccctcc

SEQ ID NO: 401724 - DNA, 30 bp, Artificial Sequence
  Synthetic oligonucleotide
tgccactttgatgtggaatatagagcctcc

SEQ ID NO: 401725 - DNA, 30 bp, Artificial Sequence
  Synthetic oligonucleotide
ggtgaccgttatctgaacgttgtagcctcc

SEQ ID NO: 401726 - DNA, 30 bp, Artificial Sequence
  Synthetic oligonucleotide
aagaggctacgcgtcccgcctgacgcctcc

SEQ ID NO: 401727 - DNA, 30 bp, Artificial Sequence
  Synthetic oligonucleotide
caaaaggagcaatggtaggatgccgcctcc

SEQ ID NO: 401728 - DNA, 30 bp, Artificial Sequence
  Synthetic oligonucleotide
attgactatgaacttttttctacggcctcc

SEQ ID NO: 401729 - DNA, 30 bp, Artificial Sequence
  Synthetic oligonucleotide
gttaagatgtagcacaggatatatgcctcc

SEQ ID NO: 401730 - DNA, 30 bp, Artificial Sequence
  Synthetic oligonucleotide
gttaatacattcatgttatgtgtctcctcc

SEQ ID NO: 401731 - DNA, 30 bp, Artificial Sequence
  Synthetic oligonucleotide
tccgagtatgtttcaatgttctagtcctcc

SEQ ID NO: 401732 - DNA, 30 bp, Artificial Sequence
  Synthetic oligonucleotide
gagcttaaggggaaataagcgtattcctcc

SEQ ID NO: 401733 - DNA, 30 bp, Artificial Sequence
  Synthetic oligonucleotide
tccaggaaggaatgcaaatctctaagctcc

SEQ ID NO: 401734 - DNA, 30 bp, Artificial Sequence
  Synthetic oligonucleotide
atcggccgggtagcacgctatcgcagctcc

SEQ ID NO: 401735 - DNA, 30 bp, Artificial Sequence
  Synthetic oligonucleotide
aatcatcggcggtagagaaagacgagctcc

SEQ ID NO: 401736 - DNA, 30 bp, Artificial Sequence
  Synthetic oligonucleotide
agcggtcgtcagcgttatagttttcgctcc

SEQ ID NO: 401737 - DNA, 30 bp, Artificial Sequence
  Synthetic oligonucleotide
ttcatgcagctaggattggagcgaggctcc

SEQ ID NO: 401738 - DNA, 30 bp, Artificial Sequence
  Synthetic oligonucleotide
tacacaatgtgggcataaacccgcggctcc

SEQ ID NO: 401739 - DNA, 30 bp, Artificial Sequence
  Synthetic oligonucleotide
tattcggacagagagatgagggggggctcc

SEQ ID NO: 401740 - DNA, 30 bp, Artificial Sequence
  Synthetic oligonucleotide
aagcattaaatctttattatcacatgctcc

SEQ ID NO: 401741 - DNA, 30 bp, Artificial Sequence
  Synthetic oligonucleotide
gcttcttctccggttgtgaagccatgctcc

SEQ ID NO: 401742 - DNA, 30 bp, Artificial Sequence
  Synthetic oligonucleotide
actctagacggctagtggttgatatgctcc

SEQ ID NO: 401743 - DNA, 30 bp, Artificial Sequence
  Synthetic oligonucleotide
tgtaggtccagccttcgaccgtactgctcc

SEQ ID NO: 401744 - DNA, 30 bp, Artificial Sequence
  Synthetic oligonucleotide
gacggccgatgagattattgcgcctgctcc

SEQ ID NO: 401745 - DNA, 30 bp, Artificial Sequence
  Synthetic oligonucleotide
taagagtctggtgcaatccctcattgctcc

SEQ ID NO: 401746 - DNA, 30 bp, Artificial Sequence
  Synthetic oligonucleotide
atcttaagggaagaaaatgcgccaatctcc

SEQ ID NO: 401747 - DNA, 30 bp, Artificial Sequence
  Synthetic oligonucleotide
aaaatagtgttgggacgaacagcaatctcc

SEQ ID NO: 401748 - DNA, 30 bp, Artificial Sequence
  Synthetic oligonucleotide
agccatgaaaagtaagatcgcttaatctcc

SEQ ID NO: 401749 - DNA, 30 bp, Artificial Sequence
  Synthetic oligonucleotide
gtctcatagtacacagaataggacatctcc

SEQ ID NO: 401750 - DNA, 30 bp, Artificial Sequence
  Synthetic oligonucleotide
cctggagtatcgctaataagcgctatctcc

SEQ ID NO: 401751 - DNA, 30 bp, Artificial Sequence
  Synthetic oligonucleotide
tccaagcacccatcacagtgtgctatctcc

SEQ ID NO: 401752 - DNA, 30 bp, Artificial Sequence
  Synthetic oligonucleotide
tcatctatggacgtccccgtcattatctcc

SEQ ID NO: 401753 - DNA, 30 bp, Artificial Sequence
  Synthetic oligonucleotide
caaggccaatccggctatgtctaactctcc

SEQ ID NO: 401754 - DNA, 30 bp, Artificial Sequence
  Synthetic oligonucleotide
gctgcgggcgaccgcactgaacaagtctcc

SEQ ID NO: 401755 - DNA, 30 bp, Artificial Sequence
  Synthetic oligonucleotide
gatccagcggaatatatccaggaggtctcc

SEQ ID NO: 401756 - DNA, 30 bp, Artificial Sequence
  Synthetic oligonucleotide
tcttgtaagtggcacctgtgaccggtctcc

SEQ ID NO: 401757 - DNA, 30 bp, Artificial Sequence
  Synthetic oligonucleotide
cacaggttctcgttagagatccgggtctcc

SEQ ID NO: 401758 - DNA, 30 bp, Artificial Sequence
  Synthetic oligonucleotide
tactacgccctactggcgccacttgtctcc

SEQ ID NO: 401759 - DNA, 30 bp, Artificial Sequence
  Synthetic oligonucleotide
agaccgtcggcacgtacgagttaattctcc

SEQ ID NO: 401760 - DNA, 30 bp, Artificial Sequence
  Synthetic oligonucleotide
gcaccattagactgatgggcaccattctcc

SEQ ID NO: 401761 - DNA, 30 bp, Artificial Sequence
  Synthetic oligonucleotide
gtagtgcttaaagatcgcgttaagttctcc

SEQ ID NO: 401762 - DNA, 30 bp, Artificial Sequence
  Synthetic oligonucleotide
tgggcacgcgccgtatgctatgcgttctcc

SEQ ID NO: 401763 - DNA, 30 bp, Artificial Sequence
  Synthetic oligonucleotide
taagctcgctagagtctctacataaagtcc

SEQ ID NO: 401764 - DNA, 30 bp, Artificial Sequence
  Synthetic oligonucleotide
tagtaggaaatttccagggacctcaagtcc

SEQ ID NO: 401765 - DNA, 30 bp, Artificial Sequence
  Synthetic oligonucleotide
tacgaggggcgtactgagtttaagaagtcc

SEQ ID NO: 401766 - DNA, 30 bp, Artificial Sequence
  Synthetic oligonucleotide
aatcacgtatgaggtaatcacccgaagtcc

SEQ ID NO: 401767 - DNA, 30 bp, Artificial Sequence
  Synthetic oligonucleotide
aaggacttgcattcgtcaaacgctaagtcc

SEQ ID NO: 401768 - DNA, 30 bp, Artificial Sequence
  Synthetic oligonucleotide
atttccttgatttgccgattacttaagtcc

SEQ ID NO: 401769 - DNA, 30 bp, Artificial Sequence
  Synthetic oligonucleotide
acgacacttcctggattctggcaacagtcc

SEQ ID NO: 401770 - DNA, 30 bp, Artificial Sequence
  Synthetic oligonucleotide
taatagcgcagtttgcggtgggaccagtcc

SEQ ID NO: 401771 - DNA, 30 bp, Artificial Sequence
  Synthetic oligonucleotide
cttttgtagtaggggaaacggatccagtcc

SEQ ID NO: 401772 - DNA, 30 bp, Artificial Sequence
  Synthetic oligonucleotide
cgttgacgaaggcttaaggggctccagtcc

SEQ ID NO: 401773 - DNA, 30 bp, Artificial Sequence
  Synthetic oligonucleotide
gacgtcactagtgtctggttcacgcagtcc

SEQ ID NO: 401774 - DNA, 30 bp, Artificial Sequence
  Synthetic oligonucleotide
ttacgttgtacacggacgtttccgcagtcc

SEQ ID NO: 401775 - DNA, 30 bp, Artificial Sequence
  Synthetic oligonucleotide
taatcgggccaactgaggactgctcagtcc

SEQ ID NO: 401776 - DNA, 30 bp, Artificial Sequence
  Synthetic oligonucleotide
tagtacctacgtcttagggccgaagagtcc

SEQ ID NO: 401777 - DNA, 30 bp, Artificial Sequence
  Synthetic oligonucleotide
ccgggggcgcaacttgaggaagtagagtcc

SEQ ID NO: 401778 - DNA, 30 bp, Artificial Sequence
  Synthetic oligonucleotide
tcgttcgcgccccaactccgtgtagagtcc

SEQ ID NO: 401779 - DNA, 30 bp, Artificial Sequence
  Synthetic oligonucleotide
gtcctacgtgaccgagccgcattagagtcc

SEQ ID NO: 401780 - DNA, 30 bp, Artificial Sequence
  Synthetic oligonucleotide
agaggacccgcgctctaaggttacgagtcc

SEQ ID NO: 401781 - DNA, 30 bp, Artificial Sequence
  Synthetic oligonucleotide
ccgagatcctttgttgacccggcatagtcc

SEQ ID NO: 401782 - DNA, 30 bp, Artificial Sequence
  Synthetic oligonucleotide
tgagatcccgggctcgaccagacctagtcc

SEQ ID NO: 401783 - DNA, 30 bp, Artificial Sequence
  Synthetic oligonucleotide
accgcagccggttatctcgaactctagtcc

SEQ ID NO: 401784 - DNA, 30 bp, Artificial Sequence
  Synthetic oligonucleotide
taagtagtttctgggtaagaatcgtagtcc

SEQ ID NO: 401785 - DNA, 30 bp, Artificial Sequence
  Synthetic oligonucleotide
ctctcactataatcaaattggaatacgtcc

SEQ ID NO: 401786 - DNA, 30 bp, Artificial Sequence
  Synthetic oligonucleotide
gagcactcgcaatcctcaggacgtacgtcc

SEQ ID NO: 401787 - DNA, 30 bp, Artificial Sequence
  Synthetic oligonucleotide
agagaacatggtggtcagttgcgtacgtcc

SEQ ID NO: 401788 - DNA, 30 bp, Artificial Sequence
  Synthetic oligonucleotide
ctaaaccccggttgatgggtgcttacgtcc

SEQ ID NO: 401789 - DNA, 30 bp, Artificial Sequence
  Synthetic oligonucleotide
atcgaacgtcaatggggtcgaaaaccgtcc

SEQ ID NO: 401790 - DNA, 30 bp, Artificial Sequence
  Synthetic oligonucleotide
gcggcacagtcgttgattaaagaaccgtcc

SEQ ID NO: 401791 - DNA, 30 bp, Artificial Sequence
  Synthetic oligonucleotide
tttctcacatggagattcatggacccgtcc

SEQ ID NO: 401792 - DNA, 30 bp, Artificial Sequence
  Synthetic oligonucleotide
aactagcgttggaaggcgcctaacgcgtcc

SEQ ID NO: 401793 - DNA, 30 bp, Artificial Sequence
  Synthetic oligonucleotide
gctcacaaatatgttcttggacgcgcgtcc

SEQ ID NO: 401794 - DNA, 30 bp, Artificial Sequence
  Synthetic oligonucleotide
accggctcctgtgttcaggcgaaggcgtcc

SEQ ID NO: 401795 - DNA, 30 bp, Artificial Sequence
  Synthetic oligonucleotide
tacggatagatgcttggtacgcaggcgtcc

SEQ ID NO: 401796 - DNA, 30 bp, Artificial Sequence
  Synthetic oligonucleotide
atccggtgtcgaacgctacacactgcgtcc

SEQ ID NO: 401797 - DNA, 30 bp, Artificial Sequence
  Synthetic oligonucleotide
ccagtacctgcatgatgtatcgctgcgtcc

SEQ ID NO: 401798 - DNA, 30 bp, Artificial Sequence
  Synthetic oligonucleotide
aacgcaagcatgattcggcactgatcgtcc

SEQ ID NO: 401799 - DNA, 30 bp, Artificial Sequence
  Synthetic oligonucleotide
gaacctaggtgcgccagtctagcctcgtcc

SEQ ID NO: 401800 - DNA, 30 bp, Artificial Sequence
  Synthetic oligonucleotide
ccaaactcgtcctccggaaggccttcgtcc

SEQ ID NO: 401801 - DNA, 30 bp, Artificial Sequence
  Synthetic oligonucleotide
tgtatgatcgtgacctattccggttcgtcc

SEQ ID NO: 401802 - DNA, 29 bp, Artificial Sequence
  Synthetic oligonucleotide
ataactcgcgcggaaggcgcgtttcgtcc

SEQ ID NO: 401803 - DNA, 30 bp, Artificial Sequence
  Synthetic oligonucleotide
caatcattaggtgtttgtggaccaaggtcc

SEQ ID NO: 401804 - DNA, 30 bp, Artificial Sequence
  Synthetic oligonucleotide
cgagcgttacgatacgcccgtccaaggtcc

SEQ ID NO: 401805 - DNA, 30 bp, Artificial Sequence
  Synthetic oligonucleotide
ccactgagagagccagcggcgtcaaggtcc

SEQ ID NO: 401806 - DNA, 31 bp, Artificial Sequence
  Synthetic oligonucleotide
actccaccccgagcatgagcacaacaggtcc

SEQ ID NO: 401807 - DNA, 30 bp, Artificial Sequence
  Synthetic oligonucleotide
ctcgaacctttccgcgctgatgacaggtcc

SEQ ID NO: 401808 - DNA, 30 bp, Artificial Sequence
  Synthetic oligonucleotide
cgtagtagactggtttcaaaaacgaggtcc

SEQ ID NO: 401809 - DNA, 30 bp, Artificial Sequence
  Synthetic oligonucleotide
cagctttagatcctcgatactatgaggtcc

SEQ ID NO: 401810 - DNA, 30 bp, Artificial Sequence
  Synthetic oligonucleotide
gggagggatactctagtatagggtaggtcc

SEQ ID NO: 401811 - DNA, 30 bp, Artificial Sequence
  Synthetic oligonucleotide
gaagacgccaatgtgacctgatttaggtcc

SEQ ID NO: 401812 - DNA, 30 bp, Artificial Sequence
  Synthetic oligonucleotide
atcaccagtattaactttaaggaacggtcc

SEQ ID NO: 401813 - DNA, 30 bp, Artificial Sequence
  Synthetic oligonucleotide
tatctagacctgatgacctcagtacggtcc

SEQ ID NO: 401814 - DNA, 30 bp, Artificial Sequence
  Synthetic oligonucleotide
gagagaaagcccgagataattccgcggtcc

SEQ ID NO: 401815 - DNA, 30 bp, Artificial Sequence
  Synthetic oligonucleotide
gtaatcacggcgatgtttttgcggcggtcc

SEQ ID NO: 401816 - DNA, 30 bp, Artificial Sequence
  Synthetic oligonucleotide
tacgctgcgcaatacatatatatgcggtcc

SEQ ID NO: 401817 - DNA, 30 bp, Artificial Sequence
  Synthetic oligonucleotide
cacgcgatgaaccatctgacgcaagggtcc

SEQ ID NO: 401818 - DNA, 30 bp, Artificial Sequence
  Synthetic oligonucleotide
cgcgggaacaataacattcaccacgggtcc

SEQ ID NO: 401819 - DNA, 30 bp, Artificial Sequence
  Synthetic oligonucleotide
atgtgattaacgacgccaggttgcgggtcc

SEQ ID NO: 401820 - DNA, 30 bp, Artificial Sequence
  Synthetic oligonucleotide
tataagggtagcgtggaattgagggggtcc

SEQ ID NO: 401821 - DNA, 30 bp, Artificial Sequence
  Synthetic oligonucleotide
cttatcccttctggaatcttacttgggtcc

SEQ ID NO: 401822 - DNA, 30 bp, Artificial Sequence
  Synthetic oligonucleotide
cgccgggccgaatggggcaaaccatggtcc

SEQ ID NO: 401823 - DNA, 30 bp, Artificial Sequence
  Synthetic oligonucleotide
tccaccgggcatgtgaaccgactatggtcc

SEQ ID NO: 401824 - DNA, 30 bp, Artificial Sequence
  Synthetic oligonucleotide
cgacccagaggattgtaagacgtctggtcc

SEQ ID NO: 401825 - DNA, 30 bp, Artificial Sequence
  Synthetic oligonucleotide
tacccccacatgtgtaggcttttgtggtcc

SEQ ID NO: 401826 - DNA, 30 bp, Artificial Sequence
  Synthetic oligonucleotide
aactgcctaaattatttaccaaattggtcc

SEQ ID NO: 401827 - DNA, 30 bp, Artificial Sequence
  Synthetic oligonucleotide
tacaggtgtcgctgcgacctcagttggtcc

SEQ ID NO: 401828 - DNA, 30 bp, Artificial Sequence
  Synthetic oligonucleotide
ctgtaaaatatctcggttcgaatttggtcc

SEQ ID NO: 401829 - DNA, 30 bp, Artificial Sequence
  Synthetic oligonucleotide
gtccggggtaagtgggaatagctaatgtcc

SEQ ID NO: 401830 - DNA, 30 bp, Artificial Sequence
  Synthetic oligonucleotide
ctgattagcgtccaaacggaggacatgtcc

SEQ ID NO: 401831 - DNA, 30 bp, Artificial Sequence
  Synthetic oligonucleotide
attcgacccacatgtagggcctacatgtcc

SEQ ID NO: 401832 - DNA, 30 bp, Artificial Sequence
  Synthetic oligonucleotide
aagaaactaatttatttggtaaagatgtcc

SEQ ID NO: 401833 - DNA, 30 bp, Artificial Sequence
  Synthetic oligonucleotide
ctaatccgcgcgcgaactcaaccgatgtcc

SEQ ID NO: 401834 - DNA, 30 bp, Artificial Sequence
  Synthetic oligonucleotide
caagaatccttgttcaaagttaggatgtcc

SEQ ID NO: 401835 - DNA, 30 bp, Artificial Sequence
  Synthetic oligonucleotide
attcatgctacgaggaaggcatctatgtcc

SEQ ID NO: 401836 - DNA, 30 bp, Artificial Sequence
  Synthetic oligonucleotide
ttttggatacagtctttcctgtctatgtcc

SEQ ID NO: 401837 - DNA, 30 bp, Artificial Sequence
  Synthetic oligonucleotide
aactacacctttaacttcttgaaactgtcc

SEQ ID NO: 401838 - DNA, 30 bp, Artificial Sequence
  Synthetic oligonucleotide
tgcggtgcttgtcaatcagtttcgctgtcc

SEQ ID NO: 401839 - DNA, 30 bp, Artificial Sequence
  Synthetic oligonucleotide
cccgtttgacaggagcttagtgatctgtcc

SEQ ID NO: 401840 - DNA, 30 bp, Artificial Sequence
  Synthetic oligonucleotide
gcgggtttgattcttcatgtagacgtgtcc

SEQ ID NO: 401841 - DNA, 30 bp, Artificial Sequence
  Synthetic oligonucleotide
aaagaacccatttggggtgcaatcgtgtcc

SEQ ID NO: 401842 - DNA, 30 bp, Artificial Sequence
  Synthetic oligonucleotide
ctgggcgcgggcaccttctgtagggtgtcc

SEQ ID NO: 401843 - DNA, 30 bp, Artificial Sequence
  Synthetic oligonucleotide
ttcggagcaggctgaaatcgtcgggtgtcc

SEQ ID NO: 401844 - DNA, 30 bp, Artificial Sequence
  Synthetic oligonucleotide
aatgacccaccatttagggtgactgtgtcc

SEQ ID NO: 401845 - DNA, 30 bp, Artificial Sequence
  Synthetic oligonucleotide
acggagcctggatcatgtctggcattgtcc

SEQ ID NO: 401846 - DNA, 30 bp, Artificial Sequence
  Synthetic oligonucleotide
ctgtcaattcaacattatgcgagcttgtcc

SEQ ID NO: 401847 - DNA, 30 bp, Artificial Sequence
  Synthetic oligonucleotide
ggacgtaaacgcactgagacgggcttgtcc

SEQ ID NO: 401848 - DNA, 30 bp, Artificial Sequence
  Synthetic oligonucleotide
tatgttctctcagtaccacttacgttgtcc

SEQ ID NO: 401849 - DNA, 30 bp, Artificial Sequence
  Synthetic oligonucleotide
acggatgcaggttcaggtcggctgttgtcc

SEQ ID NO: 401850 - DNA, 30 bp, Artificial Sequence
  Synthetic oligonucleotide
ttattacgttgaacataaatccttttgtcc

SEQ ID NO: 401851 - DNA, 30 bp, Artificial Sequence
  Synthetic oligonucleotide
gctattgtaactaggaaataggttttgtcc

SEQ ID NO: 401852 - DNA, 30 bp, Artificial Sequence
  Synthetic oligonucleotide
tataatggatgctaaccatgtcgaaattcc

SEQ ID NO: 401853 - DNA, 30 bp, Artificial Sequence
  Synthetic oligonucleotide
tctagtattaaaaggggatattacaattcc

SEQ ID NO: 401854 - DNA, 30 bp, Artificial Sequence
  Synthetic oligonucleotide
cgcagtatggtagtgggtcttggcaattcc

SEQ ID NO: 401855 - DNA, 30 bp, Artificial Sequence
  Synthetic oligonucleotide
cagcttgtcatctggccttcattcaattcc

SEQ ID NO: 401856 - DNA, 30 bp, Artificial Sequence
  Synthetic oligonucleotide
caaggaggacgtagttctaatttcaattcc

SEQ ID NO: 401857 - DNA, 30 bp, Artificial Sequence
  Synthetic oligonucleotide
atgtaattgcttttctacctgattaattcc

SEQ ID NO: 401858 - DNA, 30 bp, Artificial Sequence
  Synthetic oligonucleotide
agaaccacttcgcataggagggtacattcc

SEQ ID NO: 401859 - DNA, 30 bp, Artificial Sequence
  Synthetic oligonucleotide
tgcttagcccttgactgatgacatcattcc

SEQ ID NO: 401860 - DNA, 30 bp, Artificial Sequence
  Synthetic oligonucleotide
acagcatatggagcaaatcacacagattcc

SEQ ID NO: 401861 - DNA, 30 bp, Artificial Sequence
  Synthetic oligonucleotide
acaggaacgctctaatataattcagattcc

SEQ ID NO: 401862 - DNA, 30 bp, Artificial Sequence
  Synthetic oligonucleotide
ggcttaccgaaaattacccttcgagattcc

SEQ ID NO: 401863 - DNA, 30 bp, Artificial Sequence
  Synthetic oligonucleotide
catggccctcagaccgacagtgtagattcc

SEQ ID NO: 401864 - DNA, 30 bp, Artificial Sequence
  Synthetic oligonucleotide
tgcccggttaggagaggcaacgccgattcc

SEQ ID NO: 401865 - DNA, 30 bp, Artificial Sequence
  Synthetic oligonucleotide
aaaccacaaggaatacgagaatccgattcc

SEQ ID NO: 401866 - DNA, 30 bp, Artificial Sequence
  Synthetic oligonucleotide
cacggtccgggggcacggacatgggattcc

SEQ ID NO: 401867 - DNA, 30 bp, Artificial Sequence
  Synthetic oligonucleotide
cagacacgtttataagcgaccttggattcc

SEQ ID NO: 401868 - DNA, 30 bp, Artificial Sequence
  Synthetic oligonucleotide
aaccataacatgagtgtggtgtatgattcc

SEQ ID NO: 401869 - DNA, 30 bp, Artificial Sequence
  Synthetic oligonucleotide
tttcatggatcatattggtacactgattcc

SEQ ID NO: 401870 - DNA, 30 bp, Artificial Sequence
  Synthetic oligonucleotide
tgatttgcatcgacccaccgtttatattcc

SEQ ID NO: 401871 - DNA, 30 bp, Artificial Sequence
  Synthetic oligonucleotide
agcacgaggagccgcatatgtagctattcc

SEQ ID NO: 401872 - DNA, 30 bp, Artificial Sequence
  Synthetic oligonucleotide
atgaacgcactcgtcacgcaacggtattcc

SEQ ID NO: 401873 - DNA, 30 bp, Artificial Sequence
  Synthetic oligonucleotide
tcgagtctataaaccaactagtattattcc

SEQ ID NO: 401874 - DNA, 30 bp, Artificial Sequence
  Synthetic oligonucleotide
gcaaatattcctgtatttttgccaacttcc

SEQ ID NO: 401875 - DNA, 30 bp, Artificial Sequence
  Synthetic oligonucleotide
gctgtattttcaacattatcatacacttcc

SEQ ID NO: 401876 - DNA, 30 bp, Artificial Sequence
  Synthetic oligonucleotide
tacaggcagaccaagggatgtaccacttcc

SEQ ID NO: 401877 - DNA, 30 bp, Artificial Sequence
  Synthetic oligonucleotide
tagattgttgccttcagaagaacgacttcc

SEQ ID NO: 401878 - DNA, 30 bp, Artificial Sequence
  Synthetic oligonucleotide
gtcttccacatagagaagtcgttgacttcc

SEQ ID NO: 401879 - DNA, 30 bp, Artificial Sequence
  Synthetic oligonucleotide
ggatacagacagtattgttaaactacttcc

SEQ ID NO: 401880 - DNA, 30 bp, Artificial Sequence
  Synthetic oligonucleotide
taatagggtccgatccggcttgctacttcc

SEQ ID NO: 401881 - DNA, 30 bp, Artificial Sequence
  Synthetic oligonucleotide
caggtagtaaggttaaggagtcttacttcc

SEQ ID NO: 401882 - DNA, 30 bp, Artificial Sequence
  Synthetic oligonucleotide
cgaaggccaggggggagggttaacccttcc

SEQ ID NO: 401883 - DNA, 30 bp, Artificial Sequence
  Synthetic oligonucleotide
gccccatatatagctgcaactgatccttcc

SEQ ID NO: 401884 - DNA, 30 bp, Artificial Sequence
  Synthetic oligonucleotide
tcggaagtattcgatctacgaactccttcc

SEQ ID NO: 401885 - DNA, 30 bp, Artificial Sequence
  Synthetic oligonucleotide
attacgcacatcccaccaatagtagcttcc

SEQ ID NO: 401886 - DNA, 31 bp, Artificial Sequence
  Synthetic oligonucleotide
attagtattactacctctcttgttagcttcc

SEQ ID NO: 401887 - DNA, 31 bp, Artificial Sequence
  Synthetic oligonucleotide
ccttccgcccagagagcctaggatcgcttcc

SEQ ID NO: 401888 - DNA, 30 bp, Artificial Sequence
  Synthetic oligonucleotide
tttaccttcggacgggagacccctgcttcc

SEQ ID NO: 401889 - DNA, 30 bp, Artificial Sequence
  Synthetic oligonucleotide
gcaaaagatagcgagaactttgctgcttcc

SEQ ID NO: 401890 - DNA, 30 bp, Artificial Sequence
  Synthetic oligonucleotide
ggatctaactgcggaaaactatcctcttcc

SEQ ID NO: 401891 - DNA, 30 bp, Artificial Sequence
  Synthetic oligonucleotide
gggagaacattacacggtggtttctcttcc

SEQ ID NO: 401892 - DNA, 30 bp, Artificial Sequence
  Synthetic oligonucleotide
gagcccattagggtaagaattaagtcttcc

SEQ ID NO: 401893 - DNA, 31 bp, Artificial Sequence
  Synthetic oligonucleotide
catggttctaggctgccgaacggagtcttcc

SEQ ID NO: 401894 - DNA, 30 bp, Artificial Sequence
  Synthetic oligonucleotide
gacagaaaccgtgggcatcccctgtcttcc

SEQ ID NO: 401895 - DNA, 30 bp, Artificial Sequence
  Synthetic oligonucleotide
gccccacaaaccgcattggaactttcttcc

SEQ ID NO: 401896 - DNA, 30 bp, Artificial Sequence
  Synthetic oligonucleotide
ttggatgacaagtggcgttagtaaagttcc

SEQ ID NO: 401897 - DNA, 30 bp, Artificial Sequence
  Synthetic oligonucleotide
gtcttgtacgttcagggactaaacagttcc

SEQ ID NO: 401898 - DNA, 30 bp, Artificial Sequence
  Synthetic oligonucleotide
tccatgctacgactgatatgacagagttcc

SEQ ID NO: 401899 - DNA, 30 bp, Artificial Sequence
  Synthetic oligonucleotide
gatatgtgacggccaaggtcttgtagttcc

SEQ ID NO: 401900 - DNA, 30 bp, Artificial Sequence
  Synthetic oligonucleotide
gcatttaccgtcttcgatgaagaacgttcc

SEQ ID NO: 401901 - DNA, 30 bp, Artificial Sequence
  Synthetic oligonucleotide
ggcaaccctaaactgcgggccgaacgttcc

SEQ ID NO: 401902 - DNA, 30 bp, Artificial Sequence
  Synthetic oligonucleotide
gctgcacgtttgatcgtgcacgaccgttcc

SEQ ID NO: 401903 - DNA, 30 bp, Artificial Sequence
  Synthetic oligonucleotide
tgcagttcttcgggggccgatcagcgttcc

SEQ ID NO: 401904 - DNA, 30 bp, Artificial Sequence
  Synthetic oligonucleotide
tgcgacgaaggcaaaaggtcgaatcgttcc

SEQ ID NO: 401905 - DNA, 30 bp, Artificial Sequence
  Synthetic oligonucleotide
tgcgtgcaactgttcattgctgctcgttcc

SEQ ID NO: 401906 - DNA, 30 bp, Artificial Sequence
  Synthetic oligonucleotide
agcatttgatgagtaggcacccgtcgttcc

SEQ ID NO: 401907 - DNA, 30 bp, Artificial Sequence
  Synthetic oligonucleotide
cacatgtatctcgccgggggttcgggttcc

SEQ ID NO: 401908 - DNA, 30 bp, Artificial Sequence
  Synthetic oligonucleotide
aggggtattatgggtcaattacctggttcc

SEQ ID NO: 401909 - DNA, 30 bp, Artificial Sequence
  Synthetic oligonucleotide
actgacgggaaaggaagacttagtggttcc

SEQ ID NO: 401910 - DNA, 30 bp, Artificial Sequence
  Synthetic oligonucleotide
ctgcgcgacgtatgtagcctgcgtggttcc

SEQ ID NO: 401911 - DNA, 30 bp, Artificial Sequence
  Synthetic oligonucleotide
gatccttaaaacaaattcttggttggttcc

SEQ ID NO: 401912 - DNA, 30 bp, Artificial Sequence
  Synthetic oligonucleotide
aatcacggccgcccccggaaggactgttcc

SEQ ID NO: 401913 - DNA, 30 bp, Artificial Sequence
  Synthetic oligonucleotide
gacgcgctccatcgggccaccacctgttcc

SEQ ID NO: 401914 - DNA, 30 bp, Artificial Sequence
  Synthetic oligonucleotide
aaagaatgccagtatgacactttttgttcc

SEQ ID NO: 401915 - DNA, 30 bp, Artificial Sequence
  Synthetic oligonucleotide
cagaatatctaaacattgttgcacatttcc

SEQ ID NO: 401916 - DNA, 30 bp, Artificial Sequence
  Synthetic oligonucleotide
aaggtggcgtgcagcccaccgaccatttcc

SEQ ID NO: 401917 - DNA, 30 bp, Artificial Sequence
  Synthetic oligonucleotide
actcgttataaaccttcatgtaccatttcc

SEQ ID NO: 401918 - DNA, 30 bp, Artificial Sequence
  Synthetic oligonucleotide
ccactggcccggggtggagaagccatttcc

SEQ ID NO: 401919 - DNA, 30 bp, Artificial Sequence
  Synthetic oligonucleotide
ccgcatttattcgttggtactgtcatttcc

SEQ ID NO: 401920 - DNA, 30 bp, Artificial Sequence
  Synthetic oligonucleotide
ccacgcatcttctggacgtcgacgatttcc

SEQ ID NO: 401921 - DNA, 30 bp, Artificial Sequence
  Synthetic oligonucleotide
gggtaccttactttctgcgcgtcgatttcc

SEQ ID NO: 401922 - DNA, 30 bp, Artificial Sequence
  Synthetic oligonucleotide
acagtttaagattaggctgatagtatttcc

SEQ ID NO: 401923 - DNA, 30 bp, Artificial Sequence
  Synthetic oligonucleotide
aaagtgttgaggcgaattaagacactttcc

SEQ ID NO: 401924 - DNA, 30 bp, Artificial Sequence
  Synthetic oligonucleotide
atacatagaacatgcaggccgtagctttcc

SEQ ID NO: 401925 - DNA, 30 bp, Artificial Sequence
  Synthetic oligonucleotide
aatggtaggtgtaggtgaatcaggctttcc

SEQ ID NO: 401926 - DNA, 30 bp, Artificial Sequence
  Synthetic oligonucleotide
agagccaccagagggtctttcggtctttcc

SEQ ID NO: 401927 - DNA, 30 bp, Artificial Sequence
  Synthetic oligonucleotide
agacagtaatgcatactcaattcagtttcc

SEQ ID NO: 401928 - DNA, 30 bp, Artificial Sequence
  Synthetic oligonucleotide
taggatcttaccacggaaacgcaggtttcc

SEQ ID NO: 401929 - DNA, 30 bp, Artificial Sequence
  Synthetic oligonucleotide
aagtccgtgttaatagattcctaggtttcc

SEQ ID NO: 401930 - DNA, 30 bp, Artificial Sequence
  Synthetic oligonucleotide
tctgaaaaagcgaaatttactgcggtttcc

SEQ ID NO: 401931 - DNA, 30 bp, Artificial Sequence
  Synthetic oligonucleotide
gtgtattcgctggagaatacagctgtttcc

SEQ ID NO: 401932 - DNA, 30 bp, Artificial Sequence
  Synthetic oligonucleotide
gctaagaaaatattccaaccgcaattttcc

SEQ ID NO: 401933 - DNA, 30 bp, Artificial Sequence
  Synthetic oligonucleotide
taagaggtggaacgataagggatgttttcc

SEQ ID NO: 401934 - DNA, 30 bp, Artificial Sequence
  Synthetic oligonucleotide
agtgtagctggatagtggattcatttttcc

SEQ ID NO: 401935 - DNA, 30 bp, Artificial Sequence
  Synthetic oligonucleotide
agatcggaccacacctggaggcctttttcc

SEQ ID NO: 401936 - DNA, 30 bp, Artificial Sequence
  Synthetic oligonucleotide
aagtcccccaagtgctaaacccaaaaaagc

SEQ ID NO: 401937 - DNA, 30 bp, Artificial Sequence
  Synthetic oligonucleotide
ctctaaggacactctccgcttcaaaaaagc

SEQ ID NO: 401938 - DNA, 30 bp, Artificial Sequence
  Synthetic oligonucleotide
aagtctgaacgcttagtatccataaaaagc

SEQ ID NO: 401939 - DNA, 30 bp, Artificial Sequence
  Synthetic oligonucleotide
atttagcgtttagcggcgttgcgcaaaagc

SEQ ID NO: 401940 - DNA, 30 bp, Artificial Sequence
  Synthetic oligonucleotide
aacttggggttgccagtttccctcaaaagc

SEQ ID NO: 401941 - DNA, 30 bp, Artificial Sequence
  Synthetic oligonucleotide
tgactcgttcatagaatgcggaagcaaagc

SEQ ID NO: 401942 - DNA, 30 bp, Artificial Sequence
  Synthetic oligonucleotide
ggagcaactgaatgccgtccgtggcaaagc

SEQ ID NO: 401943 - DNA, 30 bp, Artificial Sequence
  Synthetic oligonucleotide
tagcgtttcctatagttactagatcaaagc

SEQ ID NO: 401944 - DNA, 30 bp, Artificial Sequence
  Synthetic oligonucleotide
atctgtgaagtcgctgttgggtaagaaagc

SEQ ID NO: 401945 - DNA, 30 bp, Artificial Sequence
  Synthetic oligonucleotide
tggccgacgcgaaggacgttcgacgaaagc

SEQ ID NO: 401946 - DNA, 30 bp, Artificial Sequence
  Synthetic oligonucleotide
tcttcaggaggaccctggtatacggaaagc

SEQ ID NO: 401947 - DNA, 30 bp, Artificial Sequence
  Synthetic oligonucleotide
ttctacgctatctgatacacattggaaagc

SEQ ID NO: 401948 - DNA, 30 bp, Artificial Sequence
  Synthetic oligonucleotide
gacgcacggatcaagaaataaactgaaagc

SEQ ID NO: 401949 - DNA, 30 bp, Artificial Sequence
  Synthetic oligonucleotide
tccggccttggcggctggcgtcctgaaagc

SEQ ID NO: 401950 - DNA, 30 bp, Artificial Sequence
  Synthetic oligonucleotide
caactgtccgcgaatcatgtcacataaagc

SEQ ID NO: 401951 - DNA, 30 bp, Artificial Sequence
  Synthetic oligonucleotide
gcagggcgggtttaaaggcgagtataaagc

SEQ ID NO: 401952 - DNA, 30 bp, Artificial Sequence
  Synthetic oligonucleotide
tcatgtatgaccccctaaatagtataaagc

SEQ ID NO: 401953 - DNA, 30 bp, Artificial Sequence
  Synthetic oligonucleotide
ttgcctacaagctattagctcgcttaaagc

SEQ ID NO: 401954 - DNA, 30 bp, Artificial Sequence
  Synthetic oligonucleotide
gatcagtccgcgccttcccggaaaacaagc

SEQ ID NO: 401955 - DNA, 30 bp, Artificial Sequence
  Synthetic oligonucleotide
cagcagttcctgtaatcggagataacaagc

SEQ ID NO: 401956 - DNA, 30 bp, Artificial Sequence
  Synthetic oligonucleotide
gataacgtagtactatcgcggttaacaagc

SEQ ID NO: 401957 - DNA, 30 bp, Artificial Sequence
  Synthetic oligonucleotide
ctcgggactatcagaaacacatagacaagc

SEQ ID NO: 401958 - DNA, 30 bp, Artificial Sequence
  Synthetic oligonucleotide
ggctattgatggccgtactttcatacaagc

SEQ ID NO: 401959 - DNA, 30 bp, Artificial Sequence
  Synthetic oligonucleotide
ttagcaacgagcggctttagccgtacaagc

SEQ ID NO: 401960 - DNA, 30 bp, Artificial Sequence
  Synthetic oligonucleotide
tcagtggtcggtatcccggtagcaccaagc

SEQ ID NO: 401961 - DNA, 30 bp, Artificial Sequence
  Synthetic oligonucleotide
taacagtcatatgcagctgggcacccaagc

SEQ ID NO: 401962 - DNA, 30 bp, Artificial Sequence
  Synthetic oligonucleotide
ataagagctattgagcgccgggagccaagc

SEQ ID NO: 401963 - DNA, 30 bp, Artificial Sequence
  Synthetic oligonucleotide
ggatggtccggaaccctgccgcttccaagc

SEQ ID NO: 401964 - DNA, 30 bp, Artificial Sequence
  Synthetic oligonucleotide
ggacgccagctatcgaaagccaaagcaagc

SEQ ID NO: 401965 - DNA, 30 bp, Artificial Sequence
  Synthetic oligonucleotide
aattgtacgcgcggaccaaaactagcaagc

SEQ ID NO: 401966 - DNA, 30 bp, Artificial Sequence
  Synthetic oligonucleotide
aaagtgccagtaaccactcggaccgcaagc

SEQ ID NO: 401967 - DNA, 30 bp, Artificial Sequence
  Synthetic oligonucleotide
atgatttacaagtatcgacagctcgcaagc

SEQ ID NO: 401968 - DNA, 30 bp, Artificial Sequence
  Synthetic oligonucleotide
ggttgctttcccgcaagaccgacggcaagc

SEQ ID NO: 401969 - DNA, 30 bp, Artificial Sequence
  Synthetic oligonucleotide
gttgattaagagagtgataattctgcaagc

SEQ ID NO: 401970 - DNA, 30 bp, Artificial Sequence
  Synthetic oligonucleotide
gagtctagacagcgttggcagaaatcaagc

SEQ ID NO: 401971 - DNA, 30 bp, Artificial Sequence
  Synthetic oligonucleotide
gaatcgctaaagcgccagtttggatcaagc

SEQ ID NO: 401972 - DNA, 30 bp, Artificial Sequence
  Synthetic oligonucleotide
taagggtcttgcacatgcttaggctcaagc

SEQ ID NO: 401973 - DNA, 30 bp, Artificial Sequence
  Synthetic oligonucleotide
aggcaatgaatgagatacgcactctcaagc

SEQ ID NO: 401974 - DNA, 30 bp, Artificial Sequence
  Synthetic oligonucleotide
gacaatgaaattccgccaggtctctcaagc

SEQ ID NO: 401975 - DNA, 30 bp, Artificial Sequence
  Synthetic oligonucleotide
ggatagaacatcttaatccgtacgtcaagc

SEQ ID NO: 401976 - DNA, 30 bp, Artificial Sequence
  Synthetic oligonucleotide
gcttaaagaaggtatatcgggccgtcaagc

SEQ ID NO: 401977 - DNA, 30 bp, Artificial Sequence
  Synthetic oligonucleotide
tcggttttggtaatttatccagcgtcaagc

SEQ ID NO: 401978 - DNA, 30 bp, Artificial Sequence
  Synthetic oligonucleotide
agtcaacctgctcgaatagtattaagaagc

SEQ ID NO: 401979 - DNA, 30 bp, Artificial Sequence
  Synthetic oligonucleotide
cgggcggtcagtgagaatgggttaagaagc

SEQ ID NO: 401980 - DNA, 30 bp, Artificial Sequence
  Synthetic oligonucleotide
tatggtgtattcaccaaaacgcgcagaagc

SEQ ID NO: 401981 - DNA, 30 bp, Artificial Sequence
  Synthetic oligonucleotide
taccgatccattcattagatgaatagaagc

SEQ ID NO: 401982 - DNA, 30 bp, Artificial Sequence
  Synthetic oligonucleotide
gatggtacgacgagcccgtatctacgaagc

SEQ ID NO: 401983 - DNA, 30 bp, Artificial Sequence
  Synthetic oligonucleotide
gactacgttacacgctcgattagccgaagc

SEQ ID NO: 401984 - DNA, 30 bp, Artificial Sequence
  Synthetic oligonucleotide
gtacgaattttgctcttaatgaatcgaagc

SEQ ID NO: 401985 - DNA, 30 bp, Artificial Sequence
  Synthetic oligonucleotide
agcggcacaatgtttgcagctggtcgaagc

SEQ ID NO: 401986 - DNA, 30 bp, Artificial Sequence
  Synthetic oligonucleotide
ccttgaataaggattaattgtctaggaagc

SEQ ID NO: 401987 - DNA, 30 bp, Artificial Sequence
  Synthetic oligonucleotide
atgtcagatagcattctgaactttggaagc

SEQ ID NO: 401988 - DNA, 30 bp, Artificial Sequence
  Synthetic oligonucleotide
cgagtatactaggattcggcagactgaagc

SEQ ID NO: 401989 - DNA, 30 bp, Artificial Sequence
  Synthetic oligonucleotide
caccaatggttattttaggaccgttgaagc

SEQ ID NO: 401990 - DNA, 30 bp, Artificial Sequence
  Synthetic oligonucleotide
tggggtacggtgtgcatagcactaataagc

SEQ ID NO: 401991 - DNA, 30 bp, Artificial Sequence
  Synthetic oligonucleotide
aatcagaacaccaccatctgcatcataagc

SEQ ID NO: 401992 - DNA, 30 bp, Artificial Sequence
  Synthetic oligonucleotide
aatgcatcggattacgtggcggtcataagc

SEQ ID NO: 401993 - DNA, 27 bp, Artificial Sequence
  Synthetic oligonucleotide
gtcgaagcaaattgaataaatataagc

SEQ ID NO: 401994 - DNA, 30 bp, Artificial Sequence
  Synthetic oligonucleotide
actgttaaattgggcagttggcttataagc

SEQ ID NO: 401995 - DNA, 30 bp, Artificial Sequence
  Synthetic oligonucleotide
acaatgagcgttgcggttccccacctaagc

SEQ ID NO: 401996 - DNA, 30 bp, Artificial Sequence
  Synthetic oligonucleotide
gtatgttaataactgatatatcttctaagc

SEQ ID NO: 401997 - DNA, 30 bp, Artificial Sequence
  Synthetic oligonucleotide
gaaatagcattgcgcacgttttttctaagc

SEQ ID NO: 401998 - DNA, 30 bp, Artificial Sequence
  Synthetic oligonucleotide
cagtagcgcgccttgactgcagaagtaagc

SEQ ID NO: 401999 - DNA, 30 bp, Artificial Sequence
  Synthetic oligonucleotide
ctttgcgttaatgggctacgcagagtaagc

SEQ ID NO: 402000 - DNA, 30 bp, Artificial Sequence
  Synthetic oligonucleotide
tagtattacctaggaggcctgtacgtaagc

SEQ ID NO: 402001 - DNA, 30 bp, Artificial Sequence
  Synthetic oligonucleotide
ttcgctcatagtctccccttggcggtaagc

SEQ ID NO: 402002 - DNA, 30 bp, Artificial Sequence
  Synthetic oligonucleotide
agcctgctacgtcacagggcattggtaagc

SEQ ID NO: 402003 - DNA, 30 bp, Artificial Sequence
  Synthetic oligonucleotide
gggggtcgcaccggtaatgtaaatgtaagc

SEQ ID NO: 402004 - DNA, 30 bp, Artificial Sequence
  Synthetic oligonucleotide
gcatcgattgtccccaggacagttgtaagc

SEQ ID NO: 402005 - DNA, 30 bp, Artificial Sequence
  Synthetic oligonucleotide
gaggggtcctccgaggccgcataattaagc

SEQ ID NO: 402006 - DNA, 30 bp, Artificial Sequence
  Synthetic oligonucleotide
gaggaagtaggtatagctttacagttaagc

SEQ ID NO: 402007 - DNA, 30 bp, Artificial Sequence
  Synthetic oligonucleotide
tttaaatttaagttgggtgggaatttaagc

SEQ ID NO: 402008 - DNA, 30 bp, Artificial Sequence
  Synthetic oligonucleotide
tcatttaaaaaatgacaagtaactttaagc

SEQ ID NO: 402009 - DNA, 30 bp, Artificial Sequence
  Synthetic oligonucleotide
ggttcagaccgggtcctgcgggctttaagc

SEQ ID NO: 402010 - DNA, 30 bp, Artificial Sequence
  Synthetic oligonucleotide
gcgcattagtcggcgtaaattagtttaagc

SEQ ID NO: 402011 - DNA, 30 bp, Artificial Sequence
  Synthetic oligonucleotide
tatgtcgcaatgcttggggtgtaaaacagc

SEQ ID NO: 402012 - DNA, 30 bp, Artificial Sequence
  Synthetic oligonucleotide
aactgtcgggcaagggccaggacaaacagc

SEQ ID NO: 402013 - DNA, 30 bp, Artificial Sequence
  Synthetic oligonucleotide
tgcatctataattagtgcaaatccaacagc

SEQ ID NO: 402014 - DNA, 30 bp, Artificial Sequence
  Synthetic oligonucleotide
accaaagggttaattgtcgggcgcaacagc

SEQ ID NO: 402015 - DNA, 30 bp, Artificial Sequence
  Synthetic oligonucleotide
ggaaggcccccgcgctcgatcttcaacagc

SEQ ID NO: 402016 - DNA, 30 bp, Artificial Sequence
  Synthetic oligonucleotide
cgctcgtgtctgattaccttgttcaacagc

SEQ ID NO: 402017 - DNA, 30 bp, Artificial Sequence
  Synthetic oligonucleotide
agacattccgcgagtactccacggaacagc

SEQ ID NO: 402018 - DNA, 30 bp, Artificial Sequence
  Synthetic oligonucleotide
tccatttgcaagcgtcggggctggaacagc

SEQ ID NO: 402019 - DNA, 29 bp, Artificial Sequence
  Synthetic oligonucleotide
gtcaacttttcgaaatgaaaattaacagc

SEQ ID NO: 402020 - DNA, 30 bp, Artificial Sequence
  Synthetic oligonucleotide
ggagacattcttcaagtatttgaacacagc

SEQ ID NO: 402021 - DNA, 30 bp, Artificial Sequence
  Synthetic oligonucleotide
ttcttataatagtgcgtttcaagccacagc

SEQ ID NO: 402022 - DNA, 30 bp, Artificial Sequence
  Synthetic oligonucleotide
acctcagatccgaacataaatcagcacagc

SEQ ID NO: 402023 - DNA, 30 bp, Artificial Sequence
  Synthetic oligonucleotide
attcagatatacgcccgagcacacgacagc

SEQ ID NO: 402024 - DNA, 30 bp, Artificial Sequence
  Synthetic oligonucleotide
taccttcgcaccttggagaacctggacagc

SEQ ID NO: 402025 - DNA, 30 bp, Artificial Sequence
  Synthetic oligonucleotide
gggatgtccagaaggcgttcttatgacagc

SEQ ID NO: 402026 - DNA, 30 bp, Artificial Sequence
  Synthetic oligonucleotide
cgatccactctggtgccagggatctacagc

SEQ ID NO: 402027 - DNA, 30 bp, Artificial Sequence
  Synthetic oligonucleotide
ggttccccgagcttccgggtgcagtacagc

SEQ ID NO: 402028 - DNA, 30 bp, Artificial Sequence
  Synthetic oligonucleotide
tttcttcaggtgtaccacgttgtgtacagc

SEQ ID NO: 402029 - DNA, 30 bp, Artificial Sequence
  Synthetic oligonucleotide
caattagtgatgtattttcgggtcaccagc

SEQ ID NO: 402030 - DNA, 30 bp, Artificial Sequence
  Synthetic oligonucleotide
ctagaaccccctataaccctaccgaccagc

SEQ ID NO: 402031 - DNA, 30 bp, Artificial Sequence
  Synthetic oligonucleotide
gggtatggctcttcgttggcgaggaccagc

SEQ ID NO: 402032 - DNA, 30 bp, Artificial Sequence
  Synthetic oligonucleotide
tgctcctctgttcccaaacactctaccagc

SEQ ID NO: 402033 - DNA, 30 bp, Artificial Sequence
  Synthetic oligonucleotide
taacactgtttaagcggccatagtaccagc

SEQ ID NO: 402034 - DNA, 30 bp, Artificial Sequence
  Synthetic oligonucleotide
aagggtgaaaccttctggtttctacccagc

SEQ ID NO: 402035 - DNA, 30 bp, Artificial Sequence
  Synthetic oligonucleotide
catactaatgctctagctatgagccccagc

SEQ ID NO: 402036 - DNA, 30 bp, Artificial Sequence
  Synthetic oligonucleotide
gcaatggtgaatttatcgtcacatcccagc

SEQ ID NO: 402037 - DNA, 30 bp, Artificial Sequence
  Synthetic oligonucleotide
gaccgaaagctctcgccaagcggagccagc

SEQ ID NO: 402038 - DNA, 30 bp, Artificial Sequence
  Synthetic oligonucleotide
tctatgcccgtaccaaaagacggtgccagc

SEQ ID NO: 402039 - DNA, 30 bp, Artificial Sequence
  Synthetic oligonucleotide
tatattaagcgatctatgatcgcatccagc

SEQ ID NO: 402040 - DNA, 30 bp, Artificial Sequence
  Synthetic oligonucleotide
cagaagcatgaggaataacagttatccagc

SEQ ID NO: 402041 - DNA, 30 bp, Artificial Sequence
  Synthetic oligonucleotide
ctactctggatttacgccgtatactccagc

SEQ ID NO: 402042 - DNA, 30 bp, Artificial Sequence
  Synthetic oligonucleotide
gcggccctaagagctatgagatcctccagc

SEQ ID NO: 402043 - DNA, 30 bp, Artificial Sequence
  Synthetic oligonucleotide
gcacttatctcccggcctcccaagtccagc

SEQ ID NO: 402044 - DNA, 30 bp, Artificial Sequence
  Synthetic oligonucleotide
ggacgctgccacagacgtagtaagtccagc

SEQ ID NO: 402045 - DNA, 30 bp, Artificial Sequence
  Synthetic oligonucleotide
ggctcagcatagactatcgaggtgtccagc

SEQ ID NO: 402046 - DNA, 30 bp, Artificial Sequence
  Synthetic oligonucleotide
ccgatcaggaattacgttacgtcttccagc

SEQ ID NO: 402047 - DNA, 30 bp, Artificial Sequence
  Synthetic oligonucleotide
gccctcatgcccagaattggcataagcagc

SEQ ID NO: 402048 - DNA, 30 bp, Artificial Sequence
  Synthetic oligonucleotide
gccgatgccggatagttagtgcacagcagc

SEQ ID NO: 402049 - DNA, 30 bp, Artificial Sequence
  Synthetic oligonucleotide
agaggctctacctttcaatcttgcagcagc

SEQ ID NO: 402050 - DNA, 30 bp, Artificial Sequence
  Synthetic oligonucleotide
aaacttagggtctcatttgtcaagagcagc

SEQ ID NO: 402051 - DNA, 30 bp, Artificial Sequence
  Synthetic oligonucleotide
attttcacaagaccacgtccgagccgcagc

SEQ ID NO: 402052 - DNA, 30 bp, Artificial Sequence
  Synthetic oligonucleotide
ggtgtgtgaccagggcgtttggtaggcagc

SEQ ID NO: 402053 - DNA, 30 bp, Artificial Sequence
  Synthetic oligonucleotide
gtaccgatatccattccgtccaacggcagc

SEQ ID NO: 402054 - DNA, 30 bp, Artificial Sequence
  Synthetic oligonucleotide
cgctatgtcttaacaacggtatacggcagc

SEQ ID NO: 402055 - DNA, 31 bp, Artificial Sequence
  Synthetic oligonucleotide
ttggggtcagtgtggcgttataaggggcagc

SEQ ID NO: 402056 - DNA, 30 bp, Artificial Sequence
  Synthetic oligonucleotide
gcataacctgtcagatgattgcatggcagc

SEQ ID NO: 402057 - DNA, 30 bp, Artificial Sequence
  Synthetic oligonucleotide
tacgagtccgggtacgtgattcgtggcagc

SEQ ID NO: 402058 - DNA, 30 bp, Artificial Sequence
  Synthetic oligonucleotide
attcgctggccgtagttttttggatgcagc

SEQ ID NO: 402059 - DNA, 30 bp, Artificial Sequence
  Synthetic oligonucleotide
gagcgggttatctctatataatgatgcagc

SEQ ID NO: 402060 - DNA, 30 bp, Artificial Sequence
  Synthetic oligonucleotide
acagtgagcgactacggcgtggcaatcagc

SEQ ID NO: 402061 - DNA, 30 bp, Artificial Sequence
  Synthetic oligonucleotide
gtgccaagttctgcttttgcacgaatcagc

SEQ ID NO: 402062 - DNA, 30 bp, Artificial Sequence
  Synthetic oligonucleotide
gttgtccgttaaagatgtatcgtaatcagc

SEQ ID NO: 402063 - DNA, 30 bp, Artificial Sequence
  Synthetic oligonucleotide
ttaacgaaaatagcctaaagtgtaatcagc

SEQ ID NO: 402064 - DNA, 30 bp, Artificial Sequence
  Synthetic oligonucleotide
atactataataatttggctctaccatcagc

SEQ ID NO: 402065 - DNA, 30 bp, Artificial Sequence
  Synthetic oligonucleotide
gactttagatgggcagtgagaaggatcagc

SEQ ID NO: 402066 - DNA, 30 bp, Artificial Sequence
  Synthetic oligonucleotide
aaactaaactgacactgatccaatatcagc

SEQ ID NO: 402067 - DNA, 30 bp, Artificial Sequence
  Synthetic oligonucleotide
aaatgctaccacgcggtgggaagtatcagc

SEQ ID NO: 402068 - DNA, 30 bp, Artificial Sequence
  Synthetic oligonucleotide
ttagcgctcgcaataataaattaactcagc

SEQ ID NO: 402069 - DNA, 30 bp, Artificial Sequence
  Synthetic oligonucleotide
gacttctttacagatggatggatactcagc

SEQ ID NO: 402070 - DNA, 30 bp, Artificial Sequence
  Synthetic oligonucleotide
cgcaggttgttagttgtggaggtactcagc

SEQ ID NO: 402071 - DNA, 30 bp, Artificial Sequence
  Synthetic oligonucleotide
ctatcggtgattaaggacacgcgcctcagc

SEQ ID NO: 402072 - DNA, 31 bp, Artificial Sequence
  Synthetic oligonucleotide
accggatgaatattctgcgatcttcctcagc

SEQ ID NO: 402073 - DNA, 30 bp, Artificial Sequence
  Synthetic oligonucleotide
ctgcctgcatgtatcgggttataagtcagc

SEQ ID NO: 402074 - DNA, 30 bp, Artificial Sequence
  Synthetic oligonucleotide
gggatgactcacgtttggcactaagtcagc

SEQ ID NO: 402075 - DNA, 30 bp, Artificial Sequence
  Synthetic oligonucleotide
tctattgtagttacgggaacttaagtcagc

SEQ ID NO: 402076 - DNA, 30 bp, Artificial Sequence
  Synthetic oligonucleotide
ttcactatgtcagtatggcttatagtcagc

SEQ ID NO: 402077 - DNA, 30 bp, Artificial Sequence
  Synthetic oligonucleotide
tgtcgtaccccgaggacgagcaacgtcagc

SEQ ID NO: 402078 - DNA, 30 bp, Artificial Sequence
  Synthetic oligonucleotide
tcgcggctagttagtggatcaaccgtcagc

SEQ ID NO: 402079 - DNA, 30 bp, Artificial Sequence
  Synthetic oligonucleotide
cccaaaaacgtattgcatgagcccgtcagc

SEQ ID NO: 402080 - DNA, 30 bp, Artificial Sequence
  Synthetic oligonucleotide
tttatcaggcatcggggacagcctgtcagc

SEQ ID NO: 402081 - DNA, 30 bp, Artificial Sequence
  Synthetic oligonucleotide
tttgtgacgacggcttctactatattcagc

SEQ ID NO: 402082 - DNA, 30 bp, Artificial Sequence
  Synthetic oligonucleotide
cgtcttgagggtaacgctcagttcttcagc

SEQ ID NO: 402083 - DNA, 30 bp, Artificial Sequence
  Synthetic oligonucleotide
gtccggtacgatcctctgtaccagttcagc

SEQ ID NO: 402084 - DNA, 30 bp, Artificial Sequence
  Synthetic oligonucleotide
ccctggtacgtagtactcacatggttcagc

SEQ ID NO: 402085 - DNA, 30 bp, Artificial Sequence
  Synthetic oligonucleotide
agacattagtgaacatctcgttatttcagc

SEQ ID NO: 402086 - DNA, 30 bp, Artificial Sequence
  Synthetic oligonucleotide
gcatcttctacgtcgtcacgataaaagagc

SEQ ID NO: 402087 - DNA, 30 bp, Artificial Sequence
  Synthetic oligonucleotide
atttgtctgcgataccgaagaataaagagc

SEQ ID NO: 402088 - DNA, 30 bp, Artificial Sequence
  Synthetic oligonucleotide
cttgttcaacactgtgggctgcacaagagc

SEQ ID NO: 402089 - DNA, 30 bp, Artificial Sequence
  Synthetic oligonucleotide
taatgcgtatagacgagaagtcgcaagagc

SEQ ID NO: 402090 - DNA, 30 bp, Artificial Sequence
  Synthetic oligonucleotide
ctttgggggcaatccccctaagtcaagagc

SEQ ID NO: 402091 - DNA, 30 bp, Artificial Sequence
  Synthetic oligonucleotide
tctatttatgggacgcgtcgtcataagagc

SEQ ID NO: 402092 - DNA, 30 bp, Artificial Sequence
  Synthetic oligonucleotide
gttataagagtccttggtcatatccagagc

SEQ ID NO: 402093 - DNA, 30 bp, Artificial Sequence
  Synthetic oligonucleotide
acgccgtttacccttttttgatttcagagc

SEQ ID NO: 402094 - DNA, 30 bp, Artificial Sequence
  Synthetic oligonucleotide
tgttctcccttggtcccatgttcagagagc

SEQ ID NO: 402095 - DNA, 30 bp, Artificial Sequence
  Synthetic oligonucleotide
ctgccctgtgggaactctggagtcgagagc

SEQ ID NO: 402096 - DNA, 30 bp, Artificial Sequence
  Synthetic oligonucleotide
aaactagggagctttatggcatatgagagc

SEQ ID NO: 402097 - DNA, 30 bp, Artificial Sequence
  Synthetic oligonucleotide
tttcagtaagagatagtgagatatgagagc

SEQ ID NO: 402098 - DNA, 30 bp, Artificial Sequence
  Synthetic oligonucleotide
tcgggttttgtgttatggggagctgagagc

SEQ ID NO: 402099 - DNA, 30 bp, Artificial Sequence
  Synthetic oligonucleotide
tggctgcgttttacgcagagtcgtgagagc

SEQ ID NO: 402100 - DNA, 30 bp, Artificial Sequence
  Synthetic oligonucleotide
taataggctgttatacagaggtaatagagc

SEQ ID NO: 402101 - DNA, 30 bp, Artificial Sequence
  Synthetic oligonucleotide
ctctcggtaaaatgagatggggtatagagc

SEQ ID NO: 402102 - DNA, 30 bp, Artificial Sequence
  Synthetic oligonucleotide
gtgtccttgcgtttcgccactacctagagc

SEQ ID NO: 402103 - DNA, 30 bp, Artificial Sequence
  Synthetic oligonucleotide
tattagagtcgggtagtcatccgctagagc

SEQ ID NO: 402104 - DNA, 30 bp, Artificial Sequence
  Synthetic oligonucleotide
aacaggcggcctcacaagagccgttagagc

SEQ ID NO: 402105 - DNA, 30 bp, Artificial Sequence
  Synthetic oligonucleotide
tgataccgcgggcaaggtaggcaaacgagc

SEQ ID NO: 402106 - DNA, 30 bp, Artificial Sequence
  Synthetic oligonucleotide
caaccaataaaaattttaactgacacgagc

SEQ ID NO: 402107 - DNA, 30 bp, Artificial Sequence
  Synthetic oligonucleotide
taacctccgcaagaggtcgccatcacgagc

SEQ ID NO: 402108 - DNA, 30 bp, Artificial Sequence
  Synthetic oligonucleotide
actggttgaacacaccggtgtaagacgagc

SEQ ID NO: 402109 - DNA, 30 bp, Artificial Sequence
  Synthetic oligonucleotide
aagaccctttatttccaacgggctacgagc

SEQ ID NO: 402110 - DNA, 30 bp, Artificial Sequence
  Synthetic oligonucleotide
taccagtcttcgtactgcatgggtacgagc

SEQ ID NO: 402111 - DNA, 30 bp, Artificial Sequence
  Synthetic oligonucleotide
aagggtcacggtaatgcagtgaccccgagc

SEQ ID NO: 402112 - DNA, 30 bp, Artificial Sequence
  Synthetic oligonucleotide
ctaattatagttgagtagtgtgtcccgagc

SEQ ID NO: 402113 - DNA, 30 bp, Artificial Sequence
  Synthetic oligonucleotide
cgcatcacaacgagcctctacggtccgagc

SEQ ID NO: 402114 - DNA, 30 bp, Artificial Sequence
  Synthetic oligonucleotide
tccggggtgccagagactgttggtccgagc

SEQ ID NO: 402115 - DNA, 30 bp, Artificial Sequence
  Synthetic oligonucleotide
agttcggtgcctgttgatgggcgagcgagc

SEQ ID NO: 402116 - DNA, 30 bp, Artificial Sequence
  Synthetic oligonucleotide
tccgttaagcacgttaagtacggagcgagc

SEQ ID NO: 402117 - DNA, 30 bp, Artificial Sequence
  Synthetic oligonucleotide
cctcgggggaatccttgggggagcgcgagc

SEQ ID NO: 402118 - DNA, 30 bp, Artificial Sequence
  Synthetic oligonucleotide
taatgttgcatagagatgaccttggcgagc

SEQ ID NO: 402119 - DNA, 30 bp, Artificial Sequence
  Synthetic oligonucleotide
ccagtcgtagagcattcaagcactgcgagc

SEQ ID NO: 402120 - DNA, 30 bp, Artificial Sequence
  Synthetic oligonucleotide
tccaaccgcctgtgtgttgcctctgcgagc

SEQ ID NO: 402121 - DNA, 30 bp, Artificial Sequence
  Synthetic oligonucleotide
gctatactggtgtccgttgtctttgcgagc

SEQ ID NO: 402122 - DNA, 30 bp, Artificial Sequence
  Synthetic oligonucleotide
atgtgtttccgtctggcatgtatatcgagc

SEQ ID NO: 402123 - DNA, 30 bp, Artificial Sequence
  Synthetic oligonucleotide
ttttgtctgctctgcctgacactatcgagc

SEQ ID NO: 402124 - DNA, 30 bp, Artificial Sequence
  Synthetic oligonucleotide
cgagaacgaatgttgaagttagtttcgagc

SEQ ID NO: 402125 - DNA, 30 bp, Artificial Sequence
  Synthetic oligonucleotide
gactcttgatttctttcataagcaaggagc

SEQ ID NO: 402126 - DNA, 30 bp, Artificial Sequence
  Synthetic oligonucleotide
ttactaaaggtaaggggaggggcaaggagc

SEQ ID NO: 402127 - DNA, 30 bp, Artificial Sequence
  Synthetic oligonucleotide
ctccaggactactttccaaccgtaaggagc

SEQ ID NO: 402128 - DNA, 30 bp, Artificial Sequence
  Synthetic oligonucleotide
ccaggacgttgtggcttccacctcaggagc

SEQ ID NO: 402129 - DNA, 30 bp, Artificial Sequence
  Synthetic oligonucleotide
ggtcggttgaaaatgcacttcaggaggagc

SEQ ID NO: 402130 - DNA, 30 bp, Artificial Sequence
  Synthetic oligonucleotide
attatatggagcgccgcaatgactaggagc

SEQ ID NO: 402131 - DNA, 30 bp, Artificial Sequence
  Synthetic oligonucleotide
attattgaaggggcttagtagattaggagc

SEQ ID NO: 402132 - DNA, 30 bp, Artificial Sequence
  Synthetic oligonucleotide
ggacgcaggatccaataagtatgacggagc

SEQ ID NO: 402133 - DNA, 30 bp, Artificial Sequence
  Synthetic oligonucleotide
gtagttttctgtctcacctgagctcggagc

SEQ ID NO: 402134 - DNA, 30 bp, Artificial Sequence
  Synthetic oligonucleotide
cggtgaacggtcggtatgattttagggagc

SEQ ID NO: 402135 - DNA, 30 bp, Artificial Sequence
  Synthetic oligonucleotide
gggtctcctacgtataggagaaccgggagc

SEQ ID NO: 402136 - DNA, 30 bp, Artificial Sequence
  Synthetic oligonucleotide
gttcactgtcgaggctgtaaactcgggagc

SEQ ID NO: 402137 - DNA, 30 bp, Artificial Sequence
  Synthetic oligonucleotide
cactgattgcaaagtcttcatccggggagc

SEQ ID NO: 402138 - DNA, 30 bp, Artificial Sequence
  Synthetic oligonucleotide
ggcgcaacgggttctgtcaacggtgggagc

SEQ ID NO: 402139 - DNA, 30 bp, Artificial Sequence
  Synthetic oligonucleotide
aagattacgtcaaaatctttgcaatggagc

SEQ ID NO: 402140 - DNA, 30 bp, Artificial Sequence
  Synthetic oligonucleotide
cttaaagcttgaaaggaaattaagtggagc

SEQ ID NO: 402141 - DNA, 30 bp, Artificial Sequence
  Synthetic oligonucleotide
agcaaaatgtaccttaagctctggtggagc

SEQ ID NO: 402142 - DNA, 30 bp, Artificial Sequence
  Synthetic oligonucleotide
tttgggaccgttgggctgggcggttggagc

SEQ ID NO: 402143 - DNA, 30 bp, Artificial Sequence
  Synthetic oligonucleotide
agcagacgatcaagctatgtgtcgatgagc

SEQ ID NO: 402144 - DNA, 30 bp, Artificial Sequence
  Synthetic oligonucleotide
ttggaccacggcttttgatttcggatgagc

SEQ ID NO: 402145 - DNA, 30 bp, Artificial Sequence
  Synthetic oligonucleotide
aatccgccgtgttcgagagggattctgagc

SEQ ID NO: 402146 - DNA, 30 bp, Artificial Sequence
  Synthetic oligonucleotide
tgcagctccagcagtatcaacggcgtgagc

SEQ ID NO: 402147 - DNA, 30 bp, Artificial Sequence
  Synthetic oligonucleotide
ctttacctgagtgtcagccagttggtgagc

SEQ ID NO: 402148 - DNA, 30 bp, Artificial Sequence
  Synthetic oligonucleotide
attctgaattgtcagacgttcagattgagc

SEQ ID NO: 402149 - DNA, 30 bp, Artificial Sequence
  Synthetic oligonucleotide
cgagagccgggagcgaaaaagaacttgagc

SEQ ID NO: 402150 - DNA, 30 bp, Artificial Sequence
  Synthetic oligonucleotide
ggggcttacttctttttaaaggccttgagc

SEQ ID NO: 402151 - DNA, 30 bp, Artificial Sequence
  Synthetic oligonucleotide
gccgcgcggaccaaagctgataatttgagc

SEQ ID NO: 402152 - DNA, 30 bp, Artificial Sequence
  Synthetic oligonucleotide
gaggcacgcaccgggcgagctttaaatagc

SEQ ID NO: 402153 - DNA, 30 bp, Artificial Sequence
  Synthetic oligonucleotide
tcccaatgaattagtaggtgcggtaatagc

SEQ ID NO: 402154 - DNA, 30 bp, Artificial Sequence
  Synthetic oligonucleotide
tccactgttcttataaagcctcttaatagc

SEQ ID NO: 402155 - DNA, 30 bp, Artificial Sequence
  Synthetic oligonucleotide
gttaccaaaagtgacccgggctaacatagc

SEQ ID NO: 402156 - DNA, 30 bp, Artificial Sequence
  Synthetic oligonucleotide
cattcggatcgttgactcaagcgacatagc

SEQ ID NO: 402157 - DNA, 30 bp, Artificial Sequence
  Synthetic oligonucleotide
tggtaaatttggggtcatgaatgccatagc

SEQ ID NO: 402158 - DNA, 30 bp, Artificial Sequence
  Synthetic oligonucleotide
agtcttagttagcttacgccatatcatagc

SEQ ID NO: 402159 - DNA, 30 bp, Artificial Sequence
  Synthetic oligonucleotide
gagcaacgcttttatattggatttcatagc

SEQ ID NO: 402160 - DNA, 30 bp, Artificial Sequence
  Synthetic oligonucleotide
ggccgcctaccaatttttccgtaagatagc

SEQ ID NO: 402161 - DNA, 30 bp, Artificial Sequence
  Synthetic oligonucleotide
cgccctcacctatcacgacgaacagatagc

SEQ ID NO: 402162 - DNA, 30 bp, Artificial Sequence
  Synthetic oligonucleotide
ccgagggggctattcgtcgcacgagatagc

SEQ ID NO: 402163 - DNA, 30 bp, Artificial Sequence
  Synthetic oligonucleotide
atggagtgaacatagcgagcaaacgatagc

SEQ ID NO: 402164 - DNA, 30 bp, Artificial Sequence
  Synthetic oligonucleotide
gtctccgcctagcacaccggttacgatagc

SEQ ID NO: 402165 - DNA, 30 bp, Artificial Sequence
  Synthetic oligonucleotide
gcctataactcacaggatctcaaggatagc

SEQ ID NO: 402166 - DNA, 30 bp, Artificial Sequence
  Synthetic oligonucleotide
gatatctaagcgcatgtaaagcaggatagc

SEQ ID NO: 402167 - DNA, 30 bp, Artificial Sequence
  Synthetic oligonucleotide
aacctatgctgtcagactagagcggatagc

SEQ ID NO: 402168 - DNA, 30 bp, Artificial Sequence
  Synthetic oligonucleotide
aaatcattgaaagctaacaccttggatagc

SEQ ID NO: 402169 - DNA, 30 bp, Artificial Sequence
  Synthetic oligonucleotide
atatcacgccctacaaataaatttgatagc

SEQ ID NO: 402170 - DNA, 30 bp, Artificial Sequence
  Synthetic oligonucleotide
gtatatgagatagtctatggtgcatatagc

SEQ ID NO: 402171 - DNA, 30 bp, Artificial Sequence
  Synthetic oligonucleotide
tatgattaagctaatgataatctatatagc

SEQ ID NO: 402172 - DNA, 30 bp, Artificial Sequence
  Synthetic oligonucleotide
tgttcgtagtttggttggtaaaagtatagc

SEQ ID NO: 402173 - DNA, 30 bp, Artificial Sequence
  Synthetic oligonucleotide
ctggtcgtgcttgcatgtggacggtatagc

SEQ ID NO: 402174 - DNA, 30 bp, Artificial Sequence
  Synthetic oligonucleotide
tatggtgggcccgagcgctatgtgtatagc

SEQ ID NO: 402175 - DNA, 30 bp, Artificial Sequence
  Synthetic oligonucleotide
taacgaacatgtcgcatcggccgaactagc

SEQ ID NO: 402176 - DNA, 30 bp, Artificial Sequence
  Synthetic oligonucleotide
ataaagtaattcattcaactagtaactagc

SEQ ID NO: 402177 - DNA, 30 bp, Artificial Sequence
  Synthetic oligonucleotide
ctggtgtgggatgcagtcagtatgactagc

SEQ ID NO: 402178 - DNA, 30 bp, Artificial Sequence
  Synthetic oligonucleotide
ctctagggtagactcctgcactcccctagc

SEQ ID NO: 402179 - DNA, 30 bp, Artificial Sequence
  Synthetic oligonucleotide
atcgaacactttggaaagagtcttcctagc

SEQ ID NO: 402180 - DNA, 30 bp, Artificial Sequence
  Synthetic oligonucleotide
tattcgggattgtcttccgctacggctagc

SEQ ID NO: 402181 - DNA, 30 bp, Artificial Sequence
  Synthetic oligonucleotide
gtgaattgaccctcacttggctaatctagc

SEQ ID NO: 402182 - DNA, 30 bp, Artificial Sequence
  Synthetic oligonucleotide
agagttatacgtacgaggagtttatctagc

SEQ ID NO: 402183 - DNA, 30 bp, Artificial Sequence
  Synthetic oligonucleotide
ctatgtactccaagttatctcgtctctagc

SEQ ID NO: 402184 - DNA, 30 bp, Artificial Sequence
  Synthetic oligonucleotide
gcggagaatcattccgcgtttgagtctagc

SEQ ID NO: 402185 - DNA, 30 bp, Artificial Sequence
  Synthetic oligonucleotide
ccgaggcattatacggcttgtccgtctagc

SEQ ID NO: 402186 - DNA, 30 bp, Artificial Sequence
  Synthetic oligonucleotide
gtggccgaagcactgcgtttttcaagtagc

SEQ ID NO: 402187 - DNA, 30 bp, Artificial Sequence
  Synthetic oligonucleotide
aattcagtataacaaatgctgagcagtagc

SEQ ID NO: 402188 - DNA, 30 bp, Artificial Sequence
  Synthetic oligonucleotide
gatcactaatgggacttcgttttgagtagc

SEQ ID NO: 402189 - DNA, 30 bp, Artificial Sequence
  Synthetic oligonucleotide
ctagcgtagtccggcttaggcaatagtagc

SEQ ID NO: 402190 - DNA, 30 bp, Artificial Sequence
  Synthetic oligonucleotide
gtagtccgcataactgtgagatctagtagc

SEQ ID NO: 402191 - DNA, 30 bp, Artificial Sequence
  Synthetic oligonucleotide
ccctatttgagtgtcaaaacatgtagtagc

SEQ ID NO: 402192 - DNA, 30 bp, Artificial Sequence
  Synthetic oligonucleotide
cgacaaggggtaatgacggatcgacgtagc

SEQ ID NO: 402193 - DNA, 30 bp, Artificial Sequence
  Synthetic oligonucleotide
ggttgtaaatcgtcatattaatttcgtagc

SEQ ID NO: 402194 - DNA, 30 bp, Artificial Sequence
  Synthetic oligonucleotide
attgcgaagaaaaaaatacgcgggggtagc

SEQ ID NO: 402195 - DNA, 30 bp, Artificial Sequence
  Synthetic oligonucleotide
cggctataggttggcgccaggaaatgtagc

SEQ ID NO: 402196 - DNA, 30 bp, Artificial Sequence
  Synthetic oligonucleotide
ataaaattatagggacaactaccctgtagc

SEQ ID NO: 402197 - DNA, 30 bp, Artificial Sequence
  Synthetic oligonucleotide
gtactctgagtcaccccacgtctctgtagc

SEQ ID NO: 402198 - DNA, 30 bp, Artificial Sequence
  Synthetic oligonucleotide
cgcagaagcggcatagtctcatagtgtagc

SEQ ID NO: 402199 - DNA, 30 bp, Artificial Sequence
  Synthetic oligonucleotide
tgttggggctaattcgtgctaacgtgtagc

SEQ ID NO: 402200 - DNA, 30 bp, Artificial Sequence
  Synthetic oligonucleotide
aatcggggtatgatggtcgattggtgtagc

SEQ ID NO: 402201 - DNA, 30 bp, Artificial Sequence
  Synthetic oligonucleotide
ctagttttagaatccgaaaatgtgtgtagc

SEQ ID NO: 402202 - DNA, 30 bp, Artificial Sequence
  Synthetic oligonucleotide
actctcaactattgaactcaagcaattagc

SEQ ID NO: 402203 - DNA, 30 bp, Artificial Sequence
  Synthetic oligonucleotide
aaattcggcgcatatacgatttgaattagc

SEQ ID NO: 402204 - DNA, 30 bp, Artificial Sequence
  Synthetic oligonucleotide
gacatgtgtcagcaactccgctacattagc

SEQ ID NO: 402205 - DNA, 30 bp, Artificial Sequence
  Synthetic oligonucleotide
ggtctgaatgtagcatcgtcgaccattagc

SEQ ID NO: 402206 - DNA, 30 bp, Artificial Sequence
  Synthetic oligonucleotide
atcctcgcaggctccagggttatcattagc

SEQ ID NO: 402207 - DNA, 30 bp, Artificial Sequence
  Synthetic oligonucleotide
aactctgcaggtaatgtctgggagattagc

SEQ ID NO: 402208 - DNA, 30 bp, Artificial Sequence
  Synthetic oligonucleotide
gtggaagattctcgggcgcagatgattagc

SEQ ID NO: 402209 - DNA, 30 bp, Artificial Sequence
  Synthetic oligonucleotide
aattgcaaaatggcgtgatggggtattagc

SEQ ID NO: 402210 - DNA, 30 bp, Artificial Sequence
  Synthetic oligonucleotide
tcattccatcgggtgtaatttgttattagc

SEQ ID NO: 402211 - DNA, 30 bp, Artificial Sequence
  Synthetic oligonucleotide
ttaatgttactattcttaccatcccttagc

SEQ ID NO: 402212 - DNA, 30 bp, Artificial Sequence
  Synthetic oligonucleotide
tcggctcagacgtacgctggcagtcttagc

SEQ ID NO: 402213 - DNA, 30 bp, Artificial Sequence
  Synthetic oligonucleotide
aatcaacagggatatacattaattcttagc

SEQ ID NO: 402214 - DNA, 30 bp, Artificial Sequence
  Synthetic oligonucleotide
agtacagcgcttgtcgatccgcttcttagc

SEQ ID NO: 402215 - DNA, 30 bp, Artificial Sequence
  Synthetic oligonucleotide
gcaatacacttggtgagcagtaaagttagc

SEQ ID NO: 402216 - DNA, 30 bp, Artificial Sequence
  Synthetic oligonucleotide
ggtaatagtaatcactcaagttccgttagc

SEQ ID NO: 402217 - DNA, 30 bp, Artificial Sequence
  Synthetic oligonucleotide
ttgaatcggactcatgtttcaagcgttagc

SEQ ID NO: 402218 - DNA, 30 bp, Artificial Sequence
  Synthetic oligonucleotide
ccatggctgactgccccagtgggggttagc

SEQ ID NO: 402219 - DNA, 30 bp, Artificial Sequence
  Synthetic oligonucleotide
accgatttcccactgaaagtgtatgttagc

SEQ ID NO: 402220 - DNA, 30 bp, Artificial Sequence
  Synthetic oligonucleotide
attcaaattgtacaacatatttctgttagc

SEQ ID NO: 402221 - DNA, 30 bp, Artificial Sequence
  Synthetic oligonucleotide
ggcttcgtaaaagcgttttggattgttagc

SEQ ID NO: 402222 - DNA, 30 bp, Artificial Sequence
  Synthetic oligonucleotide
ttacttattgaaacgtatgacgttgttagc

SEQ ID NO: 402223 - DNA, 30 bp, Artificial Sequence
  Synthetic oligonucleotide
tactgcggagttgtacgcccggttgttagc

SEQ ID NO: 402224 - DNA, 30 bp, Artificial Sequence
  Synthetic oligonucleotide
agggctctggcgtttatctcgtaatttagc

SEQ ID NO: 402225 - DNA, 30 bp, Artificial Sequence
  Synthetic oligonucleotide
caaagtaatacgtcagacgggagatttagc

SEQ ID NO: 402226 - DNA, 30 bp, Artificial Sequence
  Synthetic oligonucleotide
cgtttttggcatattcgccaaggatttagc

SEQ ID NO: 402227 - DNA, 30 bp, Artificial Sequence
  Synthetic oligonucleotide
tcgagcccacttagccacgggtgatttagc

SEQ ID NO: 402228 - DNA, 30 bp, Artificial Sequence
  Synthetic oligonucleotide
aagtaaccatctgtctgggccctatttagc

SEQ ID NO: 402229 - DNA, 30 bp, Artificial Sequence
  Synthetic oligonucleotide
cagatcatgatttctgcgaggcggtttagc

SEQ ID NO: 402230 - DNA, 30 bp, Artificial Sequence
  Synthetic oligonucleotide
aaattcatcaggccacttccaatgtttagc

SEQ ID NO: 402231 - DNA, 30 bp, Artificial Sequence
  Synthetic oligonucleotide
gcacagctagatccaaactataattttagc

SEQ ID NO: 402232 - DNA, 30 bp, Artificial Sequence
  Synthetic oligonucleotide
gttcccgctatggcggaagtattttttagc

SEQ ID NO: 402233 - DNA, 30 bp, Artificial Sequence
  Synthetic oligonucleotide
attcgcgtaccagtctagggtcgaaaacgc

SEQ ID NO: 402234 - DNA, 30 bp, Artificial Sequence
  Synthetic oligonucleotide
gaccttggggttgcctggctagggaaacgc

SEQ ID NO: 402235 - DNA, 30 bp, Artificial Sequence
  Synthetic oligonucleotide
ccacgataacagatgccatcactgaaacgc

SEQ ID NO: 402236 - DNA, 30 bp, Artificial Sequence
  Synthetic oligonucleotide
gcttccgacttttgcgttggcaataaacgc

SEQ ID NO: 402237 - DNA, 30 bp, Artificial Sequence
  Synthetic oligonucleotide
catcggggcgcagatttcaggacgcaacgc

SEQ ID NO: 402238 - DNA, 30 bp, Artificial Sequence
  Synthetic oligonucleotide
cgctcttgtaatacacggggagtgcaacgc

SEQ ID NO: 402239 - DNA, 30 bp, Artificial Sequence
  Synthetic oligonucleotide
gcacatctatggacgatcgtcacagaacgc

SEQ ID NO: 402240 - DNA, 30 bp, Artificial Sequence
  Synthetic oligonucleotide
tttggtcagttagcccatgtttccgaacgc

SEQ ID NO: 402241 - DNA, 30 bp, Artificial Sequence
  Synthetic oligonucleotide
gctctgaccccatgaggtatgatggaacgc

SEQ ID NO: 402242 - DNA, 30 bp, Artificial Sequence
  Synthetic oligonucleotide
cggggaatattttccacaattgtggaacgc

SEQ ID NO: 402243 - DNA, 30 bp, Artificial Sequence
  Synthetic oligonucleotide
gctgtacacctgacgccatacgatgaacgc

SEQ ID NO: 402244 - DNA, 30 bp, Artificial Sequence
  Synthetic oligonucleotide
gatactatggtttctgttcacggataacgc

SEQ ID NO: 402245 - DNA, 30 bp, Artificial Sequence
  Synthetic oligonucleotide
ttgatagggactgtctggaggtcctaacgc

SEQ ID NO: 402246 - DNA, 30 bp, Artificial Sequence
  Synthetic oligonucleotide
aatcccaggttcgttccaacaatctaacgc

SEQ ID NO: 402247 - DNA, 30 bp, Artificial Sequence
  Synthetic oligonucleotide
acgagtcggctaccttttgtcttctaacgc

SEQ ID NO: 402248 - DNA, 30 bp, Artificial Sequence
  Synthetic oligonucleotide
tggtgaagccaccggatacgacagtaacgc

SEQ ID NO: 402249 - DNA, 30 bp, Artificial Sequence
  Synthetic oligonucleotide
ccagcgtagctgtcgcgcaaagcgtaacgc

SEQ ID NO: 402250 - DNA, 30 bp, Artificial Sequence
  Synthetic oligonucleotide
gtcgaacaagaaagtcgcacaaattaacgc

SEQ ID NO: 402251 - DNA, 30 bp, Artificial Sequence
  Synthetic oligonucleotide
ttacatacgcctgtaagcgcaaattaacgc

SEQ ID NO: 402252 - DNA, 30 bp, Artificial Sequence
  Synthetic oligonucleotide
ggatatccccgataaatttacgtttaacgc

SEQ ID NO: 402253 - DNA, 30 bp, Artificial Sequence
  Synthetic oligonucleotide
ggcgctaaatatcttgttaagtgaacacgc

SEQ ID NO: 402254 - DNA, 31 bp, Artificial Sequence
  Synthetic oligonucleotide
aaaggaaggtctcgggatggtagtaacacgc

SEQ ID NO: 402255 - DNA, 30 bp, Artificial Sequence
  Synthetic oligonucleotide
gctccaagccagcggtacgtagtcacacgc

SEQ ID NO: 402256 - DNA, 30 bp, Artificial Sequence
  Synthetic oligonucleotide
ttgccgttggtgctattttgtcagacacgc

SEQ ID NO: 402257 - DNA, 30 bp, Artificial Sequence
  Synthetic oligonucleotide
tacccgggtacataagccgtatcgacacgc

SEQ ID NO: 402258 - DNA, 30 bp, Artificial Sequence
  Synthetic oligonucleotide
gtgaacattgagccgctgccaaggacacgc

SEQ ID NO: 402259 - DNA, 30 bp, Artificial Sequence
  Synthetic oligonucleotide
agataggtcgcatgtctttaacggacacgc

SEQ ID NO: 402260 - DNA, 30 bp, Artificial Sequence
  Synthetic oligonucleotide
acggcggccacttggcaaggacggacacgc

SEQ ID NO: 402261 - DNA, 30 bp, Artificial Sequence
  Synthetic oligonucleotide
aaacctggtgagtaggctaccttgacacgc

SEQ ID NO: 402262 - DNA, 30 bp, Artificial Sequence
  Synthetic oligonucleotide
tgattaaattcgttgaaagctagcccacgc

SEQ ID NO: 402263 - DNA, 30 bp, Artificial Sequence
  Synthetic oligonucleotide
gggtcgtggaatagacgtgtcttcccacgc

SEQ ID NO: 402264 - DNA, 30 bp, Artificial Sequence
  Synthetic oligonucleotide
ttgtaaccaagccgcccttctgcgccacgc

SEQ ID NO: 402265 - DNA, 30 bp, Artificial Sequence
  Synthetic oligonucleotide
gcactatccgcgaacttctccgggccacgc

SEQ ID NO: 402266 - DNA, 30 bp, Artificial Sequence
  Synthetic oligonucleotide
ggaaaggtcgtggggcgggcgtggccacgc

SEQ ID NO: 402267 - DNA, 30 bp, Artificial Sequence
  Synthetic oligonucleotide
agactatatgggtacatagcggtgccacgc

SEQ ID NO: 402268 - DNA, 30 bp, Artificial Sequence
  Synthetic oligonucleotide
aaccgtgctatctccgggcaatcagcacgc

SEQ ID NO: 402269 - DNA, 30 bp, Artificial Sequence
  Synthetic oligonucleotide
atctttctatagggagactgagtagcacgc

SEQ ID NO: 402270 - DNA, 30 bp, Artificial Sequence
  Synthetic oligonucleotide
ggtgaatgatttaaaagaatcgtagcacgc

SEQ ID NO: 402271 - DNA, 30 bp, Artificial Sequence
  Synthetic oligonucleotide
tgggcatatctcgagagccctagggcacgc

SEQ ID NO: 402272 - DNA, 30 bp, Artificial Sequence
  Synthetic oligonucleotide
ctaatggtgaagctgtgggatcttgcacgc

SEQ ID NO: 402273 - DNA, 30 bp, Artificial Sequence
  Synthetic oligonucleotide
ttgggcactaggatgctgtgtctatcacgc

SEQ ID NO: 402274 - DNA, 30 bp, Artificial Sequence
  Synthetic oligonucleotide
ccgacgatctattgtcctgtaggctcacgc

SEQ ID NO: 402275 - DNA, 30 bp, Artificial Sequence
  Synthetic oligonucleotide
tcgactgcgatttcctggtcttgttcacgc

SEQ ID NO: 402276 - DNA, 30 bp, Artificial Sequence
  Synthetic oligonucleotide
agtccagatttggacataaagcaaagacgc

SEQ ID NO: 402277 - DNA, 30 bp, Artificial Sequence
  Synthetic oligonucleotide
agtagtcaactcacgggattgccaagacgc

SEQ ID NO: 402278 - DNA, 30 bp, Artificial Sequence
  Synthetic oligonucleotide
gctgggtgctttagcaatcccgcaagacgc

SEQ ID NO: 402279 - DNA, 30 bp, Artificial Sequence
  Synthetic oligonucleotide
tagcacccaagggcgcatgagggaagacgc

SEQ ID NO: 402280 - DNA, 30 bp, Artificial Sequence
  Synthetic oligonucleotide
ttgactctgtcttgatcaggaaccagacgc

SEQ ID NO: 402281 - DNA, 30 bp, Artificial Sequence
  Synthetic oligonucleotide
tgtcaaggggggacgtaatcgggcagacgc

SEQ ID NO: 402282 - DNA, 30 bp, Artificial Sequence
  Synthetic oligonucleotide
tcacaatttctggattcgcgtacgagacgc

SEQ ID NO: 402283 - DNA, 30 bp, Artificial Sequence
  Synthetic oligonucleotide
cgcgcatgaggggagcaccttacgagacgc

SEQ ID NO: 402284 - DNA, 30 bp, Artificial Sequence
  Synthetic oligonucleotide
aacgaatacgggtaaaacgcgatgagacgc

SEQ ID NO: 402285 - DNA, 30 bp, Artificial Sequence
  Synthetic oligonucleotide
ggcggattactatgccctatcaatagacgc

SEQ ID NO: 402286 - DNA, 30 bp, Artificial Sequence
  Synthetic oligonucleotide
ccgagacaccagaggttgcaagatagacgc

SEQ ID NO: 402287 - DNA, 30 bp, Artificial Sequence
  Synthetic oligonucleotide
aggctactaggattaaatccaactagacgc

SEQ ID NO: 402288 - DNA, 30 bp, Artificial Sequence
  Synthetic oligonucleotide
cggaagtacgacggtcttcacattagacgc

SEQ ID NO: 402289 - DNA, 30 bp, Artificial Sequence
  Synthetic oligonucleotide
ccggctcagggaagtgtacatgcccgacgc

SEQ ID NO: 402290 - DNA, 30 bp, Artificial Sequence
  Synthetic oligonucleotide
actttcggagaggagccaatcggccgacgc

SEQ ID NO: 402291 - DNA, 30 bp, Artificial Sequence
  Synthetic oligonucleotide
cgacattttgactctatgcgaaagcgacgc

SEQ ID NO: 402292 - DNA, 30 bp, Artificial Sequence
  Synthetic oligonucleotide
gagcgtcatgccgggtgagctaagcgacgc

SEQ ID NO: 402293 - DNA, 30 bp, Artificial Sequence
  Synthetic oligonucleotide
gccagctcagaacagacttatccgcgacgc

SEQ ID NO: 402294 - DNA, 30 bp, Artificial Sequence
  Synthetic oligonucleotide
aaaggatgatacaatagataccgtcgacgc

SEQ ID NO: 402295 - DNA, 30 bp, Artificial Sequence
  Synthetic oligonucleotide
gcaccgcttgcatctgaattagtaggacgc

SEQ ID NO: 402296 - DNA, 30 bp, Artificial Sequence
  Synthetic oligonucleotide
tagtctgtatgagcaaggcttggcggacgc

SEQ ID NO: 402297 - DNA, 30 bp, Artificial Sequence
  Synthetic oligonucleotide
ttaggattaaggagttgtaatacgggacgc

SEQ ID NO: 402298 - DNA, 30 bp, Artificial Sequence
  Synthetic oligonucleotide
aaaagagcgtttgtagcaaagcggggacgc

SEQ ID NO: 402299 - DNA, 30 bp, Artificial Sequence
  Synthetic oligonucleotide
gttcaccagtggtcgataagtcggggacgc

SEQ ID NO: 402300 - DNA, 30 bp, Artificial Sequence
  Synthetic oligonucleotide
ccaaaggggttagtgaaacaactgggacgc

SEQ ID NO: 402301 - DNA, 30 bp, Artificial Sequence
  Synthetic oligonucleotide
aaaagcgttagatgtcgatgatgtggacgc

SEQ ID NO: 402302 - DNA, 30 bp, Artificial Sequence
  Synthetic oligonucleotide
tacggtggacgtttgaataattcatgacgc

SEQ ID NO: 402303 - DNA, 30 bp, Artificial Sequence
  Synthetic oligonucleotide
gggtaggggagaggtaatcgtcgatgacgc

SEQ ID NO: 402304 - DNA, 30 bp, Artificial Sequence
  Synthetic oligonucleotide
gtagacgggcgtctcgtgtatctctgacgc

SEQ ID NO: 402305 - DNA, 30 bp, Artificial Sequence
  Synthetic oligonucleotide
aggccccaagatagtagccatctaatacgc

SEQ ID NO: 402306 - DNA, 30 bp, Artificial Sequence
  Synthetic oligonucleotide
caacaaatggagggactggggggtatacgc

SEQ ID NO: 402307 - DNA, 30 bp, Artificial Sequence
  Synthetic oligonucleotide
tggcccacttcctgggcgccagaactacgc

SEQ ID NO: 402308 - DNA, 30 bp, Artificial Sequence
  Synthetic oligonucleotide
accaggtaatccttgccttcctgactacgc

SEQ ID NO: 402309 - DNA, 30 bp, Artificial Sequence
  Synthetic oligonucleotide
ttcgcagggcgcgcttctccccacctacgc

SEQ ID NO: 402310 - DNA, 30 bp, Artificial Sequence
  Synthetic oligonucleotide
cagatttttgcgaaagttaaactcctacgc

SEQ ID NO: 402311 - DNA, 30 bp, Artificial Sequence
  Synthetic oligonucleotide
tcgcgctagctatcgttcagggatctacgc

SEQ ID NO: 402312 - DNA, 30 bp, Artificial Sequence
  Synthetic oligonucleotide
ttctactccatgaggaggatatgtctacgc

SEQ ID NO: 402313 - DNA, 30 bp, Artificial Sequence
  Synthetic oligonucleotide
gactacagtgttacacgttgagaagtacgc

SEQ ID NO: 402314 - DNA, 30 bp, Artificial Sequence
  Synthetic oligonucleotide
gtcctattccgcaagaagagcgcagtacgc

SEQ ID NO: 402315 - DNA, 30 bp, Artificial Sequence
  Synthetic oligonucleotide
cagagcgtggtttaaaacatgcacgtacgc

SEQ ID NO: 402316 - DNA, 30 bp, Artificial Sequence
  Synthetic oligonucleotide
gtcacatccgtacggcacaccacggtacgc

SEQ ID NO: 402317 - DNA, 30 bp, Artificial Sequence
  Synthetic oligonucleotide
gcccgaatgcccatcataccgatggtacgc

SEQ ID NO: 402318 - DNA, 30 bp, Artificial Sequence
  Synthetic oligonucleotide
accgaaaagcggtttcactgtctggtacgc

SEQ ID NO: 402319 - DNA, 30 bp, Artificial Sequence
  Synthetic oligonucleotide
acacgttctcagttcggtaggtatgtacgc

SEQ ID NO: 402320 - DNA, 30 bp, Artificial Sequence
  Synthetic oligonucleotide
ttgtcgctaagtttacgtctgccattacgc

SEQ ID NO: 402321 - DNA, 30 bp, Artificial Sequence
  Synthetic oligonucleotide
caaagaaggttaacgattgttacgttacgc

SEQ ID NO: 402322 - DNA, 30 bp, Artificial Sequence
  Synthetic oligonucleotide
gggtcatgaggtagaggcccaaatttacgc

SEQ ID NO: 402323 - DNA, 30 bp, Artificial Sequence
  Synthetic oligonucleotide
ttgttgctgtctccatcgttaagaaaccgc

SEQ ID NO: 402324 - DNA, 30 bp, Artificial Sequence
  Synthetic oligonucleotide
aatactggtcctaattggtccggaaaccgc

SEQ ID NO: 402325 - DNA, 30 bp, Artificial Sequence
  Synthetic oligonucleotide
tttgttaacggaacacccacattaaaccgc

SEQ ID NO: 402326 - DNA, 30 bp, Artificial Sequence
  Synthetic oligonucleotide
gaaacagaaaagcggtctgtggggcaccgc

SEQ ID NO: 402327 - DNA, 31 bp, Artificial Sequence
  Synthetic oligonucleotide
acagcggcagggccagcacacgttgcaccgc

SEQ ID NO: 402328 - DNA, 29 bp, Artificial Sequence
  Synthetic oligonucleotide
gggtaaacgttttcgtgtcctttcaccgc

SEQ ID NO: 402329 - DNA, 30 bp, Artificial Sequence
  Synthetic oligonucleotide
ccccgcgagcccatccctgggccagaccgc

SEQ ID NO: 402330 - DNA, 30 bp, Artificial Sequence
  Synthetic oligonucleotide
ggaatctgcttggttgacggggtagaccgc

SEQ ID NO: 402331 - DNA, 30 bp, Artificial Sequence
  Synthetic oligonucleotide
gacgtctgaaaatcattcacagccgaccgc

SEQ ID NO: 402332 - DNA, 30 bp, Artificial Sequence
  Synthetic oligonucleotide
ttgtgtcacgctattctcgaccaggaccgc

SEQ ID NO: 402333 - DNA, 30 bp, Artificial Sequence
  Synthetic oligonucleotide
atgtctgtgtttctaagttgtgaggaccgc

SEQ ID NO: 402334 - DNA, 30 bp, Artificial Sequence
  Synthetic oligonucleotide
gagacgctgaaaatcctcggatatgaccgc

SEQ ID NO: 402335 - DNA, 30 bp, Artificial Sequence
  Synthetic oligonucleotide
catgttcgttcatagagactgtatgaccgc

SEQ ID NO: 402336 - DNA, 30 bp, Artificial Sequence
  Synthetic oligonucleotide
aagacttgcgcgctcgttgtcagtgaccgc

SEQ ID NO: 402337 - DNA, 30 bp, Artificial Sequence
  Synthetic oligonucleotide
tagcattaaatgcactggtcttactaccgc

SEQ ID NO: 402338 - DNA, 30 bp, Artificial Sequence
  Synthetic oligonucleotide
gtttgacctgtgcgttcatattcgtaccgc

SEQ ID NO: 402339 - DNA, 30 bp, Artificial Sequence
  Synthetic oligonucleotide
gggaattttcattctcgaatcatgtaccgc

SEQ ID NO: 402340 - DNA, 30 bp, Artificial Sequence
  Synthetic oligonucleotide
tttgattttttgaaaatccacgccacccgc

SEQ ID NO: 402341 - DNA, 30 bp, Artificial Sequence
  Synthetic oligonucleotide
gttgcaaaccaccaggttttcatcacccgc

SEQ ID NO: 402342 - DNA, 30 bp, Artificial Sequence
  Synthetic oligonucleotide
tgcgagcttcacccaatgtcgcggacccgc

SEQ ID NO: 402343 - DNA, 30 bp, Artificial Sequence
  Synthetic oligonucleotide
cccgcgtgttattggggtggagggacccgc

SEQ ID NO: 402344 - DNA, 30 bp, Artificial Sequence
  Synthetic oligonucleotide
ataccacggggcggaaagtggggaccccgc

SEQ ID NO: 402345 - DNA, 30 bp, Artificial Sequence
  Synthetic oligonucleotide
ttcatcactccaaacgaagaattcccccgc

SEQ ID NO: 402346 - DNA, 30 bp, Artificial Sequence
  Synthetic oligonucleotide
gctaatgtacagtactgctgacagccccgc

SEQ ID NO: 402347 - DNA, 30 bp, Artificial Sequence
  Synthetic oligonucleotide
cctgcactattattacaacgtgagccccgc

SEQ ID NO: 402348 - DNA, 30 bp, Artificial Sequence
  Synthetic oligonucleotide
gaccggacatttgttctcgtttaagcccgc

SEQ ID NO: 402349 - DNA, 30 bp, Artificial Sequence
  Synthetic oligonucleotide
gtataaaattaacgcttgtgatcagcccgc

SEQ ID NO: 402350 - DNA, 30 bp, Artificial Sequence
  Synthetic oligonucleotide
atagaagaatggaacctaagttgagcccgc

SEQ ID NO: 402351 - DNA, 30 bp, Artificial Sequence
  Synthetic oligonucleotide
aggggcgacgttagcgctgacgaatcccgc

SEQ ID NO: 402352 - DNA, 30 bp, Artificial Sequence
  Synthetic oligonucleotide
aattcttcctttgcgtaaggttggtcccgc

SEQ ID NO: 402353 - DNA, 30 bp, Artificial Sequence
  Synthetic oligonucleotide
tctgttgttcgacacccgccatattcccgc

SEQ ID NO: 402354 - DNA, 30 bp, Artificial Sequence
  Synthetic oligonucleotide
ccaatataataatacaatccttattcccgc

SEQ ID NO: 402355 - DNA, 30 bp, Artificial Sequence
  Synthetic oligonucleotide
gaatcccgccagggtaacctgataagccgc

SEQ ID NO: 402356 - DNA, 30 bp, Artificial Sequence
  Synthetic oligonucleotide
caccgcgttgcataaagcaacgagagccgc

SEQ ID NO: 402357 - DNA, 30 bp, Artificial Sequence
  Synthetic oligonucleotide
aactctgcacctactcgctctgtgagccgc

SEQ ID NO: 402358 - DNA, 30 bp, Artificial Sequence
  Synthetic oligonucleotide
gcctacgagcataccagttggcgtagccgc

SEQ ID NO: 402359 - DNA, 30 bp, Artificial Sequence
  Synthetic oligonucleotide
tagcgttttcaaccctctagctttagccgc

SEQ ID NO: 402360 - DNA, 30 bp, Artificial Sequence
  Synthetic oligonucleotide
gcccgtagggatttgcacggacgacgccgc

SEQ ID NO: 402361 - DNA, 30 bp, Artificial Sequence
  Synthetic oligonucleotide
gagtgtaaaacatagtttctcttacgccgc

SEQ ID NO: 402362 - DNA, 30 bp, Artificial Sequence
  Synthetic oligonucleotide
tctagtcgcctttcccgctcctaaggccgc

SEQ ID NO: 402363 - DNA, 30 bp, Artificial Sequence
  Synthetic oligonucleotide
cggggtatagatccggataggcccggccgc

SEQ ID NO: 402364 - DNA, 30 bp, Artificial Sequence
  Synthetic oligonucleotide
ggttgtgattttgccgggagaacgggccgc

SEQ ID NO: 402365 - DNA, 30 bp, Artificial Sequence
  Synthetic oligonucleotide
cgcgtaaggagggtacactcttggggccgc

SEQ ID NO: 402366 - DNA, 30 bp, Artificial Sequence
  Synthetic oligonucleotide
gcatttgcgcacggtgttttagtgggccgc

SEQ ID NO: 402367 - DNA, 30 bp, Artificial Sequence
  Synthetic oligonucleotide
ctgatcgggcacattggggtaactggccgc

SEQ ID NO: 402368 - DNA, 30 bp, Artificial Sequence
  Synthetic oligonucleotide
gggtgcattattggcggagcatgtggccgc

SEQ ID NO: 402369 - DNA, 30 bp, Artificial Sequence
  Synthetic oligonucleotide
tcagaacatggctgttccgtcggctgccgc

SEQ ID NO: 402370 - DNA, 30 bp, Artificial Sequence
  Synthetic oligonucleotide
gatcagtcaacccatggatcagtctgccgc

SEQ ID NO: 402371 - DNA, 30 bp, Artificial Sequence
  Synthetic oligonucleotide
tcatagccggcagaccgacaccggtgccgc

SEQ ID NO: 402372 - DNA, 30 bp, Artificial Sequence
  Synthetic oligonucleotide
tattagacaatgcgggaagtcggttgccgc

SEQ ID NO: 402373 - DNA, 30 bp, Artificial Sequence
  Synthetic oligonucleotide
tggcctcgttatgaactacatggttgccgc

SEQ ID NO: 402374 - DNA, 30 bp, Artificial Sequence
  Synthetic oligonucleotide
ttcagcgacgagctttagcacgtttgccgc

SEQ ID NO: 402375 - DNA, 30 bp, Artificial Sequence
  Synthetic oligonucleotide
gggagagaatccaacttacgggcaatccgc

SEQ ID NO: 402376 - DNA, 30 bp, Artificial Sequence
  Synthetic oligonucleotide
aagtgcgaataacgcacgcgtttgatccgc

SEQ ID NO: 402377 - DNA, 30 bp, Artificial Sequence
  Synthetic oligonucleotide
cattcaaattggatgataattaatatccgc

SEQ ID NO: 402378 - DNA, 30 bp, Artificial Sequence
  Synthetic oligonucleotide
acccaacgcaggactatgagtagtatccgc

SEQ ID NO: 402379 - DNA, 30 bp, Artificial Sequence
  Synthetic oligonucleotide
acgcttcgcacataccctcgtgcgctccgc

SEQ ID NO: 402380 - DNA, 30 bp, Artificial Sequence
  Synthetic oligonucleotide
ggtaggtcttcatgttctgagtggctccgc

SEQ ID NO: 402381 - DNA, 30 bp, Artificial Sequence
  Synthetic oligonucleotide
tctcgagcctcctctttttgaatagtccgc

SEQ ID NO: 402382 - DNA, 30 bp, Artificial Sequence
  Synthetic oligonucleotide
gcttatgggctccgagttccactagtccgc

SEQ ID NO: 402383 - DNA, 30 bp, Artificial Sequence
  Synthetic oligonucleotide
ttgaggtatcgggcattaagtgtcgtccgc

SEQ ID NO: 402384 - DNA, 30 bp, Artificial Sequence
  Synthetic oligonucleotide
gccgtcttcgaccaagcggtagaggtccgc

SEQ ID NO: 402385 - DNA, 30 bp, Artificial Sequence
  Synthetic oligonucleotide
gacagacgccttcagacagaatcggtccgc

SEQ ID NO: 402386 - DNA, 30 bp, Artificial Sequence
  Synthetic oligonucleotide
atttggtcaaatcacgtttccttggtccgc

SEQ ID NO: 402387 - DNA, 30 bp, Artificial Sequence
  Synthetic oligonucleotide
taaggtcgttcgggctttcttaaattccgc

SEQ ID NO: 402388 - DNA, 30 bp, Artificial Sequence
  Synthetic oligonucleotide
aagtcgtgaccatccacgcaataattccgc

SEQ ID NO: 402389 - DNA, 30 bp, Artificial Sequence
  Synthetic oligonucleotide
gttgtacatactgttgtagtgttattccgc

SEQ ID NO: 402390 - DNA, 30 bp, Artificial Sequence
  Synthetic oligonucleotide
aatcgagaggttccagggaagaacttccgc

SEQ ID NO: 402391 - DNA, 30 bp, Artificial Sequence
  Synthetic oligonucleotide
ataatattatatcactgggacggcttccgc

SEQ ID NO: 402392 - DNA, 30 bp, Artificial Sequence
  Synthetic oligonucleotide
atggtacctggacgacccggcgcgttccgc

SEQ ID NO: 402393 - DNA, 30 bp, Artificial Sequence
  Synthetic oligonucleotide
gtgaatctttgaccttaactcccaaagcgc

SEQ ID NO: 402394 - DNA, 30 bp, Artificial Sequence
  Synthetic oligonucleotide
ggaacgatgagtgatagtaaatgaaagcgc

SEQ ID NO: 402395 - DNA, 30 bp, Artificial Sequence
  Synthetic oligonucleotide
ctcctactgtaggattcctggttaaagcgc

SEQ ID NO: 402396 - DNA, 30 bp, Artificial Sequence
  Synthetic oligonucleotide
cttcttggtttcgtcgagtgccccaagcgc

SEQ ID NO: 402397 - DNA, 30 bp, Artificial Sequence
  Synthetic oligonucleotide
tataattcatgttagtaagaagagaagcgc

SEQ ID NO: 402398 - DNA, 30 bp, Artificial Sequence
  Synthetic oligonucleotide
gtgtgcggacaacaagaggtgacacagcgc

SEQ ID NO: 402399 - DNA, 30 bp, Artificial Sequence
  Synthetic oligonucleotide
taacagtcggttcctattttggcacagcgc

SEQ ID NO: 402400 - DNA, 30 bp, Artificial Sequence
  Synthetic oligonucleotide
gacacttcaaggttgttattagttcagcgc

SEQ ID NO: 402401 - DNA, 30 bp, Artificial Sequence
  Synthetic oligonucleotide
cctttacacatgggaggtttacaagagcgc

SEQ ID NO: 402402 - DNA, 30 bp, Artificial Sequence
  Synthetic oligonucleotide
cggtcatctttcgcgcgttgtgaagagcgc

SEQ ID NO: 402403 - DNA, 30 bp, Artificial Sequence
  Synthetic oligonucleotide
attttgaattctgtaggagacccagagcgc

SEQ ID NO: 402404 - DNA, 30 bp, Artificial Sequence
  Synthetic oligonucleotide
ggtttatttactctaacacaccccgagcgc

SEQ ID NO: 402405 - DNA, 30 bp, Artificial Sequence
  Synthetic oligonucleotide
tctccccggacacgaagtccggccgagcgc

SEQ ID NO: 402406 - DNA, 30 bp, Artificial Sequence
  Synthetic oligonucleotide
tatacccgcactcaaagtcagatcgagcgc

SEQ ID NO: 402407 - DNA, 30 bp, Artificial Sequence
  Synthetic oligonucleotide
taaaaacgttaatggccgatgcaggagcgc

SEQ ID NO: 402408 - DNA, 30 bp, Artificial Sequence
  Synthetic oligonucleotide
tgcacggttccgcttgttggttgggagcgc

SEQ ID NO: 402409 - DNA, 30 bp, Artificial Sequence
  Synthetic oligonucleotide
aatcgggacagagtttctgcgatggagcgc

SEQ ID NO: 402410 - DNA, 30 bp, Artificial Sequence
  Synthetic oligonucleotide
ggtgatgacgttttgggtcaagtggagcgc

SEQ ID NO: 402411 - DNA, 30 bp, Artificial Sequence
  Synthetic oligonucleotide
gggaaacctattcatgcacaatatgagcgc

SEQ ID NO: 402412 - DNA, 30 bp, Artificial Sequence
  Synthetic oligonucleotide
ggggatggggtttgcagcggaactgagcgc

SEQ ID NO: 402413 - DNA, 30 bp, Artificial Sequence
  Synthetic oligonucleotide
cattgatgttaatggccctgctttgagcgc

SEQ ID NO: 402414 - DNA, 30 bp, Artificial Sequence
  Synthetic oligonucleotide
gcggagtgacatggatttgtttttgagcgc

SEQ ID NO: 402415 - DNA, 30 bp, Artificial Sequence
  Synthetic oligonucleotide
tatatgtgccttatgggggtcaaatagcgc

SEQ ID NO: 402416 - DNA, 30 bp, Artificial Sequence
  Synthetic oligonucleotide
aacagtaccataatatcgcccaggtagcgc

SEQ ID NO: 402417 - DNA, 30 bp, Artificial Sequence
  Synthetic oligonucleotide
ggatgggcgattgtatggggcaggtagcgc

SEQ ID NO: 402418 - DNA, 30 bp, Artificial Sequence
  Synthetic oligonucleotide
gaaatcgtttccgagcgattggggtagcgc

SEQ ID NO: 402419 - DNA, 30 bp, Artificial Sequence
  Synthetic oligonucleotide
tatactatcacgtggaggtaaagaacgcgc

SEQ ID NO: 402420 - DNA, 30 bp, Artificial Sequence
  Synthetic oligonucleotide
attgtggcagagctgagcaaaccgacgcgc

SEQ ID NO: 402421 - DNA, 30 bp, Artificial Sequence
  Synthetic oligonucleotide
gcactttcaactagccttgagattacgcgc

SEQ ID NO: 402422 - DNA, 30 bp, Artificial Sequence
  Synthetic oligonucleotide
cagatgttggcggggtcatagtcaccgcgc

SEQ ID NO: 402423 - DNA, 31 bp, Artificial Sequence
  Synthetic oligonucleotide
gtaatagcgcgctcaatgtcgaagaccgcgc

SEQ ID NO: 402424 - DNA, 30 bp, Artificial Sequence
  Synthetic oligonucleotide
tcatctgtgggcggcgaaatgctaccgcgc

SEQ ID NO: 402425 - DNA, 31 bp, Artificial Sequence
  Synthetic oligonucleotide
attatagttggtctacaagtggctagcgcgc

SEQ ID NO: 402426 - DNA, 30 bp, Artificial Sequence
  Synthetic oligonucleotide
gtgatctgccggcctcctttagtagcgcgc

SEQ ID NO: 402427 - DNA, 30 bp, Artificial Sequence
  Synthetic oligonucleotide
ttgaaacggttatcacccccaggggcgcgc

SEQ ID NO: 402428 - DNA, 30 bp, Artificial Sequence
  Synthetic oligonucleotide
tgttcgtatctgtggcaaatttgggcgcgc

SEQ ID NO: 402429 - DNA, 30 bp, Artificial Sequence
  Synthetic oligonucleotide
ctacgatgatgagcgtgggcagatgcgcgc

SEQ ID NO: 402430 - DNA, 30 bp, Artificial Sequence
  Synthetic oligonucleotide
taaacggtcgcgtccttagtagcatcgcgc

SEQ ID NO: 402431 - DNA, 29 bp, Artificial Sequence
  Synthetic oligonucleotide
accagagtccaacttagttttgatcgcgc

SEQ ID NO: 402432 - DNA, 30 bp, Artificial Sequence
  Synthetic oligonucleotide
tgaatgtcgctgctgaccgagtactcgcgc

SEQ ID NO: 402433 - DNA, 30 bp, Artificial Sequence
  Synthetic oligonucleotide
aactcagaagtactgtaccggtggtcgcgc

SEQ ID NO: 402434 - DNA, 30 bp, Artificial Sequence
  Synthetic oligonucleotide
cgttacggcatcaaaccccctgattcgcgc

SEQ ID NO: 402435 - DNA, 29 bp, Artificial Sequence
  Synthetic oligonucleotide
cggacacgtggacgtaaactggttcgcgc

SEQ ID NO: 402436 - DNA, 29 bp, Artificial Sequence
  Synthetic oligonucleotide
ctgtcccggcattcttataagacaggcgc

SEQ ID NO: 402437 - DNA, 30 bp, Artificial Sequence
  Synthetic oligonucleotide
ttattccgcatgtggacaatcgacaggcgc

SEQ ID NO: 402438 - DNA, 30 bp, Artificial Sequence
  Synthetic oligonucleotide
agttttagttcacatcgttatcgcaggcgc

SEQ ID NO: 402439 - DNA, 30 bp, Artificial Sequence
  Synthetic oligonucleotide
aattacccagtgcagttctacggcaggcgc

SEQ ID NO: 402440 - DNA, 30 bp, Artificial Sequence
  Synthetic oligonucleotide
acttcggttctgttaaactgcgtcaggcgc

SEQ ID NO: 402441 - DNA, 30 bp, Artificial Sequence
  Synthetic oligonucleotide
tcaagtagtaccgattggatcaaacggcgc

SEQ ID NO: 402442 - DNA, 30 bp, Artificial Sequence
  Synthetic oligonucleotide
gtttttgtggccagtttcaacgaacggcgc

SEQ ID NO: 402443 - DNA, 30 bp, Artificial Sequence
  Synthetic oligonucleotide
tcgtctcccggcttatcgggtggacggcgc

SEQ ID NO: 402444 - DNA, 30 bp, Artificial Sequence
  Synthetic oligonucleotide
gccggatctttactgtgtgctatacggcgc

SEQ ID NO: 402445 - DNA, 30 bp, Artificial Sequence
  Synthetic oligonucleotide
caactaaccttaaatgcatcaacccggcgc

SEQ ID NO: 402446 - DNA, 30 bp, Artificial Sequence
  Synthetic oligonucleotide
atatcgatatggatgggacccgcgcggcgc

SEQ ID NO: 402447 - DNA, 30 bp, Artificial Sequence
  Synthetic oligonucleotide
cacctcttccgggtcgtgaggtggcggcgc

SEQ ID NO: 402448 - DNA, 30 bp, Artificial Sequence
  Synthetic oligonucleotide
tacctcgggtatgggtacctacctcggcgc

SEQ ID NO: 402449 - DNA, 30 bp, Artificial Sequence
  Synthetic oligonucleotide
aactcgcgtgtatatagagttgtagggcgc

SEQ ID NO: 402450 - DNA, 30 bp, Artificial Sequence
  Synthetic oligonucleotide
gctgctctcgctctccgtattgtggggcgc

SEQ ID NO: 402451 - DNA, 30 bp, Artificial Sequence
  Synthetic oligonucleotide
tgcgcctgttcacagatctgaagtgggcgc

SEQ ID NO: 402452 - DNA, 30 bp, Artificial Sequence
  Synthetic oligonucleotide
gtataaccgtcatacttgacaggtgggcgc

SEQ ID NO: 402453 - DNA, 30 bp, Artificial Sequence
  Synthetic oligonucleotide
tgctggtagcaacacgaatgaggtgggcgc

SEQ ID NO: 402454 - DNA, 30 bp, Artificial Sequence
  Synthetic oligonucleotide
atagaactgtgattggactggacatggcgc

SEQ ID NO: 402455 - DNA, 30 bp, Artificial Sequence
  Synthetic oligonucleotide
gacttgtctcgttactgcttaagatggcgc

SEQ ID NO: 402456 - DNA, 30 bp, Artificial Sequence
  Synthetic oligonucleotide
tcggagttgaataaaccgcgcgtatggcgc

SEQ ID NO: 402457 - DNA, 30 bp, Artificial Sequence
  Synthetic oligonucleotide
gtgtacagcctatgcttataatcgtggcgc

SEQ ID NO: 402458 - DNA, 30 bp, Artificial Sequence
  Synthetic oligonucleotide
ataatagaactcacctttccaaattggcgc

SEQ ID NO: 402459 - DNA, 30 bp, Artificial Sequence
  Synthetic oligonucleotide
ctggctcagaatcctaataataattggcgc

SEQ ID NO: 402460 - DNA, 30 bp, Artificial Sequence
  Synthetic oligonucleotide
agccgatgggttagcgacacccattggcgc

SEQ ID NO: 402461 - DNA, 30 bp, Artificial Sequence
  Synthetic oligonucleotide
agcacggggtctggaatttgatgttggcgc

SEQ ID NO: 402462 - DNA, 30 bp, Artificial Sequence
  Synthetic oligonucleotide
gtcctggcggggcgagatcctggaatgcgc

SEQ ID NO: 402463 - DNA, 30 bp, Artificial Sequence
  Synthetic oligonucleotide
aggagcggtcatattacattgcccatgcgc

SEQ ID NO: 402464 - DNA, 30 bp, Artificial Sequence
  Synthetic oligonucleotide
ttggacatccggtgccataagggcatgcgc

SEQ ID NO: 402465 - DNA, 30 bp, Artificial Sequence
  Synthetic oligonucleotide
ccttccactgcgaaaaagccgtaagtgcgc

SEQ ID NO: 402466 - DNA, 30 bp, Artificial Sequence
  Synthetic oligonucleotide
aaacgcgcccctggtccaagatcagtgcgc

SEQ ID NO: 402467 - DNA, 30 bp, Artificial Sequence
  Synthetic oligonucleotide
ggacttacgtctggtacaacaggcgtgcgc

SEQ ID NO: 402468 - DNA, 30 bp, Artificial Sequence
  Synthetic oligonucleotide
gtttactacagaattcgttgctgcgtgcgc

SEQ ID NO: 402469 - DNA, 30 bp, Artificial Sequence
  Synthetic oligonucleotide
aagcagagccagcgggcggctcctgtgcgc

SEQ ID NO: 402470 - DNA, 30 bp, Artificial Sequence
  Synthetic oligonucleotide
tcgaattgctcggcggaagggcaattgcgc

SEQ ID NO: 402471 - DNA, 30 bp, Artificial Sequence
  Synthetic oligonucleotide
ttagggcttaaaccctagtaatcattgcgc

SEQ ID NO: 402472 - DNA, 30 bp, Artificial Sequence
  Synthetic oligonucleotide
ttttacaagtcaggtaattatcgattgcgc

SEQ ID NO: 402473 - DNA, 30 bp, Artificial Sequence
  Synthetic oligonucleotide
gcaggacgtaatggcgcgggactattgcgc

SEQ ID NO: 402474 - DNA, 30 bp, Artificial Sequence
  Synthetic oligonucleotide
tgctgatcgctgcgctactagctattgcgc

SEQ ID NO: 402475 - DNA, 30 bp, Artificial Sequence
  Synthetic oligonucleotide
tatatggacgccactacgtgcaacttgcgc

SEQ ID NO: 402476 - DNA, 30 bp, Artificial Sequence
  Synthetic oligonucleotide
atttacaccaatcaggcgcacgggttgcgc

SEQ ID NO: 402477 - DNA, 30 bp, Artificial Sequence
  Synthetic oligonucleotide
tcacaatcgctctctgtagctatgttgcgc

SEQ ID NO: 402478 - DNA, 30 bp, Artificial Sequence
  Synthetic oligonucleotide
tgattgcacgaaattctcaaaagaaatcgc

SEQ ID NO: 402479 - DNA, 30 bp, Artificial Sequence
  Synthetic oligonucleotide
acgctattacggaagctgcgcgtacatcgc

SEQ ID NO: 402480 - DNA, 30 bp, Artificial Sequence
  Synthetic oligonucleotide
ggcgtttctgaagctgttgtgatccatcgc

SEQ ID NO: 402481 - DNA, 25 bp, Artificial Sequence
  Synthetic oligonucleotide
ttacccctgggaacccgtccatcgc

SEQ ID NO: 402482 - DNA, 30 bp, Artificial Sequence
  Synthetic oligonucleotide
tacattggtcaaccgctgatcaatcatcgc

SEQ ID NO: 402483 - DNA, 30 bp, Artificial Sequence
  Synthetic oligonucleotide
aatgatttttcccgtaaccctactcatcgc

SEQ ID NO: 402484 - DNA, 30 bp, Artificial Sequence
  Synthetic oligonucleotide
atgattggatggccaagtttggctcatcgc

SEQ ID NO: 402485 - DNA, 30 bp, Artificial Sequence
  Synthetic oligonucleotide
gactcttaggtcatagttatcagtcatcgc

SEQ ID NO: 402486 - DNA, 30 bp, Artificial Sequence
  Synthetic oligonucleotide
ctcgtgaccttgatggcttagggtcatcgc

SEQ ID NO: 402487 - DNA, 30 bp, Artificial Sequence
  Synthetic oligonucleotide
gcatataagaattcctttatctgggatcgc

SEQ ID NO: 402488 - DNA, 30 bp, Artificial Sequence
  Synthetic oligonucleotide
agttcgtagccgttcggggggactgatcgc

SEQ ID NO: 402489 - DNA, 30 bp, Artificial Sequence
  Synthetic oligonucleotide
ggtaggagaatgccgagaatacctgatcgc

SEQ ID NO: 402490 - DNA, 30 bp, Artificial Sequence
  Synthetic oligonucleotide
ggtcatatttagggctagacgtaatatcgc

SEQ ID NO: 402491 - DNA, 30 bp, Artificial Sequence
  Synthetic oligonucleotide
ccttcatcgaggatgtaccttgcatatcgc

SEQ ID NO: 402492 - DNA, 30 bp, Artificial Sequence
  Synthetic oligonucleotide
ggatccgacttgccgaacaatacctatcgc

SEQ ID NO: 402493 - DNA, 30 bp, Artificial Sequence
  Synthetic oligonucleotide
ttatcgctatagtcggctgggagctatcgc

SEQ ID NO: 402494 - DNA, 30 bp, Artificial Sequence
  Synthetic oligonucleotide
acatacttagtaacaggccaacagtatcgc

SEQ ID NO: 402495 - DNA, 30 bp, Artificial Sequence
  Synthetic oligonucleotide
cgacctatactttaggtctatcagtatcgc

SEQ ID NO: 402496 - DNA, 30 bp, Artificial Sequence
  Synthetic oligonucleotide
atggttcatagttatagtagttcgtatcgc

SEQ ID NO: 402497 - DNA, 30 bp, Artificial Sequence
  Synthetic oligonucleotide
tgcttcggaattgtcgagggcgggtatcgc

SEQ ID NO: 402498 - DNA, 30 bp, Artificial Sequence
  Synthetic oligonucleotide
gctcaaccgcttttagtgggacattatcgc

SEQ ID NO: 402499 - DNA, 30 bp, Artificial Sequence
  Synthetic oligonucleotide
gacaatgtaatttagtaactcagttatcgc

SEQ ID NO: 402500 - DNA, 30 bp, Artificial Sequence
  Synthetic oligonucleotide
cgggaagttgttacgcatcgcataactcgc

SEQ ID NO: 402501 - DNA, 30 bp, Artificial Sequence
  Synthetic oligonucleotide
caggcgttaatgggacacccaaagactcgc

SEQ ID NO: 402502 - DNA, 30 bp, Artificial Sequence
  Synthetic oligonucleotide
ttaacttccccctactcctgggggactcgc

SEQ ID NO: 402503 - DNA, 30 bp, Artificial Sequence
  Synthetic oligonucleotide
cccaaatgagtgtatacctggattactcgc

SEQ ID NO: 402504 - DNA, 30 bp, Artificial Sequence
  Synthetic oligonucleotide
atatccttggcgaactcatgataccctcgc

SEQ ID NO: 402505 - DNA, 30 bp, Artificial Sequence
  Synthetic oligonucleotide
ccagaccgcagggcttctctttcccctcgc

SEQ ID NO: 402506 - DNA, 30 bp, Artificial Sequence
  Synthetic oligonucleotide
ctggccgcctttttcaaagcccgccctcgc

SEQ ID NO: 402507 - DNA, 30 bp, Artificial Sequence
  Synthetic oligonucleotide
gctcagcggaatttcgaggataggcctcgc

SEQ ID NO: 402508 - DNA, 30 bp, Artificial Sequence
  Synthetic oligonucleotide
agggtctaggacacaacgcaaaatcctcgc

SEQ ID NO: 402509 - DNA, 30 bp, Artificial Sequence
  Synthetic oligonucleotide
gttcggttttcgggcaggacttaagctcgc

SEQ ID NO: 402510 - DNA, 30 bp, Artificial Sequence
  Synthetic oligonucleotide
ctgagggccgcagtggttcgaaacgctcgc

SEQ ID NO: 402511 - DNA, 30 bp, Artificial Sequence
  Synthetic oligonucleotide
cgcatttaactctcgacaggcaacgctcgc

SEQ ID NO: 402512 - DNA, 30 bp, Artificial Sequence
  Synthetic oligonucleotide
tatgcactgacaaatccctaacctgctcgc

SEQ ID NO: 402513 - DNA, 30 bp, Artificial Sequence
  Synthetic oligonucleotide
cgaggggtttaatcgacggtacgtgctcgc

SEQ ID NO: 402514 - DNA, 30 bp, Artificial Sequence
  Synthetic oligonucleotide
ctgacgcatttgtggggtggaggtgctcgc

SEQ ID NO: 402515 - DNA, 30 bp, Artificial Sequence
  Synthetic oligonucleotide
aggtcctataacgaccggcattttgctcgc

SEQ ID NO: 402516 - DNA, 30 bp, Artificial Sequence
  Synthetic oligonucleotide
tcgccgcctcgaatcgttaaacgctctcgc

SEQ ID NO: 402517 - DNA, 30 bp, Artificial Sequence
  Synthetic oligonucleotide
tttctcggtctacggggggatatgtctcgc

SEQ ID NO: 402518 - DNA, 30 bp, Artificial Sequence
  Synthetic oligonucleotide
caaacggagggttttcattacgattctcgc

SEQ ID NO: 402519 - DNA, 30 bp, Artificial Sequence
  Synthetic oligonucleotide
atcattggtcttagcttagcgccaagtcgc

SEQ ID NO: 402520 - DNA, 30 bp, Artificial Sequence
  Synthetic oligonucleotide
gtcaaagcgcaagcagcaatgccaagtcgc

SEQ ID NO: 402521 - DNA, 30 bp, Artificial Sequence
  Synthetic oligonucleotide
gctcacttggtcatttgattcaagagtcgc

SEQ ID NO: 402522 - DNA, 30 bp, Artificial Sequence
  Synthetic oligonucleotide
cgccccttatttagcatgggacagagtcgc

SEQ ID NO: 402523 - DNA, 30 bp, Artificial Sequence
  Synthetic oligonucleotide
aagggattgctcagtatcacagcgagtcgc

SEQ ID NO: 402524 - DNA, 30 bp, Artificial Sequence
  Synthetic oligonucleotide
gctgcgtcgcactaatcttgccgccgtcgc

SEQ ID NO: 402525 - DNA, 30 bp, Artificial Sequence
  Synthetic oligonucleotide
ttgtagattaccacgtgcgagtcgcgtcgc

SEQ ID NO: 402526 - DNA, 30 bp, Artificial Sequence
  Synthetic oligonucleotide
atctctcgggagcagtattagtttcgtcgc

SEQ ID NO: 402527 - DNA, 30 bp, Artificial Sequence
  Synthetic oligonucleotide
gggattggacgggcagagcttctcggtcgc

SEQ ID NO: 402528 - DNA, 30 bp, Artificial Sequence
  Synthetic oligonucleotide
tgtaacctgctaaaagtttaagatggtcgc

SEQ ID NO: 402529 - DNA, 30 bp, Artificial Sequence
  Synthetic oligonucleotide
acttgtagtctgtgcggacaaaggtgtcgc

SEQ ID NO: 402530 - DNA, 30 bp, Artificial Sequence
  Synthetic oligonucleotide
tgatatacgtggtctagatatcattgtcgc

SEQ ID NO: 402531 - DNA, 30 bp, Artificial Sequence
  Synthetic oligonucleotide
gcccggtctatcacaagttggagaattcgc

SEQ ID NO: 402532 - DNA, 30 bp, Artificial Sequence
  Synthetic oligonucleotide
taagcatgattataaaaaggacgcattcgc

SEQ ID NO: 402533 - DNA, 30 bp, Artificial Sequence
  Synthetic oligonucleotide
gcactagagatacgcaagtaggcgattcgc

SEQ ID NO: 402534 - DNA, 30 bp, Artificial Sequence
  Synthetic oligonucleotide
gatagtgtatggcggttagtcaggattcgc

SEQ ID NO: 402535 - DNA, 30 bp, Artificial Sequence
  Synthetic oligonucleotide
aagtatcatcaacatacaatgttgattcgc

SEQ ID NO: 402536 - DNA, 30 bp, Artificial Sequence
  Synthetic oligonucleotide
cctgttccgtattggcaggtggatattcgc

SEQ ID NO: 402537 - DNA, 30 bp, Artificial Sequence
  Synthetic oligonucleotide
tcattgggtgatctcgtggtctctattcgc

SEQ ID NO: 402538 - DNA, 30 bp, Artificial Sequence
  Synthetic oligonucleotide
ctggtcattctcaaaacggccagtattcgc

SEQ ID NO: 402539 - DNA, 30 bp, Artificial Sequence
  Synthetic oligonucleotide
gccgaaataagtgatttacacattattcgc

SEQ ID NO: 402540 - DNA, 30 bp, Artificial Sequence
  Synthetic oligonucleotide
gttacggactgtttgaagcgagttattcgc

SEQ ID NO: 402541 - DNA, 30 bp, Artificial Sequence
  Synthetic oligonucleotide
agaaatctattataggacgtatcacttcgc

SEQ ID NO: 402542 - DNA, 30 bp, Artificial Sequence
  Synthetic oligonucleotide
cgcactccgtagacctcatagcgacttcgc

SEQ ID NO: 402543 - DNA, 30 bp, Artificial Sequence
  Synthetic oligonucleotide
cacagcatcaataatcgcttactacttcgc

SEQ ID NO: 402544 - DNA, 30 bp, Artificial Sequence
  Synthetic oligonucleotide
caggctcaaatgagtttcttgctgcttcgc

SEQ ID NO: 402545 - DNA, 30 bp, Artificial Sequence
  Synthetic oligonucleotide
cagcccaaaatctatttttcacctcttcgc

SEQ ID NO: 402546 - DNA, 30 bp, Artificial Sequence
  Synthetic oligonucleotide
gaataagtgcgctctgtttggcaagttcgc

SEQ ID NO: 402547 - DNA, 30 bp, Artificial Sequence
  Synthetic oligonucleotide
agttaatcccccgatttaactgcagttcgc

SEQ ID NO: 402548 - DNA, 30 bp, Artificial Sequence
  Synthetic oligonucleotide
ctctattactaatagtctaaaggcgttcgc

SEQ ID NO: 402549 - DNA, 30 bp, Artificial Sequence
  Synthetic oligonucleotide
tgcgctgcacctactcagcgcttcgttcgc

SEQ ID NO: 402550 - DNA, 30 bp, Artificial Sequence
  Synthetic oligonucleotide
ttaagcgatctggtatcatgtatggttcgc

SEQ ID NO: 402551 - DNA, 30 bp, Artificial Sequence
  Synthetic oligonucleotide
ggactaaccagacttgtgtttatggttcgc

SEQ ID NO: 402552 - DNA, 30 bp, Artificial Sequence
  Synthetic oligonucleotide
gccttactttggtgaatctatcctgttcgc

SEQ ID NO: 402553 - DNA, 30 bp, Artificial Sequence
  Synthetic oligonucleotide
gcatcgtaagtgagtatagcgaaatttcgc

SEQ ID NO: 402554 - DNA, 30 bp, Artificial Sequence
  Synthetic oligonucleotide
accaccgaatattatggtattccatttcgc

SEQ ID NO: 402555 - DNA, 30 bp, Artificial Sequence
  Synthetic oligonucleotide
atcatctatgtaataacgtgtggatttcgc

SEQ ID NO: 402556 - DNA, 30 bp, Artificial Sequence
  Synthetic oligonucleotide
tctcatgtgtacccagctagtatatttcgc

SEQ ID NO: 402557 - DNA, 30 bp, Artificial Sequence
  Synthetic oligonucleotide
ggccggcggccgtgccgcctacgctttcgc

SEQ ID NO: 402558 - DNA, 30 bp, Artificial Sequence
  Synthetic oligonucleotide
tcttatcgtgcatcgaaaaagcattttcgc

SEQ ID NO: 402559 - DNA, 30 bp, Artificial Sequence
  Synthetic oligonucleotide
cggtgtgatgctgagatatgagattttcgc

SEQ ID NO: 402560 - DNA, 30 bp, Artificial Sequence
  Synthetic oligonucleotide
cagtcgacggtttacgggagtttttttcgc

SEQ ID NO: 402561 - DNA, 30 bp, Artificial Sequence
  Synthetic oligonucleotide
gtaccggcgccagtcctcgtaacaaaaggc

SEQ ID NO: 402562 - DNA, 30 bp, Artificial Sequence
  Synthetic oligonucleotide
ctggttcgcatcacgaggattaccaaaggc

SEQ ID NO: 402563 - DNA, 30 bp, Artificial Sequence
  Synthetic oligonucleotide
accgctacttctttcttcaatagcaaaggc

SEQ ID NO: 402564 - DNA, 30 bp, Artificial Sequence
  Synthetic oligonucleotide
gcttcggagaagttggacttgtgcaaaggc

SEQ ID NO: 402565 - DNA, 30 bp, Artificial Sequence
  Synthetic oligonucleotide
ccgtctgatcccttgtatcagaggaaaggc

SEQ ID NO: 402566 - DNA, 30 bp, Artificial Sequence
  Synthetic oligonucleotide
cacgcacttccaagggccgcacgtaaaggc

SEQ ID NO: 402567 - DNA, 30 bp, Artificial Sequence
  Synthetic oligonucleotide
gttcaagacgatgtatcgccgacacaaggc

SEQ ID NO: 402568 - DNA, 30 bp, Artificial Sequence
  Synthetic oligonucleotide
ttgatgagcgagtagtaccgtgtacaaggc

SEQ ID NO: 402569 - DNA, 30 bp, Artificial Sequence
  Synthetic oligonucleotide
agtagtagtgcacaggattaagaccaaggc

SEQ ID NO: 402570 - DNA, 30 bp, Artificial Sequence
  Synthetic oligonucleotide
aggggcgtcggcgaagtacgtttgcaaggc

SEQ ID NO: 402571 - DNA, 30 bp, Artificial Sequence
  Synthetic oligonucleotide
ggctcaatgggttcggggaaccaagaaggc

SEQ ID NO: 402572 - DNA, 30 bp, Artificial Sequence
  Synthetic oligonucleotide
gagttaaacgtgtccccggtgacagaaggc

SEQ ID NO: 402573 - DNA, 30 bp, Artificial Sequence
  Synthetic oligonucleotide
tatgcgctgtagctgcgctgtaccgaaggc

SEQ ID NO: 402574 - DNA, 30 bp, Artificial Sequence
  Synthetic oligonucleotide
ctaactacatacacgccaacttgcgaaggc

SEQ ID NO: 402575 - DNA, 30 bp, Artificial Sequence
  Synthetic oligonucleotide
cagaccattcgatatcccttccgggaaggc

SEQ ID NO: 402576 - DNA, 30 bp, Artificial Sequence
  Synthetic oligonucleotide
attacggtgagacttccgaaagtggaaggc

SEQ ID NO: 402577 - DNA, 30 bp, Artificial Sequence
  Synthetic oligonucleotide
aataactgcagccacaaagctggtgaaggc

SEQ ID NO: 402578 - DNA, 30 bp, Artificial Sequence
  Synthetic oligonucleotide
gcggttggagtgcggcccctaattgaaggc

SEQ ID NO: 402579 - DNA, 30 bp, Artificial Sequence
  Synthetic oligonucleotide
cttggtgacgtggctacttgagcataaggc

SEQ ID NO: 402580 - DNA, 30 bp, Artificial Sequence
  Synthetic oligonucleotide
tgctcgacccggaagggagttttataaggc

SEQ ID NO: 402581 - DNA, 30 bp, Artificial Sequence
  Synthetic oligonucleotide
cagcgtccagttgaaagccttacctaaggc

SEQ ID NO: 402582 - DNA, 30 bp, Artificial Sequence
  Synthetic oligonucleotide
atctaagctactgggccggaatcctaaggc

SEQ ID NO: 402583 - DNA, 30 bp, Artificial Sequence
  Synthetic oligonucleotide
aagtctccaaaataacatgtgagctaaggc

SEQ ID NO: 402584 - DNA, 30 bp, Artificial Sequence
  Synthetic oligonucleotide
gcggcaccccgcttagaccttctctaaggc

SEQ ID NO: 402585 - DNA, 30 bp, Artificial Sequence
  Synthetic oligonucleotide
cagaatattgtcagtgcaagcggttaaggc

SEQ ID NO: 402586 - DNA, 30 bp, Artificial Sequence
  Synthetic oligonucleotide
cttgatgttggaacaggcacgggttaaggc

SEQ ID NO: 402587 - DNA, 30 bp, Artificial Sequence
  Synthetic oligonucleotide
ggtgtattgaataacagcgccggaacaggc

SEQ ID NO: 402588 - DNA, 30 bp, Artificial Sequence
  Synthetic oligonucleotide
tcaatgaagcgccatggcgaaggcacaggc

SEQ ID NO: 402589 - DNA, 30 bp, Artificial Sequence
  Synthetic oligonucleotide
acagctcgggaagtttttcacaggacaggc

SEQ ID NO: 402590 - DNA, 30 bp, Artificial Sequence
  Synthetic oligonucleotide
ttgacttgcgtacaggctagtaggacaggc

SEQ ID NO: 402591 - DNA, 30 bp, Artificial Sequence
  Synthetic oligonucleotide
attgttggtgaacgaaattaacttacaggc

SEQ ID NO: 402592 - DNA, 30 bp, Artificial Sequence
  Synthetic oligonucleotide
tccccagttgctgaaattgcagaaccaggc

SEQ ID NO: 402593 - DNA, 30 bp, Artificial Sequence
  Synthetic oligonucleotide
ctcgacgtgtagaaagtactgacaccaggc

SEQ ID NO: 402594 - DNA, 30 bp, Artificial Sequence
  Synthetic oligonucleotide
acccctctagttgcacgtcgcttcccaggc

SEQ ID NO: 402595 - DNA, 30 bp, Artificial Sequence
  Synthetic oligonucleotide
ttctcttagaacaacaaacaagacgcaggc

SEQ ID NO: 402596 - DNA, 30 bp, Artificial Sequence
  Synthetic oligonucleotide
aacagcgtgagcctgacaagagcggcaggc

SEQ ID NO: 402597 - DNA, 30 bp, Artificial Sequence
  Synthetic oligonucleotide
taccattgcgtgatccgcggccgggcaggc

SEQ ID NO: 402598 - DNA, 30 bp, Artificial Sequence
  Synthetic oligonucleotide
taacacacgccatgcatgagcaatgcaggc

SEQ ID NO: 402599 - DNA, 30 bp, Artificial Sequence
  Synthetic oligonucleotide
tgcatttaccaaggcgcacagattgcaggc

SEQ ID NO: 402600 - DNA, 30 bp, Artificial Sequence
  Synthetic oligonucleotide
tccaacttagcggaagtagctgcatcaggc

SEQ ID NO: 402601 - DNA, 30 bp, Artificial Sequence
  Synthetic oligonucleotide
actatccggtatattgagttctgatcaggc

SEQ ID NO: 402602 - DNA, 31 bp, Artificial Sequence
  Synthetic oligonucleotide
gacacggttccccgtggaaagcgggtcaggc

SEQ ID NO: 402603 - DNA, 30 bp, Artificial Sequence
  Synthetic oligonucleotide
atatgccgtggcactttgcagtggtcaggc

SEQ ID NO: 402604 - DNA, 30 bp, Artificial Sequence
  Synthetic oligonucleotide
gtgatgcgggttagtacaatcatgtcaggc

SEQ ID NO: 402605 - DNA, 30 bp, Artificial Sequence
  Synthetic oligonucleotide
gcagacgttttgtgattaatgaattcaggc

SEQ ID NO: 402606 - DNA, 30 bp, Artificial Sequence
  Synthetic oligonucleotide
gcgcagagattcggctctgttgtttcaggc

SEQ ID NO: 402607 - DNA, 30 bp, Artificial Sequence
  Synthetic oligonucleotide
tggggtgccgcggaggtggagccgagaggc

SEQ ID NO: 402608 - DNA, 30 bp, Artificial Sequence
  Synthetic oligonucleotide
attcagcgcctgaaaatcgggtggagaggc

SEQ ID NO: 402609 - DNA, 30 bp, Artificial Sequence
  Synthetic oligonucleotide
acagcttttacgtacgaaattagtagaggc

SEQ ID NO: 402610 - DNA, 30 bp, Artificial Sequence
  Synthetic oligonucleotide
acgtcgacgacctatggggtccgacgaggc

SEQ ID NO: 402611 - DNA, 30 bp, Artificial Sequence
  Synthetic oligonucleotide
tgtatcttttcggaaggtgcggtacgaggc

SEQ ID NO: 402612 - DNA, 30 bp, Artificial Sequence
  Synthetic oligonucleotide
gagtacggggtcgaatgcggatagcgaggc

SEQ ID NO: 402613 - DNA, 30 bp, Artificial Sequence
  Synthetic oligonucleotide
ggtaggaccgagggagacttttagcgaggc

SEQ ID NO: 402614 - DNA, 30 bp, Artificial Sequence
  Synthetic oligonucleotide
cgcgcggtacgaaagtaggcacggcgaggc

SEQ ID NO: 402615 - DNA, 30 bp, Artificial Sequence
  Synthetic oligonucleotide
gctgagtatcatacacgactagaaggaggc

SEQ ID NO: 402616 - DNA, 30 bp, Artificial Sequence
  Synthetic oligonucleotide
gcaagccagtatcgtcaatatgcgggaggc

SEQ ID NO: 402617 - DNA, 30 bp, Artificial Sequence
  Synthetic oligonucleotide
ggacatgaatacgtgctactccggggaggc

SEQ ID NO: 402618 - DNA, 30 bp, Artificial Sequence
  Synthetic oligonucleotide
ttgtaaataaatcctttctgaggtggaggc

SEQ ID NO: 402619 - DNA, 30 bp, Artificial Sequence
  Synthetic oligonucleotide
tatcgggggcccccattgaaataatgaggc

SEQ ID NO: 402620 - DNA, 30 bp, Artificial Sequence
  Synthetic oligonucleotide
catcatccgttaacagaccgcgcctgaggc

SEQ ID NO: 402621 - DNA, 30 bp, Artificial Sequence
  Synthetic oligonucleotide
tgggagtgcgcccgggtaacatgctgaggc

SEQ ID NO: 402622 - DNA, 30 bp, Artificial Sequence
  Synthetic oligonucleotide
acgcagggttcgtttggttcatgctgaggc

SEQ ID NO: 402623 - DNA, 30 bp, Artificial Sequence
  Synthetic oligonucleotide
tacccttaggaaaatttgcgactctgaggc

SEQ ID NO: 402624 - DNA, 30 bp, Artificial Sequence
  Synthetic oligonucleotide
atacaaacacatcgttatgtagtctgaggc

SEQ ID NO: 402625 - DNA, 30 bp, Artificial Sequence
  Synthetic oligonucleotide
gatatcctgactattaccacatggtgaggc

SEQ ID NO: 402626 - DNA, 30 bp, Artificial Sequence
  Synthetic oligonucleotide
ataactaacggttcgcaagagctgtgaggc

SEQ ID NO: 402627 - DNA, 30 bp, Artificial Sequence
  Synthetic oligonucleotide
tagccaggcagtgcaatgtgtgtgtgaggc

SEQ ID NO: 402628 - DNA, 30 bp, Artificial Sequence
  Synthetic oligonucleotide
aaaacgagcgcttatttagaatattgaggc

SEQ ID NO: 402629 - DNA, 30 bp, Artificial Sequence
  Synthetic oligonucleotide
gcacctgtaggcagccggtcctcttgaggc

SEQ ID NO: 402630 - DNA, 30 bp, Artificial Sequence
  Synthetic oligonucleotide
ctttgaccttttcaggaatcaggaataggc

SEQ ID NO: 402631 - DNA, 30 bp, Artificial Sequence
  Synthetic oligonucleotide
cctgagattgtggcgacgtttttaataggc

SEQ ID NO: 402632 - DNA, 30 bp, Artificial Sequence
  Synthetic oligonucleotide
tataagaagggcaggcactagtggataggc

SEQ ID NO: 402633 - DNA, 30 bp, Artificial Sequence
  Synthetic oligonucleotide
cccccaaaatacgtgttgagttgcctaggc

SEQ ID NO: 402634 - DNA, 30 bp, Artificial Sequence
  Synthetic oligonucleotide
cggcagtcataccgcttgcgtaatctaggc

SEQ ID NO: 402635 - DNA, 30 bp, Artificial Sequence
  Synthetic oligonucleotide
gcgggttgcggcttccgctgggaagtaggc

SEQ ID NO: 402636 - DNA, 30 bp, Artificial Sequence
  Synthetic oligonucleotide
gggttgacgacagcattaagatacgtaggc

SEQ ID NO: 402637 - DNA, 30 bp, Artificial Sequence
  Synthetic oligonucleotide
aatggatgttgtacttgtatagccgtaggc

SEQ ID NO: 402638 - DNA, 30 bp, Artificial Sequence
  Synthetic oligonucleotide
aacggccgctgcaggagtaaaggcgtaggc

SEQ ID NO: 402639 - DNA, 30 bp, Artificial Sequence
  Synthetic oligonucleotide
aacatgttgctacaaccaatgtctgtaggc

SEQ ID NO: 402640 - DNA, 30 bp, Artificial Sequence
  Synthetic oligonucleotide
cacctggcgttgtattcctctggtgtaggc

SEQ ID NO: 402641 - DNA, 30 bp, Artificial Sequence
  Synthetic oligonucleotide
tcgtgataaaaatcaaaattggaattaggc

SEQ ID NO: 402642 - DNA, 30 bp, Artificial Sequence
  Synthetic oligonucleotide
attagtgggaaacctgtggtagttttaggc

SEQ ID NO: 402643 - DNA, 30 bp, Artificial Sequence
  Synthetic oligonucleotide
tgggggccctcattgggcatcagaaacggc

SEQ ID NO: 402644 - DNA, 30 bp, Artificial Sequence
  Synthetic oligonucleotide
aacttgtcctcatagatatatggcaacggc

SEQ ID NO: 402645 - DNA, 30 bp, Artificial Sequence
  Synthetic oligonucleotide
aacgtcggtcgtacttgaggagaccacggc

SEQ ID NO: 402646 - DNA, 30 bp, Artificial Sequence
  Synthetic oligonucleotide
accaaccctgatacgtatgcggcgcacggc

SEQ ID NO: 402647 - DNA, 30 bp, Artificial Sequence
  Synthetic oligonucleotide
tagcgttcgggagtacgtagcgttcacggc

SEQ ID NO: 402648 - DNA, 30 bp, Artificial Sequence
  Synthetic oligonucleotide
ccgtgtcttgagtcccctattcgagacggc

SEQ ID NO: 402649 - DNA, 30 bp, Artificial Sequence
  Synthetic oligonucleotide
gaacaaaacaggattgtactgcccgacggc

SEQ ID NO: 402650 - DNA, 30 bp, Artificial Sequence
  Synthetic oligonucleotide
acagttggggtaccgtggataagcgacggc

SEQ ID NO: 402651 - DNA, 30 bp, Artificial Sequence
  Synthetic oligonucleotide
gtcctattaccaagaagccggtgcgacggc

SEQ ID NO: 402652 - DNA, 30 bp, Artificial Sequence
  Synthetic oligonucleotide
catgagtatcataaaaatgatttcgacggc

SEQ ID NO: 402653 - DNA, 30 bp, Artificial Sequence
  Synthetic oligonucleotide
ggggtacccatagcggttcgggaggacggc

SEQ ID NO: 402654 - DNA, 30 bp, Artificial Sequence
  Synthetic oligonucleotide
ctgcacggccaaaggggctgcacggacggc

SEQ ID NO: 402655 - DNA, 30 bp, Artificial Sequence
  Synthetic oligonucleotide
agacgacagtaaacgcttcactatgacggc

SEQ ID NO: 402656 - DNA, 30 bp, Artificial Sequence
  Synthetic oligonucleotide
ccgttcaggctctctcgagattatgacggc

SEQ ID NO: 402657 - DNA, 30 bp, Artificial Sequence
  Synthetic oligonucleotide
caaggtaccggttgggcaccgtctgacggc

SEQ ID NO: 402658 - DNA, 30 bp, Artificial Sequence
  Synthetic oligonucleotide
gtagaacccaggcctaactttaaatacggc

SEQ ID NO: 402659 - DNA, 30 bp, Artificial Sequence
  Synthetic oligonucleotide
gaaccacctgagtcttaatctagatacggc

SEQ ID NO: 402660 - DNA, 30 bp, Artificial Sequence
  Synthetic oligonucleotide
ttcgttctgaagcctaaagcaatatacggc

SEQ ID NO: 402661 - DNA, 30 bp, Artificial Sequence
  Synthetic oligonucleotide
gcaatttagcacagttggcctctatacggc

SEQ ID NO: 402662 - DNA, 30 bp, Artificial Sequence
  Synthetic oligonucleotide
gtgactcacgctagttgttgtacctacggc

SEQ ID NO: 402663 - DNA, 30 bp, Artificial Sequence
  Synthetic oligonucleotide
gttgcagtaggcccgtcacgggtctacggc

SEQ ID NO: 402664 - DNA, 30 bp, Artificial Sequence
  Synthetic oligonucleotide
agacagcccgtatcagttgacccgtacggc

SEQ ID NO: 402665 - DNA, 30 bp, Artificial Sequence
  Synthetic oligonucleotide
aatccttggtgcagtgtataccggtacggc

SEQ ID NO: 402666 - DNA, 30 bp, Artificial Sequence
  Synthetic oligonucleotide
tacgacgccatcagtatatctgtgtacggc

SEQ ID NO: 402667 - DNA, 30 bp, Artificial Sequence
  Synthetic oligonucleotide
cgactcgcgcctggccgcagacattacggc

SEQ ID NO: 402668 - DNA, 30 bp, Artificial Sequence
  Synthetic oligonucleotide
ggatactgaggaagtgatttactttacggc

SEQ ID NO: 402669 - DNA, 30 bp, Artificial Sequence
  Synthetic oligonucleotide
ttgtttcgtagttgtattaggctttacggc

SEQ ID NO: 402670 - DNA, 30 bp, Artificial Sequence
  Synthetic oligonucleotide
aatcacactgtatcattttggctttacggc

SEQ ID NO: 402671 - DNA, 30 bp, Artificial Sequence
  Synthetic oligonucleotide
ggcatttttggtacaaaagtgaccaccggc

SEQ ID NO: 402672 - DNA, 30 bp, Artificial Sequence
  Synthetic oligonucleotide
ataggttgaaataattccgatttgaccggc

SEQ ID NO: 402673 - DNA, 30 bp, Artificial Sequence
  Synthetic oligonucleotide
agagctaccactttatgagaagcacccggc

SEQ ID NO: 402674 - DNA, 30 bp, Artificial Sequence
  Synthetic oligonucleotide
aagtctcgtatctaaagtgaaatacccggc

SEQ ID NO: 402675 - DNA, 30 bp, Artificial Sequence
  Synthetic oligonucleotide
tgcttgcgagcactaaaagtatcgcccggc

SEQ ID NO: 402676 - DNA, 30 bp, Artificial Sequence
  Synthetic oligonucleotide
agccgctgggctctgcgtcattatcccggc

SEQ ID NO: 402677 - DNA, 30 bp, Artificial Sequence
  Synthetic oligonucleotide
aagccggatgttcaccctagacctgccggc

SEQ ID NO: 402678 - DNA, 30 bp, Artificial Sequence
  Synthetic oligonucleotide
aagagctgtcagataaatacatgtgccggc

SEQ ID NO: 402679 - DNA, 30 bp, Artificial Sequence
  Synthetic oligonucleotide
attctgcacaagttatccagggaatccggc

SEQ ID NO: 402680 - DNA, 30 bp, Artificial Sequence
  Synthetic oligonucleotide
aaaagccaaccagcgaacgtgtgttccggc

SEQ ID NO: 402681 - DNA, 30 bp, Artificial Sequence
  Synthetic oligonucleotide
gaggtcaagtatagaacagcagtttccggc

SEQ ID NO: 402682 - DNA, 30 bp, Artificial Sequence
  Synthetic oligonucleotide
gctaaatccgcgcctgttgaaagaagcggc

SEQ ID NO: 402683 - DNA, 30 bp, Artificial Sequence
  Synthetic oligonucleotide
tttcgtagcagtttaggcgggcccagcggc

SEQ ID NO: 402684 - DNA, 30 bp, Artificial Sequence
  Synthetic oligonucleotide
ttaaatcttggtccccgtgggcccagcggc

SEQ ID NO: 402685 - DNA, 30 bp, Artificial Sequence
  Synthetic oligonucleotide
ctactttggctctagggcttctagagcggc

SEQ ID NO: 402686 - DNA, 30 bp, Artificial Sequence
  Synthetic oligonucleotide
aggggagtactgggaagggtttggagcggc

SEQ ID NO: 402687 - DNA, 30 bp, Artificial Sequence
  Synthetic oligonucleotide
cgaaatagaccccggccgggacatagcggc

SEQ ID NO: 402688 - DNA, 30 bp, Artificial Sequence
  Synthetic oligonucleotide
ttataacggcctgcggtaccccgtagcggc

SEQ ID NO: 402689 - DNA, 30 bp, Artificial Sequence
  Synthetic oligonucleotide
catggcaattctgggccgattcaacgcggc

SEQ ID NO: 402690 - DNA, 30 bp, Artificial Sequence
  Synthetic oligonucleotide
tgaaccagccgactagcctttgaccgcggc

SEQ ID NO: 402691 - DNA, 30 bp, Artificial Sequence
  Synthetic oligonucleotide
taatatcatcgacagtggacagggcgcggc

SEQ ID NO: 402692 - DNA, 30 bp, Artificial Sequence
  Synthetic oligonucleotide
aaaatgaactgtgtaaccttgactcgcggc

SEQ ID NO: 402693 - DNA, 30 bp, Artificial Sequence
  Synthetic oligonucleotide
ggcgtacagccaagaattcggcctcgcggc

SEQ ID NO: 402694 - DNA, 30 bp, Artificial Sequence
  Synthetic oligonucleotide
cttattaagctggtcgggtgtattcgcggc

SEQ ID NO: 402695 - DNA, 30 bp, Artificial Sequence
  Synthetic oligonucleotide
tcgcggcggggaaccagcatcccaggcggc

SEQ ID NO: 402696 - DNA, 30 bp, Artificial Sequence
  Synthetic oligonucleotide
agctactgggatgttttcggactaggcggc

SEQ ID NO: 402697 - DNA, 30 bp, Artificial Sequence
  Synthetic oligonucleotide
tagtgtcttgctatcagccaccacggcggc

SEQ ID NO: 402698 - DNA, 30 bp, Artificial Sequence
  Synthetic oligonucleotide
ctatcgcagcgcaaatactgttacggcggc

SEQ ID NO: 402699 - DNA, 30 bp, Artificial Sequence
  Synthetic oligonucleotide
tatactcggatggtaaacccaacgggcggc

SEQ ID NO: 402700 - DNA, 30 bp, Artificial Sequence
  Synthetic oligonucleotide
agagcgcggagcgcgagacgaggtggcggc

SEQ ID NO: 402701 - DNA, 30 bp, Artificial Sequence
  Synthetic oligonucleotide
gagcggagggccacggcccggtcatgcggc

SEQ ID NO: 402702 - DNA, 30 bp, Artificial Sequence
  Synthetic oligonucleotide
gtaccaccgagttgcctggacagatgcggc

SEQ ID NO: 402703 - DNA, 30 bp, Artificial Sequence
  Synthetic oligonucleotide
attaaagggtattctattcgacgctgcggc

SEQ ID NO: 402704 - DNA, 30 bp, Artificial Sequence
  Synthetic oligonucleotide
tcaagctttactccgtaagatggctgcggc

SEQ ID NO: 402705 - DNA, 30 bp, Artificial Sequence
  Synthetic oligonucleotide
tttatagtataaattcatggcaagtgcggc

SEQ ID NO: 402706 - DNA, 30 bp, Artificial Sequence
  Synthetic oligonucleotide
agccaggcatctactcgagaacattgcggc

SEQ ID NO: 402707 - DNA, 30 bp, Artificial Sequence
  Synthetic oligonucleotide
atgtagggacgatttaggcataaaatcggc

SEQ ID NO: 402708 - DNA, 30 bp, Artificial Sequence
  Synthetic oligonucleotide
tgtggtctgcagacttatattggaatcggc

SEQ ID NO: 402709 - DNA, 30 bp, Artificial Sequence
  Synthetic oligonucleotide
ggtatctcgagcagagtggcggtaatcggc

SEQ ID NO: 402710 - DNA, 30 bp, Artificial Sequence
  Synthetic oligonucleotide
gagttggtcgtcaggaggtaacacatcggc

SEQ ID NO: 402711 - DNA, 30 bp, Artificial Sequence
  Synthetic oligonucleotide
ctcgtatcgctcagcatccgtttcatcggc

SEQ ID NO: 402712 - DNA, 30 bp, Artificial Sequence
  Synthetic oligonucleotide
caatattttgtcacgtaagtaactatcggc

SEQ ID NO: 402713 - DNA, 30 bp, Artificial Sequence
  Synthetic oligonucleotide
ctctagccatggacgttaacacctatcggc

SEQ ID NO: 402714 - DNA, 30 bp, Artificial Sequence
  Synthetic oligonucleotide
cccctaggcgtcctggtaccgaaactcggc

SEQ ID NO: 402715 - DNA, 30 bp, Artificial Sequence
  Synthetic oligonucleotide
ttcgggcatggaggttgggcctaactcggc

SEQ ID NO: 402716 - DNA, 30 bp, Artificial Sequence
  Synthetic oligonucleotide
agggttttgatattgctcagagcactcggc

SEQ ID NO: 402717 - DNA, 30 bp, Artificial Sequence
  Synthetic oligonucleotide
tggtcgtagaaacggcgccgacgactcggc

SEQ ID NO: 402718 - DNA, 30 bp, Artificial Sequence
  Synthetic oligonucleotide
aaatcatgtgtgccaaacaaacgcgtcggc

SEQ ID NO: 402719 - DNA, 30 bp, Artificial Sequence
  Synthetic oligonucleotide
tcgtgacgccgcaagaggcaatgggtcggc

SEQ ID NO: 402720 - DNA, 30 bp, Artificial Sequence
  Synthetic oligonucleotide
ggcacaaacatcagtgatttacaattcggc

SEQ ID NO: 402721 - DNA, 30 bp, Artificial Sequence
  Synthetic oligonucleotide
caaccattgattagcggttcaggcttcggc

SEQ ID NO: 402722 - DNA, 30 bp, Artificial Sequence
  Synthetic oligonucleotide
acattgtcgagggggttagaaatcttcggc

SEQ ID NO: 402723 - DNA, 30 bp, Artificial Sequence
  Synthetic oligonucleotide
tataaatagttactaggcggctcgttcggc

SEQ ID NO: 402724 - DNA, 30 bp, Artificial Sequence
  Synthetic oligonucleotide
actacagaccagacaccgacggtgttcggc

SEQ ID NO: 402725 - DNA, 30 bp, Artificial Sequence
  Synthetic oligonucleotide
cacgagataggccgggcgtggagtttcggc

SEQ ID NO: 402726 - DNA, 30 bp, Artificial Sequence
  Synthetic oligonucleotide
atatcggcgccgatgatgcaaccaaagggc

SEQ ID NO: 402727 - DNA, 30 bp, Artificial Sequence
  Synthetic oligonucleotide
ggaaattcgcctcaaagggcggcaaagggc

SEQ ID NO: 402728 - DNA, 30 bp, Artificial Sequence
  Synthetic oligonucleotide
ctcgtcttgatgggaattcgtgcaaagggc

SEQ ID NO: 402729 - DNA, 30 bp, Artificial Sequence
  Synthetic oligonucleotide
gttgtttcaaccgcggaggagggaaagggc

SEQ ID NO: 402730 - DNA, 30 bp, Artificial Sequence
  Synthetic oligonucleotide
ggcgttctcccggtacgaaccccgaagggc

SEQ ID NO: 402731 - DNA, 30 bp, Artificial Sequence
  Synthetic oligonucleotide
aatcggagctatgagccaccggctaagggc

SEQ ID NO: 402732 - DNA, 30 bp, Artificial Sequence
  Synthetic oligonucleotide
aacaagttagtatacatgtcgtgtaagggc

SEQ ID NO: 402733 - DNA, 30 bp, Artificial Sequence
  Synthetic oligonucleotide
atgaatcaggcgttcgcgggagaacagggc

SEQ ID NO: 402734 - DNA, 30 bp, Artificial Sequence
  Synthetic oligonucleotide
cgttagggcttccttagcgccgcacagggc

SEQ ID NO: 402735 - DNA, 30 bp, Artificial Sequence
  Synthetic oligonucleotide
cctttaaacccattgctacagccccagggc

SEQ ID NO: 402736 - DNA, 30 bp, Artificial Sequence
  Synthetic oligonucleotide
cacgctcccagccattgagcgtctcagggc

SEQ ID NO: 402737 - DNA, 30 bp, Artificial Sequence
  Synthetic oligonucleotide
ctgacgcgggcaaacagatttgttcagggc

SEQ ID NO: 402738 - DNA, 30 bp, Artificial Sequence
  Synthetic oligonucleotide
acaccagtttacatacgtcggcgcgagggc

SEQ ID NO: 402739 - DNA, 30 bp, Artificial Sequence
  Synthetic oligonucleotide
cggcctatatctatatttaaaggggagggc

SEQ ID NO: 402740 - DNA, 30 bp, Artificial Sequence
  Synthetic oligonucleotide
cggggtgcttgttgatttaattgggagggc

SEQ ID NO: 402741 - DNA, 30 bp, Artificial Sequence
  Synthetic oligonucleotide
ttgacccgttccatgcaggtgctggagggc

SEQ ID NO: 402742 - DNA, 30 bp, Artificial Sequence
  Synthetic oligonucleotide
tcctaaggaagctgcgcagctcgtgagggc

SEQ ID NO: 402743 - DNA, 30 bp, Artificial Sequence
  Synthetic oligonucleotide
ggttcatttatgttgctactagttgagggc

SEQ ID NO: 402744 - DNA, 30 bp, Artificial Sequence
  Synthetic oligonucleotide
tctgagcgcctccacaacagtgttgagggc

SEQ ID NO: 402745 - DNA, 30 bp, Artificial Sequence
  Synthetic oligonucleotide
ttgatacgctgaccaggtactgcatagggc

SEQ ID NO: 402746 - DNA, 30 bp, Artificial Sequence
  Synthetic oligonucleotide
aaaactaatgggaggggagggttatagggc

SEQ ID NO: 402747 - DNA, 30 bp, Artificial Sequence
  Synthetic oligonucleotide
agcttaaagaccgtttttgcctgctagggc

SEQ ID NO: 402748 - DNA, 30 bp, Artificial Sequence
  Synthetic oligonucleotide
atgttccataagggagaagctgtctagggc

SEQ ID NO: 402749 - DNA, 30 bp, Artificial Sequence
  Synthetic oligonucleotide
cggtcaaccaaaggagaacccagttagggc

SEQ ID NO: 402750 - DNA, 30 bp, Artificial Sequence
  Synthetic oligonucleotide
gccatcggactttaatctgtatgttagggc

SEQ ID NO: 402751 - DNA, 30 bp, Artificial Sequence
  Synthetic oligonucleotide
ccagtaactccacgccccgcttgaacgggc

SEQ ID NO: 402752 - DNA, 30 bp, Artificial Sequence
  Synthetic oligonucleotide
gtgttactccgagggcggaacctaacgggc

SEQ ID NO: 402753 - DNA, 30 bp, Artificial Sequence
  Synthetic oligonucleotide
cggaatgcaggtttaatcgtgttcacgggc

SEQ ID NO: 402754 - DNA, 30 bp, Artificial Sequence
  Synthetic oligonucleotide
tgtgttcctactgcggagcccaagacgggc

SEQ ID NO: 402755 - DNA, 30 bp, Artificial Sequence
  Synthetic oligonucleotide
agagaccacgcatactaatccgagacgggc

SEQ ID NO: 402756 - DNA, 30 bp, Artificial Sequence
  Synthetic oligonucleotide
gatttgtgtttaccaggcagaacgacgggc

SEQ ID NO: 402757 - DNA, 30 bp, Artificial Sequence
  Synthetic oligonucleotide
tttgggtttaagaggcgtgagctgacgggc

SEQ ID NO: 402758 - DNA, 30 bp, Artificial Sequence
  Synthetic oligonucleotide
gtaattacgagctgttgaggtgaaccgggc

SEQ ID NO: 402759 - DNA, 27 bp, Artificial Sequence
  Synthetic oligonucleotide
aaatttgtaagggtcaacacaccgggc

SEQ ID NO: 402760 - DNA, 30 bp, Artificial Sequence
  Synthetic oligonucleotide
cccccgttatgcaaagggcggtcgccgggc

SEQ ID NO: 402761 - DNA, 30 bp, Artificial Sequence
  Synthetic oligonucleotide
cagcatttagcaggcgggcttaacgcgggc

SEQ ID NO: 402762 - DNA, 30 bp, Artificial Sequence
  Synthetic oligonucleotide
taatgtctgcatccatggtgacaggcgggc

SEQ ID NO: 402763 - DNA, 30 bp, Artificial Sequence
  Synthetic oligonucleotide
ccagaagagcgttttacccgataatcgggc

SEQ ID NO: 402764 - DNA, 30 bp, Artificial Sequence
  Synthetic oligonucleotide
ttcggagttgcggccgtccctacgtcgggc

SEQ ID NO: 402765 - DNA, 30 bp, Artificial Sequence
  Synthetic oligonucleotide
cagcgcgttaattaagtatcgtcttcgggc

SEQ ID NO: 402766 - DNA, 30 bp, Artificial Sequence
  Synthetic oligonucleotide
accgtctcgaataggtatattcgttcgggc

SEQ ID NO: 402767 - DNA, 30 bp, Artificial Sequence
  Synthetic oligonucleotide
agggaagaaggggtatccggcccaaggggc

SEQ ID NO: 402768 - DNA, 30 bp, Artificial Sequence
  Synthetic oligonucleotide
cctctcaaacccgttcgaggcgcaaggggc

SEQ ID NO: 402769 - DNA, 30 bp, Artificial Sequence
  Synthetic oligonucleotide
atcaaagagttctatggctacgccaggggc

SEQ ID NO: 402770 - DNA, 30 bp, Artificial Sequence
  Synthetic oligonucleotide
gattaagtattccataggtctgtgaggggc

SEQ ID NO: 402771 - DNA, 30 bp, Artificial Sequence
  Synthetic oligonucleotide
gatacagtttccagtgagcatttgaggggc

SEQ ID NO: 402772 - DNA, 30 bp, Artificial Sequence
  Synthetic oligonucleotide
tggacgacgtaacctagccaccgtaggggc

SEQ ID NO: 402773 - DNA, 30 bp, Artificial Sequence
  Synthetic oligonucleotide
cagggcacccatagaattcgtattaggggc

SEQ ID NO: 402774 - DNA, 30 bp, Artificial Sequence
  Synthetic oligonucleotide
cgcccaagtctaggcctgcgcaaacggggc

SEQ ID NO: 402775 - DNA, 31 bp, Artificial Sequence
  Synthetic oligonucleotide
ccgcctggaggcgctactgaggcaacggggc

SEQ ID NO: 402776 - DNA, 30 bp, Artificial Sequence
  Synthetic oligonucleotide
gatccaccttgcatcattatccaccggggc

SEQ ID NO: 402777 - DNA, 30 bp, Artificial Sequence
  Synthetic oligonucleotide
tattggccctttgatttagtcagccggggc

SEQ ID NO: 402778 - DNA, 30 bp, Artificial Sequence
  Synthetic oligonucleotide
gaatgacgggggacagtcggtccagggggc

SEQ ID NO: 402779 - DNA, 30 bp, Artificial Sequence
  Synthetic oligonucleotide
tacacaaacagcctccgaaattcagggggc

SEQ ID NO: 402780 - DNA, 30 bp, Artificial Sequence
  Synthetic oligonucleotide
cgcttatacgcaatatcgtggggcgggggc

SEQ ID NO: 402781 - DNA, 30 bp, Artificial Sequence
  Synthetic oligonucleotide
ggtcaaggtacacgggttttagtcgggggc

SEQ ID NO: 402782 - DNA, 30 bp, Artificial Sequence
  Synthetic oligonucleotide
ctattctagtttcgttcagattaggggggc

SEQ ID NO: 402783 - DNA, 31 bp, Artificial Sequence
  Synthetic oligonucleotide
atatagtacacatcactatatttaggggggc

SEQ ID NO: 402784 - DNA, 30 bp, Artificial Sequence
  Synthetic oligonucleotide
agaagggtcataatgcgcccgggggggggc

SEQ ID NO: 402785 - DNA, 30 bp, Artificial Sequence
  Synthetic oligonucleotide
gtggcggagtcttcacttacgtgtgggggc

SEQ ID NO: 402786 - DNA, 30 bp, Artificial Sequence
  Synthetic oligonucleotide
tgccttccccttattattgcgtgtgggggc

SEQ ID NO: 402787 - DNA, 30 bp, Artificial Sequence
  Synthetic oligonucleotide
agataacggaccactacttcgtgtgggggc

SEQ ID NO: 402788 - DNA, 30 bp, Artificial Sequence
  Synthetic oligonucleotide
aagttgtgtcctagcgaaggttgtgggggc

SEQ ID NO: 402789 - DNA, 30 bp, Artificial Sequence
  Synthetic oligonucleotide
gtagcattcttcttctgccctcaatggggc

SEQ ID NO: 402790 - DNA, 30 bp, Artificial Sequence
  Synthetic oligonucleotide
gctagatcgggatataatcgatcatggggc

SEQ ID NO: 402791 - DNA, 30 bp, Artificial Sequence
  Synthetic oligonucleotide
cgcttccggtcttgctcatgggtatggggc

SEQ ID NO: 402792 - DNA, 30 bp, Artificial Sequence
  Synthetic oligonucleotide
agtcggcgtcagaatcatcacctctggggc

SEQ ID NO: 402793 - DNA, 30 bp, Artificial Sequence
  Synthetic oligonucleotide
ggttagcgtaatcggtgccaacggtggggc

SEQ ID NO: 402794 - DNA, 30 bp, Artificial Sequence
  Synthetic oligonucleotide
gtagcctcacgtcctcctgctccttggggc

SEQ ID NO: 402795 - DNA, 30 bp, Artificial Sequence
  Synthetic oligonucleotide
catgtgcgggaaccacaatcaagttggggc

SEQ ID NO: 402796 - DNA, 30 bp, Artificial Sequence
  Synthetic oligonucleotide
ccgggtccaatggctcggtccagttggggc

SEQ ID NO: 402797 - DNA, 30 bp, Artificial Sequence
  Synthetic oligonucleotide
acctggaagggactaaggttcggttggggc

SEQ ID NO: 402798 - DNA, 30 bp, Artificial Sequence
  Synthetic oligonucleotide
gaagctgccgtcgacgtgcacaaaatgggc

SEQ ID NO: 402799 - DNA, 30 bp, Artificial Sequence
  Synthetic oligonucleotide
gatttctgacataatttccagggcatgggc

SEQ ID NO: 402800 - DNA, 30 bp, Artificial Sequence
  Synthetic oligonucleotide
ttgacgtaagcaaagggctaccgtatgggc

SEQ ID NO: 402801 - DNA, 30 bp, Artificial Sequence
  Synthetic oligonucleotide
taacagattatttcattatggatactgggc

SEQ ID NO: 402802 - DNA, 30 bp, Artificial Sequence
  Synthetic oligonucleotide
agtagaatgttgcaaatttgtatactgggc

SEQ ID NO: 402803 - DNA, 30 bp, Artificial Sequence
  Synthetic oligonucleotide
atcacacgacggacaagctgcagcctgggc

SEQ ID NO: 402804 - DNA, 30 bp, Artificial Sequence
  Synthetic oligonucleotide
ctacggcaaagacaccagcatattctgggc

SEQ ID NO: 402805 - DNA, 30 bp, Artificial Sequence
  Synthetic oligonucleotide
aatgtatgaaggggtggtttggttctgggc

SEQ ID NO: 402806 - DNA, 30 bp, Artificial Sequence
  Synthetic oligonucleotide
aaccttgctgagcgaccctgccaagtgggc

SEQ ID NO: 402807 - DNA, 28 bp, Artificial Sequence
  Synthetic oligonucleotide
aaatatatttaccatcctgagagtgggc

SEQ ID NO: 402808 - DNA, 30 bp, Artificial Sequence
  Synthetic oligonucleotide
ctctggaaagaggggggaatttacgtgggc

SEQ ID NO: 402809 - DNA, 30 bp, Artificial Sequence
  Synthetic oligonucleotide
ggagtttcagagggctttacatcgttgggc

SEQ ID NO: 402810 - DNA, 30 bp, Artificial Sequence
  Synthetic oligonucleotide
tcaagtcgtctcacgaaggagatgttgggc

SEQ ID NO: 402811 - DNA, 30 bp, Artificial Sequence
  Synthetic oligonucleotide
gggcagcgcgtattacgagtttaaaatggc

SEQ ID NO: 402812 - DNA, 30 bp, Artificial Sequence
  Synthetic oligonucleotide
ccaggtataatttgtctgatcagaaatggc

SEQ ID NO: 402813 - DNA, 30 bp, Artificial Sequence
  Synthetic oligonucleotide
ttgtatcaggtctccacggaggacaatggc

SEQ ID NO: 402814 - DNA, 30 bp, Artificial Sequence
  Synthetic oligonucleotide
ttaaagtgcacagacacggtaagcaatggc

SEQ ID NO: 402815 - DNA, 30 bp, Artificial Sequence
  Synthetic oligonucleotide
acttaccgtttgcgcggctctgagaatggc

SEQ ID NO: 402816 - DNA, 30 bp, Artificial Sequence
  Synthetic oligonucleotide
taggtccgcagttaatacacggggaatggc

SEQ ID NO: 402817 - DNA, 30 bp, Artificial Sequence
  Synthetic oligonucleotide
agaaagtcttctatcgctgactataatggc

SEQ ID NO: 402818 - DNA, 30 bp, Artificial Sequence
  Synthetic oligonucleotide
gtataactgaaagtttcctagactaatggc

SEQ ID NO: 402819 - DNA, 30 bp, Artificial Sequence
  Synthetic oligonucleotide
attaccgcataacggataggctgtaatggc

SEQ ID NO: 402820 - DNA, 30 bp, Artificial Sequence
  Synthetic oligonucleotide
ttacgtaatccttagggttactcacatggc

SEQ ID NO: 402821 - DNA, 30 bp, Artificial Sequence
  Synthetic oligonucleotide
ttctggccggtggatgtgctgctacatggc

SEQ ID NO: 402822 - DNA, 30 bp, Artificial Sequence
  Synthetic oligonucleotide
ggtccggtcactgtggccactaggcatggc

SEQ ID NO: 402823 - DNA, 30 bp, Artificial Sequence
  Synthetic oligonucleotide
ggggtcacggtccccccgacgcctcatggc

SEQ ID NO: 402824 - DNA, 30 bp, Artificial Sequence
  Synthetic oligonucleotide
atccatatcggtgtcgcagattttcatggc

SEQ ID NO: 402825 - DNA, 30 bp, Artificial Sequence
  Synthetic oligonucleotide
cgtaaagcatctgactcaactgcggatggc

SEQ ID NO: 402826 - DNA, 31 bp, Artificial Sequence
  Synthetic oligonucleotide
aatctcagctagagtaattaaagttgatggc

SEQ ID NO: 402827 - DNA, 30 bp, Artificial Sequence
  Synthetic oligonucleotide
ggagctaagtgcgggggttctaaatatggc

SEQ ID NO: 402828 - DNA, 30 bp, Artificial Sequence
  Synthetic oligonucleotide
agtgcagtgctttgacaggtagtctatggc

SEQ ID NO: 402829 - DNA, 30 bp, Artificial Sequence
  Synthetic oligonucleotide
ggctgaattcggtcgcagggtgcgtatggc

SEQ ID NO: 402830 - DNA, 30 bp, Artificial Sequence
  Synthetic oligonucleotide
actgtggaaagtggagacaagcggtatggc

SEQ ID NO: 402831 - DNA, 30 bp, Artificial Sequence
  Synthetic oligonucleotide
gcccgactttgctttaaggtcgtgtatggc

SEQ ID NO: 402832 - DNA, 30 bp, Artificial Sequence
  Synthetic oligonucleotide
aatcccctgtacatgaaaaacgcttatggc

SEQ ID NO: 402833 - DNA, 30 bp, Artificial Sequence
  Synthetic oligonucleotide
agaaacccgccttcagcttgaggttatggc

SEQ ID NO: 402834 - DNA, 30 bp, Artificial Sequence
  Synthetic oligonucleotide
gcctctttgtagccatgactcttttatggc

SEQ ID NO: 402835 - DNA, 30 bp, Artificial Sequence
  Synthetic oligonucleotide
tcattgggccctcagtcatcataaactggc

SEQ ID NO: 402836 - DNA, 30 bp, Artificial Sequence
  Synthetic oligonucleotide
aaatataaacccccagaaccacgaactggc

SEQ ID NO: 402837 - DNA, 30 bp, Artificial Sequence
  Synthetic oligonucleotide
attgctatgaattactgtctccgaactggc

SEQ ID NO: 402838 - DNA, 30 bp, Artificial Sequence
  Synthetic oligonucleotide
gtctagcagtggcattaggtcaccactggc

SEQ ID NO: 402839 - DNA, 30 bp, Artificial Sequence
  Synthetic oligonucleotide
agcggttatgagaaagtctgacggactggc

SEQ ID NO: 402840 - DNA, 30 bp, Artificial Sequence
  Synthetic oligonucleotide
ctgccattttttgtcacgactgtgactggc

SEQ ID NO: 402841 - DNA, 30 bp, Artificial Sequence
  Synthetic oligonucleotide
ggggttagcctcccgcgtgattatactggc

SEQ ID NO: 402842 - DNA, 30 bp, Artificial Sequence
  Synthetic oligonucleotide
tgcggtattcgttttcgcgtaacacctggc

SEQ ID NO: 402843 - DNA, 30 bp, Artificial Sequence
  Synthetic oligonucleotide
aataatatcgggtgctaaaacaacgctggc

SEQ ID NO: 402844 - DNA, 30 bp, Artificial Sequence
  Synthetic oligonucleotide
ggggcccggcgtggaaggggctaggctggc

SEQ ID NO: 402845 - DNA, 30 bp, Artificial Sequence
  Synthetic oligonucleotide
gaccatccagccccgagagagacggctggc

SEQ ID NO: 402846 - DNA, 30 bp, Artificial Sequence
  Synthetic oligonucleotide
catgggaagccgcagcgaggttgggctggc

SEQ ID NO: 402847 - DNA, 30 bp, Artificial Sequence
  Synthetic oligonucleotide
cacgcagcctaatgttcccttgctgctggc

SEQ ID NO: 402848 - DNA, 30 bp, Artificial Sequence
  Synthetic oligonucleotide
gacattggattctaatcctgaggatctggc

SEQ ID NO: 402849 - DNA, 30 bp, Artificial Sequence
  Synthetic oligonucleotide
agttcggaattaaatcctcgattctctggc

SEQ ID NO: 402850 - DNA, 30 bp, Artificial Sequence
  Synthetic oligonucleotide
tcggacccgcgcggcggtgatacttctggc

SEQ ID NO: 402851 - DNA, 30 bp, Artificial Sequence
  Synthetic oligonucleotide
ttgttatatgagcgggcgcatggttctggc

SEQ ID NO: 402852 - DNA, 30 bp, Artificial Sequence
  Synthetic oligonucleotide
tatggtagataggccatcaggcaaagtggc

SEQ ID NO: 402853 - DNA, 30 bp, Artificial Sequence
  Synthetic oligonucleotide
ggcggttcgcccaagagcagtttaagtggc

SEQ ID NO: 402854 - DNA, 30 bp, Artificial Sequence
  Synthetic oligonucleotide
gagtgtctcgttgaagatcctgccagtggc

SEQ ID NO: 402855 - DNA, 30 bp, Artificial Sequence
  Synthetic oligonucleotide
tctactgggatcatttctgacccgagtggc

SEQ ID NO: 402856 - DNA, 30 bp, Artificial Sequence
  Synthetic oligonucleotide
tccgtggggccccatatataacctagtggc

SEQ ID NO: 402857 - DNA, 30 bp, Artificial Sequence
  Synthetic oligonucleotide
cacaaccgcataatgttgtactgtagtggc

SEQ ID NO: 402858 - DNA, 30 bp, Artificial Sequence
  Synthetic oligonucleotide
gcttttggtcaggcttgagggtgtcgtggc

SEQ ID NO: 402859 - DNA, 30 bp, Artificial Sequence
  Synthetic oligonucleotide
acgcctatgtgcacgctataagcaggtggc

SEQ ID NO: 402860 - DNA, 30 bp, Artificial Sequence
  Synthetic oligonucleotide
aatggccaacctacctcctacagaggtggc

SEQ ID NO: 402861 - DNA, 30 bp, Artificial Sequence
  Synthetic oligonucleotide
gtataatgctcctggggatgcttcggtggc

SEQ ID NO: 402862 - DNA, 30 bp, Artificial Sequence
  Synthetic oligonucleotide
ttttgtaccagatcgtagtggtgtggtggc

SEQ ID NO: 402863 - DNA, 30 bp, Artificial Sequence
  Synthetic oligonucleotide
gggcgtcgccaggaagggctgattggtggc

SEQ ID NO: 402864 - DNA, 30 bp, Artificial Sequence
  Synthetic oligonucleotide
gacgcccgtgtgtgtgctctaacctgtggc

SEQ ID NO: 402865 - DNA, 30 bp, Artificial Sequence
  Synthetic oligonucleotide
taaagccggatgtatcatttaagctgtggc

SEQ ID NO: 402866 - DNA, 30 bp, Artificial Sequence
  Synthetic oligonucleotide
gtcttctcgcctcaacacgtttattgtggc

SEQ ID NO: 402867 - DNA, 30 bp, Artificial Sequence
  Synthetic oligonucleotide
ctggctaaatatgaatgtaactgttgtggc

SEQ ID NO: 402868 - DNA, 30 bp, Artificial Sequence
  Synthetic oligonucleotide
aaacgtttacgaggaccgggccccattggc

SEQ ID NO: 402869 - DNA, 30 bp, Artificial Sequence
  Synthetic oligonucleotide
ctttcgaagaagagagaacgttgtattggc

SEQ ID NO: 402870 - DNA, 30 bp, Artificial Sequence
  Synthetic oligonucleotide
ctttttggagccgcttgaagataacttggc

SEQ ID NO: 402871 - DNA, 30 bp, Artificial Sequence
  Synthetic oligonucleotide
tgagctgtctgtaaaaccgcggcacttggc

SEQ ID NO: 402872 - DNA, 30 bp, Artificial Sequence
  Synthetic oligonucleotide
gcttttcgaattacataaagaccccttggc

SEQ ID NO: 402873 - DNA, 30 bp, Artificial Sequence
  Synthetic oligonucleotide
gacgactcacggtgtgaggtagcccttggc

SEQ ID NO: 402874 - DNA, 30 bp, Artificial Sequence
  Synthetic oligonucleotide
ccggagatacaaattatctgcgtccttggc

SEQ ID NO: 402875 - DNA, 30 bp, Artificial Sequence
  Synthetic oligonucleotide
tccaggtaaaatccgcgcacccatcttggc

SEQ ID NO: 402876 - DNA, 30 bp, Artificial Sequence
  Synthetic oligonucleotide
tcaggcctccttagggtgctcgaagttggc

SEQ ID NO: 402877 - DNA, 30 bp, Artificial Sequence
  Synthetic oligonucleotide
gagaaagcgtcgggtctggtagacgttggc

SEQ ID NO: 402878 - DNA, 30 bp, Artificial Sequence
  Synthetic oligonucleotide
aacgccacaggtaaaccctcgttggttggc

SEQ ID NO: 402879 - DNA, 30 bp, Artificial Sequence
  Synthetic oligonucleotide
ctgctctactcatgaacctccggtgttggc

SEQ ID NO: 402880 - DNA, 30 bp, Artificial Sequence
  Synthetic oligonucleotide
gcatatagcgatgaatgggcagaatttggc

SEQ ID NO: 402881 - DNA, 30 bp, Artificial Sequence
  Synthetic oligonucleotide
ccggtgtccgcatagaccctggaatttggc

SEQ ID NO: 402882 - DNA, 30 bp, Artificial Sequence
  Synthetic oligonucleotide
ctctataatcaaatgtcaaaaagatttggc

SEQ ID NO: 402883 - DNA, 30 bp, Artificial Sequence
  Synthetic oligonucleotide
atcacccggaataaacgccagtcctttggc

SEQ ID NO: 402884 - DNA, 30 bp, Artificial Sequence
  Synthetic oligonucleotide
gctttagagggcgacgtacaccgctttggc

SEQ ID NO: 402885 - DNA, 30 bp, Artificial Sequence
  Synthetic oligonucleotide
acagtatgtgatgccacatttagttttggc

SEQ ID NO: 402886 - DNA, 30 bp, Artificial Sequence
  Synthetic oligonucleotide
gcgatagacgggctgtgtagcgtttttggc

SEQ ID NO: 402887 - DNA, 30 bp, Artificial Sequence
  Synthetic oligonucleotide
ttgacggctgagagtttattggtttttggc

SEQ ID NO: 402888 - DNA, 30 bp, Artificial Sequence
  Synthetic oligonucleotide
aaaatctgtgtgcggaggcagttaaaatgc

SEQ ID NO: 402889 - DNA, 30 bp, Artificial Sequence
  Synthetic oligonucleotide
atggctttgagcagcattccagacaaatgc

SEQ ID NO: 402890 - DNA, 30 bp, Artificial Sequence
  Synthetic oligonucleotide
taaattgtaaaaagaagcgtgaagaaatgc

SEQ ID NO: 402891 - DNA, 30 bp, Artificial Sequence
  Synthetic oligonucleotide
cattagcacgcgctccacttccagaaatgc

SEQ ID NO: 402892 - DNA, 30 bp, Artificial Sequence
  Synthetic oligonucleotide
tgaagatttttaattgtcccatggaaatgc

SEQ ID NO: 402893 - DNA, 30 bp, Artificial Sequence
  Synthetic oligonucleotide
tagggaattgtgtatgtgatctggaaatgc

SEQ ID NO: 402894 - DNA, 30 bp, Artificial Sequence
  Synthetic oligonucleotide
cgccccgcatatgcaatgctaggtaaatgc

SEQ ID NO: 402895 - DNA, 30 bp, Artificial Sequence
  Synthetic oligonucleotide
cccctctaaacgttctgatctcttaaatgc

SEQ ID NO: 402896 - DNA, 30 bp, Artificial Sequence
  Synthetic oligonucleotide
tagatgagagacgatgatgcatttaaatgc

SEQ ID NO: 402897 - DNA, 30 bp, Artificial Sequence
  Synthetic oligonucleotide
tttcgtggtgctagttttataacccaatgc

SEQ ID NO: 402898 - DNA, 30 bp, Artificial Sequence
  Synthetic oligonucleotide
cacaagcaaacacattgcaaccgccaatgc

SEQ ID NO: 402899 - DNA, 30 bp, Artificial Sequence
  Synthetic oligonucleotide
ccggttactgctgccatttgggtccaatgc

SEQ ID NO: 402900 - DNA, 30 bp, Artificial Sequence
  Synthetic oligonucleotide
atccgtagaattttaaattataggcaatgc

SEQ ID NO: 402901 - DNA, 30 bp, Artificial Sequence
  Synthetic oligonucleotide
ctacccagtataggttatgtggatcaatgc

SEQ ID NO: 402902 - DNA, 30 bp, Artificial Sequence
  Synthetic oligonucleotide
ttctgtgtcagtgcgcctatgtctcaatgc

SEQ ID NO: 402903 - DNA, 30 bp, Artificial Sequence
  Synthetic oligonucleotide
ttgtatggggggtaacggtgtagtcaatgc

SEQ ID NO: 402904 - DNA, 30 bp, Artificial Sequence
  Synthetic oligonucleotide
tactccccgttccttgcgtttggtcaatgc

SEQ ID NO: 402905 - DNA, 30 bp, Artificial Sequence
  Synthetic oligonucleotide
tcgtcgatgacggcgggctgctgagaatgc

SEQ ID NO: 402906 - DNA, 30 bp, Artificial Sequence
  Synthetic oligonucleotide
tgtaggtgattccaactatattacgaatgc

SEQ ID NO: 402907 - DNA, 30 bp, Artificial Sequence
  Synthetic oligonucleotide
tttgaagtttctgtgaagttaggggaatgc

SEQ ID NO: 402908 - DNA, 30 bp, Artificial Sequence
  Synthetic oligonucleotide
tctatccaatcgtgatacatttactaatgc

SEQ ID NO: 402909 - DNA, 30 bp, Artificial Sequence
  Synthetic oligonucleotide
tctagtagaagagttttctgctagtaatgc

SEQ ID NO: 402910 - DNA, 30 bp, Artificial Sequence
  Synthetic oligonucleotide
tgttggcctgcagcaagaggacggtaatgc

SEQ ID NO: 402911 - DNA, 30 bp, Artificial Sequence
  Synthetic oligonucleotide
gtcatacttagcagtcgcgaaaaaacatgc

SEQ ID NO: 402912 - DNA, 38 bp, Artificial Sequence
  Synthetic oligonucleotide
gggtttcccattttccgtgatcctgtaccgcaacatgc

SEQ ID NO: 402913 - DNA, 30 bp, Artificial Sequence
  Synthetic oligonucleotide
aatcctgttgtgataatcggcgacacatgc

SEQ ID NO: 402914 - DNA, 30 bp, Artificial Sequence
  Synthetic oligonucleotide
tctccgcggactccgtcagtgtcgacatgc

SEQ ID NO: 402915 - DNA, 30 bp, Artificial Sequence
  Synthetic oligonucleotide
agtagtggcgcaatgggttggttgacatgc

SEQ ID NO: 402916 - DNA, 30 bp, Artificial Sequence
  Synthetic oligonucleotide
tcacttctcccttcgcaaaaggatacatgc

SEQ ID NO: 402917 - DNA, 30 bp, Artificial Sequence
  Synthetic oligonucleotide
gacgcactatgatgcctcggcattacatgc

SEQ ID NO: 402918 - DNA, 30 bp, Artificial Sequence
  Synthetic oligonucleotide
aatacaccttgtttcttcaaaacaccatgc

SEQ ID NO: 402919 - DNA, 29 bp, Artificial Sequence
  Synthetic oligonucleotide
aaagaatccgtgaaccagaacccccatgc

SEQ ID NO: 402920 - DNA, 30 bp, Artificial Sequence
  Synthetic oligonucleotide
tttacgggctttcttcactacactccatgc

SEQ ID NO: 402921 - DNA, 30 bp, Artificial Sequence
  Synthetic oligonucleotide
aagtgttaatacaagtcgagtagagcatgc

SEQ ID NO: 402922 - DNA, 30 bp, Artificial Sequence
  Synthetic oligonucleotide
tgtcccagcgaacgtaggtaggtcgcatgc

SEQ ID NO: 402923 - DNA, 30 bp, Artificial Sequence
  Synthetic oligonucleotide
gcctctctgaagggggacgccggggcatgc

SEQ ID NO: 402924 - DNA, 30 bp, Artificial Sequence
  Synthetic oligonucleotide
tgctggtcagtccccggtaatgtatcatgc

SEQ ID NO: 402925 - DNA, 30 bp, Artificial Sequence
  Synthetic oligonucleotide
ggaccacaagggccctgttgcccgtcatgc

SEQ ID NO: 402926 - DNA, 30 bp, Artificial Sequence
  Synthetic oligonucleotide
tctggttggggcctctcagctgggtcatgc

SEQ ID NO: 402927 - DNA, 30 bp, Artificial Sequence
  Synthetic oligonucleotide
aagattaaagaaaatgtatacgcaagatgc

SEQ ID NO: 402928 - DNA, 30 bp, Artificial Sequence
  Synthetic oligonucleotide
ctttcaaaaagtcatgacctactaagatgc

SEQ ID NO: 402929 - DNA, 30 bp, Artificial Sequence
  Synthetic oligonucleotide
gacaggtaaagacatggagacgacagatgc

SEQ ID NO: 402930 - DNA, 30 bp, Artificial Sequence
  Synthetic oligonucleotide
tgggggcccgctctacgcacggccagatgc

SEQ ID NO: 402931 - DNA, 30 bp, Artificial Sequence
  Synthetic oligonucleotide
tgcgttatcctttttttagtagtcagatgc

SEQ ID NO: 402932 - DNA, 30 bp, Artificial Sequence
  Synthetic oligonucleotide
gagcagttggtcgaatatgccttcagatgc

SEQ ID NO: 402933 - DNA, 30 bp, Artificial Sequence
  Synthetic oligonucleotide
accgacccgtactgcatagatccgagatgc

SEQ ID NO: 402934 - DNA, 30 bp, Artificial Sequence
  Synthetic oligonucleotide
aatccggcacggacaggccaggctagatgc

SEQ ID NO: 402935 - DNA, 30 bp, Artificial Sequence
  Synthetic oligonucleotide
gcaaaataagtgggctcctagtttagatgc

SEQ ID NO: 402936 - DNA, 30 bp, Artificial Sequence
  Synthetic oligonucleotide
taatatgtagccaatctggcttcacgatgc

SEQ ID NO: 402937 - DNA, 30 bp, Artificial Sequence
  Synthetic oligonucleotide
aagtgataatcacgcctactaagccgatgc

SEQ ID NO: 402938 - DNA, 30 bp, Artificial Sequence
  Synthetic oligonucleotide
aatgaataggagcagctacagcctcgatgc

SEQ ID NO: 402939 - DNA, 30 bp, Artificial Sequence
  Synthetic oligonucleotide
acgctacactacacaattcagattcgatgc

SEQ ID NO: 402940 - DNA, 30 bp, Artificial Sequence
  Synthetic oligonucleotide
gcgagcgaaaaatcgaaagcaaaaggatgc

SEQ ID NO: 402941 - DNA, 30 bp, Artificial Sequence
  Synthetic oligonucleotide
tactccccctagtgtcgggccgaaggatgc

SEQ ID NO: 402942 - DNA, 29 bp, Artificial Sequence
  Synthetic oligonucleotide
ccgtctgggagcagtgacaaagaggatgc

SEQ ID NO: 402943 - DNA, 30 bp, Artificial Sequence
  Synthetic oligonucleotide
tggatccagcaagcggtccacataggatgc

SEQ ID NO: 402944 - DNA, 30 bp, Artificial Sequence
  Synthetic oligonucleotide
tgaggcctgtgtcatcctcacaccggatgc

SEQ ID NO: 402945 - DNA, 30 bp, Artificial Sequence
  Synthetic oligonucleotide
ggggtagaagcagcacttaaacccggatgc

SEQ ID NO: 402946 - DNA, 30 bp, Artificial Sequence
  Synthetic oligonucleotide
ggtaagtaaagtaagggacttctcggatgc

SEQ ID NO: 402947 - DNA, 30 bp, Artificial Sequence
  Synthetic oligonucleotide
agtgtgaccagtaatgattttaagggatgc

SEQ ID NO: 402948 - DNA, 30 bp, Artificial Sequence
  Synthetic oligonucleotide
atagttgaatgacgttagggttggggatgc

SEQ ID NO: 402949 - DNA, 30 bp, Artificial Sequence
  Synthetic oligonucleotide
accttattggccgcccagaccttgggatgc

SEQ ID NO: 402950 - DNA, 30 bp, Artificial Sequence
  Synthetic oligonucleotide
cagctttcagccatttcgcaagatggatgc

SEQ ID NO: 402951 - DNA, 30 bp, Artificial Sequence
  Synthetic oligonucleotide
ccgctcgaatgaagacattctagtggatgc

SEQ ID NO: 402952 - DNA, 30 bp, Artificial Sequence
  Synthetic oligonucleotide
ccgcgttctaactttaaagtctgtggatgc

SEQ ID NO: 402953 - DNA, 30 bp, Artificial Sequence
  Synthetic oligonucleotide
aacactagctaagacaacaaaggatgatgc

SEQ ID NO: 402954 - DNA, 30 bp, Artificial Sequence
  Synthetic oligonucleotide
cgagatcatgcggcaacctcaccctgatgc

SEQ ID NO: 402955 - DNA, 30 bp, Artificial Sequence
  Synthetic oligonucleotide
gcaagatacaatcataaatttctctgatgc

SEQ ID NO: 402956 - DNA, 30 bp, Artificial Sequence
  Synthetic oligonucleotide
cgcggaggccccagatcctggtagtgatgc

SEQ ID NO: 402957 - DNA, 30 bp, Artificial Sequence
  Synthetic oligonucleotide
tgaccactaggtcttcttgatgcttgatgc

SEQ ID NO: 402958 - DNA, 30 bp, Artificial Sequence
  Synthetic oligonucleotide
tcgtaatctctcgatctagcgctttgatgc

SEQ ID NO: 402959 - DNA, 30 bp, Artificial Sequence
  Synthetic oligonucleotide
acacatataaagggtgtgcacccaatatgc

SEQ ID NO: 402960 - DNA, 30 bp, Artificial Sequence
  Synthetic oligonucleotide
aaggagtaccagatttcagtggacatatgc

SEQ ID NO: 402961 - DNA, 30 bp, Artificial Sequence
  Synthetic oligonucleotide
gccgccccccgggccccgtacgccatatgc

SEQ ID NO: 402962 - DNA, 30 bp, Artificial Sequence
  Synthetic oligonucleotide
atagatcctccacgtggtgatatcatatgc

SEQ ID NO: 402963 - DNA, 30 bp, Artificial Sequence
  Synthetic oligonucleotide
cggtgcaacgcccgtggctcctagatatgc

SEQ ID NO: 402964 - DNA, 30 bp, Artificial Sequence
  Synthetic oligonucleotide
gtgacactttcttccataggtgcgatatgc

SEQ ID NO: 402965 - DNA, 30 bp, Artificial Sequence
  Synthetic oligonucleotide
aaagctgtggtgagtcaattgtcgatatgc

SEQ ID NO: 402966 - DNA, 30 bp, Artificial Sequence
  Synthetic oligonucleotide
ggtctactaacgattccaccgctgatatgc

SEQ ID NO: 402967 - DNA, 30 bp, Artificial Sequence
  Synthetic oligonucleotide
gagctcttacaccaattttgattgatatgc

SEQ ID NO: 402968 - DNA, 30 bp, Artificial Sequence
  Synthetic oligonucleotide
tctggttttaggggagaagtatatatatgc

SEQ ID NO: 402969 - DNA, 30 bp, Artificial Sequence
  Synthetic oligonucleotide
gtgcctagtgggtttagacaagtactatgc

SEQ ID NO: 402970 - DNA, 30 bp, Artificial Sequence
  Synthetic oligonucleotide
aagagaacatttttgtctctccacctatgc

SEQ ID NO: 402971 - DNA, 30 bp, Artificial Sequence
  Synthetic oligonucleotide
aaaaaacggatgcgtgtagtaaccctatgc

SEQ ID NO: 402972 - DNA, 30 bp, Artificial Sequence
  Synthetic oligonucleotide
accaacctaacgactactgctgccctatgc

SEQ ID NO: 402973 - DNA, 30 bp, Artificial Sequence
  Synthetic oligonucleotide
aaaccaacttgggtagacgggtccctatgc

SEQ ID NO: 402974 - DNA, 30 bp, Artificial Sequence
  Synthetic oligonucleotide
ataggaggatagagctctgttttcctatgc

SEQ ID NO: 402975 - DNA, 30 bp, Artificial Sequence
  Synthetic oligonucleotide
gtcttcattagtgatggtttcgtagtatgc

SEQ ID NO: 402976 - DNA, 30 bp, Artificial Sequence
  Synthetic oligonucleotide
tatcgcgcctgtattgtcaaaaccgtatgc

SEQ ID NO: 402977 - DNA, 30 bp, Artificial Sequence
  Synthetic oligonucleotide
tccttacacgaggagtgtcattcggtatgc

SEQ ID NO: 402978 - DNA, 30 bp, Artificial Sequence
  Synthetic oligonucleotide
tttacgggttgtctctgccgtgatgtatgc

SEQ ID NO: 402979 - DNA, 30 bp, Artificial Sequence
  Synthetic oligonucleotide
tttcataacttcgaagttataagtgtatgc

SEQ ID NO: 402980 - DNA, 30 bp, Artificial Sequence
  Synthetic oligonucleotide
gtccgctctatgtcactgagagaattatgc

SEQ ID NO: 402981 - DNA, 30 bp, Artificial Sequence
  Synthetic oligonucleotide
agtcaatgtcacttcggaattccattatgc

SEQ ID NO: 402982 - DNA, 30 bp, Artificial Sequence
  Synthetic oligonucleotide
tggaaatcttgcgcgttctaagccttatgc

SEQ ID NO: 402983 - DNA, 30 bp, Artificial Sequence
  Synthetic oligonucleotide
gacgaataggaaaagccaattgggttatgc

SEQ ID NO: 402984 - DNA, 30 bp, Artificial Sequence
  Synthetic oligonucleotide
ctggacgcagaaggaagagccctgttatgc

SEQ ID NO: 402985 - DNA, 30 bp, Artificial Sequence
  Synthetic oligonucleotide
ttcccgacaacaacgacctcaagtttatgc

SEQ ID NO: 402986 - DNA, 30 bp, Artificial Sequence
  Synthetic oligonucleotide
ggggtatgtccgtgcaagtaaggtttatgc

SEQ ID NO: 402987 - DNA, 30 bp, Artificial Sequence
  Synthetic oligonucleotide
gatcctatgtgctcttgttagcccaactgc

SEQ ID NO: 402988 - DNA, 30 bp, Artificial Sequence
  Synthetic oligonucleotide
aacgtcttaacgtgctgtggtatcaactgc

SEQ ID NO: 402989 - DNA, 30 bp, Artificial Sequence
  Synthetic oligonucleotide
attaagttatgctgtctgactccgaactgc

SEQ ID NO: 402990 - DNA, 30 bp, Artificial Sequence
  Synthetic oligonucleotide
tcgcattagggggccgcgcgcgcgaactgc

SEQ ID NO: 402991 - DNA, 30 bp, Artificial Sequence
  Synthetic oligonucleotide
ggttggaattccacgttctcgcggaactgc

SEQ ID NO: 402992 - DNA, 30 bp, Artificial Sequence
  Synthetic oligonucleotide
ttcatgggcttaaggtcgctgtataactgc

SEQ ID NO: 402993 - DNA, 30 bp, Artificial Sequence
  Synthetic oligonucleotide
cccgaccacccgaggtccgaaagtaactgc

SEQ ID NO: 402994 - DNA, 30 bp, Artificial Sequence
  Synthetic oligonucleotide
ccgcgggcgcttaaacttcgcaaacactgc

SEQ ID NO: 402995 - DNA, 30 bp, Artificial Sequence
  Synthetic oligonucleotide
tagaactacacttaatacgtttgacactgc

SEQ ID NO: 402996 - DNA, 30 bp, Artificial Sequence
  Synthetic oligonucleotide
acagagcagtgtgccgaaggaatccactgc

SEQ ID NO: 402997 - DNA, 30 bp, Artificial Sequence
  Synthetic oligonucleotide
ggtgttaaacgcacctggagacagcactgc

SEQ ID NO: 402998 - DNA, 30 bp, Artificial Sequence
  Synthetic oligonucleotide
ttatcctcgaatagaagttggcagcactgc

SEQ ID NO: 402999 - DNA, 30 bp, Artificial Sequence
  Synthetic oligonucleotide
cccgaagggggttcacaacggactcactgc

SEQ ID NO: 403000 - DNA, 30 bp, Artificial Sequence
  Synthetic oligonucleotide
cagccattctggtacttatcgatagactgc

SEQ ID NO: 403001 - DNA, 30 bp, Artificial Sequence
  Synthetic oligonucleotide
attttccgagggagtgtcggaaaggactgc

SEQ ID NO: 403002 - DNA, 30 bp, Artificial Sequence
  Synthetic oligonucleotide
gaaccgtgatttcgtgcggccccggactgc

SEQ ID NO: 403003 - DNA, 30 bp, Artificial Sequence
  Synthetic oligonucleotide
taatctgcaccggttggctgtgtggactgc

SEQ ID NO: 403004 - DNA, 30 bp, Artificial Sequence
  Synthetic oligonucleotide
atatcgagacggaattgtatgttggactgc

SEQ ID NO: 403005 - DNA, 30 bp, Artificial Sequence
  Synthetic oligonucleotide
gtaccctggaagccaggaactcctgactgc

SEQ ID NO: 403006 - DNA, 30 bp, Artificial Sequence
  Synthetic oligonucleotide
atagtcttatataggactgtggaatactgc

SEQ ID NO: 403007 - DNA, 30 bp, Artificial Sequence
  Synthetic oligonucleotide
accagatgaatagtgacgacctaatactgc

SEQ ID NO: 403008 - DNA, 30 bp, Artificial Sequence
  Synthetic oligonucleotide
ccttgtagtctgaagtgagcctactactgc

SEQ ID NO: 403009 - DNA, 30 bp, Artificial Sequence
  Synthetic oligonucleotide
aaagcatacaacaacaatcaaaagtactgc

SEQ ID NO: 403010 - DNA, 30 bp, Artificial Sequence
  Synthetic oligonucleotide
tcttatgttactgaaatataagcgtactgc

SEQ ID NO: 403011 - DNA, 30 bp, Artificial Sequence
  Synthetic oligonucleotide
tccacagcgttgcgtgaggcacggtactgc

SEQ ID NO: 403012 - DNA, 29 bp, Artificial Sequence
  Synthetic oligonucleotide
catagggccttgcacatgagctttactgc

SEQ ID NO: 403013 - DNA, 30 bp, Artificial Sequence
  Synthetic oligonucleotide
ttgatccaagacgggttcgaattttactgc

SEQ ID NO: 403014 - DNA, 30 bp, Artificial Sequence
  Synthetic oligonucleotide
taccctcagattttgcggatcgcgacctgc

SEQ ID NO: 403015 - DNA, 30 bp, Artificial Sequence
  Synthetic oligonucleotide
atctggggggataggcaaagctatacctgc

SEQ ID NO: 403016 - DNA, 30 bp, Artificial Sequence
  Synthetic oligonucleotide
caggcagggacgtgctgcgccgaaccctgc

SEQ ID NO: 403017 - DNA, 30 bp, Artificial Sequence
  Synthetic oligonucleotide
cagcagcgaaatacattaagcgtaccctgc

SEQ ID NO: 403018 - DNA, 30 bp, Artificial Sequence
  Synthetic oligonucleotide
tactggtccgacaggtgcattgcagcctgc

SEQ ID NO: 403019 - DNA, 30 bp, Artificial Sequence
  Synthetic oligonucleotide
ccaaccccaaaggtgtgtctcaccgcctgc

SEQ ID NO: 403020 - DNA, 30 bp, Artificial Sequence
  Synthetic oligonucleotide
acatccaacaacggggaggactccgcctgc

SEQ ID NO: 403021 - DNA, 30 bp, Artificial Sequence
  Synthetic oligonucleotide
cactagctttcgctaatcggcggggcctgc

SEQ ID NO: 403022 - DNA, 29 bp, Artificial Sequence
  Synthetic oligonucleotide
gctggagacgggtagaaagtcttgcctgc

SEQ ID NO: 403023 - DNA, 30 bp, Artificial Sequence
  Synthetic oligonucleotide
cccccatccggtacaaatgacctctcctgc

SEQ ID NO: 403024 - DNA, 30 bp, Artificial Sequence
  Synthetic oligonucleotide
aagtattagccgcgcgattcgctctcctgc

SEQ ID NO: 403025 - DNA, 30 bp, Artificial Sequence
  Synthetic oligonucleotide
ctccttgattgcgactaaggaaggtcctgc

SEQ ID NO: 403026 - DNA, 31 bp, Artificial Sequence
  Synthetic oligonucleotide
cggtttcggggttcgggcgtcaatttcctgc

SEQ ID NO: 403027 - DNA, 30 bp, Artificial Sequence
  Synthetic oligonucleotide
ttctttgcgcatgaatcatcgataagctgc

SEQ ID NO: 403028 - DNA, 30 bp, Artificial Sequence
  Synthetic oligonucleotide
taaatataccccattcttaacgtaagctgc

SEQ ID NO: 403029 - DNA, 30 bp, Artificial Sequence
  Synthetic oligonucleotide
tgtgtaacaccgtaactacacacgagctgc

SEQ ID NO: 403030 - DNA, 30 bp, Artificial Sequence
  Synthetic oligonucleotide
gtcagtccgttgggcactcgttggagctgc

SEQ ID NO: 403031 - DNA, 30 bp, Artificial Sequence
  Synthetic oligonucleotide
tctcggtgctctactagcttcttacgctgc

SEQ ID NO: 403032 - DNA, 30 bp, Artificial Sequence
  Synthetic oligonucleotide
gtatgggggggtgcgtttcgggagggctgc

SEQ ID NO: 403033 - DNA, 30 bp, Artificial Sequence
  Synthetic oligonucleotide
tgataatgcaacgtcccttctgttggctgc

SEQ ID NO: 403034 - DNA, 30 bp, Artificial Sequence
  Synthetic oligonucleotide
tatgagcgcgcctcgaaagctgaatgctgc

SEQ ID NO: 403035 - DNA, 30 bp, Artificial Sequence
  Synthetic oligonucleotide
gttccatcacaagtaatacctctatgctgc

SEQ ID NO: 403036 - DNA, 30 bp, Artificial Sequence
  Synthetic oligonucleotide
ctttggcatacatcgctcggtctatgctgc

SEQ ID NO: 403037 - DNA, 30 bp, Artificial Sequence
  Synthetic oligonucleotide
tactaaatgactgtggccaaggtatgctgc

SEQ ID NO: 403038 - DNA, 30 bp, Artificial Sequence
  Synthetic oligonucleotide
ctggtaccactgcatgttcaagcctgctgc

SEQ ID NO: 403039 - DNA, 30 bp, Artificial Sequence
  Synthetic oligonucleotide
tcagtttgaggcaatgttgtacagtgctgc

SEQ ID NO: 403040 - DNA, 30 bp, Artificial Sequence
  Synthetic oligonucleotide
taagtatgtataaaatctaagcattgctgc

SEQ ID NO: 403041 - DNA, 30 bp, Artificial Sequence
  Synthetic oligonucleotide
ttagaggcaccaaatgcatgggtttgctgc

SEQ ID NO: 403042 - DNA, 30 bp, Artificial Sequence
  Synthetic oligonucleotide
ggtgccttcgcgagtggagcctcaatctgc

SEQ ID NO: 403043 - DNA, 30 bp, Artificial Sequence
  Synthetic oligonucleotide
ggctctcgctatgtaaacccgtgaatctgc

SEQ ID NO: 403044 - DNA, 30 bp, Artificial Sequence
  Synthetic oligonucleotide
tgatataacaaggcatgatgcagcatctgc

SEQ ID NO: 403045 - DNA, 30 bp, Artificial Sequence
  Synthetic oligonucleotide
ctgtcatagttaattgattaaggcatctgc

SEQ ID NO: 403046 - DNA, 30 bp, Artificial Sequence
  Synthetic oligonucleotide
acttcagagtatgttgcggcgcagatctgc

SEQ ID NO: 403047 - DNA, 30 bp, Artificial Sequence
  Synthetic oligonucleotide
ggctcaggattccaggctaattagatctgc

SEQ ID NO: 403048 - DNA, 30 bp, Artificial Sequence
  Synthetic oligonucleotide
tgtacgatatagatgtgcccgcggatctgc

SEQ ID NO: 403049 - DNA, 30 bp, Artificial Sequence
  Synthetic oligonucleotide
taagggctggaggcagcttactggatctgc

SEQ ID NO: 403050 - DNA, 30 bp, Artificial Sequence
  Synthetic oligonucleotide
cagagcacaaacgcgagatgcagactctgc

SEQ ID NO: 403051 - DNA, 27 bp, Artificial Sequence
  Synthetic oligonucleotide
atttctaccaagacccgattactctgc

SEQ ID NO: 403052 - DNA, 30 bp, Artificial Sequence
  Synthetic oligonucleotide
tgggtctcgcccctctgggagccgctctgc

SEQ ID NO: 403053 - DNA, 30 bp, Artificial Sequence
  Synthetic oligonucleotide
tgttttgggatgttcgaaaagtggctctgc

SEQ ID NO: 403054 - DNA, 30 bp, Artificial Sequence
  Synthetic oligonucleotide
catgagactcggcatacaagcttgctctgc

SEQ ID NO: 403055 - DNA, 30 bp, Artificial Sequence
  Synthetic oligonucleotide
attcctggacgggccactgctcgagtctgc

SEQ ID NO: 403056 - DNA, 30 bp, Artificial Sequence
  Synthetic oligonucleotide
acgcgccgaaccttatgaactgtggtctgc

SEQ ID NO: 403057 - DNA, 30 bp, Artificial Sequence
  Synthetic oligonucleotide
caggagagtaagatcattaatcgtgtctgc

SEQ ID NO: 403058 - DNA, 30 bp, Artificial Sequence
  Synthetic oligonucleotide
catagtgtattttatattatgcgattctgc

SEQ ID NO: 403059 - DNA, 30 bp, Artificial Sequence
  Synthetic oligonucleotide
atattaaaatctaaggcgggtggcttctgc

SEQ ID NO: 403060 - DNA, 30 bp, Artificial Sequence
  Synthetic oligonucleotide
cgaactctgctatgctaaagcacgttctgc

SEQ ID NO: 403061 - DNA, 30 bp, Artificial Sequence
  Synthetic oligonucleotide
gtttagtgcagaaggcgtatctatttctgc

SEQ ID NO: 403062 - DNA, 30 bp, Artificial Sequence
  Synthetic oligonucleotide
ccagcaaacttcgacgtgggaactttctgc

SEQ ID NO: 403063 - DNA, 30 bp, Artificial Sequence
  Synthetic oligonucleotide
gatcaatgtcggtccaaattgcttttctgc

SEQ ID NO: 403064 - DNA, 30 bp, Artificial Sequence
  Synthetic oligonucleotide
aatatgtgactggtcacacgagaaaagtgc

SEQ ID NO: 403065 - DNA, 30 bp, Artificial Sequence
  Synthetic oligonucleotide
acgcattggagctgctctaagtgaaagtgc

SEQ ID NO: 403066 - DNA, 30 bp, Artificial Sequence
  Synthetic oligonucleotide
gcttgaggcccgtgcgcattgacacagtgc

SEQ ID NO: 403067 - DNA, 30 bp, Artificial Sequence
  Synthetic oligonucleotide
gtcactcgtcctgcattcgggagccagtgc

SEQ ID NO: 403068 - DNA, 30 bp, Artificial Sequence
  Synthetic oligonucleotide
gtacgttgtgggtgggcagcctagcagtgc

SEQ ID NO: 403069 - DNA, 30 bp, Artificial Sequence
  Synthetic oligonucleotide
acattctagccagtcccagtattgcagtgc

SEQ ID NO: 403070 - DNA, 30 bp, Artificial Sequence
  Synthetic oligonucleotide
ggcctacatatgtagtacggcgctcagtgc

SEQ ID NO: 403071 - DNA, 30 bp, Artificial Sequence
  Synthetic oligonucleotide
tccctttggctcatagcgtttttcgagtgc

SEQ ID NO: 403072 - DNA, 30 bp, Artificial Sequence
  Synthetic oligonucleotide
gcccccagggctaagtgtaaggatgagtgc

SEQ ID NO: 403073 - DNA, 30 bp, Artificial Sequence
  Synthetic oligonucleotide
gaccgaaattatacaagcactcttgagtgc

SEQ ID NO: 403074 - DNA, 30 bp, Artificial Sequence
  Synthetic oligonucleotide
tttaaaaatccatcgcggcatgactagtgc

SEQ ID NO: 403075 - DNA, 30 bp, Artificial Sequence
  Synthetic oligonucleotide
gttggtctcatgagctgtatggcctagtgc

SEQ ID NO: 403076 - DNA, 30 bp, Artificial Sequence
  Synthetic oligonucleotide
gtccgttcccgaattttaacttcttagtgc

SEQ ID NO: 403077 - DNA, 30 bp, Artificial Sequence
  Synthetic oligonucleotide
gaggccttatggcatcgtattttttagtgc

SEQ ID NO: 403078 - DNA, 30 bp, Artificial Sequence
  Synthetic oligonucleotide
tagcccacgttggaacattcataaacgtgc

SEQ ID NO: 403079 - DNA, 30 bp, Artificial Sequence
  Synthetic oligonucleotide
cacgtaattacttgttctgacataacgtgc

SEQ ID NO: 403080 - DNA, 30 bp, Artificial Sequence
  Synthetic oligonucleotide
gcctaagcctaaggtcgtcacgacacgtgc

SEQ ID NO: 403081 - DNA, 31 bp, Artificial Sequence
  Synthetic oligonucleotide
gtattaaaacgtcggtccgcgtgacacgtgc

SEQ ID NO: 403082 - DNA, 30 bp, Artificial Sequence
  Synthetic oligonucleotide
ccgctatgatagactgcatggtacacgtgc

SEQ ID NO: 403083 - DNA, 30 bp, Artificial Sequence
  Synthetic oligonucleotide
gactaattatcatacgtgctgaccacgtgc

SEQ ID NO: 403084 - DNA, 30 bp, Artificial Sequence
  Synthetic oligonucleotide
attacggctcctgacgagcgaatcacgtgc

SEQ ID NO: 403085 - DNA, 30 bp, Artificial Sequence
  Synthetic oligonucleotide
gtctgtacaattcgctgttccgcaccgtgc

SEQ ID NO: 403086 - DNA, 30 bp, Artificial Sequence
  Synthetic oligonucleotide
cctcgagctgcacgcacatcaagcccgtgc

SEQ ID NO: 403087 - DNA, 30 bp, Artificial Sequence
  Synthetic oligonucleotide
agacgcatacagacagcaggcaatccgtgc

SEQ ID NO: 403088 - DNA, 30 bp, Artificial Sequence
  Synthetic oligonucleotide
gcacacgacttgagttttacgcatccgtgc

SEQ ID NO: 403089 - DNA, 30 bp, Artificial Sequence
  Synthetic oligonucleotide
cgttaagggacgcgctccggatgagcgtgc

SEQ ID NO: 403090 - DNA, 30 bp, Artificial Sequence
  Synthetic oligonucleotide
gtcttgagcggagggttcatacacgcgtgc

SEQ ID NO: 403091 - DNA, 30 bp, Artificial Sequence
  Synthetic oligonucleotide
tccgcggacgtgtcgatttatgcggcgtgc

SEQ ID NO: 403092 - DNA, 30 bp, Artificial Sequence
  Synthetic oligonucleotide
ccggccccttggtcccagatatcggcgtgc

SEQ ID NO: 403093 - DNA, 30 bp, Artificial Sequence
  Synthetic oligonucleotide
acacacctgccaagagtccacggggcgtgc

SEQ ID NO: 403094 - DNA, 30 bp, Artificial Sequence
  Synthetic oligonucleotide
aaactcgggctgtagtgaaggatggcgtgc

SEQ ID NO: 403095 - DNA, 30 bp, Artificial Sequence
  Synthetic oligonucleotide
agagattattcccacattagttaatcgtgc

SEQ ID NO: 403096 - DNA, 30 bp, Artificial Sequence
  Synthetic oligonucleotide
ctattaagtggaccctggggatgatcgtgc

SEQ ID NO: 403097 - DNA, 30 bp, Artificial Sequence
  Synthetic oligonucleotide
gagcatgttcgaatagttttaaggtcgtgc

SEQ ID NO: 403098 - DNA, 30 bp, Artificial Sequence
  Synthetic oligonucleotide
gagcggcatgtcggattcatggcgaggtgc

SEQ ID NO: 403099 - DNA, 30 bp, Artificial Sequence
  Synthetic oligonucleotide
ggtttaagagttgtcagccgacggaggtgc

SEQ ID NO: 403100 - DNA, 30 bp, Artificial Sequence
  Synthetic oligonucleotide
gctgaccagtatatttgtttcatgaggtgc

SEQ ID NO: 403101 - DNA, 30 bp, Artificial Sequence
  Synthetic oligonucleotide
tgaataacggagggttatggctcccggtgc

SEQ ID NO: 403102 - DNA, 30 bp, Artificial Sequence
  Synthetic oligonucleotide
cacgatattctctgaggcttgtggcggtgc

SEQ ID NO: 403103 - DNA, 30 bp, Artificial Sequence
  Synthetic oligonucleotide
tttatatctcagaaatgtgactatcggtgc

SEQ ID NO: 403104 - DNA, 30 bp, Artificial Sequence
  Synthetic oligonucleotide
aggtacggaggttcttatatcgttcggtgc

SEQ ID NO: 403105 - DNA, 30 bp, Artificial Sequence
  Synthetic oligonucleotide
aattcaagccgtggggaaagcagagggtgc

SEQ ID NO: 403106 - DNA, 30 bp, Artificial Sequence
  Synthetic oligonucleotide
tactttatcgtatcggactaaatagggtgc

SEQ ID NO: 403107 - DNA, 30 bp, Artificial Sequence
  Synthetic oligonucleotide
aactaaggtactaggttaactgtagggtgc

SEQ ID NO: 403108 - DNA, 30 bp, Artificial Sequence
  Synthetic oligonucleotide
cctctttatgattagattagcaaggggtgc

SEQ ID NO: 403109 - DNA, 30 bp, Artificial Sequence
  Synthetic oligonucleotide
ttctatcgcttttgcccgttaccggggtgc

SEQ ID NO: 403110 - DNA, 30 bp, Artificial Sequence
  Synthetic oligonucleotide
agtatgaacttcaggcggcagtctgggtgc

SEQ ID NO: 403111 - DNA, 30 bp, Artificial Sequence
  Synthetic oligonucleotide
gcaataaagtaccaagcaccacgtgggtgc

SEQ ID NO: 403112 - DNA, 30 bp, Artificial Sequence
  Synthetic oligonucleotide
aaatcctcaacccaattacggacctggtgc

SEQ ID NO: 403113 - DNA, 30 bp, Artificial Sequence
  Synthetic oligonucleotide
cgttacgacaacctgaacacagtctggtgc

SEQ ID NO: 403114 - DNA, 30 bp, Artificial Sequence
  Synthetic oligonucleotide
aggcgagctgcgctgcgcgtttcttggtgc

SEQ ID NO: 403115 - DNA, 30 bp, Artificial Sequence
  Synthetic oligonucleotide
ttaccattttgaaccgggtaactttggtgc

SEQ ID NO: 403116 - DNA, 30 bp, Artificial Sequence
  Synthetic oligonucleotide
agtaaacaaacactaagatatgtttggtgc

SEQ ID NO: 403117 - DNA, 30 bp, Artificial Sequence
  Synthetic oligonucleotide
aggctcttgaggcgtgcatatacaatgtgc

SEQ ID NO: 403118 - DNA, 30 bp, Artificial Sequence
  Synthetic oligonucleotide
acgtactagttgttcttgtacaacatgtgc

SEQ ID NO: 403119 - DNA, 30 bp, Artificial Sequence
  Synthetic oligonucleotide
agtttacctacttgacaaccagacatgtgc

SEQ ID NO: 403120 - DNA, 30 bp, Artificial Sequence
  Synthetic oligonucleotide
gagcgctccatcacttgaatactcatgtgc

SEQ ID NO: 403121 - DNA, 30 bp, Artificial Sequence
  Synthetic oligonucleotide
cgttatagggatcagtaaacatagatgtgc

SEQ ID NO: 403122 - DNA, 30 bp, Artificial Sequence
  Synthetic oligonucleotide
ttcatttgtagcccgtcagagcctatgtgc

SEQ ID NO: 403123 - DNA, 30 bp, Artificial Sequence
  Synthetic oligonucleotide
ggtttcgcgggcactcgtactattatgtgc

SEQ ID NO: 403124 - DNA, 30 bp, Artificial Sequence
  Synthetic oligonucleotide
tatatttttgaggttgaataaaacgtgtgc

SEQ ID NO: 403125 - DNA, 30 bp, Artificial Sequence
  Synthetic oligonucleotide
gtttgttttgattacagaaaggacgtgtgc

SEQ ID NO: 403126 - DNA, 30 bp, Artificial Sequence
  Synthetic oligonucleotide
tgaggattcttcttaggggtgatcgtgtgc

SEQ ID NO: 403127 - DNA, 31 bp, Artificial Sequence
  Synthetic oligonucleotide
tagcctccggtactgggtggagttcgtgtgc

SEQ ID NO: 403128 - DNA, 30 bp, Artificial Sequence
  Synthetic oligonucleotide
tacaccccaaaattgatatagggggtgtgc

SEQ ID NO: 403129 - DNA, 31 bp, Artificial Sequence
  Synthetic oligonucleotide
cacatctgccacgtaatacatgactgtgtgc

SEQ ID NO: 403130 - DNA, 30 bp, Artificial Sequence
  Synthetic oligonucleotide
ggttctcatttccgcagaagctgattgtgc

SEQ ID NO: 403131 - DNA, 30 bp, Artificial Sequence
  Synthetic oligonucleotide
gtcccaggtactcagtgtcttccgttgtgc

SEQ ID NO: 403132 - DNA, 29 bp, Artificial Sequence
  Synthetic oligonucleotide
ttgcagagcacagtgaattccatttgtgc

SEQ ID NO: 403133 - DNA, 30 bp, Artificial Sequence
  Synthetic oligonucleotide
agggtggtatgagggcacttcagtttgtgc

SEQ ID NO: 403134 - DNA, 30 bp, Artificial Sequence
  Synthetic oligonucleotide
ttagacatgcgcatgaggactctcaattgc

SEQ ID NO: 403135 - DNA, 30 bp, Artificial Sequence
  Synthetic oligonucleotide
tatagacatctgcgttgcgatttgaattgc

SEQ ID NO: 403136 - DNA, 30 bp, Artificial Sequence
  Synthetic oligonucleotide
tcgcactagtaggcaaggcgcgttaattgc

SEQ ID NO: 403137 - DNA, 30 bp, Artificial Sequence
  Synthetic oligonucleotide
taaaggttcctacctcggatacaacattgc

SEQ ID NO: 403138 - DNA, 30 bp, Artificial Sequence
  Synthetic oligonucleotide
acttcagttggacaactttttaatcattgc

SEQ ID NO: 403139 - DNA, 30 bp, Artificial Sequence
  Synthetic oligonucleotide
taggtccggggacggagcccataagattgc

SEQ ID NO: 403140 - DNA, 30 bp, Artificial Sequence
  Synthetic oligonucleotide
gtcaattctaactgacgcgtcagagattgc

SEQ ID NO: 403141 - DNA, 30 bp, Artificial Sequence
  Synthetic oligonucleotide
atgagcatcagctatactccccatgattgc

SEQ ID NO: 403142 - DNA, 30 bp, Artificial Sequence
  Synthetic oligonucleotide
aggtctttagaatgttaatgtcatgattgc

SEQ ID NO: 403143 - DNA, 30 bp, Artificial Sequence
  Synthetic oligonucleotide
cgttaacgtacctatactgtatctgattgc

SEQ ID NO: 403144 - DNA, 30 bp, Artificial Sequence
  Synthetic oligonucleotide
aactcgaaagacgcatctattcgtgattgc

SEQ ID NO: 403145 - DNA, 30 bp, Artificial Sequence
  Synthetic oligonucleotide
tttcagaagtccacaaggccgacatattgc

SEQ ID NO: 403146 - DNA, 30 bp, Artificial Sequence
  Synthetic oligonucleotide
gcgcacagaacagtagacttcatctattgc

SEQ ID NO: 403147 - DNA, 30 bp, Artificial Sequence
  Synthetic oligonucleotide
ctagattgtttagtgtaagtaacgtattgc

SEQ ID NO: 403148 - DNA, 30 bp, Artificial Sequence
  Synthetic oligonucleotide
gggaatcttttgagattaaggcggtattgc

SEQ ID NO: 403149 - DNA, 30 bp, Artificial Sequence
  Synthetic oligonucleotide
actttgtcgcgccacgaacaggggtattgc

SEQ ID NO: 403150 - DNA, 30 bp, Artificial Sequence
  Synthetic oligonucleotide
cgaacaccctcgtcataacggttgtattgc

SEQ ID NO: 403151 - DNA, 30 bp, Artificial Sequence
  Synthetic oligonucleotide
agtaaaaggtagtcggctgagaattattgc

SEQ ID NO: 403152 - DNA, 30 bp, Artificial Sequence
  Synthetic oligonucleotide
tccaccatggtgcatagaccaggttattgc

SEQ ID NO: 403153 - DNA, 30 bp, Artificial Sequence
  Synthetic oligonucleotide
tgaaataacaatgttgggctgataacttgc

SEQ ID NO: 403154 - DNA, 30 bp, Artificial Sequence
  Synthetic oligonucleotide
actattctcgtaggagaattaacgacttgc

SEQ ID NO: 403155 - DNA, 30 bp, Artificial Sequence
  Synthetic oligonucleotide
cttccttctgcaagttgtatgcatacttgc

SEQ ID NO: 403156 - DNA, 30 bp, Artificial Sequence
  Synthetic oligonucleotide
gtatgttgcaatcgtgaagcatatacttgc

SEQ ID NO: 403157 - DNA, 30 bp, Artificial Sequence
  Synthetic oligonucleotide
ccagctgctattgtgatgctccctacttgc

SEQ ID NO: 403158 - DNA, 29 bp, Artificial Sequence
  Synthetic oligonucleotide
gcaatggctccacgtaaagacttacttgc

SEQ ID NO: 403159 - DNA, 30 bp, Artificial Sequence
  Synthetic oligonucleotide
catctatagcaatgtatagaaaaaccttgc

SEQ ID NO: 403160 - DNA, 30 bp, Artificial Sequence
  Synthetic oligonucleotide
ccgtaagattattgcagttgtcaaccttgc

SEQ ID NO: 403161 - DNA, 30 bp, Artificial Sequence
  Synthetic oligonucleotide
cgatgaacttgcgggaggcggtaaccttgc

SEQ ID NO: 403162 - DNA, 30 bp, Artificial Sequence
  Synthetic oligonucleotide
gatgcggtcttttaggttaccaagccttgc

SEQ ID NO: 403163 - DNA, 30 bp, Artificial Sequence
  Synthetic oligonucleotide
tagtaataggagggtttactatagccttgc

SEQ ID NO: 403164 - DNA, 30 bp, Artificial Sequence
  Synthetic oligonucleotide
gttcggtcgtaactatctcggaatccttgc

SEQ ID NO: 403165 - DNA, 30 bp, Artificial Sequence
  Synthetic oligonucleotide
ttgtcaggtctgcgtggggtcgacgcttgc

SEQ ID NO: 403166 - DNA, 30 bp, Artificial Sequence
  Synthetic oligonucleotide
ggaagcaacttgatcgttttagtcgcttgc

SEQ ID NO: 403167 - DNA, 30 bp, Artificial Sequence
  Synthetic oligonucleotide
ctttaatgagcgcaactataataggcttgc

SEQ ID NO: 403168 - DNA, 30 bp, Artificial Sequence
  Synthetic oligonucleotide
ttacttcctcaagcctgtatttaggcttgc

SEQ ID NO: 403169 - DNA, 30 bp, Artificial Sequence
  Synthetic oligonucleotide
atgaatcgtaccgagaagtggtcggcttgc

SEQ ID NO: 403170 - DNA, 30 bp, Artificial Sequence
  Synthetic oligonucleotide
caataagtaatttgatagcggcgggcttgc

SEQ ID NO: 403171 - DNA, 30 bp, Artificial Sequence
  Synthetic oligonucleotide
tcgcgacgggagcaggatataaatgcttgc

SEQ ID NO: 403172 - DNA, 30 bp, Artificial Sequence
  Synthetic oligonucleotide
ggagtacatagaaacgcggaatgtgcttgc

SEQ ID NO: 403173 - DNA, 30 bp, Artificial Sequence
  Synthetic oligonucleotide
cattcacgctggttgggaggtcgatcttgc

SEQ ID NO: 403174 - DNA, 30 bp, Artificial Sequence
  Synthetic oligonucleotide
tgggaacgacattaagcataggtatcttgc

SEQ ID NO: 403175 - DNA, 30 bp, Artificial Sequence
  Synthetic oligonucleotide
gagtagtgcctattcttgacccactcttgc

SEQ ID NO: 403176 - DNA, 30 bp, Artificial Sequence
  Synthetic oligonucleotide
gcacaggtagactattcaaagctctcttgc

SEQ ID NO: 403177 - DNA, 30 bp, Artificial Sequence
  Synthetic oligonucleotide
tacctggatatggggaccagtaattcttgc

SEQ ID NO: 403178 - DNA, 30 bp, Artificial Sequence
  Synthetic oligonucleotide
gtcatctaaatgttccagatccgttcttgc

SEQ ID NO: 403179 - DNA, 30 bp, Artificial Sequence
  Synthetic oligonucleotide
ctaacctcgtctttaatagtcttttcttgc

SEQ ID NO: 403180 - DNA, 30 bp, Artificial Sequence
  Synthetic oligonucleotide
aggttgttaacggcaggcttcgtaagttgc

SEQ ID NO: 403181 - DNA, 30 bp, Artificial Sequence
  Synthetic oligonucleotide
ttagcttttatggaatcgttaaacagttgc

SEQ ID NO: 403182 - DNA, 30 bp, Artificial Sequence
  Synthetic oligonucleotide
ggttacgcctggaagaaggtggccagttgc

SEQ ID NO: 403183 - DNA, 30 bp, Artificial Sequence
  Synthetic oligonucleotide
agatgggaacctaggttttcatgcagttgc

SEQ ID NO: 403184 - DNA, 30 bp, Artificial Sequence
  Synthetic oligonucleotide
atccgggtccgctaacgggacgagagttgc

SEQ ID NO: 403185 - DNA, 30 bp, Artificial Sequence
  Synthetic oligonucleotide
gaaatcccggacaaggatgtggagagttgc

SEQ ID NO: 403186 - DNA, 30 bp, Artificial Sequence
  Synthetic oligonucleotide
agggcgggctggtccgggacggggagttgc

SEQ ID NO: 403187 - DNA, 30 bp, Artificial Sequence
  Synthetic oligonucleotide
gcgaggtcggtctgcatgacgaatagttgc

SEQ ID NO: 403188 - DNA, 30 bp, Artificial Sequence
  Synthetic oligonucleotide
aaccaataatcggtactgaaagttagttgc

SEQ ID NO: 403189 - DNA, 30 bp, Artificial Sequence
  Synthetic oligonucleotide
ttagttcaaataggggcaccagtccgttgc

SEQ ID NO: 403190 - DNA, 30 bp, Artificial Sequence
  Synthetic oligonucleotide
agcatgtagcgaccgaaggccttccgttgc

SEQ ID NO: 403191 - DNA, 30 bp, Artificial Sequence
  Synthetic oligonucleotide
aggctagacgtggttgacgagtttcgttgc

SEQ ID NO: 403192 - DNA, 30 bp, Artificial Sequence
  Synthetic oligonucleotide
cgggctattgcgacagctggtaaatgttgc

SEQ ID NO: 403193 - DNA, 30 bp, Artificial Sequence
  Synthetic oligonucleotide
aggtttgaagcggagttcagcacatgttgc

SEQ ID NO: 403194 - DNA, 30 bp, Artificial Sequence
  Synthetic oligonucleotide
agtgttccgcctagcaggggcggctgttgc

SEQ ID NO: 403195 - DNA, 30 bp, Artificial Sequence
  Synthetic oligonucleotide
ctggggttggttcattaattgggctgttgc

SEQ ID NO: 403196 - DNA, 30 bp, Artificial Sequence
  Synthetic oligonucleotide
catttaacagaatttgatcccatctgttgc

SEQ ID NO: 403197 - DNA, 30 bp, Artificial Sequence
  Synthetic oligonucleotide
actatggctgaattgggtgtgagttgttgc

SEQ ID NO: 403198 - DNA, 30 bp, Artificial Sequence
  Synthetic oligonucleotide
gtcaacttcgaagtaccgaatatttgttgc

SEQ ID NO: 403199 - DNA, 30 bp, Artificial Sequence
  Synthetic oligonucleotide
atcgaccggggcaccgctgacataatttgc

SEQ ID NO: 403200 - DNA, 30 bp, Artificial Sequence
  Synthetic oligonucleotide
agaaaaagcagtagtgggcgaaggatttgc

SEQ ID NO: 403201 - DNA, 31 bp, Artificial Sequence
  Synthetic oligonucleotide
atagtatgaatcgcccttgaggtatatttgc

SEQ ID NO: 403202 - DNA, 30 bp, Artificial Sequence
  Synthetic oligonucleotide
aagatcaatgtatcgggcccccgcctttgc

SEQ ID NO: 403203 - DNA, 30 bp, Artificial Sequence
  Synthetic oligonucleotide
tttgccgataatgagcatagaaagctttgc

SEQ ID NO: 403204 - DNA, 30 bp, Artificial Sequence
  Synthetic oligonucleotide
ggttagcttcgggttgtgtacaggctttgc

SEQ ID NO: 403205 - DNA, 30 bp, Artificial Sequence
  Synthetic oligonucleotide
gagcggtagaggctttgagcccctctttgc

SEQ ID NO: 403206 - DNA, 30 bp, Artificial Sequence
  Synthetic oligonucleotide
gctgacacaagatatggtcaagttctttgc

SEQ ID NO: 403207 - DNA, 30 bp, Artificial Sequence
  Synthetic oligonucleotide
gggtgatattgcccggggggacgagtttgc

SEQ ID NO: 403208 - DNA, 30 bp, Artificial Sequence
  Synthetic oligonucleotide
gagcccgcgggtctatgccttcgagtttgc

SEQ ID NO: 403209 - DNA, 30 bp, Artificial Sequence
  Synthetic oligonucleotide
atcggccacaagccatccgtcctagtttgc

SEQ ID NO: 403210 - DNA, 30 bp, Artificial Sequence
  Synthetic oligonucleotide
aagaacatggtggcaatatgtaacgtttgc

SEQ ID NO: 403211 - DNA, 30 bp, Artificial Sequence
  Synthetic oligonucleotide
ttctaaggagccattgatgcaatcgtttgc

SEQ ID NO: 403212 - DNA, 30 bp, Artificial Sequence
  Synthetic oligonucleotide
gtcgggcccccggtcacccacaaggtttgc

SEQ ID NO: 403213 - DNA, 30 bp, Artificial Sequence
  Synthetic oligonucleotide
ggcagccgccacacatagtagagggtttgc

SEQ ID NO: 403214 - DNA, 30 bp, Artificial Sequence
  Synthetic oligonucleotide
tcggactaaccaaagagcccgaatgtttgc

SEQ ID NO: 403215 - DNA, 30 bp, Artificial Sequence
  Synthetic oligonucleotide
gcaccggccagaccgctgggcgatgtttgc

SEQ ID NO: 403216 - DNA, 30 bp, Artificial Sequence
  Synthetic oligonucleotide
cattatctatactagataatccctgtttgc

SEQ ID NO: 403217 - DNA, 30 bp, Artificial Sequence
  Synthetic oligonucleotide
tatagggctagttctttttaggcattttgc

SEQ ID NO: 403218 - DNA, 30 bp, Artificial Sequence
  Synthetic oligonucleotide
atataaatactcatcattttgcgcttttgc

SEQ ID NO: 403219 - DNA, 30 bp, Artificial Sequence
  Synthetic oligonucleotide
gtgttgagagcaagcatacgcaagttttgc

SEQ ID NO: 403220 - DNA, 30 bp, Artificial Sequence
  Synthetic oligonucleotide
acgaggcgggcgtgagggtggtcgttttgc

SEQ ID NO: 403221 - DNA, 30 bp, Artificial Sequence
  Synthetic oligonucleotide
agttctaggaactacgattaagggttttgc

SEQ ID NO: 403222 - DNA, 30 bp, Artificial Sequence
  Synthetic oligonucleotide
gaaccggagaattttggttgaattttttgc

SEQ ID NO: 403223 - DNA, 30 bp, Artificial Sequence
  Synthetic oligonucleotide
tttaggatatgtgacaccggccaaaaaatc

SEQ ID NO: 403224 - DNA, 30 bp, Artificial Sequence
  Synthetic oligonucleotide
acctaaaagccatcgtttgtagaaaaaatc

SEQ ID NO: 403225 - DNA, 30 bp, Artificial Sequence
  Synthetic oligonucleotide
gccaacttattggggtataatgaaaaaatc

SEQ ID NO: 403226 - DNA, 30 bp, Artificial Sequence
  Synthetic oligonucleotide
tctccaagctgcgcagggatacgaaaaatc

SEQ ID NO: 403227 - DNA, 30 bp, Artificial Sequence
  Synthetic oligonucleotide
ggtgacctcatgctggacagattaaaaatc

SEQ ID NO: 403228 - DNA, 30 bp, Artificial Sequence
  Synthetic oligonucleotide
gagtaagacttagtggtcgaggccaaaatc

SEQ ID NO: 403229 - DNA, 30 bp, Artificial Sequence
  Synthetic oligonucleotide
cctttttaatgcggtttggcgaagaaaatc

SEQ ID NO: 403230 - DNA, 30 bp, Artificial Sequence
  Synthetic oligonucleotide
cccataagcacggtcactttacctaaaatc

SEQ ID NO: 403231 - DNA, 30 bp, Artificial Sequence
  Synthetic oligonucleotide
tccctgtaagcacggaataactctaaaatc

SEQ ID NO: 403232 - DNA, 30 bp, Artificial Sequence
  Synthetic oligonucleotide
tcgattgacaacaaagtcattggtaaaatc

SEQ ID NO: 403233 - DNA, 30 bp, Artificial Sequence
  Synthetic oligonucleotide
ggggggtttggcaagccagctgcacaaatc

SEQ ID NO: 403234 - DNA, 30 bp, Artificial Sequence
  Synthetic oligonucleotide
aacatcaggtccacgctgccttcacaaatc

SEQ ID NO: 403235 - DNA, 30 bp, Artificial Sequence
  Synthetic oligonucleotide
aggcgggccactctttacagtagacaaatc

SEQ ID NO: 403236 - DNA, 30 bp, Artificial Sequence
  Synthetic oligonucleotide
gcgttctgtacccagtctccggaccaaatc

SEQ ID NO: 403237 - DNA, 30 bp, Artificial Sequence
  Synthetic oligonucleotide
cattcgccatgggacttcctttcccaaatc

SEQ ID NO: 403238 - DNA, 30 bp, Artificial Sequence
  Synthetic oligonucleotide
aatagcgttatgatcaaggagctccaaatc

SEQ ID NO: 403239 - DNA, 30 bp, Artificial Sequence
  Synthetic oligonucleotide
accaacggcccctctggttcagtccaaatc

SEQ ID NO: 403240 - DNA, 30 bp, Artificial Sequence
  Synthetic oligonucleotide
cgatgaaggccacactcagaaacgcaaatc

SEQ ID NO: 403241 - DNA, 30 bp, Artificial Sequence
  Synthetic oligonucleotide
cagtggcagcaccaattgagctggcaaatc

SEQ ID NO: 403242 - DNA, 30 bp, Artificial Sequence
  Synthetic oligonucleotide
gccgtcgtattacggattatggtgcaaatc

SEQ ID NO: 403243 - DNA, 30 bp, Artificial Sequence
  Synthetic oligonucleotide
gatgtgaccttcaagtttcagactcaaatc

SEQ ID NO: 403244 - DNA, 30 bp, Artificial Sequence
  Synthetic oligonucleotide
taaatgttcgtaaagtactggcctcaaatc

SEQ ID NO: 403245 - DNA, 30 bp, Artificial Sequence
  Synthetic oligonucleotide
ctgtgcagggtttgcgtgtggtttcaaatc

SEQ ID NO: 403246 - DNA, 30 bp, Artificial Sequence
  Synthetic oligonucleotide
actgtttaattgtttaccgcgaaagaaatc

SEQ ID NO: 403247 - DNA, 30 bp, Artificial Sequence
  Synthetic oligonucleotide
tgtgcgcccagatccgctaataaagaaatc

SEQ ID NO: 403248 - DNA, 30 bp, Artificial Sequence
  Synthetic oligonucleotide
attcaatgacagtgggtgaaagcagaaatc

SEQ ID NO: 403249 - DNA, 30 bp, Artificial Sequence
  Synthetic oligonucleotide
gagcagcgcgtcggtttaccggacgaaatc

SEQ ID NO: 403250 - DNA, 30 bp, Artificial Sequence
  Synthetic oligonucleotide
gctttattacgtgtgtgggttgacgaaatc

SEQ ID NO: 403251 - DNA, 30 bp, Artificial Sequence
  Synthetic oligonucleotide
cctgtaggtttatctattacctgcgaaatc

SEQ ID NO: 403252 - DNA, 30 bp, Artificial Sequence
  Synthetic oligonucleotide
aaggagatttgtcaatgccacctcgaaatc

SEQ ID NO: 403253 - DNA, 30 bp, Artificial Sequence
  Synthetic oligonucleotide
tgcgtcagcggcattcattggtaggaaatc

SEQ ID NO: 403254 - DNA, 30 bp, Artificial Sequence
  Synthetic oligonucleotide
ggacgacggcgttcctgttgtcgtgaaatc

SEQ ID NO: 403255 - DNA, 30 bp, Artificial Sequence
  Synthetic oligonucleotide
tgatggccatgtcatccgaccttataaatc

SEQ ID NO: 403256 - DNA, 30 bp, Artificial Sequence
  Synthetic oligonucleotide
aatggcccgttgagcagattaacctaaatc

SEQ ID NO: 403257 - DNA, 30 bp, Artificial Sequence
  Synthetic oligonucleotide
gtggcccccactaaatttcagcagtaaatc

SEQ ID NO: 403258 - DNA, 30 bp, Artificial Sequence
  Synthetic oligonucleotide
tcttcagtcttcaaatcagagctgtaaatc

SEQ ID NO: 403259 - DNA, 30 bp, Artificial Sequence
  Synthetic oligonucleotide
tactttagaatcttgtagaagcattaaatc

SEQ ID NO: 403260 - DNA, 30 bp, Artificial Sequence
  Synthetic oligonucleotide
atttagatatgggaatagtaacgttaaatc

SEQ ID NO: 403261 - DNA, 30 bp, Artificial Sequence
  Synthetic oligonucleotide
ggctgtcgttccagtgtttgccaaacaatc

SEQ ID NO: 403262 - DNA, 30 bp, Artificial Sequence
  Synthetic oligonucleotide
cattccctgggcgggcttcgcggaacaatc

SEQ ID NO: 403263 - DNA, 30 bp, Artificial Sequence
  Synthetic oligonucleotide
atggtattatctcaccccgctaagacaatc

SEQ ID NO: 403264 - DNA, 30 bp, Artificial Sequence
  Synthetic oligonucleotide
acaataggacgtattgcggactggacaatc

SEQ ID NO: 403265 - DNA, 30 bp, Artificial Sequence
  Synthetic oligonucleotide
ttatcgatttggataggcctaatgacaatc

SEQ ID NO: 403266 - DNA, 30 bp, Artificial Sequence
  Synthetic oligonucleotide
agccaagtctaccgcaacgggactacaatc

SEQ ID NO: 403267 - DNA, 30 bp, Artificial Sequence
  Synthetic oligonucleotide
agacagcctcatctaatcggttgtacaatc

SEQ ID NO: 403268 - DNA, 31 bp, Artificial Sequence
  Synthetic oligonucleotide
agagctaccttgacggtaacggattacaatc

SEQ ID NO: 403269 - DNA, 30 bp, Artificial Sequence
  Synthetic oligonucleotide
ctaatcgatttacgtatttcagttacaatc

SEQ ID NO: 403270 - DNA, 30 bp, Artificial Sequence
  Synthetic oligonucleotide
taaggcaatgagttcaattacgcaccaatc

SEQ ID NO: 403271 - DNA, 30 bp, Artificial Sequence
  Synthetic oligonucleotide
atatggtataagatgcctgaggcaccaatc

SEQ ID NO: 403272 - DNA, 30 bp, Artificial Sequence
  Synthetic oligonucleotide
aatatattgtacggactcgacttaccaatc

SEQ ID NO: 403273 - DNA, 30 bp, Artificial Sequence
  Synthetic oligonucleotide
ttcatggtggtagggtcaccagatccaatc

SEQ ID NO: 403274 - DNA, 30 bp, Artificial Sequence
  Synthetic oligonucleotide
ggtacgcaagcttataatctcgctccaatc

SEQ ID NO: 403275 - DNA, 30 bp, Artificial Sequence
  Synthetic oligonucleotide
cgtcaccgttataagtattcaagtccaatc

SEQ ID NO: 403276 - DNA, 30 bp, Artificial Sequence
  Synthetic oligonucleotide
actcgggtcaattcagtgatatttccaatc

SEQ ID NO: 403277 - DNA, 30 bp, Artificial Sequence
  Synthetic oligonucleotide
agggtttcctttagcagaattgcagcaatc

SEQ ID NO: 403278 - DNA, 30 bp, Artificial Sequence
  Synthetic oligonucleotide
agttgtagaccataccgtaggttagcaatc

SEQ ID NO: 403279 - DNA, 30 bp, Artificial Sequence
  Synthetic oligonucleotide
acacgacagtatcttagattttgggcaatc

SEQ ID NO: 403280 - DNA, 30 bp, Artificial Sequence
  Synthetic oligonucleotide
gggatcgacggtgtagtacgccttgcaatc

SEQ ID NO: 403281 - DNA, 30 bp, Artificial Sequence
  Synthetic oligonucleotide
cttgtcgttaagcaaagtagtcttgcaatc

SEQ ID NO: 403282 - DNA, 30 bp, Artificial Sequence
  Synthetic oligonucleotide
cccccttgtacgccgataggttgatcaatc

SEQ ID NO: 403283 - DNA, 30 bp, Artificial Sequence
  Synthetic oligonucleotide
ggaaagtagtaataggtctacgtatcaatc

SEQ ID NO: 403284 - DNA, 30 bp, Artificial Sequence
  Synthetic oligonucleotide
cttctccacacaatgctcttaaagtcaatc

SEQ ID NO: 403285 - DNA, 30 bp, Artificial Sequence
  Synthetic oligonucleotide
tggtccccacgatgggggccgttgtcaatc

SEQ ID NO: 403286 - DNA, 30 bp, Artificial Sequence
  Synthetic oligonucleotide
gctggaggatgcaggattaagcgttcaatc

SEQ ID NO: 403287 - DNA, 30 bp, Artificial Sequence
  Synthetic oligonucleotide
acggtcgccattattgacttacgaagaatc

SEQ ID NO: 403288 - DNA, 30 bp, Artificial Sequence
  Synthetic oligonucleotide
tgtgaaaatttaccctccctcttaagaatc

SEQ ID NO: 403289 - DNA, 30 bp, Artificial Sequence
  Synthetic oligonucleotide
attgtgtcgctagagcgccatttaagaatc

SEQ ID NO: 403290 - DNA, 30 bp, Artificial Sequence
  Synthetic oligonucleotide
aatatgagtcaaatcgagaacatcagaatc

SEQ ID NO: 403291 - DNA, 30 bp, Artificial Sequence
  Synthetic oligonucleotide
accatctatatcaacgaggcatagagaatc

SEQ ID NO: 403292 - DNA, 30 bp, Artificial Sequence
  Synthetic oligonucleotide
gacccgtccggttcattgtgacggagaatc

SEQ ID NO: 403293 - DNA, 30 bp, Artificial Sequence
  Synthetic oligonucleotide
cgctcggcatcccctgaaaagcatagaatc

SEQ ID NO: 403294 - DNA, 30 bp, Artificial Sequence
  Synthetic oligonucleotide
ggattctcgcattagcgaggacaacgaatc

SEQ ID NO: 403295 - DNA, 30 bp, Artificial Sequence
  Synthetic oligonucleotide
atcgaaccggtgagtgcgtttcaacgaatc

SEQ ID NO: 403296 - DNA, 30 bp, Artificial Sequence
  Synthetic oligonucleotide
cactgtatgtgacctccaggtgaacgaatc

SEQ ID NO: 403297 - DNA, 30 bp, Artificial Sequence
  Synthetic oligonucleotide
gcaagagtgtagctctgacatgagcgaatc

SEQ ID NO: 403298 - DNA, 30 bp, Artificial Sequence
  Synthetic oligonucleotide
aaaaacatcgctagatcccgttggcgaatc

SEQ ID NO: 403299 - DNA, 30 bp, Artificial Sequence
  Synthetic oligonucleotide
gtccagcccacccgctcgggttggcgaatc

SEQ ID NO: 403300 - DNA, 30 bp, Artificial Sequence
  Synthetic oligonucleotide
cctgagtggggacaccagtcacatcgaatc

SEQ ID NO: 403301 - DNA, 30 bp, Artificial Sequence
  Synthetic oligonucleotide
caatggttgattctatcggtgatgggaatc

SEQ ID NO: 403302 - DNA, 30 bp, Artificial Sequence
  Synthetic oligonucleotide
ccaattgccgaatatgttaatattggaatc

SEQ ID NO: 403303 - DNA, 30 bp, Artificial Sequence
  Synthetic oligonucleotide
ctaggctcatcgcagttagccctatgaatc

SEQ ID NO: 403304 - DNA, 30 bp, Artificial Sequence
  Synthetic oligonucleotide
tgtatgatggtctattaagcgcagtgaatc

SEQ ID NO: 403305 - DNA, 30 bp, Artificial Sequence
  Synthetic oligonucleotide
cttaccagcgtaacatgtcatacgtgaatc

SEQ ID NO: 403306 - DNA, 30 bp, Artificial Sequence
  Synthetic oligonucleotide
tcacggactacgatgtacacccattgaatc

SEQ ID NO: 403307 - DNA, 30 bp, Artificial Sequence
  Synthetic oligonucleotide
cctagagctgtttaattgttctattgaatc

SEQ ID NO: 403308 - DNA, 30 bp, Artificial Sequence
  Synthetic oligonucleotide
acactcatatatagggatgcgtattgaatc

SEQ ID NO: 403309 - DNA, 30 bp, Artificial Sequence
  Synthetic oligonucleotide
tattcttcagagtaggtcgggccttgaatc

SEQ ID NO: 403310 - DNA, 30 bp, Artificial Sequence
  Synthetic oligonucleotide
catccccgacggcaggcgtcggcaataatc

SEQ ID NO: 403311 - DNA, 30 bp, Artificial Sequence
  Synthetic oligonucleotide
ctgaagcacctgggattgtcatgaataatc

SEQ ID NO: 403312 - DNA, 30 bp, Artificial Sequence
  Synthetic oligonucleotide
tgaacaagtcacgccctggttgacataatc

SEQ ID NO: 403313 - DNA, 30 bp, Artificial Sequence
  Synthetic oligonucleotide
gtataaacctgaagacttggctccataatc

SEQ ID NO: 403314 - DNA, 30 bp, Artificial Sequence
  Synthetic oligonucleotide
tatggagagattgattgtatttgcataatc

SEQ ID NO: 403315 - DNA, 30 bp, Artificial Sequence
  Synthetic oligonucleotide
tcagatcatttaatgtatcacactataatc

SEQ ID NO: 403316 - DNA, 30 bp, Artificial Sequence
  Synthetic oligonucleotide
gaatcttaggaatatcatccggaactaatc

SEQ ID NO: 403317 - DNA, 30 bp, Artificial Sequence
  Synthetic oligonucleotide
cttggagcaaacccactccaagcactaatc

SEQ ID NO: 403318 - DNA, 30 bp, Artificial Sequence
  Synthetic oligonucleotide
atgagggtgttgcttctcagagacctaatc

SEQ ID NO: 403319 - DNA, 30 bp, Artificial Sequence
  Synthetic oligonucleotide
ctcgaacaatgttatgcccaggacctaatc

SEQ ID NO: 403320 - DNA, 30 bp, Artificial Sequence
  Synthetic oligonucleotide
ccgattcctacagaactgacgtgcctaatc

SEQ ID NO: 403321 - DNA, 30 bp, Artificial Sequence
  Synthetic oligonucleotide
atcactcgaaaccatggtcgttaagtaatc

SEQ ID NO: 403322 - DNA, 30 bp, Artificial Sequence
  Synthetic oligonucleotide
tatactcgcattcaaggtggcggcgtaatc

SEQ ID NO: 403323 - DNA, 30 bp, Artificial Sequence
  Synthetic oligonucleotide
atattagcttgtagggaaccataggtaatc

SEQ ID NO: 403324 - DNA, 30 bp, Artificial Sequence
  Synthetic oligonucleotide
tgaagttcgtgagttttgcgcacggtaatc

SEQ ID NO: 403325 - DNA, 30 bp, Artificial Sequence
  Synthetic oligonucleotide
agtagcccacccgcccaacctgatgtaatc

SEQ ID NO: 403326 - DNA, 30 bp, Artificial Sequence
  Synthetic oligonucleotide
tcctctggcaaggcgggtatatatgtaatc

SEQ ID NO: 403327 - DNA, 30 bp, Artificial Sequence
  Synthetic oligonucleotide
atagttttgtccattatacatcagttaatc

SEQ ID NO: 403328 - DNA, 30 bp, Artificial Sequence
  Synthetic oligonucleotide
aaaagtatgagaaccacagaacggttaatc

SEQ ID NO: 403329 - DNA, 30 bp, Artificial Sequence
  Synthetic oligonucleotide
gattcgtcgttgttcgcgatgtggttaatc

SEQ ID NO: 403330 - DNA, 30 bp, Artificial Sequence
  Synthetic oligonucleotide
ctcgccgcaggtttgtcgagttggttaatc

SEQ ID NO: 403331 - DNA, 30 bp, Artificial Sequence
  Synthetic oligonucleotide
aaaaaggggttgtaatttttgatgttaatc

SEQ ID NO: 403332 - DNA, 30 bp, Artificial Sequence
  Synthetic oligonucleotide
tgtgacaaggcggcgcgctacaatttaatc

SEQ ID NO: 403333 - DNA, 30 bp, Artificial Sequence
  Synthetic oligonucleotide
gcctcctttgcctgtttcaattatttaatc

SEQ ID NO: 403334 - DNA, 30 bp, Artificial Sequence
  Synthetic oligonucleotide
tgggatgtattagaaagctgaattttaatc

SEQ ID NO: 403335 - DNA, 30 bp, Artificial Sequence
  Synthetic oligonucleotide
gacttcatattcggtgtactaacaaacatc

SEQ ID NO: 403336 - DNA, 30 bp, Artificial Sequence
  Synthetic oligonucleotide
gtatgggattttcttacatactacaacatc

SEQ ID NO: 403337 - DNA, 30 bp, Artificial Sequence
  Synthetic oligonucleotide
gatcaagcgcgtgcacgtccaaccaacatc

SEQ ID NO: 403338 - DNA, 30 bp, Artificial Sequence
  Synthetic oligonucleotide
atgagcagagttagattagctctcaacatc

SEQ ID NO: 403339 - DNA, 30 bp, Artificial Sequence
  Synthetic oligonucleotide
gagtatacatgtgttccgtacaggaacatc

SEQ ID NO: 403340 - DNA, 30 bp, Artificial Sequence
  Synthetic oligonucleotide
tacaattgcatggatctaattaggaacatc

SEQ ID NO: 403341 - DNA, 30 bp, Artificial Sequence
  Synthetic oligonucleotide
ttaagatattccagattaattgtgaacatc

SEQ ID NO: 403342 - DNA, 30 bp, Artificial Sequence
  Synthetic oligonucleotide
tagaaacagcgggcctccgattgtaacatc

SEQ ID NO: 403343 - DNA, 30 bp, Artificial Sequence
  Synthetic oligonucleotide
gtgtcagagtcaatgctatgtgttaacatc

SEQ ID NO: 403344 - DNA, 30 bp, Artificial Sequence
  Synthetic oligonucleotide
atagcttccttagtaacggagttacacatc

SEQ ID NO: 403345 - DNA, 30 bp, Artificial Sequence
  Synthetic oligonucleotide
ttgtagcttgatcaatccattatgcacatc

SEQ ID NO: 403346 - DNA, 30 bp, Artificial Sequence
  Synthetic oligonucleotide
tatatctgaatcgtaatgtatggtcacatc

SEQ ID NO: 403347 - DNA, 30 bp, Artificial Sequence
  Synthetic oligonucleotide
gatgagcactgcaagtcgagccgcgacatc

SEQ ID NO: 403348 - DNA, 30 bp, Artificial Sequence
  Synthetic oligonucleotide
cttctgagcgagtggttcgtcgatgacatc

SEQ ID NO: 403349 - DNA, 30 bp, Artificial Sequence
  Synthetic oligonucleotide
tgcgatgtcaattctgcaacacctgacatc

SEQ ID NO: 403350 - DNA, 30 bp, Artificial Sequence
  Synthetic oligonucleotide
ccgcatacctgcccgcgttcgcgtgacatc

SEQ ID NO: 403351 - DNA, 30 bp, Artificial Sequence
  Synthetic oligonucleotide
atccacttttgattgaatagaacatacatc

SEQ ID NO: 403352 - DNA, 30 bp, Artificial Sequence
  Synthetic oligonucleotide
tgtcctgagaaaatgtttcgtggatacatc

SEQ ID NO: 403353 - DNA, 30 bp, Artificial Sequence
  Synthetic oligonucleotide
tgtagcaggaagacacaccgattatacatc

SEQ ID NO: 403354 - DNA, 30 bp, Artificial Sequence
  Synthetic oligonucleotide
acaaagctcgtggtatcttccaactacatc

SEQ ID NO: 403355 - DNA, 30 bp, Artificial Sequence
  Synthetic oligonucleotide
ctagccacatcgaagcactaatgctacatc

SEQ ID NO: 403356 - DNA, 30 bp, Artificial Sequence
  Synthetic oligonucleotide
tgactgtagatggcgcaatagatctacatc

SEQ ID NO: 403357 - DNA, 30 bp, Artificial Sequence
  Synthetic oligonucleotide
tctcttagatataaggtgaagttctacatc

SEQ ID NO: 403358 - DNA, 30 bp, Artificial Sequence
  Synthetic oligonucleotide
ctaattgtaatacctatacttgggtacatc

SEQ ID NO: 403359 - DNA, 30 bp, Artificial Sequence
  Synthetic oligonucleotide
gttagtcaaaagcaggactggaattacatc

SEQ ID NO: 403360 - DNA, 30 bp, Artificial Sequence
  Synthetic oligonucleotide
tagtgaagcgggttatcggccggttacatc

SEQ ID NO: 403361 - DNA, 30 bp, Artificial Sequence
  Synthetic oligonucleotide
agtggcttgcacaccattttaaaaaccatc

SEQ ID NO: 403362 - DNA, 30 bp, Artificial Sequence
  Synthetic oligonucleotide
tggacgattgatcgtagggctgaaaccatc

SEQ ID NO: 403363 - DNA, 30 bp, Artificial Sequence
  Synthetic oligonucleotide
ctaccaagggtagccgatgccgcaaccatc

SEQ ID NO: 403364 - DNA, 30 bp, Artificial Sequence
  Synthetic oligonucleotide
caggccagcttcctgctactcggaaccatc

SEQ ID NO: 403365 - DNA, 30 bp, Artificial Sequence
  Synthetic oligonucleotide
gcacaacgtgccgttggagtagacaccatc

SEQ ID NO: 403366 - DNA, 30 bp, Artificial Sequence
  Synthetic oligonucleotide
tcgtacagaagttgtcccatcattaccatc

SEQ ID NO: 403367 - DNA, 30 bp, Artificial Sequence
  Synthetic oligonucleotide
tgcacccaccccccgattacccaacccatc

SEQ ID NO: 403368 - DNA, 30 bp, Artificial Sequence
  Synthetic oligonucleotide
tctcgggtcgcaacagagattacacccatc

SEQ ID NO: 403369 - DNA, 30 bp, Artificial Sequence
  Synthetic oligonucleotide
acgcatactaggctacttagaaaccccatc

SEQ ID NO: 403370 - DNA, 30 bp, Artificial Sequence
  Synthetic oligonucleotide
atattaaagtgttcggccaggcagcccatc

SEQ ID NO: 403371 - DNA, 30 bp, Artificial Sequence
  Synthetic oligonucleotide
aaagtcccttaaacgataaagacgcccatc

SEQ ID NO: 403372 - DNA, 30 bp, Artificial Sequence
  Synthetic oligonucleotide
gcctcgagcgcgggtgtgtttccgcccatc

SEQ ID NO: 403373 - DNA, 30 bp, Artificial Sequence
  Synthetic oligonucleotide
aacattcatacaatcacccttcatcccatc

SEQ ID NO: 403374 - DNA, 30 bp, Artificial Sequence
  Synthetic oligonucleotide
tatccgggctccggcggcgatgatcccatc

SEQ ID NO: 403375 - DNA, 30 bp, Artificial Sequence
  Synthetic oligonucleotide
atgatcgtggaagacgtctgagttcccatc

SEQ ID NO: 403376 - DNA, 30 bp, Artificial Sequence
  Synthetic oligonucleotide
cgtactacagttacatggccataagccatc

SEQ ID NO: 403377 - DNA, 30 bp, Artificial Sequence
  Synthetic oligonucleotide
ttttaaccaggttggcatatgaccgccatc

SEQ ID NO: 403378 - DNA, 30 bp, Artificial Sequence
  Synthetic oligonucleotide
aacgcggcaaaggtggttagaagggccatc

SEQ ID NO: 403379 - DNA, 30 bp, Artificial Sequence
  Synthetic oligonucleotide
gtttcgggcatgcgtgcctccctggccatc

SEQ ID NO: 403380 - DNA, 30 bp, Artificial Sequence
  Synthetic oligonucleotide
agcctagtcttctacctagggaatgccatc

SEQ ID NO: 403381 - DNA, 30 bp, Artificial Sequence
  Synthetic oligonucleotide
ggtttcctttggaaactacatcctgccatc

SEQ ID NO: 403382 - DNA, 30 bp, Artificial Sequence
  Synthetic oligonucleotide
attgctcgtgcactacatcagattgccatc

SEQ ID NO: 403383 - DNA, 30 bp, Artificial Sequence
  Synthetic oligonucleotide
gcgtggcagtggagtggatctccatccatc

SEQ ID NO: 403384 - DNA, 30 bp, Artificial Sequence
  Synthetic oligonucleotide
aagtgatcacgtttgaccgaacagtccatc

SEQ ID NO: 403385 - DNA, 30 bp, Artificial Sequence
  Synthetic oligonucleotide
aatctaatcagccgacattagaattccatc

SEQ ID NO: 403386 - DNA, 30 bp, Artificial Sequence
  Synthetic oligonucleotide
cccctgcctccaggactgggtaattccatc

SEQ ID NO: 403387 - DNA, 30 bp, Artificial Sequence
  Synthetic oligonucleotide
aagccccgcgcacatggtgtcggttccatc

SEQ ID NO: 403388 - DNA, 30 bp, Artificial Sequence
  Synthetic oligonucleotide
ggtatagtaatctacgttggtcaaagcatc

SEQ ID NO: 403389 - DNA, 30 bp, Artificial Sequence
  Synthetic oligonucleotide
aagtctcataggaacgtctggtaaagcatc

SEQ ID NO: 403390 - DNA, 30 bp, Artificial Sequence
  Synthetic oligonucleotide
gtaatgcttgtgcagtcctcgtcaagcatc

SEQ ID NO: 403391 - DNA, 30 bp, Artificial Sequence
  Synthetic oligonucleotide
tggtactaacttatcgggactagaagcatc

SEQ ID NO: 403392 - DNA, 30 bp, Artificial Sequence
  Synthetic oligonucleotide
tctccttgtccccttatatgtggcagcatc

SEQ ID NO: 403393 - DNA, 30 bp, Artificial Sequence
  Synthetic oligonucleotide
ttattggctgtcctgatgaaacaacgcatc

SEQ ID NO: 403394 - DNA, 30 bp, Artificial Sequence
  Synthetic oligonucleotide
gacgacggagaccagcctgctcgccgcatc

SEQ ID NO: 403395 - DNA, 30 bp, Artificial Sequence
  Synthetic oligonucleotide
ctctgggcctgatgttgcaacgagcgcatc

SEQ ID NO: 403396 - DNA, 30 bp, Artificial Sequence
  Synthetic oligonucleotide
gcggccgagcgatgcaggaacgagcgcatc

SEQ ID NO: 403397 - DNA, 30 bp, Artificial Sequence
  Synthetic oligonucleotide
cgtaaattgtcattaatctgataaggcatc

SEQ ID NO: 403398 - DNA, 30 bp, Artificial Sequence
  Synthetic oligonucleotide
tttagggtaacacgcgtataattcggcatc

SEQ ID NO: 403399 - DNA, 30 bp, Artificial Sequence
  Synthetic oligonucleotide
ggaaaaggtaggggcgcaacttatggcatc

SEQ ID NO: 403400 - DNA, 30 bp, Artificial Sequence
  Synthetic oligonucleotide
ttctctggtagaacaggactgactggcatc

SEQ ID NO: 403401 - DNA, 30 bp, Artificial Sequence
  Synthetic oligonucleotide
agctcacggtcttattgcacggctggcatc

SEQ ID NO: 403402 - DNA, 30 bp, Artificial Sequence
  Synthetic oligonucleotide
cagaacttcgatgcaactgaagttggcatc

SEQ ID NO: 403403 - DNA, 30 bp, Artificial Sequence
  Synthetic oligonucleotide
aagtttgtgattataccagcctaatgcatc

SEQ ID NO: 403404 - DNA, 30 bp, Artificial Sequence
  Synthetic oligonucleotide
tgctactcttacaatattggaacatgcatc

SEQ ID NO: 403405 - DNA, 30 bp, Artificial Sequence
  Synthetic oligonucleotide
ttatagggtgtgcaacgtttaatatgcatc

SEQ ID NO: 403406 - DNA, 30 bp, Artificial Sequence
  Synthetic oligonucleotide
ccccgtggacagcctaaggtgacctgcatc

SEQ ID NO: 403407 - DNA, 30 bp, Artificial Sequence
  Synthetic oligonucleotide
attactacagtcgggtgaccccgttgcatc

SEQ ID NO: 403408 - DNA, 30 bp, Artificial Sequence
  Synthetic oligonucleotide
gggttagcgctcggcaaaatgggttgcatc

SEQ ID NO: 403409 - DNA, 30 bp, Artificial Sequence
  Synthetic oligonucleotide
gtaccacgtcttccgtcgtagctttgcatc

SEQ ID NO: 403410 - DNA, 30 bp, Artificial Sequence
  Synthetic oligonucleotide
gtctcgatcctgtgtccaaataaaatcatc

SEQ ID NO: 403411 - DNA, 30 bp, Artificial Sequence
  Synthetic oligonucleotide
taagcaacgacccgcaaacctggaatcatc

SEQ ID NO: 403412 - DNA, 30 bp, Artificial Sequence
  Synthetic oligonucleotide
ctaatgtctccagggattcaacagatcatc

SEQ ID NO: 403413 - DNA, 30 bp, Artificial Sequence
  Synthetic oligonucleotide
gcgggcagctagctgaacctatgtatcatc

SEQ ID NO: 403414 - DNA, 30 bp, Artificial Sequence
  Synthetic oligonucleotide
acaaataaggtcgcgggagttccactcatc

SEQ ID NO: 403415 - DNA, 30 bp, Artificial Sequence
  Synthetic oligonucleotide
tacccgattcttaccaacataagtctcatc

SEQ ID NO: 403416 - DNA, 30 bp, Artificial Sequence
  Synthetic oligonucleotide
taatgcttctatagaagtacagaagtcatc

SEQ ID NO: 403417 - DNA, 30 bp, Artificial Sequence
  Synthetic oligonucleotide
tacaagaactcagcctcagtctaagtcatc

SEQ ID NO: 403418 - DNA, 30 bp, Artificial Sequence
  Synthetic oligonucleotide
ggtatggagtttattacctatccagtcatc

SEQ ID NO: 403419 - DNA, 30 bp, Artificial Sequence
  Synthetic oligonucleotide
catatgaatagtaggaatccgcacgtcatc

SEQ ID NO: 403420 - DNA, 30 bp, Artificial Sequence
  Synthetic oligonucleotide
gtcactgaccttgatatgaaccaggtcatc

SEQ ID NO: 403421 - DNA, 30 bp, Artificial Sequence
  Synthetic oligonucleotide
cgtttgattgggcggtatgagcgggtcatc

SEQ ID NO: 403422 - DNA, 30 bp, Artificial Sequence
  Synthetic oligonucleotide
gcacgttcttctagattgacgcgtgtcatc

SEQ ID NO: 403423 - DNA, 30 bp, Artificial Sequence
  Synthetic oligonucleotide
gatgtttaggcgcaacaaataggtgtcatc

SEQ ID NO: 403424 - DNA, 30 bp, Artificial Sequence
  Synthetic oligonucleotide
gtagtgagaggactacgtcgagttgtcatc

SEQ ID NO: 403425 - DNA, 30 bp, Artificial Sequence
  Synthetic oligonucleotide
ggttcagctgacttgttagaatgcttcatc

SEQ ID NO: 403426 - DNA, 30 bp, Artificial Sequence
  Synthetic oligonucleotide
ggtattgtcacatagtgataaatgttcatc

SEQ ID NO: 403427 - DNA, 30 bp, Artificial Sequence
  Synthetic oligonucleotide
gggtccaaagcgacctcacgcgtgttcatc

SEQ ID NO: 403428 - DNA, 30 bp, Artificial Sequence
  Synthetic oligonucleotide
cgcgcacgtggcagagcgtttttgttcatc

SEQ ID NO: 403429 - DNA, 30 bp, Artificial Sequence
  Synthetic oligonucleotide
ttttataaataagggctaatgcatttcatc

SEQ ID NO: 403430 - DNA, 30 bp, Artificial Sequence
  Synthetic oligonucleotide
atgcacagtgaagtatctgatactttcatc

SEQ ID NO: 403431 - DNA, 30 bp, Artificial Sequence
  Synthetic oligonucleotide
gggtgaggatattgccgatttaaaaagatc

SEQ ID NO: 403432 - DNA, 30 bp, Artificial Sequence
  Synthetic oligonucleotide
cataggcgcgagtccgtaatcgcaaagatc

SEQ ID NO: 403433 - DNA, 30 bp, Artificial Sequence
  Synthetic oligonucleotide
aactagtacgcagctacctcacgaaagatc

SEQ ID NO: 403434 - DNA, 30 bp, Artificial Sequence
  Synthetic oligonucleotide
ctcgtgtcccagtgtattactctcaagatc

SEQ ID NO: 403435 - DNA, 30 bp, Artificial Sequence
  Synthetic oligonucleotide
atcaagtgacgctggatagctcggaagatc

SEQ ID NO: 403436 - DNA, 30 bp, Artificial Sequence
  Synthetic oligonucleotide
aggcagatcaggatccgacgacagcagatc

SEQ ID NO: 403437 - DNA, 30 bp, Artificial Sequence
  Synthetic oligonucleotide
tgggcggacctggtacctgacttgcagatc

SEQ ID NO: 403438 - DNA, 30 bp, Artificial Sequence
  Synthetic oligonucleotide
acaaaagcaagagtaacaagcttagagatc

SEQ ID NO: 403439 - DNA, 30 bp, Artificial Sequence
  Synthetic oligonucleotide
attgcggatcggagctgggacagggagatc

SEQ ID NO: 403440 - DNA, 30 bp, Artificial Sequence
  Synthetic oligonucleotide
actgtacgtaactctcgggttcgggagatc

SEQ ID NO: 403441 - DNA, 30 bp, Artificial Sequence
  Synthetic oligonucleotide
gacgtaattacaaagtgcgttcctgagatc

SEQ ID NO: 403442 - DNA, 30 bp, Artificial Sequence
  Synthetic oligonucleotide
agacctaaagatcttgggccctcatagatc

SEQ ID NO: 403443 - DNA, 30 bp, Artificial Sequence
  Synthetic oligonucleotide
ggctaggcttgtgtgcgcatgatatagatc

SEQ ID NO: 403444 - DNA, 30 bp, Artificial Sequence
  Synthetic oligonucleotide
ctgtatattaggttacacgatcgctagatc

SEQ ID NO: 403445 - DNA, 30 bp, Artificial Sequence
  Synthetic oligonucleotide
ttgccttgggaagggcagattcgctagatc

SEQ ID NO: 403446 - DNA, 30 bp, Artificial Sequence
  Synthetic oligonucleotide
catgatcacatgcgggacgccatctagatc

SEQ ID NO: 403447 - DNA, 30 bp, Artificial Sequence
  Synthetic oligonucleotide
aaaattctagtatcaagagatgcgtagatc

SEQ ID NO: 403448 - DNA, 30 bp, Artificial Sequence
  Synthetic oligonucleotide
tattccgcgggaagtagattgtggtagatc

SEQ ID NO: 403449 - DNA, 30 bp, Artificial Sequence
  Synthetic oligonucleotide
accgatctggccacatcaatctattagatc

SEQ ID NO: 403450 - DNA, 30 bp, Artificial Sequence
  Synthetic oligonucleotide
ttgttgtcatcgtccggaggaggcacgatc

SEQ ID NO: 403451 - DNA, 30 bp, Artificial Sequence
  Synthetic oligonucleotide
atgtagtagaggtctagtacgggcacgatc

SEQ ID NO: 403452 - DNA, 30 bp, Artificial Sequence
  Synthetic oligonucleotide
cgacctttactggaacatactggcacgatc

SEQ ID NO: 403453 - DNA, 29 bp, Artificial Sequence
  Synthetic oligonucleotide
cagtcgctaggctagattattagacgatc

SEQ ID NO: 403454 - DNA, 30 bp, Artificial Sequence
  Synthetic oligonucleotide
aaagtagtaatctgatgcccacatacgatc

SEQ ID NO: 403455 - DNA, 30 bp, Artificial Sequence
  Synthetic oligonucleotide
aagatcagaatgtaattcccttccccgatc

SEQ ID NO: 403456 - DNA, 30 bp, Artificial Sequence
  Synthetic oligonucleotide
accaagagatacgaagcatacaagccgatc

SEQ ID NO: 403457 - DNA, 30 bp, Artificial Sequence
  Synthetic oligonucleotide
tgatctgtgccgtttcgtgcatcgccgatc

SEQ ID NO: 403458 - DNA, 30 bp, Artificial Sequence
  Synthetic oligonucleotide
atttaatacccacaatttagcaaagcgatc

SEQ ID NO: 403459 - DNA, 30 bp, Artificial Sequence
  Synthetic oligonucleotide
tcctctagcagggcgagctcgtaagcgatc

SEQ ID NO: 403460 - DNA, 30 bp, Artificial Sequence
  Synthetic oligonucleotide
cagacattttcgctccaagcgtacgcgatc

SEQ ID NO: 403461 - DNA, 30 bp, Artificial Sequence
  Synthetic oligonucleotide
gtctattaaatgagagcgtgataggcgatc

SEQ ID NO: 403462 - DNA, 30 bp, Artificial Sequence
  Synthetic oligonucleotide
aattgcgaggaatttacctcctgggcgatc

SEQ ID NO: 403463 - DNA, 30 bp, Artificial Sequence
  Synthetic oligonucleotide
aaacttcgcccgacgggcatacgtgcgatc

SEQ ID NO: 403464 - DNA, 30 bp, Artificial Sequence
  Synthetic oligonucleotide
atttgagtataatacagtattgcatcgatc

SEQ ID NO: 403465 - DNA, 30 bp, Artificial Sequence
  Synthetic oligonucleotide
gcagtgaactgctggccagagagatcgatc

SEQ ID NO: 403466 - DNA, 30 bp, Artificial Sequence
  Synthetic oligonucleotide
gcgctctctatggataacatgtcgtcgatc

SEQ ID NO: 403467 - DNA, 30 bp, Artificial Sequence
  Synthetic oligonucleotide
gtcagcacgcactttcctggagattcgatc

SEQ ID NO: 403468 - DNA, 30 bp, Artificial Sequence
  Synthetic oligonucleotide
gaataggatgtgcagctgtaaaaaaggatc

SEQ ID NO: 403469 - DNA, 30 bp, Artificial Sequence
  Synthetic oligonucleotide
tacaaacgcttggtcaggatgaccaggatc

SEQ ID NO: 403470 - DNA, 30 bp, Artificial Sequence
  Synthetic oligonucleotide
gccttattctgttttgactaggcgaggatc

SEQ ID NO: 403471 - DNA, 30 bp, Artificial Sequence
  Synthetic oligonucleotide
gtctatatcgggaaatgatgctcgaggatc

SEQ ID NO: 403472 - DNA, 30 bp, Artificial Sequence
  Synthetic oligonucleotide
agctcctaaacaacacaagccaggaggatc

SEQ ID NO: 403473 - DNA, 30 bp, Artificial Sequence
  Synthetic oligonucleotide
gtcgtggccgtttgcatcctgatgaggatc

SEQ ID NO: 403474 - DNA, 30 bp, Artificial Sequence
  Synthetic oligonucleotide
tccccatccatgagacctcgaggtaggatc

SEQ ID NO: 403475 - DNA, 30 bp, Artificial Sequence
  Synthetic oligonucleotide
gttgagtactccgagctattgaaacggatc

SEQ ID NO: 403476 - DNA, 30 bp, Artificial Sequence
  Synthetic oligonucleotide
tccttcactggagggtacgacgcacggatc

SEQ ID NO: 403477 - DNA, 30 bp, Artificial Sequence
  Synthetic oligonucleotide
aatcatatgacgcgtgcggatagccggatc

SEQ ID NO: 403478 - DNA, 30 bp, Artificial Sequence
  Synthetic oligonucleotide
gaatcaacaaccaatcccccgatccggatc

SEQ ID NO: 403479 - DNA, 30 bp, Artificial Sequence
  Synthetic oligonucleotide
tcctggaagaggtcccccatgccgcggatc

SEQ ID NO: 403480 - DNA, 30 bp, Artificial Sequence
  Synthetic oligonucleotide
gtaatgccacgttaactccgaaggcggatc

SEQ ID NO: 403481 - DNA, 30 bp, Artificial Sequence
  Synthetic oligonucleotide
taattcatcatctgtctagcatggcggatc

SEQ ID NO: 403482 - DNA, 30 bp, Artificial Sequence
  Synthetic oligonucleotide
ttacaggtcgtcagaggtacgctgcggatc

SEQ ID NO: 403483 - DNA, 30 bp, Artificial Sequence
  Synthetic oligonucleotide
gatcgataactttatggtcggttgcggatc

SEQ ID NO: 403484 - DNA, 30 bp, Artificial Sequence
  Synthetic oligonucleotide
ataatgggtgcccagcggcggtatcggatc

SEQ ID NO: 403485 - DNA, 30 bp, Artificial Sequence
  Synthetic oligonucleotide
ggttttcttcgactcctgcgtgctcggatc

SEQ ID NO: 403486 - DNA, 30 bp, Artificial Sequence
  Synthetic oligonucleotide
tatctggcattgcgatttgcgaaagggatc

SEQ ID NO: 403487 - DNA, 30 bp, Artificial Sequence
  Synthetic oligonucleotide
ctcgaccgcggccagactgcctaagggatc

SEQ ID NO: 403488 - DNA, 30 bp, Artificial Sequence
  Synthetic oligonucleotide
gaaattaccggtcgacatcgtgcagggatc

SEQ ID NO: 403489 - DNA, 30 bp, Artificial Sequence
  Synthetic oligonucleotide
ggacagcggacacgcaaaaggtcagggatc

SEQ ID NO: 403490 - DNA, 30 bp, Artificial Sequence
  Synthetic oligonucleotide
atgatgacgacaaggtataacctcgggatc

SEQ ID NO: 403491 - DNA, 30 bp, Artificial Sequence
  Synthetic oligonucleotide
ctattttcgaaacaggttgatgcggggatc

SEQ ID NO: 403492 - DNA, 30 bp, Artificial Sequence
  Synthetic oligonucleotide
tgtgattaatacaggacatcgctggggatc

SEQ ID NO: 403493 - DNA, 30 bp, Artificial Sequence
  Synthetic oligonucleotide
ctaccgtagggactcacgggtcgtgggatc

SEQ ID NO: 403494 - DNA, 30 bp, Artificial Sequence
  Synthetic oligonucleotide
caccgtgtatacgagcttaagacatggatc

SEQ ID NO: 403495 - DNA, 30 bp, Artificial Sequence
  Synthetic oligonucleotide
aacatataagattacgtatacaactggatc

SEQ ID NO: 403496 - DNA, 30 bp, Artificial Sequence
  Synthetic oligonucleotide
actcacagacaccgcgagctcacgtggatc

SEQ ID NO: 403497 - DNA, 30 bp, Artificial Sequence
  Synthetic oligonucleotide
acgtgctttagacatcatgtatgcatgatc

SEQ ID NO: 403498 - DNA, 30 bp, Artificial Sequence
  Synthetic oligonucleotide
agcagtcgctgtaatgtatgacagatgatc

SEQ ID NO: 403499 - DNA, 30 bp, Artificial Sequence
  Synthetic oligonucleotide
aaatggtctagagtactaatatcgatgatc

SEQ ID NO: 403500 - DNA, 30 bp, Artificial Sequence
  Synthetic oligonucleotide
ttaaacattatgacgcgtcgaggtatgatc

SEQ ID NO: 403501 - DNA, 30 bp, Artificial Sequence
  Synthetic oligonucleotide
taatgcagttgtcgatttagcagactgatc

SEQ ID NO: 403502 - DNA, 30 bp, Artificial Sequence
  Synthetic oligonucleotide
aagtccgcaccatgactaggcgtcctgatc

SEQ ID NO: 403503 - DNA, 30 bp, Artificial Sequence
  Synthetic oligonucleotide
cagattgccgagcggcaagctccgctgatc

SEQ ID NO: 403504 - DNA, 30 bp, Artificial Sequence
  Synthetic oligonucleotide
gaattgcttcggtgtaatgcaatgctgatc

SEQ ID NO: 403505 - DNA, 29 bp, Artificial Sequence
  Synthetic oligonucleotide
atgtatgcaggcagtaaccaagagtgatc

SEQ ID NO: 403506 - DNA, 30 bp, Artificial Sequence
  Synthetic oligonucleotide
aacatcggacttgatacctctcgagtgatc

SEQ ID NO: 403507 - DNA, 30 bp, Artificial Sequence
  Synthetic oligonucleotide
aaaactcgggaacttcggttaaacgtgatc

SEQ ID NO: 403508 - DNA, 30 bp, Artificial Sequence
  Synthetic oligonucleotide
aaagtgatagcagcaccatagggcgtgatc

SEQ ID NO: 403509 - DNA, 30 bp, Artificial Sequence
  Synthetic oligonucleotide
ttagtgagggtcgttgacgcgccggtgatc

SEQ ID NO: 403510 - DNA, 30 bp, Artificial Sequence
  Synthetic oligonucleotide
agaccatatccgaatgaataaggggtgatc

SEQ ID NO: 403511 - DNA, 30 bp, Artificial Sequence
  Synthetic oligonucleotide
ctggcattatactagcttagaagattgatc

SEQ ID NO: 403512 - DNA, 30 bp, Artificial Sequence
  Synthetic oligonucleotide
tagacaacagtaaaccctgatggattgatc

SEQ ID NO: 403513 - DNA, 30 bp, Artificial Sequence
  Synthetic oligonucleotide
gacagctagttcgatctcggatgattgatc

SEQ ID NO: 403514 - DNA, 30 bp, Artificial Sequence
  Synthetic oligonucleotide
ggatccgtctttgaggtttaagacttgatc

SEQ ID NO: 403515 - DNA, 30 bp, Artificial Sequence
  Synthetic oligonucleotide
gttttaaagaacctggcagagtacttgatc

SEQ ID NO: 403516 - DNA, 30 bp, Artificial Sequence
  Synthetic oligonucleotide
aatctgtagttacttcatttttccttgatc

SEQ ID NO: 403517 - DNA, 30 bp, Artificial Sequence
  Synthetic oligonucleotide
tactaaatatgatatgtataaagcttgatc

SEQ ID NO: 403518 - DNA, 30 bp, Artificial Sequence
  Synthetic oligonucleotide
tgattggcttgacgaataggtctcttgatc

SEQ ID NO: 403519 - DNA, 30 bp, Artificial Sequence
  Synthetic oligonucleotide
aggctgatgggccggggcgatcagttgatc

SEQ ID NO: 403520 - DNA, 30 bp, Artificial Sequence
  Synthetic oligonucleotide
ccgccttctgagagcatgaatcgaaatatc

SEQ ID NO: 403521 - DNA, 30 bp, Artificial Sequence
  Synthetic oligonucleotide
gatgaaaaattcacgtatatcataaatatc

SEQ ID NO: 403522 - DNA, 30 bp, Artificial Sequence
  Synthetic oligonucleotide
taagagtacttttcttcaacttccaatatc

SEQ ID NO: 403523 - DNA, 30 bp, Artificial Sequence
  Synthetic oligonucleotide
ccgtagtgttgatttatatggatcaatatc

SEQ ID NO: 403524 - DNA, 30 bp, Artificial Sequence
  Synthetic oligonucleotide
agggtgataggcgctacgggcgtcaatatc

SEQ ID NO: 403525 - DNA, 30 bp, Artificial Sequence
  Synthetic oligonucleotide
gttcaccgagggtagcccgcgaagaatatc

SEQ ID NO: 403526 - DNA, 30 bp, Artificial Sequence
  Synthetic oligonucleotide
tttcataatttgtagtcagaatcgaatatc

SEQ ID NO: 403527 - DNA, 30 bp, Artificial Sequence
  Synthetic oligonucleotide
tatataattgagtcggattagcctaatatc

SEQ ID NO: 403528 - DNA, 30 bp, Artificial Sequence
  Synthetic oligonucleotide
catcagcactacgcgaaagactctaatatc

SEQ ID NO: 403529 - DNA, 30 bp, Artificial Sequence
  Synthetic oligonucleotide
gtttcaatacgtcaataagccgttaatatc

SEQ ID NO: 403530 - DNA, 30 bp, Artificial Sequence
  Synthetic oligonucleotide
cagtcgctcttccagatgattcaacatatc

SEQ ID NO: 403531 - DNA, 30 bp, Artificial Sequence
  Synthetic oligonucleotide
agctgctatacatagagacatccacatatc

SEQ ID NO: 403532 - DNA, 30 bp, Artificial Sequence
  Synthetic oligonucleotide
cagcttctggatccgtccatgagccatatc

SEQ ID NO: 403533 - DNA, 30 bp, Artificial Sequence
  Synthetic oligonucleotide
tgttttgctaccaatatagcactgcatatc

SEQ ID NO: 403534 - DNA, 30 bp, Artificial Sequence
  Synthetic oligonucleotide
tggagttggtatcgagttacctctcatatc

SEQ ID NO: 403535 - DNA, 30 bp, Artificial Sequence
  Synthetic oligonucleotide
ggtcccttaggtgctaattaaggtcatatc

SEQ ID NO: 403536 - DNA, 30 bp, Artificial Sequence
  Synthetic oligonucleotide
tctctcatggacatcgcgtcgggtcatatc

SEQ ID NO: 403537 - DNA, 30 bp, Artificial Sequence
  Synthetic oligonucleotide
acccggtacggacatagggccggagatatc

SEQ ID NO: 403538 - DNA, 30 bp, Artificial Sequence
  Synthetic oligonucleotide
aatgccagactgcagttacgacgggatatc

SEQ ID NO: 403539 - DNA, 30 bp, Artificial Sequence
  Synthetic oligonucleotide
agcagttatcaacagttgatagtggatatc

SEQ ID NO: 403540 - DNA, 30 bp, Artificial Sequence
  Synthetic oligonucleotide
ttcatgcgttgtaggcaatcttctgatatc

SEQ ID NO: 403541 - DNA, 30 bp, Artificial Sequence
  Synthetic oligonucleotide
atccagccatttgcacattggagatatatc

SEQ ID NO: 403542 - DNA, 30 bp, Artificial Sequence
  Synthetic oligonucleotide
taaaggaattgctctaaggagccctatatc

SEQ ID NO: 403543 - DNA, 30 bp, Artificial Sequence
  Synthetic oligonucleotide
actaaagcggcggcataaggtccctatatc

SEQ ID NO: 403544 - DNA, 30 bp, Artificial Sequence
  Synthetic oligonucleotide
tgagtcaaagtatctcggacggtctatatc

SEQ ID NO: 403545 - DNA, 30 bp, Artificial Sequence
  Synthetic oligonucleotide
acagacagttgttcatcagccaagtatatc

SEQ ID NO: 403546 - DNA, 30 bp, Artificial Sequence
  Synthetic oligonucleotide
gcaccgatagattctacgcaagcgtatatc

SEQ ID NO: 403547 - DNA, 30 bp, Artificial Sequence
  Synthetic oligonucleotide
cttacatcgtataaatatgttgcgtatatc

SEQ ID NO: 403548 - DNA, 30 bp, Artificial Sequence
  Synthetic oligonucleotide
ccctgcccctgcagcctctggatgtatatc

SEQ ID NO: 403549 - DNA, 30 bp, Artificial Sequence
  Synthetic oligonucleotide
ctccagtagacgatagaccccaattatatc

SEQ ID NO: 403550 - DNA, 30 bp, Artificial Sequence
  Synthetic oligonucleotide
gctcgttgagcaatgaaattgtcttatatc

SEQ ID NO: 403551 - DNA, 30 bp, Artificial Sequence
  Synthetic oligonucleotide
acggtcattgaaccccgtacccaaactatc

SEQ ID NO: 403552 - DNA, 30 bp, Artificial Sequence
  Synthetic oligonucleotide
aatccgtcggccaaaacagatttcactatc

SEQ ID NO: 403553 - DNA, 31 bp, Artificial Sequence
  Synthetic oligonucleotide
accgaggtttgtggatcaccgagcgactatc

SEQ ID NO: 403554 - DNA, 30 bp, Artificial Sequence
  Synthetic oligonucleotide
agggtgcactcgcagcgggttattactatc

SEQ ID NO: 403555 - DNA, 30 bp, Artificial Sequence
  Synthetic oligonucleotide
gtcaaaactacgatgccaacagtccctatc

SEQ ID NO: 403556 - DNA, 30 bp, Artificial Sequence
  Synthetic oligonucleotide
acgagcggcacattttttgttactcctatc

SEQ ID NO: 403557 - DNA, 30 bp, Artificial Sequence
  Synthetic oligonucleotide
cacagatcccgactagaaacggcagctatc

SEQ ID NO: 403558 - DNA, 30 bp, Artificial Sequence
  Synthetic oligonucleotide
gaatgcttatctgacctggaaaccgctatc

SEQ ID NO: 403559 - DNA, 30 bp, Artificial Sequence
  Synthetic oligonucleotide
aattacagcacgattggcattgcggctatc

SEQ ID NO: 403560 - DNA, 30 bp, Artificial Sequence
  Synthetic oligonucleotide
cgggagttttgcataaaacatatggctatc

SEQ ID NO: 403561 - DNA, 30 bp, Artificial Sequence
  Synthetic oligonucleotide
cattatacggaaactgatcatactgctatc

SEQ ID NO: 403562 - DNA, 30 bp, Artificial Sequence
  Synthetic oligonucleotide
caatacatactttcgggtcacgtctctatc

SEQ ID NO: 403563 - DNA, 30 bp, Artificial Sequence
  Synthetic oligonucleotide
ctcccttaataacgaactacagagtctatc

SEQ ID NO: 403564 - DNA, 30 bp, Artificial Sequence
  Synthetic oligonucleotide
gtggagctttcgataatgtcgcaaagtatc

SEQ ID NO: 403565 - DNA, 30 bp, Artificial Sequence
  Synthetic oligonucleotide
tacctcggcgctacagcttgcgaaagtatc

SEQ ID NO: 403566 - DNA, 30 bp, Artificial Sequence
  Synthetic oligonucleotide
ctggacgcggaccctcagcgggccagtatc

SEQ ID NO: 403567 - DNA, 30 bp, Artificial Sequence
  Synthetic oligonucleotide
ctcatccccgactaaggccttgatagtatc

SEQ ID NO: 403568 - DNA, 29 bp, Artificial Sequence
  Synthetic oligonucleotide
tccgcggaaaaatgttttttagacgtatc

SEQ ID NO: 403569 - DNA, 30 bp, Artificial Sequence
  Synthetic oligonucleotide
aaggcctccagtgccttcaatggacgtatc

SEQ ID NO: 403570 - DNA, 30 bp, Artificial Sequence
  Synthetic oligonucleotide
gatgttatgggagacctaggacaccgtatc

SEQ ID NO: 403571 - DNA, 30 bp, Artificial Sequence
  Synthetic oligonucleotide
tggatactgtagcgatagccatagcgtatc

SEQ ID NO: 403572 - DNA, 30 bp, Artificial Sequence
  Synthetic oligonucleotide
cgctctcccccgcttgtccgccctcgtatc

SEQ ID NO: 403573 - DNA, 30 bp, Artificial Sequence
  Synthetic oligonucleotide
ggtcatatctgcatgcggatatgtcgtatc

SEQ ID NO: 403574 - DNA, 30 bp, Artificial Sequence
  Synthetic oligonucleotide
ccaggggagctggttatcaatctaggtatc

SEQ ID NO: 403575 - DNA, 30 bp, Artificial Sequence
  Synthetic oligonucleotide
acgtccgcctattgcgcgcttcacggtatc

SEQ ID NO: 403576 - DNA, 30 bp, Artificial Sequence
  Synthetic oligonucleotide
accggaacagtcccggagctcggtggtatc

SEQ ID NO: 403577 - DNA, 30 bp, Artificial Sequence
  Synthetic oligonucleotide
ctatctctgtcccgcgctagcaaatgtatc

SEQ ID NO: 403578 - DNA, 30 bp, Artificial Sequence
  Synthetic oligonucleotide
atgattgagacctcaatgtcataatgtatc

SEQ ID NO: 403579 - DNA, 30 bp, Artificial Sequence
  Synthetic oligonucleotide
taaaaaaatcagcgtctcccttcatgtatc

SEQ ID NO: 403580 - DNA, 30 bp, Artificial Sequence
  Synthetic oligonucleotide
ataggcagacacacgtggacacgatgtatc

SEQ ID NO: 403581 - DNA, 30 bp, Artificial Sequence
  Synthetic oligonucleotide
gaactatactaaattatcactgtatgtatc

SEQ ID NO: 403582 - DNA, 30 bp, Artificial Sequence
  Synthetic oligonucleotide
tagatcttaagatattacggagtctgtatc

SEQ ID NO: 403583 - DNA, 30 bp, Artificial Sequence
  Synthetic oligonucleotide
gaacttgttacataaacggagtagtgtatc

SEQ ID NO: 403584 - DNA, 30 bp, Artificial Sequence
  Synthetic oligonucleotide
aactcagggtgattaacagggccttgtatc

SEQ ID NO: 403585 - DNA, 30 bp, Artificial Sequence
  Synthetic oligonucleotide
ggaactcccgccgcatcgaagcgttgtatc

SEQ ID NO: 403586 - DNA, 30 bp, Artificial Sequence
  Synthetic oligonucleotide
ccgctgtgggtagaaggaagcatttgtatc

SEQ ID NO: 403587 - DNA, 30 bp, Artificial Sequence
  Synthetic oligonucleotide
tggactggaagcagtacctcgctttgtatc

SEQ ID NO: 403588 - DNA, 30 bp, Artificial Sequence
  Synthetic oligonucleotide
cagcagctagttaatcgtaacagaattatc

SEQ ID NO: 403589 - DNA, 30 bp, Artificial Sequence
  Synthetic oligonucleotide
aagtgtgtatcatagaatatcggaattatc

SEQ ID NO: 403590 - DNA, 30 bp, Artificial Sequence
  Synthetic oligonucleotide
agggtcgatttccggcgattactaattatc

SEQ ID NO: 403591 - DNA, 30 bp, Artificial Sequence
  Synthetic oligonucleotide
tccaacagttcatggttagacgtcattatc

SEQ ID NO: 403592 - DNA, 30 bp, Artificial Sequence
  Synthetic oligonucleotide
agagtggaacccctttaacatgtcattatc

SEQ ID NO: 403593 - DNA, 30 bp, Artificial Sequence
  Synthetic oligonucleotide
aggttactcgtagtgaagacatagattatc

SEQ ID NO: 403594 - DNA, 30 bp, Artificial Sequence
  Synthetic oligonucleotide
ctaaggtttgacggactcgcagatattatc

SEQ ID NO: 403595 - DNA, 30 bp, Artificial Sequence
  Synthetic oligonucleotide
tcgctccgcgtgtgtattgtagctattatc

SEQ ID NO: 403596 - DNA, 30 bp, Artificial Sequence
  Synthetic oligonucleotide
ccttaattcaatcgcaggaaggttattatc

SEQ ID NO: 403597 - DNA, 30 bp, Artificial Sequence
  Synthetic oligonucleotide
tgacctcagtttagcaaccataaacttatc

SEQ ID NO: 403598 - DNA, 30 bp, Artificial Sequence
  Synthetic oligonucleotide
actctacggggctcgcaagtgcagcttatc

SEQ ID NO: 403599 - DNA, 30 bp, Artificial Sequence
  Synthetic oligonucleotide
ccgcgtagcctgtatacggccgagcttatc

SEQ ID NO: 403600 - DNA, 30 bp, Artificial Sequence
  Synthetic oligonucleotide
tatcggagtacaatagccttacctcttatc

SEQ ID NO: 403601 - DNA, 30 bp, Artificial Sequence
  Synthetic oligonucleotide
cttccatgtagggaaacacggtaagttatc

SEQ ID NO: 403602 - DNA, 30 bp, Artificial Sequence
  Synthetic oligonucleotide
atccggagtcacgtttatatcgcagttatc

SEQ ID NO: 403603 - DNA, 30 bp, Artificial Sequence
  Synthetic oligonucleotide
gaagtatgggatcatacgtggatagttatc

SEQ ID NO: 403604 - DNA, 30 bp, Artificial Sequence
  Synthetic oligonucleotide
tatagctaggtatcggaattacgcgttatc

SEQ ID NO: 403605 - DNA, 30 bp, Artificial Sequence
  Synthetic oligonucleotide
aagagtcctttacttacaagaaaggttatc

SEQ ID NO: 403606 - DNA, 30 bp, Artificial Sequence
  Synthetic oligonucleotide
atctaggattcccgagaatggtaggttatc

SEQ ID NO: 403607 - DNA, 30 bp, Artificial Sequence
  Synthetic oligonucleotide
gcaccacgagtgagtcatccatgtgttatc

SEQ ID NO: 403608 - DNA, 30 bp, Artificial Sequence
  Synthetic oligonucleotide
gtggactaacgtctagggtccgaatttatc

SEQ ID NO: 403609 - DNA, 30 bp, Artificial Sequence
  Synthetic oligonucleotide
ccacccattcttccggttgtgtaatttatc

SEQ ID NO: 403610 - DNA, 29 bp, Artificial Sequence
  Synthetic oligonucleotide
agaatctcactaccgttttaacatttatc

SEQ ID NO: 403611 - DNA, 30 bp, Artificial Sequence
  Synthetic oligonucleotide
taaagtgttctgtcaaaagacgtatttatc

SEQ ID NO: 403612 - DNA, 30 bp, Artificial Sequence
  Synthetic oligonucleotide
ttttcgagtataacagagggaacctttatc

SEQ ID NO: 403613 - DNA, 30 bp, Artificial Sequence
  Synthetic oligonucleotide
cgaacacgcctggctacgtgtggctttatc

SEQ ID NO: 403614 - DNA, 30 bp, Artificial Sequence
  Synthetic oligonucleotide
tgagaggggagtttcgagagcctgtttatc

SEQ ID NO: 403615 - DNA, 30 bp, Artificial Sequence
  Synthetic oligonucleotide
ggtctagaaacggccagtcccttgtttatc

SEQ ID NO: 403616 - DNA, 30 bp, Artificial Sequence
  Synthetic oligonucleotide
aacaaacgctggttcgccccaaattttatc

SEQ ID NO: 403617 - DNA, 30 bp, Artificial Sequence
  Synthetic oligonucleotide
cggaattcgtctatagagatctattttatc

SEQ ID NO: 403618 - DNA, 30 bp, Artificial Sequence
  Synthetic oligonucleotide
atcggattttatagaattcagtattttatc

SEQ ID NO: 403619 - DNA, 30 bp, Artificial Sequence
  Synthetic oligonucleotide
gtgcattggtgggtagcaatatgttttatc

SEQ ID NO: 403620 - DNA, 30 bp, Artificial Sequence
  Synthetic oligonucleotide
ggactattagcgtgttattattgaaaactc

SEQ ID NO: 403621 - DNA, 30 bp, Artificial Sequence
  Synthetic oligonucleotide
gtagagatcttgaatgataacctaaaactc

SEQ ID NO: 403622 - DNA, 30 bp, Artificial Sequence
  Synthetic oligonucleotide
gagcgaggcgccgagagatacgtaaaactc

SEQ ID NO: 403623 - DNA, 30 bp, Artificial Sequence
  Synthetic oligonucleotide
aggtaacctggtactgatgcagacaaactc

SEQ ID NO: 403624 - DNA, 30 bp, Artificial Sequence
  Synthetic oligonucleotide
gtcataatcgtggaatcgcacagcaaactc

SEQ ID NO: 403625 - DNA, 30 bp, Artificial Sequence
  Synthetic oligonucleotide
ttgtagtgaactggtatccatagcaaactc

SEQ ID NO: 403626 - DNA, 30 bp, Artificial Sequence
  Synthetic oligonucleotide
acgctgcgatctggtcattccttcaaactc

SEQ ID NO: 403627 - DNA, 30 bp, Artificial Sequence
  Synthetic oligonucleotide
cacggtcacctcgcccccccccagaaactc

SEQ ID NO: 403628 - DNA, 30 bp, Artificial Sequence
  Synthetic oligonucleotide
gttccgatgaatttgctgtttccccaactc

SEQ ID NO: 403629 - DNA, 30 bp, Artificial Sequence
  Synthetic oligonucleotide
tatcccctgcgacagcaggacatccaactc

SEQ ID NO: 403630 - DNA, 30 bp, Artificial Sequence
  Synthetic oligonucleotide
gagttcaaattagaagctcggcttcaactc

SEQ ID NO: 403631 - DNA, 30 bp, Artificial Sequence
  Synthetic oligonucleotide
gccccctaacacaccagcctttcagaactc

SEQ ID NO: 403632 - DNA, 30 bp, Artificial Sequence
  Synthetic oligonucleotide
aagtgcgagatgatgattaccttagaactc

SEQ ID NO: 403633 - DNA, 30 bp, Artificial Sequence
  Synthetic oligonucleotide
cggacaactgttctttgttgttacgaactc

SEQ ID NO: 403634 - DNA, 30 bp, Artificial Sequence
  Synthetic oligonucleotide
gtcgaacacacattaagccggttcgaactc

SEQ ID NO: 403635 - DNA, 30 bp, Artificial Sequence
  Synthetic oligonucleotide
cctgacctgctcactcattagcaggaactc

SEQ ID NO: 403636 - DNA, 30 bp, Artificial Sequence
  Synthetic oligonucleotide
tgtacacttgtttactgtcagatggaactc

SEQ ID NO: 403637 - DNA, 30 bp, Artificial Sequence
  Synthetic oligonucleotide
ctgaacattttccagggagcccttgaactc

SEQ ID NO: 403638 - DNA, 30 bp, Artificial Sequence
  Synthetic oligonucleotide
agcactcatactctacactattaataactc

SEQ ID NO: 403639 - DNA, 30 bp, Artificial Sequence
  Synthetic oligonucleotide
ctttctatgtagggttaagaaagataactc

SEQ ID NO: 403640 - DNA, 30 bp, Artificial Sequence
  Synthetic oligonucleotide
gatctgatgaatctgccctgccagtaactc

SEQ ID NO: 403641 - DNA, 30 bp, Artificial Sequence
  Synthetic oligonucleotide
aaaatcgacagcattcaacaaccgtaactc

SEQ ID NO: 403642 - DNA, 30 bp, Artificial Sequence
  Synthetic oligonucleotide
aagcaaaaactaagagagtttaattaactc

SEQ ID NO: 403643 - DNA, 30 bp, Artificial Sequence
  Synthetic oligonucleotide
caagggcacactataggagcctattaactc

SEQ ID NO: 403644 - DNA, 30 bp, Artificial Sequence
  Synthetic oligonucleotide
gccctaagatgagaaacagggccttaactc

SEQ ID NO: 403645 - DNA, 30 bp, Artificial Sequence
  Synthetic oligonucleotide
gctagggagtttttcctcacgctttaactc

SEQ ID NO: 403646 - DNA, 29 bp, Artificial Sequence
  Synthetic oligonucleotide
ggagtggttgtgcaatttcgtccacactc

SEQ ID NO: 403647 - DNA, 30 bp, Artificial Sequence
  Synthetic oligonucleotide
gctcaacaatattattgacttagcacactc

SEQ ID NO: 403648 - DNA, 30 bp, Artificial Sequence
  Synthetic oligonucleotide
acttctttatggagctatcaacgcacactc

SEQ ID NO: 403649 - DNA, 30 bp, Artificial Sequence
  Synthetic oligonucleotide
ctggagcaagggagggtcaacgagacactc

SEQ ID NO: 403650 - DNA, 30 bp, Artificial Sequence
  Synthetic oligonucleotide
tacttgagttccccgtggagtcatacactc

SEQ ID NO: 403651 - DNA, 30 bp, Artificial Sequence
  Synthetic oligonucleotide
ctttcaggctggtaataatacagtacactc

SEQ ID NO: 403652 - DNA, 30 bp, Artificial Sequence
  Synthetic oligonucleotide
tcgtatgagctgtgagctatcagaccactc

SEQ ID NO: 403653 - DNA, 30 bp, Artificial Sequence
  Synthetic oligonucleotide
taattcaatgcagctaggacgataccactc

SEQ ID NO: 403654 - DNA, 30 bp, Artificial Sequence
  Synthetic oligonucleotide
gggagccgcattagactcagggccccactc

SEQ ID NO: 403655 - DNA, 30 bp, Artificial Sequence
  Synthetic oligonucleotide
gatatagctagaaacaatggtcgcccactc

SEQ ID NO: 403656 - DNA, 30 bp, Artificial Sequence
  Synthetic oligonucleotide
agcagcggcgaccgcaaaacttagccactc

SEQ ID NO: 403657 - DNA, 30 bp, Artificial Sequence
  Synthetic oligonucleotide
atagagggcccgcggaggaggaggccactc

SEQ ID NO: 403658 - DNA, 30 bp, Artificial Sequence
  Synthetic oligonucleotide
tgccgcttggttcgaggcgcgaatccactc

SEQ ID NO: 403659 - DNA, 30 bp, Artificial Sequence
  Synthetic oligonucleotide
tgagatagattggtaaataccagtccactc

SEQ ID NO: 403660 - DNA, 30 bp, Artificial Sequence
  Synthetic oligonucleotide
gcacgagcatcatgtgcaactgtagcactc

SEQ ID NO: 403661 - DNA, 30 bp, Artificial Sequence
  Synthetic oligonucleotide
gcacgcaccgtgatacatgttgtagcactc

SEQ ID NO: 403662 - DNA, 30 bp, Artificial Sequence
  Synthetic oligonucleotide
ttagttgggtgtctcacatccaacgcactc

SEQ ID NO: 403663 - DNA, 30 bp, Artificial Sequence
  Synthetic oligonucleotide
gtattcaagatcgctatcgttgaggcactc

SEQ ID NO: 403664 - DNA, 30 bp, Artificial Sequence
  Synthetic oligonucleotide
agcttcttgccgtgggtgtcaggggcactc

SEQ ID NO: 403665 - DNA, 30 bp, Artificial Sequence
  Synthetic oligonucleotide
attaggctcagccaaagtagatttgcactc

SEQ ID NO: 403666 - DNA, 30 bp, Artificial Sequence
  Synthetic oligonucleotide
gatagacgggcgaccgcattcggatcactc

SEQ ID NO: 403667 - DNA, 30 bp, Artificial Sequence
  Synthetic oligonucleotide
tccacttgacgagcaatccggaagtcactc

SEQ ID NO: 403668 - DNA, 30 bp, Artificial Sequence
  Synthetic oligonucleotide
tttgtaaaaaccgcagctctgatgtcactc

SEQ ID NO: 403669 - DNA, 30 bp, Artificial Sequence
  Synthetic oligonucleotide
ttcgatagaggataccggagcgattcactc

SEQ ID NO: 403670 - DNA, 30 bp, Artificial Sequence
  Synthetic oligonucleotide
ttacaccactatataatgaccgggagactc

SEQ ID NO: 403671 - DNA, 30 bp, Artificial Sequence
  Synthetic oligonucleotide
gcaagtcactttacctgtcatgggagactc

SEQ ID NO: 403672 - DNA, 30 bp, Artificial Sequence
  Synthetic oligonucleotide
atatacaatgattaatcgtaacatagactc

SEQ ID NO: 403673 - DNA, 30 bp, Artificial Sequence
  Synthetic oligonucleotide
cctttaatgctcggcagtcttgaccgactc

SEQ ID NO: 403674 - DNA, 30 bp, Artificial Sequence
  Synthetic oligonucleotide
gagaagcactaacgtgccctctagcgactc

SEQ ID NO: 403675 - DNA, 30 bp, Artificial Sequence
  Synthetic oligonucleotide
gacaatttcatggtaaacacaagtcgactc

SEQ ID NO: 403676 - DNA, 30 bp, Artificial Sequence
  Synthetic oligonucleotide
tatccaatgcactaacctcacccaggactc

SEQ ID NO: 403677 - DNA, 30 bp, Artificial Sequence
  Synthetic oligonucleotide
gcgtaatttaacaagacctaacgaggactc

SEQ ID NO: 403678 - DNA, 30 bp, Artificial Sequence
  Synthetic oligonucleotide
cagccagaaggccgtaagtcaggaggactc

SEQ ID NO: 403679 - DNA, 30 bp, Artificial Sequence
  Synthetic oligonucleotide
atacatacattcttttttgtagtaggactc

SEQ ID NO: 403680 - DNA, 30 bp, Artificial Sequence
  Synthetic oligonucleotide
tatatgttatcgtaagcccttgccggactc

SEQ ID NO: 403681 - DNA, 30 bp, Artificial Sequence
  Synthetic oligonucleotide
aagaaaggcaccaggattgctttcggactc

SEQ ID NO: 403682 - DNA, 30 bp, Artificial Sequence
  Synthetic oligonucleotide
aatttgaggtggattgactcccttggactc

SEQ ID NO: 403683 - DNA, 30 bp, Artificial Sequence
  Synthetic oligonucleotide
tctctgtttgctggagatgaataatgactc

SEQ ID NO: 403684 - DNA, 30 bp, Artificial Sequence
  Synthetic oligonucleotide
ggctcttcgtggcccgatgagaagtgactc

SEQ ID NO: 403685 - DNA, 30 bp, Artificial Sequence
  Synthetic oligonucleotide
gcgctagaggtatctaagactgtaatactc

SEQ ID NO: 403686 - DNA, 30 bp, Artificial Sequence
  Synthetic oligonucleotide
ccgcagattatttgggtgacggagatactc

SEQ ID NO: 403687 - DNA, 30 bp, Artificial Sequence
  Synthetic oligonucleotide
tatagacgagcattgatcggaccgatactc

SEQ ID NO: 403688 - DNA, 30 bp, Artificial Sequence
  Synthetic oligonucleotide
ggcctagtttcgaatgctaatatgatactc

SEQ ID NO: 403689 - DNA, 30 bp, Artificial Sequence
  Synthetic oligonucleotide
gccggacgagcagatctgaatgatatactc

SEQ ID NO: 403690 - DNA, 30 bp, Artificial Sequence
  Synthetic oligonucleotide
gggtaattggcaggaagacggtatatactc

SEQ ID NO: 403691 - DNA, 30 bp, Artificial Sequence
  Synthetic oligonucleotide
ggcagattacgtgagcggaagcctatactc

SEQ ID NO: 403692 - DNA, 30 bp, Artificial Sequence
  Synthetic oligonucleotide
tgagctcggtggcgggcataagttatactc

SEQ ID NO: 403693 - DNA, 30 bp, Artificial Sequence
  Synthetic oligonucleotide
tagattttgaaataatcagtagtcctactc

SEQ ID NO: 403694 - DNA, 30 bp, Artificial Sequence
  Synthetic oligonucleotide
ccattcgcctatatgaggaacgatctactc

SEQ ID NO: 403695 - DNA, 30 bp, Artificial Sequence
  Synthetic oligonucleotide
tacacctctgggacaatagatgctctactc

SEQ ID NO: 403696 - DNA, 30 bp, Artificial Sequence
  Synthetic oligonucleotide
ccaggagagtctgcgttatagcgtctactc

SEQ ID NO: 403697 - DNA, 30 bp, Artificial Sequence
  Synthetic oligonucleotide
taagcgccaattgggactgatgcagtactc

SEQ ID NO: 403698 - DNA, 30 bp, Artificial Sequence
  Synthetic oligonucleotide
aaaccttacggggcactagtttgagtactc

SEQ ID NO: 403699 - DNA, 30 bp, Artificial Sequence
  Synthetic oligonucleotide
tacgtggcgcagggaccgtgcaacgtactc

SEQ ID NO: 403700 - DNA, 30 bp, Artificial Sequence
  Synthetic oligonucleotide
cctctcaggggcttacatctgcccgtactc

SEQ ID NO: 403701 - DNA, 30 bp, Artificial Sequence
  Synthetic oligonucleotide
aaaagtccctaccagctcgaagccgtactc

SEQ ID NO: 403702 - DNA, 30 bp, Artificial Sequence
  Synthetic oligonucleotide
aatcctagaaccgtaccgataagcgtactc

SEQ ID NO: 403703 - DNA, 30 bp, Artificial Sequence
  Synthetic oligonucleotide
gttcgtgcagcaagctccataacggtactc

SEQ ID NO: 403704 - DNA, 30 bp, Artificial Sequence
  Synthetic oligonucleotide
accaaaatggatcgcttggttcgggtactc

SEQ ID NO: 403705 - DNA, 30 bp, Artificial Sequence
  Synthetic oligonucleotide
ctcttaaagcgttcatcgctggctgtactc

SEQ ID NO: 403706 - DNA, 30 bp, Artificial Sequence
  Synthetic oligonucleotide
ttggtatatatacaatcatgccaattactc

SEQ ID NO: 403707 - DNA, 30 bp, Artificial Sequence
  Synthetic oligonucleotide
tggctagaataaacgggaaaactattactc

SEQ ID NO: 403708 - DNA, 30 bp, Artificial Sequence
  Synthetic oligonucleotide
gtcagatctacggcgacgtagaacttactc

SEQ ID NO: 403709 - DNA, 30 bp, Artificial Sequence
  Synthetic oligonucleotide
ttgcctaggtcaggagtacatcgcttactc

SEQ ID NO: 403710 - DNA, 30 bp, Artificial Sequence
  Synthetic oligonucleotide
acgccggtgcgaagtggaaagatcttactc

SEQ ID NO: 403711 - DNA, 30 bp, Artificial Sequence
  Synthetic oligonucleotide
ggtaggtgaactctgcacaaagcgttactc

SEQ ID NO: 403712 - DNA, 30 bp, Artificial Sequence
  Synthetic oligonucleotide
tgatcaaattgacataacggatcgttactc

SEQ ID NO: 403713 - DNA, 30 bp, Artificial Sequence
  Synthetic oligonucleotide
ttgtttatccataggcaccatgttttactc

SEQ ID NO: 403714 - DNA, 30 bp, Artificial Sequence
  Synthetic oligonucleotide
aacaaagcatgtaagacgacctcaaacctc

SEQ ID NO: 403715 - DNA, 30 bp, Artificial Sequence
  Synthetic oligonucleotide
cgtctacagggagggtagcgttgacacctc

SEQ ID NO: 403716 - DNA, 30 bp, Artificial Sequence
  Synthetic oligonucleotide
aatacatggtgagaattaaagcaccacctc

SEQ ID NO: 403717 - DNA, 30 bp, Artificial Sequence
  Synthetic oligonucleotide
attttgtgacctcatcgtggtccccacctc

SEQ ID NO: 403718 - DNA, 30 bp, Artificial Sequence
  Synthetic oligonucleotide
gtcagattaccgtgagagctccgccacctc

SEQ ID NO: 403719 - DNA, 30 bp, Artificial Sequence
  Synthetic oligonucleotide
gaaaggctgagttctcggtgtatccacctc

SEQ ID NO: 403720 - DNA, 30 bp, Artificial Sequence
  Synthetic oligonucleotide
ggatatgtgtggcatatcggcgagcacctc

SEQ ID NO: 403721 - DNA, 30 bp, Artificial Sequence
  Synthetic oligonucleotide
ttctcgagtgagctgatgtcttagcacctc

SEQ ID NO: 403722 - DNA, 30 bp, Artificial Sequence
  Synthetic oligonucleotide
cctctagatgaccagtcaacgacgcacctc

SEQ ID NO: 403723 - DNA, 30 bp, Artificial Sequence
  Synthetic oligonucleotide
tagggtgaagtaagttagacctttcacctc

SEQ ID NO: 403724 - DNA, 30 bp, Artificial Sequence
  Synthetic oligonucleotide
ggcctagtggtacgtgcttcctaagacctc

SEQ ID NO: 403725 - DNA, 30 bp, Artificial Sequence
  Synthetic oligonucleotide
tccaataaccgacggatactaagcgacctc

SEQ ID NO: 403726 - DNA, 30 bp, Artificial Sequence
  Synthetic oligonucleotide
gtaattagggaagcgccttgtctggacctc

SEQ ID NO: 403727 - DNA, 30 bp, Artificial Sequence
  Synthetic oligonucleotide
tagtaagacgctggtacgttaaactacctc

SEQ ID NO: 403728 - DNA, 30 bp, Artificial Sequence
  Synthetic oligonucleotide
cgtgggtcagaagcataagttacgtacctc

SEQ ID NO: 403729 - DNA, 30 bp, Artificial Sequence
  Synthetic oligonucleotide
ttacactcgaactgctctggtagaaccctc

SEQ ID NO: 403730 - DNA, 30 bp, Artificial Sequence
  Synthetic oligonucleotide
tatgatccatggagatcaagcggaaccctc

SEQ ID NO: 403731 - DNA, 30 bp, Artificial Sequence
  Synthetic oligonucleotide
aggaagtgtccgtcgttcaaattcaccctc

SEQ ID NO: 403732 - DNA, 30 bp, Artificial Sequence
  Synthetic oligonucleotide
gcctgtcagagtccccatgacacgaccctc

SEQ ID NO: 403733 - DNA, 30 bp, Artificial Sequence
  Synthetic oligonucleotide
tcttgagcgtccaagaaggtctataccctc

SEQ ID NO: 403734 - DNA, 30 bp, Artificial Sequence
  Synthetic oligonucleotide
aattgtcatgtccgccttatgtataccctc

SEQ ID NO: 403735 - DNA, 30 bp, Artificial Sequence
  Synthetic oligonucleotide
tagaacttgactttagaggcacctaccctc

SEQ ID NO: 403736 - DNA, 30 bp, Artificial Sequence
  Synthetic oligonucleotide
cttaatcatggagccttgcgagttaccctc

SEQ ID NO: 403737 - DNA, 30 bp, Artificial Sequence
  Synthetic oligonucleotide
aaaccccagaggaggacatgtagtcccctc

SEQ ID NO: 403738 - DNA, 31 bp, Artificial Sequence
  Synthetic oligonucleotide
gccaaccatcttatatttactccgagccctc

SEQ ID NO: 403739 - DNA, 30 bp, Artificial Sequence
  Synthetic oligonucleotide
gacgcggttttgtaggacgggagcgccctc

SEQ ID NO: 403740 - DNA, 30 bp, Artificial Sequence
  Synthetic oligonucleotide
ttattagttctttgcacgatcgtcgccctc

SEQ ID NO: 403741 - DNA, 30 bp, Artificial Sequence
  Synthetic oligonucleotide
tggaaaggaattcacgtgttccgggccctc

SEQ ID NO: 403742 - DNA, 30 bp, Artificial Sequence
  Synthetic oligonucleotide
cttttttaggtgtctgtggattgggccctc

SEQ ID NO: 403743 - DNA, 30 bp, Artificial Sequence
  Synthetic oligonucleotide
tttgcgctgatgagtttaacggtggccctc

SEQ ID NO: 403744 - DNA, 30 bp, Artificial Sequence
  Synthetic oligonucleotide
gtcggcctgagatggcaagtgattgccctc

SEQ ID NO: 403745 - DNA, 30 bp, Artificial Sequence
  Synthetic oligonucleotide
ggattacagagccccatactccattccctc

SEQ ID NO: 403746 - DNA, 30 bp, Artificial Sequence
  Synthetic oligonucleotide
atggagtttacgactgagacgcacagcctc

SEQ ID NO: 403747 - DNA, 30 bp, Artificial Sequence
  Synthetic oligonucleotide
ataaggaacataccaaattgatgcagcctc

SEQ ID NO: 403748 - DNA, 30 bp, Artificial Sequence
  Synthetic oligonucleotide
gagcgttctcaatgtcactatcagagcctc

SEQ ID NO: 403749 - DNA, 30 bp, Artificial Sequence
  Synthetic oligonucleotide
agtagttcttccgaaacgggtatgagcctc

SEQ ID NO: 403750 - DNA, 30 bp, Artificial Sequence
  Synthetic oligonucleotide
aatctctcaggtgctcgtctgcttagcctc

SEQ ID NO: 403751 - DNA, 30 bp, Artificial Sequence
  Synthetic oligonucleotide
ggaggcctgaacttcttgtccgaacgcctc

SEQ ID NO: 403752 - DNA, 30 bp, Artificial Sequence
  Synthetic oligonucleotide
ttaagaggcacaggctgtaactaacgcctc

SEQ ID NO: 403753 - DNA, 30 bp, Artificial Sequence
  Synthetic oligonucleotide
tttacagagtctaaccttggggtaggcctc

SEQ ID NO: 403754 - DNA, 30 bp, Artificial Sequence
  Synthetic oligonucleotide
tttaaggtaaaccttgtttcatacggcctc

SEQ ID NO: 403755 - DNA, 30 bp, Artificial Sequence
  Synthetic oligonucleotide
gtacactcgactatgcccttgtacggcctc

SEQ ID NO: 403756 - DNA, 30 bp, Artificial Sequence
  Synthetic oligonucleotide
ttccagcgtagtctttatccacagggcctc

SEQ ID NO: 403757 - DNA, 30 bp, Artificial Sequence
  Synthetic oligonucleotide
gggctacgtagcgtgaggagtgggggcctc

SEQ ID NO: 403758 - DNA, 30 bp, Artificial Sequence
  Synthetic oligonucleotide
aatacctcgttcaccgcaggtctgggcctc

SEQ ID NO: 403759 - DNA, 30 bp, Artificial Sequence
  Synthetic oligonucleotide
caacggggcggttgcgtatgaaaatgcctc

SEQ ID NO: 403760 - DNA, 30 bp, Artificial Sequence
  Synthetic oligonucleotide
agactcaaacgttcccacgatagatgcctc

SEQ ID NO: 403761 - DNA, 30 bp, Artificial Sequence
  Synthetic oligonucleotide
tactcaggctacgtaatcacgacctgcctc

SEQ ID NO: 403762 - DNA, 30 bp, Artificial Sequence
  Synthetic oligonucleotide
ggttaggactaagggaggaaacggtgcctc

SEQ ID NO: 403763 - DNA, 30 bp, Artificial Sequence
  Synthetic oligonucleotide
gagagttgacattatcggaacggttgcctc

SEQ ID NO: 403764 - DNA, 30 bp, Artificial Sequence
  Synthetic oligonucleotide
actacatgtgtattcacttgataaatcctc

SEQ ID NO: 403765 - DNA, 30 bp, Artificial Sequence
  Synthetic oligonucleotide
cccccgtcagggttccgctaggtaatcctc

SEQ ID NO: 403766 - DNA, 30 bp, Artificial Sequence
  Synthetic oligonucleotide
aatcgtaagtatgggagttacgtgatcctc

SEQ ID NO: 403767 - DNA, 30 bp, Artificial Sequence
  Synthetic oligonucleotide
tccttacccacccagagacggcatatcctc

SEQ ID NO: 403768 - DNA, 30 bp, Artificial Sequence
  Synthetic oligonucleotide
acgaaatggtactcggtctctcttatcctc

SEQ ID NO: 403769 - DNA, 30 bp, Artificial Sequence
  Synthetic oligonucleotide
gcagtgtatgtcctttcaactaacctcctc

SEQ ID NO: 403770 - DNA, 30 bp, Artificial Sequence
  Synthetic oligonucleotide
ggatcaggttcggcactccacgacctcctc

SEQ ID NO: 403771 - DNA, 30 bp, Artificial Sequence
  Synthetic oligonucleotide
caaagatgcggagtgcttgtaagcctcctc

SEQ ID NO: 403772 - DNA, 30 bp, Artificial Sequence
  Synthetic oligonucleotide
tttaccccaactgctctcaactcgctcctc

SEQ ID NO: 403773 - DNA, 30 bp, Artificial Sequence
  Synthetic oligonucleotide
ttgctaccagaaagtcgctggggagtcctc

SEQ ID NO: 403774 - DNA, 30 bp, Artificial Sequence
  Synthetic oligonucleotide
agttttgggcaataatcatgggaggtcctc

SEQ ID NO: 403775 - DNA, 30 bp, Artificial Sequence
  Synthetic oligonucleotide
acgtaccgcacgtttgggacctcggtcctc

SEQ ID NO: 403776 - DNA, 30 bp, Artificial Sequence
  Synthetic oligonucleotide
ctatggcagtaatgctccacatatgtcctc

SEQ ID NO: 403777 - DNA, 30 bp, Artificial Sequence
  Synthetic oligonucleotide
atatcacccctcacgtggccccccttcctc

SEQ ID NO: 403778 - DNA, 30 bp, Artificial Sequence
  Synthetic oligonucleotide
gaatcgacctgtcccgtgtttcggttcctc

SEQ ID NO: 403779 - DNA, 30 bp, Artificial Sequence
  Synthetic oligonucleotide
tcaagctaagaacccctgcgtctgttcctc

SEQ ID NO: 403780 - DNA, 30 bp, Artificial Sequence
  Synthetic oligonucleotide
gtagtgtgctgggatatttgccgtttcctc

SEQ ID NO: 403781 - DNA, 30 bp, Artificial Sequence
  Synthetic oligonucleotide
atctctatccctgtcataagtattttcctc

SEQ ID NO: 403782 - DNA, 30 bp, Artificial Sequence
  Synthetic oligonucleotide
agtaatagacgctggccgctgccaaagctc

SEQ ID NO: 403783 - DNA, 30 bp, Artificial Sequence
  Synthetic oligonucleotide
gcctcgcgcctcccatagaactgaaagctc

SEQ ID NO: 403784 - DNA, 30 bp, Artificial Sequence
  Synthetic oligonucleotide
agataagaaagcaataagccgcagaagctc

SEQ ID NO: 403785 - DNA, 30 bp, Artificial Sequence
  Synthetic oligonucleotide
cgcccctatgtgtcgccgacctggaagctc

SEQ ID NO: 403786 - DNA, 30 bp, Artificial Sequence
  Synthetic oligonucleotide
catatggtaatcgggatgttgattaagctc

SEQ ID NO: 403787 - DNA, 30 bp, Artificial Sequence
  Synthetic oligonucleotide
gaacccacggttggatcgagtaaacagctc

SEQ ID NO: 403788 - DNA, 31 bp, Artificial Sequence
  Synthetic oligonucleotide
cagagctaagctgctagataagtcacagctc

SEQ ID NO: 403789 - DNA, 31 bp, Artificial Sequence
  Synthetic oligonucleotide
tcacgacgcagttgactcgactcgacagctc

SEQ ID NO: 403790 - DNA, 30 bp, Artificial Sequence
  Synthetic oligonucleotide
tgtgccccggaaacttgactcgtccagctc

SEQ ID NO: 403791 - DNA, 30 bp, Artificial Sequence
  Synthetic oligonucleotide
tgctatagtccataaattgcattagagctc

SEQ ID NO: 403792 - DNA, 30 bp, Artificial Sequence
  Synthetic oligonucleotide
cattataccccaaccccgataggggagctc

SEQ ID NO: 403793 - DNA, 30 bp, Artificial Sequence
  Synthetic oligonucleotide
gcaaagacatgttgttcactctatgagctc

SEQ ID NO: 403794 - DNA, 30 bp, Artificial Sequence
  Synthetic oligonucleotide
agtaggcggtaaatgcaatcttaatagctc

SEQ ID NO: 403795 - DNA, 30 bp, Artificial Sequence
  Synthetic oligonucleotide
cgggttcaggggtttatactttcatagctc

SEQ ID NO: 403796 - DNA, 30 bp, Artificial Sequence
  Synthetic oligonucleotide
gcgtagagtttggatctcttatcctagctc

SEQ ID NO: 403797 - DNA, 30 bp, Artificial Sequence
  Synthetic oligonucleotide
aataagatggtggtatttccattgtagctc

SEQ ID NO: 403798 - DNA, 30 bp, Artificial Sequence
  Synthetic oligonucleotide
cataactctggattttactatccttagctc

SEQ ID NO: 403799 - DNA, 30 bp, Artificial Sequence
  Synthetic oligonucleotide
ggcttcctggaacccggtaatctaacgctc

SEQ ID NO: 403800 - DNA, 30 bp, Artificial Sequence
  Synthetic oligonucleotide
agtcgcgcaggttaggcagaaccgacgctc

SEQ ID NO: 403801 - DNA, 30 bp, Artificial Sequence
  Synthetic oligonucleotide
aactaactttatagaggtctcaatacgctc

SEQ ID NO: 403802 - DNA, 30 bp, Artificial Sequence
  Synthetic oligonucleotide
agagctgtgttcgagccacctattacgctc

SEQ ID NO: 403803 - DNA, 30 bp, Artificial Sequence
  Synthetic oligonucleotide
gagtgtaatgggaccgtccaacttacgctc

SEQ ID NO: 403804 - DNA, 30 bp, Artificial Sequence
  Synthetic oligonucleotide
aaagcaccgcggtatacctgcgttacgctc

SEQ ID NO: 403805 - DNA, 30 bp, Artificial Sequence
  Synthetic oligonucleotide
gacttcatgcggagttattataaaccgctc

SEQ ID NO: 403806 - DNA, 30 bp, Artificial Sequence
  Synthetic oligonucleotide
tcagtgctagagtattaggaccacgcgctc

SEQ ID NO: 403807 - DNA, 30 bp, Artificial Sequence
  Synthetic oligonucleotide
gtctccaatggctcctggtcctgcgcgctc

SEQ ID NO: 403808 - DNA, 30 bp, Artificial Sequence
  Synthetic oligonucleotide
gtaagtgcgaataccctactatcggcgctc

SEQ ID NO: 403809 - DNA, 30 bp, Artificial Sequence
  Synthetic oligonucleotide
gagaagcgagagatgtatctggctgcgctc

SEQ ID NO: 403810 - DNA, 30 bp, Artificial Sequence
  Synthetic oligonucleotide
cataggtttaaggagcgtgctttatcgctc

SEQ ID NO: 403811 - DNA, 30 bp, Artificial Sequence
  Synthetic oligonucleotide
ggacgttgagctgaaaatgaaatctcgctc

SEQ ID NO: 403812 - DNA, 30 bp, Artificial Sequence
  Synthetic oligonucleotide
cgccgtataattcagccagacatgtcgctc

SEQ ID NO: 403813 - DNA, 30 bp, Artificial Sequence
  Synthetic oligonucleotide
acaaagaacgtttttgctgcacaaaggctc

SEQ ID NO: 403814 - DNA, 30 bp, Artificial Sequence
  Synthetic oligonucleotide
cttaagagagcctattatagactaaggctc

SEQ ID NO: 403815 - DNA, 30 bp, Artificial Sequence
  Synthetic oligonucleotide
taggcgttgaatccctgtcacgctaggctc

SEQ ID NO: 403816 - DNA, 30 bp, Artificial Sequence
  Synthetic oligonucleotide
gcagtgtttagcgtctccgcaatacggctc

SEQ ID NO: 403817 - DNA, 30 bp, Artificial Sequence
  Synthetic oligonucleotide
tgaggccctccctggcagggttaccggctc

SEQ ID NO: 403818 - DNA, 30 bp, Artificial Sequence
  Synthetic oligonucleotide
cgataaattgcacccttaatggggcggctc

SEQ ID NO: 403819 - DNA, 30 bp, Artificial Sequence
  Synthetic oligonucleotide
ccaagcgtgattccacaggaatatcggctc

SEQ ID NO: 403820 - DNA, 30 bp, Artificial Sequence
  Synthetic oligonucleotide
tggtaaggacagaataattggtctcggctc

SEQ ID NO: 403821 - DNA, 30 bp, Artificial Sequence
  Synthetic oligonucleotide
cggtaggcgaacggggtttcctttcggctc

SEQ ID NO: 403822 - DNA, 30 bp, Artificial Sequence
  Synthetic oligonucleotide
taagtggtcttgtagcgttagggagggctc

SEQ ID NO: 403823 - DNA, 30 bp, Artificial Sequence
  Synthetic oligonucleotide
ccaaaggcaatctcgcaaaaagtcgggctc

SEQ ID NO: 403824 - DNA, 30 bp, Artificial Sequence
  Synthetic oligonucleotide
taacttgcttacggggggcgggaggggctc

SEQ ID NO: 403825 - DNA, 30 bp, Artificial Sequence
  Synthetic oligonucleotide
gtgaaggtgaatatagagctccgtgggctc

SEQ ID NO: 403826 - DNA, 30 bp, Artificial Sequence
  Synthetic oligonucleotide
gcaagatcctgtcagtctgatacatggctc

SEQ ID NO: 403827 - DNA, 30 bp, Artificial Sequence
  Synthetic oligonucleotide
cactttcaaacgcggacgcggagctggctc

SEQ ID NO: 403828 - DNA, 30 bp, Artificial Sequence
  Synthetic oligonucleotide
aactttacctgcaacaatgttcggtggctc

SEQ ID NO: 403829 - DNA, 30 bp, Artificial Sequence
  Synthetic oligonucleotide
gtatggtaatttggtttacttgattggctc

SEQ ID NO: 403830 - DNA, 30 bp, Artificial Sequence
  Synthetic oligonucleotide
agcaggtgagcttgtaatttaacaatgctc

SEQ ID NO: 403831 - DNA, 30 bp, Artificial Sequence
  Synthetic oligonucleotide
ccccccatttcctcctcgaaggacatgctc

SEQ ID NO: 403832 - DNA, 30 bp, Artificial Sequence
  Synthetic oligonucleotide
gagtggatctgaatctgtatagggatgctc

SEQ ID NO: 403833 - DNA, 30 bp, Artificial Sequence
  Synthetic oligonucleotide
gtttaggtattagagtgcccctttatgctc

SEQ ID NO: 403834 - DNA, 30 bp, Artificial Sequence
  Synthetic oligonucleotide
gcgtgggtttgccgagctccactactgctc

SEQ ID NO: 403835 - DNA, 30 bp, Artificial Sequence
  Synthetic oligonucleotide
gtatgcacgcgatcttgagcctgcctgctc

SEQ ID NO: 403836 - DNA, 30 bp, Artificial Sequence
  Synthetic oligonucleotide
aggccctctaggtgtggcagcacgctgctc

SEQ ID NO: 403837 - DNA, 30 bp, Artificial Sequence
  Synthetic oligonucleotide
taatgaaaattgggatacgtgcgtctgctc

SEQ ID NO: 403838 - DNA, 30 bp, Artificial Sequence
  Synthetic oligonucleotide
ctgtatttattacctctggagacagtgctc

SEQ ID NO: 403839 - DNA, 30 bp, Artificial Sequence
  Synthetic oligonucleotide
ggatacatccccagctactgcgcagtgctc

SEQ ID NO: 403840 - DNA, 30 bp, Artificial Sequence
  Synthetic oligonucleotide
ggagtaatccccggctgtaggggcgtgctc

SEQ ID NO: 403841 - DNA, 30 bp, Artificial Sequence
  Synthetic oligonucleotide
ccccacttaattctggccctagaggtgctc

SEQ ID NO: 403842 - DNA, 30 bp, Artificial Sequence
  Synthetic oligonucleotide
gccgtcaagaagaatgacatgacggtgctc

SEQ ID NO: 403843 - DNA, 30 bp, Artificial Sequence
  Synthetic oligonucleotide
agagggtgacatgagcatattgaattgctc

SEQ ID NO: 403844 - DNA, 30 bp, Artificial Sequence
  Synthetic oligonucleotide
caataggacaccaggcgtctactattgctc

SEQ ID NO: 403845 - DNA, 30 bp, Artificial Sequence
  Synthetic oligonucleotide
tgtaaatgtacgtcaaaaacgtgcttgctc

SEQ ID NO: 403846 - DNA, 30 bp, Artificial Sequence
  Synthetic oligonucleotide
tgtaagtaccttcttgttgcgaagttgctc

SEQ ID NO: 403847 - DNA, 30 bp, Artificial Sequence
  Synthetic oligonucleotide
gtggtgcgtgtgcgccaggatcagttgctc

SEQ ID NO: 403848 - DNA, 30 bp, Artificial Sequence
  Synthetic oligonucleotide
ctaagcttttggggcaataccatgttgctc

SEQ ID NO: 403849 - DNA, 30 bp, Artificial Sequence
  Synthetic oligonucleotide
tactacataggcccattacttgtgttgctc

SEQ ID NO: 403850 - DNA, 30 bp, Artificial Sequence
  Synthetic oligonucleotide
ccttcaccagccacataagcccaaaatctc

SEQ ID NO: 403851 - DNA, 30 bp, Artificial Sequence
  Synthetic oligonucleotide
tactgcgtttatatgcggagccgaaatctc

SEQ ID NO: 403852 - DNA, 30 bp, Artificial Sequence
  Synthetic oligonucleotide
ttcagcctgccccaaccgaatcgaaatctc

SEQ ID NO: 403853 - DNA, 30 bp, Artificial Sequence
  Synthetic oligonucleotide
gagtactgtcacggctggtccggaaatctc

SEQ ID NO: 403854 - DNA, 30 bp, Artificial Sequence
  Synthetic oligonucleotide
aacggatattgcctgtagagaaacaatctc

SEQ ID NO: 403855 - DNA, 30 bp, Artificial Sequence
  Synthetic oligonucleotide
ccgtctttagcctgtaggcaatccaatctc

SEQ ID NO: 403856 - DNA, 30 bp, Artificial Sequence
  Synthetic oligonucleotide
ttcattctgggtactgccacgtccaatctc

SEQ ID NO: 403857 - DNA, 30 bp, Artificial Sequence
  Synthetic oligonucleotide
gctaccctgcagccatgtaaaaataatctc

SEQ ID NO: 403858 - DNA, 30 bp, Artificial Sequence
  Synthetic oligonucleotide
tgcttggcgcccaattccggacctaatctc

SEQ ID NO: 403859 - DNA, 30 bp, Artificial Sequence
  Synthetic oligonucleotide
tacggagggtatgcacggagtccccatctc

SEQ ID NO: 403860 - DNA, 30 bp, Artificial Sequence
  Synthetic oligonucleotide
tagcgcgatttcgtagctttataagatctc

SEQ ID NO: 403861 - DNA, 30 bp, Artificial Sequence
  Synthetic oligonucleotide
atgacgaccgacaagaattcgtcggatctc

SEQ ID NO: 403862 - DNA, 30 bp, Artificial Sequence
  Synthetic oligonucleotide
catattcggtagctcatccaaatggatctc

SEQ ID NO: 403863 - DNA, 30 bp, Artificial Sequence
  Synthetic oligonucleotide
cgggacctgtaatgggcaggggtggatctc

SEQ ID NO: 403864 - DNA, 30 bp, Artificial Sequence
  Synthetic oligonucleotide
aatcaacttacagagggctcctaatatctc

SEQ ID NO: 403865 - DNA, 30 bp, Artificial Sequence
  Synthetic oligonucleotide
gcaggatacaaatacgacttttaatatctc

SEQ ID NO: 403866 - DNA, 30 bp, Artificial Sequence
  Synthetic oligonucleotide
cgcgacttctaacggaggcggtcatatctc

SEQ ID NO: 403867 - DNA, 30 bp, Artificial Sequence
  Synthetic oligonucleotide
tgcctgcaactcctgagaggtttatatctc

SEQ ID NO: 403868 - DNA, 30 bp, Artificial Sequence
  Synthetic oligonucleotide
tactatcacctgacaagatggtcgtatctc

SEQ ID NO: 403869 - DNA, 30 bp, Artificial Sequence
  Synthetic oligonucleotide
tattagctgctccataaaacacattatctc

SEQ ID NO: 403870 - DNA, 29 bp, Artificial Sequence
  Synthetic oligonucleotide
gttctaatggatatccgattagttatctc

SEQ ID NO: 403871 - DNA, 30 bp, Artificial Sequence
  Synthetic oligonucleotide
ggcgaacgcaagcgtcgccgtcggactctc

SEQ ID NO: 403872 - DNA, 30 bp, Artificial Sequence
  Synthetic oligonucleotide
cggagtaggagtgtcagctcggtgactctc

SEQ ID NO: 403873 - DNA, 30 bp, Artificial Sequence
  Synthetic oligonucleotide
aaagccatctgcatgttaaatattactctc

SEQ ID NO: 403874 - DNA, 30 bp, Artificial Sequence
  Synthetic oligonucleotide
ttgagggataattgcatactataccctctc

SEQ ID NO: 403875 - DNA, 30 bp, Artificial Sequence
  Synthetic oligonucleotide
attataaaatacttctgctccaaagctctc

SEQ ID NO: 403876 - DNA, 30 bp, Artificial Sequence
  Synthetic oligonucleotide
agtacttcgtagtattcgcataccgctctc

SEQ ID NO: 403877 - DNA, 30 bp, Artificial Sequence
  Synthetic oligonucleotide
gggattcagcgccagcgagtccgggctctc

SEQ ID NO: 403878 - DNA, 30 bp, Artificial Sequence
  Synthetic oligonucleotide
gcgaacatgccttcatgcgccgtggctctc

SEQ ID NO: 403879 - DNA, 30 bp, Artificial Sequence
  Synthetic oligonucleotide
cggtgaacttacaactacgtataatctctc

SEQ ID NO: 403880 - DNA, 30 bp, Artificial Sequence
  Synthetic oligonucleotide
aggccaatgccttcagcaaaaacctctctc

SEQ ID NO: 403881 - DNA, 31 bp, Artificial Sequence
  Synthetic oligonucleotide
cagtatcctaggcgtcagggcgttctctctc

SEQ ID NO: 403882 - DNA, 30 bp, Artificial Sequence
  Synthetic oligonucleotide
aaagcttgttgccatggcatggagtctctc

SEQ ID NO: 403883 - DNA, 30 bp, Artificial Sequence
  Synthetic oligonucleotide
tttatctgcatacttcgttgtcattctctc

SEQ ID NO: 403884 - DNA, 29 bp, Artificial Sequence
  Synthetic oligonucleotide
catatccgcgcctccaatcctgaagtctc

SEQ ID NO: 403885 - DNA, 30 bp, Artificial Sequence
  Synthetic oligonucleotide
aatacctagatgaagttcggcgccagtctc

SEQ ID NO: 403886 - DNA, 30 bp, Artificial Sequence
  Synthetic oligonucleotide
agtaggcacaccctcagtggcgcgagtctc

SEQ ID NO: 403887 - DNA, 30 bp, Artificial Sequence
  Synthetic oligonucleotide
atcaaggattccttcttttttaatagtctc

SEQ ID NO: 403888 - DNA, 29 bp, Artificial Sequence
  Synthetic oligonucleotide
aaccattcgtcttggtgtgcactagtctc

SEQ ID NO: 403889 - DNA, 30 bp, Artificial Sequence
  Synthetic oligonucleotide
aatttattctcgtgggcccgatgtagtctc

SEQ ID NO: 403890 - DNA, 30 bp, Artificial Sequence
  Synthetic oligonucleotide
ctgtgctgcattgaaacattggcacgtctc

SEQ ID NO: 403891 - DNA, 30 bp, Artificial Sequence
  Synthetic oligonucleotide
tgtagagttagtcttagcgttcgccgtctc

SEQ ID NO: 403892 - DNA, 30 bp, Artificial Sequence
  Synthetic oligonucleotide
agaagttggtggaataacttcaaaggtctc

SEQ ID NO: 403893 - DNA, 30 bp, Artificial Sequence
  Synthetic oligonucleotide
gttgcgttagaatgaagcacctagggtctc

SEQ ID NO: 403894 - DNA, 30 bp, Artificial Sequence
  Synthetic oligonucleotide
aagctcgttagttgcagtgacaggggtctc

SEQ ID NO: 403895 - DNA, 30 bp, Artificial Sequence
  Synthetic oligonucleotide
tgtgcccgccctgttggactcgtgggtctc

SEQ ID NO: 403896 - DNA, 30 bp, Artificial Sequence
  Synthetic oligonucleotide
ccgactcgagtttctgtgaacgctggtctc

SEQ ID NO: 403897 - DNA, 30 bp, Artificial Sequence
  Synthetic oligonucleotide
tcagagtcaaataggtcctacaaatgtctc

SEQ ID NO: 403898 - DNA, 30 bp, Artificial Sequence
  Synthetic oligonucleotide
gaatatatacgttaagagtacaaatgtctc

SEQ ID NO: 403899 - DNA, 30 bp, Artificial Sequence
  Synthetic oligonucleotide
gacagcgttatatctaatttagaatgtctc

SEQ ID NO: 403900 - DNA, 30 bp, Artificial Sequence
  Synthetic oligonucleotide
tgcatgttagcgagttccggtgtatgtctc

SEQ ID NO: 403901 - DNA, 31 bp, Artificial Sequence
  Synthetic oligonucleotide
gtgtcgctagcggggtaatatttcctgtctc

SEQ ID NO: 403902 - DNA, 30 bp, Artificial Sequence
  Synthetic oligonucleotide
cgcggcggaatccggctgtcaggctgtctc

SEQ ID NO: 403903 - DNA, 30 bp, Artificial Sequence
  Synthetic oligonucleotide
ggcccgggctatttgttaacctcgtgtctc

SEQ ID NO: 403904 - DNA, 30 bp, Artificial Sequence
  Synthetic oligonucleotide
gaatggacatttcaattcgtaggaattctc

SEQ ID NO: 403905 - DNA, 30 bp, Artificial Sequence
  Synthetic oligonucleotide
ggaggttggtatcgttagaccgccattctc

SEQ ID NO: 403906 - DNA, 30 bp, Artificial Sequence
  Synthetic oligonucleotide
ctgtagggatgggcttaacaggcacttctc

SEQ ID NO: 403907 - DNA, 30 bp, Artificial Sequence
  Synthetic oligonucleotide
agtatggatacctattgatgaaaccttctc

SEQ ID NO: 403908 - DNA, 30 bp, Artificial Sequence
  Synthetic oligonucleotide
gcgctgattgtccgccctgtcgaccttctc

SEQ ID NO: 403909 - DNA, 30 bp, Artificial Sequence
  Synthetic oligonucleotide
gcagctcgccgggaatctatttaccttctc

SEQ ID NO: 403910 - DNA, 30 bp, Artificial Sequence
  Synthetic oligonucleotide
tcaggtaaggacgtaactcttaagcttctc

SEQ ID NO: 403911 - DNA, 30 bp, Artificial Sequence
  Synthetic oligonucleotide
acagacgtctttagatagaggtctcttctc

SEQ ID NO: 403912 - DNA, 30 bp, Artificial Sequence
  Synthetic oligonucleotide
aatgggatacaaaccccgggtagtcttctc

SEQ ID NO: 403913 - DNA, 30 bp, Artificial Sequence
  Synthetic oligonucleotide
tccaaacttttcctacatccggttcttctc

SEQ ID NO: 403914 - DNA, 30 bp, Artificial Sequence
  Synthetic oligonucleotide
aaaagctgaagaaaggaacgcttagttctc

SEQ ID NO: 403915 - DNA, 30 bp, Artificial Sequence
  Synthetic oligonucleotide
tttttatttcgttaagtctcccacgttctc

SEQ ID NO: 403916 - DNA, 30 bp, Artificial Sequence
  Synthetic oligonucleotide
aaaagcttcgtgctcaattcaacctttctc

SEQ ID NO: 403917 - DNA, 30 bp, Artificial Sequence
  Synthetic oligonucleotide
tcgcacttcatccaccgtaccggctttctc

SEQ ID NO: 403918 - DNA, 30 bp, Artificial Sequence
  Synthetic oligonucleotide
tgctattttcttgtaattcctgtctttctc

SEQ ID NO: 403919 - DNA, 30 bp, Artificial Sequence
  Synthetic oligonucleotide
tgcgtggaacccggtgagtatccgtttctc

SEQ ID NO: 403920 - DNA, 30 bp, Artificial Sequence
  Synthetic oligonucleotide
acattgctagccgttaaattaaggtttctc

SEQ ID NO: 403921 - DNA, 30 bp, Artificial Sequence
  Synthetic oligonucleotide
tcaaccttgatcggaagctacaggtttctc

SEQ ID NO: 403922 - DNA, 30 bp, Artificial Sequence
  Synthetic oligonucleotide
acggcaatttgatggattacagggtttctc

SEQ ID NO: 403923 - DNA, 30 bp, Artificial Sequence
  Synthetic oligonucleotide
cggtccctctacgtgccatgggtgtttctc

SEQ ID NO: 403924 - DNA, 30 bp, Artificial Sequence
  Synthetic oligonucleotide
catgtgtgtactctgacgagggcttttctc

SEQ ID NO: 403925 - DNA, 30 bp, Artificial Sequence
  Synthetic oligonucleotide
aagataagctaagggtatctaagttttctc

SEQ ID NO: 403926 - DNA, 30 bp, Artificial Sequence
  Synthetic oligonucleotide
taggggctagcggctttccggtaaaaagtc

SEQ ID NO: 403927 - DNA, 30 bp, Artificial Sequence
  Synthetic oligonucleotide
gatttgatcgtgaggaaacgaagaaaagtc

SEQ ID NO: 403928 - DNA, 30 bp, Artificial Sequence
  Synthetic oligonucleotide
gatgacgtcaagctgattcatatcaaagtc

SEQ ID NO: 403929 - DNA, 30 bp, Artificial Sequence
  Synthetic oligonucleotide
tgttattggtaccctgcctctatgaaagtc

SEQ ID NO: 403930 - DNA, 30 bp, Artificial Sequence
  Synthetic oligonucleotide
cagataagcttcataccttgcttgaaagtc

SEQ ID NO: 403931 - DNA, 30 bp, Artificial Sequence
  Synthetic oligonucleotide
taccatgggttagcctcggaacgtaaagtc

SEQ ID NO: 403932 - DNA, 30 bp, Artificial Sequence
  Synthetic oligonucleotide
tgacactgccgagatggggacgttaaagtc

SEQ ID NO: 403933 - DNA, 30 bp, Artificial Sequence
  Synthetic oligonucleotide
catggaatgtcaaaacgtaaccaccaagtc

SEQ ID NO: 403934 - DNA, 30 bp, Artificial Sequence
  Synthetic oligonucleotide
tgctccccgacttagataacacagcaagtc

SEQ ID NO: 403935 - DNA, 30 bp, Artificial Sequence
  Synthetic oligonucleotide
gaggtcttatatattcgtggccatcaagtc

SEQ ID NO: 403936 - DNA, 30 bp, Artificial Sequence
  Synthetic oligonucleotide
ataagtaccgcacagagctgcgatcaagtc

SEQ ID NO: 403937 - DNA, 30 bp, Artificial Sequence
  Synthetic oligonucleotide
ttatacctaactctggtaggatatcaagtc

SEQ ID NO: 403938 - DNA, 30 bp, Artificial Sequence
  Synthetic oligonucleotide
tttctcgccgattgcgcccctggtcaagtc

SEQ ID NO: 403939 - DNA, 30 bp, Artificial Sequence
  Synthetic oligonucleotide
accgtagtttgttgggtggcagccgaagtc

SEQ ID NO: 403940 - DNA, 30 bp, Artificial Sequence
  Synthetic oligonucleotide
gcacgccacttagagaaatgactcgaagtc

SEQ ID NO: 403941 - DNA, 30 bp, Artificial Sequence
  Synthetic oligonucleotide
aagccgtgtttgatggtgcatcaggaagtc

SEQ ID NO: 403942 - DNA, 30 bp, Artificial Sequence
  Synthetic oligonucleotide
ggctgtactggttctgcagacatggaagtc

SEQ ID NO: 403943 - DNA, 30 bp, Artificial Sequence
  Synthetic oligonucleotide
tttgtcttttgcgacagataggaataagtc

SEQ ID NO: 403944 - DNA, 30 bp, Artificial Sequence
  Synthetic oligonucleotide
gtagctttaatggactgagttccataagtc

SEQ ID NO: 403945 - DNA, 30 bp, Artificial Sequence
  Synthetic oligonucleotide
catcattctacgggcaagccccactaagtc

SEQ ID NO: 403946 - DNA, 30 bp, Artificial Sequence
  Synthetic oligonucleotide
cgtttgctgtttaggcgctctatgtaagtc

SEQ ID NO: 403947 - DNA, 31 bp, Artificial Sequence
  Synthetic oligonucleotide
accagcccgggctgacagcatgacttaagtc

SEQ ID NO: 403948 - DNA, 30 bp, Artificial Sequence
  Synthetic oligonucleotide
gaaactatccgaatcttgatcagttaagtc

SEQ ID NO: 403949 - DNA, 30 bp, Artificial Sequence
  Synthetic oligonucleotide
tctatggtcccgagtgtactctgttaagtc

SEQ ID NO: 403950 - DNA, 30 bp, Artificial Sequence
  Synthetic oligonucleotide
acgaggcaacatgggatcaactgcacagtc

SEQ ID NO: 403951 - DNA, 30 bp, Artificial Sequence
  Synthetic oligonucleotide
ggggtatcccgagctatatcggtgacagtc

SEQ ID NO: 403952 - DNA, 30 bp, Artificial Sequence
  Synthetic oligonucleotide
gatcaaatgtcttgttttaatattacagtc

SEQ ID NO: 403953 - DNA, 30 bp, Artificial Sequence
  Synthetic oligonucleotide
gagctacttttagtctaaggacttacagtc

SEQ ID NO: 403954 - DNA, 30 bp, Artificial Sequence
  Synthetic oligonucleotide
gaaatcaatagtggtacgtcgcgaccagtc

SEQ ID NO: 403955 - DNA, 30 bp, Artificial Sequence
  Synthetic oligonucleotide
gttcgtacctttgcaatgtcgggaccagtc

SEQ ID NO: 403956 - DNA, 30 bp, Artificial Sequence
  Synthetic oligonucleotide
gtacaaagggagcgcagttggtccccagtc

SEQ ID NO: 403957 - DNA, 30 bp, Artificial Sequence
  Synthetic oligonucleotide
acactattgtcaactgcgcgaagcccagtc

SEQ ID NO: 403958 - DNA, 30 bp, Artificial Sequence
  Synthetic oligonucleotide
agaatagttagattcggctctttcccagtc

SEQ ID NO: 403959 - DNA, 30 bp, Artificial Sequence
  Synthetic oligonucleotide
cttctgtaacgggtagaacttggtccagtc

SEQ ID NO: 403960 - DNA, 30 bp, Artificial Sequence
  Synthetic oligonucleotide
atgcagtataagaaggcatactgtccagtc

SEQ ID NO: 403961 - DNA, 30 bp, Artificial Sequence
  Synthetic oligonucleotide
aagggattggaaactgcgacggttccagtc

SEQ ID NO: 403962 - DNA, 30 bp, Artificial Sequence
  Synthetic oligonucleotide
gtgcgtttaaggtagcctagcatcgcagtc

SEQ ID NO: 403963 - DNA, 30 bp, Artificial Sequence
  Synthetic oligonucleotide
cgggtattagcgggcatgagggaatcagtc

SEQ ID NO: 403964 - DNA, 30 bp, Artificial Sequence
  Synthetic oligonucleotide
ggccatatatatcctgttgctacatcagtc

SEQ ID NO: 403965 - DNA, 30 bp, Artificial Sequence
  Synthetic oligonucleotide
ttcttaattttctgttaaccaaactcagtc

SEQ ID NO: 403966 - DNA, 30 bp, Artificial Sequence
  Synthetic oligonucleotide
gtctagtatgattaaggcccaaattcagtc

SEQ ID NO: 403967 - DNA, 30 bp, Artificial Sequence
  Synthetic oligonucleotide
gataatgtaacgtacgataataattcagtc

SEQ ID NO: 403968 - DNA, 30 bp, Artificial Sequence
  Synthetic oligonucleotide
tagtactagccttggcgctttgaaagagtc

SEQ ID NO: 403969 - DNA, 30 bp, Artificial Sequence
  Synthetic oligonucleotide
agaaagccaatttagttccgctaaagagtc

SEQ ID NO: 403970 - DNA, 30 bp, Artificial Sequence
  Synthetic oligonucleotide
gatgcatgtctttgggcagtgacaagagtc

SEQ ID NO: 403971 - DNA, 30 bp, Artificial Sequence
  Synthetic oligonucleotide
ctagttagtgattgctgtctaagcagagtc

SEQ ID NO: 403972 - DNA, 29 bp, Artificial Sequence
  Synthetic oligonucleotide
gagggaggagatctttgcgattcagagtc

SEQ ID NO: 403973 - DNA, 30 bp, Artificial Sequence
  Synthetic oligonucleotide
cctctcgcctaacgctggattcatagagtc

SEQ ID NO: 403974 - DNA, 30 bp, Artificial Sequence
  Synthetic oligonucleotide
gacaaccggggccgacccagcatacgagtc

SEQ ID NO: 403975 - DNA, 30 bp, Artificial Sequence
  Synthetic oligonucleotide
tctaggtaggttcccttggggatacgagtc

SEQ ID NO: 403976 - DNA, 30 bp, Artificial Sequence
  Synthetic oligonucleotide
aagtttgggcatagtagcctggcccgagtc

SEQ ID NO: 403977 - DNA, 30 bp, Artificial Sequence
  Synthetic oligonucleotide
ataacaacaagctttgcaggctggcgagtc

SEQ ID NO: 403978 - DNA, 30 bp, Artificial Sequence
  Synthetic oligonucleotide
ataattgctaccgctactatgacaggagtc

SEQ ID NO: 403979 - DNA, 30 bp, Artificial Sequence
  Synthetic oligonucleotide
acgcggaggacgaccctttaccgaggagtc

SEQ ID NO: 403980 - DNA, 30 bp, Artificial Sequence
  Synthetic oligonucleotide
cgccaatcaacagtttaataattaggagtc

SEQ ID NO: 403981 - DNA, 30 bp, Artificial Sequence
  Synthetic oligonucleotide
tctcacgaggcgtgagtatggtcgggagtc

SEQ ID NO: 403982 - DNA, 30 bp, Artificial Sequence
  Synthetic oligonucleotide
cttaatgacatagtcagagcttcgggagtc

SEQ ID NO: 403983 - DNA, 30 bp, Artificial Sequence
  Synthetic oligonucleotide
ggttgtagtcagaagttccaccggggagtc

SEQ ID NO: 403984 - DNA, 30 bp, Artificial Sequence
  Synthetic oligonucleotide
atcaaggcggactcattttgaggatgagtc

SEQ ID NO: 403985 - DNA, 30 bp, Artificial Sequence
  Synthetic oligonucleotide
tgaaacagaatctactcttcactatgagtc

SEQ ID NO: 403986 - DNA, 30 bp, Artificial Sequence
  Synthetic oligonucleotide
gacttgatttagtacttgcttaacatagtc

SEQ ID NO: 403987 - DNA, 30 bp, Artificial Sequence
  Synthetic oligonucleotide
tttggatctgataaaagcgacgagatagtc

SEQ ID NO: 403988 - DNA, 30 bp, Artificial Sequence
  Synthetic oligonucleotide
taaaattgatcgattcggtggtttatagtc

SEQ ID NO: 403989 - DNA, 30 bp, Artificial Sequence
  Synthetic oligonucleotide
cgtttttcctacgataaggtccaactagtc

SEQ ID NO: 403990 - DNA, 30 bp, Artificial Sequence
  Synthetic oligonucleotide
ggatttctgctaataaattccggactagtc

SEQ ID NO: 403991 - DNA, 30 bp, Artificial Sequence
  Synthetic oligonucleotide
aaggaggttggacacgaagtggtactagtc

SEQ ID NO: 403992 - DNA, 30 bp, Artificial Sequence
  Synthetic oligonucleotide
attctttagcccgtgcaaataaccctagtc

SEQ ID NO: 403993 - DNA, 30 bp, Artificial Sequence
  Synthetic oligonucleotide
atttcgttactggaggtggatttgctagtc

SEQ ID NO: 403994 - DNA, 30 bp, Artificial Sequence
  Synthetic oligonucleotide
ccgaaatcctacccgcactgatctctagtc

SEQ ID NO: 403995 - DNA, 30 bp, Artificial Sequence
  Synthetic oligonucleotide
attcccgtcgcaaacggtatgtctctagtc

SEQ ID NO: 403996 - DNA, 30 bp, Artificial Sequence
  Synthetic oligonucleotide
aggcatgtgacagagatagcaatagtagtc

SEQ ID NO: 403997 - DNA, 30 bp, Artificial Sequence
  Synthetic oligonucleotide
gtcgaggcaactatggtccaacacgtagtc

SEQ ID NO: 403998 - DNA, 30 bp, Artificial Sequence
  Synthetic oligonucleotide
tatagtggcagtccggactaccccgtagtc

SEQ ID NO: 403999 - DNA, 30 bp, Artificial Sequence
  Synthetic oligonucleotide
tgttttggaatcgacgcaacgaaggtagtc

SEQ ID NO: 404000 - DNA, 30 bp, Artificial Sequence
  Synthetic oligonucleotide
atatcccaactgtaatggggcgcggtagtc

SEQ ID NO: 404001 - DNA, 30 bp, Artificial Sequence
  Synthetic oligonucleotide
agcataaacaaatacgagtacaatgtagtc

SEQ ID NO: 404002 - DNA, 30 bp, Artificial Sequence
  Synthetic oligonucleotide
tttgagcagctatccattacttctgtagtc

SEQ ID NO: 404003 - DNA, 31 bp, Artificial Sequence
  Synthetic oligonucleotide
ccgttctgaatggagaggctaccgattagtc

SEQ ID NO: 404004 - DNA, 30 bp, Artificial Sequence
  Synthetic oligonucleotide
accttccaagacgaactgacaatcttagtc

SEQ ID NO: 404005 - DNA, 30 bp, Artificial Sequence
  Synthetic oligonucleotide
attatccgagcccgggatcggaagttagtc

SEQ ID NO: 404006 - DNA, 30 bp, Artificial Sequence
  Synthetic oligonucleotide
gttgcgcccatgactgctttaaggttagtc

SEQ ID NO: 404007 - DNA, 30 bp, Artificial Sequence
  Synthetic oligonucleotide
gggcgggaaccggccgagatacctttagtc

SEQ ID NO: 404008 - DNA, 30 bp, Artificial Sequence
  Synthetic oligonucleotide
gggacctgcctagtcacgacatttttagtc

SEQ ID NO: 404009 - DNA, 31 bp, Artificial Sequence
  Synthetic oligonucleotide
accattccccagttaccgattctccaacgtc

SEQ ID NO: 404010 - DNA, 30 bp, Artificial Sequence
  Synthetic oligonucleotide
caagcaaaatgcgccaggcaattgaacgtc

SEQ ID NO: 404011 - DNA, 30 bp, Artificial Sequence
  Synthetic oligonucleotide
gcgattgatcgcagcctgtgcgataacgtc

SEQ ID NO: 404012 - DNA, 30 bp, Artificial Sequence
  Synthetic oligonucleotide
tgcagaagaaatcagtgagattataacgtc

SEQ ID NO: 404013 - DNA, 30 bp, Artificial Sequence
  Synthetic oligonucleotide
ttcagaaacaaagttctgacgcttaacgtc

SEQ ID NO: 404014 - DNA, 30 bp, Artificial Sequence
  Synthetic oligonucleotide
gcccgtattgggcggcactgccaacacgtc

SEQ ID NO: 404015 - DNA, 30 bp, Artificial Sequence
  Synthetic oligonucleotide
gtatctcaatctcccactcggagccacgtc

SEQ ID NO: 404016 - DNA, 30 bp, Artificial Sequence
  Synthetic oligonucleotide
caggtaaagacgctgacctctatccacgtc

SEQ ID NO: 404017 - DNA, 30 bp, Artificial Sequence
  Synthetic oligonucleotide
agcatacggaagccccgtccgaatcacgtc

SEQ ID NO: 404018 - DNA, 30 bp, Artificial Sequence
  Synthetic oligonucleotide
gcagataggctcttaactagggaagacgtc

SEQ ID NO: 404019 - DNA, 30 bp, Artificial Sequence
  Synthetic oligonucleotide
agcaagttgagggtctgaagcacagacgtc

SEQ ID NO: 404020 - DNA, 30 bp, Artificial Sequence
  Synthetic oligonucleotide
gtacaagctcaggacgtcccggttgacgtc

SEQ ID NO: 404021 - DNA, 30 bp, Artificial Sequence
  Synthetic oligonucleotide
gacccgctcccttcaatcttcccatacgtc

SEQ ID NO: 404022 - DNA, 30 bp, Artificial Sequence
  Synthetic oligonucleotide
actaggggtcaaagtccccgtctatacgtc

SEQ ID NO: 404023 - DNA, 30 bp, Artificial Sequence
  Synthetic oligonucleotide
ataagccgcgaggtccctaaaggttacgtc

SEQ ID NO: 404024 - DNA, 30 bp, Artificial Sequence
  Synthetic oligonucleotide
cttgtttctgggaagaggccaagaaccgtc

SEQ ID NO: 404025 - DNA, 30 bp, Artificial Sequence
  Synthetic oligonucleotide
gatacaattgtttaaaaacccttgaccgtc

SEQ ID NO: 404026 - DNA, 30 bp, Artificial Sequence
  Synthetic oligonucleotide
ctgggctgaaacgggtgtaggtagcccgtc

SEQ ID NO: 404027 - DNA, 30 bp, Artificial Sequence
  Synthetic oligonucleotide
gggaacgctcccttggtaaaagggcccgtc

SEQ ID NO: 404028 - DNA, 30 bp, Artificial Sequence
  Synthetic oligonucleotide
tatgcatgttgaatcatgtcgccagccgtc

SEQ ID NO: 404029 - DNA, 30 bp, Artificial Sequence
  Synthetic oligonucleotide
cttcgccatcaataaggactgcgggccgtc

SEQ ID NO: 404030 - DNA, 30 bp, Artificial Sequence
  Synthetic oligonucleotide
gcgtaatagtataataatagtgcatccgtc

SEQ ID NO: 404031 - DNA, 30 bp, Artificial Sequence
  Synthetic oligonucleotide
accttacggtctcggtcgagtgtatccgtc

SEQ ID NO: 404032 - DNA, 30 bp, Artificial Sequence
  Synthetic oligonucleotide
gtcttgtcgaatgtggcagataactccgtc

SEQ ID NO: 404033 - DNA, 30 bp, Artificial Sequence
  Synthetic oligonucleotide
cacccggcgtacaacgtaacaagctccgtc

SEQ ID NO: 404034 - DNA, 30 bp, Artificial Sequence
  Synthetic oligonucleotide
tatgtataggtaagtccttttagctccgtc

SEQ ID NO: 404035 - DNA, 30 bp, Artificial Sequence
  Synthetic oligonucleotide
aggggtaacgccgtaccccagctctccgtc

SEQ ID NO: 404036 - DNA, 30 bp, Artificial Sequence
  Synthetic oligonucleotide
acccggagttgaggcataggcgacagcgtc

SEQ ID NO: 404037 - DNA, 30 bp, Artificial Sequence
  Synthetic oligonucleotide
tcactctgacaggattcgagtcccagcgtc

SEQ ID NO: 404038 - DNA, 30 bp, Artificial Sequence
  Synthetic oligonucleotide
atcagctatgctggcacggaacctagcgtc

SEQ ID NO: 404039 - DNA, 30 bp, Artificial Sequence
  Synthetic oligonucleotide
ccgccgcactgtaaatcatagattagcgtc

SEQ ID NO: 404040 - DNA, 30 bp, Artificial Sequence
  Synthetic oligonucleotide
gtaagaatatgtttatcggcgcaacgcgtc

SEQ ID NO: 404041 - DNA, 30 bp, Artificial Sequence
  Synthetic oligonucleotide
ccaaacgagggaggctgtacctcccgcgtc

SEQ ID NO: 404042 - DNA, 30 bp, Artificial Sequence
  Synthetic oligonucleotide
gcatgcgggaaaaaagggccctgccgcgtc

SEQ ID NO: 404043 - DNA, 30 bp, Artificial Sequence
  Synthetic oligonucleotide
gcctcatgaaataactgagcgacgcgcgtc

SEQ ID NO: 404044 - DNA, 30 bp, Artificial Sequence
  Synthetic oligonucleotide
aagatgatgaatcgacggggtgggcgcgtc

SEQ ID NO: 404045 - DNA, 30 bp, Artificial Sequence
  Synthetic oligonucleotide
agtattagtcggactgtcgtcaagggcgtc

SEQ ID NO: 404046 - DNA, 30 bp, Artificial Sequence
  Synthetic oligonucleotide
gcggctccaagggcttacggttagggcgtc

SEQ ID NO: 404047 - DNA, 30 bp, Artificial Sequence
  Synthetic oligonucleotide
tagtgcacagcagttaaagaccggggcgtc

SEQ ID NO: 404048 - DNA, 30 bp, Artificial Sequence
  Synthetic oligonucleotide
tggatgacgttcccttggatcctgggcgtc

SEQ ID NO: 404049 - DNA, 30 bp, Artificial Sequence
  Synthetic oligonucleotide
tctggtggcgacagcaaccttcgtggcgtc

SEQ ID NO: 404050 - DNA, 30 bp, Artificial Sequence
  Synthetic oligonucleotide
ggatatggctctccgacgatcacatgcgtc

SEQ ID NO: 404051 - DNA, 30 bp, Artificial Sequence
  Synthetic oligonucleotide
taactgactaagcggtggaccttatgcgtc

SEQ ID NO: 404052 - DNA, 30 bp, Artificial Sequence
  Synthetic oligonucleotide
gggtcacggaaggcgtgcgtccggatcgtc

SEQ ID NO: 404053 - DNA, 30 bp, Artificial Sequence
  Synthetic oligonucleotide
gttggccgcacgttagggtctcatatcgtc

SEQ ID NO: 404054 - DNA, 30 bp, Artificial Sequence
  Synthetic oligonucleotide
ccccatttaacagtctttggaccgctcgtc

SEQ ID NO: 404055 - DNA, 30 bp, Artificial Sequence
  Synthetic oligonucleotide
catcatacacgacgcttttaaaggctcgtc

SEQ ID NO: 404056 - DNA, 30 bp, Artificial Sequence
  Synthetic oligonucleotide
aacccctgaccttacgccctggctctcgtc

SEQ ID NO: 404057 - DNA, 30 bp, Artificial Sequence
  Synthetic oligonucleotide
cagttatgccgagattaacggtctctcgtc

SEQ ID NO: 404058 - DNA, 30 bp, Artificial Sequence
  Synthetic oligonucleotide
aaatgacttagtagcggtgacaccgtcgtc

SEQ ID NO: 404059 - DNA, 30 bp, Artificial Sequence
  Synthetic oligonucleotide
caccagatcacgatccgtattccggtcgtc

SEQ ID NO: 404060 - DNA, 30 bp, Artificial Sequence
  Synthetic oligonucleotide
ggatagtaagattgattgtagagtgtcgtc

SEQ ID NO: 404061 - DNA, 30 bp, Artificial Sequence
  Synthetic oligonucleotide
tagcgtccattagtggacgggtcgttcgtc

SEQ ID NO: 404062 - DNA, 30 bp, Artificial Sequence
  Synthetic oligonucleotide
acatgcgcttttggcgatggtagtttcgtc

SEQ ID NO: 404063 - DNA, 30 bp, Artificial Sequence
  Synthetic oligonucleotide
tccgtcttctgacaagacgactttttcgtc

SEQ ID NO: 404064 - DNA, 30 bp, Artificial Sequence
  Synthetic oligonucleotide
agttttcgagcttctccgtagacaaaggtc

SEQ ID NO: 404065 - DNA, 29 bp, Artificial Sequence
  Synthetic oligonucleotide
agcagcacgaaacttatcaatgcaaggtc

SEQ ID NO: 404066 - DNA, 30 bp, Artificial Sequence
  Synthetic oligonucleotide
catattaaccttccaagggggttgaaggtc

SEQ ID NO: 404067 - DNA, 30 bp, Artificial Sequence
  Synthetic oligonucleotide
gcagcctttgtcattagtttgttgaaggtc

SEQ ID NO: 404068 - DNA, 30 bp, Artificial Sequence
  Synthetic oligonucleotide
gagatctaggagggccttgataaacaggtc

SEQ ID NO: 404069 - DNA, 30 bp, Artificial Sequence
  Synthetic oligonucleotide
gagaacatcacgaagcccgcggcacaggtc

SEQ ID NO: 404070 - DNA, 30 bp, Artificial Sequence
  Synthetic oligonucleotide
tgcaggagtgaagttggtatttaccaggtc

SEQ ID NO: 404071 - DNA, 30 bp, Artificial Sequence
  Synthetic oligonucleotide
cgccacggtcacacggcgatggagcaggtc

SEQ ID NO: 404072 - DNA, 30 bp, Artificial Sequence
  Synthetic oligonucleotide
attgacagtggggctgaccagtgtcaggtc

SEQ ID NO: 404073 - DNA, 30 bp, Artificial Sequence
  Synthetic oligonucleotide
cgctgttcttccgtatcatgcattcaggtc

SEQ ID NO: 404074 - DNA, 30 bp, Artificial Sequence
  Synthetic oligonucleotide
ctagttaaagtctcttaagggtttcaggtc

SEQ ID NO: 404075 - DNA, 30 bp, Artificial Sequence
  Synthetic oligonucleotide
acatgtaatcgtagctgcattatagaggtc

SEQ ID NO: 404076 - DNA, 30 bp, Artificial Sequence
  Synthetic oligonucleotide
atgtacactggcacgcccagctccgaggtc

SEQ ID NO: 404077 - DNA, 30 bp, Artificial Sequence
  Synthetic oligonucleotide
agtacttggcttcgtgcatgcggtgaggtc

SEQ ID NO: 404078 - DNA, 31 bp, Artificial Sequence
  Synthetic oligonucleotide
tacatcctaaattgttttatcgggctaggtc

SEQ ID NO: 404079 - DNA, 30 bp, Artificial Sequence
  Synthetic oligonucleotide
ctccacgtcagacctggagctctgtaggtc

SEQ ID NO: 404080 - DNA, 30 bp, Artificial Sequence
  Synthetic oligonucleotide
atagctaacctgcatatagcagtgtaggtc

SEQ ID NO: 404081 - DNA, 30 bp, Artificial Sequence
  Synthetic oligonucleotide
ccgctctcgcaaaccccgtactattaggtc

SEQ ID NO: 404082 - DNA, 30 bp, Artificial Sequence
  Synthetic oligonucleotide
tgaacgcccgcaaaagtatatgtttaggtc

SEQ ID NO: 404083 - DNA, 30 bp, Artificial Sequence
  Synthetic oligonucleotide
atacgatagcacgcgctatccaaaacggtc

SEQ ID NO: 404084 - DNA, 30 bp, Artificial Sequence
  Synthetic oligonucleotide
atacagtacgcctatcggctgcaaacggtc

SEQ ID NO: 404085 - DNA, 30 bp, Artificial Sequence
  Synthetic oligonucleotide
atctcatgctcgccaggactaaccacggtc

SEQ ID NO: 404086 - DNA, 30 bp, Artificial Sequence
  Synthetic oligonucleotide
gtttgggtcgtagtcgtaaatctcacggtc

SEQ ID NO: 404087 - DNA, 30 bp, Artificial Sequence
  Synthetic oligonucleotide
gatggatctcttaacttcgaccagacggtc

SEQ ID NO: 404088 - DNA, 30 bp, Artificial Sequence
  Synthetic oligonucleotide
gttaaaacacacaactgtggtcagacggtc

SEQ ID NO: 404089 - DNA, 30 bp, Artificial Sequence
  Synthetic oligonucleotide
acttttggcaatcatctagcttatacggtc

SEQ ID NO: 404090 - DNA, 30 bp, Artificial Sequence
  Synthetic oligonucleotide
agagatgtccagattgcgaaacgtacggtc

SEQ ID NO: 404091 - DNA, 30 bp, Artificial Sequence
  Synthetic oligonucleotide
aaagcgtgacatgcttagctcggtacggtc

SEQ ID NO: 404092 - DNA, 30 bp, Artificial Sequence
  Synthetic oligonucleotide
aactacgggtacaatcgccaggaaccggtc

SEQ ID NO: 404093 - DNA, 30 bp, Artificial Sequence
  Synthetic oligonucleotide
tcgcatcgatgccactgtcatcgaccggtc

SEQ ID NO: 404094 - DNA, 30 bp, Artificial Sequence
  Synthetic oligonucleotide
gcagcttaacaacaggtccgcgacccggtc

SEQ ID NO: 404095 - DNA, 30 bp, Artificial Sequence
  Synthetic oligonucleotide
gtcagaacgccattatacaaacgcccggtc

SEQ ID NO: 404096 - DNA, 30 bp, Artificial Sequence
  Synthetic oligonucleotide
caagactatcggcggaattcaaagccggtc

SEQ ID NO: 404097 - DNA, 30 bp, Artificial Sequence
  Synthetic oligonucleotide
tacccttttgaagcgtacacgattccggtc

SEQ ID NO: 404098 - DNA, 30 bp, Artificial Sequence
  Synthetic oligonucleotide
gtattcaaccaacgcatgggagcagcggtc

SEQ ID NO: 404099 - DNA, 30 bp, Artificial Sequence
  Synthetic oligonucleotide
acggtgacccccattgacgaccgagcggtc

SEQ ID NO: 404100 - DNA, 30 bp, Artificial Sequence
  Synthetic oligonucleotide
cgacagttttcttttctctatggcgcggtc

SEQ ID NO: 404101 - DNA, 30 bp, Artificial Sequence
  Synthetic oligonucleotide
aagacgcaaactcgattaaaacgggcggtc

SEQ ID NO: 404102 - DNA, 30 bp, Artificial Sequence
  Synthetic oligonucleotide
tcgcctatcaagggggatgaacgggcggtc

SEQ ID NO: 404103 - DNA, 30 bp, Artificial Sequence
  Synthetic oligonucleotide
cgagtgggatcgccacttaacactgcggtc

SEQ ID NO: 404104 - DNA, 30 bp, Artificial Sequence
  Synthetic oligonucleotide
agtttgggacctatggacctccctgcggtc

SEQ ID NO: 404105 - DNA, 30 bp, Artificial Sequence
  Synthetic oligonucleotide
gattgactagtgcaggtttcggctgcggtc

SEQ ID NO: 404106 - DNA, 30 bp, Artificial Sequence
  Synthetic oligonucleotide
cgtaatatcaccgaattgcaagaatcggtc

SEQ ID NO: 404107 - DNA, 30 bp, Artificial Sequence
  Synthetic oligonucleotide
tgtttaggtacctcaaggtcgccatcggtc

SEQ ID NO: 404108 - DNA, 30 bp, Artificial Sequence
  Synthetic oligonucleotide
agtgcgaccagtgacgcttcatggtcggtc

SEQ ID NO: 404109 - DNA, 30 bp, Artificial Sequence
  Synthetic oligonucleotide
ccgaggtcggaaaggttctggacaagggtc

SEQ ID NO: 404110 - DNA, 30 bp, Artificial Sequence
  Synthetic oligonucleotide
ggtcagtgcccaggaccgcgcgacagggtc

SEQ ID NO: 404111 - DNA, 30 bp, Artificial Sequence
  Synthetic oligonucleotide
ggtttctgtacctcatcgagtaggagggtc

SEQ ID NO: 404112 - DNA, 30 bp, Artificial Sequence
  Synthetic oligonucleotide
gcctcttggggccagggctcttggagggtc

SEQ ID NO: 404113 - DNA, 30 bp, Artificial Sequence
  Synthetic oligonucleotide
gcgtaccgcttccgctggggcactagggtc

SEQ ID NO: 404114 - DNA, 30 bp, Artificial Sequence
  Synthetic oligonucleotide
attgccaaagaggggcttctcagtagggtc

SEQ ID NO: 404115 - DNA, 30 bp, Artificial Sequence
  Synthetic oligonucleotide
cagtgcgtggatggtctgtgcaaacgggtc

SEQ ID NO: 404116 - DNA, 30 bp, Artificial Sequence
  Synthetic oligonucleotide
gtgctgctgcgccaaagaagagaacgggtc

SEQ ID NO: 404117 - DNA, 30 bp, Artificial Sequence
  Synthetic oligonucleotide
agtgaacaatatcaggattccgcacgggtc

SEQ ID NO: 404118 - DNA, 30 bp, Artificial Sequence
  Synthetic oligonucleotide
gtatgacacagaagttggttgaagcgggtc

SEQ ID NO: 404119 - DNA, 30 bp, Artificial Sequence
  Synthetic oligonucleotide
agccggagccacggatgggagccgcgggtc

SEQ ID NO: 404120 - DNA, 30 bp, Artificial Sequence
  Synthetic oligonucleotide
accgtgatggagaagacatgtttgcgggtc

SEQ ID NO: 404121 - DNA, 30 bp, Artificial Sequence
  Synthetic oligonucleotide
accaacccaacttgggtattatatcgggtc

SEQ ID NO: 404122 - DNA, 30 bp, Artificial Sequence
  Synthetic oligonucleotide
acatatgccttgagagatctatctcgggtc

SEQ ID NO: 404123 - DNA, 30 bp, Artificial Sequence
  Synthetic oligonucleotide
agacgtaattcacaaatcataagtcgggtc

SEQ ID NO: 404124 - DNA, 30 bp, Artificial Sequence
  Synthetic oligonucleotide
gtctttagatagatggtatttcggggggtc

SEQ ID NO: 404125 - DNA, 30 bp, Artificial Sequence
  Synthetic oligonucleotide
ccaccgattcaagccatgctattgggggtc

SEQ ID NO: 404126 - DNA, 30 bp, Artificial Sequence
  Synthetic oligonucleotide
gccgcgcgatcctatggcttcattggggtc

SEQ ID NO: 404127 - DNA, 30 bp, Artificial Sequence
  Synthetic oligonucleotide
aaaggctttaacagtttgtgactatgggtc

SEQ ID NO: 404128 - DNA, 30 bp, Artificial Sequence
  Synthetic oligonucleotide
gaaacggtcaatcaggaacacttatgggtc

SEQ ID NO: 404129 - DNA, 30 bp, Artificial Sequence
  Synthetic oligonucleotide
ctggtatgttgggcagtttgagagtgggtc

SEQ ID NO: 404130 - DNA, 30 bp, Artificial Sequence
  Synthetic oligonucleotide
gctgttcattactcggaagtgagaatggtc

SEQ ID NO: 404131 - DNA, 30 bp, Artificial Sequence
  Synthetic oligonucleotide
ttgttgaataaaacgcggtggggaatggtc

SEQ ID NO: 404132 - DNA, 30 bp, Artificial Sequence
  Synthetic oligonucleotide
aattaaaccccgtacggaaggatcatggtc

SEQ ID NO: 404133 - DNA, 30 bp, Artificial Sequence
  Synthetic oligonucleotide
actatggagcgaggagctacggggatggtc

SEQ ID NO: 404134 - DNA, 30 bp, Artificial Sequence
  Synthetic oligonucleotide
gagaatagtctatgaattgcaaatatggtc

SEQ ID NO: 404135 - DNA, 30 bp, Artificial Sequence
  Synthetic oligonucleotide
ctaagatcgacggccattgacagtatggtc

SEQ ID NO: 404136 - DNA, 30 bp, Artificial Sequence
  Synthetic oligonucleotide
caattcccgggtcgccggtcttttatggtc

SEQ ID NO: 404137 - DNA, 30 bp, Artificial Sequence
  Synthetic oligonucleotide
agacgtctgcttccggttggtaacctggtc

SEQ ID NO: 404138 - DNA, 30 bp, Artificial Sequence
  Synthetic oligonucleotide
gtctattcaagagggctataccgtctggtc

SEQ ID NO: 404139 - DNA, 30 bp, Artificial Sequence
  Synthetic oligonucleotide
atcgtgtataaacaacgaatataagtggtc

SEQ ID NO: 404140 - DNA, 30 bp, Artificial Sequence
  Synthetic oligonucleotide
cagcgccactagatgagcactcgagtggtc

SEQ ID NO: 404141 - DNA, 30 bp, Artificial Sequence
  Synthetic oligonucleotide
gtttgattcactgaaaagagtatagtggtc

SEQ ID NO: 404142 - DNA, 30 bp, Artificial Sequence
  Synthetic oligonucleotide
tcgatcaaagccgatgtcttattggtggtc

SEQ ID NO: 404143 - DNA, 30 bp, Artificial Sequence
  Synthetic oligonucleotide
cacagcagtggagagccccacggtgtggtc

SEQ ID NO: 404144 - DNA, 30 bp, Artificial Sequence
  Synthetic oligonucleotide
accggcactcatctgtcagtctcattggtc

SEQ ID NO: 404145 - DNA, 30 bp, Artificial Sequence
  Synthetic oligonucleotide
gatttagctgtattaaagataaacttggtc

SEQ ID NO: 404146 - DNA, 30 bp, Artificial Sequence
  Synthetic oligonucleotide
taaagacatgtgctatagctaaacttggtc

SEQ ID NO: 404147 - DNA, 30 bp, Artificial Sequence
  Synthetic oligonucleotide
ttagccgatgaacgacccgtgaacttggtc

SEQ ID NO: 404148 - DNA, 30 bp, Artificial Sequence
  Synthetic oligonucleotide
agagatgatgaggagtctagtgccttggtc

SEQ ID NO: 404149 - DNA, 30 bp, Artificial Sequence
  Synthetic oligonucleotide
tggcggaaagtcctaacatataatttggtc

SEQ ID NO: 404150 - DNA, 30 bp, Artificial Sequence
  Synthetic oligonucleotide
aactctccctttttcgggtggtgtttggtc

SEQ ID NO: 404151 - DNA, 30 bp, Artificial Sequence
  Synthetic oligonucleotide
cgttccataagcgctcctaaccttttggtc

SEQ ID NO: 404152 - DNA, 30 bp, Artificial Sequence
  Synthetic oligonucleotide
aataaacttcatcgtacataccttttggtc

SEQ ID NO: 404153 - DNA, 30 bp, Artificial Sequence
  Synthetic oligonucleotide
caagttcggcctagcgtgaaaccaaatgtc

SEQ ID NO: 404154 - DNA, 30 bp, Artificial Sequence
  Synthetic oligonucleotide
cgatgatctggttagtagcacttaaatgtc

SEQ ID NO: 404155 - DNA, 30 bp, Artificial Sequence
  Synthetic oligonucleotide
gtcctacagcagattgctggaaagaatgtc

SEQ ID NO: 404156 - DNA, 30 bp, Artificial Sequence
  Synthetic oligonucleotide
tcgttattaaaatatccgttctggaatgtc

SEQ ID NO: 404157 - DNA, 30 bp, Artificial Sequence
  Synthetic oligonucleotide
gaagacttgatggtgaacgttttgaatgtc

SEQ ID NO: 404158 - DNA, 30 bp, Artificial Sequence
  Synthetic oligonucleotide
caccccgtacccttagtttagggtaatgtc

SEQ ID NO: 404159 - DNA, 30 bp, Artificial Sequence
  Synthetic oligonucleotide
ttgccacgcgctaagtcccggtgccatgtc

SEQ ID NO: 404160 - DNA, 30 bp, Artificial Sequence
  Synthetic oligonucleotide
gccgcactactgcctatagtcgttcatgtc

SEQ ID NO: 404161 - DNA, 30 bp, Artificial Sequence
  Synthetic oligonucleotide
cacgaagcatggatagccgccaaggatgtc

SEQ ID NO: 404162 - DNA, 30 bp, Artificial Sequence
  Synthetic oligonucleotide
catgcggctatattggtatatggggatgtc

SEQ ID NO: 404163 - DNA, 30 bp, Artificial Sequence
  Synthetic oligonucleotide
cactgcaggcatcttatctaaaatgatgtc

SEQ ID NO: 404164 - DNA, 30 bp, Artificial Sequence
  Synthetic oligonucleotide
gtgcgactgctgagacactgcgatgatgtc

SEQ ID NO: 404165 - DNA, 30 bp, Artificial Sequence
  Synthetic oligonucleotide
tagaattgtgcagtggtacatgatgatgtc

SEQ ID NO: 404166 - DNA, 30 bp, Artificial Sequence
  Synthetic oligonucleotide
ccgcagtgggcgtcaacatcgtgtgatgtc

SEQ ID NO: 404167 - DNA, 30 bp, Artificial Sequence
  Synthetic oligonucleotide
tacgtactctcgcgggaatatatatatgtc

SEQ ID NO: 404168 - DNA, 30 bp, Artificial Sequence
  Synthetic oligonucleotide
ccgcgaggtcaaagtaaatggtactatgtc

SEQ ID NO: 404169 - DNA, 30 bp, Artificial Sequence
  Synthetic oligonucleotide
tatttgataactcgtttgttaatctatgtc

SEQ ID NO: 404170 - DNA, 30 bp, Artificial Sequence
  Synthetic oligonucleotide
agactagaacaaaccctacaattgtatgtc

SEQ ID NO: 404171 - DNA, 30 bp, Artificial Sequence
  Synthetic oligonucleotide
ttagttggtctcagggtgcgagattatgtc

SEQ ID NO: 404172 - DNA, 30 bp, Artificial Sequence
  Synthetic oligonucleotide
atgtgaagacatcctcagtaaacttatgtc

SEQ ID NO: 404173 - DNA, 30 bp, Artificial Sequence
  Synthetic oligonucleotide
cactctccactaattacgccgaaaactgtc

SEQ ID NO: 404174 - DNA, 30 bp, Artificial Sequence
  Synthetic oligonucleotide
gtaacgccaaaaaccgcaggttacactgtc

SEQ ID NO: 404175 - DNA, 30 bp, Artificial Sequence
  Synthetic oligonucleotide
aattctattgggaagggtgataggactgtc

SEQ ID NO: 404176 - DNA, 30 bp, Artificial Sequence
  Synthetic oligonucleotide
atttgtgaacaaacacgcctcctgactgtc

SEQ ID NO: 404177 - DNA, 30 bp, Artificial Sequence
  Synthetic oligonucleotide
agttctgagaattgttttacatcccctgtc

SEQ ID NO: 404178 - DNA, 30 bp, Artificial Sequence
  Synthetic oligonucleotide
agtcagcagattcagcaatgtctccctgtc

SEQ ID NO: 404179 - DNA, 30 bp, Artificial Sequence
  Synthetic oligonucleotide
cacaatttctagctgggtgaattgcctgtc

SEQ ID NO: 404180 - DNA, 30 bp, Artificial Sequence
  Synthetic oligonucleotide
agttattattggggtaagatcggtcctgtc

SEQ ID NO: 404181 - DNA, 30 bp, Artificial Sequence
  Synthetic oligonucleotide
acaaggaattgggggctgtggctagctgtc

SEQ ID NO: 404182 - DNA, 30 bp, Artificial Sequence
  Synthetic oligonucleotide
tatttatggaggcattcttctaccgctgtc

SEQ ID NO: 404183 - DNA, 30 bp, Artificial Sequence
  Synthetic oligonucleotide
gcacagcccaggatgatacagctggctgtc

SEQ ID NO: 404184 - DNA, 30 bp, Artificial Sequence
  Synthetic oligonucleotide
gaaaggttattattccaagttacctctgtc

SEQ ID NO: 404185 - DNA, 30 bp, Artificial Sequence
  Synthetic oligonucleotide
ttactcttgcagctcgcgaaacattctgtc

SEQ ID NO: 404186 - DNA, 30 bp, Artificial Sequence
  Synthetic oligonucleotide
agtcaacgaaagcgatcactcggttctgtc

SEQ ID NO: 404187 - DNA, 30 bp, Artificial Sequence
  Synthetic oligonucleotide
aaaaacatggtgccgattcagttttctgtc

SEQ ID NO: 404188 - DNA, 30 bp, Artificial Sequence
  Synthetic oligonucleotide
atctggaaaatgatccgtaactgaagtgtc

SEQ ID NO: 404189 - DNA, 30 bp, Artificial Sequence
  Synthetic oligonucleotide
caactcacgggtcagtctgtcaccagtgtc

SEQ ID NO: 404190 - DNA, 30 bp, Artificial Sequence
  Synthetic oligonucleotide
ggacggatttaagataggtcgggcagtgtc

SEQ ID NO: 404191 - DNA, 30 bp, Artificial Sequence
  Synthetic oligonucleotide
ggttagagttagtacgttattgtcagtgtc

SEQ ID NO: 404192 - DNA, 30 bp, Artificial Sequence
  Synthetic oligonucleotide
gtttagtctatgttaggtaatgggagtgtc

SEQ ID NO: 404193 - DNA, 30 bp, Artificial Sequence
  Synthetic oligonucleotide
taatgggagtatccggcacgtaatagtgtc

SEQ ID NO: 404194 - DNA, 30 bp, Artificial Sequence
  Synthetic oligonucleotide
cagtgtgacaactatggtcaaattagtgtc

SEQ ID NO: 404195 - DNA, 30 bp, Artificial Sequence
  Synthetic oligonucleotide
tcaatttgcttggcgactcaaggacgtgtc

SEQ ID NO: 404196 - DNA, 30 bp, Artificial Sequence
  Synthetic oligonucleotide
gttcgagaacttgctccttatatgcgtgtc

SEQ ID NO: 404197 - DNA, 30 bp, Artificial Sequence
  Synthetic oligonucleotide
tatatcgaccgcggttaacatgtgcgtgtc

SEQ ID NO: 404198 - DNA, 30 bp, Artificial Sequence
  Synthetic oligonucleotide
cgccaaactgcgtgggtgctctctcgtgtc

SEQ ID NO: 404199 - DNA, 30 bp, Artificial Sequence
  Synthetic oligonucleotide
tcgcggcatagcggacttaacagtcgtgtc

SEQ ID NO: 404200 - DNA, 30 bp, Artificial Sequence
  Synthetic oligonucleotide
aaattccaacagcaccctatattaggtgtc

SEQ ID NO: 404201 - DNA, 30 bp, Artificial Sequence
  Synthetic oligonucleotide
ggagcgatttcctactaaaataacggtgtc

SEQ ID NO: 404202 - DNA, 30 bp, Artificial Sequence
  Synthetic oligonucleotide
acatgctacgatttgttcgcagctggtgtc

SEQ ID NO: 404203 - DNA, 30 bp, Artificial Sequence
  Synthetic oligonucleotide
tggctttacccactctgatggttgtgtgtc

SEQ ID NO: 404204 - DNA, 30 bp, Artificial Sequence
  Synthetic oligonucleotide
aagactactgtatgaccgttcgcttgtgtc

SEQ ID NO: 404205 - DNA, 30 bp, Artificial Sequence
  Synthetic oligonucleotide
tcggtacttgattcgcaggacttttgtgtc

SEQ ID NO: 404206 - DNA, 30 bp, Artificial Sequence
  Synthetic oligonucleotide
taaggcaagcattagcatagtgtcattgtc

SEQ ID NO: 404207 - DNA, 30 bp, Artificial Sequence
  Synthetic oligonucleotide
tcttccggctggaaagctgagctgattgtc

SEQ ID NO: 404208 - DNA, 30 bp, Artificial Sequence
  Synthetic oligonucleotide
ggtaagtgaggtaccttgatggttattgtc

SEQ ID NO: 404209 - DNA, 30 bp, Artificial Sequence
  Synthetic oligonucleotide
ttggtataggagaaaccattcaaacttgtc

SEQ ID NO: 404210 - DNA, 30 bp, Artificial Sequence
  Synthetic oligonucleotide
atcacttttctgactttcccgctacttgtc

SEQ ID NO: 404211 - DNA, 30 bp, Artificial Sequence
  Synthetic oligonucleotide
cgacacggttaaaaagtgaatcttcttgtc

SEQ ID NO: 404212 - DNA, 30 bp, Artificial Sequence
  Synthetic oligonucleotide
gcgacccccgctacacgtcgaacggttgtc

SEQ ID NO: 404213 - DNA, 30 bp, Artificial Sequence
  Synthetic oligonucleotide
tatcgtagtgtacaaagggtccatgttgtc

SEQ ID NO: 404214 - DNA, 30 bp, Artificial Sequence
  Synthetic oligonucleotide
tcagcgtactgtcggagagacagatttgtc

SEQ ID NO: 404215 - DNA, 30 bp, Artificial Sequence
  Synthetic oligonucleotide
gtacaatagtgccaaacctccctatttgtc

SEQ ID NO: 404216 - DNA, 30 bp, Artificial Sequence
  Synthetic oligonucleotide
caccggatctctgttcgacagccctttgtc

SEQ ID NO: 404217 - DNA, 30 bp, Artificial Sequence
  Synthetic oligonucleotide
tactgttcggatcaaatgagccgctttgtc

SEQ ID NO: 404218 - DNA, 30 bp, Artificial Sequence
  Synthetic oligonucleotide
gtaaagggggaacacagtagcgcgtttgtc

SEQ ID NO: 404219 - DNA, 30 bp, Artificial Sequence
  Synthetic oligonucleotide
cttaaatggtcgaatatgtcactgtttgtc

SEQ ID NO: 404220 - DNA, 30 bp, Artificial Sequence
  Synthetic oligonucleotide
aacatgagacgatagtacctatattttgtc

SEQ ID NO: 404221 - DNA, 30 bp, Artificial Sequence
  Synthetic oligonucleotide
ttctggacatccgcattggggagttttgtc

SEQ ID NO: 404222 - DNA, 30 bp, Artificial Sequence
  Synthetic oligonucleotide
cgcaccaacgtaacactaggttgttttgtc

SEQ ID NO: 404223 - DNA, 30 bp, Artificial Sequence
  Synthetic oligonucleotide
ttatacgggttggagcggtccacaaaattc

SEQ ID NO: 404224 - DNA, 30 bp, Artificial Sequence
  Synthetic oligonucleotide
aaggtaggacccttctaactagtaaaattc

SEQ ID NO: 404225 - DNA, 30 bp, Artificial Sequence
  Synthetic oligonucleotide
aatgtcaaaaatgatcctatggtaaaattc

SEQ ID NO: 404226 - DNA, 30 bp, Artificial Sequence
  Synthetic oligonucleotide
aggttaagactcgcagaccgacacaaattc

SEQ ID NO: 404227 - DNA, 30 bp, Artificial Sequence
  Synthetic oligonucleotide
gattaaccagtcaggacttgaagcaaattc

SEQ ID NO: 404228 - DNA, 27 bp, Artificial Sequence
  Synthetic oligonucleotide
taaacggtccaagcgtataagaaattc

SEQ ID NO: 404229 - DNA, 30 bp, Artificial Sequence
  Synthetic oligonucleotide
atggccgttaacgacttttgtgagaaattc

SEQ ID NO: 404230 - DNA, 30 bp, Artificial Sequence
  Synthetic oligonucleotide
gagcatgcatgatgtatcatctataaattc

SEQ ID NO: 404231 - DNA, 30 bp, Artificial Sequence
  Synthetic oligonucleotide
ccatcatcattccggtcccattctaaattc

SEQ ID NO: 404232 - DNA, 30 bp, Artificial Sequence
  Synthetic oligonucleotide
actaatattgcagggatttaagtccaattc

SEQ ID NO: 404233 - DNA, 30 bp, Artificial Sequence
  Synthetic oligonucleotide
aatacaatgcacttatgaccaaagcaattc

SEQ ID NO: 404234 - DNA, 30 bp, Artificial Sequence
  Synthetic oligonucleotide
cctttattgacgtttgtgtcttatcaattc

SEQ ID NO: 404235 - DNA, 30 bp, Artificial Sequence
  Synthetic oligonucleotide
tataggcaggcgcgatccaagtgtcaattc

SEQ ID NO: 404236 - DNA, 30 bp, Artificial Sequence
  Synthetic oligonucleotide
acgtgattatctgctcttgtgtgagaattc

SEQ ID NO: 404237 - DNA, 30 bp, Artificial Sequence
  Synthetic oligonucleotide
cagcccaagcctgcacgccatctagaattc

SEQ ID NO: 404238 - DNA, 30 bp, Artificial Sequence
  Synthetic oligonucleotide
acatttccaaaacaacaagttttagaattc

SEQ ID NO: 404239 - DNA, 30 bp, Artificial Sequence
  Synthetic oligonucleotide
gggtcacaacaacaaagctttttagaattc

SEQ ID NO: 404240 - DNA, 30 bp, Artificial Sequence
  Synthetic oligonucleotide
agttaagacccccgatgttcaatcgaattc

SEQ ID NO: 404241 - DNA, 30 bp, Artificial Sequence
  Synthetic oligonucleotide
ctggagattccctgtgatatataggaattc

SEQ ID NO: 404242 - DNA, 30 bp, Artificial Sequence
  Synthetic oligonucleotide
caaagctcccccgtcattcctggtgaattc

SEQ ID NO: 404243 - DNA, 30 bp, Artificial Sequence
  Synthetic oligonucleotide
gggttgacaacgccggccggtggtgaattc

SEQ ID NO: 404244 - DNA, 30 bp, Artificial Sequence
  Synthetic oligonucleotide
agatttataggcggaatttcaaaataattc

SEQ ID NO: 404245 - DNA, 26 bp, Artificial Sequence
  Synthetic oligonucleotide
ccgcggattcttacgacggataattc

SEQ ID NO: 404246 - DNA, 28 bp, Artificial Sequence
  Synthetic oligonucleotide
catggagaggtagataacacggtaattc

SEQ ID NO: 404247 - DNA, 30 bp, Artificial Sequence
  Synthetic oligonucleotide
ctgaaatgtccgacctatcgcaattaattc

SEQ ID NO: 404248 - DNA, 30 bp, Artificial Sequence
  Synthetic oligonucleotide
agcacaggccaagaattagcttattaattc

SEQ ID NO: 404249 - DNA, 30 bp, Artificial Sequence
  Synthetic oligonucleotide
taaccttagacctccttgggttacacattc

SEQ ID NO: 404250 - DNA, 30 bp, Artificial Sequence
  Synthetic oligonucleotide
ggacgttattgattccgctcgggcacattc

SEQ ID NO: 404251 - DNA, 30 bp, Artificial Sequence
  Synthetic oligonucleotide
tctatcataatatcctccttctcgacattc

SEQ ID NO: 404252 - DNA, 30 bp, Artificial Sequence
  Synthetic oligonucleotide
gactagttgattagatctgcactgacattc

SEQ ID NO: 404253 - DNA, 30 bp, Artificial Sequence
  Synthetic oligonucleotide
accaccgcgatcaagcggatggtgacattc

SEQ ID NO: 404254 - DNA, 30 bp, Artificial Sequence
  Synthetic oligonucleotide
cacagtaacttttactatggacatacattc

SEQ ID NO: 404255 - DNA, 30 bp, Artificial Sequence
  Synthetic oligonucleotide
gtgccgacgtgacagctttgggctacattc

SEQ ID NO: 404256 - DNA, 30 bp, Artificial Sequence
  Synthetic oligonucleotide
ctttgacaggcgattctgcgaattacattc

SEQ ID NO: 404257 - DNA, 30 bp, Artificial Sequence
  Synthetic oligonucleotide
actctaccgactaatgtcaagaaaccattc

SEQ ID NO: 404258 - DNA, 30 bp, Artificial Sequence
  Synthetic oligonucleotide
ggtggcgtttaagtcggatgagaaccattc

SEQ ID NO: 404259 - DNA, 30 bp, Artificial Sequence
  Synthetic oligonucleotide
ccactcggagactataaggatccaccattc

SEQ ID NO: 404260 - DNA, 30 bp, Artificial Sequence
  Synthetic oligonucleotide
gccggcacggatgccaagggcatgccattc

SEQ ID NO: 404261 - DNA, 30 bp, Artificial Sequence
  Synthetic oligonucleotide
taagccttaggcctttctgaaagtccattc

SEQ ID NO: 404262 - DNA, 30 bp, Artificial Sequence
  Synthetic oligonucleotide
actagcggcagtgcaactatacttccattc

SEQ ID NO: 404263 - DNA, 30 bp, Artificial Sequence
  Synthetic oligonucleotide
gtgctctagtgcccgtgcctataagcattc

SEQ ID NO: 404264 - DNA, 29 bp, Artificial Sequence
  Synthetic oligonucleotide
atatcatttcttgtcagcccacagcattc

SEQ ID NO: 404265 - DNA, 30 bp, Artificial Sequence
  Synthetic oligonucleotide
attatttttagctcgtccgggatagcattc

SEQ ID NO: 404266 - DNA, 30 bp, Artificial Sequence
  Synthetic oligonucleotide
tgccgaaaggggaaatctcgccacgcattc

SEQ ID NO: 404267 - DNA, 30 bp, Artificial Sequence
  Synthetic oligonucleotide
atacgcttaggccatattcgatccgcattc

SEQ ID NO: 404268 - DNA, 31 bp, Artificial Sequence
  Synthetic oligonucleotide
tgagactcgctcgaacttagaaaaggcattc

SEQ ID NO: 404269 - DNA, 30 bp, Artificial Sequence
  Synthetic oligonucleotide
gtatcgtgtggatgaggatagtttgcattc

SEQ ID NO: 404270 - DNA, 30 bp, Artificial Sequence
  Synthetic oligonucleotide
atagtctaccagtttgctacttaatcattc

SEQ ID NO: 404271 - DNA, 30 bp, Artificial Sequence
  Synthetic oligonucleotide
tttggtgtctcttgattgtaaggatcattc

SEQ ID NO: 404272 - DNA, 30 bp, Artificial Sequence
  Synthetic oligonucleotide
tcgctttacagcgggctcctactatcattc

SEQ ID NO: 404273 - DNA, 30 bp, Artificial Sequence
  Synthetic oligonucleotide
ccctatacatattactataccgtatcattc

SEQ ID NO: 404274 - DNA, 30 bp, Artificial Sequence
  Synthetic oligonucleotide
ctcagaattgagttagatagcggctcattc

SEQ ID NO: 404275 - DNA, 30 bp, Artificial Sequence
  Synthetic oligonucleotide
gtcggtaacttgatacctgcgacgtcattc

SEQ ID NO: 404276 - DNA, 30 bp, Artificial Sequence
  Synthetic oligonucleotide
ataagttatggaattgaaaccctgtcattc

SEQ ID NO: 404277 - DNA, 30 bp, Artificial Sequence
  Synthetic oligonucleotide
cccaattagggagtgatgttcacttcattc

SEQ ID NO: 404278 - DNA, 30 bp, Artificial Sequence
  Synthetic oligonucleotide
gatggtcagtgcgcttaacggctttcattc

SEQ ID NO: 404279 - DNA, 30 bp, Artificial Sequence
  Synthetic oligonucleotide
gttcgccctgggttcggtcggttcagattc

SEQ ID NO: 404280 - DNA, 30 bp, Artificial Sequence
  Synthetic oligonucleotide
tagtcattgactgttagacgtcagagattc

SEQ ID NO: 404281 - DNA, 30 bp, Artificial Sequence
  Synthetic oligonucleotide
gcgtcatcggtcaggggttgtgagagattc

SEQ ID NO: 404282 - DNA, 30 bp, Artificial Sequence
  Synthetic oligonucleotide
tttaccatgcaatcgagctagtcgagattc

SEQ ID NO: 404283 - DNA, 30 bp, Artificial Sequence
  Synthetic oligonucleotide
atcgttagtagcgctacgggaatgagattc

SEQ ID NO: 404284 - DNA, 30 bp, Artificial Sequence
  Synthetic oligonucleotide
ccgtagttgggacaccagcacgttagattc

SEQ ID NO: 404285 - DNA, 30 bp, Artificial Sequence
  Synthetic oligonucleotide
gggtttcgaggaccatccgactttagattc

SEQ ID NO: 404286 - DNA, 30 bp, Artificial Sequence
  Synthetic oligonucleotide
ttatttggcgccgggcaaaccgcccgattc

SEQ ID NO: 404287 - DNA, 30 bp, Artificial Sequence
  Synthetic oligonucleotide
caagacggtagcggtggtcctgcgcgattc

SEQ ID NO: 404288 - DNA, 30 bp, Artificial Sequence
  Synthetic oligonucleotide
aacaaataaataggggctataactcgattc

SEQ ID NO: 404289 - DNA, 30 bp, Artificial Sequence
  Synthetic oligonucleotide
tttcccgttgacatgatggaataaggattc

SEQ ID NO: 404290 - DNA, 30 bp, Artificial Sequence
  Synthetic oligonucleotide
ggctaacatgaaaatgattaagcaggattc

SEQ ID NO: 404291 - DNA, 30 bp, Artificial Sequence
  Synthetic oligonucleotide
acggttgtggacacacccgctcgaggattc

SEQ ID NO: 404292 - DNA, 30 bp, Artificial Sequence
  Synthetic oligonucleotide
gccagggatttgggcaaaaacctaggattc

SEQ ID NO: 404293 - DNA, 30 bp, Artificial Sequence
  Synthetic oligonucleotide
ttccaatttaagcgaggatggaccggattc

SEQ ID NO: 404294 - DNA, 30 bp, Artificial Sequence
  Synthetic oligonucleotide
ggtctgtctgacttttgcatggtcggattc

SEQ ID NO: 404295 - DNA, 30 bp, Artificial Sequence
  Synthetic oligonucleotide
agtgtggtaggccaaaccctagatggattc

SEQ ID NO: 404296 - DNA, 30 bp, Artificial Sequence
  Synthetic oligonucleotide
agctgatgtctgacgagctgaattggattc

SEQ ID NO: 404297 - DNA, 30 bp, Artificial Sequence
  Synthetic oligonucleotide
aatgaaccctatggagataacaaatgattc

SEQ ID NO: 404298 - DNA, 30 bp, Artificial Sequence
  Synthetic oligonucleotide
gagttgttgtacgacagctcgtaatgattc

SEQ ID NO: 404299 - DNA, 30 bp, Artificial Sequence
  Synthetic oligonucleotide
aattccgatcatagggggagagactgattc

SEQ ID NO: 404300 - DNA, 30 bp, Artificial Sequence
  Synthetic oligonucleotide
gtaccaaggagtgcaccggtattctgattc

SEQ ID NO: 404301 - DNA, 30 bp, Artificial Sequence
  Synthetic oligonucleotide
tagcagcggagtcgccacagatggtgattc

SEQ ID NO: 404302 - DNA, 30 bp, Artificial Sequence
  Synthetic oligonucleotide
agtagttttccttaattatgcatgtgattc

SEQ ID NO: 404303 - DNA, 30 bp, Artificial Sequence
  Synthetic oligonucleotide
tataaccgttgagtagacaatagttgattc

SEQ ID NO: 404304 - DNA, 30 bp, Artificial Sequence
  Synthetic oligonucleotide
tgattagcatgtcttcctaaggtttgattc

SEQ ID NO: 404305 - DNA, 30 bp, Artificial Sequence
  Synthetic oligonucleotide
atcggcgtttacgaccgcggggtttgattc

SEQ ID NO: 404306 - DNA, 30 bp, Artificial Sequence
  Synthetic oligonucleotide
tgaaccacaactcattatctattttgattc

SEQ ID NO: 404307 - DNA, 30 bp, Artificial Sequence
  Synthetic oligonucleotide
tctggtagattcggggtgcgcataatattc

SEQ ID NO: 404308 - DNA, 29 bp, Artificial Sequence
  Synthetic oligonucleotide
ctacgacgctaccggtgcaaacgatattc

SEQ ID NO: 404309 - DNA, 30 bp, Artificial Sequence
  Synthetic oligonucleotide
ctggtggtttagataacccatatgctattc

SEQ ID NO: 404310 - DNA, 30 bp, Artificial Sequence
  Synthetic oligonucleotide
tctcttggaggctcggagcggggtctattc

SEQ ID NO: 404311 - DNA, 30 bp, Artificial Sequence
  Synthetic oligonucleotide
ggtagagctttaggcttacatcttctattc

SEQ ID NO: 404312 - DNA, 30 bp, Artificial Sequence
  Synthetic oligonucleotide
tgattcggcaaaaaagcgtcgcgagtattc

SEQ ID NO: 404313 - DNA, 30 bp, Artificial Sequence
  Synthetic oligonucleotide
tctcgcatgctttacaggcttgccgtattc

SEQ ID NO: 404314 - DNA, 30 bp, Artificial Sequence
  Synthetic oligonucleotide
atcaggtcgccgtgaatgacatgggtattc

SEQ ID NO: 404315 - DNA, 30 bp, Artificial Sequence
  Synthetic oligonucleotide
ttgggcattccgtatcacactttggtattc

SEQ ID NO: 404316 - DNA, 30 bp, Artificial Sequence
  Synthetic oligonucleotide
gacatacgatggacggccctttatgtattc

SEQ ID NO: 404317 - DNA, 30 bp, Artificial Sequence
  Synthetic oligonucleotide
gtcgattgaagacaataatgtactgtattc

SEQ ID NO: 404318 - DNA, 30 bp, Artificial Sequence
  Synthetic oligonucleotide
gagggctgcacgggttgttaaagtgtattc

SEQ ID NO: 404319 - DNA, 30 bp, Artificial Sequence
  Synthetic oligonucleotide
ccgacagttctttgcgggccaagtgtattc

SEQ ID NO: 404320 - DNA, 30 bp, Artificial Sequence
  Synthetic oligonucleotide
cggatacactcagacttactggcattattc

SEQ ID NO: 404321 - DNA, 30 bp, Artificial Sequence
  Synthetic oligonucleotide
agaatcgttgccttaaaaaacatattattc

SEQ ID NO: 404322 - DNA, 30 bp, Artificial Sequence
  Synthetic oligonucleotide
gtggatccggttggacgggcgagtttattc

SEQ ID NO: 404323 - DNA, 30 bp, Artificial Sequence
  Synthetic oligonucleotide
cctgaagaatttagcctgatccgtttattc

SEQ ID NO: 404324 - DNA, 30 bp, Artificial Sequence
  Synthetic oligonucleotide
ctatctggttcgtaaaacccgggtttattc

SEQ ID NO: 404325 - DNA, 30 bp, Artificial Sequence
  Synthetic oligonucleotide
ggcgcaccattttagggtaatggtttattc

SEQ ID NO: 404326 - DNA, 30 bp, Artificial Sequence
  Synthetic oligonucleotide
ttggtatgcgcattcggccgggcaaacttc

SEQ ID NO: 404327 - DNA, 30 bp, Artificial Sequence
  Synthetic oligonucleotide
ctcatacgggggcgagatcgttcaaacttc

SEQ ID NO: 404328 - DNA, 30 bp, Artificial Sequence
  Synthetic oligonucleotide
cgaagtagcgcggtgggtcttttaaacttc

SEQ ID NO: 404329 - DNA, 30 bp, Artificial Sequence
  Synthetic oligonucleotide
aaccatcgcaaacatgctattaccaacttc

SEQ ID NO: 404330 - DNA, 30 bp, Artificial Sequence
  Synthetic oligonucleotide
cgtcccagtatgcccctagccggcaacttc

SEQ ID NO: 404331 - DNA, 30 bp, Artificial Sequence
  Synthetic oligonucleotide
atggattaggcgcgcacatccctgaacttc

SEQ ID NO: 404332 - DNA, 30 bp, Artificial Sequence
  Synthetic oligonucleotide
aggttagaacaggacttcgcgctgaacttc

SEQ ID NO: 404333 - DNA, 30 bp, Artificial Sequence
  Synthetic oligonucleotide
gtacgcgtattcgtatgacatagacacttc

SEQ ID NO: 404334 - DNA, 30 bp, Artificial Sequence
  Synthetic oligonucleotide
tgcagcccagacggatttattgagcacttc

SEQ ID NO: 404335 - DNA, 30 bp, Artificial Sequence
  Synthetic oligonucleotide
tcccacctaaaatgacggctacacgacttc

SEQ ID NO: 404336 - DNA, 30 bp, Artificial Sequence
  Synthetic oligonucleotide
tccaatactctgaaccgagaggtggacttc

SEQ ID NO: 404337 - DNA, 30 bp, Artificial Sequence
  Synthetic oligonucleotide
ggcactttgtatgcaggctggtctgacttc

SEQ ID NO: 404338 - DNA, 30 bp, Artificial Sequence
  Synthetic oligonucleotide
gtgaacggcaccggaggtattagatacttc

SEQ ID NO: 404339 - DNA, 30 bp, Artificial Sequence
  Synthetic oligonucleotide
gctaccgtgggccgcgctcaaggctacttc

SEQ ID NO: 404340 - DNA, 30 bp, Artificial Sequence
  Synthetic oligonucleotide
tagaagtatttgcgcggttccacgtacttc

SEQ ID NO: 404341 - DNA, 30 bp, Artificial Sequence
  Synthetic oligonucleotide
gctatctccggtaaacagcaaaggtacttc

SEQ ID NO: 404342 - DNA, 30 bp, Artificial Sequence
  Synthetic oligonucleotide
tgctgtagaactaaactagttagttacttc

SEQ ID NO: 404343 - DNA, 30 bp, Artificial Sequence
  Synthetic oligonucleotide
gataggttcagggatgcttacatttacttc

SEQ ID NO: 404344 - DNA, 30 bp, Artificial Sequence
  Synthetic oligonucleotide
cctcgaaacgccggcacagccttaaccttc

SEQ ID NO: 404345 - DNA, 30 bp, Artificial Sequence
  Synthetic oligonucleotide
cttaaggagcgttacgagtcattccccttc

SEQ ID NO: 404346 - DNA, 30 bp, Artificial Sequence
  Synthetic oligonucleotide
cttctctgatattgagccggtaagcccttc

SEQ ID NO: 404347 - DNA, 30 bp, Artificial Sequence
  Synthetic oligonucleotide
gaaggtggaacacacggagttcgagccttc

SEQ ID NO: 404348 - DNA, 30 bp, Artificial Sequence
  Synthetic oligonucleotide
tgtaaaacccagggtacttcattagccttc

SEQ ID NO: 404349 - DNA, 30 bp, Artificial Sequence
  Synthetic oligonucleotide
ataccaattagtattttagcagacgccttc

SEQ ID NO: 404350 - DNA, 30 bp, Artificial Sequence
  Synthetic oligonucleotide
acataggtgtaggttcggttatgggccttc

SEQ ID NO: 404351 - DNA, 30 bp, Artificial Sequence
  Synthetic oligonucleotide
tctgtccatggttgtattcgagaatccttc

SEQ ID NO: 404352 - DNA, 30 bp, Artificial Sequence
  Synthetic oligonucleotide
taagttcctaaagtgcaatcgaactccttc

SEQ ID NO: 404353 - DNA, 30 bp, Artificial Sequence
  Synthetic oligonucleotide
ttttggatttacaaagcggtgtagtccttc

SEQ ID NO: 404354 - DNA, 30 bp, Artificial Sequence
  Synthetic oligonucleotide
aagtcaaacttactacgcgtaatgtccttc

SEQ ID NO: 404355 - DNA, 30 bp, Artificial Sequence
  Synthetic oligonucleotide
gtatcgaagattagacactggacttccttc

SEQ ID NO: 404356 - DNA, 30 bp, Artificial Sequence
  Synthetic oligonucleotide
gatatccggctaggtcaatcgggttccttc

SEQ ID NO: 404357 - DNA, 30 bp, Artificial Sequence
  Synthetic oligonucleotide
cgaccaagggccatacactttggttccttc

SEQ ID NO: 404358 - DNA, 30 bp, Artificial Sequence
  Synthetic oligonucleotide
tcaggctccgtgagctaagcgcaaagcttc

SEQ ID NO: 404359 - DNA, 30 bp, Artificial Sequence
  Synthetic oligonucleotide
tttatatctttgatgggggaagaaagcttc

SEQ ID NO: 404360 - DNA, 30 bp, Artificial Sequence
  Synthetic oligonucleotide
tgcgagatccgatcggttcacccaagcttc

SEQ ID NO: 404361 - DNA, 30 bp, Artificial Sequence
  Synthetic oligonucleotide
atactcgggcgaggggattcgtgaagcttc

SEQ ID NO: 404362 - DNA, 30 bp, Artificial Sequence
  Synthetic oligonucleotide
cccgattcccctagtccaccgttgagcttc

SEQ ID NO: 404363 - DNA, 30 bp, Artificial Sequence
  Synthetic oligonucleotide
tgaagcagctgtgtaccgtatcgtagcttc

SEQ ID NO: 404364 - DNA, 30 bp, Artificial Sequence
  Synthetic oligonucleotide
ggaatcttccgtaaaatcagttaacgcttc

SEQ ID NO: 404365 - DNA, 30 bp, Artificial Sequence
  Synthetic oligonucleotide
gtcccacgagcgcacgtggagagccgcttc

SEQ ID NO: 404366 - DNA, 30 bp, Artificial Sequence
  Synthetic oligonucleotide
agacgttacgtagggatttgatacggcttc

SEQ ID NO: 404367 - DNA, 30 bp, Artificial Sequence
  Synthetic oligonucleotide
cttggccggtcagaatacactcccggcttc

SEQ ID NO: 404368 - DNA, 30 bp, Artificial Sequence
  Synthetic oligonucleotide
caagtaaacacccgttaccggtggggcttc

SEQ ID NO: 404369 - DNA, 30 bp, Artificial Sequence
  Synthetic oligonucleotide
cagcatattccaacagcaacgatgggcttc

SEQ ID NO: 404370 - DNA, 30 bp, Artificial Sequence
  Synthetic oligonucleotide
gaccgaagacggatgcaatatgcatgcttc

SEQ ID NO: 404371 - DNA, 30 bp, Artificial Sequence
  Synthetic oligonucleotide
attgcaaggctaccaacggatttatgcttc

SEQ ID NO: 404372 - DNA, 30 bp, Artificial Sequence
  Synthetic oligonucleotide
tgggttagtgcaagggtttcgacctgcttc

SEQ ID NO: 404373 - DNA, 30 bp, Artificial Sequence
  Synthetic oligonucleotide
ctgtaaggttagtttcatatcagctgcttc

SEQ ID NO: 404374 - DNA, 30 bp, Artificial Sequence
  Synthetic oligonucleotide
cgcaagggcatagaggcaagcttgtgcttc

SEQ ID NO: 404375 - DNA, 30 bp, Artificial Sequence
  Synthetic oligonucleotide
gtccgggaaagaaaatttgggagaatcttc

SEQ ID NO: 404376 - DNA, 30 bp, Artificial Sequence
  Synthetic oligonucleotide
cccaagatctggctcctctgggtcatcttc

SEQ ID NO: 404377 - DNA, 30 bp, Artificial Sequence
  Synthetic oligonucleotide
atttaagaatgaggatagagagcgatcttc

SEQ ID NO: 404378 - DNA, 30 bp, Artificial Sequence
  Synthetic oligonucleotide
ctaccaaatgttccgcgcccctcgatcttc

SEQ ID NO: 404379 - DNA, 30 bp, Artificial Sequence
  Synthetic oligonucleotide
gtgtgtgacatgccacagactgggatcttc

SEQ ID NO: 404380 - DNA, 30 bp, Artificial Sequence
  Synthetic oligonucleotide
tatgacatgggggcaaactgagtgatcttc

SEQ ID NO: 404381 - DNA, 30 bp, Artificial Sequence
  Synthetic oligonucleotide
tatacaatggtgactcggcgagctatcttc

SEQ ID NO: 404382 - DNA, 30 bp, Artificial Sequence
  Synthetic oligonucleotide
gtctcagtctatactttaaaaatcctcttc

SEQ ID NO: 404383 - DNA, 29 bp, Artificial Sequence
  Synthetic oligonucleotide
gtactaactacaccagtaatttcctcttc

SEQ ID NO: 404384 - DNA, 30 bp, Artificial Sequence
  Synthetic oligonucleotide
gagcactttgcacattgttctcggctcttc

SEQ ID NO: 404385 - DNA, 30 bp, Artificial Sequence
  Synthetic oligonucleotide
tatgagggtgacacaatatttcggctcttc

SEQ ID NO: 404386 - DNA, 30 bp, Artificial Sequence
  Synthetic oligonucleotide
acgggccaagagtctctagaaactctcttc

SEQ ID NO: 404387 - DNA, 30 bp, Artificial Sequence
  Synthetic oligonucleotide
tactggtctacggagactcacggtctcttc

SEQ ID NO: 404388 - DNA, 30 bp, Artificial Sequence
  Synthetic oligonucleotide
cgctgaagatccgccggatcagtagtcttc

SEQ ID NO: 404389 - DNA, 30 bp, Artificial Sequence
  Synthetic oligonucleotide
gtaagttcttatgtactgtacgctgtcttc

SEQ ID NO: 404390 - DNA, 30 bp, Artificial Sequence
  Synthetic oligonucleotide
ccatcaagaatgtccgatttacgtgtcttc

SEQ ID NO: 404391 - DNA, 30 bp, Artificial Sequence
  Synthetic oligonucleotide
cttattaggcgttccaagtggaaattcttc

SEQ ID NO: 404392 - DNA, 30 bp, Artificial Sequence
  Synthetic oligonucleotide
gcttaacgcacataacggccctgattcttc

SEQ ID NO: 404393 - DNA, 30 bp, Artificial Sequence
  Synthetic oligonucleotide
tgggggaagtgagtcacgcggaagttcttc

SEQ ID NO: 404394 - DNA, 30 bp, Artificial Sequence
  Synthetic oligonucleotide
gtgttcagcaaaaaggcttttcggttcttc

SEQ ID NO: 404395 - DNA, 30 bp, Artificial Sequence
  Synthetic oligonucleotide
gtctgatggcaatcggatgtaagtttcttc

SEQ ID NO: 404396 - DNA, 30 bp, Artificial Sequence
  Synthetic oligonucleotide
ccgatttcgcgcgatttgagaggtttcttc

SEQ ID NO: 404397 - DNA, 30 bp, Artificial Sequence
  Synthetic oligonucleotide
ggtgaagatgttttgccgttgtttttcttc

SEQ ID NO: 404398 - DNA, 30 bp, Artificial Sequence
  Synthetic oligonucleotide
acgcatagaatttgaagacgaccaaagttc

SEQ ID NO: 404399 - DNA, 30 bp, Artificial Sequence
  Synthetic oligonucleotide
ctagatgttccgacgagttcgtacaagttc

SEQ ID NO: 404400 - DNA, 30 bp, Artificial Sequence
  Synthetic oligonucleotide
atgcacgcttgacccgcagtcgccaagttc

SEQ ID NO: 404401 - DNA, 30 bp, Artificial Sequence
  Synthetic oligonucleotide
agtgtgtcccgagctgggctccgcaagttc

SEQ ID NO: 404402 - DNA, 30 bp, Artificial Sequence
  Synthetic oligonucleotide
gtcagtcaccggcgtactcgctgcaagttc

SEQ ID NO: 404403 - DNA, 30 bp, Artificial Sequence
  Synthetic oligonucleotide
tgagcctccagatgcccgtccctcaagttc

SEQ ID NO: 404404 - DNA, 30 bp, Artificial Sequence
  Synthetic oligonucleotide
aatttttaccctagagtcgtggataagttc

SEQ ID NO: 404405 - DNA, 30 bp, Artificial Sequence
  Synthetic oligonucleotide
attaatgtaataagatagagatataagttc

SEQ ID NO: 404406 - DNA, 30 bp, Artificial Sequence
  Synthetic oligonucleotide
cctgtgttaagtcacacggattataagttc

SEQ ID NO: 404407 - DNA, 30 bp, Artificial Sequence
  Synthetic oligonucleotide
ataattaacgtgtttccagttacacagttc

SEQ ID NO: 404408 - DNA, 30 bp, Artificial Sequence
  Synthetic oligonucleotide
gcgtactctgctaagcgagtttggcagttc

SEQ ID NO: 404409 - DNA, 30 bp, Artificial Sequence
  Synthetic oligonucleotide
gagatgcgtcatcgccggtgaactcagttc

SEQ ID NO: 404410 - DNA, 30 bp, Artificial Sequence
  Synthetic oligonucleotide
aataactcagcatgtctgcagtctcagttc

SEQ ID NO: 404411 - DNA, 30 bp, Artificial Sequence
  Synthetic oligonucleotide
ggtcgtcgcactcagggtacctgtcagttc

SEQ ID NO: 404412 - DNA, 30 bp, Artificial Sequence
  Synthetic oligonucleotide
gaatcttcctttatcaaggcgtaagagttc

SEQ ID NO: 404413 - DNA, 30 bp, Artificial Sequence
  Synthetic oligonucleotide
gctttattaggtaagttaggggcagagttc

SEQ ID NO: 404414 - DNA, 30 bp, Artificial Sequence
  Synthetic oligonucleotide
agtgcgtagaccttatagaaccgagagttc

SEQ ID NO: 404415 - DNA, 30 bp, Artificial Sequence
  Synthetic oligonucleotide
gttcacaaaaagagataatatggagagttc

SEQ ID NO: 404416 - DNA, 30 bp, Artificial Sequence
  Synthetic oligonucleotide
gcattttgccatcccggagtaaacgagttc

SEQ ID NO: 404417 - DNA, 30 bp, Artificial Sequence
  Synthetic oligonucleotide
attcatggtacccgactgagccgcgagttc

SEQ ID NO: 404418 - DNA, 30 bp, Artificial Sequence
  Synthetic oligonucleotide
taggatatctccccaaaaattcgggagttc

SEQ ID NO: 404419 - DNA, 30 bp, Artificial Sequence
  Synthetic oligonucleotide
tctgtgttaccacgaccaaagtatgagttc

SEQ ID NO: 404420 - DNA, 30 bp, Artificial Sequence
  Synthetic oligonucleotide
gggtcacaacagacgcgtacagttgagttc

SEQ ID NO: 404421 - DNA, 29 bp, Artificial Sequence
  Synthetic oligonucleotide
catagtactaaaagtcgcatgttgagttc

SEQ ID NO: 404422 - DNA, 30 bp, Artificial Sequence
  Synthetic oligonucleotide
aagcagatccccgggaccaatgaatagttc

SEQ ID NO: 404423 - DNA, 30 bp, Artificial Sequence
  Synthetic oligonucleotide
tgcccactgccgcgggacttaggatagttc

SEQ ID NO: 404424 - DNA, 30 bp, Artificial Sequence
  Synthetic oligonucleotide
aatgagataaacttgtggaatacgtagttc

SEQ ID NO: 404425 - DNA, 30 bp, Artificial Sequence
  Synthetic oligonucleotide
aagaatctcgtggtcatcgcgccgtagttc

SEQ ID NO: 404426 - DNA, 30 bp, Artificial Sequence
  Synthetic oligonucleotide
tgcattaggttaaatctgatgaggtagttc

SEQ ID NO: 404427 - DNA, 30 bp, Artificial Sequence
  Synthetic oligonucleotide
cagtttgagatgggagtggaattgtagttc

SEQ ID NO: 404428 - DNA, 30 bp, Artificial Sequence
  Synthetic oligonucleotide
ggatgagacgattattgcgattcttagttc

SEQ ID NO: 404429 - DNA, 30 bp, Artificial Sequence
  Synthetic oligonucleotide
cattcatagtgttgaccatgtatttagttc

SEQ ID NO: 404430 - DNA, 30 bp, Artificial Sequence
  Synthetic oligonucleotide
atcaatatacctcccctgatttgcacgttc

SEQ ID NO: 404431 - DNA, 30 bp, Artificial Sequence
  Synthetic oligonucleotide
atgtagcaggattgacgactaatcacgttc

SEQ ID NO: 404432 - DNA, 30 bp, Artificial Sequence
  Synthetic oligonucleotide
caacaagccaacatctctacactcacgttc

SEQ ID NO: 404433 - DNA, 30 bp, Artificial Sequence
  Synthetic oligonucleotide
gccgcatgtgacaatccagaacagacgttc

SEQ ID NO: 404434 - DNA, 30 bp, Artificial Sequence
  Synthetic oligonucleotide
cagcgtttgcgacctagcttgacgacgttc

SEQ ID NO: 404435 - DNA, 30 bp, Artificial Sequence
  Synthetic oligonucleotide
aatacgtcccgcacgaatgaacctacgttc

SEQ ID NO: 404436 - DNA, 30 bp, Artificial Sequence
  Synthetic oligonucleotide
ggccagggcaactatcaaaggtgtacgttc

SEQ ID NO: 404437 - DNA, 30 bp, Artificial Sequence
  Synthetic oligonucleotide
tattttcgggacgatttcgaagtcccgttc

SEQ ID NO: 404438 - DNA, 30 bp, Artificial Sequence
  Synthetic oligonucleotide
tctcttccgcaaaccatcttagggccgttc

SEQ ID NO: 404439 - DNA, 30 bp, Artificial Sequence
  Synthetic oligonucleotide
tttttataagggtcgggttatgggccgttc

SEQ ID NO: 404440 - DNA, 30 bp, Artificial Sequence
  Synthetic oligonucleotide
gatggatccgaggcctccacgatgccgttc

SEQ ID NO: 404441 - DNA, 30 bp, Artificial Sequence
  Synthetic oligonucleotide
agggtaacgtggccatggcagtatccgttc

SEQ ID NO: 404442 - DNA, 30 bp, Artificial Sequence
  Synthetic oligonucleotide
ccatgttataggcggactgtgattccgttc

SEQ ID NO: 404443 - DNA, 30 bp, Artificial Sequence
  Synthetic oligonucleotide
tctgcagctgcaaattagaggcttccgttc

SEQ ID NO: 404444 - DNA, 30 bp, Artificial Sequence
  Synthetic oligonucleotide
tttggttagagcaatagtaaggaagcgttc

SEQ ID NO: 404445 - DNA, 30 bp, Artificial Sequence
  Synthetic oligonucleotide
acgtgtattttacctaggcaccaggcgttc

SEQ ID NO: 404446 - DNA, 30 bp, Artificial Sequence
  Synthetic oligonucleotide
aaggtgttgctctagacatctgaggcgttc

SEQ ID NO: 404447 - DNA, 30 bp, Artificial Sequence
  Synthetic oligonucleotide
tacttcaaatggattattgatggggcgttc

SEQ ID NO: 404448 - DNA, 30 bp, Artificial Sequence
  Synthetic oligonucleotide
cgggctagccgaacggggcagaatgcgttc

SEQ ID NO: 404449 - DNA, 30 bp, Artificial Sequence
  Synthetic oligonucleotide
gtcacagccacgggaggtcgttaatcgttc

SEQ ID NO: 404450 - DNA, 30 bp, Artificial Sequence
  Synthetic oligonucleotide
gtctagtgttgatggatcataaattcgttc

SEQ ID NO: 404451 - DNA, 30 bp, Artificial Sequence
  Synthetic oligonucleotide
accgtactgcggacgccactgagttcgttc

SEQ ID NO: 404452 - DNA, 30 bp, Artificial Sequence
  Synthetic oligonucleotide
aaaatagtagcatccatcaagctttcgttc

SEQ ID NO: 404453 - DNA, 30 bp, Artificial Sequence
  Synthetic oligonucleotide
tcacgccattttggatcctcagcaaggttc

SEQ ID NO: 404454 - DNA, 30 bp, Artificial Sequence
  Synthetic oligonucleotide
gaacgggacccatgaaaaagggcaaggttc

SEQ ID NO: 404455 - DNA, 30 bp, Artificial Sequence
  Synthetic oligonucleotide
atttctaagtagcttaatgcactaaggttc

SEQ ID NO: 404456 - DNA, 30 bp, Artificial Sequence
  Synthetic oligonucleotide
atccactattcagtcctccacctaaggttc

SEQ ID NO: 404457 - DNA, 30 bp, Artificial Sequence
  Synthetic oligonucleotide
gttgtaatgttccggatgtcgcacaggttc

SEQ ID NO: 404458 - DNA, 30 bp, Artificial Sequence
  Synthetic oligonucleotide
cccggtgaaaggttgggggtaccgaggttc

SEQ ID NO: 404459 - DNA, 30 bp, Artificial Sequence
  Synthetic oligonucleotide
taagagttgaccggcagactaactaggttc

SEQ ID NO: 404460 - DNA, 30 bp, Artificial Sequence
  Synthetic oligonucleotide
cgaatctctcgatgcgtaaaaaaacggttc

SEQ ID NO: 404461 - DNA, 30 bp, Artificial Sequence
  Synthetic oligonucleotide
atagccttgggcagctgtccggaacggttc

SEQ ID NO: 404462 - DNA, 30 bp, Artificial Sequence
  Synthetic oligonucleotide
ccgctgcataaaacggtcataccacggttc

SEQ ID NO: 404463 - DNA, 30 bp, Artificial Sequence
  Synthetic oligonucleotide
tccaaggcaacgtcgcgtttgagacggttc

SEQ ID NO: 404464 - DNA, 30 bp, Artificial Sequence
  Synthetic oligonucleotide
taccattaggaacacggcgagcatcggttc

SEQ ID NO: 404465 - DNA, 30 bp, Artificial Sequence
  Synthetic oligonucleotide
tacgttttgatatcccaacagtatcggttc

SEQ ID NO: 404466 - DNA, 30 bp, Artificial Sequence
  Synthetic oligonucleotide
tgtggtccggcagaggcggccagtcggttc

SEQ ID NO: 404467 - DNA, 30 bp, Artificial Sequence
  Synthetic oligonucleotide
tgccatctggtaacagattcgtaagggttc

SEQ ID NO: 404468 - DNA, 30 bp, Artificial Sequence
  Synthetic oligonucleotide
aggactgacttagcggatagtacagggttc

SEQ ID NO: 404469 - DNA, 30 bp, Artificial Sequence
  Synthetic oligonucleotide
ccgtaggcccctgtaagagggccagggttc

SEQ ID NO: 404470 - DNA, 30 bp, Artificial Sequence
  Synthetic oligonucleotide
atcttatacaaggactgcgggagagggttc

SEQ ID NO: 404471 - DNA, 30 bp, Artificial Sequence
  Synthetic oligonucleotide
gtcgcaaatataatcaatactcacgggttc

SEQ ID NO: 404472 - DNA, 30 bp, Artificial Sequence
  Synthetic oligonucleotide
cggggtgagaccgcagtcttcgacgggttc

SEQ ID NO: 404473 - DNA, 30 bp, Artificial Sequence
  Synthetic oligonucleotide
tgcacccctgatcgggcgacaaccgggttc

SEQ ID NO: 404474 - DNA, 30 bp, Artificial Sequence
  Synthetic oligonucleotide
tttggagtgtttcccaaattcagcgggttc

SEQ ID NO: 404475 - DNA, 30 bp, Artificial Sequence
  Synthetic oligonucleotide
cacggtacactacctccggagaaggggttc

SEQ ID NO: 404476 - DNA, 30 bp, Artificial Sequence
  Synthetic oligonucleotide
ggtgcgctcggctgggaagttgaggggttc

SEQ ID NO: 404477 - DNA, 30 bp, Artificial Sequence
  Synthetic oligonucleotide
gatgaagttttccaggctgactaggggttc

SEQ ID NO: 404478 - DNA, 30 bp, Artificial Sequence
  Synthetic oligonucleotide
cattttagctcccaagcgccttcggggttc

SEQ ID NO: 404479 - DNA, 30 bp, Artificial Sequence
  Synthetic oligonucleotide
tgcacagtgattatgtaaaagggggggttc

SEQ ID NO: 404480 - DNA, 30 bp, Artificial Sequence
  Synthetic oligonucleotide
gtccctctaaccggataatggctggggttc

SEQ ID NO: 404481 - DNA, 30 bp, Artificial Sequence
  Synthetic oligonucleotide
aatagcctatcgtataggtaacctgggttc

SEQ ID NO: 404482 - DNA, 30 bp, Artificial Sequence
  Synthetic oligonucleotide
ggatcggttcgaggtttcgtgcaatggttc

SEQ ID NO: 404483 - DNA, 30 bp, Artificial Sequence
  Synthetic oligonucleotide
tagaccaccatgcagccgcggctatggttc

SEQ ID NO: 404484 - DNA, 30 bp, Artificial Sequence
  Synthetic oligonucleotide
ctgaaattccatgcagacacccgctggttc

SEQ ID NO: 404485 - DNA, 30 bp, Artificial Sequence
  Synthetic oligonucleotide
gaaagcacgatcctgcagccatagtggttc

SEQ ID NO: 404486 - DNA, 30 bp, Artificial Sequence
  Synthetic oligonucleotide
aattgatgggagtgcactggcgtgtggttc

SEQ ID NO: 404487 - DNA, 30 bp, Artificial Sequence
  Synthetic oligonucleotide
ttcctccagcaagtatgatccgcttggttc

SEQ ID NO: 404488 - DNA, 30 bp, Artificial Sequence
  Synthetic oligonucleotide
agatggctctttgtgcgagtaatttggttc

SEQ ID NO: 404489 - DNA, 30 bp, Artificial Sequence
  Synthetic oligonucleotide
cagtcgccttggctcgagagtgtttggttc

SEQ ID NO: 404490 - DNA, 30 bp, Artificial Sequence
  Synthetic oligonucleotide
gttagccacgacttcacatggcgaatgttc

SEQ ID NO: 404491 - DNA, 30 bp, Artificial Sequence
  Synthetic oligonucleotide
gacgcgaggcaccttcaatgattcatgttc

SEQ ID NO: 404492 - DNA, 30 bp, Artificial Sequence
  Synthetic oligonucleotide
cagagcttagtgattatatgcaaactgttc

SEQ ID NO: 404493 - DNA, 30 bp, Artificial Sequence
  Synthetic oligonucleotide
cgctcgccgctccgtcttgcacgactgttc

SEQ ID NO: 404494 - DNA, 30 bp, Artificial Sequence
  Synthetic oligonucleotide
cacgtaatctacagccttaccttactgttc

SEQ ID NO: 404495 - DNA, 30 bp, Artificial Sequence
  Synthetic oligonucleotide
gccactcggcggtccggcgggaagctgttc

SEQ ID NO: 404496 - DNA, 30 bp, Artificial Sequence
  Synthetic oligonucleotide
gtacgatccgagttcctcccgtggctgttc

SEQ ID NO: 404497 - DNA, 30 bp, Artificial Sequence
  Synthetic oligonucleotide
gacttgaactccggcatatagcgagtgttc

SEQ ID NO: 404498 - DNA, 30 bp, Artificial Sequence
  Synthetic oligonucleotide
agtagggtggttatatggtccatagtgttc

SEQ ID NO: 404499 - DNA, 30 bp, Artificial Sequence
  Synthetic oligonucleotide
gtatgatttggataagcacttacggtgttc

SEQ ID NO: 404500 - DNA, 30 bp, Artificial Sequence
  Synthetic oligonucleotide
gtggtattcatatatgctgaagtggtgttc

SEQ ID NO: 404501 - DNA, 30 bp, Artificial Sequence
  Synthetic oligonucleotide
acgtatggtttatttgtaacacgtgtgttc

SEQ ID NO: 404502 - DNA, 30 bp, Artificial Sequence
  Synthetic oligonucleotide
gtcccgggacgtcggaatccttgtgtgttc

SEQ ID NO: 404503 - DNA, 30 bp, Artificial Sequence
  Synthetic oligonucleotide
cagaaataccgacgggtctagattgtgttc

SEQ ID NO: 404504 - DNA, 30 bp, Artificial Sequence
  Synthetic oligonucleotide
gaatcagcgcgtccgaaaaactaattgttc

SEQ ID NO: 404505 - DNA, 30 bp, Artificial Sequence
  Synthetic oligonucleotide
acgcgatccatcgatgcaaggtcattgttc

SEQ ID NO: 404506 - DNA, 31 bp, Artificial Sequence
  Synthetic oligonucleotide
cggtgtcagcaacggcacattagagttgttc

SEQ ID NO: 404507 - DNA, 30 bp, Artificial Sequence
  Synthetic oligonucleotide
taatcgcacacaaatctccaggggttgttc

SEQ ID NO: 404508 - DNA, 30 bp, Artificial Sequence
  Synthetic oligonucleotide
tttcctccactgtatagcatcatgttgttc

SEQ ID NO: 404509 - DNA, 30 bp, Artificial Sequence
  Synthetic oligonucleotide
tcctccaaaacaattctttttcccaatttc

SEQ ID NO: 404510 - DNA, 30 bp, Artificial Sequence
  Synthetic oligonucleotide
acacccgattgtgcctctcgagccaatttc

SEQ ID NO: 404511 - DNA, 30 bp, Artificial Sequence
  Synthetic oligonucleotide
cattatagacattttctgaaatagaatttc

SEQ ID NO: 404512 - DNA, 30 bp, Artificial Sequence
  Synthetic oligonucleotide
gcactcgctgtccgttgaacgcggaatttc

SEQ ID NO: 404513 - DNA, 30 bp, Artificial Sequence
  Synthetic oligonucleotide
tgagacacatagcgactgagcggtaatttc

SEQ ID NO: 404514 - DNA, 30 bp, Artificial Sequence
  Synthetic oligonucleotide
ttgggccaaaaggtgccgctgccacatttc

SEQ ID NO: 404515 - DNA, 30 bp, Artificial Sequence
  Synthetic oligonucleotide
tcgtgggccggttgaacggcaggacatttc

SEQ ID NO: 404516 - DNA, 30 bp, Artificial Sequence
  Synthetic oligonucleotide
ttttcgaagtgtgcatagcgagaccatttc

SEQ ID NO: 404517 - DNA, 30 bp, Artificial Sequence
  Synthetic oligonucleotide
taccggtcccccgaacggacatagcatttc

SEQ ID NO: 404518 - DNA, 30 bp, Artificial Sequence
  Synthetic oligonucleotide
gttaccgattcgtaagcaaactcgcatttc

SEQ ID NO: 404519 - DNA, 30 bp, Artificial Sequence
  Synthetic oligonucleotide
atgcaacctagatatggcatgcggcatttc

SEQ ID NO: 404520 - DNA, 30 bp, Artificial Sequence
  Synthetic oligonucleotide
tccatgctaggtgtagggttcgggcatttc

SEQ ID NO: 404521 - DNA, 30 bp, Artificial Sequence
  Synthetic oligonucleotide
ctgggtcacagagtacccaaatggcatttc

SEQ ID NO: 404522 - DNA, 30 bp, Artificial Sequence
  Synthetic oligonucleotide
ttccgtgacagtttaggaaccgtgcatttc

SEQ ID NO: 404523 - DNA, 30 bp, Artificial Sequence
  Synthetic oligonucleotide
acttggacagtataagaaatatatcatttc

SEQ ID NO: 404524 - DNA, 30 bp, Artificial Sequence
  Synthetic oligonucleotide
tcacatgctctaaaagtttggtttcatttc

SEQ ID NO: 404525 - DNA, 30 bp, Artificial Sequence
  Synthetic oligonucleotide
taatcgcgcgatcttagagattttcatttc

SEQ ID NO: 404526 - DNA, 30 bp, Artificial Sequence
  Synthetic oligonucleotide
ctttaacgcggtttagattacccagatttc

SEQ ID NO: 404527 - DNA, 30 bp, Artificial Sequence
  Synthetic oligonucleotide
tacctctcgcgcagcactggattggatttc

SEQ ID NO: 404528 - DNA, 30 bp, Artificial Sequence
  Synthetic oligonucleotide
ctctgtattctagatcagcttaactatttc

SEQ ID NO: 404529 - DNA, 30 bp, Artificial Sequence
  Synthetic oligonucleotide
atctacagacgcacgtgttttaggtatttc

SEQ ID NO: 404530 - DNA, 30 bp, Artificial Sequence
  Synthetic oligonucleotide
ctttagggagtaaagagtctgcattatttc

SEQ ID NO: 404531 - DNA, 30 bp, Artificial Sequence
  Synthetic oligonucleotide
tttgcttgggagagacactatcgttatttc

SEQ ID NO: 404532 - DNA, 30 bp, Artificial Sequence
  Synthetic oligonucleotide
atcaaatgggtcaaaaagctccccactttc

SEQ ID NO: 404533 - DNA, 30 bp, Artificial Sequence
  Synthetic oligonucleotide
tcagttgagagccgcctggcaaagactttc

SEQ ID NO: 404534 - DNA, 30 bp, Artificial Sequence
  Synthetic oligonucleotide
tcccctcttttcatggtaaagaggactttc

SEQ ID NO: 404535 - DNA, 30 bp, Artificial Sequence
  Synthetic oligonucleotide
ctgttagtatgagtcagaaaacctactttc

SEQ ID NO: 404536 - DNA, 30 bp, Artificial Sequence
  Synthetic oligonucleotide
actttggcgctgaaattgatcggtactttc

SEQ ID NO: 404537 - DNA, 30 bp, Artificial Sequence
  Synthetic oligonucleotide
gtggcgtggattccacccgacccacctttc

SEQ ID NO: 404538 - DNA, 30 bp, Artificial Sequence
  Synthetic oligonucleotide
tgagtcttatcggataagggtggccctttc

SEQ ID NO: 404539 - DNA, 30 bp, Artificial Sequence
  Synthetic oligonucleotide
gagcacgccctcatgtttgggaagcctttc

SEQ ID NO: 404540 - DNA, 30 bp, Artificial Sequence
  Synthetic oligonucleotide
gtatgcaataccaggaaagggcatcctttc

SEQ ID NO: 404541 - DNA, 30 bp, Artificial Sequence
  Synthetic oligonucleotide
tatgtagccttggcctccaccatcgctttc

SEQ ID NO: 404542 - DNA, 30 bp, Artificial Sequence
  Synthetic oligonucleotide
ttaaacaggtttgacatcctctctgctttc

SEQ ID NO: 404543 - DNA, 30 bp, Artificial Sequence
  Synthetic oligonucleotide
acagaatggcgacattttacggaatctttc

SEQ ID NO: 404544 - DNA, 28 bp, Artificial Sequence
  Synthetic oligonucleotide
gatcagcgtctcattttacgcatctttc

SEQ ID NO: 404545 - DNA, 30 bp, Artificial Sequence
  Synthetic oligonucleotide
tccgtaagagacatgaggactgcatctttc

SEQ ID NO: 404546 - DNA, 30 bp, Artificial Sequence
  Synthetic oligonucleotide
gcaaatatacacttgatcaagagatctttc

SEQ ID NO: 404547 - DNA, 30 bp, Artificial Sequence
  Synthetic oligonucleotide
ttagcaagactcctgtctcacgtctctttc

SEQ ID NO: 404548 - DNA, 30 bp, Artificial Sequence
  Synthetic oligonucleotide
ggtgcgttgcaattcatgtccgtctctttc

SEQ ID NO: 404549 - DNA, 29 bp, Artificial Sequence
  Synthetic oligonucleotide
gtgaaataggcggttcatgttggtctttc

SEQ ID NO: 404550 - DNA, 30 bp, Artificial Sequence
  Synthetic oligonucleotide
tcaaatgcggctttctaacaaacttctttc

SEQ ID NO: 404551 - DNA, 30 bp, Artificial Sequence
  Synthetic oligonucleotide
caccgggtgaataaacgcccaggaagtttc

SEQ ID NO: 404552 - DNA, 30 bp, Artificial Sequence
  Synthetic oligonucleotide
aagacctctcatacagtacggggaagtttc

SEQ ID NO: 404553 - DNA, 30 bp, Artificial Sequence
  Synthetic oligonucleotide
ggggctttgtctggccaactagacagtttc

SEQ ID NO: 404554 - DNA, 30 bp, Artificial Sequence
  Synthetic oligonucleotide
ggtcaaggtacagacggtgtttacagtttc

SEQ ID NO: 404555 - DNA, 30 bp, Artificial Sequence
  Synthetic oligonucleotide
ctaacatgcgatagcgggtaaatgagtttc

SEQ ID NO: 404556 - DNA, 30 bp, Artificial Sequence
  Synthetic oligonucleotide
gggtgtacgaaacacaccgtaaaacgtttc

SEQ ID NO: 404557 - DNA, 30 bp, Artificial Sequence
  Synthetic oligonucleotide
tatctgaacatgtcgctcctgaaccgtttc

SEQ ID NO: 404558 - DNA, 30 bp, Artificial Sequence
  Synthetic oligonucleotide
atattgacattgtcaaatcgccagcgtttc

SEQ ID NO: 404559 - DNA, 30 bp, Artificial Sequence
  Synthetic oligonucleotide
taggacacacgcaagttatttgagcgtttc

SEQ ID NO: 404560 - DNA, 30 bp, Artificial Sequence
  Synthetic oligonucleotide
cgaccggtcggtaatcgacaacctcgtttc

SEQ ID NO: 404561 - DNA, 30 bp, Artificial Sequence
  Synthetic oligonucleotide
ctcaggcaatgcaacaaaccataaggtttc

SEQ ID NO: 404562 - DNA, 30 bp, Artificial Sequence
  Synthetic oligonucleotide
gtttgtgtaaacctgttagctggaggtttc

SEQ ID NO: 404563 - DNA, 30 bp, Artificial Sequence
  Synthetic oligonucleotide
cattacatcgattacacgagatgcggtttc

SEQ ID NO: 404564 - DNA, 30 bp, Artificial Sequence
  Synthetic oligonucleotide
tattcatacctaggaatccgtatcggtttc

SEQ ID NO: 404565 - DNA, 30 bp, Artificial Sequence
  Synthetic oligonucleotide
agcatgacaaatccagagtccgtcggtttc

SEQ ID NO: 404566 - DNA, 30 bp, Artificial Sequence
  Synthetic oligonucleotide
agatgacacgcgccaaaacacgagggtttc

SEQ ID NO: 404567 - DNA, 30 bp, Artificial Sequence
  Synthetic oligonucleotide
agagaaccgcgccgaacccaggcgggtttc

SEQ ID NO: 404568 - DNA, 30 bp, Artificial Sequence
  Synthetic oligonucleotide
ataaaagtcttgacaatcaggtcgggtttc

SEQ ID NO: 404569 - DNA, 30 bp, Artificial Sequence
  Synthetic oligonucleotide
cctctctgcacccttaccgaacgtggtttc

SEQ ID NO: 404570 - DNA, 30 bp, Artificial Sequence
  Synthetic oligonucleotide
taagttttactaattatctaggcatgtttc

SEQ ID NO: 404571 - DNA, 30 bp, Artificial Sequence
  Synthetic oligonucleotide
tgaagacctgttgaaggggtccgatgtttc

SEQ ID NO: 404572 - DNA, 30 bp, Artificial Sequence
  Synthetic oligonucleotide
tgctacgtgcaccagggcattgtatgtttc

SEQ ID NO: 404573 - DNA, 30 bp, Artificial Sequence
  Synthetic oligonucleotide
cccatcggcccatctgcaaggatctgtttc

SEQ ID NO: 404574 - DNA, 30 bp, Artificial Sequence
  Synthetic oligonucleotide
attcaccataaaggtctatagaagtgtttc

SEQ ID NO: 404575 - DNA, 30 bp, Artificial Sequence
  Synthetic oligonucleotide
ccatcatgaatatgctgttcgacgtgtttc

SEQ ID NO: 404576 - DNA, 30 bp, Artificial Sequence
  Synthetic oligonucleotide
tggattggctagcggtccataccgtgtttc

SEQ ID NO: 404577 - DNA, 30 bp, Artificial Sequence
  Synthetic oligonucleotide
atgcatcacacgcatcgcctgccgtgtttc

SEQ ID NO: 404578 - DNA, 30 bp, Artificial Sequence
  Synthetic oligonucleotide
taattctgggcacataattcaaattgtttc

SEQ ID NO: 404579 - DNA, 30 bp, Artificial Sequence
  Synthetic oligonucleotide
tggtcggctttaagatccgccgcaattttc

SEQ ID NO: 404580 - DNA, 30 bp, Artificial Sequence
  Synthetic oligonucleotide
gtaccgatgataggcacttaacacattttc

SEQ ID NO: 404581 - DNA, 30 bp, Artificial Sequence
  Synthetic oligonucleotide
tcaatattcatgagactttatgacattttc

SEQ ID NO: 404582 - DNA, 30 bp, Artificial Sequence
  Synthetic oligonucleotide
atggagatgtgccacccgtattagattttc

SEQ ID NO: 404583 - DNA, 30 bp, Artificial Sequence
  Synthetic oligonucleotide
agcttgttaagtagcgacaagccgattttc

SEQ ID NO: 404584 - DNA, 30 bp, Artificial Sequence
  Synthetic oligonucleotide
gggtcttataatttctccgacgatattttc

SEQ ID NO: 404585 - DNA, 30 bp, Artificial Sequence
  Synthetic oligonucleotide
acaaaatcaccgcgattccaagctattttc

SEQ ID NO: 404586 - DNA, 30 bp, Artificial Sequence
  Synthetic oligonucleotide
tttaaggtactagcctatgtaagtattttc

SEQ ID NO: 404587 - DNA, 30 bp, Artificial Sequence
  Synthetic oligonucleotide
ctgttcatagtgtgtatccttagtattttc

SEQ ID NO: 404588 - DNA, 30 bp, Artificial Sequence
  Synthetic oligonucleotide
tccctggctaaacggtttctgaaacttttc

SEQ ID NO: 404589 - DNA, 30 bp, Artificial Sequence
  Synthetic oligonucleotide
gccagggtgcgcttcgaaaagtgacttttc

SEQ ID NO: 404590 - DNA, 30 bp, Artificial Sequence
  Synthetic oligonucleotide
ggtgtttatgagcttcataaggaccttttc

SEQ ID NO: 404591 - DNA, 30 bp, Artificial Sequence
  Synthetic oligonucleotide
tgcctgcttggaacctgtggccagcttttc

SEQ ID NO: 404592 - DNA, 30 bp, Artificial Sequence
  Synthetic oligonucleotide
ccggaaccaatgcttcagaaatagcttttc

SEQ ID NO: 404593 - DNA, 30 bp, Artificial Sequence
  Synthetic oligonucleotide
cctacctccattgacgagatatatcttttc

SEQ ID NO: 404594 - DNA, 30 bp, Artificial Sequence
  Synthetic oligonucleotide
catattcgtagagaaacctaacctcttttc

SEQ ID NO: 404595 - DNA, 30 bp, Artificial Sequence
  Synthetic oligonucleotide
acgtctgcgacagactgaaggccagttttc

SEQ ID NO: 404596 - DNA, 30 bp, Artificial Sequence
  Synthetic oligonucleotide
cattcacaaaagggggaaacgcgagttttc

SEQ ID NO: 404597 - DNA, 30 bp, Artificial Sequence
  Synthetic oligonucleotide
ttagctccaggacgaaggatcctggttttc

SEQ ID NO: 404598 - DNA, 30 bp, Artificial Sequence
  Synthetic oligonucleotide
aggggaatagccgcgttcgttgtatttttc

SEQ ID NO: 404599 - DNA, 30 bp, Artificial Sequence
  Synthetic oligonucleotide
gaatagttttggcgtaatataaagtttttc

SEQ ID NO: 404600 - DNA, 30 bp, Artificial Sequence
  Synthetic oligonucleotide
gaacgaatcggaatctaagtttagtttttc

SEQ ID NO: 404601 - DNA, 30 bp, Artificial Sequence
  Synthetic oligonucleotide
aaaccggagttgactgattccatgtttttc

SEQ ID NO: 404602 - DNA, 30 bp, Artificial Sequence
  Synthetic oligonucleotide
gaagtggcatgaccaaacttcatgtttttc

SEQ ID NO: 404603 - DNA, 30 bp, Artificial Sequence
  Synthetic oligonucleotide
aagtacacatgagattccttagcttttttc

SEQ ID NO: 404604 - DNA, 30 bp, Artificial Sequence
  Synthetic oligonucleotide
tccagatgtgcgttctgggacgcttttttc

SEQ ID NO: 404605 - DNA, 30 bp, Artificial Sequence
  Synthetic oligonucleotide
aacatttagtaggaccggatggaaaaaaag

SEQ ID NO: 404606 - DNA, 30 bp, Artificial Sequence
  Synthetic oligonucleotide
tagtttgacatcacgtactggtcaaaaaag

SEQ ID NO: 404607 - DNA, 30 bp, Artificial Sequence
  Synthetic oligonucleotide
gaatttgagacgggccaataggtaaaaaag

SEQ ID NO: 404608 - DNA, 30 bp, Artificial Sequence
  Synthetic oligonucleotide
tctccgcatggcttacccaactccaaaaag

SEQ ID NO: 404609 - DNA, 30 bp, Artificial Sequence
  Synthetic oligonucleotide
aaatctgggcccacgagcgcaagcaaaaag

SEQ ID NO: 404610 - DNA, 30 bp, Artificial Sequence
  Synthetic oligonucleotide
ttccacttggggccaaggaccttcaaaaag

SEQ ID NO: 404611 - DNA, 30 bp, Artificial Sequence
  Synthetic oligonucleotide
cgttggcttgatagagtatctaagaaaaag

SEQ ID NO: 404612 - DNA, 30 bp, Artificial Sequence
  Synthetic oligonucleotide
tatgggaaagtagacgatttctcgaaaaag

SEQ ID NO: 404613 - DNA, 30 bp, Artificial Sequence
  Synthetic oligonucleotide
tcggtgcatttatgtgacgagtataaaaag

SEQ ID NO: 404614 - DNA, 30 bp, Artificial Sequence
  Synthetic oligonucleotide
gacctagccacaaatagctcttcacaaaag

SEQ ID NO: 404615 - DNA, 30 bp, Artificial Sequence
  Synthetic oligonucleotide
gagatgtacagcggtgcctcaggacaaaag

SEQ ID NO: 404616 - DNA, 30 bp, Artificial Sequence
  Synthetic oligonucleotide
aatcacctcgttacaaggcccgcccaaaag

SEQ ID NO: 404617 - DNA, 30 bp, Artificial Sequence
  Synthetic oligonucleotide
gtcatctttggtatttaaacctagcaaaag

SEQ ID NO: 404618 - DNA, 30 bp, Artificial Sequence
  Synthetic oligonucleotide
ctgatcaagttgggatctttagttcaaaag

SEQ ID NO: 404619 - DNA, 30 bp, Artificial Sequence
  Synthetic oligonucleotide
ctaagctttcagattaaaccttcagaaaag

SEQ ID NO: 404620 - DNA, 30 bp, Artificial Sequence
  Synthetic oligonucleotide
gttcaggttcgttggcacatgcgagaaaag

SEQ ID NO: 404621 - DNA, 30 bp, Artificial Sequence
  Synthetic oligonucleotide
aatgcatgcacacgccccgtcagcgaaaag

SEQ ID NO: 404622 - DNA, 30 bp, Artificial Sequence
  Synthetic oligonucleotide
gcacgattctccctacctatgtaggaaaag

SEQ ID NO: 404623 - DNA, 30 bp, Artificial Sequence
  Synthetic oligonucleotide
ccgcaaggtgtctataatgacccggaaaag

SEQ ID NO: 404624 - DNA, 30 bp, Artificial Sequence
  Synthetic oligonucleotide
attagtcaattgacgcaatcaagggaaaag

SEQ ID NO: 404625 - DNA, 30 bp, Artificial Sequence
  Synthetic oligonucleotide
cctagcgtgattgttagttgacttgaaaag

SEQ ID NO: 404626 - DNA, 31 bp, Artificial Sequence
  Synthetic oligonucleotide
catcgtccagccaacaatcgggtaataaaag

SEQ ID NO: 404627 - DNA, 30 bp, Artificial Sequence
  Synthetic oligonucleotide
ctctctgctaggtgcgattcgggataaaag

SEQ ID NO: 404628 - DNA, 30 bp, Artificial Sequence
  Synthetic oligonucleotide
aattgtactaggaatggctgctgataaaag

SEQ ID NO: 404629 - DNA, 30 bp, Artificial Sequence
  Synthetic oligonucleotide
gcgctcgtttccgctggccaattctaaaag

SEQ ID NO: 404630 - DNA, 30 bp, Artificial Sequence
  Synthetic oligonucleotide
ggctgagggttccatttattcgagtaaaag

SEQ ID NO: 404631 - DNA, 30 bp, Artificial Sequence
  Synthetic oligonucleotide
cgtgattacaggatattttcttcgtaaaag

SEQ ID NO: 404632 - DNA, 30 bp, Artificial Sequence
  Synthetic oligonucleotide
agcgcagtcttaactacgggacggtaaaag

SEQ ID NO: 404633 - DNA, 30 bp, Artificial Sequence
  Synthetic oligonucleotide
cgtacgcctttcggttacggcgtgtaaaag

SEQ ID NO: 404634 - DNA, 30 bp, Artificial Sequence
  Synthetic oligonucleotide
atactttagataagcttgaaatgaacaaag

SEQ ID NO: 404635 - DNA, 30 bp, Artificial Sequence
  Synthetic oligonucleotide
cggtccaagccggatagaaccagcacaaag

SEQ ID NO: 404636 - DNA, 30 bp, Artificial Sequence
  Synthetic oligonucleotide
ggtggatggacggctctacagtgtacaaag

SEQ ID NO: 404637 - DNA, 30 bp, Artificial Sequence
  Synthetic oligonucleotide
gttatacgttattgctgattgtagccaaag

SEQ ID NO: 404638 - DNA, 30 bp, Artificial Sequence
  Synthetic oligonucleotide
ctgcagctattctggtcctgactgccaaag

SEQ ID NO: 404639 - DNA, 30 bp, Artificial Sequence
  Synthetic oligonucleotide
ggatttgtgaactgaagcctccgtccaaag

SEQ ID NO: 404640 - DNA, 31 bp, Artificial Sequence
  Synthetic oligonucleotide
gctctggcgcagacacacaagtattccaaag

SEQ ID NO: 404641 - DNA, 30 bp, Artificial Sequence
  Synthetic oligonucleotide
cacggtcgtgaatatagtctcgttccaaag

SEQ ID NO: 404642 - DNA, 30 bp, Artificial Sequence
  Synthetic oligonucleotide
gcatcatcgagtcgagttgagggagcaaag

SEQ ID NO: 404643 - DNA, 30 bp, Artificial Sequence
  Synthetic oligonucleotide
cgggggatgactctgatttagtacgcaaag

SEQ ID NO: 404644 - DNA, 30 bp, Artificial Sequence
  Synthetic oligonucleotide
gattaataagatagtagcgtcggcgcaaag

SEQ ID NO: 404645 - DNA, 30 bp, Artificial Sequence
  Synthetic oligonucleotide
aattacttattgggcgacatttaggcaaag

SEQ ID NO: 404646 - DNA, 30 bp, Artificial Sequence
  Synthetic oligonucleotide
aaacgattagttcacaggtatatggcaaag

SEQ ID NO: 404647 - DNA, 30 bp, Artificial Sequence
  Synthetic oligonucleotide
gtttattgccccataaagggagtggcaaag

SEQ ID NO: 404648 - DNA, 30 bp, Artificial Sequence
  Synthetic oligonucleotide
taggtatttggcacggggggtgctgcaaag

SEQ ID NO: 404649 - DNA, 30 bp, Artificial Sequence
  Synthetic oligonucleotide
tttccagagagcttgtctaactttgcaaag

SEQ ID NO: 404650 - DNA, 30 bp, Artificial Sequence
  Synthetic oligonucleotide
ctgcgcactgaaggctacaaggcatcaaag

SEQ ID NO: 404651 - DNA, 30 bp, Artificial Sequence
  Synthetic oligonucleotide
agcactccgatggggcagcgcaggtcaaag

SEQ ID NO: 404652 - DNA, 30 bp, Artificial Sequence
  Synthetic oligonucleotide
aattgtgtcgtcccaatagtgagttcaaag

SEQ ID NO: 404653 - DNA, 30 bp, Artificial Sequence
  Synthetic oligonucleotide
aattaccaggccgggtcctcggaaagaaag

SEQ ID NO: 404654 - DNA, 30 bp, Artificial Sequence
  Synthetic oligonucleotide
tagacattagtgatttctattgcaagaaag

SEQ ID NO: 404655 - DNA, 30 bp, Artificial Sequence
  Synthetic oligonucleotide
gttcgcacgcgctgccaagggctaagaaag

SEQ ID NO: 404656 - DNA, 30 bp, Artificial Sequence
  Synthetic oligonucleotide
tgggatgtgacctattctttttacagaaag

SEQ ID NO: 404657 - DNA, 30 bp, Artificial Sequence
  Synthetic oligonucleotide
cactgatagacgccaactggagccagaaag

SEQ ID NO: 404658 - DNA, 30 bp, Artificial Sequence
  Synthetic oligonucleotide
gttagctcgtattccaattgaaagagaaag

SEQ ID NO: 404659 - DNA, 30 bp, Artificial Sequence
  Synthetic oligonucleotide
acactgattcggtagactctgacgagaaag

SEQ ID NO: 404660 - DNA, 30 bp, Artificial Sequence
  Synthetic oligonucleotide
gaccttacttgtgcccggggcccgagaaag

SEQ ID NO: 404661 - DNA, 30 bp, Artificial Sequence
  Synthetic oligonucleotide
ctcaaggggcatgccatcgccggtagaaag

SEQ ID NO: 404662 - DNA, 30 bp, Artificial Sequence
  Synthetic oligonucleotide
atagcttgtttgtgtgtacgtgttagaaag

SEQ ID NO: 404663 - DNA, 30 bp, Artificial Sequence
  Synthetic oligonucleotide
tgtgagattgcactaagcttcagacgaaag

SEQ ID NO: 404664 - DNA, 30 bp, Artificial Sequence
  Synthetic oligonucleotide
acgggcgtattggcaatttagatacgaaag

SEQ ID NO: 404665 - DNA, 30 bp, Artificial Sequence
  Synthetic oligonucleotide
ctggatctcgtttagactgacgttcgaaag

SEQ ID NO: 404666 - DNA, 30 bp, Artificial Sequence
  Synthetic oligonucleotide
cagggacgtatcagcagtcatggaggaaag

SEQ ID NO: 404667 - DNA, 30 bp, Artificial Sequence
  Synthetic oligonucleotide
gttagtttagctcaaggagcgtacggaaag

SEQ ID NO: 404668 - DNA, 30 bp, Artificial Sequence
  Synthetic oligonucleotide
ctttaaggattgaataaaagtcagggaaag

SEQ ID NO: 404669 - DNA, 30 bp, Artificial Sequence
  Synthetic oligonucleotide
tccaatcacggtggtgtattagcgggaaag

SEQ ID NO: 404670 - DNA, 31 bp, Artificial Sequence
  Synthetic oligonucleotide
aactttccagctgccatataaattgggaaag

SEQ ID NO: 404671 - DNA, 30 bp, Artificial Sequence
  Synthetic oligonucleotide
accaacgatgattaccctcgaactggaaag

SEQ ID NO: 404672 - DNA, 30 bp, Artificial Sequence
  Synthetic oligonucleotide
ttgttgctaaatggatattcacgtggaaag

SEQ ID NO: 404673 - DNA, 30 bp, Artificial Sequence
  Synthetic oligonucleotide
tatagctattgatatcgggatcttggaaag

SEQ ID NO: 404674 - DNA, 30 bp, Artificial Sequence
  Synthetic oligonucleotide
ttctgggcagctaggttggcctaatgaaag

SEQ ID NO: 404675 - DNA, 30 bp, Artificial Sequence
  Synthetic oligonucleotide
atttaatccgacgaactttcgtcatgaaag

SEQ ID NO: 404676 - DNA, 30 bp, Artificial Sequence
  Synthetic oligonucleotide
gcgttctttgcattgccggtgtcatgaaag

SEQ ID NO: 404677 - DNA, 30 bp, Artificial Sequence
  Synthetic oligonucleotide
cacaagttattagaaggtgacccttgaaag

SEQ ID NO: 404678 - DNA, 30 bp, Artificial Sequence
  Synthetic oligonucleotide
tataggtcccaatggacctgctgttgaaag

SEQ ID NO: 404679 - DNA, 30 bp, Artificial Sequence
  Synthetic oligonucleotide
gcacaacatctggcgcctttaaacataaag

SEQ ID NO: 404680 - DNA, 30 bp, Artificial Sequence
  Synthetic oligonucleotide
gtaagcattctctaagtcgcgcccataaag

SEQ ID NO: 404681 - DNA, 30 bp, Artificial Sequence
  Synthetic oligonucleotide
tcgggaaaggctgattccttttgtataaag

SEQ ID NO: 404682 - DNA, 30 bp, Artificial Sequence
  Synthetic oligonucleotide
gggtatctattcctttccggggttataaag

SEQ ID NO: 404683 - DNA, 30 bp, Artificial Sequence
  Synthetic oligonucleotide
aggaatggcgcgcgtcgcacataactaaag

SEQ ID NO: 404684 - DNA, 30 bp, Artificial Sequence
  Synthetic oligonucleotide
catttatatggattgccggtgacactaaag

SEQ ID NO: 404685 - DNA, 30 bp, Artificial Sequence
  Synthetic oligonucleotide
tactggatagagtagctaaactgactaaag

SEQ ID NO: 404686 - DNA, 30 bp, Artificial Sequence
  Synthetic oligonucleotide
aaatgatgttgggggcggcggtggctaaag

SEQ ID NO: 404687 - DNA, 30 bp, Artificial Sequence
  Synthetic oligonucleotide
accagaaaatcacgcatgtgggtagtaaag

SEQ ID NO: 404688 - DNA, 30 bp, Artificial Sequence
  Synthetic oligonucleotide
aaacattggagcacgaaatgcaacgtaaag

SEQ ID NO: 404689 - DNA, 30 bp, Artificial Sequence
  Synthetic oligonucleotide
ctaaacgcgataaaacggagtagcgtaaag

SEQ ID NO: 404690 - DNA, 30 bp, Artificial Sequence
  Synthetic oligonucleotide
gagcagcgcacgttgtttacaacggtaaag

SEQ ID NO: 404691 - DNA, 30 bp, Artificial Sequence
  Synthetic oligonucleotide
gattgtaaatattcgccgaggacggtaaag

SEQ ID NO: 404692 - DNA, 30 bp, Artificial Sequence
  Synthetic oligonucleotide
ttccgatacttaaggtgcattacattaaag

SEQ ID NO: 404693 - DNA, 30 bp, Artificial Sequence
  Synthetic oligonucleotide
ctattgcattatataccgtggggattaaag

SEQ ID NO: 404694 - DNA, 30 bp, Artificial Sequence
  Synthetic oligonucleotide
caaatacgttgcgatgcttcgctattaaag

SEQ ID NO: 404695 - DNA, 30 bp, Artificial Sequence
  Synthetic oligonucleotide
ccactctacgatttttccatctcgttaaag

SEQ ID NO: 404696 - DNA, 30 bp, Artificial Sequence
  Synthetic oligonucleotide
tccactaatgttctcttatgtcttttaaag

SEQ ID NO: 404697 - DNA, 30 bp, Artificial Sequence
  Synthetic oligonucleotide
tatgtatctgtaagttgaagcgtcaacaag

SEQ ID NO: 404698 - DNA, 30 bp, Artificial Sequence
  Synthetic oligonucleotide
gggctttaacgcctatcaggcggtaacaag

SEQ ID NO: 404699 - DNA, 30 bp, Artificial Sequence
  Synthetic oligonucleotide
atgcgacttaggacgaaggcgtgtaacaag

SEQ ID NO: 404700 - DNA, 30 bp, Artificial Sequence
  Synthetic oligonucleotide
accccataacggacgagggggcttaacaag

SEQ ID NO: 404701 - DNA, 30 bp, Artificial Sequence
  Synthetic oligonucleotide
ataaaataacatgccccgcatgttaacaag

SEQ ID NO: 404702 - DNA, 30 bp, Artificial Sequence
  Synthetic oligonucleotide
tgccgaattgcatgcactatatttaacaag

SEQ ID NO: 404703 - DNA, 30 bp, Artificial Sequence
  Synthetic oligonucleotide
tcatcggttttcatcagttatatccacaag

SEQ ID NO: 404704 - DNA, 30 bp, Artificial Sequence
  Synthetic oligonucleotide
gagccagcctggtcagggtcgaagcacaag

SEQ ID NO: 404705 - DNA, 30 bp, Artificial Sequence
  Synthetic oligonucleotide
gtcgcataagacctatttagtagtcacaag

SEQ ID NO: 404706 - DNA, 30 bp, Artificial Sequence
  Synthetic oligonucleotide
cgtcatgtcgcatctgccgcttgtcacaag

SEQ ID NO: 404707 - DNA, 30 bp, Artificial Sequence
  Synthetic oligonucleotide
tgtggccggaaatttggtagcgacgacaag

SEQ ID NO: 404708 - DNA, 30 bp, Artificial Sequence
  Synthetic oligonucleotide
aacctatttcatcaagtcatatccgacaag

SEQ ID NO: 404709 - DNA, 30 bp, Artificial Sequence
  Synthetic oligonucleotide
aggcgatttctcgagagcctttcggacaag

SEQ ID NO: 404710 - DNA, 30 bp, Artificial Sequence
  Synthetic oligonucleotide
aagtttgggacactgtaaagtttggacaag

SEQ ID NO: 404711 - DNA, 30 bp, Artificial Sequence
  Synthetic oligonucleotide
cctgttgaaacgtgtttcaactaatacaag

SEQ ID NO: 404712 - DNA, 30 bp, Artificial Sequence
  Synthetic oligonucleotide
tgagagctccaggaattttttgcgtacaag

SEQ ID NO: 404713 - DNA, 30 bp, Artificial Sequence
  Synthetic oligonucleotide
cccacatatataacgtggcgcgggtacaag

SEQ ID NO: 404714 - DNA, 30 bp, Artificial Sequence
  Synthetic oligonucleotide
gtcgcagctgtataactaatttattacaag

SEQ ID NO: 404715 - DNA, 30 bp, Artificial Sequence
  Synthetic oligonucleotide
ttcagagagttgaatgagttattttacaag

SEQ ID NO: 404716 - DNA, 30 bp, Artificial Sequence
  Synthetic oligonucleotide
caagcgcgtattagtcctcgcagaaccaag

SEQ ID NO: 404717 - DNA, 30 bp, Artificial Sequence
  Synthetic oligonucleotide
ggctttcgttaccggtcgcgcttcaccaag

SEQ ID NO: 404718 - DNA, 30 bp, Artificial Sequence
  Synthetic oligonucleotide
tcactcctgcgagccagccgcaggaccaag

SEQ ID NO: 404719 - DNA, 30 bp, Artificial Sequence
  Synthetic oligonucleotide
ctgaatccacaggaaccctggatgaccaag

SEQ ID NO: 404720 - DNA, 30 bp, Artificial Sequence
  Synthetic oligonucleotide
gcatcacggggcagccctaccctgaccaag

SEQ ID NO: 404721 - DNA, 30 bp, Artificial Sequence
  Synthetic oligonucleotide
ttagggcattagtatcggattcttaccaag

SEQ ID NO: 404722 - DNA, 30 bp, Artificial Sequence
  Synthetic oligonucleotide
tttagccttgagcggaataatgaacccaag

SEQ ID NO: 404723 - DNA, 30 bp, Artificial Sequence
  Synthetic oligonucleotide
aaattaattggtgtttccaagatacccaag

SEQ ID NO: 404724 - DNA, 30 bp, Artificial Sequence
  Synthetic oligonucleotide
ctggcctgactatcgtcagccaaccccaag

SEQ ID NO: 404725 - DNA, 30 bp, Artificial Sequence
  Synthetic oligonucleotide
ggtcataggtgggcacaaaaaagccccaag

SEQ ID NO: 404726 - DNA, 30 bp, Artificial Sequence
  Synthetic oligonucleotide
tggaagtgttccgagcttatcggccccaag

SEQ ID NO: 404727 - DNA, 30 bp, Artificial Sequence
  Synthetic oligonucleotide
aaacatattgccatgtttggccatcccaag

SEQ ID NO: 404728 - DNA, 30 bp, Artificial Sequence
  Synthetic oligonucleotide
tatcttaagatcatcatagccactcccaag

SEQ ID NO: 404729 - DNA, 30 bp, Artificial Sequence
  Synthetic oligonucleotide
ttaggtttcgtttgcagggggactcccaag

SEQ ID NO: 404730 - DNA, 30 bp, Artificial Sequence
  Synthetic oligonucleotide
ctggtagttgatgggcgtatttgagccaag

SEQ ID NO: 404731 - DNA, 30 bp, Artificial Sequence
  Synthetic oligonucleotide
catatttttcccacagacagaagcgccaag

SEQ ID NO: 404732 - DNA, 30 bp, Artificial Sequence
  Synthetic oligonucleotide
tattgacaacggttgcatactttcgccaag

SEQ ID NO: 404733 - DNA, 30 bp, Artificial Sequence
  Synthetic oligonucleotide
attggttcttatccaacatagggtgccaag

SEQ ID NO: 404734 - DNA, 30 bp, Artificial Sequence
  Synthetic oligonucleotide
agacagggtcattttttgaacacatccaag

SEQ ID NO: 404735 - DNA, 30 bp, Artificial Sequence
  Synthetic oligonucleotide
ccgcttcacggcggacctaagtgatccaag

SEQ ID NO: 404736 - DNA, 30 bp, Artificial Sequence
  Synthetic oligonucleotide
atccggttttctacctcggacgtatccaag

SEQ ID NO: 404737 - DNA, 30 bp, Artificial Sequence
  Synthetic oligonucleotide
tctcggtgagcaatactaaaggtatccaag

SEQ ID NO: 404738 - DNA, 30 bp, Artificial Sequence
  Synthetic oligonucleotide
caagaaatgtaagttagcgttagctccaag

SEQ ID NO: 404739 - DNA, 30 bp, Artificial Sequence
  Synthetic oligonucleotide
tggaaggatattggctttactacgtccaag

SEQ ID NO: 404740 - DNA, 30 bp, Artificial Sequence
  Synthetic oligonucleotide
accgcgttttgaccgcattgttggtccaag

SEQ ID NO: 404741 - DNA, 30 bp, Artificial Sequence
  Synthetic oligonucleotide
gattggaaaagcggcactggtgattccaag

SEQ ID NO: 404742 - DNA, 30 bp, Artificial Sequence
  Synthetic oligonucleotide
tttctattggtggtaggttggcgttccaag

SEQ ID NO: 404743 - DNA, 30 bp, Artificial Sequence
  Synthetic oligonucleotide
tatcatcgcattttatggtatttaagcaag

SEQ ID NO: 404744 - DNA, 30 bp, Artificial Sequence
  Synthetic oligonucleotide
ctaatcagtcaaatttattcttccagcaag

SEQ ID NO: 404745 - DNA, 30 bp, Artificial Sequence
  Synthetic oligonucleotide
gtcgaatttgtttcaggtgtttgtagcaag

SEQ ID NO: 404746 - DNA, 30 bp, Artificial Sequence
  Synthetic oligonucleotide
ggcgacgaaagagtactatggggacgcaag

SEQ ID NO: 404747 - DNA, 30 bp, Artificial Sequence
  Synthetic oligonucleotide
aggcctgaacgccaagggtattgacgcaag

SEQ ID NO: 404748 - DNA, 30 bp, Artificial Sequence
  Synthetic oligonucleotide
atcatttcacgaggctaggtccggcgcaag

SEQ ID NO: 404749 - DNA, 30 bp, Artificial Sequence
  Synthetic oligonucleotide
tgaattaagacacttgactacgggcgcaag

SEQ ID NO: 404750 - DNA, 30 bp, Artificial Sequence
  Synthetic oligonucleotide
attctggtctaaaaacttagtgaaggcaag

SEQ ID NO: 404751 - DNA, 30 bp, Artificial Sequence
  Synthetic oligonucleotide
gaccttgcgcgtatgtccccgggaggcaag

SEQ ID NO: 404752 - DNA, 30 bp, Artificial Sequence
  Synthetic oligonucleotide
cgttcgcacatcgtacccagatgaggcaag

SEQ ID NO: 404753 - DNA, 30 bp, Artificial Sequence
  Synthetic oligonucleotide
ggaggttatagacagttttgtctaggcaag

SEQ ID NO: 404754 - DNA, 30 bp, Artificial Sequence
  Synthetic oligonucleotide
ggtaaacgctggcgatttcgattcggcaag

SEQ ID NO: 404755 - DNA, 30 bp, Artificial Sequence
  Synthetic oligonucleotide
gatagcttgccttctcgaaagaagggcaag

SEQ ID NO: 404756 - DNA, 30 bp, Artificial Sequence
  Synthetic oligonucleotide
aaatgcgattcagaatcccggtagggcaag

SEQ ID NO: 404757 - DNA, 30 bp, Artificial Sequence
  Synthetic oligonucleotide
tgtacgatacacaggatggttttgggcaag

SEQ ID NO: 404758 - DNA, 30 bp, Artificial Sequence
  Synthetic oligonucleotide
tcgttagatgtggcatcattaagtggcaag

SEQ ID NO: 404759 - DNA, 30 bp, Artificial Sequence
  Synthetic oligonucleotide
gtcaatcgtttatcgttactatttggcaag

SEQ ID NO: 404760 - DNA, 30 bp, Artificial Sequence
  Synthetic oligonucleotide
gcctgggtgtttatacaacaggcctgcaag

SEQ ID NO: 404761 - DNA, 30 bp, Artificial Sequence
  Synthetic oligonucleotide
ataacccgtggcaataggcaatcctgcaag

SEQ ID NO: 404762 - DNA, 30 bp, Artificial Sequence
  Synthetic oligonucleotide
tggatatatcgtcgtcagcgtcgctgcaag

SEQ ID NO: 404763 - DNA, 30 bp, Artificial Sequence
  Synthetic oligonucleotide
atctccacttaggaagttttggggtgcaag

SEQ ID NO: 404764 - DNA, 30 bp, Artificial Sequence
  Synthetic oligonucleotide
aacgcaccgggcccaatgtttcgttgcaag

SEQ ID NO: 404765 - DNA, 30 bp, Artificial Sequence
  Synthetic oligonucleotide
ggaattggtcggtgttggtgtccaatcaag

SEQ ID NO: 404766 - DNA, 30 bp, Artificial Sequence
  Synthetic oligonucleotide
ggtcagatatgcccgaacgggtgaatcaag

SEQ ID NO: 404767 - DNA, 30 bp, Artificial Sequence
  Synthetic oligonucleotide
actggggacgcagtcgccgaaaacatcaag

SEQ ID NO: 404768 - DNA, 30 bp, Artificial Sequence
  Synthetic oligonucleotide
ttttgagatgacacttgctgtggtatcaag

SEQ ID NO: 404769 - DNA, 31 bp, Artificial Sequence
  Synthetic oligonucleotide
tatgtagccgttggtcacaataattatcaag

SEQ ID NO: 404770 - DNA, 30 bp, Artificial Sequence
  Synthetic oligonucleotide
tgatgtacgaatacgggtaatttactcaag

SEQ ID NO: 404771 - DNA, 30 bp, Artificial Sequence
  Synthetic oligonucleotide
actgcttgtctgccatacaacagcctcaag

SEQ ID NO: 404772 - DNA, 30 bp, Artificial Sequence
  Synthetic oligonucleotide
taattaatatgctcgggtaactatgtcaag

SEQ ID NO: 404773 - DNA, 30 bp, Artificial Sequence
  Synthetic oligonucleotide
atgtaattttacatcttatcacgtgtcaag

SEQ ID NO: 404774 - DNA, 30 bp, Artificial Sequence
  Synthetic oligonucleotide
catttcacattcggtgtaccaagattcaag

SEQ ID NO: 404775 - DNA, 30 bp, Artificial Sequence
  Synthetic oligonucleotide
tattgagaggggcagaacaggttcttcaag

SEQ ID NO: 404776 - DNA, 30 bp, Artificial Sequence
  Synthetic oligonucleotide
attctaattctacgcgtgaagaagttcaag

SEQ ID NO: 404777 - DNA, 30 bp, Artificial Sequence
  Synthetic oligonucleotide
tattggttatctgtcctctaagagttcaag

SEQ ID NO: 404778 - DNA, 30 bp, Artificial Sequence
  Synthetic oligonucleotide
caaccgagcaaacgctgccattagttcaag

SEQ ID NO: 404779 - DNA, 30 bp, Artificial Sequence
  Synthetic oligonucleotide
actacacgctctgagaatgatgatttcaag

SEQ ID NO: 404780 - DNA, 30 bp, Artificial Sequence
  Synthetic oligonucleotide
gcgtaccgcgttaagcccacggttttcaag

SEQ ID NO: 404781 - DNA, 30 bp, Artificial Sequence
  Synthetic oligonucleotide
caatttatttaggaacacttctttttcaag

SEQ ID NO: 404782 - DNA, 30 bp, Artificial Sequence
  Synthetic oligonucleotide
gcgtttagaacacagggatgctgcaagaag

SEQ ID NO: 404783 - DNA, 30 bp, Artificial Sequence
  Synthetic oligonucleotide
acggcggctgtttggcgccgcctgaagaag

SEQ ID NO: 404784 - DNA, 30 bp, Artificial Sequence
  Synthetic oligonucleotide
ctatgcaagcttccagactgtctgaagaag

SEQ ID NO: 404785 - DNA, 30 bp, Artificial Sequence
  Synthetic oligonucleotide
agcacgctgctcactaccccttataagaag

SEQ ID NO: 404786 - DNA, 30 bp, Artificial Sequence
  Synthetic oligonucleotide
agtccatctgattatggtgtttataagaag

SEQ ID NO: 404787 - DNA, 30 bp, Artificial Sequence
  Synthetic oligonucleotide
ttatgtacgtcgcggacttgacgtaagaag

SEQ ID NO: 404788 - DNA, 30 bp, Artificial Sequence
  Synthetic oligonucleotide
cctttatggcgctaccgcttcattaagaag

SEQ ID NO: 404789 - DNA, 30 bp, Artificial Sequence
  Synthetic oligonucleotide
ataaacttgtgtaacccgtgttttaagaag

SEQ ID NO: 404790 - DNA, 30 bp, Artificial Sequence
  Synthetic oligonucleotide
ggtgacacagccacacggcaagtacagaag

SEQ ID NO: 404791 - DNA, 30 bp, Artificial Sequence
  Synthetic oligonucleotide
tctttgtgattccataggtgtttccagaag

SEQ ID NO: 404792 - DNA, 30 bp, Artificial Sequence
  Synthetic oligonucleotide
ttcttatcacttagactttaaaacgagaag

SEQ ID NO: 404793 - DNA, 30 bp, Artificial Sequence
  Synthetic oligonucleotide
gatgaggagtgactgttgcatctatagaag

SEQ ID NO: 404794 - DNA, 30 bp, Artificial Sequence
  Synthetic oligonucleotide
cgatctcatattgcgggcgggcactagaag

SEQ ID NO: 404795 - DNA, 30 bp, Artificial Sequence
  Synthetic oligonucleotide
atgtagcatgtagtaggcaatgactagaag

SEQ ID NO: 404796 - DNA, 30 bp, Artificial Sequence
  Synthetic oligonucleotide
ccgataggcatgttgtagagtcgaacgaag

SEQ ID NO: 404797 - DNA, 30 bp, Artificial Sequence
  Synthetic oligonucleotide
aaatcttgttttgacaagggacccacgaag

SEQ ID NO: 404798 - DNA, 30 bp, Artificial Sequence
  Synthetic oligonucleotide
tcctaagtgctccttcgcggctgtacgaag

SEQ ID NO: 404799 - DNA, 30 bp, Artificial Sequence
  Synthetic oligonucleotide
tgtcatttacagacgccagaggttacgaag

SEQ ID NO: 404800 - DNA, 30 bp, Artificial Sequence
  Synthetic oligonucleotide
cgttaggtagccatgtacggctttacgaag

SEQ ID NO: 404801 - DNA, 30 bp, Artificial Sequence
  Synthetic oligonucleotide
gtagagatgcgaagccctgggataccgaag

SEQ ID NO: 404802 - DNA, 30 bp, Artificial Sequence
  Synthetic oligonucleotide
tttataactgcctgtaacgaattaccgaag

SEQ ID NO: 404803 - DNA, 30 bp, Artificial Sequence
  Synthetic oligonucleotide
ctatcagcgcgtttatgatgtacgccgaag

SEQ ID NO: 404804 - DNA, 30 bp, Artificial Sequence
  Synthetic oligonucleotide
atgacccaacgccattccttccgtccgaag

SEQ ID NO: 404805 - DNA, 30 bp, Artificial Sequence
  Synthetic oligonucleotide
tttgcagcctccgtgcaattagaagcgaag

SEQ ID NO: 404806 - DNA, 30 bp, Artificial Sequence
  Synthetic oligonucleotide
gccttattgggagtgatggcattagcgaag

SEQ ID NO: 404807 - DNA, 30 bp, Artificial Sequence
  Synthetic oligonucleotide
tgccttctcagaccctgagcgtgatcgaag

SEQ ID NO: 404808 - DNA, 30 bp, Artificial Sequence
  Synthetic oligonucleotide
cgcacgtaaacgaccgtattgttgtcgaag

SEQ ID NO: 404809 - DNA, 30 bp, Artificial Sequence
  Synthetic oligonucleotide
gtgcatattgagttcgatctcgattcgaag

SEQ ID NO: 404810 - DNA, 30 bp, Artificial Sequence
  Synthetic oligonucleotide
ggaagcttcagtcacggtgtctccaggaag

SEQ ID NO: 404811 - DNA, 30 bp, Artificial Sequence
  Synthetic oligonucleotide
cttgaaaatgtcattgggacacgcaggaag

SEQ ID NO: 404812 - DNA, 30 bp, Artificial Sequence
  Synthetic oligonucleotide
ctttcatgttggcgatactcgactaggaag

SEQ ID NO: 404813 - DNA, 30 bp, Artificial Sequence
  Synthetic oligonucleotide
ctgatatagcccggtccgggcaaacggaag

SEQ ID NO: 404814 - DNA, 30 bp, Artificial Sequence
  Synthetic oligonucleotide
tcattttcgcttatgcagaaaagacggaag

SEQ ID NO: 404815 - DNA, 30 bp, Artificial Sequence
  Synthetic oligonucleotide
gtatatcgttcaaggcaagtgctacggaag

SEQ ID NO: 404816 - DNA, 30 bp, Artificial Sequence
  Synthetic oligonucleotide
ggtctcttttgataggaaagggaccggaag

SEQ ID NO: 404817 - DNA, 30 bp, Artificial Sequence
  Synthetic oligonucleotide
tccctacttgcaacacccgaagcgcggaag

SEQ ID NO: 404818 - DNA, 30 bp, Artificial Sequence
  Synthetic oligonucleotide
ttttctaggattctggtacacgtgcggaag

SEQ ID NO: 404819 - DNA, 30 bp, Artificial Sequence
  Synthetic oligonucleotide
ttacgctgctaacatagcatttaagggaag

SEQ ID NO: 404820 - DNA, 30 bp, Artificial Sequence
  Synthetic oligonucleotide
aatttctcaagggaagatagtttagggaag

SEQ ID NO: 404821 - DNA, 30 bp, Artificial Sequence
  Synthetic oligonucleotide
ctatagaatcgttgtggcacttaggggaag

SEQ ID NO: 404822 - DNA, 30 bp, Artificial Sequence
  Synthetic oligonucleotide
tagcgttcctaattagtgaatatggggaag

SEQ ID NO: 404823 - DNA, 30 bp, Artificial Sequence
  Synthetic oligonucleotide
gttcggtatatgtaagggaattctgggaag

SEQ ID NO: 404824 - DNA, 30 bp, Artificial Sequence
  Synthetic oligonucleotide
ggaacggttacaaagcgttccgaatggaag

SEQ ID NO: 404825 - DNA, 30 bp, Artificial Sequence
  Synthetic oligonucleotide
gcacagacaggcaaccgggtggcatggaag

SEQ ID NO: 404826 - DNA, 30 bp, Artificial Sequence
  Synthetic oligonucleotide
acgtaacgtgacggggggccggcctggaag

SEQ ID NO: 404827 - DNA, 30 bp, Artificial Sequence
  Synthetic oligonucleotide
ttgtgatgatatttgacgcttcagtggaag

SEQ ID NO: 404828 - DNA, 30 bp, Artificial Sequence
  Synthetic oligonucleotide
taggctctaaaacggggtcagtaaatgaag

SEQ ID NO: 404829 - DNA, 30 bp, Artificial Sequence
  Synthetic oligonucleotide
gatgactagccgtaagggcttcccatgaag

SEQ ID NO: 404830 - DNA, 30 bp, Artificial Sequence
  Synthetic oligonucleotide
atccaatcaattcatagtaccgagatgaag

SEQ ID NO: 404831 - DNA, 30 bp, Artificial Sequence
  Synthetic oligonucleotide
tgtattaagtcgtaggttcaattgatgaag

SEQ ID NO: 404832 - DNA, 30 bp, Artificial Sequence
  Synthetic oligonucleotide
acagtgtacgacatgtgcgtagctatgaag

SEQ ID NO: 404833 - DNA, 30 bp, Artificial Sequence
  Synthetic oligonucleotide
tgagtgacggcccgcaagactaaactgaag

SEQ ID NO: 404834 - DNA, 30 bp, Artificial Sequence
  Synthetic oligonucleotide
gccgagcagtcttccgttctggcgctgaag

SEQ ID NO: 404835 - DNA, 30 bp, Artificial Sequence
  Synthetic oligonucleotide
tccactcgcaaagcgtagcttactctgaag

SEQ ID NO: 404836 - DNA, 30 bp, Artificial Sequence
  Synthetic oligonucleotide
ccagtttattatagaggtgcacgtctgaag

SEQ ID NO: 404837 - DNA, 30 bp, Artificial Sequence
  Synthetic oligonucleotide
tccgagggacatccgggcttgaaggtgaag

SEQ ID NO: 404838 - DNA, 30 bp, Artificial Sequence
  Synthetic oligonucleotide
gcatttatacgtgcgaagtccacggtgaag

SEQ ID NO: 404839 - DNA, 30 bp, Artificial Sequence
  Synthetic oligonucleotide
cttggaactcctatacattcacgggtgaag

SEQ ID NO: 404840 - DNA, 30 bp, Artificial Sequence
  Synthetic oligonucleotide
aagcgcttgatatacccgatgcgggtgaag

SEQ ID NO: 404841 - DNA, 30 bp, Artificial Sequence
  Synthetic oligonucleotide
ctgagcctcttacctacataagtggtgaag

SEQ ID NO: 404842 - DNA, 30 bp, Artificial Sequence
  Synthetic oligonucleotide
agcggcagcgagagtacctactgattgaag

SEQ ID NO: 404843 - DNA, 30 bp, Artificial Sequence
  Synthetic oligonucleotide
gtaagagggtcacatgcgcaccacttgaag

SEQ ID NO: 404844 - DNA, 31 bp, Artificial Sequence
  Synthetic oligonucleotide
taggcaagcatagtggatgtggtacttgaag

SEQ ID NO: 404845 - DNA, 30 bp, Artificial Sequence
  Synthetic oligonucleotide
tcaaatcacggacacgtgcgttacttgaag

SEQ ID NO: 404846 - DNA, 29 bp, Artificial Sequence
  Synthetic oligonucleotide
agtaaagattgtttcaaacttggttgaag

SEQ ID NO: 404847 - DNA, 30 bp, Artificial Sequence
  Synthetic oligonucleotide
ataaggtccgtagaggggtttcatttgaag

SEQ ID NO: 404848 - DNA, 30 bp, Artificial Sequence
  Synthetic oligonucleotide
cgctacggaaggaaaggtgccccaaataag

SEQ ID NO: 404849 - DNA, 30 bp, Artificial Sequence
  Synthetic oligonucleotide
gctctagtcttagtgtgtggcagaaataag

SEQ ID NO: 404850 - DNA, 30 bp, Artificial Sequence
  Synthetic oligonucleotide
tatgtcagcggactagggatcacgaataag

SEQ ID NO: 404851 - DNA, 30 bp, Artificial Sequence
  Synthetic oligonucleotide
gcacgctctccggccttgtagcggaataag

SEQ ID NO: 404852 - DNA, 30 bp, Artificial Sequence
  Synthetic oligonucleotide
ctaagtcaaacccgagtaatttggaataag

SEQ ID NO: 404853 - DNA, 30 bp, Artificial Sequence
  Synthetic oligonucleotide
ttagcgatggacaatatcaaggataataag

SEQ ID NO: 404854 - DNA, 30 bp, Artificial Sequence
  Synthetic oligonucleotide
gcgagttagggcgccacgcaaattaataag

SEQ ID NO: 404855 - DNA, 30 bp, Artificial Sequence
  Synthetic oligonucleotide
gattcctgtgtccacccggtcattaataag

SEQ ID NO: 404856 - DNA, 30 bp, Artificial Sequence
  Synthetic oligonucleotide
tactggaacgctcccgtccgcacacataag

SEQ ID NO: 404857 - DNA, 30 bp, Artificial Sequence
  Synthetic oligonucleotide
gaaactcttgcccggggccggatacataag

SEQ ID NO: 404858 - DNA, 30 bp, Artificial Sequence
  Synthetic oligonucleotide
tataacgggctaccccgaggaatccataag

SEQ ID NO: 404859 - DNA, 30 bp, Artificial Sequence
  Synthetic oligonucleotide
gggatcgacgggccttagggggatcataag

SEQ ID NO: 404860 - DNA, 30 bp, Artificial Sequence
  Synthetic oligonucleotide
tgaaggcttcgcgttttatcccctcataag

SEQ ID NO: 404861 - DNA, 30 bp, Artificial Sequence
  Synthetic oligonucleotide
ttgccattttcgtggacacgtccagataag

SEQ ID NO: 404862 - DNA, 30 bp, Artificial Sequence
  Synthetic oligonucleotide
ggcttacacgattttacggctttagataag

SEQ ID NO: 404863 - DNA, 30 bp, Artificial Sequence
  Synthetic oligonucleotide
tgccaatcgtctggtcgtgtatccgataag

SEQ ID NO: 404864 - DNA, 30 bp, Artificial Sequence
  Synthetic oligonucleotide
ataacacgagggggctgagactaggataag

SEQ ID NO: 404865 - DNA, 30 bp, Artificial Sequence
  Synthetic oligonucleotide
ccacacaacatggaagcctttaatgataag

SEQ ID NO: 404866 - DNA, 30 bp, Artificial Sequence
  Synthetic oligonucleotide
taatggaggccaactaagtcttttgataag

SEQ ID NO: 404867 - DNA, 30 bp, Artificial Sequence
  Synthetic oligonucleotide
ttgtgacgcatacctgaacaggcatataag

SEQ ID NO: 404868 - DNA, 30 bp, Artificial Sequence
  Synthetic oligonucleotide
attcgagctggccaaaaatttaactataag

SEQ ID NO: 404869 - DNA, 30 bp, Artificial Sequence
  Synthetic oligonucleotide
ccatgacataacttttacgtggtctataag

SEQ ID NO: 404870 - DNA, 30 bp, Artificial Sequence
  Synthetic oligonucleotide
gggaccctgattgcacgagtatagtataag

SEQ ID NO: 404871 - DNA, 30 bp, Artificial Sequence
  Synthetic oligonucleotide
atagttgttgcgagatcctgccggtataag

SEQ ID NO: 404872 - DNA, 30 bp, Artificial Sequence
  Synthetic oligonucleotide
gattaacattcgggcctggataattataag

SEQ ID NO: 404873 - DNA, 30 bp, Artificial Sequence
  Synthetic oligonucleotide
ccctaagctaagtaacgagtgggttataag

SEQ ID NO: 404874 - DNA, 30 bp, Artificial Sequence
  Synthetic oligonucleotide
ccgggtaagcataaacatttggtttataag

SEQ ID NO: 404875 - DNA, 30 bp, Artificial Sequence
  Synthetic oligonucleotide
tgtccgaccatataacagcccaaaactaag

SEQ ID NO: 404876 - DNA, 30 bp, Artificial Sequence
  Synthetic oligonucleotide
tagggttccacttagaaccccgtaactaag

SEQ ID NO: 404877 - DNA, 30 bp, Artificial Sequence
  Synthetic oligonucleotide
acgtctcggggactgtcaaacgacactaag

SEQ ID NO: 404878 - DNA, 30 bp, Artificial Sequence
  Synthetic oligonucleotide
cttagctggatcatgtgggctaagactaag

SEQ ID NO: 404879 - DNA, 30 bp, Artificial Sequence
  Synthetic oligonucleotide
gtacatgcagctaaaacgtcacagactaag

SEQ ID NO: 404880 - DNA, 30 bp, Artificial Sequence
  Synthetic oligonucleotide
gattcgtgcgattttaggtaggagactaag

SEQ ID NO: 404881 - DNA, 30 bp, Artificial Sequence
  Synthetic oligonucleotide
gtttgtctgagaaccgacaacccgactaag

SEQ ID NO: 404882 - DNA, 30 bp, Artificial Sequence
  Synthetic oligonucleotide
cttggtccgccgcggccagcgaggactaag

SEQ ID NO: 404883 - DNA, 30 bp, Artificial Sequence
  Synthetic oligonucleotide
gccttcacaaccactgacccagtgactaag

SEQ ID NO: 404884 - DNA, 30 bp, Artificial Sequence
  Synthetic oligonucleotide
ttttttgtacgggggcctgtgttacctaag

SEQ ID NO: 404885 - DNA, 30 bp, Artificial Sequence
  Synthetic oligonucleotide
agtatgaaataaggcttttctttccctaag

SEQ ID NO: 404886 - DNA, 30 bp, Artificial Sequence
  Synthetic oligonucleotide
atgggcaacgcaaggatcgggttgcctaag

SEQ ID NO: 404887 - DNA, 30 bp, Artificial Sequence
  Synthetic oligonucleotide
cttattttgaagtctggaccaggcgctaag

SEQ ID NO: 404888 - DNA, 30 bp, Artificial Sequence
  Synthetic oligonucleotide
gtacacgcagttgagtttatgaaggctaag

SEQ ID NO: 404889 - DNA, 30 bp, Artificial Sequence
  Synthetic oligonucleotide
tcgctcttatacaggcgaagtctggctaag

SEQ ID NO: 404890 - DNA, 30 bp, Artificial Sequence
  Synthetic oligonucleotide
ttccaacggtgttacattggtcatgctaag

SEQ ID NO: 404891 - DNA, 30 bp, Artificial Sequence
  Synthetic oligonucleotide
ttatcacggatgtgaacttaggatgctaag

SEQ ID NO: 404892 - DNA, 30 bp, Artificial Sequence
  Synthetic oligonucleotide
cctagcctggaggagtcgaacccctctaag

SEQ ID NO: 404893 - DNA, 30 bp, Artificial Sequence
  Synthetic oligonucleotide
gctaagtaggcgctatccgcgcgctctaag

SEQ ID NO: 404894 - DNA, 30 bp, Artificial Sequence
  Synthetic oligonucleotide
acaccggttggtgtgtgtttgttctctaag

SEQ ID NO: 404895 - DNA, 30 bp, Artificial Sequence
  Synthetic oligonucleotide
aatttataacgagtataaacatagtctaag

SEQ ID NO: 404896 - DNA, 30 bp, Artificial Sequence
  Synthetic oligonucleotide
aatcaatttagaaggtctagcccgtctaag

SEQ ID NO: 404897 - DNA, 30 bp, Artificial Sequence
  Synthetic oligonucleotide
gctccccactaaaatttactgggttctaag

SEQ ID NO: 404898 - DNA, 30 bp, Artificial Sequence
  Synthetic oligonucleotide
catgtctaggaaaaggtatctgtttctaag

SEQ ID NO: 404899 - DNA, 30 bp, Artificial Sequence
  Synthetic oligonucleotide
ttttcggcgagccattgatatctaagtaag

SEQ ID NO: 404900 - DNA, 30 bp, Artificial Sequence
  Synthetic oligonucleotide
cactggtgggcccgttaagtgcccagtaag

SEQ ID NO: 404901 - DNA, 30 bp, Artificial Sequence
  Synthetic oligonucleotide
aagctcgctcggttctcatggttcagtaag

SEQ ID NO: 404902 - DNA, 30 bp, Artificial Sequence
  Synthetic oligonucleotide
aagtttcctgggtggggtaaaactagtaag

SEQ ID NO: 404903 - DNA, 30 bp, Artificial Sequence
  Synthetic oligonucleotide
cagcacgctaactatcgaaatcctagtaag

SEQ ID NO: 404904 - DNA, 30 bp, Artificial Sequence
  Synthetic oligonucleotide
cttcggatgtggaccaccaaatgtagtaag

SEQ ID NO: 404905 - DNA, 30 bp, Artificial Sequence
  Synthetic oligonucleotide
cccaccccacctatggcagtgaaccgtaag

SEQ ID NO: 404906 - DNA, 30 bp, Artificial Sequence
  Synthetic oligonucleotide
actcagagctctgtggaattgtcccgtaag

SEQ ID NO: 404907 - DNA, 30 bp, Artificial Sequence
  Synthetic oligonucleotide
gatttgcctatgtacaaactgtgccgtaag

SEQ ID NO: 404908 - DNA, 30 bp, Artificial Sequence
  Synthetic oligonucleotide
cttcatagtaaaagggctgtacggcgtaag

SEQ ID NO: 404909 - DNA, 30 bp, Artificial Sequence
  Synthetic oligonucleotide
ttacggcccaatttcaaaaactatcgtaag

SEQ ID NO: 404910 - DNA, 30 bp, Artificial Sequence
  Synthetic oligonucleotide
ttctaacgtctcaagcggttgtctcgtaag

SEQ ID NO: 404911 - DNA, 30 bp, Artificial Sequence
  Synthetic oligonucleotide
ctgttgcctccggatcgggggaacggtaag

SEQ ID NO: 404912 - DNA, 30 bp, Artificial Sequence
  Synthetic oligonucleotide
tggtacatttagtaacggtgagacggtaag

SEQ ID NO: 404913 - DNA, 30 bp, Artificial Sequence
  Synthetic oligonucleotide
tgagtaaggtactaagctcgagagggtaag

SEQ ID NO: 404914 - DNA, 30 bp, Artificial Sequence
  Synthetic oligonucleotide
agggctcgttcggcttcagttgcgggtaag

SEQ ID NO: 404915 - DNA, 30 bp, Artificial Sequence
  Synthetic oligonucleotide
gccgatacgacaaattctgcgtcgggtaag

SEQ ID NO: 404916 - DNA, 30 bp, Artificial Sequence
  Synthetic oligonucleotide
gtcagaagttatttacccactactggtaag

SEQ ID NO: 404917 - DNA, 30 bp, Artificial Sequence
  Synthetic oligonucleotide
tcagttcctttcctgctctacattggtaag

SEQ ID NO: 404918 - DNA, 30 bp, Artificial Sequence
  Synthetic oligonucleotide
atgcagtaacgtcatgtgggtacatgtaag

SEQ ID NO: 404919 - DNA, 30 bp, Artificial Sequence
  Synthetic oligonucleotide
gtcaggaccggggtaggaagtggatgtaag

SEQ ID NO: 404920 - DNA, 30 bp, Artificial Sequence
  Synthetic oligonucleotide
gttattgcttgtatgttatcgagctgtaag

SEQ ID NO: 404921 - DNA, 30 bp, Artificial Sequence
  Synthetic oligonucleotide
actttgtattaatcaagttcccagtgtaag

SEQ ID NO: 404922 - DNA, 30 bp, Artificial Sequence
  Synthetic oligonucleotide
cgtgtgttcatcccaagtttgtcttgtaag

SEQ ID NO: 404923 - DNA, 30 bp, Artificial Sequence
  Synthetic oligonucleotide
ttgttattgaggagttctgagaaaattaag

SEQ ID NO: 404924 - DNA, 30 bp, Artificial Sequence
  Synthetic oligonucleotide
atttaattgacctcccattatgcaattaag

SEQ ID NO: 404925 - DNA, 30 bp, Artificial Sequence
  Synthetic oligonucleotide
atcccacgtctctggactcggtgaattaag

SEQ ID NO: 404926 - DNA, 30 bp, Artificial Sequence
  Synthetic oligonucleotide
agcgtggtgcgttgaccgtggagcattaag

SEQ ID NO: 404927 - DNA, 30 bp, Artificial Sequence
  Synthetic oligonucleotide
tcccatgcaaccctgagaacattgattaag

SEQ ID NO: 404928 - DNA, 30 bp, Artificial Sequence
  Synthetic oligonucleotide
ggttcgcgctaagtgccatggttacttaag

SEQ ID NO: 404929 - DNA, 30 bp, Artificial Sequence
  Synthetic oligonucleotide
aaatctcaatgtccttttgataagcttaag

SEQ ID NO: 404930 - DNA, 30 bp, Artificial Sequence
  Synthetic oligonucleotide
catagtgcggtgccacgaaaacgtcttaag

SEQ ID NO: 404931 - DNA, 30 bp, Artificial Sequence
  Synthetic oligonucleotide
cctcttttgatgccggtcgcctgagttaag

SEQ ID NO: 404932 - DNA, 30 bp, Artificial Sequence
  Synthetic oligonucleotide
gtcttggcgcagaaaattcttttagttaag

SEQ ID NO: 404933 - DNA, 30 bp, Artificial Sequence
  Synthetic oligonucleotide
attacgtgcaaccagttctgattcgttaag

SEQ ID NO: 404934 - DNA, 30 bp, Artificial Sequence
  Synthetic oligonucleotide
taagcaggaacctgaaggctttaggttaag

SEQ ID NO: 404935 - DNA, 30 bp, Artificial Sequence
  Synthetic oligonucleotide
gtcttcatatccgttatccacccggttaag

SEQ ID NO: 404936 - DNA, 30 bp, Artificial Sequence
  Synthetic oligonucleotide
tattttatcccggaagtcgtcagggttaag

SEQ ID NO: 404937 - DNA, 30 bp, Artificial Sequence
  Synthetic oligonucleotide
agtatttttcactggtgacagggggttaag

SEQ ID NO: 404938 - DNA, 30 bp, Artificial Sequence
  Synthetic oligonucleotide
ttttttggaaccagattgacgtgggttaag

SEQ ID NO: 404939 - DNA, 30 bp, Artificial Sequence
  Synthetic oligonucleotide
ggtcgctgtacacaccaaatcctggttaag

SEQ ID NO: 404940 - DNA, 30 bp, Artificial Sequence
  Synthetic oligonucleotide
ttgatttcaccggaggagccgaatgttaag

SEQ ID NO: 404941 - DNA, 30 bp, Artificial Sequence
  Synthetic oligonucleotide
ccctgtgcggagcttccaggccatgttaag

SEQ ID NO: 404942 - DNA, 30 bp, Artificial Sequence
  Synthetic oligonucleotide
ttgcaaatgcttgtacggcgttctgttaag

SEQ ID NO: 404943 - DNA, 30 bp, Artificial Sequence
  Synthetic oligonucleotide
aactaaagaaacacctctaagcgtgttaag

SEQ ID NO: 404944 - DNA, 30 bp, Artificial Sequence
  Synthetic oligonucleotide
tagttttaatcaaagtaaactggtgttaag

SEQ ID NO: 404945 - DNA, 30 bp, Artificial Sequence
  Synthetic oligonucleotide
aagatgcagccagctacggccgttgttaag

SEQ ID NO: 404946 - DNA, 30 bp, Artificial Sequence
  Synthetic oligonucleotide
ggtgccctttcgtatatcttgtttgttaag

SEQ ID NO: 404947 - DNA, 30 bp, Artificial Sequence
  Synthetic oligonucleotide
tagggattagatatctgtcggaaatttaag

SEQ ID NO: 404948 - DNA, 30 bp, Artificial Sequence
  Synthetic oligonucleotide
tcgcaaccaccccatattctacaatttaag

SEQ ID NO: 404949 - DNA, 30 bp, Artificial Sequence
  Synthetic oligonucleotide
ctggcaaggcccattggtcccgaatttaag

SEQ ID NO: 404950 - DNA, 30 bp, Artificial Sequence
  Synthetic oligonucleotide
ctcctgattctaacgttggcgagatttaag

SEQ ID NO: 404951 - DNA, 30 bp, Artificial Sequence
  Synthetic oligonucleotide
ctcctctttgtctgtcactagctatttaag

SEQ ID NO: 404952 - DNA, 30 bp, Artificial Sequence
  Synthetic oligonucleotide
ccggcatggcctattccatggctatttaag

SEQ ID NO: 404953 - DNA, 30 bp, Artificial Sequence
  Synthetic oligonucleotide
aagtaagctctgacaacttggacctttaag

SEQ ID NO: 404954 - DNA, 30 bp, Artificial Sequence
  Synthetic oligonucleotide
ctagaacgagcatgtctgacgcgctttaag

SEQ ID NO: 404955 - DNA, 30 bp, Artificial Sequence
  Synthetic oligonucleotide
ccgattttatatcgttgtattcgctttaag

SEQ ID NO: 404956 - DNA, 30 bp, Artificial Sequence
  Synthetic oligonucleotide
atgccgttgaagatgtgggccgtctttaag

SEQ ID NO: 404957 - DNA, 30 bp, Artificial Sequence
  Synthetic oligonucleotide
tgatagtgggcacgcagacacgcgtttaag

SEQ ID NO: 404958 - DNA, 30 bp, Artificial Sequence
  Synthetic oligonucleotide
gcgccctcgtgggtcaatcaaaggtttaag

SEQ ID NO: 404959 - DNA, 30 bp, Artificial Sequence
  Synthetic oligonucleotide
ttatttaccaggccacgacgagggtttaag

SEQ ID NO: 404960 - DNA, 30 bp, Artificial Sequence
  Synthetic oligonucleotide
tcagagcccagtctttcatatatgtttaag

SEQ ID NO: 404961 - DNA, 30 bp, Artificial Sequence
  Synthetic oligonucleotide
gagaaaggttgaggattaacggcttttaag

SEQ ID NO: 404962 - DNA, 30 bp, Artificial Sequence
  Synthetic oligonucleotide
gggtacgcttgtatggtttcgtgaaaacag

SEQ ID NO: 404963 - DNA, 30 bp, Artificial Sequence
  Synthetic oligonucleotide
gataaacattcgatgcgattggagaaacag

SEQ ID NO: 404964 - DNA, 30 bp, Artificial Sequence
  Synthetic oligonucleotide
aattgcgccacctgtccgtcaggtaaacag

SEQ ID NO: 404965 - DNA, 30 bp, Artificial Sequence
  Synthetic oligonucleotide
tgtgggcagttctgcttgatgattaaacag

SEQ ID NO: 404966 - DNA, 30 bp, Artificial Sequence
  Synthetic oligonucleotide
gtggttgtctcattaggcgtgggacaacag

SEQ ID NO: 404967 - DNA, 30 bp, Artificial Sequence
  Synthetic oligonucleotide
atatggtcgtccatggtcattgaccaacag

SEQ ID NO: 404968 - DNA, 30 bp, Artificial Sequence
  Synthetic oligonucleotide
ccgggatgtacagttaaccggtaccaacag

SEQ ID NO: 404969 - DNA, 30 bp, Artificial Sequence
  Synthetic oligonucleotide
ggcttaaattttgttatgggacgccaacag

SEQ ID NO: 404970 - DNA, 30 bp, Artificial Sequence
  Synthetic oligonucleotide
tatttgtatcactacggacggcgccaacag

SEQ ID NO: 404971 - DNA, 30 bp, Artificial Sequence
  Synthetic oligonucleotide
gggcaccagcaatgtccttactagcaacag

SEQ ID NO: 404972 - DNA, 30 bp, Artificial Sequence
  Synthetic oligonucleotide
ctgcctcaaatgagccctggggcgcaacag

SEQ ID NO: 404973 - DNA, 30 bp, Artificial Sequence
  Synthetic oligonucleotide
gttattcctacgatgcaccgatggcaacag

SEQ ID NO: 404974 - DNA, 30 bp, Artificial Sequence
  Synthetic oligonucleotide
tgtggtgcagagccgtcaataatgcaacag

SEQ ID NO: 404975 - DNA, 30 bp, Artificial Sequence
  Synthetic oligonucleotide
atctaccacagaatgggataacatcaacag

SEQ ID NO: 404976 - DNA, 30 bp, Artificial Sequence
  Synthetic oligonucleotide
attatgtgggtctattcagtcgtagaacag

SEQ ID NO: 404977 - DNA, 30 bp, Artificial Sequence
  Synthetic oligonucleotide
gcatacaggttgtggttgggtgtcgaacag

SEQ ID NO: 404978 - DNA, 30 bp, Artificial Sequence
  Synthetic oligonucleotide
gtagacagggtcacggtagcaatggaacag

SEQ ID NO: 404979 - DNA, 30 bp, Artificial Sequence
  Synthetic oligonucleotide
ccgttaatccggggagcagtccctgaacag

SEQ ID NO: 404980 - DNA, 30 bp, Artificial Sequence
  Synthetic oligonucleotide
ggtttttgacccgggaaccaggctgaacag

SEQ ID NO: 404981 - DNA, 30 bp, Artificial Sequence
  Synthetic oligonucleotide
gtccacgggtgtggttttgcaagtgaacag

SEQ ID NO: 404982 - DNA, 30 bp, Artificial Sequence
  Synthetic oligonucleotide
agattaaaagtcatggtggggcttgaacag

SEQ ID NO: 404983 - DNA, 30 bp, Artificial Sequence
  Synthetic oligonucleotide
gcccagtataaacatcctaatctctaacag

SEQ ID NO: 404984 - DNA, 30 bp, Artificial Sequence
  Synthetic oligonucleotide
gtttatgcacgtctgagcgcaaagtaacag

SEQ ID NO: 404985 - DNA, 30 bp, Artificial Sequence
  Synthetic oligonucleotide
cgtctgttccgtcgagcggggcagtaacag

SEQ ID NO: 404986 - DNA, 30 bp, Artificial Sequence
  Synthetic oligonucleotide
ttagatattagtctttgccattagtaacag

SEQ ID NO: 404987 - DNA, 30 bp, Artificial Sequence
  Synthetic oligonucleotide
tagtgaactgacaacgtgttcatttaacag

SEQ ID NO: 404988 - DNA, 30 bp, Artificial Sequence
  Synthetic oligonucleotide
tgattgaacgtcaggttgtaaacaacacag

SEQ ID NO: 404989 - DNA, 30 bp, Artificial Sequence
  Synthetic oligonucleotide
aaataaaacgattcgcacgtagcaacacag

SEQ ID NO: 404990 - DNA, 30 bp, Artificial Sequence
  Synthetic oligonucleotide
gttggtcaacgccggtcaactagaacacag

SEQ ID NO: 404991 - DNA, 30 bp, Artificial Sequence
  Synthetic oligonucleotide
ctacgcctttgcgctagtaggtgaacacag

SEQ ID NO: 404992 - DNA, 30 bp, Artificial Sequence
  Synthetic oligonucleotide
ttagtagtgataggtctggtctacacacag

SEQ ID NO: 404993 - DNA, 30 bp, Artificial Sequence
  Synthetic oligonucleotide
ccccaatcggggttaagtaaacggacacag

SEQ ID NO: 404994 - DNA, 30 bp, Artificial Sequence
  Synthetic oligonucleotide
caaaagtcaccacatggtgatgggacacag

SEQ ID NO: 404995 - DNA, 30 bp, Artificial Sequence
  Synthetic oligonucleotide
gtctttgagtatcgtaccttttgtacacag

SEQ ID NO: 404996 - DNA, 30 bp, Artificial Sequence
  Synthetic oligonucleotide
tcttgtagtgagagaatcgccgtcccacag

SEQ ID NO: 404997 - DNA, 30 bp, Artificial Sequence
  Synthetic oligonucleotide
tagtcatggtgaacggcgtgtaagccacag

SEQ ID NO: 404998 - DNA, 30 bp, Artificial Sequence
  Synthetic oligonucleotide
tgctcgtatttgtcccgagccacgccacag

SEQ ID NO: 404999 - DNA, 30 bp, Artificial Sequence
  Synthetic oligonucleotide
aattggagctgtggccttctatttccacag

SEQ ID NO: 405000 - DNA, 30 bp, Artificial Sequence
  Synthetic oligonucleotide
aggactgcaataaatggcagtccagcacag

SEQ ID NO: 405001 - DNA, 30 bp, Artificial Sequence
  Synthetic oligonucleotide
gttgagacccgggttaaaaggcacgcacag

SEQ ID NO: 405002 - DNA, 30 bp, Artificial Sequence
  Synthetic oligonucleotide
tgacaacaagcttgcggacgagacgcacag

SEQ ID NO: 405003 - DNA, 30 bp, Artificial Sequence
  Synthetic oligonucleotide
caacggccctactcttgactattcgcacag

SEQ ID NO: 405004 - DNA, 30 bp, Artificial Sequence
  Synthetic oligonucleotide
ttgatgagggtatgaacggatacggcacag

SEQ ID NO: 405005 - DNA, 30 bp, Artificial Sequence
  Synthetic oligonucleotide
ctcactgggtgagtgaaagaccgggcacag

SEQ ID NO: 405006 - DNA, 30 bp, Artificial Sequence
  Synthetic oligonucleotide
aacacttactacccgggacggacctcacag

SEQ ID NO: 405007 - DNA, 30 bp, Artificial Sequence
  Synthetic oligonucleotide
acactctggggtgcaaccttgccctcacag

SEQ ID NO: 405008 - DNA, 30 bp, Artificial Sequence
  Synthetic oligonucleotide
tacccgttggaagccgtctcctgctcacag

SEQ ID NO: 405009 - DNA, 30 bp, Artificial Sequence
  Synthetic oligonucleotide
taggatagcatgcactatacttagtcacag

SEQ ID NO: 405010 - DNA, 30 bp, Artificial Sequence
  Synthetic oligonucleotide
gtattgtaatcagctatgattaattcacag

SEQ ID NO: 405011 - DNA, 30 bp, Artificial Sequence
  Synthetic oligonucleotide
tacttgttcgccgatagcagtttttcacag

SEQ ID NO: 405012 - DNA, 30 bp, Artificial Sequence
  Synthetic oligonucleotide
ggggctgttcggtttaatgtctaaagacag

SEQ ID NO: 405013 - DNA, 30 bp, Artificial Sequence
  Synthetic oligonucleotide
tataggtcattagcactggaggtaagacag

SEQ ID NO: 405014 - DNA, 30 bp, Artificial Sequence
  Synthetic oligonucleotide
atagtgtctaaatgttaaaatttaagacag

SEQ ID NO: 405015 - DNA, 30 bp, Artificial Sequence
  Synthetic oligonucleotide
gttcagtctgggttgccgtgctacagacag

SEQ ID NO: 405016 - DNA, 30 bp, Artificial Sequence
  Synthetic oligonucleotide
gagtgtgagagacataccacacgcagacag

SEQ ID NO: 405017 - DNA, 30 bp, Artificial Sequence
  Synthetic oligonucleotide
ttttacggaattgagtcctctatcagacag

SEQ ID NO: 405018 - DNA, 30 bp, Artificial Sequence
  Synthetic oligonucleotide
tatcaatatccatgccatcgcttcagacag

SEQ ID NO: 405019 - DNA, 30 bp, Artificial Sequence
  Synthetic oligonucleotide
gagctcgccgggtatcatcttcgtagacag

SEQ ID NO: 405020 - DNA, 30 bp, Artificial Sequence
  Synthetic oligonucleotide
tacaagtaatgggggattactttaggacag

SEQ ID NO: 405021 - DNA, 30 bp, Artificial Sequence
  Synthetic oligonucleotide
tcaattgaggggagtgcaggtaagggacag

SEQ ID NO: 405022 - DNA, 30 bp, Artificial Sequence
  Synthetic oligonucleotide
tgtcccgcctgtaatgtggtgcagggacag

SEQ ID NO: 405023 - DNA, 30 bp, Artificial Sequence
  Synthetic oligonucleotide
gggcttcatcttgaacacctggtgggacag

SEQ ID NO: 405024 - DNA, 30 bp, Artificial Sequence
  Synthetic oligonucleotide
gcgtcagatgatctggaccttgtgggacag

SEQ ID NO: 405025 - DNA, 30 bp, Artificial Sequence
  Synthetic oligonucleotide
cgttagattatcacccttaacgttggacag

SEQ ID NO: 405026 - DNA, 30 bp, Artificial Sequence
  Synthetic oligonucleotide
gctttcagttacgtgttcactcaatgacag

SEQ ID NO: 405027 - DNA, 30 bp, Artificial Sequence
  Synthetic oligonucleotide
tggctataaacgacagacggagaatgacag

SEQ ID NO: 405028 - DNA, 30 bp, Artificial Sequence
  Synthetic oligonucleotide
gcaaacagtcttacaaagaggcgctgacag

SEQ ID NO: 405029 - DNA, 30 bp, Artificial Sequence
  Synthetic oligonucleotide
cccttaagcctcactgaaacaatctgacag

SEQ ID NO: 405030 - DNA, 30 bp, Artificial Sequence
  Synthetic oligonucleotide
taagctcacaagttgactatcttgtgacag

SEQ ID NO: 405031 - DNA, 30 bp, Artificial Sequence
  Synthetic oligonucleotide
aatgttatggctacgataatgttttgacag

SEQ ID NO: 405032 - DNA, 30 bp, Artificial Sequence
  Synthetic oligonucleotide
gaatcctttaagcattcctgcccaatacag

SEQ ID NO: 405033 - DNA, 30 bp, Artificial Sequence
  Synthetic oligonucleotide
actgattatttaaggctcctcggaatacag

SEQ ID NO: 405034 - DNA, 30 bp, Artificial Sequence
  Synthetic oligonucleotide
ttaaaagggggcctccgtctgggaatacag

SEQ ID NO: 405035 - DNA, 30 bp, Artificial Sequence
  Synthetic oligonucleotide
gtagtgggtacactgttcccgtgaatacag

SEQ ID NO: 405036 - DNA, 30 bp, Artificial Sequence
  Synthetic oligonucleotide
tgccttctcgacccgggaccctgcatacag

SEQ ID NO: 405037 - DNA, 30 bp, Artificial Sequence
  Synthetic oligonucleotide
gttaatttctcttttcggaacgtcatacag

SEQ ID NO: 405038 - DNA, 30 bp, Artificial Sequence
  Synthetic oligonucleotide
gtgtgtgtaattcgtaatgtctatatacag

SEQ ID NO: 405039 - DNA, 30 bp, Artificial Sequence
  Synthetic oligonucleotide
taaatcattttacggtcgatttatatacag

SEQ ID NO: 405040 - DNA, 30 bp, Artificial Sequence
  Synthetic oligonucleotide
tgttatttcgggatattcgtgattatacag

SEQ ID NO: 405041 - DNA, 30 bp, Artificial Sequence
  Synthetic oligonucleotide
tcagcatgggtgacggttacgtccctacag

SEQ ID NO: 405042 - DNA, 30 bp, Artificial Sequence
  Synthetic oligonucleotide
tgtttaatgggcagttttgctatcctacag

SEQ ID NO: 405043 - DNA, 30 bp, Artificial Sequence
  Synthetic oligonucleotide
gtggccgatgtcgcatcggatcggctacag

SEQ ID NO: 405044 - DNA, 30 bp, Artificial Sequence
  Synthetic oligonucleotide
cactggtggccgcgttgactaatgctacag

SEQ ID NO: 405045 - DNA, 30 bp, Artificial Sequence
  Synthetic oligonucleotide
aggtagtcagttgatagaagaattctacag

SEQ ID NO: 405046 - DNA, 30 bp, Artificial Sequence
  Synthetic oligonucleotide
tgtagggtatatgatagccccttagtacag

SEQ ID NO: 405047 - DNA, 30 bp, Artificial Sequence
  Synthetic oligonucleotide
gaccgttttttcacgggggtatgcgtacag

SEQ ID NO: 405048 - DNA, 30 bp, Artificial Sequence
  Synthetic oligonucleotide
tttacccacatatttttggataaggtacag

SEQ ID NO: 405049 - DNA, 30 bp, Artificial Sequence
  Synthetic oligonucleotide
gtaatacagtacatatcggtccgtgtacag

SEQ ID NO: 405050 - DNA, 30 bp, Artificial Sequence
  Synthetic oligonucleotide
aataagaaaatatgggcctagtgtgtacag

SEQ ID NO: 405051 - DNA, 30 bp, Artificial Sequence
  Synthetic oligonucleotide
aattttgtccaaaaaggcgataacttacag

SEQ ID NO: 405052 - DNA, 30 bp, Artificial Sequence
  Synthetic oligonucleotide
ggcgctatgtcctagccgtcacacttacag

SEQ ID NO: 405053 - DNA, 30 bp, Artificial Sequence
  Synthetic oligonucleotide
gaaattaccgccttggtggggtgcttacag

SEQ ID NO: 405054 - DNA, 30 bp, Artificial Sequence
  Synthetic oligonucleotide
agtaaaaaaccgcgaatacccctcttacag

SEQ ID NO: 405055 - DNA, 30 bp, Artificial Sequence
  Synthetic oligonucleotide
tgccgaattcccgtcatgtattcgttacag

SEQ ID NO: 405056 - DNA, 30 bp, Artificial Sequence
  Synthetic oligonucleotide
aagccgcatatttttgcacggctgttacag

SEQ ID NO: 405057 - DNA, 30 bp, Artificial Sequence
  Synthetic oligonucleotide
tgccacgggtggatccggaatggtttacag

SEQ ID NO: 405058 - DNA, 30 bp, Artificial Sequence
  Synthetic oligonucleotide
ttagcgacggacaacaggaaatttttacag

SEQ ID NO: 405059 - DNA, 30 bp, Artificial Sequence
  Synthetic oligonucleotide
ccttcatatatatcttgcgtggcaaaccag

SEQ ID NO: 405060 - DNA, 30 bp, Artificial Sequence
  Synthetic oligonucleotide
tgcagtaactgtcggaacacacccaaccag

SEQ ID NO: 405061 - DNA, 30 bp, Artificial Sequence
  Synthetic oligonucleotide
cggagcacaggccacaacgataataaccag

SEQ ID NO: 405062 - DNA, 30 bp, Artificial Sequence
  Synthetic oligonucleotide
gcacatgggtgtctcaactggggtaaccag

SEQ ID NO: 405063 - DNA, 30 bp, Artificial Sequence
  Synthetic oligonucleotide
aggcatgcttcatactatcgtgaacaccag

SEQ ID NO: 405064 - DNA, 30 bp, Artificial Sequence
  Synthetic oligonucleotide
ggatggtgctacgtgtccaggccacaccag

SEQ ID NO: 405065 - DNA, 30 bp, Artificial Sequence
  Synthetic oligonucleotide
caatatccaggcggagcggtatgccaccag

SEQ ID NO: 405066 - DNA, 30 bp, Artificial Sequence
  Synthetic oligonucleotide
gtctcacatcctcttatgtaagcgcaccag

SEQ ID NO: 405067 - DNA, 30 bp, Artificial Sequence
  Synthetic oligonucleotide
caggacccagggctcgctttatcgcaccag

SEQ ID NO: 405068 - DNA, 30 bp, Artificial Sequence
  Synthetic oligonucleotide
gactgatatgtcacgggggcgcggcaccag

SEQ ID NO: 405069 - DNA, 30 bp, Artificial Sequence
  Synthetic oligonucleotide
cgtactcgttgataatgttttcggcaccag

SEQ ID NO: 405070 - DNA, 30 bp, Artificial Sequence
  Synthetic oligonucleotide
gaatccatgaggacgccaaggcatcaccag

SEQ ID NO: 405071 - DNA, 30 bp, Artificial Sequence
  Synthetic oligonucleotide
catgcctccgttggataatattgtcaccag

SEQ ID NO: 405072 - DNA, 30 bp, Artificial Sequence
  Synthetic oligonucleotide
tgggtatcgatcgttttcacttttcaccag

SEQ ID NO: 405073 - DNA, 30 bp, Artificial Sequence
  Synthetic oligonucleotide
actacttctattacctctaggacagaccag

SEQ ID NO: 405074 - DNA, 30 bp, Artificial Sequence
  Synthetic oligonucleotide
tatcctggccagtagaatgtttgagaccag

SEQ ID NO: 405075 - DNA, 30 bp, Artificial Sequence
  Synthetic oligonucleotide
aataggtttagttttaaggccaaggaccag

SEQ ID NO: 405076 - DNA, 30 bp, Artificial Sequence
  Synthetic oligonucleotide
cacgaacggacggcacttgccatggaccag

SEQ ID NO: 405077 - DNA, 30 bp, Artificial Sequence
  Synthetic oligonucleotide
ataagtggttaaggacgccgggactaccag

SEQ ID NO: 405078 - DNA, 30 bp, Artificial Sequence
  Synthetic oligonucleotide
gcccccacgataaccctgcactgctaccag

SEQ ID NO: 405079 - DNA, 30 bp, Artificial Sequence
  Synthetic oligonucleotide
catatggttagatactcaagggcgtaccag

SEQ ID NO: 405080 - DNA, 29 bp, Artificial Sequence
  Synthetic oligonucleotide
aatatttgtcggacgctgggatgtaccag

SEQ ID NO: 405081 - DNA, 30 bp, Artificial Sequence
  Synthetic oligonucleotide
gaaagcaaatgccgcactctcggttaccag

SEQ ID NO: 405082 - DNA, 30 bp, Artificial Sequence
  Synthetic oligonucleotide
ccaagattacggacaaagtggatttaccag

SEQ ID NO: 405083 - DNA, 30 bp, Artificial Sequence
  Synthetic oligonucleotide
gggcaatgcacaggtcaggatatttaccag

SEQ ID NO: 405084 - DNA, 30 bp, Artificial Sequence
  Synthetic oligonucleotide
acctatctaatgaagtaggcgctttaccag

SEQ ID NO: 405085 - DNA, 30 bp, Artificial Sequence
  Synthetic oligonucleotide
acactatctctattttcattctaaacccag

SEQ ID NO: 405086 - DNA, 30 bp, Artificial Sequence
  Synthetic oligonucleotide
tagcggagacgtacgtgtcctgtaacccag

SEQ ID NO: 405087 - DNA, 30 bp, Artificial Sequence
  Synthetic oligonucleotide
aaattctggtgacggtgccacctgacccag

SEQ ID NO: 405088 - DNA, 30 bp, Artificial Sequence
  Synthetic oligonucleotide
atcttccagtgttgatccgtttatacccag

SEQ ID NO: 405089 - DNA, 30 bp, Artificial Sequence
  Synthetic oligonucleotide
tttattatgcccacactgcttatgccccag

SEQ ID NO: 405090 - DNA, 30 bp, Artificial Sequence
  Synthetic oligonucleotide
cacttaagcaatgctatctggtatccccag

SEQ ID NO: 405091 - DNA, 30 bp, Artificial Sequence
  Synthetic oligonucleotide
ccaccgcatgggaaaattcacgttccccag

SEQ ID NO: 405092 - DNA, 30 bp, Artificial Sequence
  Synthetic oligonucleotide
tcctacgggatagggatggcggcagcccag

SEQ ID NO: 405093 - DNA, 30 bp, Artificial Sequence
  Synthetic oligonucleotide
gttagttggttcagaacgtgggtagcccag

SEQ ID NO: 405094 - DNA, 30 bp, Artificial Sequence
  Synthetic oligonucleotide
gagtaggccaggtgttgggggaatgcccag

SEQ ID NO: 405095 - DNA, 30 bp, Artificial Sequence
  Synthetic oligonucleotide
ggggagcggcaggcaccggaccggtcccag

SEQ ID NO: 405096 - DNA, 30 bp, Artificial Sequence
  Synthetic oligonucleotide
ttatgggatatcccctgctctcattcccag

SEQ ID NO: 405097 - DNA, 30 bp, Artificial Sequence
  Synthetic oligonucleotide
gtactcaattctgcgcggggcagttcccag

SEQ ID NO: 405098 - DNA, 30 bp, Artificial Sequence
  Synthetic oligonucleotide
atacataataccacagcgttaatttcccag

SEQ ID NO: 405099 - DNA, 30 bp, Artificial Sequence
  Synthetic oligonucleotide
gttaggacactttgcatgtccgaaagccag

SEQ ID NO: 405100 - DNA, 30 bp, Artificial Sequence
  Synthetic oligonucleotide
agttgactatctattgcgcaaacaagccag

SEQ ID NO: 405101 - DNA, 30 bp, Artificial Sequence
  Synthetic oligonucleotide
actccagatggcagggtggctgcacgccag

SEQ ID NO: 405102 - DNA, 30 bp, Artificial Sequence
  Synthetic oligonucleotide
accatgagcctacggatcccttgacgccag

SEQ ID NO: 405103 - DNA, 30 bp, Artificial Sequence
  Synthetic oligonucleotide
taataggttcacgtagcgtctccccgccag

SEQ ID NO: 405104 - DNA, 30 bp, Artificial Sequence
  Synthetic oligonucleotide
taggatcgccaaaaggccgaatgccgccag

SEQ ID NO: 405105 - DNA, 30 bp, Artificial Sequence
  Synthetic oligonucleotide
accagatctggccgttatctctaaggccag

SEQ ID NO: 405106 - DNA, 30 bp, Artificial Sequence
  Synthetic oligonucleotide
gtaaggccgagaaaccttagttaaggccag

SEQ ID NO: 405107 - DNA, 30 bp, Artificial Sequence
  Synthetic oligonucleotide
actctcgagtaaacagttgcattaggccag

SEQ ID NO: 405108 - DNA, 30 bp, Artificial Sequence
  Synthetic oligonucleotide
agactggctatcggacactcaaacggccag

SEQ ID NO: 405109 - DNA, 30 bp, Artificial Sequence
  Synthetic oligonucleotide
tgtgatatgcgcgccgcgaggcgcggccag

SEQ ID NO: 405110 - DNA, 30 bp, Artificial Sequence
  Synthetic oligonucleotide
gattggatagtatcatcattattcggccag

SEQ ID NO: 405111 - DNA, 30 bp, Artificial Sequence
  Synthetic oligonucleotide
ccattgtcagacatacgcgctgcgggccag

SEQ ID NO: 405112 - DNA, 30 bp, Artificial Sequence
  Synthetic oligonucleotide
agctgtacccgtgggaaatctgcgggccag

SEQ ID NO: 405113 - DNA, 30 bp, Artificial Sequence
  Synthetic oligonucleotide
gttttagcagtatgaccacaaacatgccag

SEQ ID NO: 405114 - DNA, 30 bp, Artificial Sequence
  Synthetic oligonucleotide
gactctcaaaatgcgatttctaactgccag

SEQ ID NO: 405115 - DNA, 30 bp, Artificial Sequence
  Synthetic oligonucleotide
gatttgttctgccccgcgcatgactgccag

SEQ ID NO: 405116 - DNA, 30 bp, Artificial Sequence
  Synthetic oligonucleotide
cttgttgctatacttgttgttttctgccag

SEQ ID NO: 405117 - DNA, 30 bp, Artificial Sequence
  Synthetic oligonucleotide
gcataaaatgcgtctcaccaacagtgccag

SEQ ID NO: 405118 - DNA, 30 bp, Artificial Sequence
  Synthetic oligonucleotide
cacctgtcctgacgtgatgtaatgtgccag

SEQ ID NO: 405119 - DNA, 30 bp, Artificial Sequence
  Synthetic oligonucleotide
cagtatttggtggtctgatcgctgatccag

SEQ ID NO: 405120 - DNA, 30 bp, Artificial Sequence
  Synthetic oligonucleotide
gaagttatttctgttgccgcccctatccag

SEQ ID NO: 405121 - DNA, 30 bp, Artificial Sequence
  Synthetic oligonucleotide
accgcccgcttgttttgccaatttatccag

SEQ ID NO: 405122 - DNA, 30 bp, Artificial Sequence
  Synthetic oligonucleotide
ccaaatcggcccggcggcgaatgactccag

SEQ ID NO: 405123 - DNA, 30 bp, Artificial Sequence
  Synthetic oligonucleotide
actgcacataggcaccagggtagcctccag

SEQ ID NO: 405124 - DNA, 30 bp, Artificial Sequence
  Synthetic oligonucleotide
cccttcctttctggaatttcgccgctccag

SEQ ID NO: 405125 - DNA, 30 bp, Artificial Sequence
  Synthetic oligonucleotide
ctttcaaagatgacattgagtgtgctccag

SEQ ID NO: 405126 - DNA, 30 bp, Artificial Sequence
  Synthetic oligonucleotide
aaatgggaggaggcttactgggttctccag

SEQ ID NO: 405127 - DNA, 30 bp, Artificial Sequence
  Synthetic oligonucleotide
ttatcaagtgggaatctgtattttctccag

SEQ ID NO: 405128 - DNA, 30 bp, Artificial Sequence
  Synthetic oligonucleotide
attaggacccgtattacacggtgcgtccag

SEQ ID NO: 405129 - DNA, 30 bp, Artificial Sequence
  Synthetic oligonucleotide
gagtcgtcggacagtggccttccggtccag

SEQ ID NO: 405130 - DNA, 30 bp, Artificial Sequence
  Synthetic oligonucleotide
aagactagtgtttcgtagcgagtggtccag

SEQ ID NO: 405131 - DNA, 30 bp, Artificial Sequence
  Synthetic oligonucleotide
aactgatccacgacacagacatctgtccag

SEQ ID NO: 405132 - DNA, 30 bp, Artificial Sequence
  Synthetic oligonucleotide
ggtccggaatttattgtagatggtgtccag

SEQ ID NO: 405133 - DNA, 30 bp, Artificial Sequence
  Synthetic oligonucleotide
tcaatgtatcctcgattgatattattccag

SEQ ID NO: 405134 - DNA, 30 bp, Artificial Sequence
  Synthetic oligonucleotide
tacactaaacggtggcactcaaccttccag

SEQ ID NO: 405135 - DNA, 30 bp, Artificial Sequence
  Synthetic oligonucleotide
tggtacgtgttatactaactatccttccag

SEQ ID NO: 405136 - DNA, 30 bp, Artificial Sequence
  Synthetic oligonucleotide
ttggtcgtggcccactgcatgcagttccag

SEQ ID NO: 405137 - DNA, 30 bp, Artificial Sequence
  Synthetic oligonucleotide
tgcgggccctattggaactgcgggttccag

SEQ ID NO: 405138 - DNA, 30 bp, Artificial Sequence
  Synthetic oligonucleotide
aagtgaatagactagtgtcaatgtttccag

SEQ ID NO: 405139 - DNA, 30 bp, Artificial Sequence
  Synthetic oligonucleotide
taggcctctgtgctcaacatacgcaagcag

SEQ ID NO: 405140 - DNA, 30 bp, Artificial Sequence
  Synthetic oligonucleotide
tcccctgactcgatcattagtcgcaagcag

SEQ ID NO: 405141 - DNA, 30 bp, Artificial Sequence
  Synthetic oligonucleotide
gctgttagatgtctactcggtttcaagcag

SEQ ID NO: 405142 - DNA, 30 bp, Artificial Sequence
  Synthetic oligonucleotide
tccgaccccaaagacacgaggacgaagcag

SEQ ID NO: 405143 - DNA, 30 bp, Artificial Sequence
  Synthetic oligonucleotide
ccacttcaagtaggccagtcttcgaagcag

SEQ ID NO: 405144 - DNA, 30 bp, Artificial Sequence
  Synthetic oligonucleotide
gaattaacgcagctaatataaacacagcag

SEQ ID NO: 405145 - DNA, 30 bp, Artificial Sequence
  Synthetic oligonucleotide
gcggttgggtttcggggttatcgacagcag

SEQ ID NO: 405146 - DNA, 30 bp, Artificial Sequence
  Synthetic oligonucleotide
acaccgataatttctaggcacgaccagcag

SEQ ID NO: 405147 - DNA, 30 bp, Artificial Sequence
  Synthetic oligonucleotide
ataacctttacggttatctaggcccagcag

SEQ ID NO: 405148 - DNA, 30 bp, Artificial Sequence
  Synthetic oligonucleotide
attggtttaccttgaatccgtcagcagcag

SEQ ID NO: 405149 - DNA, 30 bp, Artificial Sequence
  Synthetic oligonucleotide
tagcttgtatatgcagcctcgtctcagcag

SEQ ID NO: 405150 - DNA, 30 bp, Artificial Sequence
  Synthetic oligonucleotide
acctcgccgcatgttaaagtaacggagcag

SEQ ID NO: 405151 - DNA, 30 bp, Artificial Sequence
  Synthetic oligonucleotide
ccaagacaagcatgactcagcccggagcag

SEQ ID NO: 405152 - DNA, 30 bp, Artificial Sequence
  Synthetic oligonucleotide
aaccgatcatggcctgcaagaaatgagcag

SEQ ID NO: 405153 - DNA, 28 bp, Artificial Sequence
  Synthetic oligonucleotide
tggtgcccattccgttttctttgagcag

SEQ ID NO: 405154 - DNA, 30 bp, Artificial Sequence
  Synthetic oligonucleotide
gactcttatggatacagggctcgatagcag

SEQ ID NO: 405155 - DNA, 30 bp, Artificial Sequence
  Synthetic oligonucleotide
taagtcattgagggcacgcgtcactagcag

SEQ ID NO: 405156 - DNA, 30 bp, Artificial Sequence
  Synthetic oligonucleotide
cttcttatctgcagggaatgttggtagcag

SEQ ID NO: 405157 - DNA, 25 bp, Artificial Sequence
  Synthetic oligonucleotide
gattgaaccgcttttctattagcag

SEQ ID NO: 405158 - DNA, 30 bp, Artificial Sequence
  Synthetic oligonucleotide
gcctagtagttcggttgacaataaacgcag

SEQ ID NO: 405159 - DNA, 30 bp, Artificial Sequence
  Synthetic oligonucleotide
gactatgtccactctaagtcaataacgcag

SEQ ID NO: 405160 - DNA, 30 bp, Artificial Sequence
  Synthetic oligonucleotide
cggtcggaccccggcagaatgctcacgcag

SEQ ID NO: 405161 - DNA, 30 bp, Artificial Sequence
  Synthetic oligonucleotide
aataacagccaatcaacaacaaagacgcag

SEQ ID NO: 405162 - DNA, 30 bp, Artificial Sequence
  Synthetic oligonucleotide
caacgggggaccacgccgtaagggacgcag

SEQ ID NO: 405163 - DNA, 30 bp, Artificial Sequence
  Synthetic oligonucleotide
tcgggatacgactgcggtcaattgacgcag

SEQ ID NO: 405164 - DNA, 30 bp, Artificial Sequence
  Synthetic oligonucleotide
cacctatttttgagttgataaaatacgcag

SEQ ID NO: 405165 - DNA, 30 bp, Artificial Sequence
  Synthetic oligonucleotide
agattcgttacccatggttcttacccgcag

SEQ ID NO: 405166 - DNA, 30 bp, Artificial Sequence
  Synthetic oligonucleotide
tacatggtacttacgcgtgtggccccgcag

SEQ ID NO: 405167 - DNA, 30 bp, Artificial Sequence
  Synthetic oligonucleotide
accccgttagagcacgcctctagcccgcag

SEQ ID NO: 405168 - DNA, 30 bp, Artificial Sequence
  Synthetic oligonucleotide
agatccacgtattgaacttgtaagccgcag

SEQ ID NO: 405169 - DNA, 30 bp, Artificial Sequence
  Synthetic oligonucleotide
ctcgcgttcagcctgttctctttgccgcag

SEQ ID NO: 405170 - DNA, 30 bp, Artificial Sequence
  Synthetic oligonucleotide
ctgtaacggtgtaacctatagtttccgcag

SEQ ID NO: 405171 - DNA, 30 bp, Artificial Sequence
  Synthetic oligonucleotide
ggtgggtatttctgagtgtttgcagcgcag

SEQ ID NO: 405172 - DNA, 30 bp, Artificial Sequence
  Synthetic oligonucleotide
ttgaagtctcggtacacaagacccgcgcag

SEQ ID NO: 405173 - DNA, 30 bp, Artificial Sequence
  Synthetic oligonucleotide
tctattcctgggtctaaacgacccgcgcag

SEQ ID NO: 405174 - DNA, 30 bp, Artificial Sequence
  Synthetic oligonucleotide
ttaccgtaacctactatatattccgcgcag

SEQ ID NO: 405175 - DNA, 30 bp, Artificial Sequence
  Synthetic oligonucleotide
tactatagggacgagtggcctggcgcgcag

SEQ ID NO: 405176 - DNA, 30 bp, Artificial Sequence
  Synthetic oligonucleotide
gattgccggggcggtgtaattgaggcgcag

SEQ ID NO: 405177 - DNA, 30 bp, Artificial Sequence
  Synthetic oligonucleotide
atctgctgcttcggtctaggaacggcgcag

SEQ ID NO: 405178 - DNA, 30 bp, Artificial Sequence
  Synthetic oligonucleotide
ccattcggaattccaatgttaatggcgcag

SEQ ID NO: 405179 - DNA, 30 bp, Artificial Sequence
  Synthetic oligonucleotide
ggttagtctattaggaagccgtgttcgcag

SEQ ID NO: 405180 - DNA, 30 bp, Artificial Sequence
  Synthetic oligonucleotide
cctattaggttaccgtacaacgtttcgcag

SEQ ID NO: 405181 - DNA, 30 bp, Artificial Sequence
  Synthetic oligonucleotide
cgcaatttcatattgtgccgtggaaggcag

SEQ ID NO: 405182 - DNA, 30 bp, Artificial Sequence
  Synthetic oligonucleotide
tgttcaggaccagaggcacacgtaaggcag

SEQ ID NO: 405183 - DNA, 30 bp, Artificial Sequence
  Synthetic oligonucleotide
ggcgaagttacttgcctagctaacaggcag

SEQ ID NO: 405184 - DNA, 30 bp, Artificial Sequence
  Synthetic oligonucleotide
gctggttgttctattttggagggcaggcag

SEQ ID NO: 405185 - DNA, 30 bp, Artificial Sequence
  Synthetic oligonucleotide
gcggttttagagttccctggatagaggcag

SEQ ID NO: 405186 - DNA, 30 bp, Artificial Sequence
  Synthetic oligonucleotide
cgtaacggacccccttttcagcggaggcag

SEQ ID NO: 405187 - DNA, 30 bp, Artificial Sequence
  Synthetic oligonucleotide
taggactatctttggacggctacacggcag

SEQ ID NO: 405188 - DNA, 30 bp, Artificial Sequence
  Synthetic oligonucleotide
tgcgcagcccgtcacacactgagacggcag

SEQ ID NO: 405189 - DNA, 30 bp, Artificial Sequence
  Synthetic oligonucleotide
gctggcagagtacctccaccttgacggcag

SEQ ID NO: 405190 - DNA, 30 bp, Artificial Sequence
  Synthetic oligonucleotide
gtacgggcaagggcacccttcctccggcag

SEQ ID NO: 405191 - DNA, 30 bp, Artificial Sequence
  Synthetic oligonucleotide
cgggatgcccactgaattccgtggcggcag

SEQ ID NO: 405192 - DNA, 30 bp, Artificial Sequence
  Synthetic oligonucleotide
gtcaatgttttaccccttgtaggtcggcag

SEQ ID NO: 405193 - DNA, 30 bp, Artificial Sequence
  Synthetic oligonucleotide
gaactaaaagtaaatgattgggttcggcag

SEQ ID NO: 405194 - DNA, 30 bp, Artificial Sequence
  Synthetic oligonucleotide
atttatgctttgcactcatataaagggcag

SEQ ID NO: 405195 - DNA, 30 bp, Artificial Sequence
  Synthetic oligonucleotide
ggctattcgcggaacttccttgaagggcag

SEQ ID NO: 405196 - DNA, 30 bp, Artificial Sequence
  Synthetic oligonucleotide
ctgatatcgtctatgtatgcctaagggcag

SEQ ID NO: 405197 - DNA, 30 bp, Artificial Sequence
  Synthetic oligonucleotide
attttagctcacatggaatcagtagggcag

SEQ ID NO: 405198 - DNA, 30 bp, Artificial Sequence
  Synthetic oligonucleotide
ttcagtggagtagattttaaaaaggggcag

SEQ ID NO: 405199 - DNA, 30 bp, Artificial Sequence
  Synthetic oligonucleotide
actccgaaacgtgcctcactttgggggcag

SEQ ID NO: 405200 - DNA, 30 bp, Artificial Sequence
  Synthetic oligonucleotide
cattcaaccaactcacttcgcaaatggcag

SEQ ID NO: 405201 - DNA, 30 bp, Artificial Sequence
  Synthetic oligonucleotide
aggaccaaatcatgtgcaaaggcatggcag

SEQ ID NO: 405202 - DNA, 30 bp, Artificial Sequence
  Synthetic oligonucleotide
cgcaacagaaacggccagtcgacctggcag

SEQ ID NO: 405203 - DNA, 30 bp, Artificial Sequence
  Synthetic oligonucleotide
cctgatgcacacgagttaacgtcgtggcag

SEQ ID NO: 405204 - DNA, 30 bp, Artificial Sequence
  Synthetic oligonucleotide
gcgcgtgcctaagaaacgttaaattggcag

SEQ ID NO: 405205 - DNA, 30 bp, Artificial Sequence
  Synthetic oligonucleotide
acattttctgcacgaccccgtgattggcag

SEQ ID NO: 405206 - DNA, 30 bp, Artificial Sequence
  Synthetic oligonucleotide
ccgggtggaccagaggttctgggttggcag

SEQ ID NO: 405207 - DNA, 30 bp, Artificial Sequence
  Synthetic oligonucleotide
tgggatgtcttggacgatagctgaatgcag

SEQ ID NO: 405208 - DNA, 30 bp, Artificial Sequence
  Synthetic oligonucleotide
tcgctatgtcgcattctaagcctaatgcag

SEQ ID NO: 405209 - DNA, 30 bp, Artificial Sequence
  Synthetic oligonucleotide
ctcttaacgtgtctcctctcgatcatgcag

SEQ ID NO: 405210 - DNA, 30 bp, Artificial Sequence
  Synthetic oligonucleotide
gatggtcaggccaaacattgccggatgcag

SEQ ID NO: 405211 - DNA, 30 bp, Artificial Sequence
  Synthetic oligonucleotide
tagtaagactctagcgcaccggcactgcag

SEQ ID NO: 405212 - DNA, 30 bp, Artificial Sequence
  Synthetic oligonucleotide
tcaacaataatcgcccatggagggctgcag

SEQ ID NO: 405213 - DNA, 30 bp, Artificial Sequence
  Synthetic oligonucleotide
cacagttttgtagatgttgtggtgctgcag

SEQ ID NO: 405214 - DNA, 30 bp, Artificial Sequence
  Synthetic oligonucleotide
ggcctctagcagcgcgacttaactctgcag

SEQ ID NO: 405215 - DNA, 30 bp, Artificial Sequence
  Synthetic oligonucleotide
gaacacactgaggctgtccatgctctgcag

SEQ ID NO: 405216 - DNA, 30 bp, Artificial Sequence
  Synthetic oligonucleotide
gaaaaccgccgtactggctttctagtgcag

SEQ ID NO: 405217 - DNA, 30 bp, Artificial Sequence
  Synthetic oligonucleotide
aatatatatggtcaaccgaaaaacgtgcag

SEQ ID NO: 405218 - DNA, 30 bp, Artificial Sequence
  Synthetic oligonucleotide
aatgataagatttaacaaaactatgtgcag

SEQ ID NO: 405219 - DNA, 30 bp, Artificial Sequence
  Synthetic oligonucleotide
gaccgatgacaacccccaaaccctgtgcag

SEQ ID NO: 405220 - DNA, 30 bp, Artificial Sequence
  Synthetic oligonucleotide
ccggttatttgggattagagcaaattgcag

SEQ ID NO: 405221 - DNA, 30 bp, Artificial Sequence
  Synthetic oligonucleotide
aattatcctcgtacgattggacgattgcag

SEQ ID NO: 405222 - DNA, 30 bp, Artificial Sequence
  Synthetic oligonucleotide
gtgtccaattgtgttgggcttaacttgcag

SEQ ID NO: 405223 - DNA, 30 bp, Artificial Sequence
  Synthetic oligonucleotide
tctagtccaatgtcttcgtagaccttgcag

SEQ ID NO: 405224 - DNA, 30 bp, Artificial Sequence
  Synthetic oligonucleotide
ttatagtttccgctaaaaggtcagttgcag

SEQ ID NO: 405225 - DNA, 30 bp, Artificial Sequence
  Synthetic oligonucleotide
agactggcacccttccccttaacgttgcag

SEQ ID NO: 405226 - DNA, 30 bp, Artificial Sequence
  Synthetic oligonucleotide
tgcgatgagcatcattttcggataaatcag

SEQ ID NO: 405227 - DNA, 30 bp, Artificial Sequence
  Synthetic oligonucleotide
tcctatcgaacctagctgggcgtcaatcag

SEQ ID NO: 405228 - DNA, 30 bp, Artificial Sequence
  Synthetic oligonucleotide
tcgggccctggtcgaaagaaggcccatcag

SEQ ID NO: 405229 - DNA, 30 bp, Artificial Sequence
  Synthetic oligonucleotide
actattgggttcataccggaaggccatcag

SEQ ID NO: 405230 - DNA, 30 bp, Artificial Sequence
  Synthetic oligonucleotide
aattgggagcacttgtctaatgatcatcag

SEQ ID NO: 405231 - DNA, 30 bp, Artificial Sequence
  Synthetic oligonucleotide
aatgaagggatgatgataattgatcatcag

SEQ ID NO: 405232 - DNA, 30 bp, Artificial Sequence
  Synthetic oligonucleotide
acatgcaacactgttgaaacgactcatcag

SEQ ID NO: 405233 - DNA, 30 bp, Artificial Sequence
  Synthetic oligonucleotide
tcacccccctcacctcgagtacgtcatcag

SEQ ID NO: 405234 - DNA, 30 bp, Artificial Sequence
  Synthetic oligonucleotide
tgaatgccgggcctatgcgcttgtcatcag

SEQ ID NO: 405235 - DNA, 30 bp, Artificial Sequence
  Synthetic oligonucleotide
actcgaggacacggagtccaggttcatcag

SEQ ID NO: 405236 - DNA, 30 bp, Artificial Sequence
  Synthetic oligonucleotide
tcatggttccaaccgtctaatatcgatcag

SEQ ID NO: 405237 - DNA, 30 bp, Artificial Sequence
  Synthetic oligonucleotide
ttgtcatagcgtgatggtttgggggatcag

SEQ ID NO: 405238 - DNA, 30 bp, Artificial Sequence
  Synthetic oligonucleotide
aacgtcggaccaaacactgcttttgatcag

SEQ ID NO: 405239 - DNA, 30 bp, Artificial Sequence
  Synthetic oligonucleotide
tcgagctttcaggtgttcaactaatatcag

SEQ ID NO: 405240 - DNA, 30 bp, Artificial Sequence
  Synthetic oligonucleotide
tgcactttctagaagttttgtacatatcag

SEQ ID NO: 405241 - DNA, 30 bp, Artificial Sequence
  Synthetic oligonucleotide
gaagtctatgaaaatgacacagcatatcag

SEQ ID NO: 405242 - DNA, 30 bp, Artificial Sequence
  Synthetic oligonucleotide
gtcatactcttaactaccggactatatcag

SEQ ID NO: 405243 - DNA, 30 bp, Artificial Sequence
  Synthetic oligonucleotide
ttcggggaaatagtctttgctgtatatcag

SEQ ID NO: 405244 - DNA, 30 bp, Artificial Sequence
  Synthetic oligonucleotide
ttctcatagtaaatagggttgacctatcag

SEQ ID NO: 405245 - DNA, 30 bp, Artificial Sequence
  Synthetic oligonucleotide
acttaggtctattctggaaacgggtatcag

SEQ ID NO: 405246 - DNA, 30 bp, Artificial Sequence
  Synthetic oligonucleotide
caacaatcgcgacgactgggtgccactcag

SEQ ID NO: 405247 - DNA, 30 bp, Artificial Sequence
  Synthetic oligonucleotide
tgcactgagctattgggtcctagcactcag

SEQ ID NO: 405248 - DNA, 30 bp, Artificial Sequence
  Synthetic oligonucleotide
gtaaagggccgggggccttaggcgactcag

SEQ ID NO: 405249 - DNA, 30 bp, Artificial Sequence
  Synthetic oligonucleotide
tcactttgatggctcaggtcttgtactcag

SEQ ID NO: 405250 - DNA, 31 bp, Artificial Sequence
  Synthetic oligonucleotide
ctctgaagccctccccgacatcatacctcag

SEQ ID NO: 405251 - DNA, 30 bp, Artificial Sequence
  Synthetic oligonucleotide
agtatgttatccgacacggagttacctcag

SEQ ID NO: 405252 - DNA, 30 bp, Artificial Sequence
  Synthetic oligonucleotide
atgaaaaaaggacaggtgggcgaccctcag

SEQ ID NO: 405253 - DNA, 30 bp, Artificial Sequence
  Synthetic oligonucleotide
caaacttactggttagcaacaaatcctcag

SEQ ID NO: 405254 - DNA, 30 bp, Artificial Sequence
  Synthetic oligonucleotide
ctgggttaatcgtgcagtacattagctcag

SEQ ID NO: 405255 - DNA, 30 bp, Artificial Sequence
  Synthetic oligonucleotide
atccaccattgtatattgctcgatgctcag

SEQ ID NO: 405256 - DNA, 30 bp, Artificial Sequence
  Synthetic oligonucleotide
acctccactacatgcctgagtattgctcag

SEQ ID NO: 405257 - DNA, 30 bp, Artificial Sequence
  Synthetic oligonucleotide
cttgggcacgtgttgttgttaatatctcag

SEQ ID NO: 405258 - DNA, 30 bp, Artificial Sequence
  Synthetic oligonucleotide
ctgagctatcgtttcctgccagcctctcag

SEQ ID NO: 405259 - DNA, 30 bp, Artificial Sequence
  Synthetic oligonucleotide
gcctgaggtccagtcaatggtatctctcag

SEQ ID NO: 405260 - DNA, 30 bp, Artificial Sequence
  Synthetic oligonucleotide
cgcatgagcattattctcagtcattctcag

SEQ ID NO: 405261 - DNA, 30 bp, Artificial Sequence
  Synthetic oligonucleotide
gtgactcaacgttcgcttgctcgttctcag

SEQ ID NO: 405262 - DNA, 30 bp, Artificial Sequence
  Synthetic oligonucleotide
tacgctgtacgtttcgattagaaaagtcag

SEQ ID NO: 405263 - DNA, 30 bp, Artificial Sequence
  Synthetic oligonucleotide
ggctagcttgaacgttctaggcgcagtcag

SEQ ID NO: 405264 - DNA, 30 bp, Artificial Sequence
  Synthetic oligonucleotide
gagtactctaatgtacatataggcagtcag

SEQ ID NO: 405265 - DNA, 30 bp, Artificial Sequence
  Synthetic oligonucleotide
gcgccccctttaacttgataacatagtcag

SEQ ID NO: 405266 - DNA, 30 bp, Artificial Sequence
  Synthetic oligonucleotide
caatttgacttctgctctataagtagtcag

SEQ ID NO: 405267 - DNA, 30 bp, Artificial Sequence
  Synthetic oligonucleotide
ggcagcgttaagtttccgcgtcaacgtcag

SEQ ID NO: 405268 - DNA, 31 bp, Artificial Sequence
  Synthetic oligonucleotide
ttattaaacatcgcgttaggcactacgtcag

SEQ ID NO: 405269 - DNA, 30 bp, Artificial Sequence
  Synthetic oligonucleotide
gccgcaattattagagggctgacccgtcag

SEQ ID NO: 405270 - DNA, 30 bp, Artificial Sequence
  Synthetic oligonucleotide
ctgactaggcgcttgttagtccgccgtcag

SEQ ID NO: 405271 - DNA, 30 bp, Artificial Sequence
  Synthetic oligonucleotide
taaaaatgaaaggtgttctccatccgtcag

SEQ ID NO: 405272 - DNA, 30 bp, Artificial Sequence
  Synthetic oligonucleotide
gctatttagggcttctgggctgtccgtcag

SEQ ID NO: 405273 - DNA, 30 bp, Artificial Sequence
  Synthetic oligonucleotide
atttctcctatagtgcatgctgtgcgtcag

SEQ ID NO: 405274 - DNA, 30 bp, Artificial Sequence
  Synthetic oligonucleotide
gaggggttttgacgtgcgattggtcgtcag

SEQ ID NO: 405275 - DNA, 30 bp, Artificial Sequence
  Synthetic oligonucleotide
tgagttcgtgagatggtcagagaaggtcag

SEQ ID NO: 405276 - DNA, 30 bp, Artificial Sequence
  Synthetic oligonucleotide
gtgtagttgtttcaaccaggccacggtcag

SEQ ID NO: 405277 - DNA, 30 bp, Artificial Sequence
  Synthetic oligonucleotide
tttatatgatgaggtttttcaaccggtcag

SEQ ID NO: 405278 - DNA, 30 bp, Artificial Sequence
  Synthetic oligonucleotide
aatcgaactttcgtgggacaatgcggtcag

SEQ ID NO: 405279 - DNA, 30 bp, Artificial Sequence
  Synthetic oligonucleotide
aatgcgagggagtttaacctaatcggtcag

SEQ ID NO: 405280 - DNA, 30 bp, Artificial Sequence
  Synthetic oligonucleotide
atcatggtttcgttgcaaagcgagggtcag

SEQ ID NO: 405281 - DNA, 30 bp, Artificial Sequence
  Synthetic oligonucleotide
gatctcattcaatgcgaagtatatggtcag

SEQ ID NO: 405282 - DNA, 30 bp, Artificial Sequence
  Synthetic oligonucleotide
gttcagtctggcttatctgccactggtcag

SEQ ID NO: 405283 - DNA, 30 bp, Artificial Sequence
  Synthetic oligonucleotide
tcttgtctcgacgcggtcgtttttggtcag

SEQ ID NO: 405284 - DNA, 30 bp, Artificial Sequence
  Synthetic oligonucleotide
agtatcatgttaagatgtcgctaatgtcag

SEQ ID NO: 405285 - DNA, 30 bp, Artificial Sequence
  Synthetic oligonucleotide
gctctagaggcacgcgcccgccgatgtcag

SEQ ID NO: 405286 - DNA, 30 bp, Artificial Sequence
  Synthetic oligonucleotide
gccattaggttgagtattgcagtatgtcag

SEQ ID NO: 405287 - DNA, 30 bp, Artificial Sequence
  Synthetic oligonucleotide
taattcatcctttcggttctaacctgtcag

SEQ ID NO: 405288 - DNA, 30 bp, Artificial Sequence
  Synthetic oligonucleotide
ttcgtaaacggataggtatgcacgtgtcag

SEQ ID NO: 405289 - DNA, 30 bp, Artificial Sequence
  Synthetic oligonucleotide
ttaatctgtacgtatcataataattgtcag

SEQ ID NO: 405290 - DNA, 30 bp, Artificial Sequence
  Synthetic oligonucleotide
gaacataaacactacgatgtcacttgtcag

SEQ ID NO: 405291 - DNA, 30 bp, Artificial Sequence
  Synthetic oligonucleotide
acataatctactaaaatcttttcttgtcag

SEQ ID NO: 405292 - DNA, 30 bp, Artificial Sequence
  Synthetic oligonucleotide
ctgccgcgtcgactgatattagtttgtcag

SEQ ID NO: 405293 - DNA, 30 bp, Artificial Sequence
  Synthetic oligonucleotide
aactcgcaagataagttccggcaaattcag

SEQ ID NO: 405294 - DNA, 30 bp, Artificial Sequence
  Synthetic oligonucleotide
atatgacttaggatgtcgctgcaaattcag

SEQ ID NO: 405295 - DNA, 30 bp, Artificial Sequence
  Synthetic oligonucleotide
gctaggatctgctgctgaggatcaattcag

SEQ ID NO: 405296 - DNA, 30 bp, Artificial Sequence
  Synthetic oligonucleotide
accaaaccaatggccgaagacaccattcag

SEQ ID NO: 405297 - DNA, 30 bp, Artificial Sequence
  Synthetic oligonucleotide
atattttattgggtcgggtatcgcattcag

SEQ ID NO: 405298 - DNA, 30 bp, Artificial Sequence
  Synthetic oligonucleotide
agcactaggtacctcgttctttggattcag

SEQ ID NO: 405299 - DNA, 30 bp, Artificial Sequence
  Synthetic oligonucleotide
tgttggaatgaacctagttgcatgattcag

SEQ ID NO: 405300 - DNA, 30 bp, Artificial Sequence
  Synthetic oligonucleotide
agcagcgagaaagtttctggcttgattcag

SEQ ID NO: 405301 - DNA, 30 bp, Artificial Sequence
  Synthetic oligonucleotide
cagttccgaagggactgtagcgatattcag

SEQ ID NO: 405302 - DNA, 30 bp, Artificial Sequence
  Synthetic oligonucleotide
gtactcaagtgattctcgagtagacttcag

SEQ ID NO: 405303 - DNA, 30 bp, Artificial Sequence
  Synthetic oligonucleotide
gcacgatggcggtttctgtttggacttcag

SEQ ID NO: 405304 - DNA, 31 bp, Artificial Sequence
  Synthetic oligonucleotide
gtatactatcgcggccagcaattagcttcag

SEQ ID NO: 405305 - DNA, 30 bp, Artificial Sequence
  Synthetic oligonucleotide
ttggcgtcgagctttaagtccagtcttcag

SEQ ID NO: 405306 - DNA, 30 bp, Artificial Sequence
  Synthetic oligonucleotide
ccgatgtacgccactaatacttttcttcag

SEQ ID NO: 405307 - DNA, 30 bp, Artificial Sequence
  Synthetic oligonucleotide
tatactcatccacgacaccgctaagttcag

SEQ ID NO: 405308 - DNA, 30 bp, Artificial Sequence
  Synthetic oligonucleotide
tatccataattcaagtagacggcagttcag

SEQ ID NO: 405309 - DNA, 30 bp, Artificial Sequence
  Synthetic oligonucleotide
ctgatgagtttctcacttggtggagttcag

SEQ ID NO: 405310 - DNA, 30 bp, Artificial Sequence
  Synthetic oligonucleotide
actggagctgaagccatctgaatagttcag

SEQ ID NO: 405311 - DNA, 30 bp, Artificial Sequence
  Synthetic oligonucleotide
ctaatggtatactttgctgtgacggttcag

SEQ ID NO: 405312 - DNA, 30 bp, Artificial Sequence
  Synthetic oligonucleotide
ctttgaggcttttacgtggggtcggttcag

SEQ ID NO: 405313 - DNA, 30 bp, Artificial Sequence
  Synthetic oligonucleotide
tcagactatgctcccgcaaatggggttcag

SEQ ID NO: 405314 - DNA, 30 bp, Artificial Sequence
  Synthetic oligonucleotide
atcattagtcctggccctcatatggttcag

SEQ ID NO: 405315 - DNA, 30 bp, Artificial Sequence
  Synthetic oligonucleotide
ggtcaacccatgtaactcactggatttcag

SEQ ID NO: 405316 - DNA, 30 bp, Artificial Sequence
  Synthetic oligonucleotide
actattgtttcgctctcggcgctatttcag

SEQ ID NO: 405317 - DNA, 30 bp, Artificial Sequence
  Synthetic oligonucleotide
actccatcgcagcaatgcgtagtctttcag

SEQ ID NO: 405318 - DNA, 30 bp, Artificial Sequence
  Synthetic oligonucleotide
tgagcgcctccgtgagtggcagcttttcag

SEQ ID NO: 405319 - DNA, 30 bp, Artificial Sequence
  Synthetic oligonucleotide
agctttgccacaacgacgtaaatttttcag

SEQ ID NO: 405320 - DNA, 30 bp, Artificial Sequence
  Synthetic oligonucleotide
ggtgcgggtcccgatatggcagcaaaagag

SEQ ID NO: 405321 - DNA, 30 bp, Artificial Sequence
  Synthetic oligonucleotide
ggctttcggatcggactcaagctaaaagag

SEQ ID NO: 405322 - DNA, 30 bp, Artificial Sequence
  Synthetic oligonucleotide
ttaattctaaatcctatctggaacaaagag

SEQ ID NO: 405323 - DNA, 30 bp, Artificial Sequence
  Synthetic oligonucleotide
atctcagacacggatttcctggggaaagag

SEQ ID NO: 405324 - DNA, 30 bp, Artificial Sequence
  Synthetic oligonucleotide
gtctatgttataacatggcgcatgaaagag

SEQ ID NO: 405325 - DNA, 30 bp, Artificial Sequence
  Synthetic oligonucleotide
ctgttccatctgaagtgcgttgataaagag

SEQ ID NO: 405326 - DNA, 30 bp, Artificial Sequence
  Synthetic oligonucleotide
taatagcccggctctttgacgactcaagag

SEQ ID NO: 405327 - DNA, 30 bp, Artificial Sequence
  Synthetic oligonucleotide
attatcatttaacaattttatcgtcaagag

SEQ ID NO: 405328 - DNA, 30 bp, Artificial Sequence
  Synthetic oligonucleotide
atttttcagatcagaccacggggagaagag

SEQ ID NO: 405329 - DNA, 30 bp, Artificial Sequence
  Synthetic oligonucleotide
tttcgtcacctcggcatgcagacggaagag

SEQ ID NO: 405330 - DNA, 30 bp, Artificial Sequence
  Synthetic oligonucleotide
ccttatgaaaatgaatatacatgggaagag

SEQ ID NO: 405331 - DNA, 30 bp, Artificial Sequence
  Synthetic oligonucleotide
cgactcctacggcacggggctactgaagag

SEQ ID NO: 405332 - DNA, 30 bp, Artificial Sequence
  Synthetic oligonucleotide
caggtctatcctaagactattatataagag

SEQ ID NO: 405333 - DNA, 30 bp, Artificial Sequence
  Synthetic oligonucleotide
ggctctattgcctcagcatcggtataagag

SEQ ID NO: 405334 - DNA, 30 bp, Artificial Sequence
  Synthetic oligonucleotide
gagagtgcctatcggtgttttaattaagag

SEQ ID NO: 405335 - DNA, 30 bp, Artificial Sequence
  Synthetic oligonucleotide
tgctcactaatacgcataccagtttaagag

SEQ ID NO: 405336 - DNA, 30 bp, Artificial Sequence
  Synthetic oligonucleotide
ctgcggatcaagaataattccaaaacagag

SEQ ID NO: 405337 - DNA, 30 bp, Artificial Sequence
  Synthetic oligonucleotide
gtattttcattttagtttgaatgcacagag

SEQ ID NO: 405338 - DNA, 30 bp, Artificial Sequence
  Synthetic oligonucleotide
ttcactgacaatgtcggccgcttcacagag

SEQ ID NO: 405339 - DNA, 30 bp, Artificial Sequence
  Synthetic oligonucleotide
ctcaggagagtccgatagctttggacagag

SEQ ID NO: 405340 - DNA, 30 bp, Artificial Sequence
  Synthetic oligonucleotide
atattattaacataccgtgatactacagag

SEQ ID NO: 405341 - DNA, 30 bp, Artificial Sequence
  Synthetic oligonucleotide
ctggtggcgtacggaccacggaaagcagag

SEQ ID NO: 405342 - DNA, 30 bp, Artificial Sequence
  Synthetic oligonucleotide
caggatttacgaaattccacctcggcagag

SEQ ID NO: 405343 - DNA, 30 bp, Artificial Sequence
  Synthetic oligonucleotide
atcctcttgggttgggggagcgatgcagag

SEQ ID NO: 405344 - DNA, 30 bp, Artificial Sequence
  Synthetic oligonucleotide
ttctagcgagggggaacgccgagtgcagag

SEQ ID NO: 405345 - DNA, 30 bp, Artificial Sequence
  Synthetic oligonucleotide
gtaggaaattcgacaccacgaacatcagag

SEQ ID NO: 405346 - DNA, 30 bp, Artificial Sequence
  Synthetic oligonucleotide
gttgagcactccccagcgtcatcatcagag

SEQ ID NO: 405347 - DNA, 30 bp, Artificial Sequence
  Synthetic oligonucleotide
tcaaagctggccgccgcgattcgatcagag

SEQ ID NO: 405348 - DNA, 30 bp, Artificial Sequence
  Synthetic oligonucleotide
cttatgagcgccatgctatacgtctcagag

SEQ ID NO: 405349 - DNA, 30 bp, Artificial Sequence
  Synthetic oligonucleotide
gcaaaggcggccgtggggacaggttcagag

SEQ ID NO: 405350 - DNA, 30 bp, Artificial Sequence
  Synthetic oligonucleotide
aataacgggaccccccaggcagtttcagag

SEQ ID NO: 405351 - DNA, 29 bp, Artificial Sequence
  Synthetic oligonucleotide
tcccaaaaaacatttaccgaagaagagag

SEQ ID NO: 405352 - DNA, 30 bp, Artificial Sequence
  Synthetic oligonucleotide
atttcaccgtggggttgtagtaggagagag

SEQ ID NO: 405353 - DNA, 30 bp, Artificial Sequence
  Synthetic oligonucleotide
ggtcttagaagcgcgaactagcctagagag

SEQ ID NO: 405354 - DNA, 30 bp, Artificial Sequence
  Synthetic oligonucleotide
gaagggcgcgcgtcacagcttcctagagag

SEQ ID NO: 405355 - DNA, 30 bp, Artificial Sequence
  Synthetic oligonucleotide
tgacatagttcagaatttgacgaacgagag

SEQ ID NO: 405356 - DNA, 30 bp, Artificial Sequence
  Synthetic oligonucleotide
gccgatcggccaggacagcctgacggagag

SEQ ID NO: 405357 - DNA, 30 bp, Artificial Sequence
  Synthetic oligonucleotide
agttagacagtctggccttttagatgagag

SEQ ID NO: 405358 - DNA, 26 bp, Artificial Sequence
  Synthetic oligonucleotide
ttcgatccacccttaaaatatgagag

SEQ ID NO: 405359 - DNA, 30 bp, Artificial Sequence
  Synthetic oligonucleotide
cttaataccacggctacttacgactgagag

SEQ ID NO: 405360 - DNA, 30 bp, Artificial Sequence
  Synthetic oligonucleotide
ccggttggagatatgtgcgaataaatagag

SEQ ID NO: 405361 - DNA, 30 bp, Artificial Sequence
  Synthetic oligonucleotide
gcccgtaccggtttcctttgataaatagag

SEQ ID NO: 405362 - DNA, 30 bp, Artificial Sequence
  Synthetic oligonucleotide
gctctgattgagcgaacgggtgcaatagag

SEQ ID NO: 405363 - DNA, 30 bp, Artificial Sequence
  Synthetic oligonucleotide
tttttggatatattcgagtgaaacatagag

SEQ ID NO: 405364 - DNA, 30 bp, Artificial Sequence
  Synthetic oligonucleotide
ttcggacgccggattaggcttaacatagag

SEQ ID NO: 405365 - DNA, 30 bp, Artificial Sequence
  Synthetic oligonucleotide
aagtcgggtctaagttatgtgcacatagag

SEQ ID NO: 405366 - DNA, 30 bp, Artificial Sequence
  Synthetic oligonucleotide
cagtggttcagagagactggctgcatagag

SEQ ID NO: 405367 - DNA, 30 bp, Artificial Sequence
  Synthetic oligonucleotide
cagactgaggtacacgaagcgctcatagag

SEQ ID NO: 405368 - DNA, 30 bp, Artificial Sequence
  Synthetic oligonucleotide
aatcgaggctcgaacgaatactagatagag

SEQ ID NO: 405369 - DNA, 30 bp, Artificial Sequence
  Synthetic oligonucleotide
gtcgcaactctcctcattttatcgatagag

SEQ ID NO: 405370 - DNA, 30 bp, Artificial Sequence
  Synthetic oligonucleotide
atcttcaaatttcggaagaagttgatagag

SEQ ID NO: 405371 - DNA, 30 bp, Artificial Sequence
  Synthetic oligonucleotide
tttaaccggtttaataggaaatctatagag

SEQ ID NO: 405372 - DNA, 30 bp, Artificial Sequence
  Synthetic oligonucleotide
gatccaaccctttcgctgcacggtatagag

SEQ ID NO: 405373 - DNA, 30 bp, Artificial Sequence
  Synthetic oligonucleotide
ttatatccgggggccatttttggtatagag

SEQ ID NO: 405374 - DNA, 30 bp, Artificial Sequence
  Synthetic oligonucleotide
atacttcacatttcgacgtgtcggctagag

SEQ ID NO: 405375 - DNA, 30 bp, Artificial Sequence
  Synthetic oligonucleotide
atttatgagggaaagactttgtggctagag

SEQ ID NO: 405376 - DNA, 30 bp, Artificial Sequence
  Synthetic oligonucleotide
ttaggaccgcaattataataaaaggtagag

SEQ ID NO: 405377 - DNA, 30 bp, Artificial Sequence
  Synthetic oligonucleotide
aaaatgtccggtgcgtggacttgggtagag

SEQ ID NO: 405378 - DNA, 30 bp, Artificial Sequence
  Synthetic oligonucleotide
aggttaaatcgtctacgtctaaatgtagag

SEQ ID NO: 405379 - DNA, 30 bp, Artificial Sequence
  Synthetic oligonucleotide
catttatacaatccccaggcagctgtagag

SEQ ID NO: 405380 - DNA, 30 bp, Artificial Sequence
  Synthetic oligonucleotide
cttaccgctccgggtgcggttaccttagag

SEQ ID NO: 405381 - DNA, 30 bp, Artificial Sequence
  Synthetic oligonucleotide
gaaaactaattatgatccgcctcgttagag

SEQ ID NO: 405382 - DNA, 30 bp, Artificial Sequence
  Synthetic oligonucleotide
gaaattcggtaaaattcgcacgatttagag

SEQ ID NO: 405383 - DNA, 30 bp, Artificial Sequence
  Synthetic oligonucleotide
tttcaagtccattctgctcttggcaacgag

SEQ ID NO: 405384 - DNA, 30 bp, Artificial Sequence
  Synthetic oligonucleotide
gacctcaacaaagcagtagtgacgaacgag

SEQ ID NO: 405385 - DNA, 30 bp, Artificial Sequence
  Synthetic oligonucleotide
tgatcgttcccggcaccgagtacccacgag

SEQ ID NO: 405386 - DNA, 30 bp, Artificial Sequence
  Synthetic oligonucleotide
tattgtggcggtgttccagcattccacgag

SEQ ID NO: 405387 - DNA, 30 bp, Artificial Sequence
  Synthetic oligonucleotide
ccggatagctaagttccggtttagcacgag

SEQ ID NO: 405388 - DNA, 30 bp, Artificial Sequence
  Synthetic oligonucleotide
ctcctaggtccaaccaccgtggttcacgag

SEQ ID NO: 405389 - DNA, 30 bp, Artificial Sequence
  Synthetic oligonucleotide
ggttccaagcccattggagtaatcgacgag

SEQ ID NO: 405390 - DNA, 30 bp, Artificial Sequence
  Synthetic oligonucleotide
attggttccaggaaaatacattaggacgag

SEQ ID NO: 405391 - DNA, 30 bp, Artificial Sequence
  Synthetic oligonucleotide
tgattgcgaggataatgtgttgctgacgag

SEQ ID NO: 405392 - DNA, 30 bp, Artificial Sequence
  Synthetic oligonucleotide
gagtcctatatgactatgtctaaatacgag

SEQ ID NO: 405393 - DNA, 30 bp, Artificial Sequence
  Synthetic oligonucleotide
ggattccggcaattgatatgtcagtacgag

SEQ ID NO: 405394 - DNA, 30 bp, Artificial Sequence
  Synthetic oligonucleotide
gcctcagacgcttcgtcagacagcaccgag

SEQ ID NO: 405395 - DNA, 30 bp, Artificial Sequence
  Synthetic oligonucleotide
tgcacccggcgccaacgggcttataccgag

SEQ ID NO: 405396 - DNA, 30 bp, Artificial Sequence
  Synthetic oligonucleotide
cttttcggagttcccaaggcgtttaccgag

SEQ ID NO: 405397 - DNA, 30 bp, Artificial Sequence
  Synthetic oligonucleotide
ggcttggattcctcgtgctggccagccgag

SEQ ID NO: 405398 - DNA, 30 bp, Artificial Sequence
  Synthetic oligonucleotide
ctcctgggaacacgcagaacttcagccgag

SEQ ID NO: 405399 - DNA, 30 bp, Artificial Sequence
  Synthetic oligonucleotide
aatattcagggaggggcaaagcagtccgag

SEQ ID NO: 405400 - DNA, 30 bp, Artificial Sequence
  Synthetic oligonucleotide
atctacgctcgttcatctgtttcttccgag

SEQ ID NO: 405401 - DNA, 30 bp, Artificial Sequence
  Synthetic oligonucleotide
ctattcaaccttcatcttggctaaagcgag

SEQ ID NO: 405402 - DNA, 30 bp, Artificial Sequence
  Synthetic oligonucleotide
attttgcaccacttgaccaatgcaagcgag

SEQ ID NO: 405403 - DNA, 30 bp, Artificial Sequence
  Synthetic oligonucleotide
ccggtcgtcagcaccttacgcctaagcgag

SEQ ID NO: 405404 - DNA, 30 bp, Artificial Sequence
  Synthetic oligonucleotide
ggagaccacgtgactaagtcggccagcgag

SEQ ID NO: 405405 - DNA, 30 bp, Artificial Sequence
  Synthetic oligonucleotide
cctccgctttattgcacggacagcagcgag

SEQ ID NO: 405406 - DNA, 30 bp, Artificial Sequence
  Synthetic oligonucleotide
ggacgaaccgagaatagtaattgacgcgag

SEQ ID NO: 405407 - DNA, 30 bp, Artificial Sequence
  Synthetic oligonucleotide
tgcaaaaagttacatgccgtttgacgcgag

SEQ ID NO: 405408 - DNA, 30 bp, Artificial Sequence
  Synthetic oligonucleotide
tgcaggagaggggattagtatccccgcgag

SEQ ID NO: 405409 - DNA, 30 bp, Artificial Sequence
  Synthetic oligonucleotide
gaagttacgctcggcacgttgtttcgcgag

SEQ ID NO: 405410 - DNA, 30 bp, Artificial Sequence
  Synthetic oligonucleotide
gaccgggggtgaggggagccggagggcgag

SEQ ID NO: 405411 - DNA, 30 bp, Artificial Sequence
  Synthetic oligonucleotide
tcaagaatgatagatgaggggttgggcgag

SEQ ID NO: 405412 - DNA, 30 bp, Artificial Sequence
  Synthetic oligonucleotide
cccctgtgtcccggttatactattggcgag

SEQ ID NO: 405413 - DNA, 29 bp, Artificial Sequence
  Synthetic oligonucleotide
gtggctgccatattatcgtgacatgcgag

SEQ ID NO: 405414 - DNA, 30 bp, Artificial Sequence
  Synthetic oligonucleotide
ttaaagcatgctctctgtcaagtatgcgag

SEQ ID NO: 405415 - DNA, 30 bp, Artificial Sequence
  Synthetic oligonucleotide
gtacgaagtttctttggtcgtctctgcgag

SEQ ID NO: 405416 - DNA, 30 bp, Artificial Sequence
  Synthetic oligonucleotide
tgagagtcaacgcgcggtttcgcttgcgag

SEQ ID NO: 405417 - DNA, 30 bp, Artificial Sequence
  Synthetic oligonucleotide
ttggtaacagtaggttgtcggaccatcgag

SEQ ID NO: 405418 - DNA, 30 bp, Artificial Sequence
  Synthetic oligonucleotide
tgagggccgcagcgtggcttcgggatcgag

SEQ ID NO: 405419 - DNA, 30 bp, Artificial Sequence
  Synthetic oligonucleotide
ggaacgtacctcgacggagccatgatcgag

SEQ ID NO: 405420 - DNA, 30 bp, Artificial Sequence
  Synthetic oligonucleotide
aaaggaagtgattgtgaaagtaaactcgag

SEQ ID NO: 405421 - DNA, 30 bp, Artificial Sequence
  Synthetic oligonucleotide
ctcagcttttactaaggtgggtccctcgag

SEQ ID NO: 405422 - DNA, 30 bp, Artificial Sequence
  Synthetic oligonucleotide
tcgcaggatggaaataatttcactctcgag

SEQ ID NO: 405423 - DNA, 30 bp, Artificial Sequence
  Synthetic oligonucleotide
ggcgtcgaactagattcgttcgacgtcgag

SEQ ID NO: 405424 - DNA, 30 bp, Artificial Sequence
  Synthetic oligonucleotide
agttaccaggctgttaggaattacgtcgag

SEQ ID NO: 405425 - DNA, 30 bp, Artificial Sequence
  Synthetic oligonucleotide
ttaggagtatctagcgtggcaatggtcgag

SEQ ID NO: 405426 - DNA, 30 bp, Artificial Sequence
  Synthetic oligonucleotide
cacaagtggtccggctgcttgttggtcgag

SEQ ID NO: 405427 - DNA, 30 bp, Artificial Sequence
  Synthetic oligonucleotide
gttcacaaagtttggaatactggattcgag

SEQ ID NO: 405428 - DNA, 30 bp, Artificial Sequence
  Synthetic oligonucleotide
attattaaggcgaatatcaacatcttcgag

SEQ ID NO: 405429 - DNA, 30 bp, Artificial Sequence
  Synthetic oligonucleotide
aactcttcgagtgtgtattaaacgttcgag

SEQ ID NO: 405430 - DNA, 30 bp, Artificial Sequence
  Synthetic oligonucleotide
attctttaaaaacagcaatgtctgttcgag

SEQ ID NO: 405431 - DNA, 30 bp, Artificial Sequence
  Synthetic oligonucleotide
tattcaaagaatggggcgtttaagaaggag

SEQ ID NO: 405432 - DNA, 30 bp, Artificial Sequence
  Synthetic oligonucleotide
gccccatcctgaactctatgccagaaggag

SEQ ID NO: 405433 - DNA, 30 bp, Artificial Sequence
  Synthetic oligonucleotide
aaaggacgtctttgatgagcctaacaggag

SEQ ID NO: 405434 - DNA, 30 bp, Artificial Sequence
  Synthetic oligonucleotide
gccttcgttagcgctgaaccgcggcaggag

SEQ ID NO: 405435 - DNA, 30 bp, Artificial Sequence
  Synthetic oligonucleotide
agagcatagacgtagttattgatgcaggag

SEQ ID NO: 405436 - DNA, 30 bp, Artificial Sequence
  Synthetic oligonucleotide
aaggaagacaaacaccccctaagtcaggag

SEQ ID NO: 405437 - DNA, 30 bp, Artificial Sequence
  Synthetic oligonucleotide
gggtatttcattggaacctctgtagaggag

SEQ ID NO: 405438 - DNA, 30 bp, Artificial Sequence
  Synthetic oligonucleotide
tagttgcattctctaagccattccgaggag

SEQ ID NO: 405439 - DNA, 30 bp, Artificial Sequence
  Synthetic oligonucleotide
gaacgtagcgaggctgcgcaaagggaggag

SEQ ID NO: 405440 - DNA, 30 bp, Artificial Sequence
  Synthetic oligonucleotide
tgtatcgtgttgtacatcatctctgaggag

SEQ ID NO: 405441 - DNA, 30 bp, Artificial Sequence
  Synthetic oligonucleotide
cttttgatgtaactcacatcgattgaggag

SEQ ID NO: 405442 - DNA, 30 bp, Artificial Sequence
  Synthetic oligonucleotide
ttgaggcccgggggaaacctggtataggag

SEQ ID NO: 405443 - DNA, 30 bp, Artificial Sequence
  Synthetic oligonucleotide
gggaaagactttggtgtggtggactaggag

SEQ ID NO: 405444 - DNA, 30 bp, Artificial Sequence
  Synthetic oligonucleotide
ggttaaccgtttaatacagcgtgctaggag

SEQ ID NO: 405445 - DNA, 30 bp, Artificial Sequence
  Synthetic oligonucleotide
gtaaaatttaggacgcgccgacagtaggag

SEQ ID NO: 405446 - DNA, 30 bp, Artificial Sequence
  Synthetic oligonucleotide
cgcgtcttattagtcatgcatatgtaggag

SEQ ID NO: 405447 - DNA, 30 bp, Artificial Sequence
  Synthetic oligonucleotide
cttcatccaatcacaatgacgctttaggag

SEQ ID NO: 405448 - DNA, 30 bp, Artificial Sequence
  Synthetic oligonucleotide
tggtggcccgtcagttgaatgaaaacggag

SEQ ID NO: 405449 - DNA, 30 bp, Artificial Sequence
  Synthetic oligonucleotide
ctccgctgtatgctcttaagttgaacggag

SEQ ID NO: 405450 - DNA, 30 bp, Artificial Sequence
  Synthetic oligonucleotide
ggtgcaaaattctatttagcgtgcacggag

SEQ ID NO: 405451 - DNA, 30 bp, Artificial Sequence
  Synthetic oligonucleotide
ttcatacctagctggaaagctgtgacggag

SEQ ID NO: 405452 - DNA, 30 bp, Artificial Sequence
  Synthetic oligonucleotide
atgacacggaagggtcttttgtgaccggag

SEQ ID NO: 405453 - DNA, 30 bp, Artificial Sequence
  Synthetic oligonucleotide
gcgctggagcgcggcgtgaacgcgccggag

SEQ ID NO: 405454 - DNA, 30 bp, Artificial Sequence
  Synthetic oligonucleotide
tttagagcagcggccattagcgtgccggag

SEQ ID NO: 405455 - DNA, 30 bp, Artificial Sequence
  Synthetic oligonucleotide
tcaacgggagggctgtgttgcgcagcggag

SEQ ID NO: 405456 - DNA, 30 bp, Artificial Sequence
  Synthetic oligonucleotide
acggggcagcctccgtgcctacatgcggag

SEQ ID NO: 405457 - DNA, 30 bp, Artificial Sequence
  Synthetic oligonucleotide
cttgctgtattcacaagctggtaatcggag

SEQ ID NO: 405458 - DNA, 30 bp, Artificial Sequence
  Synthetic oligonucleotide
gaatctaaatccctattactggcatcggag

SEQ ID NO: 405459 - DNA, 30 bp, Artificial Sequence
  Synthetic oligonucleotide
gaatagaggacacggctattttcctcggag

SEQ ID NO: 405460 - DNA, 30 bp, Artificial Sequence
  Synthetic oligonucleotide
gacgctgagcagtcctcatatatgtcggag

SEQ ID NO: 405461 - DNA, 30 bp, Artificial Sequence
  Synthetic oligonucleotide
aagtgagagttgtacaaatcaacaagggag

SEQ ID NO: 405462 - DNA, 30 bp, Artificial Sequence
  Synthetic oligonucleotide
attacaagcttacccgccatctacagggag

SEQ ID NO: 405463 - DNA, 30 bp, Artificial Sequence
  Synthetic oligonucleotide
agcggcgccactgatacccgtgtcagggag

SEQ ID NO: 405464 - DNA, 30 bp, Artificial Sequence
  Synthetic oligonucleotide
gatgtttgccggccgctacatcgacgggag

SEQ ID NO: 405465 - DNA, 30 bp, Artificial Sequence
  Synthetic oligonucleotide
gttcgtttctcttagtagcagtgacgggag

SEQ ID NO: 405466 - DNA, 30 bp, Artificial Sequence
  Synthetic oligonucleotide
attgggttgagcccgtatccttcgcgggag

SEQ ID NO: 405467 - DNA, 30 bp, Artificial Sequence
  Synthetic oligonucleotide
gctaaaaccttccttcccaactatcgggag

SEQ ID NO: 405468 - DNA, 30 bp, Artificial Sequence
  Synthetic oligonucleotide
gcacttgtcgaacaagtaaggtttcgggag

SEQ ID NO: 405469 - DNA, 30 bp, Artificial Sequence
  Synthetic oligonucleotide
gaagtcacggagaaggcactcacgggggag

SEQ ID NO: 405470 - DNA, 30 bp, Artificial Sequence
  Synthetic oligonucleotide
tttctgggaagcggcatcttataatgggag

SEQ ID NO: 405471 - DNA, 30 bp, Artificial Sequence
  Synthetic oligonucleotide
cgcatggttcttgtcagcactcgatgggag

SEQ ID NO: 405472 - DNA, 30 bp, Artificial Sequence
  Synthetic oligonucleotide
aaagtcccgtgtggcggggttggatgggag

SEQ ID NO: 405473 - DNA, 28 bp, Artificial Sequence
  Synthetic oligonucleotide
tacctcgcccaaagcccgtacctgggag

SEQ ID NO: 405474 - DNA, 30 bp, Artificial Sequence
  Synthetic oligonucleotide
taggtcacagggactttaattttctgggag

SEQ ID NO: 405475 - DNA, 30 bp, Artificial Sequence
  Synthetic oligonucleotide
tatttctattgagagtattagggttgggag

SEQ ID NO: 405476 - DNA, 30 bp, Artificial Sequence
  Synthetic oligonucleotide
tttacggtcttagagtgtcacctttgggag

SEQ ID NO: 405477 - DNA, 30 bp, Artificial Sequence
  Synthetic oligonucleotide
aactataaattcactcctgctgtcatggag

SEQ ID NO: 405478 - DNA, 30 bp, Artificial Sequence
  Synthetic oligonucleotide
atatggcacacgatcgctgcacagatggag

SEQ ID NO: 405479 - DNA, 30 bp, Artificial Sequence
  Synthetic oligonucleotide
gataagcgcccgtcgtactattggatggag

SEQ ID NO: 405480 - DNA, 30 bp, Artificial Sequence
  Synthetic oligonucleotide
attccatatgttcccaaagatcatatggag

SEQ ID NO: 405481 - DNA, 30 bp, Artificial Sequence
  Synthetic oligonucleotide
cgtctccgataagttcgcgcggccctggag

SEQ ID NO: 405482 - DNA, 30 bp, Artificial Sequence
  Synthetic oligonucleotide
aattccaagtcgcaatgtaaaatgctggag

SEQ ID NO: 405483 - DNA, 30 bp, Artificial Sequence
  Synthetic oligonucleotide
aaacttctcaacctgggcttgcgtctggag

SEQ ID NO: 405484 - DNA, 30 bp, Artificial Sequence
  Synthetic oligonucleotide
ttaaatataatacggatccgaattctggag

SEQ ID NO: 405485 - DNA, 30 bp, Artificial Sequence
  Synthetic oligonucleotide
ccgcacggggttcctctggaagttctggag

SEQ ID NO: 405486 - DNA, 30 bp, Artificial Sequence
  Synthetic oligonucleotide
gtcttctcctaactcaccttcacggtggag

SEQ ID NO: 405487 - DNA, 30 bp, Artificial Sequence
  Synthetic oligonucleotide
cgctcctatgagtcggacgcagtggtggag

SEQ ID NO: 405488 - DNA, 30 bp, Artificial Sequence
  Synthetic oligonucleotide
gcactaatcatggtgcgagctcctgtggag

SEQ ID NO: 405489 - DNA, 30 bp, Artificial Sequence
  Synthetic oligonucleotide
agtctaataaaagtaaacgcttctgtggag

SEQ ID NO: 405490 - DNA, 30 bp, Artificial Sequence
  Synthetic oligonucleotide
gccgtttacttctacaattcacttgtggag

SEQ ID NO: 405491 - DNA, 30 bp, Artificial Sequence
  Synthetic oligonucleotide
caaggttgtccacggttcaggctcttggag

SEQ ID NO: 405492 - DNA, 30 bp, Artificial Sequence
  Synthetic oligonucleotide
ccccaatgagagagttagcttctcttggag

SEQ ID NO: 405493 - DNA, 30 bp, Artificial Sequence
  Synthetic oligonucleotide
aagtgaagggcacccaaatgtgtcttggag

SEQ ID NO: 405494 - DNA, 30 bp, Artificial Sequence
  Synthetic oligonucleotide
ctagggtaaagtttcaggggcttcttggag

SEQ ID NO: 405495 - DNA, 30 bp, Artificial Sequence
  Synthetic oligonucleotide
gcagtattgttgagcttggtgttcttggag

SEQ ID NO: 405496 - DNA, 30 bp, Artificial Sequence
  Synthetic oligonucleotide
tatgacaatgatttcgtactccagttggag

SEQ ID NO: 405497 - DNA, 30 bp, Artificial Sequence
  Synthetic oligonucleotide
ttggccatctgacgctgggcgcttttggag

SEQ ID NO: 405498 - DNA, 30 bp, Artificial Sequence
  Synthetic oligonucleotide
actcttaccgacgcgactctaacaaatgag

SEQ ID NO: 405499 - DNA, 30 bp, Artificial Sequence
  Synthetic oligonucleotide
agggaaggattgggtaatcagggaaatgag

SEQ ID NO: 405500 - DNA, 30 bp, Artificial Sequence
  Synthetic oligonucleotide
aatttctctattgagtgagggggaaatgag

SEQ ID NO: 405501 - DNA, 30 bp, Artificial Sequence
  Synthetic oligonucleotide
gggctagtctatccgccgaattacaatgag

SEQ ID NO: 405502 - DNA, 30 bp, Artificial Sequence
  Synthetic oligonucleotide
tgaaccgtggctatatcaccattcaatgag

SEQ ID NO: 405503 - DNA, 30 bp, Artificial Sequence
  Synthetic oligonucleotide
ttaactaattattcgtcatataagaatgag

SEQ ID NO: 405504 - DNA, 30 bp, Artificial Sequence
  Synthetic oligonucleotide
cagacccaaaattgtccctgattgaatgag

SEQ ID NO: 405505 - DNA, 30 bp, Artificial Sequence
  Synthetic oligonucleotide
acagcttagaagctcctcaggggtaatgag

SEQ ID NO: 405506 - DNA, 30 bp, Artificial Sequence
  Synthetic oligonucleotide
agcgtgagcacgtgcggacgtattaatgag

SEQ ID NO: 405507 - DNA, 30 bp, Artificial Sequence
  Synthetic oligonucleotide
ttatgtcgagaagtcagccccaaacatgag

SEQ ID NO: 405508 - DNA, 30 bp, Artificial Sequence
  Synthetic oligonucleotide
tgtgagccgagagtgtgcgggaaacatgag

SEQ ID NO: 405509 - DNA, 30 bp, Artificial Sequence
  Synthetic oligonucleotide
tccgggatttctaacgagacataccatgag

SEQ ID NO: 405510 - DNA, 30 bp, Artificial Sequence
  Synthetic oligonucleotide
cgtattttaggccgatgcttcgcccatgag

SEQ ID NO: 405511 - DNA, 31 bp, Artificial Sequence
  Synthetic oligonucleotide
acccttgtcaggggggccaattgatcatgag

SEQ ID NO: 405512 - DNA, 30 bp, Artificial Sequence
  Synthetic oligonucleotide
aactccattttaggcttgtgatgtcatgag

SEQ ID NO: 405513 - DNA, 30 bp, Artificial Sequence
  Synthetic oligonucleotide
catcattcggctgactggccgattcatgag

SEQ ID NO: 405514 - DNA, 30 bp, Artificial Sequence
  Synthetic oligonucleotide
gatctaggtcactatcatctttgagatgag

SEQ ID NO: 405515 - DNA, 30 bp, Artificial Sequence
  Synthetic oligonucleotide
gagcttaagggtacggctctgggcgatgag

SEQ ID NO: 405516 - DNA, 30 bp, Artificial Sequence
  Synthetic oligonucleotide
ttggttttgcgaagaagagcgctcgatgag

SEQ ID NO: 405517 - DNA, 30 bp, Artificial Sequence
  Synthetic oligonucleotide
aagtgacacaggtgggtctctaatgatgag

SEQ ID NO: 405518 - DNA, 30 bp, Artificial Sequence
  Synthetic oligonucleotide
ccccggtgttgctttaccggggaatatgag

SEQ ID NO: 405519 - DNA, 30 bp, Artificial Sequence
  Synthetic oligonucleotide
tcatttttccgcgtgaggttggggtatgag

SEQ ID NO: 405520 - DNA, 30 bp, Artificial Sequence
  Synthetic oligonucleotide
tctcacctggacgtttttataatgtatgag

SEQ ID NO: 405521 - DNA, 30 bp, Artificial Sequence
  Synthetic oligonucleotide
ttagagtataatgggatcgaatattatgag

SEQ ID NO: 405522 - DNA, 30 bp, Artificial Sequence
  Synthetic oligonucleotide
cgggtgttctttcgtgagattagttatgag

SEQ ID NO: 405523 - DNA, 30 bp, Artificial Sequence
  Synthetic oligonucleotide
tctgttattatatcactttctggttatgag

SEQ ID NO: 405524 - DNA, 30 bp, Artificial Sequence
  Synthetic oligonucleotide
tactatcgtcatggccaaactttttatgag

SEQ ID NO: 405525 - DNA, 30 bp, Artificial Sequence
  Synthetic oligonucleotide
gccggtcaggttgttttcaagccaactgag

SEQ ID NO: 405526 - DNA, 30 bp, Artificial Sequence
  Synthetic oligonucleotide
gattcagtggaccgtgttccatagactgag

SEQ ID NO: 405527 - DNA, 30 bp, Artificial Sequence
  Synthetic oligonucleotide
cgggtaaatacagagtgaaagccgcctgag

SEQ ID NO: 405528 - DNA, 30 bp, Artificial Sequence
  Synthetic oligonucleotide
aaatcggctctcgagattaagcgtcctgag

SEQ ID NO: 405529 - DNA, 30 bp, Artificial Sequence
  Synthetic oligonucleotide
atcgggccagggacatgatcaggtcctgag

SEQ ID NO: 405530 - DNA, 30 bp, Artificial Sequence
  Synthetic oligonucleotide
agaggatccggattcatacttacagctgag

SEQ ID NO: 405531 - DNA, 30 bp, Artificial Sequence
  Synthetic oligonucleotide
tggtatctttttggtactcaattagctgag

SEQ ID NO: 405532 - DNA, 30 bp, Artificial Sequence
  Synthetic oligonucleotide
cctttagtacctaggaaatcgagggctgag

SEQ ID NO: 405533 - DNA, 30 bp, Artificial Sequence
  Synthetic oligonucleotide
ctatccctaaggtccataactagggctgag

SEQ ID NO: 405534 - DNA, 30 bp, Artificial Sequence
  Synthetic oligonucleotide
ggtgcagtcgcgaacccggatcgtgctgag

SEQ ID NO: 405535 - DNA, 30 bp, Artificial Sequence
  Synthetic oligonucleotide
agatgacggacgtttaagatattatctgag

SEQ ID NO: 405536 - DNA, 30 bp, Artificial Sequence
  Synthetic oligonucleotide
ataggggcgatatttgcgaaagcttctgag

SEQ ID NO: 405537 - DNA, 30 bp, Artificial Sequence
  Synthetic oligonucleotide
cgtggtcgatcaaagacttcataaagtgag

SEQ ID NO: 405538 - DNA, 30 bp, Artificial Sequence
  Synthetic oligonucleotide
gtagatactaccggtattggaccaagtgag

SEQ ID NO: 405539 - DNA, 30 bp, Artificial Sequence
  Synthetic oligonucleotide
accccttcaggccgtttcctgcgcagtgag

SEQ ID NO: 405540 - DNA, 30 bp, Artificial Sequence
  Synthetic oligonucleotide
ttgggacaggggcgcacgctatgcagtgag

SEQ ID NO: 405541 - DNA, 30 bp, Artificial Sequence
  Synthetic oligonucleotide
ttaggggtcatgtgcatttcgtatagtgag

SEQ ID NO: 405542 - DNA, 30 bp, Artificial Sequence
  Synthetic oligonucleotide
ttttagacgggacaaaggccctgtagtgag

SEQ ID NO: 405543 - DNA, 30 bp, Artificial Sequence
  Synthetic oligonucleotide
agggatcggaggcgatagtgttgacgtgag

SEQ ID NO: 405544 - DNA, 30 bp, Artificial Sequence
  Synthetic oligonucleotide
cacaaggacccgcgcgcccggctccgtgag

SEQ ID NO: 405545 - DNA, 30 bp, Artificial Sequence
  Synthetic oligonucleotide
aatcgtgcactcagcactgtttggcgtgag

SEQ ID NO: 405546 - DNA, 30 bp, Artificial Sequence
  Synthetic oligonucleotide
ggattttggtcatgtgcttgaatcggtgag

SEQ ID NO: 405547 - DNA, 30 bp, Artificial Sequence
  Synthetic oligonucleotide
tggtccggaccgggcggcggcagtggtgag

SEQ ID NO: 405548 - DNA, 30 bp, Artificial Sequence
  Synthetic oligonucleotide
atccggataaggttctcttagtttggtgag

SEQ ID NO: 405549 - DNA, 30 bp, Artificial Sequence
  Synthetic oligonucleotide
aaatttaggaaagtacccagcgcatgtgag

SEQ ID NO: 405550 - DNA, 30 bp, Artificial Sequence
  Synthetic oligonucleotide
atgcgttatagtcaggcgttgtgatgtgag

SEQ ID NO: 405551 - DNA, 30 bp, Artificial Sequence
  Synthetic oligonucleotide
atgtctccacttacgttgtttatatgtgag

SEQ ID NO: 405552 - DNA, 30 bp, Artificial Sequence
  Synthetic oligonucleotide
atctcactagcggtcttaagtccctgtgag

SEQ ID NO: 405553 - DNA, 30 bp, Artificial Sequence
  Synthetic oligonucleotide
aatctttgcattaccacaagcaattgtgag

SEQ ID NO: 405554 - DNA, 30 bp, Artificial Sequence
  Synthetic oligonucleotide
tcggtggcaacctcgttacaaacttgtgag

SEQ ID NO: 405555 - DNA, 30 bp, Artificial Sequence
  Synthetic oligonucleotide
ggatatgaaagctttacagccccttgtgag

SEQ ID NO: 405556 - DNA, 30 bp, Artificial Sequence
  Synthetic oligonucleotide
cacctcgggggccaagacatgataattgag

SEQ ID NO: 405557 - DNA, 30 bp, Artificial Sequence
  Synthetic oligonucleotide
ttaagtgggggctcattttgtaacattgag

SEQ ID NO: 405558 - DNA, 30 bp, Artificial Sequence
  Synthetic oligonucleotide
atctccactgggaatatgttctccattgag

SEQ ID NO: 405559 - DNA, 29 bp, Artificial Sequence
  Synthetic oligonucleotide
tgcctttgtgtgaaactgcagatattgag

SEQ ID NO: 405560 - DNA, 30 bp, Artificial Sequence
  Synthetic oligonucleotide
gttttcgactcacgatgtccagaccttgag

SEQ ID NO: 405561 - DNA, 30 bp, Artificial Sequence
  Synthetic oligonucleotide
agttggcctatctctcaagggttgcttgag

SEQ ID NO: 405562 - DNA, 30 bp, Artificial Sequence
  Synthetic oligonucleotide
tgaaattgagggcatcatgacgctcttgag

SEQ ID NO: 405563 - DNA, 30 bp, Artificial Sequence
  Synthetic oligonucleotide
ttatctcaacattttgattaataggttgag

SEQ ID NO: 405564 - DNA, 30 bp, Artificial Sequence
  Synthetic oligonucleotide
aaaggggctagacatagaatcggggttgag

SEQ ID NO: 405565 - DNA, 30 bp, Artificial Sequence
  Synthetic oligonucleotide
agctggggccactcattctttagtgttgag

SEQ ID NO: 405566 - DNA, 30 bp, Artificial Sequence
  Synthetic oligonucleotide
ggtcgggaagaagcggcgtttgtatttgag

SEQ ID NO: 405567 - DNA, 30 bp, Artificial Sequence
  Synthetic oligonucleotide
ggtactcggacgttcgtttagaactttgag

SEQ ID NO: 405568 - DNA, 31 bp, Artificial Sequence
  Synthetic oligonucleotide
ttatcggcgcttacgttttgcagcctttgag

SEQ ID NO: 405569 - DNA, 30 bp, Artificial Sequence
  Synthetic oligonucleotide
ggtgtcttagacagcgagccatcgtttgag

SEQ ID NO: 405570 - DNA, 30 bp, Artificial Sequence
  Synthetic oligonucleotide
tagagttacacgacgcataacaggtttgag

SEQ ID NO: 405571 - DNA, 30 bp, Artificial Sequence
  Synthetic oligonucleotide
ccggtacacgcggacaggcaccggtttgag

SEQ ID NO: 405572 - DNA, 30 bp, Artificial Sequence
  Synthetic oligonucleotide
tcaatgtacctcggcgctccaatgtttgag

SEQ ID NO: 405573 - DNA, 30 bp, Artificial Sequence
  Synthetic oligonucleotide
ctcctaaaccctcgcgggtgggattttgag

SEQ ID NO: 405574 - DNA, 30 bp, Artificial Sequence
  Synthetic oligonucleotide
taggactgagcgtaggacagcagttttgag

SEQ ID NO: 405575 - DNA, 31 bp, Artificial Sequence
  Synthetic oligonucleotide
ccgaagccggtcttgtatggggcgttttgag

SEQ ID NO: 405576 - DNA, 30 bp, Artificial Sequence
  Synthetic oligonucleotide
aatttccggtcaagggcacatataaaatag

SEQ ID NO: 405577 - DNA, 30 bp, Artificial Sequence
  Synthetic oligonucleotide
gaaacctcagtggcctgaagtgacaaatag

SEQ ID NO: 405578 - DNA, 30 bp, Artificial Sequence
  Synthetic oligonucleotide
aaccttgggtgtccatcagtgtccaaatag

SEQ ID NO: 405579 - DNA, 30 bp, Artificial Sequence
  Synthetic oligonucleotide
gcagatgttacgcacaacgggcgcaaatag

SEQ ID NO: 405580 - DNA, 30 bp, Artificial Sequence
  Synthetic oligonucleotide
ctgtggcctctatttgaacttttgaaatag

SEQ ID NO: 405581 - DNA, 30 bp, Artificial Sequence
  Synthetic oligonucleotide
ccacttcttgaaacgacatcaactaaatag

SEQ ID NO: 405582 - DNA, 30 bp, Artificial Sequence
  Synthetic oligonucleotide
caatagacttggcagaacgctactaaatag

SEQ ID NO: 405583 - DNA, 30 bp, Artificial Sequence
  Synthetic oligonucleotide
cagcgcttggtggtacttggattacaatag

SEQ ID NO: 405584 - DNA, 30 bp, Artificial Sequence
  Synthetic oligonucleotide
tatatgttagagtctactaaaactcaatag

SEQ ID NO: 405585 - DNA, 30 bp, Artificial Sequence
  Synthetic oligonucleotide
ttgaagtcaattctcatgactcgtcaatag

SEQ ID NO: 405586 - DNA, 30 bp, Artificial Sequence
  Synthetic oligonucleotide
cttagtgttgacccctatacaattcaatag

SEQ ID NO: 405587 - DNA, 30 bp, Artificial Sequence
  Synthetic oligonucleotide
gtgaattcactcgagtcatggcttcaatag

SEQ ID NO: 405588 - DNA, 30 bp, Artificial Sequence
  Synthetic oligonucleotide
aacctgccatcagtgtttgaagttcaatag

SEQ ID NO: 405589 - DNA, 30 bp, Artificial Sequence
  Synthetic oligonucleotide
cgcagaccactgttattactggaagaatag

SEQ ID NO: 405590 - DNA, 30 bp, Artificial Sequence
  Synthetic oligonucleotide
cttaatggttactcataaagcacagaatag

SEQ ID NO: 405591 - DNA, 30 bp, Artificial Sequence
  Synthetic oligonucleotide
ggtggcgaacagcaacttttcctagaatag

SEQ ID NO: 405592 - DNA, 30 bp, Artificial Sequence
  Synthetic oligonucleotide
gtagacggtcgggaaactactggcgaatag

SEQ ID NO: 405593 - DNA, 30 bp, Artificial Sequence
  Synthetic oligonucleotide
ggattttatgacgggtctagtcaggaatag

SEQ ID NO: 405594 - DNA, 30 bp, Artificial Sequence
  Synthetic oligonucleotide
tacatccgtgtgtaaaaggagccctaatag

SEQ ID NO: 405595 - DNA, 30 bp, Artificial Sequence
  Synthetic oligonucleotide
atcacccactctcctactatggcctaatag

SEQ ID NO: 405596 - DNA, 30 bp, Artificial Sequence
  Synthetic oligonucleotide
aagaggtatcttttggatcaaatctaatag

SEQ ID NO: 405597 - DNA, 30 bp, Artificial Sequence
  Synthetic oligonucleotide
taatctaccgccgcacgagacccgtaatag

SEQ ID NO: 405598 - DNA, 30 bp, Artificial Sequence
  Synthetic oligonucleotide
gatttaactcgcgaaccgacagcttaatag

SEQ ID NO: 405599 - DNA, 30 bp, Artificial Sequence
  Synthetic oligonucleotide
tccaccaaggtatacctgccgtcttaatag

SEQ ID NO: 405600 - DNA, 30 bp, Artificial Sequence
  Synthetic oligonucleotide
gaaaagtctgacggaccctcgaaaacatag

SEQ ID NO: 405601 - DNA, 30 bp, Artificial Sequence
  Synthetic oligonucleotide
ttcaacccctgtagcacacctacaacatag

SEQ ID NO: 405602 - DNA, 30 bp, Artificial Sequence
  Synthetic oligonucleotide
atgatcatgtgagcaaggcgaagcacatag

SEQ ID NO: 405603 - DNA, 30 bp, Artificial Sequence
  Synthetic oligonucleotide
gttcagctgtttttaattacctcgacatag

SEQ ID NO: 405604 - DNA, 30 bp, Artificial Sequence
  Synthetic oligonucleotide
ccagcaacatgtttagtatatactacatag

SEQ ID NO: 405605 - DNA, 30 bp, Artificial Sequence
  Synthetic oligonucleotide
gtgtatgttactgcactatgataaccatag

SEQ ID NO: 405606 - DNA, 30 bp, Artificial Sequence
  Synthetic oligonucleotide
cgccacgtggactctggacggggcccatag

SEQ ID NO: 405607 - DNA, 30 bp, Artificial Sequence
  Synthetic oligonucleotide
aaaagtgctaacgaaattgagcagccatag

SEQ ID NO: 405608 - DNA, 30 bp, Artificial Sequence
  Synthetic oligonucleotide
ataaagatctctgcatcagcctccgcatag

SEQ ID NO: 405609 - DNA, 30 bp, Artificial Sequence
  Synthetic oligonucleotide
cgtttaggacagatgctatgcatcgcatag

SEQ ID NO: 405610 - DNA, 30 bp, Artificial Sequence
  Synthetic oligonucleotide
aaatatgccgcattatcaggcaaggcatag

SEQ ID NO: 405611 - DNA, 30 bp, Artificial Sequence
  Synthetic oligonucleotide
gtctgtatagggccaagattattggcatag

SEQ ID NO: 405612 - DNA, 30 bp, Artificial Sequence
  Synthetic oligonucleotide
gtgttatattgcgtgtaacgggatgcatag

SEQ ID NO: 405613 - DNA, 30 bp, Artificial Sequence
  Synthetic oligonucleotide
agctttcagacgcaaacacgaactgcatag

SEQ ID NO: 405614 - DNA, 30 bp, Artificial Sequence
  Synthetic oligonucleotide
gggttcgcacgccaactacaacctgcatag

SEQ ID NO: 405615 - DNA, 30 bp, Artificial Sequence
  Synthetic oligonucleotide
gcatatacctgtatttcttgcagtgcatag

SEQ ID NO: 405616 - DNA, 30 bp, Artificial Sequence
  Synthetic oligonucleotide
gtaacatgttaaatctcactgtgatcatag

SEQ ID NO: 405617 - DNA, 30 bp, Artificial Sequence
  Synthetic oligonucleotide
tacgtattccggttatcggctgtgtcatag

SEQ ID NO: 405618 - DNA, 30 bp, Artificial Sequence
  Synthetic oligonucleotide
tattcttggtatcgtctttgcgaaagatag

SEQ ID NO: 405619 - DNA, 31 bp, Artificial Sequence
  Synthetic oligonucleotide
tgcgcccccgtcggcttcgggttacagatag

SEQ ID NO: 405620 - DNA, 30 bp, Artificial Sequence
  Synthetic oligonucleotide
gcagagtcgagggatctctctacgagatag

SEQ ID NO: 405621 - DNA, 30 bp, Artificial Sequence
  Synthetic oligonucleotide
ttagaggcagtgaacctcggtaggagatag

SEQ ID NO: 405622 - DNA, 30 bp, Artificial Sequence
  Synthetic oligonucleotide
gaacttcgactcgcaacattcagtagatag

SEQ ID NO: 405623 - DNA, 30 bp, Artificial Sequence
  Synthetic oligonucleotide
aaaatgttccccggtcatgacgaacgatag

SEQ ID NO: 405624 - DNA, 30 bp, Artificial Sequence
  Synthetic oligonucleotide
ccggcttggtttggatctgaccgacgatag

SEQ ID NO: 405625 - DNA, 30 bp, Artificial Sequence
  Synthetic oligonucleotide
gagaaataggtattagccggttgacgatag

SEQ ID NO: 405626 - DNA, 30 bp, Artificial Sequence
  Synthetic oligonucleotide
ttgaagcagccctgcattcgagaccgatag

SEQ ID NO: 405627 - DNA, 30 bp, Artificial Sequence
  Synthetic oligonucleotide
ggataggagcagcacgcaagggtccgatag

SEQ ID NO: 405628 - DNA, 30 bp, Artificial Sequence
  Synthetic oligonucleotide
gagttttgaaaatggggcagaattcgatag

SEQ ID NO: 405629 - DNA, 30 bp, Artificial Sequence
  Synthetic oligonucleotide
agttactcacaatgcggggcagttcgatag

SEQ ID NO: 405630 - DNA, 30 bp, Artificial Sequence
  Synthetic oligonucleotide
tctgagctgcgtttttaaacttaaggatag

SEQ ID NO: 405631 - DNA, 30 bp, Artificial Sequence
  Synthetic oligonucleotide
tctgttaccgaactatacagaaacggatag

SEQ ID NO: 405632 - DNA, 30 bp, Artificial Sequence
  Synthetic oligonucleotide
ggtgatggaaagtgtcgcttgcacggatag

SEQ ID NO: 405633 - DNA, 30 bp, Artificial Sequence
  Synthetic oligonucleotide
ttagaccaacgttcttaactaacgggatag

SEQ ID NO: 405634 - DNA, 30 bp, Artificial Sequence
  Synthetic oligonucleotide
caccacatttgacgctgtgtagggggatag

SEQ ID NO: 405635 - DNA, 30 bp, Artificial Sequence
  Synthetic oligonucleotide
tgctaggtccctttcctggtcatgggatag

SEQ ID NO: 405636 - DNA, 30 bp, Artificial Sequence
  Synthetic oligonucleotide
gtcaggtacgaaacgcggcgttaatgatag

SEQ ID NO: 405637 - DNA, 30 bp, Artificial Sequence
  Synthetic oligonucleotide
aatatatcgagcgaaaagattcactgatag

SEQ ID NO: 405638 - DNA, 29 bp, Artificial Sequence
  Synthetic oligonucleotide
cgttgatgtacttctttcctatctgatag

SEQ ID NO: 405639 - DNA, 30 bp, Artificial Sequence
  Synthetic oligonucleotide
gagtgctccttaggtatcatgcggtgatag

SEQ ID NO: 405640 - DNA, 30 bp, Artificial Sequence
  Synthetic oligonucleotide
aagaccgctggtgttggtctatattgatag

SEQ ID NO: 405641 - DNA, 30 bp, Artificial Sequence
  Synthetic oligonucleotide
atgggttcctcgaggattagtttttgatag

SEQ ID NO: 405642 - DNA, 30 bp, Artificial Sequence
  Synthetic oligonucleotide
ctattccgtcccgtttggacacaaatatag

SEQ ID NO: 405643 - DNA, 30 bp, Artificial Sequence
  Synthetic oligonucleotide
cagcagctgattgacttgatggaaatatag

SEQ ID NO: 405644 - DNA, 30 bp, Artificial Sequence
  Synthetic oligonucleotide
ggatcattgtatctctcggcgctgatatag

SEQ ID NO: 405645 - DNA, 30 bp, Artificial Sequence
  Synthetic oligonucleotide
cacactgggctggcttgacgtttgatatag

SEQ ID NO: 405646 - DNA, 30 bp, Artificial Sequence
  Synthetic oligonucleotide
tatgaccagtgcgctgctttaattatatag

SEQ ID NO: 405647 - DNA, 30 bp, Artificial Sequence
  Synthetic oligonucleotide
aacgtacccaaacaaaaacctagactatag

SEQ ID NO: 405648 - DNA, 30 bp, Artificial Sequence
  Synthetic oligonucleotide
cacattttacctcaggtaagacatctatag

SEQ ID NO: 405649 - DNA, 31 bp, Artificial Sequence
  Synthetic oligonucleotide
gacggttagccgaacgcactcatctctatag

SEQ ID NO: 405650 - DNA, 30 bp, Artificial Sequence
  Synthetic oligonucleotide
ggtctccctgttttatcagattaagtatag

SEQ ID NO: 405651 - DNA, 30 bp, Artificial Sequence
  Synthetic oligonucleotide
cattgtgcctaaaagcgacgtacagtatag

SEQ ID NO: 405652 - DNA, 30 bp, Artificial Sequence
  Synthetic oligonucleotide
taccagtttttgtttcggtaagcagtatag

SEQ ID NO: 405653 - DNA, 30 bp, Artificial Sequence
  Synthetic oligonucleotide
gagtatcgtgaataagtagtgagagtatag

SEQ ID NO: 405654 - DNA, 30 bp, Artificial Sequence
  Synthetic oligonucleotide
gtctaatcgatcaacattggcctagtatag

SEQ ID NO: 405655 - DNA, 30 bp, Artificial Sequence
  Synthetic oligonucleotide
aaattcggccggccaaaggcccacgtatag

SEQ ID NO: 405656 - DNA, 30 bp, Artificial Sequence
  Synthetic oligonucleotide
gggattgcagacaaacctattcgggtatag

SEQ ID NO: 405657 - DNA, 30 bp, Artificial Sequence
  Synthetic oligonucleotide
cccttggcttgttacaaactggtggtatag

SEQ ID NO: 405658 - DNA, 30 bp, Artificial Sequence
  Synthetic oligonucleotide
gtttgcctgtctggctagacttgtgtatag

SEQ ID NO: 405659 - DNA, 30 bp, Artificial Sequence
  Synthetic oligonucleotide
ctaggggaccggacagtgcttcaattatag

SEQ ID NO: 405660 - DNA, 30 bp, Artificial Sequence
  Synthetic oligonucleotide
gctaagttggctgttatactaagattatag

SEQ ID NO: 405661 - DNA, 29 bp, Artificial Sequence
  Synthetic oligonucleotide
tatgaatcgattttcggcatatattatag

SEQ ID NO: 405662 - DNA, 30 bp, Artificial Sequence
  Synthetic oligonucleotide
tctgtctctcgagtttgcagcgcgttatag

SEQ ID NO: 405663 - DNA, 31 bp, Artificial Sequence
  Synthetic oligonucleotide
ccattcacttggtcacgtggaaggtttatag

SEQ ID NO: 405664 - DNA, 30 bp, Artificial Sequence
  Synthetic oligonucleotide
caggaatgtatgagctgagaccttttatag

SEQ ID NO: 405665 - DNA, 30 bp, Artificial Sequence
  Synthetic oligonucleotide
gagaaattagtaggcatttttgcaaactag

SEQ ID NO: 405666 - DNA, 30 bp, Artificial Sequence
  Synthetic oligonucleotide
gataataagccgcaatgaaggaacaactag

SEQ ID NO: 405667 - DNA, 30 bp, Artificial Sequence
  Synthetic oligonucleotide
gtcctagcacgaacgtgagatgttaactag

SEQ ID NO: 405668 - DNA, 30 bp, Artificial Sequence
  Synthetic oligonucleotide
cgtactttttaactggggcagtttaactag

SEQ ID NO: 405669 - DNA, 30 bp, Artificial Sequence
  Synthetic oligonucleotide
tttcagtgcgaccaagtaggcaaacactag

SEQ ID NO: 405670 - DNA, 30 bp, Artificial Sequence
  Synthetic oligonucleotide
gagctgcactgagtccgtttggaccactag

SEQ ID NO: 405671 - DNA, 30 bp, Artificial Sequence
  Synthetic oligonucleotide
tccctggtaaagcctcatcagacgcactag

SEQ ID NO: 405672 - DNA, 30 bp, Artificial Sequence
  Synthetic oligonucleotide
tttggcccggaggcacgcccggcggactag

SEQ ID NO: 405673 - DNA, 30 bp, Artificial Sequence
  Synthetic oligonucleotide
ttccccttgaagagccggccacgtgactag

SEQ ID NO: 405674 - DNA, 30 bp, Artificial Sequence
  Synthetic oligonucleotide
gtataatgcaagtctgattccgggtactag

SEQ ID NO: 405675 - DNA, 30 bp, Artificial Sequence
  Synthetic oligonucleotide
cagcaggatctaatccatgagaattactag

SEQ ID NO: 405676 - DNA, 30 bp, Artificial Sequence
  Synthetic oligonucleotide
ggaagcacgatgtttgggctcggttactag

SEQ ID NO: 405677 - DNA, 30 bp, Artificial Sequence
  Synthetic oligonucleotide
cggtcttggaagctaattcatatttactag

SEQ ID NO: 405678 - DNA, 30 bp, Artificial Sequence
  Synthetic oligonucleotide
agatagcccagatggtttgatgaaacctag

SEQ ID NO: 405679 - DNA, 30 bp, Artificial Sequence
  Synthetic oligonucleotide
gaaggtcccgtgtattcacgggccacctag

SEQ ID NO: 405680 - DNA, 30 bp, Artificial Sequence
  Synthetic oligonucleotide
ccctgacgatatgatgttatccgcacctag

SEQ ID NO: 405681 - DNA, 30 bp, Artificial Sequence
  Synthetic oligonucleotide
tcctctgaaacctataatctagggacctag

SEQ ID NO: 405682 - DNA, 30 bp, Artificial Sequence
  Synthetic oligonucleotide
ttttagccggttaggttctcgtatacctag

SEQ ID NO: 405683 - DNA, 30 bp, Artificial Sequence
  Synthetic oligonucleotide
agaatcgggctttgagctaacgctacctag

SEQ ID NO: 405684 - DNA, 30 bp, Artificial Sequence
  Synthetic oligonucleotide
gagctctggtttcctcagggaattacctag

SEQ ID NO: 405685 - DNA, 30 bp, Artificial Sequence
  Synthetic oligonucleotide
aaatattataggagtctgtctgaaccctag

SEQ ID NO: 405686 - DNA, 30 bp, Artificial Sequence
  Synthetic oligonucleotide
tcatcgggattgagcgcaagcagaccctag

SEQ ID NO: 405687 - DNA, 30 bp, Artificial Sequence
  Synthetic oligonucleotide
tgatactacttagtcggagtgtacccctag

SEQ ID NO: 405688 - DNA, 30 bp, Artificial Sequence
  Synthetic oligonucleotide
ccggtatttatagatttacctcagccctag

SEQ ID NO: 405689 - DNA, 30 bp, Artificial Sequence
  Synthetic oligonucleotide
atcggaagattcacgcctaaaaggccctag

SEQ ID NO: 405690 - DNA, 30 bp, Artificial Sequence
  Synthetic oligonucleotide
tccccgtttaacgctggtaagatgccctag

SEQ ID NO: 405691 - DNA, 30 bp, Artificial Sequence
  Synthetic oligonucleotide
tctacaagtaaggattcctataatccctag

SEQ ID NO: 405692 - DNA, 30 bp, Artificial Sequence
  Synthetic oligonucleotide
cccgtaattgaccgctaggggactccctag

SEQ ID NO: 405693 - DNA, 30 bp, Artificial Sequence
  Synthetic oligonucleotide
gaaaacacgccgaatgtagggacagcctag

SEQ ID NO: 405694 - DNA, 30 bp, Artificial Sequence
  Synthetic oligonucleotide
tcctatcgtcggaagagtccgacggcctag

SEQ ID NO: 405695 - DNA, 30 bp, Artificial Sequence
  Synthetic oligonucleotide
ccggattaaacggtgaccggtgatgcctag

SEQ ID NO: 405696 - DNA, 30 bp, Artificial Sequence
  Synthetic oligonucleotide
aaaagcttgcgtgatggccgcgttgcctag

SEQ ID NO: 405697 - DNA, 30 bp, Artificial Sequence
  Synthetic oligonucleotide
catcagtagtaatcccgggtgtttgcctag

SEQ ID NO: 405698 - DNA, 30 bp, Artificial Sequence
  Synthetic oligonucleotide
atagatcaagggtactatccagtatcctag

SEQ ID NO: 405699 - DNA, 30 bp, Artificial Sequence
  Synthetic oligonucleotide
atcggcacgagcaaataggataagtcctag

SEQ ID NO: 405700 - DNA, 30 bp, Artificial Sequence
  Synthetic oligonucleotide
caaaagttacgataacgacggggttcctag

SEQ ID NO: 405701 - DNA, 30 bp, Artificial Sequence
  Synthetic oligonucleotide
aaatattcacgatttcaggctctaagctag

SEQ ID NO: 405702 - DNA, 30 bp, Artificial Sequence
  Synthetic oligonucleotide
ccttacttaatgctggtatagcgcagctag

SEQ ID NO: 405703 - DNA, 30 bp, Artificial Sequence
  Synthetic oligonucleotide
caatagcggctttaactcttttgcagctag

SEQ ID NO: 405704 - DNA, 30 bp, Artificial Sequence
  Synthetic oligonucleotide
taatctcaccacgtgagtaatggacgctag

SEQ ID NO: 405705 - DNA, 30 bp, Artificial Sequence
  Synthetic oligonucleotide
catctatcgacacttccaccaaaccgctag

SEQ ID NO: 405706 - DNA, 30 bp, Artificial Sequence
  Synthetic oligonucleotide
tggaatgagcctgtccgcgcaagccgctag

SEQ ID NO: 405707 - DNA, 30 bp, Artificial Sequence
  Synthetic oligonucleotide
ctcaatccggtatgttggcggttccgctag

SEQ ID NO: 405708 - DNA, 30 bp, Artificial Sequence
  Synthetic oligonucleotide
ctggatgacaataccacttgccggcgctag

SEQ ID NO: 405709 - DNA, 30 bp, Artificial Sequence
  Synthetic oligonucleotide
aacagtcgttagagtccagccttgggctag

SEQ ID NO: 405710 - DNA, 30 bp, Artificial Sequence
  Synthetic oligonucleotide
gtaagagttatgcttgttggccatggctag

SEQ ID NO: 405711 - DNA, 30 bp, Artificial Sequence
  Synthetic oligonucleotide
tctactttaaaacacgccagtcgatgctag

SEQ ID NO: 405712 - DNA, 30 bp, Artificial Sequence
  Synthetic oligonucleotide
acttaaagtagatttataccatgatgctag

SEQ ID NO: 405713 - DNA, 30 bp, Artificial Sequence
  Synthetic oligonucleotide
taaaagtaaagtcgggttataagctgctag

SEQ ID NO: 405714 - DNA, 30 bp, Artificial Sequence
  Synthetic oligonucleotide
ttctgttctatggcaacttgcaattgctag

SEQ ID NO: 405715 - DNA, 30 bp, Artificial Sequence
  Synthetic oligonucleotide
cttggcggttggctgggtttcttttgctag

SEQ ID NO: 405716 - DNA, 30 bp, Artificial Sequence
  Synthetic oligonucleotide
taacaatacttatgtgccctggcaatctag

SEQ ID NO: 405717 - DNA, 30 bp, Artificial Sequence
  Synthetic oligonucleotide
tggatggctgcgcaccgtatatgaatctag

SEQ ID NO: 405718 - DNA, 30 bp, Artificial Sequence
  Synthetic oligonucleotide
accatattttaagtgctgccagtaatctag

SEQ ID NO: 405719 - DNA, 30 bp, Artificial Sequence
  Synthetic oligonucleotide
ttttcagagactgtaaaagcggacatctag

SEQ ID NO: 405720 - DNA, 30 bp, Artificial Sequence
  Synthetic oligonucleotide
aaaattggccattacagactacccatctag

SEQ ID NO: 405721 - DNA, 30 bp, Artificial Sequence
  Synthetic oligonucleotide
atgaatagggtgacggttcatgggatctag

SEQ ID NO: 405722 - DNA, 30 bp, Artificial Sequence
  Synthetic oligonucleotide
tttagctcggcattctccatagtcctctag

SEQ ID NO: 405723 - DNA, 30 bp, Artificial Sequence
  Synthetic oligonucleotide
gtcttggagctagactttatcgggctctag

SEQ ID NO: 405724 - DNA, 30 bp, Artificial Sequence
  Synthetic oligonucleotide
ttcaacataacggaaactagtgaagtctag

SEQ ID NO: 405725 - DNA, 30 bp, Artificial Sequence
  Synthetic oligonucleotide
atttcacctggtataacacttatagtctag

SEQ ID NO: 405726 - DNA, 30 bp, Artificial Sequence
  Synthetic oligonucleotide
tgtaccgtcattattttacagtttgtctag

SEQ ID NO: 405727 - DNA, 30 bp, Artificial Sequence
  Synthetic oligonucleotide
agcatgaagggttaacgaggttttgtctag

SEQ ID NO: 405728 - DNA, 30 bp, Artificial Sequence
  Synthetic oligonucleotide
gtttgcgcactatgctgttccacgttctag

SEQ ID NO: 405729 - DNA, 30 bp, Artificial Sequence
  Synthetic oligonucleotide
taacggcgagtgccgctatgtccgttctag

SEQ ID NO: 405730 - DNA, 30 bp, Artificial Sequence
  Synthetic oligonucleotide
ttttccgcggctcacccctctgtgttctag

SEQ ID NO: 405731 - DNA, 30 bp, Artificial Sequence
  Synthetic oligonucleotide
taaggcacgcttccttaaataggtttctag

SEQ ID NO: 405732 - DNA, 30 bp, Artificial Sequence
  Synthetic oligonucleotide
gctaccaaactgttagccggctgtttctag

SEQ ID NO: 405733 - DNA, 30 bp, Artificial Sequence
  Synthetic oligonucleotide
aatatctatttttaggccgaacgaaagtag

SEQ ID NO: 405734 - DNA, 30 bp, Artificial Sequence
  Synthetic oligonucleotide
atctagtctttttgtcaatgtcacaagtag

SEQ ID NO: 405735 - DNA, 30 bp, Artificial Sequence
  Synthetic oligonucleotide
tccggatgcctggataaaaagtccaagtag

SEQ ID NO: 405736 - DNA, 30 bp, Artificial Sequence
  Synthetic oligonucleotide
tacacaacttgcacgcggaattccaagtag

SEQ ID NO: 405737 - DNA, 30 bp, Artificial Sequence
  Synthetic oligonucleotide
catttacagtctttcgaattctgcaagtag

SEQ ID NO: 405738 - DNA, 30 bp, Artificial Sequence
  Synthetic oligonucleotide
gtccaagacgcaacgacgagacggaagtag

SEQ ID NO: 405739 - DNA, 30 bp, Artificial Sequence
  Synthetic oligonucleotide
gagtgggaatcatatggacacgataagtag

SEQ ID NO: 405740 - DNA, 30 bp, Artificial Sequence
  Synthetic oligonucleotide
cttttggtcatggtcacacgtagtaagtag

SEQ ID NO: 405741 - DNA, 30 bp, Artificial Sequence
  Synthetic oligonucleotide
tactcgttgatgtggaatactatacagtag

SEQ ID NO: 405742 - DNA, 30 bp, Artificial Sequence
  Synthetic oligonucleotide
aaacatttgtttgtatatgccgggcagtag

SEQ ID NO: 405743 - DNA, 30 bp, Artificial Sequence
  Synthetic oligonucleotide
actgcatgttccctcaaagcctctcagtag

SEQ ID NO: 405744 - DNA, 30 bp, Artificial Sequence
  Synthetic oligonucleotide
ctccagctggggagacacgccattcagtag

SEQ ID NO: 405745 - DNA, 30 bp, Artificial Sequence
  Synthetic oligonucleotide
gtagcattttttaaagaagtctttcagtag

SEQ ID NO: 405746 - DNA, 30 bp, Artificial Sequence
  Synthetic oligonucleotide
aactcgactcggcaccattcacaagagtag

SEQ ID NO: 405747 - DNA, 30 bp, Artificial Sequence
  Synthetic oligonucleotide
agcgatgctgtattcagaggcttagagtag

SEQ ID NO: 405748 - DNA, 30 bp, Artificial Sequence
  Synthetic oligonucleotide
ttttctggtagaggtagtgtgcatgagtag

SEQ ID NO: 405749 - DNA, 30 bp, Artificial Sequence
  Synthetic oligonucleotide
cccgtttgaaaagccggggttcatgagtag

SEQ ID NO: 405750 - DNA, 30 bp, Artificial Sequence
  Synthetic oligonucleotide
tcccgcggggccgtatgaaaaactgagtag

SEQ ID NO: 405751 - DNA, 30 bp, Artificial Sequence
  Synthetic oligonucleotide
cgctaattacgtagcaaatgttaatagtag

SEQ ID NO: 405752 - DNA, 30 bp, Artificial Sequence
  Synthetic oligonucleotide
tcgactattattacctggtctcaaacgtag

SEQ ID NO: 405753 - DNA, 30 bp, Artificial Sequence
  Synthetic oligonucleotide
tgagtggaggcaacaacttggttaacgtag

SEQ ID NO: 405754 - DNA, 30 bp, Artificial Sequence
  Synthetic oligonucleotide
cgtgccttgtgctggcgggagatcacgtag

SEQ ID NO: 405755 - DNA, 30 bp, Artificial Sequence
  Synthetic oligonucleotide
gctgtggtttgatgcgtataagggacgtag

SEQ ID NO: 405756 - DNA, 30 bp, Artificial Sequence
  Synthetic oligonucleotide
ttatgcatcagtactctttacattacgtag

SEQ ID NO: 405757 - DNA, 30 bp, Artificial Sequence
  Synthetic oligonucleotide
ttatataagaagtaaattacaggcccgtag

SEQ ID NO: 405758 - DNA, 30 bp, Artificial Sequence
  Synthetic oligonucleotide
tgtgcagaacctcgtatttggcttccgtag

SEQ ID NO: 405759 - DNA, 30 bp, Artificial Sequence
  Synthetic oligonucleotide
aataggtgcctaacggggcacccagcgtag

SEQ ID NO: 405760 - DNA, 30 bp, Artificial Sequence
  Synthetic oligonucleotide
ggttatcaaagagcccggtattgggcgtag

SEQ ID NO: 405761 - DNA, 30 bp, Artificial Sequence
  Synthetic oligonucleotide
accatgatcatatacttgtatcgtgcgtag

SEQ ID NO: 405762 - DNA, 30 bp, Artificial Sequence
  Synthetic oligonucleotide
ggaatatgaattaacatatttatatcgtag

SEQ ID NO: 405763 - DNA, 30 bp, Artificial Sequence
  Synthetic oligonucleotide
ccactataaatcggcccttgcacctcgtag

SEQ ID NO: 405764 - DNA, 30 bp, Artificial Sequence
  Synthetic oligonucleotide
cgacggttgcactcgtaaaccatttcgtag

SEQ ID NO: 405765 - DNA, 30 bp, Artificial Sequence
  Synthetic oligonucleotide
tatgagtttgtgagagaacaacaaaggtag

SEQ ID NO: 405766 - DNA, 30 bp, Artificial Sequence
  Synthetic oligonucleotide
gcattccgggacccttttatttcaaggtag

SEQ ID NO: 405767 - DNA, 30 bp, Artificial Sequence
  Synthetic oligonucleotide
tatagatgcagatccttagacagaaggtag

SEQ ID NO: 405768 - DNA, 30 bp, Artificial Sequence
  Synthetic oligonucleotide
actattacgcattctcgctcgctaaggtag

SEQ ID NO: 405769 - DNA, 30 bp, Artificial Sequence
  Synthetic oligonucleotide
cttggctctgagcctaataagttgaggtag

SEQ ID NO: 405770 - DNA, 30 bp, Artificial Sequence
  Synthetic oligonucleotide
cgacacgggtatcgatagtcgacacggtag

SEQ ID NO: 405771 - DNA, 30 bp, Artificial Sequence
  Synthetic oligonucleotide
agcgcgtctggtaattcgggccagcggtag

SEQ ID NO: 405772 - DNA, 30 bp, Artificial Sequence
  Synthetic oligonucleotide
ggttcaattgcgtgttcagctgcgcggtag

SEQ ID NO: 405773 - DNA, 30 bp, Artificial Sequence
  Synthetic oligonucleotide
tattcagatagatggatgtcgtggcggtag

SEQ ID NO: 405774 - DNA, 30 bp, Artificial Sequence
  Synthetic oligonucleotide
aggaagctcaaaacaccgcttgtgcggtag

SEQ ID NO: 405775 - DNA, 30 bp, Artificial Sequence
  Synthetic oligonucleotide
acagaagacaacacttacgtatatcggtag

SEQ ID NO: 405776 - DNA, 30 bp, Artificial Sequence
  Synthetic oligonucleotide
tcgtgcgtctacaggctccccggtcggtag

SEQ ID NO: 405777 - DNA, 30 bp, Artificial Sequence
  Synthetic oligonucleotide
aattgggtttccctggacgggtaagggtag

SEQ ID NO: 405778 - DNA, 30 bp, Artificial Sequence
  Synthetic oligonucleotide
ctatttgtaggtgccagaggcagggggtag

SEQ ID NO: 405779 - DNA, 30 bp, Artificial Sequence
  Synthetic oligonucleotide
gatggactgtgtgcatactcgcgggggtag

SEQ ID NO: 405780 - DNA, 30 bp, Artificial Sequence
  Synthetic oligonucleotide
actgtgtggagcgcagataatcgtgggtag

SEQ ID NO: 405781 - DNA, 30 bp, Artificial Sequence
  Synthetic oligonucleotide
gaggtctagtgatagtcaccacactggtag

SEQ ID NO: 405782 - DNA, 30 bp, Artificial Sequence
  Synthetic oligonucleotide
ttggttcaaagttctagacaatcttggtag

SEQ ID NO: 405783 - DNA, 30 bp, Artificial Sequence
  Synthetic oligonucleotide
gtgacggaggatagctatacaatttggtag

SEQ ID NO: 405784 - DNA, 30 bp, Artificial Sequence
  Synthetic oligonucleotide
acgcggtatatcgcttaacggatttggtag

SEQ ID NO: 405785 - DNA, 30 bp, Artificial Sequence
  Synthetic oligonucleotide
gaccccactataagctcatgtcaaatgtag

SEQ ID NO: 405786 - DNA, 30 bp, Artificial Sequence
  Synthetic oligonucleotide
tcataatgatggactgaaactatgatgtag

SEQ ID NO: 405787 - DNA, 30 bp, Artificial Sequence
  Synthetic oligonucleotide
taatgtaccccacagtatggagtactgtag

SEQ ID NO: 405788 - DNA, 30 bp, Artificial Sequence
  Synthetic oligonucleotide
gaaggggactgtattagactcagcctgtag

SEQ ID NO: 405789 - DNA, 30 bp, Artificial Sequence
  Synthetic oligonucleotide
gattgtagcggttcatcaaggtagctgtag

SEQ ID NO: 405790 - DNA, 30 bp, Artificial Sequence
  Synthetic oligonucleotide
aacgtacgtgggttgggctcgcggctgtag

SEQ ID NO: 405791 - DNA, 30 bp, Artificial Sequence
  Synthetic oligonucleotide
taagctgggcaaaggctgctggatctgtag

SEQ ID NO: 405792 - DNA, 30 bp, Artificial Sequence
  Synthetic oligonucleotide
aagtcgatctctgcgggaggcagtctgtag

SEQ ID NO: 405793 - DNA, 30 bp, Artificial Sequence
  Synthetic oligonucleotide
ccctacggtgcggtcatatcctttctgtag

SEQ ID NO: 405794 - DNA, 30 bp, Artificial Sequence
  Synthetic oligonucleotide
tacattcggcgtgaaagtcccgtagtgtag

SEQ ID NO: 405795 - DNA, 30 bp, Artificial Sequence
  Synthetic oligonucleotide
tacgtcgtcttttcaactatgtccgtgtag

SEQ ID NO: 405796 - DNA, 30 bp, Artificial Sequence
  Synthetic oligonucleotide
ttatttaactccaaaaatccactcgtgtag

SEQ ID NO: 405797 - DNA, 30 bp, Artificial Sequence
  Synthetic oligonucleotide
cttcaatagttagcgcatgattgggtgtag

SEQ ID NO: 405798 - DNA, 30 bp, Artificial Sequence
  Synthetic oligonucleotide
tgtacgtgagagatcctgccgcaattgtag

SEQ ID NO: 405799 - DNA, 30 bp, Artificial Sequence
  Synthetic oligonucleotide
ctattcaactatttcgtcggtacattgtag

SEQ ID NO: 405800 - DNA, 30 bp, Artificial Sequence
  Synthetic oligonucleotide
attacgtcactaaaatcatggcgattgtag

SEQ ID NO: 405801 - DNA, 30 bp, Artificial Sequence
  Synthetic oligonucleotide
ccacaggacggtgcagtctacagcttgtag

SEQ ID NO: 405802 - DNA, 30 bp, Artificial Sequence
  Synthetic oligonucleotide
ttaattaggacttcgggcttaggcttgtag

SEQ ID NO: 405803 - DNA, 30 bp, Artificial Sequence
  Synthetic oligonucleotide
ccgctggcatgaagcatgcacaggttgtag

SEQ ID NO: 405804 - DNA, 30 bp, Artificial Sequence
  Synthetic oligonucleotide
acggactagtaagtcgtaggacatttgtag

SEQ ID NO: 405805 - DNA, 30 bp, Artificial Sequence
  Synthetic oligonucleotide
gcagttaacttcgttatcgtcactttgtag

SEQ ID NO: 405806 - DNA, 30 bp, Artificial Sequence
  Synthetic oligonucleotide
gagtgctggccctgtaaagtgactttgtag

SEQ ID NO: 405807 - DNA, 30 bp, Artificial Sequence
  Synthetic oligonucleotide
gtgagacagcgggttaacaaatttttgtag

SEQ ID NO: 405808 - DNA, 30 bp, Artificial Sequence
  Synthetic oligonucleotide
cttagtccgttgtcgcgcgtatccaattag

SEQ ID NO: 405809 - DNA, 30 bp, Artificial Sequence
  Synthetic oligonucleotide
cccatttaaatagtaattttaggcaattag

SEQ ID NO: 405810 - DNA, 30 bp, Artificial Sequence
  Synthetic oligonucleotide
actgttcactgagtcgtgtactgcaattag

SEQ ID NO: 405811 - DNA, 30 bp, Artificial Sequence
  Synthetic oligonucleotide
ttacaggatcctacggttaccaggaattag

SEQ ID NO: 405812 - DNA, 30 bp, Artificial Sequence
  Synthetic oligonucleotide
aataatatctctacctaatagatgaattag

SEQ ID NO: 405813 - DNA, 30 bp, Artificial Sequence
  Synthetic oligonucleotide
atttgtactgttcacttatatatgaattag

SEQ ID NO: 405814 - DNA, 30 bp, Artificial Sequence
  Synthetic oligonucleotide
ctcacaacggcgggggcccaccttaattag

SEQ ID NO: 405815 - DNA, 30 bp, Artificial Sequence
  Synthetic oligonucleotide
ccgcaagactagataagctaatttaattag

SEQ ID NO: 405816 - DNA, 30 bp, Artificial Sequence
  Synthetic oligonucleotide
cttcgcagtggacggcaatcaagccattag

SEQ ID NO: 405817 - DNA, 30 bp, Artificial Sequence
  Synthetic oligonucleotide
cccggatacgcgggaccacaatatcattag

SEQ ID NO: 405818 - DNA, 30 bp, Artificial Sequence
  Synthetic oligonucleotide
gagcgacgggctgcatgagcggctcattag

SEQ ID NO: 405819 - DNA, 30 bp, Artificial Sequence
  Synthetic oligonucleotide
cttaactacctttatgaaagtaaagattag

SEQ ID NO: 405820 - DNA, 30 bp, Artificial Sequence
  Synthetic oligonucleotide
ctctcggggtcatggtttgagccagattag

SEQ ID NO: 405821 - DNA, 30 bp, Artificial Sequence
  Synthetic oligonucleotide
gatgacgtaacacgattttcagtagattag

SEQ ID NO: 405822 - DNA, 30 bp, Artificial Sequence
  Synthetic oligonucleotide
ggttatttggactcatcaagatgcgattag

SEQ ID NO: 405823 - DNA, 30 bp, Artificial Sequence
  Synthetic oligonucleotide
aatacatagaagtccgcatgggctgattag

SEQ ID NO: 405824 - DNA, 30 bp, Artificial Sequence
  Synthetic oligonucleotide
aggtagactccaacgggcaaccaatattag

SEQ ID NO: 405825 - DNA, 30 bp, Artificial Sequence
  Synthetic oligonucleotide
cttggtataagcttactagcgtactattag

SEQ ID NO: 405826 - DNA, 30 bp, Artificial Sequence
  Synthetic oligonucleotide
attaccgcattaccaaggtggttgtattag

SEQ ID NO: 405827 - DNA, 30 bp, Artificial Sequence
  Synthetic oligonucleotide
gttacctggccgctatcaatatattattag

SEQ ID NO: 405828 - DNA, 30 bp, Artificial Sequence
  Synthetic oligonucleotide
tttctaggagaagtgttaacttcttattag

SEQ ID NO: 405829 - DNA, 30 bp, Artificial Sequence
  Synthetic oligonucleotide
tgtattttaacgagaactaggatttattag

SEQ ID NO: 405830 - DNA, 30 bp, Artificial Sequence
  Synthetic oligonucleotide
tcattgtacgccgaagccggtgaaacttag

SEQ ID NO: 405831 - DNA, 30 bp, Artificial Sequence
  Synthetic oligonucleotide
gtcggggggccgtaagagccataaacttag

SEQ ID NO: 405832 - DNA, 30 bp, Artificial Sequence
  Synthetic oligonucleotide
gtccaagggcctcatgcctcgggaacttag

SEQ ID NO: 405833 - DNA, 30 bp, Artificial Sequence
  Synthetic oligonucleotide
tccacaagttgcgactgccgactaacttag

SEQ ID NO: 405834 - DNA, 30 bp, Artificial Sequence
  Synthetic oligonucleotide
gggactatgggtatcccagatgccacttag

SEQ ID NO: 405835 - DNA, 30 bp, Artificial Sequence
  Synthetic oligonucleotide
gcaacttataaccattcgaccggcacttag

SEQ ID NO: 405836 - DNA, 30 bp, Artificial Sequence
  Synthetic oligonucleotide
gagcggcatccagacctgtacaggacttag

SEQ ID NO: 405837 - DNA, 30 bp, Artificial Sequence
  Synthetic oligonucleotide
tttgcgtctgggagggggaagggtacttag

SEQ ID NO: 405838 - DNA, 30 bp, Artificial Sequence
  Synthetic oligonucleotide
aagttgttgttacggttggggggtacttag

SEQ ID NO: 405839 - DNA, 30 bp, Artificial Sequence
  Synthetic oligonucleotide
tgctttgtgctagggcctagagccccttag

SEQ ID NO: 405840 - DNA, 30 bp, Artificial Sequence
  Synthetic oligonucleotide
aatttgtcccgtgagtgacaattcccttag

SEQ ID NO: 405841 - DNA, 30 bp, Artificial Sequence
  Synthetic oligonucleotide
gacgacccgggcggcgggggaaagccttag

SEQ ID NO: 405842 - DNA, 30 bp, Artificial Sequence
  Synthetic oligonucleotide
gatcgcccccatatctcggcacagccttag

SEQ ID NO: 405843 - DNA, 30 bp, Artificial Sequence
  Synthetic oligonucleotide
ataattgtatcagggacgtgtatgccttag

SEQ ID NO: 405844 - DNA, 30 bp, Artificial Sequence
  Synthetic oligonucleotide
tgaaccgggcatgggcgctttatagcttag

SEQ ID NO: 405845 - DNA, 30 bp, Artificial Sequence
  Synthetic oligonucleotide
tgcatgtccggggcatagctgctagcttag

SEQ ID NO: 405846 - DNA, 30 bp, Artificial Sequence
  Synthetic oligonucleotide
cccgtaaatctcaggcgcggtaaggcttag

SEQ ID NO: 405847 - DNA, 30 bp, Artificial Sequence
  Synthetic oligonucleotide
atgatacgctgtcctatggcgttggcttag

SEQ ID NO: 405848 - DNA, 30 bp, Artificial Sequence
  Synthetic oligonucleotide
ttatctctgacccccgtacggattgcttag

SEQ ID NO: 405849 - DNA, 30 bp, Artificial Sequence
  Synthetic oligonucleotide
agtacagtagatgtaagaagagcatcttag

SEQ ID NO: 405850 - DNA, 30 bp, Artificial Sequence
  Synthetic oligonucleotide
tatcttgagcgcggagatgtgatatcttag

SEQ ID NO: 405851 - DNA, 30 bp, Artificial Sequence
  Synthetic oligonucleotide
gttgtaagtatcatggtcttgatttcttag

SEQ ID NO: 405852 - DNA, 30 bp, Artificial Sequence
  Synthetic oligonucleotide
tacttggtcccttgtctattagcaagttag

SEQ ID NO: 405853 - DNA, 30 bp, Artificial Sequence
  Synthetic oligonucleotide
gattaccgtgccgtgctgaatcgaagttag

SEQ ID NO: 405854 - DNA, 30 bp, Artificial Sequence
  Synthetic oligonucleotide
tcggtctaatttcgaagcacctggagttag

SEQ ID NO: 405855 - DNA, 30 bp, Artificial Sequence
  Synthetic oligonucleotide
acttgtttaatctgttggtcgtatagttag

SEQ ID NO: 405856 - DNA, 30 bp, Artificial Sequence
  Synthetic oligonucleotide
taggtggaaccttcgttattctctagttag

SEQ ID NO: 405857 - DNA, 30 bp, Artificial Sequence
  Synthetic oligonucleotide
cgttataacgtcgaatgaaactgacgttag

SEQ ID NO: 405858 - DNA, 30 bp, Artificial Sequence
  Synthetic oligonucleotide
acacggcttgtacaaaccacgcggcgttag

SEQ ID NO: 405859 - DNA, 30 bp, Artificial Sequence
  Synthetic oligonucleotide
tcaagcaagtaggtcggggctataggttag

SEQ ID NO: 405860 - DNA, 30 bp, Artificial Sequence
  Synthetic oligonucleotide
aatcggcgttaagggaagacggtcggttag

SEQ ID NO: 405861 - DNA, 30 bp, Artificial Sequence
  Synthetic oligonucleotide
cccatacccgctgctgtattttggggttag

SEQ ID NO: 405862 - DNA, 30 bp, Artificial Sequence
  Synthetic oligonucleotide
tgggagcagcgacgtaacagaatgggttag

SEQ ID NO: 405863 - DNA, 30 bp, Artificial Sequence
  Synthetic oligonucleotide
gaagcttatctccggatgcgtgatggttag

SEQ ID NO: 405864 - DNA, 30 bp, Artificial Sequence
  Synthetic oligonucleotide
aaaacataagttcttcgacatactggttag

SEQ ID NO: 405865 - DNA, 30 bp, Artificial Sequence
  Synthetic oligonucleotide
cacgggccttaataggttcctcctggttag

SEQ ID NO: 405866 - DNA, 30 bp, Artificial Sequence
  Synthetic oligonucleotide
ttatggagaaagtacaaccacgctggttag

SEQ ID NO: 405867 - DNA, 30 bp, Artificial Sequence
  Synthetic oligonucleotide
cccgcgtcgaagtttggtaagagtggttag

SEQ ID NO: 405868 - DNA, 30 bp, Artificial Sequence
  Synthetic oligonucleotide
gctgaagcaacacaacgccacccatgttag

SEQ ID NO: 405869 - DNA, 30 bp, Artificial Sequence
  Synthetic oligonucleotide
ataactggtaggcacagctcgatatgttag

SEQ ID NO: 405870 - DNA, 30 bp, Artificial Sequence
  Synthetic oligonucleotide
ccgcgttcagtgctgcgacaaaactgttag

SEQ ID NO: 405871 - DNA, 30 bp, Artificial Sequence
  Synthetic oligonucleotide
atacattccgatttttaacctctttgttag

SEQ ID NO: 405872 - DNA, 30 bp, Artificial Sequence
  Synthetic oligonucleotide
gtttctggcgcgggatgaatatgaatttag

SEQ ID NO: 405873 - DNA, 30 bp, Artificial Sequence
  Synthetic oligonucleotide
tgtgcagcgacgagttgatcaaacatttag

SEQ ID NO: 405874 - DNA, 31 bp, Artificial Sequence
  Synthetic oligonucleotide
tctcgaaggcaattgcgcacggagcatttag

SEQ ID NO: 405875 - DNA, 30 bp, Artificial Sequence
  Synthetic oligonucleotide
gttctcggtctgtatgaacatagcatttag

SEQ ID NO: 405876 - DNA, 30 bp, Artificial Sequence
  Synthetic oligonucleotide
ttgagtatatattattgtctggtcatttag

SEQ ID NO: 405877 - DNA, 30 bp, Artificial Sequence
  Synthetic oligonucleotide
ttgaacccccacggttatgggtcgatttag

SEQ ID NO: 405878 - DNA, 30 bp, Artificial Sequence
  Synthetic oligonucleotide
ttatttgaccgactcaaaaacggtatttag

SEQ ID NO: 405879 - DNA, 30 bp, Artificial Sequence
  Synthetic oligonucleotide
actctttcgtcgtactacttggttatttag

SEQ ID NO: 405880 - DNA, 30 bp, Artificial Sequence
  Synthetic oligonucleotide
tttcgaacttgggcttttttcctactttag

SEQ ID NO: 405881 - DNA, 30 bp, Artificial Sequence
  Synthetic oligonucleotide
ccttatttcccttacagtgacaacctttag

SEQ ID NO: 405882 - DNA, 30 bp, Artificial Sequence
  Synthetic oligonucleotide
agacaatcgaaataccgtacttacctttag

SEQ ID NO: 405883 - DNA, 30 bp, Artificial Sequence
  Synthetic oligonucleotide
tgtcgtctattggctcggtccttcctttag

SEQ ID NO: 405884 - DNA, 30 bp, Artificial Sequence
  Synthetic oligonucleotide
cgaccgggtcattaccattagaatctttag

SEQ ID NO: 405885 - DNA, 30 bp, Artificial Sequence
  Synthetic oligonucleotide
atcaacatccaatgtatcagtcttctttag

SEQ ID NO: 405886 - DNA, 30 bp, Artificial Sequence
  Synthetic oligonucleotide
gcaagtaattatgtaacataagaagtttag

SEQ ID NO: 405887 - DNA, 30 bp, Artificial Sequence
  Synthetic oligonucleotide
gtgcccccgcatcgggcgtacggagtttag

SEQ ID NO: 405888 - DNA, 30 bp, Artificial Sequence
  Synthetic oligonucleotide
ggaactatttacaagcaaggactagtttag

SEQ ID NO: 405889 - DNA, 30 bp, Artificial Sequence
  Synthetic oligonucleotide
gcattacggctggaccttggctccgtttag

SEQ ID NO: 405890 - DNA, 30 bp, Artificial Sequence
  Synthetic oligonucleotide
attcggctacagatcgttaacggcgtttag

SEQ ID NO: 405891 - DNA, 30 bp, Artificial Sequence
  Synthetic oligonucleotide
ttgggacagcacaaagtcaattaggtttag

SEQ ID NO: 405892 - DNA, 30 bp, Artificial Sequence
  Synthetic oligonucleotide
cgaataattgacgcaatcctaccggtttag

SEQ ID NO: 405893 - DNA, 30 bp, Artificial Sequence
  Synthetic oligonucleotide
gcgtatagcgtatgcccagtacgggtttag

SEQ ID NO: 405894 - DNA, 30 bp, Artificial Sequence
  Synthetic oligonucleotide
tctggtgacacggcctcacaggatgtttag

SEQ ID NO: 405895 - DNA, 30 bp, Artificial Sequence
  Synthetic oligonucleotide
cttagtatcccattcgaccgggatgtttag

SEQ ID NO: 405896 - DNA, 30 bp, Artificial Sequence
  Synthetic oligonucleotide
cccgttgctagcttatagtatgatgtttag

SEQ ID NO: 405897 - DNA, 30 bp, Artificial Sequence
  Synthetic oligonucleotide
tctctgaagcgcgggaggtggactgtttag

SEQ ID NO: 405898 - DNA, 30 bp, Artificial Sequence
  Synthetic oligonucleotide
gagtctctggagtgagcagattgtgtttag

SEQ ID NO: 405899 - DNA, 30 bp, Artificial Sequence
  Synthetic oligonucleotide
tacaaattgcaggatgacatttaattttag

SEQ ID NO: 405900 - DNA, 30 bp, Artificial Sequence
  Synthetic oligonucleotide
aggaatttgctgaatgttcgcaacttttag

SEQ ID NO: 405901 - DNA, 30 bp, Artificial Sequence
  Synthetic oligonucleotide
actagccagttcaacggtaagaggttttag

SEQ ID NO: 405902 - DNA, 30 bp, Artificial Sequence
  Synthetic oligonucleotide
atatttatgagataaccagtgctgttttag

SEQ ID NO: 405903 - DNA, 30 bp, Artificial Sequence
  Synthetic oligonucleotide
acgcgtgtttggtgatagagtgatttttag

SEQ ID NO: 405904 - DNA, 30 bp, Artificial Sequence
  Synthetic oligonucleotide
tcccgtcgatacatgcccagatatttttag

SEQ ID NO: 405905 - DNA, 30 bp, Artificial Sequence
  Synthetic oligonucleotide
ttaggcctggttggattccgatatttttag

SEQ ID NO: 405906 - DNA, 30 bp, Artificial Sequence
  Synthetic oligonucleotide
tatcagtacatatagtagaaagttttttag

SEQ ID NO: 405907 - DNA, 30 bp, Artificial Sequence
  Synthetic oligonucleotide
gtccttttcgctgttttgcgtccaaaaacg

SEQ ID NO: 405908 - DNA, 30 bp, Artificial Sequence
  Synthetic oligonucleotide
tacgcgtttttagggtgcgagctaaaaacg

SEQ ID NO: 405909 - DNA, 30 bp, Artificial Sequence
  Synthetic oligonucleotide
ctttatgcaggagtagaccgaaccaaaacg

SEQ ID NO: 405910 - DNA, 30 bp, Artificial Sequence
  Synthetic oligonucleotide
tattatgggactaagatgggctctaaaacg

SEQ ID NO: 405911 - DNA, 30 bp, Artificial Sequence
  Synthetic oligonucleotide
gacttgcccattaatgccgccaaacaaacg

SEQ ID NO: 405912 - DNA, 30 bp, Artificial Sequence
  Synthetic oligonucleotide
gttaatcggtacgcgacctttttacaaacg

SEQ ID NO: 405913 - DNA, 30 bp, Artificial Sequence
  Synthetic oligonucleotide
gtatacgttttctgctgcatatctcaaacg

SEQ ID NO: 405914 - DNA, 30 bp, Artificial Sequence
  Synthetic oligonucleotide
cccctgttacaaaatacctgcgttcaaacg

SEQ ID NO: 405915 - DNA, 30 bp, Artificial Sequence
  Synthetic oligonucleotide
gggcgagtgggcacgcacgcccaagaaacg

SEQ ID NO: 405916 - DNA, 30 bp, Artificial Sequence
  Synthetic oligonucleotide
agatattgtcctccttcagcaacagaaacg

SEQ ID NO: 405917 - DNA, 30 bp, Artificial Sequence
  Synthetic oligonucleotide
gtcgactttagggtagacaccccggaaacg

SEQ ID NO: 405918 - DNA, 30 bp, Artificial Sequence
  Synthetic oligonucleotide
cgtagttgaactttttgtaaatgtgaaacg

SEQ ID NO: 405919 - DNA, 30 bp, Artificial Sequence
  Synthetic oligonucleotide
cagtttgtcaatgatatgattaaataaacg

SEQ ID NO: 405920 - DNA, 31 bp, Artificial Sequence
  Synthetic oligonucleotide
tcttatagaggctacttgtctgcaataaacg

SEQ ID NO: 405921 - DNA, 30 bp, Artificial Sequence
  Synthetic oligonucleotide
acgcacggccggctctagcacgcataaacg

SEQ ID NO: 405922 - DNA, 30 bp, Artificial Sequence
  Synthetic oligonucleotide
cttctaggatatgcccgttatagataaacg

SEQ ID NO: 405923 - DNA, 30 bp, Artificial Sequence
  Synthetic oligonucleotide
atctacagaccagaccatacggtataaacg

SEQ ID NO: 405924 - DNA, 29 bp, Artificial Sequence
  Synthetic oligonucleotide
tttttccgtgaagaacttgtaagtaaacg

SEQ ID NO: 405925 - DNA, 30 bp, Artificial Sequence
  Synthetic oligonucleotide
cttggctggcatctattctcatggtaaacg

SEQ ID NO: 405926 - DNA, 30 bp, Artificial Sequence
  Synthetic oligonucleotide
cagttaagcgtagcacgctggtcttaaacg

SEQ ID NO: 405927 - DNA, 30 bp, Artificial Sequence
  Synthetic oligonucleotide
tagttgtggatacgcgacggcgccacaacg

SEQ ID NO: 405928 - DNA, 30 bp, Artificial Sequence
  Synthetic oligonucleotide
gactcgtccttgtccttagtgtgcacaacg

SEQ ID NO: 405929 - DNA, 30 bp, Artificial Sequence
  Synthetic oligonucleotide
gtttccgggtattccgaattgatcacaacg

SEQ ID NO: 405930 - DNA, 30 bp, Artificial Sequence
  Synthetic oligonucleotide
tggcctgccacatgcccttaatggacaacg

SEQ ID NO: 405931 - DNA, 30 bp, Artificial Sequence
  Synthetic oligonucleotide
aaatataatcgcgtgggctacggtacaacg

SEQ ID NO: 405932 - DNA, 30 bp, Artificial Sequence
  Synthetic oligonucleotide
ctattcactcccggaatgatgaaagcaacg

SEQ ID NO: 405933 - DNA, 30 bp, Artificial Sequence
  Synthetic oligonucleotide
gtcgagtgtcaggtatctctgcaagcaacg

SEQ ID NO: 405934 - DNA, 30 bp, Artificial Sequence
  Synthetic oligonucleotide
agtaacattaggaatgcgtccagcgcaacg

SEQ ID NO: 405935 - DNA, 30 bp, Artificial Sequence
  Synthetic oligonucleotide
gaggcgggaagttctgattagagcgcaacg

SEQ ID NO: 405936 - DNA, 30 bp, Artificial Sequence
  Synthetic oligonucleotide
cgctacgtcggccgaatcccgtgatcaacg

SEQ ID NO: 405937 - DNA, 30 bp, Artificial Sequence
  Synthetic oligonucleotide
agctcatacgcatggcgcggtgcctcaacg

SEQ ID NO: 405938 - DNA, 30 bp, Artificial Sequence
  Synthetic oligonucleotide
gtaatccgttaaccgataaaaatgtcaacg

SEQ ID NO: 405939 - DNA, 30 bp, Artificial Sequence
  Synthetic oligonucleotide
acacggtttccatacgactctgcttcaacg

SEQ ID NO: 405940 - DNA, 30 bp, Artificial Sequence
  Synthetic oligonucleotide
gaaaaacttccaccgcgagctatttcaacg

SEQ ID NO: 405941 - DNA, 30 bp, Artificial Sequence
  Synthetic oligonucleotide
aaatatcgtggcccagtcctggtttcaacg

SEQ ID NO: 405942 - DNA, 30 bp, Artificial Sequence
  Synthetic oligonucleotide
tggtgtaacctctttcgcagtagaagaacg

SEQ ID NO: 405943 - DNA, 30 bp, Artificial Sequence
  Synthetic oligonucleotide
tagttactctgacataatccttgaagaacg

SEQ ID NO: 405944 - DNA, 30 bp, Artificial Sequence
  Synthetic oligonucleotide
agttccgaacgtgtgtggttcgtcagaacg

SEQ ID NO: 405945 - DNA, 30 bp, Artificial Sequence
  Synthetic oligonucleotide
aaccacacacacgtactttatcagagaacg

SEQ ID NO: 405946 - DNA, 30 bp, Artificial Sequence
  Synthetic oligonucleotide
agtatagtcgccgagcacctagtgagaacg

SEQ ID NO: 405947 - DNA, 30 bp, Artificial Sequence
  Synthetic oligonucleotide
agacaactctcggagccttattgtagaacg

SEQ ID NO: 405948 - DNA, 30 bp, Artificial Sequence
  Synthetic oligonucleotide
attcggagcaccaaaggccccgcacgaacg

SEQ ID NO: 405949 - DNA, 30 bp, Artificial Sequence
  Synthetic oligonucleotide
gcgatcccgctcatcgaggatactcgaacg

SEQ ID NO: 405950 - DNA, 30 bp, Artificial Sequence
  Synthetic oligonucleotide
aagaacgctggttagcacggcagtcgaacg

SEQ ID NO: 405951 - DNA, 30 bp, Artificial Sequence
  Synthetic oligonucleotide
gttaatgtgcaaggactctggtgtcgaacg

SEQ ID NO: 405952 - DNA, 30 bp, Artificial Sequence
  Synthetic oligonucleotide
gcctatactcatatattcgtgagaggaacg

SEQ ID NO: 405953 - DNA, 30 bp, Artificial Sequence
  Synthetic oligonucleotide
ctccgtgctacatactccagtgtaggaacg

SEQ ID NO: 405954 - DNA, 30 bp, Artificial Sequence
  Synthetic oligonucleotide
cggccccacctgggggcaaggaccggaacg

SEQ ID NO: 405955 - DNA, 30 bp, Artificial Sequence
  Synthetic oligonucleotide
ggtaaactgttgaagctctcacggggaacg

SEQ ID NO: 405956 - DNA, 30 bp, Artificial Sequence
  Synthetic oligonucleotide
ccgccttgtttatcttgttctccatgaacg

SEQ ID NO: 405957 - DNA, 30 bp, Artificial Sequence
  Synthetic oligonucleotide
aaattgttgttcgatgaagtggactgaacg

SEQ ID NO: 405958 - DNA, 30 bp, Artificial Sequence
  Synthetic oligonucleotide
cactcaatattaggggtagatttctgaacg

SEQ ID NO: 405959 - DNA, 30 bp, Artificial Sequence
  Synthetic oligonucleotide
tgaaagaatccgctccgtactttctgaacg

SEQ ID NO: 405960 - DNA, 30 bp, Artificial Sequence
  Synthetic oligonucleotide
tgaaaggcagatgcggcatttgattgaacg

SEQ ID NO: 405961 - DNA, 30 bp, Artificial Sequence
  Synthetic oligonucleotide
aagattcgttatgttacgcgacaaataacg

SEQ ID NO: 405962 - DNA, 30 bp, Artificial Sequence
  Synthetic oligonucleotide
ttctaaggatacatgatccagttaataacg

SEQ ID NO: 405963 - DNA, 30 bp, Artificial Sequence
  Synthetic oligonucleotide
gtatagtacccaatcctggaccgcataacg

SEQ ID NO: 405964 - DNA, 30 bp, Artificial Sequence
  Synthetic oligonucleotide
ccggtacccgtaagttaacggcgcataacg

SEQ ID NO: 405965 - DNA, 30 bp, Artificial Sequence
  Synthetic oligonucleotide
tttaggtgatccccgcacgaaattataacg

SEQ ID NO: 405966 - DNA, 30 bp, Artificial Sequence
  Synthetic oligonucleotide
taattcgtctcgggtcttaagattataacg

SEQ ID NO: 405967 - DNA, 30 bp, Artificial Sequence
  Synthetic oligonucleotide
atcgtgcgccactttacataggttataacg

SEQ ID NO: 405968 - DNA, 30 bp, Artificial Sequence
  Synthetic oligonucleotide
acaacgccggcgcctatacaatttataacg

SEQ ID NO: 405969 - DNA, 30 bp, Artificial Sequence
  Synthetic oligonucleotide
ttttgcgtgaattatagtttgctactaacg

SEQ ID NO: 405970 - DNA, 30 bp, Artificial Sequence
  Synthetic oligonucleotide
tacccggattaaggcacgcctatcctaacg

SEQ ID NO: 405971 - DNA, 30 bp, Artificial Sequence
  Synthetic oligonucleotide
tgacctgacacatcaagtgatactctaacg

SEQ ID NO: 405972 - DNA, 30 bp, Artificial Sequence
  Synthetic oligonucleotide
aagcattgcggtcacgcgggtcgtctaacg

SEQ ID NO: 405973 - DNA, 30 bp, Artificial Sequence
  Synthetic oligonucleotide
tgtcacagttacctgtatgtgtgtctaacg

SEQ ID NO: 405974 - DNA, 30 bp, Artificial Sequence
  Synthetic oligonucleotide
ataacctggccttcgagttactttctaacg

SEQ ID NO: 405975 - DNA, 30 bp, Artificial Sequence
  Synthetic oligonucleotide
cttagcgtacattcggtatacgccgtaacg

SEQ ID NO: 405976 - DNA, 30 bp, Artificial Sequence
  Synthetic oligonucleotide
attatggaccggcaaatggtataggtaacg

SEQ ID NO: 405977 - DNA, 30 bp, Artificial Sequence
  Synthetic oligonucleotide
actaccaggaaaagctcccgttaggtaacg

SEQ ID NO: 405978 - DNA, 30 bp, Artificial Sequence
  Synthetic oligonucleotide
ggttaacgggctctatcataagcattaacg

SEQ ID NO: 405979 - DNA, 30 bp, Artificial Sequence
  Synthetic oligonucleotide
actgatgcatggtgttattgaaccttaacg

SEQ ID NO: 405980 - DNA, 30 bp, Artificial Sequence
  Synthetic oligonucleotide
catctcgcgtcttgggctggtagaaacacg

SEQ ID NO: 405981 - DNA, 30 bp, Artificial Sequence
  Synthetic oligonucleotide
gcggacgaacggctttttatctaacacacg

SEQ ID NO: 405982 - DNA, 30 bp, Artificial Sequence
  Synthetic oligonucleotide
gagttgaagacggttgcagtgacccacacg

SEQ ID NO: 405983 - DNA, 30 bp, Artificial Sequence
  Synthetic oligonucleotide
atctggcagagttggtaaaggctccacacg

SEQ ID NO: 405984 - DNA, 30 bp, Artificial Sequence
  Synthetic oligonucleotide
acctagcagggtccaaattaatgagacacg

SEQ ID NO: 405985 - DNA, 30 bp, Artificial Sequence
  Synthetic oligonucleotide
acgttaaaatcgtgcctatacaaggacacg

SEQ ID NO: 405986 - DNA, 30 bp, Artificial Sequence
  Synthetic oligonucleotide
tgcgtagattttggtatccggatctacacg

SEQ ID NO: 405987 - DNA, 30 bp, Artificial Sequence
  Synthetic oligonucleotide
ctagttccgtgtggcgtttgatcgtacacg

SEQ ID NO: 405988 - DNA, 30 bp, Artificial Sequence
  Synthetic oligonucleotide
taattgtagtgaggatgtgtgttttacacg

SEQ ID NO: 405989 - DNA, 30 bp, Artificial Sequence
  Synthetic oligonucleotide
tgtttaaaatgtacctcacttttttacacg

SEQ ID NO: 405990 - DNA, 30 bp, Artificial Sequence
  Synthetic oligonucleotide
caactactttccgtggtcatctgaaccacg

SEQ ID NO: 405991 - DNA, 30 bp, Artificial Sequence
  Synthetic oligonucleotide
gcaaagtttgtgaataacaaccggaccacg

SEQ ID NO: 405992 - DNA, 30 bp, Artificial Sequence
  Synthetic oligonucleotide
gcgactgggcttgcaaataacctgaccacg

SEQ ID NO: 405993 - DNA, 30 bp, Artificial Sequence
  Synthetic oligonucleotide
gacattagcgcgctaatatatattaccacg

SEQ ID NO: 405994 - DNA, 30 bp, Artificial Sequence
  Synthetic oligonucleotide
tcatattgggtctgttaggagcttaccacg

SEQ ID NO: 405995 - DNA, 30 bp, Artificial Sequence
  Synthetic oligonucleotide
tgcattggagataagacttgctcacccacg

SEQ ID NO: 405996 - DNA, 30 bp, Artificial Sequence
  Synthetic oligonucleotide
actagcgactgccgcaagcgtctacccacg

SEQ ID NO: 405997 - DNA, 30 bp, Artificial Sequence
  Synthetic oligonucleotide
gtcaacgtgaattacgtcctctaccccacg

SEQ ID NO: 405998 - DNA, 30 bp, Artificial Sequence
  Synthetic oligonucleotide
gctcctcgcacgagtacaggcttccccacg

SEQ ID NO: 405999 - DNA, 30 bp, Artificial Sequence
  Synthetic oligonucleotide
tctgactttattcgacaccagtggcccacg

SEQ ID NO: 406000 - DNA, 30 bp, Artificial Sequence
  Synthetic oligonucleotide
gtgcgccatccttacgcgcaaactcccacg

SEQ ID NO: 406001 - DNA, 30 bp, Artificial Sequence
  Synthetic oligonucleotide
ggactttcgaatgctgatataaaagccacg

SEQ ID NO: 406002 - DNA, 30 bp, Artificial Sequence
  Synthetic oligonucleotide
ctatgtatagtttatcatggcaaagccacg

SEQ ID NO: 406003 - DNA, 30 bp, Artificial Sequence
  Synthetic oligonucleotide
tttagcgtatgatacaattaccgtgccacg

SEQ ID NO: 406004 - DNA, 30 bp, Artificial Sequence
  Synthetic oligonucleotide
ttctaacgcggtatcgaggacagatccacg

SEQ ID NO: 406005 - DNA, 30 bp, Artificial Sequence
  Synthetic oligonucleotide
cgcagacttcacgttctttaggcctccacg

SEQ ID NO: 406006 - DNA, 30 bp, Artificial Sequence
  Synthetic oligonucleotide
gctggaatgcataccacgaggtgctccacg

SEQ ID NO: 406007 - DNA, 30 bp, Artificial Sequence
  Synthetic oligonucleotide
ggaccagggaagttttcccatacgtccacg

SEQ ID NO: 406008 - DNA, 30 bp, Artificial Sequence
  Synthetic oligonucleotide
ccgaatgccttgtgtatatggcaaagcacg

SEQ ID NO: 406009 - DNA, 30 bp, Artificial Sequence
  Synthetic oligonucleotide
aatctggccaagttcaccgacttgagcacg

SEQ ID NO: 406010 - DNA, 30 bp, Artificial Sequence
  Synthetic oligonucleotide
acttgctaatgtgatccgtaaacacgcacg

SEQ ID NO: 406011 - DNA, 30 bp, Artificial Sequence
  Synthetic oligonucleotide
agcctagtttatcgccaattcccacgcacg

SEQ ID NO: 406012 - DNA, 30 bp, Artificial Sequence
  Synthetic oligonucleotide
tagaaccagtaagctatttaacgacgcacg

SEQ ID NO: 406013 - DNA, 30 bp, Artificial Sequence
  Synthetic oligonucleotide
tccagcttgtcacggagcgtgaatcgcacg

SEQ ID NO: 406014 - DNA, 30 bp, Artificial Sequence
  Synthetic oligonucleotide
ctggtgttactaccagttattctaggcacg

SEQ ID NO: 406015 - DNA, 30 bp, Artificial Sequence
  Synthetic oligonucleotide
acggtacgtgtgcagacgggctacggcacg

SEQ ID NO: 406016 - DNA, 30 bp, Artificial Sequence
  Synthetic oligonucleotide
catggcaccctctaggtacaatgcggcacg

SEQ ID NO: 406017 - DNA, 30 bp, Artificial Sequence
  Synthetic oligonucleotide
tggttaggctttaggctgtacgtgggcacg

SEQ ID NO: 406018 - DNA, 30 bp, Artificial Sequence
  Synthetic oligonucleotide
cagggcgactttagtcgtatgcgatgcacg

SEQ ID NO: 406019 - DNA, 30 bp, Artificial Sequence
  Synthetic oligonucleotide
aagcatgtacaaaaaaaaatgtactgcacg

SEQ ID NO: 406020 - DNA, 30 bp, Artificial Sequence
  Synthetic oligonucleotide
actcccctttgatgagagtgctcaatcacg

SEQ ID NO: 406021 - DNA, 30 bp, Artificial Sequence
  Synthetic oligonucleotide
cacttgcattggctgcagtggtgaatcacg

SEQ ID NO: 406022 - DNA, 30 bp, Artificial Sequence
  Synthetic oligonucleotide
taggccctacaatgcataacaataatcacg

SEQ ID NO: 406023 - DNA, 30 bp, Artificial Sequence
  Synthetic oligonucleotide
taaatccctagagaggtaggcggcatcacg

SEQ ID NO: 406024 - DNA, 30 bp, Artificial Sequence
  Synthetic oligonucleotide
agcttgctagaccctggcgagctcatcacg

SEQ ID NO: 406025 - DNA, 30 bp, Artificial Sequence
  Synthetic oligonucleotide
gctggtcgcgctcttatataatagatcacg

SEQ ID NO: 406026 - DNA, 30 bp, Artificial Sequence
  Synthetic oligonucleotide
ttttgggttggactaaggtaaacgctcacg

SEQ ID NO: 406027 - DNA, 30 bp, Artificial Sequence
  Synthetic oligonucleotide
taagttataattgtcgaccactcgctcacg

SEQ ID NO: 406028 - DNA, 30 bp, Artificial Sequence
  Synthetic oligonucleotide
agaatctgggtcagtcaagcagcagtcacg

SEQ ID NO: 406029 - DNA, 30 bp, Artificial Sequence
  Synthetic oligonucleotide
tcgccgctaacacagcagagactcgtcacg

SEQ ID NO: 406030 - DNA, 30 bp, Artificial Sequence
  Synthetic oligonucleotide
atatgcggagatttcctcccatttgtcacg

SEQ ID NO: 406031 - DNA, 30 bp, Artificial Sequence
  Synthetic oligonucleotide
attcaattcctctcatatgtacacttcacg

SEQ ID NO: 406032 - DNA, 30 bp, Artificial Sequence
  Synthetic oligonucleotide
gcttttatcgagtgtgcttggagtttcacg

SEQ ID NO: 406033 - DNA, 30 bp, Artificial Sequence
  Synthetic oligonucleotide
tcgctattgcccttgtcccagcgtttcacg

SEQ ID NO: 406034 - DNA, 30 bp, Artificial Sequence
  Synthetic oligonucleotide
gtggcatgatgattggtctgggttttcacg

SEQ ID NO: 406035 - DNA, 30 bp, Artificial Sequence
  Synthetic oligonucleotide
tctaggttccgtgagtgcatcaacaagacg

SEQ ID NO: 406036 - DNA, 30 bp, Artificial Sequence
  Synthetic oligonucleotide
aaacacagttgtccatctagagggaagacg

SEQ ID NO: 406037 - DNA, 30 bp, Artificial Sequence
  Synthetic oligonucleotide
gacaaacagcgaggcatcaagggacagacg

SEQ ID NO: 406038 - DNA, 30 bp, Artificial Sequence
  Synthetic oligonucleotide
tacattcctctccccggagatgatcagacg

SEQ ID NO: 406039 - DNA, 30 bp, Artificial Sequence
  Synthetic oligonucleotide
ctgctacgaatgccaaattcgtgtcagacg

SEQ ID NO: 406040 - DNA, 30 bp, Artificial Sequence
  Synthetic oligonucleotide
tttgagagctcgagcaacccacaagagacg

SEQ ID NO: 406041 - DNA, 30 bp, Artificial Sequence
  Synthetic oligonucleotide
agtatcctttaaaattgggccgaagagacg

SEQ ID NO: 406042 - DNA, 30 bp, Artificial Sequence
  Synthetic oligonucleotide
taacatgggacgccggttcttgaggagacg

SEQ ID NO: 406043 - DNA, 30 bp, Artificial Sequence
  Synthetic oligonucleotide
aattaaatcggaaaaccttcgaatgagacg

SEQ ID NO: 406044 - DNA, 30 bp, Artificial Sequence
  Synthetic oligonucleotide
cgccgatatcggctacccacgggtgagacg

SEQ ID NO: 406045 - DNA, 30 bp, Artificial Sequence
  Synthetic oligonucleotide
caggtcaaatataggaacatttttgagacg

SEQ ID NO: 406046 - DNA, 30 bp, Artificial Sequence
  Synthetic oligonucleotide
atctgccatcgagtggcttgtcaatagacg

SEQ ID NO: 406047 - DNA, 30 bp, Artificial Sequence
  Synthetic oligonucleotide
cctaacctcagaggtagagagacatagacg

SEQ ID NO: 406048 - DNA, 30 bp, Artificial Sequence
  Synthetic oligonucleotide
ctgacaaacggattatttcagcgatagacg

SEQ ID NO: 406049 - DNA, 30 bp, Artificial Sequence
  Synthetic oligonucleotide
ggaggtcatccgcccgggggtatatagacg

SEQ ID NO: 406050 - DNA, 30 bp, Artificial Sequence
  Synthetic oligonucleotide
catccaaacggtaatgcggtgcactagacg

SEQ ID NO: 406051 - DNA, 30 bp, Artificial Sequence
  Synthetic oligonucleotide
ttagccaatattgaagtccgcagctagacg

SEQ ID NO: 406052 - DNA, 30 bp, Artificial Sequence
  Synthetic oligonucleotide
cattctatctaaagcactatctagtagacg

SEQ ID NO: 406053 - DNA, 30 bp, Artificial Sequence
  Synthetic oligonucleotide
ggccaagaacacggtgaggtcgattagacg

SEQ ID NO: 406054 - DNA, 30 bp, Artificial Sequence
  Synthetic oligonucleotide
cacgtttgccctacagttttcccttagacg

SEQ ID NO: 406055 - DNA, 30 bp, Artificial Sequence
  Synthetic oligonucleotide
ctggtggaaagtcagtcataaggttagacg

SEQ ID NO: 406056 - DNA, 30 bp, Artificial Sequence
  Synthetic oligonucleotide
caacgttacgagcgtttgggttaaacgacg

SEQ ID NO: 406057 - DNA, 30 bp, Artificial Sequence
  Synthetic oligonucleotide
ttcgtggttctatatatcaaaaacacgacg

SEQ ID NO: 406058 - DNA, 30 bp, Artificial Sequence
  Synthetic oligonucleotide
gagaggttctcagtactatcactcacgacg

SEQ ID NO: 406059 - DNA, 30 bp, Artificial Sequence
  Synthetic oligonucleotide
gctgctacgagtatattatcaatgacgacg

SEQ ID NO: 406060 - DNA, 30 bp, Artificial Sequence
  Synthetic oligonucleotide
tcccagtgatagtcgcccgcttgtacgacg

SEQ ID NO: 406061 - DNA, 30 bp, Artificial Sequence
  Synthetic oligonucleotide
gtctattgagatttggcaagatagccgacg

SEQ ID NO: 406062 - DNA, 30 bp, Artificial Sequence
  Synthetic oligonucleotide
aatgactgggcattatatcgagatccgacg

SEQ ID NO: 406063 - DNA, 30 bp, Artificial Sequence
  Synthetic oligonucleotide
atgaaaggagggggtatccgcgatccgacg

SEQ ID NO: 406064 - DNA, 30 bp, Artificial Sequence
  Synthetic oligonucleotide
gtctacagccccacccttgatagtccgacg

SEQ ID NO: 406065 - DNA, 30 bp, Artificial Sequence
  Synthetic oligonucleotide
ggtcttgatcacacactgtaatgtccgacg

SEQ ID NO: 406066 - DNA, 30 bp, Artificial Sequence
  Synthetic oligonucleotide
aatctttcgtagcttaggatttaagcgacg

SEQ ID NO: 406067 - DNA, 30 bp, Artificial Sequence
  Synthetic oligonucleotide
gtcaaacatctgtctaaacccgtggcgacg

SEQ ID NO: 406068 - DNA, 30 bp, Artificial Sequence
  Synthetic oligonucleotide
gggaacaggtattaaaggtttggatcgacg

SEQ ID NO: 406069 - DNA, 30 bp, Artificial Sequence
  Synthetic oligonucleotide
tggggcaagtcagggtagtctctatcgacg

SEQ ID NO: 406070 - DNA, 30 bp, Artificial Sequence
  Synthetic oligonucleotide
aataaccgcggtaaatcaaaattctcgacg

SEQ ID NO: 406071 - DNA, 30 bp, Artificial Sequence
  Synthetic oligonucleotide
cgggcagtgagtatcatcttaacaaggacg

SEQ ID NO: 406072 - DNA, 30 bp, Artificial Sequence
  Synthetic oligonucleotide
gttttggatcgttctccgtgttcaaggacg

SEQ ID NO: 406073 - DNA, 30 bp, Artificial Sequence
  Synthetic oligonucleotide
ggaacttgctcagtttctataataaggacg

SEQ ID NO: 406074 - DNA, 30 bp, Artificial Sequence
  Synthetic oligonucleotide
ttgacgcaggttcgggccaaactaaggacg

SEQ ID NO: 406075 - DNA, 30 bp, Artificial Sequence
  Synthetic oligonucleotide
atctccggatctagatgcggagtaaggacg

SEQ ID NO: 406076 - DNA, 30 bp, Artificial Sequence
  Synthetic oligonucleotide
aagcgtattacatcattcggcttaaggacg

SEQ ID NO: 406077 - DNA, 30 bp, Artificial Sequence
  Synthetic oligonucleotide
cccccagtcatcagttccgggcataggacg

SEQ ID NO: 406078 - DNA, 30 bp, Artificial Sequence
  Synthetic oligonucleotide
caacaccggccgtctttaacacgacggacg

SEQ ID NO: 406079 - DNA, 30 bp, Artificial Sequence
  Synthetic oligonucleotide
ccttaaggccgtatcccatccgaccggacg

SEQ ID NO: 406080 - DNA, 30 bp, Artificial Sequence
  Synthetic oligonucleotide
gagtaataattattatcaacacagcggacg

SEQ ID NO: 406081 - DNA, 30 bp, Artificial Sequence
  Synthetic oligonucleotide
caatgatgctaatggctgtacattcggacg

SEQ ID NO: 406082 - DNA, 30 bp, Artificial Sequence
  Synthetic oligonucleotide
ctcgtccacgttcatcgactcaacgggacg

SEQ ID NO: 406083 - DNA, 30 bp, Artificial Sequence
  Synthetic oligonucleotide
gggcagcttataagctgtctgaccgggacg

SEQ ID NO: 406084 - DNA, 30 bp, Artificial Sequence
  Synthetic oligonucleotide
tgtccagatcgttcggttcgtctcgggacg

SEQ ID NO: 406085 - DNA, 30 bp, Artificial Sequence
  Synthetic oligonucleotide
tgctctcactcacggtaggctaaggggacg

SEQ ID NO: 406086 - DNA, 30 bp, Artificial Sequence
  Synthetic oligonucleotide
taatttcgacagcattgacgagatgggacg

SEQ ID NO: 406087 - DNA, 30 bp, Artificial Sequence
  Synthetic oligonucleotide
ttctaacaaggatcagttgtttctgggacg

SEQ ID NO: 406088 - DNA, 30 bp, Artificial Sequence
  Synthetic oligonucleotide
ccctacgtgggtcatgatgcacgtgggacg

SEQ ID NO: 406089 - DNA, 30 bp, Artificial Sequence
  Synthetic oligonucleotide
gtttgtgttgccatatgaaccacatggacg

SEQ ID NO: 406090 - DNA, 30 bp, Artificial Sequence
  Synthetic oligonucleotide
agttgcgatctataggacatggtatggacg

SEQ ID NO: 406091 - DNA, 30 bp, Artificial Sequence
  Synthetic oligonucleotide
atcggtcgaccctagattatagtctggacg

SEQ ID NO: 406092 - DNA, 30 bp, Artificial Sequence
  Synthetic oligonucleotide
cttggcgtatatttcgaatacgtctggacg

SEQ ID NO: 406093 - DNA, 30 bp, Artificial Sequence
  Synthetic oligonucleotide
tccttttgttgtcgagggccgtagtggacg

SEQ ID NO: 406094 - DNA, 30 bp, Artificial Sequence
  Synthetic oligonucleotide
gcaacatgccaattggggatctggtggacg

SEQ ID NO: 406095 - DNA, 30 bp, Artificial Sequence
  Synthetic oligonucleotide
atagctgatcgcaatccgatctattggacg

SEQ ID NO: 406096 - DNA, 30 bp, Artificial Sequence
  Synthetic oligonucleotide
gacgcttcatgtaaacaagcgtcttggacg

SEQ ID NO: 406097 - DNA, 30 bp, Artificial Sequence
  Synthetic oligonucleotide
actttaggataaccctttccaagttggacg

SEQ ID NO: 406098 - DNA, 30 bp, Artificial Sequence
  Synthetic oligonucleotide
aggctgaagctctaagctgtcggttggacg

SEQ ID NO: 406099 - DNA, 30 bp, Artificial Sequence
  Synthetic oligonucleotide
cgacgattgcatgaaacgtcggtttggacg

SEQ ID NO: 406100 - DNA, 30 bp, Artificial Sequence
  Synthetic oligonucleotide
taatcgtaacgcgttccaaccgtaatgacg

SEQ ID NO: 406101 - DNA, 30 bp, Artificial Sequence
  Synthetic oligonucleotide
attttaggtgagaagtcactttccatgacg

SEQ ID NO: 406102 - DNA, 30 bp, Artificial Sequence
  Synthetic oligonucleotide
tctaggggtgcacggcacctgctcatgacg

SEQ ID NO: 406103 - DNA, 30 bp, Artificial Sequence
  Synthetic oligonucleotide
aggctcctatatccattgcgtctcatgacg

SEQ ID NO: 406104 - DNA, 30 bp, Artificial Sequence
  Synthetic oligonucleotide
gcggcagtgccacggttatataagatgacg

SEQ ID NO: 406105 - DNA, 30 bp, Artificial Sequence
  Synthetic oligonucleotide
gaagccggacaaagcttggacgcgatgacg

SEQ ID NO: 406106 - DNA, 30 bp, Artificial Sequence
  Synthetic oligonucleotide
cgtcatttactgtgcttgtaatggatgacg

SEQ ID NO: 406107 - DNA, 30 bp, Artificial Sequence
  Synthetic oligonucleotide
cactactctttgtacttgagcctgatgacg

SEQ ID NO: 406108 - DNA, 30 bp, Artificial Sequence
  Synthetic oligonucleotide
gcgtagtatacagttaccgtcaatatgacg

SEQ ID NO: 406109 - DNA, 30 bp, Artificial Sequence
  Synthetic oligonucleotide
agcctatagagctgttctcgcgctatgacg

SEQ ID NO: 406110 - DNA, 30 bp, Artificial Sequence
  Synthetic oligonucleotide
acagcactgacaacaatatacgcactgacg

SEQ ID NO: 406111 - DNA, 30 bp, Artificial Sequence
  Synthetic oligonucleotide
caagtgcacaagtcgcacttaaacctgacg

SEQ ID NO: 406112 - DNA, 30 bp, Artificial Sequence
  Synthetic oligonucleotide
atttgaatcgcatgtttaaccaggctgacg

SEQ ID NO: 406113 - DNA, 30 bp, Artificial Sequence
  Synthetic oligonucleotide
tcacggtgcgggagagcatcgcggctgacg

SEQ ID NO: 406114 - DNA, 30 bp, Artificial Sequence
  Synthetic oligonucleotide
agagagtgctttctgctcagtatgctgacg

SEQ ID NO: 406115 - DNA, 30 bp, Artificial Sequence
  Synthetic oligonucleotide
tgcgagaacttaagttcgagtattctgacg

SEQ ID NO: 406116 - DNA, 30 bp, Artificial Sequence
  Synthetic oligonucleotide
cgggttcttccgttgaccgatcttctgacg

SEQ ID NO: 406117 - DNA, 30 bp, Artificial Sequence
  Synthetic oligonucleotide
tataatcgccggttcgtttccgcagtgacg

SEQ ID NO: 406118 - DNA, 30 bp, Artificial Sequence
  Synthetic oligonucleotide
ttaactgctgcaaaagccgaagtcgtgacg

SEQ ID NO: 406119 - DNA, 30 bp, Artificial Sequence
  Synthetic oligonucleotide
cccaacctttctggtttgagcatggtgacg

SEQ ID NO: 406120 - DNA, 30 bp, Artificial Sequence
  Synthetic oligonucleotide
cgctttgttgatccaccaccaagtgtgacg

SEQ ID NO: 406121 - DNA, 30 bp, Artificial Sequence
  Synthetic oligonucleotide
ttccgtgatgccggcagaggtcaattgacg

SEQ ID NO: 406122 - DNA, 30 bp, Artificial Sequence
  Synthetic oligonucleotide
acgtggttctctcccctacttcaattgacg

SEQ ID NO: 406123 - DNA, 30 bp, Artificial Sequence
  Synthetic oligonucleotide
accacccgatacagaccacgaacattgacg

SEQ ID NO: 406124 - DNA, 30 bp, Artificial Sequence
  Synthetic oligonucleotide
acgacctattagaaaatcgttgcaaatacg

SEQ ID NO: 406125 - DNA, 30 bp, Artificial Sequence
  Synthetic oligonucleotide
gacattttagtgcacaagcccagaaatacg

SEQ ID NO: 406126 - DNA, 30 bp, Artificial Sequence
  Synthetic oligonucleotide
ctcccttggcgtcatttctcaataaatacg

SEQ ID NO: 406127 - DNA, 30 bp, Artificial Sequence
  Synthetic oligonucleotide
cattttcggcgtgcggtgttccctaatacg

SEQ ID NO: 406128 - DNA, 30 bp, Artificial Sequence
  Synthetic oligonucleotide
ccggcgctcaacacatgtatgtgacatacg

SEQ ID NO: 406129 - DNA, 30 bp, Artificial Sequence
  Synthetic oligonucleotide
tccatcgtaggaggacgtagtgtacatacg

SEQ ID NO: 406130 - DNA, 30 bp, Artificial Sequence
  Synthetic oligonucleotide
cttgcctgtttgtgtagggcaccccatacg

SEQ ID NO: 406131 - DNA, 30 bp, Artificial Sequence
  Synthetic oligonucleotide
aaagaagaaaggcgctaagctttgcatacg

SEQ ID NO: 406132 - DNA, 30 bp, Artificial Sequence
  Synthetic oligonucleotide
aatgaaaacttgcagcagatgtatcatacg

SEQ ID NO: 406133 - DNA, 30 bp, Artificial Sequence
  Synthetic oligonucleotide
tcttattcgctttggcaatctgcagatacg

SEQ ID NO: 406134 - DNA, 30 bp, Artificial Sequence
  Synthetic oligonucleotide
gaggtggtaacggccacgtacctcgatacg

SEQ ID NO: 406135 - DNA, 30 bp, Artificial Sequence
  Synthetic oligonucleotide
tataatgagacggtcacattcacggatacg

SEQ ID NO: 406136 - DNA, 30 bp, Artificial Sequence
  Synthetic oligonucleotide
atgcttcggtggcccccgtaaccggatacg

SEQ ID NO: 406137 - DNA, 30 bp, Artificial Sequence
  Synthetic oligonucleotide
tcagggaacgtatttcagtttctggatacg

SEQ ID NO: 406138 - DNA, 30 bp, Artificial Sequence
  Synthetic oligonucleotide
cgatcgcgttccgaagcaaacgatgatacg

SEQ ID NO: 406139 - DNA, 30 bp, Artificial Sequence
  Synthetic oligonucleotide
catacaactatcgttttagcacctgatacg

SEQ ID NO: 406140 - DNA, 30 bp, Artificial Sequence
  Synthetic oligonucleotide
ttggacgttatggagacttaaagtgatacg

SEQ ID NO: 406141 - DNA, 30 bp, Artificial Sequence
  Synthetic oligonucleotide
tggttataaagatgatagtaaatatatacg

SEQ ID NO: 406142 - DNA, 30 bp, Artificial Sequence
  Synthetic oligonucleotide
ggagtccgcgatgggatagacgcgtatacg

SEQ ID NO: 406143 - DNA, 30 bp, Artificial Sequence
  Synthetic oligonucleotide
taatgtccagattgaactacgtcgtatacg

SEQ ID NO: 406144 - DNA, 30 bp, Artificial Sequence
  Synthetic oligonucleotide
gatcgactatggcgtttgtttacttatacg

SEQ ID NO: 406145 - DNA, 30 bp, Artificial Sequence
  Synthetic oligonucleotide
ggcgttattaaacgggtattaagttatacg

SEQ ID NO: 406146 - DNA, 30 bp, Artificial Sequence
  Synthetic oligonucleotide
tacccgtacccggtgtgctacctttatacg

SEQ ID NO: 406147 - DNA, 30 bp, Artificial Sequence
  Synthetic oligonucleotide
ggatggtcctcatacttcgtcgtttatacg

SEQ ID NO: 406148 - DNA, 30 bp, Artificial Sequence
  Synthetic oligonucleotide
acgtatagacctcatatacgcgtaactacg

SEQ ID NO: 406149 - DNA, 30 bp, Artificial Sequence
  Synthetic oligonucleotide
gaccgctaatagtgtcgcgttttgactacg

SEQ ID NO: 406150 - DNA, 30 bp, Artificial Sequence
  Synthetic oligonucleotide
tctggtccagtaattgactctggtactacg

SEQ ID NO: 406151 - DNA, 30 bp, Artificial Sequence
  Synthetic oligonucleotide
tgtcttaattctgacccccagtaacctacg

SEQ ID NO: 406152 - DNA, 30 bp, Artificial Sequence
  Synthetic oligonucleotide
catgcattgtcatggtagccgtgacctacg

SEQ ID NO: 406153 - DNA, 30 bp, Artificial Sequence
  Synthetic oligonucleotide
aaagggacgtttggcacctacttacctacg

SEQ ID NO: 406154 - DNA, 30 bp, Artificial Sequence
  Synthetic oligonucleotide
gagtatgttagccgatcgtaggtccctacg

SEQ ID NO: 406155 - DNA, 30 bp, Artificial Sequence
  Synthetic oligonucleotide
gtaggatactaattatgtgacgctcctacg

SEQ ID NO: 406156 - DNA, 30 bp, Artificial Sequence
  Synthetic oligonucleotide
gagttcgtccctgaaatgcgctctcctacg

SEQ ID NO: 406157 - DNA, 30 bp, Artificial Sequence
  Synthetic oligonucleotide
tgatgcagtgacacgggtccgtaagctacg

SEQ ID NO: 406158 - DNA, 30 bp, Artificial Sequence
  Synthetic oligonucleotide
ttgccaaacaggggtatacgcccagctacg

SEQ ID NO: 406159 - DNA, 30 bp, Artificial Sequence
  Synthetic oligonucleotide
gcggtactacactcgggagttggagctacg

SEQ ID NO: 406160 - DNA, 30 bp, Artificial Sequence
  Synthetic oligonucleotide
aggtttctggatagccctctgcgcgctacg

SEQ ID NO: 406161 - DNA, 30 bp, Artificial Sequence
  Synthetic oligonucleotide
gcaatattcgacgggggattaggggctacg

SEQ ID NO: 406162 - DNA, 30 bp, Artificial Sequence
  Synthetic oligonucleotide
aacgtagaaacagtagtaccttgtgctacg

SEQ ID NO: 406163 - DNA, 30 bp, Artificial Sequence
  Synthetic oligonucleotide
tactaggcagatacgaaggatcttgctacg

SEQ ID NO: 406164 - DNA, 30 bp, Artificial Sequence
  Synthetic oligonucleotide
ttcagtgtttaagcaattggggggtctacg

SEQ ID NO: 406165 - DNA, 30 bp, Artificial Sequence
  Synthetic oligonucleotide
tacaatcttcggcgaacgccctcttctacg

SEQ ID NO: 406166 - DNA, 30 bp, Artificial Sequence
  Synthetic oligonucleotide
gcctctttctttgagagctgtagttctacg

SEQ ID NO: 406167 - DNA, 30 bp, Artificial Sequence
  Synthetic oligonucleotide
ttttaaactagccaataaagccacagtacg

SEQ ID NO: 406168 - DNA, 30 bp, Artificial Sequence
  Synthetic oligonucleotide
caattagaaacctacccgcgccgcagtacg

SEQ ID NO: 406169 - DNA, 30 bp, Artificial Sequence
  Synthetic oligonucleotide
aatgatggccttgtaaagtgggtcagtacg

SEQ ID NO: 406170 - DNA, 30 bp, Artificial Sequence
  Synthetic oligonucleotide
ggtatgatttcctgagtcttatcgagtacg

SEQ ID NO: 406171 - DNA, 30 bp, Artificial Sequence
  Synthetic oligonucleotide
gatccccataacgcccgatctgatagtacg

SEQ ID NO: 406172 - DNA, 30 bp, Artificial Sequence
  Synthetic oligonucleotide
cccccgatccagatgtccaatattagtacg

SEQ ID NO: 406173 - DNA, 30 bp, Artificial Sequence
  Synthetic oligonucleotide
ctttctagttggcatctaggttaccgtacg

SEQ ID NO: 406174 - DNA, 30 bp, Artificial Sequence
  Synthetic oligonucleotide
gctcacacattacgtgctgtttgccgtacg

SEQ ID NO: 406175 - DNA, 30 bp, Artificial Sequence
  Synthetic oligonucleotide
tcgtattttgtaaaagcgccaatccgtacg

SEQ ID NO: 406176 - DNA, 30 bp, Artificial Sequence
  Synthetic oligonucleotide
gtactaagttttatgtaatgacagcgtacg

SEQ ID NO: 406177 - DNA, 30 bp, Artificial Sequence
  Synthetic oligonucleotide
gactgtaaagaagagatgtcatggcgtacg

SEQ ID NO: 406178 - DNA, 30 bp, Artificial Sequence
  Synthetic oligonucleotide
cgtagcacattaatccgatagcgtcgtacg

SEQ ID NO: 406179 - DNA, 30 bp, Artificial Sequence
  Synthetic oligonucleotide
ggacggggcatacgacaatatgttcgtacg

SEQ ID NO: 406180 - DNA, 30 bp, Artificial Sequence
  Synthetic oligonucleotide
catgctacccctgtcgttatttgaggtacg

SEQ ID NO: 406181 - DNA, 30 bp, Artificial Sequence
  Synthetic oligonucleotide
aataggatccctaccatttacttaggtacg

SEQ ID NO: 406182 - DNA, 30 bp, Artificial Sequence
  Synthetic oligonucleotide
agagtcttaccgtatcagaataacggtacg

SEQ ID NO: 406183 - DNA, 30 bp, Artificial Sequence
  Synthetic oligonucleotide
tactgaaggctgacttgtgaccgcggtacg

SEQ ID NO: 406184 - DNA, 30 bp, Artificial Sequence
  Synthetic oligonucleotide
gggtttgaactagccaggacaacgggtacg

SEQ ID NO: 406185 - DNA, 30 bp, Artificial Sequence
  Synthetic oligonucleotide
cgtccaatgtaacggttacctaatggtacg

SEQ ID NO: 406186 - DNA, 30 bp, Artificial Sequence
  Synthetic oligonucleotide
ccatagggcgatgatttagacggtggtacg

SEQ ID NO: 406187 - DNA, 30 bp, Artificial Sequence
  Synthetic oligonucleotide
ctggttgaagtatgtccataacactgtacg

SEQ ID NO: 406188 - DNA, 30 bp, Artificial Sequence
  Synthetic oligonucleotide
tcaattgcaaagtttgctggacgctgtacg

SEQ ID NO: 406189 - DNA, 30 bp, Artificial Sequence
  Synthetic oligonucleotide
tccgtacatagtcagatgctactttgtacg

SEQ ID NO: 406190 - DNA, 30 bp, Artificial Sequence
  Synthetic oligonucleotide
ttatatcctgccatataggatctttgtacg

SEQ ID NO: 406191 - DNA, 30 bp, Artificial Sequence
  Synthetic oligonucleotide
cggccgcgattcatacgggacgcaattacg

SEQ ID NO: 406192 - DNA, 30 bp, Artificial Sequence
  Synthetic oligonucleotide
ctggtattacgaatttgggacggaattacg

SEQ ID NO: 406193 - DNA, 30 bp, Artificial Sequence
  Synthetic oligonucleotide
aactgcagagcctcccgtgtccgcattacg

SEQ ID NO: 406194 - DNA, 26 bp, Artificial Sequence
  Synthetic oligonucleotide
cacatgttggttcagggactattacg

SEQ ID NO: 406195 - DNA, 30 bp, Artificial Sequence
  Synthetic oligonucleotide
tttcaggtagctggacaacagacacttacg

SEQ ID NO: 406196 - DNA, 30 bp, Artificial Sequence
  Synthetic oligonucleotide
agtgcatacgttcgtgttcaattacttacg

SEQ ID NO: 406197 - DNA, 30 bp, Artificial Sequence
  Synthetic oligonucleotide
gtggtcaagcttaccactgtacaccttacg

SEQ ID NO: 406198 - DNA, 30 bp, Artificial Sequence
  Synthetic oligonucleotide
acggctctctgtcgcctaagtcagcttacg

SEQ ID NO: 406199 - DNA, 30 bp, Artificial Sequence
  Synthetic oligonucleotide
caccacctgcttccgttctagtcagttacg

SEQ ID NO: 406200 - DNA, 30 bp, Artificial Sequence
  Synthetic oligonucleotide
cacttggcatcactcgcacaccacgttacg

SEQ ID NO: 406201 - DNA, 30 bp, Artificial Sequence
  Synthetic oligonucleotide
agtgtcccgcaactgtatacccaggttacg

SEQ ID NO: 406202 - DNA, 30 bp, Artificial Sequence
  Synthetic oligonucleotide
caatcagtatataatagatccgatgttacg

SEQ ID NO: 406203 - DNA, 30 bp, Artificial Sequence
  Synthetic oligonucleotide
gttccatagtcggaatcaacgggtgttacg

SEQ ID NO: 406204 - DNA, 30 bp, Artificial Sequence
  Synthetic oligonucleotide
accgcgccggcggtttaggtccttgttacg

SEQ ID NO: 406205 - DNA, 30 bp, Artificial Sequence
  Synthetic oligonucleotide
ccaccctgttttgctcggggaaaatttacg

SEQ ID NO: 406206 - DNA, 30 bp, Artificial Sequence
  Synthetic oligonucleotide
ttattgagggtctatgtactgagatttacg

SEQ ID NO: 406207 - DNA, 30 bp, Artificial Sequence
  Synthetic oligonucleotide
gtcagaggcagcgtgaggaaaagctttacg

SEQ ID NO: 406208 - DNA, 30 bp, Artificial Sequence
  Synthetic oligonucleotide
aagtttggtgtaccggcctcaaagtttacg

SEQ ID NO: 406209 - DNA, 30 bp, Artificial Sequence
  Synthetic oligonucleotide
gaccctatgcggaagtaaacgcagtttacg

SEQ ID NO: 406210 - DNA, 30 bp, Artificial Sequence
  Synthetic oligonucleotide
agcgcccagccatactttatcgagtttacg

SEQ ID NO: 406211 - DNA, 30 bp, Artificial Sequence
  Synthetic oligonucleotide
accaattagatggggccacgtgcgtttacg

SEQ ID NO: 406212 - DNA, 30 bp, Artificial Sequence
  Synthetic oligonucleotide
ggtcactggactagtccagggtcttttacg

SEQ ID NO: 406213 - DNA, 30 bp, Artificial Sequence
  Synthetic oligonucleotide
gcggtattcagtctgttctagttttttacg

SEQ ID NO: 406214 - DNA, 30 bp, Artificial Sequence
  Synthetic oligonucleotide
aaagtggtacaagttaggtggttttttacg

SEQ ID NO: 406215 - DNA, 30 bp, Artificial Sequence
  Synthetic oligonucleotide
aattacgtcttgagctagtacaaaaaaccg

SEQ ID NO: 406216 - DNA, 30 bp, Artificial Sequence
  Synthetic oligonucleotide
tgtttagatggatagtggagtaatcaaccg

SEQ ID NO: 406217 - DNA, 30 bp, Artificial Sequence
  Synthetic oligonucleotide
tcaaggcttggcggttgttactatcaaccg

SEQ ID NO: 406218 - DNA, 30 bp, Artificial Sequence
  Synthetic oligonucleotide
gtccctgatatttctttaatttgtcaaccg

SEQ ID NO: 406219 - DNA, 30 bp, Artificial Sequence
  Synthetic oligonucleotide
ggttagactcagctgctattgacagaaccg

SEQ ID NO: 406220 - DNA, 30 bp, Artificial Sequence
  Synthetic oligonucleotide
accggccatcaagaggccaggtacgaaccg

SEQ ID NO: 406221 - DNA, 30 bp, Artificial Sequence
  Synthetic oligonucleotide
tttaggctcactctaggcgctcccgaaccg

SEQ ID NO: 406222 - DNA, 30 bp, Artificial Sequence
  Synthetic oligonucleotide
cgcacactcacggaaacttaggaggaaccg

SEQ ID NO: 406223 - DNA, 30 bp, Artificial Sequence
  Synthetic oligonucleotide
actgtaggtggctcgttactgtaggaaccg

SEQ ID NO: 406224 - DNA, 30 bp, Artificial Sequence
  Synthetic oligonucleotide
taattcgacggatgcgaccgtcgctaaccg

SEQ ID NO: 406225 - DNA, 30 bp, Artificial Sequence
  Synthetic oligonucleotide
aaatcccaatgggtatagcgcttctaaccg

SEQ ID NO: 406226 - DNA, 30 bp, Artificial Sequence
  Synthetic oligonucleotide
cgcggcgaaaccagttcaatgctgtaaccg

SEQ ID NO: 406227 - DNA, 30 bp, Artificial Sequence
  Synthetic oligonucleotide
gtcccaatcgacaattgtatcaattaaccg

SEQ ID NO: 406228 - DNA, 30 bp, Artificial Sequence
  Synthetic oligonucleotide
gtcccccatggctggacttaaagttaaccg

SEQ ID NO: 406229 - DNA, 30 bp, Artificial Sequence
  Synthetic oligonucleotide
agaccggtggatagatagtgggtttaaccg

SEQ ID NO: 406230 - DNA, 30 bp, Artificial Sequence
  Synthetic oligonucleotide
aatggcgagattaacttagagtgaacaccg

SEQ ID NO: 406231 - DNA, 30 bp, Artificial Sequence
  Synthetic oligonucleotide
acgccagatctagcacttcacggcacaccg

SEQ ID NO: 406232 - DNA, 30 bp, Artificial Sequence
  Synthetic oligonucleotide
tttattccagcctctagaacgtgcacaccg

SEQ ID NO: 406233 - DNA, 30 bp, Artificial Sequence
  Synthetic oligonucleotide
ctctaggataagcagggattttgcacaccg

SEQ ID NO: 406234 - DNA, 30 bp, Artificial Sequence
  Synthetic oligonucleotide
aggttaccggcactaaaggaactcacaccg

SEQ ID NO: 406235 - DNA, 30 bp, Artificial Sequence
  Synthetic oligonucleotide
tttcttagcttaaatttatttccgacaccg

SEQ ID NO: 406236 - DNA, 30 bp, Artificial Sequence
  Synthetic oligonucleotide
accgcatagcttctccggaggctgacaccg

SEQ ID NO: 406237 - DNA, 30 bp, Artificial Sequence
  Synthetic oligonucleotide
ggcgccgagggtttgggatcgaacccaccg

SEQ ID NO: 406238 - DNA, 30 bp, Artificial Sequence
  Synthetic oligonucleotide
gtatgcgcgctggtatgtaaatccccaccg

SEQ ID NO: 406239 - DNA, 30 bp, Artificial Sequence
  Synthetic oligonucleotide
gagtggtagcgatatattggcgcgccaccg

SEQ ID NO: 406240 - DNA, 30 bp, Artificial Sequence
  Synthetic oligonucleotide
gggcatactgacgtatcggacactccaccg

SEQ ID NO: 406241 - DNA, 30 bp, Artificial Sequence
  Synthetic oligonucleotide
ccatttattgtatcgtccaagactccaccg

SEQ ID NO: 406242 - DNA, 30 bp, Artificial Sequence
  Synthetic oligonucleotide
aatagtcaatggctagacgcggttccaccg

SEQ ID NO: 406243 - DNA, 30 bp, Artificial Sequence
  Synthetic oligonucleotide
aaatgaggtaggacgtctgcttaagcaccg

SEQ ID NO: 406244 - DNA, 30 bp, Artificial Sequence
  Synthetic oligonucleotide
taatggtatatcgtcctagagcccgcaccg

SEQ ID NO: 406245 - DNA, 30 bp, Artificial Sequence
  Synthetic oligonucleotide
cttcagggaattctcgggcggtaggcaccg

SEQ ID NO: 406246 - DNA, 30 bp, Artificial Sequence
  Synthetic oligonucleotide
acgagacggtacggggaatcaatggcaccg

SEQ ID NO: 406247 - DNA, 30 bp, Artificial Sequence
  Synthetic oligonucleotide
acactaaagaggactacagagtttgcaccg

SEQ ID NO: 406248 - DNA, 30 bp, Artificial Sequence
  Synthetic oligonucleotide
gtcaggcccgcaatagcgagggactcaccg

SEQ ID NO: 406249 - DNA, 30 bp, Artificial Sequence
  Synthetic oligonucleotide
ctcttttcgtctatcgacctctactcaccg

SEQ ID NO: 406250 - DNA, 30 bp, Artificial Sequence
  Synthetic oligonucleotide
atcatccgttaaagatacttcgattcaccg

SEQ ID NO: 406251 - DNA, 30 bp, Artificial Sequence
  Synthetic oligonucleotide
gctgcggttccctccgggaatcgttcaccg

SEQ ID NO: 406252 - DNA, 30 bp, Artificial Sequence
  Synthetic oligonucleotide
ctggctcgacacgggaacacgatttcaccg

SEQ ID NO: 406253 - DNA, 30 bp, Artificial Sequence
  Synthetic oligonucleotide
taaacgctcgcgctactgtttctttcaccg

SEQ ID NO: 406254 - DNA, 30 bp, Artificial Sequence
  Synthetic oligonucleotide
gagtgcgaattcggcctcgttttaagaccg

SEQ ID NO: 406255 - DNA, 30 bp, Artificial Sequence
  Synthetic oligonucleotide
ttagttaaaatgtgcaatagttgcagaccg

SEQ ID NO: 406256 - DNA, 30 bp, Artificial Sequence
  Synthetic oligonucleotide
aggtcgcaggttgagttctggctcagaccg

SEQ ID NO: 406257 - DNA, 30 bp, Artificial Sequence
  Synthetic oligonucleotide
tttgacttcgcgttggtgacgtcgagaccg

SEQ ID NO: 406258 - DNA, 30 bp, Artificial Sequence
  Synthetic oligonucleotide
gaacaatcagaaggtctaacgagtagaccg

SEQ ID NO: 406259 - DNA, 30 bp, Artificial Sequence
  Synthetic oligonucleotide
agtagagccttttttaagagacgtagaccg

SEQ ID NO: 406260 - DNA, 30 bp, Artificial Sequence
  Synthetic oligonucleotide
gagtaccgccgacgccggaaactccgaccg

SEQ ID NO: 406261 - DNA, 30 bp, Artificial Sequence
  Synthetic oligonucleotide
aatacatgacggttacaggtccggcgaccg

SEQ ID NO: 406262 - DNA, 30 bp, Artificial Sequence
  Synthetic oligonucleotide
gacctcccatggaacgtcgtcgacggaccg

SEQ ID NO: 406263 - DNA, 30 bp, Artificial Sequence
  Synthetic oligonucleotide
tcccattgctaatgtgttgggttcggaccg

SEQ ID NO: 406264 - DNA, 30 bp, Artificial Sequence
  Synthetic oligonucleotide
cctgcttttggggaacggtaaccgggaccg

SEQ ID NO: 406265 - DNA, 30 bp, Artificial Sequence
  Synthetic oligonucleotide
gtcttcatgatgtctgatgcagatggaccg

SEQ ID NO: 406266 - DNA, 30 bp, Artificial Sequence
  Synthetic oligonucleotide
tttaattcttgcaagagacactatggaccg

SEQ ID NO: 406267 - DNA, 30 bp, Artificial Sequence
  Synthetic oligonucleotide
ccaatagaggtggtagtaaaaggatgaccg

SEQ ID NO: 406268 - DNA, 30 bp, Artificial Sequence
  Synthetic oligonucleotide
gtttcaccgcgtctcgcgggcatctgaccg

SEQ ID NO: 406269 - DNA, 30 bp, Artificial Sequence
  Synthetic oligonucleotide
ccgattttactacgaacggacttgtgaccg

SEQ ID NO: 406270 - DNA, 30 bp, Artificial Sequence
  Synthetic oligonucleotide
ggatgcctttggaatgtatagccaataccg

SEQ ID NO: 406271 - DNA, 30 bp, Artificial Sequence
  Synthetic oligonucleotide
gtacgcgtattgcgcggacagctaataccg

SEQ ID NO: 406272 - DNA, 30 bp, Artificial Sequence
  Synthetic oligonucleotide
acctaccactgtcacgatccggtaataccg

SEQ ID NO: 406273 - DNA, 30 bp, Artificial Sequence
  Synthetic oligonucleotide
cgagtggcacgaccgcagcacttcataccg

SEQ ID NO: 406274 - DNA, 30 bp, Artificial Sequence
  Synthetic oligonucleotide
gcacacggagctcggaggatacggataccg

SEQ ID NO: 406275 - DNA, 30 bp, Artificial Sequence
  Synthetic oligonucleotide
tgaatcatggcgcgtggaacggggataccg

SEQ ID NO: 406276 - DNA, 30 bp, Artificial Sequence
  Synthetic oligonucleotide
tatggaatagttcctacgtagagcctaccg

SEQ ID NO: 406277 - DNA, 30 bp, Artificial Sequence
  Synthetic oligonucleotide
aaaattgtaggtcgtgaaccccggctaccg

SEQ ID NO: 406278 - DNA, 30 bp, Artificial Sequence
  Synthetic oligonucleotide
agcaacggagtcacttcctaggatctaccg

SEQ ID NO: 406279 - DNA, 30 bp, Artificial Sequence
  Synthetic oligonucleotide
aaaaaagcctatcggtaccgaagagtaccg

SEQ ID NO: 406280 - DNA, 30 bp, Artificial Sequence
  Synthetic oligonucleotide
tgtacttcgcgctcagaggtgatagtaccg

SEQ ID NO: 406281 - DNA, 30 bp, Artificial Sequence
  Synthetic oligonucleotide
ttcaatataagggtgctcggagccgtaccg

SEQ ID NO: 406282 - DNA, 30 bp, Artificial Sequence
  Synthetic oligonucleotide
cgtaggtatcgtcgtcgcgggagcgtaccg

SEQ ID NO: 406283 - DNA, 30 bp, Artificial Sequence
  Synthetic oligonucleotide
aagttcagcttcggataggatatcgtaccg

SEQ ID NO: 406284 - DNA, 30 bp, Artificial Sequence
  Synthetic oligonucleotide
tattcgaaccgcatcgatcgacaggtaccg

SEQ ID NO: 406285 - DNA, 30 bp, Artificial Sequence
  Synthetic oligonucleotide
cctaggttgctcacgtcgctaatggtaccg

SEQ ID NO: 406286 - DNA, 30 bp, Artificial Sequence
  Synthetic oligonucleotide
cctggatttggagatcggggatatgtaccg

SEQ ID NO: 406287 - DNA, 30 bp, Artificial Sequence
  Synthetic oligonucleotide
acagaacttagagatatacagtttgtaccg

SEQ ID NO: 406288 - DNA, 30 bp, Artificial Sequence
  Synthetic oligonucleotide
atattttcgacatcacacaaatgaaacccg

SEQ ID NO: 406289 - DNA, 30 bp, Artificial Sequence
  Synthetic oligonucleotide
atctattccgcgaagcgtttggccaacccg

SEQ ID NO: 406290 - DNA, 30 bp, Artificial Sequence
  Synthetic oligonucleotide
ctgatttaagcctatattccgtggaacccg

SEQ ID NO: 406291 - DNA, 30 bp, Artificial Sequence
  Synthetic oligonucleotide
ttaccgagtggcggacatgtactgaacccg

SEQ ID NO: 406292 - DNA, 30 bp, Artificial Sequence
  Synthetic oligonucleotide
tcgccttcaggggatagttgcgttaacccg

SEQ ID NO: 406293 - DNA, 30 bp, Artificial Sequence
  Synthetic oligonucleotide
tcttgtgccgttaaaagtgggctacacccg

SEQ ID NO: 406294 - DNA, 30 bp, Artificial Sequence
  Synthetic oligonucleotide
cccaattcaattcaggccctccaccacccg

SEQ ID NO: 406295 - DNA, 30 bp, Artificial Sequence
  Synthetic oligonucleotide
gttaaaagaaagtggtaagggcgccacccg

SEQ ID NO: 406296 - DNA, 30 bp, Artificial Sequence
  Synthetic oligonucleotide
ataagtcgtgggaatgatcgccacgacccg

SEQ ID NO: 406297 - DNA, 30 bp, Artificial Sequence
  Synthetic oligonucleotide
catgcggcctaggttacccgagcggacccg

SEQ ID NO: 406298 - DNA, 30 bp, Artificial Sequence
  Synthetic oligonucleotide
ccagatcgtcgaaaaaagggggtggacccg

SEQ ID NO: 406299 - DNA, 30 bp, Artificial Sequence
  Synthetic oligonucleotide
gaattcgccatcagtataggtcatgacccg

SEQ ID NO: 406300 - DNA, 30 bp, Artificial Sequence
  Synthetic oligonucleotide
tggtcatgaaggggatttttacgtgacccg

SEQ ID NO: 406301 - DNA, 30 bp, Artificial Sequence
  Synthetic oligonucleotide
cagcctttttaaattttacaaacctacccg

SEQ ID NO: 406302 - DNA, 30 bp, Artificial Sequence
  Synthetic oligonucleotide
gtttttcaagggtaaacggtgtcctacccg

SEQ ID NO: 406303 - DNA, 30 bp, Artificial Sequence
  Synthetic oligonucleotide
ctaagttatggggtcttcccggagtacccg

SEQ ID NO: 406304 - DNA, 30 bp, Artificial Sequence
  Synthetic oligonucleotide
gtcacccagtcgaggagggattggtacccg

SEQ ID NO: 406305 - DNA, 30 bp, Artificial Sequence
  Synthetic oligonucleotide
atgcctttgaaaacagcgttcgtgtacccg

SEQ ID NO: 406306 - DNA, 30 bp, Artificial Sequence
  Synthetic oligonucleotide
gggttcttggtgcaccacacgagttacccg

SEQ ID NO: 406307 - DNA, 30 bp, Artificial Sequence
  Synthetic oligonucleotide
ggctcttgaaataactctaatcgttacccg

SEQ ID NO: 406308 - DNA, 30 bp, Artificial Sequence
  Synthetic oligonucleotide
ggtaagaaatgcagggcgcttttttacccg

SEQ ID NO: 406309 - DNA, 31 bp, Artificial Sequence
  Synthetic oligonucleotide
gatatgagatactcatttatcggtaaccccg

SEQ ID NO: 406310 - DNA, 30 bp, Artificial Sequence
  Synthetic oligonucleotide
caaactgttacacatggcaagtgccccccg

SEQ ID NO: 406311 - DNA, 30 bp, Artificial Sequence
  Synthetic oligonucleotide
cttcacgggcataccgcgggtcggcccccg

SEQ ID NO: 406312 - DNA, 30 bp, Artificial Sequence
  Synthetic oligonucleotide
tgcctcgccggtgtgcggtgtgaggccccg

SEQ ID NO: 406313 - DNA, 30 bp, Artificial Sequence
  Synthetic oligonucleotide
cacttctcatctctgcgatggtaggccccg

SEQ ID NO: 406314 - DNA, 30 bp, Artificial Sequence
  Synthetic oligonucleotide
cttctctttcgcacttcaaatatggccccg

SEQ ID NO: 406315 - DNA, 30 bp, Artificial Sequence
  Synthetic oligonucleotide
acgattgcaaggagtaagcagtcatccccg

SEQ ID NO: 406316 - DNA, 30 bp, Artificial Sequence
  Synthetic oligonucleotide
aaaactgttacgccggagttaccctccccg

SEQ ID NO: 406317 - DNA, 30 bp, Artificial Sequence
  Synthetic oligonucleotide
cagcggctttaggaaagctttacgtccccg

SEQ ID NO: 406318 - DNA, 30 bp, Artificial Sequence
  Synthetic oligonucleotide
tgcattccgctgacgcgggtggtgtccccg

SEQ ID NO: 406319 - DNA, 30 bp, Artificial Sequence
  Synthetic oligonucleotide
gactcaatgaactgatgtcattgttccccg

SEQ ID NO: 406320 - DNA, 30 bp, Artificial Sequence
  Synthetic oligonucleotide
aaatcaataccattcgtagtcgcaagcccg

SEQ ID NO: 406321 - DNA, 30 bp, Artificial Sequence
  Synthetic oligonucleotide
tcaagtttatatattctcgcagaacgcccg

SEQ ID NO: 406322 - DNA, 30 bp, Artificial Sequence
  Synthetic oligonucleotide
agaaccgcgcgactgattttcacacgcccg

SEQ ID NO: 406323 - DNA, 30 bp, Artificial Sequence
  Synthetic oligonucleotide
atcatgataggctccatttggtcacgcccg

SEQ ID NO: 406324 - DNA, 30 bp, Artificial Sequence
  Synthetic oligonucleotide
acaggtccttttaaccgcgctttgcgcccg

SEQ ID NO: 406325 - DNA, 30 bp, Artificial Sequence
  Synthetic oligonucleotide
agctcggaattccgtctccaacgtcgcccg

SEQ ID NO: 406326 - DNA, 30 bp, Artificial Sequence
  Synthetic oligonucleotide
ctaggcaattcttaagtgtgcgacggcccg

SEQ ID NO: 406327 - DNA, 30 bp, Artificial Sequence
  Synthetic oligonucleotide
gtttaaaccggcgttgatcaactcggcccg

SEQ ID NO: 406328 - DNA, 30 bp, Artificial Sequence
  Synthetic oligonucleotide
cagcgaaggcccccactaccagtcggcccg

SEQ ID NO: 406329 - DNA, 30 bp, Artificial Sequence
  Synthetic oligonucleotide
agtctatccgtaagattcatttatggcccg

SEQ ID NO: 406330 - DNA, 30 bp, Artificial Sequence
  Synthetic oligonucleotide
cagttccgcgatttatgcgcaggtggcccg

SEQ ID NO: 406331 - DNA, 30 bp, Artificial Sequence
  Synthetic oligonucleotide
cgggcttgcagccttaccaatattggcccg

SEQ ID NO: 406332 - DNA, 30 bp, Artificial Sequence
  Synthetic oligonucleotide
tcggccgatgtcacgtgttatattggcccg

SEQ ID NO: 406333 - DNA, 30 bp, Artificial Sequence
  Synthetic oligonucleotide
aaccatgacttgtgaacaagtgaatgcccg

SEQ ID NO: 406334 - DNA, 30 bp, Artificial Sequence
  Synthetic oligonucleotide
gacccctgatggtataggcacagctgcccg

SEQ ID NO: 406335 - DNA, 30 bp, Artificial Sequence
  Synthetic oligonucleotide
gcctggaggagtagaacgtctcggtgcccg

SEQ ID NO: 406336 - DNA, 30 bp, Artificial Sequence
  Synthetic oligonucleotide
ggcactaattggacgcgggtgttttgcccg

SEQ ID NO: 406337 - DNA, 30 bp, Artificial Sequence
  Synthetic oligonucleotide
gcacccgcatatacgagattgacaatcccg

SEQ ID NO: 406338 - DNA, 30 bp, Artificial Sequence
  Synthetic oligonucleotide
ttgacgcaatgaatctgattgggaatcccg

SEQ ID NO: 406339 - DNA, 30 bp, Artificial Sequence
  Synthetic oligonucleotide
gagacacgtggtcccgttgcaagtatcccg

SEQ ID NO: 406340 - DNA, 30 bp, Artificial Sequence
  Synthetic oligonucleotide
cggtggggaccgtcggttctagcactcccg

SEQ ID NO: 406341 - DNA, 30 bp, Artificial Sequence
  Synthetic oligonucleotide
ggccaggcggccaggccggtcaagctcccg

SEQ ID NO: 406342 - DNA, 30 bp, Artificial Sequence
  Synthetic oligonucleotide
cttgagctaatgtgcaagccatagctcccg

SEQ ID NO: 406343 - DNA, 30 bp, Artificial Sequence
  Synthetic oligonucleotide
tttttgtaaattacgactcatcggctcccg

SEQ ID NO: 406344 - DNA, 30 bp, Artificial Sequence
  Synthetic oligonucleotide
gggcacgccgagctctggctagaggtcccg

SEQ ID NO: 406345 - DNA, 30 bp, Artificial Sequence
  Synthetic oligonucleotide
gccgcgtgtctgtccggagacccggtcccg

SEQ ID NO: 406346 - DNA, 30 bp, Artificial Sequence
  Synthetic oligonucleotide
tttccctgagcaaccccttatggggtcccg

SEQ ID NO: 406347 - DNA, 30 bp, Artificial Sequence
  Synthetic oligonucleotide
tttaatgtaagagtcttcggaatggtcccg

SEQ ID NO: 406348 - DNA, 30 bp, Artificial Sequence
  Synthetic oligonucleotide
atcactatgggtcagcgatgagaattcccg

SEQ ID NO: 406349 - DNA, 30 bp, Artificial Sequence
  Synthetic oligonucleotide
gcgttccggaacagccgtgatgacttcccg

SEQ ID NO: 406350 - DNA, 30 bp, Artificial Sequence
  Synthetic oligonucleotide
cccatatgtgctcattcatgatacttcccg

SEQ ID NO: 406351 - DNA, 30 bp, Artificial Sequence
  Synthetic oligonucleotide
gtagggaaccgtggtagggtctggttcccg

SEQ ID NO: 406352 - DNA, 30 bp, Artificial Sequence
  Synthetic oligonucleotide
cccagcgctagactgaagtatcgtttcccg

SEQ ID NO: 406353 - DNA, 30 bp, Artificial Sequence
  Synthetic oligonucleotide
ctcttatgtcctgatatccatccaaagccg

SEQ ID NO: 406354 - DNA, 30 bp, Artificial Sequence
  Synthetic oligonucleotide
gggtatataggtaaaattatcataaagccg

SEQ ID NO: 406355 - DNA, 30 bp, Artificial Sequence
  Synthetic oligonucleotide
tggtctggacagataaaggagcccaagccg

SEQ ID NO: 406356 - DNA, 30 bp, Artificial Sequence
  Synthetic oligonucleotide
attaatagtggcatcttcaccgccaagccg

SEQ ID NO: 406357 - DNA, 30 bp, Artificial Sequence
  Synthetic oligonucleotide
cgactgttcgctcaggaatatacgaagccg

SEQ ID NO: 406358 - DNA, 30 bp, Artificial Sequence
  Synthetic oligonucleotide
ctccttagtgaggatcctcagtataagccg

SEQ ID NO: 406359 - DNA, 30 bp, Artificial Sequence
  Synthetic oligonucleotide
tatccaattagggggaacgctcctaagccg

SEQ ID NO: 406360 - DNA, 30 bp, Artificial Sequence
  Synthetic oligonucleotide
gtgagtcggctacactcgagtattaagccg

SEQ ID NO: 406361 - DNA, 30 bp, Artificial Sequence
  Synthetic oligonucleotide
ttggatagccagattagtgacgttaagccg

SEQ ID NO: 406362 - DNA, 30 bp, Artificial Sequence
  Synthetic oligonucleotide
gcgcgctatgcctatagtcccaaacagccg

SEQ ID NO: 406363 - DNA, 30 bp, Artificial Sequence
  Synthetic oligonucleotide
gatagatgtcccttcaagaatggacagccg

SEQ ID NO: 406364 - DNA, 30 bp, Artificial Sequence
  Synthetic oligonucleotide
cggcgcgcagtcgagtatcgcgcccagccg

SEQ ID NO: 406365 - DNA, 30 bp, Artificial Sequence
  Synthetic oligonucleotide
ctactaattgctgagacacgatggcagccg

SEQ ID NO: 406366 - DNA, 30 bp, Artificial Sequence
  Synthetic oligonucleotide
gtaccttgtacgagtacattggatcagccg

SEQ ID NO: 406367 - DNA, 30 bp, Artificial Sequence
  Synthetic oligonucleotide
tatttcatgcgatgtcaagtatatcagccg

SEQ ID NO: 406368 - DNA, 30 bp, Artificial Sequence
  Synthetic oligonucleotide
agcggtggtgtggtgatctcgcctcagccg

SEQ ID NO: 406369 - DNA, 30 bp, Artificial Sequence
  Synthetic oligonucleotide
tagcaatctttgtcacgacaggccgagccg

SEQ ID NO: 406370 - DNA, 30 bp, Artificial Sequence
  Synthetic oligonucleotide
gcctaccctacgcttatgctattcgagccg

SEQ ID NO: 406371 - DNA, 30 bp, Artificial Sequence
  Synthetic oligonucleotide
tatcacgtgcaaccaccggggagggagccg

SEQ ID NO: 406372 - DNA, 30 bp, Artificial Sequence
  Synthetic oligonucleotide
gatggtggattagttgcaattggtgagccg

SEQ ID NO: 406373 - DNA, 30 bp, Artificial Sequence
  Synthetic oligonucleotide
gagtactcctcaagaaaggccggatagccg

SEQ ID NO: 406374 - DNA, 30 bp, Artificial Sequence
  Synthetic oligonucleotide
cttcctgttcaggagcagatttcctagccg

SEQ ID NO: 406375 - DNA, 30 bp, Artificial Sequence
  Synthetic oligonucleotide
caggctgtgctacggtaaccattctagccg

SEQ ID NO: 406376 - DNA, 30 bp, Artificial Sequence
  Synthetic oligonucleotide
cctataagttctctggacagggtgtagccg

SEQ ID NO: 406377 - DNA, 30 bp, Artificial Sequence
  Synthetic oligonucleotide
caaagagcttgtacgaactttcattagccg

SEQ ID NO: 406378 - DNA, 30 bp, Artificial Sequence
  Synthetic oligonucleotide
gccgtcagacggatgatccgtctttagccg

SEQ ID NO: 406379 - DNA, 30 bp, Artificial Sequence
  Synthetic oligonucleotide
ttcaaagttataaggacttaaaagacgccg

SEQ ID NO: 406380 - DNA, 30 bp, Artificial Sequence
  Synthetic oligonucleotide
agctacttcgtcagggtattacggacgccg

SEQ ID NO: 406381 - DNA, 30 bp, Artificial Sequence
  Synthetic oligonucleotide
gggagagtatattgggttgccgggacgccg

SEQ ID NO: 406382 - DNA, 30 bp, Artificial Sequence
  Synthetic oligonucleotide
acgactctgggtactttggccctgacgccg

SEQ ID NO: 406383 - DNA, 30 bp, Artificial Sequence
  Synthetic oligonucleotide
cgtttagatttatctagggcgggtacgccg

SEQ ID NO: 406384 - DNA, 30 bp, Artificial Sequence
  Synthetic oligonucleotide
ggcggattagccaataacatgagcccgccg

SEQ ID NO: 406385 - DNA, 30 bp, Artificial Sequence
  Synthetic oligonucleotide
gcaagagatgtcgagatcgccgacgcgccg

SEQ ID NO: 406386 - DNA, 30 bp, Artificial Sequence
  Synthetic oligonucleotide
cactggtcgccataatttaatttcgcgccg

SEQ ID NO: 406387 - DNA, 30 bp, Artificial Sequence
  Synthetic oligonucleotide
gcgccctatcccgcgaggttgccggcgccg

SEQ ID NO: 406388 - DNA, 30 bp, Artificial Sequence
  Synthetic oligonucleotide
tccccatagataataacgggcactgcgccg

SEQ ID NO: 406389 - DNA, 30 bp, Artificial Sequence
  Synthetic oligonucleotide
gtaggcagcgcagcatagtatatgtcgccg

SEQ ID NO: 406390 - DNA, 30 bp, Artificial Sequence
  Synthetic oligonucleotide
cgcggcaagacaacacgcactagttcgccg

SEQ ID NO: 406391 - DNA, 30 bp, Artificial Sequence
  Synthetic oligonucleotide
gattcgcgattcgaccgcctagcgaggccg

SEQ ID NO: 406392 - DNA, 30 bp, Artificial Sequence
  Synthetic oligonucleotide
tgataggtccccgtctgcatggcacggccg

SEQ ID NO: 406393 - DNA, 30 bp, Artificial Sequence
  Synthetic oligonucleotide
ctcagatccccgtatccgtcataccggccg

SEQ ID NO: 406394 - DNA, 30 bp, Artificial Sequence
  Synthetic oligonucleotide
tacctccccccgggtgaaaccacccggccg

SEQ ID NO: 406395 - DNA, 30 bp, Artificial Sequence
  Synthetic oligonucleotide
ggcaggctataggcattgacccatcggccg

SEQ ID NO: 406396 - DNA, 30 bp, Artificial Sequence
  Synthetic oligonucleotide
ctgcaacttgctgacattatgtcagggccg

SEQ ID NO: 406397 - DNA, 30 bp, Artificial Sequence
  Synthetic oligonucleotide
aataattcgagtcggtgggggggagggccg

SEQ ID NO: 406398 - DNA, 30 bp, Artificial Sequence
  Synthetic oligonucleotide
cacgtacggaggctggccacgtgcgggccg

SEQ ID NO: 406399 - DNA, 30 bp, Artificial Sequence
  Synthetic oligonucleotide
ttctccgctccactatttcagttcgggccg

SEQ ID NO: 406400 - DNA, 30 bp, Artificial Sequence
  Synthetic oligonucleotide
tactgttacaacgtgcaggggcaggggccg

SEQ ID NO: 406401 - DNA, 30 bp, Artificial Sequence
  Synthetic oligonucleotide
ttacgcaccggacacactcatggggggccg

SEQ ID NO: 406402 - DNA, 30 bp, Artificial Sequence
  Synthetic oligonucleotide
ttagaagcactgcggacactgctggggccg

SEQ ID NO: 406403 - DNA, 30 bp, Artificial Sequence
  Synthetic oligonucleotide
catcccatggggaataaaggatgtgggccg

SEQ ID NO: 406404 - DNA, 30 bp, Artificial Sequence
  Synthetic oligonucleotide
ttgttcatcaagcttctcacgcaatggccg

SEQ ID NO: 406405 - DNA, 30 bp, Artificial Sequence
  Synthetic oligonucleotide
agtcgctcaccagaatatggttactggccg

SEQ ID NO: 406406 - DNA, 30 bp, Artificial Sequence
  Synthetic oligonucleotide
cggaaaggacgttcggattgtccttggccg

SEQ ID NO: 406407 - DNA, 30 bp, Artificial Sequence
  Synthetic oligonucleotide
ttccggattgtagttcgcactttttggccg

SEQ ID NO: 406408 - DNA, 30 bp, Artificial Sequence
  Synthetic oligonucleotide
gggccgtccggtgaacacggctaaatgccg

SEQ ID NO: 406409 - DNA, 30 bp, Artificial Sequence
  Synthetic oligonucleotide
ttacgcgcatttaggcgctcgctaatgccg

SEQ ID NO: 406410 - DNA, 30 bp, Artificial Sequence
  Synthetic oligonucleotide
tagacctggggtaaccggcaggacatgccg

SEQ ID NO: 406411 - DNA, 30 bp, Artificial Sequence
  Synthetic oligonucleotide
aagacacggtttaagcgtgcgcccctgccg

SEQ ID NO: 406412 - DNA, 30 bp, Artificial Sequence
  Synthetic oligonucleotide
atctaagacaagtatcaaataattctgccg

SEQ ID NO: 406413 - DNA, 30 bp, Artificial Sequence
  Synthetic oligonucleotide
atacattttaattaggaaggccttctgccg

SEQ ID NO: 406414 - DNA, 30 bp, Artificial Sequence
  Synthetic oligonucleotide
gatgacttcgcgcttaagtcgtaagtgccg

SEQ ID NO: 406415 - DNA, 30 bp, Artificial Sequence
  Synthetic oligonucleotide
gtgacacggcgagagcccgttatagtgccg

SEQ ID NO: 406416 - DNA, 30 bp, Artificial Sequence
  Synthetic oligonucleotide
gctcggttcacctatgggtgagtagtgccg

SEQ ID NO: 406417 - DNA, 30 bp, Artificial Sequence
  Synthetic oligonucleotide
agtatacactgaggcagaaatcgtgtgccg

SEQ ID NO: 406418 - DNA, 30 bp, Artificial Sequence
  Synthetic oligonucleotide
atcagtagcggtttagcattgatattgccg

SEQ ID NO: 406419 - DNA, 30 bp, Artificial Sequence
  Synthetic oligonucleotide
ggataaaagccgtttacaactgtcttgccg

SEQ ID NO: 406420 - DNA, 30 bp, Artificial Sequence
  Synthetic oligonucleotide
aggttagcgtaaatttccattaagttgccg

SEQ ID NO: 406421 - DNA, 30 bp, Artificial Sequence
  Synthetic oligonucleotide
gaatctacgaatgacttatcagtaaatccg

SEQ ID NO: 406422 - DNA, 30 bp, Artificial Sequence
  Synthetic oligonucleotide
gctatatgtctcggtagtaatccgaatccg

SEQ ID NO: 406423 - DNA, 30 bp, Artificial Sequence
  Synthetic oligonucleotide
cctgtcatccttgaaaaatcgtggaatccg

SEQ ID NO: 406424 - DNA, 30 bp, Artificial Sequence
  Synthetic oligonucleotide
aatccggctacctgggacgccctgaatccg

SEQ ID NO: 406425 - DNA, 30 bp, Artificial Sequence
  Synthetic oligonucleotide
gacgctgcgacgggtatcccattgaatccg

SEQ ID NO: 406426 - DNA, 30 bp, Artificial Sequence
  Synthetic oligonucleotide
gtgcagccactgtaggccctgttgaatccg

SEQ ID NO: 406427 - DNA, 30 bp, Artificial Sequence
  Synthetic oligonucleotide
gggttccgttgttcgttttaagaacatccg

SEQ ID NO: 406428 - DNA, 30 bp, Artificial Sequence
  Synthetic oligonucleotide
ggtaatgctctcgtttagtcggtacatccg

SEQ ID NO: 406429 - DNA, 30 bp, Artificial Sequence
  Synthetic oligonucleotide
cgatgtcttgcacgtcggatattacatccg

SEQ ID NO: 406430 - DNA, 30 bp, Artificial Sequence
  Synthetic oligonucleotide
tgtctcggtttcgaatacgtgtcccatccg

SEQ ID NO: 406431 - DNA, 30 bp, Artificial Sequence
  Synthetic oligonucleotide
ttgattgtgggagtctgacagaagcatccg

SEQ ID NO: 406432 - DNA, 30 bp, Artificial Sequence
  Synthetic oligonucleotide
tgagatccagctatgaatgaaagtcatccg

SEQ ID NO: 406433 - DNA, 30 bp, Artificial Sequence
  Synthetic oligonucleotide
tcggttggttttaactaatttatcgatccg

SEQ ID NO: 406434 - DNA, 30 bp, Artificial Sequence
  Synthetic oligonucleotide
catgagtggggcaagcacttaagtgatccg

SEQ ID NO: 406435 - DNA, 30 bp, Artificial Sequence
  Synthetic oligonucleotide
gactaattcgacgcgctctccattgatccg

SEQ ID NO: 406436 - DNA, 30 bp, Artificial Sequence
  Synthetic oligonucleotide
tagatcatatttcgggtacgtccatatccg

SEQ ID NO: 406437 - DNA, 30 bp, Artificial Sequence
  Synthetic oligonucleotide
ccactatacccgtattgtacagtctatccg

SEQ ID NO: 406438 - DNA, 30 bp, Artificial Sequence
  Synthetic oligonucleotide
tagaggcacggttttgcaacggggtatccg

SEQ ID NO: 406439 - DNA, 30 bp, Artificial Sequence
  Synthetic oligonucleotide
ggcttgtgttcagcggggggcaattatccg

SEQ ID NO: 406440 - DNA, 30 bp, Artificial Sequence
  Synthetic oligonucleotide
agatttcagactgtcgggctggattatccg

SEQ ID NO: 406441 - DNA, 30 bp, Artificial Sequence
  Synthetic oligonucleotide
gctgactaatcacgcaaataagcaactccg

SEQ ID NO: 406442 - DNA, 30 bp, Artificial Sequence
  Synthetic oligonucleotide
gggtaccgggtgagatcagcgggaactccg

SEQ ID NO: 406443 - DNA, 30 bp, Artificial Sequence
  Synthetic oligonucleotide
ttaaaagtcatatagtggcccctcactccg

SEQ ID NO: 406444 - DNA, 30 bp, Artificial Sequence
  Synthetic oligonucleotide
gttttttgtaaaattaggattcagactccg

SEQ ID NO: 406445 - DNA, 30 bp, Artificial Sequence
  Synthetic oligonucleotide
aaatgaatctcagcctccctggttactccg

SEQ ID NO: 406446 - DNA, 30 bp, Artificial Sequence
  Synthetic oligonucleotide
acgcttccgcagagctccaaaatagctccg

SEQ ID NO: 406447 - DNA, 30 bp, Artificial Sequence
  Synthetic oligonucleotide
tttctgcaggggatatccaatagcgctccg

SEQ ID NO: 406448 - DNA, 30 bp, Artificial Sequence
  Synthetic oligonucleotide
gtgccgatagttatctatattcgtgctccg

SEQ ID NO: 406449 - DNA, 30 bp, Artificial Sequence
  Synthetic oligonucleotide
cggtgacccgtgtatatgacaattgctccg

SEQ ID NO: 406450 - DNA, 30 bp, Artificial Sequence
  Synthetic oligonucleotide
gatgtggactcgcacggggctcaatctccg

SEQ ID NO: 406451 - DNA, 30 bp, Artificial Sequence
  Synthetic oligonucleotide
ttttatactgtagcctagcggcgatctccg

SEQ ID NO: 406452 - DNA, 30 bp, Artificial Sequence
  Synthetic oligonucleotide
aagggtacgagacacggagtcctatctccg

SEQ ID NO: 406453 - DNA, 30 bp, Artificial Sequence
  Synthetic oligonucleotide
ggtgtcatatacagtatacctccctctccg

SEQ ID NO: 406454 - DNA, 30 bp, Artificial Sequence
  Synthetic oligonucleotide
ggtccatgttatacctttcacagctctccg

SEQ ID NO: 406455 - DNA, 30 bp, Artificial Sequence
  Synthetic oligonucleotide
tgaggcaggtcgagtataagtgggtctccg

SEQ ID NO: 406456 - DNA, 30 bp, Artificial Sequence
  Synthetic oligonucleotide
tatctgcaacatgtaactcccccttctccg

SEQ ID NO: 406457 - DNA, 30 bp, Artificial Sequence
  Synthetic oligonucleotide
cctcttcccgtccagaggcataagagtccg

SEQ ID NO: 406458 - DNA, 30 bp, Artificial Sequence
  Synthetic oligonucleotide
tcggcgttcgtcgagttaccggcgagtccg

SEQ ID NO: 406459 - DNA, 30 bp, Artificial Sequence
  Synthetic oligonucleotide
ttgatgccccgtgagggcatccaacgtccg

SEQ ID NO: 406460 - DNA, 30 bp, Artificial Sequence
  Synthetic oligonucleotide
gaaagactttacggagaaagtcgacgtccg

SEQ ID NO: 406461 - DNA, 30 bp, Artificial Sequence
  Synthetic oligonucleotide
ctaggtaagtagaatttgtcgatacgtccg

SEQ ID NO: 406462 - DNA, 29 bp, Artificial Sequence
  Synthetic oligonucleotide
agaccacaaattatcgtttgtgtcgtccg

SEQ ID NO: 406463 - DNA, 26 bp, Artificial Sequence
  Synthetic oligonucleotide
gtcgaagctactgtgtgtttcgtccg

SEQ ID NO: 406464 - DNA, 30 bp, Artificial Sequence
  Synthetic oligonucleotide
agactacagcactatggcaagtaaggtccg

SEQ ID NO: 406465 - DNA, 30 bp, Artificial Sequence
  Synthetic oligonucleotide
gacttggtaatcacctggttatgaggtccg

SEQ ID NO: 406466 - DNA, 30 bp, Artificial Sequence
  Synthetic oligonucleotide
ttaggtcggcgcagagcactagacggtccg

SEQ ID NO: 406467 - DNA, 30 bp, Artificial Sequence
  Synthetic oligonucleotide
ttcagcaccgctggctggttggacggtccg

SEQ ID NO: 406468 - DNA, 30 bp, Artificial Sequence
  Synthetic oligonucleotide
ttgtctggcacagcttacgggggcggtccg

SEQ ID NO: 406469 - DNA, 30 bp, Artificial Sequence
  Synthetic oligonucleotide
cttactatcgcgtcaagcttccagggtccg

SEQ ID NO: 406470 - DNA, 30 bp, Artificial Sequence
  Synthetic oligonucleotide
tttactattacgacaccacattttggtccg

SEQ ID NO: 406471 - DNA, 30 bp, Artificial Sequence
  Synthetic oligonucleotide
gagatggactgtgacattccgtaatgtccg

SEQ ID NO: 406472 - DNA, 30 bp, Artificial Sequence
  Synthetic oligonucleotide
aattctttgcacctcggaaaaagatgtccg

SEQ ID NO: 406473 - DNA, 30 bp, Artificial Sequence
  Synthetic oligonucleotide
tttgtgcggtccgggattcaacgatgtccg

SEQ ID NO: 406474 - DNA, 30 bp, Artificial Sequence
  Synthetic oligonucleotide
tcagaataaacactacaaggctactgtccg

SEQ ID NO: 406475 - DNA, 30 bp, Artificial Sequence
  Synthetic oligonucleotide
cgtagctcatgggatggcttcggctgtccg

SEQ ID NO: 406476 - DNA, 30 bp, Artificial Sequence
  Synthetic oligonucleotide
aagaaaagattcaacgacgaagtctgtccg

SEQ ID NO: 406477 - DNA, 30 bp, Artificial Sequence
  Synthetic oligonucleotide
atgcgccgatggactttagtactgtgtccg

SEQ ID NO: 406478 - DNA, 30 bp, Artificial Sequence
  Synthetic oligonucleotide
gcaggaagttcgtcacgtttctattgtccg

SEQ ID NO: 406479 - DNA, 30 bp, Artificial Sequence
  Synthetic oligonucleotide
ggcaatatagacgaatgccggctttgtccg

SEQ ID NO: 406480 - DNA, 30 bp, Artificial Sequence
  Synthetic oligonucleotide
agattctcattggtgacccacgaaattccg

SEQ ID NO: 406481 - DNA, 30 bp, Artificial Sequence
  Synthetic oligonucleotide
gggcccggcagacgcgaggtagagattccg

SEQ ID NO: 406482 - DNA, 30 bp, Artificial Sequence
  Synthetic oligonucleotide
tagtcactacacttcagcagcgcgattccg

SEQ ID NO: 406483 - DNA, 30 bp, Artificial Sequence
  Synthetic oligonucleotide
agtaccaaacagttgagcggtatgattccg

SEQ ID NO: 406484 - DNA, 30 bp, Artificial Sequence
  Synthetic oligonucleotide
cccggtcgtctggacaaatcggttattccg

SEQ ID NO: 406485 - DNA, 30 bp, Artificial Sequence
  Synthetic oligonucleotide
ccatcatggtgttgacaccggccccttccg

SEQ ID NO: 406486 - DNA, 30 bp, Artificial Sequence
  Synthetic oligonucleotide
atgccataaatttttgtgtatcagcttccg

SEQ ID NO: 406487 - DNA, 30 bp, Artificial Sequence
  Synthetic oligonucleotide
tacatgtcatactgaatctggcaagttccg

SEQ ID NO: 406488 - DNA, 30 bp, Artificial Sequence
  Synthetic oligonucleotide
atatcgcagcgagtccgtatggtcgttccg

SEQ ID NO: 406489 - DNA, 31 bp, Artificial Sequence
  Synthetic oligonucleotide
acttatcctcgggcctctctggcaggttccg

SEQ ID NO: 406490 - DNA, 30 bp, Artificial Sequence
  Synthetic oligonucleotide
actcgtgatctcagttacgatcaggttccg

SEQ ID NO: 406491 - DNA, 30 bp, Artificial Sequence
  Synthetic oligonucleotide
cagcattcatgaattgaatgacgtgttccg

SEQ ID NO: 406492 - DNA, 30 bp, Artificial Sequence
  Synthetic oligonucleotide
ttgctcaccaatcattatctcgttgttccg

SEQ ID NO: 406493 - DNA, 30 bp, Artificial Sequence
  Synthetic oligonucleotide
cctttttgttgaaagccccaacaatttccg

SEQ ID NO: 406494 - DNA, 30 bp, Artificial Sequence
  Synthetic oligonucleotide
caaccgaattcgccgtttcatccctttccg

SEQ ID NO: 406495 - DNA, 30 bp, Artificial Sequence
  Synthetic oligonucleotide
ggtactggaggtattaactaaatctttccg

SEQ ID NO: 406496 - DNA, 30 bp, Artificial Sequence
  Synthetic oligonucleotide
cgcaatgcaaaaacgcgccctgagtttccg

SEQ ID NO: 406497 - DNA, 30 bp, Artificial Sequence
  Synthetic oligonucleotide
gtttcggcaacggcacatacattgtttccg

SEQ ID NO: 406498 - DNA, 30 bp, Artificial Sequence
  Synthetic oligonucleotide
ggcttcgttgtaactgtattatgttttccg

SEQ ID NO: 406499 - DNA, 30 bp, Artificial Sequence
  Synthetic oligonucleotide
tggtaggagtctgtgtttacgtgttttccg

SEQ ID NO: 406500 - DNA, 30 bp, Artificial Sequence
  Synthetic oligonucleotide
taacagatgctctcgcgatttttttttccg

SEQ ID NO: 406501 - DNA, 30 bp, Artificial Sequence
  Synthetic oligonucleotide
gcaaagcaggtcattgatttttcaaaagcg

SEQ ID NO: 406502 - DNA, 30 bp, Artificial Sequence
  Synthetic oligonucleotide
tgccccttgccgttatgggtatacaaagcg

SEQ ID NO: 406503 - DNA, 30 bp, Artificial Sequence
  Synthetic oligonucleotide
atatccaagggactgtctactatgaaagcg

SEQ ID NO: 406504 - DNA, 30 bp, Artificial Sequence
  Synthetic oligonucleotide
gaggggcaggcccggccaattcgacaagcg

SEQ ID NO: 406505 - DNA, 30 bp, Artificial Sequence
  Synthetic oligonucleotide
aatttcctaccggtaagatgaggccaagcg

SEQ ID NO: 406506 - DNA, 30 bp, Artificial Sequence
  Synthetic oligonucleotide
ttctgcgtgggccaccagtagtatcaagcg

SEQ ID NO: 406507 - DNA, 30 bp, Artificial Sequence
  Synthetic oligonucleotide
gcgcagaggcgcagccagaggattcaagcg

SEQ ID NO: 406508 - DNA, 30 bp, Artificial Sequence
  Synthetic oligonucleotide
aactccctcggcattgggtctgttcaagcg

SEQ ID NO: 406509 - DNA, 30 bp, Artificial Sequence
  Synthetic oligonucleotide
ggtgactgcctttcacagatatgagaagcg

SEQ ID NO: 406510 - DNA, 30 bp, Artificial Sequence
  Synthetic oligonucleotide
attctttgcaatagcggtcatctagaagcg

SEQ ID NO: 406511 - DNA, 30 bp, Artificial Sequence
  Synthetic oligonucleotide
tgttacatggaaaggttcttggtagaagcg

SEQ ID NO: 406512 - DNA, 30 bp, Artificial Sequence
  Synthetic oligonucleotide
tagtaattaggccagctggtcttagaagcg

SEQ ID NO: 406513 - DNA, 30 bp, Artificial Sequence
  Synthetic oligonucleotide
cgcacacttaccgaacaattggacgaagcg

SEQ ID NO: 406514 - DNA, 30 bp, Artificial Sequence
  Synthetic oligonucleotide
tattattccgagggagtcaacctcgaagcg

SEQ ID NO: 406515 - DNA, 30 bp, Artificial Sequence
  Synthetic oligonucleotide
ctcatagtaatgctattgtagcaataagcg

SEQ ID NO: 406516 - DNA, 30 bp, Artificial Sequence
  Synthetic oligonucleotide
tgggtcggacgcgacagctccttctaagcg

SEQ ID NO: 406517 - DNA, 30 bp, Artificial Sequence
  Synthetic oligonucleotide
tattcaacataatacgtccgggattaagcg

SEQ ID NO: 406518 - DNA, 30 bp, Artificial Sequence
  Synthetic oligonucleotide
gactttctgaggaaaggtgatataacagcg

SEQ ID NO: 406519 - DNA, 30 bp, Artificial Sequence
  Synthetic oligonucleotide
ggctattgtacgatcctaatgggcacagcg

SEQ ID NO: 406520 - DNA, 30 bp, Artificial Sequence
  Synthetic oligonucleotide
aagaaatgtcttaggccggtaaatacagcg

SEQ ID NO: 406521 - DNA, 30 bp, Artificial Sequence
  Synthetic oligonucleotide
agtttgacccgtcaagtctattatacagcg

SEQ ID NO: 406522 - DNA, 30 bp, Artificial Sequence
  Synthetic oligonucleotide
gcatcggctacaggttatcaggtaccagcg

SEQ ID NO: 406523 - DNA, 30 bp, Artificial Sequence
  Synthetic oligonucleotide
acgaagatgggggcgggttcagcgccagcg

SEQ ID NO: 406524 - DNA, 30 bp, Artificial Sequence
  Synthetic oligonucleotide
actgctgaccggttgcggaatcggccagcg

SEQ ID NO: 406525 - DNA, 30 bp, Artificial Sequence
  Synthetic oligonucleotide
cgttagcgcgcaacgttccgggaagcagcg

SEQ ID NO: 406526 - DNA, 30 bp, Artificial Sequence
  Synthetic oligonucleotide
tgtgtaaatttttcctgaccacaggcagcg

SEQ ID NO: 406527 - DNA, 30 bp, Artificial Sequence
  Synthetic oligonucleotide
taagagtcgtaataatcaatagaggcagcg

SEQ ID NO: 406528 - DNA, 30 bp, Artificial Sequence
  Synthetic oligonucleotide
gtgtacgtggcactgggacgataggcagcg

SEQ ID NO: 406529 - DNA, 30 bp, Artificial Sequence
  Synthetic oligonucleotide
tgggaatcatcctgtggatgcacggcagcg

SEQ ID NO: 406530 - DNA, 30 bp, Artificial Sequence
  Synthetic oligonucleotide
actcaggtctagcggaatcacccatcagcg

SEQ ID NO: 406531 - DNA, 30 bp, Artificial Sequence
  Synthetic oligonucleotide
caacggtatagcgactgtgctcgatcagcg

SEQ ID NO: 406532 - DNA, 30 bp, Artificial Sequence
  Synthetic oligonucleotide
tccccgagatggcttacctgcgactcagcg

SEQ ID NO: 406533 - DNA, 30 bp, Artificial Sequence
  Synthetic oligonucleotide
gaggagcagcagatgagaacggcctcagcg

SEQ ID NO: 406534 - DNA, 31 bp, Artificial Sequence
  Synthetic oligonucleotide
tctgggccgatagcaaagaaattgctcagcg

SEQ ID NO: 406535 - DNA, 30 bp, Artificial Sequence
  Synthetic oligonucleotide
aactcatgagggcgaggatttttgtcagcg

SEQ ID NO: 406536 - DNA, 30 bp, Artificial Sequence
  Synthetic oligonucleotide
acctgcgatggagctgagtttagttcagcg

SEQ ID NO: 406537 - DNA, 30 bp, Artificial Sequence
  Synthetic oligonucleotide
ctagcgtatgtggagatagataaaagagcg

SEQ ID NO: 406538 - DNA, 30 bp, Artificial Sequence
  Synthetic oligonucleotide
gtcgtcctccggtgagtccgactgagagcg

SEQ ID NO: 406539 - DNA, 30 bp, Artificial Sequence
  Synthetic oligonucleotide
tacacaggactcgagcggtattcacgagcg

SEQ ID NO: 406540 - DNA, 30 bp, Artificial Sequence
  Synthetic oligonucleotide
gatatcccccagatcgggcactgacgagcg

SEQ ID NO: 406541 - DNA, 30 bp, Artificial Sequence
  Synthetic oligonucleotide
aaccggatcttgggcgttagtccccgagcg

SEQ ID NO: 406542 - DNA, 30 bp, Artificial Sequence
  Synthetic oligonucleotide
aaaaatagagttccgcctgatgtgcgagcg

SEQ ID NO: 406543 - DNA, 30 bp, Artificial Sequence
  Synthetic oligonucleotide
aactaacatccacctgatttgtcgggagcg

SEQ ID NO: 406544 - DNA, 30 bp, Artificial Sequence
  Synthetic oligonucleotide
taatatgttctagcttcttttaagtgagcg

SEQ ID NO: 406545 - DNA, 30 bp, Artificial Sequence
  Synthetic oligonucleotide
ttgactgttacctaatcgataagttgagcg

SEQ ID NO: 406546 - DNA, 30 bp, Artificial Sequence
  Synthetic oligonucleotide
tagatgaagccccacccctcagtttgagcg

SEQ ID NO: 406547 - DNA, 30 bp, Artificial Sequence
  Synthetic oligonucleotide
ctattgtgacagttaacgatctcaatagcg

SEQ ID NO: 406548 - DNA, 30 bp, Artificial Sequence
  Synthetic oligonucleotide
gtttacccttagcctttactcgtaatagcg

SEQ ID NO: 406549 - DNA, 30 bp, Artificial Sequence
  Synthetic oligonucleotide
gtttatgtcaacttcatgaaattaatagcg

SEQ ID NO: 406550 - DNA, 30 bp, Artificial Sequence
  Synthetic oligonucleotide
aaatggaggcgtgcgagttgggccatagcg

SEQ ID NO: 406551 - DNA, 30 bp, Artificial Sequence
  Synthetic oligonucleotide
tcttatggcgcctttgaccgctgcatagcg

SEQ ID NO: 406552 - DNA, 30 bp, Artificial Sequence
  Synthetic oligonucleotide
aagctcgattgctgggccttagctatagcg

SEQ ID NO: 406553 - DNA, 30 bp, Artificial Sequence
  Synthetic oligonucleotide
tcggcaagtgaaatccggtcctctatagcg

SEQ ID NO: 406554 - DNA, 30 bp, Artificial Sequence
  Synthetic oligonucleotide
gcaccccgttctcatattttcggtatagcg

SEQ ID NO: 406555 - DNA, 30 bp, Artificial Sequence
  Synthetic oligonucleotide
atcattaccgttaaatgcggacacctagcg

SEQ ID NO: 406556 - DNA, 30 bp, Artificial Sequence
  Synthetic oligonucleotide
gagttccttttggcacaccaccagctagcg

SEQ ID NO: 406557 - DNA, 30 bp, Artificial Sequence
  Synthetic oligonucleotide
gctgcaatatatgtagccgctgatctagcg

SEQ ID NO: 406558 - DNA, 30 bp, Artificial Sequence
  Synthetic oligonucleotide
actctaggacaagtggccaaacttctagcg

SEQ ID NO: 406559 - DNA, 30 bp, Artificial Sequence
  Synthetic oligonucleotide
agagtttcatcaacagaattctcagtagcg

SEQ ID NO: 406560 - DNA, 30 bp, Artificial Sequence
  Synthetic oligonucleotide
ggcgaattccccctgatcaaactagtagcg

SEQ ID NO: 406561 - DNA, 30 bp, Artificial Sequence
  Synthetic oligonucleotide
ccatattgaattatgctactagacgtagcg

SEQ ID NO: 406562 - DNA, 30 bp, Artificial Sequence
  Synthetic oligonucleotide
gaaactaaacacctgaaccgtgtggtagcg

SEQ ID NO: 406563 - DNA, 31 bp, Artificial Sequence
  Synthetic oligonucleotide
aaagttttccatgcagttacaaggtgtagcg

SEQ ID NO: 406564 - DNA, 30 bp, Artificial Sequence
  Synthetic oligonucleotide
taagtagtcccagcaggggtgggattagcg

SEQ ID NO: 406565 - DNA, 30 bp, Artificial Sequence
  Synthetic oligonucleotide
acgccggtgattaatctctaatgattagcg

SEQ ID NO: 406566 - DNA, 30 bp, Artificial Sequence
  Synthetic oligonucleotide
tatcctggaccctctgacccgtatttagcg

SEQ ID NO: 406567 - DNA, 30 bp, Artificial Sequence
  Synthetic oligonucleotide
gatactgagttaaaggctatcattttagcg

SEQ ID NO: 406568 - DNA, 31 bp, Artificial Sequence
  Synthetic oligonucleotide
ggcagtgcgggtaacgcgcaagtacaacgcg

SEQ ID NO: 406569 - DNA, 30 bp, Artificial Sequence
  Synthetic oligonucleotide
ctccaagtgggttacccgctactgaacgcg

SEQ ID NO: 406570 - DNA, 30 bp, Artificial Sequence
  Synthetic oligonucleotide
ggcttagtcaattctacaacggttaacgcg

SEQ ID NO: 406571 - DNA, 30 bp, Artificial Sequence
  Synthetic oligonucleotide
cggacctccatatttttaaccaaacacgcg

SEQ ID NO: 406572 - DNA, 30 bp, Artificial Sequence
  Synthetic oligonucleotide
gagcgagggcgtacccccatgaaacacgcg

SEQ ID NO: 406573 - DNA, 30 bp, Artificial Sequence
  Synthetic oligonucleotide
gatctgagctacccattttcagcacacgcg

SEQ ID NO: 406574 - DNA, 30 bp, Artificial Sequence
  Synthetic oligonucleotide
gcctcgtgagacctaccaggatgacacgcg

SEQ ID NO: 406575 - DNA, 30 bp, Artificial Sequence
  Synthetic oligonucleotide
acctagtacagaaaatttagtatacacgcg

SEQ ID NO: 406576 - DNA, 30 bp, Artificial Sequence
  Synthetic oligonucleotide
tggttcgtctttgtatggctaatccacgcg

SEQ ID NO: 406577 - DNA, 30 bp, Artificial Sequence
  Synthetic oligonucleotide
aaacgcaaaaattctgcgtgttatcacgcg

SEQ ID NO: 406578 - DNA, 30 bp, Artificial Sequence
  Synthetic oligonucleotide
atctaggagtcagctttaaacggtcacgcg

SEQ ID NO: 406579 - DNA, 30 bp, Artificial Sequence
  Synthetic oligonucleotide
ttgataaggtcatactgacctcaagacgcg

SEQ ID NO: 406580 - DNA, 30 bp, Artificial Sequence
  Synthetic oligonucleotide
gtagtctggccaagtgtccaaccagacgcg

SEQ ID NO: 406581 - DNA, 30 bp, Artificial Sequence
  Synthetic oligonucleotide
tgatgtataggcctggatggcttagacgcg

SEQ ID NO: 406582 - DNA, 30 bp, Artificial Sequence
  Synthetic oligonucleotide
gttggcaatttcttaactggatccgacgcg

SEQ ID NO: 406583 - DNA, 30 bp, Artificial Sequence
  Synthetic oligonucleotide
cgagtataagatggcattctaagggacgcg

SEQ ID NO: 406584 - DNA, 30 bp, Artificial Sequence
  Synthetic oligonucleotide
gcgcgtcgaaccaagaagcgtggggacgcg

SEQ ID NO: 406585 - DNA, 30 bp, Artificial Sequence
  Synthetic oligonucleotide
acattggttttcctagaaggttgggacgcg

SEQ ID NO: 406586 - DNA, 30 bp, Artificial Sequence
  Synthetic oligonucleotide
acttaagactatgcgtaagtttgggacgcg

SEQ ID NO: 406587 - DNA, 30 bp, Artificial Sequence
  Synthetic oligonucleotide
ttatcaatcggaggagcaacggattacgcg

SEQ ID NO: 406588 - DNA, 30 bp, Artificial Sequence
  Synthetic oligonucleotide
taggggctacgaccccatattagttacgcg

SEQ ID NO: 406589 - DNA, 30 bp, Artificial Sequence
  Synthetic oligonucleotide
aaattaagcagtggacaggccatttacgcg

SEQ ID NO: 406590 - DNA, 30 bp, Artificial Sequence
  Synthetic oligonucleotide
ttaggtaccaatttggaggatctaaccgcg

SEQ ID NO: 406591 - DNA, 30 bp, Artificial Sequence
  Synthetic oligonucleotide
ttatttagcatcatgtctaggaccaccgcg

SEQ ID NO: 406592 - DNA, 30 bp, Artificial Sequence
  Synthetic oligonucleotide
aatcagatagcacagcgtgcttgcaccgcg

SEQ ID NO: 406593 - DNA, 30 bp, Artificial Sequence
  Synthetic oligonucleotide
gtatgcgataagaagcttttgaggaccgcg

SEQ ID NO: 406594 - DNA, 30 bp, Artificial Sequence
  Synthetic oligonucleotide
agaagtaacttgcgttcacggcataccgcg

SEQ ID NO: 406595 - DNA, 30 bp, Artificial Sequence
  Synthetic oligonucleotide
gccgggaatttcaggttgagaaagcccgcg

SEQ ID NO: 406596 - DNA, 30 bp, Artificial Sequence
  Synthetic oligonucleotide
gcggcgaccactcgttcttattagcccgcg

SEQ ID NO: 406597 - DNA, 30 bp, Artificial Sequence
  Synthetic oligonucleotide
gcagcctcggcggaaggcagatatcccgcg

SEQ ID NO: 406598 - DNA, 30 bp, Artificial Sequence
  Synthetic oligonucleotide
gccacagcggccgcatcattagaagccgcg

SEQ ID NO: 406599 - DNA, 30 bp, Artificial Sequence
  Synthetic oligonucleotide
atatggtcgcattggtaagtcagagccgcg

SEQ ID NO: 406600 - DNA, 30 bp, Artificial Sequence
  Synthetic oligonucleotide
atgggtatctcgtccattaatatcgccgcg

SEQ ID NO: 406601 - DNA, 30 bp, Artificial Sequence
  Synthetic oligonucleotide
gggtaccttggggtgcaggttagggccgcg

SEQ ID NO: 406602 - DNA, 30 bp, Artificial Sequence
  Synthetic oligonucleotide
acgcccccccaaccatcacagctctccgcg

SEQ ID NO: 406603 - DNA, 30 bp, Artificial Sequence
  Synthetic oligonucleotide
taggatttggactggcttcaggtctccgcg

SEQ ID NO: 406604 - DNA, 30 bp, Artificial Sequence
  Synthetic oligonucleotide
tttgagagggactcgttacccgggtccgcg

SEQ ID NO: 406605 - DNA, 30 bp, Artificial Sequence
  Synthetic oligonucleotide
ttctgtctattatttactgaagattccgcg

SEQ ID NO: 406606 - DNA, 30 bp, Artificial Sequence
  Synthetic oligonucleotide
tgctaatccgtgcggacatgctattccgcg

SEQ ID NO: 406607 - DNA, 30 bp, Artificial Sequence
  Synthetic oligonucleotide
ttgccgatacaactccggactatttccgcg

SEQ ID NO: 406608 - DNA, 30 bp, Artificial Sequence
  Synthetic oligonucleotide
taagtttgtagagggttttcaacaagcgcg

SEQ ID NO: 406609 - DNA, 30 bp, Artificial Sequence
  Synthetic oligonucleotide
gacttacttgtttaagcgataaggagcgcg

SEQ ID NO: 406610 - DNA, 30 bp, Artificial Sequence
  Synthetic oligonucleotide
ctgatggtctggctcagagctgggagcgcg

SEQ ID NO: 406611 - DNA, 30 bp, Artificial Sequence
  Synthetic oligonucleotide
tggtactcaagttggattttctgtagcgcg

SEQ ID NO: 406612 - DNA, 30 bp, Artificial Sequence
  Synthetic oligonucleotide
ttatcataaatagatagtaagttacgcgcg

SEQ ID NO: 406613 - DNA, 30 bp, Artificial Sequence
  Synthetic oligonucleotide
caagtggatctaagcttaggccgccgcgcg

SEQ ID NO: 406614 - DNA, 30 bp, Artificial Sequence
  Synthetic oligonucleotide
gaaaccaatcgagaggctagcatgcgcgcg

SEQ ID NO: 406615 - DNA, 30 bp, Artificial Sequence
  Synthetic oligonucleotide
tcgaattaaagtattattcaaggtcgcgcg

SEQ ID NO: 406616 - DNA, 30 bp, Artificial Sequence
  Synthetic oligonucleotide
ggcctgggaagggcgactcgcgcaggcgcg

SEQ ID NO: 406617 - DNA, 30 bp, Artificial Sequence
  Synthetic oligonucleotide
ggcatcttagaagtacttttgcagggcgcg

SEQ ID NO: 406618 - DNA, 30 bp, Artificial Sequence
  Synthetic oligonucleotide
gtcctgcaggtccggtgggtgatctgcgcg

SEQ ID NO: 406619 - DNA, 30 bp, Artificial Sequence
  Synthetic oligonucleotide
agaatggagcatttcgcactcgcttgcgcg

SEQ ID NO: 406620 - DNA, 30 bp, Artificial Sequence
  Synthetic oligonucleotide
ttacattccacggtcgcagttctttgcgcg

SEQ ID NO: 406621 - DNA, 30 bp, Artificial Sequence
  Synthetic oligonucleotide
ccacagcttgtacatatgggcaacatcgcg

SEQ ID NO: 406622 - DNA, 30 bp, Artificial Sequence
  Synthetic oligonucleotide
gatgtagtacgtaggcatttatggatcgcg

SEQ ID NO: 406623 - DNA, 30 bp, Artificial Sequence
  Synthetic oligonucleotide
ctcttgcggtcatgtttttagatgatcgcg

SEQ ID NO: 406624 - DNA, 30 bp, Artificial Sequence
  Synthetic oligonucleotide
gaattgcttgatcaagttggtatgatcgcg

SEQ ID NO: 406625 - DNA, 30 bp, Artificial Sequence
  Synthetic oligonucleotide
gggcgtcagcagcgccgacagttgatcgcg

SEQ ID NO: 406626 - DNA, 30 bp, Artificial Sequence
  Synthetic oligonucleotide
gatatcgtgtgcacgaagtagatcctcgcg

SEQ ID NO: 406627 - DNA, 30 bp, Artificial Sequence
  Synthetic oligonucleotide
acacctttaagcggtaccgcgttcctcgcg

SEQ ID NO: 406628 - DNA, 30 bp, Artificial Sequence
  Synthetic oligonucleotide
gacatgatgcgaaaaatggagaatctcgcg

SEQ ID NO: 406629 - DNA, 30 bp, Artificial Sequence
  Synthetic oligonucleotide
cagaacggagcacaattgatttctctcgcg

SEQ ID NO: 406630 - DNA, 30 bp, Artificial Sequence
  Synthetic oligonucleotide
gcgacgccaggacctgactgctcagtcgcg

SEQ ID NO: 406631 - DNA, 30 bp, Artificial Sequence
  Synthetic oligonucleotide
atccatacaagtcctgagacaggcgtcgcg

SEQ ID NO: 406632 - DNA, 30 bp, Artificial Sequence
  Synthetic oligonucleotide
ctacgtgccgggcgaacaaaagaggtcgcg

SEQ ID NO: 406633 - DNA, 30 bp, Artificial Sequence
  Synthetic oligonucleotide
ggtggcacttcggcctcagtcaaattcgcg

SEQ ID NO: 406634 - DNA, 30 bp, Artificial Sequence
  Synthetic oligonucleotide
acccttcgaaagctcgcaacttcattcgcg

SEQ ID NO: 406635 - DNA, 30 bp, Artificial Sequence
  Synthetic oligonucleotide
atggtggctcggattacaattttattcgcg

SEQ ID NO: 406636 - DNA, 30 bp, Artificial Sequence
  Synthetic oligonucleotide
ggcacgctgcatgaacatgtttcgttcgcg

SEQ ID NO: 406637 - DNA, 30 bp, Artificial Sequence
  Synthetic oligonucleotide
acggtctacgcataattagaaaggttcgcg

SEQ ID NO: 406638 - DNA, 30 bp, Artificial Sequence
  Synthetic oligonucleotide
cgtagaagctatacccctatgaatttcgcg

SEQ ID NO: 406639 - DNA, 30 bp, Artificial Sequence
  Synthetic oligonucleotide
attcagtggacagttgtgtatcttttcgcg

SEQ ID NO: 406640 - DNA, 30 bp, Artificial Sequence
  Synthetic oligonucleotide
tgtcaggtgtatgcttctaactttttcgcg

SEQ ID NO: 406641 - DNA, 30 bp, Artificial Sequence
  Synthetic oligonucleotide
agaagctgtttaacgagccgccccaaggcg

SEQ ID NO: 406642 - DNA, 30 bp, Artificial Sequence
  Synthetic oligonucleotide
ggaacctagaaaaacgtactcgccaaggcg

SEQ ID NO: 406643 - DNA, 30 bp, Artificial Sequence
  Synthetic oligonucleotide
ctcgagaaccaatttgcactccggaaggcg

SEQ ID NO: 406644 - DNA, 30 bp, Artificial Sequence
  Synthetic oligonucleotide
ggtcgggccccatggtccaaggggaaggcg

SEQ ID NO: 406645 - DNA, 30 bp, Artificial Sequence
  Synthetic oligonucleotide
gcgcttcaattagttctccgtctccaggcg

SEQ ID NO: 406646 - DNA, 30 bp, Artificial Sequence
  Synthetic oligonucleotide
ctattcggagtgtatatacgagagcaggcg

SEQ ID NO: 406647 - DNA, 30 bp, Artificial Sequence
  Synthetic oligonucleotide
aacggctgacgacctctgtactaagaggcg

SEQ ID NO: 406648 - DNA, 30 bp, Artificial Sequence
  Synthetic oligonucleotide
ggcatcgccgaatatatgaggtcagaggcg

SEQ ID NO: 406649 - DNA, 30 bp, Artificial Sequence
  Synthetic oligonucleotide
agtttcggcagtgtgtaattctgcgaggcg

SEQ ID NO: 406650 - DNA, 30 bp, Artificial Sequence
  Synthetic oligonucleotide
tgaatcttgcttgtgctcaggcaataggcg

SEQ ID NO: 406651 - DNA, 30 bp, Artificial Sequence
  Synthetic oligonucleotide
gccggcgtgatgtcccacataggctaggcg

SEQ ID NO: 406652 - DNA, 30 bp, Artificial Sequence
  Synthetic oligonucleotide
agtaaaaagtcacgggcacacttttaggcg

SEQ ID NO: 406653 - DNA, 30 bp, Artificial Sequence
  Synthetic oligonucleotide
gataatgatgcgaatcgttgataaacggcg

SEQ ID NO: 406654 - DNA, 30 bp, Artificial Sequence
  Synthetic oligonucleotide
ctagcaccgggatcccatcccttaacggcg

SEQ ID NO: 406655 - DNA, 30 bp, Artificial Sequence
  Synthetic oligonucleotide
atactgaggagtaacctcacggcgacggcg

SEQ ID NO: 406656 - DNA, 30 bp, Artificial Sequence
  Synthetic oligonucleotide
cccaccgaatcaagacgcctccagccggcg

SEQ ID NO: 406657 - DNA, 30 bp, Artificial Sequence
  Synthetic oligonucleotide
ttgcaggtggttccggatccttagccggcg

SEQ ID NO: 406658 - DNA, 30 bp, Artificial Sequence
  Synthetic oligonucleotide
tggacgcgagttcaacgccaatcagcggcg

SEQ ID NO: 406659 - DNA, 30 bp, Artificial Sequence
  Synthetic oligonucleotide
gtctgctgagtagcgtgacacaacgcggcg

SEQ ID NO: 406660 - DNA, 30 bp, Artificial Sequence
  Synthetic oligonucleotide
cagaaaaaccatggcatgattaacgcggcg

SEQ ID NO: 406661 - DNA, 30 bp, Artificial Sequence
  Synthetic oligonucleotide
gtccctgcgctaaacaaagatcgcgcggcg

SEQ ID NO: 406662 - DNA, 30 bp, Artificial Sequence
  Synthetic oligonucleotide
cactgttgttacactgtctcgtaggcggcg

SEQ ID NO: 406663 - DNA, 30 bp, Artificial Sequence
  Synthetic oligonucleotide
ttaggctgtgtgcgcggtttatgtgcggcg

SEQ ID NO: 406664 - DNA, 30 bp, Artificial Sequence
  Synthetic oligonucleotide
agtacctggaggactgttttcaaatcggcg

SEQ ID NO: 406665 - DNA, 30 bp, Artificial Sequence
  Synthetic oligonucleotide
tatggcgtcttgtgtaattggatatcggcg

SEQ ID NO: 406666 - DNA, 30 bp, Artificial Sequence
  Synthetic oligonucleotide
gcccatcgttgatgatagggacactcggcg

SEQ ID NO: 406667 - DNA, 30 bp, Artificial Sequence
  Synthetic oligonucleotide
gcggccgaagtctcaatactgaggtcggcg

SEQ ID NO: 406668 - DNA, 30 bp, Artificial Sequence
  Synthetic oligonucleotide
tacatcctcccgacgtagggagcttcggcg

SEQ ID NO: 406669 - DNA, 30 bp, Artificial Sequence
  Synthetic oligonucleotide
aggatgggttgttctacggcactttcggcg

SEQ ID NO: 406670 - DNA, 30 bp, Artificial Sequence
  Synthetic oligonucleotide
gggacagattttggcctgtgttaaagggcg

SEQ ID NO: 406671 - DNA, 30 bp, Artificial Sequence
  Synthetic oligonucleotide
gtagctacctaggtattagccctaagggcg

SEQ ID NO: 406672 - DNA, 30 bp, Artificial Sequence
  Synthetic oligonucleotide
aacgatcttaggtatcatggaggcagggcg

SEQ ID NO: 406673 - DNA, 30 bp, Artificial Sequence
  Synthetic oligonucleotide
tggtttgggagaaatgggcgtccgagggcg

SEQ ID NO: 406674 - DNA, 30 bp, Artificial Sequence
  Synthetic oligonucleotide
gatcgaattctccaccgggtaagtagggcg

SEQ ID NO: 406675 - DNA, 30 bp, Artificial Sequence
  Synthetic oligonucleotide
aaccggacgcggatgacccctagtagggcg

SEQ ID NO: 406676 - DNA, 30 bp, Artificial Sequence
  Synthetic oligonucleotide
attgcgactggctattatttatgtagggcg

SEQ ID NO: 406677 - DNA, 30 bp, Artificial Sequence
  Synthetic oligonucleotide
gaaggaccgtgctcttgtggacttagggcg

SEQ ID NO: 406678 - DNA, 31 bp, Artificial Sequence
  Synthetic oligonucleotide
accattgaccggcttctagtctgtacgggcg

SEQ ID NO: 406679 - DNA, 30 bp, Artificial Sequence
  Synthetic oligonucleotide
gagctaccaggcggatgcgagacccgggcg

SEQ ID NO: 406680 - DNA, 30 bp, Artificial Sequence
  Synthetic oligonucleotide
tccagattttctgaaagcgccttccgggcg

SEQ ID NO: 406681 - DNA, 30 bp, Artificial Sequence
  Synthetic oligonucleotide
tcaaataaagggtattagttcaagcgggcg

SEQ ID NO: 406682 - DNA, 30 bp, Artificial Sequence
  Synthetic oligonucleotide
ggtgatgtggcaatcctagtacatcgggcg

SEQ ID NO: 406683 - DNA, 29 bp, Artificial Sequence
  Synthetic oligonucleotide
gacgcggagttcggggagtcgatcgggcg

SEQ ID NO: 406684 - DNA, 30 bp, Artificial Sequence
  Synthetic oligonucleotide
tgttcagctatgccgaccataagtcgggcg

SEQ ID NO: 406685 - DNA, 30 bp, Artificial Sequence
  Synthetic oligonucleotide
cctcaaccttgtagcgctacagttcgggcg

SEQ ID NO: 406686 - DNA, 30 bp, Artificial Sequence
  Synthetic oligonucleotide
tccgctcacacgggaagacgcgtaggggcg

SEQ ID NO: 406687 - DNA, 30 bp, Artificial Sequence
  Synthetic oligonucleotide
gtcggatatggcctggaccttgtaggggcg

SEQ ID NO: 406688 - DNA, 30 bp, Artificial Sequence
  Synthetic oligonucleotide
tttatatatgtcgatctgccatccggggcg

SEQ ID NO: 406689 - DNA, 30 bp, Artificial Sequence
  Synthetic oligonucleotide
cctcgagatgtaaacacgccattcggggcg

SEQ ID NO: 406690 - DNA, 30 bp, Artificial Sequence
  Synthetic oligonucleotide
cccggacatgcatgtaatggccttggggcg

SEQ ID NO: 406691 - DNA, 30 bp, Artificial Sequence
  Synthetic oligonucleotide
gtaagggacacgtatcaatacttatgggcg

SEQ ID NO: 406692 - DNA, 30 bp, Artificial Sequence
  Synthetic oligonucleotide
ataacctgttctgctgtacctgcctgggcg

SEQ ID NO: 406693 - DNA, 30 bp, Artificial Sequence
  Synthetic oligonucleotide
gacgggaaagccaagatattaagctgggcg

SEQ ID NO: 406694 - DNA, 31 bp, Artificial Sequence
  Synthetic oligonucleotide
gtggatacgaaggcagctcctggtgtgggcg

SEQ ID NO: 406695 - DNA, 30 bp, Artificial Sequence
  Synthetic oligonucleotide
aaacacaacactattaattatcgttgggcg

SEQ ID NO: 406696 - DNA, 30 bp, Artificial Sequence
  Synthetic oligonucleotide
gcctacgatcgcatctcccgtcgttgggcg

SEQ ID NO: 406697 - DNA, 30 bp, Artificial Sequence
  Synthetic oligonucleotide
atcatgctcgatttgcccatgatttgggcg

SEQ ID NO: 406698 - DNA, 30 bp, Artificial Sequence
  Synthetic oligonucleotide
ttaacgaaattcgcacacggagtttgggcg

SEQ ID NO: 406699 - DNA, 30 bp, Artificial Sequence
  Synthetic oligonucleotide
ccagtcgcactgcctgcacttacaatggcg

SEQ ID NO: 406700 - DNA, 30 bp, Artificial Sequence
  Synthetic oligonucleotide
cgtggtaccagtgggcggggttctatggcg

SEQ ID NO: 406701 - DNA, 30 bp, Artificial Sequence
  Synthetic oligonucleotide
cattttttggaaatcatcagatcactggcg

SEQ ID NO: 406702 - DNA, 30 bp, Artificial Sequence
  Synthetic oligonucleotide
tacattttgacataggacacgtgactggcg

SEQ ID NO: 406703 - DNA, 30 bp, Artificial Sequence
  Synthetic oligonucleotide
ccggctagtcgagcattcgctctactggcg

SEQ ID NO: 406704 - DNA, 30 bp, Artificial Sequence
  Synthetic oligonucleotide
taacagatttccgagaattaggtcctggcg

SEQ ID NO: 406705 - DNA, 30 bp, Artificial Sequence
  Synthetic oligonucleotide
ttatccgggtacttactactccgtctggcg

SEQ ID NO: 406706 - DNA, 30 bp, Artificial Sequence
  Synthetic oligonucleotide
tttcaggtctaaggtgtatggtcagtggcg

SEQ ID NO: 406707 - DNA, 30 bp, Artificial Sequence
  Synthetic oligonucleotide
taagatcatgtctggggggagccggtggcg

SEQ ID NO: 406708 - DNA, 30 bp, Artificial Sequence
  Synthetic oligonucleotide
cgcacccagacaactttgtacggggtggcg

SEQ ID NO: 406709 - DNA, 30 bp, Artificial Sequence
  Synthetic oligonucleotide
cccctctgcccgtgttgtaacccattggcg

SEQ ID NO: 406710 - DNA, 30 bp, Artificial Sequence
  Synthetic oligonucleotide
cgttcgtggcccacgccgcattgattggcg

SEQ ID NO: 406711 - DNA, 30 bp, Artificial Sequence
  Synthetic oligonucleotide
cagctactcctatttcactagttattggcg

SEQ ID NO: 406712 - DNA, 30 bp, Artificial Sequence
  Synthetic oligonucleotide
aaacatatcgttgacgaataggtgttggcg

SEQ ID NO: 406713 - DNA, 30 bp, Artificial Sequence
  Synthetic oligonucleotide
tgatctttttggtggtataggggaaatgcg

SEQ ID NO: 406714 - DNA, 30 bp, Artificial Sequence
  Synthetic oligonucleotide
acgcttatgtgaaatattgttactcatgcg

SEQ ID NO: 406715 - DNA, 30 bp, Artificial Sequence
  Synthetic oligonucleotide
atacccgtcgtctaaacttggcctcatgcg

SEQ ID NO: 406716 - DNA, 30 bp, Artificial Sequence
  Synthetic oligonucleotide
acttgcgcacatagtcactacggggatgcg

SEQ ID NO: 406717 - DNA, 30 bp, Artificial Sequence
  Synthetic oligonucleotide
caattgacgacgcttacattaagtgatgcg

SEQ ID NO: 406718 - DNA, 30 bp, Artificial Sequence
  Synthetic oligonucleotide
ggttttgaggtcatgtccgtgctatatgcg

SEQ ID NO: 406719 - DNA, 30 bp, Artificial Sequence
  Synthetic oligonucleotide
ttgggaggtttcggtcaaagaaactatgcg

SEQ ID NO: 406720 - DNA, 30 bp, Artificial Sequence
  Synthetic oligonucleotide
gcatcaaccggaagtacataagattatgcg

SEQ ID NO: 406721 - DNA, 30 bp, Artificial Sequence
  Synthetic oligonucleotide
ttctcacgtcataagtgcaaatattatgcg

SEQ ID NO: 406722 - DNA, 30 bp, Artificial Sequence
  Synthetic oligonucleotide
ttggagagcgccgggcgaattccaactgcg

SEQ ID NO: 406723 - DNA, 30 bp, Artificial Sequence
  Synthetic oligonucleotide
gtaaggcacgttcgttagaaaggaactgcg

SEQ ID NO: 406724 - DNA, 30 bp, Artificial Sequence
  Synthetic oligonucleotide
tgatttaaactcgtcgacttctgcactgcg

SEQ ID NO: 406725 - DNA, 30 bp, Artificial Sequence
  Synthetic oligonucleotide
acagttgactgcctcggcgccgggactgcg

SEQ ID NO: 406726 - DNA, 30 bp, Artificial Sequence
  Synthetic oligonucleotide
ttgttagaaatagaactaaacgctactgcg

SEQ ID NO: 406727 - DNA, 30 bp, Artificial Sequence
  Synthetic oligonucleotide
gtacacgagggtgccacccagcttactgcg

SEQ ID NO: 406728 - DNA, 30 bp, Artificial Sequence
  Synthetic oligonucleotide
ctctagacggagtaagtccgaacccctgcg

SEQ ID NO: 406729 - DNA, 30 bp, Artificial Sequence
  Synthetic oligonucleotide
taagcgccttgttagttatttactcctgcg

SEQ ID NO: 406730 - DNA, 30 bp, Artificial Sequence
  Synthetic oligonucleotide
agtcgtacatactaagtcttgcacgctgcg

SEQ ID NO: 406731 - DNA, 30 bp, Artificial Sequence
  Synthetic oligonucleotide
aacctgtacggaggccggatggacgctgcg

SEQ ID NO: 406732 - DNA, 30 bp, Artificial Sequence
  Synthetic oligonucleotide
gcacgccgtatgtaagatgcatccgctgcg

SEQ ID NO: 406733 - DNA, 30 bp, Artificial Sequence
  Synthetic oligonucleotide
taaccgctcctagaggcgtggagcgctgcg

SEQ ID NO: 406734 - DNA, 30 bp, Artificial Sequence
  Synthetic oligonucleotide
cctttttggaagatggaaacagtggctgcg

SEQ ID NO: 406735 - DNA, 30 bp, Artificial Sequence
  Synthetic oligonucleotide
gaaaactgtttgtgctatgtaccatctgcg

SEQ ID NO: 406736 - DNA, 30 bp, Artificial Sequence
  Synthetic oligonucleotide
cgggtgcagatctgacattaaatatctgcg

SEQ ID NO: 406737 - DNA, 30 bp, Artificial Sequence
  Synthetic oligonucleotide
caaactgcaataggctttggcccaagtgcg

SEQ ID NO: 406738 - DNA, 30 bp, Artificial Sequence
  Synthetic oligonucleotide
gacgtcggaacgctgatcacgtggagtgcg

SEQ ID NO: 406739 - DNA, 30 bp, Artificial Sequence
  Synthetic oligonucleotide
ccgggttattccaatattaaagcacgtgcg

SEQ ID NO: 406740 - DNA, 30 bp, Artificial Sequence
  Synthetic oligonucleotide
agtaacagttcgcgacgcgtctcccgtgcg

SEQ ID NO: 406741 - DNA, 30 bp, Artificial Sequence
  Synthetic oligonucleotide
gggaaagttttgaaaattatacgccgtgcg

SEQ ID NO: 406742 - DNA, 30 bp, Artificial Sequence
  Synthetic oligonucleotide
aatctcaatacagggatgtattcgcgtgcg

SEQ ID NO: 406743 - DNA, 30 bp, Artificial Sequence
  Synthetic oligonucleotide
ctaaactcatgtgtctctacatggcgtgcg

SEQ ID NO: 406744 - DNA, 30 bp, Artificial Sequence
  Synthetic oligonucleotide
caccctaggcggcgctgatactggcgtgcg

SEQ ID NO: 406745 - DNA, 30 bp, Artificial Sequence
  Synthetic oligonucleotide
gcaagtggttagtagatatgagttcgtgcg

SEQ ID NO: 406746 - DNA, 30 bp, Artificial Sequence
  Synthetic oligonucleotide
gactgttgggtagggtcaatgcaaggtgcg

SEQ ID NO: 406747 - DNA, 30 bp, Artificial Sequence
  Synthetic oligonucleotide
actcttagacttgcggttaatgccggtgcg

SEQ ID NO: 406748 - DNA, 30 bp, Artificial Sequence
  Synthetic oligonucleotide
ttttcagattggttcgcggaaatcggtgcg

SEQ ID NO: 406749 - DNA, 30 bp, Artificial Sequence
  Synthetic oligonucleotide
atggttgccgtcgggagctcttagggtgcg

SEQ ID NO: 406750 - DNA, 30 bp, Artificial Sequence
  Synthetic oligonucleotide
gattaagtgcgccatactatccttggtgcg

SEQ ID NO: 406751 - DNA, 30 bp, Artificial Sequence
  Synthetic oligonucleotide
tctcatctcactgagtgatgtcgatgtgcg

SEQ ID NO: 406752 - DNA, 30 bp, Artificial Sequence
  Synthetic oligonucleotide
caactcaattggtgtccggggggatgtgcg

SEQ ID NO: 406753 - DNA, 30 bp, Artificial Sequence
  Synthetic oligonucleotide
gattaatgcgtgtaggacgtattatgtgcg

SEQ ID NO: 406754 - DNA, 30 bp, Artificial Sequence
  Synthetic oligonucleotide
aaatacaactacatgtccagttattgtgcg

SEQ ID NO: 406755 - DNA, 30 bp, Artificial Sequence
  Synthetic oligonucleotide
cagccagcctacgcactgtggggttgtgcg

SEQ ID NO: 406756 - DNA, 30 bp, Artificial Sequence
  Synthetic oligonucleotide
gtctcgtgtgcagtaggtcggtaaattgcg

SEQ ID NO: 406757 - DNA, 30 bp, Artificial Sequence
  Synthetic oligonucleotide
tcctcaccgcgcagacgaccatacattgcg

SEQ ID NO: 406758 - DNA, 30 bp, Artificial Sequence
  Synthetic oligonucleotide
gttactagctgtgtcggtggtactattgcg

SEQ ID NO: 406759 - DNA, 30 bp, Artificial Sequence
  Synthetic oligonucleotide
ctgagtttgcctcgcatcaagcgtattgcg

SEQ ID NO: 406760 - DNA, 30 bp, Artificial Sequence
  Synthetic oligonucleotide
gcagcaagtttattaccagcttgtattgcg

SEQ ID NO: 406761 - DNA, 30 bp, Artificial Sequence
  Synthetic oligonucleotide
agagtattttctcaataattttgtattgcg

SEQ ID NO: 406762 - DNA, 30 bp, Artificial Sequence
  Synthetic oligonucleotide
ggcccctggatctgggtatgattccttgcg

SEQ ID NO: 406763 - DNA, 30 bp, Artificial Sequence
  Synthetic oligonucleotide
gtagttgtatgtttaccttttttccttgcg

SEQ ID NO: 406764 - DNA, 30 bp, Artificial Sequence
  Synthetic oligonucleotide
gtattgccccgacctctagtcaggcttgcg

SEQ ID NO: 406765 - DNA, 30 bp, Artificial Sequence
  Synthetic oligonucleotide
gctggcaaatggtatgttgggtgtcttgcg

SEQ ID NO: 406766 - DNA, 30 bp, Artificial Sequence
  Synthetic oligonucleotide
gcgccccactatataaattagatcgttgcg

SEQ ID NO: 406767 - DNA, 30 bp, Artificial Sequence
  Synthetic oligonucleotide
ctcgaaacggttcgtttgcctttcgttgcg

SEQ ID NO: 406768 - DNA, 30 bp, Artificial Sequence
  Synthetic oligonucleotide
acggaagcttgggtaaggcagaaggttgcg

SEQ ID NO: 406769 - DNA, 30 bp, Artificial Sequence
  Synthetic oligonucleotide
ttgtgtacttgctcctgtacaatggttgcg

SEQ ID NO: 406770 - DNA, 30 bp, Artificial Sequence
  Synthetic oligonucleotide
gtacttaggcgtctccgtgatcaatttgcg

SEQ ID NO: 406771 - DNA, 30 bp, Artificial Sequence
  Synthetic oligonucleotide
cagcacagcacaggtctaatggaatttgcg

SEQ ID NO: 406772 - DNA, 30 bp, Artificial Sequence
  Synthetic oligonucleotide
tagattgggggctccggatagtaatttgcg

SEQ ID NO: 406773 - DNA, 30 bp, Artificial Sequence
  Synthetic oligonucleotide
cggcatgctatcgatcctatcatatttgcg

SEQ ID NO: 406774 - DNA, 30 bp, Artificial Sequence
  Synthetic oligonucleotide
aaacctctgcgtgcattcagcctctttgcg

SEQ ID NO: 406775 - DNA, 30 bp, Artificial Sequence
  Synthetic oligonucleotide
aatacatacgccctgtttttagcgtttgcg

SEQ ID NO: 406776 - DNA, 30 bp, Artificial Sequence
  Synthetic oligonucleotide
tcacaacttgtatgatggacttcgtttgcg

SEQ ID NO: 406777 - DNA, 30 bp, Artificial Sequence
  Synthetic oligonucleotide
aggtcggacccgtaagggccactttttgcg

SEQ ID NO: 406778 - DNA, 30 bp, Artificial Sequence
  Synthetic oligonucleotide
gactgataagcatgtcgaccgctttttgcg

SEQ ID NO: 406779 - DNA, 30 bp, Artificial Sequence
  Synthetic oligonucleotide
ataagattcaatgaagtctttctttttgcg

SEQ ID NO: 406780 - DNA, 30 bp, Artificial Sequence
  Synthetic oligonucleotide
tcccgggatttgccactggctgtcaaatcg

SEQ ID NO: 406781 - DNA, 30 bp, Artificial Sequence
  Synthetic oligonucleotide
attatatacggtttgttcattgaccaatcg

SEQ ID NO: 406782 - DNA, 30 bp, Artificial Sequence
  Synthetic oligonucleotide
tcgcaggacagacagttgccaggccaatcg

SEQ ID NO: 406783 - DNA, 30 bp, Artificial Sequence
  Synthetic oligonucleotide
actgttttggagtcaagacaagcagaatcg

SEQ ID NO: 406784 - DNA, 30 bp, Artificial Sequence
  Synthetic oligonucleotide
agaaaagaaaagggcccaaatatagaatcg

SEQ ID NO: 406785 - DNA, 30 bp, Artificial Sequence
  Synthetic oligonucleotide
ggactagtcctgaaacgggtacacgaatcg

SEQ ID NO: 406786 - DNA, 30 bp, Artificial Sequence
  Synthetic oligonucleotide
cctccaataggggcagcggtcgacgaatcg

SEQ ID NO: 406787 - DNA, 30 bp, Artificial Sequence
  Synthetic oligonucleotide
ggcttcgcaaactcgtacgtagaggaatcg

SEQ ID NO: 406788 - DNA, 30 bp, Artificial Sequence
  Synthetic oligonucleotide
gcggaacgattgacacagtccactgaatcg

SEQ ID NO: 406789 - DNA, 30 bp, Artificial Sequence
  Synthetic oligonucleotide
gaggagcaggcggcaacttcagttgaatcg

SEQ ID NO: 406790 - DNA, 30 bp, Artificial Sequence
  Synthetic oligonucleotide
tgggcacatatggtattctagaaataatcg

SEQ ID NO: 406791 - DNA, 30 bp, Artificial Sequence
  Synthetic oligonucleotide
agtgatatcaattggaatttgccctaatcg

SEQ ID NO: 406792 - DNA, 30 bp, Artificial Sequence
  Synthetic oligonucleotide
gctattgttagccgggaaatcggctaatcg

SEQ ID NO: 406793 - DNA, 30 bp, Artificial Sequence
  Synthetic oligonucleotide
tacggtcttataatcgggtatttctaatcg

SEQ ID NO: 406794 - DNA, 30 bp, Artificial Sequence
  Synthetic oligonucleotide
actgcagcagctccaatctggcagtaatcg

SEQ ID NO: 406795 - DNA, 30 bp, Artificial Sequence
  Synthetic oligonucleotide
caaacgctctggtttcatcctgtttaatcg

SEQ ID NO: 406796 - DNA, 31 bp, Artificial Sequence
  Synthetic oligonucleotide
gagcaagtaggcggtgctcgatgtaacatcg

SEQ ID NO: 406797 - DNA, 30 bp, Artificial Sequence
  Synthetic oligonucleotide
taacagttgcaatgaatacatttaacatcg

SEQ ID NO: 406798 - DNA, 30 bp, Artificial Sequence
  Synthetic oligonucleotide
ggctgcgggggcctcagtcatgacacatcg

SEQ ID NO: 406799 - DNA, 30 bp, Artificial Sequence
  Synthetic oligonucleotide
aaagttatgttacctcctaggaagacatcg

SEQ ID NO: 406800 - DNA, 30 bp, Artificial Sequence
  Synthetic oligonucleotide
tcaatgttacggtttatcctagggacatcg

SEQ ID NO: 406801 - DNA, 30 bp, Artificial Sequence
  Synthetic oligonucleotide
tcccttccgtcttgggatatggtgacatcg

SEQ ID NO: 406802 - DNA, 30 bp, Artificial Sequence
  Synthetic oligonucleotide
gccctagttaatacaaatgttaatacatcg

SEQ ID NO: 406803 - DNA, 30 bp, Artificial Sequence
  Synthetic oligonucleotide
ttgctgtatatgagacacgatcatacatcg

SEQ ID NO: 406804 - DNA, 30 bp, Artificial Sequence
  Synthetic oligonucleotide
gaagtgtcgtgtaacgaacccgatacatcg

SEQ ID NO: 406805 - DNA, 30 bp, Artificial Sequence
  Synthetic oligonucleotide
tataactgttaatgggtcgtcggtacatcg

SEQ ID NO: 406806 - DNA, 30 bp, Artificial Sequence
  Synthetic oligonucleotide
gctattccagataaggggcacctaccatcg

SEQ ID NO: 406807 - DNA, 30 bp, Artificial Sequence
  Synthetic oligonucleotide
aagggtgaggcacggaggcttatcccatcg

SEQ ID NO: 406808 - DNA, 30 bp, Artificial Sequence
  Synthetic oligonucleotide
taggccttgcccgaccgcaggcatccatcg

SEQ ID NO: 406809 - DNA, 30 bp, Artificial Sequence
  Synthetic oligonucleotide
acaagatatctggctattgcgtaagcatcg

SEQ ID NO: 406810 - DNA, 30 bp, Artificial Sequence
  Synthetic oligonucleotide
gggatgccaatgttccattgaacagcatcg

SEQ ID NO: 406811 - DNA, 30 bp, Artificial Sequence
  Synthetic oligonucleotide
gtctggggaacttcaaaatctgcggcatcg

SEQ ID NO: 406812 - DNA, 30 bp, Artificial Sequence
  Synthetic oligonucleotide
gaggattccgcctcattaaagaatgcatcg

SEQ ID NO: 406813 - DNA, 30 bp, Artificial Sequence
  Synthetic oligonucleotide
gcaagattttacgggcaccggactgcatcg

SEQ ID NO: 406814 - DNA, 30 bp, Artificial Sequence
  Synthetic oligonucleotide
ggtgctagtgtctcggtggcccaatcatcg

SEQ ID NO: 406815 - DNA, 30 bp, Artificial Sequence
  Synthetic oligonucleotide
attacatacacggaggccacggaatcatcg

SEQ ID NO: 406816 - DNA, 30 bp, Artificial Sequence
  Synthetic oligonucleotide
taaaggtaagtgctgggtgaaggctcatcg

SEQ ID NO: 406817 - DNA, 30 bp, Artificial Sequence
  Synthetic oligonucleotide
gaccgggcggtaaaacgatagacgtcatcg

SEQ ID NO: 406818 - DNA, 30 bp, Artificial Sequence
  Synthetic oligonucleotide
aatatgccgcggtgatggccagtgtcatcg

SEQ ID NO: 406819 - DNA, 30 bp, Artificial Sequence
  Synthetic oligonucleotide
tccgctcgagtgagggtacttccttcatcg

SEQ ID NO: 406820 - DNA, 30 bp, Artificial Sequence
  Synthetic oligonucleotide
gtgatcacggtgattttgtctcacagatcg

SEQ ID NO: 406821 - DNA, 30 bp, Artificial Sequence
  Synthetic oligonucleotide
gtccgttctctttcctcagctttgagatcg

SEQ ID NO: 406822 - DNA, 30 bp, Artificial Sequence
  Synthetic oligonucleotide
cttgttgagtcaagttagtggattagatcg

SEQ ID NO: 406823 - DNA, 30 bp, Artificial Sequence
  Synthetic oligonucleotide
cgaaggcgttggaaaggaacacttagatcg

SEQ ID NO: 406824 - DNA, 30 bp, Artificial Sequence
  Synthetic oligonucleotide
gcacattcaatcgccttattattccgatcg

SEQ ID NO: 406825 - DNA, 30 bp, Artificial Sequence
  Synthetic oligonucleotide
gtctggcagagtgataacttagcaggatcg

SEQ ID NO: 406826 - DNA, 31 bp, Artificial Sequence
  Synthetic oligonucleotide
aagcagacgtataatgtcgttcgtaggatcg

SEQ ID NO: 406827 - DNA, 30 bp, Artificial Sequence
  Synthetic oligonucleotide
tgatggagagtacttggagaccggggatcg

SEQ ID NO: 406828 - DNA, 30 bp, Artificial Sequence
  Synthetic oligonucleotide
gcgtgatcctaacatgataccatgggatcg

SEQ ID NO: 406829 - DNA, 30 bp, Artificial Sequence
  Synthetic oligonucleotide
gcctttggtcaaaaaaaggggcctggatcg

SEQ ID NO: 406830 - DNA, 30 bp, Artificial Sequence
  Synthetic oligonucleotide
cgatggtgatccacacgcctggaatgatcg

SEQ ID NO: 406831 - DNA, 30 bp, Artificial Sequence
  Synthetic oligonucleotide
catacggagatgtatccggtgtaatgatcg

SEQ ID NO: 406832 - DNA, 30 bp, Artificial Sequence
  Synthetic oligonucleotide
tctttatgaatgtgaggtaagcggtgatcg

SEQ ID NO: 406833 - DNA, 30 bp, Artificial Sequence
  Synthetic oligonucleotide
catgatatggtacacgtttgacccatatcg

SEQ ID NO: 406834 - DNA, 30 bp, Artificial Sequence
  Synthetic oligonucleotide
atttcaccatgtcgcttgtcagccatatcg

SEQ ID NO: 406835 - DNA, 30 bp, Artificial Sequence
  Synthetic oligonucleotide
gtctttagggtacggacgtaaagcatatcg

SEQ ID NO: 406836 - DNA, 30 bp, Artificial Sequence
  Synthetic oligonucleotide
attctaatcgtccatgcatgatgcatatcg

SEQ ID NO: 406837 - DNA, 30 bp, Artificial Sequence
  Synthetic oligonucleotide
ccctccattaacgttagtgctgggatatcg

SEQ ID NO: 406838 - DNA, 31 bp, Artificial Sequence
  Synthetic oligonucleotide
gttcctggggagaagaatgcaagtgatatcg

SEQ ID NO: 406839 - DNA, 30 bp, Artificial Sequence
  Synthetic oligonucleotide
atttagccgagaaggtaaacgagtatatcg

SEQ ID NO: 406840 - DNA, 30 bp, Artificial Sequence
  Synthetic oligonucleotide
cgcagccagacaggacgtcgcatactatcg

SEQ ID NO: 406841 - DNA, 30 bp, Artificial Sequence
  Synthetic oligonucleotide
taataacaaagcccgccgaacaccctatcg

SEQ ID NO: 406842 - DNA, 30 bp, Artificial Sequence
  Synthetic oligonucleotide
ctctgactaccggtgtgtcagtgtctatcg

SEQ ID NO: 406843 - DNA, 30 bp, Artificial Sequence
  Synthetic oligonucleotide
tggaggccaagcctctcagagattctatcg

SEQ ID NO: 406844 - DNA, 30 bp, Artificial Sequence
  Synthetic oligonucleotide
tatggtgtgggttcgttagttcttctatcg

SEQ ID NO: 406845 - DNA, 30 bp, Artificial Sequence
  Synthetic oligonucleotide
ctaataacataacgcaggggcccagtatcg

SEQ ID NO: 406846 - DNA, 30 bp, Artificial Sequence
  Synthetic oligonucleotide
attttgcccagaggttactagcgagtatcg

SEQ ID NO: 406847 - DNA, 30 bp, Artificial Sequence
  Synthetic oligonucleotide
tgtacttagcatactagaatcctagtatcg

SEQ ID NO: 406848 - DNA, 30 bp, Artificial Sequence
  Synthetic oligonucleotide
gtttctttgcattcccaagggaaggtatcg

SEQ ID NO: 406849 - DNA, 30 bp, Artificial Sequence
  Synthetic oligonucleotide
cgtctaatgctgcgggcactatgggtatcg

SEQ ID NO: 406850 - DNA, 30 bp, Artificial Sequence
  Synthetic oligonucleotide
gttcatgccggggcaacagctctggtatcg

SEQ ID NO: 406851 - DNA, 30 bp, Artificial Sequence
  Synthetic oligonucleotide
gagtattgactcaccggataattggtatcg

SEQ ID NO: 406852 - DNA, 30 bp, Artificial Sequence
  Synthetic oligonucleotide
ggggtgtcgacaccgggtagtgttgtatcg

SEQ ID NO: 406853 - DNA, 31 bp, Artificial Sequence
  Synthetic oligonucleotide
gcgacgcacatgcgccagaggcctattatcg

SEQ ID NO: 406854 - DNA, 30 bp, Artificial Sequence
  Synthetic oligonucleotide
tttgcccacgggtctcacctcgggttatcg

SEQ ID NO: 406855 - DNA, 30 bp, Artificial Sequence
  Synthetic oligonucleotide
ctgatgtagacgtaaacgcggcctttatcg

SEQ ID NO: 406856 - DNA, 30 bp, Artificial Sequence
  Synthetic oligonucleotide
gaatccttaacaaggctgggatgtttatcg

SEQ ID NO: 406857 - DNA, 30 bp, Artificial Sequence
  Synthetic oligonucleotide
attggatatgctcaaagtgaaattttatcg

SEQ ID NO: 406858 - DNA, 30 bp, Artificial Sequence
  Synthetic oligonucleotide
ccctgctatcgcggctattctacgaactcg

SEQ ID NO: 406859 - DNA, 30 bp, Artificial Sequence
  Synthetic oligonucleotide
caaaaggcggagattgagttcgtgaactcg

SEQ ID NO: 406860 - DNA, 30 bp, Artificial Sequence
  Synthetic oligonucleotide
ttcaattagggtgggtctttttcccactcg

SEQ ID NO: 406861 - DNA, 30 bp, Artificial Sequence
  Synthetic oligonucleotide
gcccacattagcgataggacacgccactcg

SEQ ID NO: 406862 - DNA, 30 bp, Artificial Sequence
  Synthetic oligonucleotide
cttttaatagggggaaatattggccactcg

SEQ ID NO: 406863 - DNA, 30 bp, Artificial Sequence
  Synthetic oligonucleotide
atcttcttttaccctgaaacgtagcactcg

SEQ ID NO: 406864 - DNA, 30 bp, Artificial Sequence
  Synthetic oligonucleotide
ttaaaccaagaagagtttcattcgcactcg

SEQ ID NO: 406865 - DNA, 30 bp, Artificial Sequence
  Synthetic oligonucleotide
acttgggaaaccgcgtctcagatgcactcg

SEQ ID NO: 406866 - DNA, 30 bp, Artificial Sequence
  Synthetic oligonucleotide
ctttcgcttatagcggggaacgtgcactcg

SEQ ID NO: 406867 - DNA, 30 bp, Artificial Sequence
  Synthetic oligonucleotide
gtttagtggggatagcaggctcctcactcg

SEQ ID NO: 406868 - DNA, 30 bp, Artificial Sequence
  Synthetic oligonucleotide
gctgcctacgtatatggtcacggtcactcg

SEQ ID NO: 406869 - DNA, 30 bp, Artificial Sequence
  Synthetic oligonucleotide
gagtacatttttgatccgctttaagactcg

SEQ ID NO: 406870 - DNA, 30 bp, Artificial Sequence
  Synthetic oligonucleotide
ctgagagttatcgttactcttggaacctcg

SEQ ID NO: 406871 - DNA, 30 bp, Artificial Sequence
  Synthetic oligonucleotide
accgcggtctagccagcagtccagacctcg

SEQ ID NO: 406872 - DNA, 30 bp, Artificial Sequence
  Synthetic oligonucleotide
actcactgtcgagcgcttggctttacctcg

SEQ ID NO: 406873 - DNA, 30 bp, Artificial Sequence
  Synthetic oligonucleotide
gcattttatgtggtcgctggatacccctcg

SEQ ID NO: 406874 - DNA, 30 bp, Artificial Sequence
  Synthetic oligonucleotide
cggcctaaaacctctgtaacgatagcctcg

SEQ ID NO: 406875 - DNA, 30 bp, Artificial Sequence
  Synthetic oligonucleotide
agcactttgtggaagaagaggttagcctcg

SEQ ID NO: 406876 - DNA, 30 bp, Artificial Sequence
  Synthetic oligonucleotide
aaggtaggttccatgtagaaacacgcctcg

SEQ ID NO: 406877 - DNA, 30 bp, Artificial Sequence
  Synthetic oligonucleotide
ggatttcgcgggttttaatgtcaggcctcg

SEQ ID NO: 406878 - DNA, 30 bp, Artificial Sequence
  Synthetic oligonucleotide
tgatcggagcggctcgtggttagggcctcg

SEQ ID NO: 406879 - DNA, 30 bp, Artificial Sequence
  Synthetic oligonucleotide
agactatttggggcagcaaaccaatcctcg

SEQ ID NO: 406880 - DNA, 30 bp, Artificial Sequence
  Synthetic oligonucleotide
cggttcgagaggtagctcgaccaatcctcg

SEQ ID NO: 406881 - DNA, 30 bp, Artificial Sequence
  Synthetic oligonucleotide
ggaattatgaagcaaaaatttttatcctcg

SEQ ID NO: 406882 - DNA, 30 bp, Artificial Sequence
  Synthetic oligonucleotide
gtcgtcttaggccggtaatgccacagctcg

SEQ ID NO: 406883 - DNA, 30 bp, Artificial Sequence
  Synthetic oligonucleotide
ttagggtcagattctcaagactagagctcg

SEQ ID NO: 406884 - DNA, 30 bp, Artificial Sequence
  Synthetic oligonucleotide
gccggttttccgtgttgatcaaggagctcg

SEQ ID NO: 406885 - DNA, 30 bp, Artificial Sequence
  Synthetic oligonucleotide
ccatcacttggcggcataaaatggagctcg

SEQ ID NO: 406886 - DNA, 30 bp, Artificial Sequence
  Synthetic oligonucleotide
agaaacagagctcggctaacgcttagctcg

SEQ ID NO: 406887 - DNA, 30 bp, Artificial Sequence
  Synthetic oligonucleotide
cctctaagctaggttttatgagttagctcg

SEQ ID NO: 406888 - DNA, 30 bp, Artificial Sequence
  Synthetic oligonucleotide
tgtcatgattaagcacagtattttagctcg

SEQ ID NO: 406889 - DNA, 30 bp, Artificial Sequence
  Synthetic oligonucleotide
aagtgtgcacgcgcgaaatggaaacgctcg

SEQ ID NO: 406890 - DNA, 30 bp, Artificial Sequence
  Synthetic oligonucleotide
gcaggggcctcaacgcattttcgacgctcg

SEQ ID NO: 406891 - DNA, 30 bp, Artificial Sequence
  Synthetic oligonucleotide
taccgatgccggtcactgtattcccgctcg

SEQ ID NO: 406892 - DNA, 30 bp, Artificial Sequence
  Synthetic oligonucleotide
tcagaatttcgtgcgcgtataggccgctcg

SEQ ID NO: 406893 - DNA, 30 bp, Artificial Sequence
  Synthetic oligonucleotide
atgacctggtttcgtttgatatgccgctcg

SEQ ID NO: 406894 - DNA, 30 bp, Artificial Sequence
  Synthetic oligonucleotide
taggtgacagtgctaaacttattccgctcg

SEQ ID NO: 406895 - DNA, 30 bp, Artificial Sequence
  Synthetic oligonucleotide
ttatgttctgaatatctatacttccgctcg

SEQ ID NO: 406896 - DNA, 30 bp, Artificial Sequence
  Synthetic oligonucleotide
atgatcacgacgcccatttaggtgcgctcg

SEQ ID NO: 406897 - DNA, 31 bp, Artificial Sequence
  Synthetic oligonucleotide
tggtaggcctgatcggagatccttgcgctcg

SEQ ID NO: 406898 - DNA, 29 bp, Artificial Sequence
  Synthetic oligonucleotide
actccttagtgggtcattctgatcgctcg

SEQ ID NO: 406899 - DNA, 30 bp, Artificial Sequence
  Synthetic oligonucleotide
atctactgcggaggttgtttaggaggctcg

SEQ ID NO: 406900 - DNA, 30 bp, Artificial Sequence
  Synthetic oligonucleotide
tcgtcgaatctcggatgagacacgggctcg

SEQ ID NO: 406901 - DNA, 30 bp, Artificial Sequence
  Synthetic oligonucleotide
tactctgaccaattgcttttttcatgctcg

SEQ ID NO: 406902 - DNA, 30 bp, Artificial Sequence
  Synthetic oligonucleotide
aaagttaatcctcagtgacaactatgctcg

SEQ ID NO: 406903 - DNA, 30 bp, Artificial Sequence
  Synthetic oligonucleotide
gtacatgtaatacaggactacggctgctcg

SEQ ID NO: 406904 - DNA, 30 bp, Artificial Sequence
  Synthetic oligonucleotide
gagtatctaccgcgagagtagacgtgctcg

SEQ ID NO: 406905 - DNA, 30 bp, Artificial Sequence
  Synthetic oligonucleotide
tttatcgaagcaggacaactgctttgctcg

SEQ ID NO: 406906 - DNA, 30 bp, Artificial Sequence
  Synthetic oligonucleotide
ataagcatggattctcttcctaacatctcg

SEQ ID NO: 406907 - DNA, 30 bp, Artificial Sequence
  Synthetic oligonucleotide
tgaaattctcgctactaatttttcatctcg

SEQ ID NO: 406908 - DNA, 30 bp, Artificial Sequence
  Synthetic oligonucleotide
ccaacaagaggctatcccgcatagctctcg

SEQ ID NO: 406909 - DNA, 30 bp, Artificial Sequence
  Synthetic oligonucleotide
aaaatccgtctctaggtgcttccgctctcg

SEQ ID NO: 406910 - DNA, 30 bp, Artificial Sequence
  Synthetic oligonucleotide
aaaaactggacatttcgaacgaggctctcg

SEQ ID NO: 406911 - DNA, 30 bp, Artificial Sequence
  Synthetic oligonucleotide
agaacgtgtctcgagatttagggtctctcg

SEQ ID NO: 406912 - DNA, 30 bp, Artificial Sequence
  Synthetic oligonucleotide
gaatatcaataacagttatttgccgtctcg

SEQ ID NO: 406913 - DNA, 30 bp, Artificial Sequence
  Synthetic oligonucleotide
aatgtcaccccatccgtggcgggcgtctcg

SEQ ID NO: 406914 - DNA, 30 bp, Artificial Sequence
  Synthetic oligonucleotide
tcaatccatttgccaacactggaggtctcg

SEQ ID NO: 406915 - DNA, 30 bp, Artificial Sequence
  Synthetic oligonucleotide
gtgccccatacctggttcaccctggtctcg

SEQ ID NO: 406916 - DNA, 30 bp, Artificial Sequence
  Synthetic oligonucleotide
gccgattgaaccactatagctagtgtctcg

SEQ ID NO: 406917 - DNA, 30 bp, Artificial Sequence
  Synthetic oligonucleotide
taggagaaggatgtagcacactgtgtctcg

SEQ ID NO: 406918 - DNA, 30 bp, Artificial Sequence
  Synthetic oligonucleotide
aactctgtgacagtacgggaaagattctcg

SEQ ID NO: 406919 - DNA, 30 bp, Artificial Sequence
  Synthetic oligonucleotide
ctggtagcacaagccctgtaggtattctcg

SEQ ID NO: 406920 - DNA, 30 bp, Artificial Sequence
  Synthetic oligonucleotide
cttgacagtcggtcctgatcagccttctcg

SEQ ID NO: 406921 - DNA, 30 bp, Artificial Sequence
  Synthetic oligonucleotide
cgacgatgaccgttcacggccatcttctcg

SEQ ID NO: 406922 - DNA, 30 bp, Artificial Sequence
  Synthetic oligonucleotide
aatcgcgctgtcatacctatcgcgttctcg

SEQ ID NO: 406923 - DNA, 30 bp, Artificial Sequence
  Synthetic oligonucleotide
cggtcgtaggggatgatcgcagggttctcg

SEQ ID NO: 406924 - DNA, 30 bp, Artificial Sequence
  Synthetic oligonucleotide
atatcgtgtgtgatgcagaagtgtttctcg

SEQ ID NO: 406925 - DNA, 30 bp, Artificial Sequence
  Synthetic oligonucleotide
aaacaagatttgccatctgatttacagtcg

SEQ ID NO: 406926 - DNA, 30 bp, Artificial Sequence
  Synthetic oligonucleotide
gtagctcatgactcaatcttccaccagtcg

SEQ ID NO: 406927 - DNA, 30 bp, Artificial Sequence
  Synthetic oligonucleotide
ctacgattatgtggcaagacggcgcagtcg

SEQ ID NO: 406928 - DNA, 30 bp, Artificial Sequence
  Synthetic oligonucleotide
gttgcgctagtaccttcctcttcgcagtcg

SEQ ID NO: 406929 - DNA, 30 bp, Artificial Sequence
  Synthetic oligonucleotide
gaacacttgttacttggtcaggatcagtcg

SEQ ID NO: 406930 - DNA, 30 bp, Artificial Sequence
  Synthetic oligonucleotide
ccttcaaccggtgcgcaacgcacagagtcg

SEQ ID NO: 406931 - DNA, 30 bp, Artificial Sequence
  Synthetic oligonucleotide
gagtctagttcttatataactcaatagtcg

SEQ ID NO: 406932 - DNA, 30 bp, Artificial Sequence
  Synthetic oligonucleotide
aaaatctagtaggaccctctaaggtagtcg

SEQ ID NO: 406933 - DNA, 30 bp, Artificial Sequence
  Synthetic oligonucleotide
caagtcgtcagatccacatgtttttagtcg

SEQ ID NO: 406934 - DNA, 30 bp, Artificial Sequence
  Synthetic oligonucleotide
tcaagattgcccgtcaaagccgaaacgtcg

SEQ ID NO: 406935 - DNA, 30 bp, Artificial Sequence
  Synthetic oligonucleotide
gctatggatgatttcacgggtaacacgtcg

SEQ ID NO: 406936 - DNA, 30 bp, Artificial Sequence
  Synthetic oligonucleotide
atactgttcaaacaacaccgacgcacgtcg

SEQ ID NO: 406937 - DNA, 30 bp, Artificial Sequence
  Synthetic oligonucleotide
gtaccctacgccacggcccgcaagacgtcg

SEQ ID NO: 406938 - DNA, 30 bp, Artificial Sequence
  Synthetic oligonucleotide
ctgtcttgggtaggctgacggtcgacgtcg

SEQ ID NO: 406939 - DNA, 30 bp, Artificial Sequence
  Synthetic oligonucleotide
atcttcccgcgttcactgccaatgacgtcg

SEQ ID NO: 406940 - DNA, 30 bp, Artificial Sequence
  Synthetic oligonucleotide
caggaacatagtcttcgtctattgacgtcg

SEQ ID NO: 406941 - DNA, 30 bp, Artificial Sequence
  Synthetic oligonucleotide
atgacctcacggacggtgttattaccgtcg

SEQ ID NO: 406942 - DNA, 30 bp, Artificial Sequence
  Synthetic oligonucleotide
ctttaagcctggggatgagctgccccgtcg

SEQ ID NO: 406943 - DNA, 30 bp, Artificial Sequence
  Synthetic oligonucleotide
ctttgcaaatctcttggtgggctcccgtcg

SEQ ID NO: 406944 - DNA, 30 bp, Artificial Sequence
  Synthetic oligonucleotide
cagtggcccatggtattcggcgtagcgtcg

SEQ ID NO: 406945 - DNA, 30 bp, Artificial Sequence
  Synthetic oligonucleotide
ttcgccgaaattcctctccataacgcgtcg

SEQ ID NO: 406946 - DNA, 30 bp, Artificial Sequence
  Synthetic oligonucleotide
caactgctttagtatataattgtcgcgtcg

SEQ ID NO: 406947 - DNA, 30 bp, Artificial Sequence
  Synthetic oligonucleotide
tataccagcaatatcccttccaaggcgtcg

SEQ ID NO: 406948 - DNA, 30 bp, Artificial Sequence
  Synthetic oligonucleotide
ttagaaaatgtattcaatgcgccggcgtcg

SEQ ID NO: 406949 - DNA, 30 bp, Artificial Sequence
  Synthetic oligonucleotide
gcgaacgagcacgtccggacggcggcgtcg

SEQ ID NO: 406950 - DNA, 30 bp, Artificial Sequence
  Synthetic oligonucleotide
gtcccgtgtagaaccagtattaaatcgtcg

SEQ ID NO: 406951 - DNA, 30 bp, Artificial Sequence
  Synthetic oligonucleotide
gttttatcccgcattttagggcagtcgtcg

SEQ ID NO: 406952 - DNA, 30 bp, Artificial Sequence
  Synthetic oligonucleotide
agtgatcagcagacgcttccgacgtcgtcg

SEQ ID NO: 406953 - DNA, 30 bp, Artificial Sequence
  Synthetic oligonucleotide
ccctgggtctctcatacagggaggtcgtcg

SEQ ID NO: 406954 - DNA, 30 bp, Artificial Sequence
  Synthetic oligonucleotide
aatataatcgaaagtagcatgcggtcgtcg

SEQ ID NO: 406955 - DNA, 30 bp, Artificial Sequence
  Synthetic oligonucleotide
aatcagggtgtctgccctatcagttcgtcg

SEQ ID NO: 406956 - DNA, 30 bp, Artificial Sequence
  Synthetic oligonucleotide
gcggccctcacgaaatatgtgggttcgtcg

SEQ ID NO: 406957 - DNA, 30 bp, Artificial Sequence
  Synthetic oligonucleotide
aaccatttgcctgctcgaaccccaaggtcg

SEQ ID NO: 406958 - DNA, 30 bp, Artificial Sequence
  Synthetic oligonucleotide
ttcgtgcttcagctttagtgctacaggtcg

SEQ ID NO: 406959 - DNA, 30 bp, Artificial Sequence
  Synthetic oligonucleotide
ttggctacgcggtttactatatccaggtcg

SEQ ID NO: 406960 - DNA, 30 bp, Artificial Sequence
  Synthetic oligonucleotide
ttgtaggaccactggctcgtaaataggtcg

SEQ ID NO: 406961 - DNA, 30 bp, Artificial Sequence
  Synthetic oligonucleotide
gcagttgggcttcgatgattcggtaggtcg

SEQ ID NO: 406962 - DNA, 30 bp, Artificial Sequence
  Synthetic oligonucleotide
tgcgcaacaatttctttgcgcgcacggtcg

SEQ ID NO: 406963 - DNA, 30 bp, Artificial Sequence
  Synthetic oligonucleotide
actgtgataacttctgatgtcaagcggtcg

SEQ ID NO: 406964 - DNA, 30 bp, Artificial Sequence
  Synthetic oligonucleotide
gcttctcttgcgcggactgaggtgcggtcg

SEQ ID NO: 406965 - DNA, 30 bp, Artificial Sequence
  Synthetic oligonucleotide
gaaaggtcttatctgtcgcaaatagggtcg

SEQ ID NO: 406966 - DNA, 30 bp, Artificial Sequence
  Synthetic oligonucleotide
aataggagatctaggcaatccgtagggtcg

SEQ ID NO: 406967 - DNA, 30 bp, Artificial Sequence
  Synthetic oligonucleotide
ttccttcgtgcaaagtgccgtatcgggtcg

SEQ ID NO: 406968 - DNA, 30 bp, Artificial Sequence
  Synthetic oligonucleotide
accccggggttaaaattgattatggggtcg

SEQ ID NO: 406969 - DNA, 30 bp, Artificial Sequence
  Synthetic oligonucleotide
gacattgcttggtagtactaagctgggtcg

SEQ ID NO: 406970 - DNA, 30 bp, Artificial Sequence
  Synthetic oligonucleotide
gggcgcggcttcagcctccacacctggtcg

SEQ ID NO: 406971 - DNA, 30 bp, Artificial Sequence
  Synthetic oligonucleotide
gtagtaggtaggtctgcagcgacgtggtcg

SEQ ID NO: 406972 - DNA, 30 bp, Artificial Sequence
  Synthetic oligonucleotide
gctgcatgaagggtccgtgatacgtggtcg

SEQ ID NO: 406973 - DNA, 30 bp, Artificial Sequence
  Synthetic oligonucleotide
aagtccctttctttagtactggattggtcg

SEQ ID NO: 406974 - DNA, 30 bp, Artificial Sequence
  Synthetic oligonucleotide
tttgaacattggccagcttctcaaatgtcg

SEQ ID NO: 406975 - DNA, 30 bp, Artificial Sequence
  Synthetic oligonucleotide
tggtctgtgcaatcgagcataataatgtcg

SEQ ID NO: 406976 - DNA, 30 bp, Artificial Sequence
  Synthetic oligonucleotide
atattagggcatagcgcccctctaatgtcg

SEQ ID NO: 406977 - DNA, 30 bp, Artificial Sequence
  Synthetic oligonucleotide
ttaaatgttactgaggtataattaatgtcg

SEQ ID NO: 406978 - DNA, 30 bp, Artificial Sequence
  Synthetic oligonucleotide
atcgattggtctcgtcggatatacatgtcg

SEQ ID NO: 406979 - DNA, 30 bp, Artificial Sequence
  Synthetic oligonucleotide
aaattttccgccccgtgaagtatcatgtcg

SEQ ID NO: 406980 - DNA, 30 bp, Artificial Sequence
  Synthetic oligonucleotide
agcatgtacttatgacaaagcctcatgtcg

SEQ ID NO: 406981 - DNA, 30 bp, Artificial Sequence
  Synthetic oligonucleotide
gatcctacacgcagaaagcctcaactgtcg

SEQ ID NO: 406982 - DNA, 30 bp, Artificial Sequence
  Synthetic oligonucleotide
tgctcttgagaaagagcaattgcactgtcg

SEQ ID NO: 406983 - DNA, 30 bp, Artificial Sequence
  Synthetic oligonucleotide
caagttatgaggtcgtcacgacacctgtcg

SEQ ID NO: 406984 - DNA, 30 bp, Artificial Sequence
  Synthetic oligonucleotide
gaggtcatgcggtggtgagggtgcctgtcg

SEQ ID NO: 406985 - DNA, 30 bp, Artificial Sequence
  Synthetic oligonucleotide
ggaagcttaatctgtaaaatgtctctgtcg

SEQ ID NO: 406986 - DNA, 30 bp, Artificial Sequence
  Synthetic oligonucleotide
tgccggcacaacataaactcaagtctgtcg

SEQ ID NO: 406987 - DNA, 30 bp, Artificial Sequence
  Synthetic oligonucleotide
gcatccaaacacataagttataatgtgtcg

SEQ ID NO: 406988 - DNA, 30 bp, Artificial Sequence
  Synthetic oligonucleotide
tgtttcactttctgtaaggctattgtgtcg

SEQ ID NO: 406989 - DNA, 30 bp, Artificial Sequence
  Synthetic oligonucleotide
agatggattttttcgttaagagccttgtcg

SEQ ID NO: 406990 - DNA, 30 bp, Artificial Sequence
  Synthetic oligonucleotide
ttgcgcagcaacacacatagggccttgtcg

SEQ ID NO: 406991 - DNA, 30 bp, Artificial Sequence
  Synthetic oligonucleotide
ccaaaacccaagctgtaactgcgcttgtcg

SEQ ID NO: 406992 - DNA, 30 bp, Artificial Sequence
  Synthetic oligonucleotide
caaacgaaaccggcgttttttgggttgtcg

SEQ ID NO: 406993 - DNA, 30 bp, Artificial Sequence
  Synthetic oligonucleotide
agtcgaatcacggtggacatggtgttgtcg

SEQ ID NO: 406994 - DNA, 30 bp, Artificial Sequence
  Synthetic oligonucleotide
ttacttttctcggatttacgcaatttgtcg

SEQ ID NO: 406995 - DNA, 30 bp, Artificial Sequence
  Synthetic oligonucleotide
gagctggtccgggacgtgacgggtttgtcg

SEQ ID NO: 406996 - DNA, 30 bp, Artificial Sequence
  Synthetic oligonucleotide
catcaaagccgcagtaggcagcaaaattcg

SEQ ID NO: 406997 - DNA, 30 bp, Artificial Sequence
  Synthetic oligonucleotide
gattgtttctcagtcagagttcgaaattcg

SEQ ID NO: 406998 - DNA, 30 bp, Artificial Sequence
  Synthetic oligonucleotide
tactctgacctcgagcggtcgggaaattcg

SEQ ID NO: 406999 - DNA, 30 bp, Artificial Sequence
  Synthetic oligonucleotide
gagggcataccgtgttgatacaagaattcg

SEQ ID NO: 407000 - DNA, 30 bp, Artificial Sequence
  Synthetic oligonucleotide
tatattgatcttccatatcgattgaattcg

SEQ ID NO: 407001 - DNA, 30 bp, Artificial Sequence
  Synthetic oligonucleotide
gccacgtctggccgagaggcagataattcg

SEQ ID NO: 407002 - DNA, 30 bp, Artificial Sequence
  Synthetic oligonucleotide
caactcaagcgcacttagggcgctaattcg

SEQ ID NO: 407003 - DNA, 30 bp, Artificial Sequence
  Synthetic oligonucleotide
gatactagccttccgcgtgtcattaattcg

SEQ ID NO: 407004 - DNA, 30 bp, Artificial Sequence
  Synthetic oligonucleotide
atgcgccgggtctgcgctgtctttaattcg

SEQ ID NO: 407005 - DNA, 30 bp, Artificial Sequence
  Synthetic oligonucleotide
tgtattttcgtgggtgagagtgggcattcg

SEQ ID NO: 407006 - DNA, 30 bp, Artificial Sequence
  Synthetic oligonucleotide
attgcgttcgcgttttgcaaatggcattcg

SEQ ID NO: 407007 - DNA, 30 bp, Artificial Sequence
  Synthetic oligonucleotide
gaccttaccctggaagagaacaatcattcg

SEQ ID NO: 407008 - DNA, 30 bp, Artificial Sequence
  Synthetic oligonucleotide
gataaggggggcctgaacaccctagattcg

SEQ ID NO: 407009 - DNA, 30 bp, Artificial Sequence
  Synthetic oligonucleotide
ctagtaattttacgcttacaggccgattcg

SEQ ID NO: 407010 - DNA, 30 bp, Artificial Sequence
  Synthetic oligonucleotide
tcccgctggtcgccctttaatcgcgattcg

SEQ ID NO: 407011 - DNA, 30 bp, Artificial Sequence
  Synthetic oligonucleotide
tctaatcttaatagatagtgaccctattcg

SEQ ID NO: 407012 - DNA, 30 bp, Artificial Sequence
  Synthetic oligonucleotide
aaatctataaattaggcagttagctattcg

SEQ ID NO: 407013 - DNA, 30 bp, Artificial Sequence
  Synthetic oligonucleotide
cataccaggaccccacgatgtctctattcg

SEQ ID NO: 407014 - DNA, 30 bp, Artificial Sequence
  Synthetic oligonucleotide
gtggaaatagttagcccttgtaagtattcg

SEQ ID NO: 407015 - DNA, 30 bp, Artificial Sequence
  Synthetic oligonucleotide
ttatgactcctggttatatgacagtattcg

SEQ ID NO: 407016 - DNA, 30 bp, Artificial Sequence
  Synthetic oligonucleotide
aacagcgttataataccttgaacgtattcg

SEQ ID NO: 407017 - DNA, 30 bp, Artificial Sequence
  Synthetic oligonucleotide
atattattccgtactaaaggctcgtattcg

SEQ ID NO: 407018 - DNA, 30 bp, Artificial Sequence
  Synthetic oligonucleotide
gccgaagatcgtaccgaatggttgtattcg

SEQ ID NO: 407019 - DNA, 30 bp, Artificial Sequence
  Synthetic oligonucleotide
catcaagaacgcgtatgaatgcacacttcg

SEQ ID NO: 407020 - DNA, 30 bp, Artificial Sequence
  Synthetic oligonucleotide
gtgaattattgtaccgaagcatagacttcg

SEQ ID NO: 407021 - DNA, 30 bp, Artificial Sequence
  Synthetic oligonucleotide
catccctactaataggtggaattgacttcg

SEQ ID NO: 407022 - DNA, 30 bp, Artificial Sequence
  Synthetic oligonucleotide
ggttttctttaacaaagagcttggccttcg

SEQ ID NO: 407023 - DNA, 30 bp, Artificial Sequence
  Synthetic oligonucleotide
agtcaagctgacgacgactgttttccttcg

SEQ ID NO: 407024 - DNA, 30 bp, Artificial Sequence
  Synthetic oligonucleotide
gaacagtactgcgtgctgcagcaagcttcg

SEQ ID NO: 407025 - DNA, 30 bp, Artificial Sequence
  Synthetic oligonucleotide
ctgatttactaaatagaccaggaggcttcg

SEQ ID NO: 407026 - DNA, 30 bp, Artificial Sequence
  Synthetic oligonucleotide
tatcattcgcaggaacttagtcctgcttcg

SEQ ID NO: 407027 - DNA, 30 bp, Artificial Sequence
  Synthetic oligonucleotide
atagtaatcggtacacggttctttgcttcg

SEQ ID NO: 407028 - DNA, 30 bp, Artificial Sequence
  Synthetic oligonucleotide
tagttaacgttcgagcaatctgcatcttcg

SEQ ID NO: 407029 - DNA, 30 bp, Artificial Sequence
  Synthetic oligonucleotide
ttgtggcacggatccaactctgactcttcg

SEQ ID NO: 407030 - DNA, 30 bp, Artificial Sequence
  Synthetic oligonucleotide
caggggatgcagaggtagggacgctcttcg

SEQ ID NO: 407031 - DNA, 30 bp, Artificial Sequence
  Synthetic oligonucleotide
gtacgggccaagtcccacatgaggtcttcg

SEQ ID NO: 407032 - DNA, 30 bp, Artificial Sequence
  Synthetic oligonucleotide
ggcagtacagcgctcgtgcatctttcttcg

SEQ ID NO: 407033 - DNA, 30 bp, Artificial Sequence
  Synthetic oligonucleotide
gtagttgtattatgatagatccaaagttcg

SEQ ID NO: 407034 - DNA, 30 bp, Artificial Sequence
  Synthetic oligonucleotide
tagcggttagggcggagggcggcaagttcg

SEQ ID NO: 407035 - DNA, 30 bp, Artificial Sequence
  Synthetic oligonucleotide
gctccatttgtactagctacgggcagttcg

SEQ ID NO: 407036 - DNA, 30 bp, Artificial Sequence
  Synthetic oligonucleotide
gaaaagagcattttggatgtgtctagttcg

SEQ ID NO: 407037 - DNA, 30 bp, Artificial Sequence
  Synthetic oligonucleotide
actgattaagatatgacggaccgtagttcg

SEQ ID NO: 407038 - DNA, 30 bp, Artificial Sequence
  Synthetic oligonucleotide
aagcagcagaggttgataaacgttagttcg

SEQ ID NO: 407039 - DNA, 30 bp, Artificial Sequence
  Synthetic oligonucleotide
ctaagtataagcttaagggccgaacgttcg

SEQ ID NO: 407040 - DNA, 30 bp, Artificial Sequence
  Synthetic oligonucleotide
ggaacacaggttgagtcggccggacgttcg

SEQ ID NO: 407041 - DNA, 30 bp, Artificial Sequence
  Synthetic oligonucleotide
gggctttcatgtgacgatcggaggcgttcg

SEQ ID NO: 407042 - DNA, 30 bp, Artificial Sequence
  Synthetic oligonucleotide
tatctatgagcgtagcaaagttatcgttcg

SEQ ID NO: 407043 - DNA, 30 bp, Artificial Sequence
  Synthetic oligonucleotide
gagaatctggtggtacgtatacttcgttcg

SEQ ID NO: 407044 - DNA, 30 bp, Artificial Sequence
  Synthetic oligonucleotide
tcttttaaaaagtcgttgtgagttcgttcg

SEQ ID NO: 407045 - DNA, 30 bp, Artificial Sequence
  Synthetic oligonucleotide
tctactgctcagtaaagacttctaggttcg

SEQ ID NO: 407046 - DNA, 30 bp, Artificial Sequence
  Synthetic oligonucleotide
ggttttttactactcgcccctatcggttcg

SEQ ID NO: 407047 - DNA, 30 bp, Artificial Sequence
  Synthetic oligonucleotide
gaccgattatatcctctgtagaagggttcg

SEQ ID NO: 407048 - DNA, 30 bp, Artificial Sequence
  Synthetic oligonucleotide
aacgcctaccggaactatatttggggttcg

SEQ ID NO: 407049 - DNA, 30 bp, Artificial Sequence
  Synthetic oligonucleotide
gaccaggagggatcctggtgggatggttcg

SEQ ID NO: 407050 - DNA, 30 bp, Artificial Sequence
  Synthetic oligonucleotide
tcttaatggggttgataggtttaatgttcg

SEQ ID NO: 407051 - DNA, 30 bp, Artificial Sequence
  Synthetic oligonucleotide
ctaaaggggcttacttgatttgcatgttcg

SEQ ID NO: 407052 - DNA, 30 bp, Artificial Sequence
  Synthetic oligonucleotide
acacggtactgggacaatgttttatgttcg

SEQ ID NO: 407053 - DNA, 30 bp, Artificial Sequence
  Synthetic oligonucleotide
aggtaccttggaggcaccgggatgtgttcg

SEQ ID NO: 407054 - DNA, 30 bp, Artificial Sequence
  Synthetic oligonucleotide
gtcttttagttagctctctagctgtgttcg

SEQ ID NO: 407055 - DNA, 30 bp, Artificial Sequence
  Synthetic oligonucleotide
tgcacatagaagtcaagtggggtgtgttcg

SEQ ID NO: 407056 - DNA, 30 bp, Artificial Sequence
  Synthetic oligonucleotide
gcctataggctactacaaatagcaatttcg

SEQ ID NO: 407057 - DNA, 30 bp, Artificial Sequence
  Synthetic oligonucleotide
gggaagataggtccccttatgcccatttcg

SEQ ID NO: 407058 - DNA, 30 bp, Artificial Sequence
  Synthetic oligonucleotide
cagtcgtgctaatgcgacgcctccatttcg

SEQ ID NO: 407059 - DNA, 30 bp, Artificial Sequence
  Synthetic oligonucleotide
tagccgtgagaagtagtaacgatgatttcg

SEQ ID NO: 407060 - DNA, 30 bp, Artificial Sequence
  Synthetic oligonucleotide
atttaatatttttgtgtggtcgttatttcg

SEQ ID NO: 407061 - DNA, 30 bp, Artificial Sequence
  Synthetic oligonucleotide
tcgtacgcaagacaggtcaacagactttcg

SEQ ID NO: 407062 - DNA, 30 bp, Artificial Sequence
  Synthetic oligonucleotide
gacctgcaccatagtcctcggaacctttcg

SEQ ID NO: 407063 - DNA, 30 bp, Artificial Sequence
  Synthetic oligonucleotide
cctattttacgacacggtcgggtcctttcg

SEQ ID NO: 407064 - DNA, 30 bp, Artificial Sequence
  Synthetic oligonucleotide
agcctttaaaaggagtcatcaacgctttcg

SEQ ID NO: 407065 - DNA, 30 bp, Artificial Sequence
  Synthetic oligonucleotide
catgagtccctatagacgaagagtctttcg

SEQ ID NO: 407066 - DNA, 30 bp, Artificial Sequence
  Synthetic oligonucleotide
taacggacctggtgatagtatcttctttcg

SEQ ID NO: 407067 - DNA, 30 bp, Artificial Sequence
  Synthetic oligonucleotide
aaatctcgggtttagtaaaacgaagtttcg

SEQ ID NO: 407068 - DNA, 30 bp, Artificial Sequence
  Synthetic oligonucleotide
aacgtggactgtcgcgacgatgcagtttcg

SEQ ID NO: 407069 - DNA, 30 bp, Artificial Sequence
  Synthetic oligonucleotide
tattacaatccatcggttaggctagtttcg

SEQ ID NO: 407070 - DNA, 30 bp, Artificial Sequence
  Synthetic oligonucleotide
tcttcctgaaacataattagcggcgtttcg

SEQ ID NO: 407071 - DNA, 30 bp, Artificial Sequence
  Synthetic oligonucleotide
tgtctatgaccggcatatgtagttgtttcg

SEQ ID NO: 407072 - DNA, 30 bp, Artificial Sequence
  Synthetic oligonucleotide
taaggtggggaatttacacgtctcttttcg

SEQ ID NO: 407073 - DNA, 30 bp, Artificial Sequence
  Synthetic oligonucleotide
ccagcctaactgacgcatagtaatttttcg

SEQ ID NO: 407074 - DNA, 30 bp, Artificial Sequence
  Synthetic oligonucleotide
ctgatttacaaccattgtgggtaaaaaagg

SEQ ID NO: 407075 - DNA, 30 bp, Artificial Sequence
  Synthetic oligonucleotide
aatagtattgattttacctgcacaaaaagg

SEQ ID NO: 407076 - DNA, 30 bp, Artificial Sequence
  Synthetic oligonucleotide
tttaaataaggaagggccggagcaaaaagg

SEQ ID NO: 407077 - DNA, 30 bp, Artificial Sequence
  Synthetic oligonucleotide
gtcttattgtgttgtgcgctagcaaaaagg

SEQ ID NO: 407078 - DNA, 30 bp, Artificial Sequence
  Synthetic oligonucleotide
ggtatagcgtaatgcagtccgctaaaaagg

SEQ ID NO: 407079 - DNA, 30 bp, Artificial Sequence
  Synthetic oligonucleotide
tgaggcgctcagaggcttttggccaaaagg

SEQ ID NO: 407080 - DNA, 30 bp, Artificial Sequence
  Synthetic oligonucleotide
tcggcctcagccccggtataactgaaaagg

SEQ ID NO: 407081 - DNA, 30 bp, Artificial Sequence
  Synthetic oligonucleotide
acgatgctagcggagcagcttaataaaagg

SEQ ID NO: 407082 - DNA, 30 bp, Artificial Sequence
  Synthetic oligonucleotide
caagtacgacttgtacaaaggcataaaagg

SEQ ID NO: 407083 - DNA, 30 bp, Artificial Sequence
  Synthetic oligonucleotide
gagggagtcacccctccccaagataaaagg

SEQ ID NO: 407084 - DNA, 30 bp, Artificial Sequence
  Synthetic oligonucleotide
taatacaagtagagtcaagtacctaaaagg

SEQ ID NO: 407085 - DNA, 30 bp, Artificial Sequence
  Synthetic oligonucleotide
tttagggccgtcgctagctacgctaaaagg

SEQ ID NO: 407086 - DNA, 30 bp, Artificial Sequence
  Synthetic oligonucleotide
ttctttctattggcatgttcaagtaaaagg

SEQ ID NO: 407087 - DNA, 30 bp, Artificial Sequence
  Synthetic oligonucleotide
acaagtttcataagttgtaggtttaaaagg

SEQ ID NO: 407088 - DNA, 30 bp, Artificial Sequence
  Synthetic oligonucleotide
tcagcagccctacgctagtgtaaacaaagg

SEQ ID NO: 407089 - DNA, 30 bp, Artificial Sequence
  Synthetic oligonucleotide
gagttacgtgcagggagggatacacaaagg

SEQ ID NO: 407090 - DNA, 30 bp, Artificial Sequence
  Synthetic oligonucleotide
caccagctgtcaggtgggtacagacaaagg

SEQ ID NO: 407091 - DNA, 30 bp, Artificial Sequence
  Synthetic oligonucleotide
gaggttgctgaaaaaaaggcagaccaaagg

SEQ ID NO: 407092 - DNA, 30 bp, Artificial Sequence
  Synthetic oligonucleotide
cggggtatggcctctgcggagtaccaaagg

SEQ ID NO: 407093 - DNA, 30 bp, Artificial Sequence
  Synthetic oligonucleotide
gcgggtcgagcggaagtgaggagccaaagg

SEQ ID NO: 407094 - DNA, 30 bp, Artificial Sequence
  Synthetic oligonucleotide
tagtcggcctagactgcccatggtcaaagg

SEQ ID NO: 407095 - DNA, 30 bp, Artificial Sequence
  Synthetic oligonucleotide
taaacaccactttcacacggttttcaaagg

SEQ ID NO: 407096 - DNA, 30 bp, Artificial Sequence
  Synthetic oligonucleotide
caccctggaagtttaaaaccccgagaaagg

SEQ ID NO: 407097 - DNA, 30 bp, Artificial Sequence
  Synthetic oligonucleotide
gtagtacacttccaacaatcgatagaaagg

SEQ ID NO: 407098 - DNA, 30 bp, Artificial Sequence
  Synthetic oligonucleotide
gggagggatagattgacgcgttcggaaagg

SEQ ID NO: 407099 - DNA, 30 bp, Artificial Sequence
  Synthetic oligonucleotide
gtaatttgtctaccatctgcggaataaagg

SEQ ID NO: 407100 - DNA, 30 bp, Artificial Sequence
  Synthetic oligonucleotide
atatcgattgtgagaccacgcacataaagg

SEQ ID NO: 407101 - DNA, 30 bp, Artificial Sequence
  Synthetic oligonucleotide
ccgaggaattggatcttgtcaatataaagg

SEQ ID NO: 407102 - DNA, 30 bp, Artificial Sequence
  Synthetic oligonucleotide
gtcaccgacatatattacctggggtaaagg

SEQ ID NO: 407103 - DNA, 30 bp, Artificial Sequence
  Synthetic oligonucleotide
ctctgtcaacggtgaggccgcacttaaagg

SEQ ID NO: 407104 - DNA, 30 bp, Artificial Sequence
  Synthetic oligonucleotide
ctcgggtggtgggactatgtcatttaaagg

SEQ ID NO: 407105 - DNA, 30 bp, Artificial Sequence
  Synthetic oligonucleotide
aatgtaaaggggtcctcgtgcccgacaagg

SEQ ID NO: 407106 - DNA, 30 bp, Artificial Sequence
  Synthetic oligonucleotide
gccctcttcggttagcatgtcctgacaagg

SEQ ID NO: 407107 - DNA, 30 bp, Artificial Sequence
  Synthetic oligonucleotide
tattagcgctgcataggcaccagtacaagg

SEQ ID NO: 407108 - DNA, 30 bp, Artificial Sequence
  Synthetic oligonucleotide
ttaataacccaggatctggtgattacaagg

SEQ ID NO: 407109 - DNA, 30 bp, Artificial Sequence
  Synthetic oligonucleotide
tctagttgttatccaaggcctttcccaagg

SEQ ID NO: 407110 - DNA, 30 bp, Artificial Sequence
  Synthetic oligonucleotide
gcaggccctggggaggaacactggccaagg

SEQ ID NO: 407111 - DNA, 30 bp, Artificial Sequence
  Synthetic oligonucleotide
attcccattaattcactgtagatagcaagg

SEQ ID NO: 407112 - DNA, 30 bp, Artificial Sequence
  Synthetic oligonucleotide
ctaaaattactcattctattgtcggcaagg

SEQ ID NO: 407113 - DNA, 30 bp, Artificial Sequence
  Synthetic oligonucleotide
cttcccactagcccccacagcagggcaagg

SEQ ID NO: 407114 - DNA, 30 bp, Artificial Sequence
  Synthetic oligonucleotide
agttaaccccgctggctcgagtatgcaagg

SEQ ID NO: 407115 - DNA, 30 bp, Artificial Sequence
  Synthetic oligonucleotide
ggggcaagggatgcccttgcggctgcaagg

SEQ ID NO: 407116 - DNA, 30 bp, Artificial Sequence
  Synthetic oligonucleotide
ttcaagttgagctcagacacacaatcaagg

SEQ ID NO: 407117 - DNA, 30 bp, Artificial Sequence
  Synthetic oligonucleotide
gttacacgggggcgtcagccgtcatcaagg

SEQ ID NO: 407118 - DNA, 30 bp, Artificial Sequence
  Synthetic oligonucleotide
aaagtttgcttggcgcatagggtatcaagg

SEQ ID NO: 407119 - DNA, 30 bp, Artificial Sequence
  Synthetic oligonucleotide
ccaggggttttatacaggtcattatcaagg

SEQ ID NO: 407120 - DNA, 30 bp, Artificial Sequence
  Synthetic oligonucleotide
aagcaccgcgttcagcgatttacctcaagg

SEQ ID NO: 407121 - DNA, 30 bp, Artificial Sequence
  Synthetic oligonucleotide
cttaattcatactcctattttttctcaagg

SEQ ID NO: 407122 - DNA, 30 bp, Artificial Sequence
  Synthetic oligonucleotide
gtggcgcactgccagaggaggcagtcaagg

SEQ ID NO: 407123 - DNA, 30 bp, Artificial Sequence
  Synthetic oligonucleotide
tataaccaactgtcatggttatagtcaagg

SEQ ID NO: 407124 - DNA, 30 bp, Artificial Sequence
  Synthetic oligonucleotide
cattgatgtatgatcgtggacacgagaagg

SEQ ID NO: 407125 - DNA, 30 bp, Artificial Sequence
  Synthetic oligonucleotide
aggatgtgattttcagaattgttccgaagg

SEQ ID NO: 407126 - DNA, 30 bp, Artificial Sequence
  Synthetic oligonucleotide
agcctggactcattattacgctagcgaagg

SEQ ID NO: 407127 - DNA, 30 bp, Artificial Sequence
  Synthetic oligonucleotide
ctggtgttttcggcgttggtcgcgcgaagg

SEQ ID NO: 407128 - DNA, 30 bp, Artificial Sequence
  Synthetic oligonucleotide
gcacatcacggcgtgtatgtgcggcgaagg

SEQ ID NO: 407129 - DNA, 30 bp, Artificial Sequence
  Synthetic oligonucleotide
aaagtctcatgtgggtcgctcggcggaagg

SEQ ID NO: 407130 - DNA, 30 bp, Artificial Sequence
  Synthetic oligonucleotide
ttgttcatatcgtaccattgagtcggaagg

SEQ ID NO: 407131 - DNA, 30 bp, Artificial Sequence
  Synthetic oligonucleotide
ttggaaggttggcacagatcgaagggaagg

SEQ ID NO: 407132 - DNA, 30 bp, Artificial Sequence
  Synthetic oligonucleotide
tgtttaatctgtgattcaggatggggaagg

SEQ ID NO: 407133 - DNA, 30 bp, Artificial Sequence
  Synthetic oligonucleotide
aggcccggtgtgggtgcaagtgtgggaagg

SEQ ID NO: 407134 - DNA, 30 bp, Artificial Sequence
  Synthetic oligonucleotide
gaccgatcgacccatcatctcggtggaagg

SEQ ID NO: 407135 - DNA, 30 bp, Artificial Sequence
  Synthetic oligonucleotide
ttcgcgctattaatggcccagggtggaagg

SEQ ID NO: 407136 - DNA, 30 bp, Artificial Sequence
  Synthetic oligonucleotide
ctttatgcccactctgtgtgtccttgaagg

SEQ ID NO: 407137 - DNA, 30 bp, Artificial Sequence
  Synthetic oligonucleotide
cggcatggcgatttcggagcgggttgaagg

SEQ ID NO: 407138 - DNA, 30 bp, Artificial Sequence
  Synthetic oligonucleotide
ggcggtatctttttccggatttaaataagg

SEQ ID NO: 407139 - DNA, 30 bp, Artificial Sequence
  Synthetic oligonucleotide
tgccacccatatgatccgaacccaataagg

SEQ ID NO: 407140 - DNA, 30 bp, Artificial Sequence
  Synthetic oligonucleotide
cggcctgcgtcgtaaacacaggtaataagg

SEQ ID NO: 407141 - DNA, 30 bp, Artificial Sequence
  Synthetic oligonucleotide
caagccatcgctctggttcaccagataagg

SEQ ID NO: 407142 - DNA, 30 bp, Artificial Sequence
  Synthetic oligonucleotide
gctacctcctctactctcacaccgataagg

SEQ ID NO: 407143 - DNA, 30 bp, Artificial Sequence
  Synthetic oligonucleotide
actcttgagcgcaaaactccaccgataagg

SEQ ID NO: 407144 - DNA, 30 bp, Artificial Sequence
  Synthetic oligonucleotide
gaggagtgaagcttgaagttatatataagg

SEQ ID NO: 407145 - DNA, 30 bp, Artificial Sequence
  Synthetic oligonucleotide
agctaattcgtgttgaagataattataagg

SEQ ID NO: 407146 - DNA, 30 bp, Artificial Sequence
  Synthetic oligonucleotide
gatagtactaggtgacctggcattataagg

SEQ ID NO: 407147 - DNA, 30 bp, Artificial Sequence
  Synthetic oligonucleotide
atgtttgattttgttcaatacgagctaagg

SEQ ID NO: 407148 - DNA, 30 bp, Artificial Sequence
  Synthetic oligonucleotide
gagagtcggccccgcgaagcgaatctaagg

SEQ ID NO: 407149 - DNA, 30 bp, Artificial Sequence
  Synthetic oligonucleotide
cgtacactttacttgacatgccatctaagg

SEQ ID NO: 407150 - DNA, 30 bp, Artificial Sequence
  Synthetic oligonucleotide
tctggtatcatgttactcatgcctctaagg

SEQ ID NO: 407151 - DNA, 30 bp, Artificial Sequence
  Synthetic oligonucleotide
gcaccgtcctggcgattatgctgtctaagg

SEQ ID NO: 407152 - DNA, 30 bp, Artificial Sequence
  Synthetic oligonucleotide
aaacatttataagcgggtccatttctaagg

SEQ ID NO: 407153 - DNA, 30 bp, Artificial Sequence
  Synthetic oligonucleotide
gaaacggggtatcgccctaattgagtaagg

SEQ ID NO: 407154 - DNA, 30 bp, Artificial Sequence
  Synthetic oligonucleotide
acaatgtacactacttagtaatacgtaagg

SEQ ID NO: 407155 - DNA, 30 bp, Artificial Sequence
  Synthetic oligonucleotide
agtgacgcccaattatggttgcgcgtaagg

SEQ ID NO: 407156 - DNA, 30 bp, Artificial Sequence
  Synthetic oligonucleotide
ttctgcctcatgtatttaaggggggtaagg

SEQ ID NO: 407157 - DNA, 30 bp, Artificial Sequence
  Synthetic oligonucleotide
ggtgtctattagcgcttgatacgtgtaagg

SEQ ID NO: 407158 - DNA, 30 bp, Artificial Sequence
  Synthetic oligonucleotide
tttagccaacagtactgtggagttgtaagg

SEQ ID NO: 407159 - DNA, 30 bp, Artificial Sequence
  Synthetic oligonucleotide
gtgaacctaaaccatatgtgtgaattaagg

SEQ ID NO: 407160 - DNA, 30 bp, Artificial Sequence
  Synthetic oligonucleotide
ttcggtagtatcggcatttttgaattaagg

SEQ ID NO: 407161 - DNA, 30 bp, Artificial Sequence
  Synthetic oligonucleotide
aactctaccgaggccgggcagccattaagg

SEQ ID NO: 407162 - DNA, 30 bp, Artificial Sequence
  Synthetic oligonucleotide
cgcaaggtttacccggctgagaagttaagg

SEQ ID NO: 407163 - DNA, 30 bp, Artificial Sequence
  Synthetic oligonucleotide
catcgcctataggtaccataggcgttaagg

SEQ ID NO: 407164 - DNA, 30 bp, Artificial Sequence
  Synthetic oligonucleotide
accaattcccccgacattttaaggttaagg

SEQ ID NO: 407165 - DNA, 30 bp, Artificial Sequence
  Synthetic oligonucleotide
gcaatattatccccaatacggatgttaagg

SEQ ID NO: 407166 - DNA, 30 bp, Artificial Sequence
  Synthetic oligonucleotide
catcgttcgcgataccctgggaatttaagg

SEQ ID NO: 407167 - DNA, 30 bp, Artificial Sequence
  Synthetic oligonucleotide
cgcggcggggcatgattagaaggtttaagg

SEQ ID NO: 407168 - DNA, 30 bp, Artificial Sequence
  Synthetic oligonucleotide
cttccctacgtaaagcacgggggtttaagg

SEQ ID NO: 407169 - DNA, 30 bp, Artificial Sequence
  Synthetic oligonucleotide
tacagaatccttggactcgtagttttaagg

SEQ ID NO: 407170 - DNA, 30 bp, Artificial Sequence
  Synthetic oligonucleotide
tatgctgttaaagttcgtggaccaaacagg

SEQ ID NO: 407171 - DNA, 30 bp, Artificial Sequence
  Synthetic oligonucleotide
tagtgcgtcgctaagattggcctaaacagg

SEQ ID NO: 407172 - DNA, 30 bp, Artificial Sequence
  Synthetic oligonucleotide
gattccgactattggtggccaaagaacagg

SEQ ID NO: 407173 - DNA, 30 bp, Artificial Sequence
  Synthetic oligonucleotide
tcctgagttgttcatgttgaggggaacagg

SEQ ID NO: 407174 - DNA, 30 bp, Artificial Sequence
  Synthetic oligonucleotide
aagttacgttcaaagtgatcggaacacagg

SEQ ID NO: 407175 - DNA, 30 bp, Artificial Sequence
  Synthetic oligonucleotide
ttaaccgagtccatcccgcctagacacagg

SEQ ID NO: 407176 - DNA, 30 bp, Artificial Sequence
  Synthetic oligonucleotide
tacaagtagaacgccgggtggagccacagg

SEQ ID NO: 407177 - DNA, 30 bp, Artificial Sequence
  Synthetic oligonucleotide
gatcacaccaggtgccagacacagcacagg

SEQ ID NO: 407178 - DNA, 30 bp, Artificial Sequence
  Synthetic oligonucleotide
ccgggacacatgtgatgtatgcagcacagg

SEQ ID NO: 407179 - DNA, 30 bp, Artificial Sequence
  Synthetic oligonucleotide
tgggcgagtatgataacgccccggcacagg

SEQ ID NO: 407180 - DNA, 30 bp, Artificial Sequence
  Synthetic oligonucleotide
gcacctatcccctaaacgctgtggcacagg

SEQ ID NO: 407181 - DNA, 30 bp, Artificial Sequence
  Synthetic oligonucleotide
tcactttcctgaggggccattcctcacagg

SEQ ID NO: 407182 - DNA, 30 bp, Artificial Sequence
  Synthetic oligonucleotide
taagcgacgtcagagcccttcacagacagg

SEQ ID NO: 407183 - DNA, 30 bp, Artificial Sequence
  Synthetic oligonucleotide
tacagtggtcctcgcctctttaccgacagg

SEQ ID NO: 407184 - DNA, 30 bp, Artificial Sequence
  Synthetic oligonucleotide
agtccaagcaactctttcccagccgacagg

SEQ ID NO: 407185 - DNA, 30 bp, Artificial Sequence
  Synthetic oligonucleotide
ccgaagcacagcctagcacctggcgacagg

SEQ ID NO: 407186 - DNA, 30 bp, Artificial Sequence
  Synthetic oligonucleotide
tgagggcttccttgttgactcaactacagg

SEQ ID NO: 407187 - DNA, 30 bp, Artificial Sequence
  Synthetic oligonucleotide
tccagatgcaacctccagggagcctacagg

SEQ ID NO: 407188 - DNA, 30 bp, Artificial Sequence
  Synthetic oligonucleotide
cgtgtatttgtttatcaacggcgctacagg

SEQ ID NO: 407189 - DNA, 30 bp, Artificial Sequence
  Synthetic oligonucleotide
cagcgtttccacccgctggcgggctacagg

SEQ ID NO: 407190 - DNA, 30 bp, Artificial Sequence
  Synthetic oligonucleotide
ttactgtcacatctagtatgtttctacagg

SEQ ID NO: 407191 - DNA, 30 bp, Artificial Sequence
  Synthetic oligonucleotide
cccgacgagcactgtttgctcgcgtacagg

SEQ ID NO: 407192 - DNA, 30 bp, Artificial Sequence
  Synthetic oligonucleotide
aacagagcaccagcgtaacatatttacagg

SEQ ID NO: 407193 - DNA, 30 bp, Artificial Sequence
  Synthetic oligonucleotide
agaaaagttagatttgtgaatctaaccagg

SEQ ID NO: 407194 - DNA, 30 bp, Artificial Sequence
  Synthetic oligonucleotide
actcggtttaatgaagcgcgcatcaccagg

SEQ ID NO: 407195 - DNA, 30 bp, Artificial Sequence
  Synthetic oligonucleotide
tttcgtcaatagaataattgggttaccagg

SEQ ID NO: 407196 - DNA, 30 bp, Artificial Sequence
  Synthetic oligonucleotide
aaaagatctgtccagagttgttcccccagg

SEQ ID NO: 407197 - DNA, 30 bp, Artificial Sequence
  Synthetic oligonucleotide
cgccttctaaaagaagtggagtgccccagg

SEQ ID NO: 407198 - DNA, 30 bp, Artificial Sequence
  Synthetic oligonucleotide
atttggggttatacttgggtagggcccagg

SEQ ID NO: 407199 - DNA, 30 bp, Artificial Sequence
  Synthetic oligonucleotide
ttggtattctaaaacgggtctgcagccagg

SEQ ID NO: 407200 - DNA, 30 bp, Artificial Sequence
  Synthetic oligonucleotide
gggggcgtacctgtacgggctggggccagg

SEQ ID NO: 407201 - DNA, 30 bp, Artificial Sequence
  Synthetic oligonucleotide
cagcaccgcaggtccagtcttgcctccagg

SEQ ID NO: 407202 - DNA, 30 bp, Artificial Sequence
  Synthetic oligonucleotide
atcggtttggaccgcgaccaacgctccagg

SEQ ID NO: 407203 - DNA, 30 bp, Artificial Sequence
  Synthetic oligonucleotide
tagcgatctggacgctgtaacatctccagg

SEQ ID NO: 407204 - DNA, 30 bp, Artificial Sequence
  Synthetic oligonucleotide
tgggggccgtggccggcagcggagtccagg

SEQ ID NO: 407205 - DNA, 30 bp, Artificial Sequence
  Synthetic oligonucleotide
ctagccattggaggccaccctgcgtccagg

SEQ ID NO: 407206 - DNA, 30 bp, Artificial Sequence
  Synthetic oligonucleotide
tactggtcacacgcaaatagtgtgtccagg

SEQ ID NO: 407207 - DNA, 30 bp, Artificial Sequence
  Synthetic oligonucleotide
cccccgtttggttatccgccccgaagcagg

SEQ ID NO: 407208 - DNA, 30 bp, Artificial Sequence
  Synthetic oligonucleotide
gcatcgttctagttagaccggaacagcagg

SEQ ID NO: 407209 - DNA, 30 bp, Artificial Sequence
  Synthetic oligonucleotide
attagggcaagtatcaatgcgaccagcagg

SEQ ID NO: 407210 - DNA, 30 bp, Artificial Sequence
  Synthetic oligonucleotide
gccctgcatttaactccatataagagcagg

SEQ ID NO: 407211 - DNA, 30 bp, Artificial Sequence
  Synthetic oligonucleotide
tcttgattcaatttagcgtggattagcagg

SEQ ID NO: 407212 - DNA, 30 bp, Artificial Sequence
  Synthetic oligonucleotide
gcgaccggttctaagggaacaaatcgcagg

SEQ ID NO: 407213 - DNA, 30 bp, Artificial Sequence
  Synthetic oligonucleotide
taaagcccttgagggctatgccatcgcagg

SEQ ID NO: 407214 - DNA, 30 bp, Artificial Sequence
  Synthetic oligonucleotide
gtacggttcggttatgatcgcgctcgcagg

SEQ ID NO: 407215 - DNA, 30 bp, Artificial Sequence
  Synthetic oligonucleotide
ctacatttttggcttgggtgatgaggcagg

SEQ ID NO: 407216 - DNA, 30 bp, Artificial Sequence
  Synthetic oligonucleotide
aaggccgtgcaggcctagtactccggcagg

SEQ ID NO: 407217 - DNA, 30 bp, Artificial Sequence
  Synthetic oligonucleotide
cggggggtgaagcacgcggtggggggcagg

SEQ ID NO: 407218 - DNA, 30 bp, Artificial Sequence
  Synthetic oligonucleotide
gggtctatcgtgttcggtcatggatgcagg

SEQ ID NO: 407219 - DNA, 30 bp, Artificial Sequence
  Synthetic oligonucleotide
acatgattaagaaggctaatgtgatgcagg

SEQ ID NO: 407220 - DNA, 30 bp, Artificial Sequence
  Synthetic oligonucleotide
ttccggacatgtgcagcaaacagctgcagg

SEQ ID NO: 407221 - DNA, 30 bp, Artificial Sequence
  Synthetic oligonucleotide
tttacagtattgacatgtccgtgctgcagg

SEQ ID NO: 407222 - DNA, 30 bp, Artificial Sequence
  Synthetic oligonucleotide
tctctgtgttcagtatatattaggtgcagg

SEQ ID NO: 407223 - DNA, 30 bp, Artificial Sequence
  Synthetic oligonucleotide
atatcaatgagcggttggtttcgttgcagg

SEQ ID NO: 407224 - DNA, 30 bp, Artificial Sequence
  Synthetic oligonucleotide
gccactcatgtggcgcagaggtaaatcagg

SEQ ID NO: 407225 - DNA, 30 bp, Artificial Sequence
  Synthetic oligonucleotide
ttatgatagttccagtaacaccgcatcagg

SEQ ID NO: 407226 - DNA, 30 bp, Artificial Sequence
  Synthetic oligonucleotide
atcagtgtaaccggttctcttgagatcagg

SEQ ID NO: 407227 - DNA, 30 bp, Artificial Sequence
  Synthetic oligonucleotide
tatgcttccggttctcggtagttgatcagg

SEQ ID NO: 407228 - DNA, 30 bp, Artificial Sequence
  Synthetic oligonucleotide
atgttaagcgcttctggctaggatatcagg

SEQ ID NO: 407229 - DNA, 30 bp, Artificial Sequence
  Synthetic oligonucleotide
agggtccggagtgggataattggactcagg

SEQ ID NO: 407230 - DNA, 30 bp, Artificial Sequence
  Synthetic oligonucleotide
ctaatagtattatgtccactctgactcagg

SEQ ID NO: 407231 - DNA, 30 bp, Artificial Sequence
  Synthetic oligonucleotide
ggggttgtctcagtagctgcgggcctcagg

SEQ ID NO: 407232 - DNA, 30 bp, Artificial Sequence
  Synthetic oligonucleotide
tattcatggtcactcgttgactagctcagg

SEQ ID NO: 407233 - DNA, 30 bp, Artificial Sequence
  Synthetic oligonucleotide
aggcgttgaaggtcgcacatcgggctcagg

SEQ ID NO: 407234 - DNA, 30 bp, Artificial Sequence
  Synthetic oligonucleotide
cgtcggcggcctggaacagcttctctcagg

SEQ ID NO: 407235 - DNA, 30 bp, Artificial Sequence
  Synthetic oligonucleotide
atagtgaaccccgggagcagaaaagtcagg

SEQ ID NO: 407236 - DNA, 30 bp, Artificial Sequence
  Synthetic oligonucleotide
cgttatactttagtacgttgtggagtcagg

SEQ ID NO: 407237 - DNA, 30 bp, Artificial Sequence
  Synthetic oligonucleotide
taatgagttatttgaatcgagtgcgtcagg

SEQ ID NO: 407238 - DNA, 30 bp, Artificial Sequence
  Synthetic oligonucleotide
cggtcagctttgttagcgcttttcgtcagg

SEQ ID NO: 407239 - DNA, 30 bp, Artificial Sequence
  Synthetic oligonucleotide
tcctggttgcaaaacaagctaatggtcagg

SEQ ID NO: 407240 - DNA, 30 bp, Artificial Sequence
  Synthetic oligonucleotide
tatagggatgctgttcccattcctgtcagg

SEQ ID NO: 407241 - DNA, 30 bp, Artificial Sequence
  Synthetic oligonucleotide
ttgttttgttgcctgggtactaaattcagg

SEQ ID NO: 407242 - DNA, 30 bp, Artificial Sequence
  Synthetic oligonucleotide
attaggtagaagcaccattaaagcttcagg

SEQ ID NO: 407243 - DNA, 30 bp, Artificial Sequence
  Synthetic oligonucleotide
gcgtcggtacgattgctggagaggttcagg

SEQ ID NO: 407244 - DNA, 30 bp, Artificial Sequence
  Synthetic oligonucleotide
tgatgccttcaaagaacttctcgtttcagg

SEQ ID NO: 407245 - DNA, 30 bp, Artificial Sequence
  Synthetic oligonucleotide
cccacgtgtaacaacaacctagttttcagg

SEQ ID NO: 407246 - DNA, 30 bp, Artificial Sequence
  Synthetic oligonucleotide
ttacgccggtctcatggtacataaaagagg

SEQ ID NO: 407247 - DNA, 30 bp, Artificial Sequence
  Synthetic oligonucleotide
gacacgcttcacaatacctcggcaaagagg

SEQ ID NO: 407248 - DNA, 30 bp, Artificial Sequence
  Synthetic oligonucleotide
gcgaagagaggatatttcatcttaaagagg

SEQ ID NO: 407249 - DNA, 30 bp, Artificial Sequence
  Synthetic oligonucleotide
tcgggcagaagttcgtggtatagcaagagg

SEQ ID NO: 407250 - DNA, 30 bp, Artificial Sequence
  Synthetic oligonucleotide
tataagacttagtggtgggatcggaagagg

SEQ ID NO: 407251 - DNA, 30 bp, Artificial Sequence
  Synthetic oligonucleotide
gattagttgataaagcgggggcgtaagagg

SEQ ID NO: 407252 - DNA, 30 bp, Artificial Sequence
  Synthetic oligonucleotide
tggttgggaaattggtgtgaccaacagagg

SEQ ID NO: 407253 - DNA, 30 bp, Artificial Sequence
  Synthetic oligonucleotide
gttatcgttcgatcgcgcaactgacagagg

SEQ ID NO: 407254 - DNA, 30 bp, Artificial Sequence
  Synthetic oligonucleotide
ctctcaagcgattttatccgagagcagagg

SEQ ID NO: 407255 - DNA, 30 bp, Artificial Sequence
  Synthetic oligonucleotide
acttcatggagatagcccggcccgcagagg

SEQ ID NO: 407256 - DNA, 30 bp, Artificial Sequence
  Synthetic oligonucleotide
ttaggtttagtcatagcgctccgtcagagg

SEQ ID NO: 407257 - DNA, 30 bp, Artificial Sequence
  Synthetic oligonucleotide
ttcgctcatcgagtttaaggtaacgagagg

SEQ ID NO: 407258 - DNA, 30 bp, Artificial Sequence
  Synthetic oligonucleotide
gcttgttacgctaaaacataattcgagagg

SEQ ID NO: 407259 - DNA, 30 bp, Artificial Sequence
  Synthetic oligonucleotide
tgggccgatgtaccaatgcccaaggagagg

SEQ ID NO: 407260 - DNA, 30 bp, Artificial Sequence
  Synthetic oligonucleotide
tataggcttaatggctactacccggagagg

SEQ ID NO: 407261 - DNA, 30 bp, Artificial Sequence
  Synthetic oligonucleotide
aaattaattatcagtggtacatcatagagg

SEQ ID NO: 407262 - DNA, 30 bp, Artificial Sequence
  Synthetic oligonucleotide
cggtagcattagccgcgggcagcgtagagg

SEQ ID NO: 407263 - DNA, 30 bp, Artificial Sequence
  Synthetic oligonucleotide
aaaggttaaggggtggaggcttggtagagg

SEQ ID NO: 407264 - DNA, 30 bp, Artificial Sequence
  Synthetic oligonucleotide
acgaagagaggtttcactttgagcacgagg

SEQ ID NO: 407265 - DNA, 30 bp, Artificial Sequence
  Synthetic oligonucleotide
caccgtgtcatttgtcggatatgcacgagg

SEQ ID NO: 407266 - DNA, 30 bp, Artificial Sequence
  Synthetic oligonucleotide
acctggcgggctcttcgatgacagacgagg

SEQ ID NO: 407267 - DNA, 30 bp, Artificial Sequence
  Synthetic oligonucleotide
gtgaaacttattggatctagctagacgagg

SEQ ID NO: 407268 - DNA, 30 bp, Artificial Sequence
  Synthetic oligonucleotide
agtttcttgtgcggttgaatggcaccgagg

SEQ ID NO: 407269 - DNA, 31 bp, Artificial Sequence
  Synthetic oligonucleotide
cagttgtggtgcggtaaccagcggaccgagg

SEQ ID NO: 407270 - DNA, 30 bp, Artificial Sequence
  Synthetic oligonucleotide
caatccatggacactgttctgctaccgagg

SEQ ID NO: 407271 - DNA, 30 bp, Artificial Sequence
  Synthetic oligonucleotide
gcgggtaaggcagcaagggtcgtaccgagg

SEQ ID NO: 407272 - DNA, 30 bp, Artificial Sequence
  Synthetic oligonucleotide
cgttgtcactttgggaacctttacccgagg

SEQ ID NO: 407273 - DNA, 30 bp, Artificial Sequence
  Synthetic oligonucleotide
gaccaataaccttcgccgcacatcccgagg

SEQ ID NO: 407274 - DNA, 30 bp, Artificial Sequence
  Synthetic oligonucleotide
ctgctggcgttaatggatcccgcgccgagg

SEQ ID NO: 407275 - DNA, 30 bp, Artificial Sequence
  Synthetic oligonucleotide
tttataactataatcgtaatccgagcgagg

SEQ ID NO: 407276 - DNA, 30 bp, Artificial Sequence
  Synthetic oligonucleotide
ctggaatcactgatctggctctacgcgagg

SEQ ID NO: 407277 - DNA, 30 bp, Artificial Sequence
  Synthetic oligonucleotide
ctaggttataaaccatgtatgcccgcgagg

SEQ ID NO: 407278 - DNA, 30 bp, Artificial Sequence
  Synthetic oligonucleotide
actgagactggcgccctcgtatccgcgagg

SEQ ID NO: 407279 - DNA, 30 bp, Artificial Sequence
  Synthetic oligonucleotide
gatatggcggggctgttcttacatgcgagg

SEQ ID NO: 407280 - DNA, 30 bp, Artificial Sequence
  Synthetic oligonucleotide
tgtattagtccagacatttcgcctgcgagg

SEQ ID NO: 407281 - DNA, 30 bp, Artificial Sequence
  Synthetic oligonucleotide
caacgctttataagtcgattgcaatcgagg

SEQ ID NO: 407282 - DNA, 30 bp, Artificial Sequence
  Synthetic oligonucleotide
cccggtgtaatgagtcagttaagatcgagg

SEQ ID NO: 407283 - DNA, 30 bp, Artificial Sequence
  Synthetic oligonucleotide
actaggttgactgttttagtcaactcgagg

SEQ ID NO: 407284 - DNA, 30 bp, Artificial Sequence
  Synthetic oligonucleotide
cgttacatatgtggtatccgggcctcgagg

SEQ ID NO: 407285 - DNA, 30 bp, Artificial Sequence
  Synthetic oligonucleotide
ctatcacttgagaccctaaaagggtcgagg

SEQ ID NO: 407286 - DNA, 30 bp, Artificial Sequence
  Synthetic oligonucleotide
ggttgcttgttctcgtgacttatgtcgagg

SEQ ID NO: 407287 - DNA, 30 bp, Artificial Sequence
  Synthetic oligonucleotide
gcttatacagggtcggtacgctcttcgagg

SEQ ID NO: 407288 - DNA, 30 bp, Artificial Sequence
  Synthetic oligonucleotide
aattcagtcagaccctttttgcgaaggagg

SEQ ID NO: 407289 - DNA, 30 bp, Artificial Sequence
  Synthetic oligonucleotide
aaagtgaactgcacacccccaggaaggagg

SEQ ID NO: 407290 - DNA, 30 bp, Artificial Sequence
  Synthetic oligonucleotide
aagctcctgcgtctcaataactgaaggagg

SEQ ID NO: 407291 - DNA, 30 bp, Artificial Sequence
  Synthetic oligonucleotide
attgggttaatctggggtttgtgcaggagg

SEQ ID NO: 407292 - DNA, 30 bp, Artificial Sequence
  Synthetic oligonucleotide
cactccagtgcccgctttcgtgtcaggagg

SEQ ID NO: 407293 - DNA, 30 bp, Artificial Sequence
  Synthetic oligonucleotide
tctaccttacctcacaccggaaggaggagg

SEQ ID NO: 407294 - DNA, 30 bp, Artificial Sequence
  Synthetic oligonucleotide
ggaaataacattgaaatcgctgcacggagg

SEQ ID NO: 407295 - DNA, 30 bp, Artificial Sequence
  Synthetic oligonucleotide
aaggatagcgttctctccgtaatacggagg

SEQ ID NO: 407296 - DNA, 30 bp, Artificial Sequence
  Synthetic oligonucleotide
caatgacacgcgaccagaggagaccggagg

SEQ ID NO: 407297 - DNA, 30 bp, Artificial Sequence
  Synthetic oligonucleotide
catttattcccgagacggcccaagcggagg

SEQ ID NO: 407298 - DNA, 30 bp, Artificial Sequence
  Synthetic oligonucleotide
aataccggcataagccgcatgcctcggagg

SEQ ID NO: 407299 - DNA, 30 bp, Artificial Sequence
  Synthetic oligonucleotide
caccgtaataacccgcttggaagtcggagg

SEQ ID NO: 407300 - DNA, 30 bp, Artificial Sequence
  Synthetic oligonucleotide
tctatacctttcttcccgtttagtcggagg

SEQ ID NO: 407301 - DNA, 30 bp, Artificial Sequence
  Synthetic oligonucleotide
gcgccttaggacagcctcgttgaagggagg

SEQ ID NO: 407302 - DNA, 30 bp, Artificial Sequence
  Synthetic oligonucleotide
gacctgagggcgacgcccacacacgggagg

SEQ ID NO: 407303 - DNA, 30 bp, Artificial Sequence
  Synthetic oligonucleotide
gtcccccgcacagttacacgacgcgggagg

SEQ ID NO: 407304 - DNA, 30 bp, Artificial Sequence
  Synthetic oligonucleotide
gcatactaagcgatccaaggcgaggggagg

SEQ ID NO: 407305 - DNA, 30 bp, Artificial Sequence
  Synthetic oligonucleotide
catttgtttacattcagtcattaggggagg

SEQ ID NO: 407306 - DNA, 30 bp, Artificial Sequence
  Synthetic oligonucleotide
cccgtgcgaaagcgcgatggtacggggagg

SEQ ID NO: 407307 - DNA, 30 bp, Artificial Sequence
  Synthetic oligonucleotide
gccggacaattggacttgggggtggggagg

SEQ ID NO: 407308 - DNA, 30 bp, Artificial Sequence
  Synthetic oligonucleotide
gcgctccctatccttcgcataaatgggagg

SEQ ID NO: 407309 - DNA, 30 bp, Artificial Sequence
  Synthetic oligonucleotide
gtctgggttagggcttctgccctatggagg

SEQ ID NO: 407310 - DNA, 30 bp, Artificial Sequence
  Synthetic oligonucleotide
tcgctcgattttggggtgaaaaactggagg

SEQ ID NO: 407311 - DNA, 29 bp, Artificial Sequence
  Synthetic oligonucleotide
gaaagcgggcatgggcggggcgctggagg

SEQ ID NO: 407312 - DNA, 30 bp, Artificial Sequence
  Synthetic oligonucleotide
tgtttcactagatgaaacaatctctggagg

SEQ ID NO: 407313 - DNA, 30 bp, Artificial Sequence
  Synthetic oligonucleotide
attataacgctctttgtgacattctggagg

SEQ ID NO: 407314 - DNA, 30 bp, Artificial Sequence
  Synthetic oligonucleotide
ctaggaccatactgacatagcaattggagg

SEQ ID NO: 407315 - DNA, 30 bp, Artificial Sequence
  Synthetic oligonucleotide
gccctctgatacgacacttcgccttggagg

SEQ ID NO: 407316 - DNA, 30 bp, Artificial Sequence
  Synthetic oligonucleotide
gagatgtttaccctctagctaggttggagg

SEQ ID NO: 407317 - DNA, 30 bp, Artificial Sequence
  Synthetic oligonucleotide
ttgccctcccttgtttactcattttggagg

SEQ ID NO: 407318 - DNA, 30 bp, Artificial Sequence
  Synthetic oligonucleotide
ctttcacggaagaccagcataataatgagg

SEQ ID NO: 407319 - DNA, 30 bp, Artificial Sequence
  Synthetic oligonucleotide
gcgggcagcgtctaattgtaccagatgagg

SEQ ID NO: 407320 - DNA, 30 bp, Artificial Sequence
  Synthetic oligonucleotide
cattaggccttaaaatgttgaagtatgagg

SEQ ID NO: 407321 - DNA, 30 bp, Artificial Sequence
  Synthetic oligonucleotide
cctcttccgcggcagggccggattatgagg

SEQ ID NO: 407322 - DNA, 30 bp, Artificial Sequence
  Synthetic oligonucleotide
tagatagccgcacccgcggatggtctgagg

SEQ ID NO: 407323 - DNA, 30 bp, Artificial Sequence
  Synthetic oligonucleotide
aattgtggcgacggtagtctgaaagtgagg

SEQ ID NO: 407324 - DNA, 30 bp, Artificial Sequence
  Synthetic oligonucleotide
ttcccaaaccttatatccgactcagtgagg

SEQ ID NO: 407325 - DNA, 30 bp, Artificial Sequence
  Synthetic oligonucleotide
ttccatacgctccacttgacaaccgtgagg

SEQ ID NO: 407326 - DNA, 30 bp, Artificial Sequence
  Synthetic oligonucleotide
cgcgcagatcttcagccgacaatcgtgagg

SEQ ID NO: 407327 - DNA, 30 bp, Artificial Sequence
  Synthetic oligonucleotide
gacgcaaatcttggcgcaatgatcgtgagg

SEQ ID NO: 407328 - DNA, 30 bp, Artificial Sequence
  Synthetic oligonucleotide
ctacgctgtagagacccgggtactgtgagg

SEQ ID NO: 407329 - DNA, 30 bp, Artificial Sequence
  Synthetic oligonucleotide
cccgggccatgttaaattcttgctgtgagg

SEQ ID NO: 407330 - DNA, 30 bp, Artificial Sequence
  Synthetic oligonucleotide
gcctccacctcccatcggtagtccttgagg

SEQ ID NO: 407331 - DNA, 30 bp, Artificial Sequence
  Synthetic oligonucleotide
cctgtatctcgtacggcaggtttcttgagg

SEQ ID NO: 407332 - DNA, 30 bp, Artificial Sequence
  Synthetic oligonucleotide
agcccactttttggctaacgctagttgagg

SEQ ID NO: 407333 - DNA, 30 bp, Artificial Sequence
  Synthetic oligonucleotide
ctgtcctgcctgtatctcaccaggttgagg

SEQ ID NO: 407334 - DNA, 30 bp, Artificial Sequence
  Synthetic oligonucleotide
gcagtaatcttcaaagatatgcggttgagg

SEQ ID NO: 407335 - DNA, 30 bp, Artificial Sequence
  Synthetic oligonucleotide
agtggtaaggtttccgagcaggtgttgagg

SEQ ID NO: 407336 - DNA, 30 bp, Artificial Sequence
  Synthetic oligonucleotide
cttccacgcctacacataatgttgttgagg

SEQ ID NO: 407337 - DNA, 30 bp, Artificial Sequence
  Synthetic oligonucleotide
gcggttttgatgtgttgtgactatttgagg

SEQ ID NO: 407338 - DNA, 30 bp, Artificial Sequence
  Synthetic oligonucleotide
tcggcgcactacggaactttgattttgagg

SEQ ID NO: 407339 - DNA, 31 bp, Artificial Sequence
  Synthetic oligonucleotide
gtgctctgaacaacacagcttacttttgagg

SEQ ID NO: 407340 - DNA, 30 bp, Artificial Sequence
  Synthetic oligonucleotide
atacgcttttgaattacggtgacaaatagg

SEQ ID NO: 407341 - DNA, 30 bp, Artificial Sequence
  Synthetic oligonucleotide
ggattatttgacagattggcttccaatagg

SEQ ID NO: 407342 - DNA, 30 bp, Artificial Sequence
  Synthetic oligonucleotide
cgttcgtctggtggtaatcgagtcaatagg

SEQ ID NO: 407343 - DNA, 30 bp, Artificial Sequence
  Synthetic oligonucleotide
ttaagtatagcataaccatgcccgaatagg

SEQ ID NO: 407344 - DNA, 30 bp, Artificial Sequence
  Synthetic oligonucleotide
aattagattgcagtcgtaagtcggaatagg

SEQ ID NO: 407345 - DNA, 30 bp, Artificial Sequence
  Synthetic oligonucleotide
ctgctgctggtttccgagcgctaacatagg

SEQ ID NO: 407346 - DNA, 30 bp, Artificial Sequence
  Synthetic oligonucleotide
aaactcaactgtgtagccgaactccatagg

SEQ ID NO: 407347 - DNA, 30 bp, Artificial Sequence
  Synthetic oligonucleotide
taatggttggcaaagaggggttcgcatagg

SEQ ID NO: 407348 - DNA, 30 bp, Artificial Sequence
  Synthetic oligonucleotide
gactccacgtgaacgtttctgttgcatagg

SEQ ID NO: 407349 - DNA, 30 bp, Artificial Sequence
  Synthetic oligonucleotide
aatgcacgtgtagcacccccatgtgatagg

SEQ ID NO: 407350 - DNA, 30 bp, Artificial Sequence
  Synthetic oligonucleotide
tgtaacgtattgttgtcaaagcaatatagg

SEQ ID NO: 407351 - DNA, 30 bp, Artificial Sequence
  Synthetic oligonucleotide
aaacaagtgcttacagtggctgcatatagg

SEQ ID NO: 407352 - DNA, 30 bp, Artificial Sequence
  Synthetic oligonucleotide
agctttggttcggtatgtaagtcatatagg

SEQ ID NO: 407353 - DNA, 30 bp, Artificial Sequence
  Synthetic oligonucleotide
gaccttattctgtaaatcgacttatatagg

SEQ ID NO: 407354 - DNA, 30 bp, Artificial Sequence
  Synthetic oligonucleotide
gtgtatagatagtgtctgattgactatagg

SEQ ID NO: 407355 - DNA, 30 bp, Artificial Sequence
  Synthetic oligonucleotide
tagacacggctatataatccacagtatagg

SEQ ID NO: 407356 - DNA, 30 bp, Artificial Sequence
  Synthetic oligonucleotide
attcgtagaattcgcgccatcacgtatagg

SEQ ID NO: 407357 - DNA, 30 bp, Artificial Sequence
  Synthetic oligonucleotide
ccggatttggttctcctcgatcggtatagg

SEQ ID NO: 407358 - DNA, 30 bp, Artificial Sequence
  Synthetic oligonucleotide
cgaccctaattcgatttgtatatgtatagg

SEQ ID NO: 407359 - DNA, 30 bp, Artificial Sequence
  Synthetic oligonucleotide
gctggtgaaaccccgtcacacctgtatagg

SEQ ID NO: 407360 - DNA, 30 bp, Artificial Sequence
  Synthetic oligonucleotide
aataaacatcaacgttttacctcttatagg

SEQ ID NO: 407361 - DNA, 30 bp, Artificial Sequence
  Synthetic oligonucleotide
taagtgtaccctgctcgccttcggactagg

SEQ ID NO: 407362 - DNA, 30 bp, Artificial Sequence
  Synthetic oligonucleotide
attcagcaacgcacattgaatgggactagg

SEQ ID NO: 407363 - DNA, 30 bp, Artificial Sequence
  Synthetic oligonucleotide
tcatgcatcgtaggcaccgagttgactagg

SEQ ID NO: 407364 - DNA, 30 bp, Artificial Sequence
  Synthetic oligonucleotide
tagttacgcagaccccaatcgttgactagg

SEQ ID NO: 407365 - DNA, 30 bp, Artificial Sequence
  Synthetic oligonucleotide
gaagcggcacaaatgccgcactatactagg

SEQ ID NO: 407366 - DNA, 30 bp, Artificial Sequence
  Synthetic oligonucleotide
tctcagcaacgataatagtgagctactagg

SEQ ID NO: 407367 - DNA, 30 bp, Artificial Sequence
  Synthetic oligonucleotide
aaaaatcgctggagttggctaaaacctagg

SEQ ID NO: 407368 - DNA, 30 bp, Artificial Sequence
  Synthetic oligonucleotide
agagatagatgagttcggtttctccctagg

SEQ ID NO: 407369 - DNA, 30 bp, Artificial Sequence
  Synthetic oligonucleotide
ttctacggaagcgctttggaatcgcctagg

SEQ ID NO: 407370 - DNA, 30 bp, Artificial Sequence
  Synthetic oligonucleotide
gagctctgttacctgattatatatcctagg

SEQ ID NO: 407371 - DNA, 30 bp, Artificial Sequence
  Synthetic oligonucleotide
actctgtccatcccatccacttaggctagg

SEQ ID NO: 407372 - DNA, 30 bp, Artificial Sequence
  Synthetic oligonucleotide
atcacctacttcaattgactgggggctagg

SEQ ID NO: 407373 - DNA, 30 bp, Artificial Sequence
  Synthetic oligonucleotide
ggtcaggcttgccaccccgcaatggctagg

SEQ ID NO: 407374 - DNA, 30 bp, Artificial Sequence
  Synthetic oligonucleotide
ttgcgctacaagatcaagcgctttgctagg

SEQ ID NO: 407375 - DNA, 30 bp, Artificial Sequence
  Synthetic oligonucleotide
gctatgagggattacggaaagtcatctagg

SEQ ID NO: 407376 - DNA, 30 bp, Artificial Sequence
  Synthetic oligonucleotide
gttaatcatactagaggacccgggtctagg

SEQ ID NO: 407377 - DNA, 30 bp, Artificial Sequence
  Synthetic oligonucleotide
agaacaaagttttccccgagtacttctagg

SEQ ID NO: 407378 - DNA, 30 bp, Artificial Sequence
  Synthetic oligonucleotide
cgcttggccatcgctgtacccctttctagg

SEQ ID NO: 407379 - DNA, 30 bp, Artificial Sequence
  Synthetic oligonucleotide
ccactttgcaattgacctgcagtttctagg

SEQ ID NO: 407380 - DNA, 30 bp, Artificial Sequence
  Synthetic oligonucleotide
ttgattacgcaggtgaacgcatacagtagg

SEQ ID NO: 407381 - DNA, 30 bp, Artificial Sequence
  Synthetic oligonucleotide
tattcaggtccaagggcgcctccgagtagg

SEQ ID NO: 407382 - DNA, 30 bp, Artificial Sequence
  Synthetic oligonucleotide
tatttagataatgtgcactctagtagtagg

SEQ ID NO: 407383 - DNA, 30 bp, Artificial Sequence
  Synthetic oligonucleotide
ctgatagagaagcgcccctgtagtagtagg

SEQ ID NO: 407384 - DNA, 30 bp, Artificial Sequence
  Synthetic oligonucleotide
aaagcaccggcagccacacccaaacgtagg

SEQ ID NO: 407385 - DNA, 30 bp, Artificial Sequence
  Synthetic oligonucleotide
aggattgagtaacacgaaagacgacgtagg

SEQ ID NO: 407386 - DNA, 30 bp, Artificial Sequence
  Synthetic oligonucleotide
cttatccacagtccacggatatgacgtagg

SEQ ID NO: 407387 - DNA, 30 bp, Artificial Sequence
  Synthetic oligonucleotide
aggttaggtcccctaacaacccctcgtagg

SEQ ID NO: 407388 - DNA, 30 bp, Artificial Sequence
  Synthetic oligonucleotide
gagtcacgtccaggctagcgaggtcgtagg

SEQ ID NO: 407389 - DNA, 30 bp, Artificial Sequence
  Synthetic oligonucleotide
ccctgccacctaccgttcattgttcgtagg

SEQ ID NO: 407390 - DNA, 30 bp, Artificial Sequence
  Synthetic oligonucleotide
cgggtaccctaagttgactcgtttcgtagg

SEQ ID NO: 407391 - DNA, 30 bp, Artificial Sequence
  Synthetic oligonucleotide
aggctctcggggggctctagaaaaggtagg

SEQ ID NO: 407392 - DNA, 30 bp, Artificial Sequence
  Synthetic oligonucleotide
gatattcaacaagcatcaatacgcggtagg

SEQ ID NO: 407393 - DNA, 30 bp, Artificial Sequence
  Synthetic oligonucleotide
aggattcctctcatgcatggctgcggtagg

SEQ ID NO: 407394 - DNA, 30 bp, Artificial Sequence
  Synthetic oligonucleotide
caaaaacacggtagctaatggctgggtagg

SEQ ID NO: 407395 - DNA, 30 bp, Artificial Sequence
  Synthetic oligonucleotide
acaaatgtctagcacggctcgttgggtagg

SEQ ID NO: 407396 - DNA, 30 bp, Artificial Sequence
  Synthetic oligonucleotide
aggtgcagactgcggccaaatattggtagg

SEQ ID NO: 407397 - DNA, 30 bp, Artificial Sequence
  Synthetic oligonucleotide
tctctcgtatggcttagataacaatgtagg

SEQ ID NO: 407398 - DNA, 30 bp, Artificial Sequence
  Synthetic oligonucleotide
ttggccgtaatcatcagaaagtaatgtagg

SEQ ID NO: 407399 - DNA, 30 bp, Artificial Sequence
  Synthetic oligonucleotide
aatcaacggagctgctgccatggatgtagg

SEQ ID NO: 407400 - DNA, 30 bp, Artificial Sequence
  Synthetic oligonucleotide
atctccgaagcctactactgcgtatgtagg

SEQ ID NO: 407401 - DNA, 30 bp, Artificial Sequence
  Synthetic oligonucleotide
tagttggtacacgcaacacgatcctgtagg

SEQ ID NO: 407402 - DNA, 30 bp, Artificial Sequence
  Synthetic oligonucleotide
agggagcgcagtcgcggtaggggctgtagg

SEQ ID NO: 407403 - DNA, 30 bp, Artificial Sequence
  Synthetic oligonucleotide
cagatttcttacgcacgtatcctctgtagg

SEQ ID NO: 407404 - DNA, 30 bp, Artificial Sequence
  Synthetic oligonucleotide
aaatcgacatattcacgtcttgcgtgtagg

SEQ ID NO: 407405 - DNA, 29 bp, Artificial Sequence
  Synthetic oligonucleotide
tccgatcattagttggcttgtggtgtagg

SEQ ID NO: 407406 - DNA, 30 bp, Artificial Sequence
  Synthetic oligonucleotide
gatatctaaagtccctaattactgtgtagg

SEQ ID NO: 407407 - DNA, 30 bp, Artificial Sequence
  Synthetic oligonucleotide
gcacttgggttcagttcacgcttgtgtagg

SEQ ID NO: 407408 - DNA, 30 bp, Artificial Sequence
  Synthetic oligonucleotide
gttctatgggagtgcgccaggtattgtagg

SEQ ID NO: 407409 - DNA, 30 bp, Artificial Sequence
  Synthetic oligonucleotide
aggccctcggctacgggcacatcttgtagg

SEQ ID NO: 407410 - DNA, 30 bp, Artificial Sequence
  Synthetic oligonucleotide
ttaccaactaaggattgcggttaaattagg

SEQ ID NO: 407411 - DNA, 30 bp, Artificial Sequence
  Synthetic oligonucleotide
gttgactttcttaaaaagacgtcaattagg

SEQ ID NO: 407412 - DNA, 30 bp, Artificial Sequence
  Synthetic oligonucleotide
atatgtaggcacattaatctccgaattagg

SEQ ID NO: 407413 - DNA, 30 bp, Artificial Sequence
  Synthetic oligonucleotide
aagaaagttacttggttagctataattagg

SEQ ID NO: 407414 - DNA, 30 bp, Artificial Sequence
  Synthetic oligonucleotide
gcaggagtaggatgtacgcatatgattagg

SEQ ID NO: 407415 - DNA, 30 bp, Artificial Sequence
  Synthetic oligonucleotide
ggtatacgctcactgctaacgttgattagg

SEQ ID NO: 407416 - DNA, 30 bp, Artificial Sequence
  Synthetic oligonucleotide
ctataggaccacataatcaggagtattagg

SEQ ID NO: 407417 - DNA, 30 bp, Artificial Sequence
  Synthetic oligonucleotide
gcagagtccaattccgttttgtgtattagg

SEQ ID NO: 407418 - DNA, 30 bp, Artificial Sequence
  Synthetic oligonucleotide
gcaatatttgaaggacgactccgacttagg

SEQ ID NO: 407419 - DNA, 30 bp, Artificial Sequence
  Synthetic oligonucleotide
gcagtcgattctacaacaacttgacttagg

SEQ ID NO: 407420 - DNA, 30 bp, Artificial Sequence
  Synthetic oligonucleotide
gtgtgagtatggggttacggaaagcttagg

SEQ ID NO: 407421 - DNA, 30 bp, Artificial Sequence
  Synthetic oligonucleotide
ccgtaaacaatgcttggtttgacgcttagg

SEQ ID NO: 407422 - DNA, 30 bp, Artificial Sequence
  Synthetic oligonucleotide
ttccatatacttgagactagctttcttagg

SEQ ID NO: 407423 - DNA, 30 bp, Artificial Sequence
  Synthetic oligonucleotide
gtggtaccgtgcttagcatcacgagttagg

SEQ ID NO: 407424 - DNA, 30 bp, Artificial Sequence
  Synthetic oligonucleotide
attctatacatcatatgttaatgcgttagg

SEQ ID NO: 407425 - DNA, 30 bp, Artificial Sequence
  Synthetic oligonucleotide
ggttagcagccccggagcgccatcgttagg

SEQ ID NO: 407426 - DNA, 30 bp, Artificial Sequence
  Synthetic oligonucleotide
acgggaatatatatgtggtaaacggttagg

SEQ ID NO: 407427 - DNA, 30 bp, Artificial Sequence
  Synthetic oligonucleotide
aattcttaaattttgattgggagggttagg

SEQ ID NO: 407428 - DNA, 30 bp, Artificial Sequence
  Synthetic oligonucleotide
actattagtcttacacgcagttgggttagg

SEQ ID NO: 407429 - DNA, 31 bp, Artificial Sequence
  Synthetic oligonucleotide
atggaactacagagcccttattgcctttagg

SEQ ID NO: 407430 - DNA, 30 bp, Artificial Sequence
  Synthetic oligonucleotide
tctagactccagtatcaatttgagtttagg

SEQ ID NO: 407431 - DNA, 30 bp, Artificial Sequence
  Synthetic oligonucleotide
aatgagctcgctggcattagtcggtttagg

SEQ ID NO: 407432 - DNA, 30 bp, Artificial Sequence
  Synthetic oligonucleotide
atcatttgacaaagttgataaaattttagg

SEQ ID NO: 407433 - DNA, 30 bp, Artificial Sequence
  Synthetic oligonucleotide
tgctcttagactcaacctctgacttttagg

SEQ ID NO: 407434 - DNA, 30 bp, Artificial Sequence
  Synthetic oligonucleotide
aaattcaaggccagatctggaccttttagg

SEQ ID NO: 407435 - DNA, 30 bp, Artificial Sequence
  Synthetic oligonucleotide
tagtgccgatttcacggcacatcaaaacgg

SEQ ID NO: 407436 - DNA, 30 bp, Artificial Sequence
  Synthetic oligonucleotide
gtacgacgtttttacttcaggaacaaacgg

SEQ ID NO: 407437 - DNA, 30 bp, Artificial Sequence
  Synthetic oligonucleotide
tatgtaccggtagaatctggtacgaaacgg

SEQ ID NO: 407438 - DNA, 30 bp, Artificial Sequence
  Synthetic oligonucleotide
gtgccttcctggttgcgttgcccgaaacgg

SEQ ID NO: 407439 - DNA, 30 bp, Artificial Sequence
  Synthetic oligonucleotide
cactcttggagcaccaggtatcgtaaacgg

SEQ ID NO: 407440 - DNA, 30 bp, Artificial Sequence
  Synthetic oligonucleotide
tgtatggggccagttacgtctggtaaacgg

SEQ ID NO: 407441 - DNA, 30 bp, Artificial Sequence
  Synthetic oligonucleotide
ggccgagtgtaagcggagaagggacaacgg

SEQ ID NO: 407442 - DNA, 30 bp, Artificial Sequence
  Synthetic oligonucleotide
ggaagtttggtgggcatgggctagcaacgg

SEQ ID NO: 407443 - DNA, 30 bp, Artificial Sequence
  Synthetic oligonucleotide
tatacaaacacggttattcctttgcaacgg

SEQ ID NO: 407444 - DNA, 30 bp, Artificial Sequence
  Synthetic oligonucleotide
tccctggtatatccagatcgtttgcaacgg

SEQ ID NO: 407445 - DNA, 31 bp, Artificial Sequence
  Synthetic oligonucleotide
gcttcatcggtccctgaatcgcaatcaacgg

SEQ ID NO: 407446 - DNA, 30 bp, Artificial Sequence
  Synthetic oligonucleotide
gtggaatcagtattcaaaactgatcaacgg

SEQ ID NO: 407447 - DNA, 30 bp, Artificial Sequence
  Synthetic oligonucleotide
gcaagccatagccttttatgaactcaacgg

SEQ ID NO: 407448 - DNA, 30 bp, Artificial Sequence
  Synthetic oligonucleotide
ttggccatcgctttaactaaacttcaacgg

SEQ ID NO: 407449 - DNA, 30 bp, Artificial Sequence
  Synthetic oligonucleotide
gttcataaagtaacggcaggccttcaacgg

SEQ ID NO: 407450 - DNA, 30 bp, Artificial Sequence
  Synthetic oligonucleotide
tttaaggcacgtgtgctgcacaaagaacgg

SEQ ID NO: 407451 - DNA, 30 bp, Artificial Sequence
  Synthetic oligonucleotide
taaaatggttgggtttcaaggaaagaacgg

SEQ ID NO: 407452 - DNA, 30 bp, Artificial Sequence
  Synthetic oligonucleotide
tgcagcattactacgcagcatgcagaacgg

SEQ ID NO: 407453 - DNA, 30 bp, Artificial Sequence
  Synthetic oligonucleotide
tgcttgacgtagattctcgtttcagaacgg

SEQ ID NO: 407454 - DNA, 30 bp, Artificial Sequence
  Synthetic oligonucleotide
aacatctcaatgtccgtagccatagaacgg

SEQ ID NO: 407455 - DNA, 30 bp, Artificial Sequence
  Synthetic oligonucleotide
attacacgctattgcacgttattcgaacgg

SEQ ID NO: 407456 - DNA, 30 bp, Artificial Sequence
  Synthetic oligonucleotide
cctcgcgtatgggacccttcgtgggaacgg

SEQ ID NO: 407457 - DNA, 30 bp, Artificial Sequence
  Synthetic oligonucleotide
taaaaagtatcgattaacaggcctgaacgg

SEQ ID NO: 407458 - DNA, 30 bp, Artificial Sequence
  Synthetic oligonucleotide
acactgcctgactgcggaagagcataacgg

SEQ ID NO: 407459 - DNA, 30 bp, Artificial Sequence
  Synthetic oligonucleotide
agcgtccttcgcatcttaaactcataacgg

SEQ ID NO: 407460 - DNA, 30 bp, Artificial Sequence
  Synthetic oligonucleotide
tatcaaactgtatcacactcgttataacgg

SEQ ID NO: 407461 - DNA, 30 bp, Artificial Sequence
  Synthetic oligonucleotide
tacctttcgcaactaatgttgtcctaacgg

SEQ ID NO: 407462 - DNA, 30 bp, Artificial Sequence
  Synthetic oligonucleotide
tactccctcctccgagtacgcgagtaacgg

SEQ ID NO: 407463 - DNA, 30 bp, Artificial Sequence
  Synthetic oligonucleotide
catccgaatgttaggagtattcggtaacgg

SEQ ID NO: 407464 - DNA, 30 bp, Artificial Sequence
  Synthetic oligonucleotide
ttccgtcgttgtaggaggaaggggtaacgg

SEQ ID NO: 407465 - DNA, 31 bp, Artificial Sequence
  Synthetic oligonucleotide
tatttctggacctgttgtcataatgtaacgg

SEQ ID NO: 407466 - DNA, 30 bp, Artificial Sequence
  Synthetic oligonucleotide
tggtagccgttcgggtaccgaagttaacgg

SEQ ID NO: 407467 - DNA, 30 bp, Artificial Sequence
  Synthetic oligonucleotide
gaggaaagaccccagacctaacgttaacgg

SEQ ID NO: 407468 - DNA, 30 bp, Artificial Sequence
  Synthetic oligonucleotide
ttttaaaggtcaccggttagttgttaacgg

SEQ ID NO: 407469 - DNA, 30 bp, Artificial Sequence
  Synthetic oligonucleotide
gccgcgccgattatggaacgtatttaacgg

SEQ ID NO: 407470 - DNA, 30 bp, Artificial Sequence
  Synthetic oligonucleotide
ttactgaaattcccatctgcggcaacacgg

SEQ ID NO: 407471 - DNA, 30 bp, Artificial Sequence
  Synthetic oligonucleotide
agaaaatgtgtacctgagaacggaacacgg

SEQ ID NO: 407472 - DNA, 30 bp, Artificial Sequence
  Synthetic oligonucleotide
cctacatcaaactaatttcaggatacacgg

SEQ ID NO: 407473 - DNA, 30 bp, Artificial Sequence
  Synthetic oligonucleotide
tcgtaatcttgtccttacctttatacacgg

SEQ ID NO: 407474 - DNA, 30 bp, Artificial Sequence
  Synthetic oligonucleotide
ggccggctgtcctttacggattctacacgg

SEQ ID NO: 407475 - DNA, 30 bp, Artificial Sequence
  Synthetic oligonucleotide
tggggtacgaatataggtatgtaaccacgg

SEQ ID NO: 407476 - DNA, 30 bp, Artificial Sequence
  Synthetic oligonucleotide
ctcctgtatgggacgactatgcccccacgg

SEQ ID NO: 407477 - DNA, 30 bp, Artificial Sequence
  Synthetic oligonucleotide
ggttcgtcattctgtttacgtgcgccacgg

SEQ ID NO: 407478 - DNA, 30 bp, Artificial Sequence
  Synthetic oligonucleotide
gattcaaagacaaaagtcaagtggccacgg

SEQ ID NO: 407479 - DNA, 30 bp, Artificial Sequence
  Synthetic oligonucleotide
aactaggccataatgatggttactccacgg

SEQ ID NO: 407480 - DNA, 30 bp, Artificial Sequence
  Synthetic oligonucleotide
caaaggcctctctgtaaggagattccacgg

SEQ ID NO: 407481 - DNA, 30 bp, Artificial Sequence
  Synthetic oligonucleotide
gggcttaatgtatgcagagaaagagcacgg

SEQ ID NO: 407482 - DNA, 30 bp, Artificial Sequence
  Synthetic oligonucleotide
ttgcgaacttttgggggagatatcgcacgg

SEQ ID NO: 407483 - DNA, 30 bp, Artificial Sequence
  Synthetic oligonucleotide
ttaaacattacaaccattccagcggcacgg

SEQ ID NO: 407484 - DNA, 30 bp, Artificial Sequence
  Synthetic oligonucleotide
atatcaatagctccctttaacgcggcacgg

SEQ ID NO: 407485 - DNA, 30 bp, Artificial Sequence
  Synthetic oligonucleotide
ttgcaacaagtaaggttacttcgtgcacgg

SEQ ID NO: 407486 - DNA, 31 bp, Artificial Sequence
  Synthetic oligonucleotide
ccaacacaggatgggaagggtacttgcacgg

SEQ ID NO: 407487 - DNA, 30 bp, Artificial Sequence
  Synthetic oligonucleotide
acccggatctctattgaaattcaatcacgg

SEQ ID NO: 407488 - DNA, 30 bp, Artificial Sequence
  Synthetic oligonucleotide
atatgccatgcatatcagtagccatcacgg

SEQ ID NO: 407489 - DNA, 30 bp, Artificial Sequence
  Synthetic oligonucleotide
gcatgaaatatctagccacgcatatcacgg

SEQ ID NO: 407490 - DNA, 30 bp, Artificial Sequence
  Synthetic oligonucleotide
gatttgcccgccgacggaaagccgtcacgg

SEQ ID NO: 407491 - DNA, 30 bp, Artificial Sequence
  Synthetic oligonucleotide
agaataggtcagtggattatctggtcacgg

SEQ ID NO: 407492 - DNA, 30 bp, Artificial Sequence
  Synthetic oligonucleotide
cgagagatgcggttctcgtccgtgtcacgg

SEQ ID NO: 407493 - DNA, 30 bp, Artificial Sequence
  Synthetic oligonucleotide
tcaacaaccccatttgatcatcattcacgg

SEQ ID NO: 407494 - DNA, 30 bp, Artificial Sequence
  Synthetic oligonucleotide
acgggcccaaattgaccagcgccttcacgg

SEQ ID NO: 407495 - DNA, 30 bp, Artificial Sequence
  Synthetic oligonucleotide
cgatctttgatataggtcgatagttcacgg

SEQ ID NO: 407496 - DNA, 30 bp, Artificial Sequence
  Synthetic oligonucleotide
ttggaatctgagggagagctcgtaagacgg

SEQ ID NO: 407497 - DNA, 30 bp, Artificial Sequence
  Synthetic oligonucleotide
catagtccgttggatggacgtggcagacgg

SEQ ID NO: 407498 - DNA, 30 bp, Artificial Sequence
  Synthetic oligonucleotide
ctctggaaaacaatagtgaagcagagacgg

SEQ ID NO: 407499 - DNA, 30 bp, Artificial Sequence
  Synthetic oligonucleotide
ccccagcgagtagcgtctacggagagacgg

SEQ ID NO: 407500 - DNA, 30 bp, Artificial Sequence
  Synthetic oligonucleotide
acattgggttgtgggagaggggagagacgg

SEQ ID NO: 407501 - DNA, 30 bp, Artificial Sequence
  Synthetic oligonucleotide
aaagttcggaggcggacacgaatacgacgg

SEQ ID NO: 407502 - DNA, 30 bp, Artificial Sequence
  Synthetic oligonucleotide
agacgcgttgcatcgggcatgtaccgacgg

SEQ ID NO: 407503 - DNA, 30 bp, Artificial Sequence
  Synthetic oligonucleotide
gctggcttagcctgtggtcgcagccgacgg

SEQ ID NO: 407504 - DNA, 30 bp, Artificial Sequence
  Synthetic oligonucleotide
atagcccacctatgaatcccctgccgacgg

SEQ ID NO: 407505 - DNA, 30 bp, Artificial Sequence
  Synthetic oligonucleotide
agcaagcactgcaagtatttgaagcgacgg

SEQ ID NO: 407506 - DNA, 30 bp, Artificial Sequence
  Synthetic oligonucleotide
gcaaccgacagaataccgctcaggcgacgg

SEQ ID NO: 407507 - DNA, 30 bp, Artificial Sequence
  Synthetic oligonucleotide
cacagtcgcggcttctcactagtgcgacgg

SEQ ID NO: 407508 - DNA, 30 bp, Artificial Sequence
  Synthetic oligonucleotide
aaaggcataattaacctttccgatcgacgg

SEQ ID NO: 407509 - DNA, 30 bp, Artificial Sequence
  Synthetic oligonucleotide
atgaatcgtcatagattatagacaggacgg

SEQ ID NO: 407510 - DNA, 30 bp, Artificial Sequence
  Synthetic oligonucleotide
cagccgctataagctttcttgccaggacgg

SEQ ID NO: 407511 - DNA, 30 bp, Artificial Sequence
  Synthetic oligonucleotide
gactagtgcttatacggtggaggaggacgg

SEQ ID NO: 407512 - DNA, 30 bp, Artificial Sequence
  Synthetic oligonucleotide
gtgggtagggttggagaatcccacggacgg

SEQ ID NO: 407513 - DNA, 30 bp, Artificial Sequence
  Synthetic oligonucleotide
tggctttcttgccacatctcgcccggacgg

SEQ ID NO: 407514 - DNA, 30 bp, Artificial Sequence
  Synthetic oligonucleotide
gggaggggggcggcgagctggtagggacgg

SEQ ID NO: 407515 - DNA, 30 bp, Artificial Sequence
  Synthetic oligonucleotide
ctttgattatggtcggacaactgtggacgg

SEQ ID NO: 407516 - DNA, 30 bp, Artificial Sequence
  Synthetic oligonucleotide
aaaggtttggatttaatcgcgtgatgacgg

SEQ ID NO: 407517 - DNA, 30 bp, Artificial Sequence
  Synthetic oligonucleotide
aaatacccgagcgatcgaagcacctgacgg

SEQ ID NO: 407518 - DNA, 30 bp, Artificial Sequence
  Synthetic oligonucleotide
gcaccacgagggcagctggggacctgacgg

SEQ ID NO: 407519 - DNA, 30 bp, Artificial Sequence
  Synthetic oligonucleotide
gtgcttaacaatgtaaatagtagctgacgg

SEQ ID NO: 407520 - DNA, 30 bp, Artificial Sequence
  Synthetic oligonucleotide
aagcctataaggggttgggaccagtgacgg

SEQ ID NO: 407521 - DNA, 30 bp, Artificial Sequence
  Synthetic oligonucleotide
cctgtgtccagattacttctttagtgacgg

SEQ ID NO: 407522 - DNA, 30 bp, Artificial Sequence
  Synthetic oligonucleotide
atatatactatggtgtacgtgtggtgacgg

SEQ ID NO: 407523 - DNA, 30 bp, Artificial Sequence
  Synthetic oligonucleotide
gagaagcacgggtccgcgtataattgacgg

SEQ ID NO: 407524 - DNA, 30 bp, Artificial Sequence
  Synthetic oligonucleotide
gggaggcaattgtcgctgccgacttgacgg

SEQ ID NO: 407525 - DNA, 31 bp, Artificial Sequence
  Synthetic oligonucleotide
gagactgttcgtccccggatttgcgatacgg

SEQ ID NO: 407526 - DNA, 30 bp, Artificial Sequence
  Synthetic oligonucleotide
ttggtcttatattaccatgtgtggatacgg

SEQ ID NO: 407527 - DNA, 30 bp, Artificial Sequence
  Synthetic oligonucleotide
tcaatttgtagagaactagtactgatacgg

SEQ ID NO: 407528 - DNA, 30 bp, Artificial Sequence
  Synthetic oligonucleotide
ggcctttggcataaaattttacctatacgg

SEQ ID NO: 407529 - DNA, 30 bp, Artificial Sequence
  Synthetic oligonucleotide
gccagaggcggagatgattgtcaactacgg

SEQ ID NO: 407530 - DNA, 30 bp, Artificial Sequence
  Synthetic oligonucleotide
ggaagcgaaaaagttttacactagctacgg

SEQ ID NO: 407531 - DNA, 30 bp, Artificial Sequence
  Synthetic oligonucleotide
tgagcggtaagccgggatttgcggctacgg

SEQ ID NO: 407532 - DNA, 30 bp, Artificial Sequence
  Synthetic oligonucleotide
tgttctgagataagtatggtagatctacgg

SEQ ID NO: 407533 - DNA, 30 bp, Artificial Sequence
  Synthetic oligonucleotide
tacatcctggatccaatcccaggagtacgg

SEQ ID NO: 407534 - DNA, 30 bp, Artificial Sequence
  Synthetic oligonucleotide
cctttgtcgtgtgttactgggcccgtacgg

SEQ ID NO: 407535 - DNA, 30 bp, Artificial Sequence
  Synthetic oligonucleotide
aataaggcctcagggaattgttgcgtacgg

SEQ ID NO: 407536 - DNA, 30 bp, Artificial Sequence
  Synthetic oligonucleotide
gcattgccgacgtgattactaccggtacgg

SEQ ID NO: 407537 - DNA, 30 bp, Artificial Sequence
  Synthetic oligonucleotide
agcagcccatcgtagcagattgcggtacgg

SEQ ID NO: 407538 - DNA, 30 bp, Artificial Sequence
  Synthetic oligonucleotide
agatgttaagatgaggatttaaatgtacgg

SEQ ID NO: 407539 - DNA, 30 bp, Artificial Sequence
  Synthetic oligonucleotide
acgcttgtactttctaactgcgctgtacgg

SEQ ID NO: 407540 - DNA, 30 bp, Artificial Sequence
  Synthetic oligonucleotide
ggcaaagctataaggctaataattgtacgg

SEQ ID NO: 407541 - DNA, 30 bp, Artificial Sequence
  Synthetic oligonucleotide
ttacatggcacttcattcccggttgtacgg

SEQ ID NO: 407542 - DNA, 30 bp, Artificial Sequence
  Synthetic oligonucleotide
gaacgtcaagtaactcgacgtcaattacgg

SEQ ID NO: 407543 - DNA, 30 bp, Artificial Sequence
  Synthetic oligonucleotide
aagtaaaattgaaaagacgaagacttacgg

SEQ ID NO: 407544 - DNA, 30 bp, Artificial Sequence
  Synthetic oligonucleotide
cgtcgctgaacaagcaaatccccgttacgg

SEQ ID NO: 407545 - DNA, 30 bp, Artificial Sequence
  Synthetic oligonucleotide
ctccctgtggtccctattcacgtgttacgg

SEQ ID NO: 407546 - DNA, 30 bp, Artificial Sequence
  Synthetic oligonucleotide
tgcgcacaccatctgcattaagttttacgg

SEQ ID NO: 407547 - DNA, 30 bp, Artificial Sequence
  Synthetic oligonucleotide
ccaacccgccgggcctggctatcaaaccgg

SEQ ID NO: 407548 - DNA, 30 bp, Artificial Sequence
  Synthetic oligonucleotide
aataagtgtcgttagaccatcaagaaccgg

SEQ ID NO: 407549 - DNA, 30 bp, Artificial Sequence
  Synthetic oligonucleotide
accttgcttagcatactgtcaaggaaccgg

SEQ ID NO: 407550 - DNA, 30 bp, Artificial Sequence
  Synthetic oligonucleotide
actgcttggggttcatgacgatataaccgg

SEQ ID NO: 407551 - DNA, 30 bp, Artificial Sequence
  Synthetic oligonucleotide
gagtcgggttaaacatgtgtccctaaccgg

SEQ ID NO: 407552 - DNA, 30 bp, Artificial Sequence
  Synthetic oligonucleotide
cgacagccattgaataattcgtgacaccgg

SEQ ID NO: 407553 - DNA, 30 bp, Artificial Sequence
  Synthetic oligonucleotide
accaaaaaggtgcagtctggcgtacaccgg

SEQ ID NO: 407554 - DNA, 30 bp, Artificial Sequence
  Synthetic oligonucleotide
tacaagatggcacagttcctatcgcaccgg

SEQ ID NO: 407555 - DNA, 30 bp, Artificial Sequence
  Synthetic oligonucleotide
aaaaatggagactcggatgtagctcaccgg

SEQ ID NO: 407556 - DNA, 30 bp, Artificial Sequence
  Synthetic oligonucleotide
tcgctgtcggcggattcctagggagaccgg

SEQ ID NO: 407557 - DNA, 30 bp, Artificial Sequence
  Synthetic oligonucleotide
taagagatgacgacctgttacgtagaccgg

SEQ ID NO: 407558 - DNA, 30 bp, Artificial Sequence
  Synthetic oligonucleotide
aaatccgaggcatacaggataaacgaccgg

SEQ ID NO: 407559 - DNA, 30 bp, Artificial Sequence
  Synthetic oligonucleotide
ttcgctcgaattatgtgggtaagcgaccgg

SEQ ID NO: 407560 - DNA, 30 bp, Artificial Sequence
  Synthetic oligonucleotide
gcataaatggcttgagggttctgcgaccgg

SEQ ID NO: 407561 - DNA, 30 bp, Artificial Sequence
  Synthetic oligonucleotide
gctctggagccatgcatgcggctcgaccgg

SEQ ID NO: 407562 - DNA, 30 bp, Artificial Sequence
  Synthetic oligonucleotide
gtagaaggagcgtggaattcataggaccgg

SEQ ID NO: 407563 - DNA, 30 bp, Artificial Sequence
  Synthetic oligonucleotide
caggaagtgatccgggtgatctcggaccgg

SEQ ID NO: 407564 - DNA, 30 bp, Artificial Sequence
  Synthetic oligonucleotide
ctggggggtgggagagggttccgggaccgg

SEQ ID NO: 407565 - DNA, 30 bp, Artificial Sequence
  Synthetic oligonucleotide
catttctcactcaatcccaagtgggaccgg

SEQ ID NO: 407566 - DNA, 30 bp, Artificial Sequence
  Synthetic oligonucleotide
accttagggaatccaacgttttgggaccgg

SEQ ID NO: 407567 - DNA, 30 bp, Artificial Sequence
  Synthetic oligonucleotide
gtgcaagagtggagcaaactcggtgaccgg

SEQ ID NO: 407568 - DNA, 30 bp, Artificial Sequence
  Synthetic oligonucleotide
gtcaactgaacgctcggcgtagtataccgg

SEQ ID NO: 407569 - DNA, 30 bp, Artificial Sequence
  Synthetic oligonucleotide
acgtacaaagcgttttacttctactaccgg

SEQ ID NO: 407570 - DNA, 30 bp, Artificial Sequence
  Synthetic oligonucleotide
gcttccggtaaatagttaggcgcctaccgg

SEQ ID NO: 407571 - DNA, 30 bp, Artificial Sequence
  Synthetic oligonucleotide
acattcgatcgcaccttattatggtaccgg

SEQ ID NO: 407572 - DNA, 30 bp, Artificial Sequence
  Synthetic oligonucleotide
ccagggacaatatctgggccaatgtaccgg

SEQ ID NO: 407573 - DNA, 30 bp, Artificial Sequence
  Synthetic oligonucleotide
aaggacacgataggtaaaataacttaccgg

SEQ ID NO: 407574 - DNA, 30 bp, Artificial Sequence
  Synthetic oligonucleotide
accattaaattagctcaagcagtttaccgg

SEQ ID NO: 407575 - DNA, 30 bp, Artificial Sequence
  Synthetic oligonucleotide
ccgtttattaccaagaggaacataacccgg

SEQ ID NO: 407576 - DNA, 30 bp, Artificial Sequence
  Synthetic oligonucleotide
gcttccagcgtcgaacgaccgtagacccgg

SEQ ID NO: 407577 - DNA, 30 bp, Artificial Sequence
  Synthetic oligonucleotide
gcacgtccacggggtaacctaacgacccgg

SEQ ID NO: 407578 - DNA, 30 bp, Artificial Sequence
  Synthetic oligonucleotide
gttcaaaggtaaaatgcgataccgacccgg

SEQ ID NO: 407579 - DNA, 30 bp, Artificial Sequence
  Synthetic oligonucleotide
aaaggacactccggggctgggctgacccgg

SEQ ID NO: 407580 - DNA, 30 bp, Artificial Sequence
  Synthetic oligonucleotide
atgctcccgtgcactggattcttgacccgg

SEQ ID NO: 407581 - DNA, 30 bp, Artificial Sequence
  Synthetic oligonucleotide
cccacgcaaaaaacacctaaggtaccccgg

SEQ ID NO: 407582 - DNA, 30 bp, Artificial Sequence
  Synthetic oligonucleotide
gataagcccacttgaaagcaacagccccgg

SEQ ID NO: 407583 - DNA, 30 bp, Artificial Sequence
  Synthetic oligonucleotide
gcggtcgcttggagcgatagcgtcgcccgg

SEQ ID NO: 407584 - DNA, 30 bp, Artificial Sequence
  Synthetic oligonucleotide
tacgtgcgagacgcacctactaatgcccgg

SEQ ID NO: 407585 - DNA, 30 bp, Artificial Sequence
  Synthetic oligonucleotide
tgtcgtggaagcatcgtcggcgatgcccgg

SEQ ID NO: 407586 - DNA, 30 bp, Artificial Sequence
  Synthetic oligonucleotide
ctagagttacacgtgtaggatcgtgcccgg

SEQ ID NO: 407587 - DNA, 30 bp, Artificial Sequence
  Synthetic oligonucleotide
ctaacagagggtatgcgagggggtgcccgg

SEQ ID NO: 407588 - DNA, 30 bp, Artificial Sequence
  Synthetic oligonucleotide
cgcactacagggggagtcttgcttgcccgg

SEQ ID NO: 407589 - DNA, 30 bp, Artificial Sequence
  Synthetic oligonucleotide
cctctgcacgcccaggctcgttaatcccgg

SEQ ID NO: 407590 - DNA, 30 bp, Artificial Sequence
  Synthetic oligonucleotide
tccgcctgtggtaatggccttagatcccgg

SEQ ID NO: 407591 - DNA, 30 bp, Artificial Sequence
  Synthetic oligonucleotide
tcgatgcaggttgctgcacgactatcccgg

SEQ ID NO: 407592 - DNA, 30 bp, Artificial Sequence
  Synthetic oligonucleotide
agtagatgcccggttggtaataacagccgg

SEQ ID NO: 407593 - DNA, 30 bp, Artificial Sequence
  Synthetic oligonucleotide
gttgtaggccgcacagcttcttgcagccgg

SEQ ID NO: 407594 - DNA, 30 bp, Artificial Sequence
  Synthetic oligonucleotide
gaaggctcagcctggcctattggccgccgg

SEQ ID NO: 407595 - DNA, 30 bp, Artificial Sequence
  Synthetic oligonucleotide
gcgagctctagtcggggaatagagcgccgg

SEQ ID NO: 407596 - DNA, 30 bp, Artificial Sequence
  Synthetic oligonucleotide
tgtgggtatgcttatctaaaatggcgccgg

SEQ ID NO: 407597 - DNA, 30 bp, Artificial Sequence
  Synthetic oligonucleotide
aatgagagcgggattgtacacgctcgccgg

SEQ ID NO: 407598 - DNA, 30 bp, Artificial Sequence
  Synthetic oligonucleotide
aactacgactatagagtcgtaggtcgccgg

SEQ ID NO: 407599 - DNA, 30 bp, Artificial Sequence
  Synthetic oligonucleotide
cgtcttgcataggcgctcctgagaggccgg

SEQ ID NO: 407600 - DNA, 30 bp, Artificial Sequence
  Synthetic oligonucleotide
ttgtcaaaggagtcttagtttaacggccgg

SEQ ID NO: 407601 - DNA, 30 bp, Artificial Sequence
  Synthetic oligonucleotide
aatcatattaacaaaatgtgaagcggccgg

SEQ ID NO: 407602 - DNA, 30 bp, Artificial Sequence
  Synthetic oligonucleotide
aatgaaccggatactgatactcgcggccgg

SEQ ID NO: 407603 - DNA, 30 bp, Artificial Sequence
  Synthetic oligonucleotide
agaggttcggatgaggtacttatatgccgg

SEQ ID NO: 407604 - DNA, 30 bp, Artificial Sequence
  Synthetic oligonucleotide
ccaatcgtataactgtacctttattgccgg

SEQ ID NO: 407605 - DNA, 30 bp, Artificial Sequence
  Synthetic oligonucleotide
ctaatccgtaatactttcatgtgttgccgg

SEQ ID NO: 407606 - DNA, 30 bp, Artificial Sequence
  Synthetic oligonucleotide
cctcgtaagcatacctctatccccatccgg

SEQ ID NO: 407607 - DNA, 30 bp, Artificial Sequence
  Synthetic oligonucleotide
cataagtaatatctgggaacttgcatccgg

SEQ ID NO: 407608 - DNA, 30 bp, Artificial Sequence
  Synthetic oligonucleotide
ggccacccaggatatgtactagtcatccgg

SEQ ID NO: 407609 - DNA, 30 bp, Artificial Sequence
  Synthetic oligonucleotide
tactcctgccgttatgacccaaatatccgg

SEQ ID NO: 407610 - DNA, 30 bp, Artificial Sequence
  Synthetic oligonucleotide
tacccattgtacttactacgagctatccgg

SEQ ID NO: 407611 - DNA, 30 bp, Artificial Sequence
  Synthetic oligonucleotide
aaggaatgccgctgccgggtgctactccgg

SEQ ID NO: 407612 - DNA, 30 bp, Artificial Sequence
  Synthetic oligonucleotide
ctgcactgggtacacacagctttactccgg

SEQ ID NO: 407613 - DNA, 30 bp, Artificial Sequence
  Synthetic oligonucleotide
gaatggacccttcgcacgctcggcctccgg

SEQ ID NO: 407614 - DNA, 30 bp, Artificial Sequence
  Synthetic oligonucleotide
caaaaaggcacgatacgatcgacgctccgg

SEQ ID NO: 407615 - DNA, 30 bp, Artificial Sequence
  Synthetic oligonucleotide
atcacattatagagtatttaatggctccgg

SEQ ID NO: 407616 - DNA, 30 bp, Artificial Sequence
  Synthetic oligonucleotide
gggagtggcacattggttaggcaagtccgg

SEQ ID NO: 407617 - DNA, 30 bp, Artificial Sequence
  Synthetic oligonucleotide
aaagtggtttggtagttcctaagagtccgg

SEQ ID NO: 407618 - DNA, 30 bp, Artificial Sequence
  Synthetic oligonucleotide
aaaccagttgagtctggtagcagagtccgg

SEQ ID NO: 407619 - DNA, 30 bp, Artificial Sequence
  Synthetic oligonucleotide
ggacaattcagaacgacgcttaccgtccgg

SEQ ID NO: 407620 - DNA, 30 bp, Artificial Sequence
  Synthetic oligonucleotide
aagtctggtgtgtagtctataagtgtccgg

SEQ ID NO: 407621 - DNA, 30 bp, Artificial Sequence
  Synthetic oligonucleotide
ggcgggcggcgggtgttatatggattccgg

SEQ ID NO: 407622 - DNA, 30 bp, Artificial Sequence
  Synthetic oligonucleotide
gagcacgttggcaggaattttgagttccgg

SEQ ID NO: 407623 - DNA, 30 bp, Artificial Sequence
  Synthetic oligonucleotide
atctgccgatcatgaatgattcggttccgg

SEQ ID NO: 407624 - DNA, 30 bp, Artificial Sequence
  Synthetic oligonucleotide
ttgcacttccgattagtttggtggttccgg

SEQ ID NO: 407625 - DNA, 30 bp, Artificial Sequence
  Synthetic oligonucleotide
tgcatttgcaagcggggacaatatttccgg

SEQ ID NO: 407626 - DNA, 30 bp, Artificial Sequence
  Synthetic oligonucleotide
cactaaatttagggaggcgttattttccgg

SEQ ID NO: 407627 - DNA, 30 bp, Artificial Sequence
  Synthetic oligonucleotide
ttgggcggcaccaccataacatacaagcgg

SEQ ID NO: 407628 - DNA, 30 bp, Artificial Sequence
  Synthetic oligonucleotide
cacatatcctccagtgccgtgtgcaagcgg

SEQ ID NO: 407629 - DNA, 30 bp, Artificial Sequence
  Synthetic oligonucleotide
tttctgtactaaatgagaggattcaagcgg

SEQ ID NO: 407630 - DNA, 30 bp, Artificial Sequence
  Synthetic oligonucleotide
atatggggttcgtagtttgtccagaagcgg

SEQ ID NO: 407631 - DNA, 30 bp, Artificial Sequence
  Synthetic oligonucleotide
cagaaataattgatttgaaagttgaagcgg

SEQ ID NO: 407632 - DNA, 30 bp, Artificial Sequence
  Synthetic oligonucleotide
gagatcgtgatggtcttgctaactaagcgg

SEQ ID NO: 407633 - DNA, 30 bp, Artificial Sequence
  Synthetic oligonucleotide
tatattgccagagacacgggatctaagcgg

SEQ ID NO: 407634 - DNA, 30 bp, Artificial Sequence
  Synthetic oligonucleotide
gtctataagagcacgcacagcatccagcgg

SEQ ID NO: 407635 - DNA, 30 bp, Artificial Sequence
  Synthetic oligonucleotide
gccactctcaagtgcacagggttccagcgg

SEQ ID NO: 407636 - DNA, 30 bp, Artificial Sequence
  Synthetic oligonucleotide
gaattgaggctcagcaggcaaaagcagcgg

SEQ ID NO: 407637 - DNA, 30 bp, Artificial Sequence
  Synthetic oligonucleotide
gggctccaaggggtaagttcacggcagcgg

SEQ ID NO: 407638 - DNA, 30 bp, Artificial Sequence
  Synthetic oligonucleotide
tgatgtcgcctacacgttagatggcagcgg

SEQ ID NO: 407639 - DNA, 30 bp, Artificial Sequence
  Synthetic oligonucleotide
atgtcaactatgcagcgcgacggtcagcgg

SEQ ID NO: 407640 - DNA, 30 bp, Artificial Sequence
  Synthetic oligonucleotide
aggatctcagtcatcgttgattgtcagcgg

SEQ ID NO: 407641 - DNA, 30 bp, Artificial Sequence
  Synthetic oligonucleotide
cgaagagagttgacatattcggaagagcgg

SEQ ID NO: 407642 - DNA, 30 bp, Artificial Sequence
  Synthetic oligonucleotide
ttcctgcctctgtccggattcacagagcgg

SEQ ID NO: 407643 - DNA, 30 bp, Artificial Sequence
  Synthetic oligonucleotide
tatggctctattagtagttcgtgggagcgg

SEQ ID NO: 407644 - DNA, 30 bp, Artificial Sequence
  Synthetic oligonucleotide
cctatccacaaagtcgctaggtgggagcgg

SEQ ID NO: 407645 - DNA, 30 bp, Artificial Sequence
  Synthetic oligonucleotide
gtgtctctaggccgcgggtcaattgagcgg

SEQ ID NO: 407646 - DNA, 30 bp, Artificial Sequence
  Synthetic oligonucleotide
gcgtggttgccacgggggcggtaatagcgg

SEQ ID NO: 407647 - DNA, 30 bp, Artificial Sequence
  Synthetic oligonucleotide
tcagtttagtatacgcctcttgcatagcgg

SEQ ID NO: 407648 - DNA, 30 bp, Artificial Sequence
  Synthetic oligonucleotide
ttagccgccgaatataaccgcatatagcgg

SEQ ID NO: 407649 - DNA, 30 bp, Artificial Sequence
  Synthetic oligonucleotide
gcgacgcatctatcgccctcacattagcgg

SEQ ID NO: 407650 - DNA, 30 bp, Artificial Sequence
  Synthetic oligonucleotide
tgtgcggtttttggggacgaaatttagcgg

SEQ ID NO: 407651 - DNA, 30 bp, Artificial Sequence
  Synthetic oligonucleotide
aatgtcgaggtagaagtagcacaaacgcgg

SEQ ID NO: 407652 - DNA, 30 bp, Artificial Sequence
  Synthetic oligonucleotide
gtataggtgggagttcaaaaagacacgcgg

SEQ ID NO: 407653 - DNA, 30 bp, Artificial Sequence
  Synthetic oligonucleotide
catccgggtcatttgagacccggcacgcgg

SEQ ID NO: 407654 - DNA, 30 bp, Artificial Sequence
  Synthetic oligonucleotide
aatacataagctgacatgaagctcacgcgg

SEQ ID NO: 407655 - DNA, 30 bp, Artificial Sequence
  Synthetic oligonucleotide
agccccgattagctaacgcgtgggacgcgg

SEQ ID NO: 407656 - DNA, 30 bp, Artificial Sequence
  Synthetic oligonucleotide
agctacaagggcataatttcaatgacgcgg

SEQ ID NO: 407657 - DNA, 30 bp, Artificial Sequence
  Synthetic oligonucleotide
gtgaatagctttaaggtcttgcatacgcgg

SEQ ID NO: 407658 - DNA, 30 bp, Artificial Sequence
  Synthetic oligonucleotide
ccttaaaaatgacaatatgtatatacgcgg

SEQ ID NO: 407659 - DNA, 30 bp, Artificial Sequence
  Synthetic oligonucleotide
gctcagttgtggatgggtaacagcccgcgg

SEQ ID NO: 407660 - DNA, 30 bp, Artificial Sequence
  Synthetic oligonucleotide
catgcctctggccaaggaaccgccgcgcgg

SEQ ID NO: 407661 - DNA, 30 bp, Artificial Sequence
  Synthetic oligonucleotide
ggacggatccctaccggctacgtcgcgcgg

SEQ ID NO: 407662 - DNA, 30 bp, Artificial Sequence
  Synthetic oligonucleotide
cggtactctgatattcagttgaaggcgcgg

SEQ ID NO: 407663 - DNA, 31 bp, Artificial Sequence
  Synthetic oligonucleotide
agtcgtgtgcacccagcttcttgcggcgcgg

SEQ ID NO: 407664 - DNA, 30 bp, Artificial Sequence
  Synthetic oligonucleotide
atcgtctgctattattttgtctgggcgcgg

SEQ ID NO: 407665 - DNA, 30 bp, Artificial Sequence
  Synthetic oligonucleotide
aaaggtgcttgttggattttcccatcgcgg

SEQ ID NO: 407666 - DNA, 30 bp, Artificial Sequence
  Synthetic oligonucleotide
tatactaccaatgagaaagagatctcgcgg

SEQ ID NO: 407667 - DNA, 30 bp, Artificial Sequence
  Synthetic oligonucleotide
tccccgagcctgttagcctgaaggtcgcgg

SEQ ID NO: 407668 - DNA, 30 bp, Artificial Sequence
  Synthetic oligonucleotide
cacgggttatgttgagagggcggttcgcgg

SEQ ID NO: 407669 - DNA, 30 bp, Artificial Sequence
  Synthetic oligonucleotide
cacccttcgtcccgttcgatggaaaggcgg

SEQ ID NO: 407670 - DNA, 30 bp, Artificial Sequence
  Synthetic oligonucleotide
ggccttcgactccaagtgttgtaaaggcgg

SEQ ID NO: 407671 - DNA, 30 bp, Artificial Sequence
  Synthetic oligonucleotide
taagcagaccgctgaatggacttaaggcgg

SEQ ID NO: 407672 - DNA, 30 bp, Artificial Sequence
  Synthetic oligonucleotide
gcccttgtgatacattacgcggagaggcgg

SEQ ID NO: 407673 - DNA, 30 bp, Artificial Sequence
  Synthetic oligonucleotide
gtagatggggacgggagatgggggaggcgg

SEQ ID NO: 407674 - DNA, 30 bp, Artificial Sequence
  Synthetic oligonucleotide
gtagatgtgtgactgcgtaccattaggcgg

SEQ ID NO: 407675 - DNA, 30 bp, Artificial Sequence
  Synthetic oligonucleotide
ggcaactaggatagtataatgacacggcgg

SEQ ID NO: 407676 - DNA, 30 bp, Artificial Sequence
  Synthetic oligonucleotide
agacaggcttactgttcggattgacggcgg

SEQ ID NO: 407677 - DNA, 30 bp, Artificial Sequence
  Synthetic oligonucleotide
caccggctgcctaaattaagtggccggcgg

SEQ ID NO: 407678 - DNA, 30 bp, Artificial Sequence
  Synthetic oligonucleotide
cccaacggcgcacgcgttaacgtccggcgg

SEQ ID NO: 407679 - DNA, 30 bp, Artificial Sequence
  Synthetic oligonucleotide
aacagcctaggggttcagagagcagggcgg

SEQ ID NO: 407680 - DNA, 30 bp, Artificial Sequence
  Synthetic oligonucleotide
ctgtgggggtcagggacttcggcagggcgg

SEQ ID NO: 407681 - DNA, 30 bp, Artificial Sequence
  Synthetic oligonucleotide
ttccgggattctgcgcttcggggagggcgg

SEQ ID NO: 407682 - DNA, 30 bp, Artificial Sequence
  Synthetic oligonucleotide
gctaccgggtccacagcaaacaaggggcgg

SEQ ID NO: 407683 - DNA, 30 bp, Artificial Sequence
  Synthetic oligonucleotide
tacgcgatattcctatgtatacaggggcgg

SEQ ID NO: 407684 - DNA, 30 bp, Artificial Sequence
  Synthetic oligonucleotide
ttgtaggaatgctgctcgtactaggggcgg

SEQ ID NO: 407685 - DNA, 30 bp, Artificial Sequence
  Synthetic oligonucleotide
cagtaacgttatctaagttcttcggggcgg

SEQ ID NO: 407686 - DNA, 30 bp, Artificial Sequence
  Synthetic oligonucleotide
gcggtgggtttatccttgatgatggggcgg

SEQ ID NO: 407687 - DNA, 30 bp, Artificial Sequence
  Synthetic oligonucleotide
gctggcttgtcggcagaattattggggcgg

SEQ ID NO: 407688 - DNA, 30 bp, Artificial Sequence
  Synthetic oligonucleotide
agtatgtgcgccaactagtataatgggcgg

SEQ ID NO: 407689 - DNA, 30 bp, Artificial Sequence
  Synthetic oligonucleotide
agtcctacgtaagaaactcgccatgggcgg

SEQ ID NO: 407690 - DNA, 30 bp, Artificial Sequence
  Synthetic oligonucleotide
cacataagatcctgtttctggtgtgggcgg

SEQ ID NO: 407691 - DNA, 30 bp, Artificial Sequence
  Synthetic oligonucleotide
ggggtactccacggttaaagcatatggcgg

SEQ ID NO: 407692 - DNA, 30 bp, Artificial Sequence
  Synthetic oligonucleotide
tgtgcactggagttgcgcgcggtctggcgg

SEQ ID NO: 407693 - DNA, 30 bp, Artificial Sequence
  Synthetic oligonucleotide
gctgttttcgctaatttcagtcagtggcgg

SEQ ID NO: 407694 - DNA, 31 bp, Artificial Sequence
  Synthetic oligonucleotide
ctgtgcatgccacagggtaatagtttggcgg

SEQ ID NO: 407695 - DNA, 30 bp, Artificial Sequence
  Synthetic oligonucleotide
gattcgatgtcgttaccatgtaacatgcgg

SEQ ID NO: 407696 - DNA, 30 bp, Artificial Sequence
  Synthetic oligonucleotide
ccggcatattatgcagcacagagcatgcgg

SEQ ID NO: 407697 - DNA, 30 bp, Artificial Sequence
  Synthetic oligonucleotide
agctaaggacgagcagcggaaggcatgcgg

SEQ ID NO: 407698 - DNA, 30 bp, Artificial Sequence
  Synthetic oligonucleotide
ggcactactcgggtggtcggttagatgcgg

SEQ ID NO: 407699 - DNA, 30 bp, Artificial Sequence
  Synthetic oligonucleotide
gtattgatagtctatgacgtacatatgcgg

SEQ ID NO: 407700 - DNA, 30 bp, Artificial Sequence
  Synthetic oligonucleotide
actctatatatcacatcatgttctatgcgg

SEQ ID NO: 407701 - DNA, 30 bp, Artificial Sequence
  Synthetic oligonucleotide
ctcttggtctcggggctatgggtactgcgg

SEQ ID NO: 407702 - DNA, 30 bp, Artificial Sequence
  Synthetic oligonucleotide
gattgcgacgcccccccgtcacggctgcgg

SEQ ID NO: 407703 - DNA, 30 bp, Artificial Sequence
  Synthetic oligonucleotide
attcatcgtagtcgggaatgccgagtgcgg

SEQ ID NO: 407704 - DNA, 29 bp, Artificial Sequence
  Synthetic oligonucleotide
taagcctttagataaacccgatagtgcgg

SEQ ID NO: 407705 - DNA, 30 bp, Artificial Sequence
  Synthetic oligonucleotide
tggtggtgcgaacttaggcagcgcgtgcgg

SEQ ID NO: 407706 - DNA, 30 bp, Artificial Sequence
  Synthetic oligonucleotide
ggcccccgctgtacaaatgcggcggtgcgg

SEQ ID NO: 407707 - DNA, 30 bp, Artificial Sequence
  Synthetic oligonucleotide
taggtcaccactcgccgtgcatcggtgcgg

SEQ ID NO: 407708 - DNA, 30 bp, Artificial Sequence
  Synthetic oligonucleotide
cagcggcgaggttaacaaacacctgtgcgg

SEQ ID NO: 407709 - DNA, 30 bp, Artificial Sequence
  Synthetic oligonucleotide
attaagagacttgtagtgagtattgtgcgg

SEQ ID NO: 407710 - DNA, 30 bp, Artificial Sequence
  Synthetic oligonucleotide
ttctaacgacggttcgggcgtgaattgcgg

SEQ ID NO: 407711 - DNA, 30 bp, Artificial Sequence
  Synthetic oligonucleotide
gtaccagtgctatgaggcatcaacttgcgg

SEQ ID NO: 407712 - DNA, 30 bp, Artificial Sequence
  Synthetic oligonucleotide
ttagcggagcaaacgtaagcgatcttgcgg

SEQ ID NO: 407713 - DNA, 30 bp, Artificial Sequence
  Synthetic oligonucleotide
cagcaatccagtaagtaatatgtcttgcgg

SEQ ID NO: 407714 - DNA, 30 bp, Artificial Sequence
  Synthetic oligonucleotide
tcgcaaacgcaaatctctgacttgttgcgg

SEQ ID NO: 407715 - DNA, 30 bp, Artificial Sequence
  Synthetic oligonucleotide
aatagttgggaagctttaatatctttgcgg

SEQ ID NO: 407716 - DNA, 30 bp, Artificial Sequence
  Synthetic oligonucleotide
ctagtcgagccattgagacgtaaaaatcgg

SEQ ID NO: 407717 - DNA, 30 bp, Artificial Sequence
  Synthetic oligonucleotide
tttcccgggaaaagttgaagggaaaatcgg

SEQ ID NO: 407718 - DNA, 30 bp, Artificial Sequence
  Synthetic oligonucleotide
acggctaataaagcgatgcggttaaatcgg

SEQ ID NO: 407719 - DNA, 30 bp, Artificial Sequence
  Synthetic oligonucleotide
accttatacagcacgatcgcccgcaatcgg

SEQ ID NO: 407720 - DNA, 30 bp, Artificial Sequence
  Synthetic oligonucleotide
taacggtcctgcagaatgtattgcaatcgg

SEQ ID NO: 407721 - DNA, 30 bp, Artificial Sequence
  Synthetic oligonucleotide
gtgctgcgcttaagtaatcgtttgaatcgg

SEQ ID NO: 407722 - DNA, 30 bp, Artificial Sequence
  Synthetic oligonucleotide
cgcagccgctcccatccaataagtaatcgg

SEQ ID NO: 407723 - DNA, 30 bp, Artificial Sequence
  Synthetic oligonucleotide
ttttagacccgttagagtacggaacatcgg

SEQ ID NO: 407724 - DNA, 30 bp, Artificial Sequence
  Synthetic oligonucleotide
tagataaaaaaagagccaagacggcatcgg

SEQ ID NO: 407725 - DNA, 30 bp, Artificial Sequence
  Synthetic oligonucleotide
ttcctgtacttagaatagccactgcatcgg

SEQ ID NO: 407726 - DNA, 30 bp, Artificial Sequence
  Synthetic oligonucleotide
tagaagtgccgtaggacagaagtgcatcgg

SEQ ID NO: 407727 - DNA, 30 bp, Artificial Sequence
  Synthetic oligonucleotide
catacatgctagcgtcgctacactcatcgg

SEQ ID NO: 407728 - DNA, 30 bp, Artificial Sequence
  Synthetic oligonucleotide
ccttcccccgcataactgagaattcatcgg

SEQ ID NO: 407729 - DNA, 30 bp, Artificial Sequence
  Synthetic oligonucleotide
tgcatttgttgaaatgcaagttcagatcgg

SEQ ID NO: 407730 - DNA, 30 bp, Artificial Sequence
  Synthetic oligonucleotide
ttagcatacctagctaatgtaacggatcgg

SEQ ID NO: 407731 - DNA, 30 bp, Artificial Sequence
  Synthetic oligonucleotide
ggatctaggcggacactcgggctggatcgg

SEQ ID NO: 407732 - DNA, 30 bp, Artificial Sequence
  Synthetic oligonucleotide
tagagtcaagtcggaaatccgactgatcgg

SEQ ID NO: 407733 - DNA, 30 bp, Artificial Sequence
  Synthetic oligonucleotide
agagtatctccgttcgggagttttgatcgg

SEQ ID NO: 407734 - DNA, 30 bp, Artificial Sequence
  Synthetic oligonucleotide
atcggtggtatctctgtaatctcatatcgg

SEQ ID NO: 407735 - DNA, 30 bp, Artificial Sequence
  Synthetic oligonucleotide
atgttgatcttatgcgaaaaaggatatcgg

SEQ ID NO: 407736 - DNA, 30 bp, Artificial Sequence
  Synthetic oligonucleotide
gttgtactttgcatcgttcccagctatcgg

SEQ ID NO: 407737 - DNA, 30 bp, Artificial Sequence
  Synthetic oligonucleotide
gtctttaaaatcattcaccagcgctatcgg

SEQ ID NO: 407738 - DNA, 30 bp, Artificial Sequence
  Synthetic oligonucleotide
cttgtgaggttagtaagcgggcagtatcgg

SEQ ID NO: 407739 - DNA, 30 bp, Artificial Sequence
  Synthetic oligonucleotide
gaactttgggcgagtccacgcgagtatcgg

SEQ ID NO: 407740 - DNA, 30 bp, Artificial Sequence
  Synthetic oligonucleotide
ttccgcacaacgtgggtccttgcgtatcgg

SEQ ID NO: 407741 - DNA, 30 bp, Artificial Sequence
  Synthetic oligonucleotide
ccaactatacattccacttagggttatcgg

SEQ ID NO: 407742 - DNA, 30 bp, Artificial Sequence
  Synthetic oligonucleotide
gtaaatgtccccgtctagaagtaaactcgg

SEQ ID NO: 407743 - DNA, 30 bp, Artificial Sequence
  Synthetic oligonucleotide
agcgctctcattcaagcgggggcaactcgg

SEQ ID NO: 407744 - DNA, 30 bp, Artificial Sequence
  Synthetic oligonucleotide
gaagttcaaggtaccttgacggacactcgg

SEQ ID NO: 407745 - DNA, 30 bp, Artificial Sequence
  Synthetic oligonucleotide
caaggaatgtgtagttgtggggttactcgg

SEQ ID NO: 407746 - DNA, 30 bp, Artificial Sequence
  Synthetic oligonucleotide
tacacgttgcgaacacggtaaggacctcgg

SEQ ID NO: 407747 - DNA, 30 bp, Artificial Sequence
  Synthetic oligonucleotide
caacgaaggtagcagcgttgctggcctcgg

SEQ ID NO: 407748 - DNA, 30 bp, Artificial Sequence
  Synthetic oligonucleotide
tcggctctaggcgacgtaggcctgcctcgg

SEQ ID NO: 407749 - DNA, 30 bp, Artificial Sequence
  Synthetic oligonucleotide
atggtggcccgggttgtcccctcagctcgg

SEQ ID NO: 407750 - DNA, 30 bp, Artificial Sequence
  Synthetic oligonucleotide
tggtttccgcgctaaataaggagagctcgg

SEQ ID NO: 407751 - DNA, 30 bp, Artificial Sequence
  Synthetic oligonucleotide
acagttagaatctattctttgttggctcgg

SEQ ID NO: 407752 - DNA, 30 bp, Artificial Sequence
  Synthetic oligonucleotide
gcgtcagatgtccgcatttatggttctcgg

SEQ ID NO: 407753 - DNA, 30 bp, Artificial Sequence
  Synthetic oligonucleotide
ccgaatggacacgatgagttgggaagtcgg

SEQ ID NO: 407754 - DNA, 30 bp, Artificial Sequence
  Synthetic oligonucleotide
cccacttagtatggttacaagcccagtcgg

SEQ ID NO: 407755 - DNA, 30 bp, Artificial Sequence
  Synthetic oligonucleotide
gtgcttgcaaacctaggtggtcgcagtcgg

SEQ ID NO: 407756 - DNA, 30 bp, Artificial Sequence
  Synthetic oligonucleotide
ggtagggcgcacgacgaaggtgtcagtcgg

SEQ ID NO: 407757 - DNA, 30 bp, Artificial Sequence
  Synthetic oligonucleotide
gagtcacgacaatgtcacagtttcagtcgg

SEQ ID NO: 407758 - DNA, 30 bp, Artificial Sequence
  Synthetic oligonucleotide
accgacgtactagttaatgcctagagtcgg

SEQ ID NO: 407759 - DNA, 30 bp, Artificial Sequence
  Synthetic oligonucleotide
gataaaaataaagcttactgtaggagtcgg

SEQ ID NO: 407760 - DNA, 30 bp, Artificial Sequence
  Synthetic oligonucleotide
gcacaaaggaggtcattgtaccttagtcgg

SEQ ID NO: 407761 - DNA, 30 bp, Artificial Sequence
  Synthetic oligonucleotide
acataaagcaccggtcatacgtgacgtcgg

SEQ ID NO: 407762 - DNA, 30 bp, Artificial Sequence
  Synthetic oligonucleotide
aaccagatttggactatctaattccgtcgg

SEQ ID NO: 407763 - DNA, 30 bp, Artificial Sequence
  Synthetic oligonucleotide
tttagggccctcaacaccagcccaggtcgg

SEQ ID NO: 407764 - DNA, 30 bp, Artificial Sequence
  Synthetic oligonucleotide
gcaagcagtctctttaccgggcccggtcgg

SEQ ID NO: 407765 - DNA, 30 bp, Artificial Sequence
  Synthetic oligonucleotide
cctgtacggtgtcctctgcgtaggggtcgg

SEQ ID NO: 407766 - DNA, 30 bp, Artificial Sequence
  Synthetic oligonucleotide
actaagtttcaaaccccgggagggggtcgg

SEQ ID NO: 407767 - DNA, 30 bp, Artificial Sequence
  Synthetic oligonucleotide
attcaagcggaggggtcataagctggtcgg

SEQ ID NO: 407768 - DNA, 30 bp, Artificial Sequence
  Synthetic oligonucleotide
tcggcccgcaagccgcgcaatgaatgtcgg

SEQ ID NO: 407769 - DNA, 30 bp, Artificial Sequence
  Synthetic oligonucleotide
ggtctgcgggagatctttcggcgctgtcgg

SEQ ID NO: 407770 - DNA, 30 bp, Artificial Sequence
  Synthetic oligonucleotide
tttttagggaggaaatatctcgtctgtcgg

SEQ ID NO: 407771 - DNA, 30 bp, Artificial Sequence
  Synthetic oligonucleotide
tcgtacagttaaaaattcaataagtgtcgg

SEQ ID NO: 407772 - DNA, 30 bp, Artificial Sequence
  Synthetic oligonucleotide
ttgtagaccgccttttagcactagtgtcgg

SEQ ID NO: 407773 - DNA, 30 bp, Artificial Sequence
  Synthetic oligonucleotide
aaggttgatagagcgtggtaaaattgtcgg

SEQ ID NO: 407774 - DNA, 30 bp, Artificial Sequence
  Synthetic oligonucleotide
gtcgtgagatgggatatctcgcattgtcgg

SEQ ID NO: 407775 - DNA, 30 bp, Artificial Sequence
  Synthetic oligonucleotide
atgagctaactcgctaggccgctcattcgg

SEQ ID NO: 407776 - DNA, 30 bp, Artificial Sequence
  Synthetic oligonucleotide
ctatggtgatgaacatagtgtgtcattcgg

SEQ ID NO: 407777 - DNA, 30 bp, Artificial Sequence
  Synthetic oligonucleotide
tatcagcggtgataacttggacatattcgg

SEQ ID NO: 407778 - DNA, 30 bp, Artificial Sequence
  Synthetic oligonucleotide
tcgcttgtccccagagcgacttatattcgg

SEQ ID NO: 407779 - DNA, 30 bp, Artificial Sequence
  Synthetic oligonucleotide
attaagttaatcttatcacgtagtattcgg

SEQ ID NO: 407780 - DNA, 30 bp, Artificial Sequence
  Synthetic oligonucleotide
gttcccgctgggtaattcataattattcgg

SEQ ID NO: 407781 - DNA, 30 bp, Artificial Sequence
  Synthetic oligonucleotide
attggaacctcagtgagcttcccacttcgg

SEQ ID NO: 407782 - DNA, 30 bp, Artificial Sequence
  Synthetic oligonucleotide
agataatggaaagctagtacgcgacttcgg

SEQ ID NO: 407783 - DNA, 30 bp, Artificial Sequence
  Synthetic oligonucleotide
ccagatctgtgcatatttctaaggcttcgg

SEQ ID NO: 407784 - DNA, 30 bp, Artificial Sequence
  Synthetic oligonucleotide
gccctgcagtcacggccatgcatgcttcgg

SEQ ID NO: 407785 - DNA, 30 bp, Artificial Sequence
  Synthetic oligonucleotide
tagtgtaagattgagttcagcaatcttcgg

SEQ ID NO: 407786 - DNA, 30 bp, Artificial Sequence
  Synthetic oligonucleotide
tgagtacccttggcaaaagttcgtcttcgg

SEQ ID NO: 407787 - DNA, 30 bp, Artificial Sequence
  Synthetic oligonucleotide
ccgatatttcccgacgtacaggatgttcgg

SEQ ID NO: 407788 - DNA, 30 bp, Artificial Sequence
  Synthetic oligonucleotide
acgcctcctaccccaccgctacaatttcgg

SEQ ID NO: 407789 - DNA, 30 bp, Artificial Sequence
  Synthetic oligonucleotide
tttggtgggcattctgtctcagaatttcgg

SEQ ID NO: 407790 - DNA, 30 bp, Artificial Sequence
  Synthetic oligonucleotide
ttcaatcctaaatctggccgtttatttcgg

SEQ ID NO: 407791 - DNA, 30 bp, Artificial Sequence
  Synthetic oligonucleotide
tgtaatgagtggcggggacgccactttcgg

SEQ ID NO: 407792 - DNA, 30 bp, Artificial Sequence
  Synthetic oligonucleotide
accatcgttactcattctttgagctttcgg

SEQ ID NO: 407793 - DNA, 29 bp, Artificial Sequence
  Synthetic oligonucleotide
caccgttttaggcactgtgttagtttcgg

SEQ ID NO: 407794 - DNA, 30 bp, Artificial Sequence
  Synthetic oligonucleotide
aaatgcacttcaggaagttgggcttttcgg

SEQ ID NO: 407795 - DNA, 30 bp, Artificial Sequence
  Synthetic oligonucleotide
tcaatggggtcagcgcggcacggaaaaggg

SEQ ID NO: 407796 - DNA, 30 bp, Artificial Sequence
  Synthetic oligonucleotide
ttgtattaggttcttgtctcaataaaaggg

SEQ ID NO: 407797 - DNA, 30 bp, Artificial Sequence
  Synthetic oligonucleotide
tagcttagtgcgggttcacgcctaaaaggg

SEQ ID NO: 407798 - DNA, 30 bp, Artificial Sequence
  Synthetic oligonucleotide
tctagatgcgcagtcgtgcgagtaaaaggg

SEQ ID NO: 407799 - DNA, 30 bp, Artificial Sequence
  Synthetic oligonucleotide
ggaatcggactggttgattggcccaaaggg

SEQ ID NO: 407800 - DNA, 30 bp, Artificial Sequence
  Synthetic oligonucleotide
ggaatgcgttctccgcaattgttcaaaggg

SEQ ID NO: 407801 - DNA, 30 bp, Artificial Sequence
  Synthetic oligonucleotide
ctataattgttatctgggtaggcgaaaggg

SEQ ID NO: 407802 - DNA, 30 bp, Artificial Sequence
  Synthetic oligonucleotide
aaggggacaagcgcctagcagttgaaaggg

SEQ ID NO: 407803 - DNA, 30 bp, Artificial Sequence
  Synthetic oligonucleotide
agcgaggacaatccgtccgcgcataaaggg

SEQ ID NO: 407804 - DNA, 30 bp, Artificial Sequence
  Synthetic oligonucleotide
gggaactcagctaggggtcggactaaaggg

SEQ ID NO: 407805 - DNA, 30 bp, Artificial Sequence
  Synthetic oligonucleotide
tttgacaagcagagcctgcaaatacaaggg

SEQ ID NO: 407806 - DNA, 30 bp, Artificial Sequence
  Synthetic oligonucleotide
acgtagttaatgccaaatccccaccaaggg

SEQ ID NO: 407807 - DNA, 30 bp, Artificial Sequence
  Synthetic oligonucleotide
catactcgtggtagcacgcgtctccaaggg

SEQ ID NO: 407808 - DNA, 30 bp, Artificial Sequence
  Synthetic oligonucleotide
tacacttaggttccgttatacccgcaaggg

SEQ ID NO: 407809 - DNA, 30 bp, Artificial Sequence
  Synthetic oligonucleotide
gataatgtaccatgtgcttaatctcaaggg

SEQ ID NO: 407810 - DNA, 30 bp, Artificial Sequence
  Synthetic oligonucleotide
tggtatgcgcacactccggttgttcaaggg

SEQ ID NO: 407811 - DNA, 30 bp, Artificial Sequence
  Synthetic oligonucleotide
tgttctgaggatgttgcagtccgagaaggg

SEQ ID NO: 407812 - DNA, 30 bp, Artificial Sequence
  Synthetic oligonucleotide
tagtcagacgaagtgacaaataaggaaggg

SEQ ID NO: 407813 - DNA, 30 bp, Artificial Sequence
  Synthetic oligonucleotide
aaaagttgtcttgtcgactcgcaggaaggg

SEQ ID NO: 407814 - DNA, 30 bp, Artificial Sequence
  Synthetic oligonucleotide
ggagttttattctacctcctataggaaggg

SEQ ID NO: 407815 - DNA, 30 bp, Artificial Sequence
  Synthetic oligonucleotide
tgtgtttgattatttaaagagtcctaaggg

SEQ ID NO: 407816 - DNA, 30 bp, Artificial Sequence
  Synthetic oligonucleotide
gaagaactcaatcgattggcggtgtaaggg

SEQ ID NO: 407817 - DNA, 30 bp, Artificial Sequence
  Synthetic oligonucleotide
gtaggcgttttatgttgtctattttaaggg

SEQ ID NO: 407818 - DNA, 30 bp, Artificial Sequence
  Synthetic oligonucleotide
ttgaagttaggtgacctttatttttaaggg

SEQ ID NO: 407819 - DNA, 30 bp, Artificial Sequence
  Synthetic oligonucleotide
acttcacaaggggtaggatgtggaacaggg

SEQ ID NO: 407820 - DNA, 30 bp, Artificial Sequence
  Synthetic oligonucleotide
gagcgaagactttcgatctgcgacacaggg

SEQ ID NO: 407821 - DNA, 30 bp, Artificial Sequence
  Synthetic oligonucleotide
tagagttctacaaccgtgacaagcacaggg

SEQ ID NO: 407822 - DNA, 30 bp, Artificial Sequence
  Synthetic oligonucleotide
gtgactgggtcaactttgggcagtacaggg

SEQ ID NO: 407823 - DNA, 30 bp, Artificial Sequence
  Synthetic oligonucleotide
cttagtcgcttctagttcatagtaccaggg

SEQ ID NO: 407824 - DNA, 30 bp, Artificial Sequence
  Synthetic oligonucleotide
cttgtggccatgtcacatggtgagccaggg

SEQ ID NO: 407825 - DNA, 30 bp, Artificial Sequence
  Synthetic oligonucleotide
aatcgtttaaccggactgcgcactccaggg

SEQ ID NO: 407826 - DNA, 30 bp, Artificial Sequence
  Synthetic oligonucleotide
aggaaacgatcggatttaccgcgtccaggg

SEQ ID NO: 407827 - DNA, 30 bp, Artificial Sequence
  Synthetic oligonucleotide
gtactgatcaagggaggataaagcgcaggg

SEQ ID NO: 407828 - DNA, 30 bp, Artificial Sequence
  Synthetic oligonucleotide
agcgttgttgtgggcatcgccggcgcaggg

SEQ ID NO: 407829 - DNA, 30 bp, Artificial Sequence
  Synthetic oligonucleotide
gaggacgaacccaagggcaaactcgcaggg

SEQ ID NO: 407830 - DNA, 30 bp, Artificial Sequence
  Synthetic oligonucleotide
gaatcaagacgttccgtattagaggcaggg

SEQ ID NO: 407831 - DNA, 30 bp, Artificial Sequence
  Synthetic oligonucleotide
ctactgatattaaacgccggacctgcaggg

SEQ ID NO: 407832 - DNA, 30 bp, Artificial Sequence
  Synthetic oligonucleotide
agcaccaatccggcttttttgcttgcaggg

SEQ ID NO: 407833 - DNA, 30 bp, Artificial Sequence
  Synthetic oligonucleotide
tgtggctagctgtgtgcgtattcatcaggg

SEQ ID NO: 407834 - DNA, 30 bp, Artificial Sequence
  Synthetic oligonucleotide
ctcatatccgccatgcggtacatatcaggg

SEQ ID NO: 407835 - DNA, 30 bp, Artificial Sequence
  Synthetic oligonucleotide
cggtcgtttgctcatggcaccacctcaggg

SEQ ID NO: 407836 - DNA, 30 bp, Artificial Sequence
  Synthetic oligonucleotide
tattaagtatgtatccgaaatttctcaggg

SEQ ID NO: 407837 - DNA, 30 bp, Artificial Sequence
  Synthetic oligonucleotide
agcttcgcagttctcgggattatttcaggg

SEQ ID NO: 407838 - DNA, 30 bp, Artificial Sequence
  Synthetic oligonucleotide
gcgcggttggtacctttggccgcgagaggg

SEQ ID NO: 407839 - DNA, 30 bp, Artificial Sequence
  Synthetic oligonucleotide
taaaagtagacgtaagccacgcgtagaggg

SEQ ID NO: 407840 - DNA, 30 bp, Artificial Sequence
  Synthetic oligonucleotide
cgtgtggggcggcccggtgcatttagaggg

SEQ ID NO: 407841 - DNA, 30 bp, Artificial Sequence
  Synthetic oligonucleotide
aacctcacttccatgcctactggacgaggg

SEQ ID NO: 407842 - DNA, 30 bp, Artificial Sequence
  Synthetic oligonucleotide
ttgactctttggtatagaagactccgaggg

SEQ ID NO: 407843 - DNA, 30 bp, Artificial Sequence
  Synthetic oligonucleotide
cattccgcgtctggagatacgctccgaggg

SEQ ID NO: 407844 - DNA, 30 bp, Artificial Sequence
  Synthetic oligonucleotide
gagatgcgcttcagcgagcgtaatcgaggg

SEQ ID NO: 407845 - DNA, 30 bp, Artificial Sequence
  Synthetic oligonucleotide
cgatgtcagtactttatatttagtcgaggg

SEQ ID NO: 407846 - DNA, 30 bp, Artificial Sequence
  Synthetic oligonucleotide
tggacggtttcagctattagcgcaggaggg

SEQ ID NO: 407847 - DNA, 30 bp, Artificial Sequence
  Synthetic oligonucleotide
gcccggaaatgggcggtgcctataggaggg

SEQ ID NO: 407848 - DNA, 30 bp, Artificial Sequence
  Synthetic oligonucleotide
aatcgggctcaattgcacaattttggaggg

SEQ ID NO: 407849 - DNA, 29 bp, Artificial Sequence
  Synthetic oligonucleotide
tgggtagggagatggaaaccctatgaggg

SEQ ID NO: 407850 - DNA, 30 bp, Artificial Sequence
  Synthetic oligonucleotide
ccaattagactgggcccccgcaactgaggg

SEQ ID NO: 407851 - DNA, 30 bp, Artificial Sequence
  Synthetic oligonucleotide
caatccgggctgcgcagcggtacctgaggg

SEQ ID NO: 407852 - DNA, 30 bp, Artificial Sequence
  Synthetic oligonucleotide
attttgaaactgggaaggctgctgtgaggg

SEQ ID NO: 407853 - DNA, 30 bp, Artificial Sequence
  Synthetic oligonucleotide
ttggaccatgaaactggaaggttgtgaggg

SEQ ID NO: 407854 - DNA, 30 bp, Artificial Sequence
  Synthetic oligonucleotide
cttttgcccgtatgagtcatacattgaggg

SEQ ID NO: 407855 - DNA, 30 bp, Artificial Sequence
  Synthetic oligonucleotide
tagtagtctatattgacagcctattgaggg

SEQ ID NO: 407856 - DNA, 30 bp, Artificial Sequence
  Synthetic oligonucleotide
gttgtctacatctcaaagagttcttgaggg

SEQ ID NO: 407857 - DNA, 30 bp, Artificial Sequence
  Synthetic oligonucleotide
ccgcgcccccgtaaatcactcgtttgaggg

SEQ ID NO: 407858 - DNA, 30 bp, Artificial Sequence
  Synthetic oligonucleotide
gccatagcgttacatcacggtaaaataggg

SEQ ID NO: 407859 - DNA, 30 bp, Artificial Sequence
  Synthetic oligonucleotide
ccaggatatttaaggacccaacccataggg

SEQ ID NO: 407860 - DNA, 30 bp, Artificial Sequence
  Synthetic oligonucleotide
gcgcccctcgaattgcttttgctcataggg

SEQ ID NO: 407861 - DNA, 30 bp, Artificial Sequence
  Synthetic oligonucleotide
tgcgaatcgggttgtatagacactataggg

SEQ ID NO: 407862 - DNA, 30 bp, Artificial Sequence
  Synthetic oligonucleotide
gagttaaacttgtaccctgagagactaggg

SEQ ID NO: 407863 - DNA, 30 bp, Artificial Sequence
  Synthetic oligonucleotide
tagccatgggggggctatgaagacctaggg

SEQ ID NO: 407864 - DNA, 30 bp, Artificial Sequence
  Synthetic oligonucleotide
taataggaggtatcttggtcaaagctaggg

SEQ ID NO: 407865 - DNA, 30 bp, Artificial Sequence
  Synthetic oligonucleotide
tgtattcttttcagaataataatgctaggg

SEQ ID NO: 407866 - DNA, 30 bp, Artificial Sequence
  Synthetic oligonucleotide
tggtattgcgtccggttttagtcagtaggg

SEQ ID NO: 407867 - DNA, 30 bp, Artificial Sequence
  Synthetic oligonucleotide
gcaattgggcactgccggtattcggtaggg

SEQ ID NO: 407868 - DNA, 30 bp, Artificial Sequence
  Synthetic oligonucleotide
tcgatggctgggtagatggtgcttgtaggg

SEQ ID NO: 407869 - DNA, 30 bp, Artificial Sequence
  Synthetic oligonucleotide
gtgtcacgttttgccgcgcctaacttaggg

SEQ ID NO: 407870 - DNA, 30 bp, Artificial Sequence
  Synthetic oligonucleotide
ggggtgaggcacccagtttgcatcttaggg

SEQ ID NO: 407871 - DNA, 31 bp, Artificial Sequence
  Synthetic oligonucleotide
ctgacggcgctagcctataagcactttaggg

SEQ ID NO: 407872 - DNA, 30 bp, Artificial Sequence
  Synthetic oligonucleotide
aacacacgctccactataggatcaaacggg

SEQ ID NO: 407873 - DNA, 30 bp, Artificial Sequence
  Synthetic oligonucleotide
tatctatcgtctaaagaccggggaaacggg

SEQ ID NO: 407874 - DNA, 30 bp, Artificial Sequence
  Synthetic oligonucleotide
ccctttagctattgtggccactccaacggg

SEQ ID NO: 407875 - DNA, 30 bp, Artificial Sequence
  Synthetic oligonucleotide
gttaccggacaggaaatcccggagaacggg

SEQ ID NO: 407876 - DNA, 30 bp, Artificial Sequence
  Synthetic oligonucleotide
aataggcctcgtgtccagattcctaacggg

SEQ ID NO: 407877 - DNA, 30 bp, Artificial Sequence
  Synthetic oligonucleotide
aagaatgttagtggggagtcctgtaacggg

SEQ ID NO: 407878 - DNA, 30 bp, Artificial Sequence
  Synthetic oligonucleotide
gataactctctggatgtgtgaggacacggg

SEQ ID NO: 407879 - DNA, 30 bp, Artificial Sequence
  Synthetic oligonucleotide
cgcgatggcaccctttaccaaacccacggg

SEQ ID NO: 407880 - DNA, 30 bp, Artificial Sequence
  Synthetic oligonucleotide
gccctgatcgttctactcttggtccacggg

SEQ ID NO: 407881 - DNA, 30 bp, Artificial Sequence
  Synthetic oligonucleotide
agggctttcgacggatccagcaggcacggg

SEQ ID NO: 407882 - DNA, 30 bp, Artificial Sequence
  Synthetic oligonucleotide
tagtttaagtgtggaacacttagtcacggg

SEQ ID NO: 407883 - DNA, 30 bp, Artificial Sequence
  Synthetic oligonucleotide
ggatgtatcgctgagcgatcatttcacggg

SEQ ID NO: 407884 - DNA, 30 bp, Artificial Sequence
  Synthetic oligonucleotide
gggatggttcgcatcactcacgtcgacggg

SEQ ID NO: 407885 - DNA, 30 bp, Artificial Sequence
  Synthetic oligonucleotide
accgcgcagacattaataacccaggacggg

SEQ ID NO: 407886 - DNA, 30 bp, Artificial Sequence
  Synthetic oligonucleotide
acccatatattagtaatccaagcggacggg

SEQ ID NO: 407887 - DNA, 30 bp, Artificial Sequence
  Synthetic oligonucleotide
atcacctggcatttgaaacacctggacggg

SEQ ID NO: 407888 - DNA, 30 bp, Artificial Sequence
  Synthetic oligonucleotide
tacaatcctctatgcaccatcactgacggg

SEQ ID NO: 407889 - DNA, 30 bp, Artificial Sequence
  Synthetic oligonucleotide
tgcatccagatgaggtgagtagttgacggg

SEQ ID NO: 407890 - DNA, 30 bp, Artificial Sequence
  Synthetic oligonucleotide
gagatttgcaggaactgtcacacatacggg

SEQ ID NO: 407891 - DNA, 30 bp, Artificial Sequence
  Synthetic oligonucleotide
gggaatagcagggcaccttaggtctacggg

SEQ ID NO: 407892 - DNA, 30 bp, Artificial Sequence
  Synthetic oligonucleotide
ggaatggatgggcgcaccgggccgtacggg

SEQ ID NO: 407893 - DNA, 30 bp, Artificial Sequence
  Synthetic oligonucleotide
taccaaacgggacaagtaacctcttacggg

SEQ ID NO: 407894 - DNA, 30 bp, Artificial Sequence
  Synthetic oligonucleotide
gactatacatggacgttgtagcacaccggg

SEQ ID NO: 407895 - DNA, 30 bp, Artificial Sequence
  Synthetic oligonucleotide
cagcttcctgttttatagtgtagcaccggg

SEQ ID NO: 407896 - DNA, 30 bp, Artificial Sequence
  Synthetic oligonucleotide
ccctgcggcgagcacaaggccatgaccggg

SEQ ID NO: 407897 - DNA, 30 bp, Artificial Sequence
  Synthetic oligonucleotide
tgcccctatggcgtgccactgcctaccggg

SEQ ID NO: 407898 - DNA, 30 bp, Artificial Sequence
  Synthetic oligonucleotide
gtatctaataggttccccttttgtaccggg

SEQ ID NO: 407899 - DNA, 30 bp, Artificial Sequence
  Synthetic oligonucleotide
ggttggcgagtaaggtggtactaccccggg

SEQ ID NO: 407900 - DNA, 29 bp, Artificial Sequence
  Synthetic oligonucleotide
gtctccccaacgatttcgctaggcccggg

SEQ ID NO: 407901 - DNA, 30 bp, Artificial Sequence
  Synthetic oligonucleotide
aacatagggaatctcaacctacttcccggg

SEQ ID NO: 407902 - DNA, 30 bp, Artificial Sequence
  Synthetic oligonucleotide
gcgcgcgggctcgacgctgcaagatccggg

SEQ ID NO: 407903 - DNA, 30 bp, Artificial Sequence
  Synthetic oligonucleotide
taggaggagtcactaaggtatatatccggg

SEQ ID NO: 407904 - DNA, 30 bp, Artificial Sequence
  Synthetic oligonucleotide
aaattacaaacagggtggagggcctccggg

SEQ ID NO: 407905 - DNA, 30 bp, Artificial Sequence
  Synthetic oligonucleotide
gggcccctccccgtggtctgcgggtccggg

SEQ ID NO: 407906 - DNA, 30 bp, Artificial Sequence
  Synthetic oligonucleotide
ctactaggggtcggagccatctattccggg

SEQ ID NO: 407907 - DNA, 30 bp, Artificial Sequence
  Synthetic oligonucleotide
cttttcctcgacctcgccctcttttccggg

SEQ ID NO: 407908 - DNA, 30 bp, Artificial Sequence
  Synthetic oligonucleotide
agctatagctactatagatctctcagcggg

SEQ ID NO: 407909 - DNA, 30 bp, Artificial Sequence
  Synthetic oligonucleotide
tcggtctttagcttcccaccccagagcggg

SEQ ID NO: 407910 - DNA, 30 bp, Artificial Sequence
  Synthetic oligonucleotide
cacccgtgccattagcgcggtacgagcggg

SEQ ID NO: 407911 - DNA, 30 bp, Artificial Sequence
  Synthetic oligonucleotide
agtatatttcgtacagacgaatcacgcggg

SEQ ID NO: 407912 - DNA, 30 bp, Artificial Sequence
  Synthetic oligonucleotide
gttccctcttgagggaaaaggtcacgcggg

SEQ ID NO: 407913 - DNA, 30 bp, Artificial Sequence
  Synthetic oligonucleotide
gctacttatctagtatttacaatacgcggg

SEQ ID NO: 407914 - DNA, 30 bp, Artificial Sequence
  Synthetic oligonucleotide
cactgacgccgcttgaagtcaatacgcggg

SEQ ID NO: 407915 - DNA, 30 bp, Artificial Sequence
  Synthetic oligonucleotide
taaagagtcgtgaaatttacactacgcggg

SEQ ID NO: 407916 - DNA, 30 bp, Artificial Sequence
  Synthetic oligonucleotide
tggggcagacactaggaggttaaccgcggg

SEQ ID NO: 407917 - DNA, 30 bp, Artificial Sequence
  Synthetic oligonucleotide
ggaaggaataattagacgcatcagcgcggg

SEQ ID NO: 407918 - DNA, 30 bp, Artificial Sequence
  Synthetic oligonucleotide
gcccgggatcccacaagctcacggcgcggg

SEQ ID NO: 407919 - DNA, 30 bp, Artificial Sequence
  Synthetic oligonucleotide
tgtatttttacgttcaccagctaaggcggg

SEQ ID NO: 407920 - DNA, 30 bp, Artificial Sequence
  Synthetic oligonucleotide
gttttcgcttgcggcaaaaatagaggcggg

SEQ ID NO: 407921 - DNA, 30 bp, Artificial Sequence
  Synthetic oligonucleotide
tcatgttaatagatacctccttagggcggg

SEQ ID NO: 407922 - DNA, 30 bp, Artificial Sequence
  Synthetic oligonucleotide
tagacgacccatattggatagacatgcggg

SEQ ID NO: 407923 - DNA, 30 bp, Artificial Sequence
  Synthetic oligonucleotide
acagcatatgggcccgcttagttatgcggg

SEQ ID NO: 407924 - DNA, 30 bp, Artificial Sequence
  Synthetic oligonucleotide
tggtctgagccagaggctcttccgtgcggg

SEQ ID NO: 407925 - DNA, 30 bp, Artificial Sequence
  Synthetic oligonucleotide
gaagtccattacatagctaaggtgtgcggg

SEQ ID NO: 407926 - DNA, 30 bp, Artificial Sequence
  Synthetic oligonucleotide
cgaccatttgttttctcgcctgcttgcggg

SEQ ID NO: 407927 - DNA, 30 bp, Artificial Sequence
  Synthetic oligonucleotide
atccgtatgtttaagcggtcaacaatcggg

SEQ ID NO: 407928 - DNA, 30 bp, Artificial Sequence
  Synthetic oligonucleotide
tctaatgatggggttaaccccataatcggg

SEQ ID NO: 407929 - DNA, 30 bp, Artificial Sequence
  Synthetic oligonucleotide
agtttgcattctaaggtgtgtaccatcggg

SEQ ID NO: 407930 - DNA, 30 bp, Artificial Sequence
  Synthetic oligonucleotide
catgtggcgcccacgccgccccgcatcggg

SEQ ID NO: 407931 - DNA, 30 bp, Artificial Sequence
  Synthetic oligonucleotide
taggtgtcattgcaacaaaagttgatcggg

SEQ ID NO: 407932 - DNA, 30 bp, Artificial Sequence
  Synthetic oligonucleotide
acagcccgtgtgagttctgaccacctcggg

SEQ ID NO: 407933 - DNA, 30 bp, Artificial Sequence
  Synthetic oligonucleotide
tacaaacagtgcaaacgcgggttcctcggg

SEQ ID NO: 407934 - DNA, 29 bp, Artificial Sequence
  Synthetic oligonucleotide
tccgtgttccccagctatgaacagtcggg

SEQ ID NO: 407935 - DNA, 30 bp, Artificial Sequence
  Synthetic oligonucleotide
gctcaattttataaaagccgctaggtcggg

SEQ ID NO: 407936 - DNA, 30 bp, Artificial Sequence
  Synthetic oligonucleotide
atcatcagtgagtagtagatcctggtcggg

SEQ ID NO: 407937 - DNA, 30 bp, Artificial Sequence
  Synthetic oligonucleotide
gacgatcaagtctttgtcgaacctgtcggg

SEQ ID NO: 407938 - DNA, 30 bp, Artificial Sequence
  Synthetic oligonucleotide
tctctagtaaacgagaggagttgtgtcggg

SEQ ID NO: 407939 - DNA, 29 bp, Artificial Sequence
  Synthetic oligonucleotide
attagtacctgtaattcacagccttcggg

SEQ ID NO: 407940 - DNA, 30 bp, Artificial Sequence
  Synthetic oligonucleotide
gacaggatggttgtttttccgtagttcggg

SEQ ID NO: 407941 - DNA, 30 bp, Artificial Sequence
  Synthetic oligonucleotide
taggtgctgccgaaacgtgcattgttcggg

SEQ ID NO: 407942 - DNA, 30 bp, Artificial Sequence
  Synthetic oligonucleotide
caatgggcatctcactgtagtttgttcggg

SEQ ID NO: 407943 - DNA, 30 bp, Artificial Sequence
  Synthetic oligonucleotide
gggggcggtagtatcgcagttcgtttcggg

SEQ ID NO: 407944 - DNA, 30 bp, Artificial Sequence
  Synthetic oligonucleotide
tgtgataattcataagtcttatgaaagggg

SEQ ID NO: 407945 - DNA, 30 bp, Artificial Sequence
  Synthetic oligonucleotide
ttactgtgactactttaggcccacaagggg

SEQ ID NO: 407946 - DNA, 30 bp, Artificial Sequence
  Synthetic oligonucleotide
ttattaccccgcgacagcaacgacaagggg

SEQ ID NO: 407947 - DNA, 30 bp, Artificial Sequence
  Synthetic oligonucleotide
gccaacttggcactatatagttccaagggg

SEQ ID NO: 407948 - DNA, 30 bp, Artificial Sequence
  Synthetic oligonucleotide
gaggcgaatcaatgatctaatgagaagggg

SEQ ID NO: 407949 - DNA, 30 bp, Artificial Sequence
  Synthetic oligonucleotide
gggttgaaaaacgattcgattttgaagggg

SEQ ID NO: 407950 - DNA, 30 bp, Artificial Sequence
  Synthetic oligonucleotide
attgatgggctacgaaacctaaagcagggg

SEQ ID NO: 407951 - DNA, 30 bp, Artificial Sequence
  Synthetic oligonucleotide
gttgtaatatctgggtactattagcagggg

SEQ ID NO: 407952 - DNA, 30 bp, Artificial Sequence
  Synthetic oligonucleotide
gggtgtcgaggccgcccagggagcgagggg

SEQ ID NO: 407953 - DNA, 30 bp, Artificial Sequence
  Synthetic oligonucleotide
atacgctagaccccattcctaatcgagggg

SEQ ID NO: 407954 - DNA, 30 bp, Artificial Sequence
  Synthetic oligonucleotide
cacaataatgcggtctttttgctggagggg

SEQ ID NO: 407955 - DNA, 30 bp, Artificial Sequence
  Synthetic oligonucleotide
gtctgtctgtgttccggaaataatgagggg

SEQ ID NO: 407956 - DNA, 30 bp, Artificial Sequence
  Synthetic oligonucleotide
atatccagtggcaaggttgccgaatagggg

SEQ ID NO: 407957 - DNA, 30 bp, Artificial Sequence
  Synthetic oligonucleotide
caataacccggcatggcctgcacatagggg

SEQ ID NO: 407958 - DNA, 30 bp, Artificial Sequence
  Synthetic oligonucleotide
taacggatattttctcacacaatctagggg

SEQ ID NO: 407959 - DNA, 30 bp, Artificial Sequence
  Synthetic oligonucleotide
gcacaactttaaagattgagtaagtagggg

SEQ ID NO: 407960 - DNA, 30 bp, Artificial Sequence
  Synthetic oligonucleotide
cttcaaggggatacaaacggggagtagggg

SEQ ID NO: 407961 - DNA, 30 bp, Artificial Sequence
  Synthetic oligonucleotide
gagcgccatggcgaccctctatagtagggg

SEQ ID NO: 407962 - DNA, 30 bp, Artificial Sequence
  Synthetic oligonucleotide
tatttacatggctgtttccatgcgtagggg

SEQ ID NO: 407963 - DNA, 30 bp, Artificial Sequence
  Synthetic oligonucleotide
tggaatctgttcataagtgaggattagggg

SEQ ID NO: 407964 - DNA, 30 bp, Artificial Sequence
  Synthetic oligonucleotide
catatttactggtcaccccttccttagggg

SEQ ID NO: 407965 - DNA, 30 bp, Artificial Sequence
  Synthetic oligonucleotide
ttgggacgtcggggtgaaccggaaacgggg

SEQ ID NO: 407966 - DNA, 30 bp, Artificial Sequence
  Synthetic oligonucleotide
acgggtattctctaccgcgtggcaacgggg

SEQ ID NO: 407967 - DNA, 30 bp, Artificial Sequence
  Synthetic oligonucleotide
ttcgggtcctcgctcttaacatcgacgggg

SEQ ID NO: 407968 - DNA, 30 bp, Artificial Sequence
  Synthetic oligonucleotide
ccaactgtatagttcgatttagggacgggg

SEQ ID NO: 407969 - DNA, 30 bp, Artificial Sequence
  Synthetic oligonucleotide
gagatggaaactgtgcatgggtggacgggg

SEQ ID NO: 407970 - DNA, 30 bp, Artificial Sequence
  Synthetic oligonucleotide
gctatcttattctggaacgggaatacgggg

SEQ ID NO: 407971 - DNA, 30 bp, Artificial Sequence
  Synthetic oligonucleotide
cccatgacttacatttgtctccacccgggg

SEQ ID NO: 407972 - DNA, 30 bp, Artificial Sequence
  Synthetic oligonucleotide
cggcgtctaccgtaattgcggtcgccgggg

SEQ ID NO: 407973 - DNA, 30 bp, Artificial Sequence
  Synthetic oligonucleotide
cgtggctcaattttactggaccctccgggg

SEQ ID NO: 407974 - DNA, 30 bp, Artificial Sequence
  Synthetic oligonucleotide
caggagtgcggccgtcgggctgttccgggg

SEQ ID NO: 407975 - DNA, 30 bp, Artificial Sequence
  Synthetic oligonucleotide
ttatagtgctcacgggccgcctaagcgggg

SEQ ID NO: 407976 - DNA, 30 bp, Artificial Sequence
  Synthetic oligonucleotide
tagaaatatttggtatattatccagcgggg

SEQ ID NO: 407977 - DNA, 30 bp, Artificial Sequence
  Synthetic oligonucleotide
aggtttacggtggtctaggtccgggcgggg

SEQ ID NO: 407978 - DNA, 30 bp, Artificial Sequence
  Synthetic oligonucleotide
gatttctggagaactctttcgcgggcgggg

SEQ ID NO: 407979 - DNA, 30 bp, Artificial Sequence
  Synthetic oligonucleotide
attgaatggggccgcggagcaggggcgggg

SEQ ID NO: 407980 - DNA, 30 bp, Artificial Sequence
  Synthetic oligonucleotide
tgctccaccgactaaggatccagtgcgggg

SEQ ID NO: 407981 - DNA, 30 bp, Artificial Sequence
  Synthetic oligonucleotide
gttgagactcatgcccgtcttacatcgggg

SEQ ID NO: 407982 - DNA, 30 bp, Artificial Sequence
  Synthetic oligonucleotide
gatgattcaagtgtgttagtttgatcgggg

SEQ ID NO: 407983 - DNA, 30 bp, Artificial Sequence
  Synthetic oligonucleotide
tggtatttaggccagggccgtatctcgggg

SEQ ID NO: 407984 - DNA, 30 bp, Artificial Sequence
  Synthetic oligonucleotide
acgtgtgacatgccacttgaagattcgggg

SEQ ID NO: 407985 - DNA, 30 bp, Artificial Sequence
  Synthetic oligonucleotide
gccacgacggtattaatagtcccaaggggg

SEQ ID NO: 407986 - DNA, 30 bp, Artificial Sequence
  Synthetic oligonucleotide
tccgtatttccaaagccttatttaaggggg

SEQ ID NO: 407987 - DNA, 30 bp, Artificial Sequence
  Synthetic oligonucleotide
atcgcgtcgtattggtgggtccagaggggg

SEQ ID NO: 407988 - DNA, 30 bp, Artificial Sequence
  Synthetic oligonucleotide
cttgtgcgcagcattaaaaggatgaggggg

SEQ ID NO: 407989 - DNA, 30 bp, Artificial Sequence
  Synthetic oligonucleotide
acccgttcggctcgtaagtttctgaggggg

SEQ ID NO: 407990 - DNA, 30 bp, Artificial Sequence
  Synthetic oligonucleotide
agcgtccgatttgcccaccgtattaggggg

SEQ ID NO: 407991 - DNA, 30 bp, Artificial Sequence
  Synthetic oligonucleotide
tataattaaagcagattgactacgcggggg

SEQ ID NO: 407992 - DNA, 30 bp, Artificial Sequence
  Synthetic oligonucleotide
ggggacggggcaaagacatcgagtcggggg

SEQ ID NO: 407993 - DNA, 30 bp, Artificial Sequence
  Synthetic oligonucleotide
ctacatattatctaagcaaattaagggggg

SEQ ID NO: 407994 - DNA, 30 bp, Artificial Sequence
  Synthetic oligonucleotide
gggatagcatttattggtaagggagggggg

SEQ ID NO: 407995 - DNA, 30 bp, Artificial Sequence
  Synthetic oligonucleotide
caactggtgtggctggccggcatagggggg

SEQ ID NO: 407996 - DNA, 30 bp, Artificial Sequence
  Synthetic oligonucleotide
aacattttaacccccaattaattagggggg

SEQ ID NO: 407997 - DNA, 30 bp, Artificial Sequence
  Synthetic oligonucleotide
gggaaacgccgggttcactacttcgggggg

SEQ ID NO: 407998 - DNA, 30 bp, Artificial Sequence
  Synthetic oligonucleotide
tgcgccactccacacgcccattaggggggg

SEQ ID NO: 407999 - DNA, 30 bp, Artificial Sequence
  Synthetic oligonucleotide
gggaaccgtttctcattaagagcggggggg

SEQ ID NO: 408000 - DNA, 30 bp, Artificial Sequence
  Synthetic oligonucleotide
gccatcgccatcaagggacctttggggggg

SEQ ID NO: 408001 - DNA, 30 bp, Artificial Sequence
  Synthetic oligonucleotide
acagctggcgcgcgaggggcccgtgggggg

SEQ ID NO: 408002 - DNA, 30 bp, Artificial Sequence
  Synthetic oligonucleotide
tgaggtacgggctgatagtcttgtgggggg

SEQ ID NO: 408003 - DNA, 30 bp, Artificial Sequence
  Synthetic oligonucleotide
gagtagcaacatctcccgctccttgggggg

SEQ ID NO: 408004 - DNA, 30 bp, Artificial Sequence
  Synthetic oligonucleotide
ggccggcgagccagatctacacagtggggg

SEQ ID NO: 408005 - DNA, 30 bp, Artificial Sequence
  Synthetic oligonucleotide
tcccggatagatgcgtaaggcacttggggg

SEQ ID NO: 408006 - DNA, 30 bp, Artificial Sequence
  Synthetic oligonucleotide
ctcgcgtgccgctgcagtgcgccttggggg

SEQ ID NO: 408007 - DNA, 30 bp, Artificial Sequence
  Synthetic oligonucleotide
aaattgaacgagcaataaacgacgatgggg

SEQ ID NO: 408008 - DNA, 30 bp, Artificial Sequence
  Synthetic oligonucleotide
cctgctccgcctccgggcccctcgatgggg

SEQ ID NO: 408009 - DNA, 30 bp, Artificial Sequence
  Synthetic oligonucleotide
tgaaagcaccaagcatctacgcttatgggg

SEQ ID NO: 408010 - DNA, 30 bp, Artificial Sequence
  Synthetic oligonucleotide
ccaagggtgaggggatttacggcgctgggg

SEQ ID NO: 408011 - DNA, 30 bp, Artificial Sequence
  Synthetic oligonucleotide
taactatataaggtccttcggaggctgggg

SEQ ID NO: 408012 - DNA, 30 bp, Artificial Sequence
  Synthetic oligonucleotide
ctcttcagtctatatagatgtatgctgggg

SEQ ID NO: 408013 - DNA, 30 bp, Artificial Sequence
  Synthetic oligonucleotide
aaagcctggagccatgacgttctgctgggg

SEQ ID NO: 408014 - DNA, 30 bp, Artificial Sequence
  Synthetic oligonucleotide
tacaataaagagtaagcctctgctctgggg

SEQ ID NO: 408015 - DNA, 30 bp, Artificial Sequence
  Synthetic oligonucleotide
ggaggtgctttccgtaaaggggacgtgggg

SEQ ID NO: 408016 - DNA, 30 bp, Artificial Sequence
  Synthetic oligonucleotide
cttccctgtctaactaaagtatccgtgggg

SEQ ID NO: 408017 - DNA, 30 bp, Artificial Sequence
  Synthetic oligonucleotide
aactggcaccgcagttgggcgatcgtgggg

SEQ ID NO: 408018 - DNA, 30 bp, Artificial Sequence
  Synthetic oligonucleotide
aaaccctatcgttcgatcacaattgtgggg

SEQ ID NO: 408019 - DNA, 30 bp, Artificial Sequence
  Synthetic oligonucleotide
gggctacttggtgaaacggcgagcttgggg

SEQ ID NO: 408020 - DNA, 30 bp, Artificial Sequence
  Synthetic oligonucleotide
tcatccgatttatatccggtattcttgggg

SEQ ID NO: 408021 - DNA, 30 bp, Artificial Sequence
  Synthetic oligonucleotide
aaacaagtgttaattacatgttatttgggg

SEQ ID NO: 408022 - DNA, 30 bp, Artificial Sequence
  Synthetic oligonucleotide
attaacgtatgtttaaaaatagctttgggg

SEQ ID NO: 408023 - DNA, 30 bp, Artificial Sequence
  Synthetic oligonucleotide
gtagcccaagtgctgtggaatgaaaatggg

SEQ ID NO: 408024 - DNA, 30 bp, Artificial Sequence
  Synthetic oligonucleotide
ctcaaatcgacggggcatcaagccaatggg

SEQ ID NO: 408025 - DNA, 30 bp, Artificial Sequence
  Synthetic oligonucleotide
ggcatgtggcagttatctccggtcaatggg

SEQ ID NO: 408026 - DNA, 30 bp, Artificial Sequence
  Synthetic oligonucleotide
gattcccttatcgggggattgcagaatggg

SEQ ID NO: 408027 - DNA, 30 bp, Artificial Sequence
  Synthetic oligonucleotide
ttgaatttaagaagatattcgaataatggg

SEQ ID NO: 408028 - DNA, 30 bp, Artificial Sequence
  Synthetic oligonucleotide
aagctccgattcgcaagcgttaataatggg

SEQ ID NO: 408029 - DNA, 30 bp, Artificial Sequence
  Synthetic oligonucleotide
aagaagtgctttcccattatttgtaatggg

SEQ ID NO: 408030 - DNA, 30 bp, Artificial Sequence
  Synthetic oligonucleotide
agggtggtttatcttcaacgtcttaatggg

SEQ ID NO: 408031 - DNA, 30 bp, Artificial Sequence
  Synthetic oligonucleotide
gatcatggtaaggacaagccgcgccatggg

SEQ ID NO: 408032 - DNA, 30 bp, Artificial Sequence
  Synthetic oligonucleotide
agccaatacttgggaatcttgtgccatggg

SEQ ID NO: 408033 - DNA, 30 bp, Artificial Sequence
  Synthetic oligonucleotide
agtctcagactcgtctggccagtgcatggg

SEQ ID NO: 408034 - DNA, 30 bp, Artificial Sequence
  Synthetic oligonucleotide
agcaagcctaagcgatcgaagcatcatggg

SEQ ID NO: 408035 - DNA, 30 bp, Artificial Sequence
  Synthetic oligonucleotide
ctcctgcagtatcatgcaaaggctcatggg

SEQ ID NO: 408036 - DNA, 30 bp, Artificial Sequence
  Synthetic oligonucleotide
aatagaacagccgagttaatttttcatggg

SEQ ID NO: 408037 - DNA, 31 bp, Artificial Sequence
  Synthetic oligonucleotide
tagctgtgcgagttttttcgcgtcagatggg

SEQ ID NO: 408038 - DNA, 30 bp, Artificial Sequence
  Synthetic oligonucleotide
tgagtgtccgcagtaggcctcaacgatggg

SEQ ID NO: 408039 - DNA, 30 bp, Artificial Sequence
  Synthetic oligonucleotide
cttgatgtctggctcccaggctcggatggg

SEQ ID NO: 408040 - DNA, 30 bp, Artificial Sequence
  Synthetic oligonucleotide
tgatttgcctcgtttgtggtccgtgatggg

SEQ ID NO: 408041 - DNA, 30 bp, Artificial Sequence
  Synthetic oligonucleotide
tttcctaccggacaaaagaatcgatatggg

SEQ ID NO: 408042 - DNA, 30 bp, Artificial Sequence
  Synthetic oligonucleotide
gtctctcatgcctgactccgcttatatggg

SEQ ID NO: 408043 - DNA, 30 bp, Artificial Sequence
  Synthetic oligonucleotide
cccattcacgcgggggtataatactatggg

SEQ ID NO: 408044 - DNA, 30 bp, Artificial Sequence
  Synthetic oligonucleotide
tttgctcacataatcagaatatactatggg

SEQ ID NO: 408045 - DNA, 30 bp, Artificial Sequence
  Synthetic oligonucleotide
actgatttaaagctcccgagagattatggg

SEQ ID NO: 408046 - DNA, 30 bp, Artificial Sequence
  Synthetic oligonucleotide
ctcttcgggggattctaggccccttatggg

SEQ ID NO: 408047 - DNA, 30 bp, Artificial Sequence
  Synthetic oligonucleotide
ttaggtcggtaactacgccgtccttatggg

SEQ ID NO: 408048 - DNA, 30 bp, Artificial Sequence
  Synthetic oligonucleotide
atggacgcatgtaggcccaaaggttatggg

SEQ ID NO: 408049 - DNA, 30 bp, Artificial Sequence
  Synthetic oligonucleotide
gaacgcgtccatcacggtggttgaactggg

SEQ ID NO: 408050 - DNA, 31 bp, Artificial Sequence
  Synthetic oligonucleotide
ttttcttagaaggcatgcgacgaggactggg

SEQ ID NO: 408051 - DNA, 30 bp, Artificial Sequence
  Synthetic oligonucleotide
ttggcctagagatacaagcggaaacctggg

SEQ ID NO: 408052 - DNA, 30 bp, Artificial Sequence
  Synthetic oligonucleotide
gttagtgcacatcgtgctaccctacctggg

SEQ ID NO: 408053 - DNA, 30 bp, Artificial Sequence
  Synthetic oligonucleotide
tgagatgtaaggctagctgaggaccctggg

SEQ ID NO: 408054 - DNA, 30 bp, Artificial Sequence
  Synthetic oligonucleotide
aaaaatatacgacttgctgatttgcctggg

SEQ ID NO: 408055 - DNA, 30 bp, Artificial Sequence
  Synthetic oligonucleotide
cgatagccgctccggtctttgcctcctggg

SEQ ID NO: 408056 - DNA, 30 bp, Artificial Sequence
  Synthetic oligonucleotide
ctatactttgatgtactggggaaagctggg

SEQ ID NO: 408057 - DNA, 30 bp, Artificial Sequence
  Synthetic oligonucleotide
cacaaggtgccaagtatcggcgcagctggg

SEQ ID NO: 408058 - DNA, 30 bp, Artificial Sequence
  Synthetic oligonucleotide
ggcccggaattttatgacatcgcagctggg

SEQ ID NO: 408059 - DNA, 29 bp, Artificial Sequence
  Synthetic oligonucleotide
ggttgtattgggagtgccagggcgctggg

SEQ ID NO: 408060 - DNA, 30 bp, Artificial Sequence
  Synthetic oligonucleotide
gccgcggcaacgatgggtaggcgggctggg

SEQ ID NO: 408061 - DNA, 30 bp, Artificial Sequence
  Synthetic oligonucleotide
ttccccggagactacaagagcctggctggg

SEQ ID NO: 408062 - DNA, 30 bp, Artificial Sequence
  Synthetic oligonucleotide
taaggtcttcctacccacgacgctgctggg

SEQ ID NO: 408063 - DNA, 30 bp, Artificial Sequence
  Synthetic oligonucleotide
gctcaaatgtttttatcgggttctgctggg

SEQ ID NO: 408064 - DNA, 30 bp, Artificial Sequence
  Synthetic oligonucleotide
ttagtataatccaggtagaaacactctggg

SEQ ID NO: 408065 - DNA, 30 bp, Artificial Sequence
  Synthetic oligonucleotide
tttaaaacgacggtgtaacatacctctggg

SEQ ID NO: 408066 - DNA, 30 bp, Artificial Sequence
  Synthetic oligonucleotide
ataagcaaccctggatgagcgaagtctggg

SEQ ID NO: 408067 - DNA, 30 bp, Artificial Sequence
  Synthetic oligonucleotide
taatgtaaggtattagggtgtgaaagtggg

SEQ ID NO: 408068 - DNA, 30 bp, Artificial Sequence
  Synthetic oligonucleotide
tagtagttagactggctttgcaacagtggg

SEQ ID NO: 408069 - DNA, 30 bp, Artificial Sequence
  Synthetic oligonucleotide
tctgcagtgtacggaaggagcagcagtggg

SEQ ID NO: 408070 - DNA, 30 bp, Artificial Sequence
  Synthetic oligonucleotide
gaggacactccaaaatgcggctcccgtggg

SEQ ID NO: 408071 - DNA, 30 bp, Artificial Sequence
  Synthetic oligonucleotide
gaacattgttgatctgaagctgctcgtggg

SEQ ID NO: 408072 - DNA, 30 bp, Artificial Sequence
  Synthetic oligonucleotide
agattctttcatgtagttatgggtcgtggg

SEQ ID NO: 408073 - DNA, 30 bp, Artificial Sequence
  Synthetic oligonucleotide
gagggatagcgtaaaagcaacattcgtggg

SEQ ID NO: 408074 - DNA, 30 bp, Artificial Sequence
  Synthetic oligonucleotide
ggatggttatggccttggagcgttcgtggg

SEQ ID NO: 408075 - DNA, 30 bp, Artificial Sequence
  Synthetic oligonucleotide
gaaacggaatttagatatcccacaggtggg

SEQ ID NO: 408076 - DNA, 30 bp, Artificial Sequence
  Synthetic oligonucleotide
ggcggacttatagtccctagaaacggtggg

SEQ ID NO: 408077 - DNA, 30 bp, Artificial Sequence
  Synthetic oligonucleotide
gggcccgcacttcatattgtctccggtggg

SEQ ID NO: 408078 - DNA, 30 bp, Artificial Sequence
  Synthetic oligonucleotide
gctccacgtgaaagttgtcgcagtggtggg

SEQ ID NO: 408079 - DNA, 30 bp, Artificial Sequence
  Synthetic oligonucleotide
gatacaccaactcaagtcgagagtggtggg

SEQ ID NO: 408080 - DNA, 30 bp, Artificial Sequence
  Synthetic oligonucleotide
atcctattggagatggagctagttggtggg

SEQ ID NO: 408081 - DNA, 30 bp, Artificial Sequence
  Synthetic oligonucleotide
gggccatagagggagactatcgggtgtggg

SEQ ID NO: 408082 - DNA, 30 bp, Artificial Sequence
  Synthetic oligonucleotide
gggacgaagcctcttatttagggaattggg

SEQ ID NO: 408083 - DNA, 30 bp, Artificial Sequence
  Synthetic oligonucleotide
aaaattcggggtcaggaatggaacattggg

SEQ ID NO: 408084 - DNA, 30 bp, Artificial Sequence
  Synthetic oligonucleotide
tcttcaactatccgacagcttaagattggg

SEQ ID NO: 408085 - DNA, 30 bp, Artificial Sequence
  Synthetic oligonucleotide
aggtacctagcccagcctaaaaggattggg

SEQ ID NO: 408086 - DNA, 30 bp, Artificial Sequence
  Synthetic oligonucleotide
aggctttgtcatataaaattcaaccttggg

SEQ ID NO: 408087 - DNA, 30 bp, Artificial Sequence
  Synthetic oligonucleotide
tactcagcgcatctgcaaagtcaccttggg

SEQ ID NO: 408088 - DNA, 30 bp, Artificial Sequence
  Synthetic oligonucleotide
ttgtaagggaagagagaataagggcttggg

SEQ ID NO: 408089 - DNA, 30 bp, Artificial Sequence
  Synthetic oligonucleotide
atttaatcatgtaggactcgtctgcttggg

SEQ ID NO: 408090 - DNA, 30 bp, Artificial Sequence
  Synthetic oligonucleotide
tcctattgtactttagggaaacatcttggg

SEQ ID NO: 408091 - DNA, 30 bp, Artificial Sequence
  Synthetic oligonucleotide
aatctatgtgccactttagtctatcttggg

SEQ ID NO: 408092 - DNA, 30 bp, Artificial Sequence
  Synthetic oligonucleotide
gacagtcttggttgaagcttcggagttggg

SEQ ID NO: 408093 - DNA, 30 bp, Artificial Sequence
  Synthetic oligonucleotide
cgtaccaatgataacgaaagggacgttggg

SEQ ID NO: 408094 - DNA, 30 bp, Artificial Sequence
  Synthetic oligonucleotide
atgaagcgcaccgctttagttggcgttggg

SEQ ID NO: 408095 - DNA, 30 bp, Artificial Sequence
  Synthetic oligonucleotide
cttatcactatttaggccttcccatttggg

SEQ ID NO: 408096 - DNA, 30 bp, Artificial Sequence
  Synthetic oligonucleotide
agtattatctgaactgagtaaagatttggg

SEQ ID NO: 408097 - DNA, 30 bp, Artificial Sequence
  Synthetic oligonucleotide
cttgaagaatcgtgtcaagggtactttggg

SEQ ID NO: 408098 - DNA, 30 bp, Artificial Sequence
  Synthetic oligonucleotide
ccaatcggcgcgccgttcgccggctttggg

SEQ ID NO: 408099 - DNA, 30 bp, Artificial Sequence
  Synthetic oligonucleotide
tgaatccggggggtttgtgtgcggtttggg

SEQ ID NO: 408100 - DNA, 30 bp, Artificial Sequence
  Synthetic oligonucleotide
aggctccgacggcgcaaatcggggtttggg

SEQ ID NO: 408101 - DNA, 30 bp, Artificial Sequence
  Synthetic oligonucleotide
ttgggcttgaagttgaccgtcttgtttggg

SEQ ID NO: 408102 - DNA, 30 bp, Artificial Sequence
  Synthetic oligonucleotide
ataccggcccgcgtgcatcgtatttttggg

SEQ ID NO: 408103 - DNA, 30 bp, Artificial Sequence
  Synthetic oligonucleotide
gccagtgcatacaaacatgtgctttttggg

SEQ ID NO: 408104 - DNA, 30 bp, Artificial Sequence
  Synthetic oligonucleotide
tttccaggacaaaagcgaagcttttttggg

SEQ ID NO: 408105 - DNA, 30 bp, Artificial Sequence
  Synthetic oligonucleotide
ttttgtatgtacaagaaaaaattaaaatgg

SEQ ID NO: 408106 - DNA, 30 bp, Artificial Sequence
  Synthetic oligonucleotide
tagattcggtacgccctgctggacaaatgg

SEQ ID NO: 408107 - DNA, 30 bp, Artificial Sequence
  Synthetic oligonucleotide
taagggggctcgtaactcacgcgcaaatgg

SEQ ID NO: 408108 - DNA, 30 bp, Artificial Sequence
  Synthetic oligonucleotide
tttgtgcactgagatcgtctgcgcaaatgg

SEQ ID NO: 408109 - DNA, 30 bp, Artificial Sequence
  Synthetic oligonucleotide
aatctcgtccacttccgtcgtttcaaatgg

SEQ ID NO: 408110 - DNA, 30 bp, Artificial Sequence
  Synthetic oligonucleotide
atgacgcactgtactgagagctttaaatgg

SEQ ID NO: 408111 - DNA, 30 bp, Artificial Sequence
  Synthetic oligonucleotide
atcatagattttaggccaccctcacaatgg

SEQ ID NO: 408112 - DNA, 30 bp, Artificial Sequence
  Synthetic oligonucleotide
gacctacaattagatggtggctaccaatgg

SEQ ID NO: 408113 - DNA, 30 bp, Artificial Sequence
  Synthetic oligonucleotide
atctcggtggagcagcaaggggtccaatgg

SEQ ID NO: 408114 - DNA, 30 bp, Artificial Sequence
  Synthetic oligonucleotide
cttggattccggatgaaactctagcaatgg

SEQ ID NO: 408115 - DNA, 30 bp, Artificial Sequence
  Synthetic oligonucleotide
gttccgcaacgttgggtaatctcgcaatgg

SEQ ID NO: 408116 - DNA, 30 bp, Artificial Sequence
  Synthetic oligonucleotide
acttctagttggaaactaaggtttcaatgg

SEQ ID NO: 408117 - DNA, 30 bp, Artificial Sequence
  Synthetic oligonucleotide
tccctacattgaaccgtgctaggagaatgg

SEQ ID NO: 408118 - DNA, 30 bp, Artificial Sequence
  Synthetic oligonucleotide
actgttcattaacagactaactgagaatgg

SEQ ID NO: 408119 - DNA, 30 bp, Artificial Sequence
  Synthetic oligonucleotide
tactttaacatgtcggttatatacgaatgg

SEQ ID NO: 408120 - DNA, 30 bp, Artificial Sequence
  Synthetic oligonucleotide
tatgctccgattgcaccactctacgaatgg

SEQ ID NO: 408121 - DNA, 30 bp, Artificial Sequence
  Synthetic oligonucleotide
gcgaaagggtcgtaggttttgtacgaatgg

SEQ ID NO: 408122 - DNA, 30 bp, Artificial Sequence
  Synthetic oligonucleotide
aaaggatccatacctggtttggatgaatgg

SEQ ID NO: 408123 - DNA, 30 bp, Artificial Sequence
  Synthetic oligonucleotide
aacgtgcacttactgtgcaccagtgaatgg

SEQ ID NO: 408124 - DNA, 30 bp, Artificial Sequence
  Synthetic oligonucleotide
gttcgttgacatactccggttattgaatgg

SEQ ID NO: 408125 - DNA, 30 bp, Artificial Sequence
  Synthetic oligonucleotide
ttaatgatggagttcaagacagttgaatgg

SEQ ID NO: 408126 - DNA, 30 bp, Artificial Sequence
  Synthetic oligonucleotide
gggcccgggggtcggaatctgagataatgg

SEQ ID NO: 408127 - DNA, 31 bp, Artificial Sequence
  Synthetic oligonucleotide
catcattcatacggtccgttgcgtataatgg

SEQ ID NO: 408128 - DNA, 30 bp, Artificial Sequence
  Synthetic oligonucleotide
gttagcaccggtacttatttaggctaatgg

SEQ ID NO: 408129 - DNA, 30 bp, Artificial Sequence
  Synthetic oligonucleotide
tacgggatcgataacactcggggctaatgg

SEQ ID NO: 408130 - DNA, 30 bp, Artificial Sequence
  Synthetic oligonucleotide
ggaaccccgactgactaagctacttaatgg

SEQ ID NO: 408131 - DNA, 30 bp, Artificial Sequence
  Synthetic oligonucleotide
tcacttgagcccgggggccctgcaacatgg

SEQ ID NO: 408132 - DNA, 30 bp, Artificial Sequence
  Synthetic oligonucleotide
cctgaatcaaaggtcggcgcaggaacatgg

SEQ ID NO: 408133 - DNA, 30 bp, Artificial Sequence
  Synthetic oligonucleotide
atggctccggcatgaaagccgcacacatgg

SEQ ID NO: 408134 - DNA, 30 bp, Artificial Sequence
  Synthetic oligonucleotide
ttcttaaaactattaccgcgcaccccatgg

SEQ ID NO: 408135 - DNA, 30 bp, Artificial Sequence
  Synthetic oligonucleotide
gtatcctcccggtgctaaggaagcccatgg

SEQ ID NO: 408136 - DNA, 30 bp, Artificial Sequence
  Synthetic oligonucleotide
gttggtgtaaagtcaggtccggagccatgg

SEQ ID NO: 408137 - DNA, 30 bp, Artificial Sequence
  Synthetic oligonucleotide
tattcaagacttagatgttaacatccatgg

SEQ ID NO: 408138 - DNA, 30 bp, Artificial Sequence
  Synthetic oligonucleotide
catcaagaatactgctaacaacttccatgg

SEQ ID NO: 408139 - DNA, 30 bp, Artificial Sequence
  Synthetic oligonucleotide
gtacggcatcagggtgaatggccagcatgg

SEQ ID NO: 408140 - DNA, 30 bp, Artificial Sequence
  Synthetic oligonucleotide
gataggagacgtgtccttagccccgcatgg

SEQ ID NO: 408141 - DNA, 30 bp, Artificial Sequence
  Synthetic oligonucleotide
gcattaagcatttttgtaaacatcgcatgg

SEQ ID NO: 408142 - DNA, 30 bp, Artificial Sequence
  Synthetic oligonucleotide
gttacgtctcatgagagtactctcgcatgg

SEQ ID NO: 408143 - DNA, 30 bp, Artificial Sequence
  Synthetic oligonucleotide
tagccattgtccgctgagaaccaggcatgg

SEQ ID NO: 408144 - DNA, 30 bp, Artificial Sequence
  Synthetic oligonucleotide
gcgatggcaccagatgtttaatcggcatgg

SEQ ID NO: 408145 - DNA, 30 bp, Artificial Sequence
  Synthetic oligonucleotide
aagagtaacttttccctgtgagtggcatgg

SEQ ID NO: 408146 - DNA, 30 bp, Artificial Sequence
  Synthetic oligonucleotide
ggccggacaggtactttggatgctgcatgg

SEQ ID NO: 408147 - DNA, 30 bp, Artificial Sequence
  Synthetic oligonucleotide
catagtgtttttctcggtagttgtgcatgg

SEQ ID NO: 408148 - DNA, 30 bp, Artificial Sequence
  Synthetic oligonucleotide
agtcactgttttcaaacggccatatcatgg

SEQ ID NO: 408149 - DNA, 29 bp, Artificial Sequence
  Synthetic oligonucleotide
tcttaagtttttaatgagtattatcatgg

SEQ ID NO: 408150 - DNA, 30 bp, Artificial Sequence
  Synthetic oligonucleotide
attctggcctgaagatgtaatggctcatgg

SEQ ID NO: 408151 - DNA, 30 bp, Artificial Sequence
  Synthetic oligonucleotide
ccgaatatcaagtttttttttcggtcatgg

SEQ ID NO: 408152 - DNA, 30 bp, Artificial Sequence
  Synthetic oligonucleotide
attgtttcgtcgtcgccgtaagaaagatgg

SEQ ID NO: 408153 - DNA, 30 bp, Artificial Sequence
  Synthetic oligonucleotide
ggcctttgggcacaagggtctacaagatgg

SEQ ID NO: 408154 - DNA, 30 bp, Artificial Sequence
  Synthetic oligonucleotide
tctaattttaagtggggcactctgagatgg

SEQ ID NO: 408155 - DNA, 30 bp, Artificial Sequence
  Synthetic oligonucleotide
ctttgactattcgacggtcatcgtagatgg

SEQ ID NO: 408156 - DNA, 30 bp, Artificial Sequence
  Synthetic oligonucleotide
aactacacagtagctaaagtaggtagatgg

SEQ ID NO: 408157 - DNA, 30 bp, Artificial Sequence
  Synthetic oligonucleotide
ataggatttccgagagttggtaaacgatgg

SEQ ID NO: 408158 - DNA, 30 bp, Artificial Sequence
  Synthetic oligonucleotide
ttatacaaggctggttgcgtcgcacgatgg

SEQ ID NO: 408159 - DNA, 30 bp, Artificial Sequence
  Synthetic oligonucleotide
aggccacggaacagggggcttcgccgatgg

SEQ ID NO: 408160 - DNA, 30 bp, Artificial Sequence
  Synthetic oligonucleotide
aatctgtccaacccctgctatatccgatgg

SEQ ID NO: 408161 - DNA, 30 bp, Artificial Sequence
  Synthetic oligonucleotide
attacaatcgttccttggttcaagcgatgg

SEQ ID NO: 408162 - DNA, 30 bp, Artificial Sequence
  Synthetic oligonucleotide
tttcaattaaatcagatccggacgcgatgg

SEQ ID NO: 408163 - DNA, 30 bp, Artificial Sequence
  Synthetic oligonucleotide
agctggcaggcgtcctgcgctagtcgatgg

SEQ ID NO: 408164 - DNA, 30 bp, Artificial Sequence
  Synthetic oligonucleotide
ttacgtcgagtctcctgggcggccggatgg

SEQ ID NO: 408165 - DNA, 30 bp, Artificial Sequence
  Synthetic oligonucleotide
cagtcaccgctagccaaaatcggcggatgg

SEQ ID NO: 408166 - DNA, 30 bp, Artificial Sequence
  Synthetic oligonucleotide
gtcttactagccaaaagtggcgagggatgg

SEQ ID NO: 408167 - DNA, 30 bp, Artificial Sequence
  Synthetic oligonucleotide
cagttccactaggacttgccgtagggatgg

SEQ ID NO: 408168 - DNA, 30 bp, Artificial Sequence
  Synthetic oligonucleotide
gttctttgacaagggggctgctggggatgg

SEQ ID NO: 408169 - DNA, 30 bp, Artificial Sequence
  Synthetic oligonucleotide
aaaaaaaggacgaacaccttggaatgatgg

SEQ ID NO: 408170 - DNA, 30 bp, Artificial Sequence
  Synthetic oligonucleotide
tccaccaacatgtgcaccactccgtgatgg

SEQ ID NO: 408171 - DNA, 30 bp, Artificial Sequence
  Synthetic oligonucleotide
cgccaatttcattgtttatgtcattgatgg

SEQ ID NO: 408172 - DNA, 30 bp, Artificial Sequence
  Synthetic oligonucleotide
cttggtgctgcactgaagttgttttgatgg

SEQ ID NO: 408173 - DNA, 30 bp, Artificial Sequence
  Synthetic oligonucleotide
gaggtgtcggcactcatgaggtaaatatgg

SEQ ID NO: 408174 - DNA, 30 bp, Artificial Sequence
  Synthetic oligonucleotide
gtggtctcaagtggcaccaagagaatatgg

SEQ ID NO: 408175 - DNA, 30 bp, Artificial Sequence
  Synthetic oligonucleotide
taatccagggcgcgtcatatatccatatgg

SEQ ID NO: 408176 - DNA, 30 bp, Artificial Sequence
  Synthetic oligonucleotide
gatttccgcaagggagcttgatagatatgg

SEQ ID NO: 408177 - DNA, 30 bp, Artificial Sequence
  Synthetic oligonucleotide
cattagaccgtacagacatcagcactatgg

SEQ ID NO: 408178 - DNA, 30 bp, Artificial Sequence
  Synthetic oligonucleotide
gtaaccaggccacctgtaactatcctatgg

SEQ ID NO: 408179 - DNA, 30 bp, Artificial Sequence
  Synthetic oligonucleotide
gaggctttggcccatggcgtcccgctatgg

SEQ ID NO: 408180 - DNA, 30 bp, Artificial Sequence
  Synthetic oligonucleotide
ggcgtgggccctcgctcttaaattctatgg

SEQ ID NO: 408181 - DNA, 30 bp, Artificial Sequence
  Synthetic oligonucleotide
tcaattctcccgtagaaggtttttctatgg

SEQ ID NO: 408182 - DNA, 30 bp, Artificial Sequence
  Synthetic oligonucleotide
gtaatcttaacatgtacgtgtacagtatgg

SEQ ID NO: 408183 - DNA, 30 bp, Artificial Sequence
  Synthetic oligonucleotide
gacaggagcctgtgcaagcttctagtatgg

SEQ ID NO: 408184 - DNA, 30 bp, Artificial Sequence
  Synthetic oligonucleotide
tagataatggggaagtgcaagcgggtatgg

SEQ ID NO: 408185 - DNA, 30 bp, Artificial Sequence
  Synthetic oligonucleotide
tatggacttcttataagactaggggtatgg

SEQ ID NO: 408186 - DNA, 30 bp, Artificial Sequence
  Synthetic oligonucleotide
tacatgcaaaatataagttttggggtatgg

SEQ ID NO: 408187 - DNA, 30 bp, Artificial Sequence
  Synthetic oligonucleotide
ctattggttcattaggcatcatgggtatgg

SEQ ID NO: 408188 - DNA, 30 bp, Artificial Sequence
  Synthetic oligonucleotide
ggaaatgtatgagggggatacaatgtatgg

SEQ ID NO: 408189 - DNA, 30 bp, Artificial Sequence
  Synthetic oligonucleotide
gtgccaacaagttacatcgcaactgtatgg

SEQ ID NO: 408190 - DNA, 30 bp, Artificial Sequence
  Synthetic oligonucleotide
attaagtgccggagttttgcggctgtatgg

SEQ ID NO: 408191 - DNA, 30 bp, Artificial Sequence
  Synthetic oligonucleotide
cccgctcaccatggtgggacggcattatgg

SEQ ID NO: 408192 - DNA, 30 bp, Artificial Sequence
  Synthetic oligonucleotide
atgatccacattgtgtgtctattattatgg

SEQ ID NO: 408193 - DNA, 30 bp, Artificial Sequence
  Synthetic oligonucleotide
aagcagacgtgtgaaggaacaaccttatgg

SEQ ID NO: 408194 - DNA, 30 bp, Artificial Sequence
  Synthetic oligonucleotide
aatcgttctaatgaatgagacgtgttatgg

SEQ ID NO: 408195 - DNA, 30 bp, Artificial Sequence
  Synthetic oligonucleotide
gaatcactgtgcttcccttatgaaaactgg

SEQ ID NO: 408196 - DNA, 30 bp, Artificial Sequence
  Synthetic oligonucleotide
tacctgacggtgacaaggaattaaaactgg

SEQ ID NO: 408197 - DNA, 30 bp, Artificial Sequence
  Synthetic oligonucleotide
gaagttggaacatcaaagtaatacaactgg

SEQ ID NO: 408198 - DNA, 30 bp, Artificial Sequence
  Synthetic oligonucleotide
gtctgggaatgtcttactttctaacactgg

SEQ ID NO: 408199 - DNA, 30 bp, Artificial Sequence
  Synthetic oligonucleotide
gcacatcaggtgacagtagtcacacactgg

SEQ ID NO: 408200 - DNA, 30 bp, Artificial Sequence
  Synthetic oligonucleotide
tgcgggatatgaagtaccgccggacactgg

SEQ ID NO: 408201 - DNA, 30 bp, Artificial Sequence
  Synthetic oligonucleotide
cagagaatcagattgtatataacccactgg

SEQ ID NO: 408202 - DNA, 30 bp, Artificial Sequence
  Synthetic oligonucleotide
tgatcgattcttaggaggtgtgggcactgg

SEQ ID NO: 408203 - DNA, 30 bp, Artificial Sequence
  Synthetic oligonucleotide
gctgtgcgacgccgttcctaccaagactgg

SEQ ID NO: 408204 - DNA, 30 bp, Artificial Sequence
  Synthetic oligonucleotide
catgttaattgcacatgtacgtccgactgg

SEQ ID NO: 408205 - DNA, 30 bp, Artificial Sequence
  Synthetic oligonucleotide
acagagcttctttggtctataaaggactgg

SEQ ID NO: 408206 - DNA, 30 bp, Artificial Sequence
  Synthetic oligonucleotide
gacaacgcctggtccgttgtcacggactgg

SEQ ID NO: 408207 - DNA, 30 bp, Artificial Sequence
  Synthetic oligonucleotide
ctcggttggcagcaagcgttttcggactgg

SEQ ID NO: 408208 - DNA, 30 bp, Artificial Sequence
  Synthetic oligonucleotide
ttccggttctcagatgcattgactgactgg

SEQ ID NO: 408209 - DNA, 30 bp, Artificial Sequence
  Synthetic oligonucleotide
tgtctatgctagtttaacagaatctactgg

SEQ ID NO: 408210 - DNA, 30 bp, Artificial Sequence
  Synthetic oligonucleotide
tttatccgaaagatgaacaccgggtactgg

SEQ ID NO: 408211 - DNA, 30 bp, Artificial Sequence
  Synthetic oligonucleotide
tcgcgtttaaagtaaggtccctgttactgg

SEQ ID NO: 408212 - DNA, 30 bp, Artificial Sequence
  Synthetic oligonucleotide
aaacaccagcaccaatcgtagttttactgg

SEQ ID NO: 408213 - DNA, 30 bp, Artificial Sequence
  Synthetic oligonucleotide
atcaagtccttgttttgcgcacgaacctgg

SEQ ID NO: 408214 - DNA, 30 bp, Artificial Sequence
  Synthetic oligonucleotide
tctccatggctccaggaaagcgacacctgg

SEQ ID NO: 408215 - DNA, 30 bp, Artificial Sequence
  Synthetic oligonucleotide
ggaaaattcgtgtaccaggcacccacctgg

SEQ ID NO: 408216 - DNA, 30 bp, Artificial Sequence
  Synthetic oligonucleotide
tatgcgtactctgtcttgaagaagacctgg

SEQ ID NO: 408217 - DNA, 30 bp, Artificial Sequence
  Synthetic oligonucleotide
ggtattgacgagctcgttagcgttacctgg

SEQ ID NO: 408218 - DNA, 30 bp, Artificial Sequence
  Synthetic oligonucleotide
ctcgaaacctacgcaacacacgacccctgg

SEQ ID NO: 408219 - DNA, 30 bp, Artificial Sequence
  Synthetic oligonucleotide
ctatcagacgcaatttatcatctcccctgg

SEQ ID NO: 408220 - DNA, 30 bp, Artificial Sequence
  Synthetic oligonucleotide
cgggacactacggtcgagtggagtccctgg

SEQ ID NO: 408221 - DNA, 30 bp, Artificial Sequence
  Synthetic oligonucleotide
tctgatagtatactgactcgctcagcctgg

SEQ ID NO: 408222 - DNA, 30 bp, Artificial Sequence
  Synthetic oligonucleotide
cagtttactgagttcttcaagtgggcctgg

SEQ ID NO: 408223 - DNA, 30 bp, Artificial Sequence
  Synthetic oligonucleotide
attttcccagcaagggaacgggtggcctgg

SEQ ID NO: 408224 - DNA, 30 bp, Artificial Sequence
  Synthetic oligonucleotide
cgctaaccatcgcaactcatcaatgcctgg

SEQ ID NO: 408225 - DNA, 30 bp, Artificial Sequence
  Synthetic oligonucleotide
ctatgtcgcgggctgtgattgaatgcctgg

SEQ ID NO: 408226 - DNA, 30 bp, Artificial Sequence
  Synthetic oligonucleotide
acgggacggacatgatgcaccggatcctgg

SEQ ID NO: 408227 - DNA, 30 bp, Artificial Sequence
  Synthetic oligonucleotide
gttagaatgtaaatggactctatgtcctgg

SEQ ID NO: 408228 - DNA, 30 bp, Artificial Sequence
  Synthetic oligonucleotide
ccacactgttttccactgcagacaagctgg

SEQ ID NO: 408229 - DNA, 30 bp, Artificial Sequence
  Synthetic oligonucleotide
agtggggtgtggcccgctgaggccagctgg

SEQ ID NO: 408230 - DNA, 30 bp, Artificial Sequence
  Synthetic oligonucleotide
ggggttggtaaaacatctcggagcagctgg

SEQ ID NO: 408231 - DNA, 30 bp, Artificial Sequence
  Synthetic oligonucleotide
agtcgggtcttccacttgtcctggagctgg

SEQ ID NO: 408232 - DNA, 30 bp, Artificial Sequence
  Synthetic oligonucleotide
gctttcgaaatacgtgaaggtctgagctgg

SEQ ID NO: 408233 - DNA, 30 bp, Artificial Sequence
  Synthetic oligonucleotide
gaacattactcccgcctggagattagctgg

SEQ ID NO: 408234 - DNA, 30 bp, Artificial Sequence
  Synthetic oligonucleotide
catctcggaaatctatcaaaaggacgctgg

SEQ ID NO: 408235 - DNA, 30 bp, Artificial Sequence
  Synthetic oligonucleotide
aggagggaccctaagataattagtcgctgg

SEQ ID NO: 408236 - DNA, 30 bp, Artificial Sequence
  Synthetic oligonucleotide
taaagtagcggagggatcggcgttcgctgg

SEQ ID NO: 408237 - DNA, 30 bp, Artificial Sequence
  Synthetic oligonucleotide
aatataaaatgcgtgccattggtaggctgg

SEQ ID NO: 408238 - DNA, 30 bp, Artificial Sequence
  Synthetic oligonucleotide
gtattcatatttaggggaaagtacggctgg

SEQ ID NO: 408239 - DNA, 30 bp, Artificial Sequence
  Synthetic oligonucleotide
cgaactgctggcctagagtgcattggctgg

SEQ ID NO: 408240 - DNA, 30 bp, Artificial Sequence
  Synthetic oligonucleotide
gaatatgatgtgaaaacatctgagtgctgg

SEQ ID NO: 408241 - DNA, 30 bp, Artificial Sequence
  Synthetic oligonucleotide
agtcaggtttttctcgaggttcggtgctgg

SEQ ID NO: 408242 - DNA, 30 bp, Artificial Sequence
  Synthetic oligonucleotide
gcactagctacgacgtcaccaatgtgctgg

SEQ ID NO: 408243 - DNA, 30 bp, Artificial Sequence
  Synthetic oligonucleotide
gagtgtagaaagctataagtattgtgctgg

SEQ ID NO: 408244 - DNA, 30 bp, Artificial Sequence
  Synthetic oligonucleotide
ctaagaaagatggactgggcaccttgctgg

SEQ ID NO: 408245 - DNA, 30 bp, Artificial Sequence
  Synthetic oligonucleotide
tatccggataataatttcttgtcttgctgg

SEQ ID NO: 408246 - DNA, 30 bp, Artificial Sequence
  Synthetic oligonucleotide
gcagtcagtcccggaattcaagcaatctgg

SEQ ID NO: 408247 - DNA, 30 bp, Artificial Sequence
  Synthetic oligonucleotide
ttacaacattcccgcatcggtataatctgg

SEQ ID NO: 408248 - DNA, 30 bp, Artificial Sequence
  Synthetic oligonucleotide
tagtaggaatgcgggttatagtgcatctgg

SEQ ID NO: 408249 - DNA, 30 bp, Artificial Sequence
  Synthetic oligonucleotide
gcccactgattgtagtcggctttcatctgg

SEQ ID NO: 408250 - DNA, 30 bp, Artificial Sequence
  Synthetic oligonucleotide
gcataatttagactccattgttggatctgg

SEQ ID NO: 408251 - DNA, 30 bp, Artificial Sequence
  Synthetic oligonucleotide
tgatccgcctcgtctagtctcattatctgg

SEQ ID NO: 408252 - DNA, 30 bp, Artificial Sequence
  Synthetic oligonucleotide
tgatatgagattacggagacgagcctctgg

SEQ ID NO: 408253 - DNA, 30 bp, Artificial Sequence
  Synthetic oligonucleotide
atttgtgctggaaagcctagacgcctctgg

SEQ ID NO: 408254 - DNA, 30 bp, Artificial Sequence
  Synthetic oligonucleotide
tgcaataaacccttgtggttttagctctgg

SEQ ID NO: 408255 - DNA, 30 bp, Artificial Sequence
  Synthetic oligonucleotide
ctattgtggcattctagttatccgctctgg

SEQ ID NO: 408256 - DNA, 30 bp, Artificial Sequence
  Synthetic oligonucleotide
gacaggaacagacgagtagtacatctctgg

SEQ ID NO: 408257 - DNA, 30 bp, Artificial Sequence
  Synthetic oligonucleotide
tcccacctacgttaacgcgtaaacgtctgg

SEQ ID NO: 408258 - DNA, 30 bp, Artificial Sequence
  Synthetic oligonucleotide
ctctcatgagatttgcttgcacccgtctgg

SEQ ID NO: 408259 - DNA, 30 bp, Artificial Sequence
  Synthetic oligonucleotide
acgcaccggccagaacggcaaagcgtctgg

SEQ ID NO: 408260 - DNA, 30 bp, Artificial Sequence
  Synthetic oligonucleotide
aaaaacgctggtgattgggattacttctgg

SEQ ID NO: 408261 - DNA, 30 bp, Artificial Sequence
  Synthetic oligonucleotide
cagcgggcttaaaaatgatgtaccttctgg

SEQ ID NO: 408262 - DNA, 30 bp, Artificial Sequence
  Synthetic oligonucleotide
tcttattgttataatagttgttagttctgg

SEQ ID NO: 408263 - DNA, 30 bp, Artificial Sequence
  Synthetic oligonucleotide
tgccataggctcacggtgacgatgttctgg

SEQ ID NO: 408264 - DNA, 30 bp, Artificial Sequence
  Synthetic oligonucleotide
cgacaggctacaagggcctttaatttctgg

SEQ ID NO: 408265 - DNA, 30 bp, Artificial Sequence
  Synthetic oligonucleotide
gtatgtatgtcggtcttctatgatttctgg

SEQ ID NO: 408266 - DNA, 30 bp, Artificial Sequence
  Synthetic oligonucleotide
tcagcgggtttcagtagaaaccgtttctgg

SEQ ID NO: 408267 - DNA, 30 bp, Artificial Sequence
  Synthetic oligonucleotide
aaagctgctgagcgcacggttggaaagtgg

SEQ ID NO: 408268 - DNA, 30 bp, Artificial Sequence
  Synthetic oligonucleotide
tgttttgcctcatccctacaatgaaagtgg

SEQ ID NO: 408269 - DNA, 30 bp, Artificial Sequence
  Synthetic oligonucleotide
tctcccctcgtaaaaatcatcctcaagtgg

SEQ ID NO: 408270 - DNA, 30 bp, Artificial Sequence
  Synthetic oligonucleotide
ccgacccttcacgggagccaccataagtgg

SEQ ID NO: 408271 - DNA, 30 bp, Artificial Sequence
  Synthetic oligonucleotide
ttgtcttagtaagtcaatggtactaagtgg

SEQ ID NO: 408272 - DNA, 30 bp, Artificial Sequence
  Synthetic oligonucleotide
gcggtcgtgggttcaaaatacaaacagtgg

SEQ ID NO: 408273 - DNA, 30 bp, Artificial Sequence
  Synthetic oligonucleotide
aaacctgtaagaagctccctagaacagtgg

SEQ ID NO: 408274 - DNA, 30 bp, Artificial Sequence
  Synthetic oligonucleotide
gataatcaattcgcttcagccggacagtgg

SEQ ID NO: 408275 - DNA, 30 bp, Artificial Sequence
  Synthetic oligonucleotide
ccaaacggttagcgcttttcaatacagtgg

SEQ ID NO: 408276 - DNA, 30 bp, Artificial Sequence
  Synthetic oligonucleotide
ctttcatgagtttgggacctataccagtgg

SEQ ID NO: 408277 - DNA, 30 bp, Artificial Sequence
  Synthetic oligonucleotide
gagtaggtagggtttgtgagtactcagtgg

SEQ ID NO: 408278 - DNA, 30 bp, Artificial Sequence
  Synthetic oligonucleotide
gctggtagaggggaggtcggtcgcgagtgg

SEQ ID NO: 408279 - DNA, 30 bp, Artificial Sequence
  Synthetic oligonucleotide
gccacctatggagaacgacgattcgagtgg

SEQ ID NO: 408280 - DNA, 30 bp, Artificial Sequence
  Synthetic oligonucleotide
tacacacgtccggttggggaaagggagtgg

SEQ ID NO: 408281 - DNA, 30 bp, Artificial Sequence
  Synthetic oligonucleotide
gcgttgagatctgtgcacagtatggagtgg

SEQ ID NO: 408282 - DNA, 30 bp, Artificial Sequence
  Synthetic oligonucleotide
gaaacgttagttgtataagagcttgagtgg

SEQ ID NO: 408283 - DNA, 30 bp, Artificial Sequence
  Synthetic oligonucleotide
ataaaggccataggacctactatatagtgg

SEQ ID NO: 408284 - DNA, 30 bp, Artificial Sequence
  Synthetic oligonucleotide
tttgtgttagttcatatttcggtgtagtgg

SEQ ID NO: 408285 - DNA, 30 bp, Artificial Sequence
  Synthetic oligonucleotide
gatttacgcagaacttccagatgttagtgg

SEQ ID NO: 408286 - DNA, 30 bp, Artificial Sequence
  Synthetic oligonucleotide
gcgcctcttgttgttagacgtagaacgtgg

SEQ ID NO: 408287 - DNA, 30 bp, Artificial Sequence
  Synthetic oligonucleotide
ctacgcgatcatgcatgcccgttaacgtgg

SEQ ID NO: 408288 - DNA, 31 bp, Artificial Sequence
  Synthetic oligonucleotide
gaatccaggaaatctccaccggtctacgtgg

SEQ ID NO: 408289 - DNA, 30 bp, Artificial Sequence
  Synthetic oligonucleotide
gtttgttcctgggtttaggcctttacgtgg

SEQ ID NO: 408290 - DNA, 30 bp, Artificial Sequence
  Synthetic oligonucleotide
ctccgtgctccaggcactggagaaccgtgg

SEQ ID NO: 408291 - DNA, 30 bp, Artificial Sequence
  Synthetic oligonucleotide
gagcggtctaccgtcgcgacgtaaccgtgg

SEQ ID NO: 408292 - DNA, 30 bp, Artificial Sequence
  Synthetic oligonucleotide
tatggaattttgaagagttcaggcccgtgg

SEQ ID NO: 408293 - DNA, 30 bp, Artificial Sequence
  Synthetic oligonucleotide
aacattaacgaagttattgttgggccgtgg

SEQ ID NO: 408294 - DNA, 30 bp, Artificial Sequence
  Synthetic oligonucleotide
ttggagtatagctctccttaccttccgtgg

SEQ ID NO: 408295 - DNA, 30 bp, Artificial Sequence
  Synthetic oligonucleotide
aacctacgattcacgctttaaagagcgtgg

SEQ ID NO: 408296 - DNA, 30 bp, Artificial Sequence
  Synthetic oligonucleotide
ctcggtgaaaaaggccgcgcatacgcgtgg

SEQ ID NO: 408297 - DNA, 30 bp, Artificial Sequence
  Synthetic oligonucleotide
aatcgtaccgtaggaattttagccgcgtgg

SEQ ID NO: 408298 - DNA, 30 bp, Artificial Sequence
  Synthetic oligonucleotide
gaaattacgctctgagtttgctatgcgtgg

SEQ ID NO: 408299 - DNA, 30 bp, Artificial Sequence
  Synthetic oligonucleotide
gcaccattgtcatgtcggcgcgcatcgtgg

SEQ ID NO: 408300 - DNA, 30 bp, Artificial Sequence
  Synthetic oligonucleotide
tgcacgctaattcgtaaatttcggtcgtgg

SEQ ID NO: 408301 - DNA, 30 bp, Artificial Sequence
  Synthetic oligonucleotide
gtacgctggtccaacacgggtgtgtcgtgg

SEQ ID NO: 408302 - DNA, 30 bp, Artificial Sequence
  Synthetic oligonucleotide
gcggctgcgaagcttatctgaggttcgtgg

SEQ ID NO: 408303 - DNA, 30 bp, Artificial Sequence
  Synthetic oligonucleotide
atccgcgcagtgacgaatctaggttcgtgg

SEQ ID NO: 408304 - DNA, 30 bp, Artificial Sequence
  Synthetic oligonucleotide
ggagccgtcgaacatatgtgatgttcgtgg

SEQ ID NO: 408305 - DNA, 30 bp, Artificial Sequence
  Synthetic oligonucleotide
taaaggtatcaccctacctgcagcaggtgg

SEQ ID NO: 408306 - DNA, 30 bp, Artificial Sequence
  Synthetic oligonucleotide
acaagtatgggctcgttgcccactaggtgg

SEQ ID NO: 408307 - DNA, 30 bp, Artificial Sequence
  Synthetic oligonucleotide
tgtaatgtacccatcgatcgatttaggtgg

SEQ ID NO: 408308 - DNA, 30 bp, Artificial Sequence
  Synthetic oligonucleotide
tgaccgctagcgctattacaagtacggtgg

SEQ ID NO: 408309 - DNA, 30 bp, Artificial Sequence
  Synthetic oligonucleotide
gcacacgtgttcaaagcaccgagccggtgg

SEQ ID NO: 408310 - DNA, 30 bp, Artificial Sequence
  Synthetic oligonucleotide
agattaggtccggcagttggatagcggtgg

SEQ ID NO: 408311 - DNA, 30 bp, Artificial Sequence
  Synthetic oligonucleotide
agatcggtcaggaacaggctttagcggtgg

SEQ ID NO: 408312 - DNA, 30 bp, Artificial Sequence
  Synthetic oligonucleotide
tgctgcccatgccttcgatctctgcggtgg

SEQ ID NO: 408313 - DNA, 30 bp, Artificial Sequence
  Synthetic oligonucleotide
gttgggcggtacggctatgatgtagggtgg

SEQ ID NO: 408314 - DNA, 30 bp, Artificial Sequence
  Synthetic oligonucleotide
aaattccagtacgtagcatggtgtgggtgg

SEQ ID NO: 408315 - DNA, 30 bp, Artificial Sequence
  Synthetic oligonucleotide
tccgcggaagctcacacagggtttgggtgg

SEQ ID NO: 408316 - DNA, 30 bp, Artificial Sequence
  Synthetic oligonucleotide
caccctagttcctgtgaagagaaatggtgg

SEQ ID NO: 408317 - DNA, 30 bp, Artificial Sequence
  Synthetic oligonucleotide
aagaggcgggctatattagtcggatggtgg

SEQ ID NO: 408318 - DNA, 30 bp, Artificial Sequence
  Synthetic oligonucleotide
atgacgattccgccgcaatctcattggtgg

SEQ ID NO: 408319 - DNA, 30 bp, Artificial Sequence
  Synthetic oligonucleotide
gggcataactagtccaagggcgaaatgtgg

SEQ ID NO: 408320 - DNA, 30 bp, Artificial Sequence
  Synthetic oligonucleotide
cttgcatacatagccacctaatgcatgtgg

SEQ ID NO: 408321 - DNA, 30 bp, Artificial Sequence
  Synthetic oligonucleotide
ttcgtatatgcatcagagtagccgatgtgg

SEQ ID NO: 408322 - DNA, 30 bp, Artificial Sequence
  Synthetic oligonucleotide
gcttccagcacctagtgccgtgggatgtgg

SEQ ID NO: 408323 - DNA, 30 bp, Artificial Sequence
  Synthetic oligonucleotide
tattcagggtctatctggggtttgatgtgg

SEQ ID NO: 408324 - DNA, 30 bp, Artificial Sequence
  Synthetic oligonucleotide
aatcgcaataggctacgtagacttatgtgg

SEQ ID NO: 408325 - DNA, 30 bp, Artificial Sequence
  Synthetic oligonucleotide
attgataagtacattaagtggcttatgtgg

SEQ ID NO: 408326 - DNA, 30 bp, Artificial Sequence
  Synthetic oligonucleotide
ggtcgcgcctaatttccccaggaactgtgg

SEQ ID NO: 408327 - DNA, 30 bp, Artificial Sequence
  Synthetic oligonucleotide
gcagataagcgcttatttgagtaactgtgg

SEQ ID NO: 408328 - DNA, 30 bp, Artificial Sequence
  Synthetic oligonucleotide
ggaggttgacgctttgccagtaggctgtgg

SEQ ID NO: 408329 - DNA, 30 bp, Artificial Sequence
  Synthetic oligonucleotide
atcatatatgagcgtccgcgtctgctgtgg

SEQ ID NO: 408330 - DNA, 30 bp, Artificial Sequence
  Synthetic oligonucleotide
cgggggcacctctattactttagtctgtgg

SEQ ID NO: 408331 - DNA, 30 bp, Artificial Sequence
  Synthetic oligonucleotide
ttgcaaaagccttaacggggagttctgtgg

SEQ ID NO: 408332 - DNA, 30 bp, Artificial Sequence
  Synthetic oligonucleotide
gtccttgagttatcttagcgcgacgtgtgg

SEQ ID NO: 408333 - DNA, 30 bp, Artificial Sequence
  Synthetic oligonucleotide
gatacagggcgcgtcggtactagcgtgtgg

SEQ ID NO: 408334 - DNA, 30 bp, Artificial Sequence
  Synthetic oligonucleotide
caggattttaccgtcatacgaatcgtgtgg

SEQ ID NO: 408335 - DNA, 30 bp, Artificial Sequence
  Synthetic oligonucleotide
tataacgtgctcagatacatgcgggtgtgg

SEQ ID NO: 408336 - DNA, 30 bp, Artificial Sequence
  Synthetic oligonucleotide
tgcgacgtgtctaggacccgcatggtgtgg

SEQ ID NO: 408337 - DNA, 30 bp, Artificial Sequence
  Synthetic oligonucleotide
atgccatcttgcggttaataagaattgtgg

SEQ ID NO: 408338 - DNA, 30 bp, Artificial Sequence
  Synthetic oligonucleotide
ctttaagtgtcgatcgctggcagattgtgg

SEQ ID NO: 408339 - DNA, 30 bp, Artificial Sequence
  Synthetic oligonucleotide
aaatgacacatccatctaaagatattgtgg

SEQ ID NO: 408340 - DNA, 30 bp, Artificial Sequence
  Synthetic oligonucleotide
acgcaaagttcgccctcaacttatttgtgg

SEQ ID NO: 408341 - DNA, 30 bp, Artificial Sequence
  Synthetic oligonucleotide
gatggaatcagcgagcgtgtcagtttgtgg

SEQ ID NO: 408342 - DNA, 30 bp, Artificial Sequence
  Synthetic oligonucleotide
ggcagtccttaccaaggttgatcaaattgg

SEQ ID NO: 408343 - DNA, 30 bp, Artificial Sequence
  Synthetic oligonucleotide
gctcctggaatatatgtattgttaaattgg

SEQ ID NO: 408344 - DNA, 30 bp, Artificial Sequence
  Synthetic oligonucleotide
caagtacttgtcgggacttagcagaattgg

SEQ ID NO: 408345 - DNA, 30 bp, Artificial Sequence
  Synthetic oligonucleotide
aaccctcaaagagtccgggatgtgaattgg

SEQ ID NO: 408346 - DNA, 30 bp, Artificial Sequence
  Synthetic oligonucleotide
gaggcgactgttggggggtgcactaattgg

SEQ ID NO: 408347 - DNA, 30 bp, Artificial Sequence
  Synthetic oligonucleotide
tatacaagttaaccatctttgcctaattgg

SEQ ID NO: 408348 - DNA, 30 bp, Artificial Sequence
  Synthetic oligonucleotide
aatcgagagccactgaaatctcctaattgg

SEQ ID NO: 408349 - DNA, 30 bp, Artificial Sequence
  Synthetic oligonucleotide
ttggccgtcattggggaaaccgcacattgg

SEQ ID NO: 408350 - DNA, 30 bp, Artificial Sequence
  Synthetic oligonucleotide
ttgtagatgtcggtatttttatcacattgg

SEQ ID NO: 408351 - DNA, 30 bp, Artificial Sequence
  Synthetic oligonucleotide
gaatttgaggacgctgaatgattacattgg

SEQ ID NO: 408352 - DNA, 30 bp, Artificial Sequence
  Synthetic oligonucleotide
tggtccgtatgaggcctttggcttcattgg

SEQ ID NO: 408353 - DNA, 30 bp, Artificial Sequence
  Synthetic oligonucleotide
agttgggcacgggcggtgtttcaagattgg

SEQ ID NO: 408354 - DNA, 30 bp, Artificial Sequence
  Synthetic oligonucleotide
tttctgtgttaccctgattcaggagattgg

SEQ ID NO: 408355 - DNA, 30 bp, Artificial Sequence
  Synthetic oligonucleotide
ataggctcgtaagctcatctcaccgattgg

SEQ ID NO: 408356 - DNA, 30 bp, Artificial Sequence
  Synthetic oligonucleotide
aggctgtattaatgatattataccgattgg

SEQ ID NO: 408357 - DNA, 30 bp, Artificial Sequence
  Synthetic oligonucleotide
tcgtgggtagttagatctcccccggattgg

SEQ ID NO: 408358 - DNA, 30 bp, Artificial Sequence
  Synthetic oligonucleotide
tttagtcgggtgtcaggggcaagggattgg

SEQ ID NO: 408359 - DNA, 30 bp, Artificial Sequence
  Synthetic oligonucleotide
tgtccgtcccatgctgggtgatgtgattgg

SEQ ID NO: 408360 - DNA, 30 bp, Artificial Sequence
  Synthetic oligonucleotide
gccaatttaaaatataccggtattgattgg

SEQ ID NO: 408361 - DNA, 30 bp, Artificial Sequence
  Synthetic oligonucleotide
cggatctacatatagatttctaattattgg

SEQ ID NO: 408362 - DNA, 30 bp, Artificial Sequence
  Synthetic oligonucleotide
cacagcgcatgcagtacaccgtcttattgg

SEQ ID NO: 408363 - DNA, 30 bp, Artificial Sequence
  Synthetic oligonucleotide
tttgagagatcatgtacaagtaaaacttgg

SEQ ID NO: 408364 - DNA, 30 bp, Artificial Sequence
  Synthetic oligonucleotide
ttggagtagttagttattaaggaaacttgg

SEQ ID NO: 408365 - DNA, 30 bp, Artificial Sequence
  Synthetic oligonucleotide
ttcacttggagctggattctcagcacttgg

SEQ ID NO: 408366 - DNA, 30 bp, Artificial Sequence
  Synthetic oligonucleotide
tgaacggtggggacgcatcttagcacttgg

SEQ ID NO: 408367 - DNA, 30 bp, Artificial Sequence
  Synthetic oligonucleotide
agtgctttgtcatggtaagccctcacttgg

SEQ ID NO: 408368 - DNA, 30 bp, Artificial Sequence
  Synthetic oligonucleotide
tactggactgttcgttgaggctggacttgg

SEQ ID NO: 408369 - DNA, 30 bp, Artificial Sequence
  Synthetic oligonucleotide
aagtcgttcgtgcctaccgctcttacttgg

SEQ ID NO: 408370 - DNA, 30 bp, Artificial Sequence
  Synthetic oligonucleotide
taggtcttcgtcgaatatcacgaaccttgg

SEQ ID NO: 408371 - DNA, 30 bp, Artificial Sequence
  Synthetic oligonucleotide
tcggcaccgggcatacggatagcaccttgg

SEQ ID NO: 408372 - DNA, 30 bp, Artificial Sequence
  Synthetic oligonucleotide
agtactccaagaattctatccctaccttgg

SEQ ID NO: 408373 - DNA, 30 bp, Artificial Sequence
  Synthetic oligonucleotide
taaaaaggactttaaattttacacccttgg

SEQ ID NO: 408374 - DNA, 30 bp, Artificial Sequence
  Synthetic oligonucleotide
tcatacctcaatataatgacgaggccttgg

SEQ ID NO: 408375 - DNA, 30 bp, Artificial Sequence
  Synthetic oligonucleotide
tcaggatcggttttggcgtatgggccttgg

SEQ ID NO: 408376 - DNA, 30 bp, Artificial Sequence
  Synthetic oligonucleotide
aggccagtgatgaaaatcataggtccttgg

SEQ ID NO: 408377 - DNA, 30 bp, Artificial Sequence
  Synthetic oligonucleotide
ttacactactataagaccggcttagcttgg

SEQ ID NO: 408378 - DNA, 30 bp, Artificial Sequence
  Synthetic oligonucleotide
cagatcgccgagctacgcagactcgcttgg

SEQ ID NO: 408379 - DNA, 30 bp, Artificial Sequence
  Synthetic oligonucleotide
tatcactacacacgggtgccgcgggcttgg

SEQ ID NO: 408380 - DNA, 30 bp, Artificial Sequence
  Synthetic oligonucleotide
aagcatagcttactcaatatgtgggcttgg

SEQ ID NO: 408381 - DNA, 30 bp, Artificial Sequence
  Synthetic oligonucleotide
actgaaagtaagtatgagtagagtgcttgg

SEQ ID NO: 408382 - DNA, 30 bp, Artificial Sequence
  Synthetic oligonucleotide
gttaatgatataatcaaaacgcttgcttgg

SEQ ID NO: 408383 - DNA, 30 bp, Artificial Sequence
  Synthetic oligonucleotide
gtcgagatacaattaggcggagactcttgg

SEQ ID NO: 408384 - DNA, 30 bp, Artificial Sequence
  Synthetic oligonucleotide
gactcgcggtatacacccataacctcttgg

SEQ ID NO: 408385 - DNA, 30 bp, Artificial Sequence
  Synthetic oligonucleotide
gtttaccgtttttgtttgcaggtctcttgg

SEQ ID NO: 408386 - DNA, 30 bp, Artificial Sequence
  Synthetic oligonucleotide
cacgcgcaatattcggcgaacttctcttgg

SEQ ID NO: 408387 - DNA, 30 bp, Artificial Sequence
  Synthetic oligonucleotide
gaatgaattaatcccgatcacatgtcttgg

SEQ ID NO: 408388 - DNA, 30 bp, Artificial Sequence
  Synthetic oligonucleotide
aggattctatacgagtcagtggattcttgg

SEQ ID NO: 408389 - DNA, 30 bp, Artificial Sequence
  Synthetic oligonucleotide
aatgtgtataactctgactgcgcttcttgg

SEQ ID NO: 408390 - DNA, 30 bp, Artificial Sequence
  Synthetic oligonucleotide
aaaggaaacgtgtgccagactcaaagttgg

SEQ ID NO: 408391 - DNA, 30 bp, Artificial Sequence
  Synthetic oligonucleotide
aagcctcgacgtggttgttccggaagttgg

SEQ ID NO: 408392 - DNA, 30 bp, Artificial Sequence
  Synthetic oligonucleotide
tcgtctgccatgtacccgcatgccagttgg

SEQ ID NO: 408393 - DNA, 30 bp, Artificial Sequence
  Synthetic oligonucleotide
tgcggcacttgataataaaacatcagttgg

SEQ ID NO: 408394 - DNA, 30 bp, Artificial Sequence
  Synthetic oligonucleotide
ctgcagttctttacggggtaccagagttgg

SEQ ID NO: 408395 - DNA, 30 bp, Artificial Sequence
  Synthetic oligonucleotide
tcgggaagagattgggtggggatgagttgg

SEQ ID NO: 408396 - DNA, 30 bp, Artificial Sequence
  Synthetic oligonucleotide
cttgccttccagcttgccgcttttagttgg

SEQ ID NO: 408397 - DNA, 30 bp, Artificial Sequence
  Synthetic oligonucleotide
caaaaagccgtaggccatcgaacacgttgg

SEQ ID NO: 408398 - DNA, 30 bp, Artificial Sequence
  Synthetic oligonucleotide
tagagctgctgagtagtgtgtacccgttgg

SEQ ID NO: 408399 - DNA, 30 bp, Artificial Sequence
  Synthetic oligonucleotide
acattgaaacttagccgtcgccatcgttgg

SEQ ID NO: 408400 - DNA, 30 bp, Artificial Sequence
  Synthetic oligonucleotide
cgcagcctagacaagatgagagatcgttgg

SEQ ID NO: 408401 - DNA, 30 bp, Artificial Sequence
  Synthetic oligonucleotide
gcactggaggagcggtgctggcgaggttgg

SEQ ID NO: 408402 - DNA, 30 bp, Artificial Sequence
  Synthetic oligonucleotide
acctggctgtgttacacgccaataggttgg

SEQ ID NO: 408403 - DNA, 30 bp, Artificial Sequence
  Synthetic oligonucleotide
ctcggcagtggcagctggctctccggttgg

SEQ ID NO: 408404 - DNA, 30 bp, Artificial Sequence
  Synthetic oligonucleotide
taatcctcgagctacgaagtgctcggttgg

SEQ ID NO: 408405 - DNA, 30 bp, Artificial Sequence
  Synthetic oligonucleotide
ggctgcacaccagctcatattttcggttgg

SEQ ID NO: 408406 - DNA, 30 bp, Artificial Sequence
  Synthetic oligonucleotide
agtatacgttacgtttagactttgggttgg

SEQ ID NO: 408407 - DNA, 30 bp, Artificial Sequence
  Synthetic oligonucleotide
ttcatcccgaagatagtgatctttggttgg

SEQ ID NO: 408408 - DNA, 30 bp, Artificial Sequence
  Synthetic oligonucleotide
gagtattcctgaattaaatggaaatgttgg

SEQ ID NO: 408409 - DNA, 30 bp, Artificial Sequence
  Synthetic oligonucleotide
cctccgagcggcggcatcgacgaatgttgg

SEQ ID NO: 408410 - DNA, 30 bp, Artificial Sequence
  Synthetic oligonucleotide
gtgtcggagacgcttcgcaactaatgttgg

SEQ ID NO: 408411 - DNA, 30 bp, Artificial Sequence
  Synthetic oligonucleotide
acgccgtcgtaacattgatcaacatgttgg

SEQ ID NO: 408412 - DNA, 30 bp, Artificial Sequence
  Synthetic oligonucleotide
ctcttaaatggccggcagctaggctgttgg

SEQ ID NO: 408413 - DNA, 30 bp, Artificial Sequence
  Synthetic oligonucleotide
gtttctaaaacgttacatgatcagtgttgg

SEQ ID NO: 408414 - DNA, 30 bp, Artificial Sequence
  Synthetic oligonucleotide
gattgtgaggttgctacttctaggtgttgg

SEQ ID NO: 408415 - DNA, 30 bp, Artificial Sequence
  Synthetic oligonucleotide
acattctaaaattcttgatgggggtgttgg

SEQ ID NO: 408416 - DNA, 30 bp, Artificial Sequence
  Synthetic oligonucleotide
taggtgatatccaagtacctaggttgttgg

SEQ ID NO: 408417 - DNA, 30 bp, Artificial Sequence
  Synthetic oligonucleotide
ctcacactgaattctcgcttgagaatttgg

SEQ ID NO: 408418 - DNA, 30 bp, Artificial Sequence
  Synthetic oligonucleotide
ttatgaaaaccgtggcgtaagcacatttgg

SEQ ID NO: 408419 - DNA, 30 bp, Artificial Sequence
  Synthetic oligonucleotide
aaaccgcttatcatgtcgaggttcatttgg

SEQ ID NO: 408420 - DNA, 30 bp, Artificial Sequence
  Synthetic oligonucleotide
gtgcgttgagtctttacatggaagatttgg

SEQ ID NO: 408421 - DNA, 30 bp, Artificial Sequence
  Synthetic oligonucleotide
gcgagataaatcgaccaggcgtcgatttgg

SEQ ID NO: 408422 - DNA, 30 bp, Artificial Sequence
  Synthetic oligonucleotide
agattctttataagtgacagacatatttgg

SEQ ID NO: 408423 - DNA, 30 bp, Artificial Sequence
  Synthetic oligonucleotide
gcaaatggtgaatttcatataactatttgg

SEQ ID NO: 408424 - DNA, 31 bp, Artificial Sequence
  Synthetic oligonucleotide
tagttagtacacggggggggaaggtatttgg

SEQ ID NO: 408425 - DNA, 30 bp, Artificial Sequence
  Synthetic oligonucleotide
gtcattccgacatgaattcccatactttgg

SEQ ID NO: 408426 - DNA, 30 bp, Artificial Sequence
  Synthetic oligonucleotide
cactcttgtagatatgttccagtgctttgg

SEQ ID NO: 408427 - DNA, 30 bp, Artificial Sequence
  Synthetic oligonucleotide
aaagcaatccgttctaggcttactctttgg

SEQ ID NO: 408428 - DNA, 30 bp, Artificial Sequence
  Synthetic oligonucleotide
ccatctcctttcagtggtgacatagtttgg

SEQ ID NO: 408429 - DNA, 30 bp, Artificial Sequence
  Synthetic oligonucleotide
gtcccagtacgcgcacaggagttggtttgg

SEQ ID NO: 408430 - DNA, 30 bp, Artificial Sequence
  Synthetic oligonucleotide
gggccgttaaggataccatggcgtgtttgg

SEQ ID NO: 408431 - DNA, 30 bp, Artificial Sequence
  Synthetic oligonucleotide
aattgccaaagacttaaccggggtgtttgg

SEQ ID NO: 408432 - DNA, 30 bp, Artificial Sequence
  Synthetic oligonucleotide
cgagttcggtaactactaagatttgtttgg

SEQ ID NO: 408433 - DNA, 30 bp, Artificial Sequence
  Synthetic oligonucleotide
gtttacgaagctgcctccatgccattttgg

SEQ ID NO: 408434 - DNA, 30 bp, Artificial Sequence
  Synthetic oligonucleotide
tctgtatcctagagtccgcgggtattttgg

SEQ ID NO: 408435 - DNA, 30 bp, Artificial Sequence
  Synthetic oligonucleotide
ctcacaccggtaagtacaggtaccttttgg

SEQ ID NO: 408436 - DNA, 30 bp, Artificial Sequence
  Synthetic oligonucleotide
tgggaatgctgacacgaagcgcgcttttgg

SEQ ID NO: 408437 - DNA, 30 bp, Artificial Sequence
  Synthetic oligonucleotide
aacaatacaaaatggtgtgttcgcttttgg

SEQ ID NO: 408438 - DNA, 30 bp, Artificial Sequence
  Synthetic oligonucleotide
gagttataaactcataggaaggtcttttgg

SEQ ID NO: 408439 - DNA, 30 bp, Artificial Sequence
  Synthetic oligonucleotide
cacgcgattttatcttagggcgcgttttgg

SEQ ID NO: 408440 - DNA, 30 bp, Artificial Sequence
  Synthetic oligonucleotide
ccgcgtgatagaggagtcacaaggttttgg

SEQ ID NO: 408441 - DNA, 30 bp, Artificial Sequence
  Synthetic oligonucleotide
acgtgactcgagtaatacgcagggttttgg

SEQ ID NO: 408442 - DNA, 30 bp, Artificial Sequence
  Synthetic oligonucleotide
ccgccggtggtgataacacttagtttttgg

SEQ ID NO: 408443 - DNA, 30 bp, Artificial Sequence
  Synthetic oligonucleotide
ctgtctttatatactaatattgttttttgg

SEQ ID NO: 408444 - DNA, 30 bp, Artificial Sequence
  Synthetic oligonucleotide
gaggctcaatggacgcccggttttttttgg

SEQ ID NO: 408445 - DNA, 30 bp, Artificial Sequence
  Synthetic oligonucleotide
cggtaattagtttattggaagcaaaaaatg

SEQ ID NO: 408446 - DNA, 30 bp, Artificial Sequence
  Synthetic oligonucleotide
tttctctgtactagaagttgttaaaaaatg

SEQ ID NO: 408447 - DNA, 30 bp, Artificial Sequence
  Synthetic oligonucleotide
tccggctaatattcttggaccgataaaatg

SEQ ID NO: 408448 - DNA, 30 bp, Artificial Sequence
  Synthetic oligonucleotide
tctgccggggattacccaatgcctaaaatg

SEQ ID NO: 408449 - DNA, 30 bp, Artificial Sequence
  Synthetic oligonucleotide
gtttattcgttagaaagaaattgtaaaatg

SEQ ID NO: 408450 - DNA, 30 bp, Artificial Sequence
  Synthetic oligonucleotide
tagttctccttgctgtcactgaaacaaatg

SEQ ID NO: 408451 - DNA, 30 bp, Artificial Sequence
  Synthetic oligonucleotide
gccacccatcagtgtgctgggccacaaatg

SEQ ID NO: 408452 - DNA, 30 bp, Artificial Sequence
  Synthetic oligonucleotide
gtacctgttgttctacttggttatcaaatg

SEQ ID NO: 408453 - DNA, 30 bp, Artificial Sequence
  Synthetic oligonucleotide
cgcgagtcccccttatggggacaagaaatg

SEQ ID NO: 408454 - DNA, 30 bp, Artificial Sequence
  Synthetic oligonucleotide
aatatgttccagtgctccacaacagaaatg

SEQ ID NO: 408455 - DNA, 30 bp, Artificial Sequence
  Synthetic oligonucleotide
gaaatggcctttctatcacggtacgaaatg

SEQ ID NO: 408456 - DNA, 30 bp, Artificial Sequence
  Synthetic oligonucleotide
taagaaattttgagctagcaaatcgaaatg

SEQ ID NO: 408457 - DNA, 30 bp, Artificial Sequence
  Synthetic oligonucleotide
ttcttcgcgttgctttgtggacctgaaatg

SEQ ID NO: 408458 - DNA, 30 bp, Artificial Sequence
  Synthetic oligonucleotide
aaacaacagtataattctaagtttgaaatg

SEQ ID NO: 408459 - DNA, 30 bp, Artificial Sequence
  Synthetic oligonucleotide
tgaggttcctgcattagtacatactaaatg

SEQ ID NO: 408460 - DNA, 30 bp, Artificial Sequence
  Synthetic oligonucleotide
tttacgcgtacggctcggacgtcctaaatg

SEQ ID NO: 408461 - DNA, 30 bp, Artificial Sequence
  Synthetic oligonucleotide
cggttgacttttggaggctcgtagtaaatg

SEQ ID NO: 408462 - DNA, 30 bp, Artificial Sequence
  Synthetic oligonucleotide
tatagacatcaccttttacatgggtaaatg

SEQ ID NO: 408463 - DNA, 30 bp, Artificial Sequence
  Synthetic oligonucleotide
agtagaaaccgcacaattgcggattaaatg

SEQ ID NO: 408464 - DNA, 30 bp, Artificial Sequence
  Synthetic oligonucleotide
ttcagacatccggaaccagcttattaaatg

SEQ ID NO: 408465 - DNA, 30 bp, Artificial Sequence
  Synthetic oligonucleotide
tgatgcttcttctataatttcatttaaatg

SEQ ID NO: 408466 - DNA, 30 bp, Artificial Sequence
  Synthetic oligonucleotide
gtcctgatatgacacatgggattttaaatg

SEQ ID NO: 408467 - DNA, 30 bp, Artificial Sequence
  Synthetic oligonucleotide
gtatattgtcaggagtggggtgaaacaatg

SEQ ID NO: 408468 - DNA, 30 bp, Artificial Sequence
  Synthetic oligonucleotide
attcaagctgcatcccttttatacacaatg

SEQ ID NO: 408469 - DNA, 30 bp, Artificial Sequence
  Synthetic oligonucleotide
ctgttcgactcttttacaccgagcacaatg

SEQ ID NO: 408470 - DNA, 30 bp, Artificial Sequence
  Synthetic oligonucleotide
aagattttttctttgtctctgctgacaatg

SEQ ID NO: 408471 - DNA, 30 bp, Artificial Sequence
  Synthetic oligonucleotide
cttctctgggatctcggactggttacaatg

SEQ ID NO: 408472 - DNA, 30 bp, Artificial Sequence
  Synthetic oligonucleotide
tcccgcttacgagcacaacctaaaccaatg

SEQ ID NO: 408473 - DNA, 30 bp, Artificial Sequence
  Synthetic oligonucleotide
tataagggaggcgaggcctcggacccaatg

SEQ ID NO: 408474 - DNA, 30 bp, Artificial Sequence
  Synthetic oligonucleotide
agttcacgaccaaaacttgttttcccaatg

SEQ ID NO: 408475 - DNA, 30 bp, Artificial Sequence
  Synthetic oligonucleotide
tgcatgaggcaggtccattctaatccaatg

SEQ ID NO: 408476 - DNA, 30 bp, Artificial Sequence
  Synthetic oligonucleotide
aatctgcaatgctatcatagctatccaatg

SEQ ID NO: 408477 - DNA, 30 bp, Artificial Sequence
  Synthetic oligonucleotide
acctgatccttctcaaggatcagagcaatg

SEQ ID NO: 408478 - DNA, 30 bp, Artificial Sequence
  Synthetic oligonucleotide
atatggttcttgcgggctgctaacgcaatg

SEQ ID NO: 408479 - DNA, 30 bp, Artificial Sequence
  Synthetic oligonucleotide
cattgacttttagtctgcgggaccgcaatg

SEQ ID NO: 408480 - DNA, 30 bp, Artificial Sequence
  Synthetic oligonucleotide
ttggtcccatacgtccactagggcgcaatg

SEQ ID NO: 408481 - DNA, 30 bp, Artificial Sequence
  Synthetic oligonucleotide
ggataaattacctgaacagattaggcaatg

SEQ ID NO: 408482 - DNA, 31 bp, Artificial Sequence
  Synthetic oligonucleotide
gcccttacgtagagaacgaccgcgggcaatg

SEQ ID NO: 408483 - DNA, 30 bp, Artificial Sequence
  Synthetic oligonucleotide
atcctggtagaggcacagcgactggcaatg

SEQ ID NO: 408484 - DNA, 30 bp, Artificial Sequence
  Synthetic oligonucleotide
tctctgattgttaagacctctgaatcaatg

SEQ ID NO: 408485 - DNA, 30 bp, Artificial Sequence
  Synthetic oligonucleotide
ccttcgcttcgaacgagagtggactcaatg

SEQ ID NO: 408486 - DNA, 30 bp, Artificial Sequence
  Synthetic oligonucleotide
ttttacacagctactggaattcgctcaatg

SEQ ID NO: 408487 - DNA, 30 bp, Artificial Sequence
  Synthetic oligonucleotide
tttggaccatgattccgaaacaattcaatg

SEQ ID NO: 408488 - DNA, 30 bp, Artificial Sequence
  Synthetic oligonucleotide
tgagagccaataaaatagcgggtttcaatg

SEQ ID NO: 408489 - DNA, 30 bp, Artificial Sequence
  Synthetic oligonucleotide
ctggcgaattgaacgcataggttttcaatg

SEQ ID NO: 408490 - DNA, 30 bp, Artificial Sequence
  Synthetic oligonucleotide
aagtttgtctaggttagtgttgcaagaatg

SEQ ID NO: 408491 - DNA, 30 bp, Artificial Sequence
  Synthetic oligonucleotide
tgtcttctcaggacggcgaatataagaatg

SEQ ID NO: 408492 - DNA, 30 bp, Artificial Sequence
  Synthetic oligonucleotide
gaaccgtccgtcatcgtggcgctaagaatg

SEQ ID NO: 408493 - DNA, 30 bp, Artificial Sequence
  Synthetic oligonucleotide
ttatcgtcgtggtgtcccggatgcagaatg

SEQ ID NO: 408494 - DNA, 30 bp, Artificial Sequence
  Synthetic oligonucleotide
tcgaccatacatggcgtaatggatagaatg

SEQ ID NO: 408495 - DNA, 30 bp, Artificial Sequence
  Synthetic oligonucleotide
ttcaaacgtaagctttaactgtcacgaatg

SEQ ID NO: 408496 - DNA, 30 bp, Artificial Sequence
  Synthetic oligonucleotide
gacagcactccgtcaaacctttcacgaatg

SEQ ID NO: 408497 - DNA, 30 bp, Artificial Sequence
  Synthetic oligonucleotide
gtcttccgccttggtttgttgggacgaatg

SEQ ID NO: 408498 - DNA, 30 bp, Artificial Sequence
  Synthetic oligonucleotide
agaggcaacattaacctgtcataaggaatg

SEQ ID NO: 408499 - DNA, 30 bp, Artificial Sequence
  Synthetic oligonucleotide
agtaacacggcccgggtgttacaatgaatg

SEQ ID NO: 408500 - DNA, 30 bp, Artificial Sequence
  Synthetic oligonucleotide
ctacacttggccatgactacaagatgaatg

SEQ ID NO: 408501 - DNA, 30 bp, Artificial Sequence
  Synthetic oligonucleotide
ccggtgggtgtgaggggtttatactgaatg

SEQ ID NO: 408502 - DNA, 30 bp, Artificial Sequence
  Synthetic oligonucleotide
ttaaccgtaatggccgtgcacatctgaatg

SEQ ID NO: 408503 - DNA, 30 bp, Artificial Sequence
  Synthetic oligonucleotide
agtccacgaactctccctgacatgtgaatg

SEQ ID NO: 408504 - DNA, 30 bp, Artificial Sequence
  Synthetic oligonucleotide
gccgcctggctccgggtaaggctgtgaatg

SEQ ID NO: 408505 - DNA, 30 bp, Artificial Sequence
  Synthetic oligonucleotide
gggtagtcgcacacatttagcacttgaatg

SEQ ID NO: 408506 - DNA, 30 bp, Artificial Sequence
  Synthetic oligonucleotide
aatcactaaagaccaggtcctagttgaatg

SEQ ID NO: 408507 - DNA, 30 bp, Artificial Sequence
  Synthetic oligonucleotide
ttcctagtcttattacagtacataataatg

SEQ ID NO: 408508 - DNA, 30 bp, Artificial Sequence
  Synthetic oligonucleotide
tctaggagtacgtcagtgcattatataatg

SEQ ID NO: 408509 - DNA, 30 bp, Artificial Sequence
  Synthetic oligonucleotide
tggctcaattgcgatttcagggctataatg

SEQ ID NO: 408510 - DNA, 30 bp, Artificial Sequence
  Synthetic oligonucleotide
actcggccgccttgttgaaaaggtataatg

SEQ ID NO: 408511 - DNA, 30 bp, Artificial Sequence
  Synthetic oligonucleotide
gaatacgtaccggtaagcatttttataatg

SEQ ID NO: 408512 - DNA, 30 bp, Artificial Sequence
  Synthetic oligonucleotide
tccaagtaacgacgtatcacaccactaatg

SEQ ID NO: 408513 - DNA, 30 bp, Artificial Sequence
  Synthetic oligonucleotide
gggatgttcgatactgggagcgcactaatg

SEQ ID NO: 408514 - DNA, 30 bp, Artificial Sequence
  Synthetic oligonucleotide
ttgacgtgactcgagaccagatgactaatg

SEQ ID NO: 408515 - DNA, 30 bp, Artificial Sequence
  Synthetic oligonucleotide
tctattgagcgctgtgcgtggtatctaatg

SEQ ID NO: 408516 - DNA, 30 bp, Artificial Sequence
  Synthetic oligonucleotide
ggtgatgcgtataccttaagccctctaatg

SEQ ID NO: 408517 - DNA, 30 bp, Artificial Sequence
  Synthetic oligonucleotide
taaccaatttgttcacactgaattctaatg

SEQ ID NO: 408518 - DNA, 30 bp, Artificial Sequence
  Synthetic oligonucleotide
tttagtggttcaatggatggacttctaatg

SEQ ID NO: 408519 - DNA, 30 bp, Artificial Sequence
  Synthetic oligonucleotide
ctggaccagccccatcgcacgcgagtaatg

SEQ ID NO: 408520 - DNA, 30 bp, Artificial Sequence
  Synthetic oligonucleotide
ccacccaagttacgggcgataacggtaatg

SEQ ID NO: 408521 - DNA, 30 bp, Artificial Sequence
  Synthetic oligonucleotide
tttggactgtccggtagctatacggtaatg

SEQ ID NO: 408522 - DNA, 30 bp, Artificial Sequence
  Synthetic oligonucleotide
aacctgtgctacggagcgctaggggtaatg

SEQ ID NO: 408523 - DNA, 30 bp, Artificial Sequence
  Synthetic oligonucleotide
gattgaataaggttcgaagaccatgtaatg

SEQ ID NO: 408524 - DNA, 30 bp, Artificial Sequence
  Synthetic oligonucleotide
gatggcggccccacgcgtgcgcgtgtaatg

SEQ ID NO: 408525 - DNA, 30 bp, Artificial Sequence
  Synthetic oligonucleotide
ggggggcactcgtttgttgctgcgttaatg

SEQ ID NO: 408526 - DNA, 30 bp, Artificial Sequence
  Synthetic oligonucleotide
ggtaggtcggttcgctgcggtcatttaatg

SEQ ID NO: 408527 - DNA, 30 bp, Artificial Sequence
  Synthetic oligonucleotide
gggaggcgcaggcggtactgcactttaatg

SEQ ID NO: 408528 - DNA, 30 bp, Artificial Sequence
  Synthetic oligonucleotide
cctcacaacatgacggtactaccgaacatg

SEQ ID NO: 408529 - DNA, 30 bp, Artificial Sequence
  Synthetic oligonucleotide
cgcgcgagcacacctttagtccgtaacatg

SEQ ID NO: 408530 - DNA, 30 bp, Artificial Sequence
  Synthetic oligonucleotide
tttttagaatagcgccgctttggacacatg

SEQ ID NO: 408531 - DNA, 30 bp, Artificial Sequence
  Synthetic oligonucleotide
gtcaagtaaatgggttcttgactgcacatg

SEQ ID NO: 408532 - DNA, 30 bp, Artificial Sequence
  Synthetic oligonucleotide
cgcattcctgggtacccgtcggtgcacatg

SEQ ID NO: 408533 - DNA, 30 bp, Artificial Sequence
  Synthetic oligonucleotide
ctcggtggtcgattggattgtaatcacatg

SEQ ID NO: 408534 - DNA, 30 bp, Artificial Sequence
  Synthetic oligonucleotide
tttataagggagtctcaaaggcttcacatg

SEQ ID NO: 408535 - DNA, 30 bp, Artificial Sequence
  Synthetic oligonucleotide
tccaggcaagggcccatgggtgttcacatg

SEQ ID NO: 408536 - DNA, 30 bp, Artificial Sequence
  Synthetic oligonucleotide
tgtctgaccgtcgtctaatagcgagacatg

SEQ ID NO: 408537 - DNA, 30 bp, Artificial Sequence
  Synthetic oligonucleotide
atgtttagtatatcgatcatgagcgacatg

SEQ ID NO: 408538 - DNA, 30 bp, Artificial Sequence
  Synthetic oligonucleotide
aaatctaggcaggacgagggttcggacatg

SEQ ID NO: 408539 - DNA, 30 bp, Artificial Sequence
  Synthetic oligonucleotide
aggctcctcggtaggcaccttatggacatg

SEQ ID NO: 408540 - DNA, 30 bp, Artificial Sequence
  Synthetic oligonucleotide
gactatcttgttctgatatatttatacatg

SEQ ID NO: 408541 - DNA, 30 bp, Artificial Sequence
  Synthetic oligonucleotide
gtttgatccgcacctaggatgtactacatg

SEQ ID NO: 408542 - DNA, 30 bp, Artificial Sequence
  Synthetic oligonucleotide
ttaaatcctatagagcatctgaaaaccatg

SEQ ID NO: 408543 - DNA, 30 bp, Artificial Sequence
  Synthetic oligonucleotide
acagcctctggctggtttgatagcaccatg

SEQ ID NO: 408544 - DNA, 30 bp, Artificial Sequence
  Synthetic oligonucleotide
tcaatgaggaactctggccattgcaccatg

SEQ ID NO: 408545 - DNA, 30 bp, Artificial Sequence
  Synthetic oligonucleotide
tcagaatcttctttgacgggtcagaccatg

SEQ ID NO: 408546 - DNA, 30 bp, Artificial Sequence
  Synthetic oligonucleotide
aaactagtgtgaagtttaggaccgaccatg

SEQ ID NO: 408547 - DNA, 30 bp, Artificial Sequence
  Synthetic oligonucleotide
gagttcacactgatgtaacagcggaccatg

SEQ ID NO: 408548 - DNA, 30 bp, Artificial Sequence
  Synthetic oligonucleotide
gttaaaactcgtctacatgcgcataccatg

SEQ ID NO: 408549 - DNA, 30 bp, Artificial Sequence
  Synthetic oligonucleotide
gggtgccgaagggagtgttcccgacccatg

SEQ ID NO: 408550 - DNA, 30 bp, Artificial Sequence
  Synthetic oligonucleotide
acgaatatctctcagctctcagatcccatg

SEQ ID NO: 408551 - DNA, 30 bp, Artificial Sequence
  Synthetic oligonucleotide
tccgggccgggtgcagccacggatcccatg

SEQ ID NO: 408552 - DNA, 30 bp, Artificial Sequence
  Synthetic oligonucleotide
ttccatttcgtcaacgaaggcggcgccatg

SEQ ID NO: 408553 - DNA, 30 bp, Artificial Sequence
  Synthetic oligonucleotide
cgttaggatggagggattaagcaggccatg

SEQ ID NO: 408554 - DNA, 30 bp, Artificial Sequence
  Synthetic oligonucleotide
gacgtagggcctcgagcgtagcaggccatg

SEQ ID NO: 408555 - DNA, 30 bp, Artificial Sequence
  Synthetic oligonucleotide
aatctgtgtagaccgctaccggaggccatg

SEQ ID NO: 408556 - DNA, 30 bp, Artificial Sequence
  Synthetic oligonucleotide
ttcaacagaaataggacacgagatgccatg

SEQ ID NO: 408557 - DNA, 30 bp, Artificial Sequence
  Synthetic oligonucleotide
cccggccatgtaacagtagctcgatccatg

SEQ ID NO: 408558 - DNA, 30 bp, Artificial Sequence
  Synthetic oligonucleotide
ttccctgaaagtgattcctgaggctccatg

SEQ ID NO: 408559 - DNA, 30 bp, Artificial Sequence
  Synthetic oligonucleotide
atttaagggcggttggtttatttctccatg

SEQ ID NO: 408560 - DNA, 30 bp, Artificial Sequence
  Synthetic oligonucleotide
tttgacagggacagcaaaatacggtccatg

SEQ ID NO: 408561 - DNA, 30 bp, Artificial Sequence
  Synthetic oligonucleotide
ctttcttttcggctcgtaatgtcttccatg

SEQ ID NO: 408562 - DNA, 30 bp, Artificial Sequence
  Synthetic oligonucleotide
agactcttcttgacacaggttggaagcatg

SEQ ID NO: 408563 - DNA, 30 bp, Artificial Sequence
  Synthetic oligonucleotide
ctagacattagtctaaaacttataagcatg

SEQ ID NO: 408564 - DNA, 30 bp, Artificial Sequence
  Synthetic oligonucleotide
atataattcgtcactcgcgcacccagcatg

SEQ ID NO: 408565 - DNA, 30 bp, Artificial Sequence
  Synthetic oligonucleotide
accagaatactactttattggcctagcatg

SEQ ID NO: 408566 - DNA, 30 bp, Artificial Sequence
  Synthetic oligonucleotide
tttttttgtctccgtcgattctctagcatg

SEQ ID NO: 408567 - DNA, 30 bp, Artificial Sequence
  Synthetic oligonucleotide
gttcattataactttctggagtctagcatg

SEQ ID NO: 408568 - DNA, 30 bp, Artificial Sequence
  Synthetic oligonucleotide
acggaggtcccccgataagtttttagcatg

SEQ ID NO: 408569 - DNA, 30 bp, Artificial Sequence
  Synthetic oligonucleotide
ttcgtataacacgataggtcttcacgcatg

SEQ ID NO: 408570 - DNA, 30 bp, Artificial Sequence
  Synthetic oligonucleotide
tctctccgaggcccaccatattcgcgcatg

SEQ ID NO: 408571 - DNA, 30 bp, Artificial Sequence
  Synthetic oligonucleotide
atcaaacgtgcaccatgcaaacgaggcatg

SEQ ID NO: 408572 - DNA, 30 bp, Artificial Sequence
  Synthetic oligonucleotide
tagggaaggcgggggctaattgacggcatg

SEQ ID NO: 408573 - DNA, 30 bp, Artificial Sequence
  Synthetic oligonucleotide
cgggggcgcgtgcgaagtagattcggcatg

SEQ ID NO: 408574 - DNA, 30 bp, Artificial Sequence
  Synthetic oligonucleotide
cctattcctcactggataggcgggggcatg

SEQ ID NO: 408575 - DNA, 31 bp, Artificial Sequence
  Synthetic oligonucleotide
gcctatatgccagcagctttctaatggcatg

SEQ ID NO: 408576 - DNA, 30 bp, Artificial Sequence
  Synthetic oligonucleotide
gctgtctacgggccaggtggcactggcatg

SEQ ID NO: 408577 - DNA, 30 bp, Artificial Sequence
  Synthetic oligonucleotide
cagcaattctccggccagcaatttggcatg

SEQ ID NO: 408578 - DNA, 30 bp, Artificial Sequence
  Synthetic oligonucleotide
taaatatgatctgaaatatgttttggcatg

SEQ ID NO: 408579 - DNA, 30 bp, Artificial Sequence
  Synthetic oligonucleotide
atccataatacatggtattcaccatgcatg

SEQ ID NO: 408580 - DNA, 30 bp, Artificial Sequence
  Synthetic oligonucleotide
gcagaccttcccaagcttcgtgggtgcatg

SEQ ID NO: 408581 - DNA, 30 bp, Artificial Sequence
  Synthetic oligonucleotide
gtttgcagtctacaagaagactggtgcatg

SEQ ID NO: 408582 - DNA, 30 bp, Artificial Sequence
  Synthetic oligonucleotide
taatacgttatattatagaagctgtgcatg

SEQ ID NO: 408583 - DNA, 30 bp, Artificial Sequence
  Synthetic oligonucleotide
atgattgtcgtacgctcagtgtattgcatg

SEQ ID NO: 408584 - DNA, 30 bp, Artificial Sequence
  Synthetic oligonucleotide
agctagtagacgtaacttgcttcttgcatg

SEQ ID NO: 408585 - DNA, 30 bp, Artificial Sequence
  Synthetic oligonucleotide
taatgtcatgatgtagcaacggaaatcatg

SEQ ID NO: 408586 - DNA, 30 bp, Artificial Sequence
  Synthetic oligonucleotide
gagttttaacttcagtagcaatgaatcatg

SEQ ID NO: 408587 - DNA, 30 bp, Artificial Sequence
  Synthetic oligonucleotide
ttttgcacaggcgaacagttggtaatcatg

SEQ ID NO: 408588 - DNA, 30 bp, Artificial Sequence
  Synthetic oligonucleotide
aacgtaagtacacttgcagatggcatcatg

SEQ ID NO: 408589 - DNA, 30 bp, Artificial Sequence
  Synthetic oligonucleotide
tacgtacactgagggatccataagatcatg

SEQ ID NO: 408590 - DNA, 30 bp, Artificial Sequence
  Synthetic oligonucleotide
gcaaatgattgtgacggacctacgatcatg

SEQ ID NO: 408591 - DNA, 30 bp, Artificial Sequence
  Synthetic oligonucleotide
gaggaggcaggagaccgggcaaggatcatg

SEQ ID NO: 408592 - DNA, 30 bp, Artificial Sequence
  Synthetic oligonucleotide
agtgtcctttagacggttgtctatatcatg

SEQ ID NO: 408593 - DNA, 30 bp, Artificial Sequence
  Synthetic oligonucleotide
ggtttaccgtcctagtcattacctatcatg

SEQ ID NO: 408594 - DNA, 30 bp, Artificial Sequence
  Synthetic oligonucleotide
tctgttcagatcgactatattccactcatg

SEQ ID NO: 408595 - DNA, 30 bp, Artificial Sequence
  Synthetic oligonucleotide
gtcgtatgactacaacgccaggcactcatg

SEQ ID NO: 408596 - DNA, 30 bp, Artificial Sequence
  Synthetic oligonucleotide
tgtcattcgtgtacagttgatctactcatg

SEQ ID NO: 408597 - DNA, 30 bp, Artificial Sequence
  Synthetic oligonucleotide
tgagtggggtccaattataaaaacctcatg

SEQ ID NO: 408598 - DNA, 30 bp, Artificial Sequence
  Synthetic oligonucleotide
tttgtgaaagggttcggaaagatcctcatg

SEQ ID NO: 408599 - DNA, 30 bp, Artificial Sequence
  Synthetic oligonucleotide
tccctgagagtacagtgatatcgtctcatg

SEQ ID NO: 408600 - DNA, 30 bp, Artificial Sequence
  Synthetic oligonucleotide
gattccagccatacaacgtaacaagtcatg

SEQ ID NO: 408601 - DNA, 30 bp, Artificial Sequence
  Synthetic oligonucleotide
gagtttccagccaacgtgcgccgagtcatg

SEQ ID NO: 408602 - DNA, 30 bp, Artificial Sequence
  Synthetic oligonucleotide
atgaggctctatgcgccggccctggtcatg

SEQ ID NO: 408603 - DNA, 30 bp, Artificial Sequence
  Synthetic oligonucleotide
agtgacgctgagtattagttgggattcatg

SEQ ID NO: 408604 - DNA, 30 bp, Artificial Sequence
  Synthetic oligonucleotide
gatttagccctagagtcaccatacttcatg

SEQ ID NO: 408605 - DNA, 30 bp, Artificial Sequence
  Synthetic oligonucleotide
aaattcccctagtcagaatggggcttcatg

SEQ ID NO: 408606 - DNA, 30 bp, Artificial Sequence
  Synthetic oligonucleotide
ttactttgacttccgcctattgtcttcatg

SEQ ID NO: 408607 - DNA, 30 bp, Artificial Sequence
  Synthetic oligonucleotide
gttaactgccctgaggtgcgcatgttcatg

SEQ ID NO: 408608 - DNA, 30 bp, Artificial Sequence
  Synthetic oligonucleotide
tgaatgtcttatcctagacggaatttcatg

SEQ ID NO: 408609 - DNA, 30 bp, Artificial Sequence
  Synthetic oligonucleotide
accggattgaggtcaaattggtgtttcatg

SEQ ID NO: 408610 - DNA, 30 bp, Artificial Sequence
  Synthetic oligonucleotide
ttggcacgagttgtggtgttcattttcatg

SEQ ID NO: 408611 - DNA, 30 bp, Artificial Sequence
  Synthetic oligonucleotide
gggttctctattgaacatccccaaaagatg

SEQ ID NO: 408612 - DNA, 30 bp, Artificial Sequence
  Synthetic oligonucleotide
tccagattccattcgggttgggtaaagatg

SEQ ID NO: 408613 - DNA, 30 bp, Artificial Sequence
  Synthetic oligonucleotide
tggttggacgacagctctctgtccaagatg

SEQ ID NO: 408614 - DNA, 30 bp, Artificial Sequence
  Synthetic oligonucleotide
atcccacggtataattggcaggtcaagatg

SEQ ID NO: 408615 - DNA, 30 bp, Artificial Sequence
  Synthetic oligonucleotide
gggcggtcgggtacacgcgcttttaagatg

SEQ ID NO: 408616 - DNA, 31 bp, Artificial Sequence
  Synthetic oligonucleotide
atctatttgtgggggaggacttcaacagatg

SEQ ID NO: 408617 - DNA, 30 bp, Artificial Sequence
  Synthetic oligonucleotide
attgtggggaaaagcatgggtgcacagatg

SEQ ID NO: 408618 - DNA, 30 bp, Artificial Sequence
  Synthetic oligonucleotide
tgcaatagagattccattgacagggagatg

SEQ ID NO: 408619 - DNA, 30 bp, Artificial Sequence
  Synthetic oligonucleotide
agcagcgaccctttaaaggacgtggagatg

SEQ ID NO: 408620 - DNA, 30 bp, Artificial Sequence
  Synthetic oligonucleotide
aaactctgagtcccggttcaaaatgagatg

SEQ ID NO: 408621 - DNA, 30 bp, Artificial Sequence
  Synthetic oligonucleotide
acatccatctggccacagtgttatgagatg

SEQ ID NO: 408622 - DNA, 30 bp, Artificial Sequence
  Synthetic oligonucleotide
tttgccaaacgtggtaggaatctctagatg

SEQ ID NO: 408623 - DNA, 30 bp, Artificial Sequence
  Synthetic oligonucleotide
agattcgtagggagaaagccgtagtagatg

SEQ ID NO: 408624 - DNA, 30 bp, Artificial Sequence
  Synthetic oligonucleotide
tattagtaaatacctggagagttgtagatg

SEQ ID NO: 408625 - DNA, 29 bp, Artificial Sequence
  Synthetic oligonucleotide
tcttgtttagggactcggccgattagatg

SEQ ID NO: 408626 - DNA, 30 bp, Artificial Sequence
  Synthetic oligonucleotide
taccccacgggtgattcatacccttagatg

SEQ ID NO: 408627 - DNA, 30 bp, Artificial Sequence
  Synthetic oligonucleotide
ctattggggcactagcgcaggctttagatg

SEQ ID NO: 408628 - DNA, 30 bp, Artificial Sequence
  Synthetic oligonucleotide
atactattggcggcaacacaagtttagatg

SEQ ID NO: 408629 - DNA, 30 bp, Artificial Sequence
  Synthetic oligonucleotide
cctgtttagaatgttaatgacttttagatg

SEQ ID NO: 408630 - DNA, 30 bp, Artificial Sequence
  Synthetic oligonucleotide
gcctagcactcttcgctcgctttaacgatg

SEQ ID NO: 408631 - DNA, 30 bp, Artificial Sequence
  Synthetic oligonucleotide
tctcacgggcacaaagtgatagacacgatg

SEQ ID NO: 408632 - DNA, 30 bp, Artificial Sequence
  Synthetic oligonucleotide
gactaataattgactaaatgcggcacgatg

SEQ ID NO: 408633 - DNA, 30 bp, Artificial Sequence
  Synthetic oligonucleotide
aggacgcagtaaagtattcggggcacgatg

SEQ ID NO: 408634 - DNA, 30 bp, Artificial Sequence
  Synthetic oligonucleotide
attagatgtcacgaatcgaccaagacgatg

SEQ ID NO: 408635 - DNA, 30 bp, Artificial Sequence
  Synthetic oligonucleotide
ctagggtctgtttgccttatacagacgatg

SEQ ID NO: 408636 - DNA, 30 bp, Artificial Sequence
  Synthetic oligonucleotide
tgactttcgacaggaggggcacacccgatg

SEQ ID NO: 408637 - DNA, 30 bp, Artificial Sequence
  Synthetic oligonucleotide
tgaaagctttggcgctcatcagacccgatg

SEQ ID NO: 408638 - DNA, 30 bp, Artificial Sequence
  Synthetic oligonucleotide
gcatttccagataccactcttggcccgatg

SEQ ID NO: 408639 - DNA, 30 bp, Artificial Sequence
  Synthetic oligonucleotide
taaccgtgagattttgattaggcgccgatg

SEQ ID NO: 408640 - DNA, 30 bp, Artificial Sequence
  Synthetic oligonucleotide
tctcaactaataatagttttagggccgatg

SEQ ID NO: 408641 - DNA, 30 bp, Artificial Sequence
  Synthetic oligonucleotide
gtcggtcgcaagcgcagcgagtgcgcgatg

SEQ ID NO: 408642 - DNA, 30 bp, Artificial Sequence
  Synthetic oligonucleotide
agcgacgcaatgtgcactttactcgcgatg

SEQ ID NO: 408643 - DNA, 30 bp, Artificial Sequence
  Synthetic oligonucleotide
ggtgctactgggaccagtataacggcgatg

SEQ ID NO: 408644 - DNA, 30 bp, Artificial Sequence
  Synthetic oligonucleotide
ggcatatgggcatttacatccggggcgatg

SEQ ID NO: 408645 - DNA, 30 bp, Artificial Sequence
  Synthetic oligonucleotide
cgaatactagtgcccgcaacgcgtgcgatg

SEQ ID NO: 408646 - DNA, 30 bp, Artificial Sequence
  Synthetic oligonucleotide
ttaaaatatctgcatcatggtggtgcgatg

SEQ ID NO: 408647 - DNA, 30 bp, Artificial Sequence
  Synthetic oligonucleotide
gctttaggcaggcatatctagagctcgatg

SEQ ID NO: 408648 - DNA, 30 bp, Artificial Sequence
  Synthetic oligonucleotide
ccaatgatggtcctattgcattagtcgatg

SEQ ID NO: 408649 - DNA, 30 bp, Artificial Sequence
  Synthetic oligonucleotide
ccaattcttttagtacgtgaaaggtcgatg

SEQ ID NO: 408650 - DNA, 30 bp, Artificial Sequence
  Synthetic oligonucleotide
aactttgaccagtttcactatgtttcgatg

SEQ ID NO: 408651 - DNA, 30 bp, Artificial Sequence
  Synthetic oligonucleotide
gtagtgagctgccagtcgggaggaaggatg

SEQ ID NO: 408652 - DNA, 30 bp, Artificial Sequence
  Synthetic oligonucleotide
tctttccgtggtggcactctactaaggatg

SEQ ID NO: 408653 - DNA, 30 bp, Artificial Sequence
  Synthetic oligonucleotide
gccgtctgcttttagagactaagcaggatg

SEQ ID NO: 408654 - DNA, 30 bp, Artificial Sequence
  Synthetic oligonucleotide
gagcttgtggtttggattcaacgcaggatg

SEQ ID NO: 408655 - DNA, 30 bp, Artificial Sequence
  Synthetic oligonucleotide
ccacggttcagtgctttatatttcaggatg

SEQ ID NO: 408656 - DNA, 30 bp, Artificial Sequence
  Synthetic oligonucleotide
ctctaatcctcgcatgtcgtgcagaggatg

SEQ ID NO: 408657 - DNA, 30 bp, Artificial Sequence
  Synthetic oligonucleotide
acaatattttagtaactattcaataggatg

SEQ ID NO: 408658 - DNA, 30 bp, Artificial Sequence
  Synthetic oligonucleotide
ggtgccctggttcactgcccagaacggatg

SEQ ID NO: 408659 - DNA, 30 bp, Artificial Sequence
  Synthetic oligonucleotide
ttcattccgaggtttccgagcgaacggatg

SEQ ID NO: 408660 - DNA, 30 bp, Artificial Sequence
  Synthetic oligonucleotide
ccaggactcgtatatccgtaaccacggatg

SEQ ID NO: 408661 - DNA, 30 bp, Artificial Sequence
  Synthetic oligonucleotide
tctcttaatccgtccaacttggtacggatg

SEQ ID NO: 408662 - DNA, 30 bp, Artificial Sequence
  Synthetic oligonucleotide
cggggctacgcccgatttaggccgcggatg

SEQ ID NO: 408663 - DNA, 30 bp, Artificial Sequence
  Synthetic oligonucleotide
ttatttaccactgaaacggttgaagggatg

SEQ ID NO: 408664 - DNA, 30 bp, Artificial Sequence
  Synthetic oligonucleotide
ccgcctgggtctacagtaaacctagggatg

SEQ ID NO: 408665 - DNA, 30 bp, Artificial Sequence
  Synthetic oligonucleotide
tccctttgagatccgcccgagcaggggatg

SEQ ID NO: 408666 - DNA, 30 bp, Artificial Sequence
  Synthetic oligonucleotide
atgtatatttccgggacacgttaggggatg

SEQ ID NO: 408667 - DNA, 30 bp, Artificial Sequence
  Synthetic oligonucleotide
gcagtacgtatcaagtttattcatgggatg

SEQ ID NO: 408668 - DNA, 30 bp, Artificial Sequence
  Synthetic oligonucleotide
gaatttgtatgagacggtctctctgggatg

SEQ ID NO: 408669 - DNA, 30 bp, Artificial Sequence
  Synthetic oligonucleotide
gagaggagacggcacaacttgaaatggatg

SEQ ID NO: 408670 - DNA, 30 bp, Artificial Sequence
  Synthetic oligonucleotide
gggtcttaaacgcgggcgtctagatggatg

SEQ ID NO: 408671 - DNA, 30 bp, Artificial Sequence
  Synthetic oligonucleotide
agtttgctgggtccagccctcaagtggatg

SEQ ID NO: 408672 - DNA, 30 bp, Artificial Sequence
  Synthetic oligonucleotide
aaagttacgagcgttacgcgggcttggatg

SEQ ID NO: 408673 - DNA, 30 bp, Artificial Sequence
  Synthetic oligonucleotide
acttatcttcagagtgggcccatttggatg

SEQ ID NO: 408674 - DNA, 30 bp, Artificial Sequence
  Synthetic oligonucleotide
taatatcctcagacgagccagcaaatgatg

SEQ ID NO: 408675 - DNA, 30 bp, Artificial Sequence
  Synthetic oligonucleotide
aacgtaaaaggtggcttaggataaatgatg

SEQ ID NO: 408676 - DNA, 30 bp, Artificial Sequence
  Synthetic oligonucleotide
catattggttagattgtttgtgggatgatg

SEQ ID NO: 408677 - DNA, 30 bp, Artificial Sequence
  Synthetic oligonucleotide
gagctcaggatttgcgcccatgatatgatg

SEQ ID NO: 408678 - DNA, 30 bp, Artificial Sequence
  Synthetic oligonucleotide
gcgctgaaaaaacgtcataattatatgatg

SEQ ID NO: 408679 - DNA, 30 bp, Artificial Sequence
  Synthetic oligonucleotide
tgtatctaagaactggttacctctatgatg

SEQ ID NO: 408680 - DNA, 30 bp, Artificial Sequence
  Synthetic oligonucleotide
ttcctgaccaggtaggtagtccccctgatg

SEQ ID NO: 408681 - DNA, 30 bp, Artificial Sequence
  Synthetic oligonucleotide
aacgcggggaaccaacccccgcgcctgatg

SEQ ID NO: 408682 - DNA, 30 bp, Artificial Sequence
  Synthetic oligonucleotide
ctcaaacgaccggggagttgactcctgatg

SEQ ID NO: 408683 - DNA, 30 bp, Artificial Sequence
  Synthetic oligonucleotide
tcaaatcatagggcatcggtgtctctgatg

SEQ ID NO: 408684 - DNA, 30 bp, Artificial Sequence
  Synthetic oligonucleotide
tctataactaatgtattgaggacagtgatg

SEQ ID NO: 408685 - DNA, 30 bp, Artificial Sequence
  Synthetic oligonucleotide
tgctatgagtgaagtagcaggtacttgatg

SEQ ID NO: 408686 - DNA, 30 bp, Artificial Sequence
  Synthetic oligonucleotide
attccatcaaggtaaacggtgatcttgatg

SEQ ID NO: 408687 - DNA, 30 bp, Artificial Sequence
  Synthetic oligonucleotide
acggccaattcggggaccgagctgttgatg

SEQ ID NO: 408688 - DNA, 30 bp, Artificial Sequence
  Synthetic oligonucleotide
ggttggagaggcttcttccagttgttgatg

SEQ ID NO: 408689 - DNA, 30 bp, Artificial Sequence
  Synthetic oligonucleotide
agtaaaccttcgaaatgaggaagtttgatg

SEQ ID NO: 408690 - DNA, 30 bp, Artificial Sequence
  Synthetic oligonucleotide
ctgcgtaatagcaataagcagggaaatatg

SEQ ID NO: 408691 - DNA, 30 bp, Artificial Sequence
  Synthetic oligonucleotide
cgttgtatcaactacatgatcagcaatatg

SEQ ID NO: 408692 - DNA, 30 bp, Artificial Sequence
  Synthetic oligonucleotide
ggcttaacggagtgtgttttttagaatatg

SEQ ID NO: 408693 - DNA, 30 bp, Artificial Sequence
  Synthetic oligonucleotide
acgcagtattatttagatgaagataatatg

SEQ ID NO: 408694 - DNA, 30 bp, Artificial Sequence
  Synthetic oligonucleotide
acacgggtctgcctttccaaatgtaatatg

SEQ ID NO: 408695 - DNA, 30 bp, Artificial Sequence
  Synthetic oligonucleotide
gtacgggctgcgcgcactattcgacatatg

SEQ ID NO: 408696 - DNA, 30 bp, Artificial Sequence
  Synthetic oligonucleotide
tttgcgcaacccctataggagtaccatatg

SEQ ID NO: 408697 - DNA, 30 bp, Artificial Sequence
  Synthetic oligonucleotide
gttgcatctaatcttcggaaaatccatatg

SEQ ID NO: 408698 - DNA, 30 bp, Artificial Sequence
  Synthetic oligonucleotide
aatcggtcgttatgacatatcgagcatatg

SEQ ID NO: 408699 - DNA, 30 bp, Artificial Sequence
  Synthetic oligonucleotide
aaccaggtcctgacactcacccgtcatatg

SEQ ID NO: 408700 - DNA, 30 bp, Artificial Sequence
  Synthetic oligonucleotide
ttcacctcacagacacgttggtcagatatg

SEQ ID NO: 408701 - DNA, 30 bp, Artificial Sequence
  Synthetic oligonucleotide
ttgcataattgcctcatgcccatagatatg

SEQ ID NO: 408702 - DNA, 30 bp, Artificial Sequence
  Synthetic oligonucleotide
ctaaatgacttatattgtgctgtagatatg

SEQ ID NO: 408703 - DNA, 30 bp, Artificial Sequence
  Synthetic oligonucleotide
agtgtccactaaatttttccaagtgatatg

SEQ ID NO: 408704 - DNA, 30 bp, Artificial Sequence
  Synthetic oligonucleotide
ggtgtgatcgtgtcgtttgtcccatatatg

SEQ ID NO: 408705 - DNA, 30 bp, Artificial Sequence
  Synthetic oligonucleotide
gagtgcccctagaaaaaccttagatatatg

SEQ ID NO: 408706 - DNA, 30 bp, Artificial Sequence
  Synthetic oligonucleotide
tcatggataagctttgcaacatcctatatg

SEQ ID NO: 408707 - DNA, 30 bp, Artificial Sequence
  Synthetic oligonucleotide
cctaccaatagacgtatcagccgctatatg

SEQ ID NO: 408708 - DNA, 30 bp, Artificial Sequence
  Synthetic oligonucleotide
acagggtacaatgaagccgcggcgtatatg

SEQ ID NO: 408709 - DNA, 30 bp, Artificial Sequence
  Synthetic oligonucleotide
gaattaaaatctaatatctgacggtatatg

SEQ ID NO: 408710 - DNA, 30 bp, Artificial Sequence
  Synthetic oligonucleotide
cggttatcgagctagtagtagatgtatatg

SEQ ID NO: 408711 - DNA, 30 bp, Artificial Sequence
  Synthetic oligonucleotide
ttataagctgcgccgccggtaaattatatg

SEQ ID NO: 408712 - DNA, 30 bp, Artificial Sequence
  Synthetic oligonucleotide
caaagtgatagagacagtttcggttatatg

SEQ ID NO: 408713 - DNA, 30 bp, Artificial Sequence
  Synthetic oligonucleotide
tgagtgccggacgtatacttattttatatg

SEQ ID NO: 408714 - DNA, 30 bp, Artificial Sequence
  Synthetic oligonucleotide
ttcgaccgtcgataacaagtagagactatg

SEQ ID NO: 408715 - DNA, 30 bp, Artificial Sequence
  Synthetic oligonucleotide
acttcatagaagggcggctgctcgactatg

SEQ ID NO: 408716 - DNA, 30 bp, Artificial Sequence
  Synthetic oligonucleotide
gtgaatttgcacccctgtgtagggactatg

SEQ ID NO: 408717 - DNA, 30 bp, Artificial Sequence
  Synthetic oligonucleotide
tgtgacaaatccggtacttaccatactatg

SEQ ID NO: 408718 - DNA, 30 bp, Artificial Sequence
  Synthetic oligonucleotide
gccacctcctaggctcaggttcaccctatg

SEQ ID NO: 408719 - DNA, 30 bp, Artificial Sequence
  Synthetic oligonucleotide
tctgatatttcggtgttacataggcctatg

SEQ ID NO: 408720 - DNA, 30 bp, Artificial Sequence
  Synthetic oligonucleotide
cgtgctcttagttgagttaacggagctatg

SEQ ID NO: 408721 - DNA, 30 bp, Artificial Sequence
  Synthetic oligonucleotide
ctccttgttgttggtaggggggtagctatg

SEQ ID NO: 408722 - DNA, 30 bp, Artificial Sequence
  Synthetic oligonucleotide
tatccagtgggaaagccccgctgcgctatg

SEQ ID NO: 408723 - DNA, 30 bp, Artificial Sequence
  Synthetic oligonucleotide
cagacacggagactatttatgcaggctatg

SEQ ID NO: 408724 - DNA, 30 bp, Artificial Sequence
  Synthetic oligonucleotide
gtaccttgcgcagagggagctttggctatg

SEQ ID NO: 408725 - DNA, 30 bp, Artificial Sequence
  Synthetic oligonucleotide
gagtaatctgtcacagacgctactgctatg

SEQ ID NO: 408726 - DNA, 30 bp, Artificial Sequence
  Synthetic oligonucleotide
aactgcaacaaggatagcacgcaatctatg

SEQ ID NO: 408727 - DNA, 30 bp, Artificial Sequence
  Synthetic oligonucleotide
cctgcatgcggccgtgcgccctggtctatg

SEQ ID NO: 408728 - DNA, 30 bp, Artificial Sequence
  Synthetic oligonucleotide
tagcgaaatagtccctgtattcgttctatg

SEQ ID NO: 408729 - DNA, 30 bp, Artificial Sequence
  Synthetic oligonucleotide
tatctgcgtttgcggataccaggttctatg

SEQ ID NO: 408730 - DNA, 30 bp, Artificial Sequence
  Synthetic oligonucleotide
gggacaataagatcggggatcatttctatg

SEQ ID NO: 408731 - DNA, 30 bp, Artificial Sequence
  Synthetic oligonucleotide
atccggcatacctggggctacctttctatg

SEQ ID NO: 408732 - DNA, 30 bp, Artificial Sequence
  Synthetic oligonucleotide
ccgcctgtcgctctcagtaaataaagtatg

SEQ ID NO: 408733 - DNA, 30 bp, Artificial Sequence
  Synthetic oligonucleotide
ggtctgtacagcactgactactaaagtatg

SEQ ID NO: 408734 - DNA, 30 bp, Artificial Sequence
  Synthetic oligonucleotide
taagaggttcgtgtcagacatacaagtatg

SEQ ID NO: 408735 - DNA, 30 bp, Artificial Sequence
  Synthetic oligonucleotide
gtctgcgtgacgctaaggctccagagtatg

SEQ ID NO: 408736 - DNA, 30 bp, Artificial Sequence
  Synthetic oligonucleotide
gtaagtcgcggattctgcgcgaggagtatg

SEQ ID NO: 408737 - DNA, 29 bp, Artificial Sequence
  Synthetic oligonucleotide
ccttcggtcagagaacgctagggagtatg

SEQ ID NO: 408738 - DNA, 30 bp, Artificial Sequence
  Synthetic oligonucleotide
ataacccgacacgtactatgcgtgagtatg

SEQ ID NO: 408739 - DNA, 30 bp, Artificial Sequence
  Synthetic oligonucleotide
agcacaccggcgtaccctatacgtagtatg

SEQ ID NO: 408740 - DNA, 30 bp, Artificial Sequence
  Synthetic oligonucleotide
ttactcgataacatacgttaaattagtatg

SEQ ID NO: 408741 - DNA, 30 bp, Artificial Sequence
  Synthetic oligonucleotide
taactcagttcaaggagtataattagtatg

SEQ ID NO: 408742 - DNA, 30 bp, Artificial Sequence
  Synthetic oligonucleotide
cagcacgtagataggtcatctcgacgtatg

SEQ ID NO: 408743 - DNA, 30 bp, Artificial Sequence
  Synthetic oligonucleotide
taagtagacgtcagcttatgcgtgcgtatg

SEQ ID NO: 408744 - DNA, 30 bp, Artificial Sequence
  Synthetic oligonucleotide
ttgtgctctcatgatatcctgaatcgtatg

SEQ ID NO: 408745 - DNA, 30 bp, Artificial Sequence
  Synthetic oligonucleotide
atgaataagcaaggaggtatagttcgtatg

SEQ ID NO: 408746 - DNA, 30 bp, Artificial Sequence
  Synthetic oligonucleotide
ctaacgatcttctgagaagttcgaggtatg

SEQ ID NO: 408747 - DNA, 30 bp, Artificial Sequence
  Synthetic oligonucleotide
gtgatcatttccgtgattctgattggtatg

SEQ ID NO: 408748 - DNA, 30 bp, Artificial Sequence
  Synthetic oligonucleotide
gaaagtgtgtccgctaaacagccatgtatg

SEQ ID NO: 408749 - DNA, 30 bp, Artificial Sequence
  Synthetic oligonucleotide
ccaacgtccccaacacggcttttatgtatg

SEQ ID NO: 408750 - DNA, 30 bp, Artificial Sequence
  Synthetic oligonucleotide
agacgtggtatgcacaagaggtcctgtatg

SEQ ID NO: 408751 - DNA, 30 bp, Artificial Sequence
  Synthetic oligonucleotide
gaatgtaactatttccacttcaagtgtatg

SEQ ID NO: 408752 - DNA, 30 bp, Artificial Sequence
  Synthetic oligonucleotide
ccttctacaggtgagtgagtgacgtgtatg

SEQ ID NO: 408753 - DNA, 30 bp, Artificial Sequence
  Synthetic oligonucleotide
cgtacctctgaaaacgtgctatgttgtatg

SEQ ID NO: 408754 - DNA, 30 bp, Artificial Sequence
  Synthetic oligonucleotide
agctctcggaaggtcgcatgcgtttgtatg

SEQ ID NO: 408755 - DNA, 30 bp, Artificial Sequence
  Synthetic oligonucleotide
atagtcgggcgtgggtgcccacacattatg

SEQ ID NO: 408756 - DNA, 30 bp, Artificial Sequence
  Synthetic oligonucleotide
gactttcaactatgttgatcacacattatg

SEQ ID NO: 408757 - DNA, 30 bp, Artificial Sequence
  Synthetic oligonucleotide
tcgtcaagcagtccataatggatcattatg

SEQ ID NO: 408758 - DNA, 30 bp, Artificial Sequence
  Synthetic oligonucleotide
acaagcatgttggaaacggctctcattatg

SEQ ID NO: 408759 - DNA, 30 bp, Artificial Sequence
  Synthetic oligonucleotide
tattttgaccgttaaaaggataagattatg

SEQ ID NO: 408760 - DNA, 30 bp, Artificial Sequence
  Synthetic oligonucleotide
aaaccggtgacgaacgcaggtctgattatg

SEQ ID NO: 408761 - DNA, 30 bp, Artificial Sequence
  Synthetic oligonucleotide
gcccttttgggtaccaaaacatggcttatg

SEQ ID NO: 408762 - DNA, 30 bp, Artificial Sequence
  Synthetic oligonucleotide
ataataccaaatatgtctttgaatcttatg

SEQ ID NO: 408763 - DNA, 30 bp, Artificial Sequence
  Synthetic oligonucleotide
tgtctatgcagacgagtaacacatcttatg

SEQ ID NO: 408764 - DNA, 30 bp, Artificial Sequence
  Synthetic oligonucleotide
ttactgtcttgatcggttccggttcttatg

SEQ ID NO: 408765 - DNA, 30 bp, Artificial Sequence
  Synthetic oligonucleotide
ttgacatctcaagagaccagcccggttatg

SEQ ID NO: 408766 - DNA, 30 bp, Artificial Sequence
  Synthetic oligonucleotide
cccttgccgaagggctttcatttggttatg

SEQ ID NO: 408767 - DNA, 30 bp, Artificial Sequence
  Synthetic oligonucleotide
cctaacaggtttcttcgcccggaatttatg

SEQ ID NO: 408768 - DNA, 30 bp, Artificial Sequence
  Synthetic oligonucleotide
agaacccgcagttgtaccaccatatttatg

SEQ ID NO: 408769 - DNA, 30 bp, Artificial Sequence
  Synthetic oligonucleotide
atctcgggaccccggtatgtgtactttatg

SEQ ID NO: 408770 - DNA, 30 bp, Artificial Sequence
  Synthetic oligonucleotide
atcaatctcgctataataacaggctttatg

SEQ ID NO: 408771 - DNA, 30 bp, Artificial Sequence
  Synthetic oligonucleotide
atcagctatcgcggttgagcgacttttatg

SEQ ID NO: 408772 - DNA, 30 bp, Artificial Sequence
  Synthetic oligonucleotide
ctggggggataggtttgtgaccgttttatg

SEQ ID NO: 408773 - DNA, 30 bp, Artificial Sequence
  Synthetic oligonucleotide
cacggacacgaccggctgggatcgaaactg

SEQ ID NO: 408774 - DNA, 30 bp, Artificial Sequence
  Synthetic oligonucleotide
tataagctaccgcgtgagtaaaggaaactg

SEQ ID NO: 408775 - DNA, 30 bp, Artificial Sequence
  Synthetic oligonucleotide
ataggtgcacaacccgaatgggctaaactg

SEQ ID NO: 408776 - DNA, 30 bp, Artificial Sequence
  Synthetic oligonucleotide
cagaagcacacagatgttatagttaaactg

SEQ ID NO: 408777 - DNA, 30 bp, Artificial Sequence
  Synthetic oligonucleotide
gaccttgagtccttgcagcactttaaactg

SEQ ID NO: 408778 - DNA, 30 bp, Artificial Sequence
  Synthetic oligonucleotide
actattttcttaggcactctgaaacaactg

SEQ ID NO: 408779 - DNA, 30 bp, Artificial Sequence
  Synthetic oligonucleotide
ttcttgatttgggacggaataacacaactg

SEQ ID NO: 408780 - DNA, 30 bp, Artificial Sequence
  Synthetic oligonucleotide
ctatcccaagttactagatcatagcaactg

SEQ ID NO: 408781 - DNA, 30 bp, Artificial Sequence
  Synthetic oligonucleotide
cgaatctttagcaatatattcctgcaactg

SEQ ID NO: 408782 - DNA, 30 bp, Artificial Sequence
  Synthetic oligonucleotide
aaaagtggtgggggtcctactttgcaactg

SEQ ID NO: 408783 - DNA, 30 bp, Artificial Sequence
  Synthetic oligonucleotide
gtaaattcagtaggcctggcatgtcaactg

SEQ ID NO: 408784 - DNA, 30 bp, Artificial Sequence
  Synthetic oligonucleotide
ttcttatcacacttgggcccgggagaactg

SEQ ID NO: 408785 - DNA, 30 bp, Artificial Sequence
  Synthetic oligonucleotide
tacatttcgtagcattacccccacgaactg

SEQ ID NO: 408786 - DNA, 30 bp, Artificial Sequence
  Synthetic oligonucleotide
tgaccactgacgatcccgggcggggaactg

SEQ ID NO: 408787 - DNA, 30 bp, Artificial Sequence
  Synthetic oligonucleotide
ggccgagacgcaggaattagtgtggaactg

SEQ ID NO: 408788 - DNA, 30 bp, Artificial Sequence
  Synthetic oligonucleotide
aactagtttgggacgattatgaatgaactg

SEQ ID NO: 408789 - DNA, 30 bp, Artificial Sequence
  Synthetic oligonucleotide
gcacgccccatacttcgaaagtatgaactg

SEQ ID NO: 408790 - DNA, 30 bp, Artificial Sequence
  Synthetic oligonucleotide
ttttatctacaggcccacgtacctgaactg

SEQ ID NO: 408791 - DNA, 30 bp, Artificial Sequence
  Synthetic oligonucleotide
ggttgatgtcagaaggagagctaataactg

SEQ ID NO: 408792 - DNA, 30 bp, Artificial Sequence
  Synthetic oligonucleotide
gttgtcacgtacgcaactggtacataactg

SEQ ID NO: 408793 - DNA, 30 bp, Artificial Sequence
  Synthetic oligonucleotide
gcctagtgtgaatcgcacaatagataactg

SEQ ID NO: 408794 - DNA, 30 bp, Artificial Sequence
  Synthetic oligonucleotide
tactttcactcgtgaagtcaaatctaactg

SEQ ID NO: 408795 - DNA, 30 bp, Artificial Sequence
  Synthetic oligonucleotide
aatcattcaatggttgcgcataattaactg

SEQ ID NO: 408796 - DNA, 30 bp, Artificial Sequence
  Synthetic oligonucleotide
taattgataaaacgccgtagaccttaactg

SEQ ID NO: 408797 - DNA, 29 bp, Artificial Sequence
  Synthetic oligonucleotide
ctcccgtccaggggacggagtcaacactg

SEQ ID NO: 408798 - DNA, 30 bp, Artificial Sequence
  Synthetic oligonucleotide
ggggtcttgccccattaaataaccacactg

SEQ ID NO: 408799 - DNA, 30 bp, Artificial Sequence
  Synthetic oligonucleotide
ttttgtcaaggtcggctgctgaccacactg

SEQ ID NO: 408800 - DNA, 30 bp, Artificial Sequence
  Synthetic oligonucleotide
gttctggacatggaatttagcgccacactg

SEQ ID NO: 408801 - DNA, 30 bp, Artificial Sequence
  Synthetic oligonucleotide
cggtgttatctcaggagtcgccgcacactg

SEQ ID NO: 408802 - DNA, 30 bp, Artificial Sequence
  Synthetic oligonucleotide
acctcagattaagcttggttcgggacactg

SEQ ID NO: 408803 - DNA, 30 bp, Artificial Sequence
  Synthetic oligonucleotide
cggtgggtacactaagccaataatacactg

SEQ ID NO: 408804 - DNA, 30 bp, Artificial Sequence
  Synthetic oligonucleotide
ttatttactacctaataaattgctacactg

SEQ ID NO: 408805 - DNA, 30 bp, Artificial Sequence
  Synthetic oligonucleotide
aaaatctgatcgaggttcgaaaaaccactg

SEQ ID NO: 408806 - DNA, 30 bp, Artificial Sequence
  Synthetic oligonucleotide
atattcttaaggaagactgccccaccactg

SEQ ID NO: 408807 - DNA, 30 bp, Artificial Sequence
  Synthetic oligonucleotide
ggatgccggggcaacaaagttcgaccactg

SEQ ID NO: 408808 - DNA, 30 bp, Artificial Sequence
  Synthetic oligonucleotide
tgggggtgcagggtgagctgttcagcactg

SEQ ID NO: 408809 - DNA, 30 bp, Artificial Sequence
  Synthetic oligonucleotide
tattcatctacactgaagcatcacgcactg

SEQ ID NO: 408810 - DNA, 30 bp, Artificial Sequence
  Synthetic oligonucleotide
ttcgaatgcccaatagttgtacgcgcactg

SEQ ID NO: 408811 - DNA, 30 bp, Artificial Sequence
  Synthetic oligonucleotide
ttgcatgccggagggtaaggcaaggcactg

SEQ ID NO: 408812 - DNA, 30 bp, Artificial Sequence
  Synthetic oligonucleotide
acttgtgtggcaggttttatcctggcactg

SEQ ID NO: 408813 - DNA, 30 bp, Artificial Sequence
  Synthetic oligonucleotide
agtttccggcccgatttagacgtggcactg

SEQ ID NO: 408814 - DNA, 30 bp, Artificial Sequence
  Synthetic oligonucleotide
gccaaagtactagtaagatgtaatgcactg

SEQ ID NO: 408815 - DNA, 31 bp, Artificial Sequence
  Synthetic oligonucleotide
gagtatcagttcgatgcactgcagtgcactg

SEQ ID NO: 408816 - DNA, 30 bp, Artificial Sequence
  Synthetic oligonucleotide
ctgcatggagaacacgtatgttttgcactg

SEQ ID NO: 408817 - DNA, 30 bp, Artificial Sequence
  Synthetic oligonucleotide
ggacatttcgcccatgacccgaagtcactg

SEQ ID NO: 408818 - DNA, 30 bp, Artificial Sequence
  Synthetic oligonucleotide
gattttaacggacggttaccgatttcactg

SEQ ID NO: 408819 - DNA, 30 bp, Artificial Sequence
  Synthetic oligonucleotide
ttgcaacgccaggctgtcggcttttcactg

SEQ ID NO: 408820 - DNA, 30 bp, Artificial Sequence
  Synthetic oligonucleotide
cgcttgtatagtgtactccgtctcagactg

SEQ ID NO: 408821 - DNA, 29 bp, Artificial Sequence
  Synthetic oligonucleotide
tataattcaatggtatccacgagagactg

SEQ ID NO: 408822 - DNA, 30 bp, Artificial Sequence
  Synthetic oligonucleotide
aaatcagacgtagcggagccactgagactg

SEQ ID NO: 408823 - DNA, 30 bp, Artificial Sequence
  Synthetic oligonucleotide
agtgcgcaggtctaggacactactagactg

SEQ ID NO: 408824 - DNA, 30 bp, Artificial Sequence
  Synthetic oligonucleotide
cgcgcaatctgcagtttcgcaccacgactg

SEQ ID NO: 408825 - DNA, 30 bp, Artificial Sequence
  Synthetic oligonucleotide
ctatagtgtattaggggaatcccacgactg

SEQ ID NO: 408826 - DNA, 30 bp, Artificial Sequence
  Synthetic oligonucleotide
gacattaggctaggccgtcagtcccgactg

SEQ ID NO: 408827 - DNA, 30 bp, Artificial Sequence
  Synthetic oligonucleotide
ataccggctaaagctattggttcgcgactg

SEQ ID NO: 408828 - DNA, 30 bp, Artificial Sequence
  Synthetic oligonucleotide
tatgaactccttggcagtaggatgcgactg

SEQ ID NO: 408829 - DNA, 30 bp, Artificial Sequence
  Synthetic oligonucleotide
gcaagtttaaaaggttatgccttgcgactg

SEQ ID NO: 408830 - DNA, 30 bp, Artificial Sequence
  Synthetic oligonucleotide
cgcccctgttgagatctagctactcgactg

SEQ ID NO: 408831 - DNA, 30 bp, Artificial Sequence
  Synthetic oligonucleotide
caggtatgagttgattgtagaggtcgactg

SEQ ID NO: 408832 - DNA, 30 bp, Artificial Sequence
  Synthetic oligonucleotide
gtccaatatctttcggcgggatcaggactg

SEQ ID NO: 408833 - DNA, 30 bp, Artificial Sequence
  Synthetic oligonucleotide
ctacgtccttttcagagtgattgtggactg

SEQ ID NO: 408834 - DNA, 30 bp, Artificial Sequence
  Synthetic oligonucleotide
tgacttgcacgcgagccacaaacatgactg

SEQ ID NO: 408835 - DNA, 30 bp, Artificial Sequence
  Synthetic oligonucleotide
cacgctactccagtttgaccgtcatgactg

SEQ ID NO: 408836 - DNA, 30 bp, Artificial Sequence
  Synthetic oligonucleotide
ctacaacacttaacctgctttatatgactg

SEQ ID NO: 408837 - DNA, 30 bp, Artificial Sequence
  Synthetic oligonucleotide
acactgctactctacgcagaaccctgactg

SEQ ID NO: 408838 - DNA, 30 bp, Artificial Sequence
  Synthetic oligonucleotide
atgagtaatctttgagtgtggttgtgactg

SEQ ID NO: 408839 - DNA, 31 bp, Artificial Sequence
  Synthetic oligonucleotide
taccaaagtttattgatacgtatattgactg

SEQ ID NO: 408840 - DNA, 30 bp, Artificial Sequence
  Synthetic oligonucleotide
caatcgtgcagcgctgagaatataatactg

SEQ ID NO: 408841 - DNA, 30 bp, Artificial Sequence
  Synthetic oligonucleotide
cagtgcacagtaattaggtaggtaatactg

SEQ ID NO: 408842 - DNA, 30 bp, Artificial Sequence
  Synthetic oligonucleotide
ttcgatactctgcgatttgggttaatactg

SEQ ID NO: 408843 - DNA, 30 bp, Artificial Sequence
  Synthetic oligonucleotide
ttatcctcgaaggtctccctcaccatactg

SEQ ID NO: 408844 - DNA, 30 bp, Artificial Sequence
  Synthetic oligonucleotide
ctctctcggacaactcttggagaactactg

SEQ ID NO: 408845 - DNA, 30 bp, Artificial Sequence
  Synthetic oligonucleotide
gttcctctgttaatgctgacggcactactg

SEQ ID NO: 408846 - DNA, 30 bp, Artificial Sequence
  Synthetic oligonucleotide
agttgcaggcgatttagaggcctactactg

SEQ ID NO: 408847 - DNA, 30 bp, Artificial Sequence
  Synthetic oligonucleotide
atgctcaccccttctgataaactgctactg

SEQ ID NO: 408848 - DNA, 30 bp, Artificial Sequence
  Synthetic oligonucleotide
gtattgtgtctcctgtcttcaagcgtactg

SEQ ID NO: 408849 - DNA, 30 bp, Artificial Sequence
  Synthetic oligonucleotide
ttatttgttcgaggcgattgaatcgtactg

SEQ ID NO: 408850 - DNA, 30 bp, Artificial Sequence
  Synthetic oligonucleotide
tgtcgctagcgcggggaatgtcgggtactg

SEQ ID NO: 408851 - DNA, 30 bp, Artificial Sequence
  Synthetic oligonucleotide
tagtcgctatagtcagatcattgggtactg

SEQ ID NO: 408852 - DNA, 30 bp, Artificial Sequence
  Synthetic oligonucleotide
ttcgattacttgggtgtaaaagatgtactg

SEQ ID NO: 408853 - DNA, 30 bp, Artificial Sequence
  Synthetic oligonucleotide
cgtatctcctgattaactggagctgtactg

SEQ ID NO: 408854 - DNA, 30 bp, Artificial Sequence
  Synthetic oligonucleotide
cgctccgtctattcaatcttagctgtactg

SEQ ID NO: 408855 - DNA, 30 bp, Artificial Sequence
  Synthetic oligonucleotide
ccggttgcagacaatcaccccggtgtactg

SEQ ID NO: 408856 - DNA, 30 bp, Artificial Sequence
  Synthetic oligonucleotide
gttttgacgtcgggatgtggtattgtactg

SEQ ID NO: 408857 - DNA, 31 bp, Artificial Sequence
  Synthetic oligonucleotide
ggaagtaaaatggtcccagtctaacttactg

SEQ ID NO: 408858 - DNA, 30 bp, Artificial Sequence
  Synthetic oligonucleotide
gatgggatagttgggtgttgtcgcttactg

SEQ ID NO: 408859 - DNA, 30 bp, Artificial Sequence
  Synthetic oligonucleotide
acaaaacatcgggtcgctttagtcttactg

SEQ ID NO: 408860 - DNA, 30 bp, Artificial Sequence
  Synthetic oligonucleotide
gacaagctgacgtagctagtaatgttactg

SEQ ID NO: 408861 - DNA, 30 bp, Artificial Sequence
  Synthetic oligonucleotide
gtaactaaccaatggggcctagtgttactg

SEQ ID NO: 408862 - DNA, 30 bp, Artificial Sequence
  Synthetic oligonucleotide
gggcgaccggtaagttctcggaatttactg

SEQ ID NO: 408863 - DNA, 30 bp, Artificial Sequence
  Synthetic oligonucleotide
cacttaagggtagcgtattactatttactg

SEQ ID NO: 408864 - DNA, 30 bp, Artificial Sequence
  Synthetic oligonucleotide
gatcccggagtagccactgccactttactg

SEQ ID NO: 408865 - DNA, 30 bp, Artificial Sequence
  Synthetic oligonucleotide
gaaacctggagtccacaggccacaaacctg

SEQ ID NO: 408866 - DNA, 30 bp, Artificial Sequence
  Synthetic oligonucleotide
taacagtgacttattacggggcataacctg

SEQ ID NO: 408867 - DNA, 30 bp, Artificial Sequence
  Synthetic oligonucleotide
agccatagtaaccaagtgattttacacctg

SEQ ID NO: 408868 - DNA, 30 bp, Artificial Sequence
  Synthetic oligonucleotide
atggtttttactttcattaatacccacctg

SEQ ID NO: 408869 - DNA, 30 bp, Artificial Sequence
  Synthetic oligonucleotide
agcaaccaagaggcgacgacgttgcacctg

SEQ ID NO: 408870 - DNA, 30 bp, Artificial Sequence
  Synthetic oligonucleotide
aaggttaatacgctgacacatttgcacctg

SEQ ID NO: 408871 - DNA, 30 bp, Artificial Sequence
  Synthetic oligonucleotide
agcggcttaaagttcagtgcttgagacctg

SEQ ID NO: 408872 - DNA, 30 bp, Artificial Sequence
  Synthetic oligonucleotide
atggtagtacctggaaaggtacacgacctg

SEQ ID NO: 408873 - DNA, 30 bp, Artificial Sequence
  Synthetic oligonucleotide
cgttatggaagacgggtacttgcatacctg

SEQ ID NO: 408874 - DNA, 30 bp, Artificial Sequence
  Synthetic oligonucleotide
ggaagtgattcgctaggggcagagtacctg

SEQ ID NO: 408875 - DNA, 30 bp, Artificial Sequence
  Synthetic oligonucleotide
tagtttacgcaaagtcaatcaaggtacctg

SEQ ID NO: 408876 - DNA, 30 bp, Artificial Sequence
  Synthetic oligonucleotide
tgtctaattgctcccgtaactctgtacctg

SEQ ID NO: 408877 - DNA, 30 bp, Artificial Sequence
  Synthetic oligonucleotide
gagaagtgagcaggggtctagttgtacctg

SEQ ID NO: 408878 - DNA, 30 bp, Artificial Sequence
  Synthetic oligonucleotide
gctgttagcttcctcagaattgaaaccctg

SEQ ID NO: 408879 - DNA, 30 bp, Artificial Sequence
  Synthetic oligonucleotide
ttggttgagacaaggcttttgccaaccctg

SEQ ID NO: 408880 - DNA, 30 bp, Artificial Sequence
  Synthetic oligonucleotide
gtcccaatcccgttcgacggggcaaccctg

SEQ ID NO: 408881 - DNA, 30 bp, Artificial Sequence
  Synthetic oligonucleotide
gacctagacatcggacgcgaaataaccctg

SEQ ID NO: 408882 - DNA, 30 bp, Artificial Sequence
  Synthetic oligonucleotide
agactaccgcttgcaagacaggtcaccctg

SEQ ID NO: 408883 - DNA, 30 bp, Artificial Sequence
  Synthetic oligonucleotide
gtccacggctatgaagcgtatgataccctg

SEQ ID NO: 408884 - DNA, 30 bp, Artificial Sequence
  Synthetic oligonucleotide
ccctctgggaccggtcaaccgggtaccctg

SEQ ID NO: 408885 - DNA, 30 bp, Artificial Sequence
  Synthetic oligonucleotide
cccttaggctcctattaaaccctccccctg

SEQ ID NO: 408886 - DNA, 30 bp, Artificial Sequence
  Synthetic oligonucleotide
gtcggtacctttagtgcttatgggcccctg

SEQ ID NO: 408887 - DNA, 30 bp, Artificial Sequence
  Synthetic oligonucleotide
aaaggatttacttagccggtgttgcccctg

SEQ ID NO: 408888 - DNA, 30 bp, Artificial Sequence
  Synthetic oligonucleotide
gttacgcgctttatgaatagagatcccctg

SEQ ID NO: 408889 - DNA, 30 bp, Artificial Sequence
  Synthetic oligonucleotide
ggggaggcctcgtctcgtgcagttcccctg

SEQ ID NO: 408890 - DNA, 31 bp, Artificial Sequence
  Synthetic oligonucleotide
cggactccgtggcattaacgaggtagccctg

SEQ ID NO: 408891 - DNA, 30 bp, Artificial Sequence
  Synthetic oligonucleotide
cccgtaattggtcttccacggttcgccctg

SEQ ID NO: 408892 - DNA, 30 bp, Artificial Sequence
  Synthetic oligonucleotide
gttcaccaatgctggctctacggtgccctg

SEQ ID NO: 408893 - DNA, 30 bp, Artificial Sequence
  Synthetic oligonucleotide
tgctgggtgctggatgcggttacatccctg

SEQ ID NO: 408894 - DNA, 30 bp, Artificial Sequence
  Synthetic oligonucleotide
agcccctggtttggttgacggaagtccctg

SEQ ID NO: 408895 - DNA, 30 bp, Artificial Sequence
  Synthetic oligonucleotide
atcaatgacgcccaagcatgagtgtccctg

SEQ ID NO: 408896 - DNA, 30 bp, Artificial Sequence
  Synthetic oligonucleotide
ggaataacatctgagcatcaagcttccctg

SEQ ID NO: 408897 - DNA, 30 bp, Artificial Sequence
  Synthetic oligonucleotide
aagggtccttttatgatacttcgttccctg

SEQ ID NO: 408898 - DNA, 30 bp, Artificial Sequence
  Synthetic oligonucleotide
tgaggctaactttcacaacgcagaagcctg

SEQ ID NO: 408899 - DNA, 30 bp, Artificial Sequence
  Synthetic oligonucleotide
acagcctagctagagatatagggcagcctg

SEQ ID NO: 408900 - DNA, 30 bp, Artificial Sequence
  Synthetic oligonucleotide
gctagtagacattagcgggacgtcagcctg

SEQ ID NO: 408901 - DNA, 30 bp, Artificial Sequence
  Synthetic oligonucleotide
tttttgtgctctatcaagatattcagcctg

SEQ ID NO: 408902 - DNA, 30 bp, Artificial Sequence
  Synthetic oligonucleotide
actgttgcgttggatagacaggagagcctg

SEQ ID NO: 408903 - DNA, 30 bp, Artificial Sequence
  Synthetic oligonucleotide
ctcggcgagaataggcatcattagagcctg

SEQ ID NO: 408904 - DNA, 30 bp, Artificial Sequence
  Synthetic oligonucleotide
cgtacagtcaatattctcctttcgagcctg

SEQ ID NO: 408905 - DNA, 30 bp, Artificial Sequence
  Synthetic oligonucleotide
gttcaaactcaagaagcatttatgagcctg

SEQ ID NO: 408906 - DNA, 30 bp, Artificial Sequence
  Synthetic oligonucleotide
agtccgcttgcatggatgcagtatagcctg

SEQ ID NO: 408907 - DNA, 30 bp, Artificial Sequence
  Synthetic oligonucleotide
ggtctctgcgagacacgcacgtctagcctg

SEQ ID NO: 408908 - DNA, 30 bp, Artificial Sequence
  Synthetic oligonucleotide
gagtacaatacttggaacatgaaacgcctg

SEQ ID NO: 408909 - DNA, 30 bp, Artificial Sequence
  Synthetic oligonucleotide
gaacgacctactggactgggcttgcgcctg

SEQ ID NO: 408910 - DNA, 30 bp, Artificial Sequence
  Synthetic oligonucleotide
ttcgggtctaaacacgtaccgcttcgcctg

SEQ ID NO: 408911 - DNA, 30 bp, Artificial Sequence
  Synthetic oligonucleotide
gctaggcattgtgattgcagcctaggcctg

SEQ ID NO: 408912 - DNA, 30 bp, Artificial Sequence
  Synthetic oligonucleotide
ctcggagtaggcatctggtgcttgggcctg

SEQ ID NO: 408913 - DNA, 30 bp, Artificial Sequence
  Synthetic oligonucleotide
atttttttccgacatatgggacaatgcctg

SEQ ID NO: 408914 - DNA, 30 bp, Artificial Sequence
  Synthetic oligonucleotide
catagttaggcccaatgggcacgatgcctg

SEQ ID NO: 408915 - DNA, 30 bp, Artificial Sequence
  Synthetic oligonucleotide
ccagtttcacgcatcatggcaacctgcctg

SEQ ID NO: 408916 - DNA, 30 bp, Artificial Sequence
  Synthetic oligonucleotide
tcgacgccggagggatgtctgacgtgcctg

SEQ ID NO: 408917 - DNA, 30 bp, Artificial Sequence
  Synthetic oligonucleotide
agctagcgtataaacatttaatgttgcctg

SEQ ID NO: 408918 - DNA, 30 bp, Artificial Sequence
  Synthetic oligonucleotide
gacgcctaacgcgttgtcacaggaatcctg

SEQ ID NO: 408919 - DNA, 30 bp, Artificial Sequence
  Synthetic oligonucleotide
cctttgggccgcacggatgtcgatatcctg

SEQ ID NO: 408920 - DNA, 30 bp, Artificial Sequence
  Synthetic oligonucleotide
caccccagcgaagctgatctcgctatcctg

SEQ ID NO: 408921 - DNA, 30 bp, Artificial Sequence
  Synthetic oligonucleotide
ctgagcttcgacgttgcccacggtatcctg

SEQ ID NO: 408922 - DNA, 30 bp, Artificial Sequence
  Synthetic oligonucleotide
cgagcgtaggacaatacatccagactcctg

SEQ ID NO: 408923 - DNA, 30 bp, Artificial Sequence
  Synthetic oligonucleotide
gaactcttaagagaaatgagtggactcctg

SEQ ID NO: 408924 - DNA, 30 bp, Artificial Sequence
  Synthetic oligonucleotide
gccgctaaagctctacactgctgactcctg

SEQ ID NO: 408925 - DNA, 30 bp, Artificial Sequence
  Synthetic oligonucleotide
tgatactgaagatccttcctattactcctg

SEQ ID NO: 408926 - DNA, 30 bp, Artificial Sequence
  Synthetic oligonucleotide
aaatggcacgctacctgttagcggctcctg

SEQ ID NO: 408927 - DNA, 30 bp, Artificial Sequence
  Synthetic oligonucleotide
aagtcagggtgaaacgattttattctcctg

SEQ ID NO: 408928 - DNA, 30 bp, Artificial Sequence
  Synthetic oligonucleotide
cttgatagcaacgggccttcgcaagtcctg

SEQ ID NO: 408929 - DNA, 30 bp, Artificial Sequence
  Synthetic oligonucleotide
agatggagaacaccagggctatgcgtcctg

SEQ ID NO: 408930 - DNA, 30 bp, Artificial Sequence
  Synthetic oligonucleotide
gagggtaacggagcctccataccggtcctg

SEQ ID NO: 408931 - DNA, 30 bp, Artificial Sequence
  Synthetic oligonucleotide
tcggaggacctatatgactcccgggtcctg

SEQ ID NO: 408932 - DNA, 30 bp, Artificial Sequence
  Synthetic oligonucleotide
tggtgcggcactataatgtttcgggtcctg

SEQ ID NO: 408933 - DNA, 31 bp, Artificial Sequence
  Synthetic oligonucleotide
tggatgcctaccatagtacatgtttgtcctg

SEQ ID NO: 408934 - DNA, 30 bp, Artificial Sequence
  Synthetic oligonucleotide
gatcttagctgaccaaatgcgtccttcctg

SEQ ID NO: 408935 - DNA, 30 bp, Artificial Sequence
  Synthetic oligonucleotide
gtcactacgccgtcaaacgcgctcttcctg

SEQ ID NO: 408936 - DNA, 30 bp, Artificial Sequence
  Synthetic oligonucleotide
tctttaggttccatcttaaacttcttcctg

SEQ ID NO: 408937 - DNA, 30 bp, Artificial Sequence
  Synthetic oligonucleotide
gggacatgagggtttagcgagaggttcctg

SEQ ID NO: 408938 - DNA, 30 bp, Artificial Sequence
  Synthetic oligonucleotide
tacggccaggaaggcgttgcacctttcctg

SEQ ID NO: 408939 - DNA, 30 bp, Artificial Sequence
  Synthetic oligonucleotide
gatgtgaatgccggatcggaatttttcctg

SEQ ID NO: 408940 - DNA, 30 bp, Artificial Sequence
  Synthetic oligonucleotide
aaataagacagtagggactctggaaagctg

SEQ ID NO: 408941 - DNA, 30 bp, Artificial Sequence
  Synthetic oligonucleotide
tcatatatctggacagctagacataagctg

SEQ ID NO: 408942 - DNA, 30 bp, Artificial Sequence
  Synthetic oligonucleotide
ggtctgattgatattttatcaattaagctg

SEQ ID NO: 408943 - DNA, 30 bp, Artificial Sequence
  Synthetic oligonucleotide
gaacgcaaagagcatttggtgtttaagctg

SEQ ID NO: 408944 - DNA, 30 bp, Artificial Sequence
  Synthetic oligonucleotide
ctctagaggcttccggcatgtaaacagctg

SEQ ID NO: 408945 - DNA, 30 bp, Artificial Sequence
  Synthetic oligonucleotide
gaagtagacgcggctggcgcctaacagctg

SEQ ID NO: 408946 - DNA, 30 bp, Artificial Sequence
  Synthetic oligonucleotide
tttaaagtggttgctcagtgatcacagctg

SEQ ID NO: 408947 - DNA, 30 bp, Artificial Sequence
  Synthetic oligonucleotide
aaaatgacgataacatatgtcgtacagctg

SEQ ID NO: 408948 - DNA, 30 bp, Artificial Sequence
  Synthetic oligonucleotide
cacctatagttgaggtggccgacccagctg

SEQ ID NO: 408949 - DNA, 30 bp, Artificial Sequence
  Synthetic oligonucleotide
gggggagatattcatacactgcagcagctg

SEQ ID NO: 408950 - DNA, 30 bp, Artificial Sequence
  Synthetic oligonucleotide
gtgaaccagggtttacacagtgtgcagctg

SEQ ID NO: 408951 - DNA, 30 bp, Artificial Sequence
  Synthetic oligonucleotide
aatggaacaatgagccccttatttcagctg

SEQ ID NO: 408952 - DNA, 30 bp, Artificial Sequence
  Synthetic oligonucleotide
gtctattaatagttgagacatagcgagctg

SEQ ID NO: 408953 - DNA, 31 bp, Artificial Sequence
  Synthetic oligonucleotide
gattcacatgaccgccatagtcaaggagctg

SEQ ID NO: 408954 - DNA, 30 bp, Artificial Sequence
  Synthetic oligonucleotide
gttaccactcacgaatatctacaggagctg

SEQ ID NO: 408955 - DNA, 30 bp, Artificial Sequence
  Synthetic oligonucleotide
ttattggatcgactagacacttgggagctg

SEQ ID NO: 408956 - DNA, 30 bp, Artificial Sequence
  Synthetic oligonucleotide
accataattgttaattcagttgtggagctg

SEQ ID NO: 408957 - DNA, 30 bp, Artificial Sequence
  Synthetic oligonucleotide
caccgacctgttacttcgcgatgtgagctg

SEQ ID NO: 408958 - DNA, 30 bp, Artificial Sequence
  Synthetic oligonucleotide
atctggtgaacaggattatgtttatagctg

SEQ ID NO: 408959 - DNA, 30 bp, Artificial Sequence
  Synthetic oligonucleotide
attgacctgggcggtgcaagtcattagctg

SEQ ID NO: 408960 - DNA, 30 bp, Artificial Sequence
  Synthetic oligonucleotide
ccgatcttttctgctcaggtaggttagctg

SEQ ID NO: 408961 - DNA, 30 bp, Artificial Sequence
  Synthetic oligonucleotide
tttgtgctgtcggattgccatccaacgctg

SEQ ID NO: 408962 - DNA, 30 bp, Artificial Sequence
  Synthetic oligonucleotide
gaagtacaactacgtcaggacgcaacgctg

SEQ ID NO: 408963 - DNA, 30 bp, Artificial Sequence
  Synthetic oligonucleotide
gttaatgtacgcgagtgtcaccgaacgctg

SEQ ID NO: 408964 - DNA, 30 bp, Artificial Sequence
  Synthetic oligonucleotide
gctatggaacgctccgggactggaacgctg

SEQ ID NO: 408965 - DNA, 30 bp, Artificial Sequence
  Synthetic oligonucleotide
aattgagatcagcgcaacggatccacgctg

SEQ ID NO: 408966 - DNA, 30 bp, Artificial Sequence
  Synthetic oligonucleotide
actcatgtatttgtattcgaaagtacgctg

SEQ ID NO: 408967 - DNA, 30 bp, Artificial Sequence
  Synthetic oligonucleotide
tgaaagatttaccggctctcagacccgctg

SEQ ID NO: 408968 - DNA, 30 bp, Artificial Sequence
  Synthetic oligonucleotide
acgtcactaacaaaactgcgctggccgctg

SEQ ID NO: 408969 - DNA, 30 bp, Artificial Sequence
  Synthetic oligonucleotide
ccgaggtctgaattcctcaaggttccgctg

SEQ ID NO: 408970 - DNA, 30 bp, Artificial Sequence
  Synthetic oligonucleotide
gagcaaaagcttacgctttcacaagcgctg

SEQ ID NO: 408971 - DNA, 30 bp, Artificial Sequence
  Synthetic oligonucleotide
ggcttagatctctctaggtgcgcagcgctg

SEQ ID NO: 408972 - DNA, 30 bp, Artificial Sequence
  Synthetic oligonucleotide
gggtattccttggtcactggaggagcgctg

SEQ ID NO: 408973 - DNA, 30 bp, Artificial Sequence
  Synthetic oligonucleotide
ggagtatcgcacgtttttttgttcgcgctg

SEQ ID NO: 408974 - DNA, 30 bp, Artificial Sequence
  Synthetic oligonucleotide
acaaatagaaaattagggaaattggcgctg

SEQ ID NO: 408975 - DNA, 30 bp, Artificial Sequence
  Synthetic oligonucleotide
gcacctacctgcggaaaaacataatcgctg

SEQ ID NO: 408976 - DNA, 30 bp, Artificial Sequence
  Synthetic oligonucleotide
acctgtaagcagacgttatttgcatcgctg

SEQ ID NO: 408977 - DNA, 30 bp, Artificial Sequence
  Synthetic oligonucleotide
acgaaagatcccattcggatacggtcgctg

SEQ ID NO: 408978 - DNA, 30 bp, Artificial Sequence
  Synthetic oligonucleotide
ccccactcagggtcaggggtgacaaggctg

SEQ ID NO: 408979 - DNA, 30 bp, Artificial Sequence
  Synthetic oligonucleotide
gactttcgtaactgtagagatgacaggctg

SEQ ID NO: 408980 - DNA, 30 bp, Artificial Sequence
  Synthetic oligonucleotide
agatcccgggattctggctagtacaggctg

SEQ ID NO: 408981 - DNA, 30 bp, Artificial Sequence
  Synthetic oligonucleotide
gctattttagtatgtcgaggtcccaggctg

SEQ ID NO: 408982 - DNA, 30 bp, Artificial Sequence
  Synthetic oligonucleotide
ggttattttacaagcgggtgtagcaggctg

SEQ ID NO: 408983 - DNA, 30 bp, Artificial Sequence
  Synthetic oligonucleotide
acgcgatctaacagtggcactcgcaggctg

SEQ ID NO: 408984 - DNA, 30 bp, Artificial Sequence
  Synthetic oligonucleotide
ttaaggagcacggcgactcgcatcaggctg

SEQ ID NO: 408985 - DNA, 30 bp, Artificial Sequence
  Synthetic oligonucleotide
gcgtcgggaggatgaactccaccgaggctg

SEQ ID NO: 408986 - DNA, 30 bp, Artificial Sequence
  Synthetic oligonucleotide
cccccgcgccagaataccggagcgaggctg

SEQ ID NO: 408987 - DNA, 30 bp, Artificial Sequence
  Synthetic oligonucleotide
caggcggacactctccctagtgcgaggctg

SEQ ID NO: 408988 - DNA, 30 bp, Artificial Sequence
  Synthetic oligonucleotide
cccgggaaacctccgagttatttacggctg

SEQ ID NO: 408989 - DNA, 30 bp, Artificial Sequence
  Synthetic oligonucleotide
gccatcccgtcgaagacatatgcccggctg

SEQ ID NO: 408990 - DNA, 30 bp, Artificial Sequence
  Synthetic oligonucleotide
actccccgggccatgacggtcctagggctg

SEQ ID NO: 408991 - DNA, 30 bp, Artificial Sequence
  Synthetic oligonucleotide
attcttatgacgggaaagactaacgggctg

SEQ ID NO: 408992 - DNA, 30 bp, Artificial Sequence
  Synthetic oligonucleotide
ggattaccgtgcattgttgacgtcgggctg

SEQ ID NO: 408993 - DNA, 30 bp, Artificial Sequence
  Synthetic oligonucleotide
tcttttataggctctatattctaggggctg

SEQ ID NO: 408994 - DNA, 30 bp, Artificial Sequence
  Synthetic oligonucleotide
cacgcacggcagttcgggtgtacggggctg

SEQ ID NO: 408995 - DNA, 30 bp, Artificial Sequence
  Synthetic oligonucleotide
gcaatttcgactggggctcgagtggggctg

SEQ ID NO: 408996 - DNA, 30 bp, Artificial Sequence
  Synthetic oligonucleotide
tgtggttccttagaatgaaaaccgtggctg

SEQ ID NO: 408997 - DNA, 29 bp, Artificial Sequence
  Synthetic oligonucleotide
aagcattttgagctgcgtcccgaatgctg

SEQ ID NO: 408998 - DNA, 30 bp, Artificial Sequence
  Synthetic oligonucleotide
gcaacagaatgactatacgcaggaatgctg

SEQ ID NO: 408999 - DNA, 30 bp, Artificial Sequence
  Synthetic oligonucleotide
ataaatacaacttctacgccgttaatgctg

SEQ ID NO: 409000 - DNA, 30 bp, Artificial Sequence
  Synthetic oligonucleotide
gttttacgtgtcgtgcgatggtgcatgctg

SEQ ID NO: 409001 - DNA, 30 bp, Artificial Sequence
  Synthetic oligonucleotide
tggtagactgatgcatgagccaggatgctg

SEQ ID NO: 409002 - DNA, 30 bp, Artificial Sequence
  Synthetic oligonucleotide
taccgggctctagatggggttcatatgctg

SEQ ID NO: 409003 - DNA, 30 bp, Artificial Sequence
  Synthetic oligonucleotide
taagccgtattgttaaaaattcctatgctg

SEQ ID NO: 409004 - DNA, 30 bp, Artificial Sequence
  Synthetic oligonucleotide
cagggcgctgcatatccgcgcggtatgctg

SEQ ID NO: 409005 - DNA, 30 bp, Artificial Sequence
  Synthetic oligonucleotide
taacacaaggggtggtgagttactctgctg

SEQ ID NO: 409006 - DNA, 30 bp, Artificial Sequence
  Synthetic oligonucleotide
ggtccttcttgttacggttgttaagtgctg

SEQ ID NO: 409007 - DNA, 30 bp, Artificial Sequence
  Synthetic oligonucleotide
ccgacaggaccgctatacattgttgtgctg

SEQ ID NO: 409008 - DNA, 30 bp, Artificial Sequence
  Synthetic oligonucleotide
tagggcagtcgcagccgactttttgtgctg

SEQ ID NO: 409009 - DNA, 30 bp, Artificial Sequence
  Synthetic oligonucleotide
attcatccctgggacattgccacattgctg

SEQ ID NO: 409010 - DNA, 30 bp, Artificial Sequence
  Synthetic oligonucleotide
tagaaggtagagcattctgtagggttgctg

SEQ ID NO: 409011 - DNA, 30 bp, Artificial Sequence
  Synthetic oligonucleotide
acgctcggggtttggcggagggaaaatctg

SEQ ID NO: 409012 - DNA, 31 bp, Artificial Sequence
  Synthetic oligonucleotide
ttgaatacgtaaggtattcagatccaatctg

SEQ ID NO: 409013 - DNA, 30 bp, Artificial Sequence
  Synthetic oligonucleotide
gcatagattacggccgttacgctgaatctg

SEQ ID NO: 409014 - DNA, 30 bp, Artificial Sequence
  Synthetic oligonucleotide
tgcgccagatctgccagtgcgctgaatctg

SEQ ID NO: 409015 - DNA, 30 bp, Artificial Sequence
  Synthetic oligonucleotide
ttacagttcgcacctcagacgattaatctg

SEQ ID NO: 409016 - DNA, 30 bp, Artificial Sequence
  Synthetic oligonucleotide
gtgtagtggctcttctccaacggtcatctg

SEQ ID NO: 409017 - DNA, 30 bp, Artificial Sequence
  Synthetic oligonucleotide
acccatcggcggatgggtggatgtcatctg

SEQ ID NO: 409018 - DNA, 30 bp, Artificial Sequence
  Synthetic oligonucleotide
ggtaggtggcgtaggattatttttcatctg

SEQ ID NO: 409019 - DNA, 30 bp, Artificial Sequence
  Synthetic oligonucleotide
attcataagtgtccgatccactaagatctg

SEQ ID NO: 409020 - DNA, 30 bp, Artificial Sequence
  Synthetic oligonucleotide
tggcgtatacagggagcagcccgcgatctg

SEQ ID NO: 409021 - DNA, 30 bp, Artificial Sequence
  Synthetic oligonucleotide
ttttcatgggtgtgttgatgtatcgatctg

SEQ ID NO: 409022 - DNA, 30 bp, Artificial Sequence
  Synthetic oligonucleotide
gcttcatgttggttcggtgaataggatctg

SEQ ID NO: 409023 - DNA, 30 bp, Artificial Sequence
  Synthetic oligonucleotide
gtcgagggtcctcgaacgttcttggatctg

SEQ ID NO: 409024 - DNA, 30 bp, Artificial Sequence
  Synthetic oligonucleotide
gagctctcccatttaaatcagaagtatctg

SEQ ID NO: 409025 - DNA, 30 bp, Artificial Sequence
  Synthetic oligonucleotide
ctccccctagctaaagcatggaattatctg

SEQ ID NO: 409026 - DNA, 30 bp, Artificial Sequence
  Synthetic oligonucleotide
tagaggctgtaatattaggacagttatctg

SEQ ID NO: 409027 - DNA, 30 bp, Artificial Sequence
  Synthetic oligonucleotide
cgcagatagactggacaacgttaaactctg

SEQ ID NO: 409028 - DNA, 30 bp, Artificial Sequence
  Synthetic oligonucleotide
cgaggggattgttcacgtaaacgcactctg

SEQ ID NO: 409029 - DNA, 30 bp, Artificial Sequence
  Synthetic oligonucleotide
atggatctgttacggcggcccgagactctg

SEQ ID NO: 409030 - DNA, 30 bp, Artificial Sequence
  Synthetic oligonucleotide
taggcggatatcgctacgctctgtactctg

SEQ ID NO: 409031 - DNA, 30 bp, Artificial Sequence
  Synthetic oligonucleotide
cacaataggtgagccgagtcagttactctg

SEQ ID NO: 409032 - DNA, 30 bp, Artificial Sequence
  Synthetic oligonucleotide
gccgtgatacctcatatcgacgcacctctg

SEQ ID NO: 409033 - DNA, 29 bp, Artificial Sequence
  Synthetic oligonucleotide
tgtttttctttctactcttcccccctctg

SEQ ID NO: 409034 - DNA, 30 bp, Artificial Sequence
  Synthetic oligonucleotide
gcgtgatcacgattttctaaggcccctctg

SEQ ID NO: 409035 - DNA, 30 bp, Artificial Sequence
  Synthetic oligonucleotide
agggtaattcagtatcggggtaggcctctg

SEQ ID NO: 409036 - DNA, 30 bp, Artificial Sequence
  Synthetic oligonucleotide
cactagggccagtcgcgagcacggcctctg

SEQ ID NO: 409037 - DNA, 30 bp, Artificial Sequence
  Synthetic oligonucleotide
gtgcgccaggttgtttgcaagttgcctctg

SEQ ID NO: 409038 - DNA, 30 bp, Artificial Sequence
  Synthetic oligonucleotide
aggacgaaaacacctgttatgacagctctg

SEQ ID NO: 409039 - DNA, 30 bp, Artificial Sequence
  Synthetic oligonucleotide
gcgttactaacggggagcataaaggctctg

SEQ ID NO: 409040 - DNA, 30 bp, Artificial Sequence
  Synthetic oligonucleotide
gatgcaatgattacgtttacagtggctctg

SEQ ID NO: 409041 - DNA, 30 bp, Artificial Sequence
  Synthetic oligonucleotide
aggccgctctctgatagggtccctgctctg

SEQ ID NO: 409042 - DNA, 30 bp, Artificial Sequence
  Synthetic oligonucleotide
atataataattattgtctagtgctgctctg

SEQ ID NO: 409043 - DNA, 30 bp, Artificial Sequence
  Synthetic oligonucleotide
gcgaagagtcatgatgcccgatttgctctg

SEQ ID NO: 409044 - DNA, 30 bp, Artificial Sequence
  Synthetic oligonucleotide
cagatgtcacacaataacaggacatctctg

SEQ ID NO: 409045 - DNA, 30 bp, Artificial Sequence
  Synthetic oligonucleotide
ccctagataatcagaatcccaaactctctg

SEQ ID NO: 409046 - DNA, 30 bp, Artificial Sequence
  Synthetic oligonucleotide
ggtcctctggccatcagtgcaggctctctg

SEQ ID NO: 409047 - DNA, 30 bp, Artificial Sequence
  Synthetic oligonucleotide
tcgcaccgagagagccacgtggtgtctctg

SEQ ID NO: 409048 - DNA, 30 bp, Artificial Sequence
  Synthetic oligonucleotide
atacaccataataacgctatgaaaagtctg

SEQ ID NO: 409049 - DNA, 30 bp, Artificial Sequence
  Synthetic oligonucleotide
tgatagctcatatgctttgctacaagtctg

SEQ ID NO: 409050 - DNA, 30 bp, Artificial Sequence
  Synthetic oligonucleotide
ttcattgggagtctcaatttgggcagtctg

SEQ ID NO: 409051 - DNA, 30 bp, Artificial Sequence
  Synthetic oligonucleotide
aagaactgtacttacagggtgatcagtctg

SEQ ID NO: 409052 - DNA, 30 bp, Artificial Sequence
  Synthetic oligonucleotide
cacgacttgagtcagccgggttcgagtctg

SEQ ID NO: 409053 - DNA, 30 bp, Artificial Sequence
  Synthetic oligonucleotide
gttatggcgtggacgcgcggagggagtctg

SEQ ID NO: 409054 - DNA, 30 bp, Artificial Sequence
  Synthetic oligonucleotide
gggtcagtaaaaaagccccttaatagtctg

SEQ ID NO: 409055 - DNA, 30 bp, Artificial Sequence
  Synthetic oligonucleotide
ggaaagaactgctcggtgtgagctagtctg

SEQ ID NO: 409056 - DNA, 30 bp, Artificial Sequence
  Synthetic oligonucleotide
ggtagactcaaacagactaatcaacgtctg

SEQ ID NO: 409057 - DNA, 30 bp, Artificial Sequence
  Synthetic oligonucleotide
aagatgtttggactaggagtagaacgtctg

SEQ ID NO: 409058 - DNA, 30 bp, Artificial Sequence
  Synthetic oligonucleotide
actttctactcgattaagcgtgtgcgtctg

SEQ ID NO: 409059 - DNA, 30 bp, Artificial Sequence
  Synthetic oligonucleotide
taccagactaccgtgctgttaagtcgtctg

SEQ ID NO: 409060 - DNA, 30 bp, Artificial Sequence
  Synthetic oligonucleotide
tggttgcgttgatggttaattgtaggtctg

SEQ ID NO: 409061 - DNA, 30 bp, Artificial Sequence
  Synthetic oligonucleotide
gattctgcacgtgacccagtctcgggtctg

SEQ ID NO: 409062 - DNA, 30 bp, Artificial Sequence
  Synthetic oligonucleotide
tgggatgtctggatactggtgtggggtctg

SEQ ID NO: 409063 - DNA, 30 bp, Artificial Sequence
  Synthetic oligonucleotide
ctggcgagagcgtggtctggactgggtctg

SEQ ID NO: 409064 - DNA, 30 bp, Artificial Sequence
  Synthetic oligonucleotide
gatgccttcttcatgagaaatccatgtctg

SEQ ID NO: 409065 - DNA, 30 bp, Artificial Sequence
  Synthetic oligonucleotide
acgtacgggagcttaagtcatccatgtctg

SEQ ID NO: 409066 - DNA, 30 bp, Artificial Sequence
  Synthetic oligonucleotide
aagattcaggtacttagtagtacctgtctg

SEQ ID NO: 409067 - DNA, 30 bp, Artificial Sequence
  Synthetic oligonucleotide
taatgacaactagcaagactgccttgtctg

SEQ ID NO: 409068 - DNA, 30 bp, Artificial Sequence
  Synthetic oligonucleotide
gcagcaagatattacacgttagcttgtctg

SEQ ID NO: 409069 - DNA, 30 bp, Artificial Sequence
  Synthetic oligonucleotide
atccgtgctcgcagataatttagttgtctg

SEQ ID NO: 409070 - DNA, 30 bp, Artificial Sequence
  Synthetic oligonucleotide
gaacatcttcttcgttaaacgttttgtctg

SEQ ID NO: 409071 - DNA, 30 bp, Artificial Sequence
  Synthetic oligonucleotide
cgtcctctcacttttacgtcagccattctg

SEQ ID NO: 409072 - DNA, 30 bp, Artificial Sequence
  Synthetic oligonucleotide
atcgactgctgactggcgctcgtcattctg

SEQ ID NO: 409073 - DNA, 30 bp, Artificial Sequence
  Synthetic oligonucleotide
ttctcttgcatctcagaactcgcgattctg

SEQ ID NO: 409074 - DNA, 30 bp, Artificial Sequence
  Synthetic oligonucleotide
caaatctccatgaaaacgtgtgggattctg

SEQ ID NO: 409075 - DNA, 30 bp, Artificial Sequence
  Synthetic oligonucleotide
atctggttgaaaaggtgatcggcacttctg

SEQ ID NO: 409076 - DNA, 30 bp, Artificial Sequence
  Synthetic oligonucleotide
gttaccttcggagagctgagccgacttctg

SEQ ID NO: 409077 - DNA, 30 bp, Artificial Sequence
  Synthetic oligonucleotide
tattttatgatagtagcctacaaccttctg

SEQ ID NO: 409078 - DNA, 30 bp, Artificial Sequence
  Synthetic oligonucleotide
ttagcttcggttgactgcttggcccttctg

SEQ ID NO: 409079 - DNA, 30 bp, Artificial Sequence
  Synthetic oligonucleotide
aaccggctttcaattgatcgtgtgcttctg

SEQ ID NO: 409080 - DNA, 30 bp, Artificial Sequence
  Synthetic oligonucleotide
gagatatagggtacactttgtcatcttctg

SEQ ID NO: 409081 - DNA, 30 bp, Artificial Sequence
  Synthetic oligonucleotide
gcgattgggtccaatccacccggtcttctg

SEQ ID NO: 409082 - DNA, 30 bp, Artificial Sequence
  Synthetic oligonucleotide
gagatggggtattagtagggcaacgttctg

SEQ ID NO: 409083 - DNA, 30 bp, Artificial Sequence
  Synthetic oligonucleotide
aactatctgctagtattaccgagtgttctg

SEQ ID NO: 409084 - DNA, 30 bp, Artificial Sequence
  Synthetic oligonucleotide
ataccgctatgcattgatcagaagtttctg

SEQ ID NO: 409085 - DNA, 30 bp, Artificial Sequence
  Synthetic oligonucleotide
gcggatatgtattacctaaatgcttttctg

SEQ ID NO: 409086 - DNA, 30 bp, Artificial Sequence
  Synthetic oligonucleotide
acgcacgggctgaaaagtgcaagttttctg

SEQ ID NO: 409087 - DNA, 30 bp, Artificial Sequence
  Synthetic oligonucleotide
caagagagaggctcttacatagtaaaagtg

SEQ ID NO: 409088 - DNA, 30 bp, Artificial Sequence
  Synthetic oligonucleotide
tcagttagagattgaaagaacatgaaagtg

SEQ ID NO: 409089 - DNA, 30 bp, Artificial Sequence
  Synthetic oligonucleotide
gtctttaggaatcgcattaaggtgaaagtg

SEQ ID NO: 409090 - DNA, 30 bp, Artificial Sequence
  Synthetic oligonucleotide
gctcatacacactgctgggtttctaaagtg

SEQ ID NO: 409091 - DNA, 30 bp, Artificial Sequence
  Synthetic oligonucleotide
tttaaggggcttagtgcgtacccacaagtg

SEQ ID NO: 409092 - DNA, 30 bp, Artificial Sequence
  Synthetic oligonucleotide
tggcccagcgtaaatgcccatggacaagtg

SEQ ID NO: 409093 - DNA, 30 bp, Artificial Sequence
  Synthetic oligonucleotide
cttgagcatatccacttgtacgcccaagtg

SEQ ID NO: 409094 - DNA, 30 bp, Artificial Sequence
  Synthetic oligonucleotide
ctgcgaatgtacgacagaacagtccaagtg

SEQ ID NO: 409095 - DNA, 30 bp, Artificial Sequence
  Synthetic oligonucleotide
gaactaggtcgtcgcgtcgaagttcaagtg

SEQ ID NO: 409096 - DNA, 31 bp, Artificial Sequence
  Synthetic oligonucleotide
cggtcccacagtaaaagcgcagtacgaagtg

SEQ ID NO: 409097 - DNA, 30 bp, Artificial Sequence
  Synthetic oligonucleotide
tttgccgtcctatcagagtaaaaggaagtg

SEQ ID NO: 409098 - DNA, 30 bp, Artificial Sequence
  Synthetic oligonucleotide
cgatgcatccaaggattcctcggggaagtg

SEQ ID NO: 409099 - DNA, 30 bp, Artificial Sequence
  Synthetic oligonucleotide
gtaactgttatccgcgagcataatgaagtg

SEQ ID NO: 409100 - DNA, 30 bp, Artificial Sequence
  Synthetic oligonucleotide
cttcttccaatggtatcgaccgactaagtg

SEQ ID NO: 409101 - DNA, 30 bp, Artificial Sequence
  Synthetic oligonucleotide
gtctcacgtagtttcgaggggacctaagtg

SEQ ID NO: 409102 - DNA, 30 bp, Artificial Sequence
  Synthetic oligonucleotide
tcacagtcgtcgcatctatactcgtaagtg

SEQ ID NO: 409103 - DNA, 30 bp, Artificial Sequence
  Synthetic oligonucleotide
gagggtgtcattggaaggttgaggtaagtg

SEQ ID NO: 409104 - DNA, 30 bp, Artificial Sequence
  Synthetic oligonucleotide
ggactaaatggcgggctgttatattaagtg

SEQ ID NO: 409105 - DNA, 30 bp, Artificial Sequence
  Synthetic oligonucleotide
tagatccattccgcggcgaccatttaagtg

SEQ ID NO: 409106 - DNA, 30 bp, Artificial Sequence
  Synthetic oligonucleotide
acgcaaggtaactaaacgttagtttaagtg

SEQ ID NO: 409107 - DNA, 30 bp, Artificial Sequence
  Synthetic oligonucleotide
tgcagattggattcaacattagacacagtg

SEQ ID NO: 409108 - DNA, 30 bp, Artificial Sequence
  Synthetic oligonucleotide
gcagttttcttcgaggcttcgcgcacagtg

SEQ ID NO: 409109 - DNA, 30 bp, Artificial Sequence
  Synthetic oligonucleotide
attatgcgagcccgaaatcgtcgcacagtg

SEQ ID NO: 409110 - DNA, 30 bp, Artificial Sequence
  Synthetic oligonucleotide
tctagtggacgacttatggttcgcacagtg

SEQ ID NO: 409111 - DNA, 30 bp, Artificial Sequence
  Synthetic oligonucleotide
ttataatttgctgatggcggtgatacagtg

SEQ ID NO: 409112 - DNA, 30 bp, Artificial Sequence
  Synthetic oligonucleotide
cctcttgacgggatcgatggggctacagtg

SEQ ID NO: 409113 - DNA, 30 bp, Artificial Sequence
  Synthetic oligonucleotide
tctatggcgctacagtttgctattacagtg

SEQ ID NO: 409114 - DNA, 30 bp, Artificial Sequence
  Synthetic oligonucleotide
tgacgctgggctggccaattagttacagtg

SEQ ID NO: 409115 - DNA, 30 bp, Artificial Sequence
  Synthetic oligonucleotide
tacctaaaacatggggggttcgcgccagtg

SEQ ID NO: 409116 - DNA, 30 bp, Artificial Sequence
  Synthetic oligonucleotide
ctactgcctgctggtgtttactctccagtg

SEQ ID NO: 409117 - DNA, 30 bp, Artificial Sequence
  Synthetic oligonucleotide
gcgttcaatagtcagagacggtacgcagtg

SEQ ID NO: 409118 - DNA, 30 bp, Artificial Sequence
  Synthetic oligonucleotide
taacatggttaagattgtgagaccgcagtg

SEQ ID NO: 409119 - DNA, 31 bp, Artificial Sequence
  Synthetic oligonucleotide
actatagcggaggccgatgggtttggcagtg

SEQ ID NO: 409120 - DNA, 30 bp, Artificial Sequence
  Synthetic oligonucleotide
gctaccagagtcttacttcacgatgcagtg

SEQ ID NO: 409121 - DNA, 30 bp, Artificial Sequence
  Synthetic oligonucleotide
atataatcgtcatcggctggttctgcagtg

SEQ ID NO: 409122 - DNA, 30 bp, Artificial Sequence
  Synthetic oligonucleotide
atttaaccgtctatgtagcccatatcagtg

SEQ ID NO: 409123 - DNA, 30 bp, Artificial Sequence
  Synthetic oligonucleotide
gaatacgggatctcgtgcacgcggtcagtg

SEQ ID NO: 409124 - DNA, 30 bp, Artificial Sequence
  Synthetic oligonucleotide
gctgtcctgacaggagcccgagggtcagtg

SEQ ID NO: 409125 - DNA, 30 bp, Artificial Sequence
  Synthetic oligonucleotide
ttagtgtgtagtagaaagtgaagttcagtg

SEQ ID NO: 409126 - DNA, 30 bp, Artificial Sequence
  Synthetic oligonucleotide
tcaccgctagcgcctctttcaccaagagtg

SEQ ID NO: 409127 - DNA, 30 bp, Artificial Sequence
  Synthetic oligonucleotide
tcaggtaggctccagctgtgcattagagtg

SEQ ID NO: 409128 - DNA, 30 bp, Artificial Sequence
  Synthetic oligonucleotide
cgtggctcattacaacgttagcttagagtg

SEQ ID NO: 409129 - DNA, 30 bp, Artificial Sequence
  Synthetic oligonucleotide
catgctatgggtgctcttcgtatacgagtg

SEQ ID NO: 409130 - DNA, 30 bp, Artificial Sequence
  Synthetic oligonucleotide
gggcagcgctggtagcactcttaccgagtg

SEQ ID NO: 409131 - DNA, 30 bp, Artificial Sequence
  Synthetic oligonucleotide
gagccgtaggtccggctgaaagtgcgagtg

SEQ ID NO: 409132 - DNA, 30 bp, Artificial Sequence
  Synthetic oligonucleotide
aaaattacgtcttctgggatgcaaggagtg

SEQ ID NO: 409133 - DNA, 30 bp, Artificial Sequence
  Synthetic oligonucleotide
ttatgatgtgtgggaattcgtccgggagtg

SEQ ID NO: 409134 - DNA, 30 bp, Artificial Sequence
  Synthetic oligonucleotide
ccactcctcagtaggtctattaggggagtg

SEQ ID NO: 409135 - DNA, 30 bp, Artificial Sequence
  Synthetic oligonucleotide
gtggctaaacatagagtaggcttgggagtg

SEQ ID NO: 409136 - DNA, 30 bp, Artificial Sequence
  Synthetic oligonucleotide
gcggtcacaccgccttatcgtgctggagtg

SEQ ID NO: 409137 - DNA, 30 bp, Artificial Sequence
  Synthetic oligonucleotide
ggagcggtagtcagcgagtctcgatgagtg

SEQ ID NO: 409138 - DNA, 30 bp, Artificial Sequence
  Synthetic oligonucleotide
tctacgctttggttcagagtttcctgagtg

SEQ ID NO: 409139 - DNA, 29 bp, Artificial Sequence
  Synthetic oligonucleotide
aacggcaggctcacattctacagtgagtg

SEQ ID NO: 409140 - DNA, 30 bp, Artificial Sequence
  Synthetic oligonucleotide
gaattccggacaaaatttgaaagttgagtg

SEQ ID NO: 409141 - DNA, 30 bp, Artificial Sequence
  Synthetic oligonucleotide
cacatatacttgagtacacatcaaatagtg

SEQ ID NO: 409142 - DNA, 30 bp, Artificial Sequence
  Synthetic oligonucleotide
tatacggggcgcaggaggataaacatagtg

SEQ ID NO: 409143 - DNA, 30 bp, Artificial Sequence
  Synthetic oligonucleotide
tggcattccagcccgctgaacaacatagtg

SEQ ID NO: 409144 - DNA, 30 bp, Artificial Sequence
  Synthetic oligonucleotide
attttcggatttcccaaacagtacatagtg

SEQ ID NO: 409145 - DNA, 30 bp, Artificial Sequence
  Synthetic oligonucleotide
agcgtggccgcttccggggggctcatagtg

SEQ ID NO: 409146 - DNA, 30 bp, Artificial Sequence
  Synthetic oligonucleotide
attgaatctatgatgagacgctggatagtg

SEQ ID NO: 409147 - DNA, 30 bp, Artificial Sequence
  Synthetic oligonucleotide
ctatctggtctgctcaagtatcatatagtg

SEQ ID NO: 409148 - DNA, 30 bp, Artificial Sequence
  Synthetic oligonucleotide
cgtcggttccaggttgtgaaatttatagtg

SEQ ID NO: 409149 - DNA, 30 bp, Artificial Sequence
  Synthetic oligonucleotide
agttgcttgacacatgggttccaactagtg

SEQ ID NO: 409150 - DNA, 30 bp, Artificial Sequence
  Synthetic oligonucleotide
atatttatcggatttgcttgtagcctagtg

SEQ ID NO: 409151 - DNA, 30 bp, Artificial Sequence
  Synthetic oligonucleotide
gcacgaattttgtcaattcaaaatctagtg

SEQ ID NO: 409152 - DNA, 30 bp, Artificial Sequence
  Synthetic oligonucleotide
ggggtgagggcaggccagtccgttctagtg

SEQ ID NO: 409153 - DNA, 30 bp, Artificial Sequence
  Synthetic oligonucleotide
gtgaacgccatacgactccataccgtagtg

SEQ ID NO: 409154 - DNA, 30 bp, Artificial Sequence
  Synthetic oligonucleotide
gagtatcaatttgcctctggctaggtagtg

SEQ ID NO: 409155 - DNA, 30 bp, Artificial Sequence
  Synthetic oligonucleotide
gctaaaagcggctcccaggggcgggtagtg

SEQ ID NO: 409156 - DNA, 30 bp, Artificial Sequence
  Synthetic oligonucleotide
gaagggcagcggttaacatataatgtagtg

SEQ ID NO: 409157 - DNA, 30 bp, Artificial Sequence
  Synthetic oligonucleotide
attgcatttagggaagcgccgcatgtagtg

SEQ ID NO: 409158 - DNA, 30 bp, Artificial Sequence
  Synthetic oligonucleotide
ctttgaatgagcagccgtatctttgtagtg

SEQ ID NO: 409159 - DNA, 29 bp, Artificial Sequence
  Synthetic oligonucleotide
cccgagactaccgtggtggacaattagtg

SEQ ID NO: 409160 - DNA, 30 bp, Artificial Sequence
  Synthetic oligonucleotide
gcctcattcagttagatggggtcattagtg

SEQ ID NO: 409161 - DNA, 30 bp, Artificial Sequence
  Synthetic oligonucleotide
caacgctgcaaacattgttctgccttagtg

SEQ ID NO: 409162 - DNA, 30 bp, Artificial Sequence
  Synthetic oligonucleotide
cgctgtgcatcgcatgacatctagttagtg

SEQ ID NO: 409163 - DNA, 30 bp, Artificial Sequence
  Synthetic oligonucleotide
caatgcctataacggtcggaaccgttagtg

SEQ ID NO: 409164 - DNA, 30 bp, Artificial Sequence
  Synthetic oligonucleotide
gttgtctcaacagcatcagataatttagtg

SEQ ID NO: 409165 - DNA, 30 bp, Artificial Sequence
  Synthetic oligonucleotide
agttaggacgccggtttttgaggtttagtg

SEQ ID NO: 409166 - DNA, 30 bp, Artificial Sequence
  Synthetic oligonucleotide
gcgcccttataaggagccgccgcaaacgtg

SEQ ID NO: 409167 - DNA, 30 bp, Artificial Sequence
  Synthetic oligonucleotide
caaactatggcataacatgtaagaaacgtg

SEQ ID NO: 409168 - DNA, 30 bp, Artificial Sequence
  Synthetic oligonucleotide
ctatgtgtgttgctacgttaactcaacgtg

SEQ ID NO: 409169 - DNA, 30 bp, Artificial Sequence
  Synthetic oligonucleotide
gccagcgtgtagactttcgctttacacgtg

SEQ ID NO: 409170 - DNA, 30 bp, Artificial Sequence
  Synthetic oligonucleotide
aacaagaacctgatttgcggaggccacgtg

SEQ ID NO: 409171 - DNA, 30 bp, Artificial Sequence
  Synthetic oligonucleotide
tattttaggcattaaatgagataagacgtg

SEQ ID NO: 409172 - DNA, 30 bp, Artificial Sequence
  Synthetic oligonucleotide
gcggggcttttatgccggtgatgagacgtg

SEQ ID NO: 409173 - DNA, 30 bp, Artificial Sequence
  Synthetic oligonucleotide
gccagggcatcgcatcagttggaggacgtg

SEQ ID NO: 409174 - DNA, 30 bp, Artificial Sequence
  Synthetic oligonucleotide
aaagtcatagttggaagggacgcatacgtg

SEQ ID NO: 409175 - DNA, 30 bp, Artificial Sequence
  Synthetic oligonucleotide
tcgcgccttagtcatcgaggaagatacgtg

SEQ ID NO: 409176 - DNA, 30 bp, Artificial Sequence
  Synthetic oligonucleotide
ggaatacgatgcgctgcagaaaggtacgtg

SEQ ID NO: 409177 - DNA, 30 bp, Artificial Sequence
  Synthetic oligonucleotide
tctgctttgaatgcctgcgacgggtacgtg

SEQ ID NO: 409178 - DNA, 30 bp, Artificial Sequence
  Synthetic oligonucleotide
atttttcgccctctcgcctgtagttacgtg

SEQ ID NO: 409179 - DNA, 30 bp, Artificial Sequence
  Synthetic oligonucleotide
cgagctcttcaaagaccggctcgttacgtg

SEQ ID NO: 409180 - DNA, 30 bp, Artificial Sequence
  Synthetic oligonucleotide
cgttagaagaatttgtttatcacgaccgtg

SEQ ID NO: 409181 - DNA, 30 bp, Artificial Sequence
  Synthetic oligonucleotide
aagcatctcggctatccccaagcgaccgtg

SEQ ID NO: 409182 - DNA, 30 bp, Artificial Sequence
  Synthetic oligonucleotide
cagtttcttgaggtctggtagcggaccgtg

SEQ ID NO: 409183 - DNA, 30 bp, Artificial Sequence
  Synthetic oligonucleotide
acatttgtggtactcaagctttggaccgtg

SEQ ID NO: 409184 - DNA, 30 bp, Artificial Sequence
  Synthetic oligonucleotide
tacagcgccgtagattacgctagtaccgtg

SEQ ID NO: 409185 - DNA, 30 bp, Artificial Sequence
  Synthetic oligonucleotide
cctttaaacgtatatcccagggcacccgtg

SEQ ID NO: 409186 - DNA, 30 bp, Artificial Sequence
  Synthetic oligonucleotide
tactttcatgaaatcgcggtgagacccgtg

SEQ ID NO: 409187 - DNA, 30 bp, Artificial Sequence
  Synthetic oligonucleotide
aggggaagcaatctgatggtaaaagccgtg

SEQ ID NO: 409188 - DNA, 30 bp, Artificial Sequence
  Synthetic oligonucleotide
cttggactctaagcactttgcagcgccgtg

SEQ ID NO: 409189 - DNA, 30 bp, Artificial Sequence
  Synthetic oligonucleotide
accgcgttgtacagtgctatagaggccgtg

SEQ ID NO: 409190 - DNA, 30 bp, Artificial Sequence
  Synthetic oligonucleotide
cacaacaccgttgaatatttgtgggccgtg

SEQ ID NO: 409191 - DNA, 30 bp, Artificial Sequence
  Synthetic oligonucleotide
ctcgcattatatgccggggtagatgccgtg

SEQ ID NO: 409192 - DNA, 30 bp, Artificial Sequence
  Synthetic oligonucleotide
gtttcgctattctcactctggtaatccgtg

SEQ ID NO: 409193 - DNA, 30 bp, Artificial Sequence
  Synthetic oligonucleotide
tctagctataagatcacgcacatgtccgtg

SEQ ID NO: 409194 - DNA, 30 bp, Artificial Sequence
  Synthetic oligonucleotide
agggtacaacgagtgcactgggtttccgtg

SEQ ID NO: 409195 - DNA, 30 bp, Artificial Sequence
  Synthetic oligonucleotide
acatccttcttgttgttagtcaagagcgtg

SEQ ID NO: 409196 - DNA, 30 bp, Artificial Sequence
  Synthetic oligonucleotide
ccacaactaattaataacgcctatagcgtg

SEQ ID NO: 409197 - DNA, 30 bp, Artificial Sequence
  Synthetic oligonucleotide
taatcccgatataagtgtacccctagcgtg

SEQ ID NO: 409198 - DNA, 30 bp, Artificial Sequence
  Synthetic oligonucleotide
gggtggtggctggagatggaacttagcgtg

SEQ ID NO: 409199 - DNA, 30 bp, Artificial Sequence
  Synthetic oligonucleotide
ctgaactgcctcttatagaatacacgcgtg

SEQ ID NO: 409200 - DNA, 31 bp, Artificial Sequence
  Synthetic oligonucleotide
tatcatgttgttagtttacaccagacgcgtg

SEQ ID NO: 409201 - DNA, 30 bp, Artificial Sequence
  Synthetic oligonucleotide
cgggtacgtgtaaacagagttatacgcgtg

SEQ ID NO: 409202 - DNA, 30 bp, Artificial Sequence
  Synthetic oligonucleotide
tcgaacgtcgctattacttagtagcgcgtg

SEQ ID NO: 409203 - DNA, 30 bp, Artificial Sequence
  Synthetic oligonucleotide
cacgtccataattgattatatgcaggcgtg

SEQ ID NO: 409204 - DNA, 30 bp, Artificial Sequence
  Synthetic oligonucleotide
attgattttatatacaaatgatatggcgtg

SEQ ID NO: 409205 - DNA, 30 bp, Artificial Sequence
  Synthetic oligonucleotide
cgacacgtctattccgaaagagctggcgtg

SEQ ID NO: 409206 - DNA, 30 bp, Artificial Sequence
  Synthetic oligonucleotide
aacctttaacggtgcaaggtgagtggcgtg

SEQ ID NO: 409207 - DNA, 30 bp, Artificial Sequence
  Synthetic oligonucleotide
attctccggtccaataaggtagaatgcgtg

SEQ ID NO: 409208 - DNA, 30 bp, Artificial Sequence
  Synthetic oligonucleotide
actctaactcgccatcagccatcctgcgtg

SEQ ID NO: 409209 - DNA, 30 bp, Artificial Sequence
  Synthetic oligonucleotide
gtataagtgtggcgctccaattattgcgtg

SEQ ID NO: 409210 - DNA, 30 bp, Artificial Sequence
  Synthetic oligonucleotide
gtcgactgagccgcaaacctcacttgcgtg

SEQ ID NO: 409211 - DNA, 30 bp, Artificial Sequence
  Synthetic oligonucleotide
tactgcactctattgaggttaggttgcgtg

SEQ ID NO: 409212 - DNA, 30 bp, Artificial Sequence
  Synthetic oligonucleotide
aactcgaaacggtaaaaagccgtttgcgtg

SEQ ID NO: 409213 - DNA, 30 bp, Artificial Sequence
  Synthetic oligonucleotide
tcagtggagccttggttaggcaaaatcgtg

SEQ ID NO: 409214 - DNA, 30 bp, Artificial Sequence
  Synthetic oligonucleotide
ttggttgattataaattgctccacatcgtg

SEQ ID NO: 409215 - DNA, 30 bp, Artificial Sequence
  Synthetic oligonucleotide
tgagggcaagtgggcacatgggggatcgtg

SEQ ID NO: 409216 - DNA, 30 bp, Artificial Sequence
  Synthetic oligonucleotide
gaatggtctccactgagaagctatatcgtg

SEQ ID NO: 409217 - DNA, 30 bp, Artificial Sequence
  Synthetic oligonucleotide
gtccttagcaacgaggtgtttactatcgtg

SEQ ID NO: 409218 - DNA, 30 bp, Artificial Sequence
  Synthetic oligonucleotide
gaggtttcattctgtttgtgcggtatcgtg

SEQ ID NO: 409219 - DNA, 30 bp, Artificial Sequence
  Synthetic oligonucleotide
atcaactgtaatctcagacaactcctcgtg

SEQ ID NO: 409220 - DNA, 30 bp, Artificial Sequence
  Synthetic oligonucleotide
gatgataccccagggtatggttatctcgtg

SEQ ID NO: 409221 - DNA, 30 bp, Artificial Sequence
  Synthetic oligonucleotide
tgattttactgcctgggagcccgtctcgtg

SEQ ID NO: 409222 - DNA, 30 bp, Artificial Sequence
  Synthetic oligonucleotide
ctcagttactgctttatcaacggcgtcgtg

SEQ ID NO: 409223 - DNA, 30 bp, Artificial Sequence
  Synthetic oligonucleotide
cgctagggaccgcagcgttattttgtcgtg

SEQ ID NO: 409224 - DNA, 30 bp, Artificial Sequence
  Synthetic oligonucleotide
ccgcttacgcggcaggcaagacaattcgtg

SEQ ID NO: 409225 - DNA, 30 bp, Artificial Sequence
  Synthetic oligonucleotide
atgttcaccgtgtagtgcaccgcattcgtg

SEQ ID NO: 409226 - DNA, 30 bp, Artificial Sequence
  Synthetic oligonucleotide
cgggattctaagtaaatagtttacttcgtg

SEQ ID NO: 409227 - DNA, 30 bp, Artificial Sequence
  Synthetic oligonucleotide
aggcgcagtgtctaggatttatccttcgtg

SEQ ID NO: 409228 - DNA, 30 bp, Artificial Sequence
  Synthetic oligonucleotide
cttattgtctgtccctgaaacttgttcgtg

SEQ ID NO: 409229 - DNA, 30 bp, Artificial Sequence
  Synthetic oligonucleotide
attggtatatgttgtatggcttctttcgtg

SEQ ID NO: 409230 - DNA, 30 bp, Artificial Sequence
  Synthetic oligonucleotide
caaaaaagtcttcgcaagaagcgtttcgtg

SEQ ID NO: 409231 - DNA, 30 bp, Artificial Sequence
  Synthetic oligonucleotide
aaatcggtacttttaggatagtcaaaggtg

SEQ ID NO: 409232 - DNA, 30 bp, Artificial Sequence
  Synthetic oligonucleotide
gaataagttccctgctccatttacaaggtg

SEQ ID NO: 409233 - DNA, 30 bp, Artificial Sequence
  Synthetic oligonucleotide
gcccactttagctgggccaagacgaaggtg

SEQ ID NO: 409234 - DNA, 30 bp, Artificial Sequence
  Synthetic oligonucleotide
cattggccaattctattctaggcgaaggtg

SEQ ID NO: 409235 - DNA, 30 bp, Artificial Sequence
  Synthetic oligonucleotide
cttctctgagtgagttatccgtcgaaggtg

SEQ ID NO: 409236 - DNA, 27 bp, Artificial Sequence
  Synthetic oligonucleotide
tcgaacgaagcgaccacttcacaggtg

SEQ ID NO: 409237 - DNA, 30 bp, Artificial Sequence
  Synthetic oligonucleotide
gccgtaatgcgggtgacgcatccccaggtg

SEQ ID NO: 409238 - DNA, 30 bp, Artificial Sequence
  Synthetic oligonucleotide
ccatattaaatagttaataatgggcaggtg

SEQ ID NO: 409239 - DNA, 30 bp, Artificial Sequence
  Synthetic oligonucleotide
gtttccactggcgatagaattaatcaggtg

SEQ ID NO: 409240 - DNA, 30 bp, Artificial Sequence
  Synthetic oligonucleotide
caattaggctcagtcttcacgttagaggtg

SEQ ID NO: 409241 - DNA, 30 bp, Artificial Sequence
  Synthetic oligonucleotide
gacctctgggaccggcgtgctctcgaggtg

SEQ ID NO: 409242 - DNA, 30 bp, Artificial Sequence
  Synthetic oligonucleotide
tgtggttaagtaccggggcgggaggaggtg

SEQ ID NO: 409243 - DNA, 30 bp, Artificial Sequence
  Synthetic oligonucleotide
tttagtgtttaagaggggtcacgggaggtg

SEQ ID NO: 409244 - DNA, 30 bp, Artificial Sequence
  Synthetic oligonucleotide
taagacccgaatcattgaaggcttgaggtg

SEQ ID NO: 409245 - DNA, 30 bp, Artificial Sequence
  Synthetic oligonucleotide
ctcggccattgctacaactaagttgaggtg

SEQ ID NO: 409246 - DNA, 30 bp, Artificial Sequence
  Synthetic oligonucleotide
tacagcaactttagccacctttaataggtg

SEQ ID NO: 409247 - DNA, 30 bp, Artificial Sequence
  Synthetic oligonucleotide
attaccgttgcgggcgtcctcttataggtg

SEQ ID NO: 409248 - DNA, 30 bp, Artificial Sequence
  Synthetic oligonucleotide
ctcgagttgcacgacatagacctctaggtg

SEQ ID NO: 409249 - DNA, 30 bp, Artificial Sequence
  Synthetic oligonucleotide
ccggcattccgaatgcccaacgagtaggtg

SEQ ID NO: 409250 - DNA, 30 bp, Artificial Sequence
  Synthetic oligonucleotide
ctgatgaatggtcgctacacgtagtaggtg

SEQ ID NO: 409251 - DNA, 30 bp, Artificial Sequence
  Synthetic oligonucleotide
ttgcatgtgagccagttagcttggtaggtg

SEQ ID NO: 409252 - DNA, 30 bp, Artificial Sequence
  Synthetic oligonucleotide
acttcaggttgggtagggtaactgtaggtg

SEQ ID NO: 409253 - DNA, 30 bp, Artificial Sequence
  Synthetic oligonucleotide
gcaacttatcgggtgtttaaaaattaggtg

SEQ ID NO: 409254 - DNA, 30 bp, Artificial Sequence
  Synthetic oligonucleotide
cagtggctgaacgcaagttcccgttaggtg

SEQ ID NO: 409255 - DNA, 30 bp, Artificial Sequence
  Synthetic oligonucleotide
gggttcgattgttgttcccctggttaggtg

SEQ ID NO: 409256 - DNA, 30 bp, Artificial Sequence
  Synthetic oligonucleotide
ccattccgtatgccgccaagcccaacggtg

SEQ ID NO: 409257 - DNA, 30 bp, Artificial Sequence
  Synthetic oligonucleotide
tctagtagtccaggacatcagtacacggtg

SEQ ID NO: 409258 - DNA, 30 bp, Artificial Sequence
  Synthetic oligonucleotide
ccttttaacgtgagccgttattccacggtg

SEQ ID NO: 409259 - DNA, 30 bp, Artificial Sequence
  Synthetic oligonucleotide
atacgcatatagtagatccttcgcacggtg

SEQ ID NO: 409260 - DNA, 30 bp, Artificial Sequence
  Synthetic oligonucleotide
agtgaaataatcaggtacttgtagacggtg

SEQ ID NO: 409261 - DNA, 30 bp, Artificial Sequence
  Synthetic oligonucleotide
ttcccgacgaaggggctaagtggaccggtg

SEQ ID NO: 409262 - DNA, 30 bp, Artificial Sequence
  Synthetic oligonucleotide
gctacaacccttcgtcagtgcataccggtg

SEQ ID NO: 409263 - DNA, 30 bp, Artificial Sequence
  Synthetic oligonucleotide
taaaaaagttccgtagaagtctccccggtg

SEQ ID NO: 409264 - DNA, 30 bp, Artificial Sequence
  Synthetic oligonucleotide
ggaatatcggctgttcccctaggcccggtg

SEQ ID NO: 409265 - DNA, 30 bp, Artificial Sequence
  Synthetic oligonucleotide
gttgttagagggcttagtgctttcccggtg

SEQ ID NO: 409266 - DNA, 30 bp, Artificial Sequence
  Synthetic oligonucleotide
ccccttgtcggagacgacgaaaatccggtg

SEQ ID NO: 409267 - DNA, 30 bp, Artificial Sequence
  Synthetic oligonucleotide
ctgtttaattgatacactcattctccggtg

SEQ ID NO: 409268 - DNA, 30 bp, Artificial Sequence
  Synthetic oligonucleotide
tgcggcgtgccgagaagtttcagagcggtg

SEQ ID NO: 409269 - DNA, 30 bp, Artificial Sequence
  Synthetic oligonucleotide
tttgttaaataatgacgatagagagcggtg

SEQ ID NO: 409270 - DNA, 30 bp, Artificial Sequence
  Synthetic oligonucleotide
ttccatgcacatgacgtgtgcgcggcggtg

SEQ ID NO: 409271 - DNA, 30 bp, Artificial Sequence
  Synthetic oligonucleotide
ctccaccgcacgtaatgagggactgcggtg

SEQ ID NO: 409272 - DNA, 30 bp, Artificial Sequence
  Synthetic oligonucleotide
cttatttcaacatttgcacactgtgcggtg

SEQ ID NO: 409273 - DNA, 30 bp, Artificial Sequence
  Synthetic oligonucleotide
gagttgcttgtttgagatcgcgaatcggtg

SEQ ID NO: 409274 - DNA, 30 bp, Artificial Sequence
  Synthetic oligonucleotide
cccatcctgagccttgcgatgggatcggtg

SEQ ID NO: 409275 - DNA, 30 bp, Artificial Sequence
  Synthetic oligonucleotide
acaagacttattacaatctcggactcggtg

SEQ ID NO: 409276 - DNA, 30 bp, Artificial Sequence
  Synthetic oligonucleotide
gtataaactgaccacgagtattactcggtg

SEQ ID NO: 409277 - DNA, 30 bp, Artificial Sequence
  Synthetic oligonucleotide
tgtagtgtcgttgcgatggtgaagtcggtg

SEQ ID NO: 409278 - DNA, 30 bp, Artificial Sequence
  Synthetic oligonucleotide
gatccgaacgcgtaaaatgccctttcggtg

SEQ ID NO: 409279 - DNA, 30 bp, Artificial Sequence
  Synthetic oligonucleotide
cgcaatacgcccggttcaaattgcagggtg

SEQ ID NO: 409280 - DNA, 30 bp, Artificial Sequence
  Synthetic oligonucleotide
aacctgggtaagtgtcttttgacacgggtg

SEQ ID NO: 409281 - DNA, 30 bp, Artificial Sequence
  Synthetic oligonucleotide
tcgccacgtaattcaaatacaatacgggtg

SEQ ID NO: 409282 - DNA, 30 bp, Artificial Sequence
  Synthetic oligonucleotide
tgttccactgtggccccataaacccgggtg

SEQ ID NO: 409283 - DNA, 30 bp, Artificial Sequence
  Synthetic oligonucleotide
tagtgcgcgtgattattggtgaagcgggtg

SEQ ID NO: 409284 - DNA, 30 bp, Artificial Sequence
  Synthetic oligonucleotide
ttacccagtacgtattacccgtatcgggtg

SEQ ID NO: 409285 - DNA, 30 bp, Artificial Sequence
  Synthetic oligonucleotide
gacgacagctgccctaaactcactcgggtg

SEQ ID NO: 409286 - DNA, 30 bp, Artificial Sequence
  Synthetic oligonucleotide
atacgcttactttacaggctgaccggggtg

SEQ ID NO: 409287 - DNA, 30 bp, Artificial Sequence
  Synthetic oligonucleotide
gccctgttgcgttgatgctatgtcggggtg

SEQ ID NO: 409288 - DNA, 30 bp, Artificial Sequence
  Synthetic oligonucleotide
tctaattttcatgtgcaagaagcgggggtg

SEQ ID NO: 409289 - DNA, 30 bp, Artificial Sequence
  Synthetic oligonucleotide
ctatggcggctcggttttctgcatggggtg

SEQ ID NO: 409290 - DNA, 30 bp, Artificial Sequence
  Synthetic oligonucleotide
gagtgcggggtaattaaaggatctggggtg

SEQ ID NO: 409291 - DNA, 30 bp, Artificial Sequence
  Synthetic oligonucleotide
cagattgaattaagcccttggcgatgggtg

SEQ ID NO: 409292 - DNA, 30 bp, Artificial Sequence
  Synthetic oligonucleotide
tttaatttacgcgagtctccttcctgggtg

SEQ ID NO: 409293 - DNA, 30 bp, Artificial Sequence
  Synthetic oligonucleotide
ccatagagcatgccatcacagttctgggtg

SEQ ID NO: 409294 - DNA, 30 bp, Artificial Sequence
  Synthetic oligonucleotide
taggcacaggcggatgtgcacccgtgggtg

SEQ ID NO: 409295 - DNA, 30 bp, Artificial Sequence
  Synthetic oligonucleotide
actctcctaaagggtaaccatccttgggtg

SEQ ID NO: 409296 - DNA, 30 bp, Artificial Sequence
  Synthetic oligonucleotide
agtgtgaagtgtggtaggtagttttgggtg

SEQ ID NO: 409297 - DNA, 30 bp, Artificial Sequence
  Synthetic oligonucleotide
ttagtgaatagaagttgacgtataatggtg

SEQ ID NO: 409298 - DNA, 30 bp, Artificial Sequence
  Synthetic oligonucleotide
aacaaggttcggccgacgggagacatggtg

SEQ ID NO: 409299 - DNA, 30 bp, Artificial Sequence
  Synthetic oligonucleotide
agacgtcgccatctggcccgatacatggtg

SEQ ID NO: 409300 - DNA, 30 bp, Artificial Sequence
  Synthetic oligonucleotide
gaaaaaaatcttctaacacactccatggtg

SEQ ID NO: 409301 - DNA, 30 bp, Artificial Sequence
  Synthetic oligonucleotide
tatgggtctggggaccgaggtaagatggtg

SEQ ID NO: 409302 - DNA, 30 bp, Artificial Sequence
  Synthetic oligonucleotide
gcttcagcttctcgtttgtccgggatggtg

SEQ ID NO: 409303 - DNA, 30 bp, Artificial Sequence
  Synthetic oligonucleotide
tgcgtgctttataatcggtgatggatggtg

SEQ ID NO: 409304 - DNA, 30 bp, Artificial Sequence
  Synthetic oligonucleotide
gatgatcaatcaagttcttatctgatggtg

SEQ ID NO: 409305 - DNA, 30 bp, Artificial Sequence
  Synthetic oligonucleotide
ttcaataaacgcttcgtatgcgaactggtg

SEQ ID NO: 409306 - DNA, 30 bp, Artificial Sequence
  Synthetic oligonucleotide
acagaatttgtaaggtgtataacactggtg

SEQ ID NO: 409307 - DNA, 30 bp, Artificial Sequence
  Synthetic oligonucleotide
cccacgccgtcaggccctgtatcactggtg

SEQ ID NO: 409308 - DNA, 30 bp, Artificial Sequence
  Synthetic oligonucleotide
gcgagcactccatgtacctgtatcctggtg

SEQ ID NO: 409309 - DNA, 30 bp, Artificial Sequence
  Synthetic oligonucleotide
aaataataaacgttggtggggctcctggtg

SEQ ID NO: 409310 - DNA, 30 bp, Artificial Sequence
  Synthetic oligonucleotide
ccggttctcctagaagcacgacagctggtg

SEQ ID NO: 409311 - DNA, 30 bp, Artificial Sequence
  Synthetic oligonucleotide
ctccaggagcactacaggtcgttgctggtg

SEQ ID NO: 409312 - DNA, 30 bp, Artificial Sequence
  Synthetic oligonucleotide
ggtgtgatttggggcgcagattatctggtg

SEQ ID NO: 409313 - DNA, 30 bp, Artificial Sequence
  Synthetic oligonucleotide
gtccccgacggttacaggaagccagtggtg

SEQ ID NO: 409314 - DNA, 30 bp, Artificial Sequence
  Synthetic oligonucleotide
taacacctgaacaatcgtaatccagtggtg

SEQ ID NO: 409315 - DNA, 30 bp, Artificial Sequence
  Synthetic oligonucleotide
agtatatctaatttattacggtcagtggtg

SEQ ID NO: 409316 - DNA, 30 bp, Artificial Sequence
  Synthetic oligonucleotide
tgtaccgtatctatgacgtacggagtggtg

SEQ ID NO: 409317 - DNA, 30 bp, Artificial Sequence
  Synthetic oligonucleotide
aggcacgcagtattcctgctgtgcgtggtg

SEQ ID NO: 409318 - DNA, 30 bp, Artificial Sequence
  Synthetic oligonucleotide
gggaggcttcggggctagccgaaggtggtg

SEQ ID NO: 409319 - DNA, 30 bp, Artificial Sequence
  Synthetic oligonucleotide
gtataatggatgcgtcataccccggtggtg

SEQ ID NO: 409320 - DNA, 30 bp, Artificial Sequence
  Synthetic oligonucleotide
gatttaaacgatatgctcgctgctgtggtg

SEQ ID NO: 409321 - DNA, 30 bp, Artificial Sequence
  Synthetic oligonucleotide
aacgggttggtcgcagggcgtcgtgtggtg

SEQ ID NO: 409322 - DNA, 30 bp, Artificial Sequence
  Synthetic oligonucleotide
gccaagcagacgcatcgtagggcattggtg

SEQ ID NO: 409323 - DNA, 30 bp, Artificial Sequence
  Synthetic oligonucleotide
agttgttaccgggacggtaggcccttggtg

SEQ ID NO: 409324 - DNA, 30 bp, Artificial Sequence
  Synthetic oligonucleotide
ctctaggagcctaatctgtagtaaaatgtg

SEQ ID NO: 409325 - DNA, 30 bp, Artificial Sequence
  Synthetic oligonucleotide
cggggccgtggccccatttatctaaatgtg

SEQ ID NO: 409326 - DNA, 30 bp, Artificial Sequence
  Synthetic oligonucleotide
taagcgcccgttgtacgcgtcctgaatgtg

SEQ ID NO: 409327 - DNA, 30 bp, Artificial Sequence
  Synthetic oligonucleotide
gcatcaattgactaattttgagtgaatgtg

SEQ ID NO: 409328 - DNA, 30 bp, Artificial Sequence
  Synthetic oligonucleotide
tataataacttcctcaatgacctacatgtg

SEQ ID NO: 409329 - DNA, 30 bp, Artificial Sequence
  Synthetic oligonucleotide
cacattactactggatagccgcgtcatgtg

SEQ ID NO: 409330 - DNA, 30 bp, Artificial Sequence
  Synthetic oligonucleotide
tagagacacatccgctcgaagattcatgtg

SEQ ID NO: 409331 - DNA, 30 bp, Artificial Sequence
  Synthetic oligonucleotide
ggtgacgtacggacggtgcggacggatgtg

SEQ ID NO: 409332 - DNA, 30 bp, Artificial Sequence
  Synthetic oligonucleotide
cttactcacagaatacagccgtatgatgtg

SEQ ID NO: 409333 - DNA, 30 bp, Artificial Sequence
  Synthetic oligonucleotide
tatggttatttatgtgctcaaggtgatgtg

SEQ ID NO: 409334 - DNA, 30 bp, Artificial Sequence
  Synthetic oligonucleotide
ggcaataaataaaatttctaggtgtatgtg

SEQ ID NO: 409335 - DNA, 30 bp, Artificial Sequence
  Synthetic oligonucleotide
cgcatgcactccctgcctcaggcttatgtg

SEQ ID NO: 409336 - DNA, 30 bp, Artificial Sequence
  Synthetic oligonucleotide
gtccctaacacgtatgtttagtgtactgtg

SEQ ID NO: 409337 - DNA, 30 bp, Artificial Sequence
  Synthetic oligonucleotide
gtaaaggttgctcccgggcttccacctgtg

SEQ ID NO: 409338 - DNA, 30 bp, Artificial Sequence
  Synthetic oligonucleotide
gcgctatcattttaagcgacctagcctgtg

SEQ ID NO: 409339 - DNA, 30 bp, Artificial Sequence
  Synthetic oligonucleotide
gtgactattctggcggcgtaggtgcctgtg

SEQ ID NO: 409340 - DNA, 30 bp, Artificial Sequence
  Synthetic oligonucleotide
gagtgtagggcccccggtctacatcctgtg

SEQ ID NO: 409341 - DNA, 30 bp, Artificial Sequence
  Synthetic oligonucleotide
gtcgtaaacggtacccctcagggtcctgtg

SEQ ID NO: 409342 - DNA, 30 bp, Artificial Sequence
  Synthetic oligonucleotide
tagactcgagctcacagacactgtcctgtg

SEQ ID NO: 409343 - DNA, 30 bp, Artificial Sequence
  Synthetic oligonucleotide
aattcactaggggattagaaaattcctgtg

SEQ ID NO: 409344 - DNA, 30 bp, Artificial Sequence
  Synthetic oligonucleotide
cctctacctaacgaggtctacgaagctgtg

SEQ ID NO: 409345 - DNA, 30 bp, Artificial Sequence
  Synthetic oligonucleotide
gtacatgcagtgtccaggattttagctgtg

SEQ ID NO: 409346 - DNA, 30 bp, Artificial Sequence
  Synthetic oligonucleotide
cgtacgttttgactggtagatcacgctgtg

SEQ ID NO: 409347 - DNA, 30 bp, Artificial Sequence
  Synthetic oligonucleotide
gcacatctggtttggccgtaactcgctgtg

SEQ ID NO: 409348 - DNA, 30 bp, Artificial Sequence
  Synthetic oligonucleotide
gcatgtggtatacttcttcgcaaatctgtg

SEQ ID NO: 409349 - DNA, 30 bp, Artificial Sequence
  Synthetic oligonucleotide
aaagaagatggtgcttgagcaatatctgtg

SEQ ID NO: 409350 - DNA, 30 bp, Artificial Sequence
  Synthetic oligonucleotide
gtctccaggataggatggatccactctgtg

SEQ ID NO: 409351 - DNA, 30 bp, Artificial Sequence
  Synthetic oligonucleotide
gaagttgcagcgcgactgctctgctctgtg

SEQ ID NO: 409352 - DNA, 30 bp, Artificial Sequence
  Synthetic oligonucleotide
tccttagcaactgtcatcggactctctgtg

SEQ ID NO: 409353 - DNA, 30 bp, Artificial Sequence
  Synthetic oligonucleotide
gagggtcatcaaacttacctcaggtctgtg

SEQ ID NO: 409354 - DNA, 30 bp, Artificial Sequence
  Synthetic oligonucleotide
ggcgcaggtactctgctttccttgtctgtg

SEQ ID NO: 409355 - DNA, 30 bp, Artificial Sequence
  Synthetic oligonucleotide
cttgtggtaaatggtccgaatgcttctgtg

SEQ ID NO: 409356 - DNA, 30 bp, Artificial Sequence
  Synthetic oligonucleotide
gaggatgcgaacacttaatgataaagtgtg

SEQ ID NO: 409357 - DNA, 30 bp, Artificial Sequence
  Synthetic oligonucleotide
tacaataatgaccctgggcggagaagtgtg

SEQ ID NO: 409358 - DNA, 30 bp, Artificial Sequence
  Synthetic oligonucleotide
gttagcaaaaggaacactgatcacagtgtg

SEQ ID NO: 409359 - DNA, 30 bp, Artificial Sequence
  Synthetic oligonucleotide
ctaacagaagcgctcgtagattacagtgtg

SEQ ID NO: 409360 - DNA, 30 bp, Artificial Sequence
  Synthetic oligonucleotide
ctgaccacgtattagatccctcccagtgtg

SEQ ID NO: 409361 - DNA, 30 bp, Artificial Sequence
  Synthetic oligonucleotide
gtatcctgctcttttatgccccagagtgtg

SEQ ID NO: 409362 - DNA, 30 bp, Artificial Sequence
  Synthetic oligonucleotide
ttatttaggttccctctaacggagagtgtg

SEQ ID NO: 409363 - DNA, 30 bp, Artificial Sequence
  Synthetic oligonucleotide
ttacgatatgctacatgtggcaatagtgtg

SEQ ID NO: 409364 - DNA, 30 bp, Artificial Sequence
  Synthetic oligonucleotide
ggtcagtccatatagacatggacccgtgtg

SEQ ID NO: 409365 - DNA, 30 bp, Artificial Sequence
  Synthetic oligonucleotide
agctcacatattttcatgccgggcggtgtg

SEQ ID NO: 409366 - DNA, 30 bp, Artificial Sequence
  Synthetic oligonucleotide
agtgggcggcatttggatggcgcgggtgtg

SEQ ID NO: 409367 - DNA, 30 bp, Artificial Sequence
  Synthetic oligonucleotide
gtcactacccacggcaacccgtgtggtgtg

SEQ ID NO: 409368 - DNA, 30 bp, Artificial Sequence
  Synthetic oligonucleotide
ggaagtagtcaggtacttcaatttggtgtg

SEQ ID NO: 409369 - DNA, 30 bp, Artificial Sequence
  Synthetic oligonucleotide
aggcccggccctcctgacgttaaatgtgtg

SEQ ID NO: 409370 - DNA, 30 bp, Artificial Sequence
  Synthetic oligonucleotide
tttagtcccagggtgaatacaaactgtgtg

SEQ ID NO: 409371 - DNA, 30 bp, Artificial Sequence
  Synthetic oligonucleotide
atggcttgcttctgcaggacccactgtgtg

SEQ ID NO: 409372 - DNA, 30 bp, Artificial Sequence
  Synthetic oligonucleotide
caatgcaacgaaagtaagtaactctgtgtg

SEQ ID NO: 409373 - DNA, 30 bp, Artificial Sequence
  Synthetic oligonucleotide
ccgcgtcacactgcagctttagagtgtgtg

SEQ ID NO: 409374 - DNA, 30 bp, Artificial Sequence
  Synthetic oligonucleotide
aacacgctatactttggaggcgagtgtgtg

SEQ ID NO: 409375 - DNA, 30 bp, Artificial Sequence
  Synthetic oligonucleotide
gagcgtgtggcgcaccaacgaaggtgtgtg

SEQ ID NO: 409376 - DNA, 30 bp, Artificial Sequence
  Synthetic oligonucleotide
taataactaatccgggtattaaattgtgtg

SEQ ID NO: 409377 - DNA, 30 bp, Artificial Sequence
  Synthetic oligonucleotide
aacgcacaggccaagaagagtccttgtgtg

SEQ ID NO: 409378 - DNA, 30 bp, Artificial Sequence
  Synthetic oligonucleotide
cctgttgcaaagagtacactagcttgtgtg

SEQ ID NO: 409379 - DNA, 30 bp, Artificial Sequence
  Synthetic oligonucleotide
gatccaggatagcggataccagtttgtgtg

SEQ ID NO: 409380 - DNA, 30 bp, Artificial Sequence
  Synthetic oligonucleotide
actttacagtatgtatgttagtaaattgtg

SEQ ID NO: 409381 - DNA, 30 bp, Artificial Sequence
  Synthetic oligonucleotide
ggtcaaaacacgtgttaggggtaaattgtg

SEQ ID NO: 409382 - DNA, 30 bp, Artificial Sequence
  Synthetic oligonucleotide
atatcgcacacttgtaagacgggaattgtg

SEQ ID NO: 409383 - DNA, 30 bp, Artificial Sequence
  Synthetic oligonucleotide
gttcatctgcaagcgaagtggcccattgtg

SEQ ID NO: 409384 - DNA, 30 bp, Artificial Sequence
  Synthetic oligonucleotide
gatgccaatcgcccgcttgtgggcattgtg

SEQ ID NO: 409385 - DNA, 30 bp, Artificial Sequence
  Synthetic oligonucleotide
gagactaggcaccagtcaccccagattgtg

SEQ ID NO: 409386 - DNA, 30 bp, Artificial Sequence
  Synthetic oligonucleotide
aattcccgtttgtcagggaggcatattgtg

SEQ ID NO: 409387 - DNA, 30 bp, Artificial Sequence
  Synthetic oligonucleotide
gatagatgtttagagtatcttcttattgtg

SEQ ID NO: 409388 - DNA, 30 bp, Artificial Sequence
  Synthetic oligonucleotide
aactatcccctagatgccggcaaacttgtg

SEQ ID NO: 409389 - DNA, 30 bp, Artificial Sequence
  Synthetic oligonucleotide
aagtcttctagctccttacaccagcttgtg

SEQ ID NO: 409390 - DNA, 30 bp, Artificial Sequence
  Synthetic oligonucleotide
attctaaagcggtccgctactgcgcttgtg

SEQ ID NO: 409391 - DNA, 30 bp, Artificial Sequence
  Synthetic oligonucleotide
gtgctcggcgacgctagtggcggtcttgtg

SEQ ID NO: 409392 - DNA, 30 bp, Artificial Sequence
  Synthetic oligonucleotide
cccggtaaacgtgttcacaatgcagttgtg

SEQ ID NO: 409393 - DNA, 30 bp, Artificial Sequence
  Synthetic oligonucleotide
cttctgagttctcgcagcatagctgttgtg

SEQ ID NO: 409394 - DNA, 30 bp, Artificial Sequence
  Synthetic oligonucleotide
atttaggccttggtcatgaatcgtgttgtg

SEQ ID NO: 409395 - DNA, 30 bp, Artificial Sequence
  Synthetic oligonucleotide
actgtttaggcttaaagtggttagtttgtg

SEQ ID NO: 409396 - DNA, 30 bp, Artificial Sequence
  Synthetic oligonucleotide
tgtaatccaaactttggtttgaggtttgtg

SEQ ID NO: 409397 - DNA, 30 bp, Artificial Sequence
  Synthetic oligonucleotide
tattaggtcccggggctctgagggtttgtg

SEQ ID NO: 409398 - DNA, 30 bp, Artificial Sequence
  Synthetic oligonucleotide
ctaaaatttgtccgtaaagggtggtttgtg

SEQ ID NO: 409399 - DNA, 30 bp, Artificial Sequence
  Synthetic oligonucleotide
agagtcggcaattctgcagctgtttttgtg

SEQ ID NO: 409400 - DNA, 30 bp, Artificial Sequence
  Synthetic oligonucleotide
gttaccctcgatgataagcagttttttgtg

SEQ ID NO: 409401 - DNA, 30 bp, Artificial Sequence
  Synthetic oligonucleotide
cacttaaaaaattggtttaggttttttgtg

SEQ ID NO: 409402 - DNA, 30 bp, Artificial Sequence
  Synthetic oligonucleotide
ctcaaagcgtggcctttagtcacaaaattg

SEQ ID NO: 409403 - DNA, 30 bp, Artificial Sequence
  Synthetic oligonucleotide
aaacgttacacgtcagtgaagacaaaattg

SEQ ID NO: 409404 - DNA, 30 bp, Artificial Sequence
  Synthetic oligonucleotide
caccgttgcttgtccattttaggaaaattg

SEQ ID NO: 409405 - DNA, 31 bp, Artificial Sequence
  Synthetic oligonucleotide
gtctgagctacctatgttaaccctaaaattg

SEQ ID NO: 409406 - DNA, 30 bp, Artificial Sequence
  Synthetic oligonucleotide
ttgcccccacgaaagccaatacgcaaattg

SEQ ID NO: 409407 - DNA, 30 bp, Artificial Sequence
  Synthetic oligonucleotide
tgcatcatagggtcctcccgctgcaaattg

SEQ ID NO: 409408 - DNA, 30 bp, Artificial Sequence
  Synthetic oligonucleotide
atataggttacagtgctcgaaaataaattg

SEQ ID NO: 409409 - DNA, 30 bp, Artificial Sequence
  Synthetic oligonucleotide
aaattgctattacacatgaggaataaattg

SEQ ID NO: 409410 - DNA, 30 bp, Artificial Sequence
  Synthetic oligonucleotide
gctttctagttttctagggtgagtaaattg

SEQ ID NO: 409411 - DNA, 30 bp, Artificial Sequence
  Synthetic oligonucleotide
tatttgagagcgacgtctgattgtaaattg

SEQ ID NO: 409412 - DNA, 30 bp, Artificial Sequence
  Synthetic oligonucleotide
actctccgagtcgtaatagttgaccaattg

SEQ ID NO: 409413 - DNA, 30 bp, Artificial Sequence
  Synthetic oligonucleotide
attctgacgggaagaagtggcacccaattg

SEQ ID NO: 409414 - DNA, 30 bp, Artificial Sequence
  Synthetic oligonucleotide
gccggttggtaactgtattgcagccaattg

SEQ ID NO: 409415 - DNA, 30 bp, Artificial Sequence
  Synthetic oligonucleotide
gtcgacgttctacttttttgccgccaattg

SEQ ID NO: 409416 - DNA, 30 bp, Artificial Sequence
  Synthetic oligonucleotide
ggaatgtttgaactgatttagctgcaattg

SEQ ID NO: 409417 - DNA, 30 bp, Artificial Sequence
  Synthetic oligonucleotide
aaaatgctggtgcaagatggacaagaattg

SEQ ID NO: 409418 - DNA, 30 bp, Artificial Sequence
  Synthetic oligonucleotide
tattgccgacgctagaagttccgagaattg

SEQ ID NO: 409419 - DNA, 30 bp, Artificial Sequence
  Synthetic oligonucleotide
tctattcatttacgcaagggacacgaattg

SEQ ID NO: 409420 - DNA, 30 bp, Artificial Sequence
  Synthetic oligonucleotide
gtgcactacctagtacagcagggctaattg

SEQ ID NO: 409421 - DNA, 30 bp, Artificial Sequence
  Synthetic oligonucleotide
cccaattaacaatattcctccccgtaattg

SEQ ID NO: 409422 - DNA, 30 bp, Artificial Sequence
  Synthetic oligonucleotide
gatcgtgttaacaatccactccggtaattg

SEQ ID NO: 409423 - DNA, 29 bp, Artificial Sequence
  Synthetic oligonucleotide
taattgatggatgtcctaaaatgtaattg

SEQ ID NO: 409424 - DNA, 30 bp, Artificial Sequence
  Synthetic oligonucleotide
gaacgaggaggcttagggatgatgtaattg

SEQ ID NO: 409425 - DNA, 30 bp, Artificial Sequence
  Synthetic oligonucleotide
gcctacaattgacatgtcttcgtgtaattg

SEQ ID NO: 409426 - DNA, 30 bp, Artificial Sequence
  Synthetic oligonucleotide
gcagaatgaagtctttgaaattcttaattg

SEQ ID NO: 409427 - DNA, 30 bp, Artificial Sequence
  Synthetic oligonucleotide
ggattggacgcatcctcaatggaaacattg

SEQ ID NO: 409428 - DNA, 30 bp, Artificial Sequence
  Synthetic oligonucleotide
taaccccatagtacacggatttcaacattg

SEQ ID NO: 409429 - DNA, 30 bp, Artificial Sequence
  Synthetic oligonucleotide
acttcaaaaaaggcagccgcagagacattg

SEQ ID NO: 409430 - DNA, 30 bp, Artificial Sequence
  Synthetic oligonucleotide
ttttgagatatcttctcaccatgtacattg

SEQ ID NO: 409431 - DNA, 30 bp, Artificial Sequence
  Synthetic oligonucleotide
tctggcactagtcctacattaataccattg

SEQ ID NO: 409432 - DNA, 30 bp, Artificial Sequence
  Synthetic oligonucleotide
agcatgatgaggttctagtatcgcccattg

SEQ ID NO: 409433 - DNA, 30 bp, Artificial Sequence
  Synthetic oligonucleotide
cttaccttgctattttgcttaagtccattg

SEQ ID NO: 409434 - DNA, 30 bp, Artificial Sequence
  Synthetic oligonucleotide
aaattagtcagcagcaaggcagttccattg

SEQ ID NO: 409435 - DNA, 30 bp, Artificial Sequence
  Synthetic oligonucleotide
tgggtttaaccaatacaatctgcagcattg

SEQ ID NO: 409436 - DNA, 30 bp, Artificial Sequence
  Synthetic oligonucleotide
tagtgattttccagatcctatagagcattg

SEQ ID NO: 409437 - DNA, 30 bp, Artificial Sequence
  Synthetic oligonucleotide
tataatccgcaaactaaaccccgagcattg

SEQ ID NO: 409438 - DNA, 30 bp, Artificial Sequence
  Synthetic oligonucleotide
cactcgcttcttgataggtgtttagcattg

SEQ ID NO: 409439 - DNA, 30 bp, Artificial Sequence
  Synthetic oligonucleotide
gactcgttcaggctggcaggtagggcattg

SEQ ID NO: 409440 - DNA, 30 bp, Artificial Sequence
  Synthetic oligonucleotide
ctgctttaaagtacaatattcactgcattg

SEQ ID NO: 409441 - DNA, 30 bp, Artificial Sequence
  Synthetic oligonucleotide
aaatcgaccatcgtatgaactgctgcattg

SEQ ID NO: 409442 - DNA, 30 bp, Artificial Sequence
  Synthetic oligonucleotide
ggttcatgattgaaaacggcataatcattg

SEQ ID NO: 409443 - DNA, 30 bp, Artificial Sequence
  Synthetic oligonucleotide
cagagcgagaatttacgggggatctcattg

SEQ ID NO: 409444 - DNA, 30 bp, Artificial Sequence
  Synthetic oligonucleotide
ggcattttagcgaaggatggcgcaagattg

SEQ ID NO: 409445 - DNA, 30 bp, Artificial Sequence
  Synthetic oligonucleotide
gatatcccgacaagccaagtttagagattg

SEQ ID NO: 409446 - DNA, 30 bp, Artificial Sequence
  Synthetic oligonucleotide
cttgaacacccggtctcgcgtacgagattg

SEQ ID NO: 409447 - DNA, 30 bp, Artificial Sequence
  Synthetic oligonucleotide
attaccgtacttatcttggtaatacgattg

SEQ ID NO: 409448 - DNA, 30 bp, Artificial Sequence
  Synthetic oligonucleotide
aatctgggttgggcagtaacaagccgattg

SEQ ID NO: 409449 - DNA, 30 bp, Artificial Sequence
  Synthetic oligonucleotide
acagcgtgcgtacggtggcgatggcgattg

SEQ ID NO: 409450 - DNA, 30 bp, Artificial Sequence
  Synthetic oligonucleotide
agtacctgccacacttcgtgcttgcgattg

SEQ ID NO: 409451 - DNA, 30 bp, Artificial Sequence
  Synthetic oligonucleotide
gtggcccgttatagccgtggtacaggattg

SEQ ID NO: 409452 - DNA, 30 bp, Artificial Sequence
  Synthetic oligonucleotide
gcacagcctgacctaggtagtccaggattg

SEQ ID NO: 409453 - DNA, 30 bp, Artificial Sequence
  Synthetic oligonucleotide
gtagcagattcggcataccgatcaggattg

SEQ ID NO: 409454 - DNA, 30 bp, Artificial Sequence
  Synthetic oligonucleotide
cttctccgtcagctgagttgctacggattg

SEQ ID NO: 409455 - DNA, 30 bp, Artificial Sequence
  Synthetic oligonucleotide
cagtcatgcctataggatgcggctggattg

SEQ ID NO: 409456 - DNA, 30 bp, Artificial Sequence
  Synthetic oligonucleotide
ttccactgctcattgctaagcgttggattg

SEQ ID NO: 409457 - DNA, 30 bp, Artificial Sequence
  Synthetic oligonucleotide
tcagagtttggagtttctatgaaatgattg

SEQ ID NO: 409458 - DNA, 30 bp, Artificial Sequence
  Synthetic oligonucleotide
ggctcctaagtgacttcctgcggatgattg

SEQ ID NO: 409459 - DNA, 30 bp, Artificial Sequence
  Synthetic oligonucleotide
gatcacagtgtttggttcgatcactgattg

SEQ ID NO: 409460 - DNA, 30 bp, Artificial Sequence
  Synthetic oligonucleotide
atcaattacgatacagttctcgactgattg

SEQ ID NO: 409461 - DNA, 30 bp, Artificial Sequence
  Synthetic oligonucleotide
gaaagaaggttaaagtcgtgggactgattg

SEQ ID NO: 409462 - DNA, 30 bp, Artificial Sequence
  Synthetic oligonucleotide
aactaagagcgctcgagtgaattgtgattg

SEQ ID NO: 409463 - DNA, 30 bp, Artificial Sequence
  Synthetic oligonucleotide
cgggtaatctgtgccctatctttgtgattg

SEQ ID NO: 409464 - DNA, 30 bp, Artificial Sequence
  Synthetic oligonucleotide
agacaaggtgttggaaatcaccattgattg

SEQ ID NO: 409465 - DNA, 30 bp, Artificial Sequence
  Synthetic oligonucleotide
tcaatcgatatcgaatgatctcattgattg

SEQ ID NO: 409466 - DNA, 30 bp, Artificial Sequence
  Synthetic oligonucleotide
gtcgtctaggctcttgtagatacttgattg

SEQ ID NO: 409467 - DNA, 30 bp, Artificial Sequence
  Synthetic oligonucleotide
tttggcatgggcagagtaatcctttgattg

SEQ ID NO: 409468 - DNA, 30 bp, Artificial Sequence
  Synthetic oligonucleotide
taaattttcagtgcttcgagtctttgattg

SEQ ID NO: 409469 - DNA, 30 bp, Artificial Sequence
  Synthetic oligonucleotide
aaaatggtcgtagtacgtggtacaatattg

SEQ ID NO: 409470 - DNA, 30 bp, Artificial Sequence
  Synthetic oligonucleotide
cctagagattgcgaacaacttccaatattg

SEQ ID NO: 409471 - DNA, 30 bp, Artificial Sequence
  Synthetic oligonucleotide
aacttagcatcatgctcagacgtaatattg

SEQ ID NO: 409472 - DNA, 30 bp, Artificial Sequence
  Synthetic oligonucleotide
tacgttcttgggtgcgcgggcttaatattg

SEQ ID NO: 409473 - DNA, 30 bp, Artificial Sequence
  Synthetic oligonucleotide
gcatagtatataatgcgacggaacatattg

SEQ ID NO: 409474 - DNA, 30 bp, Artificial Sequence
  Synthetic oligonucleotide
tcagggtgaccgatgctagacaagatattg

SEQ ID NO: 409475 - DNA, 30 bp, Artificial Sequence
  Synthetic oligonucleotide
tggataacctaatcaggcacttagatattg

SEQ ID NO: 409476 - DNA, 30 bp, Artificial Sequence
  Synthetic oligonucleotide
cttagttgagttcaacctcactctatattg

SEQ ID NO: 409477 - DNA, 30 bp, Artificial Sequence
  Synthetic oligonucleotide
tgatctaagtccgcccatgcagcgctattg

SEQ ID NO: 409478 - DNA, 30 bp, Artificial Sequence
  Synthetic oligonucleotide
ttacgaactatatacatggatgcgctattg

SEQ ID NO: 409479 - DNA, 30 bp, Artificial Sequence
  Synthetic oligonucleotide
gaagcatatagccacagctacaggctattg

SEQ ID NO: 409480 - DNA, 30 bp, Artificial Sequence
  Synthetic oligonucleotide
atgtgtggtataaccttcggctatctattg

SEQ ID NO: 409481 - DNA, 30 bp, Artificial Sequence
  Synthetic oligonucleotide
gccaattgtattttccactttactctattg

SEQ ID NO: 409482 - DNA, 30 bp, Artificial Sequence
  Synthetic oligonucleotide
taagacttttcgctggtaaaagctctattg

SEQ ID NO: 409483 - DNA, 30 bp, Artificial Sequence
  Synthetic oligonucleotide
ccttctagctttgtctgggatattctattg

SEQ ID NO: 409484 - DNA, 30 bp, Artificial Sequence
  Synthetic oligonucleotide
ggctaccgggctgtttcgcgcggagtattg

SEQ ID NO: 409485 - DNA, 30 bp, Artificial Sequence
  Synthetic oligonucleotide
gggtacgtcttttcttcatgaaacgtattg

SEQ ID NO: 409486 - DNA, 30 bp, Artificial Sequence
  Synthetic oligonucleotide
accaaaaacgcctcctcggaggcattattg

SEQ ID NO: 409487 - DNA, 30 bp, Artificial Sequence
  Synthetic oligonucleotide
gtgggaatatgtcattggtggatattattg

SEQ ID NO: 409488 - DNA, 30 bp, Artificial Sequence
  Synthetic oligonucleotide
tacttaagattcgtatgtgagagcttattg

SEQ ID NO: 409489 - DNA, 30 bp, Artificial Sequence
  Synthetic oligonucleotide
gttacacgaaaaatattatgctgcttattg

SEQ ID NO: 409490 - DNA, 30 bp, Artificial Sequence
  Synthetic oligonucleotide
accagcagaataacgcccagactgttattg

SEQ ID NO: 409491 - DNA, 30 bp, Artificial Sequence
  Synthetic oligonucleotide
ctctaaagcagaataagttttattttattg

SEQ ID NO: 409492 - DNA, 30 bp, Artificial Sequence
  Synthetic oligonucleotide
gacgtagctcatgcgctggggctaaacttg

SEQ ID NO: 409493 - DNA, 30 bp, Artificial Sequence
  Synthetic oligonucleotide
gctgacagctgagagcaaaacgtaaacttg

SEQ ID NO: 409494 - DNA, 30 bp, Artificial Sequence
  Synthetic oligonucleotide
ttaccctgtggcggaatgcagtacaacttg

SEQ ID NO: 409495 - DNA, 30 bp, Artificial Sequence
  Synthetic oligonucleotide
gccaaaaaaaccaaccggacgtagaacttg

SEQ ID NO: 409496 - DNA, 30 bp, Artificial Sequence
  Synthetic oligonucleotide
gcgcttttgttccctgggaagcataacttg

SEQ ID NO: 409497 - DNA, 30 bp, Artificial Sequence
  Synthetic oligonucleotide
gtatggagccaactggtaggttataacttg

SEQ ID NO: 409498 - DNA, 30 bp, Artificial Sequence
  Synthetic oligonucleotide
gatattgcggtgtgactaatgcgtaacttg

SEQ ID NO: 409499 - DNA, 30 bp, Artificial Sequence
  Synthetic oligonucleotide
gtccaatcataatgaaccatctttaacttg

SEQ ID NO: 409500 - DNA, 30 bp, Artificial Sequence
  Synthetic oligonucleotide
ttcacctgtcgtcgtcactaaacacacttg

SEQ ID NO: 409501 - DNA, 30 bp, Artificial Sequence
  Synthetic oligonucleotide
tggcgcgatttacagggtctgagacacttg

SEQ ID NO: 409502 - DNA, 30 bp, Artificial Sequence
  Synthetic oligonucleotide
accgatgcattaagttgcttaccgcacttg

SEQ ID NO: 409503 - DNA, 30 bp, Artificial Sequence
  Synthetic oligonucleotide
tagattctgctttcaggtccacctcacttg

SEQ ID NO: 409504 - DNA, 30 bp, Artificial Sequence
  Synthetic oligonucleotide
ccaaagactcaggaaggaatgagtcacttg

SEQ ID NO: 409505 - DNA, 30 bp, Artificial Sequence
  Synthetic oligonucleotide
cggagttgattcaatgaaagttgagacttg

SEQ ID NO: 409506 - DNA, 30 bp, Artificial Sequence
  Synthetic oligonucleotide
ctatctcatatttatcccgcccgcgacttg

SEQ ID NO: 409507 - DNA, 30 bp, Artificial Sequence
  Synthetic oligonucleotide
ccctggttactagcttcaagcaaggacttg

SEQ ID NO: 409508 - DNA, 30 bp, Artificial Sequence
  Synthetic oligonucleotide
acattttggggcacgcgaggaacctacttg

SEQ ID NO: 409509 - DNA, 30 bp, Artificial Sequence
  Synthetic oligonucleotide
gcagctcagcggacggtgtccgtctacttg

SEQ ID NO: 409510 - DNA, 30 bp, Artificial Sequence
  Synthetic oligonucleotide
aatacgctccttggataacggcagtacttg

SEQ ID NO: 409511 - DNA, 30 bp, Artificial Sequence
  Synthetic oligonucleotide
ggtctgctcattagccgtgggtagtacttg

SEQ ID NO: 409512 - DNA, 30 bp, Artificial Sequence
  Synthetic oligonucleotide
taatagtgggaattttgaacatggtacttg

SEQ ID NO: 409513 - DNA, 30 bp, Artificial Sequence
  Synthetic oligonucleotide
gccgacgggtccggtgaaagttcaaccttg

SEQ ID NO: 409514 - DNA, 30 bp, Artificial Sequence
  Synthetic oligonucleotide
gatttgccacgatttccgggaataaccttg

SEQ ID NO: 409515 - DNA, 30 bp, Artificial Sequence
  Synthetic oligonucleotide
tgcattgaacgctggggtcaacgcaccttg

SEQ ID NO: 409516 - DNA, 30 bp, Artificial Sequence
  Synthetic oligonucleotide
aggcatattgcctagtatcgcgggaccttg

SEQ ID NO: 409517 - DNA, 30 bp, Artificial Sequence
  Synthetic oligonucleotide
atggttgaatccacttctgatcttaccttg

SEQ ID NO: 409518 - DNA, 30 bp, Artificial Sequence
  Synthetic oligonucleotide
gtacagggctagaccttattctaccccttg

SEQ ID NO: 409519 - DNA, 30 bp, Artificial Sequence
  Synthetic oligonucleotide
aatcagacctttctgaaaggcttccccttg

SEQ ID NO: 409520 - DNA, 30 bp, Artificial Sequence
  Synthetic oligonucleotide
tccgcgcgctaggtccgattacctcccttg

SEQ ID NO: 409521 - DNA, 30 bp, Artificial Sequence
  Synthetic oligonucleotide
ggcgagtgcaaccctgggtgcggagccttg

SEQ ID NO: 409522 - DNA, 30 bp, Artificial Sequence
  Synthetic oligonucleotide
cattcatgacagtccttctggtccgccttg

SEQ ID NO: 409523 - DNA, 30 bp, Artificial Sequence
  Synthetic oligonucleotide
ctaaggtagggcgggggaagcacggccttg

SEQ ID NO: 409524 - DNA, 30 bp, Artificial Sequence
  Synthetic oligonucleotide
agtcttgaaattttctagctgggtgccttg

SEQ ID NO: 409525 - DNA, 30 bp, Artificial Sequence
  Synthetic oligonucleotide
gaactaagtaggcaagcatgtatatccttg

SEQ ID NO: 409526 - DNA, 30 bp, Artificial Sequence
  Synthetic oligonucleotide
atgaattttacacagttaatattctccttg

SEQ ID NO: 409527 - DNA, 30 bp, Artificial Sequence
  Synthetic oligonucleotide
aacctgatacgtggtgatggtacaagcttg

SEQ ID NO: 409528 - DNA, 30 bp, Artificial Sequence
  Synthetic oligonucleotide
cactaaatgttaaagggaggacatagcttg

SEQ ID NO: 409529 - DNA, 30 bp, Artificial Sequence
  Synthetic oligonucleotide
tcatgttctgtctggccacgatctagcttg

SEQ ID NO: 409530 - DNA, 30 bp, Artificial Sequence
  Synthetic oligonucleotide
tctatagtgacaaaccaaccgtttagcttg

SEQ ID NO: 409531 - DNA, 30 bp, Artificial Sequence
  Synthetic oligonucleotide
gcatacggacccttcgatgctgaacgcttg

SEQ ID NO: 409532 - DNA, 30 bp, Artificial Sequence
  Synthetic oligonucleotide
ataatcatacctccaggttgtacacgcttg

SEQ ID NO: 409533 - DNA, 30 bp, Artificial Sequence
  Synthetic oligonucleotide
catagttttgatagctatgtgatacgcttg

SEQ ID NO: 409534 - DNA, 30 bp, Artificial Sequence
  Synthetic oligonucleotide
agtcatggcctcggccgttgcccccgcttg

SEQ ID NO: 409535 - DNA, 30 bp, Artificial Sequence
  Synthetic oligonucleotide
cccaccggcgcaagcagcctgcttcgcttg

SEQ ID NO: 409536 - DNA, 30 bp, Artificial Sequence
  Synthetic oligonucleotide
aaagagccctcacttgcagtggaaggcttg

SEQ ID NO: 409537 - DNA, 30 bp, Artificial Sequence
  Synthetic oligonucleotide
aagactagggcagttgagcacgacggcttg

SEQ ID NO: 409538 - DNA, 30 bp, Artificial Sequence
  Synthetic oligonucleotide
ctggccatgcgggcatccgaaggcggcttg

SEQ ID NO: 409539 - DNA, 30 bp, Artificial Sequence
  Synthetic oligonucleotide
acagtgctgtgtatatgattttgcggcttg

SEQ ID NO: 409540 - DNA, 30 bp, Artificial Sequence
  Synthetic oligonucleotide
tagacactcgcctaataaacgtgtggcttg

SEQ ID NO: 409541 - DNA, 30 bp, Artificial Sequence
  Synthetic oligonucleotide
gtatttcgcgtttccagcccaacatgcttg

SEQ ID NO: 409542 - DNA, 30 bp, Artificial Sequence
  Synthetic oligonucleotide
tgtctttgattaaaggaccggacatgcttg

SEQ ID NO: 409543 - DNA, 30 bp, Artificial Sequence
  Synthetic oligonucleotide
cttttcaatacggcatatacgtcgtgcttg

SEQ ID NO: 409544 - DNA, 30 bp, Artificial Sequence
  Synthetic oligonucleotide
tcagctagtttcgtaggggtatcttgcttg

SEQ ID NO: 409545 - DNA, 30 bp, Artificial Sequence
  Synthetic oligonucleotide
aattgccgagataggtggtgatgttgcttg

SEQ ID NO: 409546 - DNA, 30 bp, Artificial Sequence
  Synthetic oligonucleotide
tatttgttaaaagtggactttacaatcttg

SEQ ID NO: 409547 - DNA, 30 bp, Artificial Sequence
  Synthetic oligonucleotide
cccttgctctaactctggttgtcaatcttg

SEQ ID NO: 409548 - DNA, 30 bp, Artificial Sequence
  Synthetic oligonucleotide
gatagcaaacacaagatcaggtacatcttg

SEQ ID NO: 409549 - DNA, 30 bp, Artificial Sequence
  Synthetic oligonucleotide
tgcctcttttgtcaagacgggggcatcttg

SEQ ID NO: 409550 - DNA, 30 bp, Artificial Sequence
  Synthetic oligonucleotide
tcttcaatccctacgtcggataatatcttg

SEQ ID NO: 409551 - DNA, 30 bp, Artificial Sequence
  Synthetic oligonucleotide
aggatagagtttctacgtttgaaactcttg

SEQ ID NO: 409552 - DNA, 30 bp, Artificial Sequence
  Synthetic oligonucleotide
ttgttccaagcggttgaccgatacctcttg

SEQ ID NO: 409553 - DNA, 30 bp, Artificial Sequence
  Synthetic oligonucleotide
gaggtcgctgtgacggccctgctcctcttg

SEQ ID NO: 409554 - DNA, 30 bp, Artificial Sequence
  Synthetic oligonucleotide
gctcttaaatgcagatgacccacgctcttg

SEQ ID NO: 409555 - DNA, 30 bp, Artificial Sequence
  Synthetic oligonucleotide
gaatagtagactaggagccccgtgctcttg

SEQ ID NO: 409556 - DNA, 30 bp, Artificial Sequence
  Synthetic oligonucleotide
ctcgacggactgtaaactgaaaatctcttg

SEQ ID NO: 409557 - DNA, 30 bp, Artificial Sequence
  Synthetic oligonucleotide
atgctgtctgatggactaagcaatctcttg

SEQ ID NO: 409558 - DNA, 30 bp, Artificial Sequence
  Synthetic oligonucleotide
atctccccctgaatgccataggatctcttg

SEQ ID NO: 409559 - DNA, 30 bp, Artificial Sequence
  Synthetic oligonucleotide
cagcacagaagccccgcgtaacaagtcttg

SEQ ID NO: 409560 - DNA, 30 bp, Artificial Sequence
  Synthetic oligonucleotide
ttctccaggttatctcgttgacaagtcttg

SEQ ID NO: 409561 - DNA, 30 bp, Artificial Sequence
  Synthetic oligonucleotide
gtagtatagaattaaactcattaagtcttg

SEQ ID NO: 409562 - DNA, 30 bp, Artificial Sequence
  Synthetic oligonucleotide
ctcgtcagggtgcatggaacgtcagtcttg

SEQ ID NO: 409563 - DNA, 30 bp, Artificial Sequence
  Synthetic oligonucleotide
cagaatgcgtaataggttttcttagtcttg

SEQ ID NO: 409564 - DNA, 30 bp, Artificial Sequence
  Synthetic oligonucleotide
gagttagtgaattgggcatggtgcgtcttg

SEQ ID NO: 409565 - DNA, 30 bp, Artificial Sequence
  Synthetic oligonucleotide
agcgtagcaaattggagcttattggtcttg

SEQ ID NO: 409566 - DNA, 30 bp, Artificial Sequence
  Synthetic oligonucleotide
atcgacaattcgaggcaggctacattcttg

SEQ ID NO: 409567 - DNA, 30 bp, Artificial Sequence
  Synthetic oligonucleotide
tcgcagcagagcttaaccaccagattcttg

SEQ ID NO: 409568 - DNA, 30 bp, Artificial Sequence
  Synthetic oligonucleotide
actgttcgcagaacggataccaggttcttg

SEQ ID NO: 409569 - DNA, 30 bp, Artificial Sequence
  Synthetic oligonucleotide
caaaaacctcttttagaccataggttcttg

SEQ ID NO: 409570 - DNA, 30 bp, Artificial Sequence
  Synthetic oligonucleotide
ctccacttgcaaggaacatacaaaaagttg

SEQ ID NO: 409571 - DNA, 30 bp, Artificial Sequence
  Synthetic oligonucleotide
ggtccactttccgagtgcctgaaaaagttg

SEQ ID NO: 409572 - DNA, 30 bp, Artificial Sequence
  Synthetic oligonucleotide
acgtcagacttttatctagttgtcaagttg

SEQ ID NO: 409573 - DNA, 30 bp, Artificial Sequence
  Synthetic oligonucleotide
gtgccttatttcgtatgttttaagaagttg

SEQ ID NO: 409574 - DNA, 30 bp, Artificial Sequence
  Synthetic oligonucleotide
tattgctcaattagcgatagagataagttg

SEQ ID NO: 409575 - DNA, 30 bp, Artificial Sequence
  Synthetic oligonucleotide
ggactacttaggatcccttcctgtaagttg

SEQ ID NO: 409576 - DNA, 30 bp, Artificial Sequence
  Synthetic oligonucleotide
accttacctcggatagcaacggttaagttg

SEQ ID NO: 409577 - DNA, 30 bp, Artificial Sequence
  Synthetic oligonucleotide
atatacggctacacaagatgaggacagttg

SEQ ID NO: 409578 - DNA, 30 bp, Artificial Sequence
  Synthetic oligonucleotide
aacgagctaaaggaaatactaggacagttg

SEQ ID NO: 409579 - DNA, 30 bp, Artificial Sequence
  Synthetic oligonucleotide
taacccatgtgattgttgtttctacagttg

SEQ ID NO: 409580 - DNA, 30 bp, Artificial Sequence
  Synthetic oligonucleotide
tcatcgttcgtttttatgaaaacccagttg

SEQ ID NO: 409581 - DNA, 30 bp, Artificial Sequence
  Synthetic oligonucleotide
gggttttacgctattggaccgtagcagttg

SEQ ID NO: 409582 - DNA, 30 bp, Artificial Sequence
  Synthetic oligonucleotide
tgcttaatgttgtgacacccttcgcagttg

SEQ ID NO: 409583 - DNA, 30 bp, Artificial Sequence
  Synthetic oligonucleotide
cgctggtcctcaccggtggatcggcagttg

SEQ ID NO: 409584 - DNA, 30 bp, Artificial Sequence
  Synthetic oligonucleotide
cacagccgccccgcattcgggctgcagttg

SEQ ID NO: 409585 - DNA, 30 bp, Artificial Sequence
  Synthetic oligonucleotide
aatgctgtccgtctggaccggttgcagttg

SEQ ID NO: 409586 - DNA, 30 bp, Artificial Sequence
  Synthetic oligonucleotide
gtcttgtctattacttagtttcctcagttg

SEQ ID NO: 409587 - DNA, 30 bp, Artificial Sequence
  Synthetic oligonucleotide
ccgccaccggggcaaacgaaaattcagttg

SEQ ID NO: 409588 - DNA, 30 bp, Artificial Sequence
  Synthetic oligonucleotide
agtcaaaatcagtggggctgtatagagttg

SEQ ID NO: 409589 - DNA, 30 bp, Artificial Sequence
  Synthetic oligonucleotide
tgaaggagcagatctgtccttatcgagttg

SEQ ID NO: 409590 - DNA, 30 bp, Artificial Sequence
  Synthetic oligonucleotide
ggtgtgtgtttgtatttcgctaaggagttg

SEQ ID NO: 409591 - DNA, 30 bp, Artificial Sequence
  Synthetic oligonucleotide
gattaacagtgatatcaatccggggagttg

SEQ ID NO: 409592 - DNA, 30 bp, Artificial Sequence
  Synthetic oligonucleotide
aaacggagtttactaggaacagctgagttg

SEQ ID NO: 409593 - DNA, 30 bp, Artificial Sequence
  Synthetic oligonucleotide
cgcgtttgcactgctcgttctggtgagttg

SEQ ID NO: 409594 - DNA, 30 bp, Artificial Sequence
  Synthetic oligonucleotide
tttcgggacttgagtgtagaggttgagttg

SEQ ID NO: 409595 - DNA, 30 bp, Artificial Sequence
  Synthetic oligonucleotide
taaagaattaactggggggttacatagttg

SEQ ID NO: 409596 - DNA, 30 bp, Artificial Sequence
  Synthetic oligonucleotide
atcctaagcgagcttgcggaatgatagttg

SEQ ID NO: 409597 - DNA, 30 bp, Artificial Sequence
  Synthetic oligonucleotide
ataacagcgattttaatatgcctctagttg

SEQ ID NO: 409598 - DNA, 30 bp, Artificial Sequence
  Synthetic oligonucleotide
gcgagtgtttgacgtcccaaacgcacgttg

SEQ ID NO: 409599 - DNA, 30 bp, Artificial Sequence
  Synthetic oligonucleotide
tatttatccccccagttcccggccccgttg

SEQ ID NO: 409600 - DNA, 30 bp, Artificial Sequence
  Synthetic oligonucleotide
atacaatacacccttggcccgtatccgttg

SEQ ID NO: 409601 - DNA, 30 bp, Artificial Sequence
  Synthetic oligonucleotide
ccgatcaagtggctgccagcaggtccgttg

SEQ ID NO: 409602 - DNA, 30 bp, Artificial Sequence
  Synthetic oligonucleotide
gctgccagcagaggattgcattacgcgttg

SEQ ID NO: 409603 - DNA, 30 bp, Artificial Sequence
  Synthetic oligonucleotide
cctcgttagtttcttcatgcctgggcgttg

SEQ ID NO: 409604 - DNA, 30 bp, Artificial Sequence
  Synthetic oligonucleotide
gattgggccactataatcccgcgtgcgttg

SEQ ID NO: 409605 - DNA, 30 bp, Artificial Sequence
  Synthetic oligonucleotide
gtacgtacgcacagtgcgactcaatcgttg

SEQ ID NO: 409606 - DNA, 30 bp, Artificial Sequence
  Synthetic oligonucleotide
tttggcgggtatgccgagcagcgatcgttg

SEQ ID NO: 409607 - DNA, 30 bp, Artificial Sequence
  Synthetic oligonucleotide
gatgtcacgcaccctaagacgacctcgttg

SEQ ID NO: 409608 - DNA, 30 bp, Artificial Sequence
  Synthetic oligonucleotide
caatttttgagctatagggacatctcgttg

SEQ ID NO: 409609 - DNA, 30 bp, Artificial Sequence
  Synthetic oligonucleotide
aatgtcgctgagtctgagtatctgtcgttg

SEQ ID NO: 409610 - DNA, 30 bp, Artificial Sequence
  Synthetic oligonucleotide
tttatcgtgctacttctcgtcctttcgttg

SEQ ID NO: 409611 - DNA, 30 bp, Artificial Sequence
  Synthetic oligonucleotide
gtttcacgtgtaatttggcggtgcaggttg

SEQ ID NO: 409612 - DNA, 30 bp, Artificial Sequence
  Synthetic oligonucleotide
tcgctcgctacccattctgatatcaggttg

SEQ ID NO: 409613 - DNA, 30 bp, Artificial Sequence
  Synthetic oligonucleotide
gttatctcgactggcctcggtctcaggttg

SEQ ID NO: 409614 - DNA, 30 bp, Artificial Sequence
  Synthetic oligonucleotide
gtagggcctggaccaaggcctcagaggttg

SEQ ID NO: 409615 - DNA, 30 bp, Artificial Sequence
  Synthetic oligonucleotide
aaaggacgatttcgccaatccacgaggttg

SEQ ID NO: 409616 - DNA, 30 bp, Artificial Sequence
  Synthetic oligonucleotide
ggagctgggtcgcatgggcaacttaggttg

SEQ ID NO: 409617 - DNA, 30 bp, Artificial Sequence
  Synthetic oligonucleotide
gaaaagtggacccgtaactctaaacggttg

SEQ ID NO: 409618 - DNA, 30 bp, Artificial Sequence
  Synthetic oligonucleotide
gaaccgcatataatcggtctgtcccggttg

SEQ ID NO: 409619 - DNA, 30 bp, Artificial Sequence
  Synthetic oligonucleotide
atcgctcccggcttttgagcaatccggttg

SEQ ID NO: 409620 - DNA, 30 bp, Artificial Sequence
  Synthetic oligonucleotide
tctatatgtagatgccgttaaaagcggttg

SEQ ID NO: 409621 - DNA, 30 bp, Artificial Sequence
  Synthetic oligonucleotide
cttaagtggtgatctacaattgagcggttg

SEQ ID NO: 409622 - DNA, 30 bp, Artificial Sequence
  Synthetic oligonucleotide
atgttttatccattactcagaacgcggttg

SEQ ID NO: 409623 - DNA, 30 bp, Artificial Sequence
  Synthetic oligonucleotide
atacgagttgtctcgacgattatgcggttg

SEQ ID NO: 409624 - DNA, 30 bp, Artificial Sequence
  Synthetic oligonucleotide
taaccatagtaaggttatagatatcggttg

SEQ ID NO: 409625 - DNA, 30 bp, Artificial Sequence
  Synthetic oligonucleotide
gcgccacgtaggaaaatccgcactcggttg

SEQ ID NO: 409626 - DNA, 30 bp, Artificial Sequence
  Synthetic oligonucleotide
gcacgtagacaccggtatgcctaagggttg

SEQ ID NO: 409627 - DNA, 30 bp, Artificial Sequence
  Synthetic oligonucleotide
ccgccagttcacctacaatcgtaagggttg

SEQ ID NO: 409628 - DNA, 30 bp, Artificial Sequence
  Synthetic oligonucleotide
gggagcaaaattccaccgttaggagggttg

SEQ ID NO: 409629 - DNA, 30 bp, Artificial Sequence
  Synthetic oligonucleotide
gttaaacttcgattgcgcggaatagggttg

SEQ ID NO: 409630 - DNA, 30 bp, Artificial Sequence
  Synthetic oligonucleotide
ctaggcccatcatcacccccactcgggttg

SEQ ID NO: 409631 - DNA, 30 bp, Artificial Sequence
  Synthetic oligonucleotide
aaacttagcaagtttaattagcaggggttg

SEQ ID NO: 409632 - DNA, 30 bp, Artificial Sequence
  Synthetic oligonucleotide
atggaaggtcttcccgcttcgattgggttg

SEQ ID NO: 409633 - DNA, 30 bp, Artificial Sequence
  Synthetic oligonucleotide
ataaccaccttaagtgggtataaatggttg

SEQ ID NO: 409634 - DNA, 30 bp, Artificial Sequence
  Synthetic oligonucleotide
tcatgcatcgcaagacatatgtaatggttg

SEQ ID NO: 409635 - DNA, 30 bp, Artificial Sequence
  Synthetic oligonucleotide
tgggtatcatgtacgcaaccgtgatggttg

SEQ ID NO: 409636 - DNA, 30 bp, Artificial Sequence
  Synthetic oligonucleotide
gaaatatccggtgggagctgaatctggttg

SEQ ID NO: 409637 - DNA, 30 bp, Artificial Sequence
  Synthetic oligonucleotide
atgtggactctatcacgaccattctggttg

SEQ ID NO: 409638 - DNA, 30 bp, Artificial Sequence
  Synthetic oligonucleotide
accatcgttggtatgctgtctacgtggttg

SEQ ID NO: 409639 - DNA, 30 bp, Artificial Sequence
  Synthetic oligonucleotide
gatgcgtgagtatccgactttaggtggttg

SEQ ID NO: 409640 - DNA, 30 bp, Artificial Sequence
  Synthetic oligonucleotide
catctggcatatgccaggtgtcaaatgttg

SEQ ID NO: 409641 - DNA, 30 bp, Artificial Sequence
  Synthetic oligonucleotide
aagtcggactcattggacatgagaatgttg

SEQ ID NO: 409642 - DNA, 30 bp, Artificial Sequence
  Synthetic oligonucleotide
gaactgcctgataatccgggtcgaatgttg

SEQ ID NO: 409643 - DNA, 30 bp, Artificial Sequence
  Synthetic oligonucleotide
gggtagcttcagtcagattaaaccatgttg

SEQ ID NO: 409644 - DNA, 30 bp, Artificial Sequence
  Synthetic oligonucleotide
agatgggttgctaagacatttcttatgttg

SEQ ID NO: 409645 - DNA, 30 bp, Artificial Sequence
  Synthetic oligonucleotide
gctcctccccgttattggttagttatgttg

SEQ ID NO: 409646 - DNA, 30 bp, Artificial Sequence
  Synthetic oligonucleotide
gctgattattgatgcgaaagttttatgttg

SEQ ID NO: 409647 - DNA, 30 bp, Artificial Sequence
  Synthetic oligonucleotide
ggtactaccgccgggttcttggtactgttg

SEQ ID NO: 409648 - DNA, 30 bp, Artificial Sequence
  Synthetic oligonucleotide
gttccgcatcgcagggtgagctgcctgttg

SEQ ID NO: 409649 - DNA, 30 bp, Artificial Sequence
  Synthetic oligonucleotide
gcggcccaacggccggggcaaatcctgttg

SEQ ID NO: 409650 - DNA, 30 bp, Artificial Sequence
  Synthetic oligonucleotide
aacagaatccgcctctgacggtagctgttg

SEQ ID NO: 409651 - DNA, 30 bp, Artificial Sequence
  Synthetic oligonucleotide
aggagttcttatcgggacgggccgctgttg

SEQ ID NO: 409652 - DNA, 30 bp, Artificial Sequence
  Synthetic oligonucleotide
gtaaacgtttttttgacaggcaatctgttg

SEQ ID NO: 409653 - DNA, 30 bp, Artificial Sequence
  Synthetic oligonucleotide
gaaaacggtttagattgagcggctctgttg

SEQ ID NO: 409654 - DNA, 30 bp, Artificial Sequence
  Synthetic oligonucleotide
gcctctcatgcgggagactactgtctgttg

SEQ ID NO: 409655 - DNA, 30 bp, Artificial Sequence
  Synthetic oligonucleotide
atcggggctacacggagttattcagtgttg

SEQ ID NO: 409656 - DNA, 30 bp, Artificial Sequence
  Synthetic oligonucleotide
cacgatcacctctctcttagcagagtgttg

SEQ ID NO: 409657 - DNA, 30 bp, Artificial Sequence
  Synthetic oligonucleotide
atattgtccggtacaagaatatacgtgttg

SEQ ID NO: 409658 - DNA, 30 bp, Artificial Sequence
  Synthetic oligonucleotide
ggttgtttaattccggtccaacgggtgttg

SEQ ID NO: 409659 - DNA, 30 bp, Artificial Sequence
  Synthetic oligonucleotide
ggtacacttctacagccgggattggtgttg

SEQ ID NO: 409660 - DNA, 30 bp, Artificial Sequence
  Synthetic oligonucleotide
ttcatcactgggcctctgatatttgtgttg

SEQ ID NO: 409661 - DNA, 30 bp, Artificial Sequence
  Synthetic oligonucleotide
ggcagcgttaacagttcagttaaattgttg

SEQ ID NO: 409662 - DNA, 30 bp, Artificial Sequence
  Synthetic oligonucleotide
ggcattcttttcaacaaagtataattgttg

SEQ ID NO: 409663 - DNA, 30 bp, Artificial Sequence
  Synthetic oligonucleotide
attaaaaggatttctcaaaactaattgttg

SEQ ID NO: 409664 - DNA, 30 bp, Artificial Sequence
  Synthetic oligonucleotide
ctatgcaaaaatagaccgtgtctattgttg

SEQ ID NO: 409665 - DNA, 30 bp, Artificial Sequence
  Synthetic oligonucleotide
tatattaaagtaaaatggatcaccttgttg

SEQ ID NO: 409666 - DNA, 30 bp, Artificial Sequence
  Synthetic oligonucleotide
cgtagtgcaattatccaaccgtagttgttg

SEQ ID NO: 409667 - DNA, 30 bp, Artificial Sequence
  Synthetic oligonucleotide
tgatagattcacccttgtactccaaatttg

SEQ ID NO: 409668 - DNA, 30 bp, Artificial Sequence
  Synthetic oligonucleotide
gaatgacatgttcgtcttacatgaaatttg

SEQ ID NO: 409669 - DNA, 30 bp, Artificial Sequence
  Synthetic oligonucleotide
cactctgctggaatcacatttctaaatttg

SEQ ID NO: 409670 - DNA, 30 bp, Artificial Sequence
  Synthetic oligonucleotide
caaatcaaatctaaatgccgtgacaatttg

SEQ ID NO: 409671 - DNA, 30 bp, Artificial Sequence
  Synthetic oligonucleotide
tattcgtccagtacatgtaggaccaatttg

SEQ ID NO: 409672 - DNA, 30 bp, Artificial Sequence
  Synthetic oligonucleotide
tggacccaccaggattgagtattcaatttg

SEQ ID NO: 409673 - DNA, 30 bp, Artificial Sequence
  Synthetic oligonucleotide
ttcttgtagggctgggtatgggagaatttg

SEQ ID NO: 409674 - DNA, 30 bp, Artificial Sequence
  Synthetic oligonucleotide
ccccttgcatgctgaatgtaagttaatttg

SEQ ID NO: 409675 - DNA, 30 bp, Artificial Sequence
  Synthetic oligonucleotide
agataagcttgtccttttgtattacatttg

SEQ ID NO: 409676 - DNA, 30 bp, Artificial Sequence
  Synthetic oligonucleotide
gttatgccctctgctaggccttaccatttg

SEQ ID NO: 409677 - DNA, 30 bp, Artificial Sequence
  Synthetic oligonucleotide
cagtagtctttcacgcccagtggccatttg

SEQ ID NO: 409678 - DNA, 30 bp, Artificial Sequence
  Synthetic oligonucleotide
tatagtggggccggtgcgttattccatttg

SEQ ID NO: 409679 - DNA, 30 bp, Artificial Sequence
  Synthetic oligonucleotide
taaggtcttaaaggcggtcgagagcatttg

SEQ ID NO: 409680 - DNA, 30 bp, Artificial Sequence
  Synthetic oligonucleotide
aaaatatacagtacatagcacagagatttg

SEQ ID NO: 409681 - DNA, 30 bp, Artificial Sequence
  Synthetic oligonucleotide
aaagcaaatattgtctgtataaaggatttg

SEQ ID NO: 409682 - DNA, 30 bp, Artificial Sequence
  Synthetic oligonucleotide
gattatagttgggtaagtttctaggatttg

SEQ ID NO: 409683 - DNA, 30 bp, Artificial Sequence
  Synthetic oligonucleotide
acctaccaacccggttatacctcggatttg

SEQ ID NO: 409684 - DNA, 29 bp, Artificial Sequence
  Synthetic oligonucleotide
aacccctacgagccgcggagaatgatttg

SEQ ID NO: 409685 - DNA, 30 bp, Artificial Sequence
  Synthetic oligonucleotide
ggacttaataggcgcatggttgttgatttg

SEQ ID NO: 409686 - DNA, 30 bp, Artificial Sequence
  Synthetic oligonucleotide
tgcaggtggaagttgcaggtaccatatttg

SEQ ID NO: 409687 - DNA, 30 bp, Artificial Sequence
  Synthetic oligonucleotide
cacccgtcgttgagtggagcagtatatttg

SEQ ID NO: 409688 - DNA, 30 bp, Artificial Sequence
  Synthetic oligonucleotide
aaacacctcggcaaatagattgactatttg

SEQ ID NO: 409689 - DNA, 30 bp, Artificial Sequence
  Synthetic oligonucleotide
aatgcgtatatctaagcgcatcagtatttg

SEQ ID NO: 409690 - DNA, 30 bp, Artificial Sequence
  Synthetic oligonucleotide
cgatgaccagattgcaacggaatgtatttg

SEQ ID NO: 409691 - DNA, 30 bp, Artificial Sequence
  Synthetic oligonucleotide
tgggttttatgcccaaaatacgtgtatttg

SEQ ID NO: 409692 - DNA, 30 bp, Artificial Sequence
  Synthetic oligonucleotide
tgatcaatcgctgctctgacatattatttg

SEQ ID NO: 409693 - DNA, 30 bp, Artificial Sequence
  Synthetic oligonucleotide
tggcgcatataaattttttttagttatttg

SEQ ID NO: 409694 - DNA, 30 bp, Artificial Sequence
  Synthetic oligonucleotide
tgattgggcctgacagcgggtacaactttg

SEQ ID NO: 409695 - DNA, 30 bp, Artificial Sequence
  Synthetic oligonucleotide
ctctgacgccccaggacagtcgtaactttg

SEQ ID NO: 409696 - DNA, 30 bp, Artificial Sequence
  Synthetic oligonucleotide
tattttgagacgacttctggttacactttg

SEQ ID NO: 409697 - DNA, 30 bp, Artificial Sequence
  Synthetic oligonucleotide
ggtactacgcgttccacaggttagactttg

SEQ ID NO: 409698 - DNA, 30 bp, Artificial Sequence
  Synthetic oligonucleotide
gggctcacgcaaagcgcgaccgggactttg

SEQ ID NO: 409699 - DNA, 30 bp, Artificial Sequence
  Synthetic oligonucleotide
tccatctgtgtttgtgggtcattgactttg

SEQ ID NO: 409700 - DNA, 30 bp, Artificial Sequence
  Synthetic oligonucleotide
gaacccagattgtgtcgcgttaatactttg

SEQ ID NO: 409701 - DNA, 30 bp, Artificial Sequence
  Synthetic oligonucleotide
tgtgatgggtgtctgagggcttgtactttg

SEQ ID NO: 409702 - DNA, 30 bp, Artificial Sequence
  Synthetic oligonucleotide
cctcagtgccgtccggccgttcttactttg

SEQ ID NO: 409703 - DNA, 30 bp, Artificial Sequence
  Synthetic oligonucleotide
tatgacctagctggggattcccgccctttg

SEQ ID NO: 409704 - DNA, 30 bp, Artificial Sequence
  Synthetic oligonucleotide
gtcgcacatcctaacacgcggcttcctttg

SEQ ID NO: 409705 - DNA, 30 bp, Artificial Sequence
  Synthetic oligonucleotide
gtatatgtcccagggcattgcgtagctttg

SEQ ID NO: 409706 - DNA, 29 bp, Artificial Sequence
  Synthetic oligonucleotide
ttgttacgctgtctagcttagccgctttg

SEQ ID NO: 409707 - DNA, 30 bp, Artificial Sequence
  Synthetic oligonucleotide
ttgaggtagggcctctgcccatgcgctttg

SEQ ID NO: 409708 - DNA, 30 bp, Artificial Sequence
  Synthetic oligonucleotide
cgcatgtgaagccctcttttcatcgctttg

SEQ ID NO: 409709 - DNA, 30 bp, Artificial Sequence
  Synthetic oligonucleotide
cgagttatggttggtgtcatactcgctttg

SEQ ID NO: 409710 - DNA, 30 bp, Artificial Sequence
  Synthetic oligonucleotide
ggttaggactattagctaacgggggctttg

SEQ ID NO: 409711 - DNA, 30 bp, Artificial Sequence
  Synthetic oligonucleotide
ttgatagcggcccaaaaagtgttatctttg

SEQ ID NO: 409712 - DNA, 30 bp, Artificial Sequence
  Synthetic oligonucleotide
ctctacgtagacggtgcatacgagtctttg

SEQ ID NO: 409713 - DNA, 30 bp, Artificial Sequence
  Synthetic oligonucleotide
cttccctgtttcatgtataaaaaaagtttg

SEQ ID NO: 409714 - DNA, 30 bp, Artificial Sequence
  Synthetic oligonucleotide
cttgccagtccctcaatttgtgacagtttg

SEQ ID NO: 409715 - DNA, 30 bp, Artificial Sequence
  Synthetic oligonucleotide
gcacgcctaaacaaagtcatgaagagtttg

SEQ ID NO: 409716 - DNA, 30 bp, Artificial Sequence
  Synthetic oligonucleotide
agccataactgcccgtcaggagcgagtttg

SEQ ID NO: 409717 - DNA, 30 bp, Artificial Sequence
  Synthetic oligonucleotide
tgtccattctgtgattcaaataatagtttg

SEQ ID NO: 409718 - DNA, 30 bp, Artificial Sequence
  Synthetic oligonucleotide
gtcttagctcattctgatggcatacgtttg

SEQ ID NO: 409719 - DNA, 30 bp, Artificial Sequence
  Synthetic oligonucleotide
aatgcgctcatatgataacgtgtacgtttg

SEQ ID NO: 409720 - DNA, 30 bp, Artificial Sequence
  Synthetic oligonucleotide
taagtttccttgtaaagcctctgtcgtttg

SEQ ID NO: 409721 - DNA, 30 bp, Artificial Sequence
  Synthetic oligonucleotide
tggcccatgccaggttgattacacggtttg

SEQ ID NO: 409722 - DNA, 30 bp, Artificial Sequence
  Synthetic oligonucleotide
aaacggcgtctgggattattgtcgggtttg

SEQ ID NO: 409723 - DNA, 30 bp, Artificial Sequence
  Synthetic oligonucleotide
cgtatacctggaagtctggtttcgggtttg

SEQ ID NO: 409724 - DNA, 30 bp, Artificial Sequence
  Synthetic oligonucleotide
tttgtatacgtcggtttcggcaggggtttg

SEQ ID NO: 409725 - DNA, 30 bp, Artificial Sequence
  Synthetic oligonucleotide
cccactaggaagatttctcacatgggtttg

SEQ ID NO: 409726 - DNA, 30 bp, Artificial Sequence
  Synthetic oligonucleotide
tgttctcagccaagcaccacagatggtttg

SEQ ID NO: 409727 - DNA, 30 bp, Artificial Sequence
  Synthetic oligonucleotide
acgttaactcgaggccaaccaagtggtttg

SEQ ID NO: 409728 - DNA, 30 bp, Artificial Sequence
  Synthetic oligonucleotide
gccctgcgatggcgtattctacttggtttg

SEQ ID NO: 409729 - DNA, 30 bp, Artificial Sequence
  Synthetic oligonucleotide
gttctctgtgagaggctgtcaggctgtttg

SEQ ID NO: 409730 - DNA, 30 bp, Artificial Sequence
  Synthetic oligonucleotide
tgagaattcaccccaccagctaattgtttg

SEQ ID NO: 409731 - DNA, 30 bp, Artificial Sequence
  Synthetic oligonucleotide
gacagttgttttccgtcgtttaattgtttg

SEQ ID NO: 409732 - DNA, 30 bp, Artificial Sequence
  Synthetic oligonucleotide
gacatcgtgaaaaatattacgatttgtttg

SEQ ID NO: 409733 - DNA, 30 bp, Artificial Sequence
  Synthetic oligonucleotide
gaattgaagtagtagtcctggtgaattttg

SEQ ID NO: 409734 - DNA, 30 bp, Artificial Sequence
  Synthetic oligonucleotide
caacagtgcgcttggtgtacccacattttg

SEQ ID NO: 409735 - DNA, 30 bp, Artificial Sequence
  Synthetic oligonucleotide
aagtaattaagcaatgttgagcagattttg

SEQ ID NO: 409736 - DNA, 30 bp, Artificial Sequence
  Synthetic oligonucleotide
taagcagagcgattgtataccctgattttg

SEQ ID NO: 409737 - DNA, 30 bp, Artificial Sequence
  Synthetic oligonucleotide
cgtgcacaagcaacttaaaaaagtattttg

SEQ ID NO: 409738 - DNA, 30 bp, Artificial Sequence
  Synthetic oligonucleotide
cgggggattcattattcctttcttattttg

SEQ ID NO: 409739 - DNA, 30 bp, Artificial Sequence
  Synthetic oligonucleotide
cctacgtgttctctatttctatttattttg

SEQ ID NO: 409740 - DNA, 30 bp, Artificial Sequence
  Synthetic oligonucleotide
aagcgaagatatttcttaccctttattttg

SEQ ID NO: 409741 - DNA, 30 bp, Artificial Sequence
  Synthetic oligonucleotide
taaaaccctgcaccggtcaggtgacttttg

SEQ ID NO: 409742 - DNA, 30 bp, Artificial Sequence
  Synthetic oligonucleotide
cgacgtgttgatagccggactggccttttg

SEQ ID NO: 409743 - DNA, 30 bp, Artificial Sequence
  Synthetic oligonucleotide
ctctatccgacctacttacatcagcttttg

SEQ ID NO: 409744 - DNA, 30 bp, Artificial Sequence
  Synthetic oligonucleotide
tatgggctaataaggcttaggtagcttttg

SEQ ID NO: 409745 - DNA, 30 bp, Artificial Sequence
  Synthetic oligonucleotide
ggaattccgtacgcatcggacgtgcttttg

SEQ ID NO: 409746 - DNA, 30 bp, Artificial Sequence
  Synthetic oligonucleotide
ggcaacgcaaggaacggtcgggtgcttttg

SEQ ID NO: 409747 - DNA, 30 bp, Artificial Sequence
  Synthetic oligonucleotide
cgttaaacttccaacaacaggtatcttttg

SEQ ID NO: 409748 - DNA, 30 bp, Artificial Sequence
  Synthetic oligonucleotide
gatccccgcaaagttaaatcatgtcttttg

SEQ ID NO: 409749 - DNA, 30 bp, Artificial Sequence
  Synthetic oligonucleotide
tgtaatggaccgccgagcggaacagttttg

SEQ ID NO: 409750 - DNA, 30 bp, Artificial Sequence
  Synthetic oligonucleotide
cctcggatttacggtagcaagcaggttttg

SEQ ID NO: 409751 - DNA, 30 bp, Artificial Sequence
  Synthetic oligonucleotide
caaggtgtgcacgctggacgagcggttttg

SEQ ID NO: 409752 - DNA, 30 bp, Artificial Sequence
  Synthetic oligonucleotide
taccaggcgacgatcagtacctgggttttg

SEQ ID NO: 409753 - DNA, 30 bp, Artificial Sequence
  Synthetic oligonucleotide
caataagggtgagattttcttgtggttttg

SEQ ID NO: 409754 - DNA, 30 bp, Artificial Sequence
  Synthetic oligonucleotide
aatcagcgaaataatttagactttgttttg

SEQ ID NO: 409755 - DNA, 30 bp, Artificial Sequence
  Synthetic oligonucleotide
ctagcacgtgagatttttaaagcatttttg

SEQ ID NO: 409756 - DNA, 31 bp, Artificial Sequence
  Synthetic oligonucleotide
ggagatatatgttatctcggccctatttttg

SEQ ID NO: 409757 - DNA, 30 bp, Artificial Sequence
  Synthetic oligonucleotide
gtacctctggagatggtcaagctatttttg

SEQ ID NO: 409758 - DNA, 30 bp, Artificial Sequence
  Synthetic oligonucleotide
ggacatggaatttaggattatgggtttttg

SEQ ID NO: 409759 - DNA, 30 bp, Artificial Sequence
  Synthetic oligonucleotide
cggttgagggagcggtatgaccattttttg

SEQ ID NO: 409760 - DNA, 30 bp, Artificial Sequence
  Synthetic oligonucleotide
cgcagcaactttctttagtagatttttttg

SEQ ID NO: 409761 - DNA, 30 bp, Artificial Sequence
  Synthetic oligonucleotide
gcgagcagctagatactttggctttttttg

SEQ ID NO: 409762 - DNA, 30 bp, Artificial Sequence
  Synthetic oligonucleotide
agagtttgtggaaaaagcggttaaaaaaat

SEQ ID NO: 409763 - DNA, 30 bp, Artificial Sequence
  Synthetic oligonucleotide
gctgtaagccagatcatgtgtacaaaaaat

SEQ ID NO: 409764 - DNA, 30 bp, Artificial Sequence
  Synthetic oligonucleotide
aatgacgcgtttgagcgaagagcaaaaaat

SEQ ID NO: 409765 - DNA, 30 bp, Artificial Sequence
  Synthetic oligonucleotide
gagcacggtcgcagcagtcgcgcaaaaaat

SEQ ID NO: 409766 - DNA, 30 bp, Artificial Sequence
  Synthetic oligonucleotide
gcaggccagcaaagccattgcggaaaaaat

SEQ ID NO: 409767 - DNA, 30 bp, Artificial Sequence
  Synthetic oligonucleotide
tgtcaaagggtgcacgttactctaaaaaat

SEQ ID NO: 409768 - DNA, 30 bp, Artificial Sequence
  Synthetic oligonucleotide
ggaaataggataccaaaaattaccaaaaat

SEQ ID NO: 409769 - DNA, 30 bp, Artificial Sequence
  Synthetic oligonucleotide
ttcatcgatagcctggcggttaccaaaaat

SEQ ID NO: 409770 - DNA, 30 bp, Artificial Sequence
  Synthetic oligonucleotide
caaatggaagcaccggcaacacgcaaaaat

SEQ ID NO: 409771 - DNA, 30 bp, Artificial Sequence
  Synthetic oligonucleotide
gaccacatccaagctgtttatgtgaaaaat

SEQ ID NO: 409772 - DNA, 30 bp, Artificial Sequence
  Synthetic oligonucleotide
ctaacaacaggttatgattcattgaaaaat

SEQ ID NO: 409773 - DNA, 30 bp, Artificial Sequence
  Synthetic oligonucleotide
gcgttctcacaaaattacgatttgaaaaat

SEQ ID NO: 409774 - DNA, 30 bp, Artificial Sequence
  Synthetic oligonucleotide
agggaactttttgcgcccttagttaaaaat

SEQ ID NO: 409775 - DNA, 30 bp, Artificial Sequence
  Synthetic oligonucleotide
gcgctttagccctctcttaatgcacaaaat

SEQ ID NO: 409776 - DNA, 30 bp, Artificial Sequence
  Synthetic oligonucleotide
tcacccttgcgagattcaactttacaaaat

SEQ ID NO: 409777 - DNA, 30 bp, Artificial Sequence
  Synthetic oligonucleotide
gtgccccaacgcgtgcagacgcgccaaaat

SEQ ID NO: 409778 - DNA, 30 bp, Artificial Sequence
  Synthetic oligonucleotide
tgctcgggtccgtttcctgaatgccaaaat

SEQ ID NO: 409779 - DNA, 30 bp, Artificial Sequence
  Synthetic oligonucleotide
ttctgctcacgtcacgccccgatccaaaat

SEQ ID NO: 409780 - DNA, 30 bp, Artificial Sequence
  Synthetic oligonucleotide
cagcggccgggttttctgtccaagcaaaat

SEQ ID NO: 409781 - DNA, 30 bp, Artificial Sequence
  Synthetic oligonucleotide
ctcacgtgtctacagtccggaccgcaaaat

SEQ ID NO: 409782 - DNA, 30 bp, Artificial Sequence
  Synthetic oligonucleotide
ctcaagattgtgttaagctaaatgcaaaat

SEQ ID NO: 409783 - DNA, 30 bp, Artificial Sequence
  Synthetic oligonucleotide
tagaaattactctcctccgtaaatcaaaat

SEQ ID NO: 409784 - DNA, 30 bp, Artificial Sequence
  Synthetic oligonucleotide
tctcgcatcattcataacaattctcaaaat

SEQ ID NO: 409785 - DNA, 30 bp, Artificial Sequence
  Synthetic oligonucleotide
ggtattgatgaggccagtcccggtcaaaat

SEQ ID NO: 409786 - DNA, 30 bp, Artificial Sequence
  Synthetic oligonucleotide
tatctcgagcttatgagggctgcagaaaat

SEQ ID NO: 409787 - DNA, 30 bp, Artificial Sequence
  Synthetic oligonucleotide
ctagcagggcgccgcagctctagagaaaat

SEQ ID NO: 409788 - DNA, 30 bp, Artificial Sequence
  Synthetic oligonucleotide
gatcctatgaagtaagccatatgagaaaat

SEQ ID NO: 409789 - DNA, 30 bp, Artificial Sequence
  Synthetic oligonucleotide
aataaataatcagtgtgcacgggataaaat

SEQ ID NO: 409790 - DNA, 30 bp, Artificial Sequence
  Synthetic oligonucleotide
tcagacttctcccaatggctgtactaaaat

SEQ ID NO: 409791 - DNA, 30 bp, Artificial Sequence
  Synthetic oligonucleotide
ccgtcgcaaattccttcattaacctaaaat

SEQ ID NO: 409792 - DNA, 30 bp, Artificial Sequence
  Synthetic oligonucleotide
gaggattcgtcgttggagtattcctaaaat

SEQ ID NO: 409793 - DNA, 30 bp, Artificial Sequence
  Synthetic oligonucleotide
agcaaggtgaggcgggcctagggctaaaat

SEQ ID NO: 409794 - DNA, 29 bp, Artificial Sequence
  Synthetic oligonucleotide
ttaatacacgtaaaccgccttagtaaaat

SEQ ID NO: 409795 - DNA, 30 bp, Artificial Sequence
  Synthetic oligonucleotide
gagcagcgaagactaaccatagggtaaaat

SEQ ID NO: 409796 - DNA, 30 bp, Artificial Sequence
  Synthetic oligonucleotide
atgttctaaatgtcaggccgttattaaaat

SEQ ID NO: 409797 - DNA, 30 bp, Artificial Sequence
  Synthetic oligonucleotide
ccatcaaaggcatcatcacccttttaaaat

SEQ ID NO: 409798 - DNA, 30 bp, Artificial Sequence
  Synthetic oligonucleotide
ggtcactccactcaccagcccgtaacaaat

SEQ ID NO: 409799 - DNA, 30 bp, Artificial Sequence
  Synthetic oligonucleotide
aaccatgccacgttcgttaggtgcacaaat

SEQ ID NO: 409800 - DNA, 30 bp, Artificial Sequence
  Synthetic oligonucleotide
acacagctgtatacatttccgattacaaat

SEQ ID NO: 409801 - DNA, 30 bp, Artificial Sequence
  Synthetic oligonucleotide
taccgtgaggggcccgtttatcttacaaat

SEQ ID NO: 409802 - DNA, 30 bp, Artificial Sequence
  Synthetic oligonucleotide
gcatgcaaacggctcaattcattaccaaat

SEQ ID NO: 409803 - DNA, 30 bp, Artificial Sequence
  Synthetic oligonucleotide
gcgagtaggtgatgggttctaaccccaaat

SEQ ID NO: 409804 - DNA, 30 bp, Artificial Sequence
  Synthetic oligonucleotide
ttgtgaccggtcatgcgtacacccccaaat

SEQ ID NO: 409805 - DNA, 30 bp, Artificial Sequence
  Synthetic oligonucleotide
atttggtaatcggaatcggccgccccaaat

SEQ ID NO: 409806 - DNA, 30 bp, Artificial Sequence
  Synthetic oligonucleotide
gttgatgcagggactggactagctccaaat

SEQ ID NO: 409807 - DNA, 30 bp, Artificial Sequence
  Synthetic oligonucleotide
ttccagacgtctcgtctagaccgtccaaat

SEQ ID NO: 409808 - DNA, 30 bp, Artificial Sequence
  Synthetic oligonucleotide
ctaaaactactgctcgcgatcggtccaaat

SEQ ID NO: 409809 - DNA, 30 bp, Artificial Sequence
  Synthetic oligonucleotide
tggggacccctagattgaagggacgcaaat

SEQ ID NO: 409810 - DNA, 30 bp, Artificial Sequence
  Synthetic oligonucleotide
aagattcgtctccgaagtaatcaggcaaat

SEQ ID NO: 409811 - DNA, 30 bp, Artificial Sequence
  Synthetic oligonucleotide
ggccacgaatgttatcgcgaacgggcaaat

SEQ ID NO: 409812 - DNA, 30 bp, Artificial Sequence
  Synthetic oligonucleotide
tgttcagactaatacacggaattggcaaat

SEQ ID NO: 409813 - DNA, 30 bp, Artificial Sequence
  Synthetic oligonucleotide
ctggcacggtgaatgttacttgatgcaaat

SEQ ID NO: 409814 - DNA, 30 bp, Artificial Sequence
  Synthetic oligonucleotide
tgcaagtgcagttacgtgggctctgcaaat

SEQ ID NO: 409815 - DNA, 30 bp, Artificial Sequence
  Synthetic oligonucleotide
tcatccatggcctgcacgaaagttgcaaat

SEQ ID NO: 409816 - DNA, 30 bp, Artificial Sequence
  Synthetic oligonucleotide
tacggtcgggaacggccccctgttgcaaat

SEQ ID NO: 409817 - DNA, 30 bp, Artificial Sequence
  Synthetic oligonucleotide
gttccactactggggtagcctgcatcaaat

SEQ ID NO: 409818 - DNA, 26 bp, Artificial Sequence
  Synthetic oligonucleotide
accattaatggtgcctaggatcaaat

SEQ ID NO: 409819 - DNA, 30 bp, Artificial Sequence
  Synthetic oligonucleotide
cacgttgggccccaacctcgtctatcaaat

SEQ ID NO: 409820 - DNA, 30 bp, Artificial Sequence
  Synthetic oligonucleotide
gtcgttgaccttccccacacgtcctcaaat

SEQ ID NO: 409821 - DNA, 30 bp, Artificial Sequence
  Synthetic oligonucleotide
aaaattattaaatcgtagccaagctcaaat

SEQ ID NO: 409822 - DNA, 30 bp, Artificial Sequence
  Synthetic oligonucleotide
tctagaattgtatataaccaaatctcaaat

SEQ ID NO: 409823 - DNA, 30 bp, Artificial Sequence
  Synthetic oligonucleotide
acgcttgtaccccagcttcgggggtcaaat

SEQ ID NO: 409824 - DNA, 30 bp, Artificial Sequence
  Synthetic oligonucleotide
aatgttcggtttaaaccgtggctgtcaaat

SEQ ID NO: 409825 - DNA, 30 bp, Artificial Sequence
  Synthetic oligonucleotide
gctcggcaccccgttttcccatcttcaaat

SEQ ID NO: 409826 - DNA, 30 bp, Artificial Sequence
  Synthetic oligonucleotide
tggggcctgtgattccacgtgacaagaaat

SEQ ID NO: 409827 - DNA, 30 bp, Artificial Sequence
  Synthetic oligonucleotide
gcgaatcaagaggaagttgttagaagaaat

SEQ ID NO: 409828 - DNA, 30 bp, Artificial Sequence
  Synthetic oligonucleotide
tcccctgtaatgccattgcggcgaagaaat

SEQ ID NO: 409829 - DNA, 30 bp, Artificial Sequence
  Synthetic oligonucleotide
gtagtctaatgataacctctggtaagaaat

SEQ ID NO: 409830 - DNA, 30 bp, Artificial Sequence
  Synthetic oligonucleotide
gacttttttagaggtatgagcttaagaaat

SEQ ID NO: 409831 - DNA, 30 bp, Artificial Sequence
  Synthetic oligonucleotide
gctgttagagtatgtccctccgacagaaat

SEQ ID NO: 409832 - DNA, 30 bp, Artificial Sequence
  Synthetic oligonucleotide
aatctatcttaatggtgagagttcagaaat

SEQ ID NO: 409833 - DNA, 30 bp, Artificial Sequence
  Synthetic oligonucleotide
gtataaggtataaaaataacttatagaaat

SEQ ID NO: 409834 - DNA, 30 bp, Artificial Sequence
  Synthetic oligonucleotide
ttgcaagcgggcaccaccagatttagaaat

SEQ ID NO: 409835 - DNA, 30 bp, Artificial Sequence
  Synthetic oligonucleotide
gctagtattgagtccctgttgagacgaaat

SEQ ID NO: 409836 - DNA, 30 bp, Artificial Sequence
  Synthetic oligonucleotide
ctcagtaatcgttgacgagtgcaccgaaat

SEQ ID NO: 409837 - DNA, 30 bp, Artificial Sequence
  Synthetic oligonucleotide
tttctagaaaaatacggctatgtgcgaaat

SEQ ID NO: 409838 - DNA, 30 bp, Artificial Sequence
  Synthetic oligonucleotide
cttaatgttgggcagaagtctgtgcgaaat

SEQ ID NO: 409839 - DNA, 30 bp, Artificial Sequence
  Synthetic oligonucleotide
tctccttggaatacatttccggttcgaaat

SEQ ID NO: 409840 - DNA, 30 bp, Artificial Sequence
  Synthetic oligonucleotide
actgcatcgtgcctgctcggttttcgaaat

SEQ ID NO: 409841 - DNA, 30 bp, Artificial Sequence
  Synthetic oligonucleotide
gatcactctaactgaagccctggaggaaat

SEQ ID NO: 409842 - DNA, 30 bp, Artificial Sequence
  Synthetic oligonucleotide
aaggttctccaccgggtcagggacggaaat

SEQ ID NO: 409843 - DNA, 31 bp, Artificial Sequence
  Synthetic oligonucleotide
ccacgtgtgtgcgctcggagcaacgggaaat

SEQ ID NO: 409844 - DNA, 30 bp, Artificial Sequence
  Synthetic oligonucleotide
agcctgagacgatcaatccagtggggaaat

SEQ ID NO: 409845 - DNA, 30 bp, Artificial Sequence
  Synthetic oligonucleotide
tggccttcaaggcatgcaaaagatggaaat

SEQ ID NO: 409846 - DNA, 30 bp, Artificial Sequence
  Synthetic oligonucleotide
tgctccgcgcaaaagtccgcttgtggaaat

SEQ ID NO: 409847 - DNA, 30 bp, Artificial Sequence
  Synthetic oligonucleotide
aagattgcgttgtaacaccggtttggaaat

SEQ ID NO: 409848 - DNA, 30 bp, Artificial Sequence
  Synthetic oligonucleotide
accccgagtactgcagttcacatctgaaat

SEQ ID NO: 409849 - DNA, 30 bp, Artificial Sequence
  Synthetic oligonucleotide
tggactgaacccccttactatctctgaaat

SEQ ID NO: 409850 - DNA, 30 bp, Artificial Sequence
  Synthetic oligonucleotide
ggttactagagcccacggtctttctgaaat

SEQ ID NO: 409851 - DNA, 30 bp, Artificial Sequence
  Synthetic oligonucleotide
ctcttggtcatgatcctcgttatttgaaat

SEQ ID NO: 409852 - DNA, 30 bp, Artificial Sequence
  Synthetic oligonucleotide
gtttgatggagacccttagtactttgaaat

SEQ ID NO: 409853 - DNA, 30 bp, Artificial Sequence
  Synthetic oligonucleotide
ctagtttcggactaccccgagcaaataaat

SEQ ID NO: 409854 - DNA, 30 bp, Artificial Sequence
  Synthetic oligonucleotide
tgcgcttcagagaccaaaagctgaataaat

SEQ ID NO: 409855 - DNA, 30 bp, Artificial Sequence
  Synthetic oligonucleotide
ttcttgcagggtaggagttgtttaataaat

SEQ ID NO: 409856 - DNA, 30 bp, Artificial Sequence
  Synthetic oligonucleotide
ttatatccacatggggtattcgtcataaat

SEQ ID NO: 409857 - DNA, 31 bp, Artificial Sequence
  Synthetic oligonucleotide
gggtacatagcaagcaaacaaattcataaat

SEQ ID NO: 409858 - DNA, 30 bp, Artificial Sequence
  Synthetic oligonucleotide
ttaaaatgctaatatgcggtgcggataaat

SEQ ID NO: 409859 - DNA, 30 bp, Artificial Sequence
  Synthetic oligonucleotide
cctatatttaagagacgcacctggataaat

SEQ ID NO: 409860 - DNA, 30 bp, Artificial Sequence
  Synthetic oligonucleotide
gttgtagaaacccccgtatatgtgataaat

SEQ ID NO: 409861 - DNA, 30 bp, Artificial Sequence
  Synthetic oligonucleotide
gatcgaattactggatctctgtatataaat

SEQ ID NO: 409862 - DNA, 35 bp, Artificial Sequence
  Synthetic oligonucleotide
cttactattttcgttccgagtttcgaactataaat

SEQ ID NO: 409863 - DNA, 30 bp, Artificial Sequence
  Synthetic oligonucleotide
acattgaacctatttatttgccgtataaat

SEQ ID NO: 409864 - DNA, 30 bp, Artificial Sequence
  Synthetic oligonucleotide
gggtttggccaatcgtagcggggtataaat

SEQ ID NO: 409865 - DNA, 30 bp, Artificial Sequence
  Synthetic oligonucleotide
ggaattttcacggtgaatctacttataaat

SEQ ID NO: 409866 - DNA, 30 bp, Artificial Sequence
  Synthetic oligonucleotide
gcctaggaaccatgtgcttatcaactaaat

SEQ ID NO: 409867 - DNA, 30 bp, Artificial Sequence
  Synthetic oligonucleotide
caaaactagatacaacgtcaaccactaaat

SEQ ID NO: 409868 - DNA, 30 bp, Artificial Sequence
  Synthetic oligonucleotide
acaccagtgaagcagctccgaccactaaat

SEQ ID NO: 409869 - DNA, 30 bp, Artificial Sequence
  Synthetic oligonucleotide
tctcatcagcttctgactatacgactaaat

SEQ ID NO: 409870 - DNA, 30 bp, Artificial Sequence
  Synthetic oligonucleotide
cacgttggtaggaagccttgcatactaaat

SEQ ID NO: 409871 - DNA, 30 bp, Artificial Sequence
  Synthetic oligonucleotide
ggtctcgggatcattaggcttatactaaat

SEQ ID NO: 409872 - DNA, 30 bp, Artificial Sequence
  Synthetic oligonucleotide
gattagtgatgggatcaaagccacctaaat

SEQ ID NO: 409873 - DNA, 30 bp, Artificial Sequence
  Synthetic oligonucleotide
cccattgggaatttcggccggtgcctaaat

SEQ ID NO: 409874 - DNA, 30 bp, Artificial Sequence
  Synthetic oligonucleotide
tcggtagtaccaagaacccgttagctaaat

SEQ ID NO: 409875 - DNA, 30 bp, Artificial Sequence
  Synthetic oligonucleotide
cttgagacttccgcctgccgctggctaaat

SEQ ID NO: 409876 - DNA, 30 bp, Artificial Sequence
  Synthetic oligonucleotide
taataaggttgcagtgtgccaatgctaaat

SEQ ID NO: 409877 - DNA, 30 bp, Artificial Sequence
  Synthetic oligonucleotide
ccaggatttacggtgtaattgattctaaat

SEQ ID NO: 409878 - DNA, 30 bp, Artificial Sequence
  Synthetic oligonucleotide
agtgaacgctgtgcgacttcaaaagtaaat

SEQ ID NO: 409879 - DNA, 30 bp, Artificial Sequence
  Synthetic oligonucleotide
ttagctcccgtcatcgggactcaagtaaat

SEQ ID NO: 409880 - DNA, 27 bp, Artificial Sequence
  Synthetic oligonucleotide
tttggtcaactaaagctaggagtaaat

SEQ ID NO: 409881 - DNA, 30 bp, Artificial Sequence
  Synthetic oligonucleotide
tgaggtacatgtacgcctgcactagtaaat

SEQ ID NO: 409882 - DNA, 30 bp, Artificial Sequence
  Synthetic oligonucleotide
gcagtacacgccagtaccgaatgcgtaaat

SEQ ID NO: 409883 - DNA, 30 bp, Artificial Sequence
  Synthetic oligonucleotide
gaaagtgattttttaaggagtttcgtaaat

SEQ ID NO: 409884 - DNA, 30 bp, Artificial Sequence
  Synthetic oligonucleotide
gcatgtcttttaatgaattgaatggtaaat

SEQ ID NO: 409885 - DNA, 30 bp, Artificial Sequence
  Synthetic oligonucleotide
gatttagctgtacgaggtagcatggtaaat

SEQ ID NO: 409886 - DNA, 30 bp, Artificial Sequence
  Synthetic oligonucleotide
ggtgccgtgtgatcactttgttctgtaaat

SEQ ID NO: 409887 - DNA, 30 bp, Artificial Sequence
  Synthetic oligonucleotide
agctgctttttccttacgttaagtgtaaat

SEQ ID NO: 409888 - DNA, 30 bp, Artificial Sequence
  Synthetic oligonucleotide
ggtgactgtacaaggagtccaattgtaaat

SEQ ID NO: 409889 - DNA, 30 bp, Artificial Sequence
  Synthetic oligonucleotide
agttgttggctactgtagatggttgtaaat

SEQ ID NO: 409890 - DNA, 30 bp, Artificial Sequence
  Synthetic oligonucleotide
gccagcgtattgcgcgcgattaaattaaat

SEQ ID NO: 409891 - DNA, 30 bp, Artificial Sequence
  Synthetic oligonucleotide
ggtaaatcgcatcacgcgattcaattaaat

SEQ ID NO: 409892 - DNA, 30 bp, Artificial Sequence
  Synthetic oligonucleotide
tgacgtgctaagtactatccgccattaaat

SEQ ID NO: 409893 - DNA, 30 bp, Artificial Sequence
  Synthetic oligonucleotide
tttggctaaacttagagggaacgattaaat

SEQ ID NO: 409894 - DNA, 30 bp, Artificial Sequence
  Synthetic oligonucleotide
atagcacgttaaggccttactgtcttaaat

SEQ ID NO: 409895 - DNA, 30 bp, Artificial Sequence
  Synthetic oligonucleotide
cctcggatcggtggtcaagcctatttaaat

SEQ ID NO: 409896 - DNA, 30 bp, Artificial Sequence
  Synthetic oligonucleotide
agcagatagctgattttagttgctttaaat

SEQ ID NO: 409897 - DNA, 30 bp, Artificial Sequence
  Synthetic oligonucleotide
tagaagggcagtgaatacatttgtttaaat

SEQ ID NO: 409898 - DNA, 30 bp, Artificial Sequence
  Synthetic oligonucleotide
gactggactatgagacgtagttaaaacaat

SEQ ID NO: 409899 - DNA, 30 bp, Artificial Sequence
  Synthetic oligonucleotide
tcaagtaacggcgcccatttttaaaacaat

SEQ ID NO: 409900 - DNA, 30 bp, Artificial Sequence
  Synthetic oligonucleotide
cggggatgcgtcggcttatagtccaacaat

SEQ ID NO: 409901 - DNA, 30 bp, Artificial Sequence
  Synthetic oligonucleotide
tttagactactgttcttgtccaagaacaat

SEQ ID NO: 409902 - DNA, 30 bp, Artificial Sequence
  Synthetic oligonucleotide
atctactgtgccggcggtctccataacaat

SEQ ID NO: 409903 - DNA, 30 bp, Artificial Sequence
  Synthetic oligonucleotide
aagcggctctgaatatttatatgtaacaat

SEQ ID NO: 409904 - DNA, 30 bp, Artificial Sequence
  Synthetic oligonucleotide
gaatagaaagttaatgctcagaaacacaat

SEQ ID NO: 409905 - DNA, 30 bp, Artificial Sequence
  Synthetic oligonucleotide
atgacattcggatattcacccgtacacaat

SEQ ID NO: 409906 - DNA, 30 bp, Artificial Sequence
  Synthetic oligonucleotide
catgactcagactaaattgtccggcacaat

SEQ ID NO: 409907 - DNA, 30 bp, Artificial Sequence
  Synthetic oligonucleotide
ctgcattatcgatttgatcttgtgcacaat

SEQ ID NO: 409908 - DNA, 30 bp, Artificial Sequence
  Synthetic oligonucleotide
tggctagatctatcgggtttgcatcacaat

SEQ ID NO: 409909 - DNA, 30 bp, Artificial Sequence
  Synthetic oligonucleotide
acgcccctaatcgcggccacggcagacaat

SEQ ID NO: 409910 - DNA, 30 bp, Artificial Sequence
  Synthetic oligonucleotide
gtccagggtaagtatttttgcaccgacaat

SEQ ID NO: 409911 - DNA, 30 bp, Artificial Sequence
  Synthetic oligonucleotide
ttcattctgtcgaagatggattcggacaat

SEQ ID NO: 409912 - DNA, 30 bp, Artificial Sequence
  Synthetic oligonucleotide
ctcgggtgacgcggtagaacctcctacaat

SEQ ID NO: 409913 - DNA, 30 bp, Artificial Sequence
  Synthetic oligonucleotide
atgtaacctcgctggtggcgaatctacaat

SEQ ID NO: 409914 - DNA, 30 bp, Artificial Sequence
  Synthetic oligonucleotide
tcaagtgttgtatagacaagaaattacaat

SEQ ID NO: 409915 - DNA, 30 bp, Artificial Sequence
  Synthetic oligonucleotide
ctcgaccagctatataaacgatcttacaat

SEQ ID NO: 409916 - DNA, 30 bp, Artificial Sequence
  Synthetic oligonucleotide
tgcactcagatagggctaacaatttacaat

SEQ ID NO: 409917 - DNA, 30 bp, Artificial Sequence
  Synthetic oligonucleotide
cccgcccccttaccagggagctaaaccaat

SEQ ID NO: 409918 - DNA, 30 bp, Artificial Sequence
  Synthetic oligonucleotide
cgtccggccatcgttcgcctttaaaccaat

SEQ ID NO: 409919 - DNA, 30 bp, Artificial Sequence
  Synthetic oligonucleotide
ttgtgacgttcgcaaactcgtcggaccaat

SEQ ID NO: 409920 - DNA, 30 bp, Artificial Sequence
  Synthetic oligonucleotide
tggccgatctttgatgtaagatggaccaat

SEQ ID NO: 409921 - DNA, 30 bp, Artificial Sequence
  Synthetic oligonucleotide
gcaacgtgcgatgttgatctggttaccaat

SEQ ID NO: 409922 - DNA, 30 bp, Artificial Sequence
  Synthetic oligonucleotide
gcaattatgttccatgagggactacccaat

SEQ ID NO: 409923 - DNA, 30 bp, Artificial Sequence
  Synthetic oligonucleotide
attggctgtattctcttacacagccccaat

SEQ ID NO: 409924 - DNA, 30 bp, Artificial Sequence
  Synthetic oligonucleotide
tcagtggggccggcggaaaattgccccaat

SEQ ID NO: 409925 - DNA, 30 bp, Artificial Sequence
  Synthetic oligonucleotide
cctgttttcttatgcttctttgtgcccaat

SEQ ID NO: 409926 - DNA, 30 bp, Artificial Sequence
  Synthetic oligonucleotide
cactttccttcgtgttggatatctcccaat

SEQ ID NO: 409927 - DNA, 30 bp, Artificial Sequence
  Synthetic oligonucleotide
gaaatgtgacgatcttgtgaagaagccaat

SEQ ID NO: 409928 - DNA, 30 bp, Artificial Sequence
  Synthetic oligonucleotide
tcatcaaatgccacctacggctgagccaat

SEQ ID NO: 409929 - DNA, 30 bp, Artificial Sequence
  Synthetic oligonucleotide
gtgtctgttgactcgggtcaggcggccaat

SEQ ID NO: 409930 - DNA, 30 bp, Artificial Sequence
  Synthetic oligonucleotide
cgggcaacgagggtcatggaagtggccaat

SEQ ID NO: 409931 - DNA, 30 bp, Artificial Sequence
  Synthetic oligonucleotide
acctagaattccttgtggatattggccaat

SEQ ID NO: 409932 - DNA, 30 bp, Artificial Sequence
  Synthetic oligonucleotide
gctattagatgttctactaatttggccaat

SEQ ID NO: 409933 - DNA, 30 bp, Artificial Sequence
  Synthetic oligonucleotide
ggccttgagtctgtgcgccaggatgccaat

SEQ ID NO: 409934 - DNA, 30 bp, Artificial Sequence
  Synthetic oligonucleotide
tcggattgcctttagatgaggtatgccaat

SEQ ID NO: 409935 - DNA, 30 bp, Artificial Sequence
  Synthetic oligonucleotide
acaaatatgttcggcaaccaatgtgccaat

SEQ ID NO: 409936 - DNA, 30 bp, Artificial Sequence
  Synthetic oligonucleotide
atttttaactgactgggtcctcactccaat

SEQ ID NO: 409937 - DNA, 30 bp, Artificial Sequence
  Synthetic oligonucleotide
taaggatagtatattcattgtttctccaat

SEQ ID NO: 409938 - DNA, 30 bp, Artificial Sequence
  Synthetic oligonucleotide
gcgaccgctgcgaattcgtttgcgtccaat

SEQ ID NO: 409939 - DNA, 30 bp, Artificial Sequence
  Synthetic oligonucleotide
gcaggtttgttccgcccaatgtggtccaat

SEQ ID NO: 409940 - DNA, 30 bp, Artificial Sequence
  Synthetic oligonucleotide
acctgggtttggttaacctctaattccaat

SEQ ID NO: 409941 - DNA, 30 bp, Artificial Sequence
  Synthetic oligonucleotide
gtatccaccacgtagtagagaacttccaat

SEQ ID NO: 409942 - DNA, 30 bp, Artificial Sequence
  Synthetic oligonucleotide
agcccagtctcagccaagagcataagcaat

SEQ ID NO: 409943 - DNA, 30 bp, Artificial Sequence
  Synthetic oligonucleotide
gaatcgtgacaaccgctaatcccgagcaat

SEQ ID NO: 409944 - DNA, 30 bp, Artificial Sequence
  Synthetic oligonucleotide
tgcattacacacgtctcttacctgagcaat

SEQ ID NO: 409945 - DNA, 30 bp, Artificial Sequence
  Synthetic oligonucleotide
gattctagcattcaacacatgttgagcaat

SEQ ID NO: 409946 - DNA, 30 bp, Artificial Sequence
  Synthetic oligonucleotide
gtatgcaactgaacgttttaagatagcaat

SEQ ID NO: 409947 - DNA, 30 bp, Artificial Sequence
  Synthetic oligonucleotide
tgtgcaacagcactaggtggtaaacgcaat

SEQ ID NO: 409948 - DNA, 30 bp, Artificial Sequence
  Synthetic oligonucleotide
ccgtgataagttagggatttggaacgcaat

SEQ ID NO: 409949 - DNA, 30 bp, Artificial Sequence
  Synthetic oligonucleotide
ttcgtacacggcggggaaagtgaacgcaat

SEQ ID NO: 409950 - DNA, 30 bp, Artificial Sequence
  Synthetic oligonucleotide
gagctgctgcgctagcggtagacacgcaat

SEQ ID NO: 409951 - DNA, 30 bp, Artificial Sequence
  Synthetic oligonucleotide
agataccgcggattccggggactacgcaat

SEQ ID NO: 409952 - DNA, 30 bp, Artificial Sequence
  Synthetic oligonucleotide
gattggataccagtagtaggccgccgcaat

SEQ ID NO: 409953 - DNA, 30 bp, Artificial Sequence
  Synthetic oligonucleotide
ggggagggctacgctcgacggggccgcaat

SEQ ID NO: 409954 - DNA, 30 bp, Artificial Sequence
  Synthetic oligonucleotide
gtcaacgtcacacacttcccatagcgcaat

SEQ ID NO: 409955 - DNA, 30 bp, Artificial Sequence
  Synthetic oligonucleotide
gtgggggaacatttggtaattacgcgcaat

SEQ ID NO: 409956 - DNA, 30 bp, Artificial Sequence
  Synthetic oligonucleotide
acatgtcgctaaataccggtaactcgcaat

SEQ ID NO: 409957 - DNA, 30 bp, Artificial Sequence
  Synthetic oligonucleotide
gtgtcttataggatgcattcgagtcgcaat

SEQ ID NO: 409958 - DNA, 30 bp, Artificial Sequence
  Synthetic oligonucleotide
ggtttgacatatctaattagagaaggcaat

SEQ ID NO: 409959 - DNA, 30 bp, Artificial Sequence
  Synthetic oligonucleotide
actgtttggtactgcctgtgaacaggcaat

SEQ ID NO: 409960 - DNA, 30 bp, Artificial Sequence
  Synthetic oligonucleotide
cgagcctccgccggtcatttatgaggcaat

SEQ ID NO: 409961 - DNA, 30 bp, Artificial Sequence
  Synthetic oligonucleotide
tttgacttttcgccacgcgagtacggcaat

SEQ ID NO: 409962 - DNA, 30 bp, Artificial Sequence
  Synthetic oligonucleotide
ggttgtacgtacatcgtctgatccggcaat

SEQ ID NO: 409963 - DNA, 29 bp, Artificial Sequence
  Synthetic oligonucleotide
cacggtgtgggccctctaattccggcaat

SEQ ID NO: 409964 - DNA, 30 bp, Artificial Sequence
  Synthetic oligonucleotide
tcggatattgcaagtttagttggcggcaat

SEQ ID NO: 409965 - DNA, 30 bp, Artificial Sequence
  Synthetic oligonucleotide
cttattccccgctgaaggggtccgggcaat

SEQ ID NO: 409966 - DNA, 29 bp, Artificial Sequence
  Synthetic oligonucleotide
agaacttatcacagcaagttccgggcaat

SEQ ID NO: 409967 - DNA, 30 bp, Artificial Sequence
  Synthetic oligonucleotide
ttctgctaaggtgatccggagtcgggcaat

SEQ ID NO: 409968 - DNA, 30 bp, Artificial Sequence
  Synthetic oligonucleotide
tccaactctagcagctgggttatgggcaat

SEQ ID NO: 409969 - DNA, 30 bp, Artificial Sequence
  Synthetic oligonucleotide
gtgattcagcgttgccctaaacctggcaat

SEQ ID NO: 409970 - DNA, 30 bp, Artificial Sequence
  Synthetic oligonucleotide
gaccggacttttgcgataccaatatgcaat

SEQ ID NO: 409971 - DNA, 30 bp, Artificial Sequence
  Synthetic oligonucleotide
tgtattgggtagggtgtaacgttatgcaat

SEQ ID NO: 409972 - DNA, 30 bp, Artificial Sequence
  Synthetic oligonucleotide
gaggcgtccatttcactcttagagtgcaat

SEQ ID NO: 409973 - DNA, 30 bp, Artificial Sequence
  Synthetic oligonucleotide
aacgttcgatacagcgacgcatattgcaat

SEQ ID NO: 409974 - DNA, 30 bp, Artificial Sequence
  Synthetic oligonucleotide
tcgttgtcgcccttgaggacgtcttgcaat

SEQ ID NO: 409975 - DNA, 30 bp, Artificial Sequence
  Synthetic oligonucleotide
aggtttcttgctgaaccctgtaaaatcaat

SEQ ID NO: 409976 - DNA, 30 bp, Artificial Sequence
  Synthetic oligonucleotide
tttgctcgaagggcataactaacgatcaat

SEQ ID NO: 409977 - DNA, 30 bp, Artificial Sequence
  Synthetic oligonucleotide
caagtcggccgtccctagactgggatcaat

SEQ ID NO: 409978 - DNA, 30 bp, Artificial Sequence
  Synthetic oligonucleotide
ggcttgtcagggcgcactaactatatcaat

SEQ ID NO: 409979 - DNA, 30 bp, Artificial Sequence
  Synthetic oligonucleotide
ttatggttacaaggacctaggtgtatcaat

SEQ ID NO: 409980 - DNA, 30 bp, Artificial Sequence
  Synthetic oligonucleotide
acaattgttatggcccactcaattatcaat

SEQ ID NO: 409981 - DNA, 30 bp, Artificial Sequence
  Synthetic oligonucleotide
tacgtacatcatacacgtgggcttatcaat

SEQ ID NO: 409982 - DNA, 30 bp, Artificial Sequence
  Synthetic oligonucleotide
tgcctacgatggaagcgcgatcttatcaat

SEQ ID NO: 409983 - DNA, 30 bp, Artificial Sequence
  Synthetic oligonucleotide
cagaaaaggtatcgagcaccggacctcaat

SEQ ID NO: 409984 - DNA, 30 bp, Artificial Sequence
  Synthetic oligonucleotide
taatcaatgtgatagtggaacatcctcaat

SEQ ID NO: 409985 - DNA, 30 bp, Artificial Sequence
  Synthetic oligonucleotide
tcttcaggatacagacttagggaagtcaat

SEQ ID NO: 409986 - DNA, 30 bp, Artificial Sequence
  Synthetic oligonucleotide
taacattgatccggttcagaataagtcaat

SEQ ID NO: 409987 - DNA, 30 bp, Artificial Sequence
  Synthetic oligonucleotide
agacccattctttcaagcctttaagtcaat

SEQ ID NO: 409988 - DNA, 30 bp, Artificial Sequence
  Synthetic oligonucleotide
tcagcagacatgcttattattatagtcaat

SEQ ID NO: 409989 - DNA, 30 bp, Artificial Sequence
  Synthetic oligonucleotide
aaagtagactaggatggacctgtagtcaat

SEQ ID NO: 409990 - DNA, 30 bp, Artificial Sequence
  Synthetic oligonucleotide
ctctcggaactagtagtatggcccgtcaat

SEQ ID NO: 409991 - DNA, 30 bp, Artificial Sequence
  Synthetic oligonucleotide
agtttagcttcccccggaacctaggtcaat

SEQ ID NO: 409992 - DNA, 30 bp, Artificial Sequence
  Synthetic oligonucleotide
gtctgtcgtgcttttcctcgcggggtcaat

SEQ ID NO: 409993 - DNA, 30 bp, Artificial Sequence
  Synthetic oligonucleotide
gccaaatagatttcagacttgatggtcaat

SEQ ID NO: 409994 - DNA, 30 bp, Artificial Sequence
  Synthetic oligonucleotide
cactaggtgtccgccccagagcatgtcaat

SEQ ID NO: 409995 - DNA, 30 bp, Artificial Sequence
  Synthetic oligonucleotide
ccaatcgctcggtctttatcggctgtcaat

SEQ ID NO: 409996 - DNA, 30 bp, Artificial Sequence
  Synthetic oligonucleotide
ggtaggcagtggtttggtgtttctgtcaat

SEQ ID NO: 409997 - DNA, 30 bp, Artificial Sequence
  Synthetic oligonucleotide
caagtccctgcggtacctgagggtgtcaat

SEQ ID NO: 409998 - DNA, 30 bp, Artificial Sequence
  Synthetic oligonucleotide
cgccatgtcaaacctttcaatattgtcaat

SEQ ID NO: 409999 - DNA, 30 bp, Artificial Sequence
  Synthetic oligonucleotide
gatgtgcgtaattaaggagcatttgtcaat

SEQ ID NO: 410000 - DNA, 30 bp, Artificial Sequence
  Synthetic oligonucleotide
cggtcgcggctatctggtacaaaattcaat

SEQ ID NO: 410001 - DNA, 30 bp, Artificial Sequence
  Synthetic oligonucleotide
tgctgaggattaggttgatagtaattcaat

SEQ ID NO: 410002 - DNA, 30 bp, Artificial Sequence
  Synthetic oligonucleotide
ttatcagataggttgatttgttcattcaat

SEQ ID NO: 410003 - DNA, 30 bp, Artificial Sequence
  Synthetic oligonucleotide
gtaatgataaaagaagatgcttgcttcaat

SEQ ID NO: 410004 - DNA, 30 bp, Artificial Sequence
  Synthetic oligonucleotide
tggttctccgaggttggtggttcgttcaat

SEQ ID NO: 410005 - DNA, 30 bp, Artificial Sequence
  Synthetic oligonucleotide
gttaggtccagacgcggagcctggttcaat

SEQ ID NO: 410006 - DNA, 30 bp, Artificial Sequence
  Synthetic oligonucleotide
agttttaacactaagccttgcgatttcaat

SEQ ID NO: 410007 - DNA, 30 bp, Artificial Sequence
  Synthetic oligonucleotide
tgataattgatgagcagtcgggtaaagaat

SEQ ID NO: 410008 - DNA, 30 bp, Artificial Sequence
  Synthetic oligonucleotide
tatagattgggtcaaagctgccccaagaat

SEQ ID NO: 410009 - DNA, 30 bp, Artificial Sequence
  Synthetic oligonucleotide
cgtgatgtagcatcctgcttggtcaagaat

SEQ ID NO: 410010 - DNA, 30 bp, Artificial Sequence
  Synthetic oligonucleotide
ggctggggccagcgaccatcctgtaagaat

SEQ ID NO: 410011 - DNA, 30 bp, Artificial Sequence
  Synthetic oligonucleotide
attgcctttattagggtttatattaagaat

SEQ ID NO: 410012 - DNA, 30 bp, Artificial Sequence
  Synthetic oligonucleotide
gtcctattcattaagtataacgaacagaat

SEQ ID NO: 410013 - DNA, 30 bp, Artificial Sequence
  Synthetic oligonucleotide
tttttgcacggcggtgatacggaacagaat

SEQ ID NO: 410014 - DNA, 31 bp, Artificial Sequence
  Synthetic oligonucleotide
gtataggatagaacggtgacttacacagaat

SEQ ID NO: 410015 - DNA, 30 bp, Artificial Sequence
  Synthetic oligonucleotide
gatgcattgaaatgtatcctagaccagaat

SEQ ID NO: 410016 - DNA, 30 bp, Artificial Sequence
  Synthetic oligonucleotide
ttactctatcacggggcgcgtacccagaat

SEQ ID NO: 410017 - DNA, 30 bp, Artificial Sequence
  Synthetic oligonucleotide
gcggggtccagtatgggtcgttcccagaat

SEQ ID NO: 410018 - DNA, 30 bp, Artificial Sequence
  Synthetic oligonucleotide
aagaaacattcactcgatcgtagccagaat

SEQ ID NO: 410019 - DNA, 30 bp, Artificial Sequence
  Synthetic oligonucleotide
cccgattacatggtggcacagcgccagaat

SEQ ID NO: 410020 - DNA, 30 bp, Artificial Sequence
  Synthetic oligonucleotide
acttcatgccgttttttcgatttccagaat

SEQ ID NO: 410021 - DNA, 30 bp, Artificial Sequence
  Synthetic oligonucleotide
tgtaacgcgcgtcttgcgcacaagcagaat

SEQ ID NO: 410022 - DNA, 30 bp, Artificial Sequence
  Synthetic oligonucleotide
tatcaatgatatgtagaaattatgcagaat

SEQ ID NO: 410023 - DNA, 30 bp, Artificial Sequence
  Synthetic oligonucleotide
gttatgctctacgcccgtgtggtgcagaat

SEQ ID NO: 410024 - DNA, 30 bp, Artificial Sequence
  Synthetic oligonucleotide
cagttgcgcctatgtgggaacgctcagaat

SEQ ID NO: 410025 - DNA, 30 bp, Artificial Sequence
  Synthetic oligonucleotide
ctctgtagcgatataaatatccgtcagaat

SEQ ID NO: 410026 - DNA, 30 bp, Artificial Sequence
  Synthetic oligonucleotide
gcctttcgactaggggtcccggttcagaat

SEQ ID NO: 410027 - DNA, 30 bp, Artificial Sequence
  Synthetic oligonucleotide
ttcctgtatgtgcgagacttcctcgagaat

SEQ ID NO: 410028 - DNA, 30 bp, Artificial Sequence
  Synthetic oligonucleotide
caagtctaactgtgatgcgagcaggagaat

SEQ ID NO: 410029 - DNA, 30 bp, Artificial Sequence
  Synthetic oligonucleotide
cctggaggcgcgataaggttcgaggagaat

SEQ ID NO: 410030 - DNA, 30 bp, Artificial Sequence
  Synthetic oligonucleotide
agcaggccgaatggccctgttctggagaat

SEQ ID NO: 410031 - DNA, 30 bp, Artificial Sequence
  Synthetic oligonucleotide
tcccaaaatcgacgcatacgtgttgagaat

SEQ ID NO: 410032 - DNA, 30 bp, Artificial Sequence
  Synthetic oligonucleotide
aaagtgcaaactcgctgtggtagatagaat

SEQ ID NO: 410033 - DNA, 30 bp, Artificial Sequence
  Synthetic oligonucleotide
atgcgtacttaactgagtaagtcaacgaat

SEQ ID NO: 410034 - DNA, 30 bp, Artificial Sequence
  Synthetic oligonucleotide
aaaaataggtttaccccccctgtaacgaat

SEQ ID NO: 410035 - DNA, 30 bp, Artificial Sequence
  Synthetic oligonucleotide
tgaaaaggtagtgtagttggcttaacgaat

SEQ ID NO: 410036 - DNA, 30 bp, Artificial Sequence
  Synthetic oligonucleotide
aaaacgtaccgaagtgacgctaacacgaat

SEQ ID NO: 410037 - DNA, 30 bp, Artificial Sequence
  Synthetic oligonucleotide
tatgtgttacgaacggggctgcccacgaat

SEQ ID NO: 410038 - DNA, 30 bp, Artificial Sequence
  Synthetic oligonucleotide
atgccatgttgatagcatggacgcacgaat

SEQ ID NO: 410039 - DNA, 30 bp, Artificial Sequence
  Synthetic oligonucleotide
aaatagtcggagcgttggtgaaggacgaat

SEQ ID NO: 410040 - DNA, 30 bp, Artificial Sequence
  Synthetic oligonucleotide
ccgcacctcaacgacaacatcgggacgaat

SEQ ID NO: 410041 - DNA, 30 bp, Artificial Sequence
  Synthetic oligonucleotide
gtctagtcgcgcacaactcatgggacgaat

SEQ ID NO: 410042 - DNA, 30 bp, Artificial Sequence
  Synthetic oligonucleotide
ttaaggatgatgtctcgggtcccgccgaat

SEQ ID NO: 410043 - DNA, 30 bp, Artificial Sequence
  Synthetic oligonucleotide
agaatgagtccgagtacctcggggccgaat

SEQ ID NO: 410044 - DNA, 30 bp, Artificial Sequence
  Synthetic oligonucleotide
gcatagtcgctcttcagtagtttagcgaat

SEQ ID NO: 410045 - DNA, 30 bp, Artificial Sequence
  Synthetic oligonucleotide
atatggtcggtgaatttatccctggcgaat

SEQ ID NO: 410046 - DNA, 30 bp, Artificial Sequence
  Synthetic oligonucleotide
tccacctcttggaaattgttatctgcgaat

SEQ ID NO: 410047 - DNA, 30 bp, Artificial Sequence
  Synthetic oligonucleotide
gcccagccgtagaattttagcttatcgaat

SEQ ID NO: 410048 - DNA, 30 bp, Artificial Sequence
  Synthetic oligonucleotide
ttaggacccattaggtgaagcccgtcgaat

SEQ ID NO: 410049 - DNA, 30 bp, Artificial Sequence
  Synthetic oligonucleotide
gaatggcaagcgtcatgttgagcgtcgaat

SEQ ID NO: 410050 - DNA, 30 bp, Artificial Sequence
  Synthetic oligonucleotide
taattgtttgccttgtcgaaacggtcgaat

SEQ ID NO: 410051 - DNA, 30 bp, Artificial Sequence
  Synthetic oligonucleotide
cctctaggcatcgaattttgtgggtcgaat

SEQ ID NO: 410052 - DNA, 30 bp, Artificial Sequence
  Synthetic oligonucleotide
caagggtcttctgactatctactttcgaat

SEQ ID NO: 410053 - DNA, 30 bp, Artificial Sequence
  Synthetic oligonucleotide
aaaatccattacggcctgattgtaaggaat

SEQ ID NO: 410054 - DNA, 30 bp, Artificial Sequence
  Synthetic oligonucleotide
ttcttcaagttatatacaacggacaggaat

SEQ ID NO: 410055 - DNA, 30 bp, Artificial Sequence
  Synthetic oligonucleotide
tgttcacagcggcccgatgcttccaggaat

SEQ ID NO: 410056 - DNA, 30 bp, Artificial Sequence
  Synthetic oligonucleotide
attcgggctcgatcgcgtcccagtaggaat

SEQ ID NO: 410057 - DNA, 30 bp, Artificial Sequence
  Synthetic oligonucleotide
gttgatacgccccgatgaacgagtaggaat

SEQ ID NO: 410058 - DNA, 30 bp, Artificial Sequence
  Synthetic oligonucleotide
acgcgcgtttctgaggcgattagacggaat

SEQ ID NO: 410059 - DNA, 30 bp, Artificial Sequence
  Synthetic oligonucleotide
cactttaacgttactttgacgccccggaat

SEQ ID NO: 410060 - DNA, 29 bp, Artificial Sequence
  Synthetic oligonucleotide
atcgataataaatcttttaaggccggaat

SEQ ID NO: 410061 - DNA, 30 bp, Artificial Sequence
  Synthetic oligonucleotide
gattcttgcattggcgtgggctgccggaat

SEQ ID NO: 410062 - DNA, 30 bp, Artificial Sequence
  Synthetic oligonucleotide
cctgtgtattaggcgtttatttagcggaat

SEQ ID NO: 410063 - DNA, 30 bp, Artificial Sequence
  Synthetic oligonucleotide
agtgcactgctttcaactagcgtgcggaat

SEQ ID NO: 410064 - DNA, 30 bp, Artificial Sequence
  Synthetic oligonucleotide
ggttttcggttctgctgccatggtcggaat

SEQ ID NO: 410065 - DNA, 30 bp, Artificial Sequence
  Synthetic oligonucleotide
gtgtatccttctgcgaggttttcagggaat

SEQ ID NO: 410066 - DNA, 30 bp, Artificial Sequence
  Synthetic oligonucleotide
gtattaaatagcacaacattataggggaat

SEQ ID NO: 410067 - DNA, 30 bp, Artificial Sequence
  Synthetic oligonucleotide
ccagtgcaccctgtcgtggtacctgggaat

SEQ ID NO: 410068 - DNA, 30 bp, Artificial Sequence
  Synthetic oligonucleotide
gtagatcctttcaccagtacggaatggaat

SEQ ID NO: 410069 - DNA, 30 bp, Artificial Sequence
  Synthetic oligonucleotide
gaaaatcgtaggtcaatgggcacatggaat

SEQ ID NO: 410070 - DNA, 30 bp, Artificial Sequence
  Synthetic oligonucleotide
cagcttggtactgatccctctgtctggaat

SEQ ID NO: 410071 - DNA, 30 bp, Artificial Sequence
  Synthetic oligonucleotide
acgaccaacctgtagtgcaatcagtggaat

SEQ ID NO: 410072 - DNA, 30 bp, Artificial Sequence
  Synthetic oligonucleotide
tcagggtctgatttcgtagtctagtggaat

SEQ ID NO: 410073 - DNA, 30 bp, Artificial Sequence
  Synthetic oligonucleotide
ggctccgatgctgtttggttcaattggaat

SEQ ID NO: 410074 - DNA, 30 bp, Artificial Sequence
  Synthetic oligonucleotide
gtgatttgtgagaccttagtggcttggaat

SEQ ID NO: 410075 - DNA, 30 bp, Artificial Sequence
  Synthetic oligonucleotide
taataagaagatggggtcccgctttggaat

SEQ ID NO: 410076 - DNA, 30 bp, Artificial Sequence
  Synthetic oligonucleotide
ccagggtcttcaaagtttctcccaatgaat

SEQ ID NO: 410077 - DNA, 30 bp, Artificial Sequence
  Synthetic oligonucleotide
tgacgaaagacgggaaatctcgcaatgaat

SEQ ID NO: 410078 - DNA, 30 bp, Artificial Sequence
  Synthetic oligonucleotide
cgtagtcggtttgtgtggaggttaatgaat

SEQ ID NO: 410079 - DNA, 30 bp, Artificial Sequence
  Synthetic oligonucleotide
ttaatggatcactacaccgcattcatgaat

SEQ ID NO: 410080 - DNA, 30 bp, Artificial Sequence
  Synthetic oligonucleotide
agtagaactcccgttagtgttctgatgaat

SEQ ID NO: 410081 - DNA, 30 bp, Artificial Sequence
  Synthetic oligonucleotide
tatgttatcactctcatattaactatgaat

SEQ ID NO: 410082 - DNA, 30 bp, Artificial Sequence
  Synthetic oligonucleotide
gagtggtagttgtataaccgatctatgaat

SEQ ID NO: 410083 - DNA, 30 bp, Artificial Sequence
  Synthetic oligonucleotide
agcagataccgcctagatcgttaactgaat

SEQ ID NO: 410084 - DNA, 30 bp, Artificial Sequence
  Synthetic oligonucleotide
atcatgacataagtcataagtcgactgaat

SEQ ID NO: 410085 - DNA, 30 bp, Artificial Sequence
  Synthetic oligonucleotide
gagcatcagtctctcagctaagacctgaat

SEQ ID NO: 410086 - DNA, 30 bp, Artificial Sequence
  Synthetic oligonucleotide
atgcctttgacatgactggcgaccctgaat

SEQ ID NO: 410087 - DNA, 30 bp, Artificial Sequence
  Synthetic oligonucleotide
gcgatattctggcccgacaagcgcctgaat

SEQ ID NO: 410088 - DNA, 30 bp, Artificial Sequence
  Synthetic oligonucleotide
cgtcagccttgagagccctccaagctgaat

SEQ ID NO: 410089 - DNA, 30 bp, Artificial Sequence
  Synthetic oligonucleotide
atcataccgaccgcgggtccatgtctgaat

SEQ ID NO: 410090 - DNA, 30 bp, Artificial Sequence
  Synthetic oligonucleotide
agctattttagcaccgttcagtgagtgaat

SEQ ID NO: 410091 - DNA, 30 bp, Artificial Sequence
  Synthetic oligonucleotide
taaactgtcctgcggtataggcacgtgaat

SEQ ID NO: 410092 - DNA, 30 bp, Artificial Sequence
  Synthetic oligonucleotide
aaaatacgaactcgtacaagatacgtgaat

SEQ ID NO: 410093 - DNA, 30 bp, Artificial Sequence
  Synthetic oligonucleotide
cgctcctccatgtggtagaataccgtgaat

SEQ ID NO: 410094 - DNA, 30 bp, Artificial Sequence
  Synthetic oligonucleotide
tcaaagcgcaacagttgaccttccgtgaat

SEQ ID NO: 410095 - DNA, 30 bp, Artificial Sequence
  Synthetic oligonucleotide
tatctgcagacttaacactcaggcgtgaat

SEQ ID NO: 410096 - DNA, 28 bp, Artificial Sequence
  Synthetic oligonucleotide
atagacgcacagcagagcgttcgtgaat

SEQ ID NO: 410097 - DNA, 30 bp, Artificial Sequence
  Synthetic oligonucleotide
ctagaaagacgctagtcagctaaggtgaat

SEQ ID NO: 410098 - DNA, 30 bp, Artificial Sequence
  Synthetic oligonucleotide
ggcgggcggttcattgattggtaggtgaat

SEQ ID NO: 410099 - DNA, 30 bp, Artificial Sequence
  Synthetic oligonucleotide
tgttaactagcccacatagttcatgtgaat

SEQ ID NO: 410100 - DNA, 30 bp, Artificial Sequence
  Synthetic oligonucleotide
agctcatttctgacaagacggtctgtgaat

SEQ ID NO: 410101 - DNA, 30 bp, Artificial Sequence
  Synthetic oligonucleotide
gctctcccaaacctgagagggagtgtgaat

SEQ ID NO: 410102 - DNA, 30 bp, Artificial Sequence
  Synthetic oligonucleotide
cattcgaggtgcacgaatggctgtgtgaat

SEQ ID NO: 410103 - DNA, 30 bp, Artificial Sequence
  Synthetic oligonucleotide
aacaggccctaaacgttgactgtattgaat

SEQ ID NO: 410104 - DNA, 30 bp, Artificial Sequence
  Synthetic oligonucleotide
gctgcgcctacgaccttgatatctttgaat

SEQ ID NO: 410105 - DNA, 30 bp, Artificial Sequence
  Synthetic oligonucleotide
ctctaaaagatctatcatgtgcttttgaat

SEQ ID NO: 410106 - DNA, 30 bp, Artificial Sequence
  Synthetic oligonucleotide
caaccgaaatttacggggctagttttgaat

SEQ ID NO: 410107 - DNA, 30 bp, Artificial Sequence
  Synthetic oligonucleotide
ccaacatgtctagactgtacaaaaaataat

SEQ ID NO: 410108 - DNA, 30 bp, Artificial Sequence
  Synthetic oligonucleotide
cctaacagctgtacggttttaaaaaataat

SEQ ID NO: 410109 - DNA, 30 bp, Artificial Sequence
  Synthetic oligonucleotide
ggagtgtatgccgtgtcgcgactaaataat

SEQ ID NO: 410110 - DNA, 30 bp, Artificial Sequence
  Synthetic oligonucleotide
ctaccggaaatgaacgggcattccaataat

SEQ ID NO: 410111 - DNA, 30 bp, Artificial Sequence
  Synthetic oligonucleotide
aaaaccttgactaagcgaatacggaataat

SEQ ID NO: 410112 - DNA, 30 bp, Artificial Sequence
  Synthetic oligonucleotide
tgacacaatcaaggggctttaactaataat

SEQ ID NO: 410113 - DNA, 30 bp, Artificial Sequence
  Synthetic oligonucleotide
gtcggcctaacatttcgcggtgttaataat

SEQ ID NO: 410114 - DNA, 30 bp, Artificial Sequence
  Synthetic oligonucleotide
gcattagtgcgcgctcgcaaatttaataat

SEQ ID NO: 410115 - DNA, 30 bp, Artificial Sequence
  Synthetic oligonucleotide
atcttggacggaacggcctgaggacataat

SEQ ID NO: 410116 - DNA, 30 bp, Artificial Sequence
  Synthetic oligonucleotide
acattagttacgggttgagtctggcataat

SEQ ID NO: 410117 - DNA, 30 bp, Artificial Sequence
  Synthetic oligonucleotide
gttccggatatgcgatttgtcgttcataat

SEQ ID NO: 410118 - DNA, 30 bp, Artificial Sequence
  Synthetic oligonucleotide
tcaccgtcatccgagcaagtgaaagataat

SEQ ID NO: 410119 - DNA, 30 bp, Artificial Sequence
  Synthetic oligonucleotide
cctcaggcatagcaaataccttcagataat

SEQ ID NO: 410120 - DNA, 30 bp, Artificial Sequence
  Synthetic oligonucleotide
gaacaggcgagaaaccggttagccgataat

SEQ ID NO: 410121 - DNA, 30 bp, Artificial Sequence
  Synthetic oligonucleotide
catgccagctcaaaccggaggttcgataat

SEQ ID NO: 410122 - DNA, 30 bp, Artificial Sequence
  Synthetic oligonucleotide
tcttcgtcaacgaagctatccggggataat

SEQ ID NO: 410123 - DNA, 30 bp, Artificial Sequence
  Synthetic oligonucleotide
atcatgcttatcacctcagtacatgataat

SEQ ID NO: 410124 - DNA, 30 bp, Artificial Sequence
  Synthetic oligonucleotide
ttgagcgccgtgctatagatgcgtgataat

SEQ ID NO: 410125 - DNA, 30 bp, Artificial Sequence
  Synthetic oligonucleotide
aagaaagtaccatagtcgctccactataat

SEQ ID NO: 410126 - DNA, 30 bp, Artificial Sequence
  Synthetic oligonucleotide
taagttaggtctcgtacgttgttctataat

SEQ ID NO: 410127 - DNA, 30 bp, Artificial Sequence
  Synthetic oligonucleotide
gctcaaccgatcgactagatcgggtataat

SEQ ID NO: 410128 - DNA, 30 bp, Artificial Sequence
  Synthetic oligonucleotide
gcagatgagcgatgcttgaaattgtataat

SEQ ID NO: 410129 - DNA, 30 bp, Artificial Sequence
  Synthetic oligonucleotide
aaatggtccgtagttgggttgtcttataat

SEQ ID NO: 410130 - DNA, 30 bp, Artificial Sequence
  Synthetic oligonucleotide
atagttattagccttggcactggttataat

SEQ ID NO: 410131 - DNA, 30 bp, Artificial Sequence
  Synthetic oligonucleotide
attcaagtatgttttttactgccaactaat

SEQ ID NO: 410132 - DNA, 30 bp, Artificial Sequence
  Synthetic oligonucleotide
cttcccttaatacactactatggaactaat

SEQ ID NO: 410133 - DNA, 30 bp, Artificial Sequence
  Synthetic oligonucleotide
cttgggtgtgcctcttttgcacagactaat

SEQ ID NO: 410134 - DNA, 30 bp, Artificial Sequence
  Synthetic oligonucleotide
cttactctggttgttcgtaatgcgactaat

SEQ ID NO: 410135 - DNA, 30 bp, Artificial Sequence
  Synthetic oligonucleotide
caactcggcccggttgttataatgactaat

SEQ ID NO: 410136 - DNA, 30 bp, Artificial Sequence
  Synthetic oligonucleotide
acattctttgaagttcacaatactactaat

SEQ ID NO: 410137 - DNA, 30 bp, Artificial Sequence
  Synthetic oligonucleotide
aggccggaccgcttctattgcagtactaat

SEQ ID NO: 410138 - DNA, 30 bp, Artificial Sequence
  Synthetic oligonucleotide
ccattggattaagcccaatggagacctaat

SEQ ID NO: 410139 - DNA, 30 bp, Artificial Sequence
  Synthetic oligonucleotide
taggaatttgtagtttagtagatacctaat

SEQ ID NO: 410140 - DNA, 30 bp, Artificial Sequence
  Synthetic oligonucleotide
ttatctctgcaagattgatagacagctaat

SEQ ID NO: 410141 - DNA, 30 bp, Artificial Sequence
  Synthetic oligonucleotide
tgcgggatttctgagcggggtaacgctaat

SEQ ID NO: 410142 - DNA, 30 bp, Artificial Sequence
  Synthetic oligonucleotide
atcgattgctatcgcgaagagagcgctaat

SEQ ID NO: 410143 - DNA, 30 bp, Artificial Sequence
  Synthetic oligonucleotide
gttacacctggggcaagtatcatcgctaat

SEQ ID NO: 410144 - DNA, 30 bp, Artificial Sequence
  Synthetic oligonucleotide
ctcattcaaggccagatctcttaggctaat

SEQ ID NO: 410145 - DNA, 30 bp, Artificial Sequence
  Synthetic oligonucleotide
gatatgtccctagcaggatgttaggctaat

SEQ ID NO: 410146 - DNA, 30 bp, Artificial Sequence
  Synthetic oligonucleotide
tgcgattggcacttagctagcacggctaat

SEQ ID NO: 410147 - DNA, 30 bp, Artificial Sequence
  Synthetic oligonucleotide
tgtggagtttcagacgtagaccatgctaat

SEQ ID NO: 410148 - DNA, 30 bp, Artificial Sequence
  Synthetic oligonucleotide
ggattgatctgtattacatgccaatctaat

SEQ ID NO: 410149 - DNA, 30 bp, Artificial Sequence
  Synthetic oligonucleotide
taggttacgtgttgggggactcaatctaat

SEQ ID NO: 410150 - DNA, 30 bp, Artificial Sequence
  Synthetic oligonucleotide
aaacgaaggggtgaaatattagaatctaat

SEQ ID NO: 410151 - DNA, 30 bp, Artificial Sequence
  Synthetic oligonucleotide
gtccgccttgccgtcaaccccgtatctaat

SEQ ID NO: 410152 - DNA, 30 bp, Artificial Sequence
  Synthetic oligonucleotide
tcaatttcgggatatattaaccgctctaat

SEQ ID NO: 410153 - DNA, 30 bp, Artificial Sequence
  Synthetic oligonucleotide
ggcaaacatgctgggaataccaggtctaat

SEQ ID NO: 410154 - DNA, 30 bp, Artificial Sequence
  Synthetic oligonucleotide
gtagtcgatgtacacctcgtgatgtctaat

SEQ ID NO: 410155 - DNA, 30 bp, Artificial Sequence
  Synthetic oligonucleotide
agtagaaggggtattcgacgactgtctaat

SEQ ID NO: 410156 - DNA, 30 bp, Artificial Sequence
  Synthetic oligonucleotide
ctcaagctcccccggcatattgattctaat

SEQ ID NO: 410157 - DNA, 30 bp, Artificial Sequence
  Synthetic oligonucleotide
acagatattgcatatggatctaaaagtaat

SEQ ID NO: 410158 - DNA, 30 bp, Artificial Sequence
  Synthetic oligonucleotide
tcatccctccccagcctttgaagcagtaat

SEQ ID NO: 410159 - DNA, 30 bp, Artificial Sequence
  Synthetic oligonucleotide
atcgtgacattcaggaacgtacgcagtaat

SEQ ID NO: 410160 - DNA, 30 bp, Artificial Sequence
  Synthetic oligonucleotide
tcaaccttttaacgccaagcagagagtaat

SEQ ID NO: 410161 - DNA, 30 bp, Artificial Sequence
  Synthetic oligonucleotide
ggagacgtaaaaatacgtgcacggagtaat

SEQ ID NO: 410162 - DNA, 30 bp, Artificial Sequence
  Synthetic oligonucleotide
ttagtagaagtgagggaaaatcgtagtaat

SEQ ID NO: 410163 - DNA, 30 bp, Artificial Sequence
  Synthetic oligonucleotide
cttgaacggagtccgaaggtctttagtaat

SEQ ID NO: 410164 - DNA, 30 bp, Artificial Sequence
  Synthetic oligonucleotide
ggggtaggcatgaaactacgtgaacgtaat

SEQ ID NO: 410165 - DNA, 30 bp, Artificial Sequence
  Synthetic oligonucleotide
cggctatattcaaggacttcgcgacgtaat

SEQ ID NO: 410166 - DNA, 30 bp, Artificial Sequence
  Synthetic oligonucleotide
cttggcgctgagaaacttcgtcaccgtaat

SEQ ID NO: 410167 - DNA, 30 bp, Artificial Sequence
  Synthetic oligonucleotide
ctcccatactcgaaacgcgcgcgccgtaat

SEQ ID NO: 410168 - DNA, 30 bp, Artificial Sequence
  Synthetic oligonucleotide
gatcatagtccaaggctggttgtccgtaat

SEQ ID NO: 410169 - DNA, 30 bp, Artificial Sequence
  Synthetic oligonucleotide
tgggtctagacatttgccatttagcgtaat

SEQ ID NO: 410170 - DNA, 30 bp, Artificial Sequence
  Synthetic oligonucleotide
tatcaaactatgctacaagcgtctcgtaat

SEQ ID NO: 410171 - DNA, 30 bp, Artificial Sequence
  Synthetic oligonucleotide
gcaatttggctgggtaatttcagtcgtaat

SEQ ID NO: 410172 - DNA, 30 bp, Artificial Sequence
  Synthetic oligonucleotide
aggggcggcattttgctatggaaaggtaat

SEQ ID NO: 410173 - DNA, 31 bp, Artificial Sequence
  Synthetic oligonucleotide
ccaatgcctgggttgggtcggagtaggtaat

SEQ ID NO: 410174 - DNA, 30 bp, Artificial Sequence
  Synthetic oligonucleotide
aggacggacgttagtaacgccaacggtaat

SEQ ID NO: 410175 - DNA, 30 bp, Artificial Sequence
  Synthetic oligonucleotide
caggttctgtggtgttcgctatacggtaat

SEQ ID NO: 410176 - DNA, 30 bp, Artificial Sequence
  Synthetic oligonucleotide
ggaacgtttgtctagcgggattacggtaat

SEQ ID NO: 410177 - DNA, 30 bp, Artificial Sequence
  Synthetic oligonucleotide
acgccatgcagatggagcccttgcggtaat

SEQ ID NO: 410178 - DNA, 30 bp, Artificial Sequence
  Synthetic oligonucleotide
taggcttccgaaattatacgttgcggtaat

SEQ ID NO: 410179 - DNA, 30 bp, Artificial Sequence
  Synthetic oligonucleotide
actaaagacagggtactattggcgggtaat

SEQ ID NO: 410180 - DNA, 30 bp, Artificial Sequence
  Synthetic oligonucleotide
agatgtagcattagatcggcaaggggtaat

SEQ ID NO: 410181 - DNA, 30 bp, Artificial Sequence
  Synthetic oligonucleotide
cacaatagaaccctgcgtgccgggggtaat

SEQ ID NO: 410182 - DNA, 30 bp, Artificial Sequence
  Synthetic oligonucleotide
gacatactacagatagaattacgtggtaat

SEQ ID NO: 410183 - DNA, 30 bp, Artificial Sequence
  Synthetic oligonucleotide
tagaaggtacgtacacggccctgtggtaat

SEQ ID NO: 410184 - DNA, 30 bp, Artificial Sequence
  Synthetic oligonucleotide
tcattgcatttgtgatttaacaaatgtaat

SEQ ID NO: 410185 - DNA, 30 bp, Artificial Sequence
  Synthetic oligonucleotide
ccccgaaaggaaggatttcttttatgtaat

SEQ ID NO: 410186 - DNA, 30 bp, Artificial Sequence
  Synthetic oligonucleotide
gttgcgtagtccaaagatgcgcactgtaat

SEQ ID NO: 410187 - DNA, 30 bp, Artificial Sequence
  Synthetic oligonucleotide
atgtaagatgacctttacgacgactgtaat

SEQ ID NO: 410188 - DNA, 30 bp, Artificial Sequence
  Synthetic oligonucleotide
cgtccacagcgctggtttctgtactgtaat

SEQ ID NO: 410189 - DNA, 30 bp, Artificial Sequence
  Synthetic oligonucleotide
tggttccgttttgaactattggcgtgtaat

SEQ ID NO: 410190 - DNA, 30 bp, Artificial Sequence
  Synthetic oligonucleotide
ctttgaagccagtcgcttgacgggtgtaat

SEQ ID NO: 410191 - DNA, 30 bp, Artificial Sequence
  Synthetic oligonucleotide
gcgggttatatcccagatctgtggtgtaat

SEQ ID NO: 410192 - DNA, 30 bp, Artificial Sequence
  Synthetic oligonucleotide
gcggcatctacacgtgcaaagggttgtaat

SEQ ID NO: 410193 - DNA, 30 bp, Artificial Sequence
  Synthetic oligonucleotide
aaacctcggttatcagtactgggttgtaat

SEQ ID NO: 410194 - DNA, 30 bp, Artificial Sequence
  Synthetic oligonucleotide
gctccaaccggctccagcagttaaattaat

SEQ ID NO: 410195 - DNA, 30 bp, Artificial Sequence
  Synthetic oligonucleotide
gatcgtacgcgctttgtggtgcgaattaat

SEQ ID NO: 410196 - DNA, 30 bp, Artificial Sequence
  Synthetic oligonucleotide
ccgccacatgcacgaattttatgcattaat

SEQ ID NO: 410197 - DNA, 30 bp, Artificial Sequence
  Synthetic oligonucleotide
acgaacgctacgttagtgaaattcattaat

SEQ ID NO: 410198 - DNA, 30 bp, Artificial Sequence
  Synthetic oligonucleotide
acgactgagcgcttgtagcaacagattaat

SEQ ID NO: 410199 - DNA, 30 bp, Artificial Sequence
  Synthetic oligonucleotide
ccatcggcgcagccatatgcagctattaat

SEQ ID NO: 410200 - DNA, 30 bp, Artificial Sequence
  Synthetic oligonucleotide
taacatctcataaggtcgtaacgtattaat

SEQ ID NO: 410201 - DNA, 30 bp, Artificial Sequence
  Synthetic oligonucleotide
cattaatcttccaggtatagacaacttaat

SEQ ID NO: 410202 - DNA, 30 bp, Artificial Sequence
  Synthetic oligonucleotide
caaaagttgttgaagaattcaccacttaat

SEQ ID NO: 410203 - DNA, 30 bp, Artificial Sequence
  Synthetic oligonucleotide
gttccacggaagggcttatgtccacttaat

SEQ ID NO: 410204 - DNA, 30 bp, Artificial Sequence
  Synthetic oligonucleotide
ctcgttgtcatggtatagaacggacttaat

SEQ ID NO: 410205 - DNA, 30 bp, Artificial Sequence
  Synthetic oligonucleotide
gccggtagattaacgtcaacgccccttaat

SEQ ID NO: 410206 - DNA, 30 bp, Artificial Sequence
  Synthetic oligonucleotide
tagcgcccgcaatctcagacgcatcttaat

SEQ ID NO: 410207 - DNA, 30 bp, Artificial Sequence
  Synthetic oligonucleotide
atagtaccctcaaatacctctcctcttaat

SEQ ID NO: 410208 - DNA, 30 bp, Artificial Sequence
  Synthetic oligonucleotide
ccggggggaattgtacacgcccttcttaat

SEQ ID NO: 410209 - DNA, 30 bp, Artificial Sequence
  Synthetic oligonucleotide
acagctatgcgtacccataggtcagttaat

SEQ ID NO: 410210 - DNA, 31 bp, Artificial Sequence
  Synthetic oligonucleotide
gttggaggcagattaagctctggaggttaat

SEQ ID NO: 410211 - DNA, 30 bp, Artificial Sequence
  Synthetic oligonucleotide
caaaatgactgtaattatgtcgcggttaat

SEQ ID NO: 410212 - DNA, 30 bp, Artificial Sequence
  Synthetic oligonucleotide
ccagataataagttatgccggagggttaat

SEQ ID NO: 410213 - DNA, 30 bp, Artificial Sequence
  Synthetic oligonucleotide
agtgagttgacatcagacgtgatggttaat

SEQ ID NO: 410214 - DNA, 30 bp, Artificial Sequence
  Synthetic oligonucleotide
atgtatagcttaatagataacgtggttaat

SEQ ID NO: 410215 - DNA, 30 bp, Artificial Sequence
  Synthetic oligonucleotide
tcaaagcacctatccatcgtggtggttaat

SEQ ID NO: 410216 - DNA, 30 bp, Artificial Sequence
  Synthetic oligonucleotide
aaagcgtggtgactgtgaatttatgttaat

SEQ ID NO: 410217 - DNA, 30 bp, Artificial Sequence
  Synthetic oligonucleotide
tgaagagatttacagtcaaaccttgttaat

SEQ ID NO: 410218 - DNA, 30 bp, Artificial Sequence
  Synthetic oligonucleotide
tttagatacagtagtatggggcgatttaat

SEQ ID NO: 410219 - DNA, 30 bp, Artificial Sequence
  Synthetic oligonucleotide
ccgtgtaccgaaacttcttattgatttaat

SEQ ID NO: 410220 - DNA, 30 bp, Artificial Sequence
  Synthetic oligonucleotide
cttgacgtgagcttaagcagtggctttaat

SEQ ID NO: 410221 - DNA, 30 bp, Artificial Sequence
  Synthetic oligonucleotide
tgtggcttctttaagattggtctctttaat

SEQ ID NO: 410222 - DNA, 30 bp, Artificial Sequence
  Synthetic oligonucleotide
cacctggtcacaatcttagttcggtttaat

SEQ ID NO: 410223 - DNA, 30 bp, Artificial Sequence
  Synthetic oligonucleotide
caagcgggtcacggagctctagggtttaat

SEQ ID NO: 410224 - DNA, 30 bp, Artificial Sequence
  Synthetic oligonucleotide
gtaccggaggtagttttacgagtgtttaat

SEQ ID NO: 410225 - DNA, 30 bp, Artificial Sequence
  Synthetic oligonucleotide
cttggtgtacagcgatccgcgtgttttaat

SEQ ID NO: 410226 - DNA, 30 bp, Artificial Sequence
  Synthetic oligonucleotide
gtagcgtaaaggtcagacgggatttttaat

SEQ ID NO: 410227 - DNA, 29 bp, Artificial Sequence
  Synthetic oligonucleotide
gcgattattattgcacccaacaaaaacat

SEQ ID NO: 410228 - DNA, 30 bp, Artificial Sequence
  Synthetic oligonucleotide
ttgaagcgtttggttgactactaaaaacat

SEQ ID NO: 410229 - DNA, 30 bp, Artificial Sequence
  Synthetic oligonucleotide
tcatgcatcctaatataatagtacaaacat

SEQ ID NO: 410230 - DNA, 30 bp, Artificial Sequence
  Synthetic oligonucleotide
gtcagtagccgcgcaccccaaaccaaacat

SEQ ID NO: 410231 - DNA, 30 bp, Artificial Sequence
  Synthetic oligonucleotide
cggtattctggtgctgggtactagaaacat

SEQ ID NO: 410232 - DNA, 30 bp, Artificial Sequence
  Synthetic oligonucleotide
agatacggtgtatctcggaacacgaaacat

SEQ ID NO: 410233 - DNA, 30 bp, Artificial Sequence
  Synthetic oligonucleotide
tggcttcccttaaacttctcgacgaaacat

SEQ ID NO: 410234 - DNA, 30 bp, Artificial Sequence
  Synthetic oligonucleotide
ccagtttcaacagggcctatgatgaaacat

SEQ ID NO: 410235 - DNA, 30 bp, Artificial Sequence
  Synthetic oligonucleotide
tgatcctcacatgatgacttcattaaacat

SEQ ID NO: 410236 - DNA, 30 bp, Artificial Sequence
  Synthetic oligonucleotide
atatctgcgggaatcgctccccgccaacat

SEQ ID NO: 410237 - DNA, 30 bp, Artificial Sequence
  Synthetic oligonucleotide
ccttcagctctttgaaacgcgcggcaacat

SEQ ID NO: 410238 - DNA, 30 bp, Artificial Sequence
  Synthetic oligonucleotide
cgtactgcgtactggcagaaatgtcaacat

SEQ ID NO: 410239 - DNA, 30 bp, Artificial Sequence
  Synthetic oligonucleotide
taagctaaggttttctgtaccagagaacat

SEQ ID NO: 410240 - DNA, 30 bp, Artificial Sequence
  Synthetic oligonucleotide
gccagattcagagacgcaacggtcgaacat

SEQ ID NO: 410241 - DNA, 30 bp, Artificial Sequence
  Synthetic oligonucleotide
gggcctggacacgtatccgcccgggaacat

SEQ ID NO: 410242 - DNA, 30 bp, Artificial Sequence
  Synthetic oligonucleotide
cagcctcatgcgatagatcagcgtgaacat

SEQ ID NO: 410243 - DNA, 30 bp, Artificial Sequence
  Synthetic oligonucleotide
tcaggtcactgagcccgtccgtttgaacat

SEQ ID NO: 410244 - DNA, 30 bp, Artificial Sequence
  Synthetic oligonucleotide
tcagtgtataaggaggattccgaataacat

SEQ ID NO: 410245 - DNA, 30 bp, Artificial Sequence
  Synthetic oligonucleotide
tcttaaacttggggttacactcactaacat

SEQ ID NO: 410246 - DNA, 30 bp, Artificial Sequence
  Synthetic oligonucleotide
tagagccctgggccggcaaaggactaacat

SEQ ID NO: 410247 - DNA, 30 bp, Artificial Sequence
  Synthetic oligonucleotide
tgtagtctaggctgccctatatgctaacat

SEQ ID NO: 410248 - DNA, 30 bp, Artificial Sequence
  Synthetic oligonucleotide
ttgcatatactctgcttatcatggtaacat

SEQ ID NO: 410249 - DNA, 30 bp, Artificial Sequence
  Synthetic oligonucleotide
ttgagccttttgttgcgcctcatttaacat

SEQ ID NO: 410250 - DNA, 30 bp, Artificial Sequence
  Synthetic oligonucleotide
agtagccatacaacctatgctaaaacacat

SEQ ID NO: 410251 - DNA, 30 bp, Artificial Sequence
  Synthetic oligonucleotide
tctggagggtacgcatccccatccacacat

SEQ ID NO: 410252 - DNA, 30 bp, Artificial Sequence
  Synthetic oligonucleotide
ttactgcaactgtgagatgttagcacacat

SEQ ID NO: 410253 - DNA, 30 bp, Artificial Sequence
  Synthetic oligonucleotide
caatcattcacagtttgggattgcacacat

SEQ ID NO: 410254 - DNA, 30 bp, Artificial Sequence
  Synthetic oligonucleotide
taacactggaagcatgacatagtgacacat

SEQ ID NO: 410255 - DNA, 30 bp, Artificial Sequence
  Synthetic oligonucleotide
ttattactggttgtctatacgactacacat

SEQ ID NO: 410256 - DNA, 30 bp, Artificial Sequence
  Synthetic oligonucleotide
tactcccccttttaagttagggttacacat

SEQ ID NO: 410257 - DNA, 30 bp, Artificial Sequence
  Synthetic oligonucleotide
ggaaagggtgaataagttatgtcaccacat

SEQ ID NO: 410258 - DNA, 30 bp, Artificial Sequence
  Synthetic oligonucleotide
ggtgtggaaacgtcaaaagacggcccacat

SEQ ID NO: 410259 - DNA, 30 bp, Artificial Sequence
  Synthetic oligonucleotide
agtaacgcatacatagcgcttttgccacat

SEQ ID NO: 410260 - DNA, 30 bp, Artificial Sequence
  Synthetic oligonucleotide
ctgaagacccgttaatactcagatccacat

SEQ ID NO: 410261 - DNA, 30 bp, Artificial Sequence
  Synthetic oligonucleotide
cgttttcaaacttggtgcttggatccacat

SEQ ID NO: 410262 - DNA, 30 bp, Artificial Sequence
  Synthetic oligonucleotide
taagcaattaaaatccttctgattccacat

SEQ ID NO: 410263 - DNA, 30 bp, Artificial Sequence
  Synthetic oligonucleotide
ttggaactaagagccttggctgaagcacat

SEQ ID NO: 410264 - DNA, 30 bp, Artificial Sequence
  Synthetic oligonucleotide
cggtagtctcaccgttccggaagcgcacat

SEQ ID NO: 410265 - DNA, 30 bp, Artificial Sequence
  Synthetic oligonucleotide
gcggtttcaatctcgggggtcatcgcacat

SEQ ID NO: 410266 - DNA, 30 bp, Artificial Sequence
  Synthetic oligonucleotide
tcactagaacgccgtccataccgggcacat

SEQ ID NO: 410267 - DNA, 30 bp, Artificial Sequence
  Synthetic oligonucleotide
acccgacatgcacatcgaagcctggcacat

SEQ ID NO: 410268 - DNA, 30 bp, Artificial Sequence
  Synthetic oligonucleotide
aatgaaagactactattaggagtatcacat

SEQ ID NO: 410269 - DNA, 30 bp, Artificial Sequence
  Synthetic oligonucleotide
ctgatgctcacaaacctttgcttatcacat

SEQ ID NO: 410270 - DNA, 30 bp, Artificial Sequence
  Synthetic oligonucleotide
tacaactgggttgaaatttgggactcacat

SEQ ID NO: 410271 - DNA, 30 bp, Artificial Sequence
  Synthetic oligonucleotide
aattagtccctgttagttagagcctcacat

SEQ ID NO: 410272 - DNA, 30 bp, Artificial Sequence
  Synthetic oligonucleotide
caaaatgcacgaggtatgagagtctcacat

SEQ ID NO: 410273 - DNA, 30 bp, Artificial Sequence
  Synthetic oligonucleotide
aagaaggcttttgaattccccaggtcacat

SEQ ID NO: 410274 - DNA, 30 bp, Artificial Sequence
  Synthetic oligonucleotide
ggaagttttttcatctgaaaagtgtcacat

SEQ ID NO: 410275 - DNA, 30 bp, Artificial Sequence
  Synthetic oligonucleotide
gcttggcgatgcactatgagggtgtcacat

SEQ ID NO: 410276 - DNA, 30 bp, Artificial Sequence
  Synthetic oligonucleotide
ttcccaatatcggcaagggaacgttcacat

SEQ ID NO: 410277 - DNA, 30 bp, Artificial Sequence
  Synthetic oligonucleotide
tatataccatgggcgtgaactgaaagacat

SEQ ID NO: 410278 - DNA, 30 bp, Artificial Sequence
  Synthetic oligonucleotide
atcggggcaagctgacgtatgtcaagacat

SEQ ID NO: 410279 - DNA, 30 bp, Artificial Sequence
  Synthetic oligonucleotide
aacagcccgaaagcggagttgagaagacat

SEQ ID NO: 410280 - DNA, 30 bp, Artificial Sequence
  Synthetic oligonucleotide
aagggctcaatggcgggcaatgtcagacat

SEQ ID NO: 410281 - DNA, 30 bp, Artificial Sequence
  Synthetic oligonucleotide
accaacaccctcctcttgtgacagagacat

SEQ ID NO: 410282 - DNA, 30 bp, Artificial Sequence
  Synthetic oligonucleotide
gattggggactaacccgtctcgcgagacat

SEQ ID NO: 410283 - DNA, 30 bp, Artificial Sequence
  Synthetic oligonucleotide
aattgagggagtcttggatacgttagacat

SEQ ID NO: 410284 - DNA, 30 bp, Artificial Sequence
  Synthetic oligonucleotide
ggtgccttttcggtgtactgcccacgacat

SEQ ID NO: 410285 - DNA, 30 bp, Artificial Sequence
  Synthetic oligonucleotide
cccggtcgacagggcgatggctcccgacat

SEQ ID NO: 410286 - DNA, 30 bp, Artificial Sequence
  Synthetic oligonucleotide
ggatggtttacgtaatcaatgagccgacat

SEQ ID NO: 410287 - DNA, 30 bp, Artificial Sequence
  Synthetic oligonucleotide
ctgagaaaggctgcgtcatctacgcgacat

SEQ ID NO: 410288 - DNA, 30 bp, Artificial Sequence
  Synthetic oligonucleotide
agccgacgaagctttctatgtaggcgacat

SEQ ID NO: 410289 - DNA, 30 bp, Artificial Sequence
  Synthetic oligonucleotide
attatctagggaacacagattcctcgacat

SEQ ID NO: 410290 - DNA, 30 bp, Artificial Sequence
  Synthetic oligonucleotide
tctctgcagccatctcgagtaggtcgacat

SEQ ID NO: 410291 - DNA, 30 bp, Artificial Sequence
  Synthetic oligonucleotide
ttgttatcgaaccaggaaggtgaaggacat

SEQ ID NO: 410292 - DNA, 30 bp, Artificial Sequence
  Synthetic oligonucleotide
agattagtcagtcagcattaatcaggacat

SEQ ID NO: 410293 - DNA, 30 bp, Artificial Sequence
  Synthetic oligonucleotide
agtcaccgaatatcattgacttcaggacat

SEQ ID NO: 410294 - DNA, 30 bp, Artificial Sequence
  Synthetic oligonucleotide
gcagatctaatggcctcgttttgaggacat

SEQ ID NO: 410295 - DNA, 30 bp, Artificial Sequence
  Synthetic oligonucleotide
taaataccacttcctttttgatcgggacat

SEQ ID NO: 410296 - DNA, 30 bp, Artificial Sequence
  Synthetic oligonucleotide
tccgcacacctcgcccgtccacatggacat

SEQ ID NO: 410297 - DNA, 30 bp, Artificial Sequence
  Synthetic oligonucleotide
tactgcgcgatgtttacaaaacctggacat

SEQ ID NO: 410298 - DNA, 30 bp, Artificial Sequence
  Synthetic oligonucleotide
gaattgctgccttctggagagcctggacat

SEQ ID NO: 410299 - DNA, 30 bp, Artificial Sequence
  Synthetic oligonucleotide
gaagattgcagtcataaggtaattggacat

SEQ ID NO: 410300 - DNA, 30 bp, Artificial Sequence
  Synthetic oligonucleotide
atggtttgattaatttatatagcatgacat

SEQ ID NO: 410301 - DNA, 30 bp, Artificial Sequence
  Synthetic oligonucleotide
atgtggattctgtagcaattaagatgacat

SEQ ID NO: 410302 - DNA, 30 bp, Artificial Sequence
  Synthetic oligonucleotide
cgtcagcattctcataaggtgtggtgacat

SEQ ID NO: 410303 - DNA, 30 bp, Artificial Sequence
  Synthetic oligonucleotide
gacgcgacctactatgaattggattgacat

SEQ ID NO: 410304 - DNA, 30 bp, Artificial Sequence
  Synthetic oligonucleotide
ctcagactcgaagcccgcccatacatacat

SEQ ID NO: 410305 - DNA, 31 bp, Artificial Sequence
  Synthetic oligonucleotide
cgcaaaaatccgggcgctatgtttgatacat

SEQ ID NO: 410306 - DNA, 30 bp, Artificial Sequence
  Synthetic oligonucleotide
tcggccgttggtcagtatagttatatacat

SEQ ID NO: 410307 - DNA, 30 bp, Artificial Sequence
  Synthetic oligonucleotide
ttgcgacgtcccgtacagtatactatacat

SEQ ID NO: 410308 - DNA, 30 bp, Artificial Sequence
  Synthetic oligonucleotide
ggctgcccacgctattgtgcaacactacat

SEQ ID NO: 410309 - DNA, 30 bp, Artificial Sequence
  Synthetic oligonucleotide
ccaaacacagtccatctcttttcactacat

SEQ ID NO: 410310 - DNA, 30 bp, Artificial Sequence
  Synthetic oligonucleotide
tgtgatatcgtcgacatttaatgactacat

SEQ ID NO: 410311 - DNA, 30 bp, Artificial Sequence
  Synthetic oligonucleotide
atgtgaatcgattatacgagagatctacat

SEQ ID NO: 410312 - DNA, 30 bp, Artificial Sequence
  Synthetic oligonucleotide
cggatggtcacgggacgtgcgattctacat

SEQ ID NO: 410313 - DNA, 30 bp, Artificial Sequence
  Synthetic oligonucleotide
gactgaatatgggcgttaaccccagtacat

SEQ ID NO: 410314 - DNA, 30 bp, Artificial Sequence
  Synthetic oligonucleotide
aaacttaaaccttatgcggccagagtacat

SEQ ID NO: 410315 - DNA, 30 bp, Artificial Sequence
  Synthetic oligonucleotide
accggtagacatgcccagcggtacgtacat

SEQ ID NO: 410316 - DNA, 30 bp, Artificial Sequence
  Synthetic oligonucleotide
gaaagcgtatcgtcatgacaccgcgtacat

SEQ ID NO: 410317 - DNA, 30 bp, Artificial Sequence
  Synthetic oligonucleotide
aagcgctccagattgcagggtttcgtacat

SEQ ID NO: 410318 - DNA, 30 bp, Artificial Sequence
  Synthetic oligonucleotide
attccgttctgttcacacattctggtacat

SEQ ID NO: 410319 - DNA, 30 bp, Artificial Sequence
  Synthetic oligonucleotide
ccgatcccgccctgatggtctaatgtacat

SEQ ID NO: 410320 - DNA, 30 bp, Artificial Sequence
  Synthetic oligonucleotide
ggggtgttaagccgccttggggttgtacat

SEQ ID NO: 410321 - DNA, 30 bp, Artificial Sequence
  Synthetic oligonucleotide
atgactctattatctctcagtggattacat

SEQ ID NO: 410322 - DNA, 30 bp, Artificial Sequence
  Synthetic oligonucleotide
cctccgttgggagactagctaatattacat

SEQ ID NO: 410323 - DNA, 30 bp, Artificial Sequence
  Synthetic oligonucleotide
atcttaaatgacgtctcgttcggcttacat

SEQ ID NO: 410324 - DNA, 30 bp, Artificial Sequence
  Synthetic oligonucleotide
gggtgagaaacgttactgttagtcttacat

SEQ ID NO: 410325 - DNA, 30 bp, Artificial Sequence
  Synthetic oligonucleotide
gaccgtgacgggctttacagggggttacat

SEQ ID NO: 410326 - DNA, 30 bp, Artificial Sequence
  Synthetic oligonucleotide
ccgctagtgggtgttgcgccccttttacat

SEQ ID NO: 410327 - DNA, 30 bp, Artificial Sequence
  Synthetic oligonucleotide
ggagtaggctcttcgctgacccgaaaccat

SEQ ID NO: 410328 - DNA, 30 bp, Artificial Sequence
  Synthetic oligonucleotide
gaggctaggccgctagatcgtcagaaccat

SEQ ID NO: 410329 - DNA, 30 bp, Artificial Sequence
  Synthetic oligonucleotide
taaattgcgacggggacgcgcacgaaccat

SEQ ID NO: 410330 - DNA, 30 bp, Artificial Sequence
  Synthetic oligonucleotide
aagccttgaagctcttccgtactgaaccat

SEQ ID NO: 410331 - DNA, 30 bp, Artificial Sequence
  Synthetic oligonucleotide
tcccacggacacgctcagcgcactaaccat

SEQ ID NO: 410332 - DNA, 30 bp, Artificial Sequence
  Synthetic oligonucleotide
ttttagaggcgttcagggcgggcccaccat

SEQ ID NO: 410333 - DNA, 30 bp, Artificial Sequence
  Synthetic oligonucleotide
gactaagatgatctaacttggtgccaccat

SEQ ID NO: 410334 - DNA, 30 bp, Artificial Sequence
  Synthetic oligonucleotide
ggacgtcttattaagatacgccctcaccat

SEQ ID NO: 410335 - DNA, 30 bp, Artificial Sequence
  Synthetic oligonucleotide
cataacctgcccgcaggcagtattcaccat

SEQ ID NO: 410336 - DNA, 31 bp, Artificial Sequence
  Synthetic oligonucleotide
gaaaggtataagtcttcaccttcaagaccat

SEQ ID NO: 410337 - DNA, 30 bp, Artificial Sequence
  Synthetic oligonucleotide
cctttggttgtccgtagatgttgagaccat

SEQ ID NO: 410338 - DNA, 30 bp, Artificial Sequence
  Synthetic oligonucleotide
cgtcccttgcaatgaggagattacgaccat

SEQ ID NO: 410339 - DNA, 30 bp, Artificial Sequence
  Synthetic oligonucleotide
cgcctatggtttctccgcactcctgaccat

SEQ ID NO: 410340 - DNA, 30 bp, Artificial Sequence
  Synthetic oligonucleotide
gcttcattgtcggtcagttgtacataccat

SEQ ID NO: 410341 - DNA, 30 bp, Artificial Sequence
  Synthetic oligonucleotide
tggattttcatctaccgagacccctaccat

SEQ ID NO: 410342 - DNA, 30 bp, Artificial Sequence
  Synthetic oligonucleotide
actcgagggatccagtagaatccctaccat

SEQ ID NO: 410343 - DNA, 30 bp, Artificial Sequence
  Synthetic oligonucleotide
cttaatttaaagggtaatgagcagtaccat

SEQ ID NO: 410344 - DNA, 30 bp, Artificial Sequence
  Synthetic oligonucleotide
cagaatgaagtttgaacgcacatcacccat

SEQ ID NO: 410345 - DNA, 30 bp, Artificial Sequence
  Synthetic oligonucleotide
ttgcgcacgcgaaataggcagatgacccat

SEQ ID NO: 410346 - DNA, 30 bp, Artificial Sequence
  Synthetic oligonucleotide
aaagattgcttaaatagtaggccaccccat

SEQ ID NO: 410347 - DNA, 30 bp, Artificial Sequence
  Synthetic oligonucleotide
tgatttgatcgcgtgtggggattgccccat

SEQ ID NO: 410348 - DNA, 30 bp, Artificial Sequence
  Synthetic oligonucleotide
actgccacacaagacggagtggctccccat

SEQ ID NO: 410349 - DNA, 30 bp, Artificial Sequence
  Synthetic oligonucleotide
attcggtactggcgccacgagccagcccat

SEQ ID NO: 410350 - DNA, 30 bp, Artificial Sequence
  Synthetic oligonucleotide
cttttttcaacatggtactgggactcccat

SEQ ID NO: 410351 - DNA, 30 bp, Artificial Sequence
  Synthetic oligonucleotide
cggtccggctgaatgaatcgaaagtcccat

SEQ ID NO: 410352 - DNA, 30 bp, Artificial Sequence
  Synthetic oligonucleotide
ataatcggtccgtctcggaacacgtcccat

SEQ ID NO: 410353 - DNA, 29 bp, Artificial Sequence
  Synthetic oligonucleotide
cataacactgtcgctctgtaaggtcccat

SEQ ID NO: 410354 - DNA, 30 bp, Artificial Sequence
  Synthetic oligonucleotide
gtcgattggtacagttcccgactgtcccat

SEQ ID NO: 410355 - DNA, 30 bp, Artificial Sequence
  Synthetic oligonucleotide
tagccgaggatgcattggctataaagccat

SEQ ID NO: 410356 - DNA, 30 bp, Artificial Sequence
  Synthetic oligonucleotide
tattgtaagtctcgaaacgtgtaaagccat

SEQ ID NO: 410357 - DNA, 30 bp, Artificial Sequence
  Synthetic oligonucleotide
tacccggttacgcactagcgggcaagccat

SEQ ID NO: 410358 - DNA, 30 bp, Artificial Sequence
  Synthetic oligonucleotide
gtaacctattattcgcgcgagcacagccat

SEQ ID NO: 410359 - DNA, 30 bp, Artificial Sequence
  Synthetic oligonucleotide
aactgcatccttcactcttaagccagccat

SEQ ID NO: 410360 - DNA, 30 bp, Artificial Sequence
  Synthetic oligonucleotide
atgtaagtgatctttcatttatgcagccat

SEQ ID NO: 410361 - DNA, 30 bp, Artificial Sequence
  Synthetic oligonucleotide
gagctggattgagtactctcaaagagccat

SEQ ID NO: 410362 - DNA, 30 bp, Artificial Sequence
  Synthetic oligonucleotide
gaaccgcccggttttccaatgtagagccat

SEQ ID NO: 410363 - DNA, 30 bp, Artificial Sequence
  Synthetic oligonucleotide
ggccaggccctagggaaggatatacgccat

SEQ ID NO: 410364 - DNA, 30 bp, Artificial Sequence
  Synthetic oligonucleotide
gttctcgttaagccgagaaatttccgccat

SEQ ID NO: 410365 - DNA, 30 bp, Artificial Sequence
  Synthetic oligonucleotide
ataagggacccgtgaatttgatcgcgccat

SEQ ID NO: 410366 - DNA, 30 bp, Artificial Sequence
  Synthetic oligonucleotide
ggctaccgtccaatagtaaggtctcgccat

SEQ ID NO: 410367 - DNA, 30 bp, Artificial Sequence
  Synthetic oligonucleotide
caatgtcgagactctttcagacaaggccat

SEQ ID NO: 410368 - DNA, 30 bp, Artificial Sequence
  Synthetic oligonucleotide
gatttgataattacaataagatcaggccat

SEQ ID NO: 410369 - DNA, 29 bp, Artificial Sequence
  Synthetic oligonucleotide
tcttactagggatggtcacgtgaggccat

SEQ ID NO: 410370 - DNA, 30 bp, Artificial Sequence
  Synthetic oligonucleotide
tatgggcaagccggcctcacattaggccat

SEQ ID NO: 410371 - DNA, 30 bp, Artificial Sequence
  Synthetic oligonucleotide
ccaggtaccccgggccttctattaggccat

SEQ ID NO: 410372 - DNA, 30 bp, Artificial Sequence
  Synthetic oligonucleotide
ggtaataagagtctgacttcagacggccat

SEQ ID NO: 410373 - DNA, 30 bp, Artificial Sequence
  Synthetic oligonucleotide
tgccctatatcaagttcttactgcggccat

SEQ ID NO: 410374 - DNA, 30 bp, Artificial Sequence
  Synthetic oligonucleotide
atcacattggaagatgaacatgtcggccat

SEQ ID NO: 410375 - DNA, 30 bp, Artificial Sequence
  Synthetic oligonucleotide
gtccgctgtagatttattaccgagggccat

SEQ ID NO: 410376 - DNA, 30 bp, Artificial Sequence
  Synthetic oligonucleotide
atggctgaggtcgcgcccgtttagggccat

SEQ ID NO: 410377 - DNA, 30 bp, Artificial Sequence
  Synthetic oligonucleotide
aaactcacagtctcttgtgtccctggccat

SEQ ID NO: 410378 - DNA, 30 bp, Artificial Sequence
  Synthetic oligonucleotide
atctcctattagcaaggatagagtggccat

SEQ ID NO: 410379 - DNA, 30 bp, Artificial Sequence
  Synthetic oligonucleotide
ctgatctcctgtatagacgagaaatgccat

SEQ ID NO: 410380 - DNA, 30 bp, Artificial Sequence
  Synthetic oligonucleotide
ttgtgtaactgtgtaaggacgtaatgccat

SEQ ID NO: 410381 - DNA, 30 bp, Artificial Sequence
  Synthetic oligonucleotide
tttggacggctggggactataatatgccat

SEQ ID NO: 410382 - DNA, 30 bp, Artificial Sequence
  Synthetic oligonucleotide
gccggataaatttgtgtttgtgcgtgccat

SEQ ID NO: 410383 - DNA, 30 bp, Artificial Sequence
  Synthetic oligonucleotide
tgaaaattatagcatggcacgatgtgccat

SEQ ID NO: 410384 - DNA, 30 bp, Artificial Sequence
  Synthetic oligonucleotide
tactttgggttccggagacacgcttgccat

SEQ ID NO: 410385 - DNA, 30 bp, Artificial Sequence
  Synthetic oligonucleotide
gtcttgttagttccagaattaagttgccat

SEQ ID NO: 410386 - DNA, 30 bp, Artificial Sequence
  Synthetic oligonucleotide
agcgcgtaataagggtacggtaaaatccat

SEQ ID NO: 410387 - DNA, 30 bp, Artificial Sequence
  Synthetic oligonucleotide
agcctgtttctctggcgtgttcgaatccat

SEQ ID NO: 410388 - DNA, 30 bp, Artificial Sequence
  Synthetic oligonucleotide
gggaacgttgacaatcataagggaatccat

SEQ ID NO: 410389 - DNA, 30 bp, Artificial Sequence
  Synthetic oligonucleotide
tcaagtatcgcacgttgagggctaatccat

SEQ ID NO: 410390 - DNA, 30 bp, Artificial Sequence
  Synthetic oligonucleotide
agcagatctattttcgtaatctagatccat

SEQ ID NO: 410391 - DNA, 30 bp, Artificial Sequence
  Synthetic oligonucleotide
aatgctagaggtgggcgggatgggatccat

SEQ ID NO: 410392 - DNA, 30 bp, Artificial Sequence
  Synthetic oligonucleotide
cctgcaggcatcaggtaattgatgatccat

SEQ ID NO: 410393 - DNA, 30 bp, Artificial Sequence
  Synthetic oligonucleotide
attggtctcctcctagaatggagtatccat

SEQ ID NO: 410394 - DNA, 30 bp, Artificial Sequence
  Synthetic oligonucleotide
ccgtacagcctctatattgtccgcctccat

SEQ ID NO: 410395 - DNA, 30 bp, Artificial Sequence
  Synthetic oligonucleotide
tgtgctagcgcaataccattggggctccat

SEQ ID NO: 410396 - DNA, 30 bp, Artificial Sequence
  Synthetic oligonucleotide
cttgtccgcattcgatgaagccatctccat

SEQ ID NO: 410397 - DNA, 30 bp, Artificial Sequence
  Synthetic oligonucleotide
caactcagtgattgaccattttttctccat

SEQ ID NO: 410398 - DNA, 30 bp, Artificial Sequence
  Synthetic oligonucleotide
tctcgctgggatggccatcaccgagtccat

SEQ ID NO: 410399 - DNA, 30 bp, Artificial Sequence
  Synthetic oligonucleotide
gccgggtcattctgtacatagtcggtccat

SEQ ID NO: 410400 - DNA, 30 bp, Artificial Sequence
  Synthetic oligonucleotide
gtcagtagaatagggacaactttggtccat

SEQ ID NO: 410401 - DNA, 30 bp, Artificial Sequence
  Synthetic oligonucleotide
gggtggagcctggttttaggaaaattccat

SEQ ID NO: 410402 - DNA, 30 bp, Artificial Sequence
  Synthetic oligonucleotide
caccaacccttgtatcacggcaaattccat

SEQ ID NO: 410403 - DNA, 31 bp, Artificial Sequence
  Synthetic oligonucleotide
ggatgtgacgtagcctggtggcgaattccat

SEQ ID NO: 410404 - DNA, 30 bp, Artificial Sequence
  Synthetic oligonucleotide
aatacagggtgatcccggaacggattccat

SEQ ID NO: 410405 - DNA, 30 bp, Artificial Sequence
  Synthetic oligonucleotide
gatgtctctgatccgggaaaatgcttccat

SEQ ID NO: 410406 - DNA, 30 bp, Artificial Sequence
  Synthetic oligonucleotide
gtaaggtcgatgtctttaatcaagttccat

SEQ ID NO: 410407 - DNA, 30 bp, Artificial Sequence
  Synthetic oligonucleotide
gctccgctcgtaagtagatacacgttccat

SEQ ID NO: 410408 - DNA, 30 bp, Artificial Sequence
  Synthetic oligonucleotide
aaagtgtataaattacgtgatgtgttccat

SEQ ID NO: 410409 - DNA, 30 bp, Artificial Sequence
  Synthetic oligonucleotide
gagtatggcacaggagaatggtttttccat

SEQ ID NO: 410410 - DNA, 30 bp, Artificial Sequence
  Synthetic oligonucleotide
attttgctcgtcaaaccgtgaaaaaagcat

SEQ ID NO: 410411 - DNA, 30 bp, Artificial Sequence
  Synthetic oligonucleotide
ttagtaaagcgagttgcttttcaaaagcat

SEQ ID NO: 410412 - DNA, 30 bp, Artificial Sequence
  Synthetic oligonucleotide
atagtaggtatggtgccgtgcctcaagcat

SEQ ID NO: 410413 - DNA, 30 bp, Artificial Sequence
  Synthetic oligonucleotide
taatatctcaagcactgctctgggaagcat

SEQ ID NO: 410414 - DNA, 30 bp, Artificial Sequence
  Synthetic oligonucleotide
gccctgtcaggtgttctgtaaatgaagcat

SEQ ID NO: 410415 - DNA, 31 bp, Artificial Sequence
  Synthetic oligonucleotide
gttgctaacaggctgaacgcgcttgaagcat

SEQ ID NO: 410416 - DNA, 30 bp, Artificial Sequence
  Synthetic oligonucleotide
atgatttcgatcgttttggattataagcat

SEQ ID NO: 410417 - DNA, 30 bp, Artificial Sequence
  Synthetic oligonucleotide
cctactcccattcccagatgccctaagcat

SEQ ID NO: 410418 - DNA, 30 bp, Artificial Sequence
  Synthetic oligonucleotide
gattccaaaggtgtatctctaaaacagcat

SEQ ID NO: 410419 - DNA, 30 bp, Artificial Sequence
  Synthetic oligonucleotide
gaaatgactcaatggacaaggtcacagcat

SEQ ID NO: 410420 - DNA, 40 bp, Artificial Sequence
  Synthetic oligonucleotide
gttcgatgaatgttcaaattgctaccttatgtaccagcat

SEQ ID NO: 410421 - DNA, 30 bp, Artificial Sequence
  Synthetic oligonucleotide
gaatacgtatcaacccaggctacgcagcat

SEQ ID NO: 410422 - DNA, 30 bp, Artificial Sequence
  Synthetic oligonucleotide
tttttccatagtgagttccgagctcagcat

SEQ ID NO: 410423 - DNA, 30 bp, Artificial Sequence
  Synthetic oligonucleotide
caggagtgtgcagcgcagcggcgtcagcat

SEQ ID NO: 410424 - DNA, 30 bp, Artificial Sequence
  Synthetic oligonucleotide
gatgccgcgaccgaatggatcggtcagcat

SEQ ID NO: 410425 - DNA, 30 bp, Artificial Sequence
  Synthetic oligonucleotide
aggcggcgccacctgcaggccgcagagcat

SEQ ID NO: 410426 - DNA, 30 bp, Artificial Sequence
  Synthetic oligonucleotide
atgatcctttggtgtctgggcttagagcat

SEQ ID NO: 410427 - DNA, 30 bp, Artificial Sequence
  Synthetic oligonucleotide
ttgtatagcgcactgctgggtgacgagcat

SEQ ID NO: 410428 - DNA, 30 bp, Artificial Sequence
  Synthetic oligonucleotide
ggtacgcttgcgctgtcaacggccgagcat

SEQ ID NO: 410429 - DNA, 30 bp, Artificial Sequence
  Synthetic oligonucleotide
aggcactccagaatagtacatgccgagcat

SEQ ID NO: 410430 - DNA, 30 bp, Artificial Sequence
  Synthetic oligonucleotide
gtgccgtagtaggtcgttaatgctgagcat

SEQ ID NO: 410431 - DNA, 30 bp, Artificial Sequence
  Synthetic oligonucleotide
ggtactgctcacggggtacgatgtgagcat

SEQ ID NO: 410432 - DNA, 30 bp, Artificial Sequence
  Synthetic oligonucleotide
actctgacccatagttttttgtaatagcat

SEQ ID NO: 410433 - DNA, 30 bp, Artificial Sequence
  Synthetic oligonucleotide
taaaggtctaggcaccccaacacatagcat

SEQ ID NO: 410434 - DNA, 30 bp, Artificial Sequence
  Synthetic oligonucleotide
gtactaactccgctagtcgagtactagcat

SEQ ID NO: 410435 - DNA, 30 bp, Artificial Sequence
  Synthetic oligonucleotide
ctctcttgttggaaaaatctcgaaacgcat

SEQ ID NO: 410436 - DNA, 30 bp, Artificial Sequence
  Synthetic oligonucleotide
attggtgtgaaagtgtgattgcacacgcat

SEQ ID NO: 410437 - DNA, 30 bp, Artificial Sequence
  Synthetic oligonucleotide
tggggacggcagaggggtgctcccacgcat

SEQ ID NO: 410438 - DNA, 30 bp, Artificial Sequence
  Synthetic oligonucleotide
tgttaaccaggaaagtcaccttggacgcat

SEQ ID NO: 410439 - DNA, 30 bp, Artificial Sequence
  Synthetic oligonucleotide
agatcccgaccacctagagacatgacgcat

SEQ ID NO: 410440 - DNA, 30 bp, Artificial Sequence
  Synthetic oligonucleotide
gagtggcaaattgttgtccagtaaccgcat

SEQ ID NO: 410441 - DNA, 30 bp, Artificial Sequence
  Synthetic oligonucleotide
ctaagggcgatatatcgatttcgaccgcat

SEQ ID NO: 410442 - DNA, 30 bp, Artificial Sequence
  Synthetic oligonucleotide
tagatatttgccccggccgctcacccgcat

SEQ ID NO: 410443 - DNA, 30 bp, Artificial Sequence
  Synthetic oligonucleotide
caggttacacgtttgagccagttgccgcat

SEQ ID NO: 410444 - DNA, 30 bp, Artificial Sequence
  Synthetic oligonucleotide
gactcgactcgtcagacccgccttccgcat

SEQ ID NO: 410445 - DNA, 30 bp, Artificial Sequence
  Synthetic oligonucleotide
ataggctggactgtatgctcagtcgcgcat

SEQ ID NO: 410446 - DNA, 30 bp, Artificial Sequence
  Synthetic oligonucleotide
cttgcttttatcaatccgtcccaggcgcat

SEQ ID NO: 410447 - DNA, 30 bp, Artificial Sequence
  Synthetic oligonucleotide
gccctgtaagagcatcataggccggcgcat

SEQ ID NO: 410448 - DNA, 30 bp, Artificial Sequence
  Synthetic oligonucleotide
cccgggctctgttagtaatcctcggcgcat

SEQ ID NO: 410449 - DNA, 30 bp, Artificial Sequence
  Synthetic oligonucleotide
tgcttgggcgagaggggggtttatgcgcat

SEQ ID NO: 410450 - DNA, 30 bp, Artificial Sequence
  Synthetic oligonucleotide
cgccccaaggataaatgtcagagtgcgcat

SEQ ID NO: 410451 - DNA, 30 bp, Artificial Sequence
  Synthetic oligonucleotide
tgcttcatgctcggtgatatggaatcgcat

SEQ ID NO: 410452 - DNA, 30 bp, Artificial Sequence
  Synthetic oligonucleotide
cgcatgaagtaggccgacgtggcatcgcat

SEQ ID NO: 410453 - DNA, 30 bp, Artificial Sequence
  Synthetic oligonucleotide
cgattcgcggcgcaactgttagcctcgcat

SEQ ID NO: 410454 - DNA, 30 bp, Artificial Sequence
  Synthetic oligonucleotide
ataggcaacatttgtgccgtgtcgtcgcat

SEQ ID NO: 410455 - DNA, 30 bp, Artificial Sequence
  Synthetic oligonucleotide
aattgaaactcggagaatatgaggtcgcat

SEQ ID NO: 410456 - DNA, 30 bp, Artificial Sequence
  Synthetic oligonucleotide
ggaatccgatcggcaattacctggtcgcat

SEQ ID NO: 410457 - DNA, 30 bp, Artificial Sequence
  Synthetic oligonucleotide
acagaatgcgccccggtccccggttcgcat

SEQ ID NO: 410458 - DNA, 30 bp, Artificial Sequence
  Synthetic oligonucleotide
ggattggtccgggggcgcctcggttcgcat

SEQ ID NO: 410459 - DNA, 30 bp, Artificial Sequence
  Synthetic oligonucleotide
tattacgaagccacacttgggggttcgcat

SEQ ID NO: 410460 - DNA, 30 bp, Artificial Sequence
  Synthetic oligonucleotide
gcagacaatcttcttccgtaaaaaaggcat

SEQ ID NO: 410461 - DNA, 30 bp, Artificial Sequence
  Synthetic oligonucleotide
gcctgtgtaggttcctcgttagaaaggcat

SEQ ID NO: 410462 - DNA, 30 bp, Artificial Sequence
  Synthetic oligonucleotide
actatgattccctctctaatcccaaggcat

SEQ ID NO: 410463 - DNA, 30 bp, Artificial Sequence
  Synthetic oligonucleotide
tgaaagtggacactttattttttaaggcat

SEQ ID NO: 410464 - DNA, 30 bp, Artificial Sequence
  Synthetic oligonucleotide
atgttaacccgcgtattcaggaagaggcat

SEQ ID NO: 410465 - DNA, 30 bp, Artificial Sequence
  Synthetic oligonucleotide
gagaatcctgctcaacaggaaaggaggcat

SEQ ID NO: 410466 - DNA, 30 bp, Artificial Sequence
  Synthetic oligonucleotide
tcaattgcctcccactccctgttgaggcat

SEQ ID NO: 410467 - DNA, 30 bp, Artificial Sequence
  Synthetic oligonucleotide
cggtgcggaatacttgtaaaggaacggcat

SEQ ID NO: 410468 - DNA, 30 bp, Artificial Sequence
  Synthetic oligonucleotide
gtgtgggctaaggacatttattgacggcat

SEQ ID NO: 410469 - DNA, 30 bp, Artificial Sequence
  Synthetic oligonucleotide
ttatgaaccctaccatttggaatacggcat

SEQ ID NO: 410470 - DNA, 30 bp, Artificial Sequence
  Synthetic oligonucleotide
ctcccgtgtggtgcctatcccaaccggcat

SEQ ID NO: 410471 - DNA, 30 bp, Artificial Sequence
  Synthetic oligonucleotide
gcccaagtgtctatgtcaattgaccggcat

SEQ ID NO: 410472 - DNA, 30 bp, Artificial Sequence
  Synthetic oligonucleotide
ctcactaacttgtccagccgaagtcggcat

SEQ ID NO: 410473 - DNA, 30 bp, Artificial Sequence
  Synthetic oligonucleotide
cctgaggccgcaaatgcaaaacaagggcat

SEQ ID NO: 410474 - DNA, 30 bp, Artificial Sequence
  Synthetic oligonucleotide
caccttcagtcacaccgtccataagggcat

SEQ ID NO: 410475 - DNA, 30 bp, Artificial Sequence
  Synthetic oligonucleotide
ttccttagtgattgcggaagatcagggcat

SEQ ID NO: 410476 - DNA, 30 bp, Artificial Sequence
  Synthetic oligonucleotide
gtacctccgtaattaccgagaggagggcat

SEQ ID NO: 410477 - DNA, 30 bp, Artificial Sequence
  Synthetic oligonucleotide
ttggttgtatgcgcgtgttcgctagggcat

SEQ ID NO: 410478 - DNA, 30 bp, Artificial Sequence
  Synthetic oligonucleotide
tgttttattggtgaaagtttcgtagggcat

SEQ ID NO: 410479 - DNA, 29 bp, Artificial Sequence
  Synthetic oligonucleotide
taatttggcgaagcaactagatcgggcat

SEQ ID NO: 410480 - DNA, 30 bp, Artificial Sequence
  Synthetic oligonucleotide
aactaaggtcagttgatttccctggggcat

SEQ ID NO: 410481 - DNA, 30 bp, Artificial Sequence
  Synthetic oligonucleotide
ttcgtcggacgggtactgtcgttggggcat

SEQ ID NO: 410482 - DNA, 30 bp, Artificial Sequence
  Synthetic oligonucleotide
cgactgactaggttacctaatcatgggcat

SEQ ID NO: 410483 - DNA, 30 bp, Artificial Sequence
  Synthetic oligonucleotide
taggcccgcagcttgataatatagtggcat

SEQ ID NO: 410484 - DNA, 30 bp, Artificial Sequence
  Synthetic oligonucleotide
tttcaacaggatcctagactaaattggcat

SEQ ID NO: 410485 - DNA, 30 bp, Artificial Sequence
  Synthetic oligonucleotide
tgtaagacctcacgtggggggtcaatgcat

SEQ ID NO: 410486 - DNA, 30 bp, Artificial Sequence
  Synthetic oligonucleotide
gaagatcgcttcgcgctgaccatcatgcat

SEQ ID NO: 410487 - DNA, 30 bp, Artificial Sequence
  Synthetic oligonucleotide
ggcatttcaggcggcgtacacctcatgcat

SEQ ID NO: 410488 - DNA, 30 bp, Artificial Sequence
  Synthetic oligonucleotide
taccatgttgactatacggctttcatgcat

SEQ ID NO: 410489 - DNA, 30 bp, Artificial Sequence
  Synthetic oligonucleotide
cgcaatgaagggtagataattaagatgcat

SEQ ID NO: 410490 - DNA, 30 bp, Artificial Sequence
  Synthetic oligonucleotide
aagtaatgttaaacgaattagactatgcat

SEQ ID NO: 410491 - DNA, 30 bp, Artificial Sequence
  Synthetic oligonucleotide
tacgccggatacataaaaacctgtatgcat

SEQ ID NO: 410492 - DNA, 30 bp, Artificial Sequence
  Synthetic oligonucleotide
ggtctgtacaagcactctcttgttatgcat

SEQ ID NO: 410493 - DNA, 31 bp, Artificial Sequence
  Synthetic oligonucleotide
ggtcatttctccgcgatctgggtaagtgcat

SEQ ID NO: 410494 - DNA, 30 bp, Artificial Sequence
  Synthetic oligonucleotide
cagctaagcttgaagcaagtttaggtgcat

SEQ ID NO: 410495 - DNA, 30 bp, Artificial Sequence
  Synthetic oligonucleotide
tgctccgatgaaatttgcatgacggtgcat

SEQ ID NO: 410496 - DNA, 30 bp, Artificial Sequence
  Synthetic oligonucleotide
gtgcatcgttgagccttaatgccggtgcat

SEQ ID NO: 410497 - DNA, 30 bp, Artificial Sequence
  Synthetic oligonucleotide
tgcattggacctggaaacggtttggtgcat

SEQ ID NO: 410498 - DNA, 30 bp, Artificial Sequence
  Synthetic oligonucleotide
agaggggataggttggattgccatgtgcat

SEQ ID NO: 410499 - DNA, 30 bp, Artificial Sequence
  Synthetic oligonucleotide
gtttcgggccgtcaactgcgcgatgtgcat

SEQ ID NO: 410500 - DNA, 30 bp, Artificial Sequence
  Synthetic oligonucleotide
tcttgagaactatcgcctgcatcattgcat

SEQ ID NO: 410501 - DNA, 30 bp, Artificial Sequence
  Synthetic oligonucleotide
atcctgagaaaggcgtcaaccactttgcat

SEQ ID NO: 410502 - DNA, 30 bp, Artificial Sequence
  Synthetic oligonucleotide
ttggaatctccagtgcttgacggaaatcat

SEQ ID NO: 410503 - DNA, 30 bp, Artificial Sequence
  Synthetic oligonucleotide
ttatcacgttcctataaattagacaatcat

SEQ ID NO: 410504 - DNA, 31 bp, Artificial Sequence
  Synthetic oligonucleotide
aggtattttaccagcagctctttacaatcat

SEQ ID NO: 410505 - DNA, 30 bp, Artificial Sequence
  Synthetic oligonucleotide
aacgcttgatcgatgggctgctggaatcat

SEQ ID NO: 410506 - DNA, 30 bp, Artificial Sequence
  Synthetic oligonucleotide
ggaaaccttcttgcaaccggaacacatcat

SEQ ID NO: 410507 - DNA, 30 bp, Artificial Sequence
  Synthetic oligonucleotide
gcgcatggctgtgggtagggcaaccatcat

SEQ ID NO: 410508 - DNA, 30 bp, Artificial Sequence
  Synthetic oligonucleotide
acatgcctcagggcagttggtccccatcat

SEQ ID NO: 410509 - DNA, 31 bp, Artificial Sequence
  Synthetic oligonucleotide
ggacgcatggacggacattccggcccatcat

SEQ ID NO: 410510 - DNA, 30 bp, Artificial Sequence
  Synthetic oligonucleotide
gaccaatttgccagagagtacttccatcat

SEQ ID NO: 410511 - DNA, 30 bp, Artificial Sequence
  Synthetic oligonucleotide
ttttctggggacggctacttgcagcatcat

SEQ ID NO: 410512 - DNA, 30 bp, Artificial Sequence
  Synthetic oligonucleotide
ttctgtagactgccgaagagaatgcatcat

SEQ ID NO: 410513 - DNA, 30 bp, Artificial Sequence
  Synthetic oligonucleotide
tccgtttgtgactgtggtaggatagatcat

SEQ ID NO: 410514 - DNA, 30 bp, Artificial Sequence
  Synthetic oligonucleotide
gacagcgtcatctcagttctgagtgatcat

SEQ ID NO: 410515 - DNA, 30 bp, Artificial Sequence
  Synthetic oligonucleotide
aaaacttcgccgaggtaagcccaatatcat

SEQ ID NO: 410516 - DNA, 30 bp, Artificial Sequence
  Synthetic oligonucleotide
aaaggaatccgtggctttgagcaatatcat

SEQ ID NO: 410517 - DNA, 30 bp, Artificial Sequence
  Synthetic oligonucleotide
gatgcagacatttcaattaaccgatatcat

SEQ ID NO: 410518 - DNA, 30 bp, Artificial Sequence
  Synthetic oligonucleotide
tcactaaaactcgtccagggacagtatcat

SEQ ID NO: 410519 - DNA, 30 bp, Artificial Sequence
  Synthetic oligonucleotide
agtatttaatggaaacacaccagttatcat

SEQ ID NO: 410520 - DNA, 30 bp, Artificial Sequence
  Synthetic oligonucleotide
tctgagtattcgcgggaattgctttatcat

SEQ ID NO: 410521 - DNA, 30 bp, Artificial Sequence
  Synthetic oligonucleotide
aaacagttctgttcgcagtgacacactcat

SEQ ID NO: 410522 - DNA, 30 bp, Artificial Sequence
  Synthetic oligonucleotide
tgtcccaacagatggccagggcagactcat

SEQ ID NO: 410523 - DNA, 30 bp, Artificial Sequence
  Synthetic oligonucleotide
ggctgtattgctcgctttatgcagactcat

SEQ ID NO: 410524 - DNA, 30 bp, Artificial Sequence
  Synthetic oligonucleotide
gaggggcctggtaagccggttacgactcat

SEQ ID NO: 410525 - DNA, 30 bp, Artificial Sequence
  Synthetic oligonucleotide
gggctggccgtgtcccacatccggactcat

SEQ ID NO: 410526 - DNA, 30 bp, Artificial Sequence
  Synthetic oligonucleotide
tcgctgtacgacgcctatgtagctactcat

SEQ ID NO: 410527 - DNA, 30 bp, Artificial Sequence
  Synthetic oligonucleotide
aattttgacaagcggtcacatcgacctcat

SEQ ID NO: 410528 - DNA, 30 bp, Artificial Sequence
  Synthetic oligonucleotide
gaggtctgaattcattctagggtacctcat

SEQ ID NO: 410529 - DNA, 30 bp, Artificial Sequence
  Synthetic oligonucleotide
aaacctcatttgagccgtcgtaagcctcat

SEQ ID NO: 410530 - DNA, 30 bp, Artificial Sequence
  Synthetic oligonucleotide
aagtgggtgcccattttagtaaggcctcat

SEQ ID NO: 410531 - DNA, 30 bp, Artificial Sequence
  Synthetic oligonucleotide
tttaaagtcataatctgggactgtcctcat

SEQ ID NO: 410532 - DNA, 30 bp, Artificial Sequence
  Synthetic oligonucleotide
cataatgataaggcctagagaattcctcat

SEQ ID NO: 410533 - DNA, 30 bp, Artificial Sequence
  Synthetic oligonucleotide
caacataaatttgtggactcaacagctcat

SEQ ID NO: 410534 - DNA, 30 bp, Artificial Sequence
  Synthetic oligonucleotide
attttgccaatggccccgtaagcagctcat

SEQ ID NO: 410535 - DNA, 30 bp, Artificial Sequence
  Synthetic oligonucleotide
ggtgaaaggaacacaatgggggacgctcat

SEQ ID NO: 410536 - DNA, 30 bp, Artificial Sequence
  Synthetic oligonucleotide
gcctgcagtcgcaatcagcctacggctcat

SEQ ID NO: 410537 - DNA, 30 bp, Artificial Sequence
  Synthetic oligonucleotide
tacttgttgtaatgaattattgtggctcat

SEQ ID NO: 410538 - DNA, 30 bp, Artificial Sequence
  Synthetic oligonucleotide
cagctgaacgaaaaaattcggtatgctcat

SEQ ID NO: 410539 - DNA, 30 bp, Artificial Sequence
  Synthetic oligonucleotide
gagtccaattatatggacgtacttgctcat

SEQ ID NO: 410540 - DNA, 30 bp, Artificial Sequence
  Synthetic oligonucleotide
tctttttgttcgcgtcccaatgttgctcat

SEQ ID NO: 410541 - DNA, 30 bp, Artificial Sequence
  Synthetic oligonucleotide
gcttcaagatggcacactagaccatctcat

SEQ ID NO: 410542 - DNA, 30 bp, Artificial Sequence
  Synthetic oligonucleotide
aaaatgcgaatctgggaggttcagtctcat

SEQ ID NO: 410543 - DNA, 30 bp, Artificial Sequence
  Synthetic oligonucleotide
atacgtatctactgctctctaccgtctcat

SEQ ID NO: 410544 - DNA, 30 bp, Artificial Sequence
  Synthetic oligonucleotide
agtggacgcatttttcatggcggttctcat

SEQ ID NO: 410545 - DNA, 30 bp, Artificial Sequence
  Synthetic oligonucleotide
cttttatcacgacctcggccgccaagtcat

SEQ ID NO: 410546 - DNA, 30 bp, Artificial Sequence
  Synthetic oligonucleotide
cagcatagaagcatgacagtcataagtcat

SEQ ID NO: 410547 - DNA, 30 bp, Artificial Sequence
  Synthetic oligonucleotide
aaatttctagaacaaacagcgcccagtcat

SEQ ID NO: 410548 - DNA, 30 bp, Artificial Sequence
  Synthetic oligonucleotide
caattgccaactctagggaaaagtagtcat

SEQ ID NO: 410549 - DNA, 30 bp, Artificial Sequence
  Synthetic oligonucleotide
tagccgttccaagtctggttgtaacgtcat

SEQ ID NO: 410550 - DNA, 30 bp, Artificial Sequence
  Synthetic oligonucleotide
caccccgctggtttgatggatgtacgtcat

SEQ ID NO: 410551 - DNA, 30 bp, Artificial Sequence
  Synthetic oligonucleotide
cccgatgccggggtttatggcgggcgtcat

SEQ ID NO: 410552 - DNA, 30 bp, Artificial Sequence
  Synthetic oligonucleotide
ttgccgtcatagatatccgtctggcgtcat

SEQ ID NO: 410553 - DNA, 30 bp, Artificial Sequence
  Synthetic oligonucleotide
accgttgcaatgaggtaagaacttcgtcat

SEQ ID NO: 410554 - DNA, 30 bp, Artificial Sequence
  Synthetic oligonucleotide
ctaactttaatattgtgtaggagaggtcat

SEQ ID NO: 410555 - DNA, 30 bp, Artificial Sequence
  Synthetic oligonucleotide
cgctgctctggtgatattgagaacggtcat

SEQ ID NO: 410556 - DNA, 30 bp, Artificial Sequence
  Synthetic oligonucleotide
gtcattttctttgcgtacgttgtcggtcat

SEQ ID NO: 410557 - DNA, 30 bp, Artificial Sequence
  Synthetic oligonucleotide
tggttttacgggtcatggttaagtggtcat

SEQ ID NO: 410558 - DNA, 30 bp, Artificial Sequence
  Synthetic oligonucleotide
gtgtgatgaatcgatgttccgacgtgtcat

SEQ ID NO: 410559 - DNA, 30 bp, Artificial Sequence
  Synthetic oligonucleotide
ggaatgggaaactcagtaataggttgtcat

SEQ ID NO: 410560 - DNA, 30 bp, Artificial Sequence
  Synthetic oligonucleotide
aaaaatacataggagcgatcaaaaattcat

SEQ ID NO: 410561 - DNA, 30 bp, Artificial Sequence
  Synthetic oligonucleotide
atggttcaagatatcaccgcagacattcat

SEQ ID NO: 410562 - DNA, 30 bp, Artificial Sequence
  Synthetic oligonucleotide
cgagggagtacccaactcgttgggattcat

SEQ ID NO: 410563 - DNA, 30 bp, Artificial Sequence
  Synthetic oligonucleotide
cctacatggactgtacggctgtggattcat

SEQ ID NO: 410564 - DNA, 27 bp, Artificial Sequence
  Synthetic oligonucleotide
gacgcccgactgggagtggtgattcat

SEQ ID NO: 410565 - DNA, 30 bp, Artificial Sequence
  Synthetic oligonucleotide
cactgagtaagacctaggggcttgattcat

SEQ ID NO: 410566 - DNA, 30 bp, Artificial Sequence
  Synthetic oligonucleotide
caatggttgctgcgtgaacattatattcat

SEQ ID NO: 410567 - DNA, 30 bp, Artificial Sequence
  Synthetic oligonucleotide
gaccgccggctattatattcgggtattcat

SEQ ID NO: 410568 - DNA, 30 bp, Artificial Sequence
  Synthetic oligonucleotide
aatcccgtcaggtaccagaggtcccttcat

SEQ ID NO: 410569 - DNA, 30 bp, Artificial Sequence
  Synthetic oligonucleotide
gataccgggtctggcgttacaatccttcat

SEQ ID NO: 410570 - DNA, 30 bp, Artificial Sequence
  Synthetic oligonucleotide
cggggaaacgagaaccttgaggatcttcat

SEQ ID NO: 410571 - DNA, 30 bp, Artificial Sequence
  Synthetic oligonucleotide
aagattgttcttgtattgtgagttcttcat

SEQ ID NO: 410572 - DNA, 30 bp, Artificial Sequence
  Synthetic oligonucleotide
gccctgatagatctttgctatctagttcat

SEQ ID NO: 410573 - DNA, 31 bp, Artificial Sequence
  Synthetic oligonucleotide
tgacgcgcccagagtcagcgtctccgttcat

SEQ ID NO: 410574 - DNA, 30 bp, Artificial Sequence
  Synthetic oligonucleotide
cagaatgtttgtcgcaactaaagcgttcat

SEQ ID NO: 410575 - DNA, 30 bp, Artificial Sequence
  Synthetic oligonucleotide
attaactttgcaatgtaagggtcatttcat

SEQ ID NO: 410576 - DNA, 30 bp, Artificial Sequence
  Synthetic oligonucleotide
tgttaatacatgatagaatattgatttcat

SEQ ID NO: 410577 - DNA, 30 bp, Artificial Sequence
  Synthetic oligonucleotide
tgggttgccgagcggcagcgctactttcat

SEQ ID NO: 410578 - DNA, 30 bp, Artificial Sequence
  Synthetic oligonucleotide
gggtgagactcattttaacgatgctttcat

SEQ ID NO: 410579 - DNA, 30 bp, Artificial Sequence
  Synthetic oligonucleotide
tatctagttgagtgggataaatggtttcat

SEQ ID NO: 410580 - DNA, 30 bp, Artificial Sequence
  Synthetic oligonucleotide
ttttaagtcaattcccggagtgtgtttcat

SEQ ID NO: 410581 - DNA, 30 bp, Artificial Sequence
  Synthetic oligonucleotide
atcaaagttgctcaaatggcaaattttcat

SEQ ID NO: 410582 - DNA, 30 bp, Artificial Sequence
  Synthetic oligonucleotide
ggaggacacgtatctgtcggtgtttttcat

SEQ ID NO: 410583 - DNA, 30 bp, Artificial Sequence
  Synthetic oligonucleotide
gccgtccgtcaggtagaatgattttttcat

SEQ ID NO: 410584 - DNA, 30 bp, Artificial Sequence
  Synthetic oligonucleotide
cacgtcctatcctggtatacacaaaaagat

SEQ ID NO: 410585 - DNA, 30 bp, Artificial Sequence
  Synthetic oligonucleotide
ggcattggacgtgtgttagtagaaaaagat

SEQ ID NO: 410586 - DNA, 30 bp, Artificial Sequence
  Synthetic oligonucleotide
tgcccgagtcagatctgatacctaaaagat

SEQ ID NO: 410587 - DNA, 30 bp, Artificial Sequence
  Synthetic oligonucleotide
caaaaattgggctgggctggacgcaaagat

SEQ ID NO: 410588 - DNA, 30 bp, Artificial Sequence
  Synthetic oligonucleotide
tagacaccctgtaaaaatggtggcaaagat

SEQ ID NO: 410589 - DNA, 30 bp, Artificial Sequence
  Synthetic oligonucleotide
aaagtggtgagacacctacttgtgaaagat

SEQ ID NO: 410590 - DNA, 30 bp, Artificial Sequence
  Synthetic oligonucleotide
ccttgtcccgctcagggcgcttctaaagat

SEQ ID NO: 410591 - DNA, 30 bp, Artificial Sequence
  Synthetic oligonucleotide
ttgaatcggaccttgtactttattaaagat

SEQ ID NO: 410592 - DNA, 30 bp, Artificial Sequence
  Synthetic oligonucleotide
aataaatataaatcggcctctccgcaagat

SEQ ID NO: 410593 - DNA, 30 bp, Artificial Sequence
  Synthetic oligonucleotide
aaataataaaccgttcataccatgcaagat

SEQ ID NO: 410594 - DNA, 30 bp, Artificial Sequence
  Synthetic oligonucleotide
atttgaccaagttgcggtgctcatcaagat

SEQ ID NO: 410595 - DNA, 30 bp, Artificial Sequence
  Synthetic oligonucleotide
cgcagtccagacgcgacgtattttcaagat

SEQ ID NO: 410596 - DNA, 30 bp, Artificial Sequence
  Synthetic oligonucleotide
cagtgtgagagaaaacatagtcgagaagat

SEQ ID NO: 410597 - DNA, 30 bp, Artificial Sequence
  Synthetic oligonucleotide
aactagcatgcttagacccgcggagaagat

SEQ ID NO: 410598 - DNA, 30 bp, Artificial Sequence
  Synthetic oligonucleotide
attcccaataggacaagcgatagcgaagat

SEQ ID NO: 410599 - DNA, 30 bp, Artificial Sequence
  Synthetic oligonucleotide
tatatcagttgcgaaggggtcccggaagat

SEQ ID NO: 410600 - DNA, 30 bp, Artificial Sequence
  Synthetic oligonucleotide
tagaaaaacccccctttatatagggaagat

SEQ ID NO: 410601 - DNA, 30 bp, Artificial Sequence
  Synthetic oligonucleotide
taggccttcgtacacgatcttggtgaagat

SEQ ID NO: 410602 - DNA, 30 bp, Artificial Sequence
  Synthetic oligonucleotide
tcgcggatttcagaatatcgctaataagat

SEQ ID NO: 410603 - DNA, 30 bp, Artificial Sequence
  Synthetic oligonucleotide
gcgtctgatggatacagcaacgcctaagat

SEQ ID NO: 410604 - DNA, 30 bp, Artificial Sequence
  Synthetic oligonucleotide
agtcctctaagaccttcataaggctaagat

SEQ ID NO: 410605 - DNA, 30 bp, Artificial Sequence
  Synthetic oligonucleotide
acacttgggccttcaacaaaaaagtaagat

SEQ ID NO: 410606 - DNA, 30 bp, Artificial Sequence
  Synthetic oligonucleotide
gcaaccaagtgctgaccccgcgtttaagat

SEQ ID NO: 410607 - DNA, 30 bp, Artificial Sequence
  Synthetic oligonucleotide
cacatgcttcaggtctacgctgccacagat

SEQ ID NO: 410608 - DNA, 30 bp, Artificial Sequence
  Synthetic oligonucleotide
ttcgctgatgcccttagccaccgcacagat

SEQ ID NO: 410609 - DNA, 30 bp, Artificial Sequence
  Synthetic oligonucleotide
ttccttaagccaccttggtctcagacagat

SEQ ID NO: 410610 - DNA, 30 bp, Artificial Sequence
  Synthetic oligonucleotide
tgccgggatttgctagatatctatacagat

SEQ ID NO: 410611 - DNA, 30 bp, Artificial Sequence
  Synthetic oligonucleotide
aagcgtgaacaggtcggatagagtacagat

SEQ ID NO: 410612 - DNA, 30 bp, Artificial Sequence
  Synthetic oligonucleotide
atctggatcggcgggtatcagacaccagat

SEQ ID NO: 410613 - DNA, 30 bp, Artificial Sequence
  Synthetic oligonucleotide
acagtcattggtcgccagtgtacaccagat

SEQ ID NO: 410614 - DNA, 30 bp, Artificial Sequence
  Synthetic oligonucleotide
aacccggtatgtctcccgggtgcaccagat

SEQ ID NO: 410615 - DNA, 30 bp, Artificial Sequence
  Synthetic oligonucleotide
agagtcacagcctagtctatcagaccagat

SEQ ID NO: 410616 - DNA, 30 bp, Artificial Sequence
  Synthetic oligonucleotide
gcgagtgggctgatattgatcgggccagat

SEQ ID NO: 410617 - DNA, 30 bp, Artificial Sequence
  Synthetic oligonucleotide
ctatgaggtattttgtcaggacaagcagat

SEQ ID NO: 410618 - DNA, 30 bp, Artificial Sequence
  Synthetic oligonucleotide
atgcacgcgcccctctaatcgacagcagat

SEQ ID NO: 410619 - DNA, 30 bp, Artificial Sequence
  Synthetic oligonucleotide
ttatgaacttcggtgtatagtatcgcagat

SEQ ID NO: 410620 - DNA, 30 bp, Artificial Sequence
  Synthetic oligonucleotide
tgaattcggtcggtaaacacggttgcagat

SEQ ID NO: 410621 - DNA, 30 bp, Artificial Sequence
  Synthetic oligonucleotide
gatgttccatagacaccctgccaatcagat

SEQ ID NO: 410622 - DNA, 30 bp, Artificial Sequence
  Synthetic oligonucleotide
taacgcccggcagctattggagaatcagat

SEQ ID NO: 410623 - DNA, 30 bp, Artificial Sequence
  Synthetic oligonucleotide
tcacatttggctgacaggaacccatcagat

SEQ ID NO: 410624 - DNA, 30 bp, Artificial Sequence
  Synthetic oligonucleotide
atccaactcattaagtgctatccatcagat

SEQ ID NO: 410625 - DNA, 30 bp, Artificial Sequence
  Synthetic oligonucleotide
tggatcctttctaagatatcatgctcagat

SEQ ID NO: 410626 - DNA, 30 bp, Artificial Sequence
  Synthetic oligonucleotide
tgtgcatgtcctaaaaggcgcgtgtcagat

SEQ ID NO: 410627 - DNA, 30 bp, Artificial Sequence
  Synthetic oligonucleotide
tcctctcatgggtgagaagcgcgaagagat

SEQ ID NO: 410628 - DNA, 30 bp, Artificial Sequence
  Synthetic oligonucleotide
cactacggtatcggtgactcggtaagagat

SEQ ID NO: 410629 - DNA, 30 bp, Artificial Sequence
  Synthetic oligonucleotide
cgctagccgtttatcttagggaacagagat

SEQ ID NO: 410630 - DNA, 30 bp, Artificial Sequence
  Synthetic oligonucleotide
ctgtttagtgagtctagctaaaagagagat

SEQ ID NO: 410631 - DNA, 30 bp, Artificial Sequence
  Synthetic oligonucleotide
aactcaatacgaagccgtggctagagagat

SEQ ID NO: 410632 - DNA, 30 bp, Artificial Sequence
  Synthetic oligonucleotide
tgtaggtttaggtcactcagaccgagagat

SEQ ID NO: 410633 - DNA, 30 bp, Artificial Sequence
  Synthetic oligonucleotide
cggagctcctcttacgagatgccgagagat

SEQ ID NO: 410634 - DNA, 30 bp, Artificial Sequence
  Synthetic oligonucleotide
cgccccgacacattgcttatgtcgagagat

SEQ ID NO: 410635 - DNA, 30 bp, Artificial Sequence
  Synthetic oligonucleotide
aggctattaaacttaagttcttgacgagat

SEQ ID NO: 410636 - DNA, 30 bp, Artificial Sequence
  Synthetic oligonucleotide
aggttattaataattacccccgagcgagat

SEQ ID NO: 410637 - DNA, 30 bp, Artificial Sequence
  Synthetic oligonucleotide
aaaaagtatctggcgattggtgagcgagat

SEQ ID NO: 410638 - DNA, 30 bp, Artificial Sequence
  Synthetic oligonucleotide
aacggtgcgacccgcccaacagggcgagat

SEQ ID NO: 410639 - DNA, 30 bp, Artificial Sequence
  Synthetic oligonucleotide
taacccctcgcgaatgtgttacatcgagat

SEQ ID NO: 410640 - DNA, 30 bp, Artificial Sequence
  Synthetic oligonucleotide
agcagtaacgcgccgttcgaggacggagat

SEQ ID NO: 410641 - DNA, 30 bp, Artificial Sequence
  Synthetic oligonucleotide
atttcataacagcgagcccattgcggagat

SEQ ID NO: 410642 - DNA, 30 bp, Artificial Sequence
  Synthetic oligonucleotide
ttacataaaatatcattgcggcagggagat

SEQ ID NO: 410643 - DNA, 30 bp, Artificial Sequence
  Synthetic oligonucleotide
gaaacaagtcatatgcgaaatcctggagat

SEQ ID NO: 410644 - DNA, 30 bp, Artificial Sequence
  Synthetic oligonucleotide
aagatttcatcagacaatcgcggtggagat

SEQ ID NO: 410645 - DNA, 30 bp, Artificial Sequence
  Synthetic oligonucleotide
gacgttatcaacgtgttcgataaatgagat

SEQ ID NO: 410646 - DNA, 30 bp, Artificial Sequence
  Synthetic oligonucleotide
gctcgagtatacggagaactacactgagat

SEQ ID NO: 410647 - DNA, 30 bp, Artificial Sequence
  Synthetic oligonucleotide
ctggggaatcctatacatagccgctgagat

SEQ ID NO: 410648 - DNA, 30 bp, Artificial Sequence
  Synthetic oligonucleotide
tatgggcgagcaacaataggatgctgagat

SEQ ID NO: 410649 - DNA, 30 bp, Artificial Sequence
  Synthetic oligonucleotide
ttagaagacgcgtcacgaatggtctgagat

SEQ ID NO: 410650 - DNA, 30 bp, Artificial Sequence
  Synthetic oligonucleotide
aacagtcaacgaactataaacttctgagat

SEQ ID NO: 410651 - DNA, 30 bp, Artificial Sequence
  Synthetic oligonucleotide
gtgcagacccgctgtgcttgcgggtgagat

SEQ ID NO: 410652 - DNA, 30 bp, Artificial Sequence
  Synthetic oligonucleotide
tggtagacggagctcccctgggtgtgagat

SEQ ID NO: 410653 - DNA, 30 bp, Artificial Sequence
  Synthetic oligonucleotide
ttgtgatactgattaaatccgccttgagat

SEQ ID NO: 410654 - DNA, 30 bp, Artificial Sequence
  Synthetic oligonucleotide
taggctcgtcaaggatgaggtccaatagat

SEQ ID NO: 410655 - DNA, 30 bp, Artificial Sequence
  Synthetic oligonucleotide
acccgccaagtacttgttaggtcaatagat

SEQ ID NO: 410656 - DNA, 30 bp, Artificial Sequence
  Synthetic oligonucleotide
gctctgcacggtgtcacaaatcgaatagat

SEQ ID NO: 410657 - DNA, 30 bp, Artificial Sequence
  Synthetic oligonucleotide
gtactccgtccaaattcagatctaatagat

SEQ ID NO: 410658 - DNA, 30 bp, Artificial Sequence
  Synthetic oligonucleotide
acaggttaggtaacggttggtcccatagat

SEQ ID NO: 410659 - DNA, 30 bp, Artificial Sequence
  Synthetic oligonucleotide
gtatctagattccgtgggaccagcatagat

SEQ ID NO: 410660 - DNA, 30 bp, Artificial Sequence
  Synthetic oligonucleotide
tctgcggcacgttcggaccgtaagatagat

SEQ ID NO: 410661 - DNA, 30 bp, Artificial Sequence
  Synthetic oligonucleotide
caggaatgtaaatattctttttttatagat

SEQ ID NO: 410662 - DNA, 30 bp, Artificial Sequence
  Synthetic oligonucleotide
gaaattaacgaagagtgaccaaccctagat

SEQ ID NO: 410663 - DNA, 30 bp, Artificial Sequence
  Synthetic oligonucleotide
tgtgatcttcgcaccatataaagcctagat

SEQ ID NO: 410664 - DNA, 30 bp, Artificial Sequence
  Synthetic oligonucleotide
cgttctagatgaagccgcgtcaagctagat

SEQ ID NO: 410665 - DNA, 30 bp, Artificial Sequence
  Synthetic oligonucleotide
agtgttgtgggtgagcgcaagcagctagat

SEQ ID NO: 410666 - DNA, 30 bp, Artificial Sequence
  Synthetic oligonucleotide
cgtccggctacggtctagactcagctagat

SEQ ID NO: 410667 - DNA, 30 bp, Artificial Sequence
  Synthetic oligonucleotide
atattaggaacaacggtgatctcgctagat

SEQ ID NO: 410668 - DNA, 30 bp, Artificial Sequence
  Synthetic oligonucleotide
tatggagaacgcacactgtacactctagat

SEQ ID NO: 410669 - DNA, 30 bp, Artificial Sequence
  Synthetic oligonucleotide
ggttcagacttggccgctggatgagtagat

SEQ ID NO: 410670 - DNA, 30 bp, Artificial Sequence
  Synthetic oligonucleotide
gtaatacagagtcggcttgtgtgagtagat

SEQ ID NO: 410671 - DNA, 30 bp, Artificial Sequence
  Synthetic oligonucleotide
tgtgagcatgtatgctgttaggacgtagat

SEQ ID NO: 410672 - DNA, 30 bp, Artificial Sequence
  Synthetic oligonucleotide
ttcgtggcgcggtctcgcacagaggtagat

SEQ ID NO: 410673 - DNA, 30 bp, Artificial Sequence
  Synthetic oligonucleotide
gcaccagggcagaccgtcaggcgcttagat

SEQ ID NO: 410674 - DNA, 30 bp, Artificial Sequence
  Synthetic oligonucleotide
aggtcggcactaaccggaggcggcttagat

SEQ ID NO: 410675 - DNA, 30 bp, Artificial Sequence
  Synthetic oligonucleotide
aacggatcgataccatggcggctcttagat

SEQ ID NO: 410676 - DNA, 30 bp, Artificial Sequence
  Synthetic oligonucleotide
cgaggaaccgctttctttcaggtcttagat

SEQ ID NO: 410677 - DNA, 30 bp, Artificial Sequence
  Synthetic oligonucleotide
acaaacccataaaggcgttccaagttagat

SEQ ID NO: 410678 - DNA, 30 bp, Artificial Sequence
  Synthetic oligonucleotide
agttgcagcatatatggtactacgttagat

SEQ ID NO: 410679 - DNA, 30 bp, Artificial Sequence
  Synthetic oligonucleotide
cgctgtaaatcgcatacgcaacggttagat

SEQ ID NO: 410680 - DNA, 30 bp, Artificial Sequence
  Synthetic oligonucleotide
tcaatttacaggcttcagattcggttagat

SEQ ID NO: 410681 - DNA, 30 bp, Artificial Sequence
  Synthetic oligonucleotide
agttcaaagaacagtatttcgatgttagat

SEQ ID NO: 410682 - DNA, 30 bp, Artificial Sequence
  Synthetic oligonucleotide
gtgaagacgaatgttcactatatgttagat

SEQ ID NO: 410683 - DNA, 30 bp, Artificial Sequence
  Synthetic oligonucleotide
atctgcgggatatctatataattgttagat

SEQ ID NO: 410684 - DNA, 31 bp, Artificial Sequence
  Synthetic oligonucleotide
ttatacaagcctccgagctcaccgtttagat

SEQ ID NO: 410685 - DNA, 29 bp, Artificial Sequence
  Synthetic oligonucleotide
gtgctatcaatggcacgactcacaacgat

SEQ ID NO: 410686 - DNA, 30 bp, Artificial Sequence
  Synthetic oligonucleotide
attactgtaaacacagtatgctccaacgat

SEQ ID NO: 410687 - DNA, 30 bp, Artificial Sequence
  Synthetic oligonucleotide
tcgttgttttcggtagcttgcagcaacgat

SEQ ID NO: 410688 - DNA, 30 bp, Artificial Sequence
  Synthetic oligonucleotide
tttacagacgtatatgaattgagcaacgat

SEQ ID NO: 410689 - DNA, 30 bp, Artificial Sequence
  Synthetic oligonucleotide
atgacaatttctataatgtcagtcaacgat

SEQ ID NO: 410690 - DNA, 30 bp, Artificial Sequence
  Synthetic oligonucleotide
gcccgcttgtagacacacagaacgaacgat

SEQ ID NO: 410691 - DNA, 30 bp, Artificial Sequence
  Synthetic oligonucleotide
ctagatcgtaaatataatagacgtaacgat

SEQ ID NO: 410692 - DNA, 30 bp, Artificial Sequence
  Synthetic oligonucleotide
gatcgaatttgatgaacgggtggtaacgat

SEQ ID NO: 410693 - DNA, 30 bp, Artificial Sequence
  Synthetic oligonucleotide
cctccaatctgcccgtaatgcggccacgat

SEQ ID NO: 410694 - DNA, 30 bp, Artificial Sequence
  Synthetic oligonucleotide
acagtcggcaatggtaggccgggccacgat

SEQ ID NO: 410695 - DNA, 30 bp, Artificial Sequence
  Synthetic oligonucleotide
gtacctccccttgttgaatgtttccacgat

SEQ ID NO: 410696 - DNA, 30 bp, Artificial Sequence
  Synthetic oligonucleotide
actggattagctaggtttgcgtagcacgat

SEQ ID NO: 410697 - DNA, 30 bp, Artificial Sequence
  Synthetic oligonucleotide
gctatggcctaggtccaggtacggcacgat

SEQ ID NO: 410698 - DNA, 30 bp, Artificial Sequence
  Synthetic oligonucleotide
ccgtcaaggaatcaactgaggccagacgat

SEQ ID NO: 410699 - DNA, 30 bp, Artificial Sequence
  Synthetic oligonucleotide
aacctatttttggatccctcaagcgacgat

SEQ ID NO: 410700 - DNA, 30 bp, Artificial Sequence
  Synthetic oligonucleotide
gacatcccgctggtggggtatcaggacgat

SEQ ID NO: 410701 - DNA, 30 bp, Artificial Sequence
  Synthetic oligonucleotide
cctccccggagacggagaacatgggacgat

SEQ ID NO: 410702 - DNA, 30 bp, Artificial Sequence
  Synthetic oligonucleotide
cttcagtaagtacgggactccctggacgat

SEQ ID NO: 410703 - DNA, 30 bp, Artificial Sequence
  Synthetic oligonucleotide
gctgtagcgattatcacttccttggacgat

SEQ ID NO: 410704 - DNA, 30 bp, Artificial Sequence
  Synthetic oligonucleotide
tcggaggtccggcatctcggatatgacgat

SEQ ID NO: 410705 - DNA, 30 bp, Artificial Sequence
  Synthetic oligonucleotide
ataaaacagaattcgtagcttcctgacgat

SEQ ID NO: 410706 - DNA, 30 bp, Artificial Sequence
  Synthetic oligonucleotide
tgctgcaagtgtttttttatcggtgacgat

SEQ ID NO: 410707 - DNA, 30 bp, Artificial Sequence
  Synthetic oligonucleotide
ttagaaatttctgttccgtgcattgacgat

SEQ ID NO: 410708 - DNA, 30 bp, Artificial Sequence
  Synthetic oligonucleotide
gtgtgcgtgagcaaacgtacgattgacgat

SEQ ID NO: 410709 - DNA, 30 bp, Artificial Sequence
  Synthetic oligonucleotide
cattaagtccagacgagacgcgcgtacgat

SEQ ID NO: 410710 - DNA, 30 bp, Artificial Sequence
  Synthetic oligonucleotide
ttgtacatccgaagcactatctcgtacgat

SEQ ID NO: 410711 - DNA, 30 bp, Artificial Sequence
  Synthetic oligonucleotide
gcgttattattggccacgttgttgtacgat

SEQ ID NO: 410712 - DNA, 30 bp, Artificial Sequence
  Synthetic oligonucleotide
ccctgggtttacacgatagggaaaaccgat

SEQ ID NO: 410713 - DNA, 30 bp, Artificial Sequence
  Synthetic oligonucleotide
atagtaggttgaggcgtttcggcaaccgat

SEQ ID NO: 410714 - DNA, 30 bp, Artificial Sequence
  Synthetic oligonucleotide
aagcaccatcaggtgtcacagctcaccgat

SEQ ID NO: 410715 - DNA, 30 bp, Artificial Sequence
  Synthetic oligonucleotide
tcgctgttcgatttcacactatcgaccgat

SEQ ID NO: 410716 - DNA, 30 bp, Artificial Sequence
  Synthetic oligonucleotide
aacatgcagcgtcgtcgggctcggaccgat

SEQ ID NO: 410717 - DNA, 30 bp, Artificial Sequence
  Synthetic oligonucleotide
ggtggtcacaaatcttatgatgggaccgat

SEQ ID NO: 410718 - DNA, 30 bp, Artificial Sequence
  Synthetic oligonucleotide
agtgaggttttcaagttcgtagtgaccgat

SEQ ID NO: 410719 - DNA, 30 bp, Artificial Sequence
  Synthetic oligonucleotide
ctccactagtaaagcctaacgaataccgat

SEQ ID NO: 410720 - DNA, 30 bp, Artificial Sequence
  Synthetic oligonucleotide
tcccggacgtgacatcaagtgacacccgat

SEQ ID NO: 410721 - DNA, 30 bp, Artificial Sequence
  Synthetic oligonucleotide
atgtaacactgtaataggggctcccccgat

SEQ ID NO: 410722 - DNA, 30 bp, Artificial Sequence
  Synthetic oligonucleotide
gtggttactagggatgaaaatgggcccgat

SEQ ID NO: 410723 - DNA, 30 bp, Artificial Sequence
  Synthetic oligonucleotide
gcatagctttacgcttcggcgatgcccgat

SEQ ID NO: 410724 - DNA, 30 bp, Artificial Sequence
  Synthetic oligonucleotide
atgcgaaaatttggttctaatgctcccgat

SEQ ID NO: 410725 - DNA, 30 bp, Artificial Sequence
  Synthetic oligonucleotide
tacacgcatctaccccactcgacagccgat

SEQ ID NO: 410726 - DNA, 30 bp, Artificial Sequence
  Synthetic oligonucleotide
gagaacaaaacacccgggggagaatccgat

SEQ ID NO: 410727 - DNA, 30 bp, Artificial Sequence
  Synthetic oligonucleotide
ataagcctccctttgaaagtagaatccgat

SEQ ID NO: 410728 - DNA, 30 bp, Artificial Sequence
  Synthetic oligonucleotide
gagatgaaaccaattcgaactttatccgat

SEQ ID NO: 410729 - DNA, 30 bp, Artificial Sequence
  Synthetic oligonucleotide
ataagcgatcaacttagaggtgcctccgat

SEQ ID NO: 410730 - DNA, 30 bp, Artificial Sequence
  Synthetic oligonucleotide
ctaagcggttcacattacctccgctccgat

SEQ ID NO: 410731 - DNA, 30 bp, Artificial Sequence
  Synthetic oligonucleotide
tttgtaacattaaagccaagcgtctccgat

SEQ ID NO: 410732 - DNA, 30 bp, Artificial Sequence
  Synthetic oligonucleotide
ctttacacgccttgaggtaatacaagcgat

SEQ ID NO: 410733 - DNA, 30 bp, Artificial Sequence
  Synthetic oligonucleotide
atcgcacgggatcttgatacgcgaagcgat

SEQ ID NO: 410734 - DNA, 30 bp, Artificial Sequence
  Synthetic oligonucleotide
taagcaggtctatatgtcctacccagcgat

SEQ ID NO: 410735 - DNA, 30 bp, Artificial Sequence
  Synthetic oligonucleotide
gatgtggcgagtaccaccgatggcagcgat

SEQ ID NO: 410736 - DNA, 30 bp, Artificial Sequence
  Synthetic oligonucleotide
cagtattactaccccgtccgggagagcgat

SEQ ID NO: 410737 - DNA, 30 bp, Artificial Sequence
  Synthetic oligonucleotide
tatacgtttactgttcgaacatagagcgat

SEQ ID NO: 410738 - DNA, 30 bp, Artificial Sequence
  Synthetic oligonucleotide
tcgaaggtccgcagaattcaaatgagcgat

SEQ ID NO: 410739 - DNA, 30 bp, Artificial Sequence
  Synthetic oligonucleotide
acctactgtaagctcgcattcatgagcgat

SEQ ID NO: 410740 - DNA, 29 bp, Artificial Sequence
  Synthetic oligonucleotide
agtctgcactcgagcacttacgacgcgat

SEQ ID NO: 410741 - DNA, 30 bp, Artificial Sequence
  Synthetic oligonucleotide
gagttgaaagcgattggcatttgacgcgat

SEQ ID NO: 410742 - DNA, 30 bp, Artificial Sequence
  Synthetic oligonucleotide
tgccaaaggccgtgctctacgttccgcgat

SEQ ID NO: 410743 - DNA, 30 bp, Artificial Sequence
  Synthetic oligonucleotide
aaatctgataggacaacatgtgctcgcgat

SEQ ID NO: 410744 - DNA, 30 bp, Artificial Sequence
  Synthetic oligonucleotide
attggaccaattgcaccttactctcgcgat

SEQ ID NO: 410745 - DNA, 30 bp, Artificial Sequence
  Synthetic oligonucleotide
ccggcgggggcgtcgcaatcgtcaggcgat

SEQ ID NO: 410746 - DNA, 30 bp, Artificial Sequence
  Synthetic oligonucleotide
atgccccttacgcgttgaccatgaggcgat

SEQ ID NO: 410747 - DNA, 30 bp, Artificial Sequence
  Synthetic oligonucleotide
acgcctatccttataggccgacacggcgat

SEQ ID NO: 410748 - DNA, 30 bp, Artificial Sequence
  Synthetic oligonucleotide
caagccaagcccgcgtttatcgagggcgat

SEQ ID NO: 410749 - DNA, 30 bp, Artificial Sequence
  Synthetic oligonucleotide
ggaagtgttacgaggccatgacgatgcgat

SEQ ID NO: 410750 - DNA, 30 bp, Artificial Sequence
  Synthetic oligonucleotide
tcgcggcgaggcggggtacgagcctgcgat

SEQ ID NO: 410751 - DNA, 30 bp, Artificial Sequence
  Synthetic oligonucleotide
attaagcttaagtactttaaagagtgcgat

SEQ ID NO: 410752 - DNA, 30 bp, Artificial Sequence
  Synthetic oligonucleotide
atctcttggtggtcggcgcgagtttgcgat

SEQ ID NO: 410753 - DNA, 30 bp, Artificial Sequence
  Synthetic oligonucleotide
ccaggtaaacatctgcttcgggcaatcgat

SEQ ID NO: 410754 - DNA, 30 bp, Artificial Sequence
  Synthetic oligonucleotide
cgatccaccaacgcttggtctgcaatcgat

SEQ ID NO: 410755 - DNA, 30 bp, Artificial Sequence
  Synthetic oligonucleotide
ttaggcagatacctaatgtaggtaatcgat

SEQ ID NO: 410756 - DNA, 30 bp, Artificial Sequence
  Synthetic oligonucleotide
atggctgttaatgttggtccattaatcgat

SEQ ID NO: 410757 - DNA, 30 bp, Artificial Sequence
  Synthetic oligonucleotide
taaaattacttctatgtcggccccatcgat

SEQ ID NO: 410758 - DNA, 30 bp, Artificial Sequence
  Synthetic oligonucleotide
agttgcgtaagtgaccacggcagcatcgat

SEQ ID NO: 410759 - DNA, 30 bp, Artificial Sequence
  Synthetic oligonucleotide
aggcgagcagcgggccatcctagcatcgat

SEQ ID NO: 410760 - DNA, 30 bp, Artificial Sequence
  Synthetic oligonucleotide
ggacgttacgcaatactccgatggatcgat

SEQ ID NO: 410761 - DNA, 30 bp, Artificial Sequence
  Synthetic oligonucleotide
acggtaagatcgcggccccgaatcctcgat

SEQ ID NO: 410762 - DNA, 30 bp, Artificial Sequence
  Synthetic oligonucleotide
tctaagcatagactgatggagtatctcgat

SEQ ID NO: 410763 - DNA, 30 bp, Artificial Sequence
  Synthetic oligonucleotide
tttggcttaacgtctaaagtagctctcgat

SEQ ID NO: 410764 - DNA, 30 bp, Artificial Sequence
  Synthetic oligonucleotide
acggggctggcagagcgggctggtctcgat

SEQ ID NO: 410765 - DNA, 30 bp, Artificial Sequence
  Synthetic oligonucleotide
gttcaaatattagtgtaggagacagtcgat

SEQ ID NO: 410766 - DNA, 30 bp, Artificial Sequence
  Synthetic oligonucleotide
tatcggcaacgaaaatgttgtagagtcgat

SEQ ID NO: 410767 - DNA, 30 bp, Artificial Sequence
  Synthetic oligonucleotide
ataaaagaccagcaccgtatctacgtcgat

SEQ ID NO: 410768 - DNA, 30 bp, Artificial Sequence
  Synthetic oligonucleotide
ctgtggggtatcatcctattcgaggtcgat

SEQ ID NO: 410769 - DNA, 30 bp, Artificial Sequence
  Synthetic oligonucleotide
caacgcttgactatcggtatgtatgtcgat

SEQ ID NO: 410770 - DNA, 30 bp, Artificial Sequence
  Synthetic oligonucleotide
aaggttagacagaagcgtttgcctgtcgat

SEQ ID NO: 410771 - DNA, 30 bp, Artificial Sequence
  Synthetic oligonucleotide
ttttcatcggaagtagtgagctctgtcgat

SEQ ID NO: 410772 - DNA, 30 bp, Artificial Sequence
  Synthetic oligonucleotide
tcttcgcgatagcagtccaagtacttcgat

SEQ ID NO: 410773 - DNA, 30 bp, Artificial Sequence
  Synthetic oligonucleotide
gttggagggatatttaggggactcttcgat

SEQ ID NO: 410774 - DNA, 30 bp, Artificial Sequence
  Synthetic oligonucleotide
tacctaacgttttgggcttttgttttcgat

SEQ ID NO: 410775 - DNA, 30 bp, Artificial Sequence
  Synthetic oligonucleotide
gaactcggacctgtatctcacttcaaggat

SEQ ID NO: 410776 - DNA, 30 bp, Artificial Sequence
  Synthetic oligonucleotide
cgggttcagattctatgttgcacgaaggat

SEQ ID NO: 410777 - DNA, 30 bp, Artificial Sequence
  Synthetic oligonucleotide
ccaccagggctttagggtccacggaaggat

SEQ ID NO: 410778 - DNA, 30 bp, Artificial Sequence
  Synthetic oligonucleotide
gtagcggtgatgggattaacctggaaggat

SEQ ID NO: 410779 - DNA, 30 bp, Artificial Sequence
  Synthetic oligonucleotide
ccaattaaattaattaccgtcatgaaggat

SEQ ID NO: 410780 - DNA, 30 bp, Artificial Sequence
  Synthetic oligonucleotide
cttattcatagggtggtgaacaataaggat

SEQ ID NO: 410781 - DNA, 30 bp, Artificial Sequence
  Synthetic oligonucleotide
tcaaagcggacgctgcgccctattaaggat

SEQ ID NO: 410782 - DNA, 30 bp, Artificial Sequence
  Synthetic oligonucleotide
gcgcttgaaactcgtctaacggaacaggat

SEQ ID NO: 410783 - DNA, 30 bp, Artificial Sequence
  Synthetic oligonucleotide
ctaaggcacgcttgtgtcaatatacaggat

SEQ ID NO: 410784 - DNA, 31 bp, Artificial Sequence
  Synthetic oligonucleotide
gttggttaagttggatctcgttatacaggat

SEQ ID NO: 410785 - DNA, 30 bp, Artificial Sequence
  Synthetic oligonucleotide
ctcaccggcaggcacccgcgacggcaggat

SEQ ID NO: 410786 - DNA, 30 bp, Artificial Sequence
  Synthetic oligonucleotide
gttgggtgtgacgtgggcgtgtggcaggat

SEQ ID NO: 410787 - DNA, 30 bp, Artificial Sequence
  Synthetic oligonucleotide
ggcgctgtaggcagagccactactcaggat

SEQ ID NO: 410788 - DNA, 30 bp, Artificial Sequence
  Synthetic oligonucleotide
tcgcgtgtaccctggtcgaccgctcaggat

SEQ ID NO: 410789 - DNA, 30 bp, Artificial Sequence
  Synthetic oligonucleotide
tcagtggcacccctcatcaggtctcaggat

SEQ ID NO: 410790 - DNA, 30 bp, Artificial Sequence
  Synthetic oligonucleotide
ggctaagtatcttattgccaaatagaggat

SEQ ID NO: 410791 - DNA, 30 bp, Artificial Sequence
  Synthetic oligonucleotide
tacccagctgcgattcctggtcatgaggat

SEQ ID NO: 410792 - DNA, 30 bp, Artificial Sequence
  Synthetic oligonucleotide
gccaacattagattggaatgtttataggat

SEQ ID NO: 410793 - DNA, 30 bp, Artificial Sequence
  Synthetic oligonucleotide
atcggaggattaatgcaatagcgctaggat

SEQ ID NO: 410794 - DNA, 30 bp, Artificial Sequence
  Synthetic oligonucleotide
cccgggactagatgggtgacaccttaggat

SEQ ID NO: 410795 - DNA, 30 bp, Artificial Sequence
  Synthetic oligonucleotide
gacgcggctatatgggggtcttgttaggat

SEQ ID NO: 410796 - DNA, 30 bp, Artificial Sequence
  Synthetic oligonucleotide
tgacgtagatactgcatacggccaacggat

SEQ ID NO: 410797 - DNA, 30 bp, Artificial Sequence
  Synthetic oligonucleotide
cagctgtgcgggagattccctgcaacggat

SEQ ID NO: 410798 - DNA, 30 bp, Artificial Sequence
  Synthetic oligonucleotide
acgacgtattcgtcgcgttaacgaacggat

SEQ ID NO: 410799 - DNA, 30 bp, Artificial Sequence
  Synthetic oligonucleotide
tgttcagacttctgggggtaactaacggat

SEQ ID NO: 410800 - DNA, 30 bp, Artificial Sequence
  Synthetic oligonucleotide
gctataatcttagaacttatagccacggat

SEQ ID NO: 410801 - DNA, 30 bp, Artificial Sequence
  Synthetic oligonucleotide
taatggctgcgtctcagtgtcctcacggat

SEQ ID NO: 410802 - DNA, 30 bp, Artificial Sequence
  Synthetic oligonucleotide
ggttggagccccagcatgaattcgacggat

SEQ ID NO: 410803 - DNA, 30 bp, Artificial Sequence
  Synthetic oligonucleotide
agaatatatggccatgaagatttgacggat

SEQ ID NO: 410804 - DNA, 30 bp, Artificial Sequence
  Synthetic oligonucleotide
taaaacattacacgtgtattcggaccggat

SEQ ID NO: 410805 - DNA, 30 bp, Artificial Sequence
  Synthetic oligonucleotide
cttatttattggtgttcctagatcccggat

SEQ ID NO: 410806 - DNA, 29 bp, Artificial Sequence
  Synthetic oligonucleotide
ttccaagtaaccttctcagggatccggat

SEQ ID NO: 410807 - DNA, 30 bp, Artificial Sequence
  Synthetic oligonucleotide
ccaaaataacgcatgggtattattccggat

SEQ ID NO: 410808 - DNA, 30 bp, Artificial Sequence
  Synthetic oligonucleotide
ttttgaaatataatagtcatgacagcggat

SEQ ID NO: 410809 - DNA, 30 bp, Artificial Sequence
  Synthetic oligonucleotide
acgcagctagtttaaatctcaggcgcggat

SEQ ID NO: 410810 - DNA, 30 bp, Artificial Sequence
  Synthetic oligonucleotide
tacttggtgtattgatagtgattcgcggat

SEQ ID NO: 410811 - DNA, 30 bp, Artificial Sequence
  Synthetic oligonucleotide
cttaccaaactgttagctctcgaggcggat

SEQ ID NO: 410812 - DNA, 30 bp, Artificial Sequence
  Synthetic oligonucleotide
tcgcgctaatgcgtgctttgtgaggcggat

SEQ ID NO: 410813 - DNA, 30 bp, Artificial Sequence
  Synthetic oligonucleotide
attctagacttcatcgtgagaccggcggat

SEQ ID NO: 410814 - DNA, 30 bp, Artificial Sequence
  Synthetic oligonucleotide
acacaacgccttgtttttggttcggcggat

SEQ ID NO: 410815 - DNA, 30 bp, Artificial Sequence
  Synthetic oligonucleotide
gctggcccatcccagatgtttcatgcggat

SEQ ID NO: 410816 - DNA, 30 bp, Artificial Sequence
  Synthetic oligonucleotide
gggctcgacaaatcattcgcagaatcggat

SEQ ID NO: 410817 - DNA, 30 bp, Artificial Sequence
  Synthetic oligonucleotide
ccctattccttgataactaggacctcggat

SEQ ID NO: 410818 - DNA, 30 bp, Artificial Sequence
  Synthetic oligonucleotide
aagtgacgagaccgttcagtcccgtcggat

SEQ ID NO: 410819 - DNA, 30 bp, Artificial Sequence
  Synthetic oligonucleotide
cagcaatttggcatattattgcgaagggat

SEQ ID NO: 410820 - DNA, 30 bp, Artificial Sequence
  Synthetic oligonucleotide
gtgaattctcgggaggaccgttgaagggat

SEQ ID NO: 410821 - DNA, 30 bp, Artificial Sequence
  Synthetic oligonucleotide
cagtcccagggtttggtatatcctagggat

SEQ ID NO: 410822 - DNA, 30 bp, Artificial Sequence
  Synthetic oligonucleotide
gagtaattctcccatcccggatctagggat

SEQ ID NO: 410823 - DNA, 30 bp, Artificial Sequence
  Synthetic oligonucleotide
tgccaggccgggatggtccttattagggat

SEQ ID NO: 410824 - DNA, 30 bp, Artificial Sequence
  Synthetic oligonucleotide
cgcttcaattctgattcctgccgacgggat

SEQ ID NO: 410825 - DNA, 30 bp, Artificial Sequence
  Synthetic oligonucleotide
atcgtgacatcggaaacccgctgccgggat

SEQ ID NO: 410826 - DNA, 30 bp, Artificial Sequence
  Synthetic oligonucleotide
cggaggagatcgtggatcgacatgcgggat

SEQ ID NO: 410827 - DNA, 30 bp, Artificial Sequence
  Synthetic oligonucleotide
gtgaagtaccggctggacctatctcgggat

SEQ ID NO: 410828 - DNA, 30 bp, Artificial Sequence
  Synthetic oligonucleotide
gatggggtcgagccacaggtatctcgggat

SEQ ID NO: 410829 - DNA, 30 bp, Artificial Sequence
  Synthetic oligonucleotide
tatgtggtttgtcttcgtaggcgtcgggat

SEQ ID NO: 410830 - DNA, 30 bp, Artificial Sequence
  Synthetic oligonucleotide
cgccgctctagaccgtaacgatcaggggat

SEQ ID NO: 410831 - DNA, 31 bp, Artificial Sequence
  Synthetic oligonucleotide
cccgatgcttctacatactcgatacggggat

SEQ ID NO: 410832 - DNA, 30 bp, Artificial Sequence
  Synthetic oligonucleotide
cattgtacactaccgggttctagcggggat

SEQ ID NO: 410833 - DNA, 30 bp, Artificial Sequence
  Synthetic oligonucleotide
ctctcgcactatgacgtgtgaacgggggat

SEQ ID NO: 410834 - DNA, 30 bp, Artificial Sequence
  Synthetic oligonucleotide
tattcgtgcaacttgcagactctgggggat

SEQ ID NO: 410835 - DNA, 30 bp, Artificial Sequence
  Synthetic oligonucleotide
cggtgggtatgcaggtgggacgatggggat

SEQ ID NO: 410836 - DNA, 30 bp, Artificial Sequence
  Synthetic oligonucleotide
ttgtgacagctcctaatatgtactggggat

SEQ ID NO: 410837 - DNA, 30 bp, Artificial Sequence
  Synthetic oligonucleotide
tgtacacacaattccgctaaaattggggat

SEQ ID NO: 410838 - DNA, 30 bp, Artificial Sequence
  Synthetic oligonucleotide
aaattaaaggggatgagttgagtatgggat

SEQ ID NO: 410839 - DNA, 30 bp, Artificial Sequence
  Synthetic oligonucleotide
tacgatttgttagtcccataattatgggat

SEQ ID NO: 410840 - DNA, 30 bp, Artificial Sequence
  Synthetic oligonucleotide
cgatcttgtacaatctaactacactgggat

SEQ ID NO: 410841 - DNA, 30 bp, Artificial Sequence
  Synthetic oligonucleotide
gttatagtgtatgcattacgttactgggat

SEQ ID NO: 410842 - DNA, 30 bp, Artificial Sequence
  Synthetic oligonucleotide
taaaaccgtgattggtctacaaagtgggat

SEQ ID NO: 410843 - DNA, 30 bp, Artificial Sequence
  Synthetic oligonucleotide
gtgtccggtagttggggtatggagtgggat

SEQ ID NO: 410844 - DNA, 30 bp, Artificial Sequence
  Synthetic oligonucleotide
gggaagtattagttcggctaatagtgggat

SEQ ID NO: 410845 - DNA, 31 bp, Artificial Sequence
  Synthetic oligonucleotide
gtcgcccttaatagtgcgtccttcgtgggat

SEQ ID NO: 410846 - DNA, 30 bp, Artificial Sequence
  Synthetic oligonucleotide
tccggtcaatctagtcgtggacggtgggat

SEQ ID NO: 410847 - DNA, 30 bp, Artificial Sequence
  Synthetic oligonucleotide
cctgctttataacttaattcattgtgggat

SEQ ID NO: 410848 - DNA, 30 bp, Artificial Sequence
  Synthetic oligonucleotide
cgcgacccaataggggtaggacgttgggat

SEQ ID NO: 410849 - DNA, 30 bp, Artificial Sequence
  Synthetic oligonucleotide
actatcgctcgtccacgtagagcaatggat

SEQ ID NO: 410850 - DNA, 30 bp, Artificial Sequence
  Synthetic oligonucleotide
cagtaatttgaatatgcacttcgaatggat

SEQ ID NO: 410851 - DNA, 30 bp, Artificial Sequence
  Synthetic oligonucleotide
ccagcgtcttaaatgtaaaatcccatggat

SEQ ID NO: 410852 - DNA, 30 bp, Artificial Sequence
  Synthetic oligonucleotide
tcagctaccatggtaggatgacgcatggat

SEQ ID NO: 410853 - DNA, 30 bp, Artificial Sequence
  Synthetic oligonucleotide
atatgaggaggtagtgtgaccctcatggat

SEQ ID NO: 410854 - DNA, 30 bp, Artificial Sequence
  Synthetic oligonucleotide
tttgcatgctccagagggggggtcatggat

SEQ ID NO: 410855 - DNA, 30 bp, Artificial Sequence
  Synthetic oligonucleotide
aaggctaaaactataggatccgggatggat

SEQ ID NO: 410856 - DNA, 30 bp, Artificial Sequence
  Synthetic oligonucleotide
cgatcgtttatgtgtatgcgtgggatggat

SEQ ID NO: 410857 - DNA, 30 bp, Artificial Sequence
  Synthetic oligonucleotide
acgaattccgtccgcagaagttggatggat

SEQ ID NO: 410858 - DNA, 30 bp, Artificial Sequence
  Synthetic oligonucleotide
ggcgcactcgtagcgcacactttgatggat

SEQ ID NO: 410859 - DNA, 30 bp, Artificial Sequence
  Synthetic oligonucleotide
aaacatgcgtaagcaaagttatatatggat

SEQ ID NO: 410860 - DNA, 30 bp, Artificial Sequence
  Synthetic oligonucleotide
agtaggagcttgggaccagatcctatggat

SEQ ID NO: 410861 - DNA, 30 bp, Artificial Sequence
  Synthetic oligonucleotide
atagtacacggtataggtgtttaactggat

SEQ ID NO: 410862 - DNA, 30 bp, Artificial Sequence
  Synthetic oligonucleotide
tttgtcaggcgggggtcatagatcctggat

SEQ ID NO: 410863 - DNA, 29 bp, Artificial Sequence
  Synthetic oligonucleotide
attggaccctgatggctgttaaagtggat

SEQ ID NO: 410864 - DNA, 30 bp, Artificial Sequence
  Synthetic oligonucleotide
tgacctaaaccgtcgcgggaacaagtggat

SEQ ID NO: 410865 - DNA, 30 bp, Artificial Sequence
  Synthetic oligonucleotide
tttaggaccttggaggagtaggcagtggat

SEQ ID NO: 410866 - DNA, 30 bp, Artificial Sequence
  Synthetic oligonucleotide
gggcctatgcgcggggggactctagtggat

SEQ ID NO: 410867 - DNA, 30 bp, Artificial Sequence
  Synthetic oligonucleotide
gaaagtgccatttatccttgttcggtggat

SEQ ID NO: 410868 - DNA, 30 bp, Artificial Sequence
  Synthetic oligonucleotide
tacagggtgaggtatctattcttggtggat

SEQ ID NO: 410869 - DNA, 30 bp, Artificial Sequence
  Synthetic oligonucleotide
atacgggtcgctgaaatgtgtttggtggat

SEQ ID NO: 410870 - DNA, 30 bp, Artificial Sequence
  Synthetic oligonucleotide
atcatcctgtaaagccgaacttaattggat

SEQ ID NO: 410871 - DNA, 30 bp, Artificial Sequence
  Synthetic oligonucleotide
ttctccttgtctcttaaggatccattggat

SEQ ID NO: 410872 - DNA, 30 bp, Artificial Sequence
  Synthetic oligonucleotide
tttcgggtctggtataactagtcattggat

SEQ ID NO: 410873 - DNA, 30 bp, Artificial Sequence
  Synthetic oligonucleotide
ataatattcctgttggttttagtattggat

SEQ ID NO: 410874 - DNA, 30 bp, Artificial Sequence
  Synthetic oligonucleotide
tgttgatactgcacgaagtaattcttggat

SEQ ID NO: 410875 - DNA, 30 bp, Artificial Sequence
  Synthetic oligonucleotide
aggcaaattgatatggtgagcaggttggat

SEQ ID NO: 410876 - DNA, 30 bp, Artificial Sequence
  Synthetic oligonucleotide
tgtcggacagttaacgtaagacgtttggat

SEQ ID NO: 410877 - DNA, 30 bp, Artificial Sequence
  Synthetic oligonucleotide
gataacgcaacgtgcctctaaataaatgat

SEQ ID NO: 410878 - DNA, 30 bp, Artificial Sequence
  Synthetic oligonucleotide
tcccttcccctgtatggcagtctaaatgat

SEQ ID NO: 410879 - DNA, 30 bp, Artificial Sequence
  Synthetic oligonucleotide
tagcgaatctaagtaggtcgttggaatgat

SEQ ID NO: 410880 - DNA, 30 bp, Artificial Sequence
  Synthetic oligonucleotide
agtgtattgacgcaacccttagataatgat

SEQ ID NO: 410881 - DNA, 30 bp, Artificial Sequence
  Synthetic oligonucleotide
gtcaatcctttgggcagatggacacatgat

SEQ ID NO: 410882 - DNA, 31 bp, Artificial Sequence
  Synthetic oligonucleotide
ccggagatctaggatggatgtatcgcatgat

SEQ ID NO: 410883 - DNA, 30 bp, Artificial Sequence
  Synthetic oligonucleotide
gtacactggcagtgcacttacaggcatgat

SEQ ID NO: 410884 - DNA, 30 bp, Artificial Sequence
  Synthetic oligonucleotide
tagtcaaagaccttaacgcacaaagatgat

SEQ ID NO: 410885 - DNA, 30 bp, Artificial Sequence
  Synthetic oligonucleotide
atatgtggcatctctgcgattggagatgat

SEQ ID NO: 410886 - DNA, 30 bp, Artificial Sequence
  Synthetic oligonucleotide
ttgccaaccggaccggactgattagatgat

SEQ ID NO: 410887 - DNA, 30 bp, Artificial Sequence
  Synthetic oligonucleotide
aaaaattaagttccgacatgtcacgatgat

SEQ ID NO: 410888 - DNA, 30 bp, Artificial Sequence
  Synthetic oligonucleotide
ggttattgctaatgtctacaagaggatgat

SEQ ID NO: 410889 - DNA, 25 bp, Artificial Sequence
  Synthetic oligonucleotide
tagatgccggttgctacctgatgat

SEQ ID NO: 410890 - DNA, 30 bp, Artificial Sequence
  Synthetic oligonucleotide
caagtcgcacgatcaacaggcgttgatgat

SEQ ID NO: 410891 - DNA, 30 bp, Artificial Sequence
  Synthetic oligonucleotide
ttaaacgagcgtcggagcacaacatatgat

SEQ ID NO: 410892 - DNA, 30 bp, Artificial Sequence
  Synthetic oligonucleotide
gggctgagcttgtatagcgtaggatatgat

SEQ ID NO: 410893 - DNA, 30 bp, Artificial Sequence
  Synthetic oligonucleotide
caaatattgcgttcgacgctatgatatgat

SEQ ID NO: 410894 - DNA, 29 bp, Artificial Sequence
  Synthetic oligonucleotide
gcgactgcttctacgactgttgctatgat

SEQ ID NO: 410895 - DNA, 30 bp, Artificial Sequence
  Synthetic oligonucleotide
cacgttccggacatcctcaggaagtatgat

SEQ ID NO: 410896 - DNA, 30 bp, Artificial Sequence
  Synthetic oligonucleotide
tttctgccgggatcatctcgggagtatgat

SEQ ID NO: 410897 - DNA, 30 bp, Artificial Sequence
  Synthetic oligonucleotide
gaagagactggacccgcaccatcgtatgat

SEQ ID NO: 410898 - DNA, 30 bp, Artificial Sequence
  Synthetic oligonucleotide
tgcgtgattgttaaaaagtagttgtatgat

SEQ ID NO: 410899 - DNA, 29 bp, Artificial Sequence
  Synthetic oligonucleotide
ataccgaaactgtctgggctgcttatgat

SEQ ID NO: 410900 - DNA, 30 bp, Artificial Sequence
  Synthetic oligonucleotide
agatgtccttggggggggacattttatgat

SEQ ID NO: 410901 - DNA, 30 bp, Artificial Sequence
  Synthetic oligonucleotide
ttatagtagtggcgttatgtcgcaactgat

SEQ ID NO: 410902 - DNA, 30 bp, Artificial Sequence
  Synthetic oligonucleotide
gtgaatggagggcagttgtatcgtactgat

SEQ ID NO: 410903 - DNA, 30 bp, Artificial Sequence
  Synthetic oligonucleotide
cataaagtgattaagtcggcgtttactgat

SEQ ID NO: 410904 - DNA, 30 bp, Artificial Sequence
  Synthetic oligonucleotide
cattctgcagcgacaccattcacacctgat

SEQ ID NO: 410905 - DNA, 30 bp, Artificial Sequence
  Synthetic oligonucleotide
tagggagtgtttgttcggtatcaccctgat

SEQ ID NO: 410906 - DNA, 30 bp, Artificial Sequence
  Synthetic oligonucleotide
gcaatattgaccgattctcagcggcctgat

SEQ ID NO: 410907 - DNA, 30 bp, Artificial Sequence
  Synthetic oligonucleotide
agtgtcgtctcgcacgtagatgacgctgat

SEQ ID NO: 410908 - DNA, 30 bp, Artificial Sequence
  Synthetic oligonucleotide
tcttcatagatactttgtaactctgctgat

SEQ ID NO: 410909 - DNA, 30 bp, Artificial Sequence
  Synthetic oligonucleotide
tgagtcgacggttaatcgtgtcgtgctgat

SEQ ID NO: 410910 - DNA, 30 bp, Artificial Sequence
  Synthetic oligonucleotide
tacgccagacagggctgatatgtatctgat

SEQ ID NO: 410911 - DNA, 30 bp, Artificial Sequence
  Synthetic oligonucleotide
gctaaatgcgctagagatctgtattctgat

SEQ ID NO: 410912 - DNA, 30 bp, Artificial Sequence
  Synthetic oligonucleotide
cagctttcagtttaggtggttatttctgat

SEQ ID NO: 410913 - DNA, 30 bp, Artificial Sequence
  Synthetic oligonucleotide
gaaattcacacattatgaccgaacagtgat

SEQ ID NO: 410914 - DNA, 30 bp, Artificial Sequence
  Synthetic oligonucleotide
cggttggagactagacccttacgcagtgat

SEQ ID NO: 410915 - DNA, 30 bp, Artificial Sequence
  Synthetic oligonucleotide
acgactcttctgttattaggcttcagtgat

SEQ ID NO: 410916 - DNA, 30 bp, Artificial Sequence
  Synthetic oligonucleotide
tttccgcgcagcgtaaaacatcggagtgat

SEQ ID NO: 410917 - DNA, 30 bp, Artificial Sequence
  Synthetic oligonucleotide
gagggcccgttctctctggtagggagtgat

SEQ ID NO: 410918 - DNA, 30 bp, Artificial Sequence
  Synthetic oligonucleotide
agtgtcaatcgtaattgacttccacgtgat

SEQ ID NO: 410919 - DNA, 30 bp, Artificial Sequence
  Synthetic oligonucleotide
tgatgcgtagactttgatggtagccgtgat

SEQ ID NO: 410920 - DNA, 30 bp, Artificial Sequence
  Synthetic oligonucleotide
tgcaagtgttcacttgtcggacgccgtgat

SEQ ID NO: 410921 - DNA, 30 bp, Artificial Sequence
  Synthetic oligonucleotide
tcgcgaggtctaacctaagacgagcgtgat

SEQ ID NO: 410922 - DNA, 30 bp, Artificial Sequence
  Synthetic oligonucleotide
ttcgatgtataaagtcttgctttgcgtgat

SEQ ID NO: 410923 - DNA, 30 bp, Artificial Sequence
  Synthetic oligonucleotide
gcacataggatcccatggacgttaggtgat

SEQ ID NO: 410924 - DNA, 30 bp, Artificial Sequence
  Synthetic oligonucleotide
gttatccgctggcaagctgaaaacggtgat

SEQ ID NO: 410925 - DNA, 30 bp, Artificial Sequence
  Synthetic oligonucleotide
caaactataccgccagaagtcaacggtgat

SEQ ID NO: 410926 - DNA, 30 bp, Artificial Sequence
  Synthetic oligonucleotide
aacggctgaagaatttcgccgaacggtgat

SEQ ID NO: 410927 - DNA, 30 bp, Artificial Sequence
  Synthetic oligonucleotide
ggtcaattctgttctcagtcgaagggtgat

SEQ ID NO: 410928 - DNA, 30 bp, Artificial Sequence
  Synthetic oligonucleotide
tatttttgggcctgaagcaagtggggtgat

SEQ ID NO: 410929 - DNA, 30 bp, Artificial Sequence
  Synthetic oligonucleotide
cacgttggcattttaaacaaagtgggtgat

SEQ ID NO: 410930 - DNA, 30 bp, Artificial Sequence
  Synthetic oligonucleotide
taaattgtccaccggatcttaagtggtgat

SEQ ID NO: 410931 - DNA, 30 bp, Artificial Sequence
  Synthetic oligonucleotide
tcgaacaacatttttcgcagtcttggtgat

SEQ ID NO: 410932 - DNA, 30 bp, Artificial Sequence
  Synthetic oligonucleotide
cttgtataaggagagagatcaggatgtgat

SEQ ID NO: 410933 - DNA, 30 bp, Artificial Sequence
  Synthetic oligonucleotide
agaaaattctatattttacgggtatgtgat

SEQ ID NO: 410934 - DNA, 30 bp, Artificial Sequence
  Synthetic oligonucleotide
gattacgtctccaaagaatgacactgtgat

SEQ ID NO: 410935 - DNA, 30 bp, Artificial Sequence
  Synthetic oligonucleotide
gtggcgcaatacatagggcgctgctgtgat

SEQ ID NO: 410936 - DNA, 30 bp, Artificial Sequence
  Synthetic oligonucleotide
ttttaagggatgccggggggcctctgtgat

SEQ ID NO: 410937 - DNA, 30 bp, Artificial Sequence
  Synthetic oligonucleotide
tgaggcctggcacacccagttgtctgtgat

SEQ ID NO: 410938 - DNA, 30 bp, Artificial Sequence
  Synthetic oligonucleotide
ttaggatgatcacattgattacattgtgat

SEQ ID NO: 410939 - DNA, 30 bp, Artificial Sequence
  Synthetic oligonucleotide
ctgtatatgaccacatcacaatattgtgat

SEQ ID NO: 410940 - DNA, 30 bp, Artificial Sequence
  Synthetic oligonucleotide
tttcacgttcgttcagttttcggttgtgat

SEQ ID NO: 410941 - DNA, 30 bp, Artificial Sequence
  Synthetic oligonucleotide
attgaacggagatccacaggacaaattgat

SEQ ID NO: 410942 - DNA, 30 bp, Artificial Sequence
  Synthetic oligonucleotide
aaatatgcacgggcctcgctgcaaattgat

SEQ ID NO: 410943 - DNA, 30 bp, Artificial Sequence
  Synthetic oligonucleotide
caccgccattgcggtcatagaggaattgat

SEQ ID NO: 410944 - DNA, 30 bp, Artificial Sequence
  Synthetic oligonucleotide
atgatcactttagcgggcgtcggaattgat

SEQ ID NO: 410945 - DNA, 30 bp, Artificial Sequence
  Synthetic oligonucleotide
gcatcccagagccaattggctggaattgat

SEQ ID NO: 410946 - DNA, 30 bp, Artificial Sequence
  Synthetic oligonucleotide
ccctcaataaggggtcacctctgcattgat

SEQ ID NO: 410947 - DNA, 30 bp, Artificial Sequence
  Synthetic oligonucleotide
atcaggccgccacatttggacgcgattgat

SEQ ID NO: 410948 - DNA, 30 bp, Artificial Sequence
  Synthetic oligonucleotide
gatctccgtggttgggtgctctggattgat

SEQ ID NO: 410949 - DNA, 30 bp, Artificial Sequence
  Synthetic oligonucleotide
gccaagactaggggaaaactagtgattgat

SEQ ID NO: 410950 - DNA, 30 bp, Artificial Sequence
  Synthetic oligonucleotide
gtatcaagaggaatgctcatcttacttgat

SEQ ID NO: 410951 - DNA, 30 bp, Artificial Sequence
  Synthetic oligonucleotide
ctagcgcatttttgatcatttcaccttgat

SEQ ID NO: 410952 - DNA, 30 bp, Artificial Sequence
  Synthetic oligonucleotide
tacggtgatctgggtggatgcaagcttgat

SEQ ID NO: 410953 - DNA, 30 bp, Artificial Sequence
  Synthetic oligonucleotide
gtagaacttcgtcaaaggcacaaagttgat

SEQ ID NO: 410954 - DNA, 30 bp, Artificial Sequence
  Synthetic oligonucleotide
taccgtaagatgcagaaaatccaagttgat

SEQ ID NO: 410955 - DNA, 30 bp, Artificial Sequence
  Synthetic oligonucleotide
agtttgaaaatctctgcgtcttcagttgat

SEQ ID NO: 410956 - DNA, 30 bp, Artificial Sequence
  Synthetic oligonucleotide
ctagttgttaaggcccgaatggtagttgat

SEQ ID NO: 410957 - DNA, 30 bp, Artificial Sequence
  Synthetic oligonucleotide
ctaacagttcaccgaacttgtaacgttgat

SEQ ID NO: 410958 - DNA, 30 bp, Artificial Sequence
  Synthetic oligonucleotide
tcgagagaggtgtcagtcagtgacgttgat

SEQ ID NO: 410959 - DNA, 30 bp, Artificial Sequence
  Synthetic oligonucleotide
gtgtgctatcgtacgcgataaagcgttgat

SEQ ID NO: 410960 - DNA, 30 bp, Artificial Sequence
  Synthetic oligonucleotide
acggaaatttgtttcacgcacaaggttgat

SEQ ID NO: 410961 - DNA, 30 bp, Artificial Sequence
  Synthetic oligonucleotide
acgctgggggtcctattgcgggcggttgat

SEQ ID NO: 410962 - DNA, 30 bp, Artificial Sequence
  Synthetic oligonucleotide
tataaggaacaaccggctctcctggttgat

SEQ ID NO: 410963 - DNA, 30 bp, Artificial Sequence
  Synthetic oligonucleotide
tatactgggcgatcgttacacaatgttgat

SEQ ID NO: 410964 - DNA, 30 bp, Artificial Sequence
  Synthetic oligonucleotide
aagcgttgtctattagctaaatatgttgat

SEQ ID NO: 410965 - DNA, 30 bp, Artificial Sequence
  Synthetic oligonucleotide
tttataacaatgggtacactagctgttgat

SEQ ID NO: 410966 - DNA, 30 bp, Artificial Sequence
  Synthetic oligonucleotide
aattaatggctacacacgggccgtgttgat

SEQ ID NO: 410967 - DNA, 30 bp, Artificial Sequence
  Synthetic oligonucleotide
taaactccaaaggaggtttcgaaatttgat

SEQ ID NO: 410968 - DNA, 30 bp, Artificial Sequence
  Synthetic oligonucleotide
tacattaagctgcacgccatgacatttgat

SEQ ID NO: 410969 - DNA, 30 bp, Artificial Sequence
  Synthetic oligonucleotide
cacgccgtaatttttatccgttcatttgat

SEQ ID NO: 410970 - DNA, 30 bp, Artificial Sequence
  Synthetic oligonucleotide
gtccctgagtgcgcaatagatcgatttgat

SEQ ID NO: 410971 - DNA, 30 bp, Artificial Sequence
  Synthetic oligonucleotide
ttacccaatccacctgaagtccagtttgat

SEQ ID NO: 410972 - DNA, 30 bp, Artificial Sequence
  Synthetic oligonucleotide
gaaaaggcaggtggtcaggatcagtttgat

SEQ ID NO: 410973 - DNA, 30 bp, Artificial Sequence
  Synthetic oligonucleotide
gagaagacattgatatgtcaggagtttgat

SEQ ID NO: 410974 - DNA, 30 bp, Artificial Sequence
  Synthetic oligonucleotide
atgcacaatggggttcatgggagttttgat

SEQ ID NO: 410975 - DNA, 30 bp, Artificial Sequence
  Synthetic oligonucleotide
ggacaattgcgaacctgttttggttttgat

SEQ ID NO: 410976 - DNA, 30 bp, Artificial Sequence
  Synthetic oligonucleotide
tgggatgatcgctcaagtcactgttttgat

SEQ ID NO: 410977 - DNA, 30 bp, Artificial Sequence
  Synthetic oligonucleotide
ccatgttggttttctagcccgtaaaaatat

SEQ ID NO: 410978 - DNA, 30 bp, Artificial Sequence
  Synthetic oligonucleotide
catggctgctcgcagcgccgaataaaatat

SEQ ID NO: 410979 - DNA, 30 bp, Artificial Sequence
  Synthetic oligonucleotide
gagcgaactgtacctatagctaacaaatat

SEQ ID NO: 410980 - DNA, 30 bp, Artificial Sequence
  Synthetic oligonucleotide
gggcgtgggctcagagcgggcaccaaatat

SEQ ID NO: 410981 - DNA, 30 bp, Artificial Sequence
  Synthetic oligonucleotide
ctacctcacgtcacagagtcagagaaatat

SEQ ID NO: 410982 - DNA, 30 bp, Artificial Sequence
  Synthetic oligonucleotide
aatggataagtgtttagccccgagaaatat

SEQ ID NO: 410983 - DNA, 30 bp, Artificial Sequence
  Synthetic oligonucleotide
cgggaattaactcaacgaaaaaggaaatat

SEQ ID NO: 410984 - DNA, 30 bp, Artificial Sequence
  Synthetic oligonucleotide
tccaggttcattggagaataacataaatat

SEQ ID NO: 410985 - DNA, 30 bp, Artificial Sequence
  Synthetic oligonucleotide
atttctccagcgcgattacggactaaatat

SEQ ID NO: 410986 - DNA, 30 bp, Artificial Sequence
  Synthetic oligonucleotide
ggttacgcacatccagcttgcagccaatat

SEQ ID NO: 410987 - DNA, 30 bp, Artificial Sequence
  Synthetic oligonucleotide
tgataaggagacttattgagtccgcaatat

SEQ ID NO: 410988 - DNA, 30 bp, Artificial Sequence
  Synthetic oligonucleotide
gtaggttctgcgcgtactgcttcgcaatat

SEQ ID NO: 410989 - DNA, 30 bp, Artificial Sequence
  Synthetic oligonucleotide
actagatctccgctgggtaactggcaatat

SEQ ID NO: 410990 - DNA, 30 bp, Artificial Sequence
  Synthetic oligonucleotide
acgcatctcttttaaggtggcgctcaatat

SEQ ID NO: 410991 - DNA, 30 bp, Artificial Sequence
  Synthetic oligonucleotide
gcgtttatcacatcaagtaatcttcaatat

SEQ ID NO: 410992 - DNA, 30 bp, Artificial Sequence
  Synthetic oligonucleotide
atagcccgcgaaacggcctgcaaagaatat

SEQ ID NO: 410993 - DNA, 30 bp, Artificial Sequence
  Synthetic oligonucleotide
gacaaatgtggcaaaattagtcaagaatat

SEQ ID NO: 410994 - DNA, 30 bp, Artificial Sequence
  Synthetic oligonucleotide
attgcattgtagaggctgaaggaagaatat

SEQ ID NO: 410995 - DNA, 30 bp, Artificial Sequence
  Synthetic oligonucleotide
ccgcaccctcaattcccgaagttagaatat

SEQ ID NO: 410996 - DNA, 30 bp, Artificial Sequence
  Synthetic oligonucleotide
acttggttcaaacctggcgcgttagaatat

SEQ ID NO: 410997 - DNA, 30 bp, Artificial Sequence
  Synthetic oligonucleotide
ggggttggattggggactttggccgaatat

SEQ ID NO: 410998 - DNA, 30 bp, Artificial Sequence
  Synthetic oligonucleotide
cccaaagtttctggctgtatacaggaatat

SEQ ID NO: 410999 - DNA, 30 bp, Artificial Sequence
  Synthetic oligonucleotide
cccgcttccggggattgtgggtcggaatat

SEQ ID NO: 411000 - DNA, 30 bp, Artificial Sequence
  Synthetic oligonucleotide
cagattggaatcacgagcaggtatgaatat

SEQ ID NO: 411001 - DNA, 30 bp, Artificial Sequence
  Synthetic oligonucleotide
ccgggttcctaaagcgcaaggcttgaatat

SEQ ID NO: 411002 - DNA, 30 bp, Artificial Sequence
  Synthetic oligonucleotide
ttcaatcgatgtgcgattgaaagataatat

SEQ ID NO: 411003 - DNA, 30 bp, Artificial Sequence
  Synthetic oligonucleotide
cccagagtagagtttagagggaactaatat

SEQ ID NO: 411004 - DNA, 30 bp, Artificial Sequence
  Synthetic oligonucleotide
aatacgccggccaggttaataccgtaatat

SEQ ID NO: 411005 - DNA, 30 bp, Artificial Sequence
  Synthetic oligonucleotide
tgtcatttcctagcactgtggatgtaatat

SEQ ID NO: 411006 - DNA, 30 bp, Artificial Sequence
  Synthetic oligonucleotide
gccaatgagaatgattacgccttgtaatat

SEQ ID NO: 411007 - DNA, 30 bp, Artificial Sequence
  Synthetic oligonucleotide
gaggatggcgcagaaacctcgtattaatat

SEQ ID NO: 411008 - DNA, 30 bp, Artificial Sequence
  Synthetic oligonucleotide
atcggatagcgttgcgtccatacttaatat

SEQ ID NO: 411009 - DNA, 30 bp, Artificial Sequence
  Synthetic oligonucleotide
atgatagtctcgagtgctaggcgttaatat

SEQ ID NO: 411010 - DNA, 30 bp, Artificial Sequence
  Synthetic oligonucleotide
cctggtggccttcctatcctgtgttaatat

SEQ ID NO: 411011 - DNA, 30 bp, Artificial Sequence
  Synthetic oligonucleotide
gccttcgtgtaggctaggacgctttaatat

SEQ ID NO: 411012 - DNA, 30 bp, Artificial Sequence
  Synthetic oligonucleotide
gtttgcaaatcttggaatattgaaacatat

SEQ ID NO: 411013 - DNA, 30 bp, Artificial Sequence
  Synthetic oligonucleotide
gcgacccaaaatgatttatacccaacatat

SEQ ID NO: 411014 - DNA, 30 bp, Artificial Sequence
  Synthetic oligonucleotide
ttacaatatgtttcgcattatataacatat

SEQ ID NO: 411015 - DNA, 30 bp, Artificial Sequence
  Synthetic oligonucleotide
tagatagccaggggtagcaaacccacatat

SEQ ID NO: 411016 - DNA, 30 bp, Artificial Sequence
  Synthetic oligonucleotide
ttagaccggttttcctctcactccacatat

SEQ ID NO: 411017 - DNA, 30 bp, Artificial Sequence
  Synthetic oligonucleotide
cagcctacgtctgcattgagactcacatat

SEQ ID NO: 411018 - DNA, 31 bp, Artificial Sequence
  Synthetic oligonucleotide
cctggtctccgtatcctggaaacagacatat

SEQ ID NO: 411019 - DNA, 30 bp, Artificial Sequence
  Synthetic oligonucleotide
gttttgcggcggcggggagatatgacatat

SEQ ID NO: 411020 - DNA, 30 bp, Artificial Sequence
  Synthetic oligonucleotide
gacacgtcgcaaatgttaggcgctacatat

SEQ ID NO: 411021 - DNA, 30 bp, Artificial Sequence
  Synthetic oligonucleotide
ctcgggactcccgtcttaagtcaaccatat

SEQ ID NO: 411022 - DNA, 31 bp, Artificial Sequence
  Synthetic oligonucleotide
ctataaacaggcgcgtaaggttctaccatat

SEQ ID NO: 411023 - DNA, 30 bp, Artificial Sequence
  Synthetic oligonucleotide
tgtgaccccgattatcttcggcccccatat

SEQ ID NO: 411024 - DNA, 30 bp, Artificial Sequence
  Synthetic oligonucleotide
cttgggcaaaatagggtcttcagcccatat

SEQ ID NO: 411025 - DNA, 30 bp, Artificial Sequence
  Synthetic oligonucleotide
tactaagttgccgaccaataacgcccatat

SEQ ID NO: 411026 - DNA, 30 bp, Artificial Sequence
  Synthetic oligonucleotide
atctatacttagtatcggggccagccatat

SEQ ID NO: 411027 - DNA, 30 bp, Artificial Sequence
  Synthetic oligonucleotide
gtgctgcgagattttctgagttggccatat

SEQ ID NO: 411028 - DNA, 30 bp, Artificial Sequence
  Synthetic oligonucleotide
ccgagcaacgtccggttcccccatccatat

SEQ ID NO: 411029 - DNA, 30 bp, Artificial Sequence
  Synthetic oligonucleotide
gaaataccgcttggaccctgtgatccatat

SEQ ID NO: 411030 - DNA, 30 bp, Artificial Sequence
  Synthetic oligonucleotide
cccatcttgtatgcattccgctgtccatat

SEQ ID NO: 411031 - DNA, 30 bp, Artificial Sequence
  Synthetic oligonucleotide
gccagtttgcgtaccttaaaacttccatat

SEQ ID NO: 411032 - DNA, 30 bp, Artificial Sequence
  Synthetic oligonucleotide
agcctcataactttaatcagtcgagcatat

SEQ ID NO: 411033 - DNA, 30 bp, Artificial Sequence
  Synthetic oligonucleotide
ctaccaggtggcttcaggggcaacgcatat

SEQ ID NO: 411034 - DNA, 31 bp, Artificial Sequence
  Synthetic oligonucleotide
tttaggagagggcattcctattgacgcatat

SEQ ID NO: 411035 - DNA, 30 bp, Artificial Sequence
  Synthetic oligonucleotide
agcggtcggtttggtccccgacccgcatat

SEQ ID NO: 411036 - DNA, 31 bp, Artificial Sequence
  Synthetic oligonucleotide
tccttaagaaacaccgtcccgactcgcatat

SEQ ID NO: 411037 - DNA, 30 bp, Artificial Sequence
  Synthetic oligonucleotide
agatatttcttgcaatcgtaacaggcatat

SEQ ID NO: 411038 - DNA, 30 bp, Artificial Sequence
  Synthetic oligonucleotide
aaccgtaaactttccgattaacgggcatat

SEQ ID NO: 411039 - DNA, 30 bp, Artificial Sequence
  Synthetic oligonucleotide
gtacaactggggcctgaattagttgcatat

SEQ ID NO: 411040 - DNA, 30 bp, Artificial Sequence
  Synthetic oligonucleotide
cagctttacggtgaacccgcataatcatat

SEQ ID NO: 411041 - DNA, 30 bp, Artificial Sequence
  Synthetic oligonucleotide
aacaatgtagagcagaaaatgtaatcatat

SEQ ID NO: 411042 - DNA, 30 bp, Artificial Sequence
  Synthetic oligonucleotide
gctacgcagttccgctgaactgcatcatat

SEQ ID NO: 411043 - DNA, 30 bp, Artificial Sequence
  Synthetic oligonucleotide
tcaggttagttgcccgcatggaactcatat

SEQ ID NO: 411044 - DNA, 30 bp, Artificial Sequence
  Synthetic oligonucleotide
acgggttcgcatcgtcgttggacctcatat

SEQ ID NO: 411045 - DNA, 30 bp, Artificial Sequence
  Synthetic oligonucleotide
ttgcaggagtcggtcgatctgctgtcatat

SEQ ID NO: 411046 - DNA, 30 bp, Artificial Sequence
  Synthetic oligonucleotide
cctctgtaatgagtggttaacttgtcatat

SEQ ID NO: 411047 - DNA, 30 bp, Artificial Sequence
  Synthetic oligonucleotide
catggagcccaataacaattttattcatat

SEQ ID NO: 411048 - DNA, 30 bp, Artificial Sequence
  Synthetic oligonucleotide
tcaattagaacaaattattggacttcatat

SEQ ID NO: 411049 - DNA, 30 bp, Artificial Sequence
  Synthetic oligonucleotide
gattacaaaagagagacttatggttcatat

SEQ ID NO: 411050 - DNA, 30 bp, Artificial Sequence
  Synthetic oligonucleotide
ttagtcgggttagacgtgggagtttcatat

SEQ ID NO: 411051 - DNA, 30 bp, Artificial Sequence
  Synthetic oligonucleotide
tcctctggttccctggaccttcaaagatat

SEQ ID NO: 411052 - DNA, 30 bp, Artificial Sequence
  Synthetic oligonucleotide
gcgtatggttactcgtgggtagacagatat

SEQ ID NO: 411053 - DNA, 30 bp, Artificial Sequence
  Synthetic oligonucleotide
tactcgcgactttcagtagcgacgagatat

SEQ ID NO: 411054 - DNA, 30 bp, Artificial Sequence
  Synthetic oligonucleotide
gtcacatattaaactctcgttgcgagatat

SEQ ID NO: 411055 - DNA, 30 bp, Artificial Sequence
  Synthetic oligonucleotide
cctgcttaattaagggaatacaatagatat

SEQ ID NO: 411056 - DNA, 30 bp, Artificial Sequence
  Synthetic oligonucleotide
ggaaatcttatcaatgaattttatagatat

SEQ ID NO: 411057 - DNA, 30 bp, Artificial Sequence
  Synthetic oligonucleotide
tggcatcgtgatactagtcccactagatat

SEQ ID NO: 411058 - DNA, 30 bp, Artificial Sequence
  Synthetic oligonucleotide
ttctggggataacttgttattgctagatat

SEQ ID NO: 411059 - DNA, 30 bp, Artificial Sequence
  Synthetic oligonucleotide
cactggccgctaccggccttaggtagatat

SEQ ID NO: 411060 - DNA, 30 bp, Artificial Sequence
  Synthetic oligonucleotide
ctgacccgattcggtcgcaagattagatat

SEQ ID NO: 411061 - DNA, 30 bp, Artificial Sequence
  Synthetic oligonucleotide
cactctaagggggtcgggacctaacgatat

SEQ ID NO: 411062 - DNA, 30 bp, Artificial Sequence
  Synthetic oligonucleotide
agcaatgttgacaagccgttttgacgatat

SEQ ID NO: 411063 - DNA, 30 bp, Artificial Sequence
  Synthetic oligonucleotide
taatgtaccgcagcccctttcgtacgatat

SEQ ID NO: 411064 - DNA, 30 bp, Artificial Sequence
  Synthetic oligonucleotide
caatggatataatctgtgcgaacccgatat

SEQ ID NO: 411065 - DNA, 30 bp, Artificial Sequence
  Synthetic oligonucleotide
ttaattgagtcggcaccccatccccgatat

SEQ ID NO: 411066 - DNA, 30 bp, Artificial Sequence
  Synthetic oligonucleotide
aaccgtcatctcagtaaccacgtccgatat

SEQ ID NO: 411067 - DNA, 30 bp, Artificial Sequence
  Synthetic oligonucleotide
atcatcatttcggcgggtttcaagcgatat

SEQ ID NO: 411068 - DNA, 30 bp, Artificial Sequence
  Synthetic oligonucleotide
gaagtctatccgatctgcagccggcgatat

SEQ ID NO: 411069 - DNA, 30 bp, Artificial Sequence
  Synthetic oligonucleotide
ggtaccggcgtatatctcaaggggcgatat

SEQ ID NO: 411070 - DNA, 30 bp, Artificial Sequence
  Synthetic oligonucleotide
tccgattccgcgtctatgatcagtcgatat

SEQ ID NO: 411071 - DNA, 30 bp, Artificial Sequence
  Synthetic oligonucleotide
gataggtagttgacgagctcctgtcgatat

SEQ ID NO: 411072 - DNA, 30 bp, Artificial Sequence
  Synthetic oligonucleotide
tcgacggaattcgaactgtgaattcgatat

SEQ ID NO: 411073 - DNA, 30 bp, Artificial Sequence
  Synthetic oligonucleotide
gaaatggaaacactgacaggcattcgatat

SEQ ID NO: 411074 - DNA, 30 bp, Artificial Sequence
  Synthetic oligonucleotide
tttggaacggcggggtcgcgaacaggatat

SEQ ID NO: 411075 - DNA, 30 bp, Artificial Sequence
  Synthetic oligonucleotide
ctatatgtggagattcagcaccgaggatat

SEQ ID NO: 411076 - DNA, 30 bp, Artificial Sequence
  Synthetic oligonucleotide
gacatgatgcattgtacctaaataggatat

SEQ ID NO: 411077 - DNA, 30 bp, Artificial Sequence
  Synthetic oligonucleotide
cagcaatccagccatgtagcgcacggatat

SEQ ID NO: 411078 - DNA, 30 bp, Artificial Sequence
  Synthetic oligonucleotide
cttagtgcaattaaggtagtaatgggatat

SEQ ID NO: 411079 - DNA, 30 bp, Artificial Sequence
  Synthetic oligonucleotide
tgtgccgcggcgtaaataccaaaatgatat

SEQ ID NO: 411080 - DNA, 30 bp, Artificial Sequence
  Synthetic oligonucleotide
cctagttaatggtttccttggacatgatat

SEQ ID NO: 411081 - DNA, 30 bp, Artificial Sequence
  Synthetic oligonucleotide
ggggtctggtgcacctctactacatgatat

SEQ ID NO: 411082 - DNA, 30 bp, Artificial Sequence
  Synthetic oligonucleotide
ctgagcccaagtcggggctttagatgatat

SEQ ID NO: 411083 - DNA, 30 bp, Artificial Sequence
  Synthetic oligonucleotide
ccgtataaccaagatagctaccactgatat

SEQ ID NO: 411084 - DNA, 30 bp, Artificial Sequence
  Synthetic oligonucleotide
tcaatggttataagctatgcggcctgatat

SEQ ID NO: 411085 - DNA, 30 bp, Artificial Sequence
  Synthetic oligonucleotide
gctgcaaggagtatcatgggttcgtgatat

SEQ ID NO: 411086 - DNA, 30 bp, Artificial Sequence
  Synthetic oligonucleotide
acctggcatgtcaaatcggctttgtgatat

SEQ ID NO: 411087 - DNA, 30 bp, Artificial Sequence
  Synthetic oligonucleotide
gtgccatctaagatcgcctcgaattgatat

SEQ ID NO: 411088 - DNA, 30 bp, Artificial Sequence
  Synthetic oligonucleotide
tggctagtccagaatacatagtattgatat

SEQ ID NO: 411089 - DNA, 30 bp, Artificial Sequence
  Synthetic oligonucleotide
tggtataattcgttcatcctcatttgatat

SEQ ID NO: 411090 - DNA, 30 bp, Artificial Sequence
  Synthetic oligonucleotide
ctactcgaggcttcttcccacaccatatat

SEQ ID NO: 411091 - DNA, 30 bp, Artificial Sequence
  Synthetic oligonucleotide
ctatcagtggagtctccatcttagatatat

SEQ ID NO: 411092 - DNA, 30 bp, Artificial Sequence
  Synthetic oligonucleotide
ctgtagtcaggtgtctttcgctcgatatat

SEQ ID NO: 411093 - DNA, 30 bp, Artificial Sequence
  Synthetic oligonucleotide
gaaagtacggtctgttcggctctgatatat

SEQ ID NO: 411094 - DNA, 30 bp, Artificial Sequence
  Synthetic oligonucleotide
ggctgaccttgcaagtatggctatatatat

SEQ ID NO: 411095 - DNA, 30 bp, Artificial Sequence
  Synthetic oligonucleotide
ggcagcataatggatcatgccagtatatat

SEQ ID NO: 411096 - DNA, 30 bp, Artificial Sequence
  Synthetic oligonucleotide
cgcgcattcaagacgtactgatgtatatat

SEQ ID NO: 411097 - DNA, 30 bp, Artificial Sequence
  Synthetic oligonucleotide
gctcatggtgacacaatattcattatatat

SEQ ID NO: 411098 - DNA, 30 bp, Artificial Sequence
  Synthetic oligonucleotide
taggcagggcgcgcccgtcccttgctatat

SEQ ID NO: 411099 - DNA, 30 bp, Artificial Sequence
  Synthetic oligonucleotide
tcgtcccctggaagacaatgcaatctatat

SEQ ID NO: 411100 - DNA, 30 bp, Artificial Sequence
  Synthetic oligonucleotide
aagcacaataaaggaccagactatctatat

SEQ ID NO: 411101 - DNA, 30 bp, Artificial Sequence
  Synthetic oligonucleotide
cggccagaagtacgcttgtttcgtctatat

SEQ ID NO: 411102 - DNA, 30 bp, Artificial Sequence
  Synthetic oligonucleotide
gctcagcaattaacttatgcaggtctatat

SEQ ID NO: 411103 - DNA, 30 bp, Artificial Sequence
  Synthetic oligonucleotide
ttcagaccattggtgcctcatcttctatat

SEQ ID NO: 411104 - DNA, 30 bp, Artificial Sequence
  Synthetic oligonucleotide
tccatcaactgatggcctattggagtatat

SEQ ID NO: 411105 - DNA, 29 bp, Artificial Sequence
  Synthetic oligonucleotide
gtgtcttcggcgtggggcgacacgtatat

SEQ ID NO: 411106 - DNA, 30 bp, Artificial Sequence
  Synthetic oligonucleotide
aatcacaggaacgctcaatactgcgtatat

SEQ ID NO: 411107 - DNA, 30 bp, Artificial Sequence
  Synthetic oligonucleotide
gcttataccagcgtgcaagggcaggtatat

SEQ ID NO: 411108 - DNA, 30 bp, Artificial Sequence
  Synthetic oligonucleotide
aggtgtttcatttgacgctctgaggtatat

SEQ ID NO: 411109 - DNA, 30 bp, Artificial Sequence
  Synthetic oligonucleotide
gtgtggcttctgaactgcctctaggtatat

SEQ ID NO: 411110 - DNA, 30 bp, Artificial Sequence
  Synthetic oligonucleotide
agtgaaccatttgttatacgacgggtatat

SEQ ID NO: 411111 - DNA, 30 bp, Artificial Sequence
  Synthetic oligonucleotide
ccaagcattattgaattcctcttggtatat

SEQ ID NO: 411112 - DNA, 30 bp, Artificial Sequence
  Synthetic oligonucleotide
ccatagaacgtgcgagtaatgaaattatat

SEQ ID NO: 411113 - DNA, 30 bp, Artificial Sequence
  Synthetic oligonucleotide
gctttaagagttgtggtgattaaattatat

SEQ ID NO: 411114 - DNA, 30 bp, Artificial Sequence
  Synthetic oligonucleotide
acataaatgggcctgtccattcaattatat

SEQ ID NO: 411115 - DNA, 30 bp, Artificial Sequence
  Synthetic oligonucleotide
caagccggcataatacaactttaattatat

SEQ ID NO: 411116 - DNA, 30 bp, Artificial Sequence
  Synthetic oligonucleotide
cctcgacgtcgtcgcaggtttctattatat

SEQ ID NO: 411117 - DNA, 30 bp, Artificial Sequence
  Synthetic oligonucleotide
agtggtccgcggcttctagtggtattatat

SEQ ID NO: 411118 - DNA, 30 bp, Artificial Sequence
  Synthetic oligonucleotide
aggtcacgcttttcatgtatctgcttatat

SEQ ID NO: 411119 - DNA, 30 bp, Artificial Sequence
  Synthetic oligonucleotide
tccttggggtcccacattaccatcttatat

SEQ ID NO: 411120 - DNA, 30 bp, Artificial Sequence
  Synthetic oligonucleotide
gttaaacagtcagccagtaaattcttatat

SEQ ID NO: 411121 - DNA, 30 bp, Artificial Sequence
  Synthetic oligonucleotide
ataaatagttaatactttgggcagttatat

SEQ ID NO: 411122 - DNA, 30 bp, Artificial Sequence
  Synthetic oligonucleotide
gtaggggacaaaacttcctggcatttatat

SEQ ID NO: 411123 - DNA, 30 bp, Artificial Sequence
  Synthetic oligonucleotide
gaatattctcatggcgtcgttcctttatat

SEQ ID NO: 411124 - DNA, 30 bp, Artificial Sequence
  Synthetic oligonucleotide
caaggcgctggattttaacgtgttttatat

SEQ ID NO: 411125 - DNA, 30 bp, Artificial Sequence
  Synthetic oligonucleotide
ttgtctaggtgccaagtgctgtcaaactat

SEQ ID NO: 411126 - DNA, 30 bp, Artificial Sequence
  Synthetic oligonucleotide
taacctgcagccaggcggtacgtcaactat

SEQ ID NO: 411127 - DNA, 30 bp, Artificial Sequence
  Synthetic oligonucleotide
ggattcaccacgttcagccccgctaactat

SEQ ID NO: 411128 - DNA, 30 bp, Artificial Sequence
  Synthetic oligonucleotide
cacgacgaaactcgtccgtaaggacactat

SEQ ID NO: 411129 - DNA, 29 bp, Artificial Sequence
  Synthetic oligonucleotide
gtttatttggggaaaggatcgaccactat

SEQ ID NO: 411130 - DNA, 30 bp, Artificial Sequence
  Synthetic oligonucleotide
ataatctgttcgttgggaccatgccactat

SEQ ID NO: 411131 - DNA, 30 bp, Artificial Sequence
  Synthetic oligonucleotide
cagcacaagatgaggtggcgtcagcactat

SEQ ID NO: 411132 - DNA, 30 bp, Artificial Sequence
  Synthetic oligonucleotide
tgtatacctctgacatcatttcctcactat

SEQ ID NO: 411133 - DNA, 30 bp, Artificial Sequence
  Synthetic oligonucleotide
tccagcacagcgtgaaatgctgctcactat

SEQ ID NO: 411134 - DNA, 30 bp, Artificial Sequence
  Synthetic oligonucleotide
tttccgggctatcacttactgaaagactat

SEQ ID NO: 411135 - DNA, 30 bp, Artificial Sequence
  Synthetic oligonucleotide
tgcagagggtcaaagtttataagagactat

SEQ ID NO: 411136 - DNA, 30 bp, Artificial Sequence
  Synthetic oligonucleotide
tagggctgtatagatactataagcgactat

SEQ ID NO: 411137 - DNA, 30 bp, Artificial Sequence
  Synthetic oligonucleotide
agtttaaaattgttaccgtatttcgactat

SEQ ID NO: 411138 - DNA, 30 bp, Artificial Sequence
  Synthetic oligonucleotide
aatacagcttgcgcttttcggaaggactat

SEQ ID NO: 411139 - DNA, 30 bp, Artificial Sequence
  Synthetic oligonucleotide
tccagacgaggctccctaaaccaggactat

SEQ ID NO: 411140 - DNA, 30 bp, Artificial Sequence
  Synthetic oligonucleotide
aatgggaattagcagtatgagccggactat

SEQ ID NO: 411141 - DNA, 30 bp, Artificial Sequence
  Synthetic oligonucleotide
ccctagcccaaaggtaatgctttggactat

SEQ ID NO: 411142 - DNA, 30 bp, Artificial Sequence
  Synthetic oligonucleotide
ttgatgcctttcttattgtccaatgactat

SEQ ID NO: 411143 - DNA, 30 bp, Artificial Sequence
  Synthetic oligonucleotide
taatggaaaatcccgctacacggtgactat

SEQ ID NO: 411144 - DNA, 30 bp, Artificial Sequence
  Synthetic oligonucleotide
aggaatcctatgtattagtaatttgactat

SEQ ID NO: 411145 - DNA, 30 bp, Artificial Sequence
  Synthetic oligonucleotide
tgaaataggacgaccatggggtttgactat

SEQ ID NO: 411146 - DNA, 30 bp, Artificial Sequence
  Synthetic oligonucleotide
agggtactagcggcctcacacctatactat

SEQ ID NO: 411147 - DNA, 30 bp, Artificial Sequence
  Synthetic oligonucleotide
tatgaaaattgctggtctgacacctactat

SEQ ID NO: 411148 - DNA, 30 bp, Artificial Sequence
  Synthetic oligonucleotide
ttgtatcccgtcgagtaatgtgtgtactat

SEQ ID NO: 411149 - DNA, 30 bp, Artificial Sequence
  Synthetic oligonucleotide
gcccctatgataacttcagggacttactat

SEQ ID NO: 411150 - DNA, 30 bp, Artificial Sequence
  Synthetic oligonucleotide
agcagggaggaatttaggtaactttactat

SEQ ID NO: 411151 - DNA, 30 bp, Artificial Sequence
  Synthetic oligonucleotide
tgcttactgtggtccaagttaaccacctat

SEQ ID NO: 411152 - DNA, 30 bp, Artificial Sequence
  Synthetic oligonucleotide
tcatgcaatgatataggctacctcacctat

SEQ ID NO: 411153 - DNA, 30 bp, Artificial Sequence
  Synthetic oligonucleotide
ggtaatagacgactatagggtaagacctat

SEQ ID NO: 411154 - DNA, 30 bp, Artificial Sequence
  Synthetic oligonucleotide
tacggcctggcttcaatttaaatgacctat

SEQ ID NO: 411155 - DNA, 30 bp, Artificial Sequence
  Synthetic oligonucleotide
acgcgacactcggcccttaccaaaccctat

SEQ ID NO: 411156 - DNA, 30 bp, Artificial Sequence
  Synthetic oligonucleotide
aaactgtaaacgtcatgacagccgccctat

SEQ ID NO: 411157 - DNA, 30 bp, Artificial Sequence
  Synthetic oligonucleotide
ctggccggtttaggggttctttgtccctat

SEQ ID NO: 411158 - DNA, 30 bp, Artificial Sequence
  Synthetic oligonucleotide
gatcgaagcgcttcaagcagatcagcctat

SEQ ID NO: 411159 - DNA, 30 bp, Artificial Sequence
  Synthetic oligonucleotide
tcgggaactgctgcgacttgtgacgcctat

SEQ ID NO: 411160 - DNA, 30 bp, Artificial Sequence
  Synthetic oligonucleotide
gggcatgagaacttttctcagaaggcctat

SEQ ID NO: 411161 - DNA, 30 bp, Artificial Sequence
  Synthetic oligonucleotide
tatatacactatacttaggtgaaggcctat

SEQ ID NO: 411162 - DNA, 30 bp, Artificial Sequence
  Synthetic oligonucleotide
gggcgattatcatgcaccattaatgcctat

SEQ ID NO: 411163 - DNA, 30 bp, Artificial Sequence
  Synthetic oligonucleotide
tttgacgtactcagtcccccgcttgcctat

SEQ ID NO: 411164 - DNA, 30 bp, Artificial Sequence
  Synthetic oligonucleotide
cacatgcgatgactgttgcggggatcctat

SEQ ID NO: 411165 - DNA, 30 bp, Artificial Sequence
  Synthetic oligonucleotide
tatggcccagggtggagaccaccctcctat

SEQ ID NO: 411166 - DNA, 30 bp, Artificial Sequence
  Synthetic oligonucleotide
agaatggaagggcacacagtgatctcctat

SEQ ID NO: 411167 - DNA, 30 bp, Artificial Sequence
  Synthetic oligonucleotide
caacccacaagtacggtcgtaccgtcctat

SEQ ID NO: 411168 - DNA, 30 bp, Artificial Sequence
  Synthetic oligonucleotide
taggacagcgcacagtgcgctcattcctat

SEQ ID NO: 411169 - DNA, 30 bp, Artificial Sequence
  Synthetic oligonucleotide
ttgttgtgttctccttttgtgttttcctat

SEQ ID NO: 411170 - DNA, 30 bp, Artificial Sequence
  Synthetic oligonucleotide
tggttgtgttctctttttgtgttttcctat

SEQ ID NO: 411171 - DNA, 30 bp, Artificial Sequence
  Synthetic oligonucleotide
ttgttgtgttttctttttgtgttttcctat

SEQ ID NO: 411172 - DNA, 30 bp, Artificial Sequence
  Synthetic oligonucleotide
ttgttgtgttctttttttgtgttttcctat

SEQ ID NO: 411173 - DNA, 30 bp, Artificial Sequence
  Synthetic oligonucleotide
ggttgcggctcttggaatcatataagctat

SEQ ID NO: 411174 - DNA, 30 bp, Artificial Sequence
  Synthetic oligonucleotide
cagctccgtcgcactcataaggtaagctat

SEQ ID NO: 411175 - DNA, 30 bp, Artificial Sequence
  Synthetic oligonucleotide
aacctacctacttcctcacacttaagctat

SEQ ID NO: 411176 - DNA, 30 bp, Artificial Sequence
  Synthetic oligonucleotide
acctgttagggtgtatggaaggacagctat

SEQ ID NO: 411177 - DNA, 30 bp, Artificial Sequence
  Synthetic oligonucleotide
atttcatattggagcatatcctccagctat

SEQ ID NO: 411178 - DNA, 30 bp, Artificial Sequence
  Synthetic oligonucleotide
agataatggattcggtgtgaaggcagctat

SEQ ID NO: 411179 - DNA, 30 bp, Artificial Sequence
  Synthetic oligonucleotide
tcttaattcgcatcttgctgagcgagctat

SEQ ID NO: 411180 - DNA, 30 bp, Artificial Sequence
  Synthetic oligonucleotide
tgagctacctccccattgcggttgagctat

SEQ ID NO: 411181 - DNA, 30 bp, Artificial Sequence
  Synthetic oligonucleotide
ttggtgaacgggtcctattactatagctat

SEQ ID NO: 411182 - DNA, 30 bp, Artificial Sequence
  Synthetic oligonucleotide
tctcagtagcactatgcttgaacacgctat

SEQ ID NO: 411183 - DNA, 30 bp, Artificial Sequence
  Synthetic oligonucleotide
tagtgtattgaggtgtcttccacacgctat

SEQ ID NO: 411184 - DNA, 30 bp, Artificial Sequence
  Synthetic oligonucleotide
ttccagctacgagggaatgctatacgctat

SEQ ID NO: 411185 - DNA, 30 bp, Artificial Sequence
  Synthetic oligonucleotide
tattctggtccagaacagcgtagccgctat

SEQ ID NO: 411186 - DNA, 30 bp, Artificial Sequence
  Synthetic oligonucleotide
gggaaatttgtaatcaatctgtatcgctat

SEQ ID NO: 411187 - DNA, 30 bp, Artificial Sequence
  Synthetic oligonucleotide
aatacgtatgtttctttagttgacggctat

SEQ ID NO: 411188 - DNA, 30 bp, Artificial Sequence
  Synthetic oligonucleotide
tacaagccaaggcaagagcaatccggctat

SEQ ID NO: 411189 - DNA, 30 bp, Artificial Sequence
  Synthetic oligonucleotide
taggcagcttatacgtggcgaacgggctat

SEQ ID NO: 411190 - DNA, 30 bp, Artificial Sequence
  Synthetic oligonucleotide
ccacaccctccaaatgcggaagcgggctat

SEQ ID NO: 411191 - DNA, 30 bp, Artificial Sequence
  Synthetic oligonucleotide
ccgcacacaatatttattcttcatggctat

SEQ ID NO: 411192 - DNA, 30 bp, Artificial Sequence
  Synthetic oligonucleotide
gcgccctcttgaacaaacggttcatgctat

SEQ ID NO: 411193 - DNA, 30 bp, Artificial Sequence
  Synthetic oligonucleotide
ttggtcgcagttatgcttcctagatgctat

SEQ ID NO: 411194 - DNA, 30 bp, Artificial Sequence
  Synthetic oligonucleotide
cttagagatacgccctagcgtggatgctat

SEQ ID NO: 411195 - DNA, 30 bp, Artificial Sequence
  Synthetic oligonucleotide
gaattggctcgaggcttgaatgcctgctat

SEQ ID NO: 411196 - DNA, 30 bp, Artificial Sequence
  Synthetic oligonucleotide
tccaggaaattgccccgacccatgtgctat

SEQ ID NO: 411197 - DNA, 30 bp, Artificial Sequence
  Synthetic oligonucleotide
ggctggttcgtggacccacagttgtgctat

SEQ ID NO: 411198 - DNA, 30 bp, Artificial Sequence
  Synthetic oligonucleotide
ggccgcccttatagagaagggaattgctat

SEQ ID NO: 411199 - DNA, 30 bp, Artificial Sequence
  Synthetic oligonucleotide
caataatggctacaggggaaattttgctat

SEQ ID NO: 411200 - DNA, 30 bp, Artificial Sequence
  Synthetic oligonucleotide
tgtgggccgagtgcgcgcaaagacatctat

SEQ ID NO: 411201 - DNA, 30 bp, Artificial Sequence
  Synthetic oligonucleotide
tctcaatgtctggtacgccaccgcatctat

SEQ ID NO: 411202 - DNA, 30 bp, Artificial Sequence
  Synthetic oligonucleotide
gagatatacccgcattttacgatcatctat

SEQ ID NO: 411203 - DNA, 30 bp, Artificial Sequence
  Synthetic oligonucleotide
tttcggtcggaacgttgaagaaagatctat

SEQ ID NO: 411204 - DNA, 30 bp, Artificial Sequence
  Synthetic oligonucleotide
aaattcatagcacgtctatgacatatctat

SEQ ID NO: 411205 - DNA, 30 bp, Artificial Sequence
  Synthetic oligonucleotide
ggtggtctttttcaacagctaagtatctat

SEQ ID NO: 411206 - DNA, 30 bp, Artificial Sequence
  Synthetic oligonucleotide
tatcacgcgtgcgagttccgtcttatctat

SEQ ID NO: 411207 - DNA, 30 bp, Artificial Sequence
  Synthetic oligonucleotide
acaaatgtccagggcaggcatatactctat

SEQ ID NO: 411208 - DNA, 30 bp, Artificial Sequence
  Synthetic oligonucleotide
atagtttttccttcgggggaggagctctat

SEQ ID NO: 411209 - DNA, 30 bp, Artificial Sequence
  Synthetic oligonucleotide
actcaattaggtcaaggcgtttagctctat

SEQ ID NO: 411210 - DNA, 30 bp, Artificial Sequence
  Synthetic oligonucleotide
ccaaacacggttttgagacgaaatctctat

SEQ ID NO: 411211 - DNA, 30 bp, Artificial Sequence
  Synthetic oligonucleotide
ctcaagcgctttgatactggggatctctat

SEQ ID NO: 411212 - DNA, 30 bp, Artificial Sequence
  Synthetic oligonucleotide
ataccgagcctaggactttgctatctctat

SEQ ID NO: 411213 - DNA, 30 bp, Artificial Sequence
  Synthetic oligonucleotide
gttctgccatacctcgttcaatctctctat

SEQ ID NO: 411214 - DNA, 30 bp, Artificial Sequence
  Synthetic oligonucleotide
tgtccccaatcgcagaacgaacgtctctat

SEQ ID NO: 411215 - DNA, 30 bp, Artificial Sequence
  Synthetic oligonucleotide
acaccacctttacggatacgtatagtctat

SEQ ID NO: 411216 - DNA, 30 bp, Artificial Sequence
  Synthetic oligonucleotide
gtattacttgcaacaggcagtatcgtctat

SEQ ID NO: 411217 - DNA, 30 bp, Artificial Sequence
  Synthetic oligonucleotide
gggtggtaaacgattcgacgcaaggtctat

SEQ ID NO: 411218 - DNA, 30 bp, Artificial Sequence
  Synthetic oligonucleotide
gacaacagatctataagctcctaggtctat

SEQ ID NO: 411219 - DNA, 30 bp, Artificial Sequence
  Synthetic oligonucleotide
gatggctgccgggtttggatgtaggtctat

SEQ ID NO: 411220 - DNA, 30 bp, Artificial Sequence
  Synthetic oligonucleotide
tagtaggcaccatatactagttaattctat

SEQ ID NO: 411221 - DNA, 30 bp, Artificial Sequence
  Synthetic oligonucleotide
ggcacgagcgttgacaccccccacttctat

SEQ ID NO: 411222 - DNA, 30 bp, Artificial Sequence
  Synthetic oligonucleotide
tgtatctttgatctgttttttctgttctat

SEQ ID NO: 411223 - DNA, 30 bp, Artificial Sequence
  Synthetic oligonucleotide
gacgctgttgagacgagtcttcatttctat

SEQ ID NO: 411224 - DNA, 30 bp, Artificial Sequence
  Synthetic oligonucleotide
atatgtctagaggagacttggtctttctat

SEQ ID NO: 411225 - DNA, 30 bp, Artificial Sequence
  Synthetic oligonucleotide
ttatgcgcgaacccagagagccttttctat

SEQ ID NO: 411226 - DNA, 30 bp, Artificial Sequence
  Synthetic oligonucleotide
taacggctccttgcgtaacgcgaaaagtat

SEQ ID NO: 411227 - DNA, 30 bp, Artificial Sequence
  Synthetic oligonucleotide
gagctacagtgcgatgtaggttaaaagtat

SEQ ID NO: 411228 - DNA, 30 bp, Artificial Sequence
  Synthetic oligonucleotide
cccggcccggccgcggttaatcgaaagtat

SEQ ID NO: 411229 - DNA, 29 bp, Artificial Sequence
  Synthetic oligonucleotide
accatcgcatttggcaccgcggaaagtat

SEQ ID NO: 411230 - DNA, 30 bp, Artificial Sequence
  Synthetic oligonucleotide
ttatttatgggcccgcgtcttactaagtat

SEQ ID NO: 411231 - DNA, 30 bp, Artificial Sequence
  Synthetic oligonucleotide
aacccggagattagaccccggtaacagtat

SEQ ID NO: 411232 - DNA, 30 bp, Artificial Sequence
  Synthetic oligonucleotide
gatagggattaattggtcgtctgacagtat

SEQ ID NO: 411233 - DNA, 30 bp, Artificial Sequence
  Synthetic oligonucleotide
acttccaatagaaaaacggttttacagtat

SEQ ID NO: 411234 - DNA, 30 bp, Artificial Sequence
  Synthetic oligonucleotide
agaggatgtttttcttggtcggatcagtat

SEQ ID NO: 411235 - DNA, 30 bp, Artificial Sequence
  Synthetic oligonucleotide
accatgatcgctagaattggcactcagtat

SEQ ID NO: 411236 - DNA, 30 bp, Artificial Sequence
  Synthetic oligonucleotide
tgcctcggtagatcatatggaagtcagtat

SEQ ID NO: 411237 - DNA, 30 bp, Artificial Sequence
  Synthetic oligonucleotide
agtacacgcactgacgcccgcaaagagtat

SEQ ID NO: 411238 - DNA, 30 bp, Artificial Sequence
  Synthetic oligonucleotide
ctggggtctggaacgtcagattcagagtat

SEQ ID NO: 411239 - DNA, 30 bp, Artificial Sequence
  Synthetic oligonucleotide
gggtagacggaccatcggatcggagagtat

SEQ ID NO: 411240 - DNA, 30 bp, Artificial Sequence
  Synthetic oligonucleotide
tcataacctgtgggcaagaacgtagagtat

SEQ ID NO: 411241 - DNA, 30 bp, Artificial Sequence
  Synthetic oligonucleotide
aacacggcactctatttcagattagagtat

SEQ ID NO: 411242 - DNA, 30 bp, Artificial Sequence
  Synthetic oligonucleotide
tgcaagacctcgccacccagggccgagtat

SEQ ID NO: 411243 - DNA, 30 bp, Artificial Sequence
  Synthetic oligonucleotide
acttggcttgatggatgtgctggcgagtat

SEQ ID NO: 411244 - DNA, 30 bp, Artificial Sequence
  Synthetic oligonucleotide
agttcctatttccttacccacatcgagtat

SEQ ID NO: 411245 - DNA, 30 bp, Artificial Sequence
  Synthetic oligonucleotide
gattgatttggcgactcactcttcgagtat

SEQ ID NO: 411246 - DNA, 30 bp, Artificial Sequence
  Synthetic oligonucleotide
tatgcgcatcacattaccggacgggagtat

SEQ ID NO: 411247 - DNA, 30 bp, Artificial Sequence
  Synthetic oligonucleotide
cagtctgttaaagcaagtcagtaatagtat

SEQ ID NO: 411248 - DNA, 30 bp, Artificial Sequence
  Synthetic oligonucleotide
gagatatgatgaacgcgaagttcatagtat

SEQ ID NO: 411249 - DNA, 30 bp, Artificial Sequence
  Synthetic oligonucleotide
ttcatcgatttgggatcgtagatatagtat

SEQ ID NO: 411250 - DNA, 30 bp, Artificial Sequence
  Synthetic oligonucleotide
gcttggcgcgcagacgcggattcctagtat

SEQ ID NO: 411251 - DNA, 30 bp, Artificial Sequence
  Synthetic oligonucleotide
gtaccacagacagttagtttgtgctagtat

SEQ ID NO: 411252 - DNA, 30 bp, Artificial Sequence
  Synthetic oligonucleotide
taagtaccttcggaacacgcgatctagtat

SEQ ID NO: 411253 - DNA, 30 bp, Artificial Sequence
  Synthetic oligonucleotide
gtgtaagtttagtgtaaacggcagtagtat

SEQ ID NO: 411254 - DNA, 30 bp, Artificial Sequence
  Synthetic oligonucleotide
attagagcgtgaaccctaatatagtagtat

SEQ ID NO: 411255 - DNA, 30 bp, Artificial Sequence
  Synthetic oligonucleotide
aacaaatggccggtgcggaagtattagtat

SEQ ID NO: 411256 - DNA, 30 bp, Artificial Sequence
  Synthetic oligonucleotide
ataaggataccagtacgtgtgacttagtat

SEQ ID NO: 411257 - DNA, 30 bp, Artificial Sequence
  Synthetic oligonucleotide
tccgttcttagtcatattaagagttagtat

SEQ ID NO: 411258 - DNA, 30 bp, Artificial Sequence
  Synthetic oligonucleotide
cctatttctgagccgaagcgaggttagtat

SEQ ID NO: 411259 - DNA, 30 bp, Artificial Sequence
  Synthetic oligonucleotide
ccccggctactcataaacaaatgttagtat

SEQ ID NO: 411260 - DNA, 30 bp, Artificial Sequence
  Synthetic oligonucleotide
gccccaccagtctaatcaggcatttagtat

SEQ ID NO: 411261 - DNA, 30 bp, Artificial Sequence
  Synthetic oligonucleotide
gaaatccggtcaatgctgggctcaacgtat

SEQ ID NO: 411262 - DNA, 30 bp, Artificial Sequence
  Synthetic oligonucleotide
acgcggtttaagtttttctgaataacgtat

SEQ ID NO: 411263 - DNA, 30 bp, Artificial Sequence
  Synthetic oligonucleotide
cggaattaatcgtgagcacggggcacgtat

SEQ ID NO: 411264 - DNA, 30 bp, Artificial Sequence
  Synthetic oligonucleotide
aggttttacttctgaaacaaacagacgtat

SEQ ID NO: 411265 - DNA, 30 bp, Artificial Sequence
  Synthetic oligonucleotide
caaaagtcataagaagagccccggacgtat

SEQ ID NO: 411266 - DNA, 30 bp, Artificial Sequence
  Synthetic oligonucleotide
agatattgcttcgtagcagatttgacgtat

SEQ ID NO: 411267 - DNA, 30 bp, Artificial Sequence
  Synthetic oligonucleotide
gttgcgtcagcatcgcgttgtcatacgtat

SEQ ID NO: 411268 - DNA, 30 bp, Artificial Sequence
  Synthetic oligonucleotide
gatccactaccggcctcaggttatacgtat

SEQ ID NO: 411269 - DNA, 31 bp, Artificial Sequence
  Synthetic oligonucleotide
aacgcaggtaactttcacaagataaccgtat

SEQ ID NO: 411270 - DNA, 30 bp, Artificial Sequence
  Synthetic oligonucleotide
gactgccaggttctcctttcgtaaccgtat

SEQ ID NO: 411271 - DNA, 31 bp, Artificial Sequence
  Synthetic oligonucleotide
acatgtattcggtgataccattccaccgtat

SEQ ID NO: 411272 - DNA, 30 bp, Artificial Sequence
  Synthetic oligonucleotide
cttcattgcccacccaattggtacccgtat

SEQ ID NO: 411273 - DNA, 30 bp, Artificial Sequence
  Synthetic oligonucleotide
atagaaatgtaatctgctcgagccccgtat

SEQ ID NO: 411274 - DNA, 30 bp, Artificial Sequence
  Synthetic oligonucleotide
ttacaagaatcaggtatagcgtccccgtat

SEQ ID NO: 411275 - DNA, 30 bp, Artificial Sequence
  Synthetic oligonucleotide
atgtgctatagacgcaggtacagcccgtat

SEQ ID NO: 411276 - DNA, 30 bp, Artificial Sequence
  Synthetic oligonucleotide
atctcacctctcttagcacttctcccgtat

SEQ ID NO: 411277 - DNA, 30 bp, Artificial Sequence
  Synthetic oligonucleotide
gctctcatgggatgaatcgaaacagcgtat

SEQ ID NO: 411278 - DNA, 30 bp, Artificial Sequence
  Synthetic oligonucleotide
aagactggttgccattctgcttgagcgtat

SEQ ID NO: 411279 - DNA, 30 bp, Artificial Sequence
  Synthetic oligonucleotide
ttagctagttcggtctgacctttcgcgtat

SEQ ID NO: 411280 - DNA, 30 bp, Artificial Sequence
  Synthetic oligonucleotide
acgtgccttagacagataagtacggcgtat

SEQ ID NO: 411281 - DNA, 30 bp, Artificial Sequence
  Synthetic oligonucleotide
ccctgttcggaatgtgcaggcgaatcgtat

SEQ ID NO: 411282 - DNA, 30 bp, Artificial Sequence
  Synthetic oligonucleotide
tcccatttaagaaatcaaatcggctcgtat

SEQ ID NO: 411283 - DNA, 29 bp, Artificial Sequence
  Synthetic oligonucleotide
accctaacgctccatgatataagtcgtat

SEQ ID NO: 411284 - DNA, 30 bp, Artificial Sequence
  Synthetic oligonucleotide
atcactcgtaggcgttgctataagtcgtat

SEQ ID NO: 411285 - DNA, 30 bp, Artificial Sequence
  Synthetic oligonucleotide
attctgaaaggtgaacgtctggagtcgtat

SEQ ID NO: 411286 - DNA, 30 bp, Artificial Sequence
  Synthetic oligonucleotide
gcaattaatctttatctcttcgattcgtat

SEQ ID NO: 411287 - DNA, 30 bp, Artificial Sequence
  Synthetic oligonucleotide
caaaacgaatacgaactcagctcttcgtat

SEQ ID NO: 411288 - DNA, 30 bp, Artificial Sequence
  Synthetic oligonucleotide
tttatgtaaggagttggtcgtctttcgtat

SEQ ID NO: 411289 - DNA, 30 bp, Artificial Sequence
  Synthetic oligonucleotide
gctacttcacaccgtatcataaaaaggtat

SEQ ID NO: 411290 - DNA, 30 bp, Artificial Sequence
  Synthetic oligonucleotide
actgtaaggccatttgtaatatcaaggtat

SEQ ID NO: 411291 - DNA, 30 bp, Artificial Sequence
  Synthetic oligonucleotide
gcagactgagttgtcattccgcagaggtat

SEQ ID NO: 411292 - DNA, 30 bp, Artificial Sequence
  Synthetic oligonucleotide
cctccggaataactcgggacagcgaggtat

SEQ ID NO: 411293 - DNA, 30 bp, Artificial Sequence
  Synthetic oligonucleotide
taaaatcattgggataggagcatgaggtat

SEQ ID NO: 411294 - DNA, 30 bp, Artificial Sequence
  Synthetic oligonucleotide
aaccaagcgcccagtaatgggctgaggtat

SEQ ID NO: 411295 - DNA, 30 bp, Artificial Sequence
  Synthetic oligonucleotide
agatcgcccttacctgagagattgaggtat

SEQ ID NO: 411296 - DNA, 30 bp, Artificial Sequence
  Synthetic oligonucleotide
gttatctcgggtgaagttccgcctaggtat

SEQ ID NO: 411297 - DNA, 30 bp, Artificial Sequence
  Synthetic oligonucleotide
taaaacgaaacacgtactacgccacggtat

SEQ ID NO: 411298 - DNA, 30 bp, Artificial Sequence
  Synthetic oligonucleotide
acttcgaagcgaattagcatcggacggtat

SEQ ID NO: 411299 - DNA, 30 bp, Artificial Sequence
  Synthetic oligonucleotide
gcgggtatcattagtatcgtattacggtat

SEQ ID NO: 411300 - DNA, 31 bp, Artificial Sequence
  Synthetic oligonucleotide
gggaactcgattgtatccgcactgccggtat

SEQ ID NO: 411301 - DNA, 30 bp, Artificial Sequence
  Synthetic oligonucleotide
aagagcaccccaagggtaataaagcggtat

SEQ ID NO: 411302 - DNA, 30 bp, Artificial Sequence
  Synthetic oligonucleotide
gaaataagcgccttcaaaaataagcggtat

SEQ ID NO: 411303 - DNA, 30 bp, Artificial Sequence
  Synthetic oligonucleotide
tcgaacctgtcgtacggtggcaatcggtat

SEQ ID NO: 411304 - DNA, 30 bp, Artificial Sequence
  Synthetic oligonucleotide
ggtgtaaaggcggcaatggagcctcggtat

SEQ ID NO: 411305 - DNA, 30 bp, Artificial Sequence
  Synthetic oligonucleotide
cactcttattaaatggaatcttgtcggtat

SEQ ID NO: 411306 - DNA, 30 bp, Artificial Sequence
  Synthetic oligonucleotide
cctgaagagcgttgcaatacggcagggtat

SEQ ID NO: 411307 - DNA, 30 bp, Artificial Sequence
  Synthetic oligonucleotide
atatgttgacccccgagactatcagggtat

SEQ ID NO: 411308 - DNA, 27 bp, Artificial Sequence
  Synthetic oligonucleotide
ctctcggggtatggcccgggagggtat

SEQ ID NO: 411309 - DNA, 30 bp, Artificial Sequence
  Synthetic oligonucleotide
agagtattatgtatcagtagcaacgggtat

SEQ ID NO: 411310 - DNA, 30 bp, Artificial Sequence
  Synthetic oligonucleotide
cgtggttggcagctttctacacacgggtat

SEQ ID NO: 411311 - DNA, 30 bp, Artificial Sequence
  Synthetic oligonucleotide
ggcagcacatatagggagttatacgggtat

SEQ ID NO: 411312 - DNA, 30 bp, Artificial Sequence
  Synthetic oligonucleotide
cgaaatgcaacaagctgtaattacgggtat

SEQ ID NO: 411313 - DNA, 30 bp, Artificial Sequence
  Synthetic oligonucleotide
tgagctcgataatgtaacatacgcgggtat

SEQ ID NO: 411314 - DNA, 30 bp, Artificial Sequence
  Synthetic oligonucleotide
cgcaaccagtctgtgatgaaaatcgggtat

SEQ ID NO: 411315 - DNA, 30 bp, Artificial Sequence
  Synthetic oligonucleotide
cgccggtgacgcgacaagtcgccggggtat

SEQ ID NO: 411316 - DNA, 30 bp, Artificial Sequence
  Synthetic oligonucleotide
ccagcttatgcgtagaactatagggggtat

SEQ ID NO: 411317 - DNA, 30 bp, Artificial Sequence
  Synthetic oligonucleotide
agtattgaagtccgtaagtacgatgggtat

SEQ ID NO: 411318 - DNA, 30 bp, Artificial Sequence
  Synthetic oligonucleotide
tagttttgatggcctccgtcctatgggtat

SEQ ID NO: 411319 - DNA, 30 bp, Artificial Sequence
  Synthetic oligonucleotide
ggaaaactcaaccaatttaggcttgggtat

SEQ ID NO: 411320 - DNA, 30 bp, Artificial Sequence
  Synthetic oligonucleotide
gcaaaataaatttttaagaacagatggtat

SEQ ID NO: 411321 - DNA, 30 bp, Artificial Sequence
  Synthetic oligonucleotide
tttgttagccgattctggttgcactggtat

SEQ ID NO: 411322 - DNA, 30 bp, Artificial Sequence
  Synthetic oligonucleotide
caatagaggttggccaggaataagtggtat

SEQ ID NO: 411323 - DNA, 30 bp, Artificial Sequence
  Synthetic oligonucleotide
agttggtctttcctagggtgcgggtggtat

SEQ ID NO: 411324 - DNA, 30 bp, Artificial Sequence
  Synthetic oligonucleotide
aacttcggggagccttaaagggggtggtat

SEQ ID NO: 411325 - DNA, 30 bp, Artificial Sequence
  Synthetic oligonucleotide
tgttttgaacagaacacgtgatggtggtat

SEQ ID NO: 411326 - DNA, 30 bp, Artificial Sequence
  Synthetic oligonucleotide
tttacgggaaaccaattgtgtcattggtat

SEQ ID NO: 411327 - DNA, 30 bp, Artificial Sequence
  Synthetic oligonucleotide
acatccgtggattctacgtgaagttggtat

SEQ ID NO: 411328 - DNA, 30 bp, Artificial Sequence
  Synthetic oligonucleotide
ataactctaaatagcgatgtaggttggtat

SEQ ID NO: 411329 - DNA, 29 bp, Artificial Sequence
  Synthetic oligonucleotide
ctgtcgctgctcctgggccgtaaatgtat

SEQ ID NO: 411330 - DNA, 30 bp, Artificial Sequence
  Synthetic oligonucleotide
aacgttccgtgccagtagcttccaatgtat

SEQ ID NO: 411331 - DNA, 30 bp, Artificial Sequence
  Synthetic oligonucleotide
catcattcgagcatgtcctcccgaatgtat

SEQ ID NO: 411332 - DNA, 30 bp, Artificial Sequence
  Synthetic oligonucleotide
taaatcactgaagggtgtactggaatgtat

SEQ ID NO: 411333 - DNA, 30 bp, Artificial Sequence
  Synthetic oligonucleotide
cgccccttgccaaatccgtttgacatgtat

SEQ ID NO: 411334 - DNA, 30 bp, Artificial Sequence
  Synthetic oligonucleotide
tagccctggtgaatctacccaccgatgtat

SEQ ID NO: 411335 - DNA, 30 bp, Artificial Sequence
  Synthetic oligonucleotide
gcaatctgaaatggcacgttaatgatgtat

SEQ ID NO: 411336 - DNA, 30 bp, Artificial Sequence
  Synthetic oligonucleotide
cactctgacccatttggaccgattatgtat

SEQ ID NO: 411337 - DNA, 30 bp, Artificial Sequence
  Synthetic oligonucleotide
cgtcctaccggatcgctgcaggttatgtat

SEQ ID NO: 411338 - DNA, 30 bp, Artificial Sequence
  Synthetic oligonucleotide
cagaaaagaagtatggtccgcagactgtat

SEQ ID NO: 411339 - DNA, 30 bp, Artificial Sequence
  Synthetic oligonucleotide
tgattggctcccagccaggtctacctgtat

SEQ ID NO: 411340 - DNA, 30 bp, Artificial Sequence
  Synthetic oligonucleotide
tcaattttaatccctgaagtctccctgtat

SEQ ID NO: 411341 - DNA, 30 bp, Artificial Sequence
  Synthetic oligonucleotide
atatccaatcatctaaaatccaatctgtat

SEQ ID NO: 411342 - DNA, 30 bp, Artificial Sequence
  Synthetic oligonucleotide
taatatttttgggtgaatgggaatctgtat

SEQ ID NO: 411343 - DNA, 30 bp, Artificial Sequence
  Synthetic oligonucleotide
acgcatctaaataaaaggttgactctgtat

SEQ ID NO: 411344 - DNA, 30 bp, Artificial Sequence
  Synthetic oligonucleotide
ttccccaaggtgggtgacgctagtctgtat

SEQ ID NO: 411345 - DNA, 30 bp, Artificial Sequence
  Synthetic oligonucleotide
aaacgccagattttagtgtaccgtctgtat

SEQ ID NO: 411346 - DNA, 30 bp, Artificial Sequence
  Synthetic oligonucleotide
tagcctgggcccagcaaatgataagtgtat

SEQ ID NO: 411347 - DNA, 30 bp, Artificial Sequence
  Synthetic oligonucleotide
ttatctcatcatattcatagtagagtgtat

SEQ ID NO: 411348 - DNA, 30 bp, Artificial Sequence
  Synthetic oligonucleotide
tgactactggccgtcaggactcgtgtgtat

SEQ ID NO: 411349 - DNA, 30 bp, Artificial Sequence
  Synthetic oligonucleotide
tcctccgatattctatcgtaaggtgtgtat

SEQ ID NO: 411350 - DNA, 30 bp, Artificial Sequence
  Synthetic oligonucleotide
tcttatctgttgtggtttcctcttgtgtat

SEQ ID NO: 411351 - DNA, 30 bp, Artificial Sequence
  Synthetic oligonucleotide
aatccaataaagcatcacaaaacattgtat

SEQ ID NO: 411352 - DNA, 30 bp, Artificial Sequence
  Synthetic oligonucleotide
atgccgttactgctgaagcttcgattgtat

SEQ ID NO: 411353 - DNA, 30 bp, Artificial Sequence
  Synthetic oligonucleotide
cgttcgcatcaaccgctagtttgattgtat

SEQ ID NO: 411354 - DNA, 30 bp, Artificial Sequence
  Synthetic oligonucleotide
attattagacctaagttccgtgtattgtat

SEQ ID NO: 411355 - DNA, 30 bp, Artificial Sequence
  Synthetic oligonucleotide
tactgacgggagcacttctttctcttgtat

SEQ ID NO: 411356 - DNA, 30 bp, Artificial Sequence
  Synthetic oligonucleotide
tatacaacttattaaactgatgagttgtat

SEQ ID NO: 411357 - DNA, 30 bp, Artificial Sequence
  Synthetic oligonucleotide
attcgtaagccagttttctggttgttgtat

SEQ ID NO: 411358 - DNA, 30 bp, Artificial Sequence
  Synthetic oligonucleotide
ctggaccgcgttaagccggtggaaaattat

SEQ ID NO: 411359 - DNA, 30 bp, Artificial Sequence
  Synthetic oligonucleotide
attggggtcccccctcgagagataaattat

SEQ ID NO: 411360 - DNA, 30 bp, Artificial Sequence
  Synthetic oligonucleotide
tgtaaaacttgttcgttaaagaccaattat

SEQ ID NO: 411361 - DNA, 30 bp, Artificial Sequence
  Synthetic oligonucleotide
gaagcaggagcaacgcggaatttcaattat

SEQ ID NO: 411362 - DNA, 30 bp, Artificial Sequence
  Synthetic oligonucleotide
agaggaagtgttcgatgattttggaattat

SEQ ID NO: 411363 - DNA, 30 bp, Artificial Sequence
  Synthetic oligonucleotide
ctatttttttggctctaatgattgaattat

SEQ ID NO: 411364 - DNA, 30 bp, Artificial Sequence
  Synthetic oligonucleotide
cccagccaagttgcttctataactaattat

SEQ ID NO: 411365 - DNA, 30 bp, Artificial Sequence
  Synthetic oligonucleotide
acccttaatttaggcgttagggcacattat

SEQ ID NO: 411366 - DNA, 30 bp, Artificial Sequence
  Synthetic oligonucleotide
taacaagtgattatggacgtttcacattat

SEQ ID NO: 411367 - DNA, 30 bp, Artificial Sequence
  Synthetic oligonucleotide
gaaagtctaagccgattagggcaccattat

SEQ ID NO: 411368 - DNA, 30 bp, Artificial Sequence
  Synthetic oligonucleotide
ttatccccactgtatcccaggtgccattat

SEQ ID NO: 411369 - DNA, 30 bp, Artificial Sequence
  Synthetic oligonucleotide
ctgtgcatataaatcatgtattagcattat

SEQ ID NO: 411370 - DNA, 30 bp, Artificial Sequence
  Synthetic oligonucleotide
taaggttgtgcctgataggtcaggcattat

SEQ ID NO: 411371 - DNA, 30 bp, Artificial Sequence
  Synthetic oligonucleotide
ttgcaaaaatcacgtagtatttctcattat

SEQ ID NO: 411372 - DNA, 30 bp, Artificial Sequence
  Synthetic oligonucleotide
aaccccccgtccgcttacgggcgagattat

SEQ ID NO: 411373 - DNA, 30 bp, Artificial Sequence
  Synthetic oligonucleotide
atgcaaagtaaattctcttctaccgattat

SEQ ID NO: 411374 - DNA, 30 bp, Artificial Sequence
  Synthetic oligonucleotide
aaggcgcggggtctgcccgcctaggattat

SEQ ID NO: 411375 - DNA, 30 bp, Artificial Sequence
  Synthetic oligonucleotide
ttttatcgggggcgaggtgcaagggattat

SEQ ID NO: 411376 - DNA, 30 bp, Artificial Sequence
  Synthetic oligonucleotide
gctcggatacaactgcttttagatgattat

SEQ ID NO: 411377 - DNA, 30 bp, Artificial Sequence
  Synthetic oligonucleotide
cgagtttgttaatcagtcgcctttgattat

SEQ ID NO: 411378 - DNA, 30 bp, Artificial Sequence
  Synthetic oligonucleotide
catgctagaaaagcgtaaaaatgatattat

SEQ ID NO: 411379 - DNA, 30 bp, Artificial Sequence
  Synthetic oligonucleotide
ctttcggagtttgccgtttggaagtattat

SEQ ID NO: 411380 - DNA, 30 bp, Artificial Sequence
  Synthetic oligonucleotide
gtctggcacaccgtccttgcacggtattat

SEQ ID NO: 411381 - DNA, 30 bp, Artificial Sequence
  Synthetic oligonucleotide
gaaatggcgaaagaactaaccggttattat

SEQ ID NO: 411382 - DNA, 30 bp, Artificial Sequence
  Synthetic oligonucleotide
ggcttctgaaacgtgccttgattttattat

SEQ ID NO: 411383 - DNA, 30 bp, Artificial Sequence
  Synthetic oligonucleotide
tagtcagtaggcttagttttcccaacttat

SEQ ID NO: 411384 - DNA, 30 bp, Artificial Sequence
  Synthetic oligonucleotide
taaacgagggacgtcggaaatataacttat

SEQ ID NO: 411385 - DNA, 30 bp, Artificial Sequence
  Synthetic oligonucleotide
ttagcggcggcaaatctgtaattaacttat

SEQ ID NO: 411386 - DNA, 30 bp, Artificial Sequence
  Synthetic oligonucleotide
ctaggaggggccggcttgagggccacttat

SEQ ID NO: 411387 - DNA, 30 bp, Artificial Sequence
  Synthetic oligonucleotide
accatcgcggtcctcggtacgtagacttat

SEQ ID NO: 411388 - DNA, 30 bp, Artificial Sequence
  Synthetic oligonucleotide
aatttgacgactgaacctgaggcgacttat

SEQ ID NO: 411389 - DNA, 30 bp, Artificial Sequence
  Synthetic oligonucleotide
tgtaggatatcaccacacgtccggacttat

SEQ ID NO: 411390 - DNA, 30 bp, Artificial Sequence
  Synthetic oligonucleotide
gagttggggacgaaataagttgatacttat

SEQ ID NO: 411391 - DNA, 30 bp, Artificial Sequence
  Synthetic oligonucleotide
atccgagtataataactggtgtatacttat

SEQ ID NO: 411392 - DNA, 30 bp, Artificial Sequence
  Synthetic oligonucleotide
ttttcggagattcggatcaccactacttat

SEQ ID NO: 411393 - DNA, 30 bp, Artificial Sequence
  Synthetic oligonucleotide
ggagaaggggcctgacggcttctaccttat

SEQ ID NO: 411394 - DNA, 30 bp, Artificial Sequence
  Synthetic oligonucleotide
agatattgatggcttcagtcactcccttat

SEQ ID NO: 411395 - DNA, 30 bp, Artificial Sequence
  Synthetic oligonucleotide
ttgtgctatgcatcttcccttgatccttat

SEQ ID NO: 411396 - DNA, 30 bp, Artificial Sequence
  Synthetic oligonucleotide
acagggcccttattcgggtgccttccttat

SEQ ID NO: 411397 - DNA, 30 bp, Artificial Sequence
  Synthetic oligonucleotide
caggcggcggaataggttagtcaagcttat

SEQ ID NO: 411398 - DNA, 30 bp, Artificial Sequence
  Synthetic oligonucleotide
cagcatattattcctagacggagagcttat

SEQ ID NO: 411399 - DNA, 30 bp, Artificial Sequence
  Synthetic oligonucleotide
gggtgcgccattttaaaatgctgagcttat

SEQ ID NO: 411400 - DNA, 30 bp, Artificial Sequence
  Synthetic oligonucleotide
attagtgtcagaacacgtatggtagcttat

SEQ ID NO: 411401 - DNA, 30 bp, Artificial Sequence
  Synthetic oligonucleotide
tctaaagcgccgtatgagagccgcgcttat

SEQ ID NO: 411402 - DNA, 30 bp, Artificial Sequence
  Synthetic oligonucleotide
atctacaaggaattctatatttgcgcttat

SEQ ID NO: 411403 - DNA, 30 bp, Artificial Sequence
  Synthetic oligonucleotide
tggccggcggtatagaacagataggcttat

SEQ ID NO: 411404 - DNA, 30 bp, Artificial Sequence
  Synthetic oligonucleotide
tttgtacgccagttctgaaacgcggcttat

SEQ ID NO: 411405 - DNA, 30 bp, Artificial Sequence
  Synthetic oligonucleotide
ccaatcggagttccggtcttgagggcttat

SEQ ID NO: 411406 - DNA, 30 bp, Artificial Sequence
  Synthetic oligonucleotide
aattacgtaaccgattttaagctggcttat

SEQ ID NO: 411407 - DNA, 30 bp, Artificial Sequence
  Synthetic oligonucleotide
aaggagacgctcgtatattgaacatcttat

SEQ ID NO: 411408 - DNA, 30 bp, Artificial Sequence
  Synthetic oligonucleotide
gtagcaggaaacctaatggatgactcttat

SEQ ID NO: 411409 - DNA, 30 bp, Artificial Sequence
  Synthetic oligonucleotide
atactttttggactaacgatgccctcttat

SEQ ID NO: 411410 - DNA, 30 bp, Artificial Sequence
  Synthetic oligonucleotide
gtggcctttaggctcgttccaccgtcttat

SEQ ID NO: 411411 - DNA, 30 bp, Artificial Sequence
  Synthetic oligonucleotide
tctggcgaacgggctaacagatgttcttat

SEQ ID NO: 411412 - DNA, 30 bp, Artificial Sequence
  Synthetic oligonucleotide
acaaccaatacgtcgggggcttgttcttat

SEQ ID NO: 411413 - DNA, 30 bp, Artificial Sequence
  Synthetic oligonucleotide
gttcatatcttggattaacacctttcttat

SEQ ID NO: 411414 - DNA, 30 bp, Artificial Sequence
  Synthetic oligonucleotide
acgctgtgcagaacgagggtgggaagttat

SEQ ID NO: 411415 - DNA, 30 bp, Artificial Sequence
  Synthetic oligonucleotide
taccaggaactgcgtttgactataagttat

SEQ ID NO: 411416 - DNA, 30 bp, Artificial Sequence
  Synthetic oligonucleotide
tctcgtttgacgatcctatacgtaagttat

SEQ ID NO: 411417 - DNA, 30 bp, Artificial Sequence
  Synthetic oligonucleotide
aaaacatcggaatcagatttcgacagttat

SEQ ID NO: 411418 - DNA, 30 bp, Artificial Sequence
  Synthetic oligonucleotide
cattacttcgagcgtgcctttgacagttat

SEQ ID NO: 411419 - DNA, 30 bp, Artificial Sequence
  Synthetic oligonucleotide
atgttctttggaaagatgtcacccagttat

SEQ ID NO: 411420 - DNA, 30 bp, Artificial Sequence
  Synthetic oligonucleotide
atgcagcaccgtccttgcgtagccagttat

SEQ ID NO: 411421 - DNA, 30 bp, Artificial Sequence
  Synthetic oligonucleotide
ccgtgtcacgaacttcgtatatccagttat

SEQ ID NO: 411422 - DNA, 30 bp, Artificial Sequence
  Synthetic oligonucleotide
gtatggggatagtgataatacagcagttat

SEQ ID NO: 411423 - DNA, 30 bp, Artificial Sequence
  Synthetic oligonucleotide
ctacggcttagtgctgaggaatgcagttat

SEQ ID NO: 411424 - DNA, 30 bp, Artificial Sequence
  Synthetic oligonucleotide
tgactccattgtctacccccgtagagttat

SEQ ID NO: 411425 - DNA, 30 bp, Artificial Sequence
  Synthetic oligonucleotide
cctagtaatatagtgttcttaatgagttat

SEQ ID NO: 411426 - DNA, 30 bp, Artificial Sequence
  Synthetic oligonucleotide
gacaattgaacccggatcgagcatagttat

SEQ ID NO: 411427 - DNA, 30 bp, Artificial Sequence
  Synthetic oligonucleotide
gtgtggtcactcaggcactagcatagttat

SEQ ID NO: 411428 - DNA, 30 bp, Artificial Sequence
  Synthetic oligonucleotide
gtaacttcatatccataagaggttagttat

SEQ ID NO: 411429 - DNA, 30 bp, Artificial Sequence
  Synthetic oligonucleotide
agcacttatggaacgggaaataaacgttat

SEQ ID NO: 411430 - DNA, 30 bp, Artificial Sequence
  Synthetic oligonucleotide
tcagtctacggtgattttctttcacgttat

SEQ ID NO: 411431 - DNA, 30 bp, Artificial Sequence
  Synthetic oligonucleotide
aaacagatcttgcggtctctaatacgttat

SEQ ID NO: 411432 - DNA, 30 bp, Artificial Sequence
  Synthetic oligonucleotide
cacatgacgtaggtgggcattcgccgttat

SEQ ID NO: 411433 - DNA, 30 bp, Artificial Sequence
  Synthetic oligonucleotide
tacatccacgatactcgtaaattccgttat

SEQ ID NO: 411434 - DNA, 30 bp, Artificial Sequence
  Synthetic oligonucleotide
ggaatatatttagcagggaaaacgcgttat

SEQ ID NO: 411435 - DNA, 30 bp, Artificial Sequence
  Synthetic oligonucleotide
taaatggttggccatcggatccggcgttat

SEQ ID NO: 411436 - DNA, 30 bp, Artificial Sequence
  Synthetic oligonucleotide
tagttaacagtgcaatttgtcgggcgttat

SEQ ID NO: 411437 - DNA, 30 bp, Artificial Sequence
  Synthetic oligonucleotide
ctcaagaattataccgcctttctgcgttat

SEQ ID NO: 411438 - DNA, 30 bp, Artificial Sequence
  Synthetic oligonucleotide
acttagtagaatcgctgaggttctcgttat

SEQ ID NO: 411439 - DNA, 30 bp, Artificial Sequence
  Synthetic oligonucleotide
gaatacctactttgttccctcattcgttat

SEQ ID NO: 411440 - DNA, 30 bp, Artificial Sequence
  Synthetic oligonucleotide
gtcagacaatatataatctcagttcgttat

SEQ ID NO: 411441 - DNA, 30 bp, Artificial Sequence
  Synthetic oligonucleotide
tacgatactacttgtggtggacaaggttat

SEQ ID NO: 411442 - DNA, 30 bp, Artificial Sequence
  Synthetic oligonucleotide
cacagcaagtgttgtcgtgctatcggttat

SEQ ID NO: 411443 - DNA, 30 bp, Artificial Sequence
  Synthetic oligonucleotide
cctgttcaacacgaaagtttgaagggttat

SEQ ID NO: 411444 - DNA, 30 bp, Artificial Sequence
  Synthetic oligonucleotide
gagaaaattgaaacctgtggccatggttat

SEQ ID NO: 411445 - DNA, 30 bp, Artificial Sequence
  Synthetic oligonucleotide
tctacccagatcagaactaggtatggttat

SEQ ID NO: 411446 - DNA, 30 bp, Artificial Sequence
  Synthetic oligonucleotide
ccaacaggtgcagactgggtgggtggttat

SEQ ID NO: 411447 - DNA, 30 bp, Artificial Sequence
  Synthetic oligonucleotide
gagcttgctggttagcccagcgttggttat

SEQ ID NO: 411448 - DNA, 30 bp, Artificial Sequence
  Synthetic oligonucleotide
aggttaaaggttcgagcagcacaatgttat

SEQ ID NO: 411449 - DNA, 30 bp, Artificial Sequence
  Synthetic oligonucleotide
gcgttgcctattaacgtcggttcatgttat

SEQ ID NO: 411450 - DNA, 30 bp, Artificial Sequence
  Synthetic oligonucleotide
tgcaaactataactgtccctgatatgttat

SEQ ID NO: 411451 - DNA, 30 bp, Artificial Sequence
  Synthetic oligonucleotide
aggattacacctacagagagtccctgttat

SEQ ID NO: 411452 - DNA, 30 bp, Artificial Sequence
  Synthetic oligonucleotide
aaatatgaataatctataggcgggtgttat

SEQ ID NO: 411453 - DNA, 30 bp, Artificial Sequence
  Synthetic oligonucleotide
gttgtacactcctcaaaggcggattgttat

SEQ ID NO: 411454 - DNA, 30 bp, Artificial Sequence
  Synthetic oligonucleotide
tctctgtattaacggaagcacgtttgttat

SEQ ID NO: 411455 - DNA, 30 bp, Artificial Sequence
  Synthetic oligonucleotide
aattcgagaggcaaactgtggtaaatttat

SEQ ID NO: 411456 - DNA, 30 bp, Artificial Sequence
  Synthetic oligonucleotide
ttgctcaagcaaatctaggagacaatttat

SEQ ID NO: 411457 - DNA, 30 bp, Artificial Sequence
  Synthetic oligonucleotide
acttcgatcacctttacgaatggaatttat

SEQ ID NO: 411458 - DNA, 30 bp, Artificial Sequence
  Synthetic oligonucleotide
gaccacggaaggtcgccggagcacatttat

SEQ ID NO: 411459 - DNA, 30 bp, Artificial Sequence
  Synthetic oligonucleotide
aagatacgtactacgatgtcccccatttat

SEQ ID NO: 411460 - DNA, 30 bp, Artificial Sequence
  Synthetic oligonucleotide
ctgttgtcaaggactgtcaggagcatttat

SEQ ID NO: 411461 - DNA, 30 bp, Artificial Sequence
  Synthetic oligonucleotide
cgcggtagttgtctaattgaagtgatttat

SEQ ID NO: 411462 - DNA, 30 bp, Artificial Sequence
  Synthetic oligonucleotide
catcccccgtcttgaaagttgtctatttat

SEQ ID NO: 411463 - DNA, 30 bp, Artificial Sequence
  Synthetic oligonucleotide
aatgttggctgtcacgagacccgtatttat

SEQ ID NO: 411464 - DNA, 30 bp, Artificial Sequence
  Synthetic oligonucleotide
ctcagtatcagaatcaactaacttatttat

SEQ ID NO: 411465 - DNA, 30 bp, Artificial Sequence
  Synthetic oligonucleotide
tgggcatagacaggcctgttcgcactttat

SEQ ID NO: 411466 - DNA, 30 bp, Artificial Sequence
  Synthetic oligonucleotide
aggtcgtcctatgactaacaaagactttat

SEQ ID NO: 411467 - DNA, 30 bp, Artificial Sequence
  Synthetic oligonucleotide
gctggagtgtgagctgcctgtcagctttat

SEQ ID NO: 411468 - DNA, 30 bp, Artificial Sequence
  Synthetic oligonucleotide
cggcaggttaggttgtatgcatagctttat

SEQ ID NO: 411469 - DNA, 30 bp, Artificial Sequence
  Synthetic oligonucleotide
atcctgttattagtaaaatacactctttat

SEQ ID NO: 411470 - DNA, 30 bp, Artificial Sequence
  Synthetic oligonucleotide
aaaagctagcgcgggtgtgatgttctttat

SEQ ID NO: 411471 - DNA, 30 bp, Artificial Sequence
  Synthetic oligonucleotide
tgcaccgccacggacgcaggactcgtttat

SEQ ID NO: 411472 - DNA, 30 bp, Artificial Sequence
  Synthetic oligonucleotide
accacaccaccagtaggaacagaggtttat

SEQ ID NO: 411473 - DNA, 29 bp, Artificial Sequence
  Synthetic oligonucleotide
tgtctgaatgagaaagtagacgggtttat

SEQ ID NO: 411474 - DNA, 30 bp, Artificial Sequence
  Synthetic oligonucleotide
acgctgatgctccagattcatctggtttat

SEQ ID NO: 411475 - DNA, 30 bp, Artificial Sequence
  Synthetic oligonucleotide
tgaaatgggatggcctcgcccttggtttat

SEQ ID NO: 411476 - DNA, 30 bp, Artificial Sequence
  Synthetic oligonucleotide
tagttctcgtcaacggtgaccactgtttat

SEQ ID NO: 411477 - DNA, 30 bp, Artificial Sequence
  Synthetic oligonucleotide
tgcacggggcatccaaatcgaagtgtttat

SEQ ID NO: 411478 - DNA, 30 bp, Artificial Sequence
  Synthetic oligonucleotide
tccccgtccagctgtctattgagtgtttat

SEQ ID NO: 411479 - DNA, 30 bp, Artificial Sequence
  Synthetic oligonucleotide
gccgtgccgggtgatggtgcaattgtttat

SEQ ID NO: 411480 - DNA, 30 bp, Artificial Sequence
  Synthetic oligonucleotide
ctcgtgtgcggcatactatcccttgtttat

SEQ ID NO: 411481 - DNA, 30 bp, Artificial Sequence
  Synthetic oligonucleotide
ccagtgtctcaggatgcgaattttgtttat

SEQ ID NO: 411482 - DNA, 30 bp, Artificial Sequence
  Synthetic oligonucleotide
gctatcttgatttggtcccgaaaattttat

SEQ ID NO: 411483 - DNA, 30 bp, Artificial Sequence
  Synthetic oligonucleotide
ggcctaagatataccgttgttaagttttat

SEQ ID NO: 411484 - DNA, 30 bp, Artificial Sequence
  Synthetic oligonucleotide
atatggtgcatgctggcgtctcagttttat

SEQ ID NO: 411485 - DNA, 30 bp, Artificial Sequence
  Synthetic oligonucleotide
ggatatgccggtcatgcaaaacggttttat

SEQ ID NO: 411486 - DNA, 30 bp, Artificial Sequence
  Synthetic oligonucleotide
cggggaacttagtccagacaccggttttat

SEQ ID NO: 411487 - DNA, 30 bp, Artificial Sequence
  Synthetic oligonucleotide
aaatcattcacgtaaacagttgtgttttat

SEQ ID NO: 411488 - DNA, 30 bp, Artificial Sequence
  Synthetic oligonucleotide
gcggtcttaaatctgacaatacctttttat

SEQ ID NO: 411489 - DNA, 30 bp, Artificial Sequence
  Synthetic oligonucleotide
tgttgcctatccaccaaactaagaaaaact

SEQ ID NO: 411490 - DNA, 30 bp, Artificial Sequence
  Synthetic oligonucleotide
gccgggattgagtgtggtttaaacaaaact

SEQ ID NO: 411491 - DNA, 30 bp, Artificial Sequence
  Synthetic oligonucleotide
ttttcctgtagtatatgatcctccaaaact

SEQ ID NO: 411492 - DNA, 30 bp, Artificial Sequence
  Synthetic oligonucleotide
aagatgacatggcttgtaactggcaaaact

SEQ ID NO: 411493 - DNA, 30 bp, Artificial Sequence
  Synthetic oligonucleotide
agtcatggtctgtagtgtcttgagaaaact

SEQ ID NO: 411494 - DNA, 30 bp, Artificial Sequence
  Synthetic oligonucleotide
ttcctgctgggttgagcttaaattaaaact

SEQ ID NO: 411495 - DNA, 30 bp, Artificial Sequence
  Synthetic oligonucleotide
tgctccttcggtaatgaggggcagcaaact

SEQ ID NO: 411496 - DNA, 30 bp, Artificial Sequence
  Synthetic oligonucleotide
acagcggtcctttgatggtattggcaaact

SEQ ID NO: 411497 - DNA, 30 bp, Artificial Sequence
  Synthetic oligonucleotide
tacctgaaaataggttcaatgttgcaaact

SEQ ID NO: 411498 - DNA, 30 bp, Artificial Sequence
  Synthetic oligonucleotide
ctcgttacagagcggtcttttggagaaact

SEQ ID NO: 411499 - DNA, 31 bp, Artificial Sequence
  Synthetic oligonucleotide
gggtgtgatcgttagaccaccagacgaaact

SEQ ID NO: 411500 - DNA, 30 bp, Artificial Sequence
  Synthetic oligonucleotide
tagtcattacgccctcaaagcgacgaaact

SEQ ID NO: 411501 - DNA, 30 bp, Artificial Sequence
  Synthetic oligonucleotide
caccttagtagtcatgaacttgacgaaact

SEQ ID NO: 411502 - DNA, 30 bp, Artificial Sequence
  Synthetic oligonucleotide
agggtggcgtctaccccgtcccgcgaaact

SEQ ID NO: 411503 - DNA, 30 bp, Artificial Sequence
  Synthetic oligonucleotide
attatcccagcatcgccaagaggcgaaact

SEQ ID NO: 411504 - DNA, 30 bp, Artificial Sequence
  Synthetic oligonucleotide
ctagatcgcttctccatgaagtgcgaaact

SEQ ID NO: 411505 - DNA, 30 bp, Artificial Sequence
  Synthetic oligonucleotide
tctagcggcatcgttttgtggtgcgaaact

SEQ ID NO: 411506 - DNA, 30 bp, Artificial Sequence
  Synthetic oligonucleotide
ggaaccaagttatcttaacctgaggaaact

SEQ ID NO: 411507 - DNA, 30 bp, Artificial Sequence
  Synthetic oligonucleotide
catggggtccgtataggtctgctggaaact

SEQ ID NO: 411508 - DNA, 30 bp, Artificial Sequence
  Synthetic oligonucleotide
agtgttaagttacaattgttggatgaaact

SEQ ID NO: 411509 - DNA, 30 bp, Artificial Sequence
  Synthetic oligonucleotide
cgccagagagcattaaccccgggtgaaact

SEQ ID NO: 411510 - DNA, 30 bp, Artificial Sequence
  Synthetic oligonucleotide
atgggcaaccttctagaaaaaattgaaact

SEQ ID NO: 411511 - DNA, 30 bp, Artificial Sequence
  Synthetic oligonucleotide
tgttccgtccgtcaaaagtcaaaataaact

SEQ ID NO: 411512 - DNA, 30 bp, Artificial Sequence
  Synthetic oligonucleotide
gttttcggctcgaatggcctcggataaact

SEQ ID NO: 411513 - DNA, 30 bp, Artificial Sequence
  Synthetic oligonucleotide
ggtcgcatgtccggcagcgctatgtaaact

SEQ ID NO: 411514 - DNA, 30 bp, Artificial Sequence
  Synthetic oligonucleotide
tcatatggattgatgcataagaattaaact

SEQ ID NO: 411515 - DNA, 30 bp, Artificial Sequence
  Synthetic oligonucleotide
ggttgagacaatgatgtccgtcgttaaact

SEQ ID NO: 411516 - DNA, 30 bp, Artificial Sequence
  Synthetic oligonucleotide
gtggacggtggtctagggcggggttaaact

SEQ ID NO: 411517 - DNA, 30 bp, Artificial Sequence
  Synthetic oligonucleotide
ggtagacagcacttgataccttgttaaact

SEQ ID NO: 411518 - DNA, 30 bp, Artificial Sequence
  Synthetic oligonucleotide
tcagtggggcacctcatggacatttaaact

SEQ ID NO: 411519 - DNA, 30 bp, Artificial Sequence
  Synthetic oligonucleotide
attttgcagtagggcacatggagtacaact

SEQ ID NO: 411520 - DNA, 30 bp, Artificial Sequence
  Synthetic oligonucleotide
tttgggaagtgccaaatttagattacaact

SEQ ID NO: 411521 - DNA, 30 bp, Artificial Sequence
  Synthetic oligonucleotide
agttgttagccctattatattagaccaact

SEQ ID NO: 411522 - DNA, 30 bp, Artificial Sequence
  Synthetic oligonucleotide
aatgtttacaggacgtagtgtggaccaact

SEQ ID NO: 411523 - DNA, 30 bp, Artificial Sequence
  Synthetic oligonucleotide
agagttcaatcagaaagatggcccccaact

SEQ ID NO: 411524 - DNA, 30 bp, Artificial Sequence
  Synthetic oligonucleotide
agcgggttggtcggttcggatcccccaact

SEQ ID NO: 411525 - DNA, 30 bp, Artificial Sequence
  Synthetic oligonucleotide
cccagtcaattgaggcctcatgctccaact

SEQ ID NO: 411526 - DNA, 30 bp, Artificial Sequence
  Synthetic oligonucleotide
ctgtataattctcaacgatattgtccaact

SEQ ID NO: 411527 - DNA, 30 bp, Artificial Sequence
  Synthetic oligonucleotide
gaactgggacccatcttcacgtttccaact

SEQ ID NO: 411528 - DNA, 30 bp, Artificial Sequence
  Synthetic oligonucleotide
caagattttttagtcgttattcgagcaact

SEQ ID NO: 411529 - DNA, 30 bp, Artificial Sequence
  Synthetic oligonucleotide
attggagaagactatgataggatagcaact

SEQ ID NO: 411530 - DNA, 30 bp, Artificial Sequence
  Synthetic oligonucleotide
ctagtaccagcattgttagatcacgcaact

SEQ ID NO: 411531 - DNA, 30 bp, Artificial Sequence
  Synthetic oligonucleotide
ttgacctggggagggcggcagcgcgcaact

SEQ ID NO: 411532 - DNA, 30 bp, Artificial Sequence
  Synthetic oligonucleotide
atacgtccacccacggcgttgcaggcaact

SEQ ID NO: 411533 - DNA, 30 bp, Artificial Sequence
  Synthetic oligonucleotide
cagggacgttcttgccagaaacttgcaact

SEQ ID NO: 411534 - DNA, 30 bp, Artificial Sequence
  Synthetic oligonucleotide
acgataaccatgccgacaatgccctcaact

SEQ ID NO: 411535 - DNA, 30 bp, Artificial Sequence
  Synthetic oligonucleotide
tgggatttgttccaatgttacgggtcaact

SEQ ID NO: 411536 - DNA, 30 bp, Artificial Sequence
  Synthetic oligonucleotide
tatcgacgcaggtgcacgaccgggtcaact

SEQ ID NO: 411537 - DNA, 30 bp, Artificial Sequence
  Synthetic oligonucleotide
cggtattactccacagggcgtgggtcaact

SEQ ID NO: 411538 - DNA, 30 bp, Artificial Sequence
  Synthetic oligonucleotide
gatgaatgaagtctgctcgtttggtcaact

SEQ ID NO: 411539 - DNA, 30 bp, Artificial Sequence
  Synthetic oligonucleotide
ttgctacctatcattgctaagggttcaact

SEQ ID NO: 411540 - DNA, 30 bp, Artificial Sequence
  Synthetic oligonucleotide
cacgcaggtggtattctgcggtaaagaact

SEQ ID NO: 411541 - DNA, 30 bp, Artificial Sequence
  Synthetic oligonucleotide
tccgcggaaattgcgtattatcacagaact

SEQ ID NO: 411542 - DNA, 30 bp, Artificial Sequence
  Synthetic oligonucleotide
gagatggtttatagggtagcttcgagaact

SEQ ID NO: 411543 - DNA, 30 bp, Artificial Sequence
  Synthetic oligonucleotide
tggtcatggcccgtgccagaaatgagaact

SEQ ID NO: 411544 - DNA, 30 bp, Artificial Sequence
  Synthetic oligonucleotide
attacttaattctgctacacgtgtagaact

SEQ ID NO: 411545 - DNA, 30 bp, Artificial Sequence
  Synthetic oligonucleotide
tatgcgatgtttacccgtgggcttagaact

SEQ ID NO: 411546 - DNA, 30 bp, Artificial Sequence
  Synthetic oligonucleotide
agcatgagtcgtgggcgccagccaggaact

SEQ ID NO: 411547 - DNA, 30 bp, Artificial Sequence
  Synthetic oligonucleotide
aagtgcgcaagtagatgcaggggaggaact

SEQ ID NO: 411548 - DNA, 30 bp, Artificial Sequence
  Synthetic oligonucleotide
cgtgcttattattatcctgttcacggaact

SEQ ID NO: 411549 - DNA, 30 bp, Artificial Sequence
  Synthetic oligonucleotide
gacattactttttgggcagattgcggaact

SEQ ID NO: 411550 - DNA, 30 bp, Artificial Sequence
  Synthetic oligonucleotide
agttgttctcctagctggcagatcggaact

SEQ ID NO: 411551 - DNA, 30 bp, Artificial Sequence
  Synthetic oligonucleotide
atgaacaattgctagcataggtagggaact

SEQ ID NO: 411552 - DNA, 30 bp, Artificial Sequence
  Synthetic oligonucleotide
agaccaggacgcctcgccgcgacgggaact

SEQ ID NO: 411553 - DNA, 30 bp, Artificial Sequence
  Synthetic oligonucleotide
tgtatagttctttcattcttgaggggaact

SEQ ID NO: 411554 - DNA, 30 bp, Artificial Sequence
  Synthetic oligonucleotide
gcaaggcagggaagccggcctttgggaact

SEQ ID NO: 411555 - DNA, 28 bp, Artificial Sequence
  Synthetic oligonucleotide
cgtgctagtttagacaatatatggaact

SEQ ID NO: 411556 - DNA, 30 bp, Artificial Sequence
  Synthetic oligonucleotide
agtactttcaggaaccggagcggtggaact

SEQ ID NO: 411557 - DNA, 30 bp, Artificial Sequence
  Synthetic oligonucleotide
ttctgagagccatatgtatgttgtggaact

SEQ ID NO: 411558 - DNA, 30 bp, Artificial Sequence
  Synthetic oligonucleotide
atctttgcaacagcaagcgatccatgaact

SEQ ID NO: 411559 - DNA, 30 bp, Artificial Sequence
  Synthetic oligonucleotide
gcgcaagcagcgtacgtacttcgatgaact

SEQ ID NO: 411560 - DNA, 30 bp, Artificial Sequence
  Synthetic oligonucleotide
tcctgggtccgttagggggccgactgaact

SEQ ID NO: 411561 - DNA, 30 bp, Artificial Sequence
  Synthetic oligonucleotide
tttggtctgatacttatcatggactgaact

SEQ ID NO: 411562 - DNA, 30 bp, Artificial Sequence
  Synthetic oligonucleotide
caccatttgggtagtgggacgtagtgaact

SEQ ID NO: 411563 - DNA, 30 bp, Artificial Sequence
  Synthetic oligonucleotide
tacggccccacaacttatcccatttgaact

SEQ ID NO: 411564 - DNA, 30 bp, Artificial Sequence
  Synthetic oligonucleotide
gattataggaagagtatcgctcgaataact

SEQ ID NO: 411565 - DNA, 30 bp, Artificial Sequence
  Synthetic oligonucleotide
aacggcgttgccccggcgaaggatataact

SEQ ID NO: 411566 - DNA, 30 bp, Artificial Sequence
  Synthetic oligonucleotide
cgccctggtggccaactaatctatataact

SEQ ID NO: 411567 - DNA, 30 bp, Artificial Sequence
  Synthetic oligonucleotide
tgtggtggtccatggataccggctataact

SEQ ID NO: 411568 - DNA, 30 bp, Artificial Sequence
  Synthetic oligonucleotide
tgacgctagatgagtacgagacgtataact

SEQ ID NO: 411569 - DNA, 30 bp, Artificial Sequence
  Synthetic oligonucleotide
cgggtccgaagtctcgccctcggtataact

SEQ ID NO: 411570 - DNA, 30 bp, Artificial Sequence
  Synthetic oligonucleotide
accactttgagcagtggctgtgttataact

SEQ ID NO: 411571 - DNA, 30 bp, Artificial Sequence
  Synthetic oligonucleotide
gaagtgttgtatcgaaagagacgactaact

SEQ ID NO: 411572 - DNA, 30 bp, Artificial Sequence
  Synthetic oligonucleotide
tctttaggttatgtcaatactaagctaact

SEQ ID NO: 411573 - DNA, 29 bp, Artificial Sequence
  Synthetic oligonucleotide
gaattatataccgcacgggaatgctaact

SEQ ID NO: 411574 - DNA, 30 bp, Artificial Sequence
  Synthetic oligonucleotide
ccaagagtcacgaaccccgtgactctaact

SEQ ID NO: 411575 - DNA, 30 bp, Artificial Sequence
  Synthetic oligonucleotide
tagggtggacatatagttcgtcctctaact

SEQ ID NO: 411576 - DNA, 30 bp, Artificial Sequence
  Synthetic oligonucleotide
aaggcctgcaacaagttggaaggagtaact

SEQ ID NO: 411577 - DNA, 30 bp, Artificial Sequence
  Synthetic oligonucleotide
gatatagccactaagatttttgtagtaact

SEQ ID NO: 411578 - DNA, 30 bp, Artificial Sequence
  Synthetic oligonucleotide
agagtggtcatcgatctgcatcgcgtaact

SEQ ID NO: 411579 - DNA, 30 bp, Artificial Sequence
  Synthetic oligonucleotide
cgaaccattgtggttagatgagtcgtaact

SEQ ID NO: 411580 - DNA, 30 bp, Artificial Sequence
  Synthetic oligonucleotide
tggtttcagatagaatttaacacggtaact

SEQ ID NO: 411581 - DNA, 30 bp, Artificial Sequence
  Synthetic oligonucleotide
cagccaatttccttacgcggaggggtaact

SEQ ID NO: 411582 - DNA, 30 bp, Artificial Sequence
  Synthetic oligonucleotide
gtatggactttatctcgatcttgattaact

SEQ ID NO: 411583 - DNA, 30 bp, Artificial Sequence
  Synthetic oligonucleotide
atctcagacacatgtatactgatattaact

SEQ ID NO: 411584 - DNA, 30 bp, Artificial Sequence
  Synthetic oligonucleotide
tcttgacaacctaaagatgttcagttaact

SEQ ID NO: 411585 - DNA, 30 bp, Artificial Sequence
  Synthetic oligonucleotide
cctacccgcgggtatactgtatggttaact

SEQ ID NO: 411586 - DNA, 30 bp, Artificial Sequence
  Synthetic oligonucleotide
gccccatattgtaaggtagctgtgttaact

SEQ ID NO: 411587 - DNA, 30 bp, Artificial Sequence
  Synthetic oligonucleotide
gagcctggtcaaacaattatacttttaact

SEQ ID NO: 411588 - DNA, 30 bp, Artificial Sequence
  Synthetic oligonucleotide
gtatgtgacggtacgcaatgcgttttaact

SEQ ID NO: 411589 - DNA, 30 bp, Artificial Sequence
  Synthetic oligonucleotide
agcctcagggaggccgttaattccaacact

SEQ ID NO: 411590 - DNA, 30 bp, Artificial Sequence
  Synthetic oligonucleotide
gactgtcagttgtttactgaaggcaacact

SEQ ID NO: 411591 - DNA, 30 bp, Artificial Sequence
  Synthetic oligonucleotide
tatgtaacggtccagggtatcccgaacact

SEQ ID NO: 411592 - DNA, 30 bp, Artificial Sequence
  Synthetic oligonucleotide
gcgaaaggactcttgtgtccgtggaacact

SEQ ID NO: 411593 - DNA, 30 bp, Artificial Sequence
  Synthetic oligonucleotide
gctagttatgggccgtgcggtgtgaacact

SEQ ID NO: 411594 - DNA, 30 bp, Artificial Sequence
  Synthetic oligonucleotide
gcgtgattttcccggtccgctgataacact

SEQ ID NO: 411595 - DNA, 30 bp, Artificial Sequence
  Synthetic oligonucleotide
tacagttcccatttcattcgtattaacact

SEQ ID NO: 411596 - DNA, 30 bp, Artificial Sequence
  Synthetic oligonucleotide
tgatatgtaaccaagtatatggttaacact

SEQ ID NO: 411597 - DNA, 30 bp, Artificial Sequence
  Synthetic oligonucleotide
cgcctatgcgccgatgtaatatttaacact

SEQ ID NO: 411598 - DNA, 30 bp, Artificial Sequence
  Synthetic oligonucleotide
gcacagggtccatcagtgatgtcacacact

SEQ ID NO: 411599 - DNA, 30 bp, Artificial Sequence
  Synthetic oligonucleotide
acgcagtaaccaagggacccctgacacact

SEQ ID NO: 411600 - DNA, 30 bp, Artificial Sequence
  Synthetic oligonucleotide
agtgcattaagctaagcgggttcgcacact

SEQ ID NO: 411601 - DNA, 30 bp, Artificial Sequence
  Synthetic oligonucleotide
taagcagccgacagtgttagaaatcacact

SEQ ID NO: 411602 - DNA, 29 bp, Artificial Sequence
  Synthetic oligonucleotide
tagggagctagccggcaacgcaagacact

SEQ ID NO: 411603 - DNA, 30 bp, Artificial Sequence
  Synthetic oligonucleotide
ggctcttttaaattatggcgcccagacact

SEQ ID NO: 411604 - DNA, 30 bp, Artificial Sequence
  Synthetic oligonucleotide
gaagctggtttgggggcgaatggagacact

SEQ ID NO: 411605 - DNA, 30 bp, Artificial Sequence
  Synthetic oligonucleotide
aatgcagccagttgtatgccaggggacact

SEQ ID NO: 411606 - DNA, 30 bp, Artificial Sequence
  Synthetic oligonucleotide
agctgagaagatggcgttcttcatgacact

SEQ ID NO: 411607 - DNA, 30 bp, Artificial Sequence
  Synthetic oligonucleotide
cccgttgttattgcctcttgtcttgacact

SEQ ID NO: 411608 - DNA, 30 bp, Artificial Sequence
  Synthetic oligonucleotide
ttaaacttcgtctgacttttcctctacact

SEQ ID NO: 411609 - DNA, 30 bp, Artificial Sequence
  Synthetic oligonucleotide
cggaatagtgagctgttgctgcagtacact

SEQ ID NO: 411610 - DNA, 30 bp, Artificial Sequence
  Synthetic oligonucleotide
tcccggagaggcccctccgaggggtacact

SEQ ID NO: 411611 - DNA, 30 bp, Artificial Sequence
  Synthetic oligonucleotide
tatccgatatgtcgctaacacgattacact

SEQ ID NO: 411612 - DNA, 30 bp, Artificial Sequence
  Synthetic oligonucleotide
tcagattgatcgtggcattgtacaaccact

SEQ ID NO: 411613 - DNA, 30 bp, Artificial Sequence
  Synthetic oligonucleotide
tgacgtgatgaggtcgacgctggcaccact

SEQ ID NO: 411614 - DNA, 30 bp, Artificial Sequence
  Synthetic oligonucleotide
gcgcgttgcacgaaggataaagtcaccact

SEQ ID NO: 411615 - DNA, 30 bp, Artificial Sequence
  Synthetic oligonucleotide
atgctgattttgccaggaaaccagaccact

SEQ ID NO: 411616 - DNA, 30 bp, Artificial Sequence
  Synthetic oligonucleotide
agtggttttgattcgatgatagtgaccact

SEQ ID NO: 411617 - DNA, 30 bp, Artificial Sequence
  Synthetic oligonucleotide
ctgcgccatgtgtacccccggcataccact

SEQ ID NO: 411618 - DNA, 30 bp, Artificial Sequence
  Synthetic oligonucleotide
taatcattggcacggccgacctcccccact

SEQ ID NO: 411619 - DNA, 30 bp, Artificial Sequence
  Synthetic oligonucleotide
tgggatttgggtttaggggaaggccccact

SEQ ID NO: 411620 - DNA, 30 bp, Artificial Sequence
  Synthetic oligonucleotide
taataagaaggggccattaccactcccact

SEQ ID NO: 411621 - DNA, 30 bp, Artificial Sequence
  Synthetic oligonucleotide
ggtattgaaccattggcatgcacagccact

SEQ ID NO: 411622 - DNA, 30 bp, Artificial Sequence
  Synthetic oligonucleotide
agtatactccaacggacaaccggagccact

SEQ ID NO: 411623 - DNA, 30 bp, Artificial Sequence
  Synthetic oligonucleotide
gggatagtgtgctgcgtgtatggagccact

SEQ ID NO: 411624 - DNA, 31 bp, Artificial Sequence
  Synthetic oligonucleotide
aggctcatgggcgggaccaatacaggccact

SEQ ID NO: 411625 - DNA, 30 bp, Artificial Sequence
  Synthetic oligonucleotide
gcaccccctcagactgggaaactggccact

SEQ ID NO: 411626 - DNA, 30 bp, Artificial Sequence
  Synthetic oligonucleotide
agagaacctaatcttgcctatgatgccact

SEQ ID NO: 411627 - DNA, 30 bp, Artificial Sequence
  Synthetic oligonucleotide
gagtgaggtgccatccaagatatatccact

SEQ ID NO: 411628 - DNA, 30 bp, Artificial Sequence
  Synthetic oligonucleotide
ggtggtttaacggcagatactagctccact

SEQ ID NO: 411629 - DNA, 30 bp, Artificial Sequence
  Synthetic oligonucleotide
actgccaagagggcttaatagggttccact

SEQ ID NO: 411630 - DNA, 30 bp, Artificial Sequence
  Synthetic oligonucleotide
tctccggccactgatactatccgaagcact

SEQ ID NO: 411631 - DNA, 30 bp, Artificial Sequence
  Synthetic oligonucleotide
ctgccgaactatctcaataggtacagcact

SEQ ID NO: 411632 - DNA, 30 bp, Artificial Sequence
  Synthetic oligonucleotide
aaggtgccctacgtattactggccagcact

SEQ ID NO: 411633 - DNA, 30 bp, Artificial Sequence
  Synthetic oligonucleotide
aaaaacagggggggtatgcgggtgagcact

SEQ ID NO: 411634 - DNA, 30 bp, Artificial Sequence
  Synthetic oligonucleotide
gccagcaaagaggacgttatgcatagcact

SEQ ID NO: 411635 - DNA, 30 bp, Artificial Sequence
  Synthetic oligonucleotide
ataatcttccttatgacgagttctagcact

SEQ ID NO: 411636 - DNA, 30 bp, Artificial Sequence
  Synthetic oligonucleotide
ggttacattcatacttgtctaggtagcact

SEQ ID NO: 411637 - DNA, 30 bp, Artificial Sequence
  Synthetic oligonucleotide
ggagataatcggctacgtgtactccgcact

SEQ ID NO: 411638 - DNA, 30 bp, Artificial Sequence
  Synthetic oligonucleotide
gtaactcacgcagggcctaccgcgcgcact

SEQ ID NO: 411639 - DNA, 30 bp, Artificial Sequence
  Synthetic oligonucleotide
tgtaagtagcaattttaagaaggaggcact

SEQ ID NO: 411640 - DNA, 30 bp, Artificial Sequence
  Synthetic oligonucleotide
aggcattgaacgctggcttcgataggcact

SEQ ID NO: 411641 - DNA, 30 bp, Artificial Sequence
  Synthetic oligonucleotide
ggaggtacggccgcctaatgtccgggcact

SEQ ID NO: 411642 - DNA, 30 bp, Artificial Sequence
  Synthetic oligonucleotide
gtacagccggtttaggggactaatggcact

SEQ ID NO: 411643 - DNA, 30 bp, Artificial Sequence
  Synthetic oligonucleotide
cgcctggtatcgccggcatgcactggcact

SEQ ID NO: 411644 - DNA, 30 bp, Artificial Sequence
  Synthetic oligonucleotide
acgtagctaaggtgcagcagggctggcact

SEQ ID NO: 411645 - DNA, 30 bp, Artificial Sequence
  Synthetic oligonucleotide
aggactattaccattggaggcagtggcact

SEQ ID NO: 411646 - DNA, 30 bp, Artificial Sequence
  Synthetic oligonucleotide
ccgttcgatgaatacgcgcagaaatgcact

SEQ ID NO: 411647 - DNA, 30 bp, Artificial Sequence
  Synthetic oligonucleotide
gccggcgagtcaaaagtccacggatgcact

SEQ ID NO: 411648 - DNA, 30 bp, Artificial Sequence
  Synthetic oligonucleotide
aacatagcctgaaacagtcagtgatgcact

SEQ ID NO: 411649 - DNA, 30 bp, Artificial Sequence
  Synthetic oligonucleotide
accgatcgacatttcatgtcggactgcact

SEQ ID NO: 411650 - DNA, 30 bp, Artificial Sequence
  Synthetic oligonucleotide
cccgttctctaacacggctagagctgcact

SEQ ID NO: 411651 - DNA, 30 bp, Artificial Sequence
  Synthetic oligonucleotide
gctggggtcgcctaaaagcgactctgcact

SEQ ID NO: 411652 - DNA, 30 bp, Artificial Sequence
  Synthetic oligonucleotide
tgaaaattcacaaatagtcggttctgcact

SEQ ID NO: 411653 - DNA, 30 bp, Artificial Sequence
  Synthetic oligonucleotide
gcacttatttattagcgggtggtgtgcact

SEQ ID NO: 411654 - DNA, 30 bp, Artificial Sequence
  Synthetic oligonucleotide
gctgattaaggatatgtgtgacaaatcact

SEQ ID NO: 411655 - DNA, 30 bp, Artificial Sequence
  Synthetic oligonucleotide
aatgtaccagaccctaacgtctaaatcact

SEQ ID NO: 411656 - DNA, 30 bp, Artificial Sequence
  Synthetic oligonucleotide
tcctataacgatggggatgatagaatcact

SEQ ID NO: 411657 - DNA, 30 bp, Artificial Sequence
  Synthetic oligonucleotide
catactcaacagcggtataggagtatcact

SEQ ID NO: 411658 - DNA, 30 bp, Artificial Sequence
  Synthetic oligonucleotide
tactgccgggctacgccacacttactcact

SEQ ID NO: 411659 - DNA, 30 bp, Artificial Sequence
  Synthetic oligonucleotide
agaaccgtgaaagtcatgtgaggcctcact

SEQ ID NO: 411660 - DNA, 30 bp, Artificial Sequence
  Synthetic oligonucleotide
agcgtgaactaggctccttgaacgctcact

SEQ ID NO: 411661 - DNA, 30 bp, Artificial Sequence
  Synthetic oligonucleotide
caaaacgcacaactcacccactctctcact

SEQ ID NO: 411662 - DNA, 30 bp, Artificial Sequence
  Synthetic oligonucleotide
accaagcaacgatctcgtcaggaagtcact

SEQ ID NO: 411663 - DNA, 30 bp, Artificial Sequence
  Synthetic oligonucleotide
cggataggttcggagccatgtacagtcact

SEQ ID NO: 411664 - DNA, 30 bp, Artificial Sequence
  Synthetic oligonucleotide
gccggtaccagcctttgaataaacgtcact

SEQ ID NO: 411665 - DNA, 30 bp, Artificial Sequence
  Synthetic oligonucleotide
ataaataatcggcctaccgcaaccgtcact

SEQ ID NO: 411666 - DNA, 30 bp, Artificial Sequence
  Synthetic oligonucleotide
atagcgactatagtcccgacgtgcgtcact

SEQ ID NO: 411667 - DNA, 30 bp, Artificial Sequence
  Synthetic oligonucleotide
acattaatgttatgagtgttttaggtcact

SEQ ID NO: 411668 - DNA, 30 bp, Artificial Sequence
  Synthetic oligonucleotide
tcatcaccactggacacagtagcggtcact

SEQ ID NO: 411669 - DNA, 30 bp, Artificial Sequence
  Synthetic oligonucleotide
attcgcggaagtgatttaaaatttgtcact

SEQ ID NO: 411670 - DNA, 30 bp, Artificial Sequence
  Synthetic oligonucleotide
aactggatccgcgtgggaccttaattcact

SEQ ID NO: 411671 - DNA, 30 bp, Artificial Sequence
  Synthetic oligonucleotide
tatgcgaatcggaagctagcaaacttcact

SEQ ID NO: 411672 - DNA, 30 bp, Artificial Sequence
  Synthetic oligonucleotide
accggtgtatgtgctttaagagccttcact

SEQ ID NO: 411673 - DNA, 30 bp, Artificial Sequence
  Synthetic oligonucleotide
gcagaagagccattcctcgagttcttcact

SEQ ID NO: 411674 - DNA, 30 bp, Artificial Sequence
  Synthetic oligonucleotide
aaagtatcttatccacgttgggggttcact

SEQ ID NO: 411675 - DNA, 30 bp, Artificial Sequence
  Synthetic oligonucleotide
aagcagatatgcaataaccagcaaaagact

SEQ ID NO: 411676 - DNA, 30 bp, Artificial Sequence
  Synthetic oligonucleotide
ttctgtgcgtggctttttacgtacaagact

SEQ ID NO: 411677 - DNA, 30 bp, Artificial Sequence
  Synthetic oligonucleotide
gcccagtattacacatttcttgccaagact

SEQ ID NO: 411678 - DNA, 30 bp, Artificial Sequence
  Synthetic oligonucleotide
ttgatggttcaattctacggaagcaagact

SEQ ID NO: 411679 - DNA, 30 bp, Artificial Sequence
  Synthetic oligonucleotide
ctttctgacactcgaaacaatgagaagact

SEQ ID NO: 411680 - DNA, 30 bp, Artificial Sequence
  Synthetic oligonucleotide
gttggtaatccgtcagtcaaggtgaagact

SEQ ID NO: 411681 - DNA, 30 bp, Artificial Sequence
  Synthetic oligonucleotide
ttatatgtcacgagtaatattgtgaagact

SEQ ID NO: 411682 - DNA, 30 bp, Artificial Sequence
  Synthetic oligonucleotide
acaaatgtttcagatatgaaaaataagact

SEQ ID NO: 411683 - DNA, 30 bp, Artificial Sequence
  Synthetic oligonucleotide
agtttagtaggttcaaggtttgttaagact

SEQ ID NO: 411684 - DNA, 30 bp, Artificial Sequence
  Synthetic oligonucleotide
tacagaagttacttgcatatacaacagact

SEQ ID NO: 411685 - DNA, 30 bp, Artificial Sequence
  Synthetic oligonucleotide
gctggtggttgacacattcctacgcagact

SEQ ID NO: 411686 - DNA, 30 bp, Artificial Sequence
  Synthetic oligonucleotide
agcgtgttcgttggccctgacatggagact

SEQ ID NO: 411687 - DNA, 30 bp, Artificial Sequence
  Synthetic oligonucleotide
ttaactggtgcctattttttcctggagact

SEQ ID NO: 411688 - DNA, 30 bp, Artificial Sequence
  Synthetic oligonucleotide
aataatccaggcaaggcaggtttggagact

SEQ ID NO: 411689 - DNA, 30 bp, Artificial Sequence
  Synthetic oligonucleotide
aaaagttctgtgattgatgagtatgagact

SEQ ID NO: 411690 - DNA, 30 bp, Artificial Sequence
  Synthetic oligonucleotide
ttggcgttgacagagggtttgggtgagact

SEQ ID NO: 411691 - DNA, 30 bp, Artificial Sequence
  Synthetic oligonucleotide
accttattcacagaatatcaacaatagact

SEQ ID NO: 411692 - DNA, 30 bp, Artificial Sequence
  Synthetic oligonucleotide
agctccccttactcgtatacctgatagact

SEQ ID NO: 411693 - DNA, 30 bp, Artificial Sequence
  Synthetic oligonucleotide
cgcatgtactagtaaagaaagaactagact

SEQ ID NO: 411694 - DNA, 30 bp, Artificial Sequence
  Synthetic oligonucleotide
gttcgcgagtttaacacttagaactagact

SEQ ID NO: 411695 - DNA, 30 bp, Artificial Sequence
  Synthetic oligonucleotide
tttaagattgtgttgattccagactagact

SEQ ID NO: 411696 - DNA, 30 bp, Artificial Sequence
  Synthetic oligonucleotide
aatcaatgtgggtataaacagatctagact

SEQ ID NO: 411697 - DNA, 30 bp, Artificial Sequence
  Synthetic oligonucleotide
cgaatagatgcagatcgacggttgtagact

SEQ ID NO: 411698 - DNA, 30 bp, Artificial Sequence
  Synthetic oligonucleotide
cgcttagatatacggtcgtacgaaacgact

SEQ ID NO: 411699 - DNA, 30 bp, Artificial Sequence
  Synthetic oligonucleotide
agtatcccaaatcgaactgttcgaacgact

SEQ ID NO: 411700 - DNA, 30 bp, Artificial Sequence
  Synthetic oligonucleotide
gagtacattatttattttacgcttccgact

SEQ ID NO: 411701 - DNA, 30 bp, Artificial Sequence
  Synthetic oligonucleotide
ggtcaattttgataggatgtggcagcgact

SEQ ID NO: 411702 - DNA, 30 bp, Artificial Sequence
  Synthetic oligonucleotide
ggaatcctcatcggctaagtttgagcgact

SEQ ID NO: 411703 - DNA, 30 bp, Artificial Sequence
  Synthetic oligonucleotide
tgcttcgcgtcacttacgcttaaggcgact

SEQ ID NO: 411704 - DNA, 30 bp, Artificial Sequence
  Synthetic oligonucleotide
aaacagattagactcgctaattgggcgact

SEQ ID NO: 411705 - DNA, 30 bp, Artificial Sequence
  Synthetic oligonucleotide
tataggcatggaaggtccgggcatgcgact

SEQ ID NO: 411706 - DNA, 30 bp, Artificial Sequence
  Synthetic oligonucleotide
atctcgtttcaagcgggagccactgcgact

SEQ ID NO: 411707 - DNA, 30 bp, Artificial Sequence
  Synthetic oligonucleotide
ctggggccagtagtcacctctcgatcgact

SEQ ID NO: 411708 - DNA, 30 bp, Artificial Sequence
  Synthetic oligonucleotide
accactgccacgattatacgatattcgact

SEQ ID NO: 411709 - DNA, 30 bp, Artificial Sequence
  Synthetic oligonucleotide
atcaaccgtaggtccgacattagttcgact

SEQ ID NO: 411710 - DNA, 30 bp, Artificial Sequence
  Synthetic oligonucleotide
tggggtattgttagagcacttagttcgact

SEQ ID NO: 411711 - DNA, 30 bp, Artificial Sequence
  Synthetic oligonucleotide
gactacgtaggggtataaaattaaaggact

SEQ ID NO: 411712 - DNA, 30 bp, Artificial Sequence
  Synthetic oligonucleotide
atgacgtaaaatgctgttgggccaaggact

SEQ ID NO: 411713 - DNA, 30 bp, Artificial Sequence
  Synthetic oligonucleotide
ataacgacatgcaagatttagggaaggact

SEQ ID NO: 411714 - DNA, 30 bp, Artificial Sequence
  Synthetic oligonucleotide
gtgtgggtttatgcaaatcatcccaggact

SEQ ID NO: 411715 - DNA, 30 bp, Artificial Sequence
  Synthetic oligonucleotide
tgcataggcttgcatagctgtagcaggact

SEQ ID NO: 411716 - DNA, 30 bp, Artificial Sequence
  Synthetic oligonucleotide
gcaccttgaatagagagccggatcaggact

SEQ ID NO: 411717 - DNA, 30 bp, Artificial Sequence
  Synthetic oligonucleotide
ggccgtaagacgtagaacctattgaggact

SEQ ID NO: 411718 - DNA, 30 bp, Artificial Sequence
  Synthetic oligonucleotide
gtttcgcgccgtgcagcgggaaataggact

SEQ ID NO: 411719 - DNA, 30 bp, Artificial Sequence
  Synthetic oligonucleotide
aaaatctaataggatcttcactttaggact

SEQ ID NO: 411720 - DNA, 30 bp, Artificial Sequence
  Synthetic oligonucleotide
agctcggcagggcgttttgatagacggact

SEQ ID NO: 411721 - DNA, 30 bp, Artificial Sequence
  Synthetic oligonucleotide
gctgtacgtgatttagacaaaggacggact

SEQ ID NO: 411722 - DNA, 30 bp, Artificial Sequence
  Synthetic oligonucleotide
aagtctagttgcgcctagttgggacggact

SEQ ID NO: 411723 - DNA, 30 bp, Artificial Sequence
  Synthetic oligonucleotide
cgaccgacagtggacgaagtatctcggact

SEQ ID NO: 411724 - DNA, 30 bp, Artificial Sequence
  Synthetic oligonucleotide
atcccacacacgttatccagatgtcggact

SEQ ID NO: 411725 - DNA, 30 bp, Artificial Sequence
  Synthetic oligonucleotide
gttaataggcctaatgtagatatagggact

SEQ ID NO: 411726 - DNA, 30 bp, Artificial Sequence
  Synthetic oligonucleotide
ttctattagtagtattttccacacgggact

SEQ ID NO: 411727 - DNA, 30 bp, Artificial Sequence
  Synthetic oligonucleotide
tacattctagcccagtcggctaaatggact

SEQ ID NO: 411728 - DNA, 30 bp, Artificial Sequence
  Synthetic oligonucleotide
cgtaaggtgtcaacgggaaagttatggact

SEQ ID NO: 411729 - DNA, 30 bp, Artificial Sequence
  Synthetic oligonucleotide
ttagatttaattcatcccttccactggact

SEQ ID NO: 411730 - DNA, 30 bp, Artificial Sequence
  Synthetic oligonucleotide
gacaccagaagcgttttgtagtcctggact

SEQ ID NO: 411731 - DNA, 30 bp, Artificial Sequence
  Synthetic oligonucleotide
ttatgaaggtttggtggtgtgagctggact

SEQ ID NO: 411732 - DNA, 30 bp, Artificial Sequence
  Synthetic oligonucleotide
agcttgatcatctataatagactctggact

SEQ ID NO: 411733 - DNA, 30 bp, Artificial Sequence
  Synthetic oligonucleotide
ttggcgacagctggatcggcgaattggact

SEQ ID NO: 411734 - DNA, 30 bp, Artificial Sequence
  Synthetic oligonucleotide
acaaagtaccgaatcgaacggccttggact

SEQ ID NO: 411735 - DNA, 30 bp, Artificial Sequence
  Synthetic oligonucleotide
cgggacgcaggaagcaaagcgtgttggact

SEQ ID NO: 411736 - DNA, 30 bp, Artificial Sequence
  Synthetic oligonucleotide
ctggtctcatgagtctaacgggtttggact

SEQ ID NO: 411737 - DNA, 30 bp, Artificial Sequence
  Synthetic oligonucleotide
tgttacgtcgatggtcccgatgtttggact

SEQ ID NO: 411738 - DNA, 30 bp, Artificial Sequence
  Synthetic oligonucleotide
gcaataaacgaccggtcgagtcaaatgact

SEQ ID NO: 411739 - DNA, 30 bp, Artificial Sequence
  Synthetic oligonucleotide
gcctatttgccaacagttgttggaatgact

SEQ ID NO: 411740 - DNA, 30 bp, Artificial Sequence
  Synthetic oligonucleotide
cgtaatctacttcagggtcaattaatgact

SEQ ID NO: 411741 - DNA, 30 bp, Artificial Sequence
  Synthetic oligonucleotide
tgcaagtgaactgcccgaattcatatgact

SEQ ID NO: 411742 - DNA, 30 bp, Artificial Sequence
  Synthetic oligonucleotide
caatttgtccgggcccttataactatgact

SEQ ID NO: 411743 - DNA, 30 bp, Artificial Sequence
  Synthetic oligonucleotide
ggtattcagtgagggcaccgcattatgact

SEQ ID NO: 411744 - DNA, 30 bp, Artificial Sequence
  Synthetic oligonucleotide
tcaacccgtccttttaggcaagttatgact

SEQ ID NO: 411745 - DNA, 30 bp, Artificial Sequence
  Synthetic oligonucleotide
ctcattaccatatttaatctctgactgact

SEQ ID NO: 411746 - DNA, 30 bp, Artificial Sequence
  Synthetic oligonucleotide
tacccggcctgctattgccttgcgctgact

SEQ ID NO: 411747 - DNA, 30 bp, Artificial Sequence
  Synthetic oligonucleotide
cacatgcctgtcccgcatgtcaggctgact

SEQ ID NO: 411748 - DNA, 29 bp, Artificial Sequence
  Synthetic oligonucleotide
tagaccgatcatttaaatagtatctgact

SEQ ID NO: 411749 - DNA, 30 bp, Artificial Sequence
  Synthetic oligonucleotide
cataatgttctactttcacgtgttctgact

SEQ ID NO: 411750 - DNA, 30 bp, Artificial Sequence
  Synthetic oligonucleotide
gagtaagcgtagcggaccacccacgtgact

SEQ ID NO: 411751 - DNA, 30 bp, Artificial Sequence
  Synthetic oligonucleotide
ggtctttggtaccgtccagcgcatgtgact

SEQ ID NO: 411752 - DNA, 30 bp, Artificial Sequence
  Synthetic oligonucleotide
ttttagcttaagcgagtattcgctgtgact

SEQ ID NO: 411753 - DNA, 30 bp, Artificial Sequence
  Synthetic oligonucleotide
atcaggattggttattacgtttcattgact

SEQ ID NO: 411754 - DNA, 30 bp, Artificial Sequence
  Synthetic oligonucleotide
taaacttagaagggaactaaaaagttgact

SEQ ID NO: 411755 - DNA, 30 bp, Artificial Sequence
  Synthetic oligonucleotide
taggcccttatctgataccccgagttgact

SEQ ID NO: 411756 - DNA, 30 bp, Artificial Sequence
  Synthetic oligonucleotide
gagactcgaaagaatacctctgctttgact

SEQ ID NO: 411757 - DNA, 30 bp, Artificial Sequence
  Synthetic oligonucleotide
tacttgcgctcactttccaaacttttgact

SEQ ID NO: 411758 - DNA, 30 bp, Artificial Sequence
  Synthetic oligonucleotide
gggacgtgcccaagtatttgatcaaatact

SEQ ID NO: 411759 - DNA, 30 bp, Artificial Sequence
  Synthetic oligonucleotide
acctcaaggtgttcacgtaccagaaatact

SEQ ID NO: 411760 - DNA, 30 bp, Artificial Sequence
  Synthetic oligonucleotide
gtggagtgacctccaactggtacgaatact

SEQ ID NO: 411761 - DNA, 30 bp, Artificial Sequence
  Synthetic oligonucleotide
aagcctaggccgatgcagactgcgaatact

SEQ ID NO: 411762 - DNA, 30 bp, Artificial Sequence
  Synthetic oligonucleotide
gaagcagtacacggcatcggattgaatact

SEQ ID NO: 411763 - DNA, 30 bp, Artificial Sequence
  Synthetic oligonucleotide
tcgtgtacgcccgacgtcaagaataatact

SEQ ID NO: 411764 - DNA, 30 bp, Artificial Sequence
  Synthetic oligonucleotide
tcttctggtgataaatttttcgataatact

SEQ ID NO: 411765 - DNA, 30 bp, Artificial Sequence
  Synthetic oligonucleotide
acgacgccgatatttaagaaagttaatact

SEQ ID NO: 411766 - DNA, 30 bp, Artificial Sequence
  Synthetic oligonucleotide
cccagtctagaagagaactaaccacatact

SEQ ID NO: 411767 - DNA, 30 bp, Artificial Sequence
  Synthetic oligonucleotide
acagccaagtctagggcccgcccacatact

SEQ ID NO: 411768 - DNA, 30 bp, Artificial Sequence
  Synthetic oligonucleotide
agattgcgactattatgtacgggccatact

SEQ ID NO: 411769 - DNA, 30 bp, Artificial Sequence
  Synthetic oligonucleotide
gtatgatcctttcgaatcgccaggcatact

SEQ ID NO: 411770 - DNA, 30 bp, Artificial Sequence
  Synthetic oligonucleotide
gcatagccattggattgagcaagtcatact

SEQ ID NO: 411771 - DNA, 30 bp, Artificial Sequence
  Synthetic oligonucleotide
ggatatctaggggttagaatggttcatact

SEQ ID NO: 411772 - DNA, 30 bp, Artificial Sequence
  Synthetic oligonucleotide
tggtgctaaatgtgcggcagatcagatact

SEQ ID NO: 411773 - DNA, 30 bp, Artificial Sequence
  Synthetic oligonucleotide
cggtgtatgtgtgcgttcgatttagatact

SEQ ID NO: 411774 - DNA, 30 bp, Artificial Sequence
  Synthetic oligonucleotide
tgcagctgctattcattcggaaacgatact

SEQ ID NO: 411775 - DNA, 30 bp, Artificial Sequence
  Synthetic oligonucleotide
ttcgcctaaactatagtacttaccgatact

SEQ ID NO: 411776 - DNA, 30 bp, Artificial Sequence
  Synthetic oligonucleotide
aacccgtctgattaccggtattgcgatact

SEQ ID NO: 411777 - DNA, 30 bp, Artificial Sequence
  Synthetic oligonucleotide
cttcactactcgggtagctccctggatact

SEQ ID NO: 411778 - DNA, 30 bp, Artificial Sequence
  Synthetic oligonucleotide
cagtaagattccccagcccgctatgatact

SEQ ID NO: 411779 - DNA, 30 bp, Artificial Sequence
  Synthetic oligonucleotide
tcgcattgctggcttcactagtatgatact

SEQ ID NO: 411780 - DNA, 30 bp, Artificial Sequence
  Synthetic oligonucleotide
ccacccaacactggaccgctttctgatact

SEQ ID NO: 411781 - DNA, 30 bp, Artificial Sequence
  Synthetic oligonucleotide
cacccatttcagttgtctgtccttgatact

SEQ ID NO: 411782 - DNA, 30 bp, Artificial Sequence
  Synthetic oligonucleotide
ttcgggctcacatattgcgtgtcatatact

SEQ ID NO: 411783 - DNA, 30 bp, Artificial Sequence
  Synthetic oligonucleotide
gcatgtttcaagtacgttcgatgatatact

SEQ ID NO: 411784 - DNA, 30 bp, Artificial Sequence
  Synthetic oligonucleotide
atttgaagctgtggaaaacgcgactatact

SEQ ID NO: 411785 - DNA, 30 bp, Artificial Sequence
  Synthetic oligonucleotide
ctcacgggtattcagatcccccgctatact

SEQ ID NO: 411786 - DNA, 30 bp, Artificial Sequence
  Synthetic oligonucleotide
ccggccgtgtacctaccatcgaattatact

SEQ ID NO: 411787 - DNA, 30 bp, Artificial Sequence
  Synthetic oligonucleotide
tttggttagcttaataatagtagttatact

SEQ ID NO: 411788 - DNA, 30 bp, Artificial Sequence
  Synthetic oligonucleotide
tgaggccgactgcacgaagacttttatact

SEQ ID NO: 411789 - DNA, 30 bp, Artificial Sequence
  Synthetic oligonucleotide
gaattgaatcggaggctatcttaaactact

SEQ ID NO: 411790 - DNA, 30 bp, Artificial Sequence
  Synthetic oligonucleotide
tcgtagttagcactaatatgttaaactact

SEQ ID NO: 411791 - DNA, 30 bp, Artificial Sequence
  Synthetic oligonucleotide
atacgatttgttgccgcggtgggaactact

SEQ ID NO: 411792 - DNA, 30 bp, Artificial Sequence
  Synthetic oligonucleotide
ttggatagcccttcaaattagtacactact

SEQ ID NO: 411793 - DNA, 30 bp, Artificial Sequence
  Synthetic oligonucleotide
actatacatacaagagtaaacgatactact

SEQ ID NO: 411794 - DNA, 30 bp, Artificial Sequence
  Synthetic oligonucleotide
gtttcgcgaaggcgcaactgggctactact

SEQ ID NO: 411795 - DNA, 30 bp, Artificial Sequence
  Synthetic oligonucleotide
cgttaaggttcagcagcgttcgttactact

SEQ ID NO: 411796 - DNA, 30 bp, Artificial Sequence
  Synthetic oligonucleotide
gaggcttcggaaacgcacaatgttactact

SEQ ID NO: 411797 - DNA, 30 bp, Artificial Sequence
  Synthetic oligonucleotide
atcgagtcataggacgcgggctaacctact

SEQ ID NO: 411798 - DNA, 30 bp, Artificial Sequence
  Synthetic oligonucleotide
cctactcgcgcactgagcattaagcctact

SEQ ID NO: 411799 - DNA, 30 bp, Artificial Sequence
  Synthetic oligonucleotide
ttgggttaagggccaattcaagtgcctact

SEQ ID NO: 411800 - DNA, 30 bp, Artificial Sequence
  Synthetic oligonucleotide
ataggttgtaacgatgactattatcctact

SEQ ID NO: 411801 - DNA, 30 bp, Artificial Sequence
  Synthetic oligonucleotide
atcccgtaatagccaagccgacctcctact

SEQ ID NO: 411802 - DNA, 30 bp, Artificial Sequence
  Synthetic oligonucleotide
tggctgaaagagtgcagatggcctcctact

SEQ ID NO: 411803 - DNA, 30 bp, Artificial Sequence
  Synthetic oligonucleotide
cataaaggacgcgcagcgcgaagtcctact

SEQ ID NO: 411804 - DNA, 30 bp, Artificial Sequence
  Synthetic oligonucleotide
aaggagaatggtgagaccattagtcctact

SEQ ID NO: 411805 - DNA, 30 bp, Artificial Sequence
  Synthetic oligonucleotide
gagtgttattgcctgaccgatattcctact

SEQ ID NO: 411806 - DNA, 30 bp, Artificial Sequence
  Synthetic oligonucleotide
cgggtattcaggatcatcaaggttcctact

SEQ ID NO: 411807 - DNA, 30 bp, Artificial Sequence
  Synthetic oligonucleotide
tttccgacaaggagaagaatatttcctact

SEQ ID NO: 411808 - DNA, 30 bp, Artificial Sequence
  Synthetic oligonucleotide
ccgcactttcagttctgactacaggctact

SEQ ID NO: 411809 - DNA, 30 bp, Artificial Sequence
  Synthetic oligonucleotide
ttggtgactgccgcctgttacgaggctact

SEQ ID NO: 411810 - DNA, 30 bp, Artificial Sequence
  Synthetic oligonucleotide
caaaactgttggacgctgtcggcggctact

SEQ ID NO: 411811 - DNA, 30 bp, Artificial Sequence
  Synthetic oligonucleotide
taaaggagttagtcgacgaagtctgctact

SEQ ID NO: 411812 - DNA, 30 bp, Artificial Sequence
  Synthetic oligonucleotide
gactcgatcgacaggatcggttgtgctact

SEQ ID NO: 411813 - DNA, 30 bp, Artificial Sequence
  Synthetic oligonucleotide
gagtgtgtctatctttcaaaccagtctact

SEQ ID NO: 411814 - DNA, 30 bp, Artificial Sequence
  Synthetic oligonucleotide
tcaattcggaacgcccccggccagtctact

SEQ ID NO: 411815 - DNA, 30 bp, Artificial Sequence
  Synthetic oligonucleotide
ggccgtagggcattacaagacctttctact

SEQ ID NO: 411816 - DNA, 30 bp, Artificial Sequence
  Synthetic oligonucleotide
actgacaagcacaagagctcgtagagtact

SEQ ID NO: 411817 - DNA, 30 bp, Artificial Sequence
  Synthetic oligonucleotide
agtacgttcgagttgactagctcgagtact

SEQ ID NO: 411818 - DNA, 30 bp, Artificial Sequence
  Synthetic oligonucleotide
atatgagtagttggcacctaatttagtact

SEQ ID NO: 411819 - DNA, 30 bp, Artificial Sequence
  Synthetic oligonucleotide
acgcgagtgggcctcacctgctttagtact

SEQ ID NO: 411820 - DNA, 30 bp, Artificial Sequence
  Synthetic oligonucleotide
tcaaggtcatgcggtagttcataacgtact

SEQ ID NO: 411821 - DNA, 30 bp, Artificial Sequence
  Synthetic oligonucleotide
tagagggctccgcccagaaagtagcgtact

SEQ ID NO: 411822 - DNA, 30 bp, Artificial Sequence
  Synthetic oligonucleotide
cggtttggccatggaacagcatggcgtact

SEQ ID NO: 411823 - DNA, 30 bp, Artificial Sequence
  Synthetic oligonucleotide
gccggcaaggtgattgtactaactcgtact

SEQ ID NO: 411824 - DNA, 30 bp, Artificial Sequence
  Synthetic oligonucleotide
aagccccaactttgatatgtttgtcgtact

SEQ ID NO: 411825 - DNA, 30 bp, Artificial Sequence
  Synthetic oligonucleotide
tctatagggtaggccggattgaacggtact

SEQ ID NO: 411826 - DNA, 30 bp, Artificial Sequence
  Synthetic oligonucleotide
ccggtaagcaagggcaaggcttccggtact

SEQ ID NO: 411827 - DNA, 30 bp, Artificial Sequence
  Synthetic oligonucleotide
gtctatggatcgcgcgatgctcgcggtact

SEQ ID NO: 411828 - DNA, 30 bp, Artificial Sequence
  Synthetic oligonucleotide
ctaacaggaatattaagtcttcagggtact

SEQ ID NO: 411829 - DNA, 30 bp, Artificial Sequence
  Synthetic oligonucleotide
tcccgattgaatgacaactctcggggtact

SEQ ID NO: 411830 - DNA, 30 bp, Artificial Sequence
  Synthetic oligonucleotide
tcccaagaccgctcttaagcgttgggtact

SEQ ID NO: 411831 - DNA, 30 bp, Artificial Sequence
  Synthetic oligonucleotide
ttgatggcatcttagatgtctgatggtact

SEQ ID NO: 411832 - DNA, 30 bp, Artificial Sequence
  Synthetic oligonucleotide
ttaagagaggacacaaagacccttggtact

SEQ ID NO: 411833 - DNA, 30 bp, Artificial Sequence
  Synthetic oligonucleotide
ctataataaggccattggttatcatgtact

SEQ ID NO: 411834 - DNA, 30 bp, Artificial Sequence
  Synthetic oligonucleotide
gggggtattcagcaaggatcgctatgtact

SEQ ID NO: 411835 - DNA, 30 bp, Artificial Sequence
  Synthetic oligonucleotide
gaacagcccacggccgggcagtcgtgtact

SEQ ID NO: 411836 - DNA, 30 bp, Artificial Sequence
  Synthetic oligonucleotide
agtctacttgcgtgctggaggtgttgtact

SEQ ID NO: 411837 - DNA, 30 bp, Artificial Sequence
  Synthetic oligonucleotide
gatatgtaccataagtttaaggtttgtact

SEQ ID NO: 411838 - DNA, 30 bp, Artificial Sequence
  Synthetic oligonucleotide
attaaatcggttaatagctagaagattact

SEQ ID NO: 411839 - DNA, 30 bp, Artificial Sequence
  Synthetic oligonucleotide
tcgcacgcacaatctataactaggattact

SEQ ID NO: 411840 - DNA, 30 bp, Artificial Sequence
  Synthetic oligonucleotide
ctcatagcagagcacgtagtgactattact

SEQ ID NO: 411841 - DNA, 30 bp, Artificial Sequence
  Synthetic oligonucleotide
aggaaagaaatacactcaagcgctattact

SEQ ID NO: 411842 - DNA, 30 bp, Artificial Sequence
  Synthetic oligonucleotide
cggtcatacgagtatgtgggatctattact

SEQ ID NO: 411843 - DNA, 30 bp, Artificial Sequence
  Synthetic oligonucleotide
aaccatgaaaaacccttgccaaaacttact

SEQ ID NO: 411844 - DNA, 30 bp, Artificial Sequence
  Synthetic oligonucleotide
gcaccactttgtcaaagtttagtacttact

SEQ ID NO: 411845 - DNA, 30 bp, Artificial Sequence
  Synthetic oligonucleotide
taaattttcgtcaatgcgtagacccttact

SEQ ID NO: 411846 - DNA, 30 bp, Artificial Sequence
  Synthetic oligonucleotide
gtgctctgtgggtgcagaacgctccttact

SEQ ID NO: 411847 - DNA, 29 bp, Artificial Sequence
  Synthetic oligonucleotide
tcgcctaaagaggctaatggacgcttact

SEQ ID NO: 411848 - DNA, 30 bp, Artificial Sequence
  Synthetic oligonucleotide
gccagccccttcgacttccacaaagttact

SEQ ID NO: 411849 - DNA, 30 bp, Artificial Sequence
  Synthetic oligonucleotide
tctacttggcgtcaggacagagtagttact

SEQ ID NO: 411850 - DNA, 30 bp, Artificial Sequence
  Synthetic oligonucleotide
gaggaaatgggaagcaagagggtagttact

SEQ ID NO: 411851 - DNA, 30 bp, Artificial Sequence
  Synthetic oligonucleotide
ggtatatgactcagtcctgatgccgttact

SEQ ID NO: 411852 - DNA, 30 bp, Artificial Sequence
  Synthetic oligonucleotide
ctagaagcgctacagacggcatccgttact

SEQ ID NO: 411853 - DNA, 30 bp, Artificial Sequence
  Synthetic oligonucleotide
gacgtaagggtttagtaatacagcgttact

SEQ ID NO: 411854 - DNA, 30 bp, Artificial Sequence
  Synthetic oligonucleotide
tcatatgcggcgatcttacaaaatgttact

SEQ ID NO: 411855 - DNA, 30 bp, Artificial Sequence
  Synthetic oligonucleotide
catatactgtaaaaccttaaacaatttact

SEQ ID NO: 411856 - DNA, 30 bp, Artificial Sequence
  Synthetic oligonucleotide
acccatcactttatgttttagtaatttact

SEQ ID NO: 411857 - DNA, 30 bp, Artificial Sequence
  Synthetic oligonucleotide
attatatcataatgagctccatcatttact

SEQ ID NO: 411858 - DNA, 30 bp, Artificial Sequence
  Synthetic oligonucleotide
agtccatcccggagtggatccctatttact

SEQ ID NO: 411859 - DNA, 30 bp, Artificial Sequence
  Synthetic oligonucleotide
agataaagggccctcctagctcactttact

SEQ ID NO: 411860 - DNA, 30 bp, Artificial Sequence
  Synthetic oligonucleotide
atccatttcacttccggtggattctttact

SEQ ID NO: 411861 - DNA, 30 bp, Artificial Sequence
  Synthetic oligonucleotide
ccgataaagagccgggggatttggtttact

SEQ ID NO: 411862 - DNA, 30 bp, Artificial Sequence
  Synthetic oligonucleotide
ttgtacaacacatagtcttataattttact

SEQ ID NO: 411863 - DNA, 30 bp, Artificial Sequence
  Synthetic oligonucleotide
cactaacgtcctttggaatcactaaaacct

SEQ ID NO: 411864 - DNA, 30 bp, Artificial Sequence
  Synthetic oligonucleotide
tgccatgggtgtaagttgagggtaaaacct

SEQ ID NO: 411865 - DNA, 30 bp, Artificial Sequence
  Synthetic oligonucleotide
ccagatttgcccctggtagagaacaaacct

SEQ ID NO: 411866 - DNA, 30 bp, Artificial Sequence
  Synthetic oligonucleotide
caactgcggagatgttttcataacaaacct

SEQ ID NO: 411867 - DNA, 30 bp, Artificial Sequence
  Synthetic oligonucleotide
ggactactctgatagaattatttcaaacct

SEQ ID NO: 411868 - DNA, 30 bp, Artificial Sequence
  Synthetic oligonucleotide
atgttctggaatgaatgggacttgaaacct

SEQ ID NO: 411869 - DNA, 30 bp, Artificial Sequence
  Synthetic oligonucleotide
gaagagatgtcgcgcactacttataaacct

SEQ ID NO: 411870 - DNA, 30 bp, Artificial Sequence
  Synthetic oligonucleotide
cgccacggacaaattctggggggtaaacct

SEQ ID NO: 411871 - DNA, 30 bp, Artificial Sequence
  Synthetic oligonucleotide
ttcgcaacaggatacatcttgatacaacct

SEQ ID NO: 411872 - DNA, 30 bp, Artificial Sequence
  Synthetic oligonucleotide
cagtgtccatttcccacagggttccaacct

SEQ ID NO: 411873 - DNA, 30 bp, Artificial Sequence
  Synthetic oligonucleotide
aggaatcgtggcacggcataaatgcaacct

SEQ ID NO: 411874 - DNA, 30 bp, Artificial Sequence
  Synthetic oligonucleotide
tattatacatttattcggcattgtcaacct

SEQ ID NO: 411875 - DNA, 30 bp, Artificial Sequence
  Synthetic oligonucleotide
acattgcgccagttgacgcaataagaacct

SEQ ID NO: 411876 - DNA, 30 bp, Artificial Sequence
  Synthetic oligonucleotide
gttagccgggtagtcatgtgctaagaacct

SEQ ID NO: 411877 - DNA, 30 bp, Artificial Sequence
  Synthetic oligonucleotide
gcagggctagcgcgattgtccacagaacct

SEQ ID NO: 411878 - DNA, 30 bp, Artificial Sequence
  Synthetic oligonucleotide
ggtgtatagcgtatacggtggccggaacct

SEQ ID NO: 411879 - DNA, 30 bp, Artificial Sequence
  Synthetic oligonucleotide
gtctagcgccggtactaagagactgaacct

SEQ ID NO: 411880 - DNA, 30 bp, Artificial Sequence
  Synthetic oligonucleotide
gtcattagccaagcgaacagggttgaacct

SEQ ID NO: 411881 - DNA, 30 bp, Artificial Sequence
  Synthetic oligonucleotide
gttgccaccaaatttgcgttcacataacct

SEQ ID NO: 411882 - DNA, 30 bp, Artificial Sequence
  Synthetic oligonucleotide
gaaaaaaggagagccaatactctataacct

SEQ ID NO: 411883 - DNA, 30 bp, Artificial Sequence
  Synthetic oligonucleotide
gcgcagggaccgccttatgacggctaacct

SEQ ID NO: 411884 - DNA, 30 bp, Artificial Sequence
  Synthetic oligonucleotide
ggtactacgatgcttcgttagatctaacct

SEQ ID NO: 411885 - DNA, 30 bp, Artificial Sequence
  Synthetic oligonucleotide
cggcgggagtactggagagggaccacacct

SEQ ID NO: 411886 - DNA, 30 bp, Artificial Sequence
  Synthetic oligonucleotide
ttagacatagtacgtccttaggcgacacct

SEQ ID NO: 411887 - DNA, 30 bp, Artificial Sequence
  Synthetic oligonucleotide
tcctaggcattagttttatcagggacacct

SEQ ID NO: 411888 - DNA, 30 bp, Artificial Sequence
  Synthetic oligonucleotide
ttgtcggctaagccgctgggattgacacct

SEQ ID NO: 411889 - DNA, 30 bp, Artificial Sequence
  Synthetic oligonucleotide
atctatggagagcttagatcaggtacacct

SEQ ID NO: 411890 - DNA, 30 bp, Artificial Sequence
  Synthetic oligonucleotide
ctcacaacaagcctacggggggttacacct

SEQ ID NO: 411891 - DNA, 30 bp, Artificial Sequence
  Synthetic oligonucleotide
tgcggccgttttgcgtccgtatttacacct

SEQ ID NO: 411892 - DNA, 30 bp, Artificial Sequence
  Synthetic oligonucleotide
tccagagctattagagttccctttacacct

SEQ ID NO: 411893 - DNA, 30 bp, Artificial Sequence
  Synthetic oligonucleotide
ccatcaactgtatcgacaacttttacacct

SEQ ID NO: 411894 - DNA, 30 bp, Artificial Sequence
  Synthetic oligonucleotide
tttgtgttgcgatataacaacctaccacct

SEQ ID NO: 411895 - DNA, 30 bp, Artificial Sequence
  Synthetic oligonucleotide
taggctatggcgactattaacggcccacct

SEQ ID NO: 411896 - DNA, 30 bp, Artificial Sequence
  Synthetic oligonucleotide
ctggtagccttaaactggacgtggccacct

SEQ ID NO: 411897 - DNA, 30 bp, Artificial Sequence
  Synthetic oligonucleotide
cccgtttgcaaacgtcggagccgagcacct

SEQ ID NO: 411898 - DNA, 30 bp, Artificial Sequence
  Synthetic oligonucleotide
gagggttggcgcacccgatccggggcacct

SEQ ID NO: 411899 - DNA, 30 bp, Artificial Sequence
  Synthetic oligonucleotide
cggttatacccctgatgggcccgctcacct

SEQ ID NO: 411900 - DNA, 30 bp, Artificial Sequence
  Synthetic oligonucleotide
ccacagctatatccgacgctgttctcacct

SEQ ID NO: 411901 - DNA, 30 bp, Artificial Sequence
  Synthetic oligonucleotide
ggcaaacgacgtatccatcagacgtcacct

SEQ ID NO: 411902 - DNA, 30 bp, Artificial Sequence
  Synthetic oligonucleotide
acagctactacgtgtctcagctattcacct

SEQ ID NO: 411903 - DNA, 30 bp, Artificial Sequence
  Synthetic oligonucleotide
cacgcgttcgattaggtcattacaagacct

SEQ ID NO: 411904 - DNA, 30 bp, Artificial Sequence
  Synthetic oligonucleotide
gattaccgtttttcagagaggagaagacct

SEQ ID NO: 411905 - DNA, 30 bp, Artificial Sequence
  Synthetic oligonucleotide
gtcaagataagcccccaggaatgcagacct

SEQ ID NO: 411906 - DNA, 30 bp, Artificial Sequence
  Synthetic oligonucleotide
gactagtcaccggcttgactggcacgacct

SEQ ID NO: 411907 - DNA, 30 bp, Artificial Sequence
  Synthetic oligonucleotide
ccagaagaagtcggtcaaccgctccgacct

SEQ ID NO: 411908 - DNA, 30 bp, Artificial Sequence
  Synthetic oligonucleotide
ctttcagaatacttcgatttcagtcgacct

SEQ ID NO: 411909 - DNA, 30 bp, Artificial Sequence
  Synthetic oligonucleotide
gtgtcctgtttgggtggcgtccaaggacct

SEQ ID NO: 411910 - DNA, 30 bp, Artificial Sequence
  Synthetic oligonucleotide
gtcaaggttccagcattggcatcaggacct

SEQ ID NO: 411911 - DNA, 30 bp, Artificial Sequence
  Synthetic oligonucleotide
gaaagcgatcgaacttgtgggagaggacct

SEQ ID NO: 411912 - DNA, 30 bp, Artificial Sequence
  Synthetic oligonucleotide
gtcacatcgggcactcaacatagcggacct

SEQ ID NO: 411913 - DNA, 30 bp, Artificial Sequence
  Synthetic oligonucleotide
gctgtgagcgcgatcgtcaccatgggacct

SEQ ID NO: 411914 - DNA, 30 bp, Artificial Sequence
  Synthetic oligonucleotide
gagcacaaggatgtcttagttttgggacct

SEQ ID NO: 411915 - DNA, 30 bp, Artificial Sequence
  Synthetic oligonucleotide
tcgagcgtccttctcgcctctcatggacct

SEQ ID NO: 411916 - DNA, 30 bp, Artificial Sequence
  Synthetic oligonucleotide
cgcacaaatttgtcgcgatggtgtggacct

SEQ ID NO: 411917 - DNA, 30 bp, Artificial Sequence
  Synthetic oligonucleotide
ttttctcgatacctgaaacaaaaatgacct

SEQ ID NO: 411918 - DNA, 30 bp, Artificial Sequence
  Synthetic oligonucleotide
taggactaaaggttcataggaatatgacct

SEQ ID NO: 411919 - DNA, 30 bp, Artificial Sequence
  Synthetic oligonucleotide
ggtgccgagctttagaagaggctatgacct

SEQ ID NO: 411920 - DNA, 30 bp, Artificial Sequence
  Synthetic oligonucleotide
gtgcttcctgggactaagcctcggtgacct

SEQ ID NO: 411921 - DNA, 30 bp, Artificial Sequence
  Synthetic oligonucleotide
tccctgaaagtcgctgctataatgtgacct

SEQ ID NO: 411922 - DNA, 30 bp, Artificial Sequence
  Synthetic oligonucleotide
gccaggtccttttggttcaataattgacct

SEQ ID NO: 411923 - DNA, 30 bp, Artificial Sequence
  Synthetic oligonucleotide
acctgtcgtagcaggtgcttacgaatacct

SEQ ID NO: 411924 - DNA, 30 bp, Artificial Sequence
  Synthetic oligonucleotide
tctgtgctgtcggtcaagccggacatacct

SEQ ID NO: 411925 - DNA, 30 bp, Artificial Sequence
  Synthetic oligonucleotide
gtaccctgccgggtgactatattcatacct

SEQ ID NO: 411926 - DNA, 30 bp, Artificial Sequence
  Synthetic oligonucleotide
caaactcagaactcagcgcggaatatacct

SEQ ID NO: 411927 - DNA, 30 bp, Artificial Sequence
  Synthetic oligonucleotide
taacctgaagacccatcggctggtatacct

SEQ ID NO: 411928 - DNA, 30 bp, Artificial Sequence
  Synthetic oligonucleotide
gagacgcaagattcttttcacgcactacct

SEQ ID NO: 411929 - DNA, 30 bp, Artificial Sequence
  Synthetic oligonucleotide
ttcgttgtggttgtcgcgcaagacgtacct

SEQ ID NO: 411930 - DNA, 30 bp, Artificial Sequence
  Synthetic oligonucleotide
taccgcagagggaagttctttccggtacct

SEQ ID NO: 411931 - DNA, 30 bp, Artificial Sequence
  Synthetic oligonucleotide
gtaactgcgctgtcgctctacactgtacct

SEQ ID NO: 411932 - DNA, 30 bp, Artificial Sequence
  Synthetic oligonucleotide
gtcgtgataccgttcaagtatggattacct

SEQ ID NO: 411933 - DNA, 30 bp, Artificial Sequence
  Synthetic oligonucleotide
gagactttttacgggcaatcggggttacct

SEQ ID NO: 411934 - DNA, 30 bp, Artificial Sequence
  Synthetic oligonucleotide
accgtttttttggggtaagtaactttacct

SEQ ID NO: 411935 - DNA, 30 bp, Artificial Sequence
  Synthetic oligonucleotide
ggttttctgcacgtacgatatccaaaccct

SEQ ID NO: 411936 - DNA, 30 bp, Artificial Sequence
  Synthetic oligonucleotide
aggatttgctgtaagtcaaggtagaaccct

SEQ ID NO: 411937 - DNA, 30 bp, Artificial Sequence
  Synthetic oligonucleotide
accggaaaaggtatcctcactgggaaccct

SEQ ID NO: 411938 - DNA, 30 bp, Artificial Sequence
  Synthetic oligonucleotide
tcaggcaggctcaaatgataatctaaccct

SEQ ID NO: 411939 - DNA, 30 bp, Artificial Sequence
  Synthetic oligonucleotide
tgttgttttatacaatgtaagttacaccct

SEQ ID NO: 411940 - DNA, 30 bp, Artificial Sequence
  Synthetic oligonucleotide
ataatgaggcttgatgggcaatcccaccct

SEQ ID NO: 411941 - DNA, 30 bp, Artificial Sequence
  Synthetic oligonucleotide
tgcggctcaggaggcacattcggccaccct

SEQ ID NO: 411942 - DNA, 30 bp, Artificial Sequence
  Synthetic oligonucleotide
agcgacatgcggagtagggtcaagcaccct

SEQ ID NO: 411943 - DNA, 30 bp, Artificial Sequence
  Synthetic oligonucleotide
ctcgtttgcggcactgttcatcttcaccct

SEQ ID NO: 411944 - DNA, 30 bp, Artificial Sequence
  Synthetic oligonucleotide
tacggagttcgtaggcatacggaagaccct

SEQ ID NO: 411945 - DNA, 30 bp, Artificial Sequence
  Synthetic oligonucleotide
atgttgcaccacaggttcgtataagaccct

SEQ ID NO: 411946 - DNA, 30 bp, Artificial Sequence
  Synthetic oligonucleotide
caacggtagagccgttacgagtgtgaccct

SEQ ID NO: 411947 - DNA, 30 bp, Artificial Sequence
  Synthetic oligonucleotide
gttcctaggaatgtttgagaagttgaccct

SEQ ID NO: 411948 - DNA, 30 bp, Artificial Sequence
  Synthetic oligonucleotide
cgagaggcgcggtccttggagtgataccct

SEQ ID NO: 411949 - DNA, 30 bp, Artificial Sequence
  Synthetic oligonucleotide
actagccttagagtgtaagtcgcctaccct

SEQ ID NO: 411950 - DNA, 30 bp, Artificial Sequence
  Synthetic oligonucleotide
gcctcccggaagagggtcaaggtgtaccct

SEQ ID NO: 411951 - DNA, 30 bp, Artificial Sequence
  Synthetic oligonucleotide
tgtcttgctcgttcccgtatgttgtaccct

SEQ ID NO: 411952 - DNA, 30 bp, Artificial Sequence
  Synthetic oligonucleotide
agtgggtaggatgttctacgagtcacccct

SEQ ID NO: 411953 - DNA, 30 bp, Artificial Sequence
  Synthetic oligonucleotide
tcacatgtacatcgtaacatgcttacccct

SEQ ID NO: 411954 - DNA, 30 bp, Artificial Sequence
  Synthetic oligonucleotide
cctatctaaaatctaatagccggcccccct

SEQ ID NO: 411955 - DNA, 30 bp, Artificial Sequence
  Synthetic oligonucleotide
ctagtgtatcgggatatgcagctagcccct

SEQ ID NO: 411956 - DNA, 30 bp, Artificial Sequence
  Synthetic oligonucleotide
aaatagttacgggtccacttttttgcccct

SEQ ID NO: 411957 - DNA, 30 bp, Artificial Sequence
  Synthetic oligonucleotide
actacgagttatagatgcggcgactcccct

SEQ ID NO: 411958 - DNA, 30 bp, Artificial Sequence
  Synthetic oligonucleotide
gggagtttcaaactggcctttgactcccct

SEQ ID NO: 411959 - DNA, 30 bp, Artificial Sequence
  Synthetic oligonucleotide
tggcatcggatgacagtttgttcgtcccct

SEQ ID NO: 411960 - DNA, 30 bp, Artificial Sequence
  Synthetic oligonucleotide
ggaatgcacggcagcccgagatggtcccct

SEQ ID NO: 411961 - DNA, 30 bp, Artificial Sequence
  Synthetic oligonucleotide
gccggcggcagcaggcagacgttcagccct

SEQ ID NO: 411962 - DNA, 30 bp, Artificial Sequence
  Synthetic oligonucleotide
ctaggcatccgtcaaagcttccggagccct

SEQ ID NO: 411963 - DNA, 30 bp, Artificial Sequence
  Synthetic oligonucleotide
ttactacgtgacgtagtaacgcggagccct

SEQ ID NO: 411964 - DNA, 30 bp, Artificial Sequence
  Synthetic oligonucleotide
acagcggtccatcagggacattttagccct

SEQ ID NO: 411965 - DNA, 30 bp, Artificial Sequence
  Synthetic oligonucleotide
ggccctgtcagataaagggatggacgccct

SEQ ID NO: 411966 - DNA, 30 bp, Artificial Sequence
  Synthetic oligonucleotide
tctgctagtgggcggacaagttgacgccct

SEQ ID NO: 411967 - DNA, 30 bp, Artificial Sequence
  Synthetic oligonucleotide
tggcgaaaagggctaccaaataagcgccct

SEQ ID NO: 411968 - DNA, 30 bp, Artificial Sequence
  Synthetic oligonucleotide
caggcgatcgcaccgacccttggtcgccct

SEQ ID NO: 411969 - DNA, 30 bp, Artificial Sequence
  Synthetic oligonucleotide
tgcatcaccgatggacggtaattaggccct

SEQ ID NO: 411970 - DNA, 30 bp, Artificial Sequence
  Synthetic oligonucleotide
cattgtgttttacgtgcccgggccggccct

SEQ ID NO: 411971 - DNA, 30 bp, Artificial Sequence
  Synthetic oligonucleotide
ccactgctctcgtctcattaacgcggccct

SEQ ID NO: 411972 - DNA, 30 bp, Artificial Sequence
  Synthetic oligonucleotide
gcgcatatgcattgtctctagtgcggccct

SEQ ID NO: 411973 - DNA, 30 bp, Artificial Sequence
  Synthetic oligonucleotide
tgtaaagttgacgtcagaactatcggccct

SEQ ID NO: 411974 - DNA, 30 bp, Artificial Sequence
  Synthetic oligonucleotide
aaatgaataaggagctgaagtctcggccct

SEQ ID NO: 411975 - DNA, 31 bp, Artificial Sequence
  Synthetic oligonucleotide
cagtgatgcactcctacccctaagtggccct

SEQ ID NO: 411976 - DNA, 30 bp, Artificial Sequence
  Synthetic oligonucleotide
catagttactaggttacgatgtgtggccct

SEQ ID NO: 411977 - DNA, 30 bp, Artificial Sequence
  Synthetic oligonucleotide
tatgaaagcgtaacacttgcgtaatgccct

SEQ ID NO: 411978 - DNA, 30 bp, Artificial Sequence
  Synthetic oligonucleotide
ataatcaacggtggatttcccatatgccct

SEQ ID NO: 411979 - DNA, 30 bp, Artificial Sequence
  Synthetic oligonucleotide
cggcgaaatgctaaattttcgcagtgccct

SEQ ID NO: 411980 - DNA, 30 bp, Artificial Sequence
  Synthetic oligonucleotide
ccccgctcgctttctattcctttgtgccct

SEQ ID NO: 411981 - DNA, 30 bp, Artificial Sequence
  Synthetic oligonucleotide
ataacacaacaagggtcgacgggaatccct

SEQ ID NO: 411982 - DNA, 30 bp, Artificial Sequence
  Synthetic oligonucleotide
agaccttacctatcctaccccataatccct

SEQ ID NO: 411983 - DNA, 30 bp, Artificial Sequence
  Synthetic oligonucleotide
tacccagcaaaaacagaacccaccatccct

SEQ ID NO: 411984 - DNA, 30 bp, Artificial Sequence
  Synthetic oligonucleotide
gaacagggcgataatttctcccccatccct

SEQ ID NO: 411985 - DNA, 30 bp, Artificial Sequence
  Synthetic oligonucleotide
actgagtgatgtccggatccttccatccct

SEQ ID NO: 411986 - DNA, 30 bp, Artificial Sequence
  Synthetic oligonucleotide
gtgacgcgtctaagaaaatcagatatccct

SEQ ID NO: 411987 - DNA, 30 bp, Artificial Sequence
  Synthetic oligonucleotide
agcttgtctacatatcgcagaagtatccct

SEQ ID NO: 411988 - DNA, 30 bp, Artificial Sequence
  Synthetic oligonucleotide
aggcaattttcatccgtttttagtatccct

SEQ ID NO: 411989 - DNA, 30 bp, Artificial Sequence
  Synthetic oligonucleotide
taactcgggtggtcgctgtttacactccct

SEQ ID NO: 411990 - DNA, 30 bp, Artificial Sequence
  Synthetic oligonucleotide
tttggccaagctgtcataatgagcctccct

SEQ ID NO: 411991 - DNA, 30 bp, Artificial Sequence
  Synthetic oligonucleotide
aactatttgtacctcacggagggcctccct

SEQ ID NO: 411992 - DNA, 30 bp, Artificial Sequence
  Synthetic oligonucleotide
gcccaacgttgggtttcccgcgaagtccct

SEQ ID NO: 411993 - DNA, 30 bp, Artificial Sequence
  Synthetic oligonucleotide
tgttgctttgcgaacttaccataagtccct

SEQ ID NO: 411994 - DNA, 30 bp, Artificial Sequence
  Synthetic oligonucleotide
aatgccaggacgcttacagccgcagtccct

SEQ ID NO: 411995 - DNA, 30 bp, Artificial Sequence
  Synthetic oligonucleotide
tacatttcgcgttcgctacaatgcgtccct

SEQ ID NO: 411996 - DNA, 30 bp, Artificial Sequence
  Synthetic oligonucleotide
gtgaatacatttgctagccaggtggtccct

SEQ ID NO: 411997 - DNA, 30 bp, Artificial Sequence
  Synthetic oligonucleotide
ggtcattctctcggattgacgtttgtccct

SEQ ID NO: 411998 - DNA, 30 bp, Artificial Sequence
  Synthetic oligonucleotide
tatgttcactcatgcgatgtggaattccct

SEQ ID NO: 411999 - DNA, 30 bp, Artificial Sequence
  Synthetic oligonucleotide
aaccatgacgcatgtggtggcccgttccct

SEQ ID NO: 412000 - DNA, 30 bp, Artificial Sequence
  Synthetic oligonucleotide
tgatccgaatcttccgttctcttgttccct

SEQ ID NO: 412001 - DNA, 30 bp, Artificial Sequence
  Synthetic oligonucleotide
cacatgttaccgcaatatgtccatttccct

SEQ ID NO: 412002 - DNA, 30 bp, Artificial Sequence
  Synthetic oligonucleotide
tggggctggctggcttatcaatgaaagcct

SEQ ID NO: 412003 - DNA, 30 bp, Artificial Sequence
  Synthetic oligonucleotide
aacctgacgtagccccgaatgtgaaagcct

SEQ ID NO: 412004 - DNA, 30 bp, Artificial Sequence
  Synthetic oligonucleotide
actaaagttcttgtttcgttgagcaagcct

SEQ ID NO: 412005 - DNA, 30 bp, Artificial Sequence
  Synthetic oligonucleotide
ataatacgtttctttgattttcgacagcct

SEQ ID NO: 412006 - DNA, 30 bp, Artificial Sequence
  Synthetic oligonucleotide
cctgcgttgtgggctttgtgtttacagcct

SEQ ID NO: 412007 - DNA, 30 bp, Artificial Sequence
  Synthetic oligonucleotide
cgctggatctcgtacagatttcaccagcct

SEQ ID NO: 412008 - DNA, 30 bp, Artificial Sequence
  Synthetic oligonucleotide
cttatcagatatcatcacagggagcagcct

SEQ ID NO: 412009 - DNA, 30 bp, Artificial Sequence
  Synthetic oligonucleotide
gctaacggaagatctgcattatagcagcct

SEQ ID NO: 412010 - DNA, 30 bp, Artificial Sequence
  Synthetic oligonucleotide
ctacccgcgggaagtcctctaccgcagcct

SEQ ID NO: 412011 - DNA, 30 bp, Artificial Sequence
  Synthetic oligonucleotide
aaaaagggggacgagtctataatgcagcct

SEQ ID NO: 412012 - DNA, 30 bp, Artificial Sequence
  Synthetic oligonucleotide
gcagagacttctggtcgcttcacagagcct

SEQ ID NO: 412013 - DNA, 30 bp, Artificial Sequence
  Synthetic oligonucleotide
aaatataggcgccctgctaagtgcgagcct

SEQ ID NO: 412014 - DNA, 30 bp, Artificial Sequence
  Synthetic oligonucleotide
tttaacgagctcagatgcgacactgagcct

SEQ ID NO: 412015 - DNA, 30 bp, Artificial Sequence
  Synthetic oligonucleotide
tttgggtgccaaacttaatttcggtagcct

SEQ ID NO: 412016 - DNA, 30 bp, Artificial Sequence
  Synthetic oligonucleotide
taaggcccgcggccgcagtatctgtagcct

SEQ ID NO: 412017 - DNA, 30 bp, Artificial Sequence
  Synthetic oligonucleotide
tttgggcgaaaggcgcgctgaataacgcct

SEQ ID NO: 412018 - DNA, 30 bp, Artificial Sequence
  Synthetic oligonucleotide
cctggcgaagacaagacatgcgacacgcct

SEQ ID NO: 412019 - DNA, 31 bp, Artificial Sequence
  Synthetic oligonucleotide
ctcggcgctcagtaaacattaagcgacgcct

SEQ ID NO: 412020 - DNA, 30 bp, Artificial Sequence
  Synthetic oligonucleotide
catgccgtgacgtctgcacccagtacgcct

SEQ ID NO: 412021 - DNA, 30 bp, Artificial Sequence
  Synthetic oligonucleotide
catcgtgttaggatttgcaattgtacgcct

SEQ ID NO: 412022 - DNA, 30 bp, Artificial Sequence
  Synthetic oligonucleotide
aaaaaaggccttacgctaagcgccccgcct

SEQ ID NO: 412023 - DNA, 30 bp, Artificial Sequence
  Synthetic oligonucleotide
cagaatagtcctaaaacattatccccgcct

SEQ ID NO: 412024 - DNA, 30 bp, Artificial Sequence
  Synthetic oligonucleotide
ccacactttcttattccaataacgccgcct

SEQ ID NO: 412025 - DNA, 30 bp, Artificial Sequence
  Synthetic oligonucleotide
gaccgcaaacacaatgcgctgtgtccgcct

SEQ ID NO: 412026 - DNA, 30 bp, Artificial Sequence
  Synthetic oligonucleotide
gtgaaactgtattctgggggggaggcgcct

SEQ ID NO: 412027 - DNA, 30 bp, Artificial Sequence
  Synthetic oligonucleotide
catttcgtgcgggatgcttaaacggcgcct

SEQ ID NO: 412028 - DNA, 30 bp, Artificial Sequence
  Synthetic oligonucleotide
tcgctgcgcctatggatttgacgtgcgcct

SEQ ID NO: 412029 - DNA, 30 bp, Artificial Sequence
  Synthetic oligonucleotide
cgagagaactcccatcgggctaaatcgcct

SEQ ID NO: 412030 - DNA, 30 bp, Artificial Sequence
  Synthetic oligonucleotide
caaaacgaatacgctctaatagtatcgcct

SEQ ID NO: 412031 - DNA, 30 bp, Artificial Sequence
  Synthetic oligonucleotide
tggcgctcggtccgacaacttttatcgcct

SEQ ID NO: 412032 - DNA, 30 bp, Artificial Sequence
  Synthetic oligonucleotide
agtccttgataggtgggaagcaattcgcct

SEQ ID NO: 412033 - DNA, 30 bp, Artificial Sequence
  Synthetic oligonucleotide
gtgtgttaacagatcaccaggaattcgcct

SEQ ID NO: 412034 - DNA, 30 bp, Artificial Sequence
  Synthetic oligonucleotide
ctccaaccccgaggatacgggggttcgcct

SEQ ID NO: 412035 - DNA, 30 bp, Artificial Sequence
  Synthetic oligonucleotide
aggacatttaaagtcgcgtcttgttcgcct

SEQ ID NO: 412036 - DNA, 30 bp, Artificial Sequence
  Synthetic oligonucleotide
aaccaatgcggcattaaaccggacaggcct

SEQ ID NO: 412037 - DNA, 30 bp, Artificial Sequence
  Synthetic oligonucleotide
caccgatagctgacggacaaccgcaggcct

SEQ ID NO: 412038 - DNA, 31 bp, Artificial Sequence
  Synthetic oligonucleotide
atttcataatgctcaacgaatgggcaggcct

SEQ ID NO: 412039 - DNA, 30 bp, Artificial Sequence
  Synthetic oligonucleotide
caaggcccgctacatgtcaccttcaggcct

SEQ ID NO: 412040 - DNA, 30 bp, Artificial Sequence
  Synthetic oligonucleotide
gactcatggatagttatttgtattaggcct

SEQ ID NO: 412041 - DNA, 30 bp, Artificial Sequence
  Synthetic oligonucleotide
ctaaccgttgataagctgaatcttaggcct

SEQ ID NO: 412042 - DNA, 30 bp, Artificial Sequence
  Synthetic oligonucleotide
cctttgtaatccttagtaccgcaacggcct

SEQ ID NO: 412043 - DNA, 30 bp, Artificial Sequence
  Synthetic oligonucleotide
ccctccgagtcgcaagctaagtgacggcct

SEQ ID NO: 412044 - DNA, 30 bp, Artificial Sequence
  Synthetic oligonucleotide
gttcaattacgttggatcatgcaccggcct

SEQ ID NO: 412045 - DNA, 30 bp, Artificial Sequence
  Synthetic oligonucleotide
actttacacgcacgaacctgcgtccggcct

SEQ ID NO: 412046 - DNA, 30 bp, Artificial Sequence
  Synthetic oligonucleotide
tggtttcagtgggagacccccgctcggcct

SEQ ID NO: 412047 - DNA, 30 bp, Artificial Sequence
  Synthetic oligonucleotide
atgtctctttatcgatgattccgtcggcct

SEQ ID NO: 412048 - DNA, 31 bp, Artificial Sequence
  Synthetic oligonucleotide
agaatagcggatgcaatagggccttcggcct

SEQ ID NO: 412049 - DNA, 30 bp, Artificial Sequence
  Synthetic oligonucleotide
caacggttggaccccgtggtccaagggcct

SEQ ID NO: 412050 - DNA, 30 bp, Artificial Sequence
  Synthetic oligonucleotide
tatgatgttttcgaccaaagactagggcct

SEQ ID NO: 412051 - DNA, 30 bp, Artificial Sequence
  Synthetic oligonucleotide
caacagccgtcatatccaatgggcgggcct

SEQ ID NO: 412052 - DNA, 30 bp, Artificial Sequence
  Synthetic oligonucleotide
tttggcgatatgctttaacgaatcgggcct

SEQ ID NO: 412053 - DNA, 30 bp, Artificial Sequence
  Synthetic oligonucleotide
tcctgttctctgaacggatgtgcggggcct

SEQ ID NO: 412054 - DNA, 30 bp, Artificial Sequence
  Synthetic oligonucleotide
cccgcggtaatggtagggcagagggggcct

SEQ ID NO: 412055 - DNA, 30 bp, Artificial Sequence
  Synthetic oligonucleotide
tctattccaaatgaggtcccattggggcct

SEQ ID NO: 412056 - DNA, 30 bp, Artificial Sequence
  Synthetic oligonucleotide
cataatgacgtgcctgcaagccgctggcct

SEQ ID NO: 412057 - DNA, 30 bp, Artificial Sequence
  Synthetic oligonucleotide
aaatccggtatagttctaaagtagtggcct

SEQ ID NO: 412058 - DNA, 30 bp, Artificial Sequence
  Synthetic oligonucleotide
gagcgtaaacctgaaggaaatacgtggcct

SEQ ID NO: 412059 - DNA, 30 bp, Artificial Sequence
  Synthetic oligonucleotide
tcacctaccgattgtggcgtatcttggcct

SEQ ID NO: 412060 - DNA, 29 bp, Artificial Sequence
  Synthetic oligonucleotide
ttcgtagattgcagacatctgccatgcct

SEQ ID NO: 412061 - DNA, 30 bp, Artificial Sequence
  Synthetic oligonucleotide
agaccaaggtagtgctcgctactcatgcct

SEQ ID NO: 412062 - DNA, 30 bp, Artificial Sequence
  Synthetic oligonucleotide
aatgcggcaccgggtaacgggcctatgcct

SEQ ID NO: 412063 - DNA, 30 bp, Artificial Sequence
  Synthetic oligonucleotide
aagtcagctattcccggcctagttatgcct

SEQ ID NO: 412064 - DNA, 30 bp, Artificial Sequence
  Synthetic oligonucleotide
tccacgtacgtagaccatactccactgcct

SEQ ID NO: 412065 - DNA, 30 bp, Artificial Sequence
  Synthetic oligonucleotide
atatgtggacagtcgttcgccacgctgcct

SEQ ID NO: 412066 - DNA, 30 bp, Artificial Sequence
  Synthetic oligonucleotide
gcaccctaacggaactggaactggctgcct

SEQ ID NO: 412067 - DNA, 30 bp, Artificial Sequence
  Synthetic oligonucleotide
aaagcacaacggtagtgccgtattctgcct

SEQ ID NO: 412068 - DNA, 30 bp, Artificial Sequence
  Synthetic oligonucleotide
cgttatggaccttagacgtagtccgtgcct

SEQ ID NO: 412069 - DNA, 30 bp, Artificial Sequence
  Synthetic oligonucleotide
gaccgaatatattagtcggccggcgtgcct

SEQ ID NO: 412070 - DNA, 30 bp, Artificial Sequence
  Synthetic oligonucleotide
gatccgactatgcatgtgtaccaggtgcct

SEQ ID NO: 412071 - DNA, 30 bp, Artificial Sequence
  Synthetic oligonucleotide
ttaaccgtacgcaaacacgtattggtgcct

SEQ ID NO: 412072 - DNA, 30 bp, Artificial Sequence
  Synthetic oligonucleotide
tttcccatcactgggatgtttagattgcct

SEQ ID NO: 412073 - DNA, 30 bp, Artificial Sequence
  Synthetic oligonucleotide
tatgaacttcaatcgatggaatcgttgcct

SEQ ID NO: 412074 - DNA, 30 bp, Artificial Sequence
  Synthetic oligonucleotide
gacattacgttactgtctagcatgttgcct

SEQ ID NO: 412075 - DNA, 30 bp, Artificial Sequence
  Synthetic oligonucleotide
ctgtggataccaagggttcagattttgcct

SEQ ID NO: 412076 - DNA, 30 bp, Artificial Sequence
  Synthetic oligonucleotide
gatttaccgctggttgagcgacaaaatcct

SEQ ID NO: 412077 - DNA, 30 bp, Artificial Sequence
  Synthetic oligonucleotide
gtataatgtgacagtcatggcatcaatcct

SEQ ID NO: 412078 - DNA, 30 bp, Artificial Sequence
  Synthetic oligonucleotide
tcacacactatcctcagcgagattaatcct

SEQ ID NO: 412079 - DNA, 30 bp, Artificial Sequence
  Synthetic oligonucleotide
cttctgacgatttcggtgttattacatcct

SEQ ID NO: 412080 - DNA, 30 bp, Artificial Sequence
  Synthetic oligonucleotide
cttggcaatttgtggcataaaatgcatcct

SEQ ID NO: 412081 - DNA, 30 bp, Artificial Sequence
  Synthetic oligonucleotide
gagaccctcggtcaatcgccacctcatcct

SEQ ID NO: 412082 - DNA, 30 bp, Artificial Sequence
  Synthetic oligonucleotide
taccattctggagggagtgaaggtcatcct

SEQ ID NO: 412083 - DNA, 30 bp, Artificial Sequence
  Synthetic oligonucleotide
cgatcttacgttcattcaccggttcatcct

SEQ ID NO: 412084 - DNA, 30 bp, Artificial Sequence
  Synthetic oligonucleotide
aaaggtgacctccaaagtcgcagagatcct

SEQ ID NO: 412085 - DNA, 30 bp, Artificial Sequence
  Synthetic oligonucleotide
tatagtatccggaacattttggacgatcct

SEQ ID NO: 412086 - DNA, 30 bp, Artificial Sequence
  Synthetic oligonucleotide
gtcgattggtaggacgcatggcgggatcct

SEQ ID NO: 412087 - DNA, 30 bp, Artificial Sequence
  Synthetic oligonucleotide
cttccgagcggaagagatacggtggatcct

SEQ ID NO: 412088 - DNA, 30 bp, Artificial Sequence
  Synthetic oligonucleotide
gcgaccatcttaaccaatgttgatgatcct

SEQ ID NO: 412089 - DNA, 30 bp, Artificial Sequence
  Synthetic oligonucleotide
acagacactccgagctttacttctgatcct

SEQ ID NO: 412090 - DNA, 30 bp, Artificial Sequence
  Synthetic oligonucleotide
actcgcagattgttagcataccaatatcct

SEQ ID NO: 412091 - DNA, 30 bp, Artificial Sequence
  Synthetic oligonucleotide
tccttttctagtatacattccggatatcct

SEQ ID NO: 412092 - DNA, 30 bp, Artificial Sequence
  Synthetic oligonucleotide
tgacacggcctgtcctttagacagtatcct

SEQ ID NO: 412093 - DNA, 30 bp, Artificial Sequence
  Synthetic oligonucleotide
tcccagtgtgggaaggtcgataattatcct

SEQ ID NO: 412094 - DNA, 30 bp, Artificial Sequence
  Synthetic oligonucleotide
ttgtagtttgagcaaactgattattatcct

SEQ ID NO: 412095 - DNA, 30 bp, Artificial Sequence
  Synthetic oligonucleotide
aattaagcaagatttagatatagttatcct

SEQ ID NO: 412096 - DNA, 30 bp, Artificial Sequence
  Synthetic oligonucleotide
tatttaggccgttaggaaacgcaaactcct

SEQ ID NO: 412097 - DNA, 30 bp, Artificial Sequence
  Synthetic oligonucleotide
tatttaaagaacgttgagtggcccactcct

SEQ ID NO: 412098 - DNA, 30 bp, Artificial Sequence
  Synthetic oligonucleotide
gtgttcttggtctttttgctattcactcct

SEQ ID NO: 412099 - DNA, 30 bp, Artificial Sequence
  Synthetic oligonucleotide
acttgtttaagacgcgatgctcagactcct

SEQ ID NO: 412100 - DNA, 30 bp, Artificial Sequence
  Synthetic oligonucleotide
tggaatcaagggatcctgcccgcgactcct

SEQ ID NO: 412101 - DNA, 30 bp, Artificial Sequence
  Synthetic oligonucleotide
tagatgctttgcttgcaagctaatactcct

SEQ ID NO: 412102 - DNA, 30 bp, Artificial Sequence
  Synthetic oligonucleotide
tctttatctagagatctctcaagtactcct

SEQ ID NO: 412103 - DNA, 30 bp, Artificial Sequence
  Synthetic oligonucleotide
ctgaaacgattccatcaggagacacctcct

SEQ ID NO: 412104 - DNA, 30 bp, Artificial Sequence
  Synthetic oligonucleotide
agcgacacagcgaggactcaaccacctcct

SEQ ID NO: 412105 - DNA, 30 bp, Artificial Sequence
  Synthetic oligonucleotide
caggctcgcaatgtttgctaaatacctcct

SEQ ID NO: 412106 - DNA, 30 bp, Artificial Sequence
  Synthetic oligonucleotide
aagcttctttaattagcggggtcccctcct

SEQ ID NO: 412107 - DNA, 30 bp, Artificial Sequence
  Synthetic oligonucleotide
tacagtgcaagaggagctgcaggccctcct

SEQ ID NO: 412108 - DNA, 30 bp, Artificial Sequence
  Synthetic oligonucleotide
gtacttctgaccccaagtctgtgccctcct

SEQ ID NO: 412109 - DNA, 30 bp, Artificial Sequence
  Synthetic oligonucleotide
atacacaggcagctgaccaggcaagctcct

SEQ ID NO: 412110 - DNA, 30 bp, Artificial Sequence
  Synthetic oligonucleotide
gcgggggtgccggcggggtgtcgagctcct

SEQ ID NO: 412111 - DNA, 30 bp, Artificial Sequence
  Synthetic oligonucleotide
ttaacagccgcacttaagaccctagctcct

SEQ ID NO: 412112 - DNA, 30 bp, Artificial Sequence
  Synthetic oligonucleotide
gcagcgtccttattgtacgcattagctcct

SEQ ID NO: 412113 - DNA, 30 bp, Artificial Sequence
  Synthetic oligonucleotide
gtgtgggggtactactgccgtaacgctcct

SEQ ID NO: 412114 - DNA, 30 bp, Artificial Sequence
  Synthetic oligonucleotide
cgccaaaagcgagggagttaggtcgctcct

SEQ ID NO: 412115 - DNA, 30 bp, Artificial Sequence
  Synthetic oligonucleotide
cactatacataaggcttgaggttcgctcct

SEQ ID NO: 412116 - DNA, 30 bp, Artificial Sequence
  Synthetic oligonucleotide
ggcaatcagaattactacttttttgctcct

SEQ ID NO: 412117 - DNA, 30 bp, Artificial Sequence
  Synthetic oligonucleotide
taatgcttaaaaacgtagtaacaatctcct

SEQ ID NO: 412118 - DNA, 30 bp, Artificial Sequence
  Synthetic oligonucleotide
aatgacattgccggttgttgtctatctcct

SEQ ID NO: 412119 - DNA, 30 bp, Artificial Sequence
  Synthetic oligonucleotide
gaatacgcactcctccctcagaggtctcct

SEQ ID NO: 412120 - DNA, 31 bp, Artificial Sequence
  Synthetic oligonucleotide
ggaggtcaacgggcaagaatcctggtctcct

SEQ ID NO: 412121 - DNA, 30 bp, Artificial Sequence
  Synthetic oligonucleotide
aatgagagtgatagtacctccccttctcct

SEQ ID NO: 412122 - DNA, 30 bp, Artificial Sequence
  Synthetic oligonucleotide
tatcggaggcgcgtcagttaccccagtcct

SEQ ID NO: 412123 - DNA, 30 bp, Artificial Sequence
  Synthetic oligonucleotide
tatggtcctttgagatctctattgagtcct

SEQ ID NO: 412124 - DNA, 30 bp, Artificial Sequence
  Synthetic oligonucleotide
gcggaaaggtccaaaacgctggctagtcct

SEQ ID NO: 412125 - DNA, 30 bp, Artificial Sequence
  Synthetic oligonucleotide
aatgacagaattttacgtagtcgtagtcct

SEQ ID NO: 412126 - DNA, 30 bp, Artificial Sequence
  Synthetic oligonucleotide
catctgcgatgaggcgtacgaagacgtcct

SEQ ID NO: 412127 - DNA, 30 bp, Artificial Sequence
  Synthetic oligonucleotide
cagttctcgagtagtacacgagtgcgtcct

SEQ ID NO: 412128 - DNA, 30 bp, Artificial Sequence
  Synthetic oligonucleotide
taaaataggctcggttatccaacaggtcct

SEQ ID NO: 412129 - DNA, 30 bp, Artificial Sequence
  Synthetic oligonucleotide
ccattaccgtccggggcattgataggtcct

SEQ ID NO: 412130 - DNA, 30 bp, Artificial Sequence
  Synthetic oligonucleotide
acataagatgttttgggaattgtaggtcct

SEQ ID NO: 412131 - DNA, 30 bp, Artificial Sequence
  Synthetic oligonucleotide
aatgatcggaggtcgaaccaatacggtcct

SEQ ID NO: 412132 - DNA, 30 bp, Artificial Sequence
  Synthetic oligonucleotide
actcgcctccaacgttgagttgccggtcct

SEQ ID NO: 412133 - DNA, 30 bp, Artificial Sequence
  Synthetic oligonucleotide
ggcaaagaaatactactacacttgggtcct

SEQ ID NO: 412134 - DNA, 30 bp, Artificial Sequence
  Synthetic oligonucleotide
attacaccttttgtgtttttgagtggtcct

SEQ ID NO: 412135 - DNA, 30 bp, Artificial Sequence
  Synthetic oligonucleotide
tgactattgctggcttacaattgatgtcct

SEQ ID NO: 412136 - DNA, 30 bp, Artificial Sequence
  Synthetic oligonucleotide
gcccatttccttagctttgtacactgtcct

SEQ ID NO: 412137 - DNA, 30 bp, Artificial Sequence
  Synthetic oligonucleotide
gatatatttggtgtcactggctcctgtcct

SEQ ID NO: 412138 - DNA, 30 bp, Artificial Sequence
  Synthetic oligonucleotide
cggaattgttacaggctttagtcctgtcct

SEQ ID NO: 412139 - DNA, 30 bp, Artificial Sequence
  Synthetic oligonucleotide
taacgattcctgtttaatatctagtgtcct

SEQ ID NO: 412140 - DNA, 30 bp, Artificial Sequence
  Synthetic oligonucleotide
tctgggtttctttctcgggtttggtgtcct

SEQ ID NO: 412141 - DNA, 30 bp, Artificial Sequence
  Synthetic oligonucleotide
tagctcgcacattctattgaattgtgtcct

SEQ ID NO: 412142 - DNA, 30 bp, Artificial Sequence
  Synthetic oligonucleotide
cctcgtaaattcgaggtcgtcctttgtcct

SEQ ID NO: 412143 - DNA, 30 bp, Artificial Sequence
  Synthetic oligonucleotide
aagtgagtacgaggtatacgtacaattcct

SEQ ID NO: 412144 - DNA, 30 bp, Artificial Sequence
  Synthetic oligonucleotide
actcccggggcggtttattgaataattcct

SEQ ID NO: 412145 - DNA, 30 bp, Artificial Sequence
  Synthetic oligonucleotide
tttgaggtgaggtatgtgatcgagattcct

SEQ ID NO: 412146 - DNA, 30 bp, Artificial Sequence
  Synthetic oligonucleotide
aagataaccaaataacgtcattatattcct

SEQ ID NO: 412147 - DNA, 30 bp, Artificial Sequence
  Synthetic oligonucleotide
aagtatttctaattcagtaaaagtattcct

SEQ ID NO: 412148 - DNA, 30 bp, Artificial Sequence
  Synthetic oligonucleotide
ggctgagaaggcgtcattcaacgtattcct

SEQ ID NO: 412149 - DNA, 30 bp, Artificial Sequence
  Synthetic oligonucleotide
gataactgcgccccggtgggtcgtattcct

SEQ ID NO: 412150 - DNA, 30 bp, Artificial Sequence
  Synthetic oligonucleotide
agaccggctcgtaaagacctctgacttcct

SEQ ID NO: 412151 - DNA, 30 bp, Artificial Sequence
  Synthetic oligonucleotide
agggtgggggttttcccgactcaccttcct

SEQ ID NO: 412152 - DNA, 30 bp, Artificial Sequence
  Synthetic oligonucleotide
tgcacgcggacatagcaagtataccttcct

SEQ ID NO: 412153 - DNA, 30 bp, Artificial Sequence
  Synthetic oligonucleotide
acgccccgggcgggataattgtgccttcct

SEQ ID NO: 412154 - DNA, 30 bp, Artificial Sequence
  Synthetic oligonucleotide
tatgtctatgggcacagctgtgagcttcct

SEQ ID NO: 412155 - DNA, 30 bp, Artificial Sequence
  Synthetic oligonucleotide
aagcctcgggagtaggaggcaggtcttcct

SEQ ID NO: 412156 - DNA, 30 bp, Artificial Sequence
  Synthetic oligonucleotide
ctcttgcgtaagacgaaccgataagttcct

SEQ ID NO: 412157 - DNA, 30 bp, Artificial Sequence
  Synthetic oligonucleotide
tcccagagataatcaaccataacagttcct

SEQ ID NO: 412158 - DNA, 30 bp, Artificial Sequence
  Synthetic oligonucleotide
acatcattgtcacacaggactcgagttcct

SEQ ID NO: 412159 - DNA, 30 bp, Artificial Sequence
  Synthetic oligonucleotide
ggctcaaggccctggcagtctctagttcct

SEQ ID NO: 412160 - DNA, 30 bp, Artificial Sequence
  Synthetic oligonucleotide
atctgtattgtgcgacaatcttgcgttcct

SEQ ID NO: 412161 - DNA, 30 bp, Artificial Sequence
  Synthetic oligonucleotide
ggcgaagcaattaatgacaattcggttcct

SEQ ID NO: 412162 - DNA, 30 bp, Artificial Sequence
  Synthetic oligonucleotide
tgtatatatatgagagatgtgggtgttcct

SEQ ID NO: 412163 - DNA, 30 bp, Artificial Sequence
  Synthetic oligonucleotide
tcttagcccgtgtagcctaagtaatttcct

SEQ ID NO: 412164 - DNA, 30 bp, Artificial Sequence
  Synthetic oligonucleotide
tccggtctcttcttcatggtagagtttcct

SEQ ID NO: 412165 - DNA, 30 bp, Artificial Sequence
  Synthetic oligonucleotide
ttggttgactggtatttccttacgtttcct

SEQ ID NO: 412166 - DNA, 30 bp, Artificial Sequence
  Synthetic oligonucleotide
ggcaattctggtaatactccaaggtttcct

SEQ ID NO: 412167 - DNA, 30 bp, Artificial Sequence
  Synthetic oligonucleotide
cttacaattagcctaccgatcgtttttcct

SEQ ID NO: 412168 - DNA, 30 bp, Artificial Sequence
  Synthetic oligonucleotide
ttttaaagggcaacaagagaagcaaaagct

SEQ ID NO: 412169 - DNA, 30 bp, Artificial Sequence
  Synthetic oligonucleotide
gtgcttcattatgggccaggttacaaagct

SEQ ID NO: 412170 - DNA, 30 bp, Artificial Sequence
  Synthetic oligonucleotide
ccggcaaggaggattggattcaagaaagct

SEQ ID NO: 412171 - DNA, 30 bp, Artificial Sequence
  Synthetic oligonucleotide
tacacaggaaatacgtattactagaaagct

SEQ ID NO: 412172 - DNA, 30 bp, Artificial Sequence
  Synthetic oligonucleotide
cagcttgcaagcattagagcactgaaagct

SEQ ID NO: 412173 - DNA, 30 bp, Artificial Sequence
  Synthetic oligonucleotide
tatccatttctcgttacgagtttgaaagct

SEQ ID NO: 412174 - DNA, 30 bp, Artificial Sequence
  Synthetic oligonucleotide
ctgttaacggacaaaaatgagaataaagct

SEQ ID NO: 412175 - DNA, 30 bp, Artificial Sequence
  Synthetic oligonucleotide
taatcaagagcgtttttagagtagcaagct

SEQ ID NO: 412176 - DNA, 30 bp, Artificial Sequence
  Synthetic oligonucleotide
cgcgccgcttaaggtcaatcggggcaagct

SEQ ID NO: 412177 - DNA, 30 bp, Artificial Sequence
  Synthetic oligonucleotide
gagccgagcacttttgtcgggatgcaagct

SEQ ID NO: 412178 - DNA, 30 bp, Artificial Sequence
  Synthetic oligonucleotide
ggggagcatggctcccgctctggtcaagct

SEQ ID NO: 412179 - DNA, 30 bp, Artificial Sequence
  Synthetic oligonucleotide
ttgtatacatacgagagcggggcagaagct

SEQ ID NO: 412180 - DNA, 30 bp, Artificial Sequence
  Synthetic oligonucleotide
atagaaaggctcttttcttcatcagaagct

SEQ ID NO: 412181 - DNA, 30 bp, Artificial Sequence
  Synthetic oligonucleotide
agaccttcataaaactccgaattagaagct

SEQ ID NO: 412182 - DNA, 30 bp, Artificial Sequence
  Synthetic oligonucleotide
cggagccaatattgtctagaacacgaagct

SEQ ID NO: 412183 - DNA, 30 bp, Artificial Sequence
  Synthetic oligonucleotide
tgttggagggtccatgatattgacgaagct

SEQ ID NO: 412184 - DNA, 30 bp, Artificial Sequence
  Synthetic oligonucleotide
ttaaaccgctagctcgatctttaggaagct

SEQ ID NO: 412185 - DNA, 30 bp, Artificial Sequence
  Synthetic oligonucleotide
tgatcggtctcacacttttaatcggaagct

SEQ ID NO: 412186 - DNA, 30 bp, Artificial Sequence
  Synthetic oligonucleotide
tggttcgatactgcgcccgagcatgaagct

SEQ ID NO: 412187 - DNA, 30 bp, Artificial Sequence
  Synthetic oligonucleotide
actaggataactgagctgaagttataagct

SEQ ID NO: 412188 - DNA, 30 bp, Artificial Sequence
  Synthetic oligonucleotide
gtgatggtcaacaagcaaatagattaagct

SEQ ID NO: 412189 - DNA, 30 bp, Artificial Sequence
  Synthetic oligonucleotide
agttggatatttggcggagactattaagct

SEQ ID NO: 412190 - DNA, 30 bp, Artificial Sequence
  Synthetic oligonucleotide
gaccatgggcttgacactttgcgttaagct

SEQ ID NO: 412191 - DNA, 30 bp, Artificial Sequence
  Synthetic oligonucleotide
gatcctgggttttaggctacccaaacagct

SEQ ID NO: 412192 - DNA, 30 bp, Artificial Sequence
  Synthetic oligonucleotide
gaaaactccgggggaaaatggtgaacagct

SEQ ID NO: 412193 - DNA, 30 bp, Artificial Sequence
  Synthetic oligonucleotide
tcaggccggtcatgcgcctggataacagct

SEQ ID NO: 412194 - DNA, 30 bp, Artificial Sequence
  Synthetic oligonucleotide
taggaatgatgattgggagacgtaacagct

SEQ ID NO: 412195 - DNA, 26 bp, Artificial Sequence
  Synthetic oligonucleotide
tagacctcataatagatttcacagct

SEQ ID NO: 412196 - DNA, 30 bp, Artificial Sequence
  Synthetic oligonucleotide
ttaaggtgcgggtgctgtctcccgacagct

SEQ ID NO: 412197 - DNA, 30 bp, Artificial Sequence
  Synthetic oligonucleotide
tcaaatctgggtgaggtgtatgtgacagct

SEQ ID NO: 412198 - DNA, 30 bp, Artificial Sequence
  Synthetic oligonucleotide
gcggggtcgtggctcgaatcatttacagct

SEQ ID NO: 412199 - DNA, 30 bp, Artificial Sequence
  Synthetic oligonucleotide
caatgataactggtatcctccctaccagct

SEQ ID NO: 412200 - DNA, 30 bp, Artificial Sequence
  Synthetic oligonucleotide
taacctagcgcgcgcttgagacgcccagct

SEQ ID NO: 412201 - DNA, 30 bp, Artificial Sequence
  Synthetic oligonucleotide
taatactaggtgggttgttttacagcagct

SEQ ID NO: 412202 - DNA, 30 bp, Artificial Sequence
  Synthetic oligonucleotide
aaaacggggcctctgtaaccaggagcagct

SEQ ID NO: 412203 - DNA, 30 bp, Artificial Sequence
  Synthetic oligonucleotide
agagggtaacctagtgtatggagcgcagct

SEQ ID NO: 412204 - DNA, 30 bp, Artificial Sequence
  Synthetic oligonucleotide
tacatcggggctttacaaagtctcgcagct

SEQ ID NO: 412205 - DNA, 30 bp, Artificial Sequence
  Synthetic oligonucleotide
tacgcttggtagtaatacgcggcggcagct

SEQ ID NO: 412206 - DNA, 30 bp, Artificial Sequence
  Synthetic oligonucleotide
tctcacttattgccgactcgtggggcagct

SEQ ID NO: 412207 - DNA, 30 bp, Artificial Sequence
  Synthetic oligonucleotide
ttcgggctagaggcttcctaattggcagct

SEQ ID NO: 412208 - DNA, 30 bp, Artificial Sequence
  Synthetic oligonucleotide
aacgacctgttgtgttgaggaagtgcagct

SEQ ID NO: 412209 - DNA, 30 bp, Artificial Sequence
  Synthetic oligonucleotide
ctttatggattcggtaccaaatgatcagct

SEQ ID NO: 412210 - DNA, 30 bp, Artificial Sequence
  Synthetic oligonucleotide
cgaacgcagttaagcatcgaaaattcagct

SEQ ID NO: 412211 - DNA, 30 bp, Artificial Sequence
  Synthetic oligonucleotide
aggcatatattttcgcccgtcacaagagct

SEQ ID NO: 412212 - DNA, 30 bp, Artificial Sequence
  Synthetic oligonucleotide
atggaagatttccagggatttgaacgagct

SEQ ID NO: 412213 - DNA, 30 bp, Artificial Sequence
  Synthetic oligonucleotide
catttggtgtggttggcatttgcccgagct

SEQ ID NO: 412214 - DNA, 30 bp, Artificial Sequence
  Synthetic oligonucleotide
aagcacaaaatgagcaccgcgacgcgagct

SEQ ID NO: 412215 - DNA, 30 bp, Artificial Sequence
  Synthetic oligonucleotide
gcaagtgccaggcaacatgagttgcgagct

SEQ ID NO: 412216 - DNA, 30 bp, Artificial Sequence
  Synthetic oligonucleotide
atggacgtttcagcgaatccgggtcgagct

SEQ ID NO: 412217 - DNA, 30 bp, Artificial Sequence
  Synthetic oligonucleotide
ggctggctagaggccgggagagacggagct

SEQ ID NO: 412218 - DNA, 30 bp, Artificial Sequence
  Synthetic oligonucleotide
atgggcttaaaccactggtccatgggagct

SEQ ID NO: 412219 - DNA, 30 bp, Artificial Sequence
  Synthetic oligonucleotide
gtggttgttacgtaaacgcccagtggagct

SEQ ID NO: 412220 - DNA, 30 bp, Artificial Sequence
  Synthetic oligonucleotide
gatgcatgagccaacatccgtaactgagct

SEQ ID NO: 412221 - DNA, 30 bp, Artificial Sequence
  Synthetic oligonucleotide
tttgcggaccggcagtagcgctgctgagct

SEQ ID NO: 412222 - DNA, 30 bp, Artificial Sequence
  Synthetic oligonucleotide
taccccgagatacttcacaggttctgagct

SEQ ID NO: 412223 - DNA, 30 bp, Artificial Sequence
  Synthetic oligonucleotide
gtataatgtaaagaatgtacctggtgagct

SEQ ID NO: 412224 - DNA, 30 bp, Artificial Sequence
  Synthetic oligonucleotide
acataccgaagaagaggcaagacttgagct

SEQ ID NO: 412225 - DNA, 30 bp, Artificial Sequence
  Synthetic oligonucleotide
aataacagggtcatatgcgccaacatagct

SEQ ID NO: 412226 - DNA, 30 bp, Artificial Sequence
  Synthetic oligonucleotide
gaatttgcggttaaaagactgaggatagct

SEQ ID NO: 412227 - DNA, 30 bp, Artificial Sequence
  Synthetic oligonucleotide
gattcggtgtccggcgtacgtgggatagct

SEQ ID NO: 412228 - DNA, 30 bp, Artificial Sequence
  Synthetic oligonucleotide
gtaagaatgccaatgcgtagatctatagct

SEQ ID NO: 412229 - DNA, 30 bp, Artificial Sequence
  Synthetic oligonucleotide
gccagtattaaagaaccactaagactagct

SEQ ID NO: 412230 - DNA, 30 bp, Artificial Sequence
  Synthetic oligonucleotide
gaatgcgtagcacaacgtcgaaccctagct

SEQ ID NO: 412231 - DNA, 30 bp, Artificial Sequence
  Synthetic oligonucleotide
tggtctggcgacccactagtaaggctagct

SEQ ID NO: 412232 - DNA, 30 bp, Artificial Sequence
  Synthetic oligonucleotide
cgcggtatgcgacgcgtgattatgctagct

SEQ ID NO: 412233 - DNA, 30 bp, Artificial Sequence
  Synthetic oligonucleotide
gacgatttttgtgtgtccaatactctagct

SEQ ID NO: 412234 - DNA, 30 bp, Artificial Sequence
  Synthetic oligonucleotide
acccctgagacaactcactaataagtagct

SEQ ID NO: 412235 - DNA, 30 bp, Artificial Sequence
  Synthetic oligonucleotide
aatttcacacgcaacccttatccagtagct

SEQ ID NO: 412236 - DNA, 30 bp, Artificial Sequence
  Synthetic oligonucleotide
tgcgcttagagcgagtcccgacgagtagct

SEQ ID NO: 412237 - DNA, 30 bp, Artificial Sequence
  Synthetic oligonucleotide
agtggttagaaagacgccatgtgcgtagct

SEQ ID NO: 412238 - DNA, 30 bp, Artificial Sequence
  Synthetic oligonucleotide
agatggtttcttggttcacagatcgtagct

SEQ ID NO: 412239 - DNA, 30 bp, Artificial Sequence
  Synthetic oligonucleotide
gacggccactgatgagttcgttaggtagct

SEQ ID NO: 412240 - DNA, 30 bp, Artificial Sequence
  Synthetic oligonucleotide
acccacttgtccaatctcaagcatgtagct

SEQ ID NO: 412241 - DNA, 30 bp, Artificial Sequence
  Synthetic oligonucleotide
gtctcgtctatcagggtttaagaattagct

SEQ ID NO: 412242 - DNA, 30 bp, Artificial Sequence
  Synthetic oligonucleotide
ttcctaagatcggatatagcccacttagct

SEQ ID NO: 412243 - DNA, 30 bp, Artificial Sequence
  Synthetic oligonucleotide
tatatatttcccgtagtttgtgtgttagct

SEQ ID NO: 412244 - DNA, 30 bp, Artificial Sequence
  Synthetic oligonucleotide
taaagtcagcggtaattgcagactttagct

SEQ ID NO: 412245 - DNA, 30 bp, Artificial Sequence
  Synthetic oligonucleotide
aatctcgtaagtattgtgttgtgtttagct

SEQ ID NO: 412246 - DNA, 30 bp, Artificial Sequence
  Synthetic oligonucleotide
cggctagtacggaatctatatccaaacgct

SEQ ID NO: 412247 - DNA, 30 bp, Artificial Sequence
  Synthetic oligonucleotide
acacactgttgcgccgttaagggcaacgct

SEQ ID NO: 412248 - DNA, 30 bp, Artificial Sequence
  Synthetic oligonucleotide
gttagccaggtaaaataaactggcaacgct

SEQ ID NO: 412249 - DNA, 30 bp, Artificial Sequence
  Synthetic oligonucleotide
caagcgattgggagaagcacattcaacgct

SEQ ID NO: 412250 - DNA, 30 bp, Artificial Sequence
  Synthetic oligonucleotide
cccgaagactcaataggcttcaagaacgct

SEQ ID NO: 412251 - DNA, 30 bp, Artificial Sequence
  Synthetic oligonucleotide
taatgcgagcgtatcggatagaagaacgct

SEQ ID NO: 412252 - DNA, 30 bp, Artificial Sequence
  Synthetic oligonucleotide
tgaagcaggtatcttagacacacgaacgct

SEQ ID NO: 412253 - DNA, 30 bp, Artificial Sequence
  Synthetic oligonucleotide
ttagcaacgctcgacatcgtatcgaacgct

SEQ ID NO: 412254 - DNA, 30 bp, Artificial Sequence
  Synthetic oligonucleotide
ttattcttgtgcgcatgtgcattgaacgct

SEQ ID NO: 412255 - DNA, 30 bp, Artificial Sequence
  Synthetic oligonucleotide
agtttaataacgtacattcacttgaacgct

SEQ ID NO: 412256 - DNA, 30 bp, Artificial Sequence
  Synthetic oligonucleotide
ccgcgaccggtgcaccgggagggtaacgct

SEQ ID NO: 412257 - DNA, 30 bp, Artificial Sequence
  Synthetic oligonucleotide
gcagaaagggttacactaacatttaacgct

SEQ ID NO: 412258 - DNA, 30 bp, Artificial Sequence
  Synthetic oligonucleotide
aatgatacacgcccttagttgtaacacgct

SEQ ID NO: 412259 - DNA, 30 bp, Artificial Sequence
  Synthetic oligonucleotide
ttacgtcctggacgttcgatcacccacgct

SEQ ID NO: 412260 - DNA, 30 bp, Artificial Sequence
  Synthetic oligonucleotide
tagacaagcgcttactaaacgccccacgct

SEQ ID NO: 412261 - DNA, 30 bp, Artificial Sequence
  Synthetic oligonucleotide
gtagcatacaatgcaaacgccacgcacgct

SEQ ID NO: 412262 - DNA, 30 bp, Artificial Sequence
  Synthetic oligonucleotide
taaaagttagttaataagtagccgcacgct

SEQ ID NO: 412263 - DNA, 30 bp, Artificial Sequence
  Synthetic oligonucleotide
tttatctctttactgcaatcaattcacgct

SEQ ID NO: 412264 - DNA, 30 bp, Artificial Sequence
  Synthetic oligonucleotide
atgataatcttgcgggaatagacagacgct

SEQ ID NO: 412265 - DNA, 29 bp, Artificial Sequence
  Synthetic oligonucleotide
tgctgcgtgggccatcaagccccgacgct

SEQ ID NO: 412266 - DNA, 30 bp, Artificial Sequence
  Synthetic oligonucleotide
aagggttctacgtggccagtaagcgacgct

SEQ ID NO: 412267 - DNA, 30 bp, Artificial Sequence
  Synthetic oligonucleotide
gacatagtgcgcaggttagccacggacgct

SEQ ID NO: 412268 - DNA, 30 bp, Artificial Sequence
  Synthetic oligonucleotide
tgtctgggagggctcagaacgtcggacgct

SEQ ID NO: 412269 - DNA, 30 bp, Artificial Sequence
  Synthetic oligonucleotide
accgttcagcgttacccgcaggtggacgct

SEQ ID NO: 412270 - DNA, 30 bp, Artificial Sequence
  Synthetic oligonucleotide
ctaagcccgaccaaggctgaggttgacgct

SEQ ID NO: 412271 - DNA, 30 bp, Artificial Sequence
  Synthetic oligonucleotide
aatttaggccggccaatagtagtctacgct

SEQ ID NO: 412272 - DNA, 30 bp, Artificial Sequence
  Synthetic oligonucleotide
aagggttcgcgtagtgctacccggtacgct

SEQ ID NO: 412273 - DNA, 30 bp, Artificial Sequence
  Synthetic oligonucleotide
gacactgttgctgtgagagctgtgtacgct

SEQ ID NO: 412274 - DNA, 30 bp, Artificial Sequence
  Synthetic oligonucleotide
tttagaggcggaattgttgggtgttacgct

SEQ ID NO: 412275 - DNA, 30 bp, Artificial Sequence
  Synthetic oligonucleotide
ttcaattagttggcggtgtatcaaaccgct

SEQ ID NO: 412276 - DNA, 30 bp, Artificial Sequence
  Synthetic oligonucleotide
ggtagtatctcagatagcgttataaccgct

SEQ ID NO: 412277 - DNA, 30 bp, Artificial Sequence
  Synthetic oligonucleotide
tctataactacagtggtgaaaaaacccgct

SEQ ID NO: 412278 - DNA, 30 bp, Artificial Sequence
  Synthetic oligonucleotide
accggtgcaacatgtcaattgggacccgct

SEQ ID NO: 412279 - DNA, 30 bp, Artificial Sequence
  Synthetic oligonucleotide
atacagtgattgtatgcctccctacccgct

SEQ ID NO: 412280 - DNA, 30 bp, Artificial Sequence
  Synthetic oligonucleotide
catataaataagtttttgccgtgcgccgct

SEQ ID NO: 412281 - DNA, 30 bp, Artificial Sequence
  Synthetic oligonucleotide
caagtccacatacgcgcttaacaggccgct

SEQ ID NO: 412282 - DNA, 30 bp, Artificial Sequence
  Synthetic oligonucleotide
cgaattctgatgggtcgtcgtggggccgct

SEQ ID NO: 412283 - DNA, 30 bp, Artificial Sequence
  Synthetic oligonucleotide
tgtcagaagacgtatagcgttgctgccgct

SEQ ID NO: 412284 - DNA, 30 bp, Artificial Sequence
  Synthetic oligonucleotide
ttatgataggtcgtgcttgtgtaatccgct

SEQ ID NO: 412285 - DNA, 25 bp, Artificial Sequence
  Synthetic oligonucleotide
acggccatttacgcagaactccgct

SEQ ID NO: 412286 - DNA, 30 bp, Artificial Sequence
  Synthetic oligonucleotide
ggggcgtactaagtgccccctgtctccgct

SEQ ID NO: 412287 - DNA, 30 bp, Artificial Sequence
  Synthetic oligonucleotide
gaactccgaagtccacaaacggagtccgct

SEQ ID NO: 412288 - DNA, 30 bp, Artificial Sequence
  Synthetic oligonucleotide
gtcagttacgccttcacataccggtccgct

SEQ ID NO: 412289 - DNA, 31 bp, Artificial Sequence
  Synthetic oligonucleotide
gcgcgtgatctacaaaaagttactttccgct

SEQ ID NO: 412290 - DNA, 30 bp, Artificial Sequence
  Synthetic oligonucleotide
tagtcgctacgacttgctaatcacagcgct

SEQ ID NO: 412291 - DNA, 30 bp, Artificial Sequence
  Synthetic oligonucleotide
gttggtgtgtctaacaggggtgacagcgct

SEQ ID NO: 412292 - DNA, 30 bp, Artificial Sequence
  Synthetic oligonucleotide
tcaatggcccggcaaacggcgtacagcgct

SEQ ID NO: 412293 - DNA, 30 bp, Artificial Sequence
  Synthetic oligonucleotide
tagtgagggtgagactgttaatcgagcgct

SEQ ID NO: 412294 - DNA, 30 bp, Artificial Sequence
  Synthetic oligonucleotide
tccttgtttctttattgaagggtgagcgct

SEQ ID NO: 412295 - DNA, 30 bp, Artificial Sequence
  Synthetic oligonucleotide
gaaaatggagagggagcactgcatagcgct

SEQ ID NO: 412296 - DNA, 30 bp, Artificial Sequence
  Synthetic oligonucleotide
gattccaataaacgccgatctaagcgcgct

SEQ ID NO: 412297 - DNA, 30 bp, Artificial Sequence
  Synthetic oligonucleotide
agataaagttgctatctgtcaggtcgcgct

SEQ ID NO: 412298 - DNA, 30 bp, Artificial Sequence
  Synthetic oligonucleotide
cctactgcataggcgcgttgggtaggcgct

SEQ ID NO: 412299 - DNA, 30 bp, Artificial Sequence
  Synthetic oligonucleotide
ctcgggagaatattgcaacatggcggcgct

SEQ ID NO: 412300 - DNA, 30 bp, Artificial Sequence
  Synthetic oligonucleotide
agatgacaatccgccaaaaaactcggcgct

SEQ ID NO: 412301 - DNA, 30 bp, Artificial Sequence
  Synthetic oligonucleotide
cagtgacattcgtgatgaacttagggcgct

SEQ ID NO: 412302 - DNA, 30 bp, Artificial Sequence
  Synthetic oligonucleotide
cggagtatgatgagctggcaagggggcgct

SEQ ID NO: 412303 - DNA, 30 bp, Artificial Sequence
  Synthetic oligonucleotide
ccgactacgtgagtaggttttgtgggcgct

SEQ ID NO: 412304 - DNA, 30 bp, Artificial Sequence
  Synthetic oligonucleotide
gtagctagccaaaatcgagtgtctggcgct

SEQ ID NO: 412305 - DNA, 30 bp, Artificial Sequence
  Synthetic oligonucleotide
acgacattgagcttttaaggcagtggcgct

SEQ ID NO: 412306 - DNA, 30 bp, Artificial Sequence
  Synthetic oligonucleotide
aaaatgccttgtacacacaggtttggcgct

SEQ ID NO: 412307 - DNA, 30 bp, Artificial Sequence
  Synthetic oligonucleotide
atctctaagaatcatttgacagattgcgct

SEQ ID NO: 412308 - DNA, 30 bp, Artificial Sequence
  Synthetic oligonucleotide
ggtactactttagcgtccggaagaatcgct

SEQ ID NO: 412309 - DNA, 30 bp, Artificial Sequence
  Synthetic oligonucleotide
gcactcgtcggagtgttccggtgaatcgct

SEQ ID NO: 412310 - DNA, 30 bp, Artificial Sequence
  Synthetic oligonucleotide
ttacactggacaaagtctttcacgatcgct

SEQ ID NO: 412311 - DNA, 30 bp, Artificial Sequence
  Synthetic oligonucleotide
ctcaatctgtcgctggatgccactatcgct

SEQ ID NO: 412312 - DNA, 30 bp, Artificial Sequence
  Synthetic oligonucleotide
ttagtcacaaaaacttatgtctctatcgct

SEQ ID NO: 412313 - DNA, 30 bp, Artificial Sequence
  Synthetic oligonucleotide
gggtggaagatgatgcggcatctactcgct

SEQ ID NO: 412314 - DNA, 30 bp, Artificial Sequence
  Synthetic oligonucleotide
tgaattcacgagtctttgtcggccctcgct

SEQ ID NO: 412315 - DNA, 30 bp, Artificial Sequence
  Synthetic oligonucleotide
tattagtttttaagtggaatagcgctcgct

SEQ ID NO: 412316 - DNA, 30 bp, Artificial Sequence
  Synthetic oligonucleotide
tttgcctcgtaaaattcgcaatcgctcgct

SEQ ID NO: 412317 - DNA, 30 bp, Artificial Sequence
  Synthetic oligonucleotide
ataggacgcgcagcgcaccaaacagtcgct

SEQ ID NO: 412318 - DNA, 30 bp, Artificial Sequence
  Synthetic oligonucleotide
gtttccttaacagattgagaactagtcgct

SEQ ID NO: 412319 - DNA, 30 bp, Artificial Sequence
  Synthetic oligonucleotide
gtcttatcaaggacaccgtgcaaggtcgct

SEQ ID NO: 412320 - DNA, 30 bp, Artificial Sequence
  Synthetic oligonucleotide
ggctagcaagggactcaaacataggtcgct

SEQ ID NO: 412321 - DNA, 30 bp, Artificial Sequence
  Synthetic oligonucleotide
atcagagcttactcattgggcatggtcgct

SEQ ID NO: 412322 - DNA, 30 bp, Artificial Sequence
  Synthetic oligonucleotide
gaaatgacattcgcacccaaaccattcgct

SEQ ID NO: 412323 - DNA, 30 bp, Artificial Sequence
  Synthetic oligonucleotide
ataatagtcggtccgtgatgcatattcgct

SEQ ID NO: 412324 - DNA, 30 bp, Artificial Sequence
  Synthetic oligonucleotide
ggaatacagcacccttcaggggtattcgct

SEQ ID NO: 412325 - DNA, 30 bp, Artificial Sequence
  Synthetic oligonucleotide
taaagatgcaatgcgccgtcattattcgct

SEQ ID NO: 412326 - DNA, 30 bp, Artificial Sequence
  Synthetic oligonucleotide
tttgagccgatgttctctcccctcttcgct

SEQ ID NO: 412327 - DNA, 30 bp, Artificial Sequence
  Synthetic oligonucleotide
ggtctacaagttagactgatgcagttcgct

SEQ ID NO: 412328 - DNA, 30 bp, Artificial Sequence
  Synthetic oligonucleotide
gctacgtattcctgtaggacagcgttcgct

SEQ ID NO: 412329 - DNA, 30 bp, Artificial Sequence
  Synthetic oligonucleotide
tgttggtaaggccctctacaaatgttcgct

SEQ ID NO: 412330 - DNA, 30 bp, Artificial Sequence
  Synthetic oligonucleotide
tccctactacaagacctcacgagtttcgct

SEQ ID NO: 412331 - DNA, 30 bp, Artificial Sequence
  Synthetic oligonucleotide
acctcttagtgaaatagggaagataaggct

SEQ ID NO: 412332 - DNA, 30 bp, Artificial Sequence
  Synthetic oligonucleotide
caaaactggcaagtaagtgtgggccaggct

SEQ ID NO: 412333 - DNA, 30 bp, Artificial Sequence
  Synthetic oligonucleotide
ggtggcccaagcatcaaagtcctccaggct

SEQ ID NO: 412334 - DNA, 30 bp, Artificial Sequence
  Synthetic oligonucleotide
cgacctcaacaacgaacacagccgcaggct

SEQ ID NO: 412335 - DNA, 30 bp, Artificial Sequence
  Synthetic oligonucleotide
gtaaggcacactggtctagggccgcaggct

SEQ ID NO: 412336 - DNA, 30 bp, Artificial Sequence
  Synthetic oligonucleotide
gggcccaagtattctcaggacgatcaggct

SEQ ID NO: 412337 - DNA, 30 bp, Artificial Sequence
  Synthetic oligonucleotide
ggctgggtactccgagatagacgtcaggct

SEQ ID NO: 412338 - DNA, 30 bp, Artificial Sequence
  Synthetic oligonucleotide
gaactaacttcgtctgcgtaataagaggct

SEQ ID NO: 412339 - DNA, 30 bp, Artificial Sequence
  Synthetic oligonucleotide
caatggcgcacctttttactaagagaggct

SEQ ID NO: 412340 - DNA, 30 bp, Artificial Sequence
  Synthetic oligonucleotide
gctatcgtgacatgctcatccggagaggct

SEQ ID NO: 412341 - DNA, 30 bp, Artificial Sequence
  Synthetic oligonucleotide
tagaattaaaaccccttattgcatgaggct

SEQ ID NO: 412342 - DNA, 30 bp, Artificial Sequence
  Synthetic oligonucleotide
tgatgttataaacgtagtacgactgaggct

SEQ ID NO: 412343 - DNA, 30 bp, Artificial Sequence
  Synthetic oligonucleotide
aggttagggttcgcgcttccccttgaggct

SEQ ID NO: 412344 - DNA, 30 bp, Artificial Sequence
  Synthetic oligonucleotide
cgggtgggcaaagggggatttcaataggct

SEQ ID NO: 412345 - DNA, 30 bp, Artificial Sequence
  Synthetic oligonucleotide
ataaagccagagtcagtaaaagcataggct

SEQ ID NO: 412346 - DNA, 30 bp, Artificial Sequence
  Synthetic oligonucleotide
taggcagttacgtatccatcgatataggct

SEQ ID NO: 412347 - DNA, 30 bp, Artificial Sequence
  Synthetic oligonucleotide
aatccggacgcgccgcatagatactaggct

SEQ ID NO: 412348 - DNA, 30 bp, Artificial Sequence
  Synthetic oligonucleotide
ttagtggtagtgcgtcgcgtatactaggct

SEQ ID NO: 412349 - DNA, 30 bp, Artificial Sequence
  Synthetic oligonucleotide
cagtcggcggtgccgcaaggaacctaggct

SEQ ID NO: 412350 - DNA, 30 bp, Artificial Sequence
  Synthetic oligonucleotide
tgatgtcgtacatgctataccttctaggct

SEQ ID NO: 412351 - DNA, 30 bp, Artificial Sequence
  Synthetic oligonucleotide
aatagtttacgtgccatcccggggtaggct

SEQ ID NO: 412352 - DNA, 30 bp, Artificial Sequence
  Synthetic oligonucleotide
cggcagacctggttcggcggcatgtaggct

SEQ ID NO: 412353 - DNA, 30 bp, Artificial Sequence
  Synthetic oligonucleotide
ctgaaactgctcttcttttgtcgttaggct

SEQ ID NO: 412354 - DNA, 30 bp, Artificial Sequence
  Synthetic oligonucleotide
ctggggatatcccaactctaaggttaggct

SEQ ID NO: 412355 - DNA, 30 bp, Artificial Sequence
  Synthetic oligonucleotide
tcaaatgggttcgaggtgcctggttaggct

SEQ ID NO: 412356 - DNA, 30 bp, Artificial Sequence
  Synthetic oligonucleotide
gtgggctttctaaagggttttctcacggct

SEQ ID NO: 412357 - DNA, 30 bp, Artificial Sequence
  Synthetic oligonucleotide
gtcggcaaccatgtccctggtcatacggct

SEQ ID NO: 412358 - DNA, 30 bp, Artificial Sequence
  Synthetic oligonucleotide
tttctacgttacccattgtcgtatacggct

SEQ ID NO: 412359 - DNA, 30 bp, Artificial Sequence
  Synthetic oligonucleotide
ccaggtgtaacgctggtgtcaataccggct

SEQ ID NO: 412360 - DNA, 30 bp, Artificial Sequence
  Synthetic oligonucleotide
cacacctgattataattcatacccccggct

SEQ ID NO: 412361 - DNA, 30 bp, Artificial Sequence
  Synthetic oligonucleotide
ggaagtccgccacgaagtggctccccggct

SEQ ID NO: 412362 - DNA, 30 bp, Artificial Sequence
  Synthetic oligonucleotide
aaaatgaagtcatccttgatgctcccggct

SEQ ID NO: 412363 - DNA, 30 bp, Artificial Sequence
  Synthetic oligonucleotide
aggtcaggccccggagaggggttcccggct

SEQ ID NO: 412364 - DNA, 30 bp, Artificial Sequence
  Synthetic oligonucleotide
tagagaggttggttgctccaagctccggct

SEQ ID NO: 412365 - DNA, 30 bp, Artificial Sequence
  Synthetic oligonucleotide
cagctctgattgaggtttccgattccggct

SEQ ID NO: 412366 - DNA, 30 bp, Artificial Sequence
  Synthetic oligonucleotide
gtatcgaccataaataagttgacagcggct

SEQ ID NO: 412367 - DNA, 30 bp, Artificial Sequence
  Synthetic oligonucleotide
aaattgttgctaaaaattacacacgcggct

SEQ ID NO: 412368 - DNA, 30 bp, Artificial Sequence
  Synthetic oligonucleotide
ttgataacgcacgagcaactaacggcggct

SEQ ID NO: 412369 - DNA, 30 bp, Artificial Sequence
  Synthetic oligonucleotide
ccagtttgatactccagagggtatgcggct

SEQ ID NO: 412370 - DNA, 30 bp, Artificial Sequence
  Synthetic oligonucleotide
tacagaatcggctgcccctgtgtatcggct

SEQ ID NO: 412371 - DNA, 30 bp, Artificial Sequence
  Synthetic oligonucleotide
tttgcagcccgataatactttaactcggct

SEQ ID NO: 412372 - DNA, 30 bp, Artificial Sequence
  Synthetic oligonucleotide
tagcgataacgacattgaatacgctcggct

SEQ ID NO: 412373 - DNA, 30 bp, Artificial Sequence
  Synthetic oligonucleotide
gtgttagcgttccgcaaggagtgttcggct

SEQ ID NO: 412374 - DNA, 30 bp, Artificial Sequence
  Synthetic oligonucleotide
cactactctgctttgaacatggaaagggct

SEQ ID NO: 412375 - DNA, 30 bp, Artificial Sequence
  Synthetic oligonucleotide
gccgttcaccatggaggcgccgtcagggct

SEQ ID NO: 412376 - DNA, 30 bp, Artificial Sequence
  Synthetic oligonucleotide
attagcctcagtcggatctcaaagagggct

SEQ ID NO: 412377 - DNA, 30 bp, Artificial Sequence
  Synthetic oligonucleotide
gaatggtcggtgccgtcatcacggagggct

SEQ ID NO: 412378 - DNA, 30 bp, Artificial Sequence
  Synthetic oligonucleotide
ttagaggcagccagttacgcgtaacgggct

SEQ ID NO: 412379 - DNA, 30 bp, Artificial Sequence
  Synthetic oligonucleotide
taagtgcaataagaatgattgacacgggct

SEQ ID NO: 412380 - DNA, 30 bp, Artificial Sequence
  Synthetic oligonucleotide
caaaaacccagtagctttttgagacgggct

SEQ ID NO: 412381 - DNA, 30 bp, Artificial Sequence
  Synthetic oligonucleotide
cgcacaaagaaggacatcgatgcccgggct

SEQ ID NO: 412382 - DNA, 30 bp, Artificial Sequence
  Synthetic oligonucleotide
ctcgctttgagatgtctcgtcaagcgggct

SEQ ID NO: 412383 - DNA, 30 bp, Artificial Sequence
  Synthetic oligonucleotide
atcttaaagcagtacatgttatatcgggct

SEQ ID NO: 412384 - DNA, 30 bp, Artificial Sequence
  Synthetic oligonucleotide
aaaggctattgcaacgcgttgataggggct

SEQ ID NO: 412385 - DNA, 30 bp, Artificial Sequence
  Synthetic oligonucleotide
taaatgaacgtatttttcattaacggggct

SEQ ID NO: 412386 - DNA, 30 bp, Artificial Sequence
  Synthetic oligonucleotide
cttccggacgttacggtccttaccggggct

SEQ ID NO: 412387 - DNA, 30 bp, Artificial Sequence
  Synthetic oligonucleotide
atccaggcgaaccgggtcccaagcggggct

SEQ ID NO: 412388 - DNA, 30 bp, Artificial Sequence
  Synthetic oligonucleotide
gttaaattgatgccctcaggcaagggggct

SEQ ID NO: 412389 - DNA, 30 bp, Artificial Sequence
  Synthetic oligonucleotide
tgggaaaatgtaggaacccttggtggggct

SEQ ID NO: 412390 - DNA, 30 bp, Artificial Sequence
  Synthetic oligonucleotide
tagtgacggaacgcctttctagaatgggct

SEQ ID NO: 412391 - DNA, 30 bp, Artificial Sequence
  Synthetic oligonucleotide
aaccattgctgggaaagcggagagtgggct

SEQ ID NO: 412392 - DNA, 30 bp, Artificial Sequence
  Synthetic oligonucleotide
atattctaaatatgcgaaggcaaaatggct

SEQ ID NO: 412393 - DNA, 30 bp, Artificial Sequence
  Synthetic oligonucleotide
ccaacattgttggccgcctcgaaaatggct

SEQ ID NO: 412394 - DNA, 30 bp, Artificial Sequence
  Synthetic oligonucleotide
gatagcacacgcccatgcctgggaatggct

SEQ ID NO: 412395 - DNA, 30 bp, Artificial Sequence
  Synthetic oligonucleotide
gagggatccacttagcagtcagtcatggct

SEQ ID NO: 412396 - DNA, 30 bp, Artificial Sequence
  Synthetic oligonucleotide
aatgatggcagtggactccagtagatggct

SEQ ID NO: 412397 - DNA, 30 bp, Artificial Sequence
  Synthetic oligonucleotide
tcttcggacacgatacaaatcacgatggct

SEQ ID NO: 412398 - DNA, 30 bp, Artificial Sequence
  Synthetic oligonucleotide
agttcgacctggaagcggttaggtatggct

SEQ ID NO: 412399 - DNA, 30 bp, Artificial Sequence
  Synthetic oligonucleotide
aattcagggttcagaactgccggactggct

SEQ ID NO: 412400 - DNA, 30 bp, Artificial Sequence
  Synthetic oligonucleotide
atcggctgcgatctggcggagagcctggct

SEQ ID NO: 412401 - DNA, 30 bp, Artificial Sequence
  Synthetic oligonucleotide
ccaggaagctcacggcggtactcgctggct

SEQ ID NO: 412402 - DNA, 30 bp, Artificial Sequence
  Synthetic oligonucleotide
ggactgccttttctccagaactaagtggct

SEQ ID NO: 412403 - DNA, 30 bp, Artificial Sequence
  Synthetic oligonucleotide
ggcccgaaagcaatatccacgaacgtggct

SEQ ID NO: 412404 - DNA, 30 bp, Artificial Sequence
  Synthetic oligonucleotide
gtatgataaaattgtctcggaatattggct

SEQ ID NO: 412405 - DNA, 30 bp, Artificial Sequence
  Synthetic oligonucleotide
gacgtctgatacacgtggttcgtattggct

SEQ ID NO: 412406 - DNA, 30 bp, Artificial Sequence
  Synthetic oligonucleotide
ccactctaactcgacgaaaggcatttggct

SEQ ID NO: 412407 - DNA, 30 bp, Artificial Sequence
  Synthetic oligonucleotide
cgataaaagtttgaactatctcgtttggct

SEQ ID NO: 412408 - DNA, 30 bp, Artificial Sequence
  Synthetic oligonucleotide
cctggcgttaatttgccagagggcaatgct

SEQ ID NO: 412409 - DNA, 30 bp, Artificial Sequence
  Synthetic oligonucleotide
aactgagcttagaagtcactgtgcaatgct

SEQ ID NO: 412410 - DNA, 30 bp, Artificial Sequence
  Synthetic oligonucleotide
gttaaatacatagactttttacataatgct

SEQ ID NO: 412411 - DNA, 30 bp, Artificial Sequence
  Synthetic oligonucleotide
gtcgacagtctaagctttcctggtaatgct

SEQ ID NO: 412412 - DNA, 30 bp, Artificial Sequence
  Synthetic oligonucleotide
tagggtactgcgatctttgtgattaatgct

SEQ ID NO: 412413 - DNA, 30 bp, Artificial Sequence
  Synthetic oligonucleotide
cgagaggcccaggatccacgccttaatgct

SEQ ID NO: 412414 - DNA, 30 bp, Artificial Sequence
  Synthetic oligonucleotide
ttccagacgggcatgttgttaggacatgct

SEQ ID NO: 412415 - DNA, 30 bp, Artificial Sequence
  Synthetic oligonucleotide
tgagcaggtagccgccagtgcggccatgct

SEQ ID NO: 412416 - DNA, 30 bp, Artificial Sequence
  Synthetic oligonucleotide
aactacagtagatttttctacgctcatgct

SEQ ID NO: 412417 - DNA, 30 bp, Artificial Sequence
  Synthetic oligonucleotide
aatgaggttactattgcacggcttcatgct

SEQ ID NO: 412418 - DNA, 30 bp, Artificial Sequence
  Synthetic oligonucleotide
gtcgcgcatcttccctacggtgttcatgct

SEQ ID NO: 412419 - DNA, 30 bp, Artificial Sequence
  Synthetic oligonucleotide
gccagctatagggaggacgtagaagatgct

SEQ ID NO: 412420 - DNA, 30 bp, Artificial Sequence
  Synthetic oligonucleotide
gtattggcacgggtccaccctccagatgct

SEQ ID NO: 412421 - DNA, 30 bp, Artificial Sequence
  Synthetic oligonucleotide
gcatttccacagcagccgcatgacgatgct

SEQ ID NO: 412422 - DNA, 30 bp, Artificial Sequence
  Synthetic oligonucleotide
gtggttgcgagtatgtgaaaagccgatgct

SEQ ID NO: 412423 - DNA, 30 bp, Artificial Sequence
  Synthetic oligonucleotide
ttacgcaatacttgcacggacccggatgct

SEQ ID NO: 412424 - DNA, 30 bp, Artificial Sequence
  Synthetic oligonucleotide
ccctgatattgaaaatagtcacctgatgct

SEQ ID NO: 412425 - DNA, 30 bp, Artificial Sequence
  Synthetic oligonucleotide
acgagcgcacataaactcggttctgatgct

SEQ ID NO: 412426 - DNA, 30 bp, Artificial Sequence
  Synthetic oligonucleotide
acgcaggcaagactaaacaccgaatatgct

SEQ ID NO: 412427 - DNA, 30 bp, Artificial Sequence
  Synthetic oligonucleotide
cctgtaacactcagggcaagtcggtatgct

SEQ ID NO: 412428 - DNA, 30 bp, Artificial Sequence
  Synthetic oligonucleotide
aaatcagtataccggcaggcgatgtatgct

SEQ ID NO: 412429 - DNA, 30 bp, Artificial Sequence
  Synthetic oligonucleotide
actgtttgggtggagggggggtcaactgct

SEQ ID NO: 412430 - DNA, 30 bp, Artificial Sequence
  Synthetic oligonucleotide
tggtgttattaagttctgatgcgaactgct

SEQ ID NO: 412431 - DNA, 30 bp, Artificial Sequence
  Synthetic oligonucleotide
acggcggctaatggccttttacacactgct

SEQ ID NO: 412432 - DNA, 30 bp, Artificial Sequence
  Synthetic oligonucleotide
tgcaagaggcgtgcctgggcttcgactgct

SEQ ID NO: 412433 - DNA, 30 bp, Artificial Sequence
  Synthetic oligonucleotide
gtctctacgggacttcctcctcgtactgct

SEQ ID NO: 412434 - DNA, 30 bp, Artificial Sequence
  Synthetic oligonucleotide
ctatcagcccggactagttggcgccctgct

SEQ ID NO: 412435 - DNA, 30 bp, Artificial Sequence
  Synthetic oligonucleotide
gatgaaatctacgttcatgtcgggcctgct

SEQ ID NO: 412436 - DNA, 30 bp, Artificial Sequence
  Synthetic oligonucleotide
tcacgcgggcaatcgcaagacaatcctgct

SEQ ID NO: 412437 - DNA, 30 bp, Artificial Sequence
  Synthetic oligonucleotide
ataatgtattggttacaaaccgtagctgct

SEQ ID NO: 412438 - DNA, 31 bp, Artificial Sequence
  Synthetic oligonucleotide
tgtaaataccgagacctgctaggtcgctgct

SEQ ID NO: 412439 - DNA, 30 bp, Artificial Sequence
  Synthetic oligonucleotide
gattcttgacagggtactcgagtatctgct

SEQ ID NO: 412440 - DNA, 30 bp, Artificial Sequence
  Synthetic oligonucleotide
tgattgacaaaacagtcctgccactctgct

SEQ ID NO: 412441 - DNA, 30 bp, Artificial Sequence
  Synthetic oligonucleotide
attggtgaagagtttccattgtggtctgct

SEQ ID NO: 412442 - DNA, 30 bp, Artificial Sequence
  Synthetic oligonucleotide
cagccttaattgagggaaatagattctgct

SEQ ID NO: 412443 - DNA, 30 bp, Artificial Sequence
  Synthetic oligonucleotide
aagacaagtctaggcgctttaccttctgct

SEQ ID NO: 412444 - DNA, 30 bp, Artificial Sequence
  Synthetic oligonucleotide
ggacagcaatgtatttgttgaatttctgct

SEQ ID NO: 412445 - DNA, 30 bp, Artificial Sequence
  Synthetic oligonucleotide
ggtaatgaaaggtgctatgaaagaagtgct

SEQ ID NO: 412446 - DNA, 30 bp, Artificial Sequence
  Synthetic oligonucleotide
tagccgggctcaagcaacttacccagtgct

SEQ ID NO: 412447 - DNA, 30 bp, Artificial Sequence
  Synthetic oligonucleotide
attttcgttatcggataaccttagagtgct

SEQ ID NO: 412448 - DNA, 30 bp, Artificial Sequence
  Synthetic oligonucleotide
agcatagctcgttgctaacgttctagtgct

SEQ ID NO: 412449 - DNA, 30 bp, Artificial Sequence
  Synthetic oligonucleotide
cccaaaaagggcccttggtccgttagtgct

SEQ ID NO: 412450 - DNA, 30 bp, Artificial Sequence
  Synthetic oligonucleotide
cacgcggcaattatgtagctcacccgtgct

SEQ ID NO: 412451 - DNA, 30 bp, Artificial Sequence
  Synthetic oligonucleotide
atctcttgaggtcagaagtacacgcgtgct

SEQ ID NO: 412452 - DNA, 30 bp, Artificial Sequence
  Synthetic oligonucleotide
ggtatgctctatgttcactaatctcgtgct

SEQ ID NO: 412453 - DNA, 30 bp, Artificial Sequence
  Synthetic oligonucleotide
ctagttttctcttgcgttggctctcgtgct

SEQ ID NO: 412454 - DNA, 30 bp, Artificial Sequence
  Synthetic oligonucleotide
cgcatggaagcgtattggcacccaggtgct

SEQ ID NO: 412455 - DNA, 30 bp, Artificial Sequence
  Synthetic oligonucleotide
ttagtgttgtcaccctttttattaggtgct

SEQ ID NO: 412456 - DNA, 30 bp, Artificial Sequence
  Synthetic oligonucleotide
agtccttctaaagatatgtgggccggtgct

SEQ ID NO: 412457 - DNA, 30 bp, Artificial Sequence
  Synthetic oligonucleotide
ctgtttgtgtcgcgacacggaccgggtgct

SEQ ID NO: 412458 - DNA, 30 bp, Artificial Sequence
  Synthetic oligonucleotide
ttggccgagggccactggcgcgcgggtgct

SEQ ID NO: 412459 - DNA, 30 bp, Artificial Sequence
  Synthetic oligonucleotide
gaatggtgtaacgtgttcggatggggtgct

SEQ ID NO: 412460 - DNA, 30 bp, Artificial Sequence
  Synthetic oligonucleotide
acccattcattcggttaatggctgggtgct

SEQ ID NO: 412461 - DNA, 30 bp, Artificial Sequence
  Synthetic oligonucleotide
gtcccaagtggcatcataggacatggtgct

SEQ ID NO: 412462 - DNA, 30 bp, Artificial Sequence
  Synthetic oligonucleotide
cgcccacgatgaacacccagttttggtgct

SEQ ID NO: 412463 - DNA, 30 bp, Artificial Sequence
  Synthetic oligonucleotide
caaggggctccggcggcaaccttatgtgct

SEQ ID NO: 412464 - DNA, 30 bp, Artificial Sequence
  Synthetic oligonucleotide
aagcagtgtggggacggagcaccctgtgct

SEQ ID NO: 412465 - DNA, 30 bp, Artificial Sequence
  Synthetic oligonucleotide
cgccaattcgacggttagcggccctgtgct

SEQ ID NO: 412466 - DNA, 30 bp, Artificial Sequence
  Synthetic oligonucleotide
tccctgctaattattcccctttgctgtgct

SEQ ID NO: 412467 - DNA, 30 bp, Artificial Sequence
  Synthetic oligonucleotide
gcgattgtgcatgcaattggaaaaattgct

SEQ ID NO: 412468 - DNA, 30 bp, Artificial Sequence
  Synthetic oligonucleotide
aggacggcctgggggattcctacaattgct

SEQ ID NO: 412469 - DNA, 30 bp, Artificial Sequence
  Synthetic oligonucleotide
cgattagtggacattaatgtagtaattgct

SEQ ID NO: 412470 - DNA, 30 bp, Artificial Sequence
  Synthetic oligonucleotide
gggcctgaggacccgctagacttaattgct

SEQ ID NO: 412471 - DNA, 30 bp, Artificial Sequence
  Synthetic oligonucleotide
acagtcgatagcactaggggatcgattgct

SEQ ID NO: 412472 - DNA, 30 bp, Artificial Sequence
  Synthetic oligonucleotide
ctaatttagaatggctgaactcggattgct

SEQ ID NO: 412473 - DNA, 30 bp, Artificial Sequence
  Synthetic oligonucleotide
ttgaaaatggtgcaaggaaaacctattgct

SEQ ID NO: 412474 - DNA, 30 bp, Artificial Sequence
  Synthetic oligonucleotide
gacgtacaccggattcgtttaagtattgct

SEQ ID NO: 412475 - DNA, 30 bp, Artificial Sequence
  Synthetic oligonucleotide
agtatgtgttgtcagctcagtagacttgct

SEQ ID NO: 412476 - DNA, 30 bp, Artificial Sequence
  Synthetic oligonucleotide
gcgcatttaagatgcgaccttcgccttgct

SEQ ID NO: 412477 - DNA, 30 bp, Artificial Sequence
  Synthetic oligonucleotide
cccaaggttagggaacggagagtccttgct

SEQ ID NO: 412478 - DNA, 30 bp, Artificial Sequence
  Synthetic oligonucleotide
aatgatgtgtttatcaagcgacgtcttgct

SEQ ID NO: 412479 - DNA, 30 bp, Artificial Sequence
  Synthetic oligonucleotide
ggcattctatgcatgtttgtcaaagttgct

SEQ ID NO: 412480 - DNA, 30 bp, Artificial Sequence
  Synthetic oligonucleotide
gatcggctagagttgactggcacagttgct

SEQ ID NO: 412481 - DNA, 30 bp, Artificial Sequence
  Synthetic oligonucleotide
tgtgattttagcagcagtttagcggttgct

SEQ ID NO: 412482 - DNA, 30 bp, Artificial Sequence
  Synthetic oligonucleotide
ccaagagcatggcagctgactggggttgct

SEQ ID NO: 412483 - DNA, 30 bp, Artificial Sequence
  Synthetic oligonucleotide
taagtacacgggtaggattgtgtggttgct

SEQ ID NO: 412484 - DNA, 30 bp, Artificial Sequence
  Synthetic oligonucleotide
aacgctccggggcggagattcattgttgct

SEQ ID NO: 412485 - DNA, 30 bp, Artificial Sequence
  Synthetic oligonucleotide
agatgtcagagtgcatcttacaactttgct

SEQ ID NO: 412486 - DNA, 30 bp, Artificial Sequence
  Synthetic oligonucleotide
tggggccaaagccgagcgttgcgctttgct

SEQ ID NO: 412487 - DNA, 30 bp, Artificial Sequence
  Synthetic oligonucleotide
ggatcgaaaaggcaaagatggatgtttgct

SEQ ID NO: 412488 - DNA, 30 bp, Artificial Sequence
  Synthetic oligonucleotide
aagaagcatattagtagcaggacttttgct

SEQ ID NO: 412489 - DNA, 30 bp, Artificial Sequence
  Synthetic oligonucleotide
tgtacgacaaacgttcaatattacaaatct

SEQ ID NO: 412490 - DNA, 30 bp, Artificial Sequence
  Synthetic oligonucleotide
aactggacccgtgggacttgtcgcaaatct

SEQ ID NO: 412491 - DNA, 30 bp, Artificial Sequence
  Synthetic oligonucleotide
ttacaaaactattgaggtcatctcaaatct

SEQ ID NO: 412492 - DNA, 30 bp, Artificial Sequence
  Synthetic oligonucleotide
gatatacacgcaagaaaaccgtcgaaatct

SEQ ID NO: 412493 - DNA, 30 bp, Artificial Sequence
  Synthetic oligonucleotide
gtagtggtcgtccggcactacgtgaaatct

SEQ ID NO: 412494 - DNA, 30 bp, Artificial Sequence
  Synthetic oligonucleotide
atggagtcaccgagatattgatataaatct

SEQ ID NO: 412495 - DNA, 30 bp, Artificial Sequence
  Synthetic oligonucleotide
cacaatccactatctccggtcggtaaatct

SEQ ID NO: 412496 - DNA, 30 bp, Artificial Sequence
  Synthetic oligonucleotide
cttttgagcggcatgtctacggaacaatct

SEQ ID NO: 412497 - DNA, 30 bp, Artificial Sequence
  Synthetic oligonucleotide
tcatatagcacgcgcaccgtggaccaatct

SEQ ID NO: 412498 - DNA, 30 bp, Artificial Sequence
  Synthetic oligonucleotide
ccttatgtatggttcatcatcaagcaatct

SEQ ID NO: 412499 - DNA, 30 bp, Artificial Sequence
  Synthetic oligonucleotide
ctagtgttgttcctggatagatatcaatct

SEQ ID NO: 412500 - DNA, 30 bp, Artificial Sequence
  Synthetic oligonucleotide
attgagtgccgtttgcatgggggcgaatct

SEQ ID NO: 412501 - DNA, 30 bp, Artificial Sequence
  Synthetic oligonucleotide
atagagcggatgtatctcgatcaggaatct

SEQ ID NO: 412502 - DNA, 30 bp, Artificial Sequence
  Synthetic oligonucleotide
gggatccaccgaagaccgcaacatgaatct

SEQ ID NO: 412503 - DNA, 30 bp, Artificial Sequence
  Synthetic oligonucleotide
aattgctgaatactgactcgatctgaatct

SEQ ID NO: 412504 - DNA, 30 bp, Artificial Sequence
  Synthetic oligonucleotide
ttggatatacatactttggcatgtgaatct

SEQ ID NO: 412505 - DNA, 30 bp, Artificial Sequence
  Synthetic oligonucleotide
ggcccaatgattaacaggtggcttgaatct

SEQ ID NO: 412506 - DNA, 30 bp, Artificial Sequence
  Synthetic oligonucleotide
tttcaacgccatcaggtgaatccataatct

SEQ ID NO: 412507 - DNA, 30 bp, Artificial Sequence
  Synthetic oligonucleotide
taacgcaatagcacgggattcgcataatct

SEQ ID NO: 412508 - DNA, 30 bp, Artificial Sequence
  Synthetic oligonucleotide
gagctcatttacagtttatatcactaatct

SEQ ID NO: 412509 - DNA, 30 bp, Artificial Sequence
  Synthetic oligonucleotide
gactatcacagcgctatggctccctaatct

SEQ ID NO: 412510 - DNA, 30 bp, Artificial Sequence
  Synthetic oligonucleotide
tgtaacaagtgataactgttcacttaatct

SEQ ID NO: 412511 - DNA, 30 bp, Artificial Sequence
  Synthetic oligonucleotide
cggacatagggatctttgacagcttaatct

SEQ ID NO: 412512 - DNA, 30 bp, Artificial Sequence
  Synthetic oligonucleotide
tttaaccggagaccccgtgcaggttaatct

SEQ ID NO: 412513 - DNA, 30 bp, Artificial Sequence
  Synthetic oligonucleotide
ggtagtgcagtttcatgcggacagacatct

SEQ ID NO: 412514 - DNA, 30 bp, Artificial Sequence
  Synthetic oligonucleotide
agggtatgctcccccagtcgccggacatct

SEQ ID NO: 412515 - DNA, 30 bp, Artificial Sequence
  Synthetic oligonucleotide
aggcgggatgatcaggtatccgctgcatct

SEQ ID NO: 412516 - DNA, 30 bp, Artificial Sequence
  Synthetic oligonucleotide
tcagtcctgattgtcgccatatttgcatct

SEQ ID NO: 412517 - DNA, 30 bp, Artificial Sequence
  Synthetic oligonucleotide
aatgttggccttcctgtccttccatcatct

SEQ ID NO: 412518 - DNA, 30 bp, Artificial Sequence
  Synthetic oligonucleotide
tactcgtgaaaggtcaccttacactcatct

SEQ ID NO: 412519 - DNA, 30 bp, Artificial Sequence
  Synthetic oligonucleotide
atacactcaatactactaaccccctcatct

SEQ ID NO: 412520 - DNA, 30 bp, Artificial Sequence
  Synthetic oligonucleotide
agacagtctcgttcgcgctgactctcatct

SEQ ID NO: 412521 - DNA, 30 bp, Artificial Sequence
  Synthetic oligonucleotide
gaagtcaataatttgtagtcattctcatct

SEQ ID NO: 412522 - DNA, 30 bp, Artificial Sequence
  Synthetic oligonucleotide
ataccgtctcccattgtgaagttttcatct

SEQ ID NO: 412523 - DNA, 30 bp, Artificial Sequence
  Synthetic oligonucleotide
gtatcggcactgttaatataatcaagatct

SEQ ID NO: 412524 - DNA, 30 bp, Artificial Sequence
  Synthetic oligonucleotide
gtacagtcagttgtgggcagtgtaagatct

SEQ ID NO: 412525 - DNA, 30 bp, Artificial Sequence
  Synthetic oligonucleotide
tagatgcgctgcgtttatgcaggcagatct

SEQ ID NO: 412526 - DNA, 30 bp, Artificial Sequence
  Synthetic oligonucleotide
caccgccaactctcccgaaatattagatct

SEQ ID NO: 412527 - DNA, 30 bp, Artificial Sequence
  Synthetic oligonucleotide
gatttcgggctcggtctggaacttagatct

SEQ ID NO: 412528 - DNA, 30 bp, Artificial Sequence
  Synthetic oligonucleotide
gcccgtaaggctagtacgatttttagatct

SEQ ID NO: 412529 - DNA, 30 bp, Artificial Sequence
  Synthetic oligonucleotide
cttctaaacccgatgttggcaccacgatct

SEQ ID NO: 412530 - DNA, 30 bp, Artificial Sequence
  Synthetic oligonucleotide
tgaggcacaatgtatttttcggtacgatct

SEQ ID NO: 412531 - DNA, 30 bp, Artificial Sequence
  Synthetic oligonucleotide
cgctaggagacattatggatcccgcgatct

SEQ ID NO: 412532 - DNA, 30 bp, Artificial Sequence
  Synthetic oligonucleotide
gaggacccggtcatttcagattcgcgatct

SEQ ID NO: 412533 - DNA, 30 bp, Artificial Sequence
  Synthetic oligonucleotide
gctaatcgtgtcctatagcggtctcgatct

SEQ ID NO: 412534 - DNA, 30 bp, Artificial Sequence
  Synthetic oligonucleotide
gcgacccccaccagcgggacattaggatct

SEQ ID NO: 412535 - DNA, 30 bp, Artificial Sequence
  Synthetic oligonucleotide
tataagctgtgctcgtagtagttaggatct

SEQ ID NO: 412536 - DNA, 30 bp, Artificial Sequence
  Synthetic oligonucleotide
tgagactttggggcgcgctccaacggatct

SEQ ID NO: 412537 - DNA, 30 bp, Artificial Sequence
  Synthetic oligonucleotide
cttctaacagcgttgaacataaccggatct

SEQ ID NO: 412538 - DNA, 30 bp, Artificial Sequence
  Synthetic oligonucleotide
agcacagagagcccacaggacgccggatct

SEQ ID NO: 412539 - DNA, 30 bp, Artificial Sequence
  Synthetic oligonucleotide
gaagatttacataccgaacttgggggatct

SEQ ID NO: 412540 - DNA, 30 bp, Artificial Sequence
  Synthetic oligonucleotide
accttccccggaactaggacgcttggatct

SEQ ID NO: 412541 - DNA, 30 bp, Artificial Sequence
  Synthetic oligonucleotide
cctaattctaacaaagaggcaggatgatct

SEQ ID NO: 412542 - DNA, 30 bp, Artificial Sequence
  Synthetic oligonucleotide
gtgttaggcgagttcttggatatatgatct

SEQ ID NO: 412543 - DNA, 30 bp, Artificial Sequence
  Synthetic oligonucleotide
agcagacaaacccatgcatgggtatgatct

SEQ ID NO: 412544 - DNA, 30 bp, Artificial Sequence
  Synthetic oligonucleotide
taaaaaaacaaagttgagttggtctgatct

SEQ ID NO: 412545 - DNA, 30 bp, Artificial Sequence
  Synthetic oligonucleotide
acggctccctgtgtgatccatcagtgatct

SEQ ID NO: 412546 - DNA, 30 bp, Artificial Sequence
  Synthetic oligonucleotide
tatttaaagcgtctatcaggatcttgatct

SEQ ID NO: 412547 - DNA, 30 bp, Artificial Sequence
  Synthetic oligonucleotide
gacttcaagtaccgttgggtcatttgatct

SEQ ID NO: 412548 - DNA, 30 bp, Artificial Sequence
  Synthetic oligonucleotide
ccgcaatcatcccggcctattagcatatct

SEQ ID NO: 412549 - DNA, 30 bp, Artificial Sequence
  Synthetic oligonucleotide
aacgcggctaagcgatcacaatagatatct

SEQ ID NO: 412550 - DNA, 30 bp, Artificial Sequence
  Synthetic oligonucleotide
acgctctgcgattcggcatgaatgatatct

SEQ ID NO: 412551 - DNA, 30 bp, Artificial Sequence
  Synthetic oligonucleotide
gttggaggtccccgcgcggacctgatatct

SEQ ID NO: 412552 - DNA, 30 bp, Artificial Sequence
  Synthetic oligonucleotide
cgacatctccccgagtgggtgttgatatct

SEQ ID NO: 412553 - DNA, 30 bp, Artificial Sequence
  Synthetic oligonucleotide
taccaagcttcccttatcctttctatatct

SEQ ID NO: 412554 - DNA, 30 bp, Artificial Sequence
  Synthetic oligonucleotide
gctcccaaagcaaggcacctccgtatatct

SEQ ID NO: 412555 - DNA, 30 bp, Artificial Sequence
  Synthetic oligonucleotide
agcgggcgcgccaagctgattatactatct

SEQ ID NO: 412556 - DNA, 30 bp, Artificial Sequence
  Synthetic oligonucleotide
cgagtaataggcacccaacttgccctatct

SEQ ID NO: 412557 - DNA, 30 bp, Artificial Sequence
  Synthetic oligonucleotide
aagcggcattgcgcattggaacgcctatct

SEQ ID NO: 412558 - DNA, 30 bp, Artificial Sequence
  Synthetic oligonucleotide
cgaggccatggcttgagtcttatcctatct

SEQ ID NO: 412559 - DNA, 30 bp, Artificial Sequence
  Synthetic oligonucleotide
atccccaggcactttaccctggagctatct

SEQ ID NO: 412560 - DNA, 30 bp, Artificial Sequence
  Synthetic oligonucleotide
atttagtaagcatctgcacaggggctatct

SEQ ID NO: 412561 - DNA, 30 bp, Artificial Sequence
  Synthetic oligonucleotide
cgaggattcgtcccgtgtaattgtctatct

SEQ ID NO: 412562 - DNA, 30 bp, Artificial Sequence
  Synthetic oligonucleotide
gtatgaggatttaaatattcagaagtatct

SEQ ID NO: 412563 - DNA, 30 bp, Artificial Sequence
  Synthetic oligonucleotide
ttagtagcacttctacacagaggagtatct

SEQ ID NO: 412564 - DNA, 30 bp, Artificial Sequence
  Synthetic oligonucleotide
aaataaactacctcttagcgattcgtatct

SEQ ID NO: 412565 - DNA, 30 bp, Artificial Sequence
  Synthetic oligonucleotide
gcacgattttgtctaggttcggaggtatct

SEQ ID NO: 412566 - DNA, 30 bp, Artificial Sequence
  Synthetic oligonucleotide
aaaggtaaaatccgggctatcaatgtatct

SEQ ID NO: 412567 - DNA, 30 bp, Artificial Sequence
  Synthetic oligonucleotide
gaaccacttactagagtggggcgtgtatct

SEQ ID NO: 412568 - DNA, 31 bp, Artificial Sequence
  Synthetic oligonucleotide
gatccccacctccgttgtgcgatgtgtatct

SEQ ID NO: 412569 - DNA, 30 bp, Artificial Sequence
  Synthetic oligonucleotide
cgcgttcctaacaacaattcttaattatct

SEQ ID NO: 412570 - DNA, 30 bp, Artificial Sequence
  Synthetic oligonucleotide
tatccaggaggtcagtgttaatgattatct

SEQ ID NO: 412571 - DNA, 30 bp, Artificial Sequence
  Synthetic oligonucleotide
ggatcaggaacgggtctcatagtattatct

SEQ ID NO: 412572 - DNA, 30 bp, Artificial Sequence
  Synthetic oligonucleotide
gcaaatgtctcagttagagcatagttatct

SEQ ID NO: 412573 - DNA, 30 bp, Artificial Sequence
  Synthetic oligonucleotide
gtagcgttgtactgttggtatctgttatct

SEQ ID NO: 412574 - DNA, 30 bp, Artificial Sequence
  Synthetic oligonucleotide
tatcaattggtgcgattgattcgtttatct

SEQ ID NO: 412575 - DNA, 30 bp, Artificial Sequence
  Synthetic oligonucleotide
gtgcggttagaacttcagtttggtttatct

SEQ ID NO: 412576 - DNA, 30 bp, Artificial Sequence
  Synthetic oligonucleotide
ccttcaaacgggtagtaaccggttttatct

SEQ ID NO: 412577 - DNA, 30 bp, Artificial Sequence
  Synthetic oligonucleotide
gagagccgtcccaaccgcgtagcaaactct

SEQ ID NO: 412578 - DNA, 30 bp, Artificial Sequence
  Synthetic oligonucleotide
tccgtattgcaatgcagaccgaccaactct

SEQ ID NO: 412579 - DNA, 30 bp, Artificial Sequence
  Synthetic oligonucleotide
gccgtcccctttcggcctacacagaactct

SEQ ID NO: 412580 - DNA, 30 bp, Artificial Sequence
  Synthetic oligonucleotide
gctaacgaaatcagtttacatacgaactct

SEQ ID NO: 412581 - DNA, 30 bp, Artificial Sequence
  Synthetic oligonucleotide
ttcgagataacttggaaagccatgaactct

SEQ ID NO: 412582 - DNA, 30 bp, Artificial Sequence
  Synthetic oligonucleotide
gccggctacagaaactgagtcagacactct

SEQ ID NO: 412583 - DNA, 30 bp, Artificial Sequence
  Synthetic oligonucleotide
aaaccttagagccgtcgccctcggcactct

SEQ ID NO: 412584 - DNA, 30 bp, Artificial Sequence
  Synthetic oligonucleotide
ctctgttgattaaaataatcagggcactct

SEQ ID NO: 412585 - DNA, 30 bp, Artificial Sequence
  Synthetic oligonucleotide
atgcacgattcgtgacatggggatcactct

SEQ ID NO: 412586 - DNA, 30 bp, Artificial Sequence
  Synthetic oligonucleotide
ttggacttcaccacactcgttgctcactct

SEQ ID NO: 412587 - DNA, 30 bp, Artificial Sequence
  Synthetic oligonucleotide
ccaaagggtgtgacacgtccgagtcactct

SEQ ID NO: 412588 - DNA, 30 bp, Artificial Sequence
  Synthetic oligonucleotide
tattttagcgaattgggtcgccttcactct

SEQ ID NO: 412589 - DNA, 30 bp, Artificial Sequence
  Synthetic oligonucleotide
ggggagcatcctgtcggcctcggcgactct

SEQ ID NO: 412590 - DNA, 30 bp, Artificial Sequence
  Synthetic oligonucleotide
tgccaaagcgtcgcggggacttgcgactct

SEQ ID NO: 412591 - DNA, 30 bp, Artificial Sequence
  Synthetic oligonucleotide
atccttccggtctacccgtgaaatgactct

SEQ ID NO: 412592 - DNA, 30 bp, Artificial Sequence
  Synthetic oligonucleotide
atgtcgcgcgagaggtgccgtaatgactct

SEQ ID NO: 412593 - DNA, 30 bp, Artificial Sequence
  Synthetic oligonucleotide
gtgggtttgtaacgtagggttagtgactct

SEQ ID NO: 412594 - DNA, 30 bp, Artificial Sequence
  Synthetic oligonucleotide
taacgtgattagcatttcttgcttgactct

SEQ ID NO: 412595 - DNA, 30 bp, Artificial Sequence
  Synthetic oligonucleotide
gagggcttttcaatagtgaaatttgactct

SEQ ID NO: 412596 - DNA, 29 bp, Artificial Sequence
  Synthetic oligonucleotide
attcctagctttgtgcgtagtaatactct

SEQ ID NO: 412597 - DNA, 30 bp, Artificial Sequence
  Synthetic oligonucleotide
attcgtaagccaaggaagcgtcagtactct

SEQ ID NO: 412598 - DNA, 30 bp, Artificial Sequence
  Synthetic oligonucleotide
atcgaggttgttccctcaacgtcgtactct

SEQ ID NO: 412599 - DNA, 30 bp, Artificial Sequence
  Synthetic oligonucleotide
tgctaaaaatactgcacgcatcattactct

SEQ ID NO: 412600 - DNA, 30 bp, Artificial Sequence
  Synthetic oligonucleotide
cggattcgccgggctctttgcccttactct

SEQ ID NO: 412601 - DNA, 30 bp, Artificial Sequence
  Synthetic oligonucleotide
gtttgtgcacatgtgatacactgttactct

SEQ ID NO: 412602 - DNA, 30 bp, Artificial Sequence
  Synthetic oligonucleotide
gcagatacaacagatgcgcactaaacctct

SEQ ID NO: 412603 - DNA, 30 bp, Artificial Sequence
  Synthetic oligonucleotide
atggtctctgaagtcgcggtcggcacctct

SEQ ID NO: 412604 - DNA, 30 bp, Artificial Sequence
  Synthetic oligonucleotide
tacatcaccggcatgcaattagttacctct

SEQ ID NO: 412605 - DNA, 30 bp, Artificial Sequence
  Synthetic oligonucleotide
ctacgctgaaacatttaagctcctccctct

SEQ ID NO: 412606 - DNA, 30 bp, Artificial Sequence
  Synthetic oligonucleotide
cacggtgtactaacagcctactgtccctct

SEQ ID NO: 412607 - DNA, 30 bp, Artificial Sequence
  Synthetic oligonucleotide
ggttgttcccgggtagcgacgtgtccctct

SEQ ID NO: 412608 - DNA, 30 bp, Artificial Sequence
  Synthetic oligonucleotide
attaacaatgtgcgtccgttcgacgcctct

SEQ ID NO: 412609 - DNA, 30 bp, Artificial Sequence
  Synthetic oligonucleotide
ggaccactagttttccgctttaccgcctct

SEQ ID NO: 412610 - DNA, 30 bp, Artificial Sequence
  Synthetic oligonucleotide
ctatatcttgtgctaagggactccgcctct

SEQ ID NO: 412611 - DNA, 30 bp, Artificial Sequence
  Synthetic oligonucleotide
taaccgtactaactccgtatactcgcctct

SEQ ID NO: 412612 - DNA, 30 bp, Artificial Sequence
  Synthetic oligonucleotide
gatgactgaaacttgcaactcgctgcctct

SEQ ID NO: 412613 - DNA, 30 bp, Artificial Sequence
  Synthetic oligonucleotide
tcagcccttatattccgcgtgattgcctct

SEQ ID NO: 412614 - DNA, 30 bp, Artificial Sequence
  Synthetic oligonucleotide
ctctgcggcaacagctgttcgcactcctct

SEQ ID NO: 412615 - DNA, 30 bp, Artificial Sequence
  Synthetic oligonucleotide
catggacgacgtttcctagatcagtcctct

SEQ ID NO: 412616 - DNA, 30 bp, Artificial Sequence
  Synthetic oligonucleotide
ttgcatcacgacgtataatgtaaaagctct

SEQ ID NO: 412617 - DNA, 30 bp, Artificial Sequence
  Synthetic oligonucleotide
gtgcaggagagtagggggtacgcgagctct

SEQ ID NO: 412618 - DNA, 30 bp, Artificial Sequence
  Synthetic oligonucleotide
tcgggatgttggcaagaacccttgagctct

SEQ ID NO: 412619 - DNA, 30 bp, Artificial Sequence
  Synthetic oligonucleotide
ggatatggacttagtaattagaatagctct

SEQ ID NO: 412620 - DNA, 30 bp, Artificial Sequence
  Synthetic oligonucleotide
cggtttccgttgggaatttcaactagctct

SEQ ID NO: 412621 - DNA, 30 bp, Artificial Sequence
  Synthetic oligonucleotide
ctcccgtctcaggagcattaacgacgctct

SEQ ID NO: 412622 - DNA, 30 bp, Artificial Sequence
  Synthetic oligonucleotide
aataaggtgttcgtgccataagtgggctct

SEQ ID NO: 412623 - DNA, 30 bp, Artificial Sequence
  Synthetic oligonucleotide
gtatttgctgcattaaactcttttggctct

SEQ ID NO: 412624 - DNA, 30 bp, Artificial Sequence
  Synthetic oligonucleotide
ccttgggctaggtcttagtctatatgctct

SEQ ID NO: 412625 - DNA, 30 bp, Artificial Sequence
  Synthetic oligonucleotide
acagaaaaggattctagtatcccctgctct

SEQ ID NO: 412626 - DNA, 30 bp, Artificial Sequence
  Synthetic oligonucleotide
tatccgcaatggtcgcatataaaaatctct

SEQ ID NO: 412627 - DNA, 30 bp, Artificial Sequence
  Synthetic oligonucleotide
gaacaccttttatacggcgttgccatctct

SEQ ID NO: 412628 - DNA, 30 bp, Artificial Sequence
  Synthetic oligonucleotide
aaggtccaattcagaatctaatgcatctct

SEQ ID NO: 412629 - DNA, 30 bp, Artificial Sequence
  Synthetic oligonucleotide
aatggatctcgtaaagtaggtaagatctct

SEQ ID NO: 412630 - DNA, 30 bp, Artificial Sequence
  Synthetic oligonucleotide
gtacagtagcgcccgctcgtttggatctct

SEQ ID NO: 412631 - DNA, 30 bp, Artificial Sequence
  Synthetic oligonucleotide
gggctgtatactggccacatctctatctct

SEQ ID NO: 412632 - DNA, 30 bp, Artificial Sequence
  Synthetic oligonucleotide
cacagaggggggtttctagtgcgactctct

SEQ ID NO: 412633 - DNA, 30 bp, Artificial Sequence
  Synthetic oligonucleotide
ggggaacagcatttacgagatatactctct

SEQ ID NO: 412634 - DNA, 30 bp, Artificial Sequence
  Synthetic oligonucleotide
acaccctcttggctcagggcggggctctct

SEQ ID NO: 412635 - DNA, 30 bp, Artificial Sequence
  Synthetic oligonucleotide
ctcacttgtattccgtatgcttggctctct

SEQ ID NO: 412636 - DNA, 30 bp, Artificial Sequence
  Synthetic oligonucleotide
agggattgagccagcgttcgcggtctctct

SEQ ID NO: 412637 - DNA, 30 bp, Artificial Sequence
  Synthetic oligonucleotide
ggtgatggagagttcgcacttaaagtctct

SEQ ID NO: 412638 - DNA, 30 bp, Artificial Sequence
  Synthetic oligonucleotide
gaatagtcgaaacgttgcggttttgtctct

SEQ ID NO: 412639 - DNA, 30 bp, Artificial Sequence
  Synthetic oligonucleotide
gtgcagccccaactcggcaagccattctct

SEQ ID NO: 412640 - DNA, 30 bp, Artificial Sequence
  Synthetic oligonucleotide
aaaactcaatgaattgtagcatgattctct

SEQ ID NO: 412641 - DNA, 30 bp, Artificial Sequence
  Synthetic oligonucleotide
catgcacccagcactaccagtctgttctct

SEQ ID NO: 412642 - DNA, 30 bp, Artificial Sequence
  Synthetic oligonucleotide
aaggataaggttcgtaactcttgtttctct

SEQ ID NO: 412643 - DNA, 30 bp, Artificial Sequence
  Synthetic oligonucleotide
aaacggtaattacgtgtgcgctttttctct

SEQ ID NO: 412644 - DNA, 31 bp, Artificial Sequence
  Synthetic oligonucleotide
cagaattaggggcgtcgtcaacctaaagtct

SEQ ID NO: 412645 - DNA, 30 bp, Artificial Sequence
  Synthetic oligonucleotide
tgtggttttcgtaaagggatagacaagtct

SEQ ID NO: 412646 - DNA, 30 bp, Artificial Sequence
  Synthetic oligonucleotide
gagcatggtcacatcgtaacgtccaagtct

SEQ ID NO: 412647 - DNA, 30 bp, Artificial Sequence
  Synthetic oligonucleotide
tttcctgataagaagatcattagcaagtct

SEQ ID NO: 412648 - DNA, 30 bp, Artificial Sequence
  Synthetic oligonucleotide
cggtggtaactatcgtcttttcgtaagtct

SEQ ID NO: 412649 - DNA, 30 bp, Artificial Sequence
  Synthetic oligonucleotide
cgcgtagatgagataaagccgcttaagtct

SEQ ID NO: 412650 - DNA, 30 bp, Artificial Sequence
  Synthetic oligonucleotide
gcttaggttctcgtaccattgccacagtct

SEQ ID NO: 412651 - DNA, 30 bp, Artificial Sequence
  Synthetic oligonucleotide
aataaggggcccattcagccgatacagtct

SEQ ID NO: 412652 - DNA, 30 bp, Artificial Sequence
  Synthetic oligonucleotide
cgggcgggctccttgagccgcgggcagtct

SEQ ID NO: 412653 - DNA, 30 bp, Artificial Sequence
  Synthetic oligonucleotide
tgcgtagagcatacaagatttttgcagtct

SEQ ID NO: 412654 - DNA, 30 bp, Artificial Sequence
  Synthetic oligonucleotide
gtgaaagcgcgcgttacagttaatcagtct

SEQ ID NO: 412655 - DNA, 30 bp, Artificial Sequence
  Synthetic oligonucleotide
cgttcaaagatttggaaccacggagagtct

SEQ ID NO: 412656 - DNA, 30 bp, Artificial Sequence
  Synthetic oligonucleotide
cccgtatcccgtcaagaccacgaggagtct

SEQ ID NO: 412657 - DNA, 30 bp, Artificial Sequence
  Synthetic oligonucleotide
ctctatacagtttccacggagtcggagtct

SEQ ID NO: 412658 - DNA, 30 bp, Artificial Sequence
  Synthetic oligonucleotide
ccatttgttctttactggtggggatagtct

SEQ ID NO: 412659 - DNA, 30 bp, Artificial Sequence
  Synthetic oligonucleotide
gggtagttattatcggggttagggtagtct

SEQ ID NO: 412660 - DNA, 30 bp, Artificial Sequence
  Synthetic oligonucleotide
agcgaataattgggactattgaattagtct

SEQ ID NO: 412661 - DNA, 30 bp, Artificial Sequence
  Synthetic oligonucleotide
gtttaacatgggacatgactgcttacgtct

SEQ ID NO: 412662 - DNA, 30 bp, Artificial Sequence
  Synthetic oligonucleotide
aggtagttgttcttaccctcggttacgtct

SEQ ID NO: 412663 - DNA, 30 bp, Artificial Sequence
  Synthetic oligonucleotide
gcccgtgcggtttaaggacgcaatccgtct

SEQ ID NO: 412664 - DNA, 30 bp, Artificial Sequence
  Synthetic oligonucleotide
acccacaccttcaccgcagatcctccgtct

SEQ ID NO: 412665 - DNA, 30 bp, Artificial Sequence
  Synthetic oligonucleotide
aacagatccagctagaatacgagtccgtct

SEQ ID NO: 412666 - DNA, 30 bp, Artificial Sequence
  Synthetic oligonucleotide
ccactctccccgttgacagatcaagcgtct

SEQ ID NO: 412667 - DNA, 30 bp, Artificial Sequence
  Synthetic oligonucleotide
aacgggccctatagtacgcatccagcgtct

SEQ ID NO: 412668 - DNA, 30 bp, Artificial Sequence
  Synthetic oligonucleotide
atattaccagtcgaggtagagtgcgcgtct

SEQ ID NO: 412669 - DNA, 30 bp, Artificial Sequence
  Synthetic oligonucleotide
aaagaacccataacatggagtacatcgtct

SEQ ID NO: 412670 - DNA, 30 bp, Artificial Sequence
  Synthetic oligonucleotide
tcaagccggcggtgtcccgaccaaaggtct

SEQ ID NO: 412671 - DNA, 30 bp, Artificial Sequence
  Synthetic oligonucleotide
agttatgaaggtttaaggagctaaaggtct

SEQ ID NO: 412672 - DNA, 30 bp, Artificial Sequence
  Synthetic oligonucleotide
ctatgcaggtaagaacaaagccgaaggtct

SEQ ID NO: 412673 - DNA, 30 bp, Artificial Sequence
  Synthetic oligonucleotide
ccagatttgggaattcccatttgaaggtct

SEQ ID NO: 412674 - DNA, 30 bp, Artificial Sequence
  Synthetic oligonucleotide
gcttaaggcccagcaactgctcacaggtct

SEQ ID NO: 412675 - DNA, 30 bp, Artificial Sequence
  Synthetic oligonucleotide
cctagtctgctttcgaatatcgtgaggtct

SEQ ID NO: 412676 - DNA, 30 bp, Artificial Sequence
  Synthetic oligonucleotide
catcaactattcctgcgagcgttgaggtct

SEQ ID NO: 412677 - DNA, 30 bp, Artificial Sequence
  Synthetic oligonucleotide
gctttggccacctctcgcagaaaacggtct

SEQ ID NO: 412678 - DNA, 30 bp, Artificial Sequence
  Synthetic oligonucleotide
tgggttgctgcttttagcgggaaacggtct

SEQ ID NO: 412679 - DNA, 30 bp, Artificial Sequence
  Synthetic oligonucleotide
gtgcggagtttaacaccgcctagacggtct

SEQ ID NO: 412680 - DNA, 30 bp, Artificial Sequence
  Synthetic oligonucleotide
ggttgtaacttcttttttagtctacggtct

SEQ ID NO: 412681 - DNA, 30 bp, Artificial Sequence
  Synthetic oligonucleotide
ttgttaggggagcaccgaattgtacggtct

SEQ ID NO: 412682 - DNA, 30 bp, Artificial Sequence
  Synthetic oligonucleotide
gcccttcagcacctcttcagaatccggtct

SEQ ID NO: 412683 - DNA, 30 bp, Artificial Sequence
  Synthetic oligonucleotide
acatctgctgcatgcgactatctccggtct

SEQ ID NO: 412684 - DNA, 30 bp, Artificial Sequence
  Synthetic oligonucleotide
ggtttcatctgcgacagccacaagcggtct

SEQ ID NO: 412685 - DNA, 30 bp, Artificial Sequence
  Synthetic oligonucleotide
tatcctgcgtgaccactttccgggcggtct

SEQ ID NO: 412686 - DNA, 30 bp, Artificial Sequence
  Synthetic oligonucleotide
ctcagatttttgggcggattagcagggtct

SEQ ID NO: 412687 - DNA, 30 bp, Artificial Sequence
  Synthetic oligonucleotide
cgcttgccgactagactagtattagggtct

SEQ ID NO: 412688 - DNA, 30 bp, Artificial Sequence
  Synthetic oligonucleotide
aaaccaatgttcgaaaaagaaaccgggtct

SEQ ID NO: 412689 - DNA, 30 bp, Artificial Sequence
  Synthetic oligonucleotide
gagaatgaacccaataccccttcggggtct

SEQ ID NO: 412690 - DNA, 30 bp, Artificial Sequence
  Synthetic oligonucleotide
gcacaccatccgggggaccggatggggtct

SEQ ID NO: 412691 - DNA, 30 bp, Artificial Sequence
  Synthetic oligonucleotide
gcagatcaggagtcaacccatgttgggtct

SEQ ID NO: 412692 - DNA, 30 bp, Artificial Sequence
  Synthetic oligonucleotide
tgtggaattgacaggcatagataatggtct

SEQ ID NO: 412693 - DNA, 30 bp, Artificial Sequence
  Synthetic oligonucleotide
ccctagattgtccactgctttcgatggtct

SEQ ID NO: 412694 - DNA, 30 bp, Artificial Sequence
  Synthetic oligonucleotide
gatcgaaaggggcgaaacgcggactggtct

SEQ ID NO: 412695 - DNA, 30 bp, Artificial Sequence
  Synthetic oligonucleotide
ttatgtgttgattggtgaggaaagtggtct

SEQ ID NO: 412696 - DNA, 30 bp, Artificial Sequence
  Synthetic oligonucleotide
tcatactgaggactgtaattttattggtct

SEQ ID NO: 412697 - DNA, 30 bp, Artificial Sequence
  Synthetic oligonucleotide
acgaatttcttagttgaaagtggcatgtct

SEQ ID NO: 412698 - DNA, 30 bp, Artificial Sequence
  Synthetic oligonucleotide
tcacgcttagccatcgcgaagtagatgtct

SEQ ID NO: 412699 - DNA, 30 bp, Artificial Sequence
  Synthetic oligonucleotide
tacgaatttggacaatttgctggtatgtct

SEQ ID NO: 412700 - DNA, 30 bp, Artificial Sequence
  Synthetic oligonucleotide
atagttggtgatgtcatatgcggactgtct

SEQ ID NO: 412701 - DNA, 30 bp, Artificial Sequence
  Synthetic oligonucleotide
ctcgttcactctcgggcctaagacctgtct

SEQ ID NO: 412702 - DNA, 30 bp, Artificial Sequence
  Synthetic oligonucleotide
tgtatacgactcgggagcccccgcctgtct

SEQ ID NO: 412703 - DNA, 30 bp, Artificial Sequence
  Synthetic oligonucleotide
gtatacgttagtcggctgcggccgctgtct

SEQ ID NO: 412704 - DNA, 30 bp, Artificial Sequence
  Synthetic oligonucleotide
ttctgctcgatgctaagggaagtgctgtct

SEQ ID NO: 412705 - DNA, 30 bp, Artificial Sequence
  Synthetic oligonucleotide
cctcttatagattctttcagtcatctgtct

SEQ ID NO: 412706 - DNA, 30 bp, Artificial Sequence
  Synthetic oligonucleotide
gggctttaaatatcggctacgcgtctgtct

SEQ ID NO: 412707 - DNA, 30 bp, Artificial Sequence
  Synthetic oligonucleotide
cacaaggcaacggtaaggtctcgtctgtct

SEQ ID NO: 412708 - DNA, 31 bp, Artificial Sequence
  Synthetic oligonucleotide
cctattgccgtgcaaaagtccgggtctgtct

SEQ ID NO: 412709 - DNA, 30 bp, Artificial Sequence
  Synthetic oligonucleotide
ccagcccgcggaagacgccggaaagtgtct

SEQ ID NO: 412710 - DNA, 30 bp, Artificial Sequence
  Synthetic oligonucleotide
tatttctgcaggcaaaggccggcagtgtct

SEQ ID NO: 412711 - DNA, 30 bp, Artificial Sequence
  Synthetic oligonucleotide
gggacagaagtgagtaccctgtccgtgtct

SEQ ID NO: 412712 - DNA, 30 bp, Artificial Sequence
  Synthetic oligonucleotide
ggtgtcccgcatttcgcacctccggtgtct

SEQ ID NO: 412713 - DNA, 30 bp, Artificial Sequence
  Synthetic oligonucleotide
gtttacggggttcagtatgacatggtgtct

SEQ ID NO: 412714 - DNA, 30 bp, Artificial Sequence
  Synthetic oligonucleotide
gcggtaagacatgtctttagttatgtgtct

SEQ ID NO: 412715 - DNA, 30 bp, Artificial Sequence
  Synthetic oligonucleotide
gcatcgaattctaatcgcagttttgtgtct

SEQ ID NO: 412716 - DNA, 30 bp, Artificial Sequence
  Synthetic oligonucleotide
taggccacattaaacattgattagttgtct

SEQ ID NO: 412717 - DNA, 30 bp, Artificial Sequence
  Synthetic oligonucleotide
tggaagtattgtattgtttacaatttgtct

SEQ ID NO: 412718 - DNA, 30 bp, Artificial Sequence
  Synthetic oligonucleotide
ttaaacgaaatagggtggttacgtttgtct

SEQ ID NO: 412719 - DNA, 30 bp, Artificial Sequence
  Synthetic oligonucleotide
acatccgttttaatccgtccctgtttgtct

SEQ ID NO: 412720 - DNA, 30 bp, Artificial Sequence
  Synthetic oligonucleotide
tgaaagagtattggggcccatcacaattct

SEQ ID NO: 412721 - DNA, 30 bp, Artificial Sequence
  Synthetic oligonucleotide
cgaagacccacttgcacagcagccaattct

SEQ ID NO: 412722 - DNA, 30 bp, Artificial Sequence
  Synthetic oligonucleotide
gcacctcgtaaggcctcggcgagcaattct

SEQ ID NO: 412723 - DNA, 30 bp, Artificial Sequence
  Synthetic oligonucleotide
ttactgcggctttatgataaatgcaattct

SEQ ID NO: 412724 - DNA, 30 bp, Artificial Sequence
  Synthetic oligonucleotide
ttaaaatcattatggatagtcaggaattct

SEQ ID NO: 412725 - DNA, 30 bp, Artificial Sequence
  Synthetic oligonucleotide
ggccggcttttgaacgctaataggaattct

SEQ ID NO: 412726 - DNA, 30 bp, Artificial Sequence
  Synthetic oligonucleotide
tcgagcaactgcagcttaagcactaattct

SEQ ID NO: 412727 - DNA, 30 bp, Artificial Sequence
  Synthetic oligonucleotide
cggcagccgtccatttaatggcgacattct

SEQ ID NO: 412728 - DNA, 30 bp, Artificial Sequence
  Synthetic oligonucleotide
tcactagaccaggggctagtactacattct

SEQ ID NO: 412729 - DNA, 30 bp, Artificial Sequence
  Synthetic oligonucleotide
tggcgcccttggtccatacgagtacattct

SEQ ID NO: 412730 - DNA, 30 bp, Artificial Sequence
  Synthetic oligonucleotide
cggacatgctaagttggctctctccattct

SEQ ID NO: 412731 - DNA, 30 bp, Artificial Sequence
  Synthetic oligonucleotide
ggaatgggtactcgggggtgtatgcattct

SEQ ID NO: 412732 - DNA, 30 bp, Artificial Sequence
  Synthetic oligonucleotide
tcaatgatggtgaggagtcacggtcattct

SEQ ID NO: 412733 - DNA, 30 bp, Artificial Sequence
  Synthetic oligonucleotide
gaggaacaaacgcacgagttccaagattct

SEQ ID NO: 412734 - DNA, 30 bp, Artificial Sequence
  Synthetic oligonucleotide
aggtcagttgctacagggcgtttagattct

SEQ ID NO: 412735 - DNA, 30 bp, Artificial Sequence
  Synthetic oligonucleotide
cgtaaaggctgttagccgttgtccgattct

SEQ ID NO: 412736 - DNA, 30 bp, Artificial Sequence
  Synthetic oligonucleotide
tggtggttggttgtccaaacgctggattct

SEQ ID NO: 412737 - DNA, 30 bp, Artificial Sequence
  Synthetic oligonucleotide
tagtagcttggagtgatacaataatattct

SEQ ID NO: 412738 - DNA, 30 bp, Artificial Sequence
  Synthetic oligonucleotide
cggatttctcagtatttcatatgatattct

SEQ ID NO: 412739 - DNA, 30 bp, Artificial Sequence
  Synthetic oligonucleotide
ggaacccttagtaacgcctaagcgtattct

SEQ ID NO: 412740 - DNA, 30 bp, Artificial Sequence
  Synthetic oligonucleotide
aaaagtggtattgtcacggctcggtattct

SEQ ID NO: 412741 - DNA, 30 bp, Artificial Sequence
  Synthetic oligonucleotide
taaccatgataatctatttcggtttattct

SEQ ID NO: 412742 - DNA, 30 bp, Artificial Sequence
  Synthetic oligonucleotide
atgatgagccttatccatcagccaacttct

SEQ ID NO: 412743 - DNA, 30 bp, Artificial Sequence
  Synthetic oligonucleotide
gcctttcactttatttgcgtcataacttct

SEQ ID NO: 412744 - DNA, 30 bp, Artificial Sequence
  Synthetic oligonucleotide
cgcctccggtccttggagaaacagacttct

SEQ ID NO: 412745 - DNA, 29 bp, Artificial Sequence
  Synthetic oligonucleotide
ccccgggcgatattgcgtcacatacttct

SEQ ID NO: 412746 - DNA, 30 bp, Artificial Sequence
  Synthetic oligonucleotide
cttgccactatagagcgacaagatacttct

SEQ ID NO: 412747 - DNA, 30 bp, Artificial Sequence
  Synthetic oligonucleotide
aacttagccttaggcattgcccgtacttct

SEQ ID NO: 412748 - DNA, 30 bp, Artificial Sequence
  Synthetic oligonucleotide
taattagaagttcggtcctggattacttct

SEQ ID NO: 412749 - DNA, 30 bp, Artificial Sequence
  Synthetic oligonucleotide
gaaccaacattaatgtcacgccaaccttct

SEQ ID NO: 412750 - DNA, 30 bp, Artificial Sequence
  Synthetic oligonucleotide
gctccatcgagtccgaggagtggaccttct

SEQ ID NO: 412751 - DNA, 30 bp, Artificial Sequence
  Synthetic oligonucleotide
tttggcctcaaccatagcccctgaccttct

SEQ ID NO: 412752 - DNA, 30 bp, Artificial Sequence
  Synthetic oligonucleotide
cgaataaaactatagatgcagtgaccttct

SEQ ID NO: 412753 - DNA, 30 bp, Artificial Sequence
  Synthetic oligonucleotide
ggggtcgcttctcggctcgtgcggccttct

SEQ ID NO: 412754 - DNA, 30 bp, Artificial Sequence
  Synthetic oligonucleotide
taggctctgagcgcatccacagggccttct

SEQ ID NO: 412755 - DNA, 30 bp, Artificial Sequence
  Synthetic oligonucleotide
caagctaggctgttgaaaggtattccttct

SEQ ID NO: 412756 - DNA, 30 bp, Artificial Sequence
  Synthetic oligonucleotide
accaaccttagcgaacacagcgttccttct

SEQ ID NO: 412757 - DNA, 30 bp, Artificial Sequence
  Synthetic oligonucleotide
cgtacacattaactgagattgggcgcttct

SEQ ID NO: 412758 - DNA, 30 bp, Artificial Sequence
  Synthetic oligonucleotide
tctcacgttttctgtattactttcgcttct

SEQ ID NO: 412759 - DNA, 30 bp, Artificial Sequence
  Synthetic oligonucleotide
agttatcggcgctcaagagttccggcttct

SEQ ID NO: 412760 - DNA, 30 bp, Artificial Sequence
  Synthetic oligonucleotide
caacaggcggatccagcggcgatggcttct

SEQ ID NO: 412761 - DNA, 30 bp, Artificial Sequence
  Synthetic oligonucleotide
gcctactaccggagtcaacccctggcttct

SEQ ID NO: 412762 - DNA, 30 bp, Artificial Sequence
  Synthetic oligonucleotide
acccatgagacaactcttcctgtggcttct

SEQ ID NO: 412763 - DNA, 30 bp, Artificial Sequence
  Synthetic oligonucleotide
attcctactgtacgttttgcgtagtcttct

SEQ ID NO: 412764 - DNA, 30 bp, Artificial Sequence
  Synthetic oligonucleotide
ggggcttttaatcctcactgagattcttct

SEQ ID NO: 412765 - DNA, 30 bp, Artificial Sequence
  Synthetic oligonucleotide
aaggtcaattcgcgctgtctaatttcttct

SEQ ID NO: 412766 - DNA, 30 bp, Artificial Sequence
  Synthetic oligonucleotide
aaggacttgggttgcgaacttaaaagttct

SEQ ID NO: 412767 - DNA, 30 bp, Artificial Sequence
  Synthetic oligonucleotide
ccaaagttacgatggttaatgataagttct

SEQ ID NO: 412768 - DNA, 30 bp, Artificial Sequence
  Synthetic oligonucleotide
tattcgaactaaaatgtagtgctaagttct

SEQ ID NO: 412769 - DNA, 30 bp, Artificial Sequence
  Synthetic oligonucleotide
tgccatggtgtgacaccgggttagagttct

SEQ ID NO: 412770 - DNA, 30 bp, Artificial Sequence
  Synthetic oligonucleotide
cagggatcgggacgcgcagtgaggagttct

SEQ ID NO: 412771 - DNA, 30 bp, Artificial Sequence
  Synthetic oligonucleotide
gtgccattccccgtaaacaaattgagttct

SEQ ID NO: 412772 - DNA, 30 bp, Artificial Sequence
  Synthetic oligonucleotide
gacctcggtgcaatcccagtcaatagttct

SEQ ID NO: 412773 - DNA, 30 bp, Artificial Sequence
  Synthetic oligonucleotide
gatattggtcaggatcccgtgggtagttct

SEQ ID NO: 412774 - DNA, 30 bp, Artificial Sequence
  Synthetic oligonucleotide
ctatacggtaatttgttgatacaccgttct

SEQ ID NO: 412775 - DNA, 30 bp, Artificial Sequence
  Synthetic oligonucleotide
acctgcatcaggacggttcctcaccgttct

SEQ ID NO: 412776 - DNA, 30 bp, Artificial Sequence
  Synthetic oligonucleotide
gagaatgcaggcagagtctcagaccgttct

SEQ ID NO: 412777 - DNA, 30 bp, Artificial Sequence
  Synthetic oligonucleotide
tagcgcttattttaacaaagtagccgttct

SEQ ID NO: 412778 - DNA, 30 bp, Artificial Sequence
  Synthetic oligonucleotide
atatccactattcgcgctgtgcgccgttct

SEQ ID NO: 412779 - DNA, 30 bp, Artificial Sequence
  Synthetic oligonucleotide
gagtaactgataagtgagaaatgccgttct

SEQ ID NO: 412780 - DNA, 30 bp, Artificial Sequence
  Synthetic oligonucleotide
gttcaagcaatgaagaagtcttctcgttct

SEQ ID NO: 412781 - DNA, 30 bp, Artificial Sequence
  Synthetic oligonucleotide
ctaaatggctggatccaaggaggtcgttct

SEQ ID NO: 412782 - DNA, 30 bp, Artificial Sequence
  Synthetic oligonucleotide
acacctacgagccaagtttctaaaggttct

SEQ ID NO: 412783 - DNA, 29 bp, Artificial Sequence
  Synthetic oligonucleotide
ctatagcgacaccccctgagacaggttct

SEQ ID NO: 412784 - DNA, 30 bp, Artificial Sequence
  Synthetic oligonucleotide
atacccgctatcgtgtagcgttcaggttct

SEQ ID NO: 412785 - DNA, 30 bp, Artificial Sequence
  Synthetic oligonucleotide
tgtgtcccccttacctacattaacggttct

SEQ ID NO: 412786 - DNA, 30 bp, Artificial Sequence
  Synthetic oligonucleotide
tagttactaagccactcggaacccggttct

SEQ ID NO: 412787 - DNA, 30 bp, Artificial Sequence
  Synthetic oligonucleotide
ttctacgttccccgggtacaacagggttct

SEQ ID NO: 412788 - DNA, 30 bp, Artificial Sequence
  Synthetic oligonucleotide
aaattcaatcggcagagaggaatgggttct

SEQ ID NO: 412789 - DNA, 30 bp, Artificial Sequence
  Synthetic oligonucleotide
tttaaagaccaagctagataagctggttct

SEQ ID NO: 412790 - DNA, 30 bp, Artificial Sequence
  Synthetic oligonucleotide
agaccacccgtggtaggtatcgctggttct

SEQ ID NO: 412791 - DNA, 30 bp, Artificial Sequence
  Synthetic oligonucleotide
cgggactctgggctcattcgctgtggttct

SEQ ID NO: 412792 - DNA, 30 bp, Artificial Sequence
  Synthetic oligonucleotide
cgggtccctcgaatataacaaattggttct

SEQ ID NO: 412793 - DNA, 30 bp, Artificial Sequence
  Synthetic oligonucleotide
atatggatcgctttagactactttggttct

SEQ ID NO: 412794 - DNA, 30 bp, Artificial Sequence
  Synthetic oligonucleotide
agctactaagagtactaacccgcatgttct

SEQ ID NO: 412795 - DNA, 30 bp, Artificial Sequence
  Synthetic oligonucleotide
aatctatagggtcagcacacattatgttct

SEQ ID NO: 412796 - DNA, 30 bp, Artificial Sequence
  Synthetic oligonucleotide
atactagcgctaatgtctatatactgttct

SEQ ID NO: 412797 - DNA, 30 bp, Artificial Sequence
  Synthetic oligonucleotide
gcggtggtcgagggattggtggattgttct

SEQ ID NO: 412798 - DNA, 30 bp, Artificial Sequence
  Synthetic oligonucleotide
agtagctgtgttgacaatcggccttgttct

SEQ ID NO: 412799 - DNA, 30 bp, Artificial Sequence
  Synthetic oligonucleotide
gagcagagccacgtaatggggcaaatttct

SEQ ID NO: 412800 - DNA, 30 bp, Artificial Sequence
  Synthetic oligonucleotide
aattgagagacacacaaatgaccaatttct

SEQ ID NO: 412801 - DNA, 31 bp, Artificial Sequence
  Synthetic oligonucleotide
ttgcagctataactacgatcggggaatttct

SEQ ID NO: 412802 - DNA, 30 bp, Artificial Sequence
  Synthetic oligonucleotide
gcagaaacaacggctcaaggagtaatttct

SEQ ID NO: 412803 - DNA, 30 bp, Artificial Sequence
  Synthetic oligonucleotide
gcactcagcttgcaattcaaaggcatttct

SEQ ID NO: 412804 - DNA, 30 bp, Artificial Sequence
  Synthetic oligonucleotide
aatgggaggaaggggcttgggttgatttct

SEQ ID NO: 412805 - DNA, 30 bp, Artificial Sequence
  Synthetic oligonucleotide
gtaagcgaagttgtttgtgcctatatttct

SEQ ID NO: 412806 - DNA, 30 bp, Artificial Sequence
  Synthetic oligonucleotide
gacaaaaagtgtgattcttcttatatttct

SEQ ID NO: 412807 - DNA, 30 bp, Artificial Sequence
  Synthetic oligonucleotide
tacttggttggcaaccgaatcaacctttct

SEQ ID NO: 412808 - DNA, 30 bp, Artificial Sequence
  Synthetic oligonucleotide
gtcattcgtaaattttgacccctcctttct

SEQ ID NO: 412809 - DNA, 30 bp, Artificial Sequence
  Synthetic oligonucleotide
tatagtacgatagaacatgttttcctttct

SEQ ID NO: 412810 - DNA, 30 bp, Artificial Sequence
  Synthetic oligonucleotide
agtggagctgataagctccaagagctttct

SEQ ID NO: 412811 - DNA, 30 bp, Artificial Sequence
  Synthetic oligonucleotide
gcgcgctgcttcatacagttcaatctttct

SEQ ID NO: 412812 - DNA, 30 bp, Artificial Sequence
  Synthetic oligonucleotide
ttaatcacatggagacgtgcaaacgtttct

SEQ ID NO: 412813 - DNA, 30 bp, Artificial Sequence
  Synthetic oligonucleotide
aggacataccttatcgctctatgggtttct

SEQ ID NO: 412814 - DNA, 30 bp, Artificial Sequence
  Synthetic oligonucleotide
gacgtgcggacctttgaaaaattattttct

SEQ ID NO: 412815 - DNA, 30 bp, Artificial Sequence
  Synthetic oligonucleotide
tccttcgtcgggcctctgggcttattttct

SEQ ID NO: 412816 - DNA, 30 bp, Artificial Sequence
  Synthetic oligonucleotide
tgtctagacctggaaatgttcgagttttct

SEQ ID NO: 412817 - DNA, 30 bp, Artificial Sequence
  Synthetic oligonucleotide
gaccgggatggtttctgtagtcgcaaaagt

SEQ ID NO: 412818 - DNA, 30 bp, Artificial Sequence
  Synthetic oligonucleotide
acagttgtacagaatttaatgaagaaaagt

SEQ ID NO: 412819 - DNA, 30 bp, Artificial Sequence
  Synthetic oligonucleotide
ctgatgctagacgttagttctgtgaaaagt

SEQ ID NO: 412820 - DNA, 30 bp, Artificial Sequence
  Synthetic oligonucleotide
acttcgttaggtagaaattaaattaaaagt

SEQ ID NO: 412821 - DNA, 30 bp, Artificial Sequence
  Synthetic oligonucleotide
ggcgtgatgggctacgacagtcttaaaagt

SEQ ID NO: 412822 - DNA, 30 bp, Artificial Sequence
  Synthetic oligonucleotide
ccagttggcagggattgattataacaaagt

SEQ ID NO: 412823 - DNA, 30 bp, Artificial Sequence
  Synthetic oligonucleotide
aaaaagctgttggtattagccgcacaaagt

SEQ ID NO: 412824 - DNA, 30 bp, Artificial Sequence
  Synthetic oligonucleotide
ttgtcagaacgcgctcagtagtcacaaagt

SEQ ID NO: 412825 - DNA, 30 bp, Artificial Sequence
  Synthetic oligonucleotide
tgtgtctaccgggacttgggatgacaaagt

SEQ ID NO: 412826 - DNA, 30 bp, Artificial Sequence
  Synthetic oligonucleotide
atagggatagcaaagtcgggcgcccaaagt

SEQ ID NO: 412827 - DNA, 30 bp, Artificial Sequence
  Synthetic oligonucleotide
cttcagggattatctacgagtgagcaaagt

SEQ ID NO: 412828 - DNA, 30 bp, Artificial Sequence
  Synthetic oligonucleotide
catctgggaatatttgcggcgtcgcaaagt

SEQ ID NO: 412829 - DNA, 30 bp, Artificial Sequence
  Synthetic oligonucleotide
gccaaccccaaatcagacttagctcaaagt

SEQ ID NO: 412830 - DNA, 30 bp, Artificial Sequence
  Synthetic oligonucleotide
tacctgcggcgtgggcacattgcagaaagt

SEQ ID NO: 412831 - DNA, 30 bp, Artificial Sequence
  Synthetic oligonucleotide
attcggcacacctacacgcagaacgaaagt

SEQ ID NO: 412832 - DNA, 29 bp, Artificial Sequence
  Synthetic oligonucleotide
gccaaatcgctgctgtacattacgaaagt

SEQ ID NO: 412833 - DNA, 30 bp, Artificial Sequence
  Synthetic oligonucleotide
tctttagggaagcccctaaccagggaaagt

SEQ ID NO: 412834 - DNA, 30 bp, Artificial Sequence
  Synthetic oligonucleotide
acaatgatcttggataaatggagggaaagt

SEQ ID NO: 412835 - DNA, 30 bp, Artificial Sequence
  Synthetic oligonucleotide
tggatctctggaagccccgctttggaaagt

SEQ ID NO: 412836 - DNA, 30 bp, Artificial Sequence
  Synthetic oligonucleotide
tttttgggcgcggtataggcctatgaaagt

SEQ ID NO: 412837 - DNA, 30 bp, Artificial Sequence
  Synthetic oligonucleotide
attaataggttgtatctatgagcataaagt

SEQ ID NO: 412838 - DNA, 30 bp, Artificial Sequence
  Synthetic oligonucleotide
acattgcgagtcataacaagcgcataaagt

SEQ ID NO: 412839 - DNA, 30 bp, Artificial Sequence
  Synthetic oligonucleotide
agtgaaattggcatcaactaagactaaagt

SEQ ID NO: 412840 - DNA, 30 bp, Artificial Sequence
  Synthetic oligonucleotide
ggagagacaagcgtatcttagacgtaaagt

SEQ ID NO: 412841 - DNA, 30 bp, Artificial Sequence
  Synthetic oligonucleotide
ggtatataagcgctttttcatatttaaagt

SEQ ID NO: 412842 - DNA, 30 bp, Artificial Sequence
  Synthetic oligonucleotide
ttcgaatgcggtcataaagctatttaaagt

SEQ ID NO: 412843 - DNA, 30 bp, Artificial Sequence
  Synthetic oligonucleotide
gatgaggggtgcaccttaataataacaagt

SEQ ID NO: 412844 - DNA, 30 bp, Artificial Sequence
  Synthetic oligonucleotide
gagggcacgcttgactaacttgcgacaagt

SEQ ID NO: 412845 - DNA, 30 bp, Artificial Sequence
  Synthetic oligonucleotide
gagtgtgggcatacgcactcacatacaagt

SEQ ID NO: 412846 - DNA, 30 bp, Artificial Sequence
  Synthetic oligonucleotide
agcacgtcatgaagtggctgtcaaccaagt

SEQ ID NO: 412847 - DNA, 30 bp, Artificial Sequence
  Synthetic oligonucleotide
cacagttacagactaaggtgttcaccaagt

SEQ ID NO: 412848 - DNA, 30 bp, Artificial Sequence
  Synthetic oligonucleotide
atctgtgcccattttcgaccaaacccaagt

SEQ ID NO: 412849 - DNA, 30 bp, Artificial Sequence
  Synthetic oligonucleotide
ctacagctatcccggtcaaaaatgccaagt

SEQ ID NO: 412850 - DNA, 30 bp, Artificial Sequence
  Synthetic oligonucleotide
ctggctgttacgcgcgaaataaatccaagt

SEQ ID NO: 412851 - DNA, 30 bp, Artificial Sequence
  Synthetic oligonucleotide
gctgatgaagcacgtcgcggatgtccaagt

SEQ ID NO: 412852 - DNA, 30 bp, Artificial Sequence
  Synthetic oligonucleotide
tttggtctcttacacacggacattccaagt

SEQ ID NO: 412853 - DNA, 30 bp, Artificial Sequence
  Synthetic oligonucleotide
attgtagtttaggctgttaacaaagcaagt

SEQ ID NO: 412854 - DNA, 30 bp, Artificial Sequence
  Synthetic oligonucleotide
tgaagtttgacggctgccatgttagcaagt

SEQ ID NO: 412855 - DNA, 30 bp, Artificial Sequence
  Synthetic oligonucleotide
aatatgaaaacgtctcgggtgggcgcaagt

SEQ ID NO: 412856 - DNA, 30 bp, Artificial Sequence
  Synthetic oligonucleotide
aagtatttgattggttacttcaaggcaagt

SEQ ID NO: 412857 - DNA, 30 bp, Artificial Sequence
  Synthetic oligonucleotide
ttgatactacaccaatcgttggcggcaagt

SEQ ID NO: 412858 - DNA, 30 bp, Artificial Sequence
  Synthetic oligonucleotide
gactccagtgggattataatttgggcaagt

SEQ ID NO: 412859 - DNA, 30 bp, Artificial Sequence
  Synthetic oligonucleotide
tggttttaatgctcagaatcactggcaagt

SEQ ID NO: 412860 - DNA, 31 bp, Artificial Sequence
  Synthetic oligonucleotide
ttaggatctaggcctacggacgactgcaagt

SEQ ID NO: 412861 - DNA, 30 bp, Artificial Sequence
  Synthetic oligonucleotide
agcttacgcaaggacccgagccttgcaagt

SEQ ID NO: 412862 - DNA, 30 bp, Artificial Sequence
  Synthetic oligonucleotide
tccccactgggaaaaatacacctatcaagt

SEQ ID NO: 412863 - DNA, 30 bp, Artificial Sequence
  Synthetic oligonucleotide
ttcggcaccataggaggcattgactcaagt

SEQ ID NO: 412864 - DNA, 30 bp, Artificial Sequence
  Synthetic oligonucleotide
ggcaagtacgccttgttgacaaagtcaagt

SEQ ID NO: 412865 - DNA, 30 bp, Artificial Sequence
  Synthetic oligonucleotide
cccagctgtactgaatggtaggcgtcaagt

SEQ ID NO: 412866 - DNA, 30 bp, Artificial Sequence
  Synthetic oligonucleotide
acccgctcatagctcccacctccttcaagt

SEQ ID NO: 412867 - DNA, 30 bp, Artificial Sequence
  Synthetic oligonucleotide
atcaagtgcggcgcatttggaatcagaagt

SEQ ID NO: 412868 - DNA, 30 bp, Artificial Sequence
  Synthetic oligonucleotide
gagtatctcacccttccacattagagaagt

SEQ ID NO: 412869 - DNA, 30 bp, Artificial Sequence
  Synthetic oligonucleotide
cgggagtgtctcgtaacattgtggagaagt

SEQ ID NO: 412870 - DNA, 30 bp, Artificial Sequence
  Synthetic oligonucleotide
tgcttcttgagctccacgtcgtgtagaagt

SEQ ID NO: 412871 - DNA, 30 bp, Artificial Sequence
  Synthetic oligonucleotide
agtgtgaggaccgcctcctttattagaagt

SEQ ID NO: 412872 - DNA, 30 bp, Artificial Sequence
  Synthetic oligonucleotide
tatgtgtgggaggcgattacacttagaagt

SEQ ID NO: 412873 - DNA, 30 bp, Artificial Sequence
  Synthetic oligonucleotide
gttagtctttgttccgagggtgttagaagt

SEQ ID NO: 412874 - DNA, 30 bp, Artificial Sequence
  Synthetic oligonucleotide
ggcatgggcagcgattccgcgctgcgaagt

SEQ ID NO: 412875 - DNA, 30 bp, Artificial Sequence
  Synthetic oligonucleotide
tactgtttcttctagacagctcatcgaagt

SEQ ID NO: 412876 - DNA, 30 bp, Artificial Sequence
  Synthetic oligonucleotide
tgcaaacacaattgctcatcgagtcgaagt

SEQ ID NO: 412877 - DNA, 30 bp, Artificial Sequence
  Synthetic oligonucleotide
attattgtctgtcacttattgtcaggaagt

SEQ ID NO: 412878 - DNA, 30 bp, Artificial Sequence
  Synthetic oligonucleotide
agcaaacatacaaaagtccaatgaggaagt

SEQ ID NO: 412879 - DNA, 30 bp, Artificial Sequence
  Synthetic oligonucleotide
gatttatcactctgcattagaaacggaagt

SEQ ID NO: 412880 - DNA, 30 bp, Artificial Sequence
  Synthetic oligonucleotide
cctcttttcggaggtcactgaatcggaagt

SEQ ID NO: 412881 - DNA, 30 bp, Artificial Sequence
  Synthetic oligonucleotide
gtctaggtcaacatcaactacatcggaagt

SEQ ID NO: 412882 - DNA, 30 bp, Artificial Sequence
  Synthetic oligonucleotide
aactcgatatgcggccgctgccagggaagt

SEQ ID NO: 412883 - DNA, 30 bp, Artificial Sequence
  Synthetic oligonucleotide
cagcactccgtctcgggagtgcatggaagt

SEQ ID NO: 412884 - DNA, 30 bp, Artificial Sequence
  Synthetic oligonucleotide
acgcacgaggatggcaagaggtctggaagt

SEQ ID NO: 412885 - DNA, 30 bp, Artificial Sequence
  Synthetic oligonucleotide
ttgagtacggggagttatgggagtggaagt

SEQ ID NO: 412886 - DNA, 30 bp, Artificial Sequence
  Synthetic oligonucleotide
tatatagaatcagcgcgtaaaaaatgaagt

SEQ ID NO: 412887 - DNA, 30 bp, Artificial Sequence
  Synthetic oligonucleotide
atcgttatgggatgggctggaaaatgaagt

SEQ ID NO: 412888 - DNA, 30 bp, Artificial Sequence
  Synthetic oligonucleotide
gttgctcccggctaattgtaggaatgaagt

SEQ ID NO: 412889 - DNA, 30 bp, Artificial Sequence
  Synthetic oligonucleotide
gaatactatgtgcaaatcgggacatgaagt

SEQ ID NO: 412890 - DNA, 30 bp, Artificial Sequence
  Synthetic oligonucleotide
gattgtagccttgtaataaaaaactgaagt

SEQ ID NO: 412891 - DNA, 30 bp, Artificial Sequence
  Synthetic oligonucleotide
atattcttatcgctccgcttgtgctgaagt

SEQ ID NO: 412892 - DNA, 30 bp, Artificial Sequence
  Synthetic oligonucleotide
atattccaacgagtttctcttatctgaagt

SEQ ID NO: 412893 - DNA, 30 bp, Artificial Sequence
  Synthetic oligonucleotide
ttggggttgttgacctagtaattaataagt

SEQ ID NO: 412894 - DNA, 30 bp, Artificial Sequence
  Synthetic oligonucleotide
acccagctctctgaatttcttttaataagt

SEQ ID NO: 412895 - DNA, 30 bp, Artificial Sequence
  Synthetic oligonucleotide
acaccgctaagtgcagcaatctccataagt

SEQ ID NO: 412896 - DNA, 30 bp, Artificial Sequence
  Synthetic oligonucleotide
ctgattttaatctgggatggttagataagt

SEQ ID NO: 412897 - DNA, 30 bp, Artificial Sequence
  Synthetic oligonucleotide
taagcgtgtcgttttaaagttatgataagt

SEQ ID NO: 412898 - DNA, 30 bp, Artificial Sequence
  Synthetic oligonucleotide
agtgtcttctggcaggaaactcatataagt

SEQ ID NO: 412899 - DNA, 30 bp, Artificial Sequence
  Synthetic oligonucleotide
gattgttgaccatcccatcggagactaagt

SEQ ID NO: 412900 - DNA, 30 bp, Artificial Sequence
  Synthetic oligonucleotide
atctgactcttcggccagcatcgcctaagt

SEQ ID NO: 412901 - DNA, 30 bp, Artificial Sequence
  Synthetic oligonucleotide
ctatgatttggactaaaagcttagctaagt

SEQ ID NO: 412902 - DNA, 30 bp, Artificial Sequence
  Synthetic oligonucleotide
agtgagagcaccgaggggccaaggctaagt

SEQ ID NO: 412903 - DNA, 30 bp, Artificial Sequence
  Synthetic oligonucleotide
tattctcgaaatgaacctaatgttctaagt

SEQ ID NO: 412904 - DNA, 30 bp, Artificial Sequence
  Synthetic oligonucleotide
tcggaaacaatcatcagacttgcagtaagt

SEQ ID NO: 412905 - DNA, 30 bp, Artificial Sequence
  Synthetic oligonucleotide
cgacacagagcactggatcgattagtaagt

SEQ ID NO: 412906 - DNA, 30 bp, Artificial Sequence
  Synthetic oligonucleotide
cgagtctcgtttttttgctacgacgtaagt

SEQ ID NO: 412907 - DNA, 30 bp, Artificial Sequence
  Synthetic oligonucleotide
atactagtccaattggatgaccgcgtaagt

SEQ ID NO: 412908 - DNA, 30 bp, Artificial Sequence
  Synthetic oligonucleotide
gtcgcgacaagtatccgctcgggggtaagt

SEQ ID NO: 412909 - DNA, 30 bp, Artificial Sequence
  Synthetic oligonucleotide
ccattaggctaagtgtctaatatggtaagt

SEQ ID NO: 412910 - DNA, 30 bp, Artificial Sequence
  Synthetic oligonucleotide
gtgttgaatgggttttattgtactgtaagt

SEQ ID NO: 412911 - DNA, 30 bp, Artificial Sequence
  Synthetic oligonucleotide
taactgtgtctgggcagatttcgattaagt

SEQ ID NO: 412912 - DNA, 30 bp, Artificial Sequence
  Synthetic oligonucleotide
tacagtttgttcagcaacggtgtattaagt

SEQ ID NO: 412913 - DNA, 30 bp, Artificial Sequence
  Synthetic oligonucleotide
tcgttggagaatgaaatcagttccttaagt

SEQ ID NO: 412914 - DNA, 30 bp, Artificial Sequence
  Synthetic oligonucleotide
aatagactcggccctgtaccgggcttaagt

SEQ ID NO: 412915 - DNA, 30 bp, Artificial Sequence
  Synthetic oligonucleotide
tgccaagttatgtgagttccatagttaagt

SEQ ID NO: 412916 - DNA, 30 bp, Artificial Sequence
  Synthetic oligonucleotide
gacaaacatacgattcccggttagttaagt

SEQ ID NO: 412917 - DNA, 30 bp, Artificial Sequence
  Synthetic oligonucleotide
gaacccgggttactggatagacatttaagt

SEQ ID NO: 412918 - DNA, 30 bp, Artificial Sequence
  Synthetic oligonucleotide
cggcaggcatccactatttatattttaagt

SEQ ID NO: 412919 - DNA, 30 bp, Artificial Sequence
  Synthetic oligonucleotide
ccgagactgctgttcgcaaaaccaaacagt

SEQ ID NO: 412920 - DNA, 30 bp, Artificial Sequence
  Synthetic oligonucleotide
ggacgttgattgtaatccacatcaaacagt

SEQ ID NO: 412921 - DNA, 30 bp, Artificial Sequence
  Synthetic oligonucleotide
tcgcatgttttcttctgctacagcaacagt

SEQ ID NO: 412922 - DNA, 30 bp, Artificial Sequence
  Synthetic oligonucleotide
tgcaatagactacacgtctatgggaacagt

SEQ ID NO: 412923 - DNA, 30 bp, Artificial Sequence
  Synthetic oligonucleotide
ataatgttggagcagtcttacaaacacagt

SEQ ID NO: 412924 - DNA, 30 bp, Artificial Sequence
  Synthetic oligonucleotide
ccctatgcaaatctccctactcaacacagt

SEQ ID NO: 412925 - DNA, 30 bp, Artificial Sequence
  Synthetic oligonucleotide
gtctgtgcttgagatcatagcgaacacagt

SEQ ID NO: 412926 - DNA, 30 bp, Artificial Sequence
  Synthetic oligonucleotide
cagatgcatcattgcagctaacaccacagt

SEQ ID NO: 412927 - DNA, 30 bp, Artificial Sequence
  Synthetic oligonucleotide
ctactaactagtaccgcgccattccacagt

SEQ ID NO: 412928 - DNA, 30 bp, Artificial Sequence
  Synthetic oligonucleotide
actcctaagcagtaaaaaggccttcacagt

SEQ ID NO: 412929 - DNA, 30 bp, Artificial Sequence
  Synthetic oligonucleotide
attaatgtattgtaccgggtgcgcgacagt

SEQ ID NO: 412930 - DNA, 30 bp, Artificial Sequence
  Synthetic oligonucleotide
atcttttgtcatcgtgcgacactcgacagt

SEQ ID NO: 412931 - DNA, 30 bp, Artificial Sequence
  Synthetic oligonucleotide
tacgggagcaccacggattttgtcgacagt

SEQ ID NO: 412932 - DNA, 30 bp, Artificial Sequence
  Synthetic oligonucleotide
gtatcttcgctactagagccagcggacagt

SEQ ID NO: 412933 - DNA, 30 bp, Artificial Sequence
  Synthetic oligonucleotide
tagttcatagaggaattacgttgggacagt

SEQ ID NO: 412934 - DNA, 30 bp, Artificial Sequence
  Synthetic oligonucleotide
ccacaagaagccgctatctttggatacagt

SEQ ID NO: 412935 - DNA, 30 bp, Artificial Sequence
  Synthetic oligonucleotide
gcggttgcgcaactggccgtagtatacagt

SEQ ID NO: 412936 - DNA, 30 bp, Artificial Sequence
  Synthetic oligonucleotide
gcaacttgggattgacctttgatctacagt

SEQ ID NO: 412937 - DNA, 30 bp, Artificial Sequence
  Synthetic oligonucleotide
gacgtgcagactcttcgatgcgagtacagt

SEQ ID NO: 412938 - DNA, 30 bp, Artificial Sequence
  Synthetic oligonucleotide
tgggctcaccacttggtcgcacattacagt

SEQ ID NO: 412939 - DNA, 30 bp, Artificial Sequence
  Synthetic oligonucleotide
tggagtttatgtgggttatttgcttacagt

SEQ ID NO: 412940 - DNA, 30 bp, Artificial Sequence
  Synthetic oligonucleotide
cctttcgaggagtaaatttacatttacagt

SEQ ID NO: 412941 - DNA, 30 bp, Artificial Sequence
  Synthetic oligonucleotide
gtcacccaaacggattcaaggatttacagt

SEQ ID NO: 412942 - DNA, 30 bp, Artificial Sequence
  Synthetic oligonucleotide
cttcccgaggtttaaaaagtctgaaccagt

SEQ ID NO: 412943 - DNA, 30 bp, Artificial Sequence
  Synthetic oligonucleotide
taaaactaggatctatgggcccgcaccagt

SEQ ID NO: 412944 - DNA, 30 bp, Artificial Sequence
  Synthetic oligonucleotide
gcagtcgtgccttcgtgacaaggcaccagt

SEQ ID NO: 412945 - DNA, 30 bp, Artificial Sequence
  Synthetic oligonucleotide
cgttgcggcgttgatttcattaagaccagt

SEQ ID NO: 412946 - DNA, 30 bp, Artificial Sequence
  Synthetic oligonucleotide
taaccaatgcagtgtcccttggttaccagt

SEQ ID NO: 412947 - DNA, 30 bp, Artificial Sequence
  Synthetic oligonucleotide
caatttacattcatctgcatgggacccagt

SEQ ID NO: 412948 - DNA, 30 bp, Artificial Sequence
  Synthetic oligonucleotide
aaatgcatgttataaacgaaagtccccagt

SEQ ID NO: 412949 - DNA, 30 bp, Artificial Sequence
  Synthetic oligonucleotide
tatcgcaatgtatagtttatgccgcccagt

SEQ ID NO: 412950 - DNA, 30 bp, Artificial Sequence
  Synthetic oligonucleotide
gtgttggagaggcagattacggggcccagt

SEQ ID NO: 412951 - DNA, 30 bp, Artificial Sequence
  Synthetic oligonucleotide
cattgttgtagtttgcttgacgaagccagt

SEQ ID NO: 412952 - DNA, 30 bp, Artificial Sequence
  Synthetic oligonucleotide
tgtcggcacaatacaaccgagttagccagt

SEQ ID NO: 412953 - DNA, 30 bp, Artificial Sequence
  Synthetic oligonucleotide
ctcgagtgttgttctcagcgatgcgccagt

SEQ ID NO: 412954 - DNA, 30 bp, Artificial Sequence
  Synthetic oligonucleotide
gaaaagtaataacggcgttgtaatgccagt

SEQ ID NO: 412955 - DNA, 30 bp, Artificial Sequence
  Synthetic oligonucleotide
gttcctccattcggtatggacatatccagt

SEQ ID NO: 412956 - DNA, 30 bp, Artificial Sequence
  Synthetic oligonucleotide
tatgacatcgctgtcttaggagtatccagt

SEQ ID NO: 412957 - DNA, 30 bp, Artificial Sequence
  Synthetic oligonucleotide
gtatgacctactgtcgggcagtagtccagt

SEQ ID NO: 412958 - DNA, 30 bp, Artificial Sequence
  Synthetic oligonucleotide
tgattttggtccggacgattggcttccagt

SEQ ID NO: 412959 - DNA, 30 bp, Artificial Sequence
  Synthetic oligonucleotide
caccaattgcgggtagaagagcgcagcagt

SEQ ID NO: 412960 - DNA, 30 bp, Artificial Sequence
  Synthetic oligonucleotide
ctttgttcttccgaccctacgcgcagcagt

SEQ ID NO: 412961 - DNA, 30 bp, Artificial Sequence
  Synthetic oligonucleotide
gacagatattcatcggataatatcagcagt

SEQ ID NO: 412962 - DNA, 28 bp, Artificial Sequence
  Synthetic oligonucleotide
cgcccgggctagcattccgacgagcagt

SEQ ID NO: 412963 - DNA, 30 bp, Artificial Sequence
  Synthetic oligonucleotide
attgagccctgcaccattacccggagcagt

SEQ ID NO: 412964 - DNA, 30 bp, Artificial Sequence
  Synthetic oligonucleotide
tgtatagttaaattggagttcatgagcagt

SEQ ID NO: 412965 - DNA, 30 bp, Artificial Sequence
  Synthetic oligonucleotide
cccgacttgtagcgcctaattattagcagt

SEQ ID NO: 412966 - DNA, 30 bp, Artificial Sequence
  Synthetic oligonucleotide
cctaaggtttgagtctcaacggaacgcagt

SEQ ID NO: 412967 - DNA, 30 bp, Artificial Sequence
  Synthetic oligonucleotide
gctgcggccaacaatgttcaaggacgcagt

SEQ ID NO: 412968 - DNA, 30 bp, Artificial Sequence
  Synthetic oligonucleotide
gtaacaagttaataagcgctgctacgcagt

SEQ ID NO: 412969 - DNA, 30 bp, Artificial Sequence
  Synthetic oligonucleotide
ttaacactacctaccgatttgcaccgcagt

SEQ ID NO: 412970 - DNA, 30 bp, Artificial Sequence
  Synthetic oligonucleotide
atactcgagatgagggcaatgctgcgcagt

SEQ ID NO: 412971 - DNA, 30 bp, Artificial Sequence
  Synthetic oligonucleotide
aatattgactcaaactagggcgatcgcagt

SEQ ID NO: 412972 - DNA, 30 bp, Artificial Sequence
  Synthetic oligonucleotide
gcaggatgttgtatgatagataaaggcagt

SEQ ID NO: 412973 - DNA, 30 bp, Artificial Sequence
  Synthetic oligonucleotide
acaaccgccacatactatagtaaaggcagt

SEQ ID NO: 412974 - DNA, 30 bp, Artificial Sequence
  Synthetic oligonucleotide
ctcaactatggacacattgctgcaggcagt

SEQ ID NO: 412975 - DNA, 30 bp, Artificial Sequence
  Synthetic oligonucleotide
acttttgtgaccgcaacagtctgaggcagt

SEQ ID NO: 412976 - DNA, 30 bp, Artificial Sequence
  Synthetic oligonucleotide
cgagcattagtttcgttcatgataggcagt

SEQ ID NO: 412977 - DNA, 31 bp, Artificial Sequence
  Synthetic oligonucleotide
cttagcccacttgagcaattattacggcagt

SEQ ID NO: 412978 - DNA, 30 bp, Artificial Sequence
  Synthetic oligonucleotide
attatcgatcattggacagttcccggcagt

SEQ ID NO: 412979 - DNA, 30 bp, Artificial Sequence
  Synthetic oligonucleotide
ataacaaacgctcctgacctcggcggcagt

SEQ ID NO: 412980 - DNA, 30 bp, Artificial Sequence
  Synthetic oligonucleotide
tacactgcgccatagacggactgcggcagt

SEQ ID NO: 412981 - DNA, 30 bp, Artificial Sequence
  Synthetic oligonucleotide
cagtagctggcaattgcctcccagggcagt

SEQ ID NO: 412982 - DNA, 30 bp, Artificial Sequence
  Synthetic oligonucleotide
cttgcccacttagggagcccatgtggcagt

SEQ ID NO: 412983 - DNA, 30 bp, Artificial Sequence
  Synthetic oligonucleotide
gtcttgtagcattccagaggctgtggcagt

SEQ ID NO: 412984 - DNA, 30 bp, Artificial Sequence
  Synthetic oligonucleotide
gggtcccccgggtaaatccaaccatgcagt

SEQ ID NO: 412985 - DNA, 30 bp, Artificial Sequence
  Synthetic oligonucleotide
ttatagaccttaacctctacccactgcagt

SEQ ID NO: 412986 - DNA, 30 bp, Artificial Sequence
  Synthetic oligonucleotide
gcattggtactttcgagtagtcgctgcagt

SEQ ID NO: 412987 - DNA, 30 bp, Artificial Sequence
  Synthetic oligonucleotide
gtgaatccaattcacagggagttctgcagt

SEQ ID NO: 412988 - DNA, 30 bp, Artificial Sequence
  Synthetic oligonucleotide
taagtgcgtctgaaatggtttttctgcagt

SEQ ID NO: 412989 - DNA, 30 bp, Artificial Sequence
  Synthetic oligonucleotide
tttgggtgacgggagctctttacgtgcagt

SEQ ID NO: 412990 - DNA, 30 bp, Artificial Sequence
  Synthetic oligonucleotide
agtgtatacgttgccgcgggcatgtgcagt

SEQ ID NO: 412991 - DNA, 30 bp, Artificial Sequence
  Synthetic oligonucleotide
tggactggccatatcttgttacattgcagt

SEQ ID NO: 412992 - DNA, 31 bp, Artificial Sequence
  Synthetic oligonucleotide
tacatgcttcttagttaacgctaaaatcagt

SEQ ID NO: 412993 - DNA, 30 bp, Artificial Sequence
  Synthetic oligonucleotide
cctatcctcctagacccttgaaacatcagt

SEQ ID NO: 412994 - DNA, 30 bp, Artificial Sequence
  Synthetic oligonucleotide
aatacaaggatctccttgcatcagatcagt

SEQ ID NO: 412995 - DNA, 30 bp, Artificial Sequence
  Synthetic oligonucleotide
ggatctgttcctaggatcgcctagatcagt

SEQ ID NO: 412996 - DNA, 30 bp, Artificial Sequence
  Synthetic oligonucleotide
ttgtctgagcacggtatatacttgatcagt

SEQ ID NO: 412997 - DNA, 30 bp, Artificial Sequence
  Synthetic oligonucleotide
gaatgtaatccacccgtaaaggatatcagt

SEQ ID NO: 412998 - DNA, 30 bp, Artificial Sequence
  Synthetic oligonucleotide
gtcggggtgaatcaggcgcggtatatcagt

SEQ ID NO: 412999 - DNA, 30 bp, Artificial Sequence
  Synthetic oligonucleotide
catacgttagcgtatgaatttactctcagt

SEQ ID NO: 413000 - DNA, 30 bp, Artificial Sequence
  Synthetic oligonucleotide
cgccatgagacacgctctagatgtctcagt

SEQ ID NO: 413001 - DNA, 30 bp, Artificial Sequence
  Synthetic oligonucleotide
gatctggtagtggtagggggcattctcagt

SEQ ID NO: 413002 - DNA, 30 bp, Artificial Sequence
  Synthetic oligonucleotide
ccacctgggggacaagtagcaacagtcagt

SEQ ID NO: 413003 - DNA, 30 bp, Artificial Sequence
  Synthetic oligonucleotide
ctgaactcggcctaagagctatcagtcagt

SEQ ID NO: 413004 - DNA, 30 bp, Artificial Sequence
  Synthetic oligonucleotide
ttagaaacatcctgaacgcgaaccgtcagt

SEQ ID NO: 413005 - DNA, 30 bp, Artificial Sequence
  Synthetic oligonucleotide
tgctcgactgcgtagcgcaactccgtcagt

SEQ ID NO: 413006 - DNA, 30 bp, Artificial Sequence
  Synthetic oligonucleotide
ggacaggttttttaattgcgctgcgtcagt

SEQ ID NO: 413007 - DNA, 30 bp, Artificial Sequence
  Synthetic oligonucleotide
cgaacaattgatatggtatttatcgtcagt

SEQ ID NO: 413008 - DNA, 30 bp, Artificial Sequence
  Synthetic oligonucleotide
acaagccttatgatgccgcgccaggtcagt

SEQ ID NO: 413009 - DNA, 30 bp, Artificial Sequence
  Synthetic oligonucleotide
tgtcttgtaggctcccgggagacggtcagt

SEQ ID NO: 413010 - DNA, 30 bp, Artificial Sequence
  Synthetic oligonucleotide
attgcatagagaaatttacagggggtcagt

SEQ ID NO: 413011 - DNA, 30 bp, Artificial Sequence
  Synthetic oligonucleotide
aggatctggataccttagcgatgggtcagt

SEQ ID NO: 413012 - DNA, 30 bp, Artificial Sequence
  Synthetic oligonucleotide
gaaatacttacatcgatcttttatgtcagt

SEQ ID NO: 413013 - DNA, 30 bp, Artificial Sequence
  Synthetic oligonucleotide
tgattccaacggatagtctccgctgtcagt

SEQ ID NO: 413014 - DNA, 30 bp, Artificial Sequence
  Synthetic oligonucleotide
caagatatcggagtcttagcgggtgtcagt

SEQ ID NO: 413015 - DNA, 30 bp, Artificial Sequence
  Synthetic oligonucleotide
gaacggcccacaaataggctttttgtcagt

SEQ ID NO: 413016 - DNA, 30 bp, Artificial Sequence
  Synthetic oligonucleotide
gttggcgtaagtgatttaactaaattcagt

SEQ ID NO: 413017 - DNA, 30 bp, Artificial Sequence
  Synthetic oligonucleotide
ctacaccaatactggtcagtcatattcagt

SEQ ID NO: 413018 - DNA, 30 bp, Artificial Sequence
  Synthetic oligonucleotide
tgatactctcttttaaaaaaacccttcagt

SEQ ID NO: 413019 - DNA, 30 bp, Artificial Sequence
  Synthetic oligonucleotide
tgtaacggatgcttttggttcttgttcagt

SEQ ID NO: 413020 - DNA, 30 bp, Artificial Sequence
  Synthetic oligonucleotide
gcgtgttattacgtaggttcttatttcagt

SEQ ID NO: 413021 - DNA, 30 bp, Artificial Sequence
  Synthetic oligonucleotide
agaacgtgaaacgaattgtcacacaagagt

SEQ ID NO: 413022 - DNA, 30 bp, Artificial Sequence
  Synthetic oligonucleotide
ataaagttgacacctattgtggacaagagt

SEQ ID NO: 413023 - DNA, 30 bp, Artificial Sequence
  Synthetic oligonucleotide
ttgtcgcggaaatgaactccctgcaagagt

SEQ ID NO: 413024 - DNA, 30 bp, Artificial Sequence
  Synthetic oligonucleotide
ttagttttgcgcttcccatagtgcaagagt

SEQ ID NO: 413025 - DNA, 30 bp, Artificial Sequence
  Synthetic oligonucleotide
caaagacgccaagtggggagtttcgagagt

SEQ ID NO: 413026 - DNA, 30 bp, Artificial Sequence
  Synthetic oligonucleotide
tcaaacagtaatcgtcggccgcaggagagt

SEQ ID NO: 413027 - DNA, 30 bp, Artificial Sequence
  Synthetic oligonucleotide
agcttctttgtggcatcgcgtacggagagt

SEQ ID NO: 413028 - DNA, 30 bp, Artificial Sequence
  Synthetic oligonucleotide
ggaaagtttatcgctgtatccgctgagagt

SEQ ID NO: 413029 - DNA, 30 bp, Artificial Sequence
  Synthetic oligonucleotide
ggttgcatttaaatgagggtataatagagt

SEQ ID NO: 413030 - DNA, 30 bp, Artificial Sequence
  Synthetic oligonucleotide
ttctggatgtcggatgatttgggatagagt

SEQ ID NO: 413031 - DNA, 30 bp, Artificial Sequence
  Synthetic oligonucleotide
gttgtgacagacggtggtatcgtatagagt

SEQ ID NO: 413032 - DNA, 30 bp, Artificial Sequence
  Synthetic oligonucleotide
gttgtttcacgcgcatcgtagccctagagt

SEQ ID NO: 413033 - DNA, 30 bp, Artificial Sequence
  Synthetic oligonucleotide
ttgtcacgttagtaccaatatgtctagagt

SEQ ID NO: 413034 - DNA, 30 bp, Artificial Sequence
  Synthetic oligonucleotide
gtaccgacggctacaatatgacagtagagt

SEQ ID NO: 413035 - DNA, 30 bp, Artificial Sequence
  Synthetic oligonucleotide
gggaactgtaaaacaggccagagttagagt

SEQ ID NO: 413036 - DNA, 30 bp, Artificial Sequence
  Synthetic oligonucleotide
agagtgtgggagttctacgccgcaacgagt

SEQ ID NO: 413037 - DNA, 30 bp, Artificial Sequence
  Synthetic oligonucleotide
tacgctttgcaaattgcattgctaacgagt

SEQ ID NO: 413038 - DNA, 30 bp, Artificial Sequence
  Synthetic oligonucleotide
cagaatttccatggataggtatacacgagt

SEQ ID NO: 413039 - DNA, 30 bp, Artificial Sequence
  Synthetic oligonucleotide
gatcctcatgacactaaggctagcacgagt

SEQ ID NO: 413040 - DNA, 30 bp, Artificial Sequence
  Synthetic oligonucleotide
gtggcagctttttccagctatttcacgagt

SEQ ID NO: 413041 - DNA, 30 bp, Artificial Sequence
  Synthetic oligonucleotide
atattcccaaaaagcgacaggtggacgagt

SEQ ID NO: 413042 - DNA, 30 bp, Artificial Sequence
  Synthetic oligonucleotide
ctctacggaccttagtggaatctgacgagt

SEQ ID NO: 413043 - DNA, 30 bp, Artificial Sequence
  Synthetic oligonucleotide
acctcccttcggagagtacgttatacgagt

SEQ ID NO: 413044 - DNA, 30 bp, Artificial Sequence
  Synthetic oligonucleotide
gacttacaagctctaatgtgtatcccgagt

SEQ ID NO: 413045 - DNA, 30 bp, Artificial Sequence
  Synthetic oligonucleotide
aactaccgtaacgagatgttttggccgagt

SEQ ID NO: 413046 - DNA, 30 bp, Artificial Sequence
  Synthetic oligonucleotide
cgccgagtcgctctaaggtgcgcagcgagt

SEQ ID NO: 413047 - DNA, 30 bp, Artificial Sequence
  Synthetic oligonucleotide
gcataggcgactagcgtagctgacgcgagt

SEQ ID NO: 413048 - DNA, 30 bp, Artificial Sequence
  Synthetic oligonucleotide
tctactactcacctcgcgcctccggcgagt

SEQ ID NO: 413049 - DNA, 29 bp, Artificial Sequence
  Synthetic oligonucleotide
ccaaaggcgaagattgcccatcggcgagt

SEQ ID NO: 413050 - DNA, 30 bp, Artificial Sequence
  Synthetic oligonucleotide
ctggtcgccgccgtttcacacactgcgagt

SEQ ID NO: 413051 - DNA, 30 bp, Artificial Sequence
  Synthetic oligonucleotide
tacaggcacagtatcccgttacgtgcgagt

SEQ ID NO: 413052 - DNA, 30 bp, Artificial Sequence
  Synthetic oligonucleotide
gcctatgagtcctaagtagggtaatcgagt

SEQ ID NO: 413053 - DNA, 30 bp, Artificial Sequence
  Synthetic oligonucleotide
gcggtcttggggggggctaatggctcgagt

SEQ ID NO: 413054 - DNA, 30 bp, Artificial Sequence
  Synthetic oligonucleotide
acggacaggcctgtcgacgaaacgaggagt

SEQ ID NO: 413055 - DNA, 30 bp, Artificial Sequence
  Synthetic oligonucleotide
acgtcggccctccacaagtcatggaggagt

SEQ ID NO: 413056 - DNA, 30 bp, Artificial Sequence
  Synthetic oligonucleotide
ccacggtctggacggctttctctgaggagt

SEQ ID NO: 413057 - DNA, 30 bp, Artificial Sequence
  Synthetic oligonucleotide
gatgttcgtacgacgttaggttaacggagt

SEQ ID NO: 413058 - DNA, 30 bp, Artificial Sequence
  Synthetic oligonucleotide
aaactcgtatacagaggagccggacggagt

SEQ ID NO: 413059 - DNA, 30 bp, Artificial Sequence
  Synthetic oligonucleotide
acacgtgcgcaatccgacggatagcggagt

SEQ ID NO: 413060 - DNA, 30 bp, Artificial Sequence
  Synthetic oligonucleotide
tttgacaaataacttcaatcgccagggagt

SEQ ID NO: 413061 - DNA, 30 bp, Artificial Sequence
  Synthetic oligonucleotide
gtcctctcttcccgtagggcggtggggagt

SEQ ID NO: 413062 - DNA, 30 bp, Artificial Sequence
  Synthetic oligonucleotide
agcgagtgacaatagaacttgcaatggagt

SEQ ID NO: 413063 - DNA, 30 bp, Artificial Sequence
  Synthetic oligonucleotide
gacacctttgggcataaattaccatggagt

SEQ ID NO: 413064 - DNA, 30 bp, Artificial Sequence
  Synthetic oligonucleotide
gtgtaccttgcgtcttaatcagtatggagt

SEQ ID NO: 413065 - DNA, 30 bp, Artificial Sequence
  Synthetic oligonucleotide
attatttcgctaagaggtgactgctggagt

SEQ ID NO: 413066 - DNA, 30 bp, Artificial Sequence
  Synthetic oligonucleotide
gcggtggtactatccgtccgcaagtggagt

SEQ ID NO: 413067 - DNA, 30 bp, Artificial Sequence
  Synthetic oligonucleotide
gccgatgtcacgattgacgatctgtggagt

SEQ ID NO: 413068 - DNA, 30 bp, Artificial Sequence
  Synthetic oligonucleotide
ggggggtgctggaacctaggcggttggagt

SEQ ID NO: 413069 - DNA, 30 bp, Artificial Sequence
  Synthetic oligonucleotide
catatgaaagaaacaatgggcgtttggagt

SEQ ID NO: 413070 - DNA, 30 bp, Artificial Sequence
  Synthetic oligonucleotide
cccataaatagtcctcggttctaaatgagt

SEQ ID NO: 413071 - DNA, 31 bp, Artificial Sequence
  Synthetic oligonucleotide
cttatgggctcagcttaacggtacaatgagt

SEQ ID NO: 413072 - DNA, 30 bp, Artificial Sequence
  Synthetic oligonucleotide
ttatatgtcaatactatgaaatcaatgagt

SEQ ID NO: 413073 - DNA, 30 bp, Artificial Sequence
  Synthetic oligonucleotide
tacgctaattgcctggtggttctaatgagt

SEQ ID NO: 413074 - DNA, 30 bp, Artificial Sequence
  Synthetic oligonucleotide
atgaagcgttccggggtatttcgcatgagt

SEQ ID NO: 413075 - DNA, 30 bp, Artificial Sequence
  Synthetic oligonucleotide
aagctttagctcacgcgcgacaagatgagt

SEQ ID NO: 413076 - DNA, 30 bp, Artificial Sequence
  Synthetic oligonucleotide
ggatgagacttttggtcatcacagatgagt

SEQ ID NO: 413077 - DNA, 30 bp, Artificial Sequence
  Synthetic oligonucleotide
gactgctccctgtagccaagttatatgagt

SEQ ID NO: 413078 - DNA, 30 bp, Artificial Sequence
  Synthetic oligonucleotide
agtcaagactttagctgtgctggtatgagt

SEQ ID NO: 413079 - DNA, 30 bp, Artificial Sequence
  Synthetic oligonucleotide
cacggcttgctcatttgtagggcactgagt

SEQ ID NO: 413080 - DNA, 30 bp, Artificial Sequence
  Synthetic oligonucleotide
cgcccgaacgccgcactgcctacgctgagt

SEQ ID NO: 413081 - DNA, 30 bp, Artificial Sequence
  Synthetic oligonucleotide
cacattcaccttttaaacatcactctgagt

SEQ ID NO: 413082 - DNA, 30 bp, Artificial Sequence
  Synthetic oligonucleotide
gtggagattatgtgcacgcatcccgtgagt

SEQ ID NO: 413083 - DNA, 30 bp, Artificial Sequence
  Synthetic oligonucleotide
tgatggatataactaacaaggtgcgtgagt

SEQ ID NO: 413084 - DNA, 30 bp, Artificial Sequence
  Synthetic oligonucleotide
caacggtaccccagttccctgaaggtgagt

SEQ ID NO: 413085 - DNA, 30 bp, Artificial Sequence
  Synthetic oligonucleotide
atgtaaggcggggtaagttcatcggtgagt

SEQ ID NO: 413086 - DNA, 30 bp, Artificial Sequence
  Synthetic oligonucleotide
gatatactagtctaccggatcgatgtgagt

SEQ ID NO: 413087 - DNA, 30 bp, Artificial Sequence
  Synthetic oligonucleotide
gggagacaattcaacttatgttatttgagt

SEQ ID NO: 413088 - DNA, 30 bp, Artificial Sequence
  Synthetic oligonucleotide
taaaagttattcaggaacgtgggtttgagt

SEQ ID NO: 413089 - DNA, 30 bp, Artificial Sequence
  Synthetic oligonucleotide
gtagtcaggtggattcgccacttaaatagt

SEQ ID NO: 413090 - DNA, 30 bp, Artificial Sequence
  Synthetic oligonucleotide
tatcaattgcatggaaaatcaggcaatagt

SEQ ID NO: 413091 - DNA, 30 bp, Artificial Sequence
  Synthetic oligonucleotide
cttgtttctaggtcccgatttccgaatagt

SEQ ID NO: 413092 - DNA, 30 bp, Artificial Sequence
  Synthetic oligonucleotide
tctattccagtccacaagggcatgaatagt

SEQ ID NO: 413093 - DNA, 30 bp, Artificial Sequence
  Synthetic oligonucleotide
ccatttactggtaattcggattctaatagt

SEQ ID NO: 413094 - DNA, 30 bp, Artificial Sequence
  Synthetic oligonucleotide
gacttgccaaactgccgggccgaacatagt

SEQ ID NO: 413095 - DNA, 30 bp, Artificial Sequence
  Synthetic oligonucleotide
cactagattctgacccgcgtttgccatagt

SEQ ID NO: 413096 - DNA, 30 bp, Artificial Sequence
  Synthetic oligonucleotide
tagagaccgcatgtgaaccatgctcatagt

SEQ ID NO: 413097 - DNA, 30 bp, Artificial Sequence
  Synthetic oligonucleotide
tagatgcgccgggtagaccagtctcatagt

SEQ ID NO: 413098 - DNA, 30 bp, Artificial Sequence
  Synthetic oligonucleotide
ctgtaatctctagtgcgttttaaagatagt

SEQ ID NO: 413099 - DNA, 30 bp, Artificial Sequence
  Synthetic oligonucleotide
agatctgaagtccacgatgtgtgagatagt

SEQ ID NO: 413100 - DNA, 30 bp, Artificial Sequence
  Synthetic oligonucleotide
gtcctatacgtaaccgattctttagatagt

SEQ ID NO: 413101 - DNA, 30 bp, Artificial Sequence
  Synthetic oligonucleotide
gcttcgttctaagatggtatcgacgatagt

SEQ ID NO: 413102 - DNA, 30 bp, Artificial Sequence
  Synthetic oligonucleotide
gtcataaaaggctaaccgatatacgatagt

SEQ ID NO: 413103 - DNA, 30 bp, Artificial Sequence
  Synthetic oligonucleotide
agcacctgagtcaggactactaaggatagt

SEQ ID NO: 413104 - DNA, 30 bp, Artificial Sequence
  Synthetic oligonucleotide
gggactactagggtgctccgcccggatagt

SEQ ID NO: 413105 - DNA, 30 bp, Artificial Sequence
  Synthetic oligonucleotide
tctgtgtccgctgatgcgaagggtgatagt

SEQ ID NO: 413106 - DNA, 30 bp, Artificial Sequence
  Synthetic oligonucleotide
agatgcctaaatggactatattgatatagt

SEQ ID NO: 413107 - DNA, 30 bp, Artificial Sequence
  Synthetic oligonucleotide
caccgtcatggctgggaatgatcctatagt

SEQ ID NO: 413108 - DNA, 30 bp, Artificial Sequence
  Synthetic oligonucleotide
ttcctccgccctggtccagttagctatagt

SEQ ID NO: 413109 - DNA, 30 bp, Artificial Sequence
  Synthetic oligonucleotide
ggagaaaaagcagctataacgccttatagt

SEQ ID NO: 413110 - DNA, 30 bp, Artificial Sequence
  Synthetic oligonucleotide
aactaaaagtatctattgatcgcttatagt

SEQ ID NO: 413111 - DNA, 30 bp, Artificial Sequence
  Synthetic oligonucleotide
gaggagggtcttgatcaggcgcgttatagt

SEQ ID NO: 413112 - DNA, 30 bp, Artificial Sequence
  Synthetic oligonucleotide
ttattcctccgcgggaggttggggactagt

SEQ ID NO: 413113 - DNA, 30 bp, Artificial Sequence
  Synthetic oligonucleotide
cgaatgagttcgttaccccgggatactagt

SEQ ID NO: 413114 - DNA, 30 bp, Artificial Sequence
  Synthetic oligonucleotide
agctcgatactctctggtggccaacctagt

SEQ ID NO: 413115 - DNA, 30 bp, Artificial Sequence
  Synthetic oligonucleotide
ttggtacgcaagttcgagtacatacctagt

SEQ ID NO: 413116 - DNA, 30 bp, Artificial Sequence
  Synthetic oligonucleotide
gagggttcaccgcccctgggactacctagt

SEQ ID NO: 413117 - DNA, 30 bp, Artificial Sequence
  Synthetic oligonucleotide
gttagtcacgccggccgttgcacccctagt

SEQ ID NO: 413118 - DNA, 30 bp, Artificial Sequence
  Synthetic oligonucleotide
tacgaaaacgtgtgtactcaaaagcctagt

SEQ ID NO: 413119 - DNA, 30 bp, Artificial Sequence
  Synthetic oligonucleotide
caatcaacaggtgatgtagagcagcctagt

SEQ ID NO: 413120 - DNA, 30 bp, Artificial Sequence
  Synthetic oligonucleotide
gattacatgttacgactcgcgccgcctagt

SEQ ID NO: 413121 - DNA, 30 bp, Artificial Sequence
  Synthetic oligonucleotide
aatggagccgctggttgggaatatcctagt

SEQ ID NO: 413122 - DNA, 30 bp, Artificial Sequence
  Synthetic oligonucleotide
acgtagtagagagatcccccgcgtcctagt

SEQ ID NO: 413123 - DNA, 30 bp, Artificial Sequence
  Synthetic oligonucleotide
gccggttcgaagtgcgacgttaaagctagt

SEQ ID NO: 413124 - DNA, 30 bp, Artificial Sequence
  Synthetic oligonucleotide
tatcttgcagcgactcgagtctcagctagt

SEQ ID NO: 413125 - DNA, 29 bp, Artificial Sequence
  Synthetic oligonucleotide
tccgccactgatgtacaacgcgggctagt

SEQ ID NO: 413126 - DNA, 30 bp, Artificial Sequence
  Synthetic oligonucleotide
agtggtgctaccggaaacgtagtggctagt

SEQ ID NO: 413127 - DNA, 31 bp, Artificial Sequence
  Synthetic oligonucleotide
tttttacccgacttccaaacctatatctagt

SEQ ID NO: 413128 - DNA, 30 bp, Artificial Sequence
  Synthetic oligonucleotide
gtttgactctttacaacggtagtatctagt

SEQ ID NO: 413129 - DNA, 30 bp, Artificial Sequence
  Synthetic oligonucleotide
ttgttattttcaaaatttacaaactctagt

SEQ ID NO: 413130 - DNA, 30 bp, Artificial Sequence
  Synthetic oligonucleotide
gttagggcatttgcaaactaagactctagt

SEQ ID NO: 413131 - DNA, 30 bp, Artificial Sequence
  Synthetic oligonucleotide
acccatttaatgcaagtattggactctagt

SEQ ID NO: 413132 - DNA, 30 bp, Artificial Sequence
  Synthetic oligonucleotide
gtggcctctagcgacgtggtaaagtctagt

SEQ ID NO: 413133 - DNA, 30 bp, Artificial Sequence
  Synthetic oligonucleotide
ccgaaagttgcaccgagtacagggtctagt

SEQ ID NO: 413134 - DNA, 30 bp, Artificial Sequence
  Synthetic oligonucleotide
ataccgcaaatattgcgagcatgttctagt

SEQ ID NO: 413135 - DNA, 30 bp, Artificial Sequence
  Synthetic oligonucleotide
ctaatggagagtaaaaaactaccaagtagt

SEQ ID NO: 413136 - DNA, 30 bp, Artificial Sequence
  Synthetic oligonucleotide
aatcgatgacttttgggagcccccagtagt

SEQ ID NO: 413137 - DNA, 30 bp, Artificial Sequence
  Synthetic oligonucleotide
ctctacatatcgtattcttagtgcagtagt

SEQ ID NO: 413138 - DNA, 30 bp, Artificial Sequence
  Synthetic oligonucleotide
gggttccaagcgggcgtatgggtcagtagt

SEQ ID NO: 413139 - DNA, 30 bp, Artificial Sequence
  Synthetic oligonucleotide
gttgctctccaacagagtattactagtagt

SEQ ID NO: 413140 - DNA, 30 bp, Artificial Sequence
  Synthetic oligonucleotide
atacttcagagtcaatacgggggtagtagt

SEQ ID NO: 413141 - DNA, 30 bp, Artificial Sequence
  Synthetic oligonucleotide
ccgtgtggaacgcatggattgtgtagtagt

SEQ ID NO: 413142 - DNA, 30 bp, Artificial Sequence
  Synthetic oligonucleotide
agcgctccaatggtgtgttgctcacgtagt

SEQ ID NO: 413143 - DNA, 30 bp, Artificial Sequence
  Synthetic oligonucleotide
gttaagggaactcgaatatcacaccgtagt

SEQ ID NO: 413144 - DNA, 30 bp, Artificial Sequence
  Synthetic oligonucleotide
gcagcgagtcacatgtcctttcaccgtagt

SEQ ID NO: 413145 - DNA, 30 bp, Artificial Sequence
  Synthetic oligonucleotide
actactgaacaaacttattctagccgtagt

SEQ ID NO: 413146 - DNA, 30 bp, Artificial Sequence
  Synthetic oligonucleotide
tgcagttttcatctcatccttagccgtagt

SEQ ID NO: 413147 - DNA, 30 bp, Artificial Sequence
  Synthetic oligonucleotide
ctcgcgcatttttctggaagttgccgtagt

SEQ ID NO: 413148 - DNA, 30 bp, Artificial Sequence
  Synthetic oligonucleotide
actggcggtatatcttgaggcaagcgtagt

SEQ ID NO: 413149 - DNA, 30 bp, Artificial Sequence
  Synthetic oligonucleotide
ctataggttttgagttgggaaccgcgtagt

SEQ ID NO: 413150 - DNA, 30 bp, Artificial Sequence
  Synthetic oligonucleotide
acccgcttatgcgaggattcagtgcgtagt

SEQ ID NO: 413151 - DNA, 30 bp, Artificial Sequence
  Synthetic oligonucleotide
aaaaggagacaacgtgcccattaaggtagt

SEQ ID NO: 413152 - DNA, 30 bp, Artificial Sequence
  Synthetic oligonucleotide
gtacatgagtattgccctaatcgaggtagt

SEQ ID NO: 413153 - DNA, 30 bp, Artificial Sequence
  Synthetic oligonucleotide
caatacaaagagagggggtactccggtagt

SEQ ID NO: 413154 - DNA, 30 bp, Artificial Sequence
  Synthetic oligonucleotide
gggccgactgggtgctctccaggcggtagt

SEQ ID NO: 413155 - DNA, 30 bp, Artificial Sequence
  Synthetic oligonucleotide
ggataaaaagatggctctggcatgggtagt

SEQ ID NO: 413156 - DNA, 30 bp, Artificial Sequence
  Synthetic oligonucleotide
tatttcacgtgcgggcacgctttgggtagt

SEQ ID NO: 413157 - DNA, 30 bp, Artificial Sequence
  Synthetic oligonucleotide
ttcggcttcaatgaagctgttcatggtagt

SEQ ID NO: 413158 - DNA, 30 bp, Artificial Sequence
  Synthetic oligonucleotide
taggtgtgttaggtaaacttctgtggtagt

SEQ ID NO: 413159 - DNA, 30 bp, Artificial Sequence
  Synthetic oligonucleotide
gcgtagtttgcttgatggcatatatgtagt

SEQ ID NO: 413160 - DNA, 30 bp, Artificial Sequence
  Synthetic oligonucleotide
gaaagtcaagtgataaggatcacctgtagt

SEQ ID NO: 413161 - DNA, 30 bp, Artificial Sequence
  Synthetic oligonucleotide
cattgcacgtcggaagccttaacgtgtagt

SEQ ID NO: 413162 - DNA, 30 bp, Artificial Sequence
  Synthetic oligonucleotide
ctcccactgataaatctgtagacgtgtagt

SEQ ID NO: 413163 - DNA, 30 bp, Artificial Sequence
  Synthetic oligonucleotide
ggttcctctccgggtcttacaagttgtagt

SEQ ID NO: 413164 - DNA, 30 bp, Artificial Sequence
  Synthetic oligonucleotide
tcacccgtagatttatcgcaattttgtagt

SEQ ID NO: 413165 - DNA, 31 bp, Artificial Sequence
  Synthetic oligonucleotide
ttgggtgtccaatgcaatgtggttttgtagt

SEQ ID NO: 413166 - DNA, 30 bp, Artificial Sequence
  Synthetic oligonucleotide
tatgcggttgcacacctctaggaaattagt

SEQ ID NO: 413167 - DNA, 30 bp, Artificial Sequence
  Synthetic oligonucleotide
gcaaattcgtttacaataagtttaattagt

SEQ ID NO: 413168 - DNA, 30 bp, Artificial Sequence
  Synthetic oligonucleotide
gaagacttagtggactaatgccgcattagt

SEQ ID NO: 413169 - DNA, 30 bp, Artificial Sequence
  Synthetic oligonucleotide
ggtaacttgcgatgtggtgtcccgattagt

SEQ ID NO: 413170 - DNA, 31 bp, Artificial Sequence
  Synthetic oligonucleotide
gaaataggatcctccaggcgggccgattagt

SEQ ID NO: 413171 - DNA, 30 bp, Artificial Sequence
  Synthetic oligonucleotide
tagggtagcctaattagcctcctgattagt

SEQ ID NO: 413172 - DNA, 30 bp, Artificial Sequence
  Synthetic oligonucleotide
ttcgagttggtgcactaagctcatattagt

SEQ ID NO: 413173 - DNA, 30 bp, Artificial Sequence
  Synthetic oligonucleotide
gatacgggaggttcgctcatgtatattagt

SEQ ID NO: 413174 - DNA, 30 bp, Artificial Sequence
  Synthetic oligonucleotide
atccgtaaggggggacgcgacgctattagt

SEQ ID NO: 413175 - DNA, 30 bp, Artificial Sequence
  Synthetic oligonucleotide
aatcgcttcagaagttaatgtcttattagt

SEQ ID NO: 413176 - DNA, 30 bp, Artificial Sequence
  Synthetic oligonucleotide
acccctttagttctaactttggaacttagt

SEQ ID NO: 413177 - DNA, 30 bp, Artificial Sequence
  Synthetic oligonucleotide
aagggatcgtaaacacgttgtgcacttagt

SEQ ID NO: 413178 - DNA, 30 bp, Artificial Sequence
  Synthetic oligonucleotide
ggagctgcacgcagtatcgactcacttagt

SEQ ID NO: 413179 - DNA, 30 bp, Artificial Sequence
  Synthetic oligonucleotide
ggctaccctgtgtcctgagcactacttagt

SEQ ID NO: 413180 - DNA, 30 bp, Artificial Sequence
  Synthetic oligonucleotide
cagacttaaatctaacgggcgagccttagt

SEQ ID NO: 413181 - DNA, 30 bp, Artificial Sequence
  Synthetic oligonucleotide
attgctcctatgggcataatttgccttagt

SEQ ID NO: 413182 - DNA, 30 bp, Artificial Sequence
  Synthetic oligonucleotide
agtcatcacataatctggttatggcttagt

SEQ ID NO: 413183 - DNA, 30 bp, Artificial Sequence
  Synthetic oligonucleotide
tcccgagccgttgctatcgagatgcttagt

SEQ ID NO: 413184 - DNA, 30 bp, Artificial Sequence
  Synthetic oligonucleotide
cgatttagcagtaatgcacggctgcttagt

SEQ ID NO: 413185 - DNA, 30 bp, Artificial Sequence
  Synthetic oligonucleotide
atagcagggacgtattatgctacagttagt

SEQ ID NO: 413186 - DNA, 30 bp, Artificial Sequence
  Synthetic oligonucleotide
gggttgcgaaagactgagtttcacgttagt

SEQ ID NO: 413187 - DNA, 31 bp, Artificial Sequence
  Synthetic oligonucleotide
tcacttagaggcgagccgcgcactcgttagt

SEQ ID NO: 413188 - DNA, 30 bp, Artificial Sequence
  Synthetic oligonucleotide
gagaatctccctgaatcggcaagggttagt

SEQ ID NO: 413189 - DNA, 30 bp, Artificial Sequence
  Synthetic oligonucleotide
ttggtgtgaggcgatggattcggggttagt

SEQ ID NO: 413190 - DNA, 30 bp, Artificial Sequence
  Synthetic oligonucleotide
acgaaaaacccgaggttgttctgggttagt

SEQ ID NO: 413191 - DNA, 29 bp, Artificial Sequence
  Synthetic oligonucleotide
ggagcctacaccaatctatgttggttagt

SEQ ID NO: 413192 - DNA, 30 bp, Artificial Sequence
  Synthetic oligonucleotide
gagtttagagagtggcggatctatgttagt

SEQ ID NO: 413193 - DNA, 31 bp, Artificial Sequence
  Synthetic oligonucleotide
gtggcattagtccggcatacattgtgttagt

SEQ ID NO: 413194 - DNA, 30 bp, Artificial Sequence
  Synthetic oligonucleotide
acaagaccacttgtatttgacccatttagt

SEQ ID NO: 413195 - DNA, 30 bp, Artificial Sequence
  Synthetic oligonucleotide
tactcagatcggggtacctcacgatttagt

SEQ ID NO: 413196 - DNA, 31 bp, Artificial Sequence
  Synthetic oligonucleotide
ttcaaaagtcctatacatggataactttagt

SEQ ID NO: 413197 - DNA, 30 bp, Artificial Sequence
  Synthetic oligonucleotide
cgccctagccaatgagtaggccgctttagt

SEQ ID NO: 413198 - DNA, 30 bp, Artificial Sequence
  Synthetic oligonucleotide
tagtttccgtaggccgctaattcttttagt

SEQ ID NO: 413199 - DNA, 30 bp, Artificial Sequence
  Synthetic oligonucleotide
aaattactgccagaaagctgcgcaaaacgt

SEQ ID NO: 413200 - DNA, 30 bp, Artificial Sequence
  Synthetic oligonucleotide
atcaacagacgagtccggcgtcagaaacgt

SEQ ID NO: 413201 - DNA, 30 bp, Artificial Sequence
  Synthetic oligonucleotide
tgttagtagctggataacgtagtgaaacgt

SEQ ID NO: 413202 - DNA, 30 bp, Artificial Sequence
  Synthetic oligonucleotide
gagaacggttctgcgggcttggtgaaacgt

SEQ ID NO: 413203 - DNA, 30 bp, Artificial Sequence
  Synthetic oligonucleotide
caggggctgttgccactttacaataaacgt

SEQ ID NO: 413204 - DNA, 30 bp, Artificial Sequence
  Synthetic oligonucleotide
cataccgaatagggcacaacgtctaaacgt

SEQ ID NO: 413205 - DNA, 30 bp, Artificial Sequence
  Synthetic oligonucleotide
tcactcttcacatgttaagtgcgtaaacgt

SEQ ID NO: 413206 - DNA, 30 bp, Artificial Sequence
  Synthetic oligonucleotide
tggggtcttactcgggtatagacacaacgt

SEQ ID NO: 413207 - DNA, 30 bp, Artificial Sequence
  Synthetic oligonucleotide
ggaatacgtctgcggaggagaatacaacgt

SEQ ID NO: 413208 - DNA, 30 bp, Artificial Sequence
  Synthetic oligonucleotide
ttgggtgccgatctgtcttttatccaacgt

SEQ ID NO: 413209 - DNA, 30 bp, Artificial Sequence
  Synthetic oligonucleotide
ggtgagtccagcactttggatacgcaacgt

SEQ ID NO: 413210 - DNA, 30 bp, Artificial Sequence
  Synthetic oligonucleotide
catctacggcatggagccttgcggcaacgt

SEQ ID NO: 413211 - DNA, 30 bp, Artificial Sequence
  Synthetic oligonucleotide
gaccacatattgtagttccttcggcaacgt

SEQ ID NO: 413212 - DNA, 30 bp, Artificial Sequence
  Synthetic oligonucleotide
ggtagtcttcgctaatcatcgcttcaacgt

SEQ ID NO: 413213 - DNA, 30 bp, Artificial Sequence
  Synthetic oligonucleotide
cccctagggagagtcgatagtacagaacgt

SEQ ID NO: 413214 - DNA, 30 bp, Artificial Sequence
  Synthetic oligonucleotide
atatcgaaataagattatttcgcagaacgt

SEQ ID NO: 413215 - DNA, 30 bp, Artificial Sequence
  Synthetic oligonucleotide
cattatattatgattctgtgtaacgaacgt

SEQ ID NO: 413216 - DNA, 30 bp, Artificial Sequence
  Synthetic oligonucleotide
gatcaggttagggtatcatagcacgaacgt

SEQ ID NO: 413217 - DNA, 30 bp, Artificial Sequence
  Synthetic oligonucleotide
ggccagtgttattttcctattagcgaacgt

SEQ ID NO: 413218 - DNA, 30 bp, Artificial Sequence
  Synthetic oligonucleotide
ccagagtacactcctatatttcaggaacgt

SEQ ID NO: 413219 - DNA, 30 bp, Artificial Sequence
  Synthetic oligonucleotide
accatgctcgcggtacgcacgcgtgaacgt

SEQ ID NO: 413220 - DNA, 30 bp, Artificial Sequence
  Synthetic oligonucleotide
acctgatgtgatatcatgacgcttgaacgt

SEQ ID NO: 413221 - DNA, 30 bp, Artificial Sequence
  Synthetic oligonucleotide
ggagcgtgtctcgcagattagtttgaacgt

SEQ ID NO: 413222 - DNA, 30 bp, Artificial Sequence
  Synthetic oligonucleotide
gctagaattgagaaccgtgttcaataacgt

SEQ ID NO: 413223 - DNA, 30 bp, Artificial Sequence
  Synthetic oligonucleotide
gggcagcccctattggaacccacataacgt

SEQ ID NO: 413224 - DNA, 30 bp, Artificial Sequence
  Synthetic oligonucleotide
cggtatgagcaagctcgtgccgactaacgt

SEQ ID NO: 413225 - DNA, 30 bp, Artificial Sequence
  Synthetic oligonucleotide
caggaatctggtttggcttgcagctaacgt

SEQ ID NO: 413226 - DNA, 30 bp, Artificial Sequence
  Synthetic oligonucleotide
caagtaatggtggctacctcgtagtaacgt

SEQ ID NO: 413227 - DNA, 30 bp, Artificial Sequence
  Synthetic oligonucleotide
acgtcgatggagggaggcatgagttaacgt

SEQ ID NO: 413228 - DNA, 30 bp, Artificial Sequence
  Synthetic oligonucleotide
cgcaaaagggccaagttataggtaacacgt

SEQ ID NO: 413229 - DNA, 30 bp, Artificial Sequence
  Synthetic oligonucleotide
tgatcggtgcgtttatgtgcattaacacgt

SEQ ID NO: 413230 - DNA, 30 bp, Artificial Sequence
  Synthetic oligonucleotide
ttgtagagccagtccgccggttggacacgt

SEQ ID NO: 413231 - DNA, 30 bp, Artificial Sequence
  Synthetic oligonucleotide
taccgatagaagacggacattggtacacgt

SEQ ID NO: 413232 - DNA, 30 bp, Artificial Sequence
  Synthetic oligonucleotide
tgcagtcagaccagacacacagaaccacgt

SEQ ID NO: 413233 - DNA, 30 bp, Artificial Sequence
  Synthetic oligonucleotide
gtcaccataacttagtggagaacaccacgt

SEQ ID NO: 413234 - DNA, 30 bp, Artificial Sequence
  Synthetic oligonucleotide
catagaaacatctagttcttcggaccacgt

SEQ ID NO: 413235 - DNA, 30 bp, Artificial Sequence
  Synthetic oligonucleotide
gatccagctgctggggctcgcgtaccacgt

SEQ ID NO: 413236 - DNA, 30 bp, Artificial Sequence
  Synthetic oligonucleotide
ggtcacaggcgcgcgtaggccacgccacgt

SEQ ID NO: 413237 - DNA, 30 bp, Artificial Sequence
  Synthetic oligonucleotide
tggctgccttgctctctgcaaaggccacgt

SEQ ID NO: 413238 - DNA, 30 bp, Artificial Sequence
  Synthetic oligonucleotide
cgggaattgcacacctttccttggccacgt

SEQ ID NO: 413239 - DNA, 30 bp, Artificial Sequence
  Synthetic oligonucleotide
ctggggtgagactttggactactgccacgt

SEQ ID NO: 413240 - DNA, 30 bp, Artificial Sequence
  Synthetic oligonucleotide
taagtttacatttcccgccagctgccacgt

SEQ ID NO: 413241 - DNA, 30 bp, Artificial Sequence
  Synthetic oligonucleotide
ggctcccatattaggcttgtcggtccacgt

SEQ ID NO: 413242 - DNA, 30 bp, Artificial Sequence
  Synthetic oligonucleotide
attaaagctaatactaatgcatgggcacgt

SEQ ID NO: 413243 - DNA, 30 bp, Artificial Sequence
  Synthetic oligonucleotide
tataggcacgcatatatcctcatggcacgt

SEQ ID NO: 413244 - DNA, 30 bp, Artificial Sequence
  Synthetic oligonucleotide
taattggttctctatagatgcattgcacgt

SEQ ID NO: 413245 - DNA, 30 bp, Artificial Sequence
  Synthetic oligonucleotide
aaatagagctgttaggcgaaacgatcacgt

SEQ ID NO: 413246 - DNA, 30 bp, Artificial Sequence
  Synthetic oligonucleotide
attgcgtacgctggcggtggcacctcacgt

SEQ ID NO: 413247 - DNA, 30 bp, Artificial Sequence
  Synthetic oligonucleotide
tttggcagtattcccttctgcacctcacgt

SEQ ID NO: 413248 - DNA, 30 bp, Artificial Sequence
  Synthetic oligonucleotide
tatgtactcctgttatccatatgctcacgt

SEQ ID NO: 413249 - DNA, 30 bp, Artificial Sequence
  Synthetic oligonucleotide
aatagcgtcgtgagtcaagtggtctcacgt

SEQ ID NO: 413250 - DNA, 30 bp, Artificial Sequence
  Synthetic oligonucleotide
gcgattgtgcgtttattctggttctcacgt

SEQ ID NO: 413251 - DNA, 30 bp, Artificial Sequence
  Synthetic oligonucleotide
taaaaacccgcgtgtcttacgaggtcacgt

SEQ ID NO: 413252 - DNA, 30 bp, Artificial Sequence
  Synthetic oligonucleotide
aagtccgcaaatcggacggtaacttcacgt

SEQ ID NO: 413253 - DNA, 30 bp, Artificial Sequence
  Synthetic oligonucleotide
gcgaatccacgactttctacaggaagacgt

SEQ ID NO: 413254 - DNA, 30 bp, Artificial Sequence
  Synthetic oligonucleotide
gctctttaacatgaaagtggttacagacgt

SEQ ID NO: 413255 - DNA, 30 bp, Artificial Sequence
  Synthetic oligonucleotide
tagggttgcttagaattcgtacccagacgt

SEQ ID NO: 413256 - DNA, 30 bp, Artificial Sequence
  Synthetic oligonucleotide
ttctctggaaacacgggtatcagcagacgt

SEQ ID NO: 413257 - DNA, 30 bp, Artificial Sequence
  Synthetic oligonucleotide
taggatcaatatccgactcggggcagacgt

SEQ ID NO: 413258 - DNA, 30 bp, Artificial Sequence
  Synthetic oligonucleotide
accctgaatagggattgcatcatgagacgt

SEQ ID NO: 413259 - DNA, 30 bp, Artificial Sequence
  Synthetic oligonucleotide
ttagcgcacttatgttacacccgtagacgt

SEQ ID NO: 413260 - DNA, 30 bp, Artificial Sequence
  Synthetic oligonucleotide
atccgttgctgataacgcattatacgacgt

SEQ ID NO: 413261 - DNA, 30 bp, Artificial Sequence
  Synthetic oligonucleotide
cagactctgtggaaaatcagttcccgacgt

SEQ ID NO: 413262 - DNA, 30 bp, Artificial Sequence
  Synthetic oligonucleotide
gaaagacattacccatctcatcagcgacgt

SEQ ID NO: 413263 - DNA, 30 bp, Artificial Sequence
  Synthetic oligonucleotide
cactatacctggtaggtagaaaatcgacgt

SEQ ID NO: 413264 - DNA, 30 bp, Artificial Sequence
  Synthetic oligonucleotide
aaagctcactgactccgaacgattcgacgt

SEQ ID NO: 413265 - DNA, 30 bp, Artificial Sequence
  Synthetic oligonucleotide
ttaagcatatcattacgaatgacaggacgt

SEQ ID NO: 413266 - DNA, 30 bp, Artificial Sequence
  Synthetic oligonucleotide
tagtcctgagtacctgtgtcatggggacgt

SEQ ID NO: 413267 - DNA, 30 bp, Artificial Sequence
  Synthetic oligonucleotide
gccgaactgtctcggctacacctgggacgt

SEQ ID NO: 413268 - DNA, 30 bp, Artificial Sequence
  Synthetic oligonucleotide
atccttcgtctcaggagggtacgtggacgt

SEQ ID NO: 413269 - DNA, 30 bp, Artificial Sequence
  Synthetic oligonucleotide
ctaacaggggtcgctcactagcgtggacgt

SEQ ID NO: 413270 - DNA, 30 bp, Artificial Sequence
  Synthetic oligonucleotide
gctctatggtaatgagaacgatttggacgt

SEQ ID NO: 413271 - DNA, 30 bp, Artificial Sequence
  Synthetic oligonucleotide
ctaagtctgaggatttcatgtgcatgacgt

SEQ ID NO: 413272 - DNA, 30 bp, Artificial Sequence
  Synthetic oligonucleotide
taggatacgaggtgaaaccacttatgacgt

SEQ ID NO: 413273 - DNA, 30 bp, Artificial Sequence
  Synthetic oligonucleotide
ctttcccctcatgatcggaataactgacgt

SEQ ID NO: 413274 - DNA, 30 bp, Artificial Sequence
  Synthetic oligonucleotide
catttcactgcggggacttaagtctgacgt

SEQ ID NO: 413275 - DNA, 30 bp, Artificial Sequence
  Synthetic oligonucleotide
gagttccagggtaagcacttaccgtgacgt

SEQ ID NO: 413276 - DNA, 30 bp, Artificial Sequence
  Synthetic oligonucleotide
gcatttagttgagtgtggtacccaatacgt

SEQ ID NO: 413277 - DNA, 30 bp, Artificial Sequence
  Synthetic oligonucleotide
gaaaatgcgaatgaagcatgtgtaatacgt

SEQ ID NO: 413278 - DNA, 30 bp, Artificial Sequence
  Synthetic oligonucleotide
gccaacaaaggttattgagaaaacatacgt

SEQ ID NO: 413279 - DNA, 30 bp, Artificial Sequence
  Synthetic oligonucleotide
gaccctcctgtaaaatctggctacatacgt

SEQ ID NO: 413280 - DNA, 30 bp, Artificial Sequence
  Synthetic oligonucleotide
ttgcgaaattaacgggttcataatatacgt

SEQ ID NO: 413281 - DNA, 30 bp, Artificial Sequence
  Synthetic oligonucleotide
agcaggccgtgtatggaggaatatatacgt

SEQ ID NO: 413282 - DNA, 30 bp, Artificial Sequence
  Synthetic oligonucleotide
ggttagctactaaaggtagactgactacgt

SEQ ID NO: 413283 - DNA, 30 bp, Artificial Sequence
  Synthetic oligonucleotide
aagtctatcggccctactcgactactacgt

SEQ ID NO: 413284 - DNA, 30 bp, Artificial Sequence
  Synthetic oligonucleotide
gcacagaaggtccacactcgggagctacgt

SEQ ID NO: 413285 - DNA, 30 bp, Artificial Sequence
  Synthetic oligonucleotide
gcgtgttatattccgaggacaccgctacgt

SEQ ID NO: 413286 - DNA, 30 bp, Artificial Sequence
  Synthetic oligonucleotide
accttgtaatttataacggaagggctacgt

SEQ ID NO: 413287 - DNA, 30 bp, Artificial Sequence
  Synthetic oligonucleotide
ttttacaactcttggaccccgctgctacgt

SEQ ID NO: 413288 - DNA, 30 bp, Artificial Sequence
  Synthetic oligonucleotide
ttcaaacttgttctaaacggctccgtacgt

SEQ ID NO: 413289 - DNA, 30 bp, Artificial Sequence
  Synthetic oligonucleotide
aggagtactagactgcagcttttggtacgt

SEQ ID NO: 413290 - DNA, 30 bp, Artificial Sequence
  Synthetic oligonucleotide
ttagggatactacaagctctaaaattacgt

SEQ ID NO: 413291 - DNA, 30 bp, Artificial Sequence
  Synthetic oligonucleotide
tgtatcttcgtataaatctgtaaattacgt

SEQ ID NO: 413292 - DNA, 30 bp, Artificial Sequence
  Synthetic oligonucleotide
aagcaactacttggccttcaacaattacgt

SEQ ID NO: 413293 - DNA, 30 bp, Artificial Sequence
  Synthetic oligonucleotide
tgcaaagtgctattaatagaggcattacgt

SEQ ID NO: 413294 - DNA, 30 bp, Artificial Sequence
  Synthetic oligonucleotide
cattaatgtgttttacgattcagattacgt

SEQ ID NO: 413295 - DNA, 30 bp, Artificial Sequence
  Synthetic oligonucleotide
actgaaaaaagcgttccgatgttattacgt

SEQ ID NO: 413296 - DNA, 30 bp, Artificial Sequence
  Synthetic oligonucleotide
ctgagtctggtctaaagtattttgttacgt

SEQ ID NO: 413297 - DNA, 30 bp, Artificial Sequence
  Synthetic oligonucleotide
ttctgatagttccgacggttttatttacgt

SEQ ID NO: 413298 - DNA, 30 bp, Artificial Sequence
  Synthetic oligonucleotide
cgggtaaatgatgttcattaatttttacgt

SEQ ID NO: 413299 - DNA, 30 bp, Artificial Sequence
  Synthetic oligonucleotide
aaaggcggcctgtgccgggactaaaaccgt

SEQ ID NO: 413300 - DNA, 30 bp, Artificial Sequence
  Synthetic oligonucleotide
atccatagacgtgagcgaaagctcaaccgt

SEQ ID NO: 413301 - DNA, 30 bp, Artificial Sequence
  Synthetic oligonucleotide
acatatgttattctgtccagggtcaaccgt

SEQ ID NO: 413302 - DNA, 31 bp, Artificial Sequence
  Synthetic oligonucleotide
aaagcgtgcaaacaaagcttttaagaaccgt

SEQ ID NO: 413303 - DNA, 30 bp, Artificial Sequence
  Synthetic oligonucleotide
gtttccctaattaaccccgaccagaaccgt

SEQ ID NO: 413304 - DNA, 30 bp, Artificial Sequence
  Synthetic oligonucleotide
gcttacagctagcggtgaggaacgaaccgt

SEQ ID NO: 413305 - DNA, 30 bp, Artificial Sequence
  Synthetic oligonucleotide
gggaaactcttttcggttgggatgaaccgt

SEQ ID NO: 413306 - DNA, 30 bp, Artificial Sequence
  Synthetic oligonucleotide
agtatgggcttgcaggatggatataaccgt

SEQ ID NO: 413307 - DNA, 30 bp, Artificial Sequence
  Synthetic oligonucleotide
ctatatcggcaatatgggggttagcaccgt

SEQ ID NO: 413308 - DNA, 30 bp, Artificial Sequence
  Synthetic oligonucleotide
atcaaccagcatccgcgatacaatcaccgt

SEQ ID NO: 413309 - DNA, 30 bp, Artificial Sequence
  Synthetic oligonucleotide
cgccagaatttgcaggaacctaatcaccgt

SEQ ID NO: 413310 - DNA, 30 bp, Artificial Sequence
  Synthetic oligonucleotide
aaagctaggctgtcgtcctgcatagaccgt

SEQ ID NO: 413311 - DNA, 30 bp, Artificial Sequence
  Synthetic oligonucleotide
taacaggtccgatttaactacccggaccgt

SEQ ID NO: 413312 - DNA, 30 bp, Artificial Sequence
  Synthetic oligonucleotide
aacacgccaccgacgcgtgggccggaccgt

SEQ ID NO: 413313 - DNA, 30 bp, Artificial Sequence
  Synthetic oligonucleotide
acctcactatacgtagcgaatactgaccgt

SEQ ID NO: 413314 - DNA, 30 bp, Artificial Sequence
  Synthetic oligonucleotide
cgatgttgggatcggaccctacttgaccgt

SEQ ID NO: 413315 - DNA, 30 bp, Artificial Sequence
  Synthetic oligonucleotide
catatcttgccgataagtcaattataccgt

SEQ ID NO: 413316 - DNA, 30 bp, Artificial Sequence
  Synthetic oligonucleotide
tcggcaacgttgtacaacaaactctaccgt

SEQ ID NO: 413317 - DNA, 30 bp, Artificial Sequence
  Synthetic oligonucleotide
gtgtggagcagctttcgatcgccgtaccgt

SEQ ID NO: 413318 - DNA, 30 bp, Artificial Sequence
  Synthetic oligonucleotide
gttatcgctcgaatggataacacttaccgt

SEQ ID NO: 413319 - DNA, 30 bp, Artificial Sequence
  Synthetic oligonucleotide
gtacgtgggcacccagggtctccaacccgt

SEQ ID NO: 413320 - DNA, 30 bp, Artificial Sequence
  Synthetic oligonucleotide
actaattaatgggtttcaccaagaacccgt

SEQ ID NO: 413321 - DNA, 30 bp, Artificial Sequence
  Synthetic oligonucleotide
acaatggtaaaatccgtagatagaacccgt

SEQ ID NO: 413322 - DNA, 30 bp, Artificial Sequence
  Synthetic oligonucleotide
tcatttaccggtagtgaatgtggaacccgt

SEQ ID NO: 413323 - DNA, 30 bp, Artificial Sequence
  Synthetic oligonucleotide
ggccggatggggaaagaggcgagcacccgt

SEQ ID NO: 413324 - DNA, 30 bp, Artificial Sequence
  Synthetic oligonucleotide
gatgaccgaagtcaagaatgctggacccgt

SEQ ID NO: 413325 - DNA, 30 bp, Artificial Sequence
  Synthetic oligonucleotide
cctcaaccgcacagtttcggtgatacccgt

SEQ ID NO: 413326 - DNA, 30 bp, Artificial Sequence
  Synthetic oligonucleotide
atctgggttcggcgagacaattatacccgt

SEQ ID NO: 413327 - DNA, 30 bp, Artificial Sequence
  Synthetic oligonucleotide
tgtcacggacaccagttcggtgcaccccgt

SEQ ID NO: 413328 - DNA, 30 bp, Artificial Sequence
  Synthetic oligonucleotide
gacgggtcttccaagaaatttgcaccccgt

SEQ ID NO: 413329 - DNA, 30 bp, Artificial Sequence
  Synthetic oligonucleotide
aaaacaaatcaagtgttgttatctccccgt

SEQ ID NO: 413330 - DNA, 30 bp, Artificial Sequence
  Synthetic oligonucleotide
ctcgaggcgttgtacgagagacttccccgt

SEQ ID NO: 413331 - DNA, 30 bp, Artificial Sequence
  Synthetic oligonucleotide
gcccacgtcggtgagcagcgtgaagcccgt

SEQ ID NO: 413332 - DNA, 30 bp, Artificial Sequence
  Synthetic oligonucleotide
ccaattgacagcgcacaagaaaacgcccgt

SEQ ID NO: 413333 - DNA, 30 bp, Artificial Sequence
  Synthetic oligonucleotide
atgccgttaacctgattggcgccggcccgt

SEQ ID NO: 413334 - DNA, 30 bp, Artificial Sequence
  Synthetic oligonucleotide
gtccctacatttctggaaacgcttgcccgt

SEQ ID NO: 413335 - DNA, 30 bp, Artificial Sequence
  Synthetic oligonucleotide
cgccgctgcaggacaggtccccaatcccgt

SEQ ID NO: 413336 - DNA, 30 bp, Artificial Sequence
  Synthetic oligonucleotide
cgaccaacgggaaacgaaagtgaatcccgt

SEQ ID NO: 413337 - DNA, 30 bp, Artificial Sequence
  Synthetic oligonucleotide
cttaggttactcccactcctggcatcccgt

SEQ ID NO: 413338 - DNA, 30 bp, Artificial Sequence
  Synthetic oligonucleotide
tgggtgacgcccgctgttcccggatcccgt

SEQ ID NO: 413339 - DNA, 30 bp, Artificial Sequence
  Synthetic oligonucleotide
caacagcgcttcaggttatacgaaagccgt

SEQ ID NO: 413340 - DNA, 30 bp, Artificial Sequence
  Synthetic oligonucleotide
aaagctagacactacttaatagccagccgt

SEQ ID NO: 413341 - DNA, 30 bp, Artificial Sequence
  Synthetic oligonucleotide
tgagccattttcgagtatcacatcagccgt

SEQ ID NO: 413342 - DNA, 30 bp, Artificial Sequence
  Synthetic oligonucleotide
ctcgcttcccacgtctaagcaaagagccgt

SEQ ID NO: 413343 - DNA, 30 bp, Artificial Sequence
  Synthetic oligonucleotide
tatagttttaccgttctaacaatgagccgt

SEQ ID NO: 413344 - DNA, 29 bp, Artificial Sequence
  Synthetic oligonucleotide
ctaatcttagactagatcggctgagccgt

SEQ ID NO: 413345 - DNA, 30 bp, Artificial Sequence
  Synthetic oligonucleotide
tgttacagttgctgcatagacgtgagccgt

SEQ ID NO: 413346 - DNA, 30 bp, Artificial Sequence
  Synthetic oligonucleotide
ttgcctggtatcaagtgccttttgagccgt

SEQ ID NO: 413347 - DNA, 30 bp, Artificial Sequence
  Synthetic oligonucleotide
gcatcaggggcgttcttctaaaatagccgt

SEQ ID NO: 413348 - DNA, 30 bp, Artificial Sequence
  Synthetic oligonucleotide
tattcagaacgaaatacgcgatatagccgt

SEQ ID NO: 413349 - DNA, 30 bp, Artificial Sequence
  Synthetic oligonucleotide
ggtaaactgcgtgatagtatcggtagccgt

SEQ ID NO: 413350 - DNA, 30 bp, Artificial Sequence
  Synthetic oligonucleotide
gccattgctgcaggtgcttgcatacgccgt

SEQ ID NO: 413351 - DNA, 30 bp, Artificial Sequence
  Synthetic oligonucleotide
cgtcgtttctgactaagcactgcccgccgt

SEQ ID NO: 413352 - DNA, 30 bp, Artificial Sequence
  Synthetic oligonucleotide
tccccacgattggatgtcgacacgcgccgt

SEQ ID NO: 413353 - DNA, 30 bp, Artificial Sequence
  Synthetic oligonucleotide
gcactatttgcggggggaagaccgcgccgt

SEQ ID NO: 413354 - DNA, 30 bp, Artificial Sequence
  Synthetic oligonucleotide
aatatgaaaacacaattgactcttcgccgt

SEQ ID NO: 413355 - DNA, 30 bp, Artificial Sequence
  Synthetic oligonucleotide
gaacgttgaatagtggggtattcaggccgt

SEQ ID NO: 413356 - DNA, 30 bp, Artificial Sequence
  Synthetic oligonucleotide
tgtttgacagattccgtcgacgggtgccgt

SEQ ID NO: 413357 - DNA, 30 bp, Artificial Sequence
  Synthetic oligonucleotide
atagtacctttctcagaggctctaatccgt

SEQ ID NO: 413358 - DNA, 30 bp, Artificial Sequence
  Synthetic oligonucleotide
gattcgaattgtactcttctcgtaatccgt

SEQ ID NO: 413359 - DNA, 30 bp, Artificial Sequence
  Synthetic oligonucleotide
gggccaaaagtttcagttaggcacatccgt

SEQ ID NO: 413360 - DNA, 30 bp, Artificial Sequence
  Synthetic oligonucleotide
gctccgaccgggtccatctctagcatccgt

SEQ ID NO: 413361 - DNA, 30 bp, Artificial Sequence
  Synthetic oligonucleotide
acgcgtgttgccctgctctgacgcatccgt

SEQ ID NO: 413362 - DNA, 30 bp, Artificial Sequence
  Synthetic oligonucleotide
gtcgttgtctctgcaaatttttagatccgt

SEQ ID NO: 413363 - DNA, 30 bp, Artificial Sequence
  Synthetic oligonucleotide
atatagagagtacaacaattgtggatccgt

SEQ ID NO: 413364 - DNA, 30 bp, Artificial Sequence
  Synthetic oligonucleotide
ggttacgggtggcatattaggttgatccgt

SEQ ID NO: 413365 - DNA, 30 bp, Artificial Sequence
  Synthetic oligonucleotide
aagtctagtcttccgttgagttcactccgt

SEQ ID NO: 413366 - DNA, 30 bp, Artificial Sequence
  Synthetic oligonucleotide
tcttattgtacgagatcactagtcctccgt

SEQ ID NO: 413367 - DNA, 30 bp, Artificial Sequence
  Synthetic oligonucleotide
caaatcttgtaagactggttcccgctccgt

SEQ ID NO: 413368 - DNA, 30 bp, Artificial Sequence
  Synthetic oligonucleotide
aaaaccggactgatccgtattgcgctccgt

SEQ ID NO: 413369 - DNA, 30 bp, Artificial Sequence
  Synthetic oligonucleotide
gaaacagcgtggtggtaaatggtgctccgt

SEQ ID NO: 413370 - DNA, 30 bp, Artificial Sequence
  Synthetic oligonucleotide
tgtatctggtcaggtccacctccagtccgt

SEQ ID NO: 413371 - DNA, 30 bp, Artificial Sequence
  Synthetic oligonucleotide
tgtagatgcatttcttaaatacaggtccgt

SEQ ID NO: 413372 - DNA, 30 bp, Artificial Sequence
  Synthetic oligonucleotide
acaacattttggagtatccgattggtccgt

SEQ ID NO: 413373 - DNA, 30 bp, Artificial Sequence
  Synthetic oligonucleotide
gaattatcgggaggatgaatccgtgtccgt

SEQ ID NO: 413374 - DNA, 30 bp, Artificial Sequence
  Synthetic oligonucleotide
cccgagttatcacaggtcattcgtgtccgt

SEQ ID NO: 413375 - DNA, 30 bp, Artificial Sequence
  Synthetic oligonucleotide
atccgccctgtaaaggattcgagattccgt

SEQ ID NO: 413376 - DNA, 30 bp, Artificial Sequence
  Synthetic oligonucleotide
actttatacatcttgtcgattcgcttccgt

SEQ ID NO: 413377 - DNA, 30 bp, Artificial Sequence
  Synthetic oligonucleotide
tcggaaactgtgtttctctgagttttccgt

SEQ ID NO: 413378 - DNA, 30 bp, Artificial Sequence
  Synthetic oligonucleotide
ttctactggaatttgtttcgctgcaagcgt

SEQ ID NO: 413379 - DNA, 30 bp, Artificial Sequence
  Synthetic oligonucleotide
taccttacccgcatgacgtccgtcaagcgt

SEQ ID NO: 413380 - DNA, 30 bp, Artificial Sequence
  Synthetic oligonucleotide
tctcacctttattttgggataactaagcgt

SEQ ID NO: 413381 - DNA, 30 bp, Artificial Sequence
  Synthetic oligonucleotide
ttaagtacgaaatgaattttatctaagcgt

SEQ ID NO: 413382 - DNA, 30 bp, Artificial Sequence
  Synthetic oligonucleotide
tatgacatgacaggaagtttgagtaagcgt

SEQ ID NO: 413383 - DNA, 30 bp, Artificial Sequence
  Synthetic oligonucleotide
agagttatgctactattttattgtaagcgt

SEQ ID NO: 413384 - DNA, 30 bp, Artificial Sequence
  Synthetic oligonucleotide
ttatgatatcggagttcttatttacagcgt

SEQ ID NO: 413385 - DNA, 30 bp, Artificial Sequence
  Synthetic oligonucleotide
gtcgttgtatactttgttgtaacccagcgt

SEQ ID NO: 413386 - DNA, 30 bp, Artificial Sequence
  Synthetic oligonucleotide
taaaggccactacaaaatgccatccagcgt

SEQ ID NO: 413387 - DNA, 30 bp, Artificial Sequence
  Synthetic oligonucleotide
aatccagacaccatgtacggcgagcagcgt

SEQ ID NO: 413388 - DNA, 30 bp, Artificial Sequence
  Synthetic oligonucleotide
ggtatcttttgagtacagatatcgcagcgt

SEQ ID NO: 413389 - DNA, 30 bp, Artificial Sequence
  Synthetic oligonucleotide
agtcgcagccgcggttccaacctgcagcgt

SEQ ID NO: 413390 - DNA, 30 bp, Artificial Sequence
  Synthetic oligonucleotide
ttcaatgtatccggcatcatattgcagcgt

SEQ ID NO: 413391 - DNA, 30 bp, Artificial Sequence
  Synthetic oligonucleotide
gtgtctagggctaaaatagttactcagcgt

SEQ ID NO: 413392 - DNA, 30 bp, Artificial Sequence
  Synthetic oligonucleotide
gatggttctttgcccgccgtacgtcagcgt

SEQ ID NO: 413393 - DNA, 30 bp, Artificial Sequence
  Synthetic oligonucleotide
tacaattcataagcatgatgcaaagagcgt

SEQ ID NO: 413394 - DNA, 30 bp, Artificial Sequence
  Synthetic oligonucleotide
atcaagccctagcgtgactctagagagcgt

SEQ ID NO: 413395 - DNA, 30 bp, Artificial Sequence
  Synthetic oligonucleotide
atatttggtgggcgtaaccgggaggagcgt

SEQ ID NO: 413396 - DNA, 30 bp, Artificial Sequence
  Synthetic oligonucleotide
ggttccgacaaaaggtattgatcctagcgt

SEQ ID NO: 413397 - DNA, 30 bp, Artificial Sequence
  Synthetic oligonucleotide
tagccttcggtggacagtagttcgtagcgt

SEQ ID NO: 413398 - DNA, 30 bp, Artificial Sequence
  Synthetic oligonucleotide
ggccgactcccgtggggtaccaggtagcgt

SEQ ID NO: 413399 - DNA, 30 bp, Artificial Sequence
  Synthetic oligonucleotide
gagtgataaactaggtagcctatttagcgt

SEQ ID NO: 413400 - DNA, 30 bp, Artificial Sequence
  Synthetic oligonucleotide
tgtccccgcaaaggatgccctttttagcgt

SEQ ID NO: 413401 - DNA, 30 bp, Artificial Sequence
  Synthetic oligonucleotide
ctggatgcaacagataatttgaagacgcgt

SEQ ID NO: 413402 - DNA, 30 bp, Artificial Sequence
  Synthetic oligonucleotide
gtatatttaagctgacattaagggacgcgt

SEQ ID NO: 413403 - DNA, 30 bp, Artificial Sequence
  Synthetic oligonucleotide
tgaatgtttattcaccattgttaaccgcgt

SEQ ID NO: 413404 - DNA, 30 bp, Artificial Sequence
  Synthetic oligonucleotide
cctggcatgttctgcacgatcctaccgcgt

SEQ ID NO: 413405 - DNA, 30 bp, Artificial Sequence
  Synthetic oligonucleotide
ccgtcctcctgttatccgggaggcccgcgt

SEQ ID NO: 413406 - DNA, 30 bp, Artificial Sequence
  Synthetic oligonucleotide
accggctatttgtggctggtaatcccgcgt

SEQ ID NO: 413407 - DNA, 30 bp, Artificial Sequence
  Synthetic oligonucleotide
gcacagattggtatggtttcatcgccgcgt

SEQ ID NO: 413408 - DNA, 30 bp, Artificial Sequence
  Synthetic oligonucleotide
cggatggtccattgagaggttcggccgcgt

SEQ ID NO: 413409 - DNA, 30 bp, Artificial Sequence
  Synthetic oligonucleotide
gtataggtcattggagatttacgagcgcgt

SEQ ID NO: 413410 - DNA, 30 bp, Artificial Sequence
  Synthetic oligonucleotide
tcgtactattgtcaggacttccacgcgcgt

SEQ ID NO: 413411 - DNA, 30 bp, Artificial Sequence
  Synthetic oligonucleotide
ttcccctcacccgtaggggggacggcgcgt

SEQ ID NO: 413412 - DNA, 30 bp, Artificial Sequence
  Synthetic oligonucleotide
gaaaaatcggcggagattgccgaatcgcgt

SEQ ID NO: 413413 - DNA, 30 bp, Artificial Sequence
  Synthetic oligonucleotide
agcgatatggttgacaacgctacatcgcgt

SEQ ID NO: 413414 - DNA, 30 bp, Artificial Sequence
  Synthetic oligonucleotide
aatttaatatagttattgctttcctcgcgt

SEQ ID NO: 413415 - DNA, 30 bp, Artificial Sequence
  Synthetic oligonucleotide
ctaacagcggccgtacgggggcgctcgcgt

SEQ ID NO: 413416 - DNA, 30 bp, Artificial Sequence
  Synthetic oligonucleotide
gggcgacgcggggtgactaacatctcgcgt

SEQ ID NO: 413417 - DNA, 30 bp, Artificial Sequence
  Synthetic oligonucleotide
tggtcggtcggggtcaccccgtcgtcgcgt

SEQ ID NO: 413418 - DNA, 30 bp, Artificial Sequence
  Synthetic oligonucleotide
taaggtgatgcctcatacgtgaggtcgcgt

SEQ ID NO: 413419 - DNA, 30 bp, Artificial Sequence
  Synthetic oligonucleotide
ggaaggtccttcgaaattgtgtacaggcgt

SEQ ID NO: 413420 - DNA, 30 bp, Artificial Sequence
  Synthetic oligonucleotide
ttcgacccatgacagcatcaggtcaggcgt

SEQ ID NO: 413421 - DNA, 30 bp, Artificial Sequence
  Synthetic oligonucleotide
atatggctctgacatacaccggagaggcgt

SEQ ID NO: 413422 - DNA, 30 bp, Artificial Sequence
  Synthetic oligonucleotide
aattgcaccggaatatattgttctcggcgt

SEQ ID NO: 413423 - DNA, 30 bp, Artificial Sequence
  Synthetic oligonucleotide
caattgttgggggagatatcccttcggcgt

SEQ ID NO: 413424 - DNA, 30 bp, Artificial Sequence
  Synthetic oligonucleotide
ttaactgtcctgaagtgacatacagggcgt

SEQ ID NO: 413425 - DNA, 30 bp, Artificial Sequence
  Synthetic oligonucleotide
caatgatcccagctgactggtaaatggcgt

SEQ ID NO: 413426 - DNA, 30 bp, Artificial Sequence
  Synthetic oligonucleotide
attcaagtgtaagacttgaaggcatggcgt

SEQ ID NO: 413427 - DNA, 30 bp, Artificial Sequence
  Synthetic oligonucleotide
tggcttcagtccccgcgcgttatatggcgt

SEQ ID NO: 413428 - DNA, 30 bp, Artificial Sequence
  Synthetic oligonucleotide
atatctgtagcaaagttacgacgctggcgt

SEQ ID NO: 413429 - DNA, 30 bp, Artificial Sequence
  Synthetic oligonucleotide
tagcgggaatctgtgagtctcttgtggcgt

SEQ ID NO: 413430 - DNA, 30 bp, Artificial Sequence
  Synthetic oligonucleotide
gaggatagcgccttgctcatacattggcgt

SEQ ID NO: 413431 - DNA, 30 bp, Artificial Sequence
  Synthetic oligonucleotide
gtatttttatacggatgtgagtattggcgt

SEQ ID NO: 413432 - DNA, 30 bp, Artificial Sequence
  Synthetic oligonucleotide
cctaagaatcccaggacatctacttggcgt

SEQ ID NO: 413433 - DNA, 30 bp, Artificial Sequence
  Synthetic oligonucleotide
ctctgggggttccatgataggggaatgcgt

SEQ ID NO: 413434 - DNA, 30 bp, Artificial Sequence
  Synthetic oligonucleotide
aaatctaactactaccgtactaagatgcgt

SEQ ID NO: 413435 - DNA, 30 bp, Artificial Sequence
  Synthetic oligonucleotide
accaaattgcttgaagtcaccgatatgcgt

SEQ ID NO: 413436 - DNA, 30 bp, Artificial Sequence
  Synthetic oligonucleotide
atcatgcaacttgcggataatggtatgcgt

SEQ ID NO: 413437 - DNA, 30 bp, Artificial Sequence
  Synthetic oligonucleotide
gtatgatattgactccattgttgtatgcgt

SEQ ID NO: 413438 - DNA, 30 bp, Artificial Sequence
  Synthetic oligonucleotide
tactagctggcgattggggtacacctgcgt

SEQ ID NO: 413439 - DNA, 30 bp, Artificial Sequence
  Synthetic oligonucleotide
aggtcggtctttgtagctttttagctgcgt

SEQ ID NO: 413440 - DNA, 30 bp, Artificial Sequence
  Synthetic oligonucleotide
gactttgagttcgttcggtgaagagtgcgt

SEQ ID NO: 413441 - DNA, 30 bp, Artificial Sequence
  Synthetic oligonucleotide
gcctccagcacgcgattctgcatagtgcgt

SEQ ID NO: 413442 - DNA, 30 bp, Artificial Sequence
  Synthetic oligonucleotide
acaaagtggttagactcggtattcgtgcgt

SEQ ID NO: 413443 - DNA, 30 bp, Artificial Sequence
  Synthetic oligonucleotide
ccatggaaattggttaatgccccggtgcgt

SEQ ID NO: 413444 - DNA, 30 bp, Artificial Sequence
  Synthetic oligonucleotide
tggagagattccaccccgcaaagggtgcgt

SEQ ID NO: 413445 - DNA, 30 bp, Artificial Sequence
  Synthetic oligonucleotide
tcataatatagtggtctatcacgggtgcgt

SEQ ID NO: 413446 - DNA, 30 bp, Artificial Sequence
  Synthetic oligonucleotide
agctgacgcggaatttcgacagatgtgcgt

SEQ ID NO: 413447 - DNA, 30 bp, Artificial Sequence
  Synthetic oligonucleotide
tgcgcaacctcatgaatttctgctgtgcgt

SEQ ID NO: 413448 - DNA, 30 bp, Artificial Sequence
  Synthetic oligonucleotide
ggaatatgtggggaaactagccttgtgcgt

SEQ ID NO: 413449 - DNA, 30 bp, Artificial Sequence
  Synthetic oligonucleotide
cttgtgtaagattcctttctgcccttgcgt

SEQ ID NO: 413450 - DNA, 30 bp, Artificial Sequence
  Synthetic oligonucleotide
accgtcggcgcctccatgaaacgcttgcgt

SEQ ID NO: 413451 - DNA, 30 bp, Artificial Sequence
  Synthetic oligonucleotide
gggtattgaacgattaaactgcgcttgcgt

SEQ ID NO: 413452 - DNA, 30 bp, Artificial Sequence
  Synthetic oligonucleotide
tcggttactaccgcacccgtgtagttgcgt

SEQ ID NO: 413453 - DNA, 30 bp, Artificial Sequence
  Synthetic oligonucleotide
ttcagacctctcaatgagtggaggttgcgt

SEQ ID NO: 413454 - DNA, 30 bp, Artificial Sequence
  Synthetic oligonucleotide
tgccgtgtcactaataaatgtgtgttgcgt

SEQ ID NO: 413455 - DNA, 30 bp, Artificial Sequence
  Synthetic oligonucleotide
agacaaattcaacatttgcgacttttgcgt

SEQ ID NO: 413456 - DNA, 30 bp, Artificial Sequence
  Synthetic oligonucleotide
gctattgggagcagacaggcagttttgcgt

SEQ ID NO: 413457 - DNA, 30 bp, Artificial Sequence
  Synthetic oligonucleotide
tacattgcagacggataactgctcaatcgt

SEQ ID NO: 413458 - DNA, 30 bp, Artificial Sequence
  Synthetic oligonucleotide
ggggtcgggaatgggcggtatttcaatcgt

SEQ ID NO: 413459 - DNA, 30 bp, Artificial Sequence
  Synthetic oligonucleotide
caaatgggtgtcaactgttgggagaatcgt

SEQ ID NO: 413460 - DNA, 30 bp, Artificial Sequence
  Synthetic oligonucleotide
gaaggccttacatggagtcagccgaatcgt

SEQ ID NO: 413461 - DNA, 30 bp, Artificial Sequence
  Synthetic oligonucleotide
cgtaggaacgttccgaaaatactgaatcgt

SEQ ID NO: 413462 - DNA, 30 bp, Artificial Sequence
  Synthetic oligonucleotide
cggagtctttgatggtcaggtggtaatcgt

SEQ ID NO: 413463 - DNA, 30 bp, Artificial Sequence
  Synthetic oligonucleotide
tagttagggacacgtggatgccaacatcgt

SEQ ID NO: 413464 - DNA, 30 bp, Artificial Sequence
  Synthetic oligonucleotide
aagagactagcgttacgtcttcaacatcgt

SEQ ID NO: 413465 - DNA, 30 bp, Artificial Sequence
  Synthetic oligonucleotide
gtataacaaccggtgtatatataacatcgt

SEQ ID NO: 413466 - DNA, 30 bp, Artificial Sequence
  Synthetic oligonucleotide
ttgtcagagaaactccctggttcccatcgt

SEQ ID NO: 413467 - DNA, 30 bp, Artificial Sequence
  Synthetic oligonucleotide
gcgggggatacgatcaaaccacgccatcgt

SEQ ID NO: 413468 - DNA, 30 bp, Artificial Sequence
  Synthetic oligonucleotide
tttcatagaagggccttctacatccatcgt

SEQ ID NO: 413469 - DNA, 30 bp, Artificial Sequence
  Synthetic oligonucleotide
caaaattgccttgattggggcgagcatcgt

SEQ ID NO: 413470 - DNA, 30 bp, Artificial Sequence
  Synthetic oligonucleotide
ttgtaccaggtgaactgtgccgcagatcgt

SEQ ID NO: 413471 - DNA, 30 bp, Artificial Sequence
  Synthetic oligonucleotide
gtctagggcgagttaggtattatagatcgt

SEQ ID NO: 413472 - DNA, 30 bp, Artificial Sequence
  Synthetic oligonucleotide
tcactcattgttaggcttcgccaggatcgt

SEQ ID NO: 413473 - DNA, 30 bp, Artificial Sequence
  Synthetic oligonucleotide
gtgttggggcccttggctatgcgggatcgt

SEQ ID NO: 413474 - DNA, 30 bp, Artificial Sequence
  Synthetic oligonucleotide
gatgacggggataggtcaactggggatcgt

SEQ ID NO: 413475 - DNA, 30 bp, Artificial Sequence
  Synthetic oligonucleotide
aggaggagcgacgtaacatttgtggatcgt

SEQ ID NO: 413476 - DNA, 30 bp, Artificial Sequence
  Synthetic oligonucleotide
gcaggcacaccgagccccgggatatatcgt

SEQ ID NO: 413477 - DNA, 30 bp, Artificial Sequence
  Synthetic oligonucleotide
cgttgagtagggtgacttttactatatcgt

SEQ ID NO: 413478 - DNA, 30 bp, Artificial Sequence
  Synthetic oligonucleotide
aaaaaccaattgaaagtaagatcctatcgt

SEQ ID NO: 413479 - DNA, 30 bp, Artificial Sequence
  Synthetic oligonucleotide
tacaatactgctcgttaagagctgtatcgt

SEQ ID NO: 413480 - DNA, 30 bp, Artificial Sequence
  Synthetic oligonucleotide
attggccttcacatatcttgtcgttatcgt

SEQ ID NO: 413481 - DNA, 29 bp, Artificial Sequence
  Synthetic oligonucleotide
gccgcaaaaaacgaattgcttcaactcgt

SEQ ID NO: 413482 - DNA, 30 bp, Artificial Sequence
  Synthetic oligonucleotide
acgctatgttaccatctaccttggactcgt

SEQ ID NO: 413483 - DNA, 30 bp, Artificial Sequence
  Synthetic oligonucleotide
caaaggggctatatggtttagctacctcgt

SEQ ID NO: 413484 - DNA, 30 bp, Artificial Sequence
  Synthetic oligonucleotide
atcaacttacacttgcccttgcaccctcgt

SEQ ID NO: 413485 - DNA, 30 bp, Artificial Sequence
  Synthetic oligonucleotide
attccagtccagtcttggtgtatccctcgt

SEQ ID NO: 413486 - DNA, 30 bp, Artificial Sequence
  Synthetic oligonucleotide
aggaactcacatagttaatactggcctcgt

SEQ ID NO: 413487 - DNA, 30 bp, Artificial Sequence
  Synthetic oligonucleotide
aggccgggtacagtgctacgctggcctcgt

SEQ ID NO: 413488 - DNA, 30 bp, Artificial Sequence
  Synthetic oligonucleotide
aataggtttggatcatcgtagactcctcgt

SEQ ID NO: 413489 - DNA, 30 bp, Artificial Sequence
  Synthetic oligonucleotide
tataggaaggagcccgacgctttcgctcgt

SEQ ID NO: 413490 - DNA, 30 bp, Artificial Sequence
  Synthetic oligonucleotide
gaaatttggtgccaactggccagggctcgt

SEQ ID NO: 413491 - DNA, 30 bp, Artificial Sequence
  Synthetic oligonucleotide
gaagttaacctactggggtctattgctcgt

SEQ ID NO: 413492 - DNA, 30 bp, Artificial Sequence
  Synthetic oligonucleotide
accttggcagtgcggcgaacaaaatctcgt

SEQ ID NO: 413493 - DNA, 30 bp, Artificial Sequence
  Synthetic oligonucleotide
tgcaaggcaggaatcaacatcgaaagtcgt

SEQ ID NO: 413494 - DNA, 30 bp, Artificial Sequence
  Synthetic oligonucleotide
gaagccatcctattagtggccggccgtcgt

SEQ ID NO: 413495 - DNA, 30 bp, Artificial Sequence
  Synthetic oligonucleotide
ggtcctcctggacgctatattggccgtcgt

SEQ ID NO: 413496 - DNA, 30 bp, Artificial Sequence
  Synthetic oligonucleotide
agttaggaggacaacatcggctcgcgtcgt

SEQ ID NO: 413497 - DNA, 30 bp, Artificial Sequence
  Synthetic oligonucleotide
ccggttggatgctgttcgacttcgcgtcgt

SEQ ID NO: 413498 - DNA, 30 bp, Artificial Sequence
  Synthetic oligonucleotide
aatggagccttagttctcaagttcggtcgt

SEQ ID NO: 413499 - DNA, 30 bp, Artificial Sequence
  Synthetic oligonucleotide
cctcctctagccagcaagtgcacgggtcgt

SEQ ID NO: 413500 - DNA, 30 bp, Artificial Sequence
  Synthetic oligonucleotide
ggcaaaaatctggatggccaggtgggtcgt

SEQ ID NO: 413501 - DNA, 30 bp, Artificial Sequence
  Synthetic oligonucleotide
gtcggttgacccagtaagtgccctggtcgt

SEQ ID NO: 413502 - DNA, 30 bp, Artificial Sequence
  Synthetic oligonucleotide
ctccctaatggtaggtgtttaggtggtcgt

SEQ ID NO: 413503 - DNA, 30 bp, Artificial Sequence
  Synthetic oligonucleotide
aatttattgaaaggctatttcaaatgtcgt

SEQ ID NO: 413504 - DNA, 30 bp, Artificial Sequence
  Synthetic oligonucleotide
taccgcatgattctgttcccttaatgtcgt

SEQ ID NO: 413505 - DNA, 30 bp, Artificial Sequence
  Synthetic oligonucleotide
tgtgttatcttgactacgccaggctgtcgt

SEQ ID NO: 413506 - DNA, 30 bp, Artificial Sequence
  Synthetic oligonucleotide
taaaggccttccggaaggggtaggtgtcgt

SEQ ID NO: 413507 - DNA, 30 bp, Artificial Sequence
  Synthetic oligonucleotide
ggaacgcgtgcagaatatgatcaaattcgt

SEQ ID NO: 413508 - DNA, 30 bp, Artificial Sequence
  Synthetic oligonucleotide
ttgagtctaccgacggacggcctaattcgt

SEQ ID NO: 413509 - DNA, 30 bp, Artificial Sequence
  Synthetic oligonucleotide
tctatttaagacatagagtgagggattcgt

SEQ ID NO: 413510 - DNA, 30 bp, Artificial Sequence
  Synthetic oligonucleotide
ttctacgaaggtacaatgatggaacttcgt

SEQ ID NO: 413511 - DNA, 30 bp, Artificial Sequence
  Synthetic oligonucleotide
caacccgaagggctacatatctaacttcgt

SEQ ID NO: 413512 - DNA, 30 bp, Artificial Sequence
  Synthetic oligonucleotide
ttcgaactaaggtacccaccttaacttcgt

SEQ ID NO: 413513 - DNA, 30 bp, Artificial Sequence
  Synthetic oligonucleotide
gagaccgatggctatactatccgacttcgt

SEQ ID NO: 413514 - DNA, 30 bp, Artificial Sequence
  Synthetic oligonucleotide
atagcattcccgcctttcaagatccttcgt

SEQ ID NO: 413515 - DNA, 30 bp, Artificial Sequence
  Synthetic oligonucleotide
gttcaaggtaacagccagcggatccttcgt

SEQ ID NO: 413516 - DNA, 30 bp, Artificial Sequence
  Synthetic oligonucleotide
gtgttttgagtatcctggataaagcttcgt

SEQ ID NO: 413517 - DNA, 29 bp, Artificial Sequence
  Synthetic oligonucleotide
ctatagagtaatgcccacaatatcttcgt

SEQ ID NO: 413518 - DNA, 30 bp, Artificial Sequence
  Synthetic oligonucleotide
gttcgtgacgccggaaggtgaagtcttcgt

SEQ ID NO: 413519 - DNA, 30 bp, Artificial Sequence
  Synthetic oligonucleotide
tactgttaatttcaactatacatagttcgt

SEQ ID NO: 413520 - DNA, 30 bp, Artificial Sequence
  Synthetic oligonucleotide
ctgcggattctttattgaaaatgcgttcgt

SEQ ID NO: 413521 - DNA, 30 bp, Artificial Sequence
  Synthetic oligonucleotide
atgaatacctccgaaacagcattcgttcgt

SEQ ID NO: 413522 - DNA, 30 bp, Artificial Sequence
  Synthetic oligonucleotide
aatcaattgcggttttcgcgtgtggttcgt

SEQ ID NO: 413523 - DNA, 30 bp, Artificial Sequence
  Synthetic oligonucleotide
ggatcacttacgacccaatcacgatttcgt

SEQ ID NO: 413524 - DNA, 30 bp, Artificial Sequence
  Synthetic oligonucleotide
ccggtctctttaagggcgacactatttcgt

SEQ ID NO: 413525 - DNA, 30 bp, Artificial Sequence
  Synthetic oligonucleotide
taagaattagagcttgcggaagcaaaaggt

SEQ ID NO: 413526 - DNA, 30 bp, Artificial Sequence
  Synthetic oligonucleotide
gagcccgggggcttgtttaagataaaaggt

SEQ ID NO: 413527 - DNA, 30 bp, Artificial Sequence
  Synthetic oligonucleotide
tcctggtatgagtccttctaagtaaaaggt

SEQ ID NO: 413528 - DNA, 30 bp, Artificial Sequence
  Synthetic oligonucleotide
tgtgaccaaccctaatatggttggaaaggt

SEQ ID NO: 413529 - DNA, 30 bp, Artificial Sequence
  Synthetic oligonucleotide
gtaagtgcaggaatctatacgctgaaaggt

SEQ ID NO: 413530 - DNA, 30 bp, Artificial Sequence
  Synthetic oligonucleotide
ctggggcttaggttccccttggtgaaaggt

SEQ ID NO: 413531 - DNA, 30 bp, Artificial Sequence
  Synthetic oligonucleotide
agccacagcacttaaggcactacccaaggt

SEQ ID NO: 413532 - DNA, 30 bp, Artificial Sequence
  Synthetic oligonucleotide
gagattccaggattcgctattccccaaggt

SEQ ID NO: 413533 - DNA, 30 bp, Artificial Sequence
  Synthetic oligonucleotide
tactttttgtagcaacgatcgtggcaaggt

SEQ ID NO: 413534 - DNA, 30 bp, Artificial Sequence
  Synthetic oligonucleotide
ctccgcgctcggcctgttggcaaagaaggt

SEQ ID NO: 413535 - DNA, 30 bp, Artificial Sequence
  Synthetic oligonucleotide
ggtgggcagatgggctcacaataagaaggt

SEQ ID NO: 413536 - DNA, 30 bp, Artificial Sequence
  Synthetic oligonucleotide
atagcgttctaccgcggacaactagaaggt

SEQ ID NO: 413537 - DNA, 30 bp, Artificial Sequence
  Synthetic oligonucleotide
agcctccaataggtacccgcttacgaaggt

SEQ ID NO: 413538 - DNA, 30 bp, Artificial Sequence
  Synthetic oligonucleotide
ataacttaaggtccgagttggtcggaaggt

SEQ ID NO: 413539 - DNA, 30 bp, Artificial Sequence
  Synthetic oligonucleotide
ctgcattatgtgtttggtatactggaaggt

SEQ ID NO: 413540 - DNA, 30 bp, Artificial Sequence
  Synthetic oligonucleotide
gataaacagggtattatcagtacataaggt

SEQ ID NO: 413541 - DNA, 30 bp, Artificial Sequence
  Synthetic oligonucleotide
gcaatgctcccaaatcgggagttataaggt

SEQ ID NO: 413542 - DNA, 30 bp, Artificial Sequence
  Synthetic oligonucleotide
gcacaattgggtcgggattaaccctaaggt

SEQ ID NO: 413543 - DNA, 30 bp, Artificial Sequence
  Synthetic oligonucleotide
agtctgagaatcaacactacccagtaaggt

SEQ ID NO: 413544 - DNA, 30 bp, Artificial Sequence
  Synthetic oligonucleotide
atagatcccaggccgaaccctgcttaaggt

SEQ ID NO: 413545 - DNA, 30 bp, Artificial Sequence
  Synthetic oligonucleotide
cattgattctcagtaatgcaggtaacaggt

SEQ ID NO: 413546 - DNA, 30 bp, Artificial Sequence
  Synthetic oligonucleotide
ccattctataagacgggttcgaacacaggt

SEQ ID NO: 413547 - DNA, 30 bp, Artificial Sequence
  Synthetic oligonucleotide
atcgctgtctagccagcagggagcacaggt

SEQ ID NO: 413548 - DNA, 30 bp, Artificial Sequence
  Synthetic oligonucleotide
gcagttcgattgcctcggttcctcacaggt

SEQ ID NO: 413549 - DNA, 30 bp, Artificial Sequence
  Synthetic oligonucleotide
taggaatgtgtctagcactatgcgacaggt

SEQ ID NO: 413550 - DNA, 30 bp, Artificial Sequence
  Synthetic oligonucleotide
ttcgtttctattcggatatatgtgacaggt

SEQ ID NO: 413551 - DNA, 30 bp, Artificial Sequence
  Synthetic oligonucleotide
cctgagagactcagttaacgtagtacaggt

SEQ ID NO: 413552 - DNA, 30 bp, Artificial Sequence
  Synthetic oligonucleotide
gtcgggtgtgtttattggggccgtacaggt

SEQ ID NO: 413553 - DNA, 30 bp, Artificial Sequence
  Synthetic oligonucleotide
cttccatttaaggctccccaaaccccaggt

SEQ ID NO: 413554 - DNA, 30 bp, Artificial Sequence
  Synthetic oligonucleotide
gctactgggttggattgaataggcccaggt

SEQ ID NO: 413555 - DNA, 30 bp, Artificial Sequence
  Synthetic oligonucleotide
aatacattgacgtttccgcatgcgccaggt

SEQ ID NO: 413556 - DNA, 30 bp, Artificial Sequence
  Synthetic oligonucleotide
tagtagccgtcaacgctgaatctgccaggt

SEQ ID NO: 413557 - DNA, 30 bp, Artificial Sequence
  Synthetic oligonucleotide
ggaccgaggcgggtgtgccgggtgccaggt

SEQ ID NO: 413558 - DNA, 30 bp, Artificial Sequence
  Synthetic oligonucleotide
ctaattcatatagttgtgcgatttccaggt

SEQ ID NO: 413559 - DNA, 30 bp, Artificial Sequence
  Synthetic oligonucleotide
ctattcgcgagcaccagaacaccagcaggt

SEQ ID NO: 413560 - DNA, 30 bp, Artificial Sequence
  Synthetic oligonucleotide
tcgtgtctagacccgttcccgtcagcaggt

SEQ ID NO: 413561 - DNA, 30 bp, Artificial Sequence
  Synthetic oligonucleotide
acactcgcgtgatcaggcgttcccgcaggt

SEQ ID NO: 413562 - DNA, 30 bp, Artificial Sequence
  Synthetic oligonucleotide
cagcgccggctggctttcctgcttgcaggt

SEQ ID NO: 413563 - DNA, 30 bp, Artificial Sequence
  Synthetic oligonucleotide
ctcttgtgctagtgtagcgttggctcaggt

SEQ ID NO: 413564 - DNA, 30 bp, Artificial Sequence
  Synthetic oligonucleotide
tctaaagatctagctgctctcaagtcaggt

SEQ ID NO: 413565 - DNA, 30 bp, Artificial Sequence
  Synthetic oligonucleotide
tgcaatttagagttgcaaagtcggtcaggt

SEQ ID NO: 413566 - DNA, 30 bp, Artificial Sequence
  Synthetic oligonucleotide
acacgtggatagtccgcaggaccttcaggt

SEQ ID NO: 413567 - DNA, 30 bp, Artificial Sequence
  Synthetic oligonucleotide
ttgatcgtaggtcccaaactacgttcaggt

SEQ ID NO: 413568 - DNA, 30 bp, Artificial Sequence
  Synthetic oligonucleotide
gagaataacaccaattaatggcgttcaggt

SEQ ID NO: 413569 - DNA, 30 bp, Artificial Sequence
  Synthetic oligonucleotide
gaccgggaattatgatgtgttcgttcaggt

SEQ ID NO: 413570 - DNA, 30 bp, Artificial Sequence
  Synthetic oligonucleotide
ttcgcagcgttgagaggtagcatttcaggt

SEQ ID NO: 413571 - DNA, 30 bp, Artificial Sequence
  Synthetic oligonucleotide
agtgtcattttatagtttgacctttcaggt

SEQ ID NO: 413572 - DNA, 30 bp, Artificial Sequence
  Synthetic oligonucleotide
gtatctttgatagcgacgggtgtttcaggt

SEQ ID NO: 413573 - DNA, 30 bp, Artificial Sequence
  Synthetic oligonucleotide
gtccccgtactgccggtgtccttttcaggt

SEQ ID NO: 413574 - DNA, 30 bp, Artificial Sequence
  Synthetic oligonucleotide
tttttgaggtgaagccaggaagtaagaggt

SEQ ID NO: 413575 - DNA, 30 bp, Artificial Sequence
  Synthetic oligonucleotide
gggaaaggcctcgtccttcgtccgagaggt

SEQ ID NO: 413576 - DNA, 29 bp, Artificial Sequence
  Synthetic oligonucleotide
taagcagggccctgcccacacggagaggt

SEQ ID NO: 413577 - DNA, 30 bp, Artificial Sequence
  Synthetic oligonucleotide
taacttgcgacctaggccgttgggagaggt

SEQ ID NO: 413578 - DNA, 30 bp, Artificial Sequence
  Synthetic oligonucleotide
actcttgataactactgtcaagtgagaggt

SEQ ID NO: 413579 - DNA, 30 bp, Artificial Sequence
  Synthetic oligonucleotide
cacagcacaaatgtcgctaatcctagaggt

SEQ ID NO: 413580 - DNA, 30 bp, Artificial Sequence
  Synthetic oligonucleotide
gtccagcgcactgtaacacccacacgaggt

SEQ ID NO: 413581 - DNA, 30 bp, Artificial Sequence
  Synthetic oligonucleotide
gttaagagccgatgttttcgtgcacgaggt

SEQ ID NO: 413582 - DNA, 30 bp, Artificial Sequence
  Synthetic oligonucleotide
ggaggggctcctggaaacgcaggacgaggt

SEQ ID NO: 413583 - DNA, 31 bp, Artificial Sequence
  Synthetic oligonucleotide
aggaatgcatctgagacctggattacgaggt

SEQ ID NO: 413584 - DNA, 30 bp, Artificial Sequence
  Synthetic oligonucleotide
ggtcctggcgtggcgcactaggggcgaggt

SEQ ID NO: 413585 - DNA, 30 bp, Artificial Sequence
  Synthetic oligonucleotide
cacaacaacactaaatctcaagatcgaggt

SEQ ID NO: 413586 - DNA, 30 bp, Artificial Sequence
  Synthetic oligonucleotide
ggcggcgactaatggcgggatgaaggaggt

SEQ ID NO: 413587 - DNA, 30 bp, Artificial Sequence
  Synthetic oligonucleotide
cgtaggaaccgacagggtataccaggaggt

SEQ ID NO: 413588 - DNA, 30 bp, Artificial Sequence
  Synthetic oligonucleotide
tgaccagctactagatacctttgaggaggt

SEQ ID NO: 413589 - DNA, 30 bp, Artificial Sequence
  Synthetic oligonucleotide
tcatgaccaaccgcttgataggccggaggt

SEQ ID NO: 413590 - DNA, 30 bp, Artificial Sequence
  Synthetic oligonucleotide
gccaataccagatgtttgccgccgggaggt

SEQ ID NO: 413591 - DNA, 30 bp, Artificial Sequence
  Synthetic oligonucleotide
tgcaatggcgttgttagatgtaatggaggt

SEQ ID NO: 413592 - DNA, 30 bp, Artificial Sequence
  Synthetic oligonucleotide
gtcctatcagcatgcaccctatgtggaggt

SEQ ID NO: 413593 - DNA, 30 bp, Artificial Sequence
  Synthetic oligonucleotide
ctcaccatctctcctgtacgtgtatgaggt

SEQ ID NO: 413594 - DNA, 30 bp, Artificial Sequence
  Synthetic oligonucleotide
aggcctagatagtcgtggtgggactgaggt

SEQ ID NO: 413595 - DNA, 30 bp, Artificial Sequence
  Synthetic oligonucleotide
ccctttggccacggggatcacgtctgaggt

SEQ ID NO: 413596 - DNA, 30 bp, Artificial Sequence
  Synthetic oligonucleotide
atactacatactttattacgcgcgtgaggt

SEQ ID NO: 413597 - DNA, 30 bp, Artificial Sequence
  Synthetic oligonucleotide
gcgcgcggacacgaatttttcgcttgaggt

SEQ ID NO: 413598 - DNA, 30 bp, Artificial Sequence
  Synthetic oligonucleotide
agccccggaccctgactcggagcaataggt

SEQ ID NO: 413599 - DNA, 30 bp, Artificial Sequence
  Synthetic oligonucleotide
ctcacctatcccataactcgtataataggt

SEQ ID NO: 413600 - DNA, 30 bp, Artificial Sequence
  Synthetic oligonucleotide
gtagaaccgggcgtttaataaaacataggt

SEQ ID NO: 413601 - DNA, 30 bp, Artificial Sequence
  Synthetic oligonucleotide
gatgtctctctcaaattaagtgacataggt

SEQ ID NO: 413602 - DNA, 30 bp, Artificial Sequence
  Synthetic oligonucleotide
gattgtgccacgatcataggttacataggt

SEQ ID NO: 413603 - DNA, 30 bp, Artificial Sequence
  Synthetic oligonucleotide
aaagatagtcggtggatgggtacactaggt

SEQ ID NO: 413604 - DNA, 30 bp, Artificial Sequence
  Synthetic oligonucleotide
gttttaaaagttatttaggcagtactaggt

SEQ ID NO: 413605 - DNA, 30 bp, Artificial Sequence
  Synthetic oligonucleotide
caccgacgcggatgcaagtcactcctaggt

SEQ ID NO: 413606 - DNA, 30 bp, Artificial Sequence
  Synthetic oligonucleotide
ctcattccaatggctgttgatgggctaggt

SEQ ID NO: 413607 - DNA, 30 bp, Artificial Sequence
  Synthetic oligonucleotide
gaatgcgtagtaggtgtagcggttctaggt

SEQ ID NO: 413608 - DNA, 30 bp, Artificial Sequence
  Synthetic oligonucleotide
gcggccagttaagaaaaggggtttctaggt

SEQ ID NO: 413609 - DNA, 30 bp, Artificial Sequence
  Synthetic oligonucleotide
ttgacctgcgtctccgggtatctagtaggt

SEQ ID NO: 413610 - DNA, 30 bp, Artificial Sequence
  Synthetic oligonucleotide
aggtaaaaccttctaatctggtacgtaggt

SEQ ID NO: 413611 - DNA, 30 bp, Artificial Sequence
  Synthetic oligonucleotide
tacccagacacggctccggcttgcgtaggt

SEQ ID NO: 413612 - DNA, 30 bp, Artificial Sequence
  Synthetic oligonucleotide
ttgtagagtttgccggaatttgtcgtaggt

SEQ ID NO: 413613 - DNA, 30 bp, Artificial Sequence
  Synthetic oligonucleotide
ccgatcccggtgctaacgtctgaggtaggt

SEQ ID NO: 413614 - DNA, 30 bp, Artificial Sequence
  Synthetic oligonucleotide
aagtacctaagcttcaaattcagggtaggt

SEQ ID NO: 413615 - DNA, 30 bp, Artificial Sequence
  Synthetic oligonucleotide
gtatgaagcatccatcaccagggggtaggt

SEQ ID NO: 413616 - DNA, 30 bp, Artificial Sequence
  Synthetic oligonucleotide
gtacctcttaacgaaaactgttgggtaggt

SEQ ID NO: 413617 - DNA, 30 bp, Artificial Sequence
  Synthetic oligonucleotide
tccacatatactgattaaattgatgtaggt

SEQ ID NO: 413618 - DNA, 29 bp, Artificial Sequence
  Synthetic oligonucleotide
agtaaccagcgggggtaacttatgtaggt

SEQ ID NO: 413619 - DNA, 30 bp, Artificial Sequence
  Synthetic oligonucleotide
acccggttgtatcgatggcacgttgtaggt

SEQ ID NO: 413620 - DNA, 30 bp, Artificial Sequence
  Synthetic oligonucleotide
gcaccggcccctaaccacggcgcattaggt

SEQ ID NO: 413621 - DNA, 30 bp, Artificial Sequence
  Synthetic oligonucleotide
acctgcccctcggaaagttctagattaggt

SEQ ID NO: 413622 - DNA, 30 bp, Artificial Sequence
  Synthetic oligonucleotide
catgtcagtcactcagagacttgattaggt

SEQ ID NO: 413623 - DNA, 30 bp, Artificial Sequence
  Synthetic oligonucleotide
attacaaatcacgttcttggtttattaggt

SEQ ID NO: 413624 - DNA, 30 bp, Artificial Sequence
  Synthetic oligonucleotide
ttccggaaatggctaagtcacagcttaggt

SEQ ID NO: 413625 - DNA, 30 bp, Artificial Sequence
  Synthetic oligonucleotide
gaaactattccaataacaggtaggttaggt

SEQ ID NO: 413626 - DNA, 30 bp, Artificial Sequence
  Synthetic oligonucleotide
ctatctcgacggtatagggtaagtttaggt

SEQ ID NO: 413627 - DNA, 30 bp, Artificial Sequence
  Synthetic oligonucleotide
cactaagcatgcctatcatgacttttaggt

SEQ ID NO: 413628 - DNA, 30 bp, Artificial Sequence
  Synthetic oligonucleotide
tggaggctgaagccatatgcttaaaacggt

SEQ ID NO: 413629 - DNA, 30 bp, Artificial Sequence
  Synthetic oligonucleotide
agatatcgggctttcaattagtcaaacggt

SEQ ID NO: 413630 - DNA, 30 bp, Artificial Sequence
  Synthetic oligonucleotide
gttaatttgtcgtcgtagaatggaaacggt

SEQ ID NO: 413631 - DNA, 30 bp, Artificial Sequence
  Synthetic oligonucleotide
acaggccgagtagggtgcggatgcaacggt

SEQ ID NO: 413632 - DNA, 30 bp, Artificial Sequence
  Synthetic oligonucleotide
acatctaggagacgatcaagcatcaacggt

SEQ ID NO: 413633 - DNA, 30 bp, Artificial Sequence
  Synthetic oligonucleotide
acccgtaatgttacacgggcgtagaacggt

SEQ ID NO: 413634 - DNA, 30 bp, Artificial Sequence
  Synthetic oligonucleotide
ctaaaatggtaatggtgaaattggaacggt

SEQ ID NO: 413635 - DNA, 30 bp, Artificial Sequence
  Synthetic oligonucleotide
aatgtgggtacaatccgtagcatacacggt

SEQ ID NO: 413636 - DNA, 30 bp, Artificial Sequence
  Synthetic oligonucleotide
gtggccttgtggggcggttggtaccacggt

SEQ ID NO: 413637 - DNA, 30 bp, Artificial Sequence
  Synthetic oligonucleotide
aacttactttacccgagtattacccacggt

SEQ ID NO: 413638 - DNA, 30 bp, Artificial Sequence
  Synthetic oligonucleotide
cgtataagcactcaggataggtcccacggt

SEQ ID NO: 413639 - DNA, 30 bp, Artificial Sequence
  Synthetic oligonucleotide
tgatcgttggccccggatttttcgcacggt

SEQ ID NO: 413640 - DNA, 30 bp, Artificial Sequence
  Synthetic oligonucleotide
atgcgtcattccttttcctatgggcacggt

SEQ ID NO: 413641 - DNA, 30 bp, Artificial Sequence
  Synthetic oligonucleotide
tctgtcgtccttctacaaaagtggcacggt

SEQ ID NO: 413642 - DNA, 30 bp, Artificial Sequence
  Synthetic oligonucleotide
cttccaacggtgagtctctcaatgcacggt

SEQ ID NO: 413643 - DNA, 30 bp, Artificial Sequence
  Synthetic oligonucleotide
ggtgcgtttgttcatcgaggtcatcacggt

SEQ ID NO: 413644 - DNA, 30 bp, Artificial Sequence
  Synthetic oligonucleotide
ttgagcggcgtactatttatttcagacggt

SEQ ID NO: 413645 - DNA, 30 bp, Artificial Sequence
  Synthetic oligonucleotide
atacttaccctaggaagaagccgagacggt

SEQ ID NO: 413646 - DNA, 30 bp, Artificial Sequence
  Synthetic oligonucleotide
ctgggggctctgcgaatctacatcgacggt

SEQ ID NO: 413647 - DNA, 30 bp, Artificial Sequence
  Synthetic oligonucleotide
ccacacctgggtccatgacgtgaggacggt

SEQ ID NO: 413648 - DNA, 30 bp, Artificial Sequence
  Synthetic oligonucleotide
gccggacgagacgcacagagtgcggacggt

SEQ ID NO: 413649 - DNA, 30 bp, Artificial Sequence
  Synthetic oligonucleotide
tcgatctattggggagtatattgggacggt

SEQ ID NO: 413650 - DNA, 30 bp, Artificial Sequence
  Synthetic oligonucleotide
actaatttacactcacccgaggtggacggt

SEQ ID NO: 413651 - DNA, 30 bp, Artificial Sequence
  Synthetic oligonucleotide
gagtgtaggaagcttgttaatcgtgacggt

SEQ ID NO: 413652 - DNA, 30 bp, Artificial Sequence
  Synthetic oligonucleotide
attaaaatgaacattaggtgagttgacggt

SEQ ID NO: 413653 - DNA, 30 bp, Artificial Sequence
  Synthetic oligonucleotide
ggagccccattagctatggggtttgacggt

SEQ ID NO: 413654 - DNA, 30 bp, Artificial Sequence
  Synthetic oligonucleotide
tgtgccagatctaatcgctgattatacggt

SEQ ID NO: 413655 - DNA, 27 bp, Artificial Sequence
  Synthetic oligonucleotide
aggggccgtggactaagtgggtacggt

SEQ ID NO: 413656 - DNA, 30 bp, Artificial Sequence
  Synthetic oligonucleotide
aagatgaatgtattttagcgaacttacggt

SEQ ID NO: 413657 - DNA, 30 bp, Artificial Sequence
  Synthetic oligonucleotide
atcacgttatagcgaactcttgtttacggt

SEQ ID NO: 413658 - DNA, 30 bp, Artificial Sequence
  Synthetic oligonucleotide
gcggggtaggggaggccctgctacaccggt

SEQ ID NO: 413659 - DNA, 30 bp, Artificial Sequence
  Synthetic oligonucleotide
attcaccccggtgaagtgaggtgcaccggt

SEQ ID NO: 413660 - DNA, 30 bp, Artificial Sequence
  Synthetic oligonucleotide
gctaagttggtgttttgacataggaccggt

SEQ ID NO: 413661 - DNA, 30 bp, Artificial Sequence
  Synthetic oligonucleotide
gtgctaaccgctaatactagcatgaccggt

SEQ ID NO: 413662 - DNA, 30 bp, Artificial Sequence
  Synthetic oligonucleotide
cccccgatctctatcggtatgtataccggt

SEQ ID NO: 413663 - DNA, 30 bp, Artificial Sequence
  Synthetic oligonucleotide
ttatgttttattagataggcgtgtaccggt

SEQ ID NO: 413664 - DNA, 30 bp, Artificial Sequence
  Synthetic oligonucleotide
gctagtgagtacatgattgtgtgtaccggt

SEQ ID NO: 413665 - DNA, 30 bp, Artificial Sequence
  Synthetic oligonucleotide
gctacttaggactaaggtccctaccccggt

SEQ ID NO: 413666 - DNA, 30 bp, Artificial Sequence
  Synthetic oligonucleotide
cctagttttacaatctaaaggctccccggt

SEQ ID NO: 413667 - DNA, 30 bp, Artificial Sequence
  Synthetic oligonucleotide
ttatccaagcgggggtttacgacgcccggt

SEQ ID NO: 413668 - DNA, 30 bp, Artificial Sequence
  Synthetic oligonucleotide
accacattagcctttcattgctcgcccggt

SEQ ID NO: 413669 - DNA, 30 bp, Artificial Sequence
  Synthetic oligonucleotide
caacaatgtacttttgcgtagggtcccggt

SEQ ID NO: 413670 - DNA, 30 bp, Artificial Sequence
  Synthetic oligonucleotide
gttgttgggacttcgtagtcctttcccggt

SEQ ID NO: 413671 - DNA, 30 bp, Artificial Sequence
  Synthetic oligonucleotide
gttgtatgcgcatgttaggacttagccggt

SEQ ID NO: 413672 - DNA, 30 bp, Artificial Sequence
  Synthetic oligonucleotide
gtgaaagcgcctagatcgacataggccggt

SEQ ID NO: 413673 - DNA, 30 bp, Artificial Sequence
  Synthetic oligonucleotide
aaacagttagaggcactgctatgggccggt

SEQ ID NO: 413674 - DNA, 30 bp, Artificial Sequence
  Synthetic oligonucleotide
cgcggacccacttttgttaggcctgccggt

SEQ ID NO: 413675 - DNA, 30 bp, Artificial Sequence
  Synthetic oligonucleotide
aaaaatagaagttgtcaccggcgtgccggt

SEQ ID NO: 413676 - DNA, 30 bp, Artificial Sequence
  Synthetic oligonucleotide
gccgtcacaagcgcataactttaatccggt

SEQ ID NO: 413677 - DNA, 30 bp, Artificial Sequence
  Synthetic oligonucleotide
attctggttcaatactccaagccatccggt

SEQ ID NO: 413678 - DNA, 30 bp, Artificial Sequence
  Synthetic oligonucleotide
agatctcggtcggtcgagcaagcctccggt

SEQ ID NO: 413679 - DNA, 30 bp, Artificial Sequence
  Synthetic oligonucleotide
ggccagaccggaaagggtagggcctccggt

SEQ ID NO: 413680 - DNA, 30 bp, Artificial Sequence
  Synthetic oligonucleotide
ggagagtgaacgctcagatcctggtccggt

SEQ ID NO: 413681 - DNA, 30 bp, Artificial Sequence
  Synthetic oligonucleotide
cgtctaccacaaaccgttgatgcttccggt

SEQ ID NO: 413682 - DNA, 30 bp, Artificial Sequence
  Synthetic oligonucleotide
cttgtcataaaagtatctgttgtttccggt

SEQ ID NO: 413683 - DNA, 31 bp, Artificial Sequence
  Synthetic oligonucleotide
tttaatagaggcacagagggcgttttccggt

SEQ ID NO: 413684 - DNA, 30 bp, Artificial Sequence
  Synthetic oligonucleotide
atactaaggcttgtattgtgtgaaagcggt

SEQ ID NO: 413685 - DNA, 30 bp, Artificial Sequence
  Synthetic oligonucleotide
tggtgcctccagcggtgatttgcaagcggt

SEQ ID NO: 413686 - DNA, 30 bp, Artificial Sequence
  Synthetic oligonucleotide
ttcgggataaagtcgggagcgggaagcggt

SEQ ID NO: 413687 - DNA, 30 bp, Artificial Sequence
  Synthetic oligonucleotide
aatggagaccaggtttcaccgaggagcggt

SEQ ID NO: 413688 - DNA, 30 bp, Artificial Sequence
  Synthetic oligonucleotide
tgtaatcatggtggggtcgccgcccgcggt

SEQ ID NO: 413689 - DNA, 30 bp, Artificial Sequence
  Synthetic oligonucleotide
gcaaagttttatcagattagggcgcgcggt

SEQ ID NO: 413690 - DNA, 30 bp, Artificial Sequence
  Synthetic oligonucleotide
ataatatacgagacgttcgttatgcgcggt

SEQ ID NO: 413691 - DNA, 30 bp, Artificial Sequence
  Synthetic oligonucleotide
tataccgtataagtgagtgggtgtcgcggt

SEQ ID NO: 413692 - DNA, 30 bp, Artificial Sequence
  Synthetic oligonucleotide
tttcccgaacaacgggattgatttcgcggt

SEQ ID NO: 413693 - DNA, 30 bp, Artificial Sequence
  Synthetic oligonucleotide
atgcaatttaatcagatgggtcaaggcggt

SEQ ID NO: 413694 - DNA, 30 bp, Artificial Sequence
  Synthetic oligonucleotide
agatcgttaaccttgacaaatgaaggcggt

SEQ ID NO: 413695 - DNA, 30 bp, Artificial Sequence
  Synthetic oligonucleotide
tcggtatagcggtttctggcaagaggcggt

SEQ ID NO: 413696 - DNA, 30 bp, Artificial Sequence
  Synthetic oligonucleotide
agaattaccgtatggtataacatcggcggt

SEQ ID NO: 413697 - DNA, 30 bp, Artificial Sequence
  Synthetic oligonucleotide
acatatgtagacacgacatcttagggcggt

SEQ ID NO: 413698 - DNA, 31 bp, Artificial Sequence
  Synthetic oligonucleotide
gctgacttgtgcaagccccaaatttggcggt

SEQ ID NO: 413699 - DNA, 30 bp, Artificial Sequence
  Synthetic oligonucleotide
ttaagtttaaatataccaggatttggcggt

SEQ ID NO: 413700 - DNA, 30 bp, Artificial Sequence
  Synthetic oligonucleotide
aaatgtgccatatagggggaccaatgcggt

SEQ ID NO: 413701 - DNA, 30 bp, Artificial Sequence
  Synthetic oligonucleotide
atgcagacatcacacccctgtacatgcggt

SEQ ID NO: 413702 - DNA, 30 bp, Artificial Sequence
  Synthetic oligonucleotide
catactactagttagctttaccgatgcggt

SEQ ID NO: 413703 - DNA, 30 bp, Artificial Sequence
  Synthetic oligonucleotide
acgattgaggttcatgtgttatgatgcggt

SEQ ID NO: 413704 - DNA, 30 bp, Artificial Sequence
  Synthetic oligonucleotide
attagcattcagaaaggaaatctatgcggt

SEQ ID NO: 413705 - DNA, 30 bp, Artificial Sequence
  Synthetic oligonucleotide
tgttccaacacagcacattcgtactgcggt

SEQ ID NO: 413706 - DNA, 30 bp, Artificial Sequence
  Synthetic oligonucleotide
actgtctcggcctgatcgggggtctgcggt

SEQ ID NO: 413707 - DNA, 30 bp, Artificial Sequence
  Synthetic oligonucleotide
gtcgtctccgtcaatcagtgtcattgcggt

SEQ ID NO: 413708 - DNA, 30 bp, Artificial Sequence
  Synthetic oligonucleotide
tagtataggatactaggatgatcttgcggt

SEQ ID NO: 413709 - DNA, 30 bp, Artificial Sequence
  Synthetic oligonucleotide
acttaaactatgtggggcggggccatcggt

SEQ ID NO: 413710 - DNA, 30 bp, Artificial Sequence
  Synthetic oligonucleotide
aatcagtgccgggacctgaatatcatcggt

SEQ ID NO: 413711 - DNA, 30 bp, Artificial Sequence
  Synthetic oligonucleotide
tatgcggtgaatagtcggcgtaatatcggt

SEQ ID NO: 413712 - DNA, 30 bp, Artificial Sequence
  Synthetic oligonucleotide
tgatcaagggaagaagtaatgctactcggt

SEQ ID NO: 413713 - DNA, 30 bp, Artificial Sequence
  Synthetic oligonucleotide
cgcctgtggagcaaagaggtttccctcggt

SEQ ID NO: 413714 - DNA, 30 bp, Artificial Sequence
  Synthetic oligonucleotide
cttcggatcctgttggtcgggtggctcggt

SEQ ID NO: 413715 - DNA, 30 bp, Artificial Sequence
  Synthetic oligonucleotide
cctcataagatctccaggtcccctctcggt

SEQ ID NO: 413716 - DNA, 30 bp, Artificial Sequence
  Synthetic oligonucleotide
caggactgtgtgtgacatggcggtctcggt

SEQ ID NO: 413717 - DNA, 30 bp, Artificial Sequence
  Synthetic oligonucleotide
atcgcgcctgagaaggtcgcgattctcggt

SEQ ID NO: 413718 - DNA, 30 bp, Artificial Sequence
  Synthetic oligonucleotide
ggcccgactatcgttctccggcaagtcggt

SEQ ID NO: 413719 - DNA, 30 bp, Artificial Sequence
  Synthetic oligonucleotide
cggcggtataagcatagacgtagcgtcggt

SEQ ID NO: 413720 - DNA, 30 bp, Artificial Sequence
  Synthetic oligonucleotide
aaatcggggttactccccgtgggcgtcggt

SEQ ID NO: 413721 - DNA, 30 bp, Artificial Sequence
  Synthetic oligonucleotide
cctgtaggcacttgcgacatatcggtcggt

SEQ ID NO: 413722 - DNA, 30 bp, Artificial Sequence
  Synthetic oligonucleotide
tagttatgcaaattcacgatcaaattcggt

SEQ ID NO: 413723 - DNA, 30 bp, Artificial Sequence
  Synthetic oligonucleotide
ggggttctctgaacgtctccgaatttcggt

SEQ ID NO: 413724 - DNA, 30 bp, Artificial Sequence
  Synthetic oligonucleotide
ggctcttggcgcatgcagaattttttcggt

SEQ ID NO: 413725 - DNA, 30 bp, Artificial Sequence
  Synthetic oligonucleotide
cgtcaccaaggctagccttgtcaaaagggt

SEQ ID NO: 413726 - DNA, 30 bp, Artificial Sequence
  Synthetic oligonucleotide
cattcggtccacacggaaattccaaagggt

SEQ ID NO: 413727 - DNA, 30 bp, Artificial Sequence
  Synthetic oligonucleotide
tatcaagtttcctaacttggagtaaagggt

SEQ ID NO: 413728 - DNA, 30 bp, Artificial Sequence
  Synthetic oligonucleotide
tcgtgccaaacgatgtagtcggggaagggt

SEQ ID NO: 413729 - DNA, 30 bp, Artificial Sequence
  Synthetic oligonucleotide
aaatgttccgcgttttaccttgggaagggt

SEQ ID NO: 413730 - DNA, 30 bp, Artificial Sequence
  Synthetic oligonucleotide
ggggataagcctggggcaaggtggaagggt

SEQ ID NO: 413731 - DNA, 30 bp, Artificial Sequence
  Synthetic oligonucleotide
gaaacatcacatacgtttgggatgaagggt

SEQ ID NO: 413732 - DNA, 30 bp, Artificial Sequence
  Synthetic oligonucleotide
cattgttcagagtgttgagtcctccagggt

SEQ ID NO: 413733 - DNA, 30 bp, Artificial Sequence
  Synthetic oligonucleotide
tcgagagctattgtacgccaagagcagggt

SEQ ID NO: 413734 - DNA, 30 bp, Artificial Sequence
  Synthetic oligonucleotide
caataagaagacgtatagataccgcagggt

SEQ ID NO: 413735 - DNA, 30 bp, Artificial Sequence
  Synthetic oligonucleotide
tgcgggacagcaaatagggtcctgcagggt

SEQ ID NO: 413736 - DNA, 30 bp, Artificial Sequence
  Synthetic oligonucleotide
accaggaacactggtgggatagttcagggt

SEQ ID NO: 413737 - DNA, 30 bp, Artificial Sequence
  Synthetic oligonucleotide
ggggttacagtttggccagcctttcagggt

SEQ ID NO: 413738 - DNA, 30 bp, Artificial Sequence
  Synthetic oligonucleotide
attatttgtttcgtggttctgggagagggt

SEQ ID NO: 413739 - DNA, 30 bp, Artificial Sequence
  Synthetic oligonucleotide
aagtgatatccttccgggaaaatagagggt

SEQ ID NO: 413740 - DNA, 30 bp, Artificial Sequence
  Synthetic oligonucleotide
ggcctgcaaattgggcttagtttagagggt

SEQ ID NO: 413741 - DNA, 30 bp, Artificial Sequence
  Synthetic oligonucleotide
acaggcggggtctccgcggttagcgagggt

SEQ ID NO: 413742 - DNA, 30 bp, Artificial Sequence
  Synthetic oligonucleotide
aatcgtgcgtggaccctgcaattcgagggt

SEQ ID NO: 413743 - DNA, 30 bp, Artificial Sequence
  Synthetic oligonucleotide
gggtgggctcgggaggaggtgggggagggt

SEQ ID NO: 413744 - DNA, 30 bp, Artificial Sequence
  Synthetic oligonucleotide
agtaatggtctatgcgccgctggggagggt

SEQ ID NO: 413745 - DNA, 29 bp, Artificial Sequence
  Synthetic oligonucleotide
gctgggcgctatccggctgtcctgagggt

SEQ ID NO: 413746 - DNA, 30 bp, Artificial Sequence
  Synthetic oligonucleotide
gtttgataagttgagcctcgtattgagggt

SEQ ID NO: 413747 - DNA, 30 bp, Artificial Sequence
  Synthetic oligonucleotide
acagcaaaaatactattatataaatagggt

SEQ ID NO: 413748 - DNA, 30 bp, Artificial Sequence
  Synthetic oligonucleotide
ggtcaacttacgcctaatagttaatagggt

SEQ ID NO: 413749 - DNA, 30 bp, Artificial Sequence
  Synthetic oligonucleotide
gcctggttgcgaattaccgaggcatagggt

SEQ ID NO: 413750 - DNA, 30 bp, Artificial Sequence
  Synthetic oligonucleotide
tcgcatatgtcgaatagtactatatagggt

SEQ ID NO: 413751 - DNA, 30 bp, Artificial Sequence
  Synthetic oligonucleotide
agatattgcgacatttgtccgccctagggt

SEQ ID NO: 413752 - DNA, 30 bp, Artificial Sequence
  Synthetic oligonucleotide
ggtgctgtctctcccttatatgagtagggt

SEQ ID NO: 413753 - DNA, 30 bp, Artificial Sequence
  Synthetic oligonucleotide
gtccgatgagaactggactctaggtagggt

SEQ ID NO: 413754 - DNA, 30 bp, Artificial Sequence
  Synthetic oligonucleotide
acctgcaagtggccctgtacccggtagggt

SEQ ID NO: 413755 - DNA, 30 bp, Artificial Sequence
  Synthetic oligonucleotide
agaattagaaatgatatgatggtgtagggt

SEQ ID NO: 413756 - DNA, 30 bp, Artificial Sequence
  Synthetic oligonucleotide
gaacgtaacccagaagttaacttgtagggt

SEQ ID NO: 413757 - DNA, 30 bp, Artificial Sequence
  Synthetic oligonucleotide
gcagtagaaagccctcccatgaattagggt

SEQ ID NO: 413758 - DNA, 30 bp, Artificial Sequence
  Synthetic oligonucleotide
tcttggcaaaaagacttggttggttagggt

SEQ ID NO: 413759 - DNA, 30 bp, Artificial Sequence
  Synthetic oligonucleotide
cgagctcgggttcgagtatgcttttagggt

SEQ ID NO: 413760 - DNA, 30 bp, Artificial Sequence
  Synthetic oligonucleotide
tgaaggatgcctgcacggccgtgaacgggt

SEQ ID NO: 413761 - DNA, 30 bp, Artificial Sequence
  Synthetic oligonucleotide
aacattcgttcgcagtaattagacacgggt

SEQ ID NO: 413762 - DNA, 30 bp, Artificial Sequence
  Synthetic oligonucleotide
ttcccgtgatttgctgggtgtgacacgggt

SEQ ID NO: 413763 - DNA, 30 bp, Artificial Sequence
  Synthetic oligonucleotide
cgatctgacagggtacatgcctgcacgggt

SEQ ID NO: 413764 - DNA, 30 bp, Artificial Sequence
  Synthetic oligonucleotide
ctgacctgatcccctccagggctcacgggt

SEQ ID NO: 413765 - DNA, 30 bp, Artificial Sequence
  Synthetic oligonucleotide
cagccctctagtccagcttacaagacgggt

SEQ ID NO: 413766 - DNA, 30 bp, Artificial Sequence
  Synthetic oligonucleotide
ggtgaaaggcgtgtatatcaaaggacgggt

SEQ ID NO: 413767 - DNA, 30 bp, Artificial Sequence
  Synthetic oligonucleotide
ggtatagtggttttaggtgccgtgacgggt

SEQ ID NO: 413768 - DNA, 30 bp, Artificial Sequence
  Synthetic oligonucleotide
atatgtgtccgggaacggcgtactacgggt

SEQ ID NO: 413769 - DNA, 30 bp, Artificial Sequence
  Synthetic oligonucleotide
gtacacttcgggaaagggacacgtacgggt

SEQ ID NO: 413770 - DNA, 30 bp, Artificial Sequence
  Synthetic oligonucleotide
ccggccctcactccacagtttcgtacgggt

SEQ ID NO: 413771 - DNA, 30 bp, Artificial Sequence
  Synthetic oligonucleotide
cacggggcatcaacaatcacttttacgggt

SEQ ID NO: 413772 - DNA, 30 bp, Artificial Sequence
  Synthetic oligonucleotide
tttctgttcgtaagacccatttccccgggt

SEQ ID NO: 413773 - DNA, 30 bp, Artificial Sequence
  Synthetic oligonucleotide
ggcaaaaagatagggattcaaatcccgggt

SEQ ID NO: 413774 - DNA, 30 bp, Artificial Sequence
  Synthetic oligonucleotide
actcccacgacatgtcagcactgtccgggt

SEQ ID NO: 413775 - DNA, 30 bp, Artificial Sequence
  Synthetic oligonucleotide
cctcaggcggttggtacgatatttccgggt

SEQ ID NO: 413776 - DNA, 30 bp, Artificial Sequence
  Synthetic oligonucleotide
catctttttagggactgacatgtagcgggt

SEQ ID NO: 413777 - DNA, 30 bp, Artificial Sequence
  Synthetic oligonucleotide
tcactatttgacacgataactgaggcgggt

SEQ ID NO: 413778 - DNA, 30 bp, Artificial Sequence
  Synthetic oligonucleotide
actttaacagtaaggcagcttacggcgggt

SEQ ID NO: 413779 - DNA, 30 bp, Artificial Sequence
  Synthetic oligonucleotide
gccgacaaggttcaggacgacctggcgggt

SEQ ID NO: 413780 - DNA, 30 bp, Artificial Sequence
  Synthetic oligonucleotide
tcacctgaccttaatattaaagtggcgggt

SEQ ID NO: 413781 - DNA, 30 bp, Artificial Sequence
  Synthetic oligonucleotide
gggtatataaatggggtctatttggcgggt

SEQ ID NO: 413782 - DNA, 30 bp, Artificial Sequence
  Synthetic oligonucleotide
accgtgaacattgcgtttcggaatgcgggt

SEQ ID NO: 413783 - DNA, 30 bp, Artificial Sequence
  Synthetic oligonucleotide
cctagcccgggtagtgcgattaatgcgggt

SEQ ID NO: 413784 - DNA, 30 bp, Artificial Sequence
  Synthetic oligonucleotide
gtcaaaagttaggccgccttgtgtgcgggt

SEQ ID NO: 413785 - DNA, 30 bp, Artificial Sequence
  Synthetic oligonucleotide
gggcgagctgacctggttttttgtgcgggt

SEQ ID NO: 413786 - DNA, 30 bp, Artificial Sequence
  Synthetic oligonucleotide
aactattaggaaaggtggctaacatcgggt

SEQ ID NO: 413787 - DNA, 30 bp, Artificial Sequence
  Synthetic oligonucleotide
aaccaagtcctacttagaggtctatcgggt

SEQ ID NO: 413788 - DNA, 30 bp, Artificial Sequence
  Synthetic oligonucleotide
cgagccacatactgcggagtcgactcgggt

SEQ ID NO: 413789 - DNA, 30 bp, Artificial Sequence
  Synthetic oligonucleotide
tctcctggttgagatggaacatgctcgggt

SEQ ID NO: 413790 - DNA, 30 bp, Artificial Sequence
  Synthetic oligonucleotide
tatggttcctggtgaacgaaaccgtcgggt

SEQ ID NO: 413791 - DNA, 30 bp, Artificial Sequence
  Synthetic oligonucleotide
taagtatcgtaatcgcgcgggaggtcgggt

SEQ ID NO: 413792 - DNA, 30 bp, Artificial Sequence
  Synthetic oligonucleotide
agaatctttcaacggcgtttgaattcgggt

SEQ ID NO: 413793 - DNA, 30 bp, Artificial Sequence
  Synthetic oligonucleotide
acatgccattcaagtcgaagcccaaggggt

SEQ ID NO: 413794 - DNA, 29 bp, Artificial Sequence
  Synthetic oligonucleotide
atggggctggaagagaggcgcagaggggt

SEQ ID NO: 413795 - DNA, 30 bp, Artificial Sequence
  Synthetic oligonucleotide
gaacattcgtggatctttggatagaggggt

SEQ ID NO: 413796 - DNA, 30 bp, Artificial Sequence
  Synthetic oligonucleotide
tcgtgtgcatggacgatagttccgaggggt

SEQ ID NO: 413797 - DNA, 30 bp, Artificial Sequence
  Synthetic oligonucleotide
caatgcgttctctactgggatcggaggggt

SEQ ID NO: 413798 - DNA, 30 bp, Artificial Sequence
  Synthetic oligonucleotide
cccgggaagatcgggggtccaaaccggggt

SEQ ID NO: 413799 - DNA, 30 bp, Artificial Sequence
  Synthetic oligonucleotide
ttgtagtgtcaccgggataaagaccggggt

SEQ ID NO: 413800 - DNA, 30 bp, Artificial Sequence
  Synthetic oligonucleotide
ttcaaggacgcttatctaatcgcccggggt

SEQ ID NO: 413801 - DNA, 30 bp, Artificial Sequence
  Synthetic oligonucleotide
gttaaacaacattctatacgtttccggggt

SEQ ID NO: 413802 - DNA, 30 bp, Artificial Sequence
  Synthetic oligonucleotide
gtaccagtattcgggtgtacccggcggggt

SEQ ID NO: 413803 - DNA, 30 bp, Artificial Sequence
  Synthetic oligonucleotide
tcgttttagtttcgaagtgagactcggggt

SEQ ID NO: 413804 - DNA, 30 bp, Artificial Sequence
  Synthetic oligonucleotide
gttcgtaaagatcacggtgagagtcggggt

SEQ ID NO: 413805 - DNA, 30 bp, Artificial Sequence
  Synthetic oligonucleotide
aaaatagcacagaaccgtgtgtaagggggt

SEQ ID NO: 413806 - DNA, 30 bp, Artificial Sequence
  Synthetic oligonucleotide
agtttgttagcaagctataacgacgggggt

SEQ ID NO: 413807 - DNA, 30 bp, Artificial Sequence
  Synthetic oligonucleotide
gagtattggggagggtctctatccgggggt

SEQ ID NO: 413808 - DNA, 30 bp, Artificial Sequence
  Synthetic oligonucleotide
ttcgattgagaattaaatccttaggggggt

SEQ ID NO: 413809 - DNA, 30 bp, Artificial Sequence
  Synthetic oligonucleotide
ggtagtggtatcacttcatccattgggggt

SEQ ID NO: 413810 - DNA, 30 bp, Artificial Sequence
  Synthetic oligonucleotide
cagtatccaccatacgggttcgttgggggt

SEQ ID NO: 413811 - DNA, 30 bp, Artificial Sequence
  Synthetic oligonucleotide
aggttattgcggcggccagaccaatggggt

SEQ ID NO: 413812 - DNA, 30 bp, Artificial Sequence
  Synthetic oligonucleotide
accctgggtcaagtgtagggcgaatggggt

SEQ ID NO: 413813 - DNA, 30 bp, Artificial Sequence
  Synthetic oligonucleotide
gggcgccaccgccactcatcataatggggt

SEQ ID NO: 413814 - DNA, 30 bp, Artificial Sequence
  Synthetic oligonucleotide
cggggcgtaggcaccgggtcaagatggggt

SEQ ID NO: 413815 - DNA, 30 bp, Artificial Sequence
  Synthetic oligonucleotide
agatctgtccacacttgtactagatggggt

SEQ ID NO: 413816 - DNA, 30 bp, Artificial Sequence
  Synthetic oligonucleotide
tgtgaatagatcaacggattagtatggggt

SEQ ID NO: 413817 - DNA, 26 bp, Artificial Sequence
  Synthetic oligonucleotide
tatagagattcgaatacaactggggt

SEQ ID NO: 413818 - DNA, 30 bp, Artificial Sequence
  Synthetic oligonucleotide
gctcagattggtagaactcaatactggggt

SEQ ID NO: 413819 - DNA, 30 bp, Artificial Sequence
  Synthetic oligonucleotide
ggctagaaccttccgacgtagtcctggggt

SEQ ID NO: 413820 - DNA, 30 bp, Artificial Sequence
  Synthetic oligonucleotide
tgcaattgcgcgtccatcttgggctggggt

SEQ ID NO: 413821 - DNA, 30 bp, Artificial Sequence
  Synthetic oligonucleotide
ataatttttatctaaaattaggggtggggt

SEQ ID NO: 413822 - DNA, 30 bp, Artificial Sequence
  Synthetic oligonucleotide
gagatactccaagtggagcacctgtggggt

SEQ ID NO: 413823 - DNA, 30 bp, Artificial Sequence
  Synthetic oligonucleotide
cggcaaggtccgtaaatggcgacttggggt

SEQ ID NO: 413824 - DNA, 30 bp, Artificial Sequence
  Synthetic oligonucleotide
cgtggcttgtggcgttagaggatttggggt

SEQ ID NO: 413825 - DNA, 30 bp, Artificial Sequence
  Synthetic oligonucleotide
tagactcgtagggcattaaaggaaatgggt

SEQ ID NO: 413826 - DNA, 30 bp, Artificial Sequence
  Synthetic oligonucleotide
gtagctatgctcatgaagttctgaatgggt

SEQ ID NO: 413827 - DNA, 30 bp, Artificial Sequence
  Synthetic oligonucleotide
atatagttcgtaaatgcgaagtgaatgggt

SEQ ID NO: 413828 - DNA, 30 bp, Artificial Sequence
  Synthetic oligonucleotide
gccacaaatggacatgtttggctaatgggt

SEQ ID NO: 413829 - DNA, 30 bp, Artificial Sequence
  Synthetic oligonucleotide
tttctactccgaaggaggcgtaacatgggt

SEQ ID NO: 413830 - DNA, 30 bp, Artificial Sequence
  Synthetic oligonucleotide
actcctgcgcttgtgtagggaggcatgggt

SEQ ID NO: 413831 - DNA, 30 bp, Artificial Sequence
  Synthetic oligonucleotide
gccgcacgtttgactaacgttctcatgggt

SEQ ID NO: 413832 - DNA, 30 bp, Artificial Sequence
  Synthetic oligonucleotide
ctctgctacattgtgacccaacatatgggt

SEQ ID NO: 413833 - DNA, 30 bp, Artificial Sequence
  Synthetic oligonucleotide
ctgctagtaagtgaatgaacatatatgggt

SEQ ID NO: 413834 - DNA, 30 bp, Artificial Sequence
  Synthetic oligonucleotide
ggtgctcatccggcgggcctcgctatgggt

SEQ ID NO: 413835 - DNA, 30 bp, Artificial Sequence
  Synthetic oligonucleotide
aaacttcacaccatcgcttcccttatgggt

SEQ ID NO: 413836 - DNA, 30 bp, Artificial Sequence
  Synthetic oligonucleotide
ttaacgaacagggttataccttttatgggt

SEQ ID NO: 413837 - DNA, 30 bp, Artificial Sequence
  Synthetic oligonucleotide
gcgggagggtataatattgcgccactgggt

SEQ ID NO: 413838 - DNA, 30 bp, Artificial Sequence
  Synthetic oligonucleotide
tggagcctgtacgactaatggtccctgggt

SEQ ID NO: 413839 - DNA, 30 bp, Artificial Sequence
  Synthetic oligonucleotide
atataaccctggggcgaacgtacgctgggt

SEQ ID NO: 413840 - DNA, 30 bp, Artificial Sequence
  Synthetic oligonucleotide
gcacagagtacaacaactttcgacgtgggt

SEQ ID NO: 413841 - DNA, 30 bp, Artificial Sequence
  Synthetic oligonucleotide
atcgagcagtccattcccgttaccgtgggt

SEQ ID NO: 413842 - DNA, 31 bp, Artificial Sequence
  Synthetic oligonucleotide
ggccttgaaatgcataatcttttccgtgggt

SEQ ID NO: 413843 - DNA, 30 bp, Artificial Sequence
  Synthetic oligonucleotide
ccccaacctaattccgtataagtcgtgggt

SEQ ID NO: 413844 - DNA, 30 bp, Artificial Sequence
  Synthetic oligonucleotide
gataccagggttatgcctcccatggtgggt

SEQ ID NO: 413845 - DNA, 30 bp, Artificial Sequence
  Synthetic oligonucleotide
cttcgttgagacacccggtcacaattgggt

SEQ ID NO: 413846 - DNA, 30 bp, Artificial Sequence
  Synthetic oligonucleotide
attaacaagagaaattaaacgacattgggt

SEQ ID NO: 413847 - DNA, 30 bp, Artificial Sequence
  Synthetic oligonucleotide
agttatacgtgcgggatacataacttgggt

SEQ ID NO: 413848 - DNA, 30 bp, Artificial Sequence
  Synthetic oligonucleotide
attaagtacactgtccgaaaccacttgggt

SEQ ID NO: 413849 - DNA, 30 bp, Artificial Sequence
  Synthetic oligonucleotide
ttaaataaggcctttacgaggggcttgggt

SEQ ID NO: 413850 - DNA, 30 bp, Artificial Sequence
  Synthetic oligonucleotide
ccagtccacgcgatcgaatcaatcttgggt

SEQ ID NO: 413851 - DNA, 30 bp, Artificial Sequence
  Synthetic oligonucleotide
tccaaccctgttgctctgctagtcttgggt

SEQ ID NO: 413852 - DNA, 30 bp, Artificial Sequence
  Synthetic oligonucleotide
actcttcgggaagatttagtgccgttgggt

SEQ ID NO: 413853 - DNA, 30 bp, Artificial Sequence
  Synthetic oligonucleotide
aacccgttagagttacatatgtggttgggt

SEQ ID NO: 413854 - DNA, 30 bp, Artificial Sequence
  Synthetic oligonucleotide
cgctcggtgccaggtcattcagtgttgggt

SEQ ID NO: 413855 - DNA, 30 bp, Artificial Sequence
  Synthetic oligonucleotide
acaagctgtctttgtgcgggattgttgggt

SEQ ID NO: 413856 - DNA, 30 bp, Artificial Sequence
  Synthetic oligonucleotide
tgtcgcttaggtacaaaggctcatttgggt

SEQ ID NO: 413857 - DNA, 30 bp, Artificial Sequence
  Synthetic oligonucleotide
gccggcggacgatctgagagctctttgggt

SEQ ID NO: 413858 - DNA, 30 bp, Artificial Sequence
  Synthetic oligonucleotide
ttcgcactaatacgctattattctttgggt

SEQ ID NO: 413859 - DNA, 30 bp, Artificial Sequence
  Synthetic oligonucleotide
gcggggattcttggggccgcatgtttgggt

SEQ ID NO: 413860 - DNA, 30 bp, Artificial Sequence
  Synthetic oligonucleotide
ggtaaacgtcgaaagctatgtttcaatggt

SEQ ID NO: 413861 - DNA, 30 bp, Artificial Sequence
  Synthetic oligonucleotide
ctgcactaggacaataagcactagaatggt

SEQ ID NO: 413862 - DNA, 30 bp, Artificial Sequence
  Synthetic oligonucleotide
ttttcagcgcgttgtcattcccgtaatggt

SEQ ID NO: 413863 - DNA, 30 bp, Artificial Sequence
  Synthetic oligonucleotide
caaagtcgggttgataagtccattaatggt

SEQ ID NO: 413864 - DNA, 30 bp, Artificial Sequence
  Synthetic oligonucleotide
gggtcccaaaaaaggccaacggaacatggt

SEQ ID NO: 413865 - DNA, 30 bp, Artificial Sequence
  Synthetic oligonucleotide
tgcacaccgcgggagaatttaacccatggt

SEQ ID NO: 413866 - DNA, 30 bp, Artificial Sequence
  Synthetic oligonucleotide
tggggttagtagtttttaacagcccatggt

SEQ ID NO: 413867 - DNA, 30 bp, Artificial Sequence
  Synthetic oligonucleotide
tcattgaagtagaacaatctgtgccatggt

SEQ ID NO: 413868 - DNA, 30 bp, Artificial Sequence
  Synthetic oligonucleotide
caaggatggagtcactagataatccatggt

SEQ ID NO: 413869 - DNA, 30 bp, Artificial Sequence
  Synthetic oligonucleotide
cattgtacgttcccctgtttgaggcatggt

SEQ ID NO: 413870 - DNA, 30 bp, Artificial Sequence
  Synthetic oligonucleotide
gccatttgtatatgtacgtctatgcatggt

SEQ ID NO: 413871 - DNA, 30 bp, Artificial Sequence
  Synthetic oligonucleotide
tcaattgtagcatctagtcgggctcatggt

SEQ ID NO: 413872 - DNA, 30 bp, Artificial Sequence
  Synthetic oligonucleotide
cccaaatttatgagccccgtagaagatggt

SEQ ID NO: 413873 - DNA, 30 bp, Artificial Sequence
  Synthetic oligonucleotide
agacccttacgcttagacttggaagatggt

SEQ ID NO: 413874 - DNA, 30 bp, Artificial Sequence
  Synthetic oligonucleotide
gtttgtgagctcggaaaggaccgggatggt

SEQ ID NO: 413875 - DNA, 31 bp, Artificial Sequence
  Synthetic oligonucleotide
ctctagcgtctttgatattgactctgatggt

SEQ ID NO: 413876 - DNA, 30 bp, Artificial Sequence
  Synthetic oligonucleotide
attgattcttgtatcgatactaaatatggt

SEQ ID NO: 413877 - DNA, 30 bp, Artificial Sequence
  Synthetic oligonucleotide
gacaatagattacgattatgctcatatggt

SEQ ID NO: 413878 - DNA, 30 bp, Artificial Sequence
  Synthetic oligonucleotide
atatccgatttaaatcgtcatttatatggt

SEQ ID NO: 413879 - DNA, 30 bp, Artificial Sequence
  Synthetic oligonucleotide
atagtgtatcctggacgttacgcctatggt

SEQ ID NO: 413880 - DNA, 30 bp, Artificial Sequence
  Synthetic oligonucleotide
atctagggaatcaagagatactcctatggt

SEQ ID NO: 413881 - DNA, 30 bp, Artificial Sequence
  Synthetic oligonucleotide
catataggcctataaggatagtgctatggt

SEQ ID NO: 413882 - DNA, 30 bp, Artificial Sequence
  Synthetic oligonucleotide
acaacatactccaaaaaatggtagtatggt

SEQ ID NO: 413883 - DNA, 30 bp, Artificial Sequence
  Synthetic oligonucleotide
ctaggtaccaccagaggaatccggtatggt

SEQ ID NO: 413884 - DNA, 30 bp, Artificial Sequence
  Synthetic oligonucleotide
gaaaaaatagaaacatcctatggttatggt

SEQ ID NO: 413885 - DNA, 30 bp, Artificial Sequence
  Synthetic oligonucleotide
gagatggcatcaagaacggacatttatggt

SEQ ID NO: 413886 - DNA, 30 bp, Artificial Sequence
  Synthetic oligonucleotide
tgcgcgctaagcagaatttatgtttatggt

SEQ ID NO: 413887 - DNA, 30 bp, Artificial Sequence
  Synthetic oligonucleotide
catcaaacctgccggggccaaccaactggt

SEQ ID NO: 413888 - DNA, 30 bp, Artificial Sequence
  Synthetic oligonucleotide
tttcggcattttaacacgtttgcaactggt

SEQ ID NO: 413889 - DNA, 30 bp, Artificial Sequence
  Synthetic oligonucleotide
agtttagctgttgctttatcgcacactggt

SEQ ID NO: 413890 - DNA, 30 bp, Artificial Sequence
  Synthetic oligonucleotide
ggtaacacttgagctcgatgccgcactggt

SEQ ID NO: 413891 - DNA, 31 bp, Artificial Sequence
  Synthetic oligonucleotide
agatccggcaatcaagagctgtggcactggt

SEQ ID NO: 413892 - DNA, 30 bp, Artificial Sequence
  Synthetic oligonucleotide
aaaggccacccggcttgttacgtgactggt

SEQ ID NO: 413893 - DNA, 30 bp, Artificial Sequence
  Synthetic oligonucleotide
aatgggcaacacatgcaaccacttactggt

SEQ ID NO: 413894 - DNA, 30 bp, Artificial Sequence
  Synthetic oligonucleotide
agctcttcccattgaggattagttactggt

SEQ ID NO: 413895 - DNA, 30 bp, Artificial Sequence
  Synthetic oligonucleotide
tgcgatgacttcaattggagtccccctggt

SEQ ID NO: 413896 - DNA, 30 bp, Artificial Sequence
  Synthetic oligonucleotide
atcatgttagttctacgtacgtggcctggt

SEQ ID NO: 413897 - DNA, 30 bp, Artificial Sequence
  Synthetic oligonucleotide
gtcagtcagatcctcgcgatactgcctggt

SEQ ID NO: 413898 - DNA, 31 bp, Artificial Sequence
  Synthetic oligonucleotide
aatccgataaccgttcgatgaggatcctggt

SEQ ID NO: 413899 - DNA, 30 bp, Artificial Sequence
  Synthetic oligonucleotide
tatcagatgtagtggaggacagttcctggt

SEQ ID NO: 413900 - DNA, 30 bp, Artificial Sequence
  Synthetic oligonucleotide
taatatggtcgtgcaagactccacgctggt

SEQ ID NO: 413901 - DNA, 30 bp, Artificial Sequence
  Synthetic oligonucleotide
cgtttataatttgtagggggttgcgctggt

SEQ ID NO: 413902 - DNA, 30 bp, Artificial Sequence
  Synthetic oligonucleotide
gttcgcgtacggattagttacgaggctggt

SEQ ID NO: 413903 - DNA, 30 bp, Artificial Sequence
  Synthetic oligonucleotide
tacagccggtggtaagtttgaatggctggt

SEQ ID NO: 413904 - DNA, 30 bp, Artificial Sequence
  Synthetic oligonucleotide
gagtgcaacacaatggtgtgcctggctggt

SEQ ID NO: 413905 - DNA, 30 bp, Artificial Sequence
  Synthetic oligonucleotide
catgcgcaatttagtttcacaagatctggt

SEQ ID NO: 413906 - DNA, 30 bp, Artificial Sequence
  Synthetic oligonucleotide
agcctatctcgcctcatgtgaacctctggt

SEQ ID NO: 413907 - DNA, 30 bp, Artificial Sequence
  Synthetic oligonucleotide
ccccggacgggtcgaataagcgggtctggt

SEQ ID NO: 413908 - DNA, 30 bp, Artificial Sequence
  Synthetic oligonucleotide
atgcggagatgagatattttatcttctggt

SEQ ID NO: 413909 - DNA, 30 bp, Artificial Sequence
  Synthetic oligonucleotide
ttgcgcataaccccgccagtagtttctggt

SEQ ID NO: 413910 - DNA, 30 bp, Artificial Sequence
  Synthetic oligonucleotide
aaaccacaaattatcaaagcgtcaagtggt

SEQ ID NO: 413911 - DNA, 30 bp, Artificial Sequence
  Synthetic oligonucleotide
gttgaatcgtcaatgtttagtaccagtggt

SEQ ID NO: 413912 - DNA, 30 bp, Artificial Sequence
  Synthetic oligonucleotide
gtagcgctcctccgaggcgcaatgagtggt

SEQ ID NO: 413913 - DNA, 30 bp, Artificial Sequence
  Synthetic oligonucleotide
ttcagtcgtataacgttgacccatagtggt

SEQ ID NO: 413914 - DNA, 30 bp, Artificial Sequence
  Synthetic oligonucleotide
aagcacatggggcaccccccctctagtggt

SEQ ID NO: 413915 - DNA, 30 bp, Artificial Sequence
  Synthetic oligonucleotide
aaagagggcaatctgacgcggagacgtggt

SEQ ID NO: 413916 - DNA, 30 bp, Artificial Sequence
  Synthetic oligonucleotide
gtgatccgattatcagttccaatacgtggt

SEQ ID NO: 413917 - DNA, 30 bp, Artificial Sequence
  Synthetic oligonucleotide
actgatctaccgccaaattccacccgtggt

SEQ ID NO: 413918 - DNA, 30 bp, Artificial Sequence
  Synthetic oligonucleotide
tacgagtgatattgatacgacgcccgtggt

SEQ ID NO: 413919 - DNA, 30 bp, Artificial Sequence
  Synthetic oligonucleotide
catgtaatagtcctgtgtgcacggcgtggt

SEQ ID NO: 413920 - DNA, 30 bp, Artificial Sequence
  Synthetic oligonucleotide
attagtctaagtctggtcgaagggcgtggt

SEQ ID NO: 413921 - DNA, 30 bp, Artificial Sequence
  Synthetic oligonucleotide
agctacacgccggtgtcagaacgtcgtggt

SEQ ID NO: 413922 - DNA, 30 bp, Artificial Sequence
  Synthetic oligonucleotide
gaatctttatctcggacgttagttcgtggt

SEQ ID NO: 413923 - DNA, 30 bp, Artificial Sequence
  Synthetic oligonucleotide
tacgcggacacgactgtacatggtggtggt

SEQ ID NO: 413924 - DNA, 30 bp, Artificial Sequence
  Synthetic oligonucleotide
cttgggtatccggatgggtttctatgtggt

SEQ ID NO: 413925 - DNA, 30 bp, Artificial Sequence
  Synthetic oligonucleotide
gggtcgacggtcccgtctgggtactgtggt

SEQ ID NO: 413926 - DNA, 30 bp, Artificial Sequence
  Synthetic oligonucleotide
gtcatgaccactaagagggtagagtgtggt

SEQ ID NO: 413927 - DNA, 30 bp, Artificial Sequence
  Synthetic oligonucleotide
ccagcgccccagtaaacggagtcgtgtggt

SEQ ID NO: 413928 - DNA, 30 bp, Artificial Sequence
  Synthetic oligonucleotide
ccgcttctcgcaggacttggtttgtgtggt

SEQ ID NO: 413929 - DNA, 30 bp, Artificial Sequence
  Synthetic oligonucleotide
ttcataacatgaataggagtgcattgtggt

SEQ ID NO: 413930 - DNA, 29 bp, Artificial Sequence
  Synthetic oligonucleotide
gaactttttaagggaaacaagattgtggt

SEQ ID NO: 413931 - DNA, 30 bp, Artificial Sequence
  Synthetic oligonucleotide
accttccaggttctgttcgcgggttgtggt

SEQ ID NO: 413932 - DNA, 30 bp, Artificial Sequence
  Synthetic oligonucleotide
aataatccgtagcgctagtgcatttgtggt

SEQ ID NO: 413933 - DNA, 30 bp, Artificial Sequence
  Synthetic oligonucleotide
ctcgtgtgtacagctcttgtataaattggt

SEQ ID NO: 413934 - DNA, 30 bp, Artificial Sequence
  Synthetic oligonucleotide
gagtacatagtattaagactttcaattggt

SEQ ID NO: 413935 - DNA, 30 bp, Artificial Sequence
  Synthetic oligonucleotide
agaggatctataatgtttccggtaattggt

SEQ ID NO: 413936 - DNA, 30 bp, Artificial Sequence
  Synthetic oligonucleotide
atttgccgattgtgcaaagagttaattggt

SEQ ID NO: 413937 - DNA, 30 bp, Artificial Sequence
  Synthetic oligonucleotide
cgggcgcatgaccaatatgctaacattggt

SEQ ID NO: 413938 - DNA, 30 bp, Artificial Sequence
  Synthetic oligonucleotide
ctatgttctccccccgtttagggcattggt

SEQ ID NO: 413939 - DNA, 30 bp, Artificial Sequence
  Synthetic oligonucleotide
acattcctcggccccgtggttttcattggt

SEQ ID NO: 413940 - DNA, 30 bp, Artificial Sequence
  Synthetic oligonucleotide
aatcaagagttgcccttaaatgcgattggt

SEQ ID NO: 413941 - DNA, 30 bp, Artificial Sequence
  Synthetic oligonucleotide
agcctggtaaagcttactcctattattggt

SEQ ID NO: 413942 - DNA, 30 bp, Artificial Sequence
  Synthetic oligonucleotide
atgcgacgctccggcacacgtactcttggt

SEQ ID NO: 413943 - DNA, 30 bp, Artificial Sequence
  Synthetic oligonucleotide
catttggtaaatttttaaaactgtcttggt

SEQ ID NO: 413944 - DNA, 30 bp, Artificial Sequence
  Synthetic oligonucleotide
cacaggtaatgagcccctcgtaaagttggt

SEQ ID NO: 413945 - DNA, 30 bp, Artificial Sequence
  Synthetic oligonucleotide
taataaacactaccaagcatagaagttggt

SEQ ID NO: 413946 - DNA, 30 bp, Artificial Sequence
  Synthetic oligonucleotide
cagaaacgggatcacgggatcctagttggt

SEQ ID NO: 413947 - DNA, 30 bp, Artificial Sequence
  Synthetic oligonucleotide
cgcgggtgatggcctgccggtatggttggt

SEQ ID NO: 413948 - DNA, 30 bp, Artificial Sequence
  Synthetic oligonucleotide
tgtacgagtcggactcctgacgtggttggt

SEQ ID NO: 413949 - DNA, 30 bp, Artificial Sequence
  Synthetic oligonucleotide
ggcggtcaattgaatgggcgcagatttggt

SEQ ID NO: 413950 - DNA, 30 bp, Artificial Sequence
  Synthetic oligonucleotide
cttggactgagtcgtatgttccgctttggt

SEQ ID NO: 413951 - DNA, 30 bp, Artificial Sequence
  Synthetic oligonucleotide
agacagagtgcggcagttgaaccttttggt

SEQ ID NO: 413952 - DNA, 30 bp, Artificial Sequence
  Synthetic oligonucleotide
tgtcgcttaatcgaactcgggtaaaaatgt

SEQ ID NO: 413953 - DNA, 30 bp, Artificial Sequence
  Synthetic oligonucleotide
cattagaggtactccgggcccgcaaaatgt

SEQ ID NO: 413954 - DNA, 30 bp, Artificial Sequence
  Synthetic oligonucleotide
ggcttcttctaaggatgggaagccaaatgt

SEQ ID NO: 413955 - DNA, 30 bp, Artificial Sequence
  Synthetic oligonucleotide
aatcaaacacaatattagcgaagcaaatgt

SEQ ID NO: 413956 - DNA, 30 bp, Artificial Sequence
  Synthetic oligonucleotide
gacatttacatacccatgtcaatcaaatgt

SEQ ID NO: 413957 - DNA, 30 bp, Artificial Sequence
  Synthetic oligonucleotide
agaaccgccgcagaattgctagtcaaatgt

SEQ ID NO: 413958 - DNA, 30 bp, Artificial Sequence
  Synthetic oligonucleotide
ctgggtgaccgcaaggttctcactaaatgt

SEQ ID NO: 413959 - DNA, 30 bp, Artificial Sequence
  Synthetic oligonucleotide
atacggctgtctgtgtctgagggtaaatgt

SEQ ID NO: 413960 - DNA, 30 bp, Artificial Sequence
  Synthetic oligonucleotide
ggcacaagaatgtctgtaaatgttaaatgt

SEQ ID NO: 413961 - DNA, 30 bp, Artificial Sequence
  Synthetic oligonucleotide
agtagtgggtgttgcgccacgcaccaatgt

SEQ ID NO: 413962 - DNA, 30 bp, Artificial Sequence
  Synthetic oligonucleotide
gtctatggcaagtgaatggaggtccaatgt

SEQ ID NO: 413963 - DNA, 30 bp, Artificial Sequence
  Synthetic oligonucleotide
aaatgaggatgtgcctgcaacaggcaatgt

SEQ ID NO: 413964 - DNA, 30 bp, Artificial Sequence
  Synthetic oligonucleotide
tatggttcggttgtcgacctacctcaatgt

SEQ ID NO: 413965 - DNA, 30 bp, Artificial Sequence
  Synthetic oligonucleotide
ggttataagtagtttaaaagctttcaatgt

SEQ ID NO: 413966 - DNA, 30 bp, Artificial Sequence
  Synthetic oligonucleotide
acaatcgggatgaaacaagtctcagaatgt

SEQ ID NO: 413967 - DNA, 30 bp, Artificial Sequence
  Synthetic oligonucleotide
ttggtcatctcggaaattgcttgagaatgt

SEQ ID NO: 413968 - DNA, 30 bp, Artificial Sequence
  Synthetic oligonucleotide
tctctactctcgttggtgggcttggaatgt

SEQ ID NO: 413969 - DNA, 30 bp, Artificial Sequence
  Synthetic oligonucleotide
accacaactgcttttcaagggtaataatgt

SEQ ID NO: 413970 - DNA, 30 bp, Artificial Sequence
  Synthetic oligonucleotide
acgctctttagtagttaaaaaatataatgt

SEQ ID NO: 413971 - DNA, 30 bp, Artificial Sequence
  Synthetic oligonucleotide
gctaacggtggtttttcaacagtctaatgt

SEQ ID NO: 413972 - DNA, 30 bp, Artificial Sequence
  Synthetic oligonucleotide
agcctctctggactctagttcctgtaatgt

SEQ ID NO: 413973 - DNA, 30 bp, Artificial Sequence
  Synthetic oligonucleotide
gaaccgtttaagggccaggcaccttaatgt

SEQ ID NO: 413974 - DNA, 30 bp, Artificial Sequence
  Synthetic oligonucleotide
gtatatacagggcaattgcatcgttaatgt

SEQ ID NO: 413975 - DNA, 30 bp, Artificial Sequence
  Synthetic oligonucleotide
taaatggaatcccggcagagtttttaatgt

SEQ ID NO: 413976 - DNA, 30 bp, Artificial Sequence
  Synthetic oligonucleotide
ataatcgtgtggatcgtagtataaacatgt

SEQ ID NO: 413977 - DNA, 30 bp, Artificial Sequence
  Synthetic oligonucleotide
ctgccagctgaggtagcagctggaacatgt

SEQ ID NO: 413978 - DNA, 30 bp, Artificial Sequence
  Synthetic oligonucleotide
tgtagcgtgccccgctgcccgggcacatgt

SEQ ID NO: 413979 - DNA, 30 bp, Artificial Sequence
  Synthetic oligonucleotide
gttttgactactgaggcaccatagacatgt

SEQ ID NO: 413980 - DNA, 30 bp, Artificial Sequence
  Synthetic oligonucleotide
ttcctcggacggtaggggtgcatgacatgt

SEQ ID NO: 413981 - DNA, 31 bp, Artificial Sequence
  Synthetic oligonucleotide
gtttcggctaatgcttaatataaatacatgt

SEQ ID NO: 413982 - DNA, 30 bp, Artificial Sequence
  Synthetic oligonucleotide
accctgttcaaccactagctgggtacatgt

SEQ ID NO: 413983 - DNA, 30 bp, Artificial Sequence
  Synthetic oligonucleotide
cctggaggtcgcgtgatattgattacatgt

SEQ ID NO: 413984 - DNA, 30 bp, Artificial Sequence
  Synthetic oligonucleotide
tttccggtctgaagatagaaacgcccatgt

SEQ ID NO: 413985 - DNA, 30 bp, Artificial Sequence
  Synthetic oligonucleotide
ttactttgtaatgcgggtaacatcccatgt

SEQ ID NO: 413986 - DNA, 30 bp, Artificial Sequence
  Synthetic oligonucleotide
actctaaaatttggtcccttggggccatgt

SEQ ID NO: 413987 - DNA, 30 bp, Artificial Sequence
  Synthetic oligonucleotide
ctggcaagaccggcagaccaggctccatgt

SEQ ID NO: 413988 - DNA, 30 bp, Artificial Sequence
  Synthetic oligonucleotide
agcctatcgatgggccactgttgtccatgt

SEQ ID NO: 413989 - DNA, 30 bp, Artificial Sequence
  Synthetic oligonucleotide
ccagtgctattacactaggtaatagcatgt

SEQ ID NO: 413990 - DNA, 30 bp, Artificial Sequence
  Synthetic oligonucleotide
aaagtgcgaggacaattgcctttagcatgt

SEQ ID NO: 413991 - DNA, 30 bp, Artificial Sequence
  Synthetic oligonucleotide
gtggagggtgagctctccgtggacgcatgt

SEQ ID NO: 413992 - DNA, 30 bp, Artificial Sequence
  Synthetic oligonucleotide
ctatagggccagacggagacaagcgcatgt

SEQ ID NO: 413993 - DNA, 30 bp, Artificial Sequence
  Synthetic oligonucleotide
gtccctgggcaattcaatgacggcgcatgt

SEQ ID NO: 413994 - DNA, 30 bp, Artificial Sequence
  Synthetic oligonucleotide
gaaccgggcgtggtgcgcgttctcgcatgt

SEQ ID NO: 413995 - DNA, 30 bp, Artificial Sequence
  Synthetic oligonucleotide
ccccgcagataggtttggaagcaggcatgt

SEQ ID NO: 413996 - DNA, 30 bp, Artificial Sequence
  Synthetic oligonucleotide
taaatgtaaacctagcctgtagaggcatgt

SEQ ID NO: 413997 - DNA, 30 bp, Artificial Sequence
  Synthetic oligonucleotide
ataatgtagttcacactttcgtatgcatgt

SEQ ID NO: 413998 - DNA, 30 bp, Artificial Sequence
  Synthetic oligonucleotide
cctgactgaatacggattctggctgcatgt

SEQ ID NO: 413999 - DNA, 30 bp, Artificial Sequence
  Synthetic oligonucleotide
tattttttgctaggtttgatacttgcatgt

SEQ ID NO: 414000 - DNA, 30 bp, Artificial Sequence
  Synthetic oligonucleotide
aagtccataatccgttctggttttgcatgt

SEQ ID NO: 414001 - DNA, 30 bp, Artificial Sequence
  Synthetic oligonucleotide
aatgtgtttcgttacatgcgatcatcatgt

SEQ ID NO: 414002 - DNA, 30 bp, Artificial Sequence
  Synthetic oligonucleotide
tagtctgaaagtgcatgtggcaactcatgt

SEQ ID NO: 414003 - DNA, 31 bp, Artificial Sequence
  Synthetic oligonucleotide
ttgatccttcaacgcaatataggagtcatgt

SEQ ID NO: 414004 - DNA, 30 bp, Artificial Sequence
  Synthetic oligonucleotide
gtctgccgagtagacattgcggtgtcatgt

SEQ ID NO: 414005 - DNA, 30 bp, Artificial Sequence
  Synthetic oligonucleotide
gagcatgttttcgcggcatagaattcatgt

SEQ ID NO: 414006 - DNA, 30 bp, Artificial Sequence
  Synthetic oligonucleotide
ctagcgttaactaatatgatgtgttcatgt

SEQ ID NO: 414007 - DNA, 30 bp, Artificial Sequence
  Synthetic oligonucleotide
cgctcctgcccatgtcttggaagaagatgt

SEQ ID NO: 414008 - DNA, 30 bp, Artificial Sequence
  Synthetic oligonucleotide
gaaagtgaccgcgaacccgatagcagatgt

SEQ ID NO: 414009 - DNA, 30 bp, Artificial Sequence
  Synthetic oligonucleotide
ttcaaaaaaacggtgtctcctcttagatgt

SEQ ID NO: 414010 - DNA, 30 bp, Artificial Sequence
  Synthetic oligonucleotide
tggattttttcagagtatagaagacgatgt

SEQ ID NO: 414011 - DNA, 30 bp, Artificial Sequence
  Synthetic oligonucleotide
attcgactagcgagcgccacctgacgatgt

SEQ ID NO: 414012 - DNA, 30 bp, Artificial Sequence
  Synthetic oligonucleotide
tatcttaacgtgcgtcgatgtcaccgatgt

SEQ ID NO: 414013 - DNA, 30 bp, Artificial Sequence
  Synthetic oligonucleotide
ttattaagcgcatcatctgcgtaccgatgt

SEQ ID NO: 414014 - DNA, 30 bp, Artificial Sequence
  Synthetic oligonucleotide
cccaccgctaatacgcgactacagcgatgt

SEQ ID NO: 414015 - DNA, 30 bp, Artificial Sequence
  Synthetic oligonucleotide
ttcttactcaagcaaacgaacgttcgatgt

SEQ ID NO: 414016 - DNA, 30 bp, Artificial Sequence
  Synthetic oligonucleotide
gactatgctactgcatagcaggttcgatgt

SEQ ID NO: 414017 - DNA, 30 bp, Artificial Sequence
  Synthetic oligonucleotide
attacatctagctagatgaagtgaggatgt

SEQ ID NO: 414018 - DNA, 30 bp, Artificial Sequence
  Synthetic oligonucleotide
ataatattcatgtcgcgatgtcggggatgt

SEQ ID NO: 414019 - DNA, 30 bp, Artificial Sequence
  Synthetic oligonucleotide
gaaccagcccatagcttgccgaatggatgt

SEQ ID NO: 414020 - DNA, 30 bp, Artificial Sequence
  Synthetic oligonucleotide
cactgaaggcccccctgtagccctggatgt

SEQ ID NO: 414021 - DNA, 30 bp, Artificial Sequence
  Synthetic oligonucleotide
atatgcggcgcgcctgcccgtcctggatgt

SEQ ID NO: 414022 - DNA, 30 bp, Artificial Sequence
  Synthetic oligonucleotide
tttagcatgcccgctcggctttgatgatgt

SEQ ID NO: 414023 - DNA, 30 bp, Artificial Sequence
  Synthetic oligonucleotide
ctttcgtccaacacggcgaaaaagtgatgt

SEQ ID NO: 414024 - DNA, 30 bp, Artificial Sequence
  Synthetic oligonucleotide
tcggtcgttgtgctaccagccacttgatgt

SEQ ID NO: 414025 - DNA, 30 bp, Artificial Sequence
  Synthetic oligonucleotide
ggtagcccaacgcattcagctatttgatgt

SEQ ID NO: 414026 - DNA, 30 bp, Artificial Sequence
  Synthetic oligonucleotide
ggtgatttatagttgtggtgccaaatatgt

SEQ ID NO: 414027 - DNA, 31 bp, Artificial Sequence
  Synthetic oligonucleotide
gcttgaaatcaccccacattatttcatatgt

SEQ ID NO: 414028 - DNA, 30 bp, Artificial Sequence
  Synthetic oligonucleotide
gatattgataaatcgatgcgtaagatatgt

SEQ ID NO: 414029 - DNA, 30 bp, Artificial Sequence
  Synthetic oligonucleotide
gtactaacccccattgtgtaagagatatgt

SEQ ID NO: 414030 - DNA, 30 bp, Artificial Sequence
  Synthetic oligonucleotide
ttctatgggatgaaagtctctctgatatgt

SEQ ID NO: 414031 - DNA, 30 bp, Artificial Sequence
  Synthetic oligonucleotide
aatcagtaaggcttcataactgtgatatgt

SEQ ID NO: 414032 - DNA, 30 bp, Artificial Sequence
  Synthetic oligonucleotide
ggaccaacaagtcgcccgtgattgatatgt

SEQ ID NO: 414033 - DNA, 30 bp, Artificial Sequence
  Synthetic oligonucleotide
ttggttgctagaaggttttcacggctatgt

SEQ ID NO: 414034 - DNA, 30 bp, Artificial Sequence
  Synthetic oligonucleotide
tggtctgcgtctctacaagaaaatctatgt

SEQ ID NO: 414035 - DNA, 30 bp, Artificial Sequence
  Synthetic oligonucleotide
agccccccgcagggttccgcacctctatgt

SEQ ID NO: 414036 - DNA, 30 bp, Artificial Sequence
  Synthetic oligonucleotide
tacagtcaagtttctgccaaaagtctatgt

SEQ ID NO: 414037 - DNA, 30 bp, Artificial Sequence
  Synthetic oligonucleotide
aagtctgtcgagcaggagcgtaaagtatgt

SEQ ID NO: 414038 - DNA, 30 bp, Artificial Sequence
  Synthetic oligonucleotide
gtttcggctgccggatccatcgaagtatgt

SEQ ID NO: 414039 - DNA, 30 bp, Artificial Sequence
  Synthetic oligonucleotide
tgggttacgctggtaggacaggaagtatgt

SEQ ID NO: 414040 - DNA, 30 bp, Artificial Sequence
  Synthetic oligonucleotide
gtcgcagacccttcataggcccgagtatgt

SEQ ID NO: 414041 - DNA, 30 bp, Artificial Sequence
  Synthetic oligonucleotide
agctcgtacgggtcagcgaaccccgtatgt

SEQ ID NO: 414042 - DNA, 30 bp, Artificial Sequence
  Synthetic oligonucleotide
tgcggtggcggacgtcacagtgaggtatgt

SEQ ID NO: 414043 - DNA, 30 bp, Artificial Sequence
  Synthetic oligonucleotide
agaagcaatcacaattatgggccggtatgt

SEQ ID NO: 414044 - DNA, 30 bp, Artificial Sequence
  Synthetic oligonucleotide
tggaaccatgcctcgggtaaaatggtatgt

SEQ ID NO: 414045 - DNA, 30 bp, Artificial Sequence
  Synthetic oligonucleotide
gtagcgcgcttcgaatcagatatggtatgt

SEQ ID NO: 414046 - DNA, 30 bp, Artificial Sequence
  Synthetic oligonucleotide
agtttgatcagtcgtgaggttatggtatgt

SEQ ID NO: 414047 - DNA, 30 bp, Artificial Sequence
  Synthetic oligonucleotide
tgactgtcagggcttacgtgccctgtatgt

SEQ ID NO: 414048 - DNA, 30 bp, Artificial Sequence
  Synthetic oligonucleotide
aatcaaacgtttgtttgtgtggctgtatgt

SEQ ID NO: 414049 - DNA, 30 bp, Artificial Sequence
  Synthetic oligonucleotide
ccaggtaatgaggtattattagttgtatgt

SEQ ID NO: 414050 - DNA, 30 bp, Artificial Sequence
  Synthetic oligonucleotide
acccctaaatttcctagagaatttgtatgt

SEQ ID NO: 414051 - DNA, 30 bp, Artificial Sequence
  Synthetic oligonucleotide
tgggaacataggttcgcataatttgtatgt

SEQ ID NO: 414052 - DNA, 30 bp, Artificial Sequence
  Synthetic oligonucleotide
aggcgagtacccattctgtgttcattatgt

SEQ ID NO: 414053 - DNA, 30 bp, Artificial Sequence
  Synthetic oligonucleotide
caagaccgacatctttagcaaggattatgt

SEQ ID NO: 414054 - DNA, 30 bp, Artificial Sequence
  Synthetic oligonucleotide
gttcgctagcataatcgtcagggattatgt

SEQ ID NO: 414055 - DNA, 30 bp, Artificial Sequence
  Synthetic oligonucleotide
gcagtgaacgaaataggccccatcttatgt

SEQ ID NO: 414056 - DNA, 30 bp, Artificial Sequence
  Synthetic oligonucleotide
ttggaggaacacatacaggatctcttatgt

SEQ ID NO: 414057 - DNA, 30 bp, Artificial Sequence
  Synthetic oligonucleotide
gactagagtctgggtttcagatcgttatgt

SEQ ID NO: 414058 - DNA, 30 bp, Artificial Sequence
  Synthetic oligonucleotide
ggcttactagactattcacaagggttatgt

SEQ ID NO: 414059 - DNA, 30 bp, Artificial Sequence
  Synthetic oligonucleotide
ggctaaagccagcgggggtcgtggttatgt

SEQ ID NO: 414060 - DNA, 30 bp, Artificial Sequence
  Synthetic oligonucleotide
ttctgcgaagcatatctggggttgttatgt

SEQ ID NO: 414061 - DNA, 30 bp, Artificial Sequence
  Synthetic oligonucleotide
gcgcacacgcgcgttagtctaactttatgt

SEQ ID NO: 414062 - DNA, 30 bp, Artificial Sequence
  Synthetic oligonucleotide
gcatgttatagccaacagtgttctttatgt

SEQ ID NO: 414063 - DNA, 30 bp, Artificial Sequence
  Synthetic oligonucleotide
ctacgtccttctatgacaggcgaaaactgt

SEQ ID NO: 414064 - DNA, 30 bp, Artificial Sequence
  Synthetic oligonucleotide
agtgcctcgtaaagtctcagctaaaactgt

SEQ ID NO: 414065 - DNA, 30 bp, Artificial Sequence
  Synthetic oligonucleotide
gagttcacagtatagttagagttaaactgt

SEQ ID NO: 414066 - DNA, 30 bp, Artificial Sequence
  Synthetic oligonucleotide
agactttgtccgccccatgtctacaactgt

SEQ ID NO: 414067 - DNA, 30 bp, Artificial Sequence
  Synthetic oligonucleotide
tatccaatctgggcgttttggcccaactgt

SEQ ID NO: 414068 - DNA, 30 bp, Artificial Sequence
  Synthetic oligonucleotide
taatccagcccgccgaccccggtcaactgt

SEQ ID NO: 414069 - DNA, 30 bp, Artificial Sequence
  Synthetic oligonucleotide
ggtcctttttcctaatggatcgggaactgt

SEQ ID NO: 414070 - DNA, 30 bp, Artificial Sequence
  Synthetic oligonucleotide
gagtaggtgtatattacggccattaactgt

SEQ ID NO: 414071 - DNA, 30 bp, Artificial Sequence
  Synthetic oligonucleotide
cgcctacataaggatactaatacacactgt

SEQ ID NO: 414072 - DNA, 30 bp, Artificial Sequence
  Synthetic oligonucleotide
gactatggctgttgtgcggcgtcacactgt

SEQ ID NO: 414073 - DNA, 30 bp, Artificial Sequence
  Synthetic oligonucleotide
ggtcggacagggccaactccatgacactgt

SEQ ID NO: 414074 - DNA, 30 bp, Artificial Sequence
  Synthetic oligonucleotide
atgacgttatggtataactcgggccactgt

SEQ ID NO: 414075 - DNA, 30 bp, Artificial Sequence
  Synthetic oligonucleotide
gaaatcacggtccccgaagaacaagactgt

SEQ ID NO: 414076 - DNA, 30 bp, Artificial Sequence
  Synthetic oligonucleotide
attcgtattctgtcagctcgttaagactgt

SEQ ID NO: 414077 - DNA, 30 bp, Artificial Sequence
  Synthetic oligonucleotide
cgtttgtagtacgagacgcgaggagactgt

SEQ ID NO: 414078 - DNA, 30 bp, Artificial Sequence
  Synthetic oligonucleotide
tgagtgtctgactggtattcaatcgactgt

SEQ ID NO: 414079 - DNA, 30 bp, Artificial Sequence
  Synthetic oligonucleotide
tgctggatttcgttcggttgaatctactgt

SEQ ID NO: 414080 - DNA, 30 bp, Artificial Sequence
  Synthetic oligonucleotide
aagtctatggaaacgcatatgctctactgt

SEQ ID NO: 414081 - DNA, 30 bp, Artificial Sequence
  Synthetic oligonucleotide
atctagcgtagaattctttcgaagtactgt

SEQ ID NO: 414082 - DNA, 30 bp, Artificial Sequence
  Synthetic oligonucleotide
agattgaacgccgattggcggaagtactgt

SEQ ID NO: 414083 - DNA, 30 bp, Artificial Sequence
  Synthetic oligonucleotide
gtctgttaggagtacgcagtcgattactgt

SEQ ID NO: 414084 - DNA, 30 bp, Artificial Sequence
  Synthetic oligonucleotide
aaaacattagccctcgccgacagttactgt

SEQ ID NO: 414085 - DNA, 30 bp, Artificial Sequence
  Synthetic oligonucleotide
agtacaaatcccggttgccgtggttactgt

SEQ ID NO: 414086 - DNA, 30 bp, Artificial Sequence
  Synthetic oligonucleotide
ttcgtgggacgatccgtgtcgctttactgt

SEQ ID NO: 414087 - DNA, 30 bp, Artificial Sequence
  Synthetic oligonucleotide
cccaaccactacaaggcactcttttactgt

SEQ ID NO: 414088 - DNA, 30 bp, Artificial Sequence
  Synthetic oligonucleotide
caccacctagaaacatgatgaccaacctgt

SEQ ID NO: 414089 - DNA, 30 bp, Artificial Sequence
  Synthetic oligonucleotide
actgccaaaaaggtcttcgctggcacctgt

SEQ ID NO: 414090 - DNA, 30 bp, Artificial Sequence
  Synthetic oligonucleotide
aatgttgtgtaaaattttggagtcacctgt

SEQ ID NO: 414091 - DNA, 30 bp, Artificial Sequence
  Synthetic oligonucleotide
tagtcaggccatttcagtagcagtacctgt

SEQ ID NO: 414092 - DNA, 30 bp, Artificial Sequence
  Synthetic oligonucleotide
ggcacatcggacgtttgatgcggtacctgt

SEQ ID NO: 414093 - DNA, 30 bp, Artificial Sequence
  Synthetic oligonucleotide
tacaggttgtcacgtgcacatctaccctgt

SEQ ID NO: 414094 - DNA, 30 bp, Artificial Sequence
  Synthetic oligonucleotide
acgtcccggcgcagtcaatcagtcccctgt

SEQ ID NO: 414095 - DNA, 30 bp, Artificial Sequence
  Synthetic oligonucleotide
ttttatcggggggagcgtctcaagccctgt

SEQ ID NO: 414096 - DNA, 30 bp, Artificial Sequence
  Synthetic oligonucleotide
gggactcaaattgttccagcacagccctgt

SEQ ID NO: 414097 - DNA, 30 bp, Artificial Sequence
  Synthetic oligonucleotide
cacactgattgtcatcaagactcgccctgt

SEQ ID NO: 414098 - DNA, 30 bp, Artificial Sequence
  Synthetic oligonucleotide
tctgctggcgggcaataatgcatgccctgt

SEQ ID NO: 414099 - DNA, 30 bp, Artificial Sequence
  Synthetic oligonucleotide
tcctggagttcctcctagatgatgccctgt

SEQ ID NO: 414100 - DNA, 30 bp, Artificial Sequence
  Synthetic oligonucleotide
ctaagtggtgcctcatgcgatcacgcctgt

SEQ ID NO: 414101 - DNA, 30 bp, Artificial Sequence
  Synthetic oligonucleotide
gagtgagctcctcgagcacgaatcgcctgt

SEQ ID NO: 414102 - DNA, 30 bp, Artificial Sequence
  Synthetic oligonucleotide
acacgccgctgtcgtggtggcagtgcctgt

SEQ ID NO: 414103 - DNA, 30 bp, Artificial Sequence
  Synthetic oligonucleotide
taataaacgatattttgctcggcatcctgt

SEQ ID NO: 414104 - DNA, 30 bp, Artificial Sequence
  Synthetic oligonucleotide
atggtcagtgccgaataggaccgatcctgt

SEQ ID NO: 414105 - DNA, 30 bp, Artificial Sequence
  Synthetic oligonucleotide
tagcagttgcagtgggcctcggagtcctgt

SEQ ID NO: 414106 - DNA, 30 bp, Artificial Sequence
  Synthetic oligonucleotide
gttagagtcgaatcggttacctcgtcctgt

SEQ ID NO: 414107 - DNA, 30 bp, Artificial Sequence
  Synthetic oligonucleotide
ataaacacgccacataggtgtgtttcctgt

SEQ ID NO: 414108 - DNA, 30 bp, Artificial Sequence
  Synthetic oligonucleotide
tcagagaagttttgtgtgtgtatcagctgt

SEQ ID NO: 414109 - DNA, 30 bp, Artificial Sequence
  Synthetic oligonucleotide
taggtgttaggaggcctttttcggagctgt

SEQ ID NO: 414110 - DNA, 30 bp, Artificial Sequence
  Synthetic oligonucleotide
tgtgtgacggtgcctgagctgttgagctgt

SEQ ID NO: 414111 - DNA, 30 bp, Artificial Sequence
  Synthetic oligonucleotide
caggtattttttccgggctgcatacgctgt

SEQ ID NO: 414112 - DNA, 30 bp, Artificial Sequence
  Synthetic oligonucleotide
ttacattattatgatgggagccgccgctgt

SEQ ID NO: 414113 - DNA, 30 bp, Artificial Sequence
  Synthetic oligonucleotide
atccagctttgtatgagcctgcgccgctgt

SEQ ID NO: 414114 - DNA, 30 bp, Artificial Sequence
  Synthetic oligonucleotide
cccattcagagacctcaattcttccgctgt

SEQ ID NO: 414115 - DNA, 30 bp, Artificial Sequence
  Synthetic oligonucleotide
ctctggcggttaatcacacgccagcgctgt

SEQ ID NO: 414116 - DNA, 30 bp, Artificial Sequence
  Synthetic oligonucleotide
acggccattgtaatgcgattcggaggctgt

SEQ ID NO: 414117 - DNA, 30 bp, Artificial Sequence
  Synthetic oligonucleotide
cgactttgtatcttgtatccttacggctgt

SEQ ID NO: 414118 - DNA, 30 bp, Artificial Sequence
  Synthetic oligonucleotide
aggtcaaagccttctgtcaagtccggctgt

SEQ ID NO: 414119 - DNA, 30 bp, Artificial Sequence
  Synthetic oligonucleotide
tgctcatggtatcacacagcctgcggctgt

SEQ ID NO: 414120 - DNA, 30 bp, Artificial Sequence
  Synthetic oligonucleotide
gcagcgacatgacatcgtcattcgggctgt

SEQ ID NO: 414121 - DNA, 30 bp, Artificial Sequence
  Synthetic oligonucleotide
cgggcagccacatgtaccccttatggctgt

SEQ ID NO: 414122 - DNA, 30 bp, Artificial Sequence
  Synthetic oligonucleotide
cgctccacggcgcctattaaatctggctgt

SEQ ID NO: 414123 - DNA, 30 bp, Artificial Sequence
  Synthetic oligonucleotide
atccttacacgttaagtcggagcatgctgt

SEQ ID NO: 414124 - DNA, 30 bp, Artificial Sequence
  Synthetic oligonucleotide
gtagtcgagtctcggtcgctgagatgctgt

SEQ ID NO: 414125 - DNA, 30 bp, Artificial Sequence
  Synthetic oligonucleotide
aacatatgtgctagcactgaaatatgctgt

SEQ ID NO: 414126 - DNA, 30 bp, Artificial Sequence
  Synthetic oligonucleotide
ttagcatcatgctctcacatgatatgctgt

SEQ ID NO: 414127 - DNA, 30 bp, Artificial Sequence
  Synthetic oligonucleotide
aagcgctcgaatcgattgcagctatgctgt

SEQ ID NO: 414128 - DNA, 30 bp, Artificial Sequence
  Synthetic oligonucleotide
taaagatcgggtatcctagaaacctgctgt

SEQ ID NO: 414129 - DNA, 30 bp, Artificial Sequence
  Synthetic oligonucleotide
ctccggttgcagttgttaacgggctgctgt

SEQ ID NO: 414130 - DNA, 30 bp, Artificial Sequence
  Synthetic oligonucleotide
tgtctattagtatgcttaatagagtgctgt

SEQ ID NO: 414131 - DNA, 30 bp, Artificial Sequence
  Synthetic oligonucleotide
aacgaaatggcacgtaactagtattgctgt

SEQ ID NO: 414132 - DNA, 30 bp, Artificial Sequence
  Synthetic oligonucleotide
gtattattggtttgcgctgatcgttgctgt

SEQ ID NO: 414133 - DNA, 30 bp, Artificial Sequence
  Synthetic oligonucleotide
aattgaaaaatcgtatagttcgtttgctgt

SEQ ID NO: 414134 - DNA, 30 bp, Artificial Sequence
  Synthetic oligonucleotide
ggaacagcctcggattcaaaacaaatctgt

SEQ ID NO: 414135 - DNA, 30 bp, Artificial Sequence
  Synthetic oligonucleotide
tacaccgtgcttaagtaggtgtgcatctgt

SEQ ID NO: 414136 - DNA, 30 bp, Artificial Sequence
  Synthetic oligonucleotide
taggtaaacacctaccgttatagtatctgt

SEQ ID NO: 414137 - DNA, 30 bp, Artificial Sequence
  Synthetic oligonucleotide
acatgaaatatacagtgctgcggtatctgt

SEQ ID NO: 414138 - DNA, 30 bp, Artificial Sequence
  Synthetic oligonucleotide
tatcgcggggtctggcacaatgcactctgt

SEQ ID NO: 414139 - DNA, 30 bp, Artificial Sequence
  Synthetic oligonucleotide
gtgaagggattaccaaactacagactctgt

SEQ ID NO: 414140 - DNA, 30 bp, Artificial Sequence
  Synthetic oligonucleotide
catagcgagaggctagccccgagactctgt

SEQ ID NO: 414141 - DNA, 30 bp, Artificial Sequence
  Synthetic oligonucleotide
gaaaaaaggtggaactatctacagctctgt

SEQ ID NO: 414142 - DNA, 30 bp, Artificial Sequence
  Synthetic oligonucleotide
actcagagtagagatgcatataggctctgt

SEQ ID NO: 414143 - DNA, 30 bp, Artificial Sequence
  Synthetic oligonucleotide
tcaaaaggaatcccggggcctgggctctgt

SEQ ID NO: 414144 - DNA, 30 bp, Artificial Sequence
  Synthetic oligonucleotide
cgattgcacgcaccccggacagtgctctgt

SEQ ID NO: 414145 - DNA, 30 bp, Artificial Sequence
  Synthetic oligonucleotide
cactaaaaaccacaaatagcctcagtctgt

SEQ ID NO: 414146 - DNA, 30 bp, Artificial Sequence
  Synthetic oligonucleotide
cgctacttgtgtttgacacatagagtctgt

SEQ ID NO: 414147 - DNA, 30 bp, Artificial Sequence
  Synthetic oligonucleotide
gactgttgtaattggctgttccacgtctgt

SEQ ID NO: 414148 - DNA, 30 bp, Artificial Sequence
  Synthetic oligonucleotide
gaatctccgggttgggtgtgcagggtctgt

SEQ ID NO: 414149 - DNA, 30 bp, Artificial Sequence
  Synthetic oligonucleotide
gggcagggcgattggtaaggggtggtctgt

SEQ ID NO: 414150 - DNA, 30 bp, Artificial Sequence
  Synthetic oligonucleotide
agagctccgaccgtcagcttcgttgtctgt

SEQ ID NO: 414151 - DNA, 30 bp, Artificial Sequence
  Synthetic oligonucleotide
agtatcaaattctcttaactaaggttctgt

SEQ ID NO: 414152 - DNA, 30 bp, Artificial Sequence
  Synthetic oligonucleotide
ttatattgagaatcgagcttagtgttctgt

SEQ ID NO: 414153 - DNA, 30 bp, Artificial Sequence
  Synthetic oligonucleotide
taatggcgaagttattagggggatttctgt

SEQ ID NO: 414154 - DNA, 30 bp, Artificial Sequence
  Synthetic oligonucleotide
gcaataaataataacaaatctgatttctgt

SEQ ID NO: 414155 - DNA, 30 bp, Artificial Sequence
  Synthetic oligonucleotide
ttggactctccgtgaggtaagcgtttctgt

SEQ ID NO: 414156 - DNA, 30 bp, Artificial Sequence
  Synthetic oligonucleotide
cagggcatagtcgaaagggtagtaaagtgt

SEQ ID NO: 414157 - DNA, 30 bp, Artificial Sequence
  Synthetic oligonucleotide
ctggttaatcgtggataaccgtacaagtgt

SEQ ID NO: 414158 - DNA, 30 bp, Artificial Sequence
  Synthetic oligonucleotide
gcataaattcccatggtctctcgcaagtgt

SEQ ID NO: 414159 - DNA, 30 bp, Artificial Sequence
  Synthetic oligonucleotide
taattcctgagccggagagctgagaagtgt

SEQ ID NO: 414160 - DNA, 30 bp, Artificial Sequence
  Synthetic oligonucleotide
ttatgaagctttttgagcgttcataagtgt

SEQ ID NO: 414161 - DNA, 30 bp, Artificial Sequence
  Synthetic oligonucleotide
gaaatgtccagtagctttccggataagtgt

SEQ ID NO: 414162 - DNA, 30 bp, Artificial Sequence
  Synthetic oligonucleotide
ccattttagcgagccgtctcgcgtaagtgt

SEQ ID NO: 414163 - DNA, 30 bp, Artificial Sequence
  Synthetic oligonucleotide
aatgttacacgggggactctatgtaagtgt

SEQ ID NO: 414164 - DNA, 30 bp, Artificial Sequence
  Synthetic oligonucleotide
cttaataggtgggactcgggcagacagtgt

SEQ ID NO: 414165 - DNA, 30 bp, Artificial Sequence
  Synthetic oligonucleotide
tcgagttggcttggggaaatactacagtgt

SEQ ID NO: 414166 - DNA, 27 bp, Artificial Sequence
  Synthetic oligonucleotide
ggattcacgacccacaccagccagtgt

SEQ ID NO: 414167 - DNA, 30 bp, Artificial Sequence
  Synthetic oligonucleotide
cctctgcattacatgatatgggtgcagtgt

SEQ ID NO: 414168 - DNA, 30 bp, Artificial Sequence
  Synthetic oligonucleotide
ttaaataccatgtatagaggtggtcagtgt

SEQ ID NO: 414169 - DNA, 30 bp, Artificial Sequence
  Synthetic oligonucleotide
aaaatggtcactatacgtgcgcgatagtgt

SEQ ID NO: 414170 - DNA, 30 bp, Artificial Sequence
  Synthetic oligonucleotide
agcgatagtgagtttggcgacgtatagtgt

SEQ ID NO: 414171 - DNA, 30 bp, Artificial Sequence
  Synthetic oligonucleotide
ctaactgcccctgctggccgcgtatagtgt

SEQ ID NO: 414172 - DNA, 30 bp, Artificial Sequence
  Synthetic oligonucleotide
gattttactgccttaaaatagtcctagtgt

SEQ ID NO: 414173 - DNA, 30 bp, Artificial Sequence
  Synthetic oligonucleotide
atatggactttgagagttaattcgtagtgt

SEQ ID NO: 414174 - DNA, 30 bp, Artificial Sequence
  Synthetic oligonucleotide
agcgcgattcccgcccctcatcggtagtgt

SEQ ID NO: 414175 - DNA, 30 bp, Artificial Sequence
  Synthetic oligonucleotide
gagccgattacggacactggcagttagtgt

SEQ ID NO: 414176 - DNA, 30 bp, Artificial Sequence
  Synthetic oligonucleotide
ctcccaaggtctcgaggacctgggacgtgt

SEQ ID NO: 414177 - DNA, 30 bp, Artificial Sequence
  Synthetic oligonucleotide
aagaatcacctttccttcgagactacgtgt

SEQ ID NO: 414178 - DNA, 30 bp, Artificial Sequence
  Synthetic oligonucleotide
tcgttgatctcttagttttctcgaccgtgt

SEQ ID NO: 414179 - DNA, 30 bp, Artificial Sequence
  Synthetic oligonucleotide
tatcgaagaacccggaacttttgaccgtgt

SEQ ID NO: 414180 - DNA, 30 bp, Artificial Sequence
  Synthetic oligonucleotide
actttgtagttcagcaataaagccccgtgt

SEQ ID NO: 414181 - DNA, 30 bp, Artificial Sequence
  Synthetic oligonucleotide
atggttggcgggcggctctcgcggccgtgt

SEQ ID NO: 414182 - DNA, 30 bp, Artificial Sequence
  Synthetic oligonucleotide
aataagtcccctcaaagggacgtgccgtgt

SEQ ID NO: 414183 - DNA, 30 bp, Artificial Sequence
  Synthetic oligonucleotide
tcaatcggagacagaatcatcggtccgtgt

SEQ ID NO: 414184 - DNA, 30 bp, Artificial Sequence
  Synthetic oligonucleotide
cactttttcattatccgctgtcccgcgtgt

SEQ ID NO: 414185 - DNA, 30 bp, Artificial Sequence
  Synthetic oligonucleotide
actagctatggaaacctgtgcggcgcgtgt

SEQ ID NO: 414186 - DNA, 30 bp, Artificial Sequence
  Synthetic oligonucleotide
ggagcgggtgcctaggcgaagcgggcgtgt

SEQ ID NO: 414187 - DNA, 30 bp, Artificial Sequence
  Synthetic oligonucleotide
agcggtcaaacggggatctattcatcgtgt

SEQ ID NO: 414188 - DNA, 30 bp, Artificial Sequence
  Synthetic oligonucleotide
aaagactgaggtgttagtccgtactcgtgt

SEQ ID NO: 414189 - DNA, 30 bp, Artificial Sequence
  Synthetic oligonucleotide
taccgcttctcatcaccgaaagcctcgtgt

SEQ ID NO: 414190 - DNA, 30 bp, Artificial Sequence
  Synthetic oligonucleotide
gaatcggcgatgtggacgtctacgtcgtgt

SEQ ID NO: 414191 - DNA, 30 bp, Artificial Sequence
  Synthetic oligonucleotide
caaacgagagtacttagaggtccttcgtgt

SEQ ID NO: 414192 - DNA, 30 bp, Artificial Sequence
  Synthetic oligonucleotide
ggcgctcgctcgttacgccctacaaggtgt

SEQ ID NO: 414193 - DNA, 30 bp, Artificial Sequence
  Synthetic oligonucleotide
gtccccagcgcgatattgtgatgaaggtgt

SEQ ID NO: 414194 - DNA, 31 bp, Artificial Sequence
  Synthetic oligonucleotide
aatcgatgtgcggcacatcgtcatcaggtgt

SEQ ID NO: 414195 - DNA, 30 bp, Artificial Sequence
  Synthetic oligonucleotide
taaaggaccgacggtgaagacctcaggtgt

SEQ ID NO: 414196 - DNA, 30 bp, Artificial Sequence
  Synthetic oligonucleotide
gctcggcccaggattcgcaggctcaggtgt

SEQ ID NO: 414197 - DNA, 30 bp, Artificial Sequence
  Synthetic oligonucleotide
gcctgtactttgcagccgcctctcaggtgt

SEQ ID NO: 414198 - DNA, 30 bp, Artificial Sequence
  Synthetic oligonucleotide
gggggaagcgagggtgtacagaagaggtgt

SEQ ID NO: 414199 - DNA, 30 bp, Artificial Sequence
  Synthetic oligonucleotide
caactagtaggcggcacgaccgcgaggtgt

SEQ ID NO: 414200 - DNA, 30 bp, Artificial Sequence
  Synthetic oligonucleotide
gccgcagctcagcgcctgggcatgaggtgt

SEQ ID NO: 414201 - DNA, 30 bp, Artificial Sequence
  Synthetic oligonucleotide
tttgagccgtgttattgcggagtgaggtgt

SEQ ID NO: 414202 - DNA, 30 bp, Artificial Sequence
  Synthetic oligonucleotide
gtcgttgaagtttggtgttgcggtaggtgt

SEQ ID NO: 414203 - DNA, 30 bp, Artificial Sequence
  Synthetic oligonucleotide
caataactagatttcaaagaaattaggtgt

SEQ ID NO: 414204 - DNA, 30 bp, Artificial Sequence
  Synthetic oligonucleotide
tagcactggggcaagttcttgcttaggtgt

SEQ ID NO: 414205 - DNA, 30 bp, Artificial Sequence
  Synthetic oligonucleotide
tgaggttcctctttgtgcctagtacggtgt

SEQ ID NO: 414206 - DNA, 30 bp, Artificial Sequence
  Synthetic oligonucleotide
tgacaaagctgggcatgtaagccccggtgt

SEQ ID NO: 414207 - DNA, 30 bp, Artificial Sequence
  Synthetic oligonucleotide
gagcaactctggtattcgcggaagcggtgt

SEQ ID NO: 414208 - DNA, 30 bp, Artificial Sequence
  Synthetic oligonucleotide
tgcgtgacacacccaagcaatgcgcggtgt

SEQ ID NO: 414209 - DNA, 30 bp, Artificial Sequence
  Synthetic oligonucleotide
ggtaattatccttgttcctaagggcggtgt

SEQ ID NO: 414210 - DNA, 30 bp, Artificial Sequence
  Synthetic oligonucleotide
ataacgctcaacggaagataggggcggtgt

SEQ ID NO: 414211 - DNA, 30 bp, Artificial Sequence
  Synthetic oligonucleotide
gtggattaaaatacgcttgtttatcggtgt

SEQ ID NO: 414212 - DNA, 31 bp, Artificial Sequence
  Synthetic oligonucleotide
gatgtcggcagtgtatatactaactcggtgt

SEQ ID NO: 414213 - DNA, 30 bp, Artificial Sequence
  Synthetic oligonucleotide
taaatcgcctaggaatcgtcccctcggtgt

SEQ ID NO: 414214 - DNA, 30 bp, Artificial Sequence
  Synthetic oligonucleotide
ttgtctatgtcctagcggggtgctcggtgt

SEQ ID NO: 414215 - DNA, 30 bp, Artificial Sequence
  Synthetic oligonucleotide
gaaccggcaatgttccaatcctgagggtgt

SEQ ID NO: 414216 - DNA, 30 bp, Artificial Sequence
  Synthetic oligonucleotide
ataatgaaaatatatgttcgataggggtgt

SEQ ID NO: 414217 - DNA, 30 bp, Artificial Sequence
  Synthetic oligonucleotide
aagaggttgttttgcaaaatcctggggtgt

SEQ ID NO: 414218 - DNA, 30 bp, Artificial Sequence
  Synthetic oligonucleotide
tataaaggcacaggagcttaagtggggtgt

SEQ ID NO: 414219 - DNA, 29 bp, Artificial Sequence
  Synthetic oligonucleotide
cccccggaggaggatgtccgtctgggtgt

SEQ ID NO: 414220 - DNA, 30 bp, Artificial Sequence
  Synthetic oligonucleotide
ttacccgtcatcagccgtgcaattgggtgt

SEQ ID NO: 414221 - DNA, 30 bp, Artificial Sequence
  Synthetic oligonucleotide
caccatcgctgatcagatagttttgggtgt

SEQ ID NO: 414222 - DNA, 30 bp, Artificial Sequence
  Synthetic oligonucleotide
ttcggattatggtcaaggcaagaatggtgt

SEQ ID NO: 414223 - DNA, 30 bp, Artificial Sequence
  Synthetic oligonucleotide
atatttcctaatgcctccatcctatggtgt

SEQ ID NO: 414224 - DNA, 30 bp, Artificial Sequence
  Synthetic oligonucleotide
gttgcgacgggcttattaagtttatggtgt

SEQ ID NO: 414225 - DNA, 28 bp, Artificial Sequence
  Synthetic oligonucleotide
aggtgggggacgtgcaacctgctggtgt

SEQ ID NO: 414226 - DNA, 30 bp, Artificial Sequence
  Synthetic oligonucleotide
tactacgctgaaattggccagaagtggtgt

SEQ ID NO: 414227 - DNA, 30 bp, Artificial Sequence
  Synthetic oligonucleotide
gatttctgaacacgcccacaagattggtgt

SEQ ID NO: 414228 - DNA, 30 bp, Artificial Sequence
  Synthetic oligonucleotide
aacactgagtacgcgcaagggtattggtgt

SEQ ID NO: 414229 - DNA, 30 bp, Artificial Sequence
  Synthetic oligonucleotide
tcatactgaccaactaggatattttggtgt

SEQ ID NO: 414230 - DNA, 30 bp, Artificial Sequence
  Synthetic oligonucleotide
tactactccatctgaactccaaaaatgtgt

SEQ ID NO: 414231 - DNA, 30 bp, Artificial Sequence
  Synthetic oligonucleotide
ccaagctaattgttctgtgcggcaatgtgt

SEQ ID NO: 414232 - DNA, 30 bp, Artificial Sequence
  Synthetic oligonucleotide
gtgttcatatcgagttaggtctcaatgtgt

SEQ ID NO: 414233 - DNA, 31 bp, Artificial Sequence
  Synthetic oligonucleotide
aatcccagccacaagcaatgtgtcaatgtgt

SEQ ID NO: 414234 - DNA, 30 bp, Artificial Sequence
  Synthetic oligonucleotide
tttaccaagatccggttttatgacatgtgt

SEQ ID NO: 414235 - DNA, 30 bp, Artificial Sequence
  Synthetic oligonucleotide
ttttgttgggacaggtaacgatccatgtgt

SEQ ID NO: 414236 - DNA, 30 bp, Artificial Sequence
  Synthetic oligonucleotide
gtaatgagacagactgtttaatgcatgtgt

SEQ ID NO: 414237 - DNA, 30 bp, Artificial Sequence
  Synthetic oligonucleotide
tcgatgtagtcgcttttaaagtatatgtgt

SEQ ID NO: 414238 - DNA, 30 bp, Artificial Sequence
  Synthetic oligonucleotide
aagattcccaccagtaaccgggctatgtgt

SEQ ID NO: 414239 - DNA, 30 bp, Artificial Sequence
  Synthetic oligonucleotide
caattaactccatgctcttgcacactgtgt

SEQ ID NO: 414240 - DNA, 30 bp, Artificial Sequence
  Synthetic oligonucleotide
cccataaacgatgggcactgggtactgtgt

SEQ ID NO: 414241 - DNA, 30 bp, Artificial Sequence
  Synthetic oligonucleotide
tggacacggtaaaaaggtacctaagtgtgt

SEQ ID NO: 414242 - DNA, 30 bp, Artificial Sequence
  Synthetic oligonucleotide
gttttgtagccatgattggataaggtgtgt

SEQ ID NO: 414243 - DNA, 30 bp, Artificial Sequence
  Synthetic oligonucleotide
tctggaaagagctgtggatcgcttgtgtgt

SEQ ID NO: 414244 - DNA, 30 bp, Artificial Sequence
  Synthetic oligonucleotide
tgcactgttccacggattctaaccttgtgt

SEQ ID NO: 414245 - DNA, 30 bp, Artificial Sequence
  Synthetic oligonucleotide
ggcagtccgctgcccactgtggtcttgtgt

SEQ ID NO: 414246 - DNA, 30 bp, Artificial Sequence
  Synthetic oligonucleotide
gacttttgtctgttacagcctaagttgtgt

SEQ ID NO: 414247 - DNA, 30 bp, Artificial Sequence
  Synthetic oligonucleotide
ataaggcttatctggtgtataacgttgtgt

SEQ ID NO: 414248 - DNA, 30 bp, Artificial Sequence
  Synthetic oligonucleotide
agcacagctctaatgatctgtgtgttgtgt

SEQ ID NO: 414249 - DNA, 30 bp, Artificial Sequence
  Synthetic oligonucleotide
gattcgccgagtgcctcgtacgctttgtgt

SEQ ID NO: 414250 - DNA, 30 bp, Artificial Sequence
  Synthetic oligonucleotide
cgtaaatttctaatgaaaatcagtttgtgt

SEQ ID NO: 414251 - DNA, 30 bp, Artificial Sequence
  Synthetic oligonucleotide
gacacagtcctgaacaagtggcgtttgtgt

SEQ ID NO: 414252 - DNA, 30 bp, Artificial Sequence
  Synthetic oligonucleotide
atactatatctgtaatgtttttttttgtgt

SEQ ID NO: 414253 - DNA, 30 bp, Artificial Sequence
  Synthetic oligonucleotide
ctagagtggactatatgattggacaattgt

SEQ ID NO: 414254 - DNA, 30 bp, Artificial Sequence
  Synthetic oligonucleotide
cattatactgctcctaaagttctcaattgt

SEQ ID NO: 414255 - DNA, 30 bp, Artificial Sequence
  Synthetic oligonucleotide
tgttatgtcgtatcgtctgttccgaattgt

SEQ ID NO: 414256 - DNA, 30 bp, Artificial Sequence
  Synthetic oligonucleotide
taatcatagccggccaatcacggacattgt

SEQ ID NO: 414257 - DNA, 30 bp, Artificial Sequence
  Synthetic oligonucleotide
ccctcatacgtgcaaacatttacccattgt

SEQ ID NO: 414258 - DNA, 30 bp, Artificial Sequence
  Synthetic oligonucleotide
ggaagtaatgatatgacaccgtgtcattgt

SEQ ID NO: 414259 - DNA, 30 bp, Artificial Sequence
  Synthetic oligonucleotide
gtgcaacatatctgtaggggacaagattgt

SEQ ID NO: 414260 - DNA, 30 bp, Artificial Sequence
  Synthetic oligonucleotide
ttactggataacctgttggctggagattgt

SEQ ID NO: 414261 - DNA, 30 bp, Artificial Sequence
  Synthetic oligonucleotide
aacacttaaactatcgacagatgagattgt

SEQ ID NO: 414262 - DNA, 30 bp, Artificial Sequence
  Synthetic oligonucleotide
taatagtcgtccccgcttaagctagattgt

SEQ ID NO: 414263 - DNA, 30 bp, Artificial Sequence
  Synthetic oligonucleotide
ttcccggatcgttctttccataccgattgt

SEQ ID NO: 414264 - DNA, 30 bp, Artificial Sequence
  Synthetic oligonucleotide
ttccgggtgcataatacctacctcgattgt

SEQ ID NO: 414265 - DNA, 30 bp, Artificial Sequence
  Synthetic oligonucleotide
ctgaagtttcagactgtagaattcgattgt

SEQ ID NO: 414266 - DNA, 30 bp, Artificial Sequence
  Synthetic oligonucleotide
aaacacaacctttaactgggagaggattgt

SEQ ID NO: 414267 - DNA, 30 bp, Artificial Sequence
  Synthetic oligonucleotide
aggcgcgtcctcttttatatgagatattgt

SEQ ID NO: 414268 - DNA, 30 bp, Artificial Sequence
  Synthetic oligonucleotide
gaaaaccttgtttttcacgtacgatattgt

SEQ ID NO: 414269 - DNA, 30 bp, Artificial Sequence
  Synthetic oligonucleotide
agatactgcgggacggaatggtattattgt

SEQ ID NO: 414270 - DNA, 30 bp, Artificial Sequence
  Synthetic oligonucleotide
caaataagagtgcacccagtcccttattgt

SEQ ID NO: 414271 - DNA, 30 bp, Artificial Sequence
  Synthetic oligonucleotide
tgccgcaacgagtcagacatggtttattgt

SEQ ID NO: 414272 - DNA, 30 bp, Artificial Sequence
  Synthetic oligonucleotide
gtcttcgcatcgtgaacacagtgaacttgt

SEQ ID NO: 414273 - DNA, 30 bp, Artificial Sequence
  Synthetic oligonucleotide
ccgtctcgtatgaagacgcgtccgacttgt

SEQ ID NO: 414274 - DNA, 30 bp, Artificial Sequence
  Synthetic oligonucleotide
ttgttcgcagtggagctatctgcgacttgt

SEQ ID NO: 414275 - DNA, 30 bp, Artificial Sequence
  Synthetic oligonucleotide
cccacaactgggtataattcacgaccttgt

SEQ ID NO: 414276 - DNA, 30 bp, Artificial Sequence
  Synthetic oligonucleotide
gtacaacctctcggcgcggtacacccttgt

SEQ ID NO: 414277 - DNA, 28 bp, Artificial Sequence
  Synthetic oligonucleotide
ttgatagacagacatgtcgtacccttgt

SEQ ID NO: 414278 - DNA, 30 bp, Artificial Sequence
  Synthetic oligonucleotide
tagatccacaggacagcggtgtagccttgt

SEQ ID NO: 414279 - DNA, 30 bp, Artificial Sequence
  Synthetic oligonucleotide
atcaagtcggttcaatatacagatccttgt

SEQ ID NO: 414280 - DNA, 30 bp, Artificial Sequence
  Synthetic oligonucleotide
ggggattagaaattgtaattcagtccttgt

SEQ ID NO: 414281 - DNA, 30 bp, Artificial Sequence
  Synthetic oligonucleotide
aaatacgccttacggtagcttaaagcttgt

SEQ ID NO: 414282 - DNA, 30 bp, Artificial Sequence
  Synthetic oligonucleotide
agatttagacgtcactacgggcaagcttgt

SEQ ID NO: 414283 - DNA, 30 bp, Artificial Sequence
  Synthetic oligonucleotide
gctatacgcacttgtttcatgcgagcttgt

SEQ ID NO: 414284 - DNA, 30 bp, Artificial Sequence
  Synthetic oligonucleotide
tgggtctagatagcatttcctatcgcttgt

SEQ ID NO: 414285 - DNA, 30 bp, Artificial Sequence
  Synthetic oligonucleotide
atatgtgaacgccataaatcgatggcttgt

SEQ ID NO: 414286 - DNA, 30 bp, Artificial Sequence
  Synthetic oligonucleotide
agttcggcggacgggttggttttggcttgt

SEQ ID NO: 414287 - DNA, 30 bp, Artificial Sequence
  Synthetic oligonucleotide
gagtcaatctaggtacgtcctgatgcttgt

SEQ ID NO: 414288 - DNA, 30 bp, Artificial Sequence
  Synthetic oligonucleotide
taaaccggttactttttgaaacctgcttgt

SEQ ID NO: 414289 - DNA, 30 bp, Artificial Sequence
  Synthetic oligonucleotide
aataggctccgctataaaaccgcctcttgt

SEQ ID NO: 414290 - DNA, 30 bp, Artificial Sequence
  Synthetic oligonucleotide
taatacgagtttggggttaggtcctcttgt

SEQ ID NO: 414291 - DNA, 30 bp, Artificial Sequence
  Synthetic oligonucleotide
ttagatctggttatgagtgcaggctcttgt

SEQ ID NO: 414292 - DNA, 30 bp, Artificial Sequence
  Synthetic oligonucleotide
acaaagtgcctcgtgtactgccagtcttgt

SEQ ID NO: 414293 - DNA, 30 bp, Artificial Sequence
  Synthetic oligonucleotide
gtgagttgggccggttttgtctagtcttgt

SEQ ID NO: 414294 - DNA, 30 bp, Artificial Sequence
  Synthetic oligonucleotide
ccaattggaaggcaagataccaggtcttgt

SEQ ID NO: 414295 - DNA, 30 bp, Artificial Sequence
  Synthetic oligonucleotide
gatctgcagatgataggggcgatgtcttgt

SEQ ID NO: 414296 - DNA, 30 bp, Artificial Sequence
  Synthetic oligonucleotide
cctgcctatcctacttcattttattcttgt

SEQ ID NO: 414297 - DNA, 31 bp, Artificial Sequence
  Synthetic oligonucleotide
ttgccgcactctaggacccgtgacttcttgt

SEQ ID NO: 414298 - DNA, 30 bp, Artificial Sequence
  Synthetic oligonucleotide
tttcttaaggatcggttagtcctttcttgt

SEQ ID NO: 414299 - DNA, 30 bp, Artificial Sequence
  Synthetic oligonucleotide
atttggtgttatttatttagtaaaagttgt

SEQ ID NO: 414300 - DNA, 30 bp, Artificial Sequence
  Synthetic oligonucleotide
ttcgcaactgaccagatattgggaagttgt

SEQ ID NO: 414301 - DNA, 30 bp, Artificial Sequence
  Synthetic oligonucleotide
ggctgctaagacttctgtctgataagttgt

SEQ ID NO: 414302 - DNA, 30 bp, Artificial Sequence
  Synthetic oligonucleotide
tacgtttttgttcaaggggcacacagttgt

SEQ ID NO: 414303 - DNA, 30 bp, Artificial Sequence
  Synthetic oligonucleotide
aggtcgactccagggcaaattgacagttgt

SEQ ID NO: 414304 - DNA, 30 bp, Artificial Sequence
  Synthetic oligonucleotide
gtttaatacagattagtcgcttccagttgt

SEQ ID NO: 414305 - DNA, 30 bp, Artificial Sequence
  Synthetic oligonucleotide
gtttaccttgattgttggcctaagagttgt

SEQ ID NO: 414306 - DNA, 30 bp, Artificial Sequence
  Synthetic oligonucleotide
tgtttaggattgtcgtcggacccgagttgt

SEQ ID NO: 414307 - DNA, 30 bp, Artificial Sequence
  Synthetic oligonucleotide
gaaagattgagagagcccaccccgagttgt

SEQ ID NO: 414308 - DNA, 30 bp, Artificial Sequence
  Synthetic oligonucleotide
agttcctctttcgggtatagccttagttgt

SEQ ID NO: 414309 - DNA, 30 bp, Artificial Sequence
  Synthetic oligonucleotide
gaagctcccgtcaggtaataagcacgttgt

SEQ ID NO: 414310 - DNA, 30 bp, Artificial Sequence
  Synthetic oligonucleotide
ggcgcgacgatctccaactaggcacgttgt

SEQ ID NO: 414311 - DNA, 30 bp, Artificial Sequence
  Synthetic oligonucleotide
aagtgtaccaggttgcgccctcgacgttgt

SEQ ID NO: 414312 - DNA, 30 bp, Artificial Sequence
  Synthetic oligonucleotide
acggctaatcacttagctccgatacgttgt

SEQ ID NO: 414313 - DNA, 30 bp, Artificial Sequence
  Synthetic oligonucleotide
ctacgttagaagtgaattctcctacgttgt

SEQ ID NO: 414314 - DNA, 30 bp, Artificial Sequence
  Synthetic oligonucleotide
gatgagccattaatgataacagtacgttgt

SEQ ID NO: 414315 - DNA, 30 bp, Artificial Sequence
  Synthetic oligonucleotide
ttgtattcggtgagtgatacagtgcgttgt

SEQ ID NO: 414316 - DNA, 30 bp, Artificial Sequence
  Synthetic oligonucleotide
atgttgcacggtcctatgctaaaaggttgt

SEQ ID NO: 414317 - DNA, 30 bp, Artificial Sequence
  Synthetic oligonucleotide
attacattctatcttttgcgtgaaggttgt

SEQ ID NO: 414318 - DNA, 30 bp, Artificial Sequence
  Synthetic oligonucleotide
tatgaagtcggtagcgcccgctaaggttgt

SEQ ID NO: 414319 - DNA, 30 bp, Artificial Sequence
  Synthetic oligonucleotide
ttctctggccatttcatgggttgaggttgt

SEQ ID NO: 414320 - DNA, 30 bp, Artificial Sequence
  Synthetic oligonucleotide
gttagccacacgtattaaggagacggttgt

SEQ ID NO: 414321 - DNA, 30 bp, Artificial Sequence
  Synthetic oligonucleotide
aacaaagaccccatacctccctacggttgt

SEQ ID NO: 414322 - DNA, 30 bp, Artificial Sequence
  Synthetic oligonucleotide
cgatacaccgcatctatacactagggttgt

SEQ ID NO: 414323 - DNA, 30 bp, Artificial Sequence
  Synthetic oligonucleotide
tagcttagcaacctagtgccaggtggttgt

SEQ ID NO: 414324 - DNA, 30 bp, Artificial Sequence
  Synthetic oligonucleotide
gtcttcattaaaggtgcaatgaaatgttgt

SEQ ID NO: 414325 - DNA, 30 bp, Artificial Sequence
  Synthetic oligonucleotide
cggacctttcggaatgagattcaatgttgt

SEQ ID NO: 414326 - DNA, 30 bp, Artificial Sequence
  Synthetic oligonucleotide
tgcgtgaggagcatatataggtcatgttgt

SEQ ID NO: 414327 - DNA, 30 bp, Artificial Sequence
  Synthetic oligonucleotide
caattcaggctggtgttgtgggtatgttgt

SEQ ID NO: 414328 - DNA, 30 bp, Artificial Sequence
  Synthetic oligonucleotide
tgatactgaactctctgcgaagactgttgt

SEQ ID NO: 414329 - DNA, 30 bp, Artificial Sequence
  Synthetic oligonucleotide
gatgtcgctgtaaagaggtgagtctgttgt

SEQ ID NO: 414330 - DNA, 30 bp, Artificial Sequence
  Synthetic oligonucleotide
ggtcatcatacttgtaacggggggtgttgt

SEQ ID NO: 414331 - DNA, 30 bp, Artificial Sequence
  Synthetic oligonucleotide
taccgtaggcaagggaaattccattgttgt

SEQ ID NO: 414332 - DNA, 30 bp, Artificial Sequence
  Synthetic oligonucleotide
gcatagatgacaatatgacaaacttgttgt

SEQ ID NO: 414333 - DNA, 30 bp, Artificial Sequence
  Synthetic oligonucleotide
atttcgtgtcctacagatcatatttgttgt

SEQ ID NO: 414334 - DNA, 30 bp, Artificial Sequence
  Synthetic oligonucleotide
tacgagctcgagctccgggtaccaatttgt

SEQ ID NO: 414335 - DNA, 30 bp, Artificial Sequence
  Synthetic oligonucleotide
tagttgaggggaaagaaagttagaatttgt

SEQ ID NO: 414336 - DNA, 30 bp, Artificial Sequence
  Synthetic oligonucleotide
ttaggcactgaagacagaagcaccatttgt

SEQ ID NO: 414337 - DNA, 30 bp, Artificial Sequence
  Synthetic oligonucleotide
aaatacccgctgcaactgtgtgtcatttgt

SEQ ID NO: 414338 - DNA, 30 bp, Artificial Sequence
  Synthetic oligonucleotide
gtaactatcgggtaatacccggagatttgt

SEQ ID NO: 414339 - DNA, 30 bp, Artificial Sequence
  Synthetic oligonucleotide
ccgttattgcgattccttatattgatttgt

SEQ ID NO: 414340 - DNA, 30 bp, Artificial Sequence
  Synthetic oligonucleotide
cacagaggtacgatttgtctagatatttgt

SEQ ID NO: 414341 - DNA, 30 bp, Artificial Sequence
  Synthetic oligonucleotide
catctaaaggactcgtagtacgatatttgt

SEQ ID NO: 414342 - DNA, 30 bp, Artificial Sequence
  Synthetic oligonucleotide
cctcactgtgttttacacagcagtatttgt

SEQ ID NO: 414343 - DNA, 30 bp, Artificial Sequence
  Synthetic oligonucleotide
accgtttcgagtcgagaccgtattatttgt

SEQ ID NO: 414344 - DNA, 30 bp, Artificial Sequence
  Synthetic oligonucleotide
acatattaaggagagctgaagtttatttgt

SEQ ID NO: 414345 - DNA, 30 bp, Artificial Sequence
  Synthetic oligonucleotide
actggaccgggggggggcctagaactttgt

SEQ ID NO: 414346 - DNA, 30 bp, Artificial Sequence
  Synthetic oligonucleotide
gcacaaagcccgttatattattccctttgt

SEQ ID NO: 414347 - DNA, 31 bp, Artificial Sequence
  Synthetic oligonucleotide
attattgatgagtgtattttgtctcctttgt

SEQ ID NO: 414348 - DNA, 30 bp, Artificial Sequence
  Synthetic oligonucleotide
tgttcgataaactttcaggctgggctttgt

SEQ ID NO: 414349 - DNA, 30 bp, Artificial Sequence
  Synthetic oligonucleotide
agtggtcactgccttagtagcgatctttgt

SEQ ID NO: 414350 - DNA, 30 bp, Artificial Sequence
  Synthetic oligonucleotide
atgctctggaaggtggatcacgctctttgt

SEQ ID NO: 414351 - DNA, 30 bp, Artificial Sequence
  Synthetic oligonucleotide
gcggtctatcaagtcgctgtttcagtttgt

SEQ ID NO: 414352 - DNA, 30 bp, Artificial Sequence
  Synthetic oligonucleotide
taactgagggcatcccgtcttggcgtttgt

SEQ ID NO: 414353 - DNA, 30 bp, Artificial Sequence
  Synthetic oligonucleotide
atcgtgcaggatccatcattatgcgtttgt

SEQ ID NO: 414354 - DNA, 30 bp, Artificial Sequence
  Synthetic oligonucleotide
cggcgcttagaagagcttaaataggtttgt

SEQ ID NO: 414355 - DNA, 30 bp, Artificial Sequence
  Synthetic oligonucleotide
atatggtgcggttgtacttcgcatgtttgt

SEQ ID NO: 414356 - DNA, 30 bp, Artificial Sequence
  Synthetic oligonucleotide
atcttatgaaggctaaaatactctgtttgt

SEQ ID NO: 414357 - DNA, 30 bp, Artificial Sequence
  Synthetic oligonucleotide
gtatacggggtgagcgcgtctaaattttgt

SEQ ID NO: 414358 - DNA, 30 bp, Artificial Sequence
  Synthetic oligonucleotide
accgtggttgcgcccgtggtgtaattttgt

SEQ ID NO: 414359 - DNA, 30 bp, Artificial Sequence
  Synthetic oligonucleotide
ctggtatcgggtgcttacgcatgcttttgt

SEQ ID NO: 414360 - DNA, 30 bp, Artificial Sequence
  Synthetic oligonucleotide
ctgttctggactgggcatattaggttttgt

SEQ ID NO: 414361 - DNA, 30 bp, Artificial Sequence
  Synthetic oligonucleotide
ttgtgatgatactagcttgcgcatttttgt

SEQ ID NO: 414362 - DNA, 30 bp, Artificial Sequence
  Synthetic oligonucleotide
tttgcgctgcgacacccgacatatttttgt

SEQ ID NO: 414363 - DNA, 30 bp, Artificial Sequence
  Synthetic oligonucleotide
tctcagttttccaaatgcacatttttttgt

SEQ ID NO: 414364 - DNA, 30 bp, Artificial Sequence
  Synthetic oligonucleotide
ggttgtaggcagggttatagcaaaaaaatt

SEQ ID NO: 414365 - DNA, 30 bp, Artificial Sequence
  Synthetic oligonucleotide
ataacggatcgtcgaatttttcaaaaaatt

SEQ ID NO: 414366 - DNA, 30 bp, Artificial Sequence
  Synthetic oligonucleotide
agtgaggcatacgatcggcaataaaaaatt

SEQ ID NO: 414367 - DNA, 30 bp, Artificial Sequence
  Synthetic oligonucleotide
agggatagagaccggcacgcgggcaaaatt

SEQ ID NO: 414368 - DNA, 30 bp, Artificial Sequence
  Synthetic oligonucleotide
ggttcctcgtggaattgaataaagaaaatt

SEQ ID NO: 414369 - DNA, 30 bp, Artificial Sequence
  Synthetic oligonucleotide
gccattaatgtgggcaaatgggcgaaaatt

SEQ ID NO: 414370 - DNA, 30 bp, Artificial Sequence
  Synthetic oligonucleotide
cggtctctccggatgtatgatgataaaatt

SEQ ID NO: 414371 - DNA, 30 bp, Artificial Sequence
  Synthetic oligonucleotide
ataaatctcgatatggtttagagtaaaatt

SEQ ID NO: 414372 - DNA, 30 bp, Artificial Sequence
  Synthetic oligonucleotide
agactaatcgatttctgacaacttaaaatt

SEQ ID NO: 414373 - DNA, 30 bp, Artificial Sequence
  Synthetic oligonucleotide
gccgtactagttatatagtccgttaaaatt

SEQ ID NO: 414374 - DNA, 30 bp, Artificial Sequence
  Synthetic oligonucleotide
aacttagggttctgtataaccgaacaaatt

SEQ ID NO: 414375 - DNA, 30 bp, Artificial Sequence
  Synthetic oligonucleotide
cattgtcgacatcgtcgacctaatcaaatt

SEQ ID NO: 414376 - DNA, 30 bp, Artificial Sequence
  Synthetic oligonucleotide
gatatacacataacttgtgaaagtcaaatt

SEQ ID NO: 414377 - DNA, 30 bp, Artificial Sequence
  Synthetic oligonucleotide
ataggtggtttcatcaatgtgcttcaaatt

SEQ ID NO: 414378 - DNA, 30 bp, Artificial Sequence
  Synthetic oligonucleotide
acttctctaatggttagagacaccgaaatt

SEQ ID NO: 414379 - DNA, 30 bp, Artificial Sequence
  Synthetic oligonucleotide
aatgtcacacgcttaactcttcgcgaaatt

SEQ ID NO: 414380 - DNA, 30 bp, Artificial Sequence
  Synthetic oligonucleotide
agtttagggactgggacagccggggaaatt

SEQ ID NO: 414381 - DNA, 30 bp, Artificial Sequence
  Synthetic oligonucleotide
tttaagacgccataaagccgagctgaaatt

SEQ ID NO: 414382 - DNA, 30 bp, Artificial Sequence
  Synthetic oligonucleotide
tgatttatacgaggtgagaccacataaatt

SEQ ID NO: 414383 - DNA, 30 bp, Artificial Sequence
  Synthetic oligonucleotide
gttcgtaatgggagttcccggtcataaatt

SEQ ID NO: 414384 - DNA, 30 bp, Artificial Sequence
  Synthetic oligonucleotide
gagtgaagtccaccatgcatgggataaatt

SEQ ID NO: 414385 - DNA, 30 bp, Artificial Sequence
  Synthetic oligonucleotide
aacaggatgcgccaattaagaccctaaatt

SEQ ID NO: 414386 - DNA, 30 bp, Artificial Sequence
  Synthetic oligonucleotide
ttactgagtacatcattctgtctctaaatt

SEQ ID NO: 414387 - DNA, 30 bp, Artificial Sequence
  Synthetic oligonucleotide
ttatagtcgaaacgcgctgtattctaaatt

SEQ ID NO: 414388 - DNA, 30 bp, Artificial Sequence
  Synthetic oligonucleotide
aacggtcctcatctagcgctttagtaaatt

SEQ ID NO: 414389 - DNA, 30 bp, Artificial Sequence
  Synthetic oligonucleotide
ggtgtttatcctgcgcaaaaaaggtaaatt

SEQ ID NO: 414390 - DNA, 30 bp, Artificial Sequence
  Synthetic oligonucleotide
cgctacctttcactcaataggcggtaaatt

SEQ ID NO: 414391 - DNA, 30 bp, Artificial Sequence
  Synthetic oligonucleotide
tgctcactaacccgtggtattctgtaaatt

SEQ ID NO: 414392 - DNA, 30 bp, Artificial Sequence
  Synthetic oligonucleotide
gccatctacggagttccctatccttaaatt

SEQ ID NO: 414393 - DNA, 30 bp, Artificial Sequence
  Synthetic oligonucleotide
ttctattagaggactttgaaggcttaaatt

SEQ ID NO: 414394 - DNA, 30 bp, Artificial Sequence
  Synthetic oligonucleotide
caaactggagccttttgtaacagttaaatt

SEQ ID NO: 414395 - DNA, 30 bp, Artificial Sequence
  Synthetic oligonucleotide
cgaaggctcgaaggtctgcccttttaaatt

SEQ ID NO: 414396 - DNA, 30 bp, Artificial Sequence
  Synthetic oligonucleotide
ctcccgtaaccgtcgcgggccttaacaatt

SEQ ID NO: 414397 - DNA, 30 bp, Artificial Sequence
  Synthetic oligonucleotide
attgtattgtttatgctatagttaacaatt

SEQ ID NO: 414398 - DNA, 30 bp, Artificial Sequence
  Synthetic oligonucleotide
ggttgtttggtaggaaaataacgcacaatt

SEQ ID NO: 414399 - DNA, 30 bp, Artificial Sequence
  Synthetic oligonucleotide
ctctaggattcgtcgacggggttcacaatt

SEQ ID NO: 414400 - DNA, 30 bp, Artificial Sequence
  Synthetic oligonucleotide
cctgctccagtccgtggttgtcggacaatt

SEQ ID NO: 414401 - DNA, 30 bp, Artificial Sequence
  Synthetic oligonucleotide
cgtctgacaaattgttccgggctgacaatt

SEQ ID NO: 414402 - DNA, 30 bp, Artificial Sequence
  Synthetic oligonucleotide
tagaggtggttacatagggtgcctacaatt

SEQ ID NO: 414403 - DNA, 30 bp, Artificial Sequence
  Synthetic oligonucleotide
atctgccacggtgtagtcagagttacaatt

SEQ ID NO: 414404 - DNA, 30 bp, Artificial Sequence
  Synthetic oligonucleotide
ggtttcacttttgctaactattttacaatt

SEQ ID NO: 414405 - DNA, 31 bp, Artificial Sequence
  Synthetic oligonucleotide
ctgggataatatggtttgtctgctaccaatt

SEQ ID NO: 414406 - DNA, 30 bp, Artificial Sequence
  Synthetic oligonucleotide
tagccgcttgtgcacggtacgcacccaatt

SEQ ID NO: 414407 - DNA, 30 bp, Artificial Sequence
  Synthetic oligonucleotide
cgaggttcttaaaacctacggatcccaatt

SEQ ID NO: 414408 - DNA, 30 bp, Artificial Sequence
  Synthetic oligonucleotide
ataaactataggtgccccgtgctcccaatt

SEQ ID NO: 414409 - DNA, 30 bp, Artificial Sequence
  Synthetic oligonucleotide
ttatccacctggcaagggtgattcccaatt

SEQ ID NO: 414410 - DNA, 30 bp, Artificial Sequence
  Synthetic oligonucleotide
actcattatggaaaattagccgggccaatt

SEQ ID NO: 414411 - DNA, 30 bp, Artificial Sequence
  Synthetic oligonucleotide
gctgaacgataggattcttataaagcaatt

SEQ ID NO: 414412 - DNA, 30 bp, Artificial Sequence
  Synthetic oligonucleotide
accgtccttcctttctctatgtcagcaatt

SEQ ID NO: 414413 - DNA, 30 bp, Artificial Sequence
  Synthetic oligonucleotide
tcccgcgaattcgccagggatggagcaatt

SEQ ID NO: 414414 - DNA, 30 bp, Artificial Sequence
  Synthetic oligonucleotide
aatctctcatggcatgggctggacgcaatt

SEQ ID NO: 414415 - DNA, 30 bp, Artificial Sequence
  Synthetic oligonucleotide
tagtatgctctcggtggagtgtacgcaatt

SEQ ID NO: 414416 - DNA, 30 bp, Artificial Sequence
  Synthetic oligonucleotide
gcgaaagcgatctctaggctctgcgcaatt

SEQ ID NO: 414417 - DNA, 30 bp, Artificial Sequence
  Synthetic oligonucleotide
tcaggagataagaccttatggtgcgcaatt

SEQ ID NO: 414418 - DNA, 30 bp, Artificial Sequence
  Synthetic oligonucleotide
ggtgcatgctaagcccttctgttcgcaatt

SEQ ID NO: 414419 - DNA, 30 bp, Artificial Sequence
  Synthetic oligonucleotide
gtaccgctggtggtcggtggaaatgcaatt

SEQ ID NO: 414420 - DNA, 30 bp, Artificial Sequence
  Synthetic oligonucleotide
acattatatgctaaaatcgccaatgcaatt

SEQ ID NO: 414421 - DNA, 30 bp, Artificial Sequence
  Synthetic oligonucleotide
aaagtgcgcttaggagtcctatgtgcaatt

SEQ ID NO: 414422 - DNA, 30 bp, Artificial Sequence
  Synthetic oligonucleotide
gagtagaatttaaagtggacgaaatcaatt

SEQ ID NO: 414423 - DNA, 30 bp, Artificial Sequence
  Synthetic oligonucleotide
gtatcataggtaggttctctagcatcaatt

SEQ ID NO: 414424 - DNA, 30 bp, Artificial Sequence
  Synthetic oligonucleotide
cagtcatatagcaacacacgcgactcaatt

SEQ ID NO: 414425 - DNA, 30 bp, Artificial Sequence
  Synthetic oligonucleotide
ttggcaatttcagcgggccatggctcaatt

SEQ ID NO: 414426 - DNA, 30 bp, Artificial Sequence
  Synthetic oligonucleotide
cccactggagagtaccaaacctagtcaatt

SEQ ID NO: 414427 - DNA, 30 bp, Artificial Sequence
  Synthetic oligonucleotide
agctagttccggacccattatccgtcaatt

SEQ ID NO: 414428 - DNA, 30 bp, Artificial Sequence
  Synthetic oligonucleotide
gttacccgccgcctgtgcgtagggtcaatt

SEQ ID NO: 414429 - DNA, 30 bp, Artificial Sequence
  Synthetic oligonucleotide
ttgtttgtaaacatggttaactggtcaatt

SEQ ID NO: 414430 - DNA, 30 bp, Artificial Sequence
  Synthetic oligonucleotide
ccatgaggtatggtcaaaatgaattcaatt

SEQ ID NO: 414431 - DNA, 30 bp, Artificial Sequence
  Synthetic oligonucleotide
ggggggtctctctacgcacaaagttcaatt

SEQ ID NO: 414432 - DNA, 30 bp, Artificial Sequence
  Synthetic oligonucleotide
ttaaatctagtgaggtccttaggttcaatt

SEQ ID NO: 414433 - DNA, 30 bp, Artificial Sequence
  Synthetic oligonucleotide
ggtgaagacacaaatcttgtctcaagaatt

SEQ ID NO: 414434 - DNA, 30 bp, Artificial Sequence
  Synthetic oligonucleotide
acaaccaaagactacggacaaataagaatt

SEQ ID NO: 414435 - DNA, 30 bp, Artificial Sequence
  Synthetic oligonucleotide
gatgggctgtgaatttaacgcataagaatt

SEQ ID NO: 414436 - DNA, 30 bp, Artificial Sequence
  Synthetic oligonucleotide
cttatgtgtaccaactaagctctaagaatt

SEQ ID NO: 414437 - DNA, 30 bp, Artificial Sequence
  Synthetic oligonucleotide
gaatctctgcctgggacagagaccagaatt

SEQ ID NO: 414438 - DNA, 30 bp, Artificial Sequence
  Synthetic oligonucleotide
ggtgtcccacgatcaattataaatagaatt

SEQ ID NO: 414439 - DNA, 30 bp, Artificial Sequence
  Synthetic oligonucleotide
tgttagccaacgctagatagtagtagaatt

SEQ ID NO: 414440 - DNA, 30 bp, Artificial Sequence
  Synthetic oligonucleotide
agtagggtacggggcgtggcccgtagaatt

SEQ ID NO: 414441 - DNA, 30 bp, Artificial Sequence
  Synthetic oligonucleotide
aaggcctattccacgcttgcctgtagaatt

SEQ ID NO: 414442 - DNA, 30 bp, Artificial Sequence
  Synthetic oligonucleotide
tgaaccgttccgtcattagagtttagaatt

SEQ ID NO: 414443 - DNA, 30 bp, Artificial Sequence
  Synthetic oligonucleotide
tgtataagacgaaggtatgcgaaacgaatt

SEQ ID NO: 414444 - DNA, 30 bp, Artificial Sequence
  Synthetic oligonucleotide
gggcaaccttccgcggatatacaccgaatt

SEQ ID NO: 414445 - DNA, 30 bp, Artificial Sequence
  Synthetic oligonucleotide
ataggtcgccgggtacgaatcgaccgaatt

SEQ ID NO: 414446 - DNA, 30 bp, Artificial Sequence
  Synthetic oligonucleotide
tagtggtctgtatttaaggcaagtcgaatt

SEQ ID NO: 414447 - DNA, 30 bp, Artificial Sequence
  Synthetic oligonucleotide
atgtgtctacgcaaccagctcctaggaatt

SEQ ID NO: 414448 - DNA, 30 bp, Artificial Sequence
  Synthetic oligonucleotide
actgtctaatggagttacgcaaacggaatt

SEQ ID NO: 414449 - DNA, 30 bp, Artificial Sequence
  Synthetic oligonucleotide
aaagttgaagtctgggtggttcgcggaatt

SEQ ID NO: 414450 - DNA, 30 bp, Artificial Sequence
  Synthetic oligonucleotide
caattgaatctttatctttatttcggaatt

SEQ ID NO: 414451 - DNA, 30 bp, Artificial Sequence
  Synthetic oligonucleotide
tataagatattgaccggttcatatggaatt

SEQ ID NO: 414452 - DNA, 30 bp, Artificial Sequence
  Synthetic oligonucleotide
aagcccctagcttaccggttcgttggaatt

SEQ ID NO: 414453 - DNA, 30 bp, Artificial Sequence
  Synthetic oligonucleotide
ctctgcgacataagcgcgacggttggaatt

SEQ ID NO: 414454 - DNA, 30 bp, Artificial Sequence
  Synthetic oligonucleotide
aatctaggacattggccccgtcggtgaatt

SEQ ID NO: 414455 - DNA, 30 bp, Artificial Sequence
  Synthetic oligonucleotide
attaagtcaaaggcggataaggattgaatt

SEQ ID NO: 414456 - DNA, 30 bp, Artificial Sequence
  Synthetic oligonucleotide
gattcatcgagggtcgtctagacttgaatt

SEQ ID NO: 414457 - DNA, 30 bp, Artificial Sequence
  Synthetic oligonucleotide
catggcctatgctaatgacgtgcttgaatt

SEQ ID NO: 414458 - DNA, 30 bp, Artificial Sequence
  Synthetic oligonucleotide
acgacgcagtgtccatttgacatttgaatt

SEQ ID NO: 414459 - DNA, 30 bp, Artificial Sequence
  Synthetic oligonucleotide
cattagtagcttggttcagagaaaataatt

SEQ ID NO: 414460 - DNA, 30 bp, Artificial Sequence
  Synthetic oligonucleotide
taacgtccacgcccgccccgtccaataatt

SEQ ID NO: 414461 - DNA, 30 bp, Artificial Sequence
  Synthetic oligonucleotide
acttgcgactacacccctgcttcaataatt

SEQ ID NO: 414462 - DNA, 30 bp, Artificial Sequence
  Synthetic oligonucleotide
gtgatgccacgccagataggtgtaataatt

SEQ ID NO: 414463 - DNA, 30 bp, Artificial Sequence
  Synthetic oligonucleotide
cgttggcagcggggccggcaaacgataatt

SEQ ID NO: 414464 - DNA, 30 bp, Artificial Sequence
  Synthetic oligonucleotide
tcagaacagaatcaggctatctggataatt

SEQ ID NO: 414465 - DNA, 30 bp, Artificial Sequence
  Synthetic oligonucleotide
ttatatgtcagttgatcatgacgtataatt

SEQ ID NO: 414466 - DNA, 30 bp, Artificial Sequence
  Synthetic oligonucleotide
gataaacacaggcgtgattccggtataatt

SEQ ID NO: 414467 - DNA, 30 bp, Artificial Sequence
  Synthetic oligonucleotide
atcgcacgtagtaagtgtaaagcactaatt

SEQ ID NO: 414468 - DNA, 30 bp, Artificial Sequence
  Synthetic oligonucleotide
attgatgaggtagaaacaacacgactaatt

SEQ ID NO: 414469 - DNA, 30 bp, Artificial Sequence
  Synthetic oligonucleotide
aaacgtgtgacttagcgagcgaacctaatt

SEQ ID NO: 414470 - DNA, 30 bp, Artificial Sequence
  Synthetic oligonucleotide
attctatcataaataaaaggtaagctaatt

SEQ ID NO: 414471 - DNA, 30 bp, Artificial Sequence
  Synthetic oligonucleotide
aactttatgggccacggcatcgaagtaatt

SEQ ID NO: 414472 - DNA, 30 bp, Artificial Sequence
  Synthetic oligonucleotide
gtacttattatagctgagccaggagtaatt

SEQ ID NO: 414473 - DNA, 30 bp, Artificial Sequence
  Synthetic oligonucleotide
tatatcaacagtacaggtatattagtaatt

SEQ ID NO: 414474 - DNA, 30 bp, Artificial Sequence
  Synthetic oligonucleotide
aataacaaattattccatcataatgtaatt

SEQ ID NO: 414475 - DNA, 30 bp, Artificial Sequence
  Synthetic oligonucleotide
tgagtgtccgtcgcttatttgcatgtaatt

SEQ ID NO: 414476 - DNA, 30 bp, Artificial Sequence
  Synthetic oligonucleotide
ttcgttggatattgactcaggtctgtaatt

SEQ ID NO: 414477 - DNA, 30 bp, Artificial Sequence
  Synthetic oligonucleotide
gagggaggagcttaaaggcttaacttaatt

SEQ ID NO: 414478 - DNA, 30 bp, Artificial Sequence
  Synthetic oligonucleotide
atatgtaccgcacactaaatgctcttaatt

SEQ ID NO: 414479 - DNA, 30 bp, Artificial Sequence
  Synthetic oligonucleotide
actttctcgtcctatccccgatagttaatt

SEQ ID NO: 414480 - DNA, 30 bp, Artificial Sequence
  Synthetic oligonucleotide
tagttgcacctgcaaacaatacatttaatt

SEQ ID NO: 414481 - DNA, 30 bp, Artificial Sequence
  Synthetic oligonucleotide
aggtgtttcgcgttgtagcacagtttaatt

SEQ ID NO: 414482 - DNA, 30 bp, Artificial Sequence
  Synthetic oligonucleotide
aattggacatgccgggcacgcagtttaatt

SEQ ID NO: 414483 - DNA, 31 bp, Artificial Sequence
  Synthetic oligonucleotide
acggttcgtcgtgagtagtcaccttttaatt

SEQ ID NO: 414484 - DNA, 30 bp, Artificial Sequence
  Synthetic oligonucleotide
acctgaccaaagggactccgagttttaatt

SEQ ID NO: 414485 - DNA, 30 bp, Artificial Sequence
  Synthetic oligonucleotide
ctctaaggaatttaataaattataaacatt

SEQ ID NO: 414486 - DNA, 30 bp, Artificial Sequence
  Synthetic oligonucleotide
cggcaagccccttgttgataattaaacatt

SEQ ID NO: 414487 - DNA, 30 bp, Artificial Sequence
  Synthetic oligonucleotide
ggccatccggaacgtggctgatacaacatt

SEQ ID NO: 414488 - DNA, 30 bp, Artificial Sequence
  Synthetic oligonucleotide
gtattaactttgttatgcagtagcaacatt

SEQ ID NO: 414489 - DNA, 30 bp, Artificial Sequence
  Synthetic oligonucleotide
tctccgccctcgacggccggccggaacatt

SEQ ID NO: 414490 - DNA, 30 bp, Artificial Sequence
  Synthetic oligonucleotide
aaattctcaccatagataccggctaacatt

SEQ ID NO: 414491 - DNA, 30 bp, Artificial Sequence
  Synthetic oligonucleotide
tcactcaaaattggccaagtatgtaacatt

SEQ ID NO: 414492 - DNA, 30 bp, Artificial Sequence
  Synthetic oligonucleotide
cttcgtccgatgaggtcgcgaattaacatt

SEQ ID NO: 414493 - DNA, 30 bp, Artificial Sequence
  Synthetic oligonucleotide
gccgactggtacagtggcaacgttaacatt

SEQ ID NO: 414494 - DNA, 30 bp, Artificial Sequence
  Synthetic oligonucleotide
cccagttacgtcgcgacgtgggcacacatt

SEQ ID NO: 414495 - DNA, 30 bp, Artificial Sequence
  Synthetic oligonucleotide
gggacagacttaaggaccccctcacacatt

SEQ ID NO: 414496 - DNA, 30 bp, Artificial Sequence
  Synthetic oligonucleotide
tgtactgtgcatgcgtcttaatagcacatt

SEQ ID NO: 414497 - DNA, 30 bp, Artificial Sequence
  Synthetic oligonucleotide
catccaaacgactgtttgggtcggcacatt

SEQ ID NO: 414498 - DNA, 30 bp, Artificial Sequence
  Synthetic oligonucleotide
agatccgtagttttttaaccgtatcacatt

SEQ ID NO: 414499 - DNA, 30 bp, Artificial Sequence
  Synthetic oligonucleotide
aactccatgcaaaatagggtatacgacatt

SEQ ID NO: 414500 - DNA, 30 bp, Artificial Sequence
  Synthetic oligonucleotide
cccgtcccagtggaagtgatcgtggacatt

SEQ ID NO: 414501 - DNA, 30 bp, Artificial Sequence
  Synthetic oligonucleotide
ggtttttggtgtgtctgcccgtatgacatt

SEQ ID NO: 414502 - DNA, 30 bp, Artificial Sequence
  Synthetic oligonucleotide
caagtatagacatctccttgtactgacatt

SEQ ID NO: 414503 - DNA, 30 bp, Artificial Sequence
  Synthetic oligonucleotide
ggcgccagccatagttcgttgcgtgacatt

SEQ ID NO: 414504 - DNA, 30 bp, Artificial Sequence
  Synthetic oligonucleotide
ggagtatttaggatataccgcacctacatt

SEQ ID NO: 414505 - DNA, 30 bp, Artificial Sequence
  Synthetic oligonucleotide
ggatacaacaggatgtgccaaatctacatt

SEQ ID NO: 414506 - DNA, 30 bp, Artificial Sequence
  Synthetic oligonucleotide
acgacgctaaacccgggtgccgtgtacatt

SEQ ID NO: 414507 - DNA, 30 bp, Artificial Sequence
  Synthetic oligonucleotide
aatcaatatctaaattcatccgtgtacatt

SEQ ID NO: 414508 - DNA, 30 bp, Artificial Sequence
  Synthetic oligonucleotide
aagagggaggaatgtatacttcattacatt

SEQ ID NO: 414509 - DNA, 30 bp, Artificial Sequence
  Synthetic oligonucleotide
tcttgttgtgagtatagataagcttacatt

SEQ ID NO: 414510 - DNA, 30 bp, Artificial Sequence
  Synthetic oligonucleotide
gacgaataggtttgtggaagtggttacatt

SEQ ID NO: 414511 - DNA, 30 bp, Artificial Sequence
  Synthetic oligonucleotide
tcatgcatggactgcggtacatgttacatt

SEQ ID NO: 414512 - DNA, 30 bp, Artificial Sequence
  Synthetic oligonucleotide
cctcgtgctcaacccattatgaaaaccatt

SEQ ID NO: 414513 - DNA, 30 bp, Artificial Sequence
  Synthetic oligonucleotide
ttgacaaatggttacgaaattcaaaccatt

SEQ ID NO: 414514 - DNA, 30 bp, Artificial Sequence
  Synthetic oligonucleotide
gcaacatatagtcctttaattcaaaccatt

SEQ ID NO: 414515 - DNA, 30 bp, Artificial Sequence
  Synthetic oligonucleotide
cctagctacaaatattcaagttcaaccatt

SEQ ID NO: 414516 - DNA, 30 bp, Artificial Sequence
  Synthetic oligonucleotide
cagtattcgtccgcaaatgacagtaccatt

SEQ ID NO: 414517 - DNA, 30 bp, Artificial Sequence
  Synthetic oligonucleotide
tggggttccgatcacgaccaatttaccatt

SEQ ID NO: 414518 - DNA, 30 bp, Artificial Sequence
  Synthetic oligonucleotide
ctcgctattcctgtgcgagtaaaacccatt

SEQ ID NO: 414519 - DNA, 30 bp, Artificial Sequence
  Synthetic oligonucleotide
tgtgcccgtcagggcagtgagcttcccatt

SEQ ID NO: 414520 - DNA, 30 bp, Artificial Sequence
  Synthetic oligonucleotide
atccgacgataaatgtaatgacgagccatt

SEQ ID NO: 414521 - DNA, 30 bp, Artificial Sequence
  Synthetic oligonucleotide
ggtctgtgatcctaggctatggacgccatt

SEQ ID NO: 414522 - DNA, 30 bp, Artificial Sequence
  Synthetic oligonucleotide
cgttcccgtcgttagttggtggcggccatt

SEQ ID NO: 414523 - DNA, 30 bp, Artificial Sequence
  Synthetic oligonucleotide
ggcttagggagttaggctggcgatgccatt

SEQ ID NO: 414524 - DNA, 30 bp, Artificial Sequence
  Synthetic oligonucleotide
atgggaatacttgactgcttcctatccatt

SEQ ID NO: 414525 - DNA, 30 bp, Artificial Sequence
  Synthetic oligonucleotide
aaggtgctgtttagccgtagctcctccatt

SEQ ID NO: 414526 - DNA, 30 bp, Artificial Sequence
  Synthetic oligonucleotide
ggttttgaaagcgggagacaaatttccatt

SEQ ID NO: 414527 - DNA, 30 bp, Artificial Sequence
  Synthetic oligonucleotide
ggccatatctcctctgtgtctatttccatt

SEQ ID NO: 414528 - DNA, 30 bp, Artificial Sequence
  Synthetic oligonucleotide
tatacggatagaaagactcaactttccatt

SEQ ID NO: 414529 - DNA, 30 bp, Artificial Sequence
  Synthetic oligonucleotide
aagtgctcgtggcaacattctttttccatt

SEQ ID NO: 414530 - DNA, 30 bp, Artificial Sequence
  Synthetic oligonucleotide
catgaattatatgaaatagtgtaaagcatt

SEQ ID NO: 414531 - DNA, 30 bp, Artificial Sequence
  Synthetic oligonucleotide
accaactttgttagtgccgtaatcagcatt

SEQ ID NO: 414532 - DNA, 30 bp, Artificial Sequence
  Synthetic oligonucleotide
acaatgcaggggtaaacccgtgtcagcatt

SEQ ID NO: 414533 - DNA, 30 bp, Artificial Sequence
  Synthetic oligonucleotide
attgatatttgaatcaacagggagagcatt

SEQ ID NO: 414534 - DNA, 30 bp, Artificial Sequence
  Synthetic oligonucleotide
acaacgaagaactgatagtacacgagcatt

SEQ ID NO: 414535 - DNA, 30 bp, Artificial Sequence
  Synthetic oligonucleotide
tcaaggccccacattacggagactagcatt

SEQ ID NO: 414536 - DNA, 30 bp, Artificial Sequence
  Synthetic oligonucleotide
taggatatacgagcgggtctggtacgcatt

SEQ ID NO: 414537 - DNA, 30 bp, Artificial Sequence
  Synthetic oligonucleotide
ttcatttccgaacagcggtaggagcgcatt

SEQ ID NO: 414538 - DNA, 30 bp, Artificial Sequence
  Synthetic oligonucleotide
ttttgtactgggtggtgctcctgcggcatt

SEQ ID NO: 414539 - DNA, 30 bp, Artificial Sequence
  Synthetic oligonucleotide
tcccgtgaagagaccctagctgagggcatt

SEQ ID NO: 414540 - DNA, 30 bp, Artificial Sequence
  Synthetic oligonucleotide
acgggctgggaagctacgggaccgggcatt

SEQ ID NO: 414541 - DNA, 30 bp, Artificial Sequence
  Synthetic oligonucleotide
ttcgtactacatcggcagtcgtttggcatt

SEQ ID NO: 414542 - DNA, 30 bp, Artificial Sequence
  Synthetic oligonucleotide
gtcggtatatgcctacagtgtccatgcatt

SEQ ID NO: 414543 - DNA, 30 bp, Artificial Sequence
  Synthetic oligonucleotide
tgtcttggctggttgttctggggatgcatt

SEQ ID NO: 414544 - DNA, 30 bp, Artificial Sequence
  Synthetic oligonucleotide
ttcggctcggagctattaaatttatgcatt

SEQ ID NO: 414545 - DNA, 30 bp, Artificial Sequence
  Synthetic oligonucleotide
taacaagacctgttccgcctggactgcatt

SEQ ID NO: 414546 - DNA, 30 bp, Artificial Sequence
  Synthetic oligonucleotide
aatatcaaaaagacaggatcaggctgcatt

SEQ ID NO: 414547 - DNA, 30 bp, Artificial Sequence
  Synthetic oligonucleotide
gccaccaacatcggaaaggttttgtgcatt

SEQ ID NO: 414548 - DNA, 30 bp, Artificial Sequence
  Synthetic oligonucleotide
tatccaaggtgtacataggattattgcatt

SEQ ID NO: 414549 - DNA, 30 bp, Artificial Sequence
  Synthetic oligonucleotide
aatggaggtgctttatcttgaatttgcatt

SEQ ID NO: 414550 - DNA, 30 bp, Artificial Sequence
  Synthetic oligonucleotide
agccttatcatcgcacagttaatttgcatt

SEQ ID NO: 414551 - DNA, 30 bp, Artificial Sequence
  Synthetic oligonucleotide
cttcatgctcatagtggaccactttgcatt

SEQ ID NO: 414552 - DNA, 30 bp, Artificial Sequence
  Synthetic oligonucleotide
ccttgtgtgaagcgcaggatagtttgcatt

SEQ ID NO: 414553 - DNA, 30 bp, Artificial Sequence
  Synthetic oligonucleotide
ctcccttcggggagcataagatgaatcatt

SEQ ID NO: 414554 - DNA, 30 bp, Artificial Sequence
  Synthetic oligonucleotide
acaaggattatacgatcccaaataatcatt

SEQ ID NO: 414555 - DNA, 30 bp, Artificial Sequence
  Synthetic oligonucleotide
atcacttgagttatgtttagccatatcatt

SEQ ID NO: 414556 - DNA, 30 bp, Artificial Sequence
  Synthetic oligonucleotide
tacaacatgtgacatccagtgtatatcatt

SEQ ID NO: 414557 - DNA, 30 bp, Artificial Sequence
  Synthetic oligonucleotide
tagcccctcgggaatgtacaccttatcatt

SEQ ID NO: 414558 - DNA, 30 bp, Artificial Sequence
  Synthetic oligonucleotide
atacaatatgtagtcaacgccatactcatt

SEQ ID NO: 414559 - DNA, 30 bp, Artificial Sequence
  Synthetic oligonucleotide
ggacatggactgctcccgaggctactcatt

SEQ ID NO: 414560 - DNA, 30 bp, Artificial Sequence
  Synthetic oligonucleotide
gtaatcctatctacattgcgtctactcatt

SEQ ID NO: 414561 - DNA, 30 bp, Artificial Sequence
  Synthetic oligonucleotide
ccgtatttatcccccggtcaaaacctcatt

SEQ ID NO: 414562 - DNA, 30 bp, Artificial Sequence
  Synthetic oligonucleotide
tttcaaactccaagggaggcgagcctcatt

SEQ ID NO: 414563 - DNA, 30 bp, Artificial Sequence
  Synthetic oligonucleotide
actttgtttgtcaaatttgccaggctcatt

SEQ ID NO: 414564 - DNA, 30 bp, Artificial Sequence
  Synthetic oligonucleotide
ttagtcagaacttatccttatcggctcatt

SEQ ID NO: 414565 - DNA, 30 bp, Artificial Sequence
  Synthetic oligonucleotide
ctactgccactcggctaggtcgggctcatt

SEQ ID NO: 414566 - DNA, 30 bp, Artificial Sequence
  Synthetic oligonucleotide
accctaagaataaaaaactgacctctcatt

SEQ ID NO: 414567 - DNA, 30 bp, Artificial Sequence
  Synthetic oligonucleotide
ggctagtaacttatggcctgaagtctcatt

SEQ ID NO: 414568 - DNA, 30 bp, Artificial Sequence
  Synthetic oligonucleotide
cgactccagtgctctccaaattgtctcatt

SEQ ID NO: 414569 - DNA, 30 bp, Artificial Sequence
  Synthetic oligonucleotide
acttcagacatcttgtctccagacgtcatt

SEQ ID NO: 414570 - DNA, 30 bp, Artificial Sequence
  Synthetic oligonucleotide
tctatcagccaacattcatgaagggtcatt

SEQ ID NO: 414571 - DNA, 30 bp, Artificial Sequence
  Synthetic oligonucleotide
acgggctcttctgtaaataggtatgtcatt

SEQ ID NO: 414572 - DNA, 30 bp, Artificial Sequence
  Synthetic oligonucleotide
cctaaatgaggtcctgacgatggtgtcatt

SEQ ID NO: 414573 - DNA, 30 bp, Artificial Sequence
  Synthetic oligonucleotide
tgtactagtgtgattcctttctgtgtcatt

SEQ ID NO: 414574 - DNA, 30 bp, Artificial Sequence
  Synthetic oligonucleotide
gagattgcgcaagcgcggatgggattcatt

SEQ ID NO: 414575 - DNA, 30 bp, Artificial Sequence
  Synthetic oligonucleotide
atctcccgcgtaatttgaggcctattcatt

SEQ ID NO: 414576 - DNA, 30 bp, Artificial Sequence
  Synthetic oligonucleotide
aagtcccttgtgatgattgtttggttcatt

SEQ ID NO: 414577 - DNA, 30 bp, Artificial Sequence
  Synthetic oligonucleotide
acatggattgctctgcttagtatgttcatt

SEQ ID NO: 414578 - DNA, 30 bp, Artificial Sequence
  Synthetic oligonucleotide
cttgctatatgctgaacagtccatttcatt

SEQ ID NO: 414579 - DNA, 30 bp, Artificial Sequence
  Synthetic oligonucleotide
cagacgtattggaagccgtacgctttcatt

SEQ ID NO: 414580 - DNA, 30 bp, Artificial Sequence
  Synthetic oligonucleotide
ataaagagtctggaactgggaagtttcatt

SEQ ID NO: 414581 - DNA, 30 bp, Artificial Sequence
  Synthetic oligonucleotide
tgaagtaccattcttgggtaccgtttcatt

SEQ ID NO: 414582 - DNA, 30 bp, Artificial Sequence
  Synthetic oligonucleotide
ccattggcgggtaccgcgatcgttttcatt

SEQ ID NO: 414583 - DNA, 30 bp, Artificial Sequence
  Synthetic oligonucleotide
cgcacattgctatgccggctatttttcatt

SEQ ID NO: 414584 - DNA, 30 bp, Artificial Sequence
  Synthetic oligonucleotide
cgcaggttattgtcaaagcggttaaagatt

SEQ ID NO: 414585 - DNA, 30 bp, Artificial Sequence
  Synthetic oligonucleotide
ccagaaaatatagttcgcatagtgaagatt

SEQ ID NO: 414586 - DNA, 30 bp, Artificial Sequence
  Synthetic oligonucleotide
gggtacgttctacgtttcaggcctaagatt

SEQ ID NO: 414587 - DNA, 30 bp, Artificial Sequence
  Synthetic oligonucleotide
caaggttgtgttccgacatgtcctaagatt

SEQ ID NO: 414588 - DNA, 30 bp, Artificial Sequence
  Synthetic oligonucleotide
ccacacggtcaacgaggccgcattaagatt

SEQ ID NO: 414589 - DNA, 30 bp, Artificial Sequence
  Synthetic oligonucleotide
tatgatggacgaccgcctcacatacagatt

SEQ ID NO: 414590 - DNA, 30 bp, Artificial Sequence
  Synthetic oligonucleotide
tctgttgcaatatattgagagctacagatt

SEQ ID NO: 414591 - DNA, 30 bp, Artificial Sequence
  Synthetic oligonucleotide
gctagctaaacatttgtggacttacagatt

SEQ ID NO: 414592 - DNA, 30 bp, Artificial Sequence
  Synthetic oligonucleotide
gcaaaacattagtccttccttttacagatt

SEQ ID NO: 414593 - DNA, 30 bp, Artificial Sequence
  Synthetic oligonucleotide
cgaacgtttgttgggttagttacccagatt

SEQ ID NO: 414594 - DNA, 30 bp, Artificial Sequence
  Synthetic oligonucleotide
aggcttttgaatactacctaaaagcagatt

SEQ ID NO: 414595 - DNA, 30 bp, Artificial Sequence
  Synthetic oligonucleotide
ctaacgttcttaaattgggttgggcagatt

SEQ ID NO: 414596 - DNA, 30 bp, Artificial Sequence
  Synthetic oligonucleotide
atggtgctggtctgcggggataatcagatt

SEQ ID NO: 414597 - DNA, 30 bp, Artificial Sequence
  Synthetic oligonucleotide
cttagtctatctcaggtacagtgtcagatt

SEQ ID NO: 414598 - DNA, 30 bp, Artificial Sequence
  Synthetic oligonucleotide
agatgtagcgtgttaaccgtaggagagatt

SEQ ID NO: 414599 - DNA, 30 bp, Artificial Sequence
  Synthetic oligonucleotide
gacatcaccgttccttggttaggagagatt

SEQ ID NO: 414600 - DNA, 30 bp, Artificial Sequence
  Synthetic oligonucleotide
acacagggtgttgatcatggcatagagatt

SEQ ID NO: 414601 - DNA, 30 bp, Artificial Sequence
  Synthetic oligonucleotide
atacattcttcgacatgactataggagatt

SEQ ID NO: 414602 - DNA, 30 bp, Artificial Sequence
  Synthetic oligonucleotide
cctccaacactggtttgattataggagatt

SEQ ID NO: 414603 - DNA, 30 bp, Artificial Sequence
  Synthetic oligonucleotide
taagtgtcaatacccgcctgcacggagatt

SEQ ID NO: 414604 - DNA, 30 bp, Artificial Sequence
  Synthetic oligonucleotide
aagagttacacctcgtaaagccatgagatt

SEQ ID NO: 414605 - DNA, 30 bp, Artificial Sequence
  Synthetic oligonucleotide
tggcacgcaacccagcccgtgcttgagatt

SEQ ID NO: 414606 - DNA, 30 bp, Artificial Sequence
  Synthetic oligonucleotide
ctttcgaaaaacagaccccaataatagatt

SEQ ID NO: 414607 - DNA, 30 bp, Artificial Sequence
  Synthetic oligonucleotide
tctacgtatcgtctattagacagatagatt

SEQ ID NO: 414608 - DNA, 30 bp, Artificial Sequence
  Synthetic oligonucleotide
aagagatccgctatgaccgctttctagatt

SEQ ID NO: 414609 - DNA, 30 bp, Artificial Sequence
  Synthetic oligonucleotide
gatacctcgcctccgtaacaagggtagatt

SEQ ID NO: 414610 - DNA, 30 bp, Artificial Sequence
  Synthetic oligonucleotide
atataaaagtacaacccgacgggttagatt

SEQ ID NO: 414611 - DNA, 30 bp, Artificial Sequence
  Synthetic oligonucleotide
ctacatcgttcatttgttgccatttagatt

SEQ ID NO: 414612 - DNA, 30 bp, Artificial Sequence
  Synthetic oligonucleotide
ctgttgcgcgcttacatgcctttttagatt

SEQ ID NO: 414613 - DNA, 30 bp, Artificial Sequence
  Synthetic oligonucleotide
gatacaagtgttagaatgatacgcacgatt

SEQ ID NO: 414614 - DNA, 30 bp, Artificial Sequence
  Synthetic oligonucleotide
acactgtgaactagctgtcctatgacgatt

SEQ ID NO: 414615 - DNA, 30 bp, Artificial Sequence
  Synthetic oligonucleotide
aagctagtgtggaacttcttccctacgatt

SEQ ID NO: 414616 - DNA, 30 bp, Artificial Sequence
  Synthetic oligonucleotide
gtaacgtatcattatttctctagtacgatt

SEQ ID NO: 414617 - DNA, 30 bp, Artificial Sequence
  Synthetic oligonucleotide
gtgtgacaagaaggaacaatcgtaccgatt

SEQ ID NO: 414618 - DNA, 30 bp, Artificial Sequence
  Synthetic oligonucleotide
tagtcacgtcttgtgcagtctaccccgatt

SEQ ID NO: 414619 - DNA, 30 bp, Artificial Sequence
  Synthetic oligonucleotide
ctgatggacccgcaacagtagtccccgatt

SEQ ID NO: 414620 - DNA, 30 bp, Artificial Sequence
  Synthetic oligonucleotide
cagttgggtgtgagtagaacggatccgatt

SEQ ID NO: 414621 - DNA, 30 bp, Artificial Sequence
  Synthetic oligonucleotide
gggttttgtggggccatttaaagagcgatt

SEQ ID NO: 414622 - DNA, 30 bp, Artificial Sequence
  Synthetic oligonucleotide
gcgcttgtaacgctccatatcttagcgatt

SEQ ID NO: 414623 - DNA, 30 bp, Artificial Sequence
  Synthetic oligonucleotide
gccaacagcaagcaattgccgaaggcgatt

SEQ ID NO: 414624 - DNA, 30 bp, Artificial Sequence
  Synthetic oligonucleotide
ttagttgatttgggaactttgaaggcgatt

SEQ ID NO: 414625 - DNA, 30 bp, Artificial Sequence
  Synthetic oligonucleotide
acaacttttttaggccactatcgggcgatt

SEQ ID NO: 414626 - DNA, 30 bp, Artificial Sequence
  Synthetic oligonucleotide
ttccgggacgcccttaaggagcttgcgatt

SEQ ID NO: 414627 - DNA, 30 bp, Artificial Sequence
  Synthetic oligonucleotide
gacgacgccctgacaccgatgcttgcgatt

SEQ ID NO: 414628 - DNA, 30 bp, Artificial Sequence
  Synthetic oligonucleotide
ctgataaacttaccagacaaggcatcgatt

SEQ ID NO: 414629 - DNA, 30 bp, Artificial Sequence
  Synthetic oligonucleotide
ctcggcaggacggatacgagaatctcgatt

SEQ ID NO: 414630 - DNA, 30 bp, Artificial Sequence
  Synthetic oligonucleotide
tacaagcacacagtcaaaattatgtcgatt

SEQ ID NO: 414631 - DNA, 30 bp, Artificial Sequence
  Synthetic oligonucleotide
tgaataattatcgggtcgcgggcttcgatt

SEQ ID NO: 414632 - DNA, 30 bp, Artificial Sequence
  Synthetic oligonucleotide
tacctcatagattctcctaaaaaaaggatt

SEQ ID NO: 414633 - DNA, 30 bp, Artificial Sequence
  Synthetic oligonucleotide
gaattcatacctcgttcatagacaaggatt

SEQ ID NO: 414634 - DNA, 30 bp, Artificial Sequence
  Synthetic oligonucleotide
attactcgcataatggaaggaggaaggatt

SEQ ID NO: 414635 - DNA, 30 bp, Artificial Sequence
  Synthetic oligonucleotide
tatgcacaccctacgatcacgggaaggatt

SEQ ID NO: 414636 - DNA, 30 bp, Artificial Sequence
  Synthetic oligonucleotide
gcaaggcctatccagatcttaataaggatt

SEQ ID NO: 414637 - DNA, 30 bp, Artificial Sequence
  Synthetic oligonucleotide
ccatcactcttaataggtactccgaggatt

SEQ ID NO: 414638 - DNA, 30 bp, Artificial Sequence
  Synthetic oligonucleotide
gggccctgtagcacgtactacgtgaggatt

SEQ ID NO: 414639 - DNA, 30 bp, Artificial Sequence
  Synthetic oligonucleotide
cattgggaaactaatttcagctctaggatt

SEQ ID NO: 414640 - DNA, 30 bp, Artificial Sequence
  Synthetic oligonucleotide
gggttctcacataaagcgttgattaggatt

SEQ ID NO: 414641 - DNA, 30 bp, Artificial Sequence
  Synthetic oligonucleotide
atagcctcgaggcgcatgcgtaaacggatt

SEQ ID NO: 414642 - DNA, 30 bp, Artificial Sequence
  Synthetic oligonucleotide
catctactcctgtgagtagggtaacggatt

SEQ ID NO: 414643 - DNA, 30 bp, Artificial Sequence
  Synthetic oligonucleotide
ctggatggtttacgatcaaggccacggatt

SEQ ID NO: 414644 - DNA, 30 bp, Artificial Sequence
  Synthetic oligonucleotide
ccttatgggtttcgaagttcggaccggatt

SEQ ID NO: 414645 - DNA, 30 bp, Artificial Sequence
  Synthetic oligonucleotide
tcatgcattacgcatacgccattccggatt

SEQ ID NO: 414646 - DNA, 30 bp, Artificial Sequence
  Synthetic oligonucleotide
agcaacgcgatcgaagggaacccgcggatt

SEQ ID NO: 414647 - DNA, 30 bp, Artificial Sequence
  Synthetic oligonucleotide
ccgtggggtgtctgcttatagccgcggatt

SEQ ID NO: 414648 - DNA, 30 bp, Artificial Sequence
  Synthetic oligonucleotide
gcccgggctatttaaaatctagatcggatt

SEQ ID NO: 414649 - DNA, 30 bp, Artificial Sequence
  Synthetic oligonucleotide
gtaagttaaggacggtttcaagctcggatt

SEQ ID NO: 414650 - DNA, 30 bp, Artificial Sequence
  Synthetic oligonucleotide
tgcgacgattgcacacctcgatctcggatt

SEQ ID NO: 414651 - DNA, 31 bp, Artificial Sequence
  Synthetic oligonucleotide
ctctccgaccagtgatgattttcgcgggatt

SEQ ID NO: 414652 - DNA, 30 bp, Artificial Sequence
  Synthetic oligonucleotide
tcgaatactgatctatccagcctcgggatt

SEQ ID NO: 414653 - DNA, 30 bp, Artificial Sequence
  Synthetic oligonucleotide
tcttttgggtcgaagcaagtttgggggatt

SEQ ID NO: 414654 - DNA, 30 bp, Artificial Sequence
  Synthetic oligonucleotide
agaatcgtttactcctcaacctgtgggatt

SEQ ID NO: 414655 - DNA, 30 bp, Artificial Sequence
  Synthetic oligonucleotide
tgtaccctacgcatatcaaccaaatggatt

SEQ ID NO: 414656 - DNA, 30 bp, Artificial Sequence
  Synthetic oligonucleotide
cttgtgttaactgtcttggaacaatggatt

SEQ ID NO: 414657 - DNA, 30 bp, Artificial Sequence
  Synthetic oligonucleotide
cttgtccttaacatactgtatttatggatt

SEQ ID NO: 414658 - DNA, 30 bp, Artificial Sequence
  Synthetic oligonucleotide
aatacttcctcgacagaaaagcagtggatt

SEQ ID NO: 414659 - DNA, 30 bp, Artificial Sequence
  Synthetic oligonucleotide
gaacttggtgggataagaggtttgtggatt

SEQ ID NO: 414660 - DNA, 27 bp, Artificial Sequence
  Synthetic oligonucleotide
ggatcgcccataatcgatccttggatt

SEQ ID NO: 414661 - DNA, 30 bp, Artificial Sequence
  Synthetic oligonucleotide
agcacccacgggacaagtcccaaaatgatt

SEQ ID NO: 414662 - DNA, 30 bp, Artificial Sequence
  Synthetic oligonucleotide
gtgctcgctagccactggaaaaccatgatt

SEQ ID NO: 414663 - DNA, 30 bp, Artificial Sequence
  Synthetic oligonucleotide
taaggatacttgagggagtgagtcatgatt

SEQ ID NO: 414664 - DNA, 30 bp, Artificial Sequence
  Synthetic oligonucleotide
gatactccgactcgagacttcttgatgatt

SEQ ID NO: 414665 - DNA, 30 bp, Artificial Sequence
  Synthetic oligonucleotide
agatatgttccggcaggagccgctatgatt

SEQ ID NO: 414666 - DNA, 30 bp, Artificial Sequence
  Synthetic oligonucleotide
tcgatcctattcgataaaacttgtatgatt

SEQ ID NO: 414667 - DNA, 30 bp, Artificial Sequence
  Synthetic oligonucleotide
cagcgtagatcgatcataattcacctgatt

SEQ ID NO: 414668 - DNA, 30 bp, Artificial Sequence
  Synthetic oligonucleotide
tattcgtaggactatttcttcaccctgatt

SEQ ID NO: 414669 - DNA, 30 bp, Artificial Sequence
  Synthetic oligonucleotide
attaaggccaccacagcctcagagctgatt

SEQ ID NO: 414670 - DNA, 30 bp, Artificial Sequence
  Synthetic oligonucleotide
ttcataatcctgagagtacctttgctgatt

SEQ ID NO: 414671 - DNA, 30 bp, Artificial Sequence
  Synthetic oligonucleotide
aatgagataaacaaaaagttttatctgatt

SEQ ID NO: 414672 - DNA, 30 bp, Artificial Sequence
  Synthetic oligonucleotide
aaaacgtacggagtttcggtaactctgatt

SEQ ID NO: 414673 - DNA, 30 bp, Artificial Sequence
  Synthetic oligonucleotide
tcgtacgttttaacaagcaacgaagtgatt

SEQ ID NO: 414674 - DNA, 30 bp, Artificial Sequence
  Synthetic oligonucleotide
cgtaacctatgtggtttcctagacgtgatt

SEQ ID NO: 414675 - DNA, 30 bp, Artificial Sequence
  Synthetic oligonucleotide
atacgctttgggcaaatctggttcgtgatt

SEQ ID NO: 414676 - DNA, 30 bp, Artificial Sequence
  Synthetic oligonucleotide
gattcgttagttatgataacgaaggtgatt

SEQ ID NO: 414677 - DNA, 30 bp, Artificial Sequence
  Synthetic oligonucleotide
ttgggtttatgtttgctctgccaggtgatt

SEQ ID NO: 414678 - DNA, 30 bp, Artificial Sequence
  Synthetic oligonucleotide
gcggacgcattgttacagctgggggtgatt

SEQ ID NO: 414679 - DNA, 30 bp, Artificial Sequence
  Synthetic oligonucleotide
tccgggtcgaacttttcacaatatgtgatt

SEQ ID NO: 414680 - DNA, 30 bp, Artificial Sequence
  Synthetic oligonucleotide
tactatacccccgtgggcagttcattgatt

SEQ ID NO: 414681 - DNA, 31 bp, Artificial Sequence
  Synthetic oligonucleotide
acaaccatggaaatagtgctatcgattgatt

SEQ ID NO: 414682 - DNA, 30 bp, Artificial Sequence
  Synthetic oligonucleotide
tgagagagagcggaaggcatagtcttgatt

SEQ ID NO: 414683 - DNA, 30 bp, Artificial Sequence
  Synthetic oligonucleotide
tccaagaagtttcatgaaagtatgttgatt

SEQ ID NO: 414684 - DNA, 30 bp, Artificial Sequence
  Synthetic oligonucleotide
gattaagctatcctcgctggcctgttgatt

SEQ ID NO: 414685 - DNA, 30 bp, Artificial Sequence
  Synthetic oligonucleotide
tcaaatttagtcagatcaatatatttgatt

SEQ ID NO: 414686 - DNA, 30 bp, Artificial Sequence
  Synthetic oligonucleotide
ggcgaccggcattcaatacacggtttgatt

SEQ ID NO: 414687 - DNA, 30 bp, Artificial Sequence
  Synthetic oligonucleotide
cggaaaatacgattttgtggtattttgatt

SEQ ID NO: 414688 - DNA, 30 bp, Artificial Sequence
  Synthetic oligonucleotide
ggtaacttagaccatgacggacacaatatt

SEQ ID NO: 414689 - DNA, 30 bp, Artificial Sequence
  Synthetic oligonucleotide
ctgagccagggtaatttggttcacaatatt

SEQ ID NO: 414690 - DNA, 30 bp, Artificial Sequence
  Synthetic oligonucleotide
tttgagctagaccaactctcacagaatatt

SEQ ID NO: 414691 - DNA, 29 bp, Artificial Sequence
  Synthetic oligonucleotide
tggtggtgattatcaaaaagccgaatatt

SEQ ID NO: 414692 - DNA, 30 bp, Artificial Sequence
  Synthetic oligonucleotide
aacgcctgttgtctgtactcgatgaatatt

SEQ ID NO: 414693 - DNA, 30 bp, Artificial Sequence
  Synthetic oligonucleotide
ctcttggtttggctcggggtgatgaatatt

SEQ ID NO: 414694 - DNA, 30 bp, Artificial Sequence
  Synthetic oligonucleotide
atgataagttttccggattgggataatatt

SEQ ID NO: 414695 - DNA, 30 bp, Artificial Sequence
  Synthetic oligonucleotide
cactcttaataaaatagcttcagtaatatt

SEQ ID NO: 414696 - DNA, 30 bp, Artificial Sequence
  Synthetic oligonucleotide
cggccaggcaacgtttcttttattaatatt

SEQ ID NO: 414697 - DNA, 30 bp, Artificial Sequence
  Synthetic oligonucleotide
taattccatagtcaagggtcgcaacatatt

SEQ ID NO: 414698 - DNA, 30 bp, Artificial Sequence
  Synthetic oligonucleotide
gtgtaagcatcttgagccgtacgacatatt

SEQ ID NO: 414699 - DNA, 30 bp, Artificial Sequence
  Synthetic oligonucleotide
ctttctatgtcaaaccggggtgtacatatt

SEQ ID NO: 414700 - DNA, 30 bp, Artificial Sequence
  Synthetic oligonucleotide
gcactaggttaacctggaccgaaccatatt

SEQ ID NO: 414701 - DNA, 30 bp, Artificial Sequence
  Synthetic oligonucleotide
tggggaaaactgtttctaggacagcatatt

SEQ ID NO: 414702 - DNA, 30 bp, Artificial Sequence
  Synthetic oligonucleotide
ggtaaagtgagctatgtcttctagcatatt

SEQ ID NO: 414703 - DNA, 30 bp, Artificial Sequence
  Synthetic oligonucleotide
agatgagaataaattttctgaacgcatatt

SEQ ID NO: 414704 - DNA, 30 bp, Artificial Sequence
  Synthetic oligonucleotide
gtagacggcctcctctttccatggcatatt

SEQ ID NO: 414705 - DNA, 30 bp, Artificial Sequence
  Synthetic oligonucleotide
gactgtgtatgttaggagcacgatcatatt

SEQ ID NO: 414706 - DNA, 30 bp, Artificial Sequence
  Synthetic oligonucleotide
ctgctaagttatttgtgcttatttcatatt

SEQ ID NO: 414707 - DNA, 30 bp, Artificial Sequence
  Synthetic oligonucleotide
gctgacgtccaaacggagcagaaagatatt

SEQ ID NO: 414708 - DNA, 30 bp, Artificial Sequence
  Synthetic oligonucleotide
gttagagacgattgtcacctttaagatatt

SEQ ID NO: 414709 - DNA, 30 bp, Artificial Sequence
  Synthetic oligonucleotide
ggcttcctttgacgataggtcacagatatt

SEQ ID NO: 414710 - DNA, 30 bp, Artificial Sequence
  Synthetic oligonucleotide
gaatctagcgaaggacgctcaaccgatatt

SEQ ID NO: 414711 - DNA, 30 bp, Artificial Sequence
  Synthetic oligonucleotide
caggcaaggcttcatggtttcaaggatatt

SEQ ID NO: 414712 - DNA, 30 bp, Artificial Sequence
  Synthetic oligonucleotide
gccgagggtgagacacccatccgggatatt

SEQ ID NO: 414713 - DNA, 30 bp, Artificial Sequence
  Synthetic oligonucleotide
ttggcgctaaagcactgaccgttggatatt

SEQ ID NO: 414714 - DNA, 30 bp, Artificial Sequence
  Synthetic oligonucleotide
ctgatagcacctaagatcagacatgatatt

SEQ ID NO: 414715 - DNA, 30 bp, Artificial Sequence
  Synthetic oligonucleotide
acttagtctattagcgatattaaatatatt

SEQ ID NO: 414716 - DNA, 30 bp, Artificial Sequence
  Synthetic oligonucleotide
tcggttccacgttaaacgaggcaatatatt

SEQ ID NO: 414717 - DNA, 30 bp, Artificial Sequence
  Synthetic oligonucleotide
tcattgtcaagcaaacacggctaatatatt

SEQ ID NO: 414718 - DNA, 30 bp, Artificial Sequence
  Synthetic oligonucleotide
tactatttctgatccgcttagccatatatt

SEQ ID NO: 414719 - DNA, 30 bp, Artificial Sequence
  Synthetic oligonucleotide
tccgaacttcatggaacgctatcatatatt

SEQ ID NO: 414720 - DNA, 30 bp, Artificial Sequence
  Synthetic oligonucleotide
ttcgatgtactctcatcgggtgtatatatt

SEQ ID NO: 414721 - DNA, 30 bp, Artificial Sequence
  Synthetic oligonucleotide
aggtcagctaccctagttctaacctatatt

SEQ ID NO: 414722 - DNA, 31 bp, Artificial Sequence
  Synthetic oligonucleotide
gaatcgtagtgagtttgtagcgccctatatt

SEQ ID NO: 414723 - DNA, 30 bp, Artificial Sequence
  Synthetic oligonucleotide
attacagagtttaggtaaccagcctatatt

SEQ ID NO: 414724 - DNA, 30 bp, Artificial Sequence
  Synthetic oligonucleotide
ctgctgtcggagtgtaatcttgcctatatt

SEQ ID NO: 414725 - DNA, 30 bp, Artificial Sequence
  Synthetic oligonucleotide
aagctatagctggatctcgggagctatatt

SEQ ID NO: 414726 - DNA, 30 bp, Artificial Sequence
  Synthetic oligonucleotide
aacgaactttagtgacataatctctatatt

SEQ ID NO: 414727 - DNA, 30 bp, Artificial Sequence
  Synthetic oligonucleotide
ctcacatcgcttagagacaagttctatatt

SEQ ID NO: 414728 - DNA, 30 bp, Artificial Sequence
  Synthetic oligonucleotide
atttcgataattggcataatacagtatatt

SEQ ID NO: 414729 - DNA, 30 bp, Artificial Sequence
  Synthetic oligonucleotide
gaatcgtaacacaggtaattacagtatatt

SEQ ID NO: 414730 - DNA, 30 bp, Artificial Sequence
  Synthetic oligonucleotide
agcggtgtgatcagtaaccagcagtatatt

SEQ ID NO: 414731 - DNA, 30 bp, Artificial Sequence
  Synthetic oligonucleotide
aaatgcattcgaaggacagttgagtatatt

SEQ ID NO: 414732 - DNA, 30 bp, Artificial Sequence
  Synthetic oligonucleotide
gcgatgtgccgggtactgtgtcattatatt

SEQ ID NO: 414733 - DNA, 30 bp, Artificial Sequence
  Synthetic oligonucleotide
atcagcttaatgcataagcgggattatatt

SEQ ID NO: 414734 - DNA, 30 bp, Artificial Sequence
  Synthetic oligonucleotide
catccgggactaccgtaatgtccttatatt

SEQ ID NO: 414735 - DNA, 30 bp, Artificial Sequence
  Synthetic oligonucleotide
cgggtgtagcatgagactattagttatatt

SEQ ID NO: 414736 - DNA, 30 bp, Artificial Sequence
  Synthetic oligonucleotide
gtgccggaaagattagctatctgttatatt

SEQ ID NO: 414737 - DNA, 30 bp, Artificial Sequence
  Synthetic oligonucleotide
ccacccgaaagcaacctacccttttatatt

SEQ ID NO: 414738 - DNA, 30 bp, Artificial Sequence
  Synthetic oligonucleotide
tagaagcatcgaagtgagattggaactatt

SEQ ID NO: 414739 - DNA, 30 bp, Artificial Sequence
  Synthetic oligonucleotide
atcaaggaagaattcattaagcggactatt

SEQ ID NO: 414740 - DNA, 30 bp, Artificial Sequence
  Synthetic oligonucleotide
agtttgtttaaggcgctagctgggactatt

SEQ ID NO: 414741 - DNA, 30 bp, Artificial Sequence
  Synthetic oligonucleotide
accccagattctaacttcctgtctactatt

SEQ ID NO: 414742 - DNA, 30 bp, Artificial Sequence
  Synthetic oligonucleotide
cagaatactgcggctcgtaccgcacctatt

SEQ ID NO: 414743 - DNA, 30 bp, Artificial Sequence
  Synthetic oligonucleotide
cctcacagcatacagggcaggtgacctatt

SEQ ID NO: 414744 - DNA, 30 bp, Artificial Sequence
  Synthetic oligonucleotide
tgttcgaaacgaatgcagccctagcctatt

SEQ ID NO: 414745 - DNA, 30 bp, Artificial Sequence
  Synthetic oligonucleotide
tggttgtcgtctgatgtggttagtcctatt

SEQ ID NO: 414746 - DNA, 30 bp, Artificial Sequence
  Synthetic oligonucleotide
actcggttactcacgggccgagttcctatt

SEQ ID NO: 414747 - DNA, 30 bp, Artificial Sequence
  Synthetic oligonucleotide
ttatcaaactcaacgacgaggctagctatt

SEQ ID NO: 414748 - DNA, 30 bp, Artificial Sequence
  Synthetic oligonucleotide
ccccaggtttgaatgccgacgttggctatt

SEQ ID NO: 414749 - DNA, 30 bp, Artificial Sequence
  Synthetic oligonucleotide
gaactcccctcgtcaacacagtctgctatt

SEQ ID NO: 414750 - DNA, 30 bp, Artificial Sequence
  Synthetic oligonucleotide
cagagtttgcggccaaccgcatgtgctatt

SEQ ID NO: 414751 - DNA, 30 bp, Artificial Sequence
  Synthetic oligonucleotide
gatctcgttggtagaggatcataatctatt

SEQ ID NO: 414752 - DNA, 30 bp, Artificial Sequence
  Synthetic oligonucleotide
ctggctgagcatgttaaatggtaatctatt

SEQ ID NO: 414753 - DNA, 30 bp, Artificial Sequence
  Synthetic oligonucleotide
atacctttgctccacctcttttaatctatt

SEQ ID NO: 414754 - DNA, 30 bp, Artificial Sequence
  Synthetic oligonucleotide
cgcgctggttatagaatgtatggatctatt

SEQ ID NO: 414755 - DNA, 30 bp, Artificial Sequence
  Synthetic oligonucleotide
atccttcggccttaggaatcccagtctatt

SEQ ID NO: 414756 - DNA, 30 bp, Artificial Sequence
  Synthetic oligonucleotide
aaataatggtcatctatgatgaggtctatt

SEQ ID NO: 414757 - DNA, 29 bp, Artificial Sequence
  Synthetic oligonucleotide
ttccggagtcaactgcattcgtgtctatt

SEQ ID NO: 414758 - DNA, 30 bp, Artificial Sequence
  Synthetic oligonucleotide
cagcattcctgcgttgccttcgtgtctatt

SEQ ID NO: 414759 - DNA, 30 bp, Artificial Sequence
  Synthetic oligonucleotide
taaagaccgcaagtgatattgttgtctatt

SEQ ID NO: 414760 - DNA, 31 bp, Artificial Sequence
  Synthetic oligonucleotide
ctctggctggaatgactgaggcatttctatt

SEQ ID NO: 414761 - DNA, 30 bp, Artificial Sequence
  Synthetic oligonucleotide
tcacggtatttcttaccagagcaaagtatt

SEQ ID NO: 414762 - DNA, 30 bp, Artificial Sequence
  Synthetic oligonucleotide
ccggactgaatggttggttatgcaagtatt

SEQ ID NO: 414763 - DNA, 30 bp, Artificial Sequence
  Synthetic oligonucleotide
tattaccttcaaaaccgtaacagaagtatt

SEQ ID NO: 414764 - DNA, 29 bp, Artificial Sequence
  Synthetic oligonucleotide
ttgtaggagaaccaattgttctaagtatt

SEQ ID NO: 414765 - DNA, 30 bp, Artificial Sequence
  Synthetic oligonucleotide
atagcccggtgtgtcacaagcaacagtatt

SEQ ID NO: 414766 - DNA, 30 bp, Artificial Sequence
  Synthetic oligonucleotide
tctgctcagaaatccggggttctcagtatt

SEQ ID NO: 414767 - DNA, 30 bp, Artificial Sequence
  Synthetic oligonucleotide
aagcccacacttatatagcagttcagtatt

SEQ ID NO: 414768 - DNA, 30 bp, Artificial Sequence
  Synthetic oligonucleotide
agctaatagtattacggagggtagagtatt

SEQ ID NO: 414769 - DNA, 30 bp, Artificial Sequence
  Synthetic oligonucleotide
tcttacagggtttagaaccaaaggagtatt

SEQ ID NO: 414770 - DNA, 30 bp, Artificial Sequence
  Synthetic oligonucleotide
cttgttaggagacgatccgttgtgagtatt

SEQ ID NO: 414771 - DNA, 30 bp, Artificial Sequence
  Synthetic oligonucleotide
tgctattcggcggtacgagttagtagtatt

SEQ ID NO: 414772 - DNA, 30 bp, Artificial Sequence
  Synthetic oligonucleotide
cctcataagaagatcacgtggattagtatt

SEQ ID NO: 414773 - DNA, 30 bp, Artificial Sequence
  Synthetic oligonucleotide
ctcacttttgacaccgacgaacttagtatt

SEQ ID NO: 414774 - DNA, 30 bp, Artificial Sequence
  Synthetic oligonucleotide
aacccaatggcacacaggtaataacgtatt

SEQ ID NO: 414775 - DNA, 30 bp, Artificial Sequence
  Synthetic oligonucleotide
catagatgcttgttcctggcagcacgtatt

SEQ ID NO: 414776 - DNA, 30 bp, Artificial Sequence
  Synthetic oligonucleotide
cccgtaacggagcggttctcgctacgtatt

SEQ ID NO: 414777 - DNA, 30 bp, Artificial Sequence
  Synthetic oligonucleotide
ggtttctacggaacgctttgataccgtatt

SEQ ID NO: 414778 - DNA, 30 bp, Artificial Sequence
  Synthetic oligonucleotide
ctaatttctctgcacggggggctgcgtatt

SEQ ID NO: 414779 - DNA, 30 bp, Artificial Sequence
  Synthetic oligonucleotide
gcgtcctttcaggaattgcgcttgcgtatt

SEQ ID NO: 414780 - DNA, 30 bp, Artificial Sequence
  Synthetic oligonucleotide
atcctagttgtgaataaggtacgtcgtatt

SEQ ID NO: 414781 - DNA, 30 bp, Artificial Sequence
  Synthetic oligonucleotide
cacgactaaagtaccggttaaggtcgtatt

SEQ ID NO: 414782 - DNA, 30 bp, Artificial Sequence
  Synthetic oligonucleotide
ttcactcctctttacgacatgtaaggtatt

SEQ ID NO: 414783 - DNA, 30 bp, Artificial Sequence
  Synthetic oligonucleotide
attcggtggaaatgcggcccgacaggtatt

SEQ ID NO: 414784 - DNA, 30 bp, Artificial Sequence
  Synthetic oligonucleotide
aagttccggaacgttgtttgatcaggtatt

SEQ ID NO: 414785 - DNA, 30 bp, Artificial Sequence
  Synthetic oligonucleotide
gaacattagtaacaacaggacataggtatt

SEQ ID NO: 414786 - DNA, 30 bp, Artificial Sequence
  Synthetic oligonucleotide
gtttttaacgtaggcacactttgcggtatt

SEQ ID NO: 414787 - DNA, 30 bp, Artificial Sequence
  Synthetic oligonucleotide
taaactccctgcatccagactgatggtatt

SEQ ID NO: 414788 - DNA, 30 bp, Artificial Sequence
  Synthetic oligonucleotide
cctcattggcttcattattcaactggtatt

SEQ ID NO: 414789 - DNA, 30 bp, Artificial Sequence
  Synthetic oligonucleotide
catgacagcaatatccttataagtggtatt

SEQ ID NO: 414790 - DNA, 30 bp, Artificial Sequence
  Synthetic oligonucleotide
gtaggtaggggatgccgcggtcgtggtatt

SEQ ID NO: 414791 - DNA, 30 bp, Artificial Sequence
  Synthetic oligonucleotide
caaagtgaagattatagtctacgctgtatt

SEQ ID NO: 414792 - DNA, 30 bp, Artificial Sequence
  Synthetic oligonucleotide
gcggcatatatagtgggagcttgctgtatt

SEQ ID NO: 414793 - DNA, 30 bp, Artificial Sequence
  Synthetic oligonucleotide
aaccggatacggtattcattcctctgtatt

SEQ ID NO: 414794 - DNA, 30 bp, Artificial Sequence
  Synthetic oligonucleotide
cagtccaccacataatttcgatggtgtatt

SEQ ID NO: 414795 - DNA, 30 bp, Artificial Sequence
  Synthetic oligonucleotide
ggactaatacctaatctatatgattgtatt

SEQ ID NO: 414796 - DNA, 30 bp, Artificial Sequence
  Synthetic oligonucleotide
gtaaaggcctctatcacccagggttgtatt

SEQ ID NO: 414797 - DNA, 30 bp, Artificial Sequence
  Synthetic oligonucleotide
ttcgctctaggagttgaaacccaaattatt

SEQ ID NO: 414798 - DNA, 30 bp, Artificial Sequence
  Synthetic oligonucleotide
agaatggatattacgccctgaagcattatt

SEQ ID NO: 414799 - DNA, 30 bp, Artificial Sequence
  Synthetic oligonucleotide
acatcatttaaaatgagggtgccgattatt

SEQ ID NO: 414800 - DNA, 30 bp, Artificial Sequence
  Synthetic oligonucleotide
cgcaaataattataaacagactcgattatt

SEQ ID NO: 414801 - DNA, 30 bp, Artificial Sequence
  Synthetic oligonucleotide
ccaaagtactgatatcactaacttattatt

SEQ ID NO: 414802 - DNA, 30 bp, Artificial Sequence
  Synthetic oligonucleotide
gggtggctaaaccaacgccccgcacttatt

SEQ ID NO: 414803 - DNA, 30 bp, Artificial Sequence
  Synthetic oligonucleotide
acgtttttagactatgagtgctcacttatt

SEQ ID NO: 414804 - DNA, 30 bp, Artificial Sequence
  Synthetic oligonucleotide
gcagttaattggaattcaagttgacttatt

SEQ ID NO: 414805 - DNA, 30 bp, Artificial Sequence
  Synthetic oligonucleotide
ggggtgggtgagatgctactccggcttatt

SEQ ID NO: 414806 - DNA, 30 bp, Artificial Sequence
  Synthetic oligonucleotide
atgacaatgatgggattatagtggcttatt

SEQ ID NO: 414807 - DNA, 30 bp, Artificial Sequence
  Synthetic oligonucleotide
ccaagtttaaaaactcgctcgtggcttatt

SEQ ID NO: 414808 - DNA, 30 bp, Artificial Sequence
  Synthetic oligonucleotide
ttcgggatataccaagacatcttgcttatt

SEQ ID NO: 414809 - DNA, 30 bp, Artificial Sequence
  Synthetic oligonucleotide
gcctaaccgtgcagtagcataagtcttatt

SEQ ID NO: 414810 - DNA, 30 bp, Artificial Sequence
  Synthetic oligonucleotide
gtaggtattaggtcgtgtggcggtcttatt

SEQ ID NO: 414811 - DNA, 30 bp, Artificial Sequence
  Synthetic oligonucleotide
gttaactccaccaggcctaatattcttatt

SEQ ID NO: 414812 - DNA, 30 bp, Artificial Sequence
  Synthetic oligonucleotide
gctgttttagattcctagagcgaagttatt

SEQ ID NO: 414813 - DNA, 30 bp, Artificial Sequence
  Synthetic oligonucleotide
gtcaacagttacggacgccgacgagttatt

SEQ ID NO: 414814 - DNA, 30 bp, Artificial Sequence
  Synthetic oligonucleotide
tagtaccgtttcggatcacagatagttatt

SEQ ID NO: 414815 - DNA, 30 bp, Artificial Sequence
  Synthetic oligonucleotide
tagggagagcgagtgttggctctagttatt

SEQ ID NO: 414816 - DNA, 30 bp, Artificial Sequence
  Synthetic oligonucleotide
gaccggtggtcaccggtaaaagccgttatt

SEQ ID NO: 414817 - DNA, 30 bp, Artificial Sequence
  Synthetic oligonucleotide
cgatatggttataactagactgccgttatt

SEQ ID NO: 414818 - DNA, 30 bp, Artificial Sequence
  Synthetic oligonucleotide
accaaagcttatatgcaactcaaggttatt

SEQ ID NO: 414819 - DNA, 30 bp, Artificial Sequence
  Synthetic oligonucleotide
ccccgtttgattgacttttttacggttatt

SEQ ID NO: 414820 - DNA, 30 bp, Artificial Sequence
  Synthetic oligonucleotide
aatccacagcacgctccgggtagtgttatt

SEQ ID NO: 414821 - DNA, 30 bp, Artificial Sequence
  Synthetic oligonucleotide
agggcagtggaaggcatttgtattgttatt

SEQ ID NO: 414822 - DNA, 30 bp, Artificial Sequence
  Synthetic oligonucleotide
gtccctgcttgagggtcaatacttgttatt

SEQ ID NO: 414823 - DNA, 30 bp, Artificial Sequence
  Synthetic oligonucleotide
ctcccaaacagacgaggagcctttgttatt

SEQ ID NO: 414824 - DNA, 30 bp, Artificial Sequence
  Synthetic oligonucleotide
aatttactggcacggcggaaagaatttatt

SEQ ID NO: 414825 - DNA, 30 bp, Artificial Sequence
  Synthetic oligonucleotide
gatctcgacgcgtaaatacttagatttatt

SEQ ID NO: 414826 - DNA, 30 bp, Artificial Sequence
  Synthetic oligonucleotide
ggcatctgttcaccctatcttatatttatt

SEQ ID NO: 414827 - DNA, 30 bp, Artificial Sequence
  Synthetic oligonucleotide
atcattctcttactccacagctagtttatt

SEQ ID NO: 414828 - DNA, 30 bp, Artificial Sequence
  Synthetic oligonucleotide
ggaaatttctttatccgtttcatgtttatt

SEQ ID NO: 414829 - DNA, 30 bp, Artificial Sequence
  Synthetic oligonucleotide
gttgcatgtgtattcatgcaggtgtttatt

SEQ ID NO: 414830 - DNA, 30 bp, Artificial Sequence
  Synthetic oligonucleotide
cgaaatcgagaccgtacgcgccattttatt

SEQ ID NO: 414831 - DNA, 30 bp, Artificial Sequence
  Synthetic oligonucleotide
cgtgttgccacacgaaaaacactttttatt

SEQ ID NO: 414832 - DNA, 30 bp, Artificial Sequence
  Synthetic oligonucleotide
ccagtagagctgttcccggttacaaaactt

SEQ ID NO: 414833 - DNA, 30 bp, Artificial Sequence
  Synthetic oligonucleotide
ttattcagcttcattaaacgctgaaaactt

SEQ ID NO: 414834 - DNA, 30 bp, Artificial Sequence
  Synthetic oligonucleotide
gcccccctggcaattggctaaaacaaactt

SEQ ID NO: 414835 - DNA, 30 bp, Artificial Sequence
  Synthetic oligonucleotide
caggcctatggtttgtcgtaacgcaaactt

SEQ ID NO: 414836 - DNA, 30 bp, Artificial Sequence
  Synthetic oligonucleotide
gctcgttcccgcacttgtaggctcaaactt

SEQ ID NO: 414837 - DNA, 30 bp, Artificial Sequence
  Synthetic oligonucleotide
gctacccgacgatagatcagatagaaactt

SEQ ID NO: 414838 - DNA, 30 bp, Artificial Sequence
  Synthetic oligonucleotide
actgaccgaccgggctatacacataaactt

SEQ ID NO: 414839 - DNA, 30 bp, Artificial Sequence
  Synthetic oligonucleotide
gtcatgtgctctccgcggttacataaactt

SEQ ID NO: 414840 - DNA, 30 bp, Artificial Sequence
  Synthetic oligonucleotide
gttggaccgcctaccatgcgatataaactt

SEQ ID NO: 414841 - DNA, 30 bp, Artificial Sequence
  Synthetic oligonucleotide
tgttttactaactgagtggcacctaaactt

SEQ ID NO: 414842 - DNA, 30 bp, Artificial Sequence
  Synthetic oligonucleotide
taacgggcagacgcgttgtctcttaaactt

SEQ ID NO: 414843 - DNA, 30 bp, Artificial Sequence
  Synthetic oligonucleotide
ataacacggttcgtgggcaccgaacaactt

SEQ ID NO: 414844 - DNA, 30 bp, Artificial Sequence
  Synthetic oligonucleotide
tatattattgtggttaaacgataccaactt

SEQ ID NO: 414845 - DNA, 30 bp, Artificial Sequence
  Synthetic oligonucleotide
gtaagatcgttccggatgaccttccaactt

SEQ ID NO: 414846 - DNA, 30 bp, Artificial Sequence
  Synthetic oligonucleotide
ccttatacttacctgatactagggcaactt

SEQ ID NO: 414847 - DNA, 30 bp, Artificial Sequence
  Synthetic oligonucleotide
tcgctgagcgaaatcggctcggcagaactt

SEQ ID NO: 414848 - DNA, 30 bp, Artificial Sequence
  Synthetic oligonucleotide
gtcgcacctttgtttattgtgtcagaactt

SEQ ID NO: 414849 - DNA, 30 bp, Artificial Sequence
  Synthetic oligonucleotide
agaaaggcacggcgttctagttcagaactt

SEQ ID NO: 414850 - DNA, 30 bp, Artificial Sequence
  Synthetic oligonucleotide
attcttcaaaaagagcccgcacacgaactt

SEQ ID NO: 414851 - DNA, 30 bp, Artificial Sequence
  Synthetic oligonucleotide
cttagtgtccagcattgcactcccgaactt

SEQ ID NO: 414852 - DNA, 30 bp, Artificial Sequence
  Synthetic oligonucleotide
tggggcttacagggagcggagatggaactt

SEQ ID NO: 414853 - DNA, 30 bp, Artificial Sequence
  Synthetic oligonucleotide
gccggatatgacagccccggtgatgaactt

SEQ ID NO: 414854 - DNA, 30 bp, Artificial Sequence
  Synthetic oligonucleotide
tctgacgccacccgcgtgtcttctgaactt

SEQ ID NO: 414855 - DNA, 30 bp, Artificial Sequence
  Synthetic oligonucleotide
agcgcgttgttttcagaattacaataactt

SEQ ID NO: 414856 - DNA, 30 bp, Artificial Sequence
  Synthetic oligonucleotide
caccttctgcccgttgtcgttcaataactt

SEQ ID NO: 414857 - DNA, 30 bp, Artificial Sequence
  Synthetic oligonucleotide
ctcgttgcgattgacccggtcgtataactt

SEQ ID NO: 414858 - DNA, 30 bp, Artificial Sequence
  Synthetic oligonucleotide
cgtaagtggtgagacattgtgtcctaactt

SEQ ID NO: 414859 - DNA, 30 bp, Artificial Sequence
  Synthetic oligonucleotide
aagcaaaggttaccaggatgatagtaactt

SEQ ID NO: 414860 - DNA, 30 bp, Artificial Sequence
  Synthetic oligonucleotide
ctgtggggattgaatgaaccctagtaactt

SEQ ID NO: 414861 - DNA, 30 bp, Artificial Sequence
  Synthetic oligonucleotide
ggctaacaccaatgacgacctacgtaactt

SEQ ID NO: 414862 - DNA, 30 bp, Artificial Sequence
  Synthetic oligonucleotide
tcgcacatacggtatattttagggtaactt

SEQ ID NO: 414863 - DNA, 30 bp, Artificial Sequence
  Synthetic oligonucleotide
gggaatctgatacgcctatggtggtaactt

SEQ ID NO: 414864 - DNA, 30 bp, Artificial Sequence
  Synthetic oligonucleotide
cggaaaccgggacctattaatgattaactt

SEQ ID NO: 414865 - DNA, 30 bp, Artificial Sequence
  Synthetic oligonucleotide
accgcccttccaccctagagcgtttaactt

SEQ ID NO: 414866 - DNA, 30 bp, Artificial Sequence
  Synthetic oligonucleotide
gccgttattttagcagcgtgtaaaacactt

SEQ ID NO: 414867 - DNA, 30 bp, Artificial Sequence
  Synthetic oligonucleotide
aaaattgcgcattatttttagccaacactt

SEQ ID NO: 414868 - DNA, 30 bp, Artificial Sequence
  Synthetic oligonucleotide
atacccctaattattatgtcagcaacactt

SEQ ID NO: 414869 - DNA, 30 bp, Artificial Sequence
  Synthetic oligonucleotide
tcctcggacacccgagtttgaaacacactt

SEQ ID NO: 414870 - DNA, 30 bp, Artificial Sequence
  Synthetic oligonucleotide
aatcaaccggttggctgggctaacacactt

SEQ ID NO: 414871 - DNA, 30 bp, Artificial Sequence
  Synthetic oligonucleotide
ctgaatgatagtagcagctatgtcacactt

SEQ ID NO: 414872 - DNA, 30 bp, Artificial Sequence
  Synthetic oligonucleotide
ccggcgctaatgtcacttcgcgagacactt

SEQ ID NO: 414873 - DNA, 30 bp, Artificial Sequence
  Synthetic oligonucleotide
acaactagtatattattgatccatacactt

SEQ ID NO: 414874 - DNA, 30 bp, Artificial Sequence
  Synthetic oligonucleotide
atcttactgaatttaaaggcggctacactt

SEQ ID NO: 414875 - DNA, 30 bp, Artificial Sequence
  Synthetic oligonucleotide
ccccctacagtgtcagtttaaattacactt

SEQ ID NO: 414876 - DNA, 30 bp, Artificial Sequence
  Synthetic oligonucleotide
gagcagtggttgcaagtggtagttacactt

SEQ ID NO: 414877 - DNA, 30 bp, Artificial Sequence
  Synthetic oligonucleotide
taaaaggtctttacagatagaccaccactt

SEQ ID NO: 414878 - DNA, 30 bp, Artificial Sequence
  Synthetic oligonucleotide
atagtattaccattccgggaaatagcactt

SEQ ID NO: 414879 - DNA, 30 bp, Artificial Sequence
  Synthetic oligonucleotide
aactactcgtacgcgagctattaggcactt

SEQ ID NO: 414880 - DNA, 30 bp, Artificial Sequence
  Synthetic oligonucleotide
aaacccttattcagagccggatcggcactt

SEQ ID NO: 414881 - DNA, 30 bp, Artificial Sequence
  Synthetic oligonucleotide
agttgttacatctctagcgacattgcactt

SEQ ID NO: 414882 - DNA, 30 bp, Artificial Sequence
  Synthetic oligonucleotide
ttgatctgtgcgcacctttaggttgcactt

SEQ ID NO: 414883 - DNA, 30 bp, Artificial Sequence
  Synthetic oligonucleotide
ggccagaagcgggccggagtatgatcactt

SEQ ID NO: 414884 - DNA, 30 bp, Artificial Sequence
  Synthetic oligonucleotide
gatataaatgagcggcactcggattcactt

SEQ ID NO: 414885 - DNA, 30 bp, Artificial Sequence
  Synthetic oligonucleotide
atacaaatccaagtcggagcttgttcactt

SEQ ID NO: 414886 - DNA, 30 bp, Artificial Sequence
  Synthetic oligonucleotide
ttcgcagctcgtacccacgtcaaaagactt

SEQ ID NO: 414887 - DNA, 30 bp, Artificial Sequence
  Synthetic oligonucleotide
atttacgaccctttcggcgttagaagactt

SEQ ID NO: 414888 - DNA, 30 bp, Artificial Sequence
  Synthetic oligonucleotide
tacgtggatctgtattgatgtaccagactt

SEQ ID NO: 414889 - DNA, 30 bp, Artificial Sequence
  Synthetic oligonucleotide
gacgataattctgctcggagaggcagactt

SEQ ID NO: 414890 - DNA, 30 bp, Artificial Sequence
  Synthetic oligonucleotide
ttccgtagtttcgcacgtaagtgcagactt

SEQ ID NO: 414891 - DNA, 30 bp, Artificial Sequence
  Synthetic oligonucleotide
caacattcaagacccgcagagctgagactt

SEQ ID NO: 414892 - DNA, 30 bp, Artificial Sequence
  Synthetic oligonucleotide
gcatgacaaaagtaccccttaaatagactt

SEQ ID NO: 414893 - DNA, 30 bp, Artificial Sequence
  Synthetic oligonucleotide
cgattaaaacgacggacttataatagactt

SEQ ID NO: 414894 - DNA, 30 bp, Artificial Sequence
  Synthetic oligonucleotide
ttgtagcgttggttaccttcacatagactt

SEQ ID NO: 414895 - DNA, 30 bp, Artificial Sequence
  Synthetic oligonucleotide
cggcggactaagacccagcgttttagactt

SEQ ID NO: 414896 - DNA, 30 bp, Artificial Sequence
  Synthetic oligonucleotide
gttattttctctttagctaaaacacgactt

SEQ ID NO: 414897 - DNA, 30 bp, Artificial Sequence
  Synthetic oligonucleotide
ccgtcgatgcacctagggaagtgacgactt

SEQ ID NO: 414898 - DNA, 30 bp, Artificial Sequence
  Synthetic oligonucleotide
ggccaccgggattcaaatatttcgcgactt

SEQ ID NO: 414899 - DNA, 30 bp, Artificial Sequence
  Synthetic oligonucleotide
cttgacacaaccttctttctcgatcgactt

SEQ ID NO: 414900 - DNA, 30 bp, Artificial Sequence
  Synthetic oligonucleotide
acatgtcatggctgttaggcagttcgactt

SEQ ID NO: 414901 - DNA, 30 bp, Artificial Sequence
  Synthetic oligonucleotide
atgggctcatatttactatcgaaaggactt

SEQ ID NO: 414902 - DNA, 30 bp, Artificial Sequence
  Synthetic oligonucleotide
ctcaattcgagatccgcacatttaggactt

SEQ ID NO: 414903 - DNA, 30 bp, Artificial Sequence
  Synthetic oligonucleotide
tgcagcttaggagtctcgttaaacggactt

SEQ ID NO: 414904 - DNA, 30 bp, Artificial Sequence
  Synthetic oligonucleotide
acccgggcgggctctcaagtttggggactt

SEQ ID NO: 414905 - DNA, 30 bp, Artificial Sequence
  Synthetic oligonucleotide
gtaattctgattagggaaaggtcatgactt

SEQ ID NO: 414906 - DNA, 30 bp, Artificial Sequence
  Synthetic oligonucleotide
tcaaagtaagcaaaatactgtgcctgactt

SEQ ID NO: 414907 - DNA, 30 bp, Artificial Sequence
  Synthetic oligonucleotide
gtatgatgatcagcaccactttattgactt

SEQ ID NO: 414908 - DNA, 30 bp, Artificial Sequence
  Synthetic oligonucleotide
caattacggtaaatcagggatatttgactt

SEQ ID NO: 414909 - DNA, 30 bp, Artificial Sequence
  Synthetic oligonucleotide
gctacatatggtcacactatattttgactt

SEQ ID NO: 414910 - DNA, 30 bp, Artificial Sequence
  Synthetic oligonucleotide
gtcggacccgagtttatacctgcaatactt

SEQ ID NO: 414911 - DNA, 30 bp, Artificial Sequence
  Synthetic oligonucleotide
ggaactgtctcgttcagtgtagtaatactt

SEQ ID NO: 414912 - DNA, 30 bp, Artificial Sequence
  Synthetic oligonucleotide
gcgtaccgacgacgccgagtgacgatactt

SEQ ID NO: 414913 - DNA, 30 bp, Artificial Sequence
  Synthetic oligonucleotide
atacggtaagtcaatccagcttttatactt

SEQ ID NO: 414914 - DNA, 30 bp, Artificial Sequence
  Synthetic oligonucleotide
taagatgtacataggaaattatcactactt

SEQ ID NO: 414915 - DNA, 30 bp, Artificial Sequence
  Synthetic oligonucleotide
tcttatggtgtataaccgtacgtactactt

SEQ ID NO: 414916 - DNA, 30 bp, Artificial Sequence
  Synthetic oligonucleotide
tcttttttaaattcgcatccttacctactt

SEQ ID NO: 414917 - DNA, 30 bp, Artificial Sequence
  Synthetic oligonucleotide
aggtagtagagttcagagccgcgtctactt

SEQ ID NO: 414918 - DNA, 30 bp, Artificial Sequence
  Synthetic oligonucleotide
cagcttatgtcgacgaacatcaaagtactt

SEQ ID NO: 414919 - DNA, 30 bp, Artificial Sequence
  Synthetic oligonucleotide
ttaaacatctgttaagtgttatcagtactt

SEQ ID NO: 414920 - DNA, 30 bp, Artificial Sequence
  Synthetic oligonucleotide
tatgggactaggtctttagatcgagtactt

SEQ ID NO: 414921 - DNA, 30 bp, Artificial Sequence
  Synthetic oligonucleotide
cactatggattatcggaaagatgagtactt

SEQ ID NO: 414922 - DNA, 30 bp, Artificial Sequence
  Synthetic oligonucleotide
ctcaaaggcagattagagagaccggtactt

SEQ ID NO: 414923 - DNA, 30 bp, Artificial Sequence
  Synthetic oligonucleotide
ttgatcatctactagtcacactatgtactt

SEQ ID NO: 414924 - DNA, 30 bp, Artificial Sequence
  Synthetic oligonucleotide
gtacacaatggttacatggggtttgtactt

SEQ ID NO: 414925 - DNA, 30 bp, Artificial Sequence
  Synthetic oligonucleotide
acgcagaataatgtgcccctttaattactt

SEQ ID NO: 414926 - DNA, 30 bp, Artificial Sequence
  Synthetic oligonucleotide
gccgttttaagaaggcgatctcgattactt

SEQ ID NO: 414927 - DNA, 30 bp, Artificial Sequence
  Synthetic oligonucleotide
gttgggacttgagaggaatactccaacctt

SEQ ID NO: 414928 - DNA, 30 bp, Artificial Sequence
  Synthetic oligonucleotide
tttcgctacgcgactatgaacacgaacctt

SEQ ID NO: 414929 - DNA, 30 bp, Artificial Sequence
  Synthetic oligonucleotide
agacagtataggatagacccttcgaacctt

SEQ ID NO: 414930 - DNA, 30 bp, Artificial Sequence
  Synthetic oligonucleotide
gagttcgtggtagcagctaaatcacacctt

SEQ ID NO: 414931 - DNA, 30 bp, Artificial Sequence
  Synthetic oligonucleotide
ctatcaagatttgtaatcggatgacacctt

SEQ ID NO: 414932 - DNA, 30 bp, Artificial Sequence
  Synthetic oligonucleotide
gctagtgttgaccccgtgtcgatagacctt

SEQ ID NO: 414933 - DNA, 30 bp, Artificial Sequence
  Synthetic oligonucleotide
ggtatgccatctttcatacacctagacctt

SEQ ID NO: 414934 - DNA, 30 bp, Artificial Sequence
  Synthetic oligonucleotide
tttaggttaatggaaggctcatacgacctt

SEQ ID NO: 414935 - DNA, 30 bp, Artificial Sequence
  Synthetic oligonucleotide
ggaataatgctttcctgaggacaggacctt

SEQ ID NO: 414936 - DNA, 30 bp, Artificial Sequence
  Synthetic oligonucleotide
ctgcaactaggcgttctttttggggacctt

SEQ ID NO: 414937 - DNA, 31 bp, Artificial Sequence
  Synthetic oligonucleotide
caaaggcaatttgaatatattcattgacctt

SEQ ID NO: 414938 - DNA, 30 bp, Artificial Sequence
  Synthetic oligonucleotide
tatactcgggagtccccacaggaatacctt

SEQ ID NO: 414939 - DNA, 30 bp, Artificial Sequence
  Synthetic oligonucleotide
atcagccgcctaaatgtaccttgatacctt

SEQ ID NO: 414940 - DNA, 31 bp, Artificial Sequence
  Synthetic oligonucleotide
atgcgaccgctgatttgtcgcgcattacctt

SEQ ID NO: 414941 - DNA, 30 bp, Artificial Sequence
  Synthetic oligonucleotide
tctcacccgtacatccctactcaaaccctt

SEQ ID NO: 414942 - DNA, 30 bp, Artificial Sequence
  Synthetic oligonucleotide
tctagcgccacttcccggtttggaaccctt

SEQ ID NO: 414943 - DNA, 30 bp, Artificial Sequence
  Synthetic oligonucleotide
tactatggcattctagaccataacaccctt

SEQ ID NO: 414944 - DNA, 30 bp, Artificial Sequence
  Synthetic oligonucleotide
agacgtcacaacggttagttgcccaccctt

SEQ ID NO: 414945 - DNA, 30 bp, Artificial Sequence
  Synthetic oligonucleotide
aaaaactaactagggaattagctcaccctt

SEQ ID NO: 414946 - DNA, 30 bp, Artificial Sequence
  Synthetic oligonucleotide
atattttggatgggtgcggcttggaccctt

SEQ ID NO: 414947 - DNA, 30 bp, Artificial Sequence
  Synthetic oligonucleotide
cagtttgtcacgagtaccaaggataccctt

SEQ ID NO: 414948 - DNA, 30 bp, Artificial Sequence
  Synthetic oligonucleotide
ggtgtgattgcggacgcatactaccccctt

SEQ ID NO: 414949 - DNA, 30 bp, Artificial Sequence
  Synthetic oligonucleotide
acgcactgtcgttttccgtgcggccccctt

SEQ ID NO: 414950 - DNA, 30 bp, Artificial Sequence
  Synthetic oligonucleotide
ccacggtaccaaggctatagcgggcccctt

SEQ ID NO: 414951 - DNA, 30 bp, Artificial Sequence
  Synthetic oligonucleotide
gtctcgaggttcactaagcagtatcccctt

SEQ ID NO: 414952 - DNA, 30 bp, Artificial Sequence
  Synthetic oligonucleotide
tttgaggtctcgttggggagcgaagccctt

SEQ ID NO: 414953 - DNA, 30 bp, Artificial Sequence
  Synthetic oligonucleotide
cgcattgtaggtgctataggaccagccctt

SEQ ID NO: 414954 - DNA, 30 bp, Artificial Sequence
  Synthetic oligonucleotide
tttccgtacagcgggcgatgaagagccctt

SEQ ID NO: 414955 - DNA, 30 bp, Artificial Sequence
  Synthetic oligonucleotide
aagcggttggattcgagtaaacgcgccctt

SEQ ID NO: 414956 - DNA, 30 bp, Artificial Sequence
  Synthetic oligonucleotide
tgtaagagtcatgtgccctacgttgccctt

SEQ ID NO: 414957 - DNA, 30 bp, Artificial Sequence
  Synthetic oligonucleotide
ggcagtcgtttgctgcgtatggtatccctt

SEQ ID NO: 414958 - DNA, 30 bp, Artificial Sequence
  Synthetic oligonucleotide
aatgatattcgaattcaatggttatccctt

SEQ ID NO: 414959 - DNA, 30 bp, Artificial Sequence
  Synthetic oligonucleotide
agcctgttttatttgcaataagcctccctt

SEQ ID NO: 414960 - DNA, 30 bp, Artificial Sequence
  Synthetic oligonucleotide
ttttgtgccccgaccaaccggatctccctt

SEQ ID NO: 414961 - DNA, 30 bp, Artificial Sequence
  Synthetic oligonucleotide
gggggcttacgcaatttcatttcgtccctt

SEQ ID NO: 414962 - DNA, 30 bp, Artificial Sequence
  Synthetic oligonucleotide
ttataaataccttagtcatggaattccctt

SEQ ID NO: 414963 - DNA, 30 bp, Artificial Sequence
  Synthetic oligonucleotide
gtgtttgggtagacgtatcgtgattccctt

SEQ ID NO: 414964 - DNA, 30 bp, Artificial Sequence
  Synthetic oligonucleotide
gtttgcagtctggctgcatggttttccctt

SEQ ID NO: 414965 - DNA, 30 bp, Artificial Sequence
  Synthetic oligonucleotide
acactggccactagaaatccgcaaagcctt

SEQ ID NO: 414966 - DNA, 30 bp, Artificial Sequence
  Synthetic oligonucleotide
agctggcacgatagtccgatggaaagcctt

SEQ ID NO: 414967 - DNA, 30 bp, Artificial Sequence
  Synthetic oligonucleotide
taaaaataaacggaagttcaggatagcctt

SEQ ID NO: 414968 - DNA, 30 bp, Artificial Sequence
  Synthetic oligonucleotide
caatcagtggacaccaacgtaagtagcctt

SEQ ID NO: 414969 - DNA, 30 bp, Artificial Sequence
  Synthetic oligonucleotide
aatttaccgccagggtactggatacgcctt

SEQ ID NO: 414970 - DNA, 30 bp, Artificial Sequence
  Synthetic oligonucleotide
tgaatcaacgccataggctcggtccgcctt

SEQ ID NO: 414971 - DNA, 30 bp, Artificial Sequence
  Synthetic oligonucleotide
atctcaggactttaagacatgaggcgcctt

SEQ ID NO: 414972 - DNA, 30 bp, Artificial Sequence
  Synthetic oligonucleotide
acttttcggcgaacatcaccatgtcgcctt

SEQ ID NO: 414973 - DNA, 30 bp, Artificial Sequence
  Synthetic oligonucleotide
ctccatacaggcggccttgacataggcctt

SEQ ID NO: 414974 - DNA, 30 bp, Artificial Sequence
  Synthetic oligonucleotide
gagaagattgagaggaaaagtggcggcctt

SEQ ID NO: 414975 - DNA, 30 bp, Artificial Sequence
  Synthetic oligonucleotide
gagagatcagcagtcacaaccttcggcctt

SEQ ID NO: 414976 - DNA, 30 bp, Artificial Sequence
  Synthetic oligonucleotide
ataacccgagcgttccagctggtgggcctt

SEQ ID NO: 414977 - DNA, 30 bp, Artificial Sequence
  Synthetic oligonucleotide
ggatcaagataggtaaccattcaatgcctt

SEQ ID NO: 414978 - DNA, 30 bp, Artificial Sequence
  Synthetic oligonucleotide
agagcgctggaaatgcgccacctatgcctt

SEQ ID NO: 414979 - DNA, 30 bp, Artificial Sequence
  Synthetic oligonucleotide
cccttcttttctttctagctggcctgcctt

SEQ ID NO: 414980 - DNA, 30 bp, Artificial Sequence
  Synthetic oligonucleotide
cctagcgttggcatcaaagttagctgcctt

SEQ ID NO: 414981 - DNA, 30 bp, Artificial Sequence
  Synthetic oligonucleotide
gtgaggccaccctatttatgtagttgcctt

SEQ ID NO: 414982 - DNA, 30 bp, Artificial Sequence
  Synthetic oligonucleotide
agtgatatacggtccaatattctaatcctt

SEQ ID NO: 414983 - DNA, 30 bp, Artificial Sequence
  Synthetic oligonucleotide
ttacacttacgagcactccgtgcgatcctt

SEQ ID NO: 414984 - DNA, 30 bp, Artificial Sequence
  Synthetic oligonucleotide
tccggccgatatacgacaccaaggatcctt

SEQ ID NO: 414985 - DNA, 30 bp, Artificial Sequence
  Synthetic oligonucleotide
agaatcagattcccgcccagcatgatcctt

SEQ ID NO: 414986 - DNA, 30 bp, Artificial Sequence
  Synthetic oligonucleotide
tccataaatattgtagtgggccgtatcctt

SEQ ID NO: 414987 - DNA, 30 bp, Artificial Sequence
  Synthetic oligonucleotide
ttaaattaaacctaggaggcgaaactcctt

SEQ ID NO: 414988 - DNA, 30 bp, Artificial Sequence
  Synthetic oligonucleotide
accggctccaacagggtgtcataactcctt

SEQ ID NO: 414989 - DNA, 30 bp, Artificial Sequence
  Synthetic oligonucleotide
tagtgtttctggttgtgaaaatacctcctt

SEQ ID NO: 414990 - DNA, 30 bp, Artificial Sequence
  Synthetic oligonucleotide
ccacgaattgatcgccagaaaaccctcctt

SEQ ID NO: 414991 - DNA, 30 bp, Artificial Sequence
  Synthetic oligonucleotide
actctaacaatataagaacagggcctcctt

SEQ ID NO: 414992 - DNA, 30 bp, Artificial Sequence
  Synthetic oligonucleotide
gctgttagagcctgctgaaccctcctcctt

SEQ ID NO: 414993 - DNA, 30 bp, Artificial Sequence
  Synthetic oligonucleotide
acaaatggtccaaccgtcctcgggctcctt

SEQ ID NO: 414994 - DNA, 30 bp, Artificial Sequence
  Synthetic oligonucleotide
gtgggaaattcaagatccataaatctcctt

SEQ ID NO: 414995 - DNA, 30 bp, Artificial Sequence
  Synthetic oligonucleotide
ttacgttgaatcgaattcaattatctcctt

SEQ ID NO: 414996 - DNA, 30 bp, Artificial Sequence
  Synthetic oligonucleotide
ccctgacgcacataaatgcggaaagtcctt

SEQ ID NO: 414997 - DNA, 30 bp, Artificial Sequence
  Synthetic oligonucleotide
atggcctacgctacgacaattcaagtcctt

SEQ ID NO: 414998 - DNA, 31 bp, Artificial Sequence
  Synthetic oligonucleotide
gcgatgaacttattgaatataagaagtcctt

SEQ ID NO: 414999 - DNA, 30 bp, Artificial Sequence
  Synthetic oligonucleotide
aataccgatgttcacaagaagccagtcctt

SEQ ID NO: 415000 - DNA, 30 bp, Artificial Sequence
  Synthetic oligonucleotide
gaggtactaacaaagtattaacgagtcctt

SEQ ID NO: 415001 - DNA, 30 bp, Artificial Sequence
  Synthetic oligonucleotide
gatagggatcgttatcaagactcggtcctt

SEQ ID NO: 415002 - DNA, 30 bp, Artificial Sequence
  Synthetic oligonucleotide
ggactctccaagagactcagatttgtcctt

SEQ ID NO: 415003 - DNA, 30 bp, Artificial Sequence
  Synthetic oligonucleotide
gctcggcttcctaaagcacgaggattcctt

SEQ ID NO: 415004 - DNA, 30 bp, Artificial Sequence
  Synthetic oligonucleotide
agcacacgggatgtatgcaccagcttcctt

SEQ ID NO: 415005 - DNA, 30 bp, Artificial Sequence
  Synthetic oligonucleotide
gaacactttgggtcttacgaatgtttcctt

SEQ ID NO: 415006 - DNA, 30 bp, Artificial Sequence
  Synthetic oligonucleotide
aataagcgattagagatacggtaaaagctt

SEQ ID NO: 415007 - DNA, 30 bp, Artificial Sequence
  Synthetic oligonucleotide
aagcgcttagcagtctccggtgacaagctt

SEQ ID NO: 415008 - DNA, 30 bp, Artificial Sequence
  Synthetic oligonucleotide
gcaaacggcactctctaagcaggcaagctt

SEQ ID NO: 415009 - DNA, 30 bp, Artificial Sequence
  Synthetic oligonucleotide
acatggatgttatcaacttttcagaagctt

SEQ ID NO: 415010 - DNA, 30 bp, Artificial Sequence
  Synthetic oligonucleotide
cgcagttgggctgcctagtgagggaagctt

SEQ ID NO: 415011 - DNA, 30 bp, Artificial Sequence
  Synthetic oligonucleotide
caacccggagtccgaagcctgactaagctt

SEQ ID NO: 415012 - DNA, 30 bp, Artificial Sequence
  Synthetic oligonucleotide
attcgaagccaaatggatcggggtaagctt

SEQ ID NO: 415013 - DNA, 30 bp, Artificial Sequence
  Synthetic oligonucleotide
gagtgcaagatgcattccgaagaccagctt

SEQ ID NO: 415014 - DNA, 30 bp, Artificial Sequence
  Synthetic oligonucleotide
ttagatgtaatctcagttcagcgccagctt

SEQ ID NO: 415015 - DNA, 30 bp, Artificial Sequence
  Synthetic oligonucleotide
tgaaactgttgtgggcaaatcgagcagctt

SEQ ID NO: 415016 - DNA, 30 bp, Artificial Sequence
  Synthetic oligonucleotide
cccaacttacgtgcgggggtgctagagctt

SEQ ID NO: 415017 - DNA, 30 bp, Artificial Sequence
  Synthetic oligonucleotide
cctcgcccccaccagggcatcgtagagctt

SEQ ID NO: 415018 - DNA, 30 bp, Artificial Sequence
  Synthetic oligonucleotide
tattgcaaatcgaccgttagggtagagctt

SEQ ID NO: 415019 - DNA, 30 bp, Artificial Sequence
  Synthetic oligonucleotide
ttcgtagtgatgggcggcttataggagctt

SEQ ID NO: 415020 - DNA, 30 bp, Artificial Sequence
  Synthetic oligonucleotide
ggcatcgagggaactcctaagtaggagctt

SEQ ID NO: 415021 - DNA, 30 bp, Artificial Sequence
  Synthetic oligonucleotide
gttggggaactcattacgcacccggagctt

SEQ ID NO: 415022 - DNA, 30 bp, Artificial Sequence
  Synthetic oligonucleotide
tgcagccttaggctagttcgtagggagctt

SEQ ID NO: 415023 - DNA, 30 bp, Artificial Sequence
  Synthetic oligonucleotide
cacatagggatcttgagccccatggagctt

SEQ ID NO: 415024 - DNA, 30 bp, Artificial Sequence
  Synthetic oligonucleotide
tgacactaaagtgcatatttcgatgagctt

SEQ ID NO: 415025 - DNA, 30 bp, Artificial Sequence
  Synthetic oligonucleotide
aagcggttttcttatcttttaacttagctt

SEQ ID NO: 415026 - DNA, 30 bp, Artificial Sequence
  Synthetic oligonucleotide
tcggtgcttgcggtaagtagttcaacgctt

SEQ ID NO: 415027 - DNA, 30 bp, Artificial Sequence
  Synthetic oligonucleotide
ggttgtagagaatgtattaggctaacgctt

SEQ ID NO: 415028 - DNA, 30 bp, Artificial Sequence
  Synthetic oligonucleotide
tgttctacgggtgggcagcatgtaacgctt

SEQ ID NO: 415029 - DNA, 30 bp, Artificial Sequence
  Synthetic oligonucleotide
taggaactagatgggatcttgaacacgctt

SEQ ID NO: 415030 - DNA, 30 bp, Artificial Sequence
  Synthetic oligonucleotide
caaatcgcggtttgaccgcgaaagacgctt

SEQ ID NO: 415031 - DNA, 30 bp, Artificial Sequence
  Synthetic oligonucleotide
taccgcggcttaagcattcttaagacgctt

SEQ ID NO: 415032 - DNA, 30 bp, Artificial Sequence
  Synthetic oligonucleotide
agattctcgctcagaaccggctcgacgctt

SEQ ID NO: 415033 - DNA, 30 bp, Artificial Sequence
  Synthetic oligonucleotide
gtcatacgttaatccaaggatttaccgctt

SEQ ID NO: 415034 - DNA, 30 bp, Artificial Sequence
  Synthetic oligonucleotide
ggatacatgacgtacttaccactgccgctt

SEQ ID NO: 415035 - DNA, 30 bp, Artificial Sequence
  Synthetic oligonucleotide
ccaccttgggcgaaacattaagccgcgctt

SEQ ID NO: 415036 - DNA, 30 bp, Artificial Sequence
  Synthetic oligonucleotide
acattacggagcgcccgggagcgcgcgctt

SEQ ID NO: 415037 - DNA, 30 bp, Artificial Sequence
  Synthetic oligonucleotide
ccaacatatggtcgcaatcagggcgcgctt

SEQ ID NO: 415038 - DNA, 27 bp, Artificial Sequence
  Synthetic oligonucleotide
ttaccaacctgccaattgttcgcgctt

SEQ ID NO: 415039 - DNA, 30 bp, Artificial Sequence
  Synthetic oligonucleotide
cgccgcaaaaacaatatgcgggaatcgctt

SEQ ID NO: 415040 - DNA, 30 bp, Artificial Sequence
  Synthetic oligonucleotide
taaataataaatgagtgccctgaatcgctt

SEQ ID NO: 415041 - DNA, 30 bp, Artificial Sequence
  Synthetic oligonucleotide
aggctgccggtagtcgcgtgacgatcgctt

SEQ ID NO: 415042 - DNA, 30 bp, Artificial Sequence
  Synthetic oligonucleotide
tgatcgcatgcaccatatgccatctcgctt

SEQ ID NO: 415043 - DNA, 30 bp, Artificial Sequence
  Synthetic oligonucleotide
gggtattctttaagcggtcaaacgtcgctt

SEQ ID NO: 415044 - DNA, 30 bp, Artificial Sequence
  Synthetic oligonucleotide
aggctgcttaataagcatatgtcgtcgctt

SEQ ID NO: 415045 - DNA, 30 bp, Artificial Sequence
  Synthetic oligonucleotide
ccagcgggattttgatagctttgttcgctt

SEQ ID NO: 415046 - DNA, 30 bp, Artificial Sequence
  Synthetic oligonucleotide
gaaattcgtaaacgaattgacgaaaggctt

SEQ ID NO: 415047 - DNA, 30 bp, Artificial Sequence
  Synthetic oligonucleotide
tgatgtggagtattgtaataattaaggctt

SEQ ID NO: 415048 - DNA, 30 bp, Artificial Sequence
  Synthetic oligonucleotide
aacgcgggtctaattggacgagacaggctt

SEQ ID NO: 415049 - DNA, 30 bp, Artificial Sequence
  Synthetic oligonucleotide
tcaaaaggctttaccgggatcgctaggctt

SEQ ID NO: 415050 - DNA, 30 bp, Artificial Sequence
  Synthetic oligonucleotide
tgtatcttgcgggcccaggtttgtaggctt

SEQ ID NO: 415051 - DNA, 30 bp, Artificial Sequence
  Synthetic oligonucleotide
gattttagaatcttcaattgggaacggctt

SEQ ID NO: 415052 - DNA, 30 bp, Artificial Sequence
  Synthetic oligonucleotide
tgacgattcaacgccggtatggcacggctt

SEQ ID NO: 415053 - DNA, 30 bp, Artificial Sequence
  Synthetic oligonucleotide
atgaagacgcaatgcgaaatgagccggctt

SEQ ID NO: 415054 - DNA, 30 bp, Artificial Sequence
  Synthetic oligonucleotide
atttgaataatgtacgcaacaacgcggctt

SEQ ID NO: 415055 - DNA, 31 bp, Artificial Sequence
  Synthetic oligonucleotide
ggaccttgtctgcgctaggcctctgcggctt

SEQ ID NO: 415056 - DNA, 30 bp, Artificial Sequence
  Synthetic oligonucleotide
cacggtgatatggcgggcaaccacgggctt

SEQ ID NO: 415057 - DNA, 30 bp, Artificial Sequence
  Synthetic oligonucleotide
cgcggtccttagctactggatcacgggctt

SEQ ID NO: 415058 - DNA, 30 bp, Artificial Sequence
  Synthetic oligonucleotide
gatgacccgctcgggctggtaaaggggctt

SEQ ID NO: 415059 - DNA, 30 bp, Artificial Sequence
  Synthetic oligonucleotide
caggtggtatgggctagcatccgggggctt

SEQ ID NO: 415060 - DNA, 30 bp, Artificial Sequence
  Synthetic oligonucleotide
tagatactcgaaataccccagggggggctt

SEQ ID NO: 415061 - DNA, 30 bp, Artificial Sequence
  Synthetic oligonucleotide
gcaagttagaattcggataagatggggctt

SEQ ID NO: 415062 - DNA, 30 bp, Artificial Sequence
  Synthetic oligonucleotide
agagccattcgatcccccagtatggggctt

SEQ ID NO: 415063 - DNA, 30 bp, Artificial Sequence
  Synthetic oligonucleotide
cttgggaaagactattttttgcttgggctt

SEQ ID NO: 415064 - DNA, 30 bp, Artificial Sequence
  Synthetic oligonucleotide
catgactgccgcgcggatgctcttgggctt

SEQ ID NO: 415065 - DNA, 30 bp, Artificial Sequence
  Synthetic oligonucleotide
ttattatctaggccataatggcgatggctt

SEQ ID NO: 415066 - DNA, 30 bp, Artificial Sequence
  Synthetic oligonucleotide
gaggcggataccacgactcaagcctggctt

SEQ ID NO: 415067 - DNA, 30 bp, Artificial Sequence
  Synthetic oligonucleotide
ggtgggtgtccgaggtcgaatacgtggctt

SEQ ID NO: 415068 - DNA, 30 bp, Artificial Sequence
  Synthetic oligonucleotide
aagaatcagagatgcggaatatcgtggctt

SEQ ID NO: 415069 - DNA, 30 bp, Artificial Sequence
  Synthetic oligonucleotide
gcaacgagcattcttatagccttgtggctt

SEQ ID NO: 415070 - DNA, 30 bp, Artificial Sequence
  Synthetic oligonucleotide
ctgttagtagtatgcaatggacattggctt

SEQ ID NO: 415071 - DNA, 30 bp, Artificial Sequence
  Synthetic oligonucleotide
ccttgggtcctattggaacccatttggctt

SEQ ID NO: 415072 - DNA, 30 bp, Artificial Sequence
  Synthetic oligonucleotide
ttgttttgccatcaatatttggacatgctt

SEQ ID NO: 415073 - DNA, 30 bp, Artificial Sequence
  Synthetic oligonucleotide
tacacgctaggggcgtatatgcccatgctt

SEQ ID NO: 415074 - DNA, 30 bp, Artificial Sequence
  Synthetic oligonucleotide
ggcaggacaaagacagggaacacgatgctt

SEQ ID NO: 415075 - DNA, 30 bp, Artificial Sequence
  Synthetic oligonucleotide
ttattcaatctattgcgattcaggatgctt

SEQ ID NO: 415076 - DNA, 30 bp, Artificial Sequence
  Synthetic oligonucleotide
atcgggaccaaaaagctattccggatgctt

SEQ ID NO: 415077 - DNA, 30 bp, Artificial Sequence
  Synthetic oligonucleotide
gcaactctgacggtcccgcgcagtatgctt

SEQ ID NO: 415078 - DNA, 30 bp, Artificial Sequence
  Synthetic oligonucleotide
caccatgccgttttccaaaggtgtatgctt

SEQ ID NO: 415079 - DNA, 30 bp, Artificial Sequence
  Synthetic oligonucleotide
ctatgatccgcctaacgagttgaactgctt

SEQ ID NO: 415080 - DNA, 30 bp, Artificial Sequence
  Synthetic oligonucleotide
agcaaggacgatataggtcgaagactgctt

SEQ ID NO: 415081 - DNA, 30 bp, Artificial Sequence
  Synthetic oligonucleotide
ccaaactttgcgttatactggagcctgctt

SEQ ID NO: 415082 - DNA, 30 bp, Artificial Sequence
  Synthetic oligonucleotide
ccgtccacaggtcgcgactgatcgctgctt

SEQ ID NO: 415083 - DNA, 30 bp, Artificial Sequence
  Synthetic oligonucleotide
agcaatagcgatgttcataacaatctgctt

SEQ ID NO: 415084 - DNA, 30 bp, Artificial Sequence
  Synthetic oligonucleotide
gcgctgaagcataagtcgcggattctgctt

SEQ ID NO: 415085 - DNA, 30 bp, Artificial Sequence
  Synthetic oligonucleotide
tgacgcagaccttatatcggtaaagtgctt

SEQ ID NO: 415086 - DNA, 30 bp, Artificial Sequence
  Synthetic oligonucleotide
atatccgagtatggactgtaggacgtgctt

SEQ ID NO: 415087 - DNA, 30 bp, Artificial Sequence
  Synthetic oligonucleotide
ctctgtaaaaagaaacccgcatcggtgctt

SEQ ID NO: 415088 - DNA, 30 bp, Artificial Sequence
  Synthetic oligonucleotide
ttctacgttatcagtgaaacggtggtgctt

SEQ ID NO: 415089 - DNA, 30 bp, Artificial Sequence
  Synthetic oligonucleotide
gcttccttccttcgcaactgtctattgctt

SEQ ID NO: 415090 - DNA, 30 bp, Artificial Sequence
  Synthetic oligonucleotide
gagcggctgactcgcatctgagtattgctt

SEQ ID NO: 415091 - DNA, 30 bp, Artificial Sequence
  Synthetic oligonucleotide
ggtctggaacaagcgtagaccgtattgctt

SEQ ID NO: 415092 - DNA, 30 bp, Artificial Sequence
  Synthetic oligonucleotide
atatggccagactactggtacggcttgctt

SEQ ID NO: 415093 - DNA, 30 bp, Artificial Sequence
  Synthetic oligonucleotide
agcgtagtcatctaacacgcgcaaaatctt

SEQ ID NO: 415094 - DNA, 30 bp, Artificial Sequence
  Synthetic oligonucleotide
tttgggacgccaccaataggattaaatctt

SEQ ID NO: 415095 - DNA, 30 bp, Artificial Sequence
  Synthetic oligonucleotide
gtgcgagggctgctggcaagctgcaatctt

SEQ ID NO: 415096 - DNA, 30 bp, Artificial Sequence
  Synthetic oligonucleotide
gttcgtcaatcccgtcacaaccggaatctt

SEQ ID NO: 415097 - DNA, 30 bp, Artificial Sequence
  Synthetic oligonucleotide
gtcaactaggaactaagaccgcgtaatctt

SEQ ID NO: 415098 - DNA, 30 bp, Artificial Sequence
  Synthetic oligonucleotide
gcactccgtaaggtagtcttgtaacatctt

SEQ ID NO: 415099 - DNA, 30 bp, Artificial Sequence
  Synthetic oligonucleotide
gtagtacttatgtgatccatgggacatctt

SEQ ID NO: 415100 - DNA, 30 bp, Artificial Sequence
  Synthetic oligonucleotide
caaaatggtacgtgtacgaggtaccatctt

SEQ ID NO: 415101 - DNA, 30 bp, Artificial Sequence
  Synthetic oligonucleotide
gccgcgcacgcagaatgcttcctccatctt

SEQ ID NO: 415102 - DNA, 30 bp, Artificial Sequence
  Synthetic oligonucleotide
gattccaggtgcgtcgactcgtagcatctt

SEQ ID NO: 415103 - DNA, 30 bp, Artificial Sequence
  Synthetic oligonucleotide
acccgtgaggggcatgctatgcctcatctt

SEQ ID NO: 415104 - DNA, 30 bp, Artificial Sequence
  Synthetic oligonucleotide
actctagggattaaatcggttagtcatctt

SEQ ID NO: 415105 - DNA, 30 bp, Artificial Sequence
  Synthetic oligonucleotide
aaaaccaggctgggggagaccatagatctt

SEQ ID NO: 415106 - DNA, 30 bp, Artificial Sequence
  Synthetic oligonucleotide
cattaaagggcaattcacgcggcggatctt

SEQ ID NO: 415107 - DNA, 30 bp, Artificial Sequence
  Synthetic oligonucleotide
taaatcatgggtagtcaaaccttggatctt

SEQ ID NO: 415108 - DNA, 30 bp, Artificial Sequence
  Synthetic oligonucleotide
actagcaattagtacgaaattgctgatctt

SEQ ID NO: 415109 - DNA, 30 bp, Artificial Sequence
  Synthetic oligonucleotide
aagacacccaaggataatttgtaatatctt

SEQ ID NO: 415110 - DNA, 30 bp, Artificial Sequence
  Synthetic oligonucleotide
cgcgtcgggatcaaccgtttttaatatctt

SEQ ID NO: 415111 - DNA, 30 bp, Artificial Sequence
  Synthetic oligonucleotide
catattgttctgtcagccgcgacatatctt

SEQ ID NO: 415112 - DNA, 30 bp, Artificial Sequence
  Synthetic oligonucleotide
tgctctgttaaatatacgaatgtatatctt

SEQ ID NO: 415113 - DNA, 30 bp, Artificial Sequence
  Synthetic oligonucleotide
aaccctctgtatgtcacgttattatatctt

SEQ ID NO: 415114 - DNA, 30 bp, Artificial Sequence
  Synthetic oligonucleotide
tgcagaccgcacgacctatcgagctatctt

SEQ ID NO: 415115 - DNA, 30 bp, Artificial Sequence
  Synthetic oligonucleotide
cacagtgctttgataggtatcgagtatctt

SEQ ID NO: 415116 - DNA, 30 bp, Artificial Sequence
  Synthetic oligonucleotide
gcaatggaagtaatcatgttcacgtatctt

SEQ ID NO: 415117 - DNA, 30 bp, Artificial Sequence
  Synthetic oligonucleotide
aactcagtaaaaagttggagatattatctt

SEQ ID NO: 415118 - DNA, 30 bp, Artificial Sequence
  Synthetic oligonucleotide
atatcggacagtgagctgaccggttatctt

SEQ ID NO: 415119 - DNA, 30 bp, Artificial Sequence
  Synthetic oligonucleotide
cgtgcggcacggcaaaagctggaaactctt

SEQ ID NO: 415120 - DNA, 30 bp, Artificial Sequence
  Synthetic oligonucleotide
acctctattatgaaccaacctccaactctt

SEQ ID NO: 415121 - DNA, 30 bp, Artificial Sequence
  Synthetic oligonucleotide
gggtatacaacccccagtcgctccactctt

SEQ ID NO: 415122 - DNA, 30 bp, Artificial Sequence
  Synthetic oligonucleotide
ggagttacttgagctctaagcagcactctt

SEQ ID NO: 415123 - DNA, 30 bp, Artificial Sequence
  Synthetic oligonucleotide
agtccaagggtaccttaagaccagactctt

SEQ ID NO: 415124 - DNA, 30 bp, Artificial Sequence
  Synthetic oligonucleotide
acgtagcagggcctccagcggtggactctt

SEQ ID NO: 415125 - DNA, 30 bp, Artificial Sequence
  Synthetic oligonucleotide
tcaaagtcttcttcctttttaaaacctctt

SEQ ID NO: 415126 - DNA, 30 bp, Artificial Sequence
  Synthetic oligonucleotide
tagtaagcagggcagcgaacgcaccctctt

SEQ ID NO: 415127 - DNA, 30 bp, Artificial Sequence
  Synthetic oligonucleotide
attcagataggtatcgtctgaaagcctctt

SEQ ID NO: 415128 - DNA, 30 bp, Artificial Sequence
  Synthetic oligonucleotide
tttagcgaccgatagaagttgcttcctctt

SEQ ID NO: 415129 - DNA, 30 bp, Artificial Sequence
  Synthetic oligonucleotide
atattggagcgtcagagtagaccagctctt

SEQ ID NO: 415130 - DNA, 30 bp, Artificial Sequence
  Synthetic oligonucleotide
actagcccctaatattttaaggcagctctt

SEQ ID NO: 415131 - DNA, 30 bp, Artificial Sequence
  Synthetic oligonucleotide
ggttatagaacggcctcttgcttagctctt

SEQ ID NO: 415132 - DNA, 30 bp, Artificial Sequence
  Synthetic oligonucleotide
cttccgggacgtaagcttctaggcgctctt

SEQ ID NO: 415133 - DNA, 30 bp, Artificial Sequence
  Synthetic oligonucleotide
gttgagatattgccccaagagcaatctctt

SEQ ID NO: 415134 - DNA, 30 bp, Artificial Sequence
  Synthetic oligonucleotide
cggcaaaggtcccatacggcggcctctctt

SEQ ID NO: 415135 - DNA, 30 bp, Artificial Sequence
  Synthetic oligonucleotide
acccggaaatcagctatgggagcttctctt

SEQ ID NO: 415136 - DNA, 30 bp, Artificial Sequence
  Synthetic oligonucleotide
attattcctcgaatgtctaagaaaagtctt

SEQ ID NO: 415137 - DNA, 30 bp, Artificial Sequence
  Synthetic oligonucleotide
ggacactcgggaaggactttagaaagtctt

SEQ ID NO: 415138 - DNA, 30 bp, Artificial Sequence
  Synthetic oligonucleotide
aatgacaggaagctataagtctcaagtctt

SEQ ID NO: 415139 - DNA, 30 bp, Artificial Sequence
  Synthetic oligonucleotide
cccggacaaagatacagtcgattaagtctt

SEQ ID NO: 415140 - DNA, 30 bp, Artificial Sequence
  Synthetic oligonucleotide
gaagcaacgtgagattacggccgcagtctt

SEQ ID NO: 415141 - DNA, 30 bp, Artificial Sequence
  Synthetic oligonucleotide
tgtgcgcatttgtccatgtcgggcagtctt

SEQ ID NO: 415142 - DNA, 30 bp, Artificial Sequence
  Synthetic oligonucleotide
ctcgactggatgataagctcattcagtctt

SEQ ID NO: 415143 - DNA, 30 bp, Artificial Sequence
  Synthetic oligonucleotide
tcctatctcaccgcccaggtgaagagtctt

SEQ ID NO: 415144 - DNA, 30 bp, Artificial Sequence
  Synthetic oligonucleotide
ctgatctcaaggcgtttgcttcggagtctt

SEQ ID NO: 415145 - DNA, 30 bp, Artificial Sequence
  Synthetic oligonucleotide
tgacaagttaaacttaacccgcgtagtctt

SEQ ID NO: 415146 - DNA, 30 bp, Artificial Sequence
  Synthetic oligonucleotide
cccaccaataatctctagcgcatacgtctt

SEQ ID NO: 415147 - DNA, 30 bp, Artificial Sequence
  Synthetic oligonucleotide
ccacccttttacatactccaggcccgtctt

SEQ ID NO: 415148 - DNA, 30 bp, Artificial Sequence
  Synthetic oligonucleotide
atcgtattattaattgtggggtggcgtctt

SEQ ID NO: 415149 - DNA, 30 bp, Artificial Sequence
  Synthetic oligonucleotide
ggattatcacgagtcatcaatactcgtctt

SEQ ID NO: 415150 - DNA, 30 bp, Artificial Sequence
  Synthetic oligonucleotide
gataatctaaactataaaccgacaggtctt

SEQ ID NO: 415151 - DNA, 30 bp, Artificial Sequence
  Synthetic oligonucleotide
tcagtgagagaacatactcgcaagggtctt

SEQ ID NO: 415152 - DNA, 30 bp, Artificial Sequence
  Synthetic oligonucleotide
ggtgtgatgggcttatcacgcatgggtctt

SEQ ID NO: 415153 - DNA, 30 bp, Artificial Sequence
  Synthetic oligonucleotide
acacgtgtaagcactgtcttgtgtggtctt

SEQ ID NO: 415154 - DNA, 30 bp, Artificial Sequence
  Synthetic oligonucleotide
ggagatgggttaattgaaaacacatgtctt

SEQ ID NO: 415155 - DNA, 30 bp, Artificial Sequence
  Synthetic oligonucleotide
ggccggttaccctacatgtagctctgtctt

SEQ ID NO: 415156 - DNA, 30 bp, Artificial Sequence
  Synthetic oligonucleotide
cggcatgaggtacttgcgcatgtctgtctt

SEQ ID NO: 415157 - DNA, 30 bp, Artificial Sequence
  Synthetic oligonucleotide
tctcaacaagttacgagcagaaaaattctt

SEQ ID NO: 415158 - DNA, 30 bp, Artificial Sequence
  Synthetic oligonucleotide
ggccgcatgagctcacgtatgtcaattctt

SEQ ID NO: 415159 - DNA, 30 bp, Artificial Sequence
  Synthetic oligonucleotide
atatgtctaagtattgtcagaataattctt

SEQ ID NO: 415160 - DNA, 30 bp, Artificial Sequence
  Synthetic oligonucleotide
ctccgatacccgtgaactgaattaattctt

SEQ ID NO: 415161 - DNA, 30 bp, Artificial Sequence
  Synthetic oligonucleotide
agaagtacaataacacaacacttaattctt

SEQ ID NO: 415162 - DNA, 30 bp, Artificial Sequence
  Synthetic oligonucleotide
aatctgctattcagaaattaacgcattctt

SEQ ID NO: 415163 - DNA, 30 bp, Artificial Sequence
  Synthetic oligonucleotide
cgttcggttctggtatcatttatcattctt

SEQ ID NO: 415164 - DNA, 30 bp, Artificial Sequence
  Synthetic oligonucleotide
tattgataaaccgagtcaggagcgattctt

SEQ ID NO: 415165 - DNA, 30 bp, Artificial Sequence
  Synthetic oligonucleotide
cctaccgcgattgtcaaccgtaatattctt

SEQ ID NO: 415166 - DNA, 30 bp, Artificial Sequence
  Synthetic oligonucleotide
tcgaaagggggccgccccccggatattctt

SEQ ID NO: 415167 - DNA, 30 bp, Artificial Sequence
  Synthetic oligonucleotide
gggggactgcacgttgggaaccctattctt

SEQ ID NO: 415168 - DNA, 30 bp, Artificial Sequence
  Synthetic oligonucleotide
tgatttcaactcgtcaattacaaacttctt

SEQ ID NO: 415169 - DNA, 30 bp, Artificial Sequence
  Synthetic oligonucleotide
ctccgcaagtagtggaaaatacgacttctt

SEQ ID NO: 415170 - DNA, 31 bp, Artificial Sequence
  Synthetic oligonucleotide
tcatcggggtcccggttaccttatccttctt

SEQ ID NO: 415171 - DNA, 30 bp, Artificial Sequence
  Synthetic oligonucleotide
aaaatgcccacgtatgtactcacgcttctt

SEQ ID NO: 415172 - DNA, 30 bp, Artificial Sequence
  Synthetic oligonucleotide
attccgaaaatagcggatctgtctcttctt

SEQ ID NO: 415173 - DNA, 30 bp, Artificial Sequence
  Synthetic oligonucleotide
gaacactgagtccccctagtcagtcttctt

SEQ ID NO: 415174 - DNA, 30 bp, Artificial Sequence
  Synthetic oligonucleotide
attgaaccgcatttaaatattcaagttctt

SEQ ID NO: 415175 - DNA, 30 bp, Artificial Sequence
  Synthetic oligonucleotide
ttataaggctattgagatatttaagttctt

SEQ ID NO: 415176 - DNA, 30 bp, Artificial Sequence
  Synthetic oligonucleotide
gagaacaagacagctagcgtttcagttctt

SEQ ID NO: 415177 - DNA, 30 bp, Artificial Sequence
  Synthetic oligonucleotide
tagtaataacgggcaattgcccgagttctt

SEQ ID NO: 415178 - DNA, 30 bp, Artificial Sequence
  Synthetic oligonucleotide
cgagatctcagacactagacagtggttctt

SEQ ID NO: 415179 - DNA, 30 bp, Artificial Sequence
  Synthetic oligonucleotide
acttctaacggctgatacgtttctgttctt

SEQ ID NO: 415180 - DNA, 30 bp, Artificial Sequence
  Synthetic oligonucleotide
ggctcgggcgagaaggttcaaaaatttctt

SEQ ID NO: 415181 - DNA, 30 bp, Artificial Sequence
  Synthetic oligonucleotide
gtgtaaattgatataagtagcgcatttctt

SEQ ID NO: 415182 - DNA, 30 bp, Artificial Sequence
  Synthetic oligonucleotide
tgggttcgacccaacctaacaatatttctt

SEQ ID NO: 415183 - DNA, 30 bp, Artificial Sequence
  Synthetic oligonucleotide
acaactagggcatagtggtgctactttctt

SEQ ID NO: 415184 - DNA, 30 bp, Artificial Sequence
  Synthetic oligonucleotide
taagtcatggtacaacttatagggtttctt

SEQ ID NO: 415185 - DNA, 30 bp, Artificial Sequence
  Synthetic oligonucleotide
ctgcaaccccggagttacacgcattttctt

SEQ ID NO: 415186 - DNA, 30 bp, Artificial Sequence
  Synthetic oligonucleotide
agccctgtacttgatttaagttattttctt

SEQ ID NO: 415187 - DNA, 30 bp, Artificial Sequence
  Synthetic oligonucleotide
tcgtgatgtgtaagcggcacacacaaagtt

SEQ ID NO: 415188 - DNA, 30 bp, Artificial Sequence
  Synthetic oligonucleotide
attctagggagacttgatggcaagaaagtt

SEQ ID NO: 415189 - DNA, 30 bp, Artificial Sequence
  Synthetic oligonucleotide
tccccaagtgatttgctcgaatagaaagtt

SEQ ID NO: 415190 - DNA, 30 bp, Artificial Sequence
  Synthetic oligonucleotide
gattcagttcgtggacttgacgtgaaagtt

SEQ ID NO: 415191 - DNA, 30 bp, Artificial Sequence
  Synthetic oligonucleotide
atcgacagagggaggctgtcgttgaaagtt

SEQ ID NO: 415192 - DNA, 30 bp, Artificial Sequence
  Synthetic oligonucleotide
cccagaccttataggagattttataaagtt

SEQ ID NO: 415193 - DNA, 30 bp, Artificial Sequence
  Synthetic oligonucleotide
taaacaactccgtcaaaggctggtaaagtt

SEQ ID NO: 415194 - DNA, 30 bp, Artificial Sequence
  Synthetic oligonucleotide
gtcagtccatccaataaacgccttaaagtt

SEQ ID NO: 415195 - DNA, 30 bp, Artificial Sequence
  Synthetic oligonucleotide
ggcggcccatgagaccgcaacgaacaagtt

SEQ ID NO: 415196 - DNA, 30 bp, Artificial Sequence
  Synthetic oligonucleotide
ttggcgagcgcgtttcattagacacaagtt

SEQ ID NO: 415197 - DNA, 30 bp, Artificial Sequence
  Synthetic oligonucleotide
actacggcctacaaaatttgaagacaagtt

SEQ ID NO: 415198 - DNA, 30 bp, Artificial Sequence
  Synthetic oligonucleotide
agttgggcagaaactgacaggaagcaagtt

SEQ ID NO: 415199 - DNA, 30 bp, Artificial Sequence
  Synthetic oligonucleotide
gctagttttaaaatataatattagcaagtt

SEQ ID NO: 415200 - DNA, 30 bp, Artificial Sequence
  Synthetic oligonucleotide
caaggttttgagtcctagaaggttcaagtt

SEQ ID NO: 415201 - DNA, 30 bp, Artificial Sequence
  Synthetic oligonucleotide
gacctgcactggatttctttattagaagtt

SEQ ID NO: 415202 - DNA, 29 bp, Artificial Sequence
  Synthetic oligonucleotide
gcagcttgttaaagttgatgtccgaagtt

SEQ ID NO: 415203 - DNA, 30 bp, Artificial Sequence
  Synthetic oligonucleotide
ggttcggtttcagttccaccaaatgaagtt

SEQ ID NO: 415204 - DNA, 30 bp, Artificial Sequence
  Synthetic oligonucleotide
tagttgtaactatttcggtcctatgaagtt

SEQ ID NO: 415205 - DNA, 30 bp, Artificial Sequence
  Synthetic oligonucleotide
tggcaaattctactgcgaaatagtgaagtt

SEQ ID NO: 415206 - DNA, 30 bp, Artificial Sequence
  Synthetic oligonucleotide
tttaaacatagagtggtggagatataagtt

SEQ ID NO: 415207 - DNA, 30 bp, Artificial Sequence
  Synthetic oligonucleotide
acaaacgtcgtttgcttcaagctctaagtt

SEQ ID NO: 415208 - DNA, 30 bp, Artificial Sequence
  Synthetic oligonucleotide
ggtcttcctctaccatcggtgatgtaagtt

SEQ ID NO: 415209 - DNA, 30 bp, Artificial Sequence
  Synthetic oligonucleotide
tacctataattaaagttaacggtgtaagtt

SEQ ID NO: 415210 - DNA, 30 bp, Artificial Sequence
  Synthetic oligonucleotide
gtcactagaatcgctcatgctttgtaagtt

SEQ ID NO: 415211 - DNA, 30 bp, Artificial Sequence
  Synthetic oligonucleotide
agcatttacacctggctctcatcttaagtt

SEQ ID NO: 415212 - DNA, 30 bp, Artificial Sequence
  Synthetic oligonucleotide
aggtctttgtcatgtgtgggttgttaagtt

SEQ ID NO: 415213 - DNA, 30 bp, Artificial Sequence
  Synthetic oligonucleotide
tagtatgaccagtagcgccctaaaacagtt

SEQ ID NO: 415214 - DNA, 31 bp, Artificial Sequence
  Synthetic oligonucleotide
ccgggagggttcggtggtatcaaagacagtt

SEQ ID NO: 415215 - DNA, 30 bp, Artificial Sequence
  Synthetic oligonucleotide
tatgccggctggaactttgtaagtacagtt

SEQ ID NO: 415216 - DNA, 30 bp, Artificial Sequence
  Synthetic oligonucleotide
ggatagcttctgtgtgaaagtaccccagtt

SEQ ID NO: 415217 - DNA, 30 bp, Artificial Sequence
  Synthetic oligonucleotide
accacggcataacacactgatagcccagtt

SEQ ID NO: 415218 - DNA, 30 bp, Artificial Sequence
  Synthetic oligonucleotide
gagggttgataccgcaacatactcccagtt

SEQ ID NO: 415219 - DNA, 30 bp, Artificial Sequence
  Synthetic oligonucleotide
tgggattgatgaaaggtggttgagccagtt

SEQ ID NO: 415220 - DNA, 30 bp, Artificial Sequence
  Synthetic oligonucleotide
ttagacgcaggggcttcgttgtagccagtt

SEQ ID NO: 415221 - DNA, 30 bp, Artificial Sequence
  Synthetic oligonucleotide
atgatgtctagatcaatgcatgatccagtt

SEQ ID NO: 415222 - DNA, 30 bp, Artificial Sequence
  Synthetic oligonucleotide
ctttaggatatatctgctcgtcttccagtt

SEQ ID NO: 415223 - DNA, 30 bp, Artificial Sequence
  Synthetic oligonucleotide
gttgatataatattcgacaccgtagcagtt

SEQ ID NO: 415224 - DNA, 30 bp, Artificial Sequence
  Synthetic oligonucleotide
catttacttcggcggcgtataggcgcagtt

SEQ ID NO: 415225 - DNA, 30 bp, Artificial Sequence
  Synthetic oligonucleotide
caccgttggatgactaatacggtcgcagtt

SEQ ID NO: 415226 - DNA, 30 bp, Artificial Sequence
  Synthetic oligonucleotide
tagcccccactcaatttactacaggcagtt

SEQ ID NO: 415227 - DNA, 30 bp, Artificial Sequence
  Synthetic oligonucleotide
tgacggagggtcttattgtccccggcagtt

SEQ ID NO: 415228 - DNA, 30 bp, Artificial Sequence
  Synthetic oligonucleotide
ttaggctatcatattcaaacatttgcagtt

SEQ ID NO: 415229 - DNA, 30 bp, Artificial Sequence
  Synthetic oligonucleotide
cacggattacaaaattaacaataatcagtt

SEQ ID NO: 415230 - DNA, 30 bp, Artificial Sequence
  Synthetic oligonucleotide
tcgcctatccggttttaatgagggtcagtt

SEQ ID NO: 415231 - DNA, 30 bp, Artificial Sequence
  Synthetic oligonucleotide
tcaggactgtgtctttaggggttgtcagtt

SEQ ID NO: 415232 - DNA, 30 bp, Artificial Sequence
  Synthetic oligonucleotide
ggggtccaatcatctcgcgacccttcagtt

SEQ ID NO: 415233 - DNA, 30 bp, Artificial Sequence
  Synthetic oligonucleotide
atgcgcgaacctaagtccttacaaagagtt

SEQ ID NO: 415234 - DNA, 30 bp, Artificial Sequence
  Synthetic oligonucleotide
taaagaggataaacttctggagtgagagtt

SEQ ID NO: 415235 - DNA, 30 bp, Artificial Sequence
  Synthetic oligonucleotide
cagttgattactaattgtagcaatagagtt

SEQ ID NO: 415236 - DNA, 30 bp, Artificial Sequence
  Synthetic oligonucleotide
atcgctccggtcactaaccatccacgagtt

SEQ ID NO: 415237 - DNA, 30 bp, Artificial Sequence
  Synthetic oligonucleotide
gaagggagtcatcgcctaggctcacgagtt

SEQ ID NO: 415238 - DNA, 30 bp, Artificial Sequence
  Synthetic oligonucleotide
tgccagggggctgtgcagtcgctacgagtt

SEQ ID NO: 415239 - DNA, 30 bp, Artificial Sequence
  Synthetic oligonucleotide
aattattcaaggggtcgctctttacgagtt

SEQ ID NO: 415240 - DNA, 30 bp, Artificial Sequence
  Synthetic oligonucleotide
taccgatgacggcagatcagtacccgagtt

SEQ ID NO: 415241 - DNA, 30 bp, Artificial Sequence
  Synthetic oligonucleotide
gcggatatacccgtgtcaccaccgcgagtt

SEQ ID NO: 415242 - DNA, 30 bp, Artificial Sequence
  Synthetic oligonucleotide
ggcattacgcgggccttccctcaaggagtt

SEQ ID NO: 415243 - DNA, 30 bp, Artificial Sequence
  Synthetic oligonucleotide
acagtcgcacggtcctggataacaggagtt

SEQ ID NO: 415244 - DNA, 30 bp, Artificial Sequence
  Synthetic oligonucleotide
gagaattcacgtattcacgagtcaggagtt

SEQ ID NO: 415245 - DNA, 30 bp, Artificial Sequence
  Synthetic oligonucleotide
atcaccacgctcgcattaagcgacggagtt

SEQ ID NO: 415246 - DNA, 30 bp, Artificial Sequence
  Synthetic oligonucleotide
gttgagttttctagtaaataggcgggagtt

SEQ ID NO: 415247 - DNA, 30 bp, Artificial Sequence
  Synthetic oligonucleotide
ccgctccgagtgcccgtaaggtcgggagtt

SEQ ID NO: 415248 - DNA, 30 bp, Artificial Sequence
  Synthetic oligonucleotide
tacaacgagtggctgtaggctaatggagtt

SEQ ID NO: 415249 - DNA, 30 bp, Artificial Sequence
  Synthetic oligonucleotide
aaacgtgcctgtatattcatccaatgagtt

SEQ ID NO: 415250 - DNA, 30 bp, Artificial Sequence
  Synthetic oligonucleotide
gtagaatttacattcgggtgtcgatgagtt

SEQ ID NO: 415251 - DNA, 30 bp, Artificial Sequence
  Synthetic oligonucleotide
acacagagtctcagacatagggactgagtt

SEQ ID NO: 415252 - DNA, 30 bp, Artificial Sequence
  Synthetic oligonucleotide
caccgctgttgggtcttatctatctgagtt

SEQ ID NO: 415253 - DNA, 30 bp, Artificial Sequence
  Synthetic oligonucleotide
ggacgcctcctgtgcggcggcctctgagtt

SEQ ID NO: 415254 - DNA, 30 bp, Artificial Sequence
  Synthetic oligonucleotide
gctatataacgattctgactcgagtgagtt

SEQ ID NO: 415255 - DNA, 30 bp, Artificial Sequence
  Synthetic oligonucleotide
ggaattggcacgtgtcacgtgaggtgagtt

SEQ ID NO: 415256 - DNA, 30 bp, Artificial Sequence
  Synthetic oligonucleotide
gactctcgtagttcatcgcaaacttgagtt

SEQ ID NO: 415257 - DNA, 30 bp, Artificial Sequence
  Synthetic oligonucleotide
gggttcggagcgtcatttctagcttgagtt

SEQ ID NO: 415258 - DNA, 30 bp, Artificial Sequence
  Synthetic oligonucleotide
acccaaacgaccggacttatcgcttgagtt

SEQ ID NO: 415259 - DNA, 30 bp, Artificial Sequence
  Synthetic oligonucleotide
gtttcaaccgaacctggtgaacgttgagtt

SEQ ID NO: 415260 - DNA, 30 bp, Artificial Sequence
  Synthetic oligonucleotide
ttatacatgcgaagtcctccacaaatagtt

SEQ ID NO: 415261 - DNA, 30 bp, Artificial Sequence
  Synthetic oligonucleotide
gctcgtctggctagcattaatttaatagtt

SEQ ID NO: 415262 - DNA, 30 bp, Artificial Sequence
  Synthetic oligonucleotide
attagtggattaggaaataggagcatagtt

SEQ ID NO: 415263 - DNA, 30 bp, Artificial Sequence
  Synthetic oligonucleotide
taaatcctaatttttcggatgtatatagtt

SEQ ID NO: 415264 - DNA, 30 bp, Artificial Sequence
  Synthetic oligonucleotide
cttgttagcggacaatgcagcgttatagtt

SEQ ID NO: 415265 - DNA, 30 bp, Artificial Sequence
  Synthetic oligonucleotide
gctcactacaaataacttgaacccctagtt

SEQ ID NO: 415266 - DNA, 30 bp, Artificial Sequence
  Synthetic oligonucleotide
caatctctactaacgcaggagagcctagtt

SEQ ID NO: 415267 - DNA, 30 bp, Artificial Sequence
  Synthetic oligonucleotide
ctgcgaatctctgcgtttggactcctagtt

SEQ ID NO: 415268 - DNA, 30 bp, Artificial Sequence
  Synthetic oligonucleotide
ttactctatccaaatcaaaggactctagtt

SEQ ID NO: 415269 - DNA, 30 bp, Artificial Sequence
  Synthetic oligonucleotide
attcaaattcaccccaagggtggagtagtt

SEQ ID NO: 415270 - DNA, 30 bp, Artificial Sequence
  Synthetic oligonucleotide
ggtgaagggttatctgagtggcacgtagtt

SEQ ID NO: 415271 - DNA, 30 bp, Artificial Sequence
  Synthetic oligonucleotide
gataggtcattcacgctagaagtcgtagtt

SEQ ID NO: 415272 - DNA, 30 bp, Artificial Sequence
  Synthetic oligonucleotide
atttgcgcgttaggcctatctcttgtagtt

SEQ ID NO: 415273 - DNA, 30 bp, Artificial Sequence
  Synthetic oligonucleotide
gggaatgggccagtgtcaccggaattagtt

SEQ ID NO: 415274 - DNA, 30 bp, Artificial Sequence
  Synthetic oligonucleotide
tcccttctagcacggaatgcactattagtt

SEQ ID NO: 415275 - DNA, 30 bp, Artificial Sequence
  Synthetic oligonucleotide
acatagttttattaaacgcaattattagtt

SEQ ID NO: 415276 - DNA, 30 bp, Artificial Sequence
  Synthetic oligonucleotide
ttatgatcggggtaaagtaaattcttagtt

SEQ ID NO: 415277 - DNA, 30 bp, Artificial Sequence
  Synthetic oligonucleotide
ctacccgtttgcccagatatcgatttagtt

SEQ ID NO: 415278 - DNA, 30 bp, Artificial Sequence
  Synthetic oligonucleotide
aatcctacaaatagtcagcaatctttagtt

SEQ ID NO: 415279 - DNA, 30 bp, Artificial Sequence
  Synthetic oligonucleotide
gatacgcctggcatacgaggaacaaacgtt

SEQ ID NO: 415280 - DNA, 30 bp, Artificial Sequence
  Synthetic oligonucleotide
tttggtcgacaaaggaatgcaccaaacgtt

SEQ ID NO: 415281 - DNA, 30 bp, Artificial Sequence
  Synthetic oligonucleotide
caacccgctaaatgagttcatgtaaacgtt

SEQ ID NO: 415282 - DNA, 30 bp, Artificial Sequence
  Synthetic oligonucleotide
gttcaattcccggtcttttacagcaacgtt

SEQ ID NO: 415283 - DNA, 30 bp, Artificial Sequence
  Synthetic oligonucleotide
gaagtgctgtcaagagagatcgagaacgtt

SEQ ID NO: 415284 - DNA, 30 bp, Artificial Sequence
  Synthetic oligonucleotide
gtccgtcccaagtcagcactggagaacgtt

SEQ ID NO: 415285 - DNA, 30 bp, Artificial Sequence
  Synthetic oligonucleotide
acctacattgggtctgataaatcgaacgtt

SEQ ID NO: 415286 - DNA, 30 bp, Artificial Sequence
  Synthetic oligonucleotide
aatctgacttaccgatttatgcggaacgtt

SEQ ID NO: 415287 - DNA, 30 bp, Artificial Sequence
  Synthetic oligonucleotide
agcgggagaggtggactccgttcccacgtt

SEQ ID NO: 415288 - DNA, 30 bp, Artificial Sequence
  Synthetic oligonucleotide
aacctgaagctggtagcacgggtccacgtt

SEQ ID NO: 415289 - DNA, 30 bp, Artificial Sequence
  Synthetic oligonucleotide
ggttctggtctcaggagtcgggggcacgtt

SEQ ID NO: 415290 - DNA, 30 bp, Artificial Sequence
  Synthetic oligonucleotide
agcatcataaagagcccaagcttgcacgtt

SEQ ID NO: 415291 - DNA, 30 bp, Artificial Sequence
  Synthetic oligonucleotide
ccatggtgcttggtatgagcccatcacgtt

SEQ ID NO: 415292 - DNA, 30 bp, Artificial Sequence
  Synthetic oligonucleotide
gaccgataacgggactccatttatcacgtt

SEQ ID NO: 415293 - DNA, 30 bp, Artificial Sequence
  Synthetic oligonucleotide
gtcagtgaggtaaaagaacccggagacgtt

SEQ ID NO: 415294 - DNA, 30 bp, Artificial Sequence
  Synthetic oligonucleotide
attacgtctctgtctactgtcatagacgtt

SEQ ID NO: 415295 - DNA, 30 bp, Artificial Sequence
  Synthetic oligonucleotide
cagcgtcgcggaagcattgcaggcgacgtt

SEQ ID NO: 415296 - DNA, 30 bp, Artificial Sequence
  Synthetic oligonucleotide
cggttcatctcagatgcttggttcgacgtt

SEQ ID NO: 415297 - DNA, 30 bp, Artificial Sequence
  Synthetic oligonucleotide
gcctaatttatcgcatacagtttcgacgtt

SEQ ID NO: 415298 - DNA, 30 bp, Artificial Sequence
  Synthetic oligonucleotide
ctttgtatctaacactccattcgggacgtt

SEQ ID NO: 415299 - DNA, 30 bp, Artificial Sequence
  Synthetic oligonucleotide
agaatctaaacacctttgcgaattgacgtt

SEQ ID NO: 415300 - DNA, 30 bp, Artificial Sequence
  Synthetic oligonucleotide
aagagggttccatgttcattacgatacgtt

SEQ ID NO: 415301 - DNA, 30 bp, Artificial Sequence
  Synthetic oligonucleotide
aagtgcgccagtatggatacgtcctacgtt

SEQ ID NO: 415302 - DNA, 30 bp, Artificial Sequence
  Synthetic oligonucleotide
gcaatcggttaatttcgttcttgctacgtt

SEQ ID NO: 415303 - DNA, 30 bp, Artificial Sequence
  Synthetic oligonucleotide
tgtggcaggagctaagcctcggcgtacgtt

SEQ ID NO: 415304 - DNA, 30 bp, Artificial Sequence
  Synthetic oligonucleotide
taccttagtaccgtcctaggcgtgtacgtt

SEQ ID NO: 415305 - DNA, 30 bp, Artificial Sequence
  Synthetic oligonucleotide
gattattactataagccgcgaggaaccgtt

SEQ ID NO: 415306 - DNA, 30 bp, Artificial Sequence
  Synthetic oligonucleotide
gttgaatgcgaacgattctattgcaccgtt

SEQ ID NO: 415307 - DNA, 30 bp, Artificial Sequence
  Synthetic oligonucleotide
attcctcggccccctaatcgtcgtaccgtt

SEQ ID NO: 415308 - DNA, 30 bp, Artificial Sequence
  Synthetic oligonucleotide
caatgcagggggatgatcatcaaacccgtt

SEQ ID NO: 415309 - DNA, 30 bp, Artificial Sequence
  Synthetic oligonucleotide
ccattggttcgagcggaccaacaacccgtt

SEQ ID NO: 415310 - DNA, 30 bp, Artificial Sequence
  Synthetic oligonucleotide
caaacggatggacctaatcgtgaacccgtt

SEQ ID NO: 415311 - DNA, 30 bp, Artificial Sequence
  Synthetic oligonucleotide
ctatacgatggaggcgggctcgcagccgtt

SEQ ID NO: 415312 - DNA, 30 bp, Artificial Sequence
  Synthetic oligonucleotide
actctctaactttattacggaaaggccgtt

SEQ ID NO: 415313 - DNA, 30 bp, Artificial Sequence
  Synthetic oligonucleotide
aatgattacggatcaccacagcgggccgtt

SEQ ID NO: 415314 - DNA, 30 bp, Artificial Sequence
  Synthetic oligonucleotide
gcttaaatgtgagttgctatttatgccgtt

SEQ ID NO: 415315 - DNA, 30 bp, Artificial Sequence
  Synthetic oligonucleotide
gtatgggatgacacattaaaaacatccgtt

SEQ ID NO: 415316 - DNA, 29 bp, Artificial Sequence
  Synthetic oligonucleotide
acccttcggaattgaccggctcatccgtt

SEQ ID NO: 415317 - DNA, 30 bp, Artificial Sequence
  Synthetic oligonucleotide
ctcctaagagatactgtggtcttatccgtt

SEQ ID NO: 415318 - DNA, 30 bp, Artificial Sequence
  Synthetic oligonucleotide
ggaatacgagggcttccagggttatccgtt

SEQ ID NO: 415319 - DNA, 30 bp, Artificial Sequence
  Synthetic oligonucleotide
aatgtacattggttctccttggcgtccgtt

SEQ ID NO: 415320 - DNA, 30 bp, Artificial Sequence
  Synthetic oligonucleotide
gggaccggtcattcaattccgtggtccgtt

SEQ ID NO: 415321 - DNA, 30 bp, Artificial Sequence
  Synthetic oligonucleotide
actccagtaaatttcatcattgaaagcgtt

SEQ ID NO: 415322 - DNA, 30 bp, Artificial Sequence
  Synthetic oligonucleotide
gcgttgtctacgcgtatactataaagcgtt

SEQ ID NO: 415323 - DNA, 30 bp, Artificial Sequence
  Synthetic oligonucleotide
tttgccgaacccaaatcgttttacagcgtt

SEQ ID NO: 415324 - DNA, 30 bp, Artificial Sequence
  Synthetic oligonucleotide
cggtaacggaaaataacgacgcccagcgtt

SEQ ID NO: 415325 - DNA, 30 bp, Artificial Sequence
  Synthetic oligonucleotide
ggtaacggccaagataggtatcgcagcgtt

SEQ ID NO: 415326 - DNA, 31 bp, Artificial Sequence
  Synthetic oligonucleotide
gtctcagcccgtggcacagacatgcagcgtt

SEQ ID NO: 415327 - DNA, 30 bp, Artificial Sequence
  Synthetic oligonucleotide
aaaggaggctagtttctatagtggagcgtt

SEQ ID NO: 415328 - DNA, 30 bp, Artificial Sequence
  Synthetic oligonucleotide
ctaaaccgggtggcccgttgcaatagcgtt

SEQ ID NO: 415329 - DNA, 30 bp, Artificial Sequence
  Synthetic oligonucleotide
acggtggtcagccttttaaagcgtagcgtt

SEQ ID NO: 415330 - DNA, 30 bp, Artificial Sequence
  Synthetic oligonucleotide
aacaaagtattctcgagcaagggacgcgtt

SEQ ID NO: 415331 - DNA, 30 bp, Artificial Sequence
  Synthetic oligonucleotide
caggcatattagcgcctcttaggccgcgtt

SEQ ID NO: 415332 - DNA, 30 bp, Artificial Sequence
  Synthetic oligonucleotide
aaacactgcgtgtgggggtacatccgcgtt

SEQ ID NO: 415333 - DNA, 30 bp, Artificial Sequence
  Synthetic oligonucleotide
tctgcaatcgggttaaaatttacgcgcgtt

SEQ ID NO: 415334 - DNA, 30 bp, Artificial Sequence
  Synthetic oligonucleotide
aaacacacgagctatggatgacggcgcgtt

SEQ ID NO: 415335 - DNA, 30 bp, Artificial Sequence
  Synthetic oligonucleotide
gcagtaggcgaaaccgcaccggcaggcgtt

SEQ ID NO: 415336 - DNA, 30 bp, Artificial Sequence
  Synthetic oligonucleotide
ccaaggagtttgcggtggcacataggcgtt

SEQ ID NO: 415337 - DNA, 30 bp, Artificial Sequence
  Synthetic oligonucleotide
ggttagcggtttcacgcatggctaggcgtt

SEQ ID NO: 415338 - DNA, 30 bp, Artificial Sequence
  Synthetic oligonucleotide
agctgtcgcgagaaagcttagaacggcgtt

SEQ ID NO: 415339 - DNA, 30 bp, Artificial Sequence
  Synthetic oligonucleotide
ggacaaaccttatgcctctcctccggcgtt

SEQ ID NO: 415340 - DNA, 30 bp, Artificial Sequence
  Synthetic oligonucleotide
gctgaatgtgtatccttgtttatgggcgtt

SEQ ID NO: 415341 - DNA, 30 bp, Artificial Sequence
  Synthetic oligonucleotide
acgcatgaaatggtgtccctacatggcgtt

SEQ ID NO: 415342 - DNA, 30 bp, Artificial Sequence
  Synthetic oligonucleotide
cggtaacgggatttagaggcgggtggcgtt

SEQ ID NO: 415343 - DNA, 30 bp, Artificial Sequence
  Synthetic oligonucleotide
gcatacattagtaaggtaattctatgcgtt

SEQ ID NO: 415344 - DNA, 30 bp, Artificial Sequence
  Synthetic oligonucleotide
gaggttcttacgttcccgcgaccctgcgtt

SEQ ID NO: 415345 - DNA, 30 bp, Artificial Sequence
  Synthetic oligonucleotide
gatgaccggcggcggtcatgaatttgcgtt

SEQ ID NO: 415346 - DNA, 30 bp, Artificial Sequence
  Synthetic oligonucleotide
tcccctgcaatagcagggacataaatcgtt

SEQ ID NO: 415347 - DNA, 30 bp, Artificial Sequence
  Synthetic oligonucleotide
acccatacatctggccgtatgtaaatcgtt

SEQ ID NO: 415348 - DNA, 30 bp, Artificial Sequence
  Synthetic oligonucleotide
tccccataatatgtgaatagacgaatcgtt

SEQ ID NO: 415349 - DNA, 30 bp, Artificial Sequence
  Synthetic oligonucleotide
ccagcacatcgttcccactgcgtaatcgtt

SEQ ID NO: 415350 - DNA, 31 bp, Artificial Sequence
  Synthetic oligonucleotide
gggggtgatcaacagttcacgcaacatcgtt

SEQ ID NO: 415351 - DNA, 30 bp, Artificial Sequence
  Synthetic oligonucleotide
ccgtcccccctgaggaagccaatcatcgtt

SEQ ID NO: 415352 - DNA, 30 bp, Artificial Sequence
  Synthetic oligonucleotide
ttatattgggcctgagtattgatgatcgtt

SEQ ID NO: 415353 - DNA, 30 bp, Artificial Sequence
  Synthetic oligonucleotide
accgtcggcttatagccctggcatatcgtt

SEQ ID NO: 415354 - DNA, 30 bp, Artificial Sequence
  Synthetic oligonucleotide
gttatcgtaccagacgagagttgtatcgtt

SEQ ID NO: 415355 - DNA, 30 bp, Artificial Sequence
  Synthetic oligonucleotide
aattgtgttgtgtttagaacggttatcgtt

SEQ ID NO: 415356 - DNA, 30 bp, Artificial Sequence
  Synthetic oligonucleotide
cttaggttctaataaaccagtttactcgtt

SEQ ID NO: 415357 - DNA, 30 bp, Artificial Sequence
  Synthetic oligonucleotide
ccagctaaccgcgaaactgtagccctcgtt

SEQ ID NO: 415358 - DNA, 30 bp, Artificial Sequence
  Synthetic oligonucleotide
caatcagtcggcgtaactggttccctcgtt

SEQ ID NO: 415359 - DNA, 30 bp, Artificial Sequence
  Synthetic oligonucleotide
agactatcgcacggaacgcatacgctcgtt

SEQ ID NO: 415360 - DNA, 30 bp, Artificial Sequence
  Synthetic oligonucleotide
tggtacttagggttgagacatgcagtcgtt

SEQ ID NO: 415361 - DNA, 30 bp, Artificial Sequence
  Synthetic oligonucleotide
gctagtccgacaggccatcgtcacgtcgtt

SEQ ID NO: 415362 - DNA, 30 bp, Artificial Sequence
  Synthetic oligonucleotide
tttagattatcacggcatggttaggtcgtt

SEQ ID NO: 415363 - DNA, 30 bp, Artificial Sequence
  Synthetic oligonucleotide
accagatttattgcaaaacctacggtcgtt

SEQ ID NO: 415364 - DNA, 30 bp, Artificial Sequence
  Synthetic oligonucleotide
tactcgaatcaaatcgacttatcggtcgtt

SEQ ID NO: 415365 - DNA, 30 bp, Artificial Sequence
  Synthetic oligonucleotide
acccaatgcttcattgtcattggggtcgtt

SEQ ID NO: 415366 - DNA, 30 bp, Artificial Sequence
  Synthetic oligonucleotide
tctgtgatatgtttggctatgggtgtcgtt

SEQ ID NO: 415367 - DNA, 30 bp, Artificial Sequence
  Synthetic oligonucleotide
tgaaatgacccacggacttatacattcgtt

SEQ ID NO: 415368 - DNA, 30 bp, Artificial Sequence
  Synthetic oligonucleotide
ccaactcagttggaagtaatttcattcgtt

SEQ ID NO: 415369 - DNA, 30 bp, Artificial Sequence
  Synthetic oligonucleotide
gaatcaagttggcacatcgtcgacttcgtt

SEQ ID NO: 415370 - DNA, 30 bp, Artificial Sequence
  Synthetic oligonucleotide
cggtgaagtcagaagcttctggacttcgtt

SEQ ID NO: 415371 - DNA, 30 bp, Artificial Sequence
  Synthetic oligonucleotide
aagcggtggggtattaaatttcagttcgtt

SEQ ID NO: 415372 - DNA, 30 bp, Artificial Sequence
  Synthetic oligonucleotide
acgtatttaaagtgcgcggctaggttcgtt

SEQ ID NO: 415373 - DNA, 30 bp, Artificial Sequence
  Synthetic oligonucleotide
gggctgcttgcaatggctagtgaaaaggtt

SEQ ID NO: 415374 - DNA, 30 bp, Artificial Sequence
  Synthetic oligonucleotide
cattcggtgctattaagtcgataaaaggtt

SEQ ID NO: 415375 - DNA, 30 bp, Artificial Sequence
  Synthetic oligonucleotide
gggcataaagcgctctggtcctgaaaggtt

SEQ ID NO: 415376 - DNA, 30 bp, Artificial Sequence
  Synthetic oligonucleotide
tcaagatgtccctgcgccctcataaaggtt

SEQ ID NO: 415377 - DNA, 30 bp, Artificial Sequence
  Synthetic oligonucleotide
gaactgcaatttcagacgttatctaaggtt

SEQ ID NO: 415378 - DNA, 30 bp, Artificial Sequence
  Synthetic oligonucleotide
aagcacacttcctacgtgcctgaacaggtt

SEQ ID NO: 415379 - DNA, 30 bp, Artificial Sequence
  Synthetic oligonucleotide
atatgcgatcaagtcggtgcctaacaggtt

SEQ ID NO: 415380 - DNA, 30 bp, Artificial Sequence
  Synthetic oligonucleotide
agtgagagcatgggttgctctagacaggtt

SEQ ID NO: 415381 - DNA, 30 bp, Artificial Sequence
  Synthetic oligonucleotide
cagcccggctcgacgtctatggtacaggtt

SEQ ID NO: 415382 - DNA, 30 bp, Artificial Sequence
  Synthetic oligonucleotide
atagacgtccctagaatacacgcgcaggtt

SEQ ID NO: 415383 - DNA, 30 bp, Artificial Sequence
  Synthetic oligonucleotide
ccgcgggatatggacgagaggtttcaggtt

SEQ ID NO: 415384 - DNA, 30 bp, Artificial Sequence
  Synthetic oligonucleotide
atgttctgggtagatcactgttaagaggtt

SEQ ID NO: 415385 - DNA, 30 bp, Artificial Sequence
  Synthetic oligonucleotide
gaggcgttcaatttgttagctggagaggtt

SEQ ID NO: 415386 - DNA, 30 bp, Artificial Sequence
  Synthetic oligonucleotide
aagaatccgtataccgaattcccggaggtt

SEQ ID NO: 415387 - DNA, 30 bp, Artificial Sequence
  Synthetic oligonucleotide
aggtccttttgacattgggatgatgaggtt

SEQ ID NO: 415388 - DNA, 30 bp, Artificial Sequence
  Synthetic oligonucleotide
cgaccacgcctggaccaggccattgaggtt

SEQ ID NO: 415389 - DNA, 30 bp, Artificial Sequence
  Synthetic oligonucleotide
tgaaaccctggaagaaagctactataggtt

SEQ ID NO: 415390 - DNA, 30 bp, Artificial Sequence
  Synthetic oligonucleotide
ccgtgtttcgattgtctcggcgtataggtt

SEQ ID NO: 415391 - DNA, 30 bp, Artificial Sequence
  Synthetic oligonucleotide
gagtaacttgaatagcagacaagctaggtt

SEQ ID NO: 415392 - DNA, 30 bp, Artificial Sequence
  Synthetic oligonucleotide
ggaagatctttccaagttactacgtaggtt

SEQ ID NO: 415393 - DNA, 30 bp, Artificial Sequence
  Synthetic oligonucleotide
acttacgataaagcgttaatcgcttaggtt

SEQ ID NO: 415394 - DNA, 30 bp, Artificial Sequence
  Synthetic oligonucleotide
cttataggaacgaaaaggctctgttaggtt

SEQ ID NO: 415395 - DNA, 30 bp, Artificial Sequence
  Synthetic oligonucleotide
atttaagtgtattgcggggaccaaacggtt

SEQ ID NO: 415396 - DNA, 30 bp, Artificial Sequence
  Synthetic oligonucleotide
caaagagctatccgggtattctcaacggtt

SEQ ID NO: 415397 - DNA, 30 bp, Artificial Sequence
  Synthetic oligonucleotide
tgtcaaaaatcttctacgcgtagaacggtt

SEQ ID NO: 415398 - DNA, 30 bp, Artificial Sequence
  Synthetic oligonucleotide
cataatcgcaacgcagacattataacggtt

SEQ ID NO: 415399 - DNA, 30 bp, Artificial Sequence
  Synthetic oligonucleotide
ttgagatgtaaagctgaaccattaacggtt

SEQ ID NO: 415400 - DNA, 30 bp, Artificial Sequence
  Synthetic oligonucleotide
ttcggtcctagtatcattggccacacggtt

SEQ ID NO: 415401 - DNA, 30 bp, Artificial Sequence
  Synthetic oligonucleotide
ctactgggcgccggtcggaccgccacggtt

SEQ ID NO: 415402 - DNA, 30 bp, Artificial Sequence
  Synthetic oligonucleotide
gcctaattggctactcgaaaaccgacggtt

SEQ ID NO: 415403 - DNA, 30 bp, Artificial Sequence
  Synthetic oligonucleotide
agcaaattccgtttatgggggtaaccggtt

SEQ ID NO: 415404 - DNA, 30 bp, Artificial Sequence
  Synthetic oligonucleotide
gccgcaactgtgtcacatcgctgaccggtt

SEQ ID NO: 415405 - DNA, 30 bp, Artificial Sequence
  Synthetic oligonucleotide
tcaaatgtgctcgcaccggagataccggtt

SEQ ID NO: 415406 - DNA, 30 bp, Artificial Sequence
  Synthetic oligonucleotide
ccgtgcaaaacgggcataagattaccggtt

SEQ ID NO: 415407 - DNA, 30 bp, Artificial Sequence
  Synthetic oligonucleotide
ccacgtgagagaagtatggcagacccggtt

SEQ ID NO: 415408 - DNA, 30 bp, Artificial Sequence
  Synthetic oligonucleotide
gtgtcggtaggggcaccgcctaccccggtt

SEQ ID NO: 415409 - DNA, 30 bp, Artificial Sequence
  Synthetic oligonucleotide
gaacaggggagtacaaaccgatatccggtt

SEQ ID NO: 415410 - DNA, 30 bp, Artificial Sequence
  Synthetic oligonucleotide
gtgtgacttgcgatagcttacaaagcggtt

SEQ ID NO: 415411 - DNA, 30 bp, Artificial Sequence
  Synthetic oligonucleotide
tttactggattaagcggccagaaagcggtt

SEQ ID NO: 415412 - DNA, 30 bp, Artificial Sequence
  Synthetic oligonucleotide
tttagagacgtgtgatacgggatagcggtt

SEQ ID NO: 415413 - DNA, 30 bp, Artificial Sequence
  Synthetic oligonucleotide
agatgacgtgtatgattgacggacgcggtt

SEQ ID NO: 415414 - DNA, 30 bp, Artificial Sequence
  Synthetic oligonucleotide
cgtcctggtgcgcatttttctggcgcggtt

SEQ ID NO: 415415 - DNA, 30 bp, Artificial Sequence
  Synthetic oligonucleotide
ttagactgaggtactatgtctacggcggtt

SEQ ID NO: 415416 - DNA, 30 bp, Artificial Sequence
  Synthetic oligonucleotide
ataaaggactttggaatgtaaggggcggtt

SEQ ID NO: 415417 - DNA, 30 bp, Artificial Sequence
  Synthetic oligonucleotide
ggattgcggtatttatctgcgcatgcggtt

SEQ ID NO: 415418 - DNA, 30 bp, Artificial Sequence
  Synthetic oligonucleotide
gttctgccggggaggaccaattaatcggtt

SEQ ID NO: 415419 - DNA, 30 bp, Artificial Sequence
  Synthetic oligonucleotide
agtaacagcaatggtagtcgattctcggtt

SEQ ID NO: 415420 - DNA, 30 bp, Artificial Sequence
  Synthetic oligonucleotide
tttgcgtcgacgacacagggggagtcggtt

SEQ ID NO: 415421 - DNA, 30 bp, Artificial Sequence
  Synthetic oligonucleotide
tcttcacgcgagagcgtgcaaagaagggtt

SEQ ID NO: 415422 - DNA, 30 bp, Artificial Sequence
  Synthetic oligonucleotide
acgatgtagcgtttgtaaccgggaagggtt

SEQ ID NO: 415423 - DNA, 30 bp, Artificial Sequence
  Synthetic oligonucleotide
gggagccccgcagaaggagggcccagggtt

SEQ ID NO: 415424 - DNA, 30 bp, Artificial Sequence
  Synthetic oligonucleotide
ggagaggtaaggggttcaaattagagggtt

SEQ ID NO: 415425 - DNA, 30 bp, Artificial Sequence
  Synthetic oligonucleotide
tagcgtagcaacgggctcttttcgagggtt

SEQ ID NO: 415426 - DNA, 30 bp, Artificial Sequence
  Synthetic oligonucleotide
ctggtcccccaagtccgataatctagggtt

SEQ ID NO: 415427 - DNA, 30 bp, Artificial Sequence
  Synthetic oligonucleotide
ctcatcccccatcacaaggtcagtagggtt

SEQ ID NO: 415428 - DNA, 30 bp, Artificial Sequence
  Synthetic oligonucleotide
tggcagcaatgaggtcggagccggcgggtt

SEQ ID NO: 415429 - DNA, 30 bp, Artificial Sequence
  Synthetic oligonucleotide
aactaacagtttaggctgatggtgcgggtt

SEQ ID NO: 415430 - DNA, 30 bp, Artificial Sequence
  Synthetic oligonucleotide
actcagggcctgcgtcgtgcggctcgggtt

SEQ ID NO: 415431 - DNA, 30 bp, Artificial Sequence
  Synthetic oligonucleotide
cttaaagcttagggcttaggtcgtcgggtt

SEQ ID NO: 415432 - DNA, 30 bp, Artificial Sequence
  Synthetic oligonucleotide
catatcacgaagcgcgccgaggttcgggtt

SEQ ID NO: 415433 - DNA, 30 bp, Artificial Sequence
  Synthetic oligonucleotide
aggcccttaagtgtgcggtactttcgggtt

SEQ ID NO: 415434 - DNA, 30 bp, Artificial Sequence
  Synthetic oligonucleotide
actggtgtactccgtcatccaaaaggggtt

SEQ ID NO: 415435 - DNA, 30 bp, Artificial Sequence
  Synthetic oligonucleotide
ctattgctcaagcccggattttaaggggtt

SEQ ID NO: 415436 - DNA, 30 bp, Artificial Sequence
  Synthetic oligonucleotide
gtggactacgcagtaaagcgccacggggtt

SEQ ID NO: 415437 - DNA, 30 bp, Artificial Sequence
  Synthetic oligonucleotide
agttcgataaagcaaattcacgacggggtt

SEQ ID NO: 415438 - DNA, 30 bp, Artificial Sequence
  Synthetic oligonucleotide
cggtgtagatactcgaagagtcccggggtt

SEQ ID NO: 415439 - DNA, 30 bp, Artificial Sequence
  Synthetic oligonucleotide
aagtgtagaatggagcaattaccgggggtt

SEQ ID NO: 415440 - DNA, 30 bp, Artificial Sequence
  Synthetic oligonucleotide
actcaagccccataggaccgtctgggggtt

SEQ ID NO: 415441 - DNA, 30 bp, Artificial Sequence
  Synthetic oligonucleotide
acgccagtgtggcctgggtgtgtgggggtt

SEQ ID NO: 415442 - DNA, 29 bp, Artificial Sequence
  Synthetic oligonucleotide
ggacttgtttataggtcaagtatggggtt

SEQ ID NO: 415443 - DNA, 30 bp, Artificial Sequence
  Synthetic oligonucleotide
gtttgataatatcacttatcgagtggggtt

SEQ ID NO: 415444 - DNA, 30 bp, Artificial Sequence
  Synthetic oligonucleotide
gtaggttgaagacaagtagtctttggggtt

SEQ ID NO: 415445 - DNA, 30 bp, Artificial Sequence
  Synthetic oligonucleotide
ctgggctggtggttaccgtacaaatgggtt

SEQ ID NO: 415446 - DNA, 30 bp, Artificial Sequence
  Synthetic oligonucleotide
tgcgaagttagaccactcctgagatgggtt

SEQ ID NO: 415447 - DNA, 30 bp, Artificial Sequence
  Synthetic oligonucleotide
ttagtctactgggacacgacgggatgggtt

SEQ ID NO: 415448 - DNA, 30 bp, Artificial Sequence
  Synthetic oligonucleotide
ttggttgtcattatgaagtcttgatgggtt

SEQ ID NO: 415449 - DNA, 30 bp, Artificial Sequence
  Synthetic oligonucleotide
ggcatcataatactcgcataaatatgggtt

SEQ ID NO: 415450 - DNA, 30 bp, Artificial Sequence
  Synthetic oligonucleotide
atttacggaatactagtgggcgtctgggtt

SEQ ID NO: 415451 - DNA, 30 bp, Artificial Sequence
  Synthetic oligonucleotide
ccacatacgctgcggaacacattctgggtt

SEQ ID NO: 415452 - DNA, 30 bp, Artificial Sequence
  Synthetic oligonucleotide
acggcttgcctgccgttgtgagggtgggtt

SEQ ID NO: 415453 - DNA, 30 bp, Artificial Sequence
  Synthetic oligonucleotide
agacccgcgaactatgatcccacttgggtt

SEQ ID NO: 415454 - DNA, 30 bp, Artificial Sequence
  Synthetic oligonucleotide
aattcgcacgggtcgtgtctatcttgggtt

SEQ ID NO: 415455 - DNA, 30 bp, Artificial Sequence
  Synthetic oligonucleotide
cttgtaggaccagctgtacgcctttgggtt

SEQ ID NO: 415456 - DNA, 30 bp, Artificial Sequence
  Synthetic oligonucleotide
agcgatttatttatgcactgttgaatggtt

SEQ ID NO: 415457 - DNA, 30 bp, Artificial Sequence
  Synthetic oligonucleotide
cgacgtattctcaccctggatctaatggtt

SEQ ID NO: 415458 - DNA, 30 bp, Artificial Sequence
  Synthetic oligonucleotide
gttttcagtagcacgagcttcttaatggtt

SEQ ID NO: 415459 - DNA, 30 bp, Artificial Sequence
  Synthetic oligonucleotide
taaatcttataagtaaccttaaacatggtt

SEQ ID NO: 415460 - DNA, 30 bp, Artificial Sequence
  Synthetic oligonucleotide
tacttttagtgaacttatataacgatggtt

SEQ ID NO: 415461 - DNA, 30 bp, Artificial Sequence
  Synthetic oligonucleotide
ctccgagttcttgacactaggcctatggtt

SEQ ID NO: 415462 - DNA, 30 bp, Artificial Sequence
  Synthetic oligonucleotide
ggccgcgtattaagggtagaggctatggtt

SEQ ID NO: 415463 - DNA, 30 bp, Artificial Sequence
  Synthetic oligonucleotide
ggaatctgccgcctcgaaagtacactggtt

SEQ ID NO: 415464 - DNA, 30 bp, Artificial Sequence
  Synthetic oligonucleotide
ttggtttagtcagctaagagctccctggtt

SEQ ID NO: 415465 - DNA, 30 bp, Artificial Sequence
  Synthetic oligonucleotide
gccagttaatccatacgatcaggtctggtt

SEQ ID NO: 415466 - DNA, 30 bp, Artificial Sequence
  Synthetic oligonucleotide
acacggtagagaggttgcaaggaagtggtt

SEQ ID NO: 415467 - DNA, 30 bp, Artificial Sequence
  Synthetic oligonucleotide
gagagacacattgtaggcatgccagtggtt

SEQ ID NO: 415468 - DNA, 30 bp, Artificial Sequence
  Synthetic oligonucleotide
tactaattttagcttatgtttatagtggtt

SEQ ID NO: 415469 - DNA, 30 bp, Artificial Sequence
  Synthetic oligonucleotide
agacccctggtcgctggtcttcgcgtggtt

SEQ ID NO: 415470 - DNA, 30 bp, Artificial Sequence
  Synthetic oligonucleotide
ggggtagaccataagaccgtcagggtggtt

SEQ ID NO: 415471 - DNA, 30 bp, Artificial Sequence
  Synthetic oligonucleotide
cggctgggcggcgaggtgcagttggtggtt

SEQ ID NO: 415472 - DNA, 30 bp, Artificial Sequence
  Synthetic oligonucleotide
tacgcaccatgcaattggttctatgtggtt

SEQ ID NO: 415473 - DNA, 30 bp, Artificial Sequence
  Synthetic oligonucleotide
aggtattgggacgggtacaccgtattggtt

SEQ ID NO: 415474 - DNA, 30 bp, Artificial Sequence
  Synthetic oligonucleotide
cactatctgcaggtgtatacgcatttggtt

SEQ ID NO: 415475 - DNA, 30 bp, Artificial Sequence
  Synthetic oligonucleotide
acccgagagatatggcaggtgcgtttggtt

SEQ ID NO: 415476 - DNA, 30 bp, Artificial Sequence
  Synthetic oligonucleotide
ggttcctaatgcagaaagactgttttggtt

SEQ ID NO: 415477 - DNA, 30 bp, Artificial Sequence
  Synthetic oligonucleotide
tacacttcttcgatgattggcaaaaatgtt

SEQ ID NO: 415478 - DNA, 30 bp, Artificial Sequence
  Synthetic oligonucleotide
ttttaggcacgacgccttagaccaaatgtt

SEQ ID NO: 415479 - DNA, 30 bp, Artificial Sequence
  Synthetic oligonucleotide
cggagaaatattcttactgaatgaaatgtt

SEQ ID NO: 415480 - DNA, 31 bp, Artificial Sequence
  Synthetic oligonucleotide
aggtcttggtatcgatgtgtcggtaaatgtt

SEQ ID NO: 415481 - DNA, 30 bp, Artificial Sequence
  Synthetic oligonucleotide
gcgggcgaggcgacagccttacacaatgtt

SEQ ID NO: 415482 - DNA, 30 bp, Artificial Sequence
  Synthetic oligonucleotide
gacccaacgtagagcgacgtagacaatgtt

SEQ ID NO: 415483 - DNA, 30 bp, Artificial Sequence
  Synthetic oligonucleotide
gcatctatccggaacttcgcatccaatgtt

SEQ ID NO: 415484 - DNA, 30 bp, Artificial Sequence
  Synthetic oligonucleotide
ttgtcggaaaatatatgcgtatccaatgtt

SEQ ID NO: 415485 - DNA, 30 bp, Artificial Sequence
  Synthetic oligonucleotide
cactggtctgcagctgtcgtatcgaatgtt

SEQ ID NO: 415486 - DNA, 30 bp, Artificial Sequence
  Synthetic oligonucleotide
cagacatgaatcttgaaaaccctgaatgtt

SEQ ID NO: 415487 - DNA, 30 bp, Artificial Sequence
  Synthetic oligonucleotide
ctcatgagcggtaaagatgataataatgtt

SEQ ID NO: 415488 - DNA, 30 bp, Artificial Sequence
  Synthetic oligonucleotide
tgtatttgagggattagcctacataatgtt

SEQ ID NO: 415489 - DNA, 30 bp, Artificial Sequence
  Synthetic oligonucleotide
cagagtttcgtatacttcagagataatgtt

SEQ ID NO: 415490 - DNA, 30 bp, Artificial Sequence
  Synthetic oligonucleotide
ttaccggttcaggtagagaactgtaatgtt

SEQ ID NO: 415491 - DNA, 30 bp, Artificial Sequence
  Synthetic oligonucleotide
ccgtgatactacggttgaccacaacatgtt

SEQ ID NO: 415492 - DNA, 30 bp, Artificial Sequence
  Synthetic oligonucleotide
tgatttaaccggacaatcgggacacatgtt

SEQ ID NO: 415493 - DNA, 30 bp, Artificial Sequence
  Synthetic oligonucleotide
caagttcgcggtagctttactcgccatgtt

SEQ ID NO: 415494 - DNA, 30 bp, Artificial Sequence
  Synthetic oligonucleotide
gtaaacgcgcgggcttagcctcggcatgtt

SEQ ID NO: 415495 - DNA, 30 bp, Artificial Sequence
  Synthetic oligonucleotide
gcaacgctgacgctccggcgctggcatgtt

SEQ ID NO: 415496 - DNA, 30 bp, Artificial Sequence
  Synthetic oligonucleotide
aatgactttaacgccgaaccgaatcatgtt

SEQ ID NO: 415497 - DNA, 30 bp, Artificial Sequence
  Synthetic oligonucleotide
tatgtgcgatattggtgaacacaagatgtt

SEQ ID NO: 415498 - DNA, 30 bp, Artificial Sequence
  Synthetic oligonucleotide
cggtggtgcttccatgtcacagcagatgtt

SEQ ID NO: 415499 - DNA, 30 bp, Artificial Sequence
  Synthetic oligonucleotide
ttccgattaaggtctcaccaaaacgatgtt

SEQ ID NO: 415500 - DNA, 30 bp, Artificial Sequence
  Synthetic oligonucleotide
cgcggcaatgtaaagataggatgtgatgtt

SEQ ID NO: 415501 - DNA, 30 bp, Artificial Sequence
  Synthetic oligonucleotide
agcaggggcatctggtccaaaattgatgtt

SEQ ID NO: 415502 - DNA, 30 bp, Artificial Sequence
  Synthetic oligonucleotide
gagatcatgtctaagagcccttttgatgtt

SEQ ID NO: 415503 - DNA, 30 bp, Artificial Sequence
  Synthetic oligonucleotide
gacgcgtatacccacgttgacgaatatgtt

SEQ ID NO: 415504 - DNA, 30 bp, Artificial Sequence
  Synthetic oligonucleotide
cattctcaggatgccatccccgcatatgtt

SEQ ID NO: 415505 - DNA, 30 bp, Artificial Sequence
  Synthetic oligonucleotide
cccaagctattttaaactcggtcctatgtt

SEQ ID NO: 415506 - DNA, 30 bp, Artificial Sequence
  Synthetic oligonucleotide
ctgataggctgctgcctctcagattatgtt

SEQ ID NO: 415507 - DNA, 30 bp, Artificial Sequence
  Synthetic oligonucleotide
ccatcacgggacggaaagaacttaactgtt

SEQ ID NO: 415508 - DNA, 30 bp, Artificial Sequence
  Synthetic oligonucleotide
aacagcatgactcataacatgaacactgtt

SEQ ID NO: 415509 - DNA, 30 bp, Artificial Sequence
  Synthetic oligonucleotide
cagcaataagccaaatattataacactgtt

SEQ ID NO: 415510 - DNA, 30 bp, Artificial Sequence
  Synthetic oligonucleotide
gctaagatattattcggggtttacactgtt

SEQ ID NO: 415511 - DNA, 30 bp, Artificial Sequence
  Synthetic oligonucleotide
ggttttactttagtggcatggagcactgtt

SEQ ID NO: 415512 - DNA, 30 bp, Artificial Sequence
  Synthetic oligonucleotide
gatacaaactgttagactgatcatactgtt

SEQ ID NO: 415513 - DNA, 31 bp, Artificial Sequence
  Synthetic oligonucleotide
ttctgaaataagggccctcagtaaacctgtt

SEQ ID NO: 415514 - DNA, 30 bp, Artificial Sequence
  Synthetic oligonucleotide
gtcttccctataattaaacacgaacctgtt

SEQ ID NO: 415515 - DNA, 30 bp, Artificial Sequence
  Synthetic oligonucleotide
gtcttaaggcaatctaaaggctcacctgtt

SEQ ID NO: 415516 - DNA, 30 bp, Artificial Sequence
  Synthetic oligonucleotide
cctatgatgtaatcggtgccccgacctgtt

SEQ ID NO: 415517 - DNA, 30 bp, Artificial Sequence
  Synthetic oligonucleotide
cacgttgccacgttgtgataatagcctgtt

SEQ ID NO: 415518 - DNA, 30 bp, Artificial Sequence
  Synthetic oligonucleotide
accagcagtatagctaccgacatggctgtt

SEQ ID NO: 415519 - DNA, 30 bp, Artificial Sequence
  Synthetic oligonucleotide
tctatttcgcgggcttgtggcatggctgtt

SEQ ID NO: 415520 - DNA, 30 bp, Artificial Sequence
  Synthetic oligonucleotide
cattacctcgggctcagccaacgctctgtt

SEQ ID NO: 415521 - DNA, 30 bp, Artificial Sequence
  Synthetic oligonucleotide
aatccaatgagtgaaacatatatctctgtt

SEQ ID NO: 415522 - DNA, 30 bp, Artificial Sequence
  Synthetic oligonucleotide
acattatacaattttgatcacgagtctgtt

SEQ ID NO: 415523 - DNA, 30 bp, Artificial Sequence
  Synthetic oligonucleotide
cgtgcgtgcttcctcgtactaacgtctgtt

SEQ ID NO: 415524 - DNA, 30 bp, Artificial Sequence
  Synthetic oligonucleotide
atgcgtttccgtacttcaggcctgtctgtt

SEQ ID NO: 415525 - DNA, 30 bp, Artificial Sequence
  Synthetic oligonucleotide
tcgatatccgggcacagaagcaattctgtt

SEQ ID NO: 415526 - DNA, 30 bp, Artificial Sequence
  Synthetic oligonucleotide
cttgttcatagagctgacacccattctgtt

SEQ ID NO: 415527 - DNA, 30 bp, Artificial Sequence
  Synthetic oligonucleotide
agtattgcattgaagggggtccgttctgtt

SEQ ID NO: 415528 - DNA, 30 bp, Artificial Sequence
  Synthetic oligonucleotide
atatggcgctaccccgcccgacgaagtgtt

SEQ ID NO: 415529 - DNA, 30 bp, Artificial Sequence
  Synthetic oligonucleotide
aagttaaacactcaaataggattaagtgtt

SEQ ID NO: 415530 - DNA, 30 bp, Artificial Sequence
  Synthetic oligonucleotide
ctcaatgggccaggtatggtacccagtgtt

SEQ ID NO: 415531 - DNA, 30 bp, Artificial Sequence
  Synthetic oligonucleotide
aacagcccggttgtaagagtattcagtgtt

SEQ ID NO: 415532 - DNA, 30 bp, Artificial Sequence
  Synthetic oligonucleotide
cagctggttgaaagctctcttcagagtgtt

SEQ ID NO: 415533 - DNA, 30 bp, Artificial Sequence
  Synthetic oligonucleotide
tagctaacttctctctgttgtactagtgtt

SEQ ID NO: 415534 - DNA, 29 bp, Artificial Sequence
  Synthetic oligonucleotide
ggaagacggagaaaacaagtggacgtgtt

SEQ ID NO: 415535 - DNA, 30 bp, Artificial Sequence
  Synthetic oligonucleotide
gttggggcgttataaacttagacccgtgtt

SEQ ID NO: 415536 - DNA, 30 bp, Artificial Sequence
  Synthetic oligonucleotide
cgaacgccgatcagaaagtcgcgccgtgtt

SEQ ID NO: 415537 - DNA, 30 bp, Artificial Sequence
  Synthetic oligonucleotide
accgaggtcgttttgcttaggttccgtgtt

SEQ ID NO: 415538 - DNA, 30 bp, Artificial Sequence
  Synthetic oligonucleotide
ttgcacttaaccgcacaactaatgcgtgtt

SEQ ID NO: 415539 - DNA, 30 bp, Artificial Sequence
  Synthetic oligonucleotide
gattgggataggctgtccatcaatcgtgtt

SEQ ID NO: 415540 - DNA, 30 bp, Artificial Sequence
  Synthetic oligonucleotide
caggtataaactgtctttatacatcgtgtt

SEQ ID NO: 415541 - DNA, 30 bp, Artificial Sequence
  Synthetic oligonucleotide
gaaggggatttaacacaggttactcgtgtt

SEQ ID NO: 415542 - DNA, 30 bp, Artificial Sequence
  Synthetic oligonucleotide
tgttgtgcgtcgcagtgcagagttcgtgtt

SEQ ID NO: 415543 - DNA, 30 bp, Artificial Sequence
  Synthetic oligonucleotide
gccgggtctccctcaaatcccagaggtgtt

SEQ ID NO: 415544 - DNA, 30 bp, Artificial Sequence
  Synthetic oligonucleotide
ctaagtgaccattttccgggtcgaggtgtt

SEQ ID NO: 415545 - DNA, 30 bp, Artificial Sequence
  Synthetic oligonucleotide
ctgtaaagaataattcaacgggacggtgtt

SEQ ID NO: 415546 - DNA, 30 bp, Artificial Sequence
  Synthetic oligonucleotide
aatcgttcgccaactacttgcacgggtgtt

SEQ ID NO: 415547 - DNA, 30 bp, Artificial Sequence
  Synthetic oligonucleotide
ccggcgaagaactatttaattcggggtgtt

SEQ ID NO: 415548 - DNA, 30 bp, Artificial Sequence
  Synthetic oligonucleotide
attggcaagcggtgcaaggcagggggtgtt

SEQ ID NO: 415549 - DNA, 30 bp, Artificial Sequence
  Synthetic oligonucleotide
tacgcgcgacgttgacgttatgtgggtgtt

SEQ ID NO: 415550 - DNA, 30 bp, Artificial Sequence
  Synthetic oligonucleotide
tatatccatataagccatcagaatggtgtt

SEQ ID NO: 415551 - DNA, 30 bp, Artificial Sequence
  Synthetic oligonucleotide
ttagtcctattagctcacagatctggtgtt

SEQ ID NO: 415552 - DNA, 30 bp, Artificial Sequence
  Synthetic oligonucleotide
atgcgtatgtcaggggtcctatttggtgtt

SEQ ID NO: 415553 - DNA, 30 bp, Artificial Sequence
  Synthetic oligonucleotide
gaatggggaagtaaggtacggtcatgtgtt

SEQ ID NO: 415554 - DNA, 30 bp, Artificial Sequence
  Synthetic oligonucleotide
ctctgtattgttctttgctattgatgtgtt

SEQ ID NO: 415555 - DNA, 30 bp, Artificial Sequence
  Synthetic oligonucleotide
cctggttcgcgcaacgatcgccagtgtgtt

SEQ ID NO: 415556 - DNA, 29 bp, Artificial Sequence
  Synthetic oligonucleotide
atatccattggggagggtttcagtgtgtt

SEQ ID NO: 415557 - DNA, 27 bp, Artificial Sequence
  Synthetic oligonucleotide
gcgctaacacattgagcttagtgtgtt

SEQ ID NO: 415558 - DNA, 30 bp, Artificial Sequence
  Synthetic oligonucleotide
atgagggttttcgctcgccagtcgtgtgtt

SEQ ID NO: 415559 - DNA, 30 bp, Artificial Sequence
  Synthetic oligonucleotide
ttatgcgatggtagtgcaggaatgtgtgtt

SEQ ID NO: 415560 - DNA, 30 bp, Artificial Sequence
  Synthetic oligonucleotide
tggaggtatttgccgtttgcgctgtgtgtt

SEQ ID NO: 415561 - DNA, 30 bp, Artificial Sequence
  Synthetic oligonucleotide
ttagcttctgatgcaagtattccttgtgtt

SEQ ID NO: 415562 - DNA, 30 bp, Artificial Sequence
  Synthetic oligonucleotide
gttttgaagtttttgcactttgcttgtgtt

SEQ ID NO: 415563 - DNA, 30 bp, Artificial Sequence
  Synthetic oligonucleotide
cgctaaacccaacagagcgactcttgtgtt

SEQ ID NO: 415564 - DNA, 30 bp, Artificial Sequence
  Synthetic oligonucleotide
gggcactcgcgggcctttgtgaaaattgtt

SEQ ID NO: 415565 - DNA, 30 bp, Artificial Sequence
  Synthetic oligonucleotide
accggttagggttatgatcgccccattgtt

SEQ ID NO: 415566 - DNA, 30 bp, Artificial Sequence
  Synthetic oligonucleotide
agtttgctattgactgcggaatgcattgtt

SEQ ID NO: 415567 - DNA, 30 bp, Artificial Sequence
  Synthetic oligonucleotide
ttatcgtacttgactttcaatcatattgtt

SEQ ID NO: 415568 - DNA, 30 bp, Artificial Sequence
  Synthetic oligonucleotide
ctttactcaccataccgctccggtattgtt

SEQ ID NO: 415569 - DNA, 30 bp, Artificial Sequence
  Synthetic oligonucleotide
atcgtgttacgcaggcgagcgtgtattgtt

SEQ ID NO: 415570 - DNA, 30 bp, Artificial Sequence
  Synthetic oligonucleotide
catgacggccaacagatcttgagacttgtt

SEQ ID NO: 415571 - DNA, 30 bp, Artificial Sequence
  Synthetic oligonucleotide
tcaatacgtttcggactcaatctacttgtt

SEQ ID NO: 415572 - DNA, 30 bp, Artificial Sequence
  Synthetic oligonucleotide
atgtttatgcggcacgcgccgttccttgtt

SEQ ID NO: 415573 - DNA, 30 bp, Artificial Sequence
  Synthetic oligonucleotide
actgcgcgagatgctcacggaaatcttgtt

SEQ ID NO: 415574 - DNA, 30 bp, Artificial Sequence
  Synthetic oligonucleotide
atgcgattgacgtaatggtggggtcttgtt

SEQ ID NO: 415575 - DNA, 30 bp, Artificial Sequence
  Synthetic oligonucleotide
cccgccctagcctggactgcctgagttgtt

SEQ ID NO: 415576 - DNA, 30 bp, Artificial Sequence
  Synthetic oligonucleotide
ggacgctttgtggttcataaattagttgtt

SEQ ID NO: 415577 - DNA, 30 bp, Artificial Sequence
  Synthetic oligonucleotide
cgtctgggtgtgggtgtcaggaccgttgtt

SEQ ID NO: 415578 - DNA, 30 bp, Artificial Sequence
  Synthetic oligonucleotide
tgcctatttgcctcggatccgcgcgttgtt

SEQ ID NO: 415579 - DNA, 30 bp, Artificial Sequence
  Synthetic oligonucleotide
tttggtcttagtgggtcgtgtcaggttgtt

SEQ ID NO: 415580 - DNA, 30 bp, Artificial Sequence
  Synthetic oligonucleotide
aatagcgttgccagattgcagacggttgtt

SEQ ID NO: 415581 - DNA, 30 bp, Artificial Sequence
  Synthetic oligonucleotide
cagtaggtccactacgtttgtgtggttgtt

SEQ ID NO: 415582 - DNA, 30 bp, Artificial Sequence
  Synthetic oligonucleotide
gagtagactcacggtaggaccgctgttgtt

SEQ ID NO: 415583 - DNA, 30 bp, Artificial Sequence
  Synthetic oligonucleotide
aataaaggatactagctagccggtgttgtt

SEQ ID NO: 415584 - DNA, 30 bp, Artificial Sequence
  Synthetic oligonucleotide
cgtgttttatagttaatgctagttgttgtt

SEQ ID NO: 415585 - DNA, 30 bp, Artificial Sequence
  Synthetic oligonucleotide
atggatttagactgcaagtaacgttttgtt

SEQ ID NO: 415586 - DNA, 30 bp, Artificial Sequence
  Synthetic oligonucleotide
gttaatacatcaatattctaagtttttgtt

SEQ ID NO: 415587 - DNA, 30 bp, Artificial Sequence
  Synthetic oligonucleotide
tgaccacctctcaacaaaccgttttttgtt

SEQ ID NO: 415588 - DNA, 30 bp, Artificial Sequence
  Synthetic oligonucleotide
aatagtctcttaatagtccgcaaaaaattt

SEQ ID NO: 415589 - DNA, 30 bp, Artificial Sequence
  Synthetic oligonucleotide
ctttcgagttcttggcaacatgacaaattt

SEQ ID NO: 415590 - DNA, 30 bp, Artificial Sequence
  Synthetic oligonucleotide
aaaatgatgacgcgtctcaacatcaaattt

SEQ ID NO: 415591 - DNA, 30 bp, Artificial Sequence
  Synthetic oligonucleotide
ggtgacccagctccagccaaggggaaattt

SEQ ID NO: 415592 - DNA, 30 bp, Artificial Sequence
  Synthetic oligonucleotide
tttccgtaaagccgaacggatgataaattt

SEQ ID NO: 415593 - DNA, 30 bp, Artificial Sequence
  Synthetic oligonucleotide
gagtcacttagggaatagacagctaaattt

SEQ ID NO: 415594 - DNA, 30 bp, Artificial Sequence
  Synthetic oligonucleotide
gttgatgttatagttatgagcagtaaattt

SEQ ID NO: 415595 - DNA, 30 bp, Artificial Sequence
  Synthetic oligonucleotide
ctacggtgaccgcaggcaatcgttaaattt

SEQ ID NO: 415596 - DNA, 30 bp, Artificial Sequence
  Synthetic oligonucleotide
tactgtaggatgggaaaatttgttaaattt

SEQ ID NO: 415597 - DNA, 30 bp, Artificial Sequence
  Synthetic oligonucleotide
atttctttgccacaatccatcggccaattt

SEQ ID NO: 415598 - DNA, 30 bp, Artificial Sequence
  Synthetic oligonucleotide
cttcgtaatgggcaatagtccccgcaattt

SEQ ID NO: 415599 - DNA, 30 bp, Artificial Sequence
  Synthetic oligonucleotide
gttgtattcttcatatttcgggcgcaattt

SEQ ID NO: 415600 - DNA, 30 bp, Artificial Sequence
  Synthetic oligonucleotide
ggaaataatataaaatacggctggcaattt

SEQ ID NO: 415601 - DNA, 30 bp, Artificial Sequence
  Synthetic oligonucleotide
gtgattcatttgcagaaagtaactcaattt

SEQ ID NO: 415602 - DNA, 30 bp, Artificial Sequence
  Synthetic oligonucleotide
aaggcatgtggcaatattgttactcaattt

SEQ ID NO: 415603 - DNA, 30 bp, Artificial Sequence
  Synthetic oligonucleotide
tcacctatcccttagctgagcagtcaattt

SEQ ID NO: 415604 - DNA, 30 bp, Artificial Sequence
  Synthetic oligonucleotide
gctgtttagtgtcccctcgatcttcaattt

SEQ ID NO: 415605 - DNA, 30 bp, Artificial Sequence
  Synthetic oligonucleotide
gcccttgcccactcattttggtaagaattt

SEQ ID NO: 415606 - DNA, 30 bp, Artificial Sequence
  Synthetic oligonucleotide
cgtttgccacgcgggaggttatacgaattt

SEQ ID NO: 415607 - DNA, 30 bp, Artificial Sequence
  Synthetic oligonucleotide
atacgcctagctcgtgactcttccgaattt

SEQ ID NO: 415608 - DNA, 30 bp, Artificial Sequence
  Synthetic oligonucleotide
gtagcccaatgtttgacgcggagcgaattt

SEQ ID NO: 415609 - DNA, 30 bp, Artificial Sequence
  Synthetic oligonucleotide
ctgcgactgacctggcttgctgtcgaattt

SEQ ID NO: 415610 - DNA, 30 bp, Artificial Sequence
  Synthetic oligonucleotide
aatttattcagctgaacaagtgtcgaattt

SEQ ID NO: 415611 - DNA, 30 bp, Artificial Sequence
  Synthetic oligonucleotide
taggctcggaaacagactgctatggaattt

SEQ ID NO: 415612 - DNA, 30 bp, Artificial Sequence
  Synthetic oligonucleotide
aattgctcatcagaacatcgagctgaattt

SEQ ID NO: 415613 - DNA, 30 bp, Artificial Sequence
  Synthetic oligonucleotide
ggccgacgcaccaacgagcctattgaattt

SEQ ID NO: 415614 - DNA, 30 bp, Artificial Sequence
  Synthetic oligonucleotide
tcaaaggcgtacgacagcagtgcataattt

SEQ ID NO: 415615 - DNA, 30 bp, Artificial Sequence
  Synthetic oligonucleotide
accccaaatagattgccccggtgataattt

SEQ ID NO: 415616 - DNA, 30 bp, Artificial Sequence
  Synthetic oligonucleotide
agataaagaccctggcgtccattataattt

SEQ ID NO: 415617 - DNA, 30 bp, Artificial Sequence
  Synthetic oligonucleotide
ccaggctcatgtcattaagcgttataattt

SEQ ID NO: 415618 - DNA, 30 bp, Artificial Sequence
  Synthetic oligonucleotide
taggaggctttggtctaggcggactaattt

SEQ ID NO: 415619 - DNA, 30 bp, Artificial Sequence
  Synthetic oligonucleotide
agcttgtttaggatacaaaatgactaattt

SEQ ID NO: 415620 - DNA, 30 bp, Artificial Sequence
  Synthetic oligonucleotide
cggtaggtatctgactaatgtccctaattt

SEQ ID NO: 415621 - DNA, 30 bp, Artificial Sequence
  Synthetic oligonucleotide
gcaggaaaacggctcactggaagctaattt

SEQ ID NO: 415622 - DNA, 30 bp, Artificial Sequence
  Synthetic oligonucleotide
aaggatgacctcatcactaccttctaattt

SEQ ID NO: 415623 - DNA, 30 bp, Artificial Sequence
  Synthetic oligonucleotide
gttcatggccctctcaagcgatagtaattt

SEQ ID NO: 415624 - DNA, 30 bp, Artificial Sequence
  Synthetic oligonucleotide
aacgcataaagtgattgtatcaggtaattt

SEQ ID NO: 415625 - DNA, 30 bp, Artificial Sequence
  Synthetic oligonucleotide
taaaacaagttcggccctgtgccttaattt

SEQ ID NO: 415626 - DNA, 30 bp, Artificial Sequence
  Synthetic oligonucleotide
gaacataatgatttgaaagtcggttaattt

SEQ ID NO: 415627 - DNA, 30 bp, Artificial Sequence
  Synthetic oligonucleotide
tttgattaacatcgttcggcgttttaattt

SEQ ID NO: 415628 - DNA, 30 bp, Artificial Sequence
  Synthetic oligonucleotide
ttgtcccccagaagtacattaataacattt

SEQ ID NO: 415629 - DNA, 30 bp, Artificial Sequence
  Synthetic oligonucleotide
tcataaagaagaagcttacgggacacattt

SEQ ID NO: 415630 - DNA, 30 bp, Artificial Sequence
  Synthetic oligonucleotide
tgagctgcgcctgctaattaaggcacattt

SEQ ID NO: 415631 - DNA, 30 bp, Artificial Sequence
  Synthetic oligonucleotide
gtggtgcgccggattgtctcggggacattt

SEQ ID NO: 415632 - DNA, 30 bp, Artificial Sequence
  Synthetic oligonucleotide
ggccaccaggtgggaattggatggacattt

SEQ ID NO: 415633 - DNA, 30 bp, Artificial Sequence
  Synthetic oligonucleotide
agcctgcctgatgggtccacggtgacattt

SEQ ID NO: 415634 - DNA, 30 bp, Artificial Sequence
  Synthetic oligonucleotide
agccatatagatcatgccagcgatacattt

SEQ ID NO: 415635 - DNA, 30 bp, Artificial Sequence
  Synthetic oligonucleotide
ggaggtaaccgacatttcgcctgtacattt

SEQ ID NO: 415636 - DNA, 30 bp, Artificial Sequence
  Synthetic oligonucleotide
gtgaattgaagcgacgatctgcaaccattt

SEQ ID NO: 415637 - DNA, 30 bp, Artificial Sequence
  Synthetic oligonucleotide
acataaggtctacgatcgcgatcaccattt

SEQ ID NO: 415638 - DNA, 30 bp, Artificial Sequence
  Synthetic oligonucleotide
cggttactatccaacctcttattaccattt

SEQ ID NO: 415639 - DNA, 30 bp, Artificial Sequence
  Synthetic oligonucleotide
gtatagaaataccctttgcgtcacccattt

SEQ ID NO: 415640 - DNA, 30 bp, Artificial Sequence
  Synthetic oligonucleotide
cgaactcgctagatggcgactctgccattt

SEQ ID NO: 415641 - DNA, 30 bp, Artificial Sequence
  Synthetic oligonucleotide
tcggggaggggaaaagggcccgtgccattt

SEQ ID NO: 415642 - DNA, 30 bp, Artificial Sequence
  Synthetic oligonucleotide
tatggtagagctatgttgcctgttccattt

SEQ ID NO: 415643 - DNA, 30 bp, Artificial Sequence
  Synthetic oligonucleotide
cttcggacactgtatcccttccaagcattt

SEQ ID NO: 415644 - DNA, 30 bp, Artificial Sequence
  Synthetic oligonucleotide
ctcgacccatgccacgtcacctcagcattt

SEQ ID NO: 415645 - DNA, 30 bp, Artificial Sequence
  Synthetic oligonucleotide
gtcagtccgtaacaagtccatctagcattt

SEQ ID NO: 415646 - DNA, 30 bp, Artificial Sequence
  Synthetic oligonucleotide
aagattgaggtgtgtactagagccgcattt

SEQ ID NO: 415647 - DNA, 30 bp, Artificial Sequence
  Synthetic oligonucleotide
gtcagttaccatgggagactgctcgcattt

SEQ ID NO: 415648 - DNA, 30 bp, Artificial Sequence
  Synthetic oligonucleotide
tcactcgcgggtccggaaggaggggcattt

SEQ ID NO: 415649 - DNA, 30 bp, Artificial Sequence
  Synthetic oligonucleotide
tcacctctcggaatgcgcgatctggcattt

SEQ ID NO: 415650 - DNA, 30 bp, Artificial Sequence
  Synthetic oligonucleotide
tcggagtaaaatctcagcagaaatgcattt

SEQ ID NO: 415651 - DNA, 30 bp, Artificial Sequence
  Synthetic oligonucleotide
ggatcgtattcctagacgcccactgcattt

SEQ ID NO: 415652 - DNA, 30 bp, Artificial Sequence
  Synthetic oligonucleotide
ataaactagttaataagggtcgttgcattt

SEQ ID NO: 415653 - DNA, 30 bp, Artificial Sequence
  Synthetic oligonucleotide
atcgatccagcctatactgcgtttgcattt

SEQ ID NO: 415654 - DNA, 30 bp, Artificial Sequence
  Synthetic oligonucleotide
agaaaaattcttaagtgacctcaatcattt

SEQ ID NO: 415655 - DNA, 30 bp, Artificial Sequence
  Synthetic oligonucleotide
tgatgggtaagggctctaaaggaatcattt

SEQ ID NO: 415656 - DNA, 30 bp, Artificial Sequence
  Synthetic oligonucleotide
aacgaaaagtacagtactataggatcattt

SEQ ID NO: 415657 - DNA, 30 bp, Artificial Sequence
  Synthetic oligonucleotide
ctggtttatgccatgtggatagtatcattt

SEQ ID NO: 415658 - DNA, 30 bp, Artificial Sequence
  Synthetic oligonucleotide
gaatctgccccagcacacttagtatcattt

SEQ ID NO: 415659 - DNA, 30 bp, Artificial Sequence
  Synthetic oligonucleotide
gctgtataaacaggtacgcgtagctcattt

SEQ ID NO: 415660 - DNA, 30 bp, Artificial Sequence
  Synthetic oligonucleotide
ttgagcagtctttctagtgtgtgctcattt

SEQ ID NO: 415661 - DNA, 30 bp, Artificial Sequence
  Synthetic oligonucleotide
gatggatgaaagcggtaacacgattcattt

SEQ ID NO: 415662 - DNA, 30 bp, Artificial Sequence
  Synthetic oligonucleotide
tgtatagttaggtcacgaaaacgaagattt

SEQ ID NO: 415663 - DNA, 30 bp, Artificial Sequence
  Synthetic oligonucleotide
cattcttcctgatttcatagtcccagattt

SEQ ID NO: 415664 - DNA, 30 bp, Artificial Sequence
  Synthetic oligonucleotide
gataaaagcgttataaagtattccagattt

SEQ ID NO: 415665 - DNA, 30 bp, Artificial Sequence
  Synthetic oligonucleotide
gttacctattatgcgactctgacacgattt

SEQ ID NO: 415666 - DNA, 30 bp, Artificial Sequence
  Synthetic oligonucleotide
gtaaaatcattagccgtactcgtacgattt

SEQ ID NO: 415667 - DNA, 30 bp, Artificial Sequence
  Synthetic oligonucleotide
acaatgcagcccgtatttaacatccgattt

SEQ ID NO: 415668 - DNA, 30 bp, Artificial Sequence
  Synthetic oligonucleotide
tctaataatgggtcaggtatgcagcgattt

SEQ ID NO: 415669 - DNA, 30 bp, Artificial Sequence
  Synthetic oligonucleotide
acccaattaataacacacatcagtcgattt

SEQ ID NO: 415670 - DNA, 30 bp, Artificial Sequence
  Synthetic oligonucleotide
ttcatttcatgatacatcggttgtcgattt

SEQ ID NO: 415671 - DNA, 30 bp, Artificial Sequence
  Synthetic oligonucleotide
gtccggcggagacggccctaatcaggattt

SEQ ID NO: 415672 - DNA, 29 bp, Artificial Sequence
  Synthetic oligonucleotide
cggctatagggtgttttggagtaggattt

SEQ ID NO: 415673 - DNA, 30 bp, Artificial Sequence
  Synthetic oligonucleotide
tatatacatgaaggtaattccaccggattt

SEQ ID NO: 415674 - DNA, 30 bp, Artificial Sequence
  Synthetic oligonucleotide
gtcaatgggttccgcgagagatccggattt

SEQ ID NO: 415675 - DNA, 30 bp, Artificial Sequence
  Synthetic oligonucleotide
agctgtgaagtgatttggcatttcggattt

SEQ ID NO: 415676 - DNA, 30 bp, Artificial Sequence
  Synthetic oligonucleotide
agtatcgacgagtcagatcgtaagggattt

SEQ ID NO: 415677 - DNA, 30 bp, Artificial Sequence
  Synthetic oligonucleotide
gattcggattccccgaacgcaatgggattt

SEQ ID NO: 415678 - DNA, 30 bp, Artificial Sequence
  Synthetic oligonucleotide
gggagcgccacaaagtaccatagtggattt

SEQ ID NO: 415679 - DNA, 30 bp, Artificial Sequence
  Synthetic oligonucleotide
atttaagtaatgtccgtgctgggtggattt

SEQ ID NO: 415680 - DNA, 30 bp, Artificial Sequence
  Synthetic oligonucleotide
gaaatatcttaccaatatctaaactgattt

SEQ ID NO: 415681 - DNA, 30 bp, Artificial Sequence
  Synthetic oligonucleotide
ccttagtcctgtccaccccttaactgattt

SEQ ID NO: 415682 - DNA, 30 bp, Artificial Sequence
  Synthetic oligonucleotide
cacagaccaaatccttgaagatcgtgattt

SEQ ID NO: 415683 - DNA, 30 bp, Artificial Sequence
  Synthetic oligonucleotide
ttccggacgaactaaagcacaatgtgattt

SEQ ID NO: 415684 - DNA, 30 bp, Artificial Sequence
  Synthetic oligonucleotide
tctatcatgaaggagacttccatgtgattt

SEQ ID NO: 415685 - DNA, 30 bp, Artificial Sequence
  Synthetic oligonucleotide
atgaataggcccggaatcgttctgtgattt

SEQ ID NO: 415686 - DNA, 30 bp, Artificial Sequence
  Synthetic oligonucleotide
ctgctctgatccagaagtttggtgtgattt

SEQ ID NO: 415687 - DNA, 30 bp, Artificial Sequence
  Synthetic oligonucleotide
acagctcatgcacgcggaagcggttgattt

SEQ ID NO: 415688 - DNA, 30 bp, Artificial Sequence
  Synthetic oligonucleotide
taccaggtaacaaaagctatgtgttgattt

SEQ ID NO: 415689 - DNA, 30 bp, Artificial Sequence
  Synthetic oligonucleotide
tatgaaggagtgggggccacagaaatattt

SEQ ID NO: 415690 - DNA, 30 bp, Artificial Sequence
  Synthetic oligonucleotide
gaaggctcaccggttttcgcgggaatattt

SEQ ID NO: 415691 - DNA, 30 bp, Artificial Sequence
  Synthetic oligonucleotide
ggtgtggaagcgcttagcgaccgcatattt

SEQ ID NO: 415692 - DNA, 30 bp, Artificial Sequence
  Synthetic oligonucleotide
gactgatacgatatagctgccggcatattt

SEQ ID NO: 415693 - DNA, 31 bp, Artificial Sequence
  Synthetic oligonucleotide
cttaaacgggatgcgcgaacttctcatattt

SEQ ID NO: 415694 - DNA, 30 bp, Artificial Sequence
  Synthetic oligonucleotide
tacggaggcgcttctctgctaaagatattt

SEQ ID NO: 415695 - DNA, 30 bp, Artificial Sequence
  Synthetic oligonucleotide
tagtatggggccagtcagatacggatattt

SEQ ID NO: 415696 - DNA, 30 bp, Artificial Sequence
  Synthetic oligonucleotide
gtaatagccggtactaagaaaatgatattt

SEQ ID NO: 415697 - DNA, 30 bp, Artificial Sequence
  Synthetic oligonucleotide
aactagggtagataggaggggttgatattt

SEQ ID NO: 415698 - DNA, 30 bp, Artificial Sequence
  Synthetic oligonucleotide
ggctctgcaataaagagcgaaaatatattt

SEQ ID NO: 415699 - DNA, 30 bp, Artificial Sequence
  Synthetic oligonucleotide
caatgatcttaaccaaggactaatatattt

SEQ ID NO: 415700 - DNA, 30 bp, Artificial Sequence
  Synthetic oligonucleotide
agaaggcaaggttttggctgacatatattt

SEQ ID NO: 415701 - DNA, 30 bp, Artificial Sequence
  Synthetic oligonucleotide
catatacgatgcggttgtgtacctatattt

SEQ ID NO: 415702 - DNA, 30 bp, Artificial Sequence
  Synthetic oligonucleotide
caaaaaatcggcttgaatcaggctatattt

SEQ ID NO: 415703 - DNA, 30 bp, Artificial Sequence
  Synthetic oligonucleotide
ttataaagttactggctgaagggtatattt

SEQ ID NO: 415704 - DNA, 30 bp, Artificial Sequence
  Synthetic oligonucleotide
cccataggcggtgctgtatctggtatattt

SEQ ID NO: 415705 - DNA, 30 bp, Artificial Sequence
  Synthetic oligonucleotide
ttactgccacacgccgtagttggtatattt

SEQ ID NO: 415706 - DNA, 30 bp, Artificial Sequence
  Synthetic oligonucleotide
gtaaacctaataggtgcgatttttatattt

SEQ ID NO: 415707 - DNA, 30 bp, Artificial Sequence
  Synthetic oligonucleotide
atgcttacaagtataactgagagactattt

SEQ ID NO: 415708 - DNA, 30 bp, Artificial Sequence
  Synthetic oligonucleotide
gttaatggacgggggtatctccccctattt

SEQ ID NO: 415709 - DNA, 30 bp, Artificial Sequence
  Synthetic oligonucleotide
ctatgacacgatccgatagtggccctattt

SEQ ID NO: 415710 - DNA, 30 bp, Artificial Sequence
  Synthetic oligonucleotide
ctagtagggggctgggctaatggcctattt

SEQ ID NO: 415711 - DNA, 30 bp, Artificial Sequence
  Synthetic oligonucleotide
ataggcctcttgccttcggtttgcctattt

SEQ ID NO: 415712 - DNA, 30 bp, Artificial Sequence
  Synthetic oligonucleotide
gagcggtccggttattgaatcttcctattt

SEQ ID NO: 415713 - DNA, 30 bp, Artificial Sequence
  Synthetic oligonucleotide
gagtgtatgacagagggttactagctattt

SEQ ID NO: 415714 - DNA, 30 bp, Artificial Sequence
  Synthetic oligonucleotide
tttagcgggcacttgcaatacgggctattt

SEQ ID NO: 415715 - DNA, 30 bp, Artificial Sequence
  Synthetic oligonucleotide
aaaaagtattatcacttgggcaatctattt

SEQ ID NO: 415716 - DNA, 30 bp, Artificial Sequence
  Synthetic oligonucleotide
gagggtcggggtggaacttttaatctattt

SEQ ID NO: 415717 - DNA, 30 bp, Artificial Sequence
  Synthetic oligonucleotide
aagtggttacccaatcgtctgtatctattt

SEQ ID NO: 415718 - DNA, 30 bp, Artificial Sequence
  Synthetic oligonucleotide
aaagctgggtctgagtcccaatgtctattt

SEQ ID NO: 415719 - DNA, 30 bp, Artificial Sequence
  Synthetic oligonucleotide
ctctcaccgacgaccataagctttctattt

SEQ ID NO: 415720 - DNA, 30 bp, Artificial Sequence
  Synthetic oligonucleotide
ctcttgatattagtgatgatcagagtattt

SEQ ID NO: 415721 - DNA, 30 bp, Artificial Sequence
  Synthetic oligonucleotide
tgtcagacggtaatatctcctggagtattt

SEQ ID NO: 415722 - DNA, 30 bp, Artificial Sequence
  Synthetic oligonucleotide
tctgatgtggtaatctcgctatacgtattt

SEQ ID NO: 415723 - DNA, 30 bp, Artificial Sequence
  Synthetic oligonucleotide
ggaaattgtttcacagacatcgtcgtattt

SEQ ID NO: 415724 - DNA, 30 bp, Artificial Sequence
  Synthetic oligonucleotide
acaggaccggcgcaggtaattgcggtattt

SEQ ID NO: 415725 - DNA, 30 bp, Artificial Sequence
  Synthetic oligonucleotide
cgtaattatattaccggacccagggtattt

SEQ ID NO: 415726 - DNA, 31 bp, Artificial Sequence
  Synthetic oligonucleotide
accgcaggttcgtcggagaggccttgtattt

SEQ ID NO: 415727 - DNA, 30 bp, Artificial Sequence
  Synthetic oligonucleotide
agaacgtgatggctgacaaaatcattattt

SEQ ID NO: 415728 - DNA, 30 bp, Artificial Sequence
  Synthetic oligonucleotide
cctagggtcacactcaaaccgggattattt

SEQ ID NO: 415729 - DNA, 30 bp, Artificial Sequence
  Synthetic oligonucleotide
agaattggtccgtaaatgtctgtattattt

SEQ ID NO: 415730 - DNA, 30 bp, Artificial Sequence
  Synthetic oligonucleotide
ttaaaaactatggtatagccattattattt

SEQ ID NO: 415731 - DNA, 30 bp, Artificial Sequence
  Synthetic oligonucleotide
cgcgtaatacgtcagctcggtcgcttattt

SEQ ID NO: 415732 - DNA, 30 bp, Artificial Sequence
  Synthetic oligonucleotide
ctaaaataatgagaactataatgcttattt

SEQ ID NO: 415733 - DNA, 30 bp, Artificial Sequence
  Synthetic oligonucleotide
cgatctagattcaattagctgtgcttattt

SEQ ID NO: 415734 - DNA, 30 bp, Artificial Sequence
  Synthetic oligonucleotide
catatggtcttgggcagtagccggttattt

SEQ ID NO: 415735 - DNA, 30 bp, Artificial Sequence
  Synthetic oligonucleotide
aatcgactattttagctactcgtgttattt

SEQ ID NO: 415736 - DNA, 30 bp, Artificial Sequence
  Synthetic oligonucleotide
tctttgcttcgacgtgtagagttgttattt

SEQ ID NO: 415737 - DNA, 30 bp, Artificial Sequence
  Synthetic oligonucleotide
agatacctccttcaatggaagtatttattt

SEQ ID NO: 415738 - DNA, 30 bp, Artificial Sequence
  Synthetic oligonucleotide
tacagcctcgtagcatgtttttctttattt

SEQ ID NO: 415739 - DNA, 30 bp, Artificial Sequence
  Synthetic oligonucleotide
agctacaaccccgcggttaattgtttattt

SEQ ID NO: 415740 - DNA, 30 bp, Artificial Sequence
  Synthetic oligonucleotide
acatcgtggattctagcggcgcacaacttt

SEQ ID NO: 415741 - DNA, 30 bp, Artificial Sequence
  Synthetic oligonucleotide
gaatgggcggcgcgctacgccggcaacttt

SEQ ID NO: 415742 - DNA, 30 bp, Artificial Sequence
  Synthetic oligonucleotide
tcgccttgggcaattcctctcaggaacttt

SEQ ID NO: 415743 - DNA, 30 bp, Artificial Sequence
  Synthetic oligonucleotide
gaccaatagatggttcatagcggccacttt

SEQ ID NO: 415744 - DNA, 30 bp, Artificial Sequence
  Synthetic oligonucleotide
tgctataaggggcacttttattggcacttt

SEQ ID NO: 415745 - DNA, 30 bp, Artificial Sequence
  Synthetic oligonucleotide
caagttgctggattaccccccgctcacttt

SEQ ID NO: 415746 - DNA, 30 bp, Artificial Sequence
  Synthetic oligonucleotide
gcgcgatcgtcgtagaacaccgttcacttt

SEQ ID NO: 415747 - DNA, 30 bp, Artificial Sequence
  Synthetic oligonucleotide
ttctgttggcgggagtgacttgaagacttt

SEQ ID NO: 415748 - DNA, 30 bp, Artificial Sequence
  Synthetic oligonucleotide
ttcgccctcgctcggtaattatcagacttt

SEQ ID NO: 415749 - DNA, 30 bp, Artificial Sequence
  Synthetic oligonucleotide
aagtgttcaccgaaaagtctaatcgacttt

SEQ ID NO: 415750 - DNA, 30 bp, Artificial Sequence
  Synthetic oligonucleotide
cagattcgtggtggaatctgataggacttt

SEQ ID NO: 415751 - DNA, 30 bp, Artificial Sequence
  Synthetic oligonucleotide
acagaagtgcccttttcaaatagtgacttt

SEQ ID NO: 415752 - DNA, 30 bp, Artificial Sequence
  Synthetic oligonucleotide
atctaactaaccccgatgaggtaatacttt

SEQ ID NO: 415753 - DNA, 30 bp, Artificial Sequence
  Synthetic oligonucleotide
agtcgtgcaacggggttccttggatacttt

SEQ ID NO: 415754 - DNA, 30 bp, Artificial Sequence
  Synthetic oligonucleotide
cacggtcacacgactgacatagtatacttt

SEQ ID NO: 415755 - DNA, 30 bp, Artificial Sequence
  Synthetic oligonucleotide
gtggtaacgtctacagtgtagacaaccttt

SEQ ID NO: 415756 - DNA, 30 bp, Artificial Sequence
  Synthetic oligonucleotide
ctcgtacatttaatcgcgtttggaaccttt

SEQ ID NO: 415757 - DNA, 30 bp, Artificial Sequence
  Synthetic oligonucleotide
agtgtgcgtaactggggttcctacaccttt

SEQ ID NO: 415758 - DNA, 30 bp, Artificial Sequence
  Synthetic oligonucleotide
taggttcataccgctcgcgcatccaccttt

SEQ ID NO: 415759 - DNA, 30 bp, Artificial Sequence
  Synthetic oligonucleotide
ctgtattatgctttccccatatccaccttt

SEQ ID NO: 415760 - DNA, 30 bp, Artificial Sequence
  Synthetic oligonucleotide
gcttgtgtcatgtaaggtgcgcgcaccttt

SEQ ID NO: 415761 - DNA, 30 bp, Artificial Sequence
  Synthetic oligonucleotide
gcggtcacaggaccagaaacctggaccttt

SEQ ID NO: 415762 - DNA, 30 bp, Artificial Sequence
  Synthetic oligonucleotide
ttcataatagtgacagcggaattgaccttt

SEQ ID NO: 415763 - DNA, 30 bp, Artificial Sequence
  Synthetic oligonucleotide
gagctcaaggtgggtttgtttcataccttt

SEQ ID NO: 415764 - DNA, 30 bp, Artificial Sequence
  Synthetic oligonucleotide
gagaatttcgcatggcccgaaaaccccttt

SEQ ID NO: 415765 - DNA, 30 bp, Artificial Sequence
  Synthetic oligonucleotide
acagtctttcacagtaaaccctgccccttt

SEQ ID NO: 415766 - DNA, 30 bp, Artificial Sequence
  Synthetic oligonucleotide
ttcggccaccaattcccaggtctccccttt

SEQ ID NO: 415767 - DNA, 30 bp, Artificial Sequence
  Synthetic oligonucleotide
cttgccgctactagactgggagcgcccttt

SEQ ID NO: 415768 - DNA, 30 bp, Artificial Sequence
  Synthetic oligonucleotide
gcctggagcctgtcccgtcagtatcccttt

SEQ ID NO: 415769 - DNA, 30 bp, Artificial Sequence
  Synthetic oligonucleotide
agtcataggggtgttcgctcgggagccttt

SEQ ID NO: 415770 - DNA, 30 bp, Artificial Sequence
  Synthetic oligonucleotide
acagtgagctgggttgctcgagtagccttt

SEQ ID NO: 415771 - DNA, 30 bp, Artificial Sequence
  Synthetic oligonucleotide
tgtgcctctaattcccgaggccaggccttt

SEQ ID NO: 415772 - DNA, 30 bp, Artificial Sequence
  Synthetic oligonucleotide
gaggcccagaaagcaattactcgggccttt

SEQ ID NO: 415773 - DNA, 30 bp, Artificial Sequence
  Synthetic oligonucleotide
atgtagtcactccagggcacaggtgccttt

SEQ ID NO: 415774 - DNA, 30 bp, Artificial Sequence
  Synthetic oligonucleotide
gtcagccttgaatcggtgcgagcctccttt

SEQ ID NO: 415775 - DNA, 30 bp, Artificial Sequence
  Synthetic oligonucleotide
ggagatctttgtatacagagtatctccttt

SEQ ID NO: 415776 - DNA, 30 bp, Artificial Sequence
  Synthetic oligonucleotide
aacaacctactggggacctactggtccttt

SEQ ID NO: 415777 - DNA, 30 bp, Artificial Sequence
  Synthetic oligonucleotide
gtcctatccaaaatccagtcacattccttt

SEQ ID NO: 415778 - DNA, 30 bp, Artificial Sequence
  Synthetic oligonucleotide
gggcagtttagctgcgtgatcgattccttt

SEQ ID NO: 415779 - DNA, 30 bp, Artificial Sequence
  Synthetic oligonucleotide
ggagtggaatgctccattacatcaagcttt

SEQ ID NO: 415780 - DNA, 30 bp, Artificial Sequence
  Synthetic oligonucleotide
aaatagtctaacgctggattactaagcttt

SEQ ID NO: 415781 - DNA, 30 bp, Artificial Sequence
  Synthetic oligonucleotide
ccacttggtgttcgtctggtgcacagcttt

SEQ ID NO: 415782 - DNA, 30 bp, Artificial Sequence
  Synthetic oligonucleotide
ggaggtacgcacaggatgaggagcagcttt

SEQ ID NO: 415783 - DNA, 30 bp, Artificial Sequence
  Synthetic oligonucleotide
catttcggacgtaacgtaacgggcagcttt

SEQ ID NO: 415784 - DNA, 30 bp, Artificial Sequence
  Synthetic oligonucleotide
gaacgagcaagggttaatgcttgcagcttt

SEQ ID NO: 415785 - DNA, 30 bp, Artificial Sequence
  Synthetic oligonucleotide
ggcgtctatagggtttcagtactcagcttt

SEQ ID NO: 415786 - DNA, 30 bp, Artificial Sequence
  Synthetic oligonucleotide
tgacaaaggcagctccgtcacctgagcttt

SEQ ID NO: 415787 - DNA, 30 bp, Artificial Sequence
  Synthetic oligonucleotide
ggcccgccactcaatgggcgtctgagcttt

SEQ ID NO: 415788 - DNA, 30 bp, Artificial Sequence
  Synthetic oligonucleotide
aataacccttgtgtttcacgctgtagcttt

SEQ ID NO: 415789 - DNA, 30 bp, Artificial Sequence
  Synthetic oligonucleotide
gctcgaaggttagaccggctataacgcttt

SEQ ID NO: 415790 - DNA, 30 bp, Artificial Sequence
  Synthetic oligonucleotide
ttccctcaacaggtacccatcgcacgcttt

SEQ ID NO: 415791 - DNA, 30 bp, Artificial Sequence
  Synthetic oligonucleotide
ctccaatagagccgtcgatctatccgcttt

SEQ ID NO: 415792 - DNA, 30 bp, Artificial Sequence
  Synthetic oligonucleotide
cggtagtgggcccggctgtgagagcgcttt

SEQ ID NO: 415793 - DNA, 30 bp, Artificial Sequence
  Synthetic oligonucleotide
actttacactacgccgaggcaccgcgcttt

SEQ ID NO: 415794 - DNA, 30 bp, Artificial Sequence
  Synthetic oligonucleotide
actctgaggcgttacgggcagtggcgcttt

SEQ ID NO: 415795 - DNA, 30 bp, Artificial Sequence
  Synthetic oligonucleotide
cgcggaataagctaagatcactatcgcttt

SEQ ID NO: 415796 - DNA, 30 bp, Artificial Sequence
  Synthetic oligonucleotide
tccaggcgaattactatagggtctcgcttt

SEQ ID NO: 415797 - DNA, 30 bp, Artificial Sequence
  Synthetic oligonucleotide
ggtcacggcccccaggctgacggtcgcttt

SEQ ID NO: 415798 - DNA, 30 bp, Artificial Sequence
  Synthetic oligonucleotide
ggacggctggggcatggggagctcggcttt

SEQ ID NO: 415799 - DNA, 30 bp, Artificial Sequence
  Synthetic oligonucleotide
aagaatttctagggctatctattcggcttt

SEQ ID NO: 415800 - DNA, 30 bp, Artificial Sequence
  Synthetic oligonucleotide
cagcaaggttgttgtcgttatcagggcttt

SEQ ID NO: 415801 - DNA, 30 bp, Artificial Sequence
  Synthetic oligonucleotide
aaagaactatgcgcaatacgtctgggcttt

SEQ ID NO: 415802 - DNA, 30 bp, Artificial Sequence
  Synthetic oligonucleotide
gacactagggcaggtatgacctctggcttt

SEQ ID NO: 415803 - DNA, 30 bp, Artificial Sequence
  Synthetic oligonucleotide
agcggtgtagacgggacaaaacaatgcttt

SEQ ID NO: 415804 - DNA, 30 bp, Artificial Sequence
  Synthetic oligonucleotide
gtgttgtaaatagtgctggtcgcatgcttt

SEQ ID NO: 415805 - DNA, 30 bp, Artificial Sequence
  Synthetic oligonucleotide
cttgacaacaccagtcagttattatgcttt

SEQ ID NO: 415806 - DNA, 30 bp, Artificial Sequence
  Synthetic oligonucleotide
gtcctttgttcaggaagcgatggctgcttt

SEQ ID NO: 415807 - DNA, 30 bp, Artificial Sequence
  Synthetic oligonucleotide
ccgctgtcccgaaagtggtctttctgcttt

SEQ ID NO: 415808 - DNA, 30 bp, Artificial Sequence
  Synthetic oligonucleotide
gataaaaagcctttagaataatggtgcttt

SEQ ID NO: 415809 - DNA, 30 bp, Artificial Sequence
  Synthetic oligonucleotide
cttacggataatataacatcacgttgcttt

SEQ ID NO: 415810 - DNA, 30 bp, Artificial Sequence
  Synthetic oligonucleotide
ggctttacgagacgggcgtcttgaatcttt

SEQ ID NO: 415811 - DNA, 30 bp, Artificial Sequence
  Synthetic oligonucleotide
cgtcagtttgtgttagtatccataatcttt

SEQ ID NO: 415812 - DNA, 30 bp, Artificial Sequence
  Synthetic oligonucleotide
gccatagctataaatgcttccttaatcttt

SEQ ID NO: 415813 - DNA, 30 bp, Artificial Sequence
  Synthetic oligonucleotide
tcaatggatgttgtgtacggatcgatcttt

SEQ ID NO: 415814 - DNA, 30 bp, Artificial Sequence
  Synthetic oligonucleotide
tccgtgggtaaacgcaggtggaggatcttt

SEQ ID NO: 415815 - DNA, 30 bp, Artificial Sequence
  Synthetic oligonucleotide
atcgcacgtgagaaatatcccttgatcttt

SEQ ID NO: 415816 - DNA, 30 bp, Artificial Sequence
  Synthetic oligonucleotide
acttttctgaaaaacgtccgcgctatcttt

SEQ ID NO: 415817 - DNA, 30 bp, Artificial Sequence
  Synthetic oligonucleotide
gacgagccatccctagactgccaactcttt

SEQ ID NO: 415818 - DNA, 30 bp, Artificial Sequence
  Synthetic oligonucleotide
cgtataggtgtagatggcgcaccactcttt

SEQ ID NO: 415819 - DNA, 30 bp, Artificial Sequence
  Synthetic oligonucleotide
ataccggtagcggaggcaccgagactcttt

SEQ ID NO: 415820 - DNA, 30 bp, Artificial Sequence
  Synthetic oligonucleotide
gtctgcgttggagacgatgcaatactcttt

SEQ ID NO: 415821 - DNA, 30 bp, Artificial Sequence
  Synthetic oligonucleotide
agttataggggaacccaccacagcctcttt

SEQ ID NO: 415822 - DNA, 30 bp, Artificial Sequence
  Synthetic oligonucleotide
ggttgtgatcacgaaacttatccgctcttt

SEQ ID NO: 415823 - DNA, 30 bp, Artificial Sequence
  Synthetic oligonucleotide
gcagaggggattttgtcgaacgggctcttt

SEQ ID NO: 415824 - DNA, 30 bp, Artificial Sequence
  Synthetic oligonucleotide
gtagagcgccccctagtgaaactgctcttt

SEQ ID NO: 415825 - DNA, 30 bp, Artificial Sequence
  Synthetic oligonucleotide
gctttgatcatgtcctgacataaagtcttt

SEQ ID NO: 415826 - DNA, 30 bp, Artificial Sequence
  Synthetic oligonucleotide
caaccatccatgtatattcgaacagtcttt

SEQ ID NO: 415827 - DNA, 30 bp, Artificial Sequence
  Synthetic oligonucleotide
gatctcacgtgctgggcccctctcgtcttt

SEQ ID NO: 415828 - DNA, 30 bp, Artificial Sequence
  Synthetic oligonucleotide
agagatcactaaagcgaccgaaaggtcttt

SEQ ID NO: 415829 - DNA, 30 bp, Artificial Sequence
  Synthetic oligonucleotide
ttagggtggcaatatatccagcaggtcttt

SEQ ID NO: 415830 - DNA, 30 bp, Artificial Sequence
  Synthetic oligonucleotide
tgcctcaacccttcaccatgtatggtcttt

SEQ ID NO: 415831 - DNA, 30 bp, Artificial Sequence
  Synthetic oligonucleotide
accacgcagtcgcagccagtgcgtgtcttt

SEQ ID NO: 415832 - DNA, 30 bp, Artificial Sequence
  Synthetic oligonucleotide
acccaagtttaccgcgtaatttaattcttt

SEQ ID NO: 415833 - DNA, 30 bp, Artificial Sequence
  Synthetic oligonucleotide
tctgctacgcttgtccgggtgctattcttt

SEQ ID NO: 415834 - DNA, 30 bp, Artificial Sequence
  Synthetic oligonucleotide
tgagtttataggccataacgcaccttcttt

SEQ ID NO: 415835 - DNA, 30 bp, Artificial Sequence
  Synthetic oligonucleotide
taactgaaaatgagtggtaatcgcttcttt

SEQ ID NO: 415836 - DNA, 29 bp, Artificial Sequence
  Synthetic oligonucleotide
tcttaactgatacctgtacattcttcttt

SEQ ID NO: 415837 - DNA, 30 bp, Artificial Sequence
  Synthetic oligonucleotide
ggctggggttatcgatcaaatgagttcttt

SEQ ID NO: 415838 - DNA, 30 bp, Artificial Sequence
  Synthetic oligonucleotide
tgaagacgttagagccagaaagggttcttt

SEQ ID NO: 415839 - DNA, 30 bp, Artificial Sequence
  Synthetic oligonucleotide
agacgttggaatctattcgataatttcttt

SEQ ID NO: 415840 - DNA, 30 bp, Artificial Sequence
  Synthetic oligonucleotide
tcaacccgcggaccgggtagggatttcttt

SEQ ID NO: 415841 - DNA, 30 bp, Artificial Sequence
  Synthetic oligonucleotide
ttggggtgcgtaatcgcccagactttcttt

SEQ ID NO: 415842 - DNA, 30 bp, Artificial Sequence
  Synthetic oligonucleotide
ggtactgatcgttaggcatgggttttcttt

SEQ ID NO: 415843 - DNA, 30 bp, Artificial Sequence
  Synthetic oligonucleotide
atcacgattcgaggccacgctctaaagttt

SEQ ID NO: 415844 - DNA, 30 bp, Artificial Sequence
  Synthetic oligonucleotide
agttggtcagatgtcgcgcccaagaagttt

SEQ ID NO: 415845 - DNA, 30 bp, Artificial Sequence
  Synthetic oligonucleotide
tgcccaacatatcgacccccccctaagttt

SEQ ID NO: 415846 - DNA, 30 bp, Artificial Sequence
  Synthetic oligonucleotide
cccagtctcgtgatttaatgcgctaagttt

SEQ ID NO: 415847 - DNA, 30 bp, Artificial Sequence
  Synthetic oligonucleotide
tataaaaaatctgcctcagagagtaagttt

SEQ ID NO: 415848 - DNA, 30 bp, Artificial Sequence
  Synthetic oligonucleotide
cgacctgctcggcgctccagttgacagttt

SEQ ID NO: 415849 - DNA, 30 bp, Artificial Sequence
  Synthetic oligonucleotide
gaaatacaactgtgctccattgtacagttt

SEQ ID NO: 415850 - DNA, 30 bp, Artificial Sequence
  Synthetic oligonucleotide
gcaagtatttgtgggctagtataccagttt

SEQ ID NO: 415851 - DNA, 30 bp, Artificial Sequence
  Synthetic oligonucleotide
tccaagggtgggtctccggccggccagttt

SEQ ID NO: 415852 - DNA, 30 bp, Artificial Sequence
  Synthetic oligonucleotide
aagagagtagcccgagagatttgccagttt

SEQ ID NO: 415853 - DNA, 30 bp, Artificial Sequence
  Synthetic oligonucleotide
agagtttcaagcggttagtgaatccagttt

SEQ ID NO: 415854 - DNA, 30 bp, Artificial Sequence
  Synthetic oligonucleotide
gtgaccggctcgttggcccgaaatcagttt

SEQ ID NO: 415855 - DNA, 30 bp, Artificial Sequence
  Synthetic oligonucleotide
tttaaccctgaaggcgttttccatcagttt

SEQ ID NO: 415856 - DNA, 30 bp, Artificial Sequence
  Synthetic oligonucleotide
aagtggtcaaagtccgcctttagagagttt

SEQ ID NO: 415857 - DNA, 30 bp, Artificial Sequence
  Synthetic oligonucleotide
cggaatactccggcggcgccccgtgagttt

SEQ ID NO: 415858 - DNA, 30 bp, Artificial Sequence
  Synthetic oligonucleotide
ctggcaaattttctcaagggtcttgagttt

SEQ ID NO: 415859 - DNA, 29 bp, Artificial Sequence
  Synthetic oligonucleotide
gtagagcgctctggcccgcggcatagttt

SEQ ID NO: 415860 - DNA, 30 bp, Artificial Sequence
  Synthetic oligonucleotide
tccggtactcgtcagaattgacagtagttt

SEQ ID NO: 415861 - DNA, 30 bp, Artificial Sequence
  Synthetic oligonucleotide
tatcctagacgctcatttcaagagtagttt

SEQ ID NO: 415862 - DNA, 30 bp, Artificial Sequence
  Synthetic oligonucleotide
ggacgtatgcaaaccgatcgtaggtagttt

SEQ ID NO: 415863 - DNA, 30 bp, Artificial Sequence
  Synthetic oligonucleotide
aaatgaagtggccctcggcgcaattagttt

SEQ ID NO: 415864 - DNA, 30 bp, Artificial Sequence
  Synthetic oligonucleotide
atttattacggcccttttcatgcttagttt

SEQ ID NO: 415865 - DNA, 30 bp, Artificial Sequence
  Synthetic oligonucleotide
caattgttatcttttagaatacgttagttt

SEQ ID NO: 415866 - DNA, 30 bp, Artificial Sequence
  Synthetic oligonucleotide
tctaatgagcaattggttaaaggttagttt

SEQ ID NO: 415867 - DNA, 30 bp, Artificial Sequence
  Synthetic oligonucleotide
cccgtcagactaggtaaggaaatttagttt

SEQ ID NO: 415868 - DNA, 30 bp, Artificial Sequence
  Synthetic oligonucleotide
agaaaacctggaacgcttcatgaaacgttt

SEQ ID NO: 415869 - DNA, 30 bp, Artificial Sequence
  Synthetic oligonucleotide
ttgaactcccgagtggcgagttgaacgttt

SEQ ID NO: 415870 - DNA, 30 bp, Artificial Sequence
  Synthetic oligonucleotide
tttgaggtcccgagtcgtctaataacgttt

SEQ ID NO: 415871 - DNA, 30 bp, Artificial Sequence
  Synthetic oligonucleotide
ctaaggacttgtaatccgtgtcacacgttt

SEQ ID NO: 415872 - DNA, 30 bp, Artificial Sequence
  Synthetic oligonucleotide
gtaattcgtacctaacgactggcgacgttt

SEQ ID NO: 415873 - DNA, 30 bp, Artificial Sequence
  Synthetic oligonucleotide
aaaaacaaaccggtgctacaagggacgttt

SEQ ID NO: 415874 - DNA, 30 bp, Artificial Sequence
  Synthetic oligonucleotide
gccccgtgaatggtcgttaccgttacgttt

SEQ ID NO: 415875 - DNA, 30 bp, Artificial Sequence
  Synthetic oligonucleotide
gaccagcacgactccccttgcagaccgttt

SEQ ID NO: 415876 - DNA, 30 bp, Artificial Sequence
  Synthetic oligonucleotide
cattcgtaacgaagtggtttgataccgttt

SEQ ID NO: 415877 - DNA, 30 bp, Artificial Sequence
  Synthetic oligonucleotide
ttttgtaggattaggaaagggaccccgttt

SEQ ID NO: 415878 - DNA, 30 bp, Artificial Sequence
  Synthetic oligonucleotide
aaccacctgttggataacgtccgcccgttt

SEQ ID NO: 415879 - DNA, 30 bp, Artificial Sequence
  Synthetic oligonucleotide
tgcaggaagacgtaagcctgccggccgttt

SEQ ID NO: 415880 - DNA, 30 bp, Artificial Sequence
  Synthetic oligonucleotide
tacgatatgacttacatttaaagtccgttt

SEQ ID NO: 415881 - DNA, 30 bp, Artificial Sequence
  Synthetic oligonucleotide
atcgtgttctatcggtcaactcttccgttt

SEQ ID NO: 415882 - DNA, 30 bp, Artificial Sequence
  Synthetic oligonucleotide
cttggtcagtatgtaagagactcagcgttt

SEQ ID NO: 415883 - DNA, 30 bp, Artificial Sequence
  Synthetic oligonucleotide
aaggaagtaacgtgtggcgtaatcgcgttt

SEQ ID NO: 415884 - DNA, 30 bp, Artificial Sequence
  Synthetic oligonucleotide
actctatagcatttgtgatcgtcggcgttt

SEQ ID NO: 415885 - DNA, 30 bp, Artificial Sequence
  Synthetic oligonucleotide
aacatctttgtacaaccttcagatgcgttt

SEQ ID NO: 415886 - DNA, 30 bp, Artificial Sequence
  Synthetic oligonucleotide
gagtggtggaattcggtacagactgcgttt

SEQ ID NO: 415887 - DNA, 30 bp, Artificial Sequence
  Synthetic oligonucleotide
atagggataatgttcctacccgaatcgttt

SEQ ID NO: 415888 - DNA, 30 bp, Artificial Sequence
  Synthetic oligonucleotide
ctacggaacgatgagtggcactcatcgttt

SEQ ID NO: 415889 - DNA, 30 bp, Artificial Sequence
  Synthetic oligonucleotide
tcttgtgacgacacacaagggggttcgttt

SEQ ID NO: 415890 - DNA, 30 bp, Artificial Sequence
  Synthetic oligonucleotide
cggcaatctctgtccaatgtataaaggttt

SEQ ID NO: 415891 - DNA, 30 bp, Artificial Sequence
  Synthetic oligonucleotide
atgtgcttgaaatacccattcacaaggttt

SEQ ID NO: 415892 - DNA, 30 bp, Artificial Sequence
  Synthetic oligonucleotide
ggctcaggggtctgctgcatgggaaggttt

SEQ ID NO: 415893 - DNA, 30 bp, Artificial Sequence
  Synthetic oligonucleotide
cgattccgtaccgggcaaatcgacaggttt

SEQ ID NO: 415894 - DNA, 30 bp, Artificial Sequence
  Synthetic oligonucleotide
cttagcagtctcaaacatagtgtcaggttt

SEQ ID NO: 415895 - DNA, 30 bp, Artificial Sequence
  Synthetic oligonucleotide
aacgcgtattcggtatatctggataggttt

SEQ ID NO: 415896 - DNA, 30 bp, Artificial Sequence
  Synthetic oligonucleotide
gtcaaactgacaaaaagcgtctgtaggttt

SEQ ID NO: 415897 - DNA, 30 bp, Artificial Sequence
  Synthetic oligonucleotide
cacactagacatagcttaacccttaggttt

SEQ ID NO: 415898 - DNA, 30 bp, Artificial Sequence
  Synthetic oligonucleotide
ttagtggggtcgggacggtgcgaacggttt

SEQ ID NO: 415899 - DNA, 30 bp, Artificial Sequence
  Synthetic oligonucleotide
ctttcgcgctgccgaccggggcgccggttt

SEQ ID NO: 415900 - DNA, 31 bp, Artificial Sequence
  Synthetic oligonucleotide
atgccattcggatcgcttaaacctccggttt

SEQ ID NO: 415901 - DNA, 30 bp, Artificial Sequence
  Synthetic oligonucleotide
agcattgatattttgcgctgtgtccggttt

SEQ ID NO: 415902 - DNA, 30 bp, Artificial Sequence
  Synthetic oligonucleotide
cagcattaaatctgtgtgaccaatcggttt

SEQ ID NO: 415903 - DNA, 30 bp, Artificial Sequence
  Synthetic oligonucleotide
gggtggttgaagcttgagtgtcttcggttt

SEQ ID NO: 415904 - DNA, 30 bp, Artificial Sequence
  Synthetic oligonucleotide
gccgttggactcatggaggcgaaagggttt

SEQ ID NO: 415905 - DNA, 30 bp, Artificial Sequence
  Synthetic oligonucleotide
cgactgcatgcctgtcctacaacagggttt

SEQ ID NO: 415906 - DNA, 30 bp, Artificial Sequence
  Synthetic oligonucleotide
gtcccgcacagtcagttgcaaagagggttt

SEQ ID NO: 415907 - DNA, 30 bp, Artificial Sequence
  Synthetic oligonucleotide
tgatgaatgcaagatcagaattccgggttt

SEQ ID NO: 415908 - DNA, 30 bp, Artificial Sequence
  Synthetic oligonucleotide
ataactcgaaacacggcttatcaggggttt

SEQ ID NO: 415909 - DNA, 30 bp, Artificial Sequence
  Synthetic oligonucleotide
tggattctacagcggagaattagggggttt

SEQ ID NO: 415910 - DNA, 30 bp, Artificial Sequence
  Synthetic oligonucleotide
tcccggactccggccgggcagcgggggttt

SEQ ID NO: 415911 - DNA, 30 bp, Artificial Sequence
  Synthetic oligonucleotide
cttaggacatgtacgcagtcgaatgggttt

SEQ ID NO: 415912 - DNA, 30 bp, Artificial Sequence
  Synthetic oligonucleotide
tagcacatcatagattgcagaaaatggttt

SEQ ID NO: 415913 - DNA, 30 bp, Artificial Sequence
  Synthetic oligonucleotide
ttttcagctacacagaaatgagaatggttt

SEQ ID NO: 415914 - DNA, 30 bp, Artificial Sequence
  Synthetic oligonucleotide
gcaccagtaacgcaacacccaatctggttt

SEQ ID NO: 415915 - DNA, 30 bp, Artificial Sequence
  Synthetic oligonucleotide
tttgcaatctaatcctgaggcttctggttt

SEQ ID NO: 415916 - DNA, 30 bp, Artificial Sequence
  Synthetic oligonucleotide
ggctcagacaaaagcctactgaagtggttt

SEQ ID NO: 415917 - DNA, 30 bp, Artificial Sequence
  Synthetic oligonucleotide
gaagcgtcatcagcttatcggtcgtggttt

SEQ ID NO: 415918 - DNA, 30 bp, Artificial Sequence
  Synthetic oligonucleotide
aaataatataacctatcagccatgtggttt

SEQ ID NO: 415919 - DNA, 30 bp, Artificial Sequence
  Synthetic oligonucleotide
gagctcacaaagagtatcactcattggttt

SEQ ID NO: 415920 - DNA, 30 bp, Artificial Sequence
  Synthetic oligonucleotide
gcagccaattgctcctggtggtcttggttt

SEQ ID NO: 415921 - DNA, 30 bp, Artificial Sequence
  Synthetic oligonucleotide
caacgatttgtaaaattatattcttggttt

SEQ ID NO: 415922 - DNA, 30 bp, Artificial Sequence
  Synthetic oligonucleotide
tataggctaaaacattcagtaggttggttt

SEQ ID NO: 415923 - DNA, 30 bp, Artificial Sequence
  Synthetic oligonucleotide
gataggaaggatattttaaactgttggttt

SEQ ID NO: 415924 - DNA, 30 bp, Artificial Sequence
  Synthetic oligonucleotide
gatgattcataaggttcactgtgttggttt

SEQ ID NO: 415925 - DNA, 30 bp, Artificial Sequence
  Synthetic oligonucleotide
tggaataagattcttttcattgtttggttt

SEQ ID NO: 415926 - DNA, 30 bp, Artificial Sequence
  Synthetic oligonucleotide
ggtattcggcgctatatagaaaaaatgttt

SEQ ID NO: 415927 - DNA, 30 bp, Artificial Sequence
  Synthetic oligonucleotide
accggcgtgtcaaaaggtctcgaaatgttt

SEQ ID NO: 415928 - DNA, 30 bp, Artificial Sequence
  Synthetic oligonucleotide
gttgtcacaactcttgaacgcgcaatgttt

SEQ ID NO: 415929 - DNA, 30 bp, Artificial Sequence
  Synthetic oligonucleotide
tcaggttagctatgattgcgtataatgttt

SEQ ID NO: 415930 - DNA, 30 bp, Artificial Sequence
  Synthetic oligonucleotide
gggccacgcgaattagacctgttaatgttt

SEQ ID NO: 415931 - DNA, 30 bp, Artificial Sequence
  Synthetic oligonucleotide
gatctgatgcgaaaaagaagggatatgttt

SEQ ID NO: 415932 - DNA, 30 bp, Artificial Sequence
  Synthetic oligonucleotide
gcctccttctgatagggtccatatatgttt

SEQ ID NO: 415933 - DNA, 30 bp, Artificial Sequence
  Synthetic oligonucleotide
gcaaaatcgcgtggcagagcctgtatgttt

SEQ ID NO: 415934 - DNA, 30 bp, Artificial Sequence
  Synthetic oligonucleotide
acctcagtttagacgtccgaaaaactgttt

SEQ ID NO: 415935 - DNA, 30 bp, Artificial Sequence
  Synthetic oligonucleotide
gctagttttagagctcagggaatcctgttt

SEQ ID NO: 415936 - DNA, 30 bp, Artificial Sequence
  Synthetic oligonucleotide
gaattccgcccggaaacttcagtcctgttt

SEQ ID NO: 415937 - DNA, 30 bp, Artificial Sequence
  Synthetic oligonucleotide
gttggttgggcggggctgcccttcctgttt

SEQ ID NO: 415938 - DNA, 30 bp, Artificial Sequence
  Synthetic oligonucleotide
cattcgacttcagtctattgcactctgttt

SEQ ID NO: 415939 - DNA, 30 bp, Artificial Sequence
  Synthetic oligonucleotide
caccgtcaaggatgattgactggggtgttt

SEQ ID NO: 415940 - DNA, 30 bp, Artificial Sequence
  Synthetic oligonucleotide
ggccctcgctacctggttcaaggtgtgttt

SEQ ID NO: 415941 - DNA, 30 bp, Artificial Sequence
  Synthetic oligonucleotide
catactttgaaggtcgctctgcttgtgttt

SEQ ID NO: 415942 - DNA, 30 bp, Artificial Sequence
  Synthetic oligonucleotide
cccattatggaatcggttacgatattgttt

SEQ ID NO: 415943 - DNA, 30 bp, Artificial Sequence
  Synthetic oligonucleotide
taaccggagtgccggcgtagcaggttgttt

SEQ ID NO: 415944 - DNA, 30 bp, Artificial Sequence
  Synthetic oligonucleotide
agatcaggcagcacttgcttacgtttgttt

SEQ ID NO: 415945 - DNA, 30 bp, Artificial Sequence
  Synthetic oligonucleotide
ttgcagttgtgcggaacagcagttttgttt

SEQ ID NO: 415946 - DNA, 30 bp, Artificial Sequence
  Synthetic oligonucleotide
gtaactcgttaaaggatctctcgaaatttt

SEQ ID NO: 415947 - DNA, 30 bp, Artificial Sequence
  Synthetic oligonucleotide
cctctctggaagcaaccggcactaaatttt

SEQ ID NO: 415948 - DNA, 30 bp, Artificial Sequence
  Synthetic oligonucleotide
atcgagcattaggttaggtacgccaatttt

SEQ ID NO: 415949 - DNA, 30 bp, Artificial Sequence
  Synthetic oligonucleotide
ggtttagattaggagtttagcgccaatttt

SEQ ID NO: 415950 - DNA, 30 bp, Artificial Sequence
  Synthetic oligonucleotide
ttacgagggctgaagccaggtgccaatttt

SEQ ID NO: 415951 - DNA, 30 bp, Artificial Sequence
  Synthetic oligonucleotide
ggaggaaaggtggcttgactcagcaatttt

SEQ ID NO: 415952 - DNA, 30 bp, Artificial Sequence
  Synthetic oligonucleotide
actcgtccagtgccggcataaggcaatttt

SEQ ID NO: 415953 - DNA, 30 bp, Artificial Sequence
  Synthetic oligonucleotide
agttaatttactcctgcaaccaagaatttt

SEQ ID NO: 415954 - DNA, 30 bp, Artificial Sequence
  Synthetic oligonucleotide
gtgtggaagacttttataccgccgaatttt

SEQ ID NO: 415955 - DNA, 30 bp, Artificial Sequence
  Synthetic oligonucleotide
gccccatagcactgccctgtcaaacatttt

SEQ ID NO: 415956 - DNA, 30 bp, Artificial Sequence
  Synthetic oligonucleotide
atatcgctttccgtgcaatatatacatttt

SEQ ID NO: 415957 - DNA, 30 bp, Artificial Sequence
  Synthetic oligonucleotide
ctctacaataacagtggttagcaccatttt

SEQ ID NO: 415958 - DNA, 30 bp, Artificial Sequence
  Synthetic oligonucleotide
actcataagggtagccggtaagcccatttt

SEQ ID NO: 415959 - DNA, 30 bp, Artificial Sequence
  Synthetic oligonucleotide
tctacgttaagacaaagctgggaagatttt

SEQ ID NO: 415960 - DNA, 30 bp, Artificial Sequence
  Synthetic oligonucleotide
tcagaatcaccgtatgcaggcacagatttt

SEQ ID NO: 415961 - DNA, 30 bp, Artificial Sequence
  Synthetic oligonucleotide
ggttgactgttgtcacggacgtgagatttt

SEQ ID NO: 415962 - DNA, 30 bp, Artificial Sequence
  Synthetic oligonucleotide
aggtcataaactatcggacgcgtcgatttt

SEQ ID NO: 415963 - DNA, 30 bp, Artificial Sequence
  Synthetic oligonucleotide
catctatagttcatggagctgtcggatttt

SEQ ID NO: 415964 - DNA, 30 bp, Artificial Sequence
  Synthetic oligonucleotide
tctgttcgaggcatgtgtaagggggatttt

SEQ ID NO: 415965 - DNA, 30 bp, Artificial Sequence
  Synthetic oligonucleotide
gtatagataccaggaaattttgtggatttt

SEQ ID NO: 415966 - DNA, 30 bp, Artificial Sequence
  Synthetic oligonucleotide
tcgtgttaagatacgcgtgaatatgatttt

SEQ ID NO: 415967 - DNA, 30 bp, Artificial Sequence
  Synthetic oligonucleotide
gacaaatcttcgaggtcatgaattgatttt

SEQ ID NO: 415968 - DNA, 30 bp, Artificial Sequence
  Synthetic oligonucleotide
gctaatgggtagtcactggctattgatttt

SEQ ID NO: 415969 - DNA, 30 bp, Artificial Sequence
  Synthetic oligonucleotide
gcgtccttaaaagtcacccatcttgatttt

SEQ ID NO: 415970 - DNA, 30 bp, Artificial Sequence
  Synthetic oligonucleotide
gagtaggcaggaacgactatggaatatttt

SEQ ID NO: 415971 - DNA, 30 bp, Artificial Sequence
  Synthetic oligonucleotide
tttggggatgagcttccaagcgcatatttt

SEQ ID NO: 415972 - DNA, 30 bp, Artificial Sequence
  Synthetic oligonucleotide
aagtagcggatcaggggattatcatatttt

SEQ ID NO: 415973 - DNA, 30 bp, Artificial Sequence
  Synthetic oligonucleotide
gtggtcgtgtctgccccgcccagatatttt

SEQ ID NO: 415974 - DNA, 30 bp, Artificial Sequence
  Synthetic oligonucleotide
aagggtgtactcatggaaccgatctatttt

SEQ ID NO: 415975 - DNA, 30 bp, Artificial Sequence
  Synthetic oligonucleotide
agcgctaatattggggataaaacgtatttt

SEQ ID NO: 415976 - DNA, 25 bp, Artificial Sequence
  Synthetic oligonucleotide
cgttgtttggtaataccggtatttt

SEQ ID NO: 415977 - DNA, 30 bp, Artificial Sequence
  Synthetic oligonucleotide
atttgctggctcaatcatccatattatttt

SEQ ID NO: 415978 - DNA, 30 bp, Artificial Sequence
  Synthetic oligonucleotide
caggaggacgcaagcgaatacatttatttt

SEQ ID NO: 415979 - DNA, 30 bp, Artificial Sequence
  Synthetic oligonucleotide
aaggctcgtgaaactagtttactaactttt

SEQ ID NO: 415980 - DNA, 30 bp, Artificial Sequence
  Synthetic oligonucleotide
gcaaaagctatttgcttacgccagactttt

SEQ ID NO: 415981 - DNA, 30 bp, Artificial Sequence
  Synthetic oligonucleotide
tgagatactggggatattccccggactttt

SEQ ID NO: 415982 - DNA, 30 bp, Artificial Sequence
  Synthetic oligonucleotide
caagtggtcacggtacagaaaaatactttt

SEQ ID NO: 415983 - DNA, 30 bp, Artificial Sequence
  Synthetic oligonucleotide
tgattttagaaactgggccgaaatactttt

SEQ ID NO: 415984 - DNA, 30 bp, Artificial Sequence
  Synthetic oligonucleotide
gatggacagaggaccccgccatatactttt

SEQ ID NO: 415985 - DNA, 30 bp, Artificial Sequence
  Synthetic oligonucleotide
ggcgtcgagaattcggagtttaaacctttt

SEQ ID NO: 415986 - DNA, 30 bp, Artificial Sequence
  Synthetic oligonucleotide
tagttgttggagtatctattacgacctttt

SEQ ID NO: 415987 - DNA, 30 bp, Artificial Sequence
  Synthetic oligonucleotide
tccccttctacgagaaggagtaagcctttt

SEQ ID NO: 415988 - DNA, 30 bp, Artificial Sequence
  Synthetic oligonucleotide
gacgaagagactgtgtatagtgagcctttt

SEQ ID NO: 415989 - DNA, 30 bp, Artificial Sequence
  Synthetic oligonucleotide
gtaccatgcgatggtagccactagcctttt

SEQ ID NO: 415990 - DNA, 30 bp, Artificial Sequence
  Synthetic oligonucleotide
accgtgtgttacttcaattgtgcgcctttt

SEQ ID NO: 415991 - DNA, 30 bp, Artificial Sequence
  Synthetic oligonucleotide
aagatgacaggtacgacttagagtcctttt

SEQ ID NO: 415992 - DNA, 31 bp, Artificial Sequence
  Synthetic oligonucleotide
tataagcacatacagggcagagtttcctttt

SEQ ID NO: 415993 - DNA, 30 bp, Artificial Sequence
  Synthetic oligonucleotide
gttactatttccggcgctttgacagctttt

SEQ ID NO: 415994 - DNA, 31 bp, Artificial Sequence
  Synthetic oligonucleotide
agtcttcgggaatatacgagctaaggctttt

SEQ ID NO: 415995 - DNA, 30 bp, Artificial Sequence
  Synthetic oligonucleotide
aattacatgactggacaaaaggaggctttt

SEQ ID NO: 415996 - DNA, 30 bp, Artificial Sequence
  Synthetic oligonucleotide
aatttgcttcttccaggaggttaatctttt

SEQ ID NO: 415997 - DNA, 30 bp, Artificial Sequence
  Synthetic oligonucleotide
agagcgttggctttggcgcgcgcatctttt

SEQ ID NO: 415998 - DNA, 30 bp, Artificial Sequence
  Synthetic oligonucleotide
aagaggagccctgtttccaaattctctttt

SEQ ID NO: 415999 - DNA, 30 bp, Artificial Sequence
  Synthetic oligonucleotide
aacaccgacacctagactgtatcgtctttt

SEQ ID NO: 416000 - DNA, 30 bp, Artificial Sequence
  Synthetic oligonucleotide
gcggaagttctaagctgttagtcgtctttt

SEQ ID NO: 416001 - DNA, 30 bp, Artificial Sequence
  Synthetic oligonucleotide
gtgaaattgtaggtgatgtaagggtctttt

SEQ ID NO: 416002 - DNA, 30 bp, Artificial Sequence
  Synthetic oligonucleotide
ggctgagtgttgctccactactattctttt

SEQ ID NO: 416003 - DNA, 30 bp, Artificial Sequence
  Synthetic oligonucleotide
taaatccacagtagcaagtgcacttctttt

SEQ ID NO: 416004 - DNA, 30 bp, Artificial Sequence
  Synthetic oligonucleotide
acctcgcagagcacatgtacttgttctttt

SEQ ID NO: 416005 - DNA, 30 bp, Artificial Sequence
  Synthetic oligonucleotide
agtcagtaagctgccgaacaactttctttt

SEQ ID NO: 416006 - DNA, 30 bp, Artificial Sequence
  Synthetic oligonucleotide
cagtgtatcaccggaccgctacacagtttt

SEQ ID NO: 416007 - DNA, 30 bp, Artificial Sequence
  Synthetic oligonucleotide
aatatgcatgtgttaacgatactcagtttt

SEQ ID NO: 416008 - DNA, 30 bp, Artificial Sequence
  Synthetic oligonucleotide
gtccgtcggctattgtacgctcagagtttt

SEQ ID NO: 416009 - DNA, 30 bp, Artificial Sequence
  Synthetic oligonucleotide
tgacagaccttgcaaacctgaacgagtttt

SEQ ID NO: 416010 - DNA, 30 bp, Artificial Sequence
  Synthetic oligonucleotide
cctcaagaagcattagaggctgcgagtttt

SEQ ID NO: 416011 - DNA, 30 bp, Artificial Sequence
  Synthetic oligonucleotide
ccaaccagactcagctcagcaaggagtttt

SEQ ID NO: 416012 - DNA, 30 bp, Artificial Sequence
  Synthetic oligonucleotide
tgtgaatttcagcgtgacaccaggagtttt

SEQ ID NO: 416013 - DNA, 30 bp, Artificial Sequence
  Synthetic oligonucleotide
gctgccccataggcacgacacgggagtttt

SEQ ID NO: 416014 - DNA, 30 bp, Artificial Sequence
  Synthetic oligonucleotide
ggcgataaactatgaaaagttactagtttt

SEQ ID NO: 416015 - DNA, 30 bp, Artificial Sequence
  Synthetic oligonucleotide
cgcccttagtatgacagtcaagctagtttt

SEQ ID NO: 416016 - DNA, 30 bp, Artificial Sequence
  Synthetic oligonucleotide
aaactggggagaaagagaatacgtagtttt

SEQ ID NO: 416017 - DNA, 30 bp, Artificial Sequence
  Synthetic oligonucleotide
ttaagggtacccgtttagcaatgacgtttt

SEQ ID NO: 416018 - DNA, 30 bp, Artificial Sequence
  Synthetic oligonucleotide
gcaaaagggtcagcctaggggatacgtttt

SEQ ID NO: 416019 - DNA, 30 bp, Artificial Sequence
  Synthetic oligonucleotide
tcttacatatgcatatcagaattacgtttt

SEQ ID NO: 416020 - DNA, 30 bp, Artificial Sequence
  Synthetic oligonucleotide
ttgtggtcttcaaggcatgcggagcgtttt

SEQ ID NO: 416021 - DNA, 30 bp, Artificial Sequence
  Synthetic oligonucleotide
ttgccgaaatgcctacaacctctgcgtttt

SEQ ID NO: 416022 - DNA, 30 bp, Artificial Sequence
  Synthetic oligonucleotide
cttataacgatattacgaatgcatcgtttt

SEQ ID NO: 416023 - DNA, 30 bp, Artificial Sequence
  Synthetic oligonucleotide
agtagtggcatctttgtggctcgtcgtttt

SEQ ID NO: 416024 - DNA, 30 bp, Artificial Sequence
  Synthetic oligonucleotide
tgaccacgcaagagaccctaattaggtttt

SEQ ID NO: 416025 - DNA, 30 bp, Artificial Sequence
  Synthetic oligonucleotide
tcaggtgcgtttctcttaaaagacggtttt

SEQ ID NO: 416026 - DNA, 30 bp, Artificial Sequence
  Synthetic oligonucleotide
gacgatcttaacctgaatatcgacggtttt

SEQ ID NO: 416027 - DNA, 30 bp, Artificial Sequence
  Synthetic oligonucleotide
ccgccccacgattggcgatgggccggtttt

SEQ ID NO: 416028 - DNA, 30 bp, Artificial Sequence
  Synthetic oligonucleotide
gtgatgttgaacggatcgagcttgggtttt

SEQ ID NO: 416029 - DNA, 30 bp, Artificial Sequence
  Synthetic oligonucleotide
gtgcgctccgcccttgcacggcctggtttt

SEQ ID NO: 416030 - DNA, 30 bp, Artificial Sequence
  Synthetic oligonucleotide
gggtttatccagccggaacactgtggtttt

SEQ ID NO: 416031 - DNA, 30 bp, Artificial Sequence
  Synthetic oligonucleotide
gtatgcctcggaaaaactttgattggtttt

SEQ ID NO: 416032 - DNA, 30 bp, Artificial Sequence
  Synthetic oligonucleotide
cggcttggttggtgactgtcttttggtttt

SEQ ID NO: 416033 - DNA, 30 bp, Artificial Sequence
  Synthetic oligonucleotide
tgtgacaattatggatttctcacatgtttt

SEQ ID NO: 416034 - DNA, 30 bp, Artificial Sequence
  Synthetic oligonucleotide
gattaccggtggagctcatatttatgtttt

SEQ ID NO: 416035 - DNA, 30 bp, Artificial Sequence
  Synthetic oligonucleotide
gagttgttaaccgcggttctcaagtgtttt

SEQ ID NO: 416036 - DNA, 30 bp, Artificial Sequence
  Synthetic oligonucleotide
gggaatactttagggttagtgtcgtgtttt

SEQ ID NO: 416037 - DNA, 30 bp, Artificial Sequence
  Synthetic oligonucleotide
ctagccaagtagaccaaccctgtgtgtttt

SEQ ID NO: 416038 - DNA, 30 bp, Artificial Sequence
  Synthetic oligonucleotide
taggttatacgtactaggaactattgtttt

SEQ ID NO: 416039 - DNA, 30 bp, Artificial Sequence
  Synthetic oligonucleotide
agcgcccgaaaaagctgcgagggttgtttt

SEQ ID NO: 416040 - DNA, 30 bp, Artificial Sequence
  Synthetic oligonucleotide
agaaacaccgggaaaaagcgacaaattttt

SEQ ID NO: 416041 - DNA, 30 bp, Artificial Sequence
  Synthetic oligonucleotide
ggtttggcataatggataagaacaattttt

SEQ ID NO: 416042 - DNA, 29 bp, Artificial Sequence
  Synthetic oligonucleotide
agtcaaggggaacgtatgccaagattttt

SEQ ID NO: 416043 - DNA, 30 bp, Artificial Sequence
  Synthetic oligonucleotide
cgaatgtgggagctcgcatcttcgattttt

SEQ ID NO: 416044 - DNA, 30 bp, Artificial Sequence
  Synthetic oligonucleotide
gcaaaggatagcagttcacggcatattttt

SEQ ID NO: 416045 - DNA, 30 bp, Artificial Sequence
  Synthetic oligonucleotide
gtaacttctccggtgataatatatattttt

SEQ ID NO: 416046 - DNA, 30 bp, Artificial Sequence
  Synthetic oligonucleotide
tacgttccaagtcggtcagattatattttt

SEQ ID NO: 416047 - DNA, 30 bp, Artificial Sequence
  Synthetic oligonucleotide
aactcaaacggggccacgacgcgtattttt

SEQ ID NO: 416048 - DNA, 30 bp, Artificial Sequence
  Synthetic oligonucleotide
gagcgttgagatttagcagcctgtattttt

SEQ ID NO: 416049 - DNA, 30 bp, Artificial Sequence
  Synthetic oligonucleotide
gaagcaggacctagaagacccaaacttttt

SEQ ID NO: 416050 - DNA, 30 bp, Artificial Sequence
  Synthetic oligonucleotide
aaggggtgaaagttagtcaatcgacttttt

SEQ ID NO: 416051 - DNA, 30 bp, Artificial Sequence
  Synthetic oligonucleotide
cacctctccaaatccactacagcccttttt

SEQ ID NO: 416052 - DNA, 30 bp, Artificial Sequence
  Synthetic oligonucleotide
atatcggagtatagagcattcattcttttt

SEQ ID NO: 416053 - DNA, 30 bp, Artificial Sequence
  Synthetic oligonucleotide
catggattaaacggccgaaatggagttttt

SEQ ID NO: 416054 - DNA, 30 bp, Artificial Sequence
  Synthetic oligonucleotide
tagaactgcaacgtatggttttacgttttt

SEQ ID NO: 416055 - DNA, 30 bp, Artificial Sequence
  Synthetic oligonucleotide
gcattgttgcactgcgcaaagaaggttttt

SEQ ID NO: 416056 - DNA, 30 bp, Artificial Sequence
  Synthetic oligonucleotide
gtgcagagctctcggaccgtctaggttttt

SEQ ID NO: 416057 - DNA, 30 bp, Artificial Sequence
  Synthetic oligonucleotide
tcaaagtcgtcgcatgttctagcggttttt

SEQ ID NO: 416058 - DNA, 30 bp, Artificial Sequence
  Synthetic oligonucleotide
ttctgacctccggagttagccgcggttttt

SEQ ID NO: 416059 - DNA, 30 bp, Artificial Sequence
  Synthetic oligonucleotide
ggaataacgggttgaaatgaaagggttttt

SEQ ID NO: 416060 - DNA, 30 bp, Artificial Sequence
  Synthetic oligonucleotide
aacggttgtttgattctcaactgggttttt

SEQ ID NO: 416061 - DNA, 30 bp, Artificial Sequence
  Synthetic oligonucleotide
ggaaaatcaaacgtaaaacgggtggttttt

SEQ ID NO: 416062 - DNA, 30 bp, Artificial Sequence
  Synthetic oligonucleotide
ccagatagcccttgggcgatagttgttttt

SEQ ID NO: 416063 - DNA, 30 bp, Artificial Sequence
  Synthetic oligonucleotide
aacgccagttgtaataacaatgttgttttt

SEQ ID NO: 416064 - DNA, 30 bp, Artificial Sequence
  Synthetic oligonucleotide
actgtatgtttatagcagattgcctttttt

SEQ ID NO: 416065 - DNA, 30 bp, Artificial Sequence
  Synthetic oligonucleotide
taggataatacgatcacaactaagtttttt

SEQ ID NO: 416066 - DNA, 30 bp, Artificial Sequence
  Synthetic oligonucleotide
gactgttgagcgcgaagtacgtcgtttttt

SEQ ID NO: 416067 - DNA, 30 bp, Artificial Sequence
  Synthetic oligonucleotide
ggaaaaacactgttggatcgccattttttt

SEQ ID NO: 416068 - DNA, 30 bp, Artificial Sequence
  Synthetic oligonucleotide
tcttggagagcgagaaaggatagaaaaaaa

SEQ ID NO: 416069 - DNA, 30 bp, Artificial Sequence
  Synthetic oligonucleotide
acataagccatcgtaggttaagtcaaaaaa

SEQ ID NO: 416070 - DNA, 30 bp, Artificial Sequence
  Synthetic oligonucleotide
ggactgtcaacctggggtgggaagaaaaaa

SEQ ID NO: 416071 - DNA, 30 bp, Artificial Sequence
  Synthetic oligonucleotide
gtcagggggtccttcgaatattataaaaaa

SEQ ID NO: 416072 - DNA, 30 bp, Artificial Sequence
  Synthetic oligonucleotide
gagggcgaggcccaaaaatttagtaaaaaa

SEQ ID NO: 416073 - DNA, 31 bp, Artificial Sequence
  Synthetic oligonucleotide
cttttcatatgctcgcacagccgaacaaaaa

SEQ ID NO: 416074 - DNA, 30 bp, Artificial Sequence
  Synthetic oligonucleotide
gaaacaaatagccctagtattgaacaaaaa

SEQ ID NO: 416075 - DNA, 30 bp, Artificial Sequence
  Synthetic oligonucleotide
cgcatgtggtccattgatccctaacaaaaa

SEQ ID NO: 416076 - DNA, 30 bp, Artificial Sequence
  Synthetic oligonucleotide
aattcctaaggcttaaataggacccaaaaa

SEQ ID NO: 416077 - DNA, 30 bp, Artificial Sequence
  Synthetic oligonucleotide
ctgtacttcatcgcatccgcgtgccaaaaa

SEQ ID NO: 416078 - DNA, 30 bp, Artificial Sequence
  Synthetic oligonucleotide
gtaagtctagtatgccgggcatagcaaaaa

SEQ ID NO: 416079 - DNA, 30 bp, Artificial Sequence
  Synthetic oligonucleotide
catacagatagttcgccgaggcggcaaaaa

SEQ ID NO: 416080 - DNA, 30 bp, Artificial Sequence
  Synthetic oligonucleotide
ggccgcatactcgcggtgactcctcaaaaa

SEQ ID NO: 416081 - DNA, 30 bp, Artificial Sequence
  Synthetic oligonucleotide
aggttagctaggcctatgacccgtcaaaaa

SEQ ID NO: 416082 - DNA, 30 bp, Artificial Sequence
  Synthetic oligonucleotide
ggccatcggcagaaagacaggattcaaaaa

SEQ ID NO: 416083 - DNA, 30 bp, Artificial Sequence
  Synthetic oligonucleotide
catttcgtgctggaactgtgtccagaaaaa

SEQ ID NO: 416084 - DNA, 30 bp, Artificial Sequence
  Synthetic oligonucleotide
tagaggcgcatacttcagctcatagaaaaa

SEQ ID NO: 416085 - DNA, 30 bp, Artificial Sequence
  Synthetic oligonucleotide
cacccagactctctctgagtcatagaaaaa

SEQ ID NO: 416086 - DNA, 30 bp, Artificial Sequence
  Synthetic oligonucleotide
ggtgtgccgcgctattctccggacgaaaaa

SEQ ID NO: 416087 - DNA, 30 bp, Artificial Sequence
  Synthetic oligonucleotide
gctcgagggcttgagctggcagtcgaaaaa

SEQ ID NO: 416088 - DNA, 30 bp, Artificial Sequence
  Synthetic oligonucleotide
gtggaattgactagctgttttcaggaaaaa

SEQ ID NO: 416089 - DNA, 30 bp, Artificial Sequence
  Synthetic oligonucleotide
cagttacacggtgtgtagccgtcggaaaaa

SEQ ID NO: 416090 - DNA, 30 bp, Artificial Sequence
  Synthetic oligonucleotide
ataaaatggctccatgtgtatcgggaaaaa

SEQ ID NO: 416091 - DNA, 30 bp, Artificial Sequence
  Synthetic oligonucleotide
gctctcgaccctctcattgcaggggaaaaa

SEQ ID NO: 416092 - DNA, 30 bp, Artificial Sequence
  Synthetic oligonucleotide
gaggttagtgtagccaaaatagatgaaaaa

SEQ ID NO: 416093 - DNA, 31 bp, Artificial Sequence
  Synthetic oligonucleotide
gcgcgtgaatattttgacgttaactgaaaaa

SEQ ID NO: 416094 - DNA, 30 bp, Artificial Sequence
  Synthetic oligonucleotide
cacgctttacacacgttaattattgaaaaa

SEQ ID NO: 416095 - DNA, 30 bp, Artificial Sequence
  Synthetic oligonucleotide
gttagtgctgtgtgagacttagaataaaaa

SEQ ID NO: 416096 - DNA, 30 bp, Artificial Sequence
  Synthetic oligonucleotide
agtttagtgttggcaagcgtccgataaaaa

SEQ ID NO: 416097 - DNA, 30 bp, Artificial Sequence
  Synthetic oligonucleotide
aaggggtccgcgggctccgagctataaaaa

SEQ ID NO: 416098 - DNA, 30 bp, Artificial Sequence
  Synthetic oligonucleotide
aagtcaaagcagtttggcgatctataaaaa

SEQ ID NO: 416099 - DNA, 30 bp, Artificial Sequence
  Synthetic oligonucleotide
ttcgcaatataaacgcatacgaactaaaaa

SEQ ID NO: 416100 - DNA, 30 bp, Artificial Sequence
  Synthetic oligonucleotide
tggaaatgttgatatgtctagagctaaaaa

SEQ ID NO: 416101 - DNA, 30 bp, Artificial Sequence
  Synthetic oligonucleotide
acttcgcgaattaatgacgagtgctaaaaa

SEQ ID NO: 416102 - DNA, 30 bp, Artificial Sequence
  Synthetic oligonucleotide
gtatttaagttcgaggacgggatctaaaaa

SEQ ID NO: 416103 - DNA, 30 bp, Artificial Sequence
  Synthetic oligonucleotide
gtttgcctccactgacaaaacgggtaaaaa

SEQ ID NO: 416104 - DNA, 30 bp, Artificial Sequence
  Synthetic oligonucleotide
aaggctttggaacccagggtttggtaaaaa

SEQ ID NO: 416105 - DNA, 30 bp, Artificial Sequence
  Synthetic oligonucleotide
accacttcactaactgcagcgttgtaaaaa

SEQ ID NO: 416106 - DNA, 30 bp, Artificial Sequence
  Synthetic oligonucleotide
ttttcgagccaatattagactaattaaaaa

SEQ ID NO: 416107 - DNA, 30 bp, Artificial Sequence
  Synthetic oligonucleotide
ttagatacaccacgcagatccacttaaaaa

SEQ ID NO: 416108 - DNA, 30 bp, Artificial Sequence
  Synthetic oligonucleotide
tagccgcttaggagactccacatttaaaaa

SEQ ID NO: 416109 - DNA, 30 bp, Artificial Sequence
  Synthetic oligonucleotide
cgacatgtgaactcagagattgtttaaaaa

SEQ ID NO: 416110 - DNA, 30 bp, Artificial Sequence
  Synthetic oligonucleotide
tcgtgcgcgtagccgttatgagaaacaaaa

SEQ ID NO: 416111 - DNA, 30 bp, Artificial Sequence
  Synthetic oligonucleotide
aatcacagacattatgtggaagacacaaaa

SEQ ID NO: 416112 - DNA, 30 bp, Artificial Sequence
  Synthetic oligonucleotide
ctatgtatgtgaacctcattggacacaaaa

SEQ ID NO: 416113 - DNA, 30 bp, Artificial Sequence
  Synthetic oligonucleotide
tttaagtagtcgacatcatcatcgacaaaa

SEQ ID NO: 416114 - DNA, 30 bp, Artificial Sequence
  Synthetic oligonucleotide
ctctggacgtatgtggtaatatggacaaaa

SEQ ID NO: 416115 - DNA, 30 bp, Artificial Sequence
  Synthetic oligonucleotide
atttttatcaagcgtgcgctacatacaaaa

SEQ ID NO: 416116 - DNA, 30 bp, Artificial Sequence
  Synthetic oligonucleotide
gatgaagcgttcttctctactgttacaaaa

SEQ ID NO: 416117 - DNA, 30 bp, Artificial Sequence
  Synthetic oligonucleotide
cttgtccctggatggcagataaccccaaaa

SEQ ID NO: 416118 - DNA, 30 bp, Artificial Sequence
  Synthetic oligonucleotide
gtttaagcgcgtagtttgctggccccaaaa

SEQ ID NO: 416119 - DNA, 30 bp, Artificial Sequence
  Synthetic oligonucleotide
gcaaaaaaatgcgctccctccttcccaaaa

SEQ ID NO: 416120 - DNA, 30 bp, Artificial Sequence
  Synthetic oligonucleotide
ggcggaactttagcattgacttcgccaaaa

SEQ ID NO: 416121 - DNA, 30 bp, Artificial Sequence
  Synthetic oligonucleotide
cttggatgccaaggggcctctcggccaaaa

SEQ ID NO: 416122 - DNA, 30 bp, Artificial Sequence
  Synthetic oligonucleotide
tagtatcgcgttttttgctgttggccaaaa

SEQ ID NO: 416123 - DNA, 30 bp, Artificial Sequence
  Synthetic oligonucleotide
acagggacaagtggcttggtacatccaaaa

SEQ ID NO: 416124 - DNA, 30 bp, Artificial Sequence
  Synthetic oligonucleotide
gaactgcatcgtcgcctccggcctccaaaa

SEQ ID NO: 416125 - DNA, 30 bp, Artificial Sequence
  Synthetic oligonucleotide
tacttggtgattagtgaaaatagtccaaaa

SEQ ID NO: 416126 - DNA, 30 bp, Artificial Sequence
  Synthetic oligonucleotide
tgtatgtctcaagtggtttagggtccaaaa

SEQ ID NO: 416127 - DNA, 30 bp, Artificial Sequence
  Synthetic oligonucleotide
gcgcaggatgcttggtttaacagagcaaaa

SEQ ID NO: 416128 - DNA, 30 bp, Artificial Sequence
  Synthetic oligonucleotide
tccagctcaagaacgaaactggtagcaaaa

SEQ ID NO: 416129 - DNA, 29 bp, Artificial Sequence
  Synthetic oligonucleotide
tagctaatcgcggtgtgttcttagcaaaa

SEQ ID NO: 416130 - DNA, 30 bp, Artificial Sequence
  Synthetic oligonucleotide
caatttgtcgctgtaggaggtaacgcaaaa

SEQ ID NO: 416131 - DNA, 30 bp, Artificial Sequence
  Synthetic oligonucleotide
ggggtcaggttggttttagggttcgcaaaa

SEQ ID NO: 416132 - DNA, 30 bp, Artificial Sequence
  Synthetic oligonucleotide
attagatcgtaattcgagatattggcaaaa

SEQ ID NO: 416133 - DNA, 30 bp, Artificial Sequence
  Synthetic oligonucleotide
ttgaagttcccacataactgcgctgcaaaa

SEQ ID NO: 416134 - DNA, 30 bp, Artificial Sequence
  Synthetic oligonucleotide
gatttgtataggtagccaaagggtgcaaaa

SEQ ID NO: 416135 - DNA, 30 bp, Artificial Sequence
  Synthetic oligonucleotide
gaacttgaatgacatggaatgtttgcaaaa

SEQ ID NO: 416136 - DNA, 30 bp, Artificial Sequence
  Synthetic oligonucleotide
atccgtattaaaaacttgtgagaatcaaaa

SEQ ID NO: 416137 - DNA, 30 bp, Artificial Sequence
  Synthetic oligonucleotide
agtaaattgtgagagtgacatagatcaaaa

SEQ ID NO: 416138 - DNA, 30 bp, Artificial Sequence
  Synthetic oligonucleotide
taacaggacttctagagcacaggatcaaaa

SEQ ID NO: 416139 - DNA, 30 bp, Artificial Sequence
  Synthetic oligonucleotide
taccatggatgtagatcgaagcactcaaaa

SEQ ID NO: 416140 - DNA, 30 bp, Artificial Sequence
  Synthetic oligonucleotide
atctaaggttgcacggtcatcccctcaaaa

SEQ ID NO: 416141 - DNA, 31 bp, Artificial Sequence
  Synthetic oligonucleotide
acccggtccacctttggagtcattctcaaaa

SEQ ID NO: 416142 - DNA, 30 bp, Artificial Sequence
  Synthetic oligonucleotide
gcatgctatatgattataggtgattcaaaa

SEQ ID NO: 416143 - DNA, 30 bp, Artificial Sequence
  Synthetic oligonucleotide
gttctactttgagtggcggaatattcaaaa

SEQ ID NO: 416144 - DNA, 30 bp, Artificial Sequence
  Synthetic oligonucleotide
tatcgtacctccacttggtcgtgttcaaaa

SEQ ID NO: 416145 - DNA, 30 bp, Artificial Sequence
  Synthetic oligonucleotide
gaatgaataatatgacttattccaagaaaa

SEQ ID NO: 416146 - DNA, 30 bp, Artificial Sequence
  Synthetic oligonucleotide
aaaccggtgagattttacggtctaagaaaa

SEQ ID NO: 416147 - DNA, 30 bp, Artificial Sequence
  Synthetic oligonucleotide
aagtgtctcgggaaggatatcccgagaaaa

SEQ ID NO: 416148 - DNA, 30 bp, Artificial Sequence
  Synthetic oligonucleotide
tcattatttgttatgaacacgcggagaaaa

SEQ ID NO: 416149 - DNA, 30 bp, Artificial Sequence
  Synthetic oligonucleotide
aaggggcgtcttagcactatataacgaaaa

SEQ ID NO: 416150 - DNA, 30 bp, Artificial Sequence
  Synthetic oligonucleotide
taactgtgttgatcgagttcagcacgaaaa

SEQ ID NO: 416151 - DNA, 30 bp, Artificial Sequence
  Synthetic oligonucleotide
agggatattcgggaacttaaatcacgaaaa

SEQ ID NO: 416152 - DNA, 30 bp, Artificial Sequence
  Synthetic oligonucleotide
atatcttgctgcgaacgttaagtacgaaaa

SEQ ID NO: 416153 - DNA, 30 bp, Artificial Sequence
  Synthetic oligonucleotide
ccgggttgaaataagaggaatgtacgaaaa

SEQ ID NO: 416154 - DNA, 30 bp, Artificial Sequence
  Synthetic oligonucleotide
cactatgcctagtggggccctgcccgaaaa

SEQ ID NO: 416155 - DNA, 30 bp, Artificial Sequence
  Synthetic oligonucleotide
tcggacacggcatcatttgcaagccgaaaa

SEQ ID NO: 416156 - DNA, 30 bp, Artificial Sequence
  Synthetic oligonucleotide
tttacagtgacgagtaatgatatgcgaaaa

SEQ ID NO: 416157 - DNA, 30 bp, Artificial Sequence
  Synthetic oligonucleotide
cttgggttcggattgcagacgcatcgaaaa

SEQ ID NO: 416158 - DNA, 30 bp, Artificial Sequence
  Synthetic oligonucleotide
tttagcattccgttgtagaagactcgaaaa

SEQ ID NO: 416159 - DNA, 30 bp, Artificial Sequence
  Synthetic oligonucleotide
gtgccccatctgatcagcgggactcgaaaa

SEQ ID NO: 416160 - DNA, 30 bp, Artificial Sequence
  Synthetic oligonucleotide
gaaaaatggttgaacgctcgcggtcgaaaa

SEQ ID NO: 416161 - DNA, 30 bp, Artificial Sequence
  Synthetic oligonucleotide
cttcgaaaaggcagggcgtagtttcgaaaa

SEQ ID NO: 416162 - DNA, 30 bp, Artificial Sequence
  Synthetic oligonucleotide
ctacactgaaacctaaacgtttgcggaaaa

SEQ ID NO: 416163 - DNA, 30 bp, Artificial Sequence
  Synthetic oligonucleotide
caaaaacgcaagctgatcaaccatggaaaa

SEQ ID NO: 416164 - DNA, 30 bp, Artificial Sequence
  Synthetic oligonucleotide
cctgttgcgtaggcattaacataatgaaaa

SEQ ID NO: 416165 - DNA, 30 bp, Artificial Sequence
  Synthetic oligonucleotide
aataaccattctctaactgttcgatgaaaa

SEQ ID NO: 416166 - DNA, 30 bp, Artificial Sequence
  Synthetic oligonucleotide
gtatattggggtataccccccatatgaaaa

SEQ ID NO: 416167 - DNA, 30 bp, Artificial Sequence
  Synthetic oligonucleotide
tgtgatgctccgatccagagggtatgaaaa

SEQ ID NO: 416168 - DNA, 30 bp, Artificial Sequence
  Synthetic oligonucleotide
aacctcgaaggggtttcagttaactgaaaa

SEQ ID NO: 416169 - DNA, 30 bp, Artificial Sequence
  Synthetic oligonucleotide
gtatatccgcgcgatttcaaaacctgaaaa

SEQ ID NO: 416170 - DNA, 30 bp, Artificial Sequence
  Synthetic oligonucleotide
ctaacgagtaatacgtattactagtgaaaa

SEQ ID NO: 416171 - DNA, 30 bp, Artificial Sequence
  Synthetic oligonucleotide
gtctataccagccactaagtgaggtgaaaa

SEQ ID NO: 416172 - DNA, 30 bp, Artificial Sequence
  Synthetic oligonucleotide
cttatgcgtcacaaacgtggcttgtgaaaa

SEQ ID NO: 416173 - DNA, 30 bp, Artificial Sequence
  Synthetic oligonucleotide
attcttagtccggtcgttagtgcttgaaaa

SEQ ID NO: 416174 - DNA, 30 bp, Artificial Sequence
  Synthetic oligonucleotide
acatagagtacaactctgttatgttgaaaa

SEQ ID NO: 416175 - DNA, 30 bp, Artificial Sequence
  Synthetic oligonucleotide
tgtctgtaacgttccggcagtccaataaaa

SEQ ID NO: 416176 - DNA, 30 bp, Artificial Sequence
  Synthetic oligonucleotide
cagttattttgtaaggtgtacgcaataaaa

SEQ ID NO: 416177 - DNA, 30 bp, Artificial Sequence
  Synthetic oligonucleotide
ctggataacctaagcaaacaaataataaaa

SEQ ID NO: 416178 - DNA, 30 bp, Artificial Sequence
  Synthetic oligonucleotide
taccgtgatggtataaatgacaacataaaa

SEQ ID NO: 416179 - DNA, 30 bp, Artificial Sequence
  Synthetic oligonucleotide
gagatagtgcactaagcgtataccataaaa

SEQ ID NO: 416180 - DNA, 30 bp, Artificial Sequence
  Synthetic oligonucleotide
gcttttcgccccgatacgatcgccataaaa

SEQ ID NO: 416181 - DNA, 30 bp, Artificial Sequence
  Synthetic oligonucleotide
ttggcgggtctattggcgagtcggataaaa

SEQ ID NO: 416182 - DNA, 30 bp, Artificial Sequence
  Synthetic oligonucleotide
ggcgtacagaatactgcaaaagctataaaa

SEQ ID NO: 416183 - DNA, 30 bp, Artificial Sequence
  Synthetic oligonucleotide
ttaatagttctgttaagctactctataaaa

SEQ ID NO: 416184 - DNA, 30 bp, Artificial Sequence
  Synthetic oligonucleotide
gcatatgcggttactaggacgtacctaaaa

SEQ ID NO: 416185 - DNA, 30 bp, Artificial Sequence
  Synthetic oligonucleotide
acgactcggtttgataagaggaccctaaaa

SEQ ID NO: 416186 - DNA, 30 bp, Artificial Sequence
  Synthetic oligonucleotide
tgatgtagatgggctggcatagtcctaaaa

SEQ ID NO: 416187 - DNA, 30 bp, Artificial Sequence
  Synthetic oligonucleotide
cgccttacggttctaacgacattcctaaaa

SEQ ID NO: 416188 - DNA, 30 bp, Artificial Sequence
  Synthetic oligonucleotide
taacagatttgaaggggcggtgagctaaaa

SEQ ID NO: 416189 - DNA, 30 bp, Artificial Sequence
  Synthetic oligonucleotide
gcgcccgctgaattgtttagctcgctaaaa

SEQ ID NO: 416190 - DNA, 30 bp, Artificial Sequence
  Synthetic oligonucleotide
cgagttaatgttttggctatcgggctaaaa

SEQ ID NO: 416191 - DNA, 30 bp, Artificial Sequence
  Synthetic oligonucleotide
atgattttattttaaacacgggtgctaaaa

SEQ ID NO: 416192 - DNA, 30 bp, Artificial Sequence
  Synthetic oligonucleotide
ataaaggtagtagcggacttctatctaaaa

SEQ ID NO: 416193 - DNA, 30 bp, Artificial Sequence
  Synthetic oligonucleotide
ctccttgatatagcgtatttagctctaaaa

SEQ ID NO: 416194 - DNA, 30 bp, Artificial Sequence
  Synthetic oligonucleotide
gttacgctagtttcttgtccaattctaaaa

SEQ ID NO: 416195 - DNA, 30 bp, Artificial Sequence
  Synthetic oligonucleotide
gctcgtagtgcagttgtactcattctaaaa

SEQ ID NO: 416196 - DNA, 30 bp, Artificial Sequence
  Synthetic oligonucleotide
aggagccattcggtccagcggagagtaaaa

SEQ ID NO: 416197 - DNA, 30 bp, Artificial Sequence
  Synthetic oligonucleotide
gttataagcaccggttgtgtaatagtaaaa

SEQ ID NO: 416198 - DNA, 30 bp, Artificial Sequence
  Synthetic oligonucleotide
tggttgttgtccgaagattaatccgtaaaa

SEQ ID NO: 416199 - DNA, 30 bp, Artificial Sequence
  Synthetic oligonucleotide
gtaaaagttacatacacatgggtcgtaaaa

SEQ ID NO: 416200 - DNA, 30 bp, Artificial Sequence
  Synthetic oligonucleotide
tgacggcggagcctgacaggcatggtaaaa

SEQ ID NO: 416201 - DNA, 30 bp, Artificial Sequence
  Synthetic oligonucleotide
cctggtagatttccaacgttctgtgtaaaa

SEQ ID NO: 416202 - DNA, 30 bp, Artificial Sequence
  Synthetic oligonucleotide
gagttcaaaatgaccaatcggcaattaaaa

SEQ ID NO: 416203 - DNA, 30 bp, Artificial Sequence
  Synthetic oligonucleotide
tatcaagatggcccgcgccattaattaaaa

SEQ ID NO: 416204 - DNA, 30 bp, Artificial Sequence
  Synthetic oligonucleotide
tgggggctggcagcgcgccatatattaaaa

SEQ ID NO: 416205 - DNA, 30 bp, Artificial Sequence
  Synthetic oligonucleotide
ggaccaaaatatgcagcgaaaaacttaaaa

SEQ ID NO: 416206 - DNA, 30 bp, Artificial Sequence
  Synthetic oligonucleotide
gagttatttagatgtaattggtacttaaaa

SEQ ID NO: 416207 - DNA, 30 bp, Artificial Sequence
  Synthetic oligonucleotide
aagcgtgcgtcatgcggatattacttaaaa

SEQ ID NO: 416208 - DNA, 30 bp, Artificial Sequence
  Synthetic oligonucleotide
actaatgttatacgacggtcttccttaaaa

SEQ ID NO: 416209 - DNA, 30 bp, Artificial Sequence
  Synthetic oligonucleotide
tagtcaaccaacaaagttccctgcttaaaa

SEQ ID NO: 416210 - DNA, 30 bp, Artificial Sequence
  Synthetic oligonucleotide
gtaggtatctaggcatctcgcgtcttaaaa

SEQ ID NO: 416211 - DNA, 30 bp, Artificial Sequence
  Synthetic oligonucleotide
aaggagattttaacggttagacagttaaaa

SEQ ID NO: 416212 - DNA, 30 bp, Artificial Sequence
  Synthetic oligonucleotide
agacccgtttcgctccgcgccgcgttaaaa

SEQ ID NO: 416213 - DNA, 30 bp, Artificial Sequence
  Synthetic oligonucleotide
ctgatacttcatggggaagtgaggttaaaa

SEQ ID NO: 416214 - DNA, 30 bp, Artificial Sequence
  Synthetic oligonucleotide
aaggttattaggaccatcctgactttaaaa

SEQ ID NO: 416215 - DNA, 30 bp, Artificial Sequence
  Synthetic oligonucleotide
agctcaggatgcaggcacgtatctttaaaa

SEQ ID NO: 416216 - DNA, 30 bp, Artificial Sequence
  Synthetic oligonucleotide
agcacgccgttacataacggttgtttaaaa

SEQ ID NO: 416217 - DNA, 30 bp, Artificial Sequence
  Synthetic oligonucleotide
ccaacctgacataattcgtcgcgcaacaaa

SEQ ID NO: 416218 - DNA, 30 bp, Artificial Sequence
  Synthetic oligonucleotide
ctgtctgcggcgcggattaggggcaacaaa

SEQ ID NO: 416219 - DNA, 30 bp, Artificial Sequence
  Synthetic oligonucleotide
taatacggtaagcgtatctgtttcaacaaa

SEQ ID NO: 416220 - DNA, 30 bp, Artificial Sequence
  Synthetic oligonucleotide
ttctatagatcctattcatctcataacaaa

SEQ ID NO: 416221 - DNA, 30 bp, Artificial Sequence
  Synthetic oligonucleotide
ggactccctctttattacagcgataacaaa

SEQ ID NO: 416222 - DNA, 30 bp, Artificial Sequence
  Synthetic oligonucleotide
gatgtcggctcgcgctccaactctaacaaa

SEQ ID NO: 416223 - DNA, 30 bp, Artificial Sequence
  Synthetic oligonucleotide
agtcattcagcgtagaataatggtaacaaa

SEQ ID NO: 416224 - DNA, 30 bp, Artificial Sequence
  Synthetic oligonucleotide
gaacttcgggtcgcctccctagtccacaaa

SEQ ID NO: 416225 - DNA, 30 bp, Artificial Sequence
  Synthetic oligonucleotide
ctggcgttctatttctcagagtagcacaaa

SEQ ID NO: 416226 - DNA, 30 bp, Artificial Sequence
  Synthetic oligonucleotide
taacgcttccgcgttaattgggggcacaaa

SEQ ID NO: 416227 - DNA, 30 bp, Artificial Sequence
  Synthetic oligonucleotide
tagacaatgtgcgctgccagtggtcacaaa

SEQ ID NO: 416228 - DNA, 30 bp, Artificial Sequence
  Synthetic oligonucleotide
atcgttctgttcaaggtgtcttgtcacaaa

SEQ ID NO: 416229 - DNA, 30 bp, Artificial Sequence
  Synthetic oligonucleotide
tttccataggataccatccctgaagacaaa

SEQ ID NO: 416230 - DNA, 30 bp, Artificial Sequence
  Synthetic oligonucleotide
ctttaccgttggaaggcttttagagacaaa

SEQ ID NO: 416231 - DNA, 30 bp, Artificial Sequence
  Synthetic oligonucleotide
ttatacgggtgtgttattgaactagacaaa

SEQ ID NO: 416232 - DNA, 30 bp, Artificial Sequence
  Synthetic oligonucleotide
ttttgttagcgctctttaggtctcgacaaa

SEQ ID NO: 416233 - DNA, 30 bp, Artificial Sequence
  Synthetic oligonucleotide
tgcacttgaggtctcttctttcaggacaaa

SEQ ID NO: 416234 - DNA, 30 bp, Artificial Sequence
  Synthetic oligonucleotide
gctttagtcccgccaagattgtgggacaaa

SEQ ID NO: 416235 - DNA, 30 bp, Artificial Sequence
  Synthetic oligonucleotide
acagtcggctaatcggctaacatggacaaa

SEQ ID NO: 416236 - DNA, 30 bp, Artificial Sequence
  Synthetic oligonucleotide
ttaatgtcggcaaactgccgaaatgacaaa

SEQ ID NO: 416237 - DNA, 30 bp, Artificial Sequence
  Synthetic oligonucleotide
aacaaatacaatcaatcctatacatacaaa

SEQ ID NO: 416238 - DNA, 30 bp, Artificial Sequence
  Synthetic oligonucleotide
ggtttgagagtagaacaatctaactacaaa

SEQ ID NO: 416239 - DNA, 30 bp, Artificial Sequence
  Synthetic oligonucleotide
gttaagtggggttataccccaagctacaaa

SEQ ID NO: 416240 - DNA, 30 bp, Artificial Sequence
  Synthetic oligonucleotide
ttgaattgctgaatccaccgcggctacaaa

SEQ ID NO: 416241 - DNA, 30 bp, Artificial Sequence
  Synthetic oligonucleotide
tgctctagagttcatctaaacctctacaaa

SEQ ID NO: 416242 - DNA, 30 bp, Artificial Sequence
  Synthetic oligonucleotide
aaaagtaagtggcgcccaggcccgtacaaa

SEQ ID NO: 416243 - DNA, 30 bp, Artificial Sequence
  Synthetic oligonucleotide
actctgacaagtacatggaatttgtacaaa

SEQ ID NO: 416244 - DNA, 30 bp, Artificial Sequence
  Synthetic oligonucleotide
accccctgtgctatgacttaaccaaccaaa

SEQ ID NO: 416245 - DNA, 30 bp, Artificial Sequence
  Synthetic oligonucleotide
tggactctctagggatgccaggccaccaaa

SEQ ID NO: 416246 - DNA, 30 bp, Artificial Sequence
  Synthetic oligonucleotide
ctattttggtgtaaaaggttcatgaccaaa

SEQ ID NO: 416247 - DNA, 30 bp, Artificial Sequence
  Synthetic oligonucleotide
atagcagagaatagtattctacataccaaa

SEQ ID NO: 416248 - DNA, 30 bp, Artificial Sequence
  Synthetic oligonucleotide
cccttgtttgtgccgattctattacccaaa

SEQ ID NO: 416249 - DNA, 30 bp, Artificial Sequence
  Synthetic oligonucleotide
agtttgatggatcaatcaacgcaccccaaa

SEQ ID NO: 416250 - DNA, 30 bp, Artificial Sequence
  Synthetic oligonucleotide
ttaggcgggtttgaagaggtttaccccaaa

SEQ ID NO: 416251 - DNA, 30 bp, Artificial Sequence
  Synthetic oligonucleotide
tttgggaagtctctcagaacagcgcccaaa

SEQ ID NO: 416252 - DNA, 30 bp, Artificial Sequence
  Synthetic oligonucleotide
gggttgaccgagggggacaaccctcccaaa

SEQ ID NO: 416253 - DNA, 30 bp, Artificial Sequence
  Synthetic oligonucleotide
tttcacccatcccgtttgggaaacgccaaa

SEQ ID NO: 416254 - DNA, 30 bp, Artificial Sequence
  Synthetic oligonucleotide
agacgcaggttgattcgaatgcacgccaaa

SEQ ID NO: 416255 - DNA, 30 bp, Artificial Sequence
  Synthetic oligonucleotide
aaggggccccgtaagcggcttgacgccaaa

SEQ ID NO: 416256 - DNA, 30 bp, Artificial Sequence
  Synthetic oligonucleotide
tgcgagtattaattaggcacataggccaaa

SEQ ID NO: 416257 - DNA, 30 bp, Artificial Sequence
  Synthetic oligonucleotide
aagattcggctctagtaagtttgggccaaa

SEQ ID NO: 416258 - DNA, 30 bp, Artificial Sequence
  Synthetic oligonucleotide
gtattgttaactaccctcccgggctccaaa

SEQ ID NO: 416259 - DNA, 30 bp, Artificial Sequence
  Synthetic oligonucleotide
cagcattagtatccaattcaacagtccaaa

SEQ ID NO: 416260 - DNA, 30 bp, Artificial Sequence
  Synthetic oligonucleotide
aacaaagaaagatcacggcacgtgtccaaa

SEQ ID NO: 416261 - DNA, 30 bp, Artificial Sequence
  Synthetic oligonucleotide
acgaaacgctaactttcgctcgtgtccaaa

SEQ ID NO: 416262 - DNA, 30 bp, Artificial Sequence
  Synthetic oligonucleotide
aacaccagtcacctatacttatgttccaaa

SEQ ID NO: 416263 - DNA, 30 bp, Artificial Sequence
  Synthetic oligonucleotide
tcttcagtaataagtacgattgcaagcaaa

SEQ ID NO: 416264 - DNA, 30 bp, Artificial Sequence
  Synthetic oligonucleotide
cgagagcattgaatgtgttggaaacgcaaa

SEQ ID NO: 416265 - DNA, 30 bp, Artificial Sequence
  Synthetic oligonucleotide
gtcccgagggctagtaaacttgcacgcaaa

SEQ ID NO: 416266 - DNA, 30 bp, Artificial Sequence
  Synthetic oligonucleotide
gtcaactctagtagaactttgagacgcaaa

SEQ ID NO: 416267 - DNA, 30 bp, Artificial Sequence
  Synthetic oligonucleotide
cctataagctagcagcagtaagtacgcaaa

SEQ ID NO: 416268 - DNA, 30 bp, Artificial Sequence
  Synthetic oligonucleotide
accctttaggatggaggacctgtacgcaaa

SEQ ID NO: 416269 - DNA, 30 bp, Artificial Sequence
  Synthetic oligonucleotide
cattctggttttaagttcttgccccgcaaa

SEQ ID NO: 416270 - DNA, 30 bp, Artificial Sequence
  Synthetic oligonucleotide
ttgcgaatcaccgccttgtacggccgcaaa

SEQ ID NO: 416271 - DNA, 30 bp, Artificial Sequence
  Synthetic oligonucleotide
ccaaaaggtgtggctagtacgcagcgcaaa

SEQ ID NO: 416272 - DNA, 30 bp, Artificial Sequence
  Synthetic oligonucleotide
gcatcacggaaactttagctcacgcgcaaa

SEQ ID NO: 416273 - DNA, 30 bp, Artificial Sequence
  Synthetic oligonucleotide
acggtctaatcggaagttcgaccgcgcaaa

SEQ ID NO: 416274 - DNA, 30 bp, Artificial Sequence
  Synthetic oligonucleotide
gtgagttctaacggccatacatggcgcaaa

SEQ ID NO: 416275 - DNA, 30 bp, Artificial Sequence
  Synthetic oligonucleotide
gactggggaagcgacggctagatgcgcaaa

SEQ ID NO: 416276 - DNA, 30 bp, Artificial Sequence
  Synthetic oligonucleotide
atttctaacagccagacaagccgtcgcaaa

SEQ ID NO: 416277 - DNA, 30 bp, Artificial Sequence
  Synthetic oligonucleotide
tgcctttgtgcatagttgtccggtcgcaaa

SEQ ID NO: 416278 - DNA, 30 bp, Artificial Sequence
  Synthetic oligonucleotide
catatggatgggtctgggattcaaggcaaa

SEQ ID NO: 416279 - DNA, 30 bp, Artificial Sequence
  Synthetic oligonucleotide
aagaatgtcctgagacgggcaataggcaaa

SEQ ID NO: 416280 - DNA, 30 bp, Artificial Sequence
  Synthetic oligonucleotide
gagaaagcgagaggttgccttctaggcaaa

SEQ ID NO: 416281 - DNA, 30 bp, Artificial Sequence
  Synthetic oligonucleotide
tcatctccttaccggcttttgaccggcaaa

SEQ ID NO: 416282 - DNA, 30 bp, Artificial Sequence
  Synthetic oligonucleotide
gagacgatacccagcggtcctcgcggcaaa

SEQ ID NO: 416283 - DNA, 30 bp, Artificial Sequence
  Synthetic oligonucleotide
taaccgtctattctatttcgtaaatgcaaa

SEQ ID NO: 416284 - DNA, 30 bp, Artificial Sequence
  Synthetic oligonucleotide
actcgccttgacactagattctgatgcaaa

SEQ ID NO: 416285 - DNA, 30 bp, Artificial Sequence
  Synthetic oligonucleotide
aatgtgtcagattggctgaccttatgcaaa

SEQ ID NO: 416286 - DNA, 30 bp, Artificial Sequence
  Synthetic oligonucleotide
tagcgtgtttgacgattagtagactgcaaa

SEQ ID NO: 416287 - DNA, 30 bp, Artificial Sequence
  Synthetic oligonucleotide
tagcacccattggccgatttattctgcaaa

SEQ ID NO: 416288 - DNA, 30 bp, Artificial Sequence
  Synthetic oligonucleotide
actaaatacgtgttacctggtacgtgcaaa

SEQ ID NO: 416289 - DNA, 30 bp, Artificial Sequence
  Synthetic oligonucleotide
gaactttacctgcttatcctaatgtgcaaa

SEQ ID NO: 416290 - DNA, 30 bp, Artificial Sequence
  Synthetic oligonucleotide
gtcctgaacggtaggttagttctgtgcaaa

SEQ ID NO: 416291 - DNA, 30 bp, Artificial Sequence
  Synthetic oligonucleotide
tacgattatggtttcggcattgtgtgcaaa

SEQ ID NO: 416292 - DNA, 30 bp, Artificial Sequence
  Synthetic oligonucleotide
cagcggtttctagctatatgggtaatcaaa

SEQ ID NO: 416293 - DNA, 30 bp, Artificial Sequence
  Synthetic oligonucleotide
acttaaaggttatatgtttcttccatcaaa

SEQ ID NO: 416294 - DNA, 30 bp, Artificial Sequence
  Synthetic oligonucleotide
gaggctgcttgttaccaaagacgcatcaaa

SEQ ID NO: 416295 - DNA, 30 bp, Artificial Sequence
  Synthetic oligonucleotide
aaaccttctgggctaatacaaatcatcaaa

SEQ ID NO: 416296 - DNA, 25 bp, Artificial Sequence
  Synthetic oligonucleotide
cctatcgaaaacccccctcatcaaa

SEQ ID NO: 416297 - DNA, 30 bp, Artificial Sequence
  Synthetic oligonucleotide
cactgtcagaaatagctactcctcatcaaa

SEQ ID NO: 416298 - DNA, 30 bp, Artificial Sequence
  Synthetic oligonucleotide
tcacatgtgctatggtcatagccgatcaaa

SEQ ID NO: 416299 - DNA, 30 bp, Artificial Sequence
  Synthetic oligonucleotide
ctgaagtctatcggaccctcatggatcaaa

SEQ ID NO: 416300 - DNA, 30 bp, Artificial Sequence
  Synthetic oligonucleotide
gagtgtggacgcgacacatcagatatcaaa

SEQ ID NO: 416301 - DNA, 30 bp, Artificial Sequence
  Synthetic oligonucleotide
tcccgatacgaggcaccatttactatcaaa

SEQ ID NO: 416302 - DNA, 30 bp, Artificial Sequence
  Synthetic oligonucleotide
cgcagatagcacgccactcgtggtatcaaa

SEQ ID NO: 416303 - DNA, 30 bp, Artificial Sequence
  Synthetic oligonucleotide
tagttagtttggacatgcaagctactcaaa

SEQ ID NO: 416304 - DNA, 30 bp, Artificial Sequence
  Synthetic oligonucleotide
gcacttgcgtcctcatggttaaacctcaaa

SEQ ID NO: 416305 - DNA, 30 bp, Artificial Sequence
  Synthetic oligonucleotide
atatagccttgtgcgggtggccgcctcaaa

SEQ ID NO: 416306 - DNA, 30 bp, Artificial Sequence
  Synthetic oligonucleotide
aatcaatggcgatgctggttcccgctcaaa

SEQ ID NO: 416307 - DNA, 30 bp, Artificial Sequence
  Synthetic oligonucleotide
tttacacaatatactaatcttctgctcaaa

SEQ ID NO: 416308 - DNA, 30 bp, Artificial Sequence
  Synthetic oligonucleotide
ttgtatttgagacccgtgatttctctcaaa

SEQ ID NO: 416309 - DNA, 30 bp, Artificial Sequence
  Synthetic oligonucleotide
ggttgctaagcgcaccatcacttagtcaaa

SEQ ID NO: 416310 - DNA, 30 bp, Artificial Sequence
  Synthetic oligonucleotide
ttgctgatatagtcgcttattcacgtcaaa

SEQ ID NO: 416311 - DNA, 30 bp, Artificial Sequence
  Synthetic oligonucleotide
gccgtgatggtcacgcatcacgaggtcaaa

SEQ ID NO: 416312 - DNA, 30 bp, Artificial Sequence
  Synthetic oligonucleotide
tgcactgcaacggctcaggtcgatgtcaaa

SEQ ID NO: 416313 - DNA, 30 bp, Artificial Sequence
  Synthetic oligonucleotide
tgttattcgttcgataggctggctgtcaaa

SEQ ID NO: 416314 - DNA, 30 bp, Artificial Sequence
  Synthetic oligonucleotide
gaatttcatgggaggcaagctattgtcaaa

SEQ ID NO: 416315 - DNA, 30 bp, Artificial Sequence
  Synthetic oligonucleotide
ttggcccccctctgaatgatgaaattcaaa

SEQ ID NO: 416316 - DNA, 30 bp, Artificial Sequence
  Synthetic oligonucleotide
ctagcattttaaaatctcaatctattcaaa

SEQ ID NO: 416317 - DNA, 30 bp, Artificial Sequence
  Synthetic oligonucleotide
tacgcgccaacgtataatcgtatcttcaaa

SEQ ID NO: 416318 - DNA, 30 bp, Artificial Sequence
  Synthetic oligonucleotide
cattatcagatgaagttctgtatcttcaaa

SEQ ID NO: 416319 - DNA, 30 bp, Artificial Sequence
  Synthetic oligonucleotide
ctcggcttggggtggaaactccgtttcaaa

SEQ ID NO: 416320 - DNA, 30 bp, Artificial Sequence
  Synthetic oligonucleotide
gctaaggaaacaatttcccggaaaaagaaa

SEQ ID NO: 416321 - DNA, 30 bp, Artificial Sequence
  Synthetic oligonucleotide
gaaatgagcgccctcatctcaacaaagaaa

SEQ ID NO: 416322 - DNA, 30 bp, Artificial Sequence
  Synthetic oligonucleotide
agcacattttttcaacgttaactaaagaaa

SEQ ID NO: 416323 - DNA, 30 bp, Artificial Sequence
  Synthetic oligonucleotide
tagtacccccttcttatatgtgtaaagaaa

SEQ ID NO: 416324 - DNA, 30 bp, Artificial Sequence
  Synthetic oligonucleotide
cgaccagcgagtaaaacttgattcaagaaa

SEQ ID NO: 416325 - DNA, 30 bp, Artificial Sequence
  Synthetic oligonucleotide
tgcatctggccatttctaaagacgaagaaa

SEQ ID NO: 416326 - DNA, 30 bp, Artificial Sequence
  Synthetic oligonucleotide
tacgggcgacaggtaaggcgcccgaagaaa

SEQ ID NO: 416327 - DNA, 30 bp, Artificial Sequence
  Synthetic oligonucleotide
agtccgtacttggatcacgttgctaagaaa

SEQ ID NO: 416328 - DNA, 30 bp, Artificial Sequence
  Synthetic oligonucleotide
catgttgatgaatcggcaagtcgacagaaa

SEQ ID NO: 416329 - DNA, 30 bp, Artificial Sequence
  Synthetic oligonucleotide
agtcgttactatgggggtcatcaccagaaa

SEQ ID NO: 416330 - DNA, 30 bp, Artificial Sequence
  Synthetic oligonucleotide
tatcatattcatccttggggatgccagaaa

SEQ ID NO: 416331 - DNA, 30 bp, Artificial Sequence
  Synthetic oligonucleotide
ggcgcttgtagacctaggaggtgccagaaa

SEQ ID NO: 416332 - DNA, 30 bp, Artificial Sequence
  Synthetic oligonucleotide
aatcggggccctgagatatggtgccagaaa

SEQ ID NO: 416333 - DNA, 30 bp, Artificial Sequence
  Synthetic oligonucleotide
gacagcttcgttttatggaagccgcagaaa

SEQ ID NO: 416334 - DNA, 30 bp, Artificial Sequence
  Synthetic oligonucleotide
tagatcagaagttgcatattggggcagaaa

SEQ ID NO: 416335 - DNA, 30 bp, Artificial Sequence
  Synthetic oligonucleotide
gcacaagttaccctaaagggttgtcagaaa

SEQ ID NO: 416336 - DNA, 30 bp, Artificial Sequence
  Synthetic oligonucleotide
cttggggaaggccaatctgcagccgagaaa

SEQ ID NO: 416337 - DNA, 30 bp, Artificial Sequence
  Synthetic oligonucleotide
ccgtatgcattacagtccacatgggagaaa

SEQ ID NO: 416338 - DNA, 30 bp, Artificial Sequence
  Synthetic oligonucleotide
ttacattgaaataaccgtaatgaatagaaa

SEQ ID NO: 416339 - DNA, 30 bp, Artificial Sequence
  Synthetic oligonucleotide
tttccatgcgcgagcagtcgtatatagaaa

SEQ ID NO: 416340 - DNA, 30 bp, Artificial Sequence
  Synthetic oligonucleotide
caaactcaggttttttggttcggctagaaa

SEQ ID NO: 416341 - DNA, 30 bp, Artificial Sequence
  Synthetic oligonucleotide
cttcctagcggctgtaaggcatattagaaa

SEQ ID NO: 416342 - DNA, 30 bp, Artificial Sequence
  Synthetic oligonucleotide
gggggcaagactatcgccttgtattagaaa

SEQ ID NO: 416343 - DNA, 30 bp, Artificial Sequence
  Synthetic oligonucleotide
taaacagtcacgatatacatgttttagaaa

SEQ ID NO: 416344 - DNA, 30 bp, Artificial Sequence
  Synthetic oligonucleotide
aggaagggttcacgttcgtgttaaacgaaa

SEQ ID NO: 416345 - DNA, 30 bp, Artificial Sequence
  Synthetic oligonucleotide
ctccgttgtctcaagctgagctgaacgaaa

SEQ ID NO: 416346 - DNA, 30 bp, Artificial Sequence
  Synthetic oligonucleotide
aataccaaatatgtattcgaaaacacgaaa

SEQ ID NO: 416347 - DNA, 30 bp, Artificial Sequence
  Synthetic oligonucleotide
attatttttcccgcacgttgagacacgaaa

SEQ ID NO: 416348 - DNA, 30 bp, Artificial Sequence
  Synthetic oligonucleotide
gcacctggtctaggttttattagaccgaaa

SEQ ID NO: 416349 - DNA, 30 bp, Artificial Sequence
  Synthetic oligonucleotide
aggttaaagacgtctgagccgttcccgaaa

SEQ ID NO: 416350 - DNA, 30 bp, Artificial Sequence
  Synthetic oligonucleotide
tacgtccgtcgccacaggtggtagccgaaa

SEQ ID NO: 416351 - DNA, 30 bp, Artificial Sequence
  Synthetic oligonucleotide
aaacgattagattcttagctttgtccgaaa

SEQ ID NO: 416352 - DNA, 30 bp, Artificial Sequence
  Synthetic oligonucleotide
tgataagctccattcttcaatgaagcgaaa

SEQ ID NO: 416353 - DNA, 30 bp, Artificial Sequence
  Synthetic oligonucleotide
cagttgagatgcgaacacgagctagcgaaa

SEQ ID NO: 416354 - DNA, 30 bp, Artificial Sequence
  Synthetic oligonucleotide
acgtcggggtgacacggtatctgcgcgaaa

SEQ ID NO: 416355 - DNA, 30 bp, Artificial Sequence
  Synthetic oligonucleotide
gatagatttaagtttaaggggatcgcgaaa

SEQ ID NO: 416356 - DNA, 30 bp, Artificial Sequence
  Synthetic oligonucleotide
tgcactttcgttgcccatctgtaggcgaaa

SEQ ID NO: 416357 - DNA, 30 bp, Artificial Sequence
  Synthetic oligonucleotide
ggggagggtgtagatttttagacggcgaaa

SEQ ID NO: 416358 - DNA, 30 bp, Artificial Sequence
  Synthetic oligonucleotide
agaatggagagtctgcggaacagggcgaaa

SEQ ID NO: 416359 - DNA, 30 bp, Artificial Sequence
  Synthetic oligonucleotide
tgcaaatttattgtacacggtgttgcgaaa

SEQ ID NO: 416360 - DNA, 30 bp, Artificial Sequence
  Synthetic oligonucleotide
agtcttgtgtccaggtcgtccacatcgaaa

SEQ ID NO: 416361 - DNA, 30 bp, Artificial Sequence
  Synthetic oligonucleotide
gggtatctatgatggtgttaaatatcgaaa

SEQ ID NO: 416362 - DNA, 30 bp, Artificial Sequence
  Synthetic oligonucleotide
acgttcaattattccccccgggtatcgaaa

SEQ ID NO: 416363 - DNA, 30 bp, Artificial Sequence
  Synthetic oligonucleotide
atattatgaagatcatagcacttatcgaaa

SEQ ID NO: 416364 - DNA, 30 bp, Artificial Sequence
  Synthetic oligonucleotide
cttatacaagtgaccataggccactcgaaa

SEQ ID NO: 416365 - DNA, 30 bp, Artificial Sequence
  Synthetic oligonucleotide
gctggataaggtgcagcaggtccctcgaaa

SEQ ID NO: 416366 - DNA, 30 bp, Artificial Sequence
  Synthetic oligonucleotide
ggcgatcagtacgttattagacgctcgaaa

SEQ ID NO: 416367 - DNA, 30 bp, Artificial Sequence
  Synthetic oligonucleotide
aagttttaagtgcgatcggtgcgctcgaaa

SEQ ID NO: 416368 - DNA, 30 bp, Artificial Sequence
  Synthetic oligonucleotide
gccagactatagacgcgatcgcgttcgaaa

SEQ ID NO: 416369 - DNA, 30 bp, Artificial Sequence
  Synthetic oligonucleotide
gcaggtaggatatgatgcatcatttcgaaa

SEQ ID NO: 416370 - DNA, 30 bp, Artificial Sequence
  Synthetic oligonucleotide
aaaatcgagagctcagaagggctttcgaaa

SEQ ID NO: 416371 - DNA, 30 bp, Artificial Sequence
  Synthetic oligonucleotide
gctatctggagatgacaagccgaaaggaaa

SEQ ID NO: 416372 - DNA, 30 bp, Artificial Sequence
  Synthetic oligonucleotide
atgggagccttggttttcattgaaaggaaa

SEQ ID NO: 416373 - DNA, 30 bp, Artificial Sequence
  Synthetic oligonucleotide
gttgttgaacgccagtaccggcgaaggaaa

SEQ ID NO: 416374 - DNA, 30 bp, Artificial Sequence
  Synthetic oligonucleotide
gatgttggaatttaccatggtcccaggaaa

SEQ ID NO: 416375 - DNA, 30 bp, Artificial Sequence
  Synthetic oligonucleotide
gtccatttgtggtggttttgggccaggaaa

SEQ ID NO: 416376 - DNA, 30 bp, Artificial Sequence
  Synthetic oligonucleotide
atacaagcccgtcattccgtgattaggaaa

SEQ ID NO: 416377 - DNA, 30 bp, Artificial Sequence
  Synthetic oligonucleotide
tgagccagaaattcccccctataacggaaa

SEQ ID NO: 416378 - DNA, 30 bp, Artificial Sequence
  Synthetic oligonucleotide
gacggaccgttaggttctggcagacggaaa

SEQ ID NO: 416379 - DNA, 30 bp, Artificial Sequence
  Synthetic oligonucleotide
cgaagcgatcacgtggtttgcagccggaaa

SEQ ID NO: 416380 - DNA, 30 bp, Artificial Sequence
  Synthetic oligonucleotide
atccggggccagatcaggcactgccggaaa

SEQ ID NO: 416381 - DNA, 30 bp, Artificial Sequence
  Synthetic oligonucleotide
caagagaccgcgaacaatttctgccggaaa

SEQ ID NO: 416382 - DNA, 30 bp, Artificial Sequence
  Synthetic oligonucleotide
ttagataattgcgagctcttaaatcggaaa

SEQ ID NO: 416383 - DNA, 30 bp, Artificial Sequence
  Synthetic oligonucleotide
caagtcatggctattggtttaactcggaaa

SEQ ID NO: 416384 - DNA, 30 bp, Artificial Sequence
  Synthetic oligonucleotide
caacccgttcgcctactttgagctcggaaa

SEQ ID NO: 416385 - DNA, 30 bp, Artificial Sequence
  Synthetic oligonucleotide
gaatgtagcgttctggacacttctcggaaa

SEQ ID NO: 416386 - DNA, 30 bp, Artificial Sequence
  Synthetic oligonucleotide
tttcattctatgtgcactagctgtcggaaa

SEQ ID NO: 416387 - DNA, 30 bp, Artificial Sequence
  Synthetic oligonucleotide
cttcccgtcagcagggttaacgttcggaaa

SEQ ID NO: 416388 - DNA, 30 bp, Artificial Sequence
  Synthetic oligonucleotide
aaccagaaatacattgcatactgcgggaaa

SEQ ID NO: 416389 - DNA, 30 bp, Artificial Sequence
  Synthetic oligonucleotide
tcacatatgttgggtcactcttgcgggaaa

SEQ ID NO: 416390 - DNA, 30 bp, Artificial Sequence
  Synthetic oligonucleotide
ttccatgagtcgtaaattatcttggggaaa

SEQ ID NO: 416391 - DNA, 30 bp, Artificial Sequence
  Synthetic oligonucleotide
tgaagaggactgaacaacgttcatgggaaa

SEQ ID NO: 416392 - DNA, 30 bp, Artificial Sequence
  Synthetic oligonucleotide
gttttggggaaggccaagatttatgggaaa

SEQ ID NO: 416393 - DNA, 30 bp, Artificial Sequence
  Synthetic oligonucleotide
gcgtttgcgctaaacccccactcatggaaa

SEQ ID NO: 416394 - DNA, 30 bp, Artificial Sequence
  Synthetic oligonucleotide
gcgcgtagagcgcgctcgtacatatggaaa

SEQ ID NO: 416395 - DNA, 30 bp, Artificial Sequence
  Synthetic oligonucleotide
catccagatagaggtagcattaactggaaa

SEQ ID NO: 416396 - DNA, 30 bp, Artificial Sequence
  Synthetic oligonucleotide
gagcagatggatgttatagttgagtggaaa

SEQ ID NO: 416397 - DNA, 30 bp, Artificial Sequence
  Synthetic oligonucleotide
atataagagcttttggaccccttgtggaaa

SEQ ID NO: 416398 - DNA, 30 bp, Artificial Sequence
  Synthetic oligonucleotide
aatacggttctaaggaagcgcgtttggaaa

SEQ ID NO: 416399 - DNA, 30 bp, Artificial Sequence
  Synthetic oligonucleotide
ttccgcagaaccagttcatgcaaaatgaaa

SEQ ID NO: 416400 - DNA, 30 bp, Artificial Sequence
  Synthetic oligonucleotide
ggctaactacacctcgcgtgtgaaatgaaa

SEQ ID NO: 416401 - DNA, 30 bp, Artificial Sequence
  Synthetic oligonucleotide
ggcacaccgctaaccttcaacgcaatgaaa

SEQ ID NO: 416402 - DNA, 30 bp, Artificial Sequence
  Synthetic oligonucleotide
agaggcaggatcgaggtagtcataatgaaa

SEQ ID NO: 416403 - DNA, 30 bp, Artificial Sequence
  Synthetic oligonucleotide
gagactcatgcttcatggctcttaatgaaa

SEQ ID NO: 416404 - DNA, 30 bp, Artificial Sequence
  Synthetic oligonucleotide
gcatgcaccgccaactgtttacacatgaaa

SEQ ID NO: 416405 - DNA, 30 bp, Artificial Sequence
  Synthetic oligonucleotide
gctacacttacaggtcagcgtcacatgaaa

SEQ ID NO: 416406 - DNA, 30 bp, Artificial Sequence
  Synthetic oligonucleotide
tgtggaagctaacttttcgtaagcatgaaa

SEQ ID NO: 416407 - DNA, 30 bp, Artificial Sequence
  Synthetic oligonucleotide
aaatgttacgatctggaaccacgcatgaaa

SEQ ID NO: 416408 - DNA, 30 bp, Artificial Sequence
  Synthetic oligonucleotide
gaagtttccggataagacgcgttcatgaaa

SEQ ID NO: 416409 - DNA, 30 bp, Artificial Sequence
  Synthetic oligonucleotide
gccctttcaacaagaagttttaaactgaaa

SEQ ID NO: 416410 - DNA, 29 bp, Artificial Sequence
  Synthetic oligonucleotide
ctgtagtatgacagagaggctccctgaaa

SEQ ID NO: 416411 - DNA, 30 bp, Artificial Sequence
  Synthetic oligonucleotide
catttaaatgtaaaatttcccagcctgaaa

SEQ ID NO: 416412 - DNA, 30 bp, Artificial Sequence
  Synthetic oligonucleotide
aattaactcgcgccagttgaattcctgaaa

SEQ ID NO: 416413 - DNA, 30 bp, Artificial Sequence
  Synthetic oligonucleotide
gcgctttgtacacggagtagttggctgaaa

SEQ ID NO: 416414 - DNA, 30 bp, Artificial Sequence
  Synthetic oligonucleotide
tctagttgttctgtctaggacgatctgaaa

SEQ ID NO: 416415 - DNA, 30 bp, Artificial Sequence
  Synthetic oligonucleotide
attacgattctcaatcgctgaaaagtgaaa

SEQ ID NO: 416416 - DNA, 30 bp, Artificial Sequence
  Synthetic oligonucleotide
tttccgacatagtctgctcgctaagtgaaa

SEQ ID NO: 416417 - DNA, 30 bp, Artificial Sequence
  Synthetic oligonucleotide
tttaatctgtgggctgtcttaagagtgaaa

SEQ ID NO: 416418 - DNA, 30 bp, Artificial Sequence
  Synthetic oligonucleotide
cccgtgctcaacacacatgtgttagtgaaa

SEQ ID NO: 416419 - DNA, 30 bp, Artificial Sequence
  Synthetic oligonucleotide
taatttctgtatcggtagtagaccgtgaaa

SEQ ID NO: 416420 - DNA, 30 bp, Artificial Sequence
  Synthetic oligonucleotide
ttcttccgttaaacccgcaaaatcgtgaaa

SEQ ID NO: 416421 - DNA, 31 bp, Artificial Sequence
  Synthetic oligonucleotide
gaaattaccataacgtaaaggcctcgtgaaa

SEQ ID NO: 416422 - DNA, 30 bp, Artificial Sequence
  Synthetic oligonucleotide
actatgactaatccgcggtaatcggtgaaa

SEQ ID NO: 416423 - DNA, 30 bp, Artificial Sequence
  Synthetic oligonucleotide
atcatggaactgggtaaaaggatggtgaaa

SEQ ID NO: 416424 - DNA, 30 bp, Artificial Sequence
  Synthetic oligonucleotide
ccctgttacgctccctcttttcatgtgaaa

SEQ ID NO: 416425 - DNA, 30 bp, Artificial Sequence
  Synthetic oligonucleotide
accgaaagcttcaaggaatgcagattgaaa

SEQ ID NO: 416426 - DNA, 30 bp, Artificial Sequence
  Synthetic oligonucleotide
gttaaaggcccgtaaatggcgttattgaaa

SEQ ID NO: 416427 - DNA, 30 bp, Artificial Sequence
  Synthetic oligonucleotide
cagctcgaccattacagtactaccttgaaa

SEQ ID NO: 416428 - DNA, 30 bp, Artificial Sequence
  Synthetic oligonucleotide
gtcatataatataagcgttatagcttgaaa

SEQ ID NO: 416429 - DNA, 30 bp, Artificial Sequence
  Synthetic oligonucleotide
gttccttaatatggcatatgaggcttgaaa

SEQ ID NO: 416430 - DNA, 30 bp, Artificial Sequence
  Synthetic oligonucleotide
tataagaggctctcggtgtgagagttgaaa

SEQ ID NO: 416431 - DNA, 30 bp, Artificial Sequence
  Synthetic oligonucleotide
gttaggtccgtggtaaacgaatagttgaaa

SEQ ID NO: 416432 - DNA, 30 bp, Artificial Sequence
  Synthetic oligonucleotide
tcattaattgacgtggaggtaccgttgaaa

SEQ ID NO: 416433 - DNA, 30 bp, Artificial Sequence
  Synthetic oligonucleotide
tgcaagcttggtgtatggaggcatttgaaa

SEQ ID NO: 416434 - DNA, 30 bp, Artificial Sequence
  Synthetic oligonucleotide
ggtgctatgtcacccgacgggcatttgaaa

SEQ ID NO: 416435 - DNA, 30 bp, Artificial Sequence
  Synthetic oligonucleotide
ctatatcgaagcagacaagcttctttgaaa

SEQ ID NO: 416436 - DNA, 30 bp, Artificial Sequence
  Synthetic oligonucleotide
ttggcgatagcaaggatccgaggtttgaaa

SEQ ID NO: 416437 - DNA, 30 bp, Artificial Sequence
  Synthetic oligonucleotide
agtattgaactcaaagagccagaaaataaa

SEQ ID NO: 416438 - DNA, 30 bp, Artificial Sequence
  Synthetic oligonucleotide
atggtctctgccgtatcaaggggaaataaa

SEQ ID NO: 416439 - DNA, 30 bp, Artificial Sequence
  Synthetic oligonucleotide
tagcaatattagttttcagagaacaataaa

SEQ ID NO: 416440 - DNA, 30 bp, Artificial Sequence
  Synthetic oligonucleotide
ctggaatcatgtgaatgtacgcacaataaa

SEQ ID NO: 416441 - DNA, 30 bp, Artificial Sequence
  Synthetic oligonucleotide
aagtagaggctaacgcgacacagcaataaa

SEQ ID NO: 416442 - DNA, 30 bp, Artificial Sequence
  Synthetic oligonucleotide
atttgtatagagttatatatcggtaataaa

SEQ ID NO: 416443 - DNA, 30 bp, Artificial Sequence
  Synthetic oligonucleotide
gcttggttttaccctaccgtgggtaataaa

SEQ ID NO: 416444 - DNA, 30 bp, Artificial Sequence
  Synthetic oligonucleotide
tcttttaaggacaagggcatttgtaataaa

SEQ ID NO: 416445 - DNA, 31 bp, Artificial Sequence
  Synthetic oligonucleotide
ctcatttggtagcgaactagggagacataaa

SEQ ID NO: 416446 - DNA, 30 bp, Artificial Sequence
  Synthetic oligonucleotide
cctttttgtattctttatttgcaccataaa

SEQ ID NO: 416447 - DNA, 30 bp, Artificial Sequence
  Synthetic oligonucleotide
gacttgctcagctaaatctgagtccataaa

SEQ ID NO: 416448 - DNA, 30 bp, Artificial Sequence
  Synthetic oligonucleotide
aggttttggtagaggggtcctgtccataaa

SEQ ID NO: 416449 - DNA, 30 bp, Artificial Sequence
  Synthetic oligonucleotide
tcatggtattttaacaatggtgtccataaa

SEQ ID NO: 416450 - DNA, 30 bp, Artificial Sequence
  Synthetic oligonucleotide
cttaagcgactccagtccggcgagcataaa

SEQ ID NO: 416451 - DNA, 30 bp, Artificial Sequence
  Synthetic oligonucleotide
gccctcggacgatccgccatgcggcataaa

SEQ ID NO: 416452 - DNA, 30 bp, Artificial Sequence
  Synthetic oligonucleotide
gtttaagagcccgttcatacgttgcataaa

SEQ ID NO: 416453 - DNA, 30 bp, Artificial Sequence
  Synthetic oligonucleotide
gccctgaaggatactgatacaattcataaa

SEQ ID NO: 416454 - DNA, 30 bp, Artificial Sequence
  Synthetic oligonucleotide
catgttaggaacacgatcgcttgagataaa

SEQ ID NO: 416455 - DNA, 30 bp, Artificial Sequence
  Synthetic oligonucleotide
ggatatactaaaagctaggctgtagataaa

SEQ ID NO: 416456 - DNA, 30 bp, Artificial Sequence
  Synthetic oligonucleotide
agctcggttcacccaacatcgtacgataaa

SEQ ID NO: 416457 - DNA, 30 bp, Artificial Sequence
  Synthetic oligonucleotide
agtttgggagtctttactctaaaggataaa

SEQ ID NO: 416458 - DNA, 30 bp, Artificial Sequence
  Synthetic oligonucleotide
accaactgaggtacatattatcaggataaa

SEQ ID NO: 416459 - DNA, 30 bp, Artificial Sequence
  Synthetic oligonucleotide
aattgatcgcctatgtcggtaaatgataaa

SEQ ID NO: 416460 - DNA, 30 bp, Artificial Sequence
  Synthetic oligonucleotide
catctggactatttgtagtcctatgataaa

SEQ ID NO: 416461 - DNA, 30 bp, Artificial Sequence
  Synthetic oligonucleotide
tctgtccatctgaaacaaggttatgataaa

SEQ ID NO: 416462 - DNA, 30 bp, Artificial Sequence
  Synthetic oligonucleotide
cagtctgtgcgtgtatctatcgctgataaa

SEQ ID NO: 416463 - DNA, 30 bp, Artificial Sequence
  Synthetic oligonucleotide
agtcgtagcggactattatgggttgataaa

SEQ ID NO: 416464 - DNA, 30 bp, Artificial Sequence
  Synthetic oligonucleotide
atggtaggaccatccatgtacgaatataaa

SEQ ID NO: 416465 - DNA, 30 bp, Artificial Sequence
  Synthetic oligonucleotide
ggtattcgtgggacaaatgtggtatataaa

SEQ ID NO: 416466 - DNA, 29 bp, Artificial Sequence
  Synthetic oligonucleotide
tttgttgtgtaggtgtactcccgtataaa

SEQ ID NO: 416467 - DNA, 30 bp, Artificial Sequence
  Synthetic oligonucleotide
ctataccatacttcgaccccggggtataaa

SEQ ID NO: 416468 - DNA, 30 bp, Artificial Sequence
  Synthetic oligonucleotide
aactcggctaggctgctagcgtggtataaa

SEQ ID NO: 416469 - DNA, 30 bp, Artificial Sequence
  Synthetic oligonucleotide
ttttacaagtgagttggagcgatgtataaa

SEQ ID NO: 416470 - DNA, 30 bp, Artificial Sequence
  Synthetic oligonucleotide
cgcacgtcatagtggtatggctattataaa

SEQ ID NO: 416471 - DNA, 30 bp, Artificial Sequence
  Synthetic oligonucleotide
attgggcacggaatgttatacagttataaa

SEQ ID NO: 416472 - DNA, 30 bp, Artificial Sequence
  Synthetic oligonucleotide
tgatcgcacagtgtacaccactgttataaa

SEQ ID NO: 416473 - DNA, 30 bp, Artificial Sequence
  Synthetic oligonucleotide
cagctgggcactggtataataaaaactaaa

SEQ ID NO: 416474 - DNA, 30 bp, Artificial Sequence
  Synthetic oligonucleotide
ggcggtcaagttggctcgatgttaactaaa

SEQ ID NO: 416475 - DNA, 30 bp, Artificial Sequence
  Synthetic oligonucleotide
tagagttccagcggagtgattttaactaaa

SEQ ID NO: 416476 - DNA, 30 bp, Artificial Sequence
  Synthetic oligonucleotide
cacaacttaccccgttgaactaacactaaa

SEQ ID NO: 416477 - DNA, 30 bp, Artificial Sequence
  Synthetic oligonucleotide
aaagatcctgggtcaatggacgccactaaa

SEQ ID NO: 416478 - DNA, 30 bp, Artificial Sequence
  Synthetic oligonucleotide
agcgttcaagggtgcgtcgaggccactaaa

SEQ ID NO: 416479 - DNA, 30 bp, Artificial Sequence
  Synthetic oligonucleotide
gagtttcgtggggtggcctccgtcactaaa

SEQ ID NO: 416480 - DNA, 30 bp, Artificial Sequence
  Synthetic oligonucleotide
gcctcaaccttggctccatgattcactaaa

SEQ ID NO: 416481 - DNA, 30 bp, Artificial Sequence
  Synthetic oligonucleotide
gtataatctttataagagaaatagactaaa

SEQ ID NO: 416482 - DNA, 30 bp, Artificial Sequence
  Synthetic oligonucleotide
tgcctctgtcgaccgtagtagatgactaaa

SEQ ID NO: 416483 - DNA, 30 bp, Artificial Sequence
  Synthetic oligonucleotide
ggcctagatggtagagcatgctttactaaa

SEQ ID NO: 416484 - DNA, 30 bp, Artificial Sequence
  Synthetic oligonucleotide
tttcgttgatctatggcacgcttacctaaa

SEQ ID NO: 416485 - DNA, 30 bp, Artificial Sequence
  Synthetic oligonucleotide
tggtagacaaatatttgccccaaccctaaa

SEQ ID NO: 416486 - DNA, 30 bp, Artificial Sequence
  Synthetic oligonucleotide
tgtgcacgatttgttgtagtacgccctaaa

SEQ ID NO: 416487 - DNA, 30 bp, Artificial Sequence
  Synthetic oligonucleotide
ctgtgctaaaggtaacacggtccgcctaaa

SEQ ID NO: 416488 - DNA, 30 bp, Artificial Sequence
  Synthetic oligonucleotide
cagcgacggagctcagtgcttcaagctaaa

SEQ ID NO: 416489 - DNA, 30 bp, Artificial Sequence
  Synthetic oligonucleotide
ggtatgcacaagtaacgggtcgaagctaaa

SEQ ID NO: 416490 - DNA, 30 bp, Artificial Sequence
  Synthetic oligonucleotide
catttatggagcgtactagctccagctaaa

SEQ ID NO: 416491 - DNA, 30 bp, Artificial Sequence
  Synthetic oligonucleotide
tagaaacttccgtaacaaacttcagctaaa

SEQ ID NO: 416492 - DNA, 30 bp, Artificial Sequence
  Synthetic oligonucleotide
tgaatagcccggagccttgggcacgctaaa

SEQ ID NO: 416493 - DNA, 30 bp, Artificial Sequence
  Synthetic oligonucleotide
ttcggacacgacacaactcactacgctaaa

SEQ ID NO: 416494 - DNA, 30 bp, Artificial Sequence
  Synthetic oligonucleotide
tcgatttcccagtcttagtgggccgctaaa

SEQ ID NO: 416495 - DNA, 30 bp, Artificial Sequence
  Synthetic oligonucleotide
tctcatttatgtacggtgaatcgtgctaaa

SEQ ID NO: 416496 - DNA, 30 bp, Artificial Sequence
  Synthetic oligonucleotide
taatcttacgagcatcaattctgtgctaaa

SEQ ID NO: 416497 - DNA, 30 bp, Artificial Sequence
  Synthetic oligonucleotide
ttctactaatctaatttgtgcattgctaaa

SEQ ID NO: 416498 - DNA, 30 bp, Artificial Sequence
  Synthetic oligonucleotide
acaccttaaacaaatacctttaaatctaaa

SEQ ID NO: 416499 - DNA, 30 bp, Artificial Sequence
  Synthetic oligonucleotide
ctaaacgttatcttatcctaacgatctaaa

SEQ ID NO: 416500 - DNA, 30 bp, Artificial Sequence
  Synthetic oligonucleotide
tatcatgcagcaagtcttaatctatctaaa

SEQ ID NO: 416501 - DNA, 30 bp, Artificial Sequence
  Synthetic oligonucleotide
ggtatagcactgacctgcggacactctaaa

SEQ ID NO: 416502 - DNA, 30 bp, Artificial Sequence
  Synthetic oligonucleotide
cgtggtctgttcaccagtggagtctctaaa

SEQ ID NO: 416503 - DNA, 30 bp, Artificial Sequence
  Synthetic oligonucleotide
ctacccaagggtataaccaatcggtctaaa

SEQ ID NO: 416504 - DNA, 30 bp, Artificial Sequence
  Synthetic oligonucleotide
gccatctagttgcgacagggctcttctaaa

SEQ ID NO: 416505 - DNA, 30 bp, Artificial Sequence
  Synthetic oligonucleotide
atactcgctggtcacaggtttttttctaaa

SEQ ID NO: 416506 - DNA, 30 bp, Artificial Sequence
  Synthetic oligonucleotide
aatactctcggtcgttacggacaaagtaaa

SEQ ID NO: 416507 - DNA, 30 bp, Artificial Sequence
  Synthetic oligonucleotide
ctcctgcaacagcggccagaccaaagtaaa

SEQ ID NO: 416508 - DNA, 30 bp, Artificial Sequence
  Synthetic oligonucleotide
gaatatcatagtggcaaggttccaagtaaa

SEQ ID NO: 416509 - DNA, 30 bp, Artificial Sequence
  Synthetic oligonucleotide
tagtaaggtaaggcctttgtaataagtaaa

SEQ ID NO: 416510 - DNA, 30 bp, Artificial Sequence
  Synthetic oligonucleotide
ggatcatttgcacggtaatcagtaagtaaa

SEQ ID NO: 416511 - DNA, 30 bp, Artificial Sequence
  Synthetic oligonucleotide
tagaacatagacgctcctatattaagtaaa

SEQ ID NO: 416512 - DNA, 30 bp, Artificial Sequence
  Synthetic oligonucleotide
gtataggtcgggttgtgagcagacagtaaa

SEQ ID NO: 416513 - DNA, 30 bp, Artificial Sequence
  Synthetic oligonucleotide
gggataaagccttttccctaatacagtaaa

SEQ ID NO: 416514 - DNA, 30 bp, Artificial Sequence
  Synthetic oligonucleotide
cgctccttgttcttataggcccggagtaaa

SEQ ID NO: 416515 - DNA, 30 bp, Artificial Sequence
  Synthetic oligonucleotide
attttcggtctgaggctctcaaatagtaaa

SEQ ID NO: 416516 - DNA, 30 bp, Artificial Sequence
  Synthetic oligonucleotide
gagttaggctgccacaaaacgcttagtaaa

SEQ ID NO: 416517 - DNA, 30 bp, Artificial Sequence
  Synthetic oligonucleotide
tccatttgttcccgctgaatcacacgtaaa

SEQ ID NO: 416518 - DNA, 30 bp, Artificial Sequence
  Synthetic oligonucleotide
atctgatatggtgatcttccgttgcgtaaa

SEQ ID NO: 416519 - DNA, 30 bp, Artificial Sequence
  Synthetic oligonucleotide
gaagagttacaagtccaactgattcgtaaa

SEQ ID NO: 416520 - DNA, 30 bp, Artificial Sequence
  Synthetic oligonucleotide
gtacaggtctatgaaatcccctaaggtaaa

SEQ ID NO: 416521 - DNA, 30 bp, Artificial Sequence
  Synthetic oligonucleotide
gtagcggcatgttatgtggtcacaggtaaa

SEQ ID NO: 416522 - DNA, 30 bp, Artificial Sequence
  Synthetic oligonucleotide
ctatcttgctctacgcttttgagaggtaaa

SEQ ID NO: 416523 - DNA, 30 bp, Artificial Sequence
  Synthetic oligonucleotide
ggatagggtgtcgataacggcctaggtaaa

SEQ ID NO: 416524 - DNA, 30 bp, Artificial Sequence
  Synthetic oligonucleotide
tgtcgagcttgaccaagggtattaggtaaa

SEQ ID NO: 416525 - DNA, 30 bp, Artificial Sequence
  Synthetic oligonucleotide
tggccggttttgaagccctagaccggtaaa

SEQ ID NO: 416526 - DNA, 30 bp, Artificial Sequence
  Synthetic oligonucleotide
tacgcagggaaattcaccactcgcggtaaa

SEQ ID NO: 416527 - DNA, 30 bp, Artificial Sequence
  Synthetic oligonucleotide
gtcgggcggcctgccgatgctatcggtaaa

SEQ ID NO: 416528 - DNA, 30 bp, Artificial Sequence
  Synthetic oligonucleotide
gttagtaaaactaagtactcggcgggtaaa

SEQ ID NO: 416529 - DNA, 30 bp, Artificial Sequence
  Synthetic oligonucleotide
caggacgctcgcacaccggggtcgggtaaa

SEQ ID NO: 416530 - DNA, 30 bp, Artificial Sequence
  Synthetic oligonucleotide
ccacaggcaacccaaatgacgcggggtaaa

SEQ ID NO: 416531 - DNA, 30 bp, Artificial Sequence
  Synthetic oligonucleotide
gtgggctggggctttgaggaagtgggtaaa

SEQ ID NO: 416532 - DNA, 30 bp, Artificial Sequence
  Synthetic oligonucleotide
agattcctccctgcagcctcgttgggtaaa

SEQ ID NO: 416533 - DNA, 30 bp, Artificial Sequence
  Synthetic oligonucleotide
cgcaatcttcaacgacggccgcatggtaaa

SEQ ID NO: 416534 - DNA, 30 bp, Artificial Sequence
  Synthetic oligonucleotide
cttgggaactcaagtccttgggatggtaaa

SEQ ID NO: 416535 - DNA, 30 bp, Artificial Sequence
  Synthetic oligonucleotide
ggcgcacggaagccatactttattggtaaa

SEQ ID NO: 416536 - DNA, 30 bp, Artificial Sequence
  Synthetic oligonucleotide
gagcatgtgcttcttagatgccttggtaaa

SEQ ID NO: 416537 - DNA, 30 bp, Artificial Sequence
  Synthetic oligonucleotide
gccttgaacagtcatcggggtaaatgtaaa

SEQ ID NO: 416538 - DNA, 30 bp, Artificial Sequence
  Synthetic oligonucleotide
gttgtctaccgcctccttccccagtgtaaa

SEQ ID NO: 416539 - DNA, 30 bp, Artificial Sequence
  Synthetic oligonucleotide
tacttagtaatatgtgtattagagtgtaaa

SEQ ID NO: 416540 - DNA, 30 bp, Artificial Sequence
  Synthetic oligonucleotide
attatctcggctgtgagtatcgagtgtaaa

SEQ ID NO: 416541 - DNA, 30 bp, Artificial Sequence
  Synthetic oligonucleotide
gcgccgatattttgcgggagcaggtgtaaa

SEQ ID NO: 416542 - DNA, 30 bp, Artificial Sequence
  Synthetic oligonucleotide
gggcttcttcccaaagcacacttttgtaaa

SEQ ID NO: 416543 - DNA, 30 bp, Artificial Sequence
  Synthetic oligonucleotide
atccagagtctgcgtttccgctgaattaaa

SEQ ID NO: 416544 - DNA, 30 bp, Artificial Sequence
  Synthetic oligonucleotide
agtactgagaccacaaagttattaattaaa

SEQ ID NO: 416545 - DNA, 30 bp, Artificial Sequence
  Synthetic oligonucleotide
gtgagcgctattgcccttaaagacattaaa

SEQ ID NO: 416546 - DNA, 30 bp, Artificial Sequence
  Synthetic oligonucleotide
cccgtcctggacggtcagtttgacattaaa

SEQ ID NO: 416547 - DNA, 30 bp, Artificial Sequence
  Synthetic oligonucleotide
gtttatgtactcgaaatattctccattaaa

SEQ ID NO: 416548 - DNA, 30 bp, Artificial Sequence
  Synthetic oligonucleotide
tagaattaacctacaggtctgaggattaaa

SEQ ID NO: 416549 - DNA, 30 bp, Artificial Sequence
  Synthetic oligonucleotide
gaaatcccgggacggtagagtaggattaaa

SEQ ID NO: 416550 - DNA, 30 bp, Artificial Sequence
  Synthetic oligonucleotide
agatgttgacgctacagcgatgctattaaa

SEQ ID NO: 416551 - DNA, 30 bp, Artificial Sequence
  Synthetic oligonucleotide
tcaatgtagtggcctactacgattattaaa

SEQ ID NO: 416552 - DNA, 30 bp, Artificial Sequence
  Synthetic oligonucleotide
ttcggatagctaagttcagcagttattaaa

SEQ ID NO: 416553 - DNA, 30 bp, Artificial Sequence
  Synthetic oligonucleotide
cacggttatcggcgtccaagttaacttaaa

SEQ ID NO: 416554 - DNA, 30 bp, Artificial Sequence
  Synthetic oligonucleotide
agctgacgccggatagatacagcacttaaa

SEQ ID NO: 416555 - DNA, 30 bp, Artificial Sequence
  Synthetic oligonucleotide
aattgtagaacgcacggtcgaaaccttaaa

SEQ ID NO: 416556 - DNA, 30 bp, Artificial Sequence
  Synthetic oligonucleotide
cgaacgcttatcttacttttaaagcttaaa

SEQ ID NO: 416557 - DNA, 30 bp, Artificial Sequence
  Synthetic oligonucleotide
tagggatttatggagtggcccgcgcttaaa

SEQ ID NO: 416558 - DNA, 30 bp, Artificial Sequence
  Synthetic oligonucleotide
tgtatgtacggcgagcggatgaaagttaaa

SEQ ID NO: 416559 - DNA, 30 bp, Artificial Sequence
  Synthetic oligonucleotide
ccaacaaattgattatataaggaagttaaa

SEQ ID NO: 416560 - DNA, 30 bp, Artificial Sequence
  Synthetic oligonucleotide
gagcgtatctatattactgtctcagttaaa

SEQ ID NO: 416561 - DNA, 30 bp, Artificial Sequence
  Synthetic oligonucleotide
aacacgttccaactcgcgaacagagttaaa

SEQ ID NO: 416562 - DNA, 30 bp, Artificial Sequence
  Synthetic oligonucleotide
ctgtaactcgtgccggatcaccccgttaaa

SEQ ID NO: 416563 - DNA, 30 bp, Artificial Sequence
  Synthetic oligonucleotide
cattatctcgataatgaggtactcgttaaa

SEQ ID NO: 416564 - DNA, 30 bp, Artificial Sequence
  Synthetic oligonucleotide
gggttgtgtctgggatttgctcaggttaaa

SEQ ID NO: 416565 - DNA, 30 bp, Artificial Sequence
  Synthetic oligonucleotide
ccattttaagctaccatgttggaggttaaa

SEQ ID NO: 416566 - DNA, 30 bp, Artificial Sequence
  Synthetic oligonucleotide
tgggcaagtttttggacctattaggttaaa

SEQ ID NO: 416567 - DNA, 30 bp, Artificial Sequence
  Synthetic oligonucleotide
attggtaaattaattctttattaggttaaa

SEQ ID NO: 416568 - DNA, 30 bp, Artificial Sequence
  Synthetic oligonucleotide
gtcattcccaatgcaagtaaccgggttaaa

SEQ ID NO: 416569 - DNA, 30 bp, Artificial Sequence
  Synthetic oligonucleotide
acctaaaaggggctctacacgagtgttaaa

SEQ ID NO: 416570 - DNA, 30 bp, Artificial Sequence
  Synthetic oligonucleotide
ttcatgcatcgttgttgggacggtgttaaa

SEQ ID NO: 416571 - DNA, 30 bp, Artificial Sequence
  Synthetic oligonucleotide
gttgatggtttaaaacacgagaaatttaaa

SEQ ID NO: 416572 - DNA, 30 bp, Artificial Sequence
  Synthetic oligonucleotide
acgcacgattgttcccgattctaatttaaa

SEQ ID NO: 416573 - DNA, 30 bp, Artificial Sequence
  Synthetic oligonucleotide
ttgttgtgatggagcgcacggacatttaaa

SEQ ID NO: 416574 - DNA, 30 bp, Artificial Sequence
  Synthetic oligonucleotide
gccaagatctttcgccgggatgactttaaa

SEQ ID NO: 416575 - DNA, 30 bp, Artificial Sequence
  Synthetic oligonucleotide
actgttgaggattggcgtgtaacctttaaa

SEQ ID NO: 416576 - DNA, 30 bp, Artificial Sequence
  Synthetic oligonucleotide
agactcagcgtcagctgatttacctttaaa

SEQ ID NO: 416577 - DNA, 30 bp, Artificial Sequence
  Synthetic oligonucleotide
gaaatgtcgaagttctgaggagtctttaaa

SEQ ID NO: 416578 - DNA, 30 bp, Artificial Sequence
  Synthetic oligonucleotide
gcatgccagccctaagaggctgtctttaaa

SEQ ID NO: 416579 - DNA, 30 bp, Artificial Sequence
  Synthetic oligonucleotide
ctgcgacgcaagtacctgggtgtctttaaa

SEQ ID NO: 416580 - DNA, 30 bp, Artificial Sequence
  Synthetic oligonucleotide
gacgagaagactcacgctgtattctttaaa

SEQ ID NO: 416581 - DNA, 30 bp, Artificial Sequence
  Synthetic oligonucleotide
gtctagtcaggtgtgcgaggagggtttaaa

SEQ ID NO: 416582 - DNA, 30 bp, Artificial Sequence
  Synthetic oligonucleotide
atctgcgaaaacagtattctgatgtttaaa

SEQ ID NO: 416583 - DNA, 30 bp, Artificial Sequence
  Synthetic oligonucleotide
actcgcgcttatcaagggaacgattttaaa

SEQ ID NO: 416584 - DNA, 30 bp, Artificial Sequence
  Synthetic oligonucleotide
aacgcaatttctttaccaccatgttttaaa

SEQ ID NO: 416585 - DNA, 30 bp, Artificial Sequence
  Synthetic oligonucleotide
ggtttatcgacgcattcaaaggacaaacaa

SEQ ID NO: 416586 - DNA, 30 bp, Artificial Sequence
  Synthetic oligonucleotide
acccatagggcgaaagcatatagcaaacaa

SEQ ID NO: 416587 - DNA, 30 bp, Artificial Sequence
  Synthetic oligonucleotide
atttgcggtggtcattatgtacgcaaacaa

SEQ ID NO: 416588 - DNA, 30 bp, Artificial Sequence
  Synthetic oligonucleotide
actaaagagggtcctatttgtgtcaaacaa

SEQ ID NO: 416589 - DNA, 30 bp, Artificial Sequence
  Synthetic oligonucleotide
atcccaaatgatcagttcggccctaaacaa

SEQ ID NO: 416590 - DNA, 31 bp, Artificial Sequence
  Synthetic oligonucleotide
cctattatgctagcgactgcaccttaaacaa

SEQ ID NO: 416591 - DNA, 30 bp, Artificial Sequence
  Synthetic oligonucleotide
ggattctacccacctttggcggttaaacaa

SEQ ID NO: 416592 - DNA, 30 bp, Artificial Sequence
  Synthetic oligonucleotide
gtcctccatcagaggaacaggacacaacaa

SEQ ID NO: 416593 - DNA, 30 bp, Artificial Sequence
  Synthetic oligonucleotide
actagggttaggtcgggtttgcgacaacaa

SEQ ID NO: 416594 - DNA, 29 bp, Artificial Sequence
  Synthetic oligonucleotide
caatcctgggccaattcattgcccaacaa

SEQ ID NO: 416595 - DNA, 30 bp, Artificial Sequence
  Synthetic oligonucleotide
tttagtcacccatcggtctccggccaacaa

SEQ ID NO: 416596 - DNA, 30 bp, Artificial Sequence
  Synthetic oligonucleotide
attctcaaggacagccgggagctccaacaa

SEQ ID NO: 416597 - DNA, 30 bp, Artificial Sequence
  Synthetic oligonucleotide
taagaatgtcctgtccttcttcggcaacaa

SEQ ID NO: 416598 - DNA, 30 bp, Artificial Sequence
  Synthetic oligonucleotide
gaaaaggtacgacacagaataaatcaacaa

SEQ ID NO: 416599 - DNA, 30 bp, Artificial Sequence
  Synthetic oligonucleotide
ataacgtataacgtaagcatccctcaacaa

SEQ ID NO: 416600 - DNA, 30 bp, Artificial Sequence
  Synthetic oligonucleotide
ttgccctaacgatttgttaagtaagaacaa

SEQ ID NO: 416601 - DNA, 30 bp, Artificial Sequence
  Synthetic oligonucleotide
tggagtatgtttaggccctgaaaggaacaa

SEQ ID NO: 416602 - DNA, 30 bp, Artificial Sequence
  Synthetic oligonucleotide
gccttctaacttgacctcattcaggaacaa

SEQ ID NO: 416603 - DNA, 30 bp, Artificial Sequence
  Synthetic oligonucleotide
cgctctcccgggcgtcgcgagccggaacaa

SEQ ID NO: 416604 - DNA, 30 bp, Artificial Sequence
  Synthetic oligonucleotide
taagggttctgtttatctacaggtgaacaa

SEQ ID NO: 416605 - DNA, 30 bp, Artificial Sequence
  Synthetic oligonucleotide
agtaatgccgaactggagttctttgaacaa

SEQ ID NO: 416606 - DNA, 30 bp, Artificial Sequence
  Synthetic oligonucleotide
gtactgcagtaaatggattaagaataacaa

SEQ ID NO: 416607 - DNA, 30 bp, Artificial Sequence
  Synthetic oligonucleotide
tggccaccagtgtggacgctaacgtaacaa

SEQ ID NO: 416608 - DNA, 30 bp, Artificial Sequence
  Synthetic oligonucleotide
atggttcgatttgagcgcgaatattaacaa

SEQ ID NO: 416609 - DNA, 30 bp, Artificial Sequence
  Synthetic oligonucleotide
cctttgactgcgtcgagttatataacacaa

SEQ ID NO: 416610 - DNA, 30 bp, Artificial Sequence
  Synthetic oligonucleotide
acctcgtagattgctgttggtaccacacaa

SEQ ID NO: 416611 - DNA, 30 bp, Artificial Sequence
  Synthetic oligonucleotide
tgggtagtttactctatcccttccacacaa

SEQ ID NO: 416612 - DNA, 30 bp, Artificial Sequence
  Synthetic oligonucleotide
gaagcgtctggaccaccgcaattgacacaa

SEQ ID NO: 416613 - DNA, 30 bp, Artificial Sequence
  Synthetic oligonucleotide
ctccccgtgcttcaacttgcttgaccacaa

SEQ ID NO: 416614 - DNA, 30 bp, Artificial Sequence
  Synthetic oligonucleotide
cgcaacttcatgagtcacgttatgccacaa

SEQ ID NO: 416615 - DNA, 30 bp, Artificial Sequence
  Synthetic oligonucleotide
attggccgtgaggcacacccgcgtccacaa

SEQ ID NO: 416616 - DNA, 30 bp, Artificial Sequence
  Synthetic oligonucleotide
attcgagcccgaaggtcatggattccacaa

SEQ ID NO: 416617 - DNA, 30 bp, Artificial Sequence
  Synthetic oligonucleotide
accatgtgcgttagtcggtgggcagcacaa

SEQ ID NO: 416618 - DNA, 30 bp, Artificial Sequence
  Synthetic oligonucleotide
gcaagctatctatgtcggaaacaggcacaa

SEQ ID NO: 416619 - DNA, 30 bp, Artificial Sequence
  Synthetic oligonucleotide
agtctcagtggttttgcagctgtggcacaa

SEQ ID NO: 416620 - DNA, 30 bp, Artificial Sequence
  Synthetic oligonucleotide
cgaatcttcccgcacgtgatcgaatcacaa

SEQ ID NO: 416621 - DNA, 30 bp, Artificial Sequence
  Synthetic oligonucleotide
ttcgataacggagaatgcttgtcatcacaa

SEQ ID NO: 416622 - DNA, 30 bp, Artificial Sequence
  Synthetic oligonucleotide
tatggcaaaatgagggtatacccaagacaa

SEQ ID NO: 416623 - DNA, 30 bp, Artificial Sequence
  Synthetic oligonucleotide
tgtgtcccttgacacgggggatacagacaa

SEQ ID NO: 416624 - DNA, 30 bp, Artificial Sequence
  Synthetic oligonucleotide
acattatgttcacctcgtgagaggagacaa

SEQ ID NO: 416625 - DNA, 30 bp, Artificial Sequence
  Synthetic oligonucleotide
ggaatagacacgcaaacgtggctgagacaa

SEQ ID NO: 416626 - DNA, 30 bp, Artificial Sequence
  Synthetic oligonucleotide
gcaatttcattttgtgggagcgtgagacaa

SEQ ID NO: 416627 - DNA, 25 bp, Artificial Sequence
  Synthetic oligonucleotide
ccaagtctcaattctgagtagacaa

SEQ ID NO: 416628 - DNA, 30 bp, Artificial Sequence
  Synthetic oligonucleotide
cctcttcaatcaggcctcggacgtagacaa

SEQ ID NO: 416629 - DNA, 30 bp, Artificial Sequence
  Synthetic oligonucleotide
agatggaattagggggcaggctgacgacaa

SEQ ID NO: 416630 - DNA, 30 bp, Artificial Sequence
  Synthetic oligonucleotide
agtttgcaatatatgtagtgagtacgacaa

SEQ ID NO: 416631 - DNA, 30 bp, Artificial Sequence
  Synthetic oligonucleotide
tttactttgaagacgttgacactccgacaa

SEQ ID NO: 416632 - DNA, 30 bp, Artificial Sequence
  Synthetic oligonucleotide
attgcaataacccctcatggagggcgacaa

SEQ ID NO: 416633 - DNA, 30 bp, Artificial Sequence
  Synthetic oligonucleotide
tgaccatgcgtacgcactctcgacggacaa

SEQ ID NO: 416634 - DNA, 30 bp, Artificial Sequence
  Synthetic oligonucleotide
tagtaagttgtatacgtcaactacggacaa

SEQ ID NO: 416635 - DNA, 30 bp, Artificial Sequence
  Synthetic oligonucleotide
tcgcagcaacccagaataacctacggacaa

SEQ ID NO: 416636 - DNA, 30 bp, Artificial Sequence
  Synthetic oligonucleotide
aaaccacgatctttttcaacgtgcggacaa

SEQ ID NO: 416637 - DNA, 30 bp, Artificial Sequence
  Synthetic oligonucleotide
ttcgctatgaggcccacccattagggacaa

SEQ ID NO: 416638 - DNA, 30 bp, Artificial Sequence
  Synthetic oligonucleotide
gatacgatctaatactgatcccctggacaa

SEQ ID NO: 416639 - DNA, 30 bp, Artificial Sequence
  Synthetic oligonucleotide
attgaggccaatagtgatgttcgtggacaa

SEQ ID NO: 416640 - DNA, 30 bp, Artificial Sequence
  Synthetic oligonucleotide
atacctagggagctcggacgtggtggacaa

SEQ ID NO: 416641 - DNA, 30 bp, Artificial Sequence
  Synthetic oligonucleotide
gatacgcggctattaataacgtaatgacaa

SEQ ID NO: 416642 - DNA, 30 bp, Artificial Sequence
  Synthetic oligonucleotide
aaccaattaacgagcgtgaacgcgtgacaa

SEQ ID NO: 416643 - DNA, 30 bp, Artificial Sequence
  Synthetic oligonucleotide
tctgatcccactgttgtaagcttgtgacaa

SEQ ID NO: 416644 - DNA, 28 bp, Artificial Sequence
  Synthetic oligonucleotide
tgaacttcaacttagaggctcttgacaa

SEQ ID NO: 416645 - DNA, 30 bp, Artificial Sequence
  Synthetic oligonucleotide
gtactactctttaccgcatccgcaatacaa

SEQ ID NO: 416646 - DNA, 30 bp, Artificial Sequence
  Synthetic oligonucleotide
tattcgatacatggtccgtgcataatacaa

SEQ ID NO: 416647 - DNA, 30 bp, Artificial Sequence
  Synthetic oligonucleotide
ttaaccttaaaatatacttttctaatacaa

SEQ ID NO: 416648 - DNA, 30 bp, Artificial Sequence
  Synthetic oligonucleotide
gacatggggccgatcgcgcgcaccatacaa

SEQ ID NO: 416649 - DNA, 30 bp, Artificial Sequence
  Synthetic oligonucleotide
tcgtacggccttattcgtcgggccatacaa

SEQ ID NO: 416650 - DNA, 30 bp, Artificial Sequence
  Synthetic oligonucleotide
tctacgtttagatcgggtacgactatacaa

SEQ ID NO: 416651 - DNA, 30 bp, Artificial Sequence
  Synthetic oligonucleotide
tgccaagatattccgatttccgtactacaa

SEQ ID NO: 416652 - DNA, 30 bp, Artificial Sequence
  Synthetic oligonucleotide
gtgtctgtaccaaaacctttggccctacaa

SEQ ID NO: 416653 - DNA, 30 bp, Artificial Sequence
  Synthetic oligonucleotide
ctggtgaacaaagtttggtgtggcctacaa

SEQ ID NO: 416654 - DNA, 30 bp, Artificial Sequence
  Synthetic oligonucleotide
aatcaattcttaggttcgcgagtcctacaa

SEQ ID NO: 416655 - DNA, 30 bp, Artificial Sequence
  Synthetic oligonucleotide
acttcttctgagggacttaagaagctacaa

SEQ ID NO: 416656 - DNA, 30 bp, Artificial Sequence
  Synthetic oligonucleotide
aatatctatgcagagttatactggctacaa

SEQ ID NO: 416657 - DNA, 30 bp, Artificial Sequence
  Synthetic oligonucleotide
gtgatagaggcttgattaaattttctacaa

SEQ ID NO: 416658 - DNA, 30 bp, Artificial Sequence
  Synthetic oligonucleotide
ctttacggaagcaaagaacgtgccgtacaa

SEQ ID NO: 416659 - DNA, 30 bp, Artificial Sequence
  Synthetic oligonucleotide
caggatgatcgtcccctgtgcacggtacaa

SEQ ID NO: 416660 - DNA, 30 bp, Artificial Sequence
  Synthetic oligonucleotide
aaatggcaccaaagtcttacaggggtacaa

SEQ ID NO: 416661 - DNA, 30 bp, Artificial Sequence
  Synthetic oligonucleotide
tatactccgttgcgctaggggggggtacaa

SEQ ID NO: 416662 - DNA, 30 bp, Artificial Sequence
  Synthetic oligonucleotide
actattacgcgtgcacaagcctctgtacaa

SEQ ID NO: 416663 - DNA, 30 bp, Artificial Sequence
  Synthetic oligonucleotide
gatttccatgcctcttgacaccgtgtacaa

SEQ ID NO: 416664 - DNA, 30 bp, Artificial Sequence
  Synthetic oligonucleotide
ctagcattaatgacttcacttaaattacaa

SEQ ID NO: 416665 - DNA, 30 bp, Artificial Sequence
  Synthetic oligonucleotide
cgcaaaacatggatcttgctaagattacaa

SEQ ID NO: 416666 - DNA, 30 bp, Artificial Sequence
  Synthetic oligonucleotide
ttctggacgttaatgtgtcaaggattacaa

SEQ ID NO: 416667 - DNA, 30 bp, Artificial Sequence
  Synthetic oligonucleotide
ggtaggaaggcgctgggaacagacttacaa

SEQ ID NO: 416668 - DNA, 30 bp, Artificial Sequence
  Synthetic oligonucleotide
gagagtgttcggctgctttaggacttacaa

SEQ ID NO: 416669 - DNA, 30 bp, Artificial Sequence
  Synthetic oligonucleotide
gtagacaggccggctattggggacttacaa

SEQ ID NO: 416670 - DNA, 30 bp, Artificial Sequence
  Synthetic oligonucleotide
cgtttccggacgcccaaagtgggcttacaa

SEQ ID NO: 416671 - DNA, 30 bp, Artificial Sequence
  Synthetic oligonucleotide
taattggctttgcagacttcggtcttacaa

SEQ ID NO: 416672 - DNA, 30 bp, Artificial Sequence
  Synthetic oligonucleotide
aaagcctgtttggtgatacgatggttacaa

SEQ ID NO: 416673 - DNA, 30 bp, Artificial Sequence
  Synthetic oligonucleotide
acttttggataaatgcactggcatttacaa

SEQ ID NO: 416674 - DNA, 30 bp, Artificial Sequence
  Synthetic oligonucleotide
gatgctagtgcatcaatatatgatttacaa

SEQ ID NO: 416675 - DNA, 30 bp, Artificial Sequence
  Synthetic oligonucleotide
tattacgaagcagcgccatatggaaaccaa

SEQ ID NO: 416676 - DNA, 30 bp, Artificial Sequence
  Synthetic oligonucleotide
taaatagcggttcgtcgaactggaaaccaa

SEQ ID NO: 416677 - DNA, 30 bp, Artificial Sequence
  Synthetic oligonucleotide
ttcgacttttttccggctccttacaaccaa

SEQ ID NO: 416678 - DNA, 30 bp, Artificial Sequence
  Synthetic oligonucleotide
agggttatcgggtgctcacataataaccaa

SEQ ID NO: 416679 - DNA, 30 bp, Artificial Sequence
  Synthetic oligonucleotide
atataacgtagccgttaaacggttaaccaa

SEQ ID NO: 416680 - DNA, 30 bp, Artificial Sequence
  Synthetic oligonucleotide
tggtccttagattcgtttagtacccaccaa

SEQ ID NO: 416681 - DNA, 30 bp, Artificial Sequence
  Synthetic oligonucleotide
aatcaaatcctgtgtaccagaagccaccaa

SEQ ID NO: 416682 - DNA, 30 bp, Artificial Sequence
  Synthetic oligonucleotide
gctcacgcgcatgtagtcccgaatcaccaa

SEQ ID NO: 416683 - DNA, 30 bp, Artificial Sequence
  Synthetic oligonucleotide
gccatatgatccgcacaactgtttcaccaa

SEQ ID NO: 416684 - DNA, 30 bp, Artificial Sequence
  Synthetic oligonucleotide
cgtgtactcaacttattagtgcaagaccaa

SEQ ID NO: 416685 - DNA, 30 bp, Artificial Sequence
  Synthetic oligonucleotide
acctcaacgcagatggaacccagcgaccaa

SEQ ID NO: 416686 - DNA, 30 bp, Artificial Sequence
  Synthetic oligonucleotide
aggtcagtttgagccggtacgtgggaccaa

SEQ ID NO: 416687 - DNA, 30 bp, Artificial Sequence
  Synthetic oligonucleotide
agaatacgtctgtaacgatgtattgaccaa

SEQ ID NO: 416688 - DNA, 30 bp, Artificial Sequence
  Synthetic oligonucleotide
atatttgtctccttggggtaataataccaa

SEQ ID NO: 416689 - DNA, 30 bp, Artificial Sequence
  Synthetic oligonucleotide
taaggtttcggatactgtagggtataccaa

SEQ ID NO: 416690 - DNA, 30 bp, Artificial Sequence
  Synthetic oligonucleotide
gccccgagtctcccctcctggaactaccaa

SEQ ID NO: 416691 - DNA, 30 bp, Artificial Sequence
  Synthetic oligonucleotide
gccggataaatattgtgttccggctaccaa

SEQ ID NO: 416692 - DNA, 30 bp, Artificial Sequence
  Synthetic oligonucleotide
gcataacgggcaattactatcccgtaccaa

SEQ ID NO: 416693 - DNA, 30 bp, Artificial Sequence
  Synthetic oligonucleotide
caagttttaacatatgcgcctccgtaccaa

SEQ ID NO: 416694 - DNA, 30 bp, Artificial Sequence
  Synthetic oligonucleotide
atgatttaccaaacgttatgtgattaccaa

SEQ ID NO: 416695 - DNA, 30 bp, Artificial Sequence
  Synthetic oligonucleotide
tgtgggaggtcaaactgctacagttaccaa

SEQ ID NO: 416696 - DNA, 30 bp, Artificial Sequence
  Synthetic oligonucleotide
tgagtttctataattggaaaaatttaccaa

SEQ ID NO: 416697 - DNA, 30 bp, Artificial Sequence
  Synthetic oligonucleotide
tgctgtataataccgaccagacgaacccaa

SEQ ID NO: 416698 - DNA, 30 bp, Artificial Sequence
  Synthetic oligonucleotide
gcttttagggactttcagtggcgaacccaa

SEQ ID NO: 416699 - DNA, 30 bp, Artificial Sequence
  Synthetic oligonucleotide
tccgcactcgacgggcaataaaacacccaa

SEQ ID NO: 416700 - DNA, 30 bp, Artificial Sequence
  Synthetic oligonucleotide
tctatcccaatctacgcgggtagcacccaa

SEQ ID NO: 416701 - DNA, 31 bp, Artificial Sequence
  Synthetic oligonucleotide
ggtataagtcgcctcccggctagtcacccaa

SEQ ID NO: 416702 - DNA, 30 bp, Artificial Sequence
  Synthetic oligonucleotide
gcggacacttgtttgatacgttcgacccaa

SEQ ID NO: 416703 - DNA, 30 bp, Artificial Sequence
  Synthetic oligonucleotide
ggtattagtcacagcgagagtaggacccaa

SEQ ID NO: 416704 - DNA, 30 bp, Artificial Sequence
  Synthetic oligonucleotide
attcaggccctacacacctcgctgacccaa

SEQ ID NO: 416705 - DNA, 30 bp, Artificial Sequence
  Synthetic oligonucleotide
gtgactggcaaatctaggagtaatacccaa

SEQ ID NO: 416706 - DNA, 30 bp, Artificial Sequence
  Synthetic oligonucleotide
ttagtaatgtttggagaggtgtacccccaa

SEQ ID NO: 416707 - DNA, 30 bp, Artificial Sequence
  Synthetic oligonucleotide
ctaataggctcgcccattggaagtccccaa

SEQ ID NO: 416708 - DNA, 30 bp, Artificial Sequence
  Synthetic oligonucleotide
taattcacgaaattggtgtgtcgagcccaa

SEQ ID NO: 416709 - DNA, 30 bp, Artificial Sequence
  Synthetic oligonucleotide
aatgggttcattaggtctggagtagcccaa

SEQ ID NO: 416710 - DNA, 30 bp, Artificial Sequence
  Synthetic oligonucleotide
ttggtgttctgttgtaatgctagggcccaa

SEQ ID NO: 416711 - DNA, 30 bp, Artificial Sequence
  Synthetic oligonucleotide
tagcgtatatagtcgggaactggggcccaa

SEQ ID NO: 416712 - DNA, 30 bp, Artificial Sequence
  Synthetic oligonucleotide
ctcatagtctattttgaatcctatgcccaa

SEQ ID NO: 416713 - DNA, 30 bp, Artificial Sequence
  Synthetic oligonucleotide
ggggggctgcccgaactcggtactgcccaa

SEQ ID NO: 416714 - DNA, 30 bp, Artificial Sequence
  Synthetic oligonucleotide
ttccagtgtagcggttttatacactcccaa

SEQ ID NO: 416715 - DNA, 30 bp, Artificial Sequence
  Synthetic oligonucleotide
ttcacagtcacctgaggctgtctctcccaa

SEQ ID NO: 416716 - DNA, 30 bp, Artificial Sequence
  Synthetic oligonucleotide
ggttagggcagaaagttcatattctcccaa

SEQ ID NO: 416717 - DNA, 30 bp, Artificial Sequence
  Synthetic oligonucleotide
tggtccacatatggcaaccagttttcccaa

SEQ ID NO: 416718 - DNA, 30 bp, Artificial Sequence
  Synthetic oligonucleotide
taagtggacccggattatttgtaaagccaa

SEQ ID NO: 416719 - DNA, 30 bp, Artificial Sequence
  Synthetic oligonucleotide
cgcggaagtgaaggatcatctataagccaa

SEQ ID NO: 416720 - DNA, 30 bp, Artificial Sequence
  Synthetic oligonucleotide
cgtaatcgtctctacgtatacaccagccaa

SEQ ID NO: 416721 - DNA, 30 bp, Artificial Sequence
  Synthetic oligonucleotide
tcgtcgcctgtcaagggggcgacgagccaa

SEQ ID NO: 416722 - DNA, 30 bp, Artificial Sequence
  Synthetic oligonucleotide
tctgtatataccgcatggcgttcgagccaa

SEQ ID NO: 416723 - DNA, 30 bp, Artificial Sequence
  Synthetic oligonucleotide
ttggaacgcaggatcgccccgcctagccaa

SEQ ID NO: 416724 - DNA, 30 bp, Artificial Sequence
  Synthetic oligonucleotide
gtcagggactgtggtccaaggtttagccaa

SEQ ID NO: 416725 - DNA, 30 bp, Artificial Sequence
  Synthetic oligonucleotide
gagttagacgcgtacgaacccaaacgccaa

SEQ ID NO: 416726 - DNA, 30 bp, Artificial Sequence
  Synthetic oligonucleotide
attactttagatgtgctcctcaaacgccaa

SEQ ID NO: 416727 - DNA, 30 bp, Artificial Sequence
  Synthetic oligonucleotide
atgttcactcaaggtagtcgttaacgccaa

SEQ ID NO: 416728 - DNA, 30 bp, Artificial Sequence
  Synthetic oligonucleotide
ggttgtaactcgaagggcatgccacgccaa

SEQ ID NO: 416729 - DNA, 30 bp, Artificial Sequence
  Synthetic oligonucleotide
aaccacgctcaactcggcggtacccgccaa

SEQ ID NO: 416730 - DNA, 30 bp, Artificial Sequence
  Synthetic oligonucleotide
tgacttatagtatactggatacgtcgccaa

SEQ ID NO: 416731 - DNA, 30 bp, Artificial Sequence
  Synthetic oligonucleotide
agcaattgtttgagagattcaattcgccaa

SEQ ID NO: 416732 - DNA, 30 bp, Artificial Sequence
  Synthetic oligonucleotide
tgggctcaggcccggggaacggacggccaa

SEQ ID NO: 416733 - DNA, 30 bp, Artificial Sequence
  Synthetic oligonucleotide
agaatcttgcgctctatgattcccggccaa

SEQ ID NO: 416734 - DNA, 30 bp, Artificial Sequence
  Synthetic oligonucleotide
tcttcaaacatgccccagacctggggccaa

SEQ ID NO: 416735 - DNA, 30 bp, Artificial Sequence
  Synthetic oligonucleotide
caggcagctgataacattgacatgggccaa

SEQ ID NO: 416736 - DNA, 30 bp, Artificial Sequence
  Synthetic oligonucleotide
cagccttcagcagctgttgtacaatgccaa

SEQ ID NO: 416737 - DNA, 30 bp, Artificial Sequence
  Synthetic oligonucleotide
ttagctcacagagtctcatgtccatgccaa

SEQ ID NO: 416738 - DNA, 30 bp, Artificial Sequence
  Synthetic oligonucleotide
ggtctggcatcttatcgaacatgatgccaa

SEQ ID NO: 416739 - DNA, 30 bp, Artificial Sequence
  Synthetic oligonucleotide
atcggcctcatatcgtagattatatgccaa

SEQ ID NO: 416740 - DNA, 30 bp, Artificial Sequence
  Synthetic oligonucleotide
ttggttgtcttattttgttccagctgccaa

SEQ ID NO: 416741 - DNA, 30 bp, Artificial Sequence
  Synthetic oligonucleotide
gggggttgattgagcaatacgctaatccaa

SEQ ID NO: 416742 - DNA, 30 bp, Artificial Sequence
  Synthetic oligonucleotide
gccggaaggaaagatttatacaccatccaa

SEQ ID NO: 416743 - DNA, 30 bp, Artificial Sequence
  Synthetic oligonucleotide
ttcaaccatttgagccagccaccgatccaa

SEQ ID NO: 416744 - DNA, 30 bp, Artificial Sequence
  Synthetic oligonucleotide
ttacgcggtgatggaaccacccggatccaa

SEQ ID NO: 416745 - DNA, 30 bp, Artificial Sequence
  Synthetic oligonucleotide
atagcggtgtacagacattcggctatccaa

SEQ ID NO: 416746 - DNA, 30 bp, Artificial Sequence
  Synthetic oligonucleotide
tccggggaggagtgacgagtgtctatccaa

SEQ ID NO: 416747 - DNA, 30 bp, Artificial Sequence
  Synthetic oligonucleotide
ggcgttcacttataagccggaattatccaa

SEQ ID NO: 416748 - DNA, 30 bp, Artificial Sequence
  Synthetic oligonucleotide
aagttaataattcgtgaattagaactccaa

SEQ ID NO: 416749 - DNA, 30 bp, Artificial Sequence
  Synthetic oligonucleotide
agatcagggggctaattaacgtcactccaa

SEQ ID NO: 416750 - DNA, 30 bp, Artificial Sequence
  Synthetic oligonucleotide
cggaggttggagaatcatcgttagctccaa

SEQ ID NO: 416751 - DNA, 30 bp, Artificial Sequence
  Synthetic oligonucleotide
aatgagagtcggtcggtctcacggctccaa

SEQ ID NO: 416752 - DNA, 30 bp, Artificial Sequence
  Synthetic oligonucleotide
gtacttggtgtgggagcccgtatgctccaa

SEQ ID NO: 416753 - DNA, 30 bp, Artificial Sequence
  Synthetic oligonucleotide
ttccgggtgatgtattcatctgatctccaa

SEQ ID NO: 416754 - DNA, 30 bp, Artificial Sequence
  Synthetic oligonucleotide
gaggagttttattttggatggtatctccaa

SEQ ID NO: 416755 - DNA, 30 bp, Artificial Sequence
  Synthetic oligonucleotide
gaagaaatttaacacgcggagggtctccaa

SEQ ID NO: 416756 - DNA, 30 bp, Artificial Sequence
  Synthetic oligonucleotide
acaaactcatgtctccgaggctaagtccaa

SEQ ID NO: 416757 - DNA, 30 bp, Artificial Sequence
  Synthetic oligonucleotide
ttgataaagtggctcactcctaatgtccaa

SEQ ID NO: 416758 - DNA, 30 bp, Artificial Sequence
  Synthetic oligonucleotide
tatcttgactcggcgttcatgcgtgtccaa

SEQ ID NO: 416759 - DNA, 30 bp, Artificial Sequence
  Synthetic oligonucleotide
ttcaacattgattccggtggcggattccaa

SEQ ID NO: 416760 - DNA, 30 bp, Artificial Sequence
  Synthetic oligonucleotide
gccacactttaaaatcgcctggtattccaa

SEQ ID NO: 416761 - DNA, 30 bp, Artificial Sequence
  Synthetic oligonucleotide
gctactaagagccatcagcgtgtattccaa

SEQ ID NO: 416762 - DNA, 30 bp, Artificial Sequence
  Synthetic oligonucleotide
tcagtggttggattggggcatttattccaa

SEQ ID NO: 416763 - DNA, 30 bp, Artificial Sequence
  Synthetic oligonucleotide
caatattgcttagatatatgggccttccaa

SEQ ID NO: 416764 - DNA, 30 bp, Artificial Sequence
  Synthetic oligonucleotide
gtccattgtctcgttgtcgttgtgttccaa

SEQ ID NO: 416765 - DNA, 30 bp, Artificial Sequence
  Synthetic oligonucleotide
gaaagagtgcattctggaatcattttccaa

SEQ ID NO: 416766 - DNA, 30 bp, Artificial Sequence
  Synthetic oligonucleotide
ataattgcggttgaaagataccttttccaa

SEQ ID NO: 416767 - DNA, 30 bp, Artificial Sequence
  Synthetic oligonucleotide
gggtcccgtcctaggacataggttttccaa

SEQ ID NO: 416768 - DNA, 30 bp, Artificial Sequence
  Synthetic oligonucleotide
actcacgcagttttattatgcagcaagcaa

SEQ ID NO: 416769 - DNA, 30 bp, Artificial Sequence
  Synthetic oligonucleotide
gtgggacataggatgtgaggaacgaagcaa

SEQ ID NO: 416770 - DNA, 30 bp, Artificial Sequence
  Synthetic oligonucleotide
actcgactattggtgtatcccgcgaagcaa

SEQ ID NO: 416771 - DNA, 30 bp, Artificial Sequence
  Synthetic oligonucleotide
ttttgtagatactaagaaacctggaagcaa

SEQ ID NO: 416772 - DNA, 30 bp, Artificial Sequence
  Synthetic oligonucleotide
atagactcaggattggaaggacataagcaa

SEQ ID NO: 416773 - DNA, 30 bp, Artificial Sequence
  Synthetic oligonucleotide
attacgtagctaacatcacggcgtaagcaa

SEQ ID NO: 416774 - DNA, 30 bp, Artificial Sequence
  Synthetic oligonucleotide
ctcaccatgagctgtaggagcgttaagcaa

SEQ ID NO: 416775 - DNA, 30 bp, Artificial Sequence
  Synthetic oligonucleotide
cgttcatcctataaatttccctttaagcaa

SEQ ID NO: 416776 - DNA, 30 bp, Artificial Sequence
  Synthetic oligonucleotide
acagtgaacctgttattatacgtacagcaa

SEQ ID NO: 416777 - DNA, 30 bp, Artificial Sequence
  Synthetic oligonucleotide
ataatgatgggtcttagctaaggccagcaa

SEQ ID NO: 416778 - DNA, 30 bp, Artificial Sequence
  Synthetic oligonucleotide
caacccggcgttaaatatatttcgcagcaa

SEQ ID NO: 416779 - DNA, 30 bp, Artificial Sequence
  Synthetic oligonucleotide
ttccaagtgcattatcgttgtgctcagcaa

SEQ ID NO: 416780 - DNA, 30 bp, Artificial Sequence
  Synthetic oligonucleotide
gtggaacaatgggcgctggtgggtgagcaa

SEQ ID NO: 416781 - DNA, 30 bp, Artificial Sequence
  Synthetic oligonucleotide
ttgctattatgctgcgtccaatgtgagcaa

SEQ ID NO: 416782 - DNA, 30 bp, Artificial Sequence
  Synthetic oligonucleotide
gagtatgtgaatttgggggaatgtgagcaa

SEQ ID NO: 416783 - DNA, 30 bp, Artificial Sequence
  Synthetic oligonucleotide
catataaacgctgagttttgcgtatagcaa

SEQ ID NO: 416784 - DNA, 30 bp, Artificial Sequence
  Synthetic oligonucleotide
aaagtcagatctagaagttctgtctagcaa

SEQ ID NO: 416785 - DNA, 30 bp, Artificial Sequence
  Synthetic oligonucleotide
aaactgtgttatgccagtgttgggtagcaa

SEQ ID NO: 416786 - DNA, 30 bp, Artificial Sequence
  Synthetic oligonucleotide
ggcgcccgcaggattgagctcgtgtagcaa

SEQ ID NO: 416787 - DNA, 30 bp, Artificial Sequence
  Synthetic oligonucleotide
atgttttcaaacattctaagctgaacgcaa

SEQ ID NO: 416788 - DNA, 30 bp, Artificial Sequence
  Synthetic oligonucleotide
ggatttcaacgtattcccggggccacgcaa

SEQ ID NO: 416789 - DNA, 30 bp, Artificial Sequence
  Synthetic oligonucleotide
cctactcaagtttgggttgaacgcacgcaa

SEQ ID NO: 416790 - DNA, 30 bp, Artificial Sequence
  Synthetic oligonucleotide
aatagctgcgatcgagctcggggcacgcaa

SEQ ID NO: 416791 - DNA, 30 bp, Artificial Sequence
  Synthetic oligonucleotide
ttgcgcgagtttaggagtgacaagacgcaa

SEQ ID NO: 416792 - DNA, 30 bp, Artificial Sequence
  Synthetic oligonucleotide
agtcccggaaatgggattacaaggacgcaa

SEQ ID NO: 416793 - DNA, 30 bp, Artificial Sequence
  Synthetic oligonucleotide
tactcgggcagactagtctcatggacgcaa

SEQ ID NO: 416794 - DNA, 30 bp, Artificial Sequence
  Synthetic oligonucleotide
gatgagctcataatctgagtgttgacgcaa

SEQ ID NO: 416795 - DNA, 30 bp, Artificial Sequence
  Synthetic oligonucleotide
gaaactgtacctgctggtctgcctacgcaa

SEQ ID NO: 416796 - DNA, 30 bp, Artificial Sequence
  Synthetic oligonucleotide
cttaaacattgactcccgcgtcgtacgcaa

SEQ ID NO: 416797 - DNA, 30 bp, Artificial Sequence
  Synthetic oligonucleotide
gacttgccccgttcccaatagtttacgcaa

SEQ ID NO: 416798 - DNA, 30 bp, Artificial Sequence
  Synthetic oligonucleotide
tgagcatctgtctctgtaagacgaccgcaa

SEQ ID NO: 416799 - DNA, 30 bp, Artificial Sequence
  Synthetic oligonucleotide
attgattccgagttcccaccagtcccgcaa

SEQ ID NO: 416800 - DNA, 30 bp, Artificial Sequence
  Synthetic oligonucleotide
ttgacccccacaaggttacttgatccgcaa

SEQ ID NO: 416801 - DNA, 30 bp, Artificial Sequence
  Synthetic oligonucleotide
gctaattatttgcgtcttacaccagcgcaa

SEQ ID NO: 416802 - DNA, 30 bp, Artificial Sequence
  Synthetic oligonucleotide
tttccccgctcgcacattacttcagcgcaa

SEQ ID NO: 416803 - DNA, 30 bp, Artificial Sequence
  Synthetic oligonucleotide
aagtcaaagcgagactgcattatagcgcaa

SEQ ID NO: 416804 - DNA, 30 bp, Artificial Sequence
  Synthetic oligonucleotide
cctgattcacggtcggctgcggacgcgcaa

SEQ ID NO: 416805 - DNA, 30 bp, Artificial Sequence
  Synthetic oligonucleotide
tatatgaagatggtacatgcagtcgcgcaa

SEQ ID NO: 416806 - DNA, 30 bp, Artificial Sequence
  Synthetic oligonucleotide
tacgagtttttactgtctcgtccggcgcaa

SEQ ID NO: 416807 - DNA, 30 bp, Artificial Sequence
  Synthetic oligonucleotide
ggcagggcacattggtttattcatgcgcaa

SEQ ID NO: 416808 - DNA, 30 bp, Artificial Sequence
  Synthetic oligonucleotide
ccatgctgggatgatcttcgacaatcgcaa

SEQ ID NO: 416809 - DNA, 30 bp, Artificial Sequence
  Synthetic oligonucleotide
gtaatgtgcgcatgggcgtattaatcgcaa

SEQ ID NO: 416810 - DNA, 30 bp, Artificial Sequence
  Synthetic oligonucleotide
gtgtgatacctgcctgtccaacgatcgcaa

SEQ ID NO: 416811 - DNA, 30 bp, Artificial Sequence
  Synthetic oligonucleotide
aaattattttctactaaggcattatcgcaa

SEQ ID NO: 416812 - DNA, 30 bp, Artificial Sequence
  Synthetic oligonucleotide
gggagttagtttccgatgcacaactcgcaa

SEQ ID NO: 416813 - DNA, 30 bp, Artificial Sequence
  Synthetic oligonucleotide
gcgtatgaggggaccccccgtccctcgcaa

SEQ ID NO: 416814 - DNA, 30 bp, Artificial Sequence
  Synthetic oligonucleotide
cggcaatatctcccctacacgggctcgcaa

SEQ ID NO: 416815 - DNA, 30 bp, Artificial Sequence
  Synthetic oligonucleotide
gtaagcagcgtttgtggtggtctctcgcaa

SEQ ID NO: 416816 - DNA, 30 bp, Artificial Sequence
  Synthetic oligonucleotide
atccgtaacaactgagaatcacagtcgcaa

SEQ ID NO: 416817 - DNA, 30 bp, Artificial Sequence
  Synthetic oligonucleotide
aacagattcttttagcctggcccaaggcaa

SEQ ID NO: 416818 - DNA, 30 bp, Artificial Sequence
  Synthetic oligonucleotide
actctatgtctgatggtacatgcaaggcaa

SEQ ID NO: 416819 - DNA, 30 bp, Artificial Sequence
  Synthetic oligonucleotide
cggataatggtgataaaaacgtgaaggcaa

SEQ ID NO: 416820 - DNA, 30 bp, Artificial Sequence
  Synthetic oligonucleotide
atagaggtggccgctcctgtcttgaggcaa

SEQ ID NO: 416821 - DNA, 30 bp, Artificial Sequence
  Synthetic oligonucleotide
tcttactgctgcgaatttgctaataggcaa

SEQ ID NO: 416822 - DNA, 30 bp, Artificial Sequence
  Synthetic oligonucleotide
ggatgtctttggagccactgaactaggcaa

SEQ ID NO: 416823 - DNA, 30 bp, Artificial Sequence
  Synthetic oligonucleotide
ttcgtgggcgtccattagtcccttaggcaa

SEQ ID NO: 416824 - DNA, 30 bp, Artificial Sequence
  Synthetic oligonucleotide
tggggaacgaaatatggaattcggcggcaa

SEQ ID NO: 416825 - DNA, 30 bp, Artificial Sequence
  Synthetic oligonucleotide
aatttaggtgccacatacggctctcggcaa

SEQ ID NO: 416826 - DNA, 30 bp, Artificial Sequence
  Synthetic oligonucleotide
gccgcgtgagacgagcaaccacgtcggcaa

SEQ ID NO: 416827 - DNA, 30 bp, Artificial Sequence
  Synthetic oligonucleotide
acgtttacagccatcctttgaattcggcaa

SEQ ID NO: 416828 - DNA, 30 bp, Artificial Sequence
  Synthetic oligonucleotide
cgggcttctgcgtccatacggagagggcaa

SEQ ID NO: 416829 - DNA, 30 bp, Artificial Sequence
  Synthetic oligonucleotide
gagcctgccagttaccccgaactcgggcaa

SEQ ID NO: 416830 - DNA, 30 bp, Artificial Sequence
  Synthetic oligonucleotide
taaggttggtcttatgaattgcaggggcaa

SEQ ID NO: 416831 - DNA, 30 bp, Artificial Sequence
  Synthetic oligonucleotide
gtctagtggcgtcgctatagcaatgggcaa

SEQ ID NO: 416832 - DNA, 30 bp, Artificial Sequence
  Synthetic oligonucleotide
ttgtagatgtgagatgactcttatgggcaa

SEQ ID NO: 416833 - DNA, 30 bp, Artificial Sequence
  Synthetic oligonucleotide
tatggcctcttctctcacctaaaatggcaa

SEQ ID NO: 416834 - DNA, 30 bp, Artificial Sequence
  Synthetic oligonucleotide
ggtatcaacacaaaccagcgccgatggcaa

SEQ ID NO: 416835 - DNA, 30 bp, Artificial Sequence
  Synthetic oligonucleotide
ggtcggacgtgaatcatgtacggatggcaa

SEQ ID NO: 416836 - DNA, 30 bp, Artificial Sequence
  Synthetic oligonucleotide
acttaccagcacgctccgagattatggcaa

SEQ ID NO: 416837 - DNA, 30 bp, Artificial Sequence
  Synthetic oligonucleotide
ctggcctcatcctatgagatagactggcaa

SEQ ID NO: 416838 - DNA, 30 bp, Artificial Sequence
  Synthetic oligonucleotide
attgccagatgcagcagaaaccagtggcaa

SEQ ID NO: 416839 - DNA, 30 bp, Artificial Sequence
  Synthetic oligonucleotide
tatgtcaggcaggagtttccactgtggcaa

SEQ ID NO: 416840 - DNA, 30 bp, Artificial Sequence
  Synthetic oligonucleotide
atgggattcaatggcttcatgtattggcaa

SEQ ID NO: 416841 - DNA, 30 bp, Artificial Sequence
  Synthetic oligonucleotide
ggttagtaaacatgatgctacgcttggcaa

SEQ ID NO: 416842 - DNA, 30 bp, Artificial Sequence
  Synthetic oligonucleotide
atcttatacagttgaatgatagtaatgcaa

SEQ ID NO: 416843 - DNA, 30 bp, Artificial Sequence
  Synthetic oligonucleotide
aaaagacagtttccaggtttcttaatgcaa

SEQ ID NO: 416844 - DNA, 30 bp, Artificial Sequence
  Synthetic oligonucleotide
tcggcttttgcgtgcgtccgacccatgcaa

SEQ ID NO: 416845 - DNA, 30 bp, Artificial Sequence
  Synthetic oligonucleotide
taagtaagaagctacttagccgccatgcaa

SEQ ID NO: 416846 - DNA, 30 bp, Artificial Sequence
  Synthetic oligonucleotide
ccagaagcttaatttaatgttcgcatgcaa

SEQ ID NO: 416847 - DNA, 30 bp, Artificial Sequence
  Synthetic oligonucleotide
atcccagcacgcctcaaccatggcatgcaa

SEQ ID NO: 416848 - DNA, 30 bp, Artificial Sequence
  Synthetic oligonucleotide
ttcttgatagctggattatttggcatgcaa

SEQ ID NO: 416849 - DNA, 30 bp, Artificial Sequence
  Synthetic oligonucleotide
tgcgctgcacgattcaatgttgttatgcaa

SEQ ID NO: 416850 - DNA, 30 bp, Artificial Sequence
  Synthetic oligonucleotide
cgctgtgaggtaggattgacactactgcaa

SEQ ID NO: 416851 - DNA, 30 bp, Artificial Sequence
  Synthetic oligonucleotide
cgcagatgggttatctgcccgtacctgcaa

SEQ ID NO: 416852 - DNA, 30 bp, Artificial Sequence
  Synthetic oligonucleotide
agcatcagagggcttaatagcaccctgcaa

SEQ ID NO: 416853 - DNA, 30 bp, Artificial Sequence
  Synthetic oligonucleotide
tttgttaggggaacaagtagtgtcctgcaa

SEQ ID NO: 416854 - DNA, 30 bp, Artificial Sequence
  Synthetic oligonucleotide
gagatcacctcttgcatggcctatctgcaa

SEQ ID NO: 416855 - DNA, 30 bp, Artificial Sequence
  Synthetic oligonucleotide
gcaacattaaggtaaagcctttaagtgcaa

SEQ ID NO: 416856 - DNA, 30 bp, Artificial Sequence
  Synthetic oligonucleotide
tagttgggtagacgggaatttacagtgcaa

SEQ ID NO: 416857 - DNA, 30 bp, Artificial Sequence
  Synthetic oligonucleotide
caggtacgcggtaaattcatgtacgtgcaa

SEQ ID NO: 416858 - DNA, 30 bp, Artificial Sequence
  Synthetic oligonucleotide
agcacgctctagcaccttcgatcggtgcaa

SEQ ID NO: 416859 - DNA, 30 bp, Artificial Sequence
  Synthetic oligonucleotide
cgcccgagagacgacttagcactggtgcaa

SEQ ID NO: 416860 - DNA, 30 bp, Artificial Sequence
  Synthetic oligonucleotide
gggtacccattcgcggattccagtgtgcaa

SEQ ID NO: 416861 - DNA, 30 bp, Artificial Sequence
  Synthetic oligonucleotide
gctttggtcatcagtccggttgttgtgcaa

SEQ ID NO: 416862 - DNA, 30 bp, Artificial Sequence
  Synthetic oligonucleotide
ctccgtctcatagatggatatagcttgcaa

SEQ ID NO: 416863 - DNA, 30 bp, Artificial Sequence
  Synthetic oligonucleotide
tactggctggggggtcttcaggtcttgcaa

SEQ ID NO: 416864 - DNA, 30 bp, Artificial Sequence
  Synthetic oligonucleotide
ataagtcgttagtcgagtgcattgttgcaa

SEQ ID NO: 416865 - DNA, 30 bp, Artificial Sequence
  Synthetic oligonucleotide
aaatgcgtaattcactagaacaatttgcaa

SEQ ID NO: 416866 - DNA, 30 bp, Artificial Sequence
  Synthetic oligonucleotide
tccatgcgtattgcgcatgctcatttgcaa

SEQ ID NO: 416867 - DNA, 30 bp, Artificial Sequence
  Synthetic oligonucleotide
cttagagatgtgccgccagaagctttgcaa

SEQ ID NO: 416868 - DNA, 30 bp, Artificial Sequence
  Synthetic oligonucleotide
ccgtactagtgtaagcttttgtgtttgcaa

SEQ ID NO: 416869 - DNA, 30 bp, Artificial Sequence
  Synthetic oligonucleotide
ccgttccgtcgcctccacttcgaaaatcaa

SEQ ID NO: 416870 - DNA, 30 bp, Artificial Sequence
  Synthetic oligonucleotide
cagtccgatatgcaaatggacgcaaatcaa

SEQ ID NO: 416871 - DNA, 30 bp, Artificial Sequence
  Synthetic oligonucleotide
tcgggctagggcgccgccgtcggaaatcaa

SEQ ID NO: 416872 - DNA, 30 bp, Artificial Sequence
  Synthetic oligonucleotide
tgtactcgtattttcgaaatattaaatcaa

SEQ ID NO: 416873 - DNA, 30 bp, Artificial Sequence
  Synthetic oligonucleotide
gctgtcggaaatcaggcccgtcacaatcaa

SEQ ID NO: 416874 - DNA, 30 bp, Artificial Sequence
  Synthetic oligonucleotide
gattttatccacagattacaagacaatcaa

SEQ ID NO: 416875 - DNA, 30 bp, Artificial Sequence
  Synthetic oligonucleotide
ggcctttggtgaattgggaaccgcaatcaa

SEQ ID NO: 416876 - DNA, 30 bp, Artificial Sequence
  Synthetic oligonucleotide
ttcatatcgaaccccggtcatttcaatcaa

SEQ ID NO: 416877 - DNA, 30 bp, Artificial Sequence
  Synthetic oligonucleotide
acaggtagactgctgttcaatgagaatcaa

SEQ ID NO: 416878 - DNA, 30 bp, Artificial Sequence
  Synthetic oligonucleotide
cgtgaatgtttcgcatggctctcgaatcaa

SEQ ID NO: 416879 - DNA, 30 bp, Artificial Sequence
  Synthetic oligonucleotide
ctatgttaagatccttacaatcggaatcaa

SEQ ID NO: 416880 - DNA, 30 bp, Artificial Sequence
  Synthetic oligonucleotide
ggccctaatataattggtatccgtaatcaa

SEQ ID NO: 416881 - DNA, 30 bp, Artificial Sequence
  Synthetic oligonucleotide
ggaaatcggatcagggccagctttaatcaa

SEQ ID NO: 416882 - DNA, 30 bp, Artificial Sequence
  Synthetic oligonucleotide
gggaattaatattactgatttggacatcaa

SEQ ID NO: 416883 - DNA, 30 bp, Artificial Sequence
  Synthetic oligonucleotide
agctgtggaaattgggtatagacccatcaa

SEQ ID NO: 416884 - DNA, 30 bp, Artificial Sequence
  Synthetic oligonucleotide
ggctttgccgggagtcctaatcgccatcaa

SEQ ID NO: 416885 - DNA, 30 bp, Artificial Sequence
  Synthetic oligonucleotide
gatcatcacgcgtgggctacaaagcatcaa

SEQ ID NO: 416886 - DNA, 30 bp, Artificial Sequence
  Synthetic oligonucleotide
gaccagctatcatataatagttcgcatcaa

SEQ ID NO: 416887 - DNA, 30 bp, Artificial Sequence
  Synthetic oligonucleotide
ttcatttgttcatatagtagccggcatcaa

SEQ ID NO: 416888 - DNA, 30 bp, Artificial Sequence
  Synthetic oligonucleotide
aattacggctgactcgacaaccaagatcaa

SEQ ID NO: 416889 - DNA, 30 bp, Artificial Sequence
  Synthetic oligonucleotide
gggtccattaggcttaacacgcacgatcaa

SEQ ID NO: 416890 - DNA, 30 bp, Artificial Sequence
  Synthetic oligonucleotide
gggagtgagacgtccatgtcttacgatcaa

SEQ ID NO: 416891 - DNA, 30 bp, Artificial Sequence
  Synthetic oligonucleotide
cagacggtagttagcaagatcatcgatcaa

SEQ ID NO: 416892 - DNA, 30 bp, Artificial Sequence
  Synthetic oligonucleotide
agatctattgagcaacggaaataggatcaa

SEQ ID NO: 416893 - DNA, 30 bp, Artificial Sequence
  Synthetic oligonucleotide
gtcatgatccaatatcatgtagtggatcaa

SEQ ID NO: 416894 - DNA, 30 bp, Artificial Sequence
  Synthetic oligonucleotide
cccagaactgagtccctattcagtgatcaa

SEQ ID NO: 416895 - DNA, 30 bp, Artificial Sequence
  Synthetic oligonucleotide
gccggtgcgcatctcagactttcatatcaa

SEQ ID NO: 416896 - DNA, 30 bp, Artificial Sequence
  Synthetic oligonucleotide
ggtatacgaacttgtgtccgcagatatcaa

SEQ ID NO: 416897 - DNA, 30 bp, Artificial Sequence
  Synthetic oligonucleotide
tactttgtcagggaaagtacctagtatcaa

SEQ ID NO: 416898 - DNA, 30 bp, Artificial Sequence
  Synthetic oligonucleotide
atcagtgcccgagtttggcccacgtatcaa

SEQ ID NO: 416899 - DNA, 30 bp, Artificial Sequence
  Synthetic oligonucleotide
gggtaaagagcgattgacgctttttatcaa

SEQ ID NO: 416900 - DNA, 30 bp, Artificial Sequence
  Synthetic oligonucleotide
tctatattaggcgaaaagcgcgtgactcaa

SEQ ID NO: 416901 - DNA, 30 bp, Artificial Sequence
  Synthetic oligonucleotide
taactgtgaataatgtgcaggtttactcaa

SEQ ID NO: 416902 - DNA, 30 bp, Artificial Sequence
  Synthetic oligonucleotide
attccaggaggccttcatctcgaacctcaa

SEQ ID NO: 416903 - DNA, 30 bp, Artificial Sequence
  Synthetic oligonucleotide
tgcttttcctcggcgaaagagttccctcaa

SEQ ID NO: 416904 - DNA, 30 bp, Artificial Sequence
  Synthetic oligonucleotide
tgtcggtgtattgacggagcccatgctcaa

SEQ ID NO: 416905 - DNA, 30 bp, Artificial Sequence
  Synthetic oligonucleotide
attaactcgtatagcagcgttactgctcaa

SEQ ID NO: 416906 - DNA, 30 bp, Artificial Sequence
  Synthetic oligonucleotide
tatatgataagcggcttacccggtgctcaa

SEQ ID NO: 416907 - DNA, 30 bp, Artificial Sequence
  Synthetic oligonucleotide
atcgcttagacacaataagttggtgctcaa

SEQ ID NO: 416908 - DNA, 30 bp, Artificial Sequence
  Synthetic oligonucleotide
atgggctatgtagcttggagcatatctcaa

SEQ ID NO: 416909 - DNA, 30 bp, Artificial Sequence
  Synthetic oligonucleotide
gacttggttcatggtaactgtcactctcaa

SEQ ID NO: 416910 - DNA, 30 bp, Artificial Sequence
  Synthetic oligonucleotide
tttgggctcgctttgcgaaaatcctctcaa

SEQ ID NO: 416911 - DNA, 30 bp, Artificial Sequence
  Synthetic oligonucleotide
tgcattgttaagttaaatttttgctctcaa

SEQ ID NO: 416912 - DNA, 30 bp, Artificial Sequence
  Synthetic oligonucleotide
ctgtgaagtttttatgtgaaatcttctcaa

SEQ ID NO: 416913 - DNA, 30 bp, Artificial Sequence
  Synthetic oligonucleotide
tgctcgtcttaaggaacgaagatttctcaa

SEQ ID NO: 416914 - DNA, 30 bp, Artificial Sequence
  Synthetic oligonucleotide
cgttattttggtcctattcacctaagtcaa

SEQ ID NO: 416915 - DNA, 30 bp, Artificial Sequence
  Synthetic oligonucleotide
ttctcgaagccgatctagcgctccagtcaa

SEQ ID NO: 416916 - DNA, 30 bp, Artificial Sequence
  Synthetic oligonucleotide
gacatcttgatctgtgccttaggcagtcaa

SEQ ID NO: 416917 - DNA, 30 bp, Artificial Sequence
  Synthetic oligonucleotide
acgcgacggacggtccacatagtcagtcaa

SEQ ID NO: 416918 - DNA, 30 bp, Artificial Sequence
  Synthetic oligonucleotide
tagtgttgggcacgtgccgtttcccgtcaa

SEQ ID NO: 416919 - DNA, 30 bp, Artificial Sequence
  Synthetic oligonucleotide
tgggaccgtagggtatacggcctccgtcaa

SEQ ID NO: 416920 - DNA, 30 bp, Artificial Sequence
  Synthetic oligonucleotide
aataacgacagcaagtgagaattccgtcaa

SEQ ID NO: 416921 - DNA, 30 bp, Artificial Sequence
  Synthetic oligonucleotide
attgcatcgggattggagaagttccgtcaa

SEQ ID NO: 416922 - DNA, 29 bp, Artificial Sequence
  Synthetic oligonucleotide
cgaccccgcgtcttgggtttgatcgtcaa

SEQ ID NO: 416923 - DNA, 30 bp, Artificial Sequence
  Synthetic oligonucleotide
atggcctgctcagcgtccaccggtcgtcaa

SEQ ID NO: 416924 - DNA, 30 bp, Artificial Sequence
  Synthetic oligonucleotide
gaattggggttcgttaacttgtttcgtcaa

SEQ ID NO: 416925 - DNA, 29 bp, Artificial Sequence
  Synthetic oligonucleotide
cacagcgtcaatacttcggtgaaggtcaa

SEQ ID NO: 416926 - DNA, 30 bp, Artificial Sequence
  Synthetic oligonucleotide
ggctcctcatgttggagcactacaggtcaa

SEQ ID NO: 416927 - DNA, 30 bp, Artificial Sequence
  Synthetic oligonucleotide
tctgccatttgggatttgtgggcaggtcaa

SEQ ID NO: 416928 - DNA, 30 bp, Artificial Sequence
  Synthetic oligonucleotide
tccctttaggtggaatcatccatcggtcaa

SEQ ID NO: 416929 - DNA, 30 bp, Artificial Sequence
  Synthetic oligonucleotide
gcctctaggattgggacgaggccgggtcaa

SEQ ID NO: 416930 - DNA, 30 bp, Artificial Sequence
  Synthetic oligonucleotide
tgtcaggattcgcgcagtcgtgctggtcaa

SEQ ID NO: 416931 - DNA, 30 bp, Artificial Sequence
  Synthetic oligonucleotide
caaaacgagtcctctacgggctctggtcaa

SEQ ID NO: 416932 - DNA, 30 bp, Artificial Sequence
  Synthetic oligonucleotide
aaagacgtgttattgtaaatgattggtcaa

SEQ ID NO: 416933 - DNA, 30 bp, Artificial Sequence
  Synthetic oligonucleotide
gacccagtggacgacgtcgtgcttggtcaa

SEQ ID NO: 416934 - DNA, 30 bp, Artificial Sequence
  Synthetic oligonucleotide
ggaaatgggctgtcccccgtgatatgtcaa

SEQ ID NO: 416935 - DNA, 30 bp, Artificial Sequence
  Synthetic oligonucleotide
agtcagatctaaaatggatgactatgtcaa

SEQ ID NO: 416936 - DNA, 30 bp, Artificial Sequence
  Synthetic oligonucleotide
gtactacttcatgacgaagacaactgtcaa

SEQ ID NO: 416937 - DNA, 30 bp, Artificial Sequence
  Synthetic oligonucleotide
taagaactctgactagtgtgacactgtcaa

SEQ ID NO: 416938 - DNA, 30 bp, Artificial Sequence
  Synthetic oligonucleotide
gatttttcatcaaccatatacgactgtcaa

SEQ ID NO: 416939 - DNA, 30 bp, Artificial Sequence
  Synthetic oligonucleotide
gataagttcgatctccagtgcatctgtcaa

SEQ ID NO: 416940 - DNA, 30 bp, Artificial Sequence
  Synthetic oligonucleotide
acccaagtatcaggactagcactctgtcaa

SEQ ID NO: 416941 - DNA, 30 bp, Artificial Sequence
  Synthetic oligonucleotide
ctccagacttttaataagtgctgttgtcaa

SEQ ID NO: 416942 - DNA, 30 bp, Artificial Sequence
  Synthetic oligonucleotide
tacctaaagttagataaggactgaattcaa

SEQ ID NO: 416943 - DNA, 30 bp, Artificial Sequence
  Synthetic oligonucleotide
taactccatagactaggttgggtaattcaa

SEQ ID NO: 416944 - DNA, 30 bp, Artificial Sequence
  Synthetic oligonucleotide
tatggttgcagtatactttcctacattcaa

SEQ ID NO: 416945 - DNA, 30 bp, Artificial Sequence
  Synthetic oligonucleotide
gtccgaatctcatcggggactactattcaa

SEQ ID NO: 416946 - DNA, 30 bp, Artificial Sequence
  Synthetic oligonucleotide
cttaggcttcgctggggcctagctattcaa

SEQ ID NO: 416947 - DNA, 30 bp, Artificial Sequence
  Synthetic oligonucleotide
tttgggactgtaaatgtgtttgttattcaa

SEQ ID NO: 416948 - DNA, 30 bp, Artificial Sequence
  Synthetic oligonucleotide
gatgagaaaggtcgaggattggaccttcaa

SEQ ID NO: 416949 - DNA, 30 bp, Artificial Sequence
  Synthetic oligonucleotide
taagttatagttccacaaccgccccttcaa

SEQ ID NO: 416950 - DNA, 30 bp, Artificial Sequence
  Synthetic oligonucleotide
gagaattactttgcgggcaaatgccttcaa

SEQ ID NO: 416951 - DNA, 30 bp, Artificial Sequence
  Synthetic oligonucleotide
cgccagttcgatctgttcgtatagcttcaa

SEQ ID NO: 416952 - DNA, 30 bp, Artificial Sequence
  Synthetic oligonucleotide
ccatctagcacgccaacgatttcgcttcaa

SEQ ID NO: 416953 - DNA, 30 bp, Artificial Sequence
  Synthetic oligonucleotide
ccgtttattaatctaaacggtaatcttcaa

SEQ ID NO: 416954 - DNA, 30 bp, Artificial Sequence
  Synthetic oligonucleotide
caggtaagatagattcgcatttatcttcaa

SEQ ID NO: 416955 - DNA, 30 bp, Artificial Sequence
  Synthetic oligonucleotide
ccttagcgattttgttgacagcctcttcaa

SEQ ID NO: 416956 - DNA, 30 bp, Artificial Sequence
  Synthetic oligonucleotide
gggagggcctcggcgccactgtctcttcaa

SEQ ID NO: 416957 - DNA, 30 bp, Artificial Sequence
  Synthetic oligonucleotide
tcctctccacctttaagggtaagtcttcaa

SEQ ID NO: 416958 - DNA, 30 bp, Artificial Sequence
  Synthetic oligonucleotide
tatcacgcggatataaaaggctgtcttcaa

SEQ ID NO: 416959 - DNA, 30 bp, Artificial Sequence
  Synthetic oligonucleotide
aacgtttgggttatgacgtattgtcttcaa

SEQ ID NO: 416960 - DNA, 30 bp, Artificial Sequence
  Synthetic oligonucleotide
aacattatgattccaacgatgttagttcaa

SEQ ID NO: 416961 - DNA, 30 bp, Artificial Sequence
  Synthetic oligonucleotide
tcccggaaagcaagtctgccgcgcgttcaa

SEQ ID NO: 416962 - DNA, 30 bp, Artificial Sequence
  Synthetic oligonucleotide
tgctatctacgatagaataagatcgttcaa

SEQ ID NO: 416963 - DNA, 30 bp, Artificial Sequence
  Synthetic oligonucleotide
tcctgtccaaaacagaatgatagggttcaa

SEQ ID NO: 416964 - DNA, 30 bp, Artificial Sequence
  Synthetic oligonucleotide
gcagcagggtgagaattgttgtgggttcaa

SEQ ID NO: 416965 - DNA, 30 bp, Artificial Sequence
  Synthetic oligonucleotide
atccactgtttagccgccagactggttcaa

SEQ ID NO: 416966 - DNA, 30 bp, Artificial Sequence
  Synthetic oligonucleotide
gcacagctacgactttagtaggctgttcaa

SEQ ID NO: 416967 - DNA, 30 bp, Artificial Sequence
  Synthetic oligonucleotide
tatgacttaaagtggggattacttgttcaa

SEQ ID NO: 416968 - DNA, 30 bp, Artificial Sequence
  Synthetic oligonucleotide
tgtttgtgattgctcatagagcaatttcaa

SEQ ID NO: 416969 - DNA, 30 bp, Artificial Sequence
  Synthetic oligonucleotide
tgtgcctatgcgaaattccaaacatttcaa

SEQ ID NO: 416970 - DNA, 30 bp, Artificial Sequence
  Synthetic oligonucleotide
caatcatctcaacaccatctgtcatttcaa

SEQ ID NO: 416971 - DNA, 30 bp, Artificial Sequence
  Synthetic oligonucleotide
gtagtcttcacgcccattacattatttcaa

SEQ ID NO: 416972 - DNA, 30 bp, Artificial Sequence
  Synthetic oligonucleotide
agccatcttcaagtcggaaaaacctttcaa

SEQ ID NO: 416973 - DNA, 30 bp, Artificial Sequence
  Synthetic oligonucleotide
cactgatgcgtaggtgcggaagagtttcaa

SEQ ID NO: 416974 - DNA, 30 bp, Artificial Sequence
  Synthetic oligonucleotide
aatataaggtgaccccaagaaaggtttcaa

SEQ ID NO: 416975 - DNA, 30 bp, Artificial Sequence
  Synthetic oligonucleotide
tcggctgcgtgatcatacattcggtttcaa

SEQ ID NO: 416976 - DNA, 30 bp, Artificial Sequence
  Synthetic oligonucleotide
ctagtgtggtatagaggcattaattttcaa

SEQ ID NO: 416977 - DNA, 30 bp, Artificial Sequence
  Synthetic oligonucleotide
tactttgtttcagaagggaggatttttcaa

SEQ ID NO: 416978 - DNA, 30 bp, Artificial Sequence
  Synthetic oligonucleotide
tacacagataggccaatgctgctttttcaa

SEQ ID NO: 416979 - DNA, 30 bp, Artificial Sequence
  Synthetic oligonucleotide
cagttcgtgacgttatccatccaaaaagaa

SEQ ID NO: 416980 - DNA, 30 bp, Artificial Sequence
  Synthetic oligonucleotide
cccagctagtttgtgcgcatatgaaaagaa

SEQ ID NO: 416981 - DNA, 30 bp, Artificial Sequence
  Synthetic oligonucleotide
acaattagcctggtttatttatataaagaa

SEQ ID NO: 416982 - DNA, 30 bp, Artificial Sequence
  Synthetic oligonucleotide
agaattcattgcttgcacgttgaacaagaa

SEQ ID NO: 416983 - DNA, 30 bp, Artificial Sequence
  Synthetic oligonucleotide
gaattccgacaaacttagtcaggacaagaa

SEQ ID NO: 416984 - DNA, 30 bp, Artificial Sequence
  Synthetic oligonucleotide
gaaccacttggggaaggtcgtatacaagaa

SEQ ID NO: 416985 - DNA, 30 bp, Artificial Sequence
  Synthetic oligonucleotide
aatttgtaggtccaatgatacaagcaagaa

SEQ ID NO: 416986 - DNA, 30 bp, Artificial Sequence
  Synthetic oligonucleotide
cgatggcatcgcacgcgcacgaagcaagaa

SEQ ID NO: 416987 - DNA, 30 bp, Artificial Sequence
  Synthetic oligonucleotide
gaactcggatttctgttacgtgcgcaagaa

SEQ ID NO: 416988 - DNA, 30 bp, Artificial Sequence
  Synthetic oligonucleotide
gcgggttgaccgacttagttacggcaagaa

SEQ ID NO: 416989 - DNA, 30 bp, Artificial Sequence
  Synthetic oligonucleotide
ggcgcataattttctactcttagtcaagaa

SEQ ID NO: 416990 - DNA, 30 bp, Artificial Sequence
  Synthetic oligonucleotide
atggttccatacgtaaatggcattcaagaa

SEQ ID NO: 416991 - DNA, 30 bp, Artificial Sequence
  Synthetic oligonucleotide
agatttccagatcttagtcatttagaagaa

SEQ ID NO: 416992 - DNA, 30 bp, Artificial Sequence
  Synthetic oligonucleotide
tgcacatgtgggtgtcgctcatgcgaagaa

SEQ ID NO: 416993 - DNA, 30 bp, Artificial Sequence
  Synthetic oligonucleotide
gaatctgttgtgggtatggcatctgaagaa

SEQ ID NO: 416994 - DNA, 30 bp, Artificial Sequence
  Synthetic oligonucleotide
cgcagcaagaaatttaaacggcttgaagaa

SEQ ID NO: 416995 - DNA, 30 bp, Artificial Sequence
  Synthetic oligonucleotide
gtgggaagcccctgttacaattcataagaa

SEQ ID NO: 416996 - DNA, 30 bp, Artificial Sequence
  Synthetic oligonucleotide
cctgataatagcatcttttcatcctaagaa

SEQ ID NO: 416997 - DNA, 31 bp, Artificial Sequence
  Synthetic oligonucleotide
aattcactggtgcagcgcgtgactgtaagaa

SEQ ID NO: 416998 - DNA, 30 bp, Artificial Sequence
  Synthetic oligonucleotide
acatcggtcatcgagcgtatgcattaagaa

SEQ ID NO: 416999 - DNA, 30 bp, Artificial Sequence
  Synthetic oligonucleotide
acccctaaggtaactggcgtagaaacagaa

SEQ ID NO: 417000 - DNA, 30 bp, Artificial Sequence
  Synthetic oligonucleotide
attctaagtttgatagagaacgaaacagaa

SEQ ID NO: 417001 - DNA, 30 bp, Artificial Sequence
  Synthetic oligonucleotide
agttctgtctatgggttgcttccaacagaa

SEQ ID NO: 417002 - DNA, 30 bp, Artificial Sequence
  Synthetic oligonucleotide
agtcacccatactttgtgttgagaacagaa

SEQ ID NO: 417003 - DNA, 30 bp, Artificial Sequence
  Synthetic oligonucleotide
ggttgaaatattgacaaacaacacacagaa

SEQ ID NO: 417004 - DNA, 30 bp, Artificial Sequence
  Synthetic oligonucleotide
gtacgcagaagcaattacggtcacacagaa

SEQ ID NO: 417005 - DNA, 30 bp, Artificial Sequence
  Synthetic oligonucleotide
gcaattctggcgttcatgcaaagtacagaa

SEQ ID NO: 417006 - DNA, 30 bp, Artificial Sequence
  Synthetic oligonucleotide
gaaaactaaatacggtcgggcagtacagaa

SEQ ID NO: 417007 - DNA, 30 bp, Artificial Sequence
  Synthetic oligonucleotide
tctatgggttcctcttatgagattacagaa

SEQ ID NO: 417008 - DNA, 30 bp, Artificial Sequence
  Synthetic oligonucleotide
catgaccgctgaaatcgctgctgaccagaa

SEQ ID NO: 417009 - DNA, 30 bp, Artificial Sequence
  Synthetic oligonucleotide
ttaaacgtcgatgggctgagttgcccagaa

SEQ ID NO: 417010 - DNA, 30 bp, Artificial Sequence
  Synthetic oligonucleotide
catcttactgtgagatggtgcatcccagaa

SEQ ID NO: 417011 - DNA, 30 bp, Artificial Sequence
  Synthetic oligonucleotide
ggttagacttcagcaatggatttcccagaa

SEQ ID NO: 417012 - DNA, 30 bp, Artificial Sequence
  Synthetic oligonucleotide
caggactgcgtaaatgctttcggtccagaa

SEQ ID NO: 417013 - DNA, 30 bp, Artificial Sequence
  Synthetic oligonucleotide
cttgttacggcatgttttagtgaggcagaa

SEQ ID NO: 417014 - DNA, 30 bp, Artificial Sequence
  Synthetic oligonucleotide
acagtcattattataacgatcgaatcagaa

SEQ ID NO: 417015 - DNA, 30 bp, Artificial Sequence
  Synthetic oligonucleotide
aaagccacttttggacctgctgcatcagaa

SEQ ID NO: 417016 - DNA, 30 bp, Artificial Sequence
  Synthetic oligonucleotide
tcgttgggaaatgctgcgtggttatcagaa

SEQ ID NO: 417017 - DNA, 30 bp, Artificial Sequence
  Synthetic oligonucleotide
tctgcatttggcggactattcaactcagaa

SEQ ID NO: 417018 - DNA, 30 bp, Artificial Sequence
  Synthetic oligonucleotide
ccaataatacggacgcgccgcagctcagaa

SEQ ID NO: 417019 - DNA, 30 bp, Artificial Sequence
  Synthetic oligonucleotide
cccagttcctgctcatattgcttctcagaa

SEQ ID NO: 417020 - DNA, 30 bp, Artificial Sequence
  Synthetic oligonucleotide
gttttaggatcgttctatagccagtcagaa

SEQ ID NO: 417021 - DNA, 30 bp, Artificial Sequence
  Synthetic oligonucleotide
tgtacgtgctctaagggttagacgtcagaa

SEQ ID NO: 417022 - DNA, 30 bp, Artificial Sequence
  Synthetic oligonucleotide
atccaccgcctttccgtagatacttcagaa

SEQ ID NO: 417023 - DNA, 30 bp, Artificial Sequence
  Synthetic oligonucleotide
tcgtcattctttataaggggcgtttcagaa

SEQ ID NO: 417024 - DNA, 30 bp, Artificial Sequence
  Synthetic oligonucleotide
gtataaatcgggatcgcaagctcaagagaa

SEQ ID NO: 417025 - DNA, 30 bp, Artificial Sequence
  Synthetic oligonucleotide
gattaagttgttccacttatagtaagagaa

SEQ ID NO: 417026 - DNA, 30 bp, Artificial Sequence
  Synthetic oligonucleotide
ttcccctagccccagagcgttatcagagaa

SEQ ID NO: 417027 - DNA, 30 bp, Artificial Sequence
  Synthetic oligonucleotide
ttcctgatcgtagataaatccatacgagaa

SEQ ID NO: 417028 - DNA, 30 bp, Artificial Sequence
  Synthetic oligonucleotide
ggaagtatgcagcatgtataactacgagaa

SEQ ID NO: 417029 - DNA, 30 bp, Artificial Sequence
  Synthetic oligonucleotide
gcgaggccttcgtcacgggtatcccgagaa

SEQ ID NO: 417030 - DNA, 31 bp, Artificial Sequence
  Synthetic oligonucleotide
gaaagactcagccttatcattcgtccgagaa

SEQ ID NO: 417031 - DNA, 30 bp, Artificial Sequence
  Synthetic oligonucleotide
tgctttatcgcgatcttggtgttccgagaa

SEQ ID NO: 417032 - DNA, 30 bp, Artificial Sequence
  Synthetic oligonucleotide
cggggtgtagattcgccactctcgcgagaa

SEQ ID NO: 417033 - DNA, 30 bp, Artificial Sequence
  Synthetic oligonucleotide
ggcaggcatcgctcgtatcatactcgagaa

SEQ ID NO: 417034 - DNA, 30 bp, Artificial Sequence
  Synthetic oligonucleotide
tatcttctctgccgtaggacacgtcgagaa

SEQ ID NO: 417035 - DNA, 30 bp, Artificial Sequence
  Synthetic oligonucleotide
ttatgttacgcggcaagaccatgtcgagaa

SEQ ID NO: 417036 - DNA, 30 bp, Artificial Sequence
  Synthetic oligonucleotide
gagctttgtaataacgtccattgtcgagaa

SEQ ID NO: 417037 - DNA, 30 bp, Artificial Sequence
  Synthetic oligonucleotide
aaacattctggaccgaggatgggaggagaa

SEQ ID NO: 417038 - DNA, 30 bp, Artificial Sequence
  Synthetic oligonucleotide
aatttcatggtgtgatgaccacacggagaa

SEQ ID NO: 417039 - DNA, 30 bp, Artificial Sequence
  Synthetic oligonucleotide
ggggcggcacttgcatgaattggcggagaa

SEQ ID NO: 417040 - DNA, 30 bp, Artificial Sequence
  Synthetic oligonucleotide
ctagtgcgacacccagcaggactcggagaa

SEQ ID NO: 417041 - DNA, 30 bp, Artificial Sequence
  Synthetic oligonucleotide
aaattacgacagtggacatctaggggagaa

SEQ ID NO: 417042 - DNA, 30 bp, Artificial Sequence
  Synthetic oligonucleotide
tgacaaaatattttggctacgcaatgagaa

SEQ ID NO: 417043 - DNA, 30 bp, Artificial Sequence
  Synthetic oligonucleotide
aaactcccaatttccgagagggcctgagaa

SEQ ID NO: 417044 - DNA, 30 bp, Artificial Sequence
  Synthetic oligonucleotide
gtccctagacatctccatgcggtctgagaa

SEQ ID NO: 417045 - DNA, 30 bp, Artificial Sequence
  Synthetic oligonucleotide
tttagactttgttcgctcaaacagtgagaa

SEQ ID NO: 417046 - DNA, 30 bp, Artificial Sequence
  Synthetic oligonucleotide
cggttcgtggcttatcgtagctagtgagaa

SEQ ID NO: 417047 - DNA, 30 bp, Artificial Sequence
  Synthetic oligonucleotide
agacaggattcttgaatataccattgagaa

SEQ ID NO: 417048 - DNA, 30 bp, Artificial Sequence
  Synthetic oligonucleotide
gacacgtcagcgtttacgcatggttgagaa

SEQ ID NO: 417049 - DNA, 30 bp, Artificial Sequence
  Synthetic oligonucleotide
tcccgggaatcacagacgtatcgaatagaa

SEQ ID NO: 417050 - DNA, 30 bp, Artificial Sequence
  Synthetic oligonucleotide
atatgaaaccccgcgtcgttatgaatagaa

SEQ ID NO: 417051 - DNA, 30 bp, Artificial Sequence
  Synthetic oligonucleotide
ggcggcattatggagtatgtaataatagaa

SEQ ID NO: 417052 - DNA, 30 bp, Artificial Sequence
  Synthetic oligonucleotide
attctaagcgatacgagaaagtgtatagaa

SEQ ID NO: 417053 - DNA, 30 bp, Artificial Sequence
  Synthetic oligonucleotide
tgtccctgcgacatggcgccagttatagaa

SEQ ID NO: 417054 - DNA, 30 bp, Artificial Sequence
  Synthetic oligonucleotide
ctttttatacccaatcaacatgttatagaa

SEQ ID NO: 417055 - DNA, 30 bp, Artificial Sequence
  Synthetic oligonucleotide
tctgttaagtgtcaattgccgtttatagaa

SEQ ID NO: 417056 - DNA, 30 bp, Artificial Sequence
  Synthetic oligonucleotide
ggcctataaattttgagcaatgagctagaa

SEQ ID NO: 417057 - DNA, 30 bp, Artificial Sequence
  Synthetic oligonucleotide
cgcagaaaggcagtctaggacgcgctagaa

SEQ ID NO: 417058 - DNA, 30 bp, Artificial Sequence
  Synthetic oligonucleotide
ctcagccgtatagacatgctcctgctagaa

SEQ ID NO: 417059 - DNA, 30 bp, Artificial Sequence
  Synthetic oligonucleotide
gtccgccagtccgacgaacctgatctagaa

SEQ ID NO: 417060 - DNA, 30 bp, Artificial Sequence
  Synthetic oligonucleotide
ggtactaaagaggcagattacgctctagaa

SEQ ID NO: 417061 - DNA, 30 bp, Artificial Sequence
  Synthetic oligonucleotide
gaattcgcatttgacccaaatcgggtagaa

SEQ ID NO: 417062 - DNA, 30 bp, Artificial Sequence
  Synthetic oligonucleotide
aattatctccatcttaaggaaatggtagaa

SEQ ID NO: 417063 - DNA, 30 bp, Artificial Sequence
  Synthetic oligonucleotide
aatgtccatgattggcagatgacattagaa

SEQ ID NO: 417064 - DNA, 30 bp, Artificial Sequence
  Synthetic oligonucleotide
ctccgagccatcaaacgcatcagattagaa

SEQ ID NO: 417065 - DNA, 30 bp, Artificial Sequence
  Synthetic oligonucleotide
aaagggacttccgtgtaatcccgcttagaa

SEQ ID NO: 417066 - DNA, 30 bp, Artificial Sequence
  Synthetic oligonucleotide
ctgtttttaaggaattacgttggcttagaa

SEQ ID NO: 417067 - DNA, 30 bp, Artificial Sequence
  Synthetic oligonucleotide
atattgtctcttgattcatcctcgttagaa

SEQ ID NO: 417068 - DNA, 30 bp, Artificial Sequence
  Synthetic oligonucleotide
tgtttggtgggaaagatagttgggttagaa

SEQ ID NO: 417069 - DNA, 30 bp, Artificial Sequence
  Synthetic oligonucleotide
ttgaagggcctgtaaatccccaatttagaa

SEQ ID NO: 417070 - DNA, 30 bp, Artificial Sequence
  Synthetic oligonucleotide
cctctccgcgctaggggtgaacgtttagaa

SEQ ID NO: 417071 - DNA, 30 bp, Artificial Sequence
  Synthetic oligonucleotide
gtattcgtgctgtaatgtttgtgaaacgaa

SEQ ID NO: 417072 - DNA, 30 bp, Artificial Sequence
  Synthetic oligonucleotide
atcttaatcgatacagtttagtacaacgaa

SEQ ID NO: 417073 - DNA, 31 bp, Artificial Sequence
  Synthetic oligonucleotide
gtataagtaagtatgaatcttgcagaacgaa

SEQ ID NO: 417074 - DNA, 30 bp, Artificial Sequence
  Synthetic oligonucleotide
aaagacactaggacttcgtttgggaacgaa

SEQ ID NO: 417075 - DNA, 30 bp, Artificial Sequence
  Synthetic oligonucleotide
agcatttgttccgatcttcacgtgaacgaa

SEQ ID NO: 417076 - DNA, 30 bp, Artificial Sequence
  Synthetic oligonucleotide
gagtgaattgcgcgggaaaacagtaacgaa

SEQ ID NO: 417077 - DNA, 30 bp, Artificial Sequence
  Synthetic oligonucleotide
gtcgtccacgtgtatgtagcagttaacgaa

SEQ ID NO: 417078 - DNA, 30 bp, Artificial Sequence
  Synthetic oligonucleotide
tgggctcacgcgatacgtataaaacacgaa

SEQ ID NO: 417079 - DNA, 30 bp, Artificial Sequence
  Synthetic oligonucleotide
cccgatgacccacttgaagtgttccacgaa

SEQ ID NO: 417080 - DNA, 30 bp, Artificial Sequence
  Synthetic oligonucleotide
gttgatttgtgaaagggctttgagcacgaa

SEQ ID NO: 417081 - DNA, 30 bp, Artificial Sequence
  Synthetic oligonucleotide
ctggaatttaccacctcacgatcgcacgaa

SEQ ID NO: 417082 - DNA, 30 bp, Artificial Sequence
  Synthetic oligonucleotide
gttgatgcacgatgattggggaatcacgaa

SEQ ID NO: 417083 - DNA, 30 bp, Artificial Sequence
  Synthetic oligonucleotide
tggtatgcggaagttaaatcccaagacgaa

SEQ ID NO: 417084 - DNA, 30 bp, Artificial Sequence
  Synthetic oligonucleotide
cgcagttgcgcaccctcctactgcgacgaa

SEQ ID NO: 417085 - DNA, 30 bp, Artificial Sequence
  Synthetic oligonucleotide
gtattgggaaaattactaccaaatgacgaa

SEQ ID NO: 417086 - DNA, 30 bp, Artificial Sequence
  Synthetic oligonucleotide
ggtgttaagagttgagtgcatgcatacgaa

SEQ ID NO: 417087 - DNA, 30 bp, Artificial Sequence
  Synthetic oligonucleotide
agtctaagtgcgtgtatacttgcatacgaa

SEQ ID NO: 417088 - DNA, 30 bp, Artificial Sequence
  Synthetic oligonucleotide
acattgctgggtagtgcctgcgcgtacgaa

SEQ ID NO: 417089 - DNA, 30 bp, Artificial Sequence
  Synthetic oligonucleotide
tgttctttttgtggcttcgagccttacgaa

SEQ ID NO: 417090 - DNA, 30 bp, Artificial Sequence
  Synthetic oligonucleotide
tgattcgctgatataggcatattttacgaa

SEQ ID NO: 417091 - DNA, 30 bp, Artificial Sequence
  Synthetic oligonucleotide
ttctataagccagctcgggctcgaaccgaa

SEQ ID NO: 417092 - DNA, 30 bp, Artificial Sequence
  Synthetic oligonucleotide
gtatgtggtgccgcgaccgcgggaaccgaa

SEQ ID NO: 417093 - DNA, 30 bp, Artificial Sequence
  Synthetic oligonucleotide
aaaattgctatggggtgaacacttaccgaa

SEQ ID NO: 417094 - DNA, 30 bp, Artificial Sequence
  Synthetic oligonucleotide
actttcaagctgtttgaatatcaccccgaa

SEQ ID NO: 417095 - DNA, 30 bp, Artificial Sequence
  Synthetic oligonucleotide
tgatgagaagcttatttattaatccccgaa

SEQ ID NO: 417096 - DNA, 30 bp, Artificial Sequence
  Synthetic oligonucleotide
cccgccatcgattcgttctttaagcccgaa

SEQ ID NO: 417097 - DNA, 30 bp, Artificial Sequence
  Synthetic oligonucleotide
aactgtcggagttccttgcatttgcccgaa

SEQ ID NO: 417098 - DNA, 30 bp, Artificial Sequence
  Synthetic oligonucleotide
gttaaggtgcagagcgggtagcctgccgaa

SEQ ID NO: 417099 - DNA, 30 bp, Artificial Sequence
  Synthetic oligonucleotide
aagagagcctcctgcaatgcttaatccgaa

SEQ ID NO: 417100 - DNA, 30 bp, Artificial Sequence
  Synthetic oligonucleotide
cccgtgtaattccattgggggaagtccgaa

SEQ ID NO: 417101 - DNA, 30 bp, Artificial Sequence
  Synthetic oligonucleotide
gttaaatacttcacatgatatcagtccgaa

SEQ ID NO: 417102 - DNA, 30 bp, Artificial Sequence
  Synthetic oligonucleotide
caaacctgccgtgcagtactctcttccgaa

SEQ ID NO: 417103 - DNA, 30 bp, Artificial Sequence
  Synthetic oligonucleotide
tagtctccaagtaatcacgtcttaagcgaa

SEQ ID NO: 417104 - DNA, 30 bp, Artificial Sequence
  Synthetic oligonucleotide
tttttgacatgaatgtcttcctccagcgaa

SEQ ID NO: 417105 - DNA, 30 bp, Artificial Sequence
  Synthetic oligonucleotide
cgtgatacggagggttacagctgcagcgaa

SEQ ID NO: 417106 - DNA, 30 bp, Artificial Sequence
  Synthetic oligonucleotide
atgggtatcgcgtggggattgagccgcgaa

SEQ ID NO: 417107 - DNA, 30 bp, Artificial Sequence
  Synthetic oligonucleotide
tttccttgatcaacgctcgggcgccgcgaa

SEQ ID NO: 417108 - DNA, 30 bp, Artificial Sequence
  Synthetic oligonucleotide
taggactgggtggcgtcgcgtgctcgcgaa

SEQ ID NO: 417109 - DNA, 30 bp, Artificial Sequence
  Synthetic oligonucleotide
ggattttggtgatagtgatcgcgtcgcgaa

SEQ ID NO: 417110 - DNA, 30 bp, Artificial Sequence
  Synthetic oligonucleotide
atgcagtcatccaaaaccattcaaggcgaa

SEQ ID NO: 417111 - DNA, 30 bp, Artificial Sequence
  Synthetic oligonucleotide
gacccgcgtatctaggacgaacggggcgaa

SEQ ID NO: 417112 - DNA, 30 bp, Artificial Sequence
  Synthetic oligonucleotide
taatttgacaggcaactttaacatggcgaa

SEQ ID NO: 417113 - DNA, 30 bp, Artificial Sequence
  Synthetic oligonucleotide
ggtcgtggcctggtccacatttatggcgaa

SEQ ID NO: 417114 - DNA, 30 bp, Artificial Sequence
  Synthetic oligonucleotide
agttctatgacaaacggttgtacttgcgaa

SEQ ID NO: 417115 - DNA, 30 bp, Artificial Sequence
  Synthetic oligonucleotide
ttttggtgtagcgccagttttggttgcgaa

SEQ ID NO: 417116 - DNA, 30 bp, Artificial Sequence
  Synthetic oligonucleotide
tgtaagaatatacatttaaccgtttgcgaa

SEQ ID NO: 417117 - DNA, 30 bp, Artificial Sequence
  Synthetic oligonucleotide
gtgagcgctacgctaaaaaaaggcatcgaa

SEQ ID NO: 417118 - DNA, 30 bp, Artificial Sequence
  Synthetic oligonucleotide
ttactagcgtcccatggcataggcatcgaa

SEQ ID NO: 417119 - DNA, 30 bp, Artificial Sequence
  Synthetic oligonucleotide
cgggcccctggggtcattccgactatcgaa

SEQ ID NO: 417120 - DNA, 30 bp, Artificial Sequence
  Synthetic oligonucleotide
ggcatacccaaggacgtagcagccctcgaa

SEQ ID NO: 417121 - DNA, 30 bp, Artificial Sequence
  Synthetic oligonucleotide
ccctatagaagttctgttcgtcgcctcgaa

SEQ ID NO: 417122 - DNA, 30 bp, Artificial Sequence
  Synthetic oligonucleotide
gaatgccctggtaagaattatgatctcgaa

SEQ ID NO: 417123 - DNA, 30 bp, Artificial Sequence
  Synthetic oligonucleotide
ctttttagagaatctcacaaggtcgtcgaa

SEQ ID NO: 417124 - DNA, 30 bp, Artificial Sequence
  Synthetic oligonucleotide
gtcattcgtgggttctaaagaacggtcgaa

SEQ ID NO: 417125 - DNA, 30 bp, Artificial Sequence
  Synthetic oligonucleotide
ggctgttctgtaaccgtattgtgggtcgaa

SEQ ID NO: 417126 - DNA, 30 bp, Artificial Sequence
  Synthetic oligonucleotide
gcctaattttagatagtgtaaaatgtcgaa

SEQ ID NO: 417127 - DNA, 30 bp, Artificial Sequence
  Synthetic oligonucleotide
tcacccctggggaccaaagtagcattcgaa

SEQ ID NO: 417128 - DNA, 30 bp, Artificial Sequence
  Synthetic oligonucleotide
ttcatatattctaggccttgaggcttcgaa

SEQ ID NO: 417129 - DNA, 30 bp, Artificial Sequence
  Synthetic oligonucleotide
agactggttcttccttgtagttagttcgaa

SEQ ID NO: 417130 - DNA, 30 bp, Artificial Sequence
  Synthetic oligonucleotide
gtgccgcacaagggatttgagacgttcgaa

SEQ ID NO: 417131 - DNA, 30 bp, Artificial Sequence
  Synthetic oligonucleotide
tccactgagtcaggaacgaaccggttcgaa

SEQ ID NO: 417132 - DNA, 30 bp, Artificial Sequence
  Synthetic oligonucleotide
ctctcaatcattccttcatttgaaaaggaa

SEQ ID NO: 417133 - DNA, 30 bp, Artificial Sequence
  Synthetic oligonucleotide
ggttccgaaggagttcgcccgtaaaaggaa

SEQ ID NO: 417134 - DNA, 30 bp, Artificial Sequence
  Synthetic oligonucleotide
gcagcagccctgccatagatagcaaaggaa

SEQ ID NO: 417135 - DNA, 30 bp, Artificial Sequence
  Synthetic oligonucleotide
agtgtgggcagggtggaacaaaggaaggaa

SEQ ID NO: 417136 - DNA, 30 bp, Artificial Sequence
  Synthetic oligonucleotide
ggagccctgtgaatttaaacctttaaggaa

SEQ ID NO: 417137 - DNA, 30 bp, Artificial Sequence
  Synthetic oligonucleotide
gacgttgtaagtacatgtacagaacaggaa

SEQ ID NO: 417138 - DNA, 30 bp, Artificial Sequence
  Synthetic oligonucleotide
tcaaaccagaccgaagtcaagacgcaggaa

SEQ ID NO: 417139 - DNA, 30 bp, Artificial Sequence
  Synthetic oligonucleotide
ggatccgatcattcagggtctcaagaggaa

SEQ ID NO: 417140 - DNA, 30 bp, Artificial Sequence
  Synthetic oligonucleotide
acattgtaaggtgggcgtctgccataggaa

SEQ ID NO: 417141 - DNA, 30 bp, Artificial Sequence
  Synthetic oligonucleotide
accggaacggcacattgtaggcactaggaa

SEQ ID NO: 417142 - DNA, 30 bp, Artificial Sequence
  Synthetic oligonucleotide
atctcatagaaaaatcacgatgactaggaa

SEQ ID NO: 417143 - DNA, 30 bp, Artificial Sequence
  Synthetic oligonucleotide
tatagtatgactcagcggttggcctaggaa

SEQ ID NO: 417144 - DNA, 30 bp, Artificial Sequence
  Synthetic oligonucleotide
ggcttacttgttcgagggtatgcgtaggaa

SEQ ID NO: 417145 - DNA, 30 bp, Artificial Sequence
  Synthetic oligonucleotide
agtcgacttccgttcgggcgaacttaggaa

SEQ ID NO: 417146 - DNA, 30 bp, Artificial Sequence
  Synthetic oligonucleotide
cccggtaaatatcactacggaccttaggaa

SEQ ID NO: 417147 - DNA, 30 bp, Artificial Sequence
  Synthetic oligonucleotide
acgggcattccagcgacagcggccacggaa

SEQ ID NO: 417148 - DNA, 30 bp, Artificial Sequence
  Synthetic oligonucleotide
gcactggcttctcccgaagctgccacggaa

SEQ ID NO: 417149 - DNA, 30 bp, Artificial Sequence
  Synthetic oligonucleotide
gctatgtcggtcacacttttaagcacggaa

SEQ ID NO: 417150 - DNA, 30 bp, Artificial Sequence
  Synthetic oligonucleotide
ccgaacgtaggctctggtgtacgcacggaa

SEQ ID NO: 417151 - DNA, 30 bp, Artificial Sequence
  Synthetic oligonucleotide
tcctccggactatgtgatgtccgcacggaa

SEQ ID NO: 417152 - DNA, 30 bp, Artificial Sequence
  Synthetic oligonucleotide
tattaacagaaacgcgtatacgagacggaa

SEQ ID NO: 417153 - DNA, 30 bp, Artificial Sequence
  Synthetic oligonucleotide
ttcccgagacttccgtccatggatacggaa

SEQ ID NO: 417154 - DNA, 31 bp, Artificial Sequence
  Synthetic oligonucleotide
ttatttttgtgcgcctgaatcccgtacggaa

SEQ ID NO: 417155 - DNA, 30 bp, Artificial Sequence
  Synthetic oligonucleotide
tgtccttgcttctgtgtgcagttaccggaa

SEQ ID NO: 417156 - DNA, 30 bp, Artificial Sequence
  Synthetic oligonucleotide
ctcgtgtcgaaagggacgtctcgcccggaa

SEQ ID NO: 417157 - DNA, 30 bp, Artificial Sequence
  Synthetic oligonucleotide
cagttgataaatcaaagaacggtcccggaa

SEQ ID NO: 417158 - DNA, 30 bp, Artificial Sequence
  Synthetic oligonucleotide
attagtcatgcgggatgatacttgccggaa

SEQ ID NO: 417159 - DNA, 30 bp, Artificial Sequence
  Synthetic oligonucleotide
gtatgtgtacctttgggccatcctccggaa

SEQ ID NO: 417160 - DNA, 30 bp, Artificial Sequence
  Synthetic oligonucleotide
agaagagttgacaagtatggctcagcggaa

SEQ ID NO: 417161 - DNA, 30 bp, Artificial Sequence
  Synthetic oligonucleotide
gtcagtggagtcgcgtcgacacgagcggaa

SEQ ID NO: 417162 - DNA, 30 bp, Artificial Sequence
  Synthetic oligonucleotide
attcttgcgagctacagatagtcggcggaa

SEQ ID NO: 417163 - DNA, 30 bp, Artificial Sequence
  Synthetic oligonucleotide
ggaaaggcgttgattcggccaagggcggaa

SEQ ID NO: 417164 - DNA, 30 bp, Artificial Sequence
  Synthetic oligonucleotide
gtaatgtatgtccgtctacggactgcggaa

SEQ ID NO: 417165 - DNA, 30 bp, Artificial Sequence
  Synthetic oligonucleotide
gggcagcagtttattacttttactgcggaa

SEQ ID NO: 417166 - DNA, 30 bp, Artificial Sequence
  Synthetic oligonucleotide
atccggcctggaaaacggaacattgcggaa

SEQ ID NO: 417167 - DNA, 30 bp, Artificial Sequence
  Synthetic oligonucleotide
gcattggcaggaaacacgatggaatcggaa

SEQ ID NO: 417168 - DNA, 30 bp, Artificial Sequence
  Synthetic oligonucleotide
gggcgttttcgattgtgctagagatcggaa

SEQ ID NO: 417169 - DNA, 30 bp, Artificial Sequence
  Synthetic oligonucleotide
tttgatcggaataactgaacgagatcggaa

SEQ ID NO: 417170 - DNA, 30 bp, Artificial Sequence
  Synthetic oligonucleotide
gggcagtacagctaggattagccctcggaa

SEQ ID NO: 417171 - DNA, 30 bp, Artificial Sequence
  Synthetic oligonucleotide
cttagctagtggtcgtttcatctctcggaa

SEQ ID NO: 417172 - DNA, 30 bp, Artificial Sequence
  Synthetic oligonucleotide
gatcttaagtaaattagtagttcttcggaa

SEQ ID NO: 417173 - DNA, 30 bp, Artificial Sequence
  Synthetic oligonucleotide
aataaggaagagtaatcacgttaaagggaa

SEQ ID NO: 417174 - DNA, 30 bp, Artificial Sequence
  Synthetic oligonucleotide
aaaatacgacaggatccgtgtataagggaa

SEQ ID NO: 417175 - DNA, 30 bp, Artificial Sequence
  Synthetic oligonucleotide
ttaccgtgcccgttcatcagagtaagggaa

SEQ ID NO: 417176 - DNA, 30 bp, Artificial Sequence
  Synthetic oligonucleotide
ccctgatgggcattttagagccgcagggaa

SEQ ID NO: 417177 - DNA, 30 bp, Artificial Sequence
  Synthetic oligonucleotide
tttgcattttccctcgacaatcagagggaa

SEQ ID NO: 417178 - DNA, 30 bp, Artificial Sequence
  Synthetic oligonucleotide
atatttcggtgaagcttcgtttcgagggaa

SEQ ID NO: 417179 - DNA, 30 bp, Artificial Sequence
  Synthetic oligonucleotide
gaccaatttcaattgggggcattgagggaa

SEQ ID NO: 417180 - DNA, 30 bp, Artificial Sequence
  Synthetic oligonucleotide
ggatcccaacaatcgctcagatttagggaa

SEQ ID NO: 417181 - DNA, 30 bp, Artificial Sequence
  Synthetic oligonucleotide
tatttatacattaggtaagtagcccgggaa

SEQ ID NO: 417182 - DNA, 30 bp, Artificial Sequence
  Synthetic oligonucleotide
actcacagcgcatccttgttgcagcgggaa

SEQ ID NO: 417183 - DNA, 30 bp, Artificial Sequence
  Synthetic oligonucleotide
atctggtttcataatttctttgcgcgggaa

SEQ ID NO: 417184 - DNA, 30 bp, Artificial Sequence
  Synthetic oligonucleotide
gatttgacggtgagaggtatactgcgggaa

SEQ ID NO: 417185 - DNA, 30 bp, Artificial Sequence
  Synthetic oligonucleotide
ttccggaggtaggtccgtatagttcgggaa

SEQ ID NO: 417186 - DNA, 30 bp, Artificial Sequence
  Synthetic oligonucleotide
tctcgtccgatttgtatgttaagaggggaa

SEQ ID NO: 417187 - DNA, 30 bp, Artificial Sequence
  Synthetic oligonucleotide
ctgtacgagcatcttatcctcagaggggaa

SEQ ID NO: 417188 - DNA, 30 bp, Artificial Sequence
  Synthetic oligonucleotide
tctgcagaactctggatggtagacggggaa

SEQ ID NO: 417189 - DNA, 30 bp, Artificial Sequence
  Synthetic oligonucleotide
ctccaatcagggtaacttcgttacggggaa

SEQ ID NO: 417190 - DNA, 30 bp, Artificial Sequence
  Synthetic oligonucleotide
gagttcgatgattcggaactctccggggaa

SEQ ID NO: 417191 - DNA, 30 bp, Artificial Sequence
  Synthetic oligonucleotide
tgggagtttgtttttccggtctagggggaa

SEQ ID NO: 417192 - DNA, 30 bp, Artificial Sequence
  Synthetic oligonucleotide
atagatacctcttaagaaccagcgggggaa

SEQ ID NO: 417193 - DNA, 30 bp, Artificial Sequence
  Synthetic oligonucleotide
ctatgttgctagggtaggttatatggggaa

SEQ ID NO: 417194 - DNA, 30 bp, Artificial Sequence
  Synthetic oligonucleotide
gataaacatcaactgatacttgctggggaa

SEQ ID NO: 417195 - DNA, 30 bp, Artificial Sequence
  Synthetic oligonucleotide
gctaagttgggcttatgtttaaaatgggaa

SEQ ID NO: 417196 - DNA, 30 bp, Artificial Sequence
  Synthetic oligonucleotide
cctggctagcgctcccatgtgaaatgggaa

SEQ ID NO: 417197 - DNA, 30 bp, Artificial Sequence
  Synthetic oligonucleotide
gcagcggtgtggaaccgattgggatgggaa

SEQ ID NO: 417198 - DNA, 30 bp, Artificial Sequence
  Synthetic oligonucleotide
cagtttctttctggattcgtggactgggaa

SEQ ID NO: 417199 - DNA, 30 bp, Artificial Sequence
  Synthetic oligonucleotide
aatctgagctgggagccactgatctgggaa

SEQ ID NO: 417200 - DNA, 30 bp, Artificial Sequence
  Synthetic oligonucleotide
ttatcgtgctcgccctaggaattctgggaa

SEQ ID NO: 417201 - DNA, 30 bp, Artificial Sequence
  Synthetic oligonucleotide
ttttcgcagtgagtcttactcacgtgggaa

SEQ ID NO: 417202 - DNA, 30 bp, Artificial Sequence
  Synthetic oligonucleotide
tgttaccccaggttgattaaactgtgggaa

SEQ ID NO: 417203 - DNA, 30 bp, Artificial Sequence
  Synthetic oligonucleotide
ccctcagtttatatctaatcattgtgggaa

SEQ ID NO: 417204 - DNA, 30 bp, Artificial Sequence
  Synthetic oligonucleotide
tggaaaaggaaatctgagtactcttgggaa

SEQ ID NO: 417205 - DNA, 30 bp, Artificial Sequence
  Synthetic oligonucleotide
tgcgtgcgactgaccacgacctgttgggaa

SEQ ID NO: 417206 - DNA, 30 bp, Artificial Sequence
  Synthetic oligonucleotide
ccatttcctttcccgttaactcaaatggaa

SEQ ID NO: 417207 - DNA, 30 bp, Artificial Sequence
  Synthetic oligonucleotide
ccattaagtgtcaaggtacaataaatggaa

SEQ ID NO: 417208 - DNA, 30 bp, Artificial Sequence
  Synthetic oligonucleotide
cattagatataggatgtctgataaatggaa

SEQ ID NO: 417209 - DNA, 30 bp, Artificial Sequence
  Synthetic oligonucleotide
tcgacagacatgtctgaccggttaatggaa

SEQ ID NO: 417210 - DNA, 30 bp, Artificial Sequence
  Synthetic oligonucleotide
ttagtctgcccctaaacaaccgtcatggaa

SEQ ID NO: 417211 - DNA, 30 bp, Artificial Sequence
  Synthetic oligonucleotide
ttaccgcgtacgatagtatgcgggatggaa

SEQ ID NO: 417212 - DNA, 30 bp, Artificial Sequence
  Synthetic oligonucleotide
cgcagcagaactatctgtggatatatggaa

SEQ ID NO: 417213 - DNA, 30 bp, Artificial Sequence
  Synthetic oligonucleotide
attcgaagacctaacagcgattatatggaa

SEQ ID NO: 417214 - DNA, 30 bp, Artificial Sequence
  Synthetic oligonucleotide
gtttgttaactcacgcaatgagctatggaa

SEQ ID NO: 417215 - DNA, 30 bp, Artificial Sequence
  Synthetic oligonucleotide
gccccggtaccggtagaggctatactggaa

SEQ ID NO: 417216 - DNA, 30 bp, Artificial Sequence
  Synthetic oligonucleotide
aaggtaaagcccagagccttcggcctggaa

SEQ ID NO: 417217 - DNA, 30 bp, Artificial Sequence
  Synthetic oligonucleotide
ctcttgtgctcaggctccaggtgcctggaa

SEQ ID NO: 417218 - DNA, 30 bp, Artificial Sequence
  Synthetic oligonucleotide
tcagagtttactgtgactcctatcctggaa

SEQ ID NO: 417219 - DNA, 30 bp, Artificial Sequence
  Synthetic oligonucleotide
agtgtccagggtaataaatagtatctggaa

SEQ ID NO: 417220 - DNA, 30 bp, Artificial Sequence
  Synthetic oligonucleotide
ctcaagtgctattacacgtaaactctggaa

SEQ ID NO: 417221 - DNA, 30 bp, Artificial Sequence
  Synthetic oligonucleotide
aaaacggtcgaacgcactacccgtctggaa

SEQ ID NO: 417222 - DNA, 30 bp, Artificial Sequence
  Synthetic oligonucleotide
ttttttaacgaactgggggcgcgtctggaa

SEQ ID NO: 417223 - DNA, 30 bp, Artificial Sequence
  Synthetic oligonucleotide
gcgctctgccgctcacgccgctttctggaa

SEQ ID NO: 417224 - DNA, 30 bp, Artificial Sequence
  Synthetic oligonucleotide
gaaagggccctatatgttggataagtggaa

SEQ ID NO: 417225 - DNA, 30 bp, Artificial Sequence
  Synthetic oligonucleotide
tgggtagttaattgaacaatgggagtggaa

SEQ ID NO: 417226 - DNA, 30 bp, Artificial Sequence
  Synthetic oligonucleotide
gttatacatccacagttcctgagcgtggaa

SEQ ID NO: 417227 - DNA, 30 bp, Artificial Sequence
  Synthetic oligonucleotide
cgttcggcagcgcattaaccgagggtggaa

SEQ ID NO: 417228 - DNA, 30 bp, Artificial Sequence
  Synthetic oligonucleotide
ttcccatgaggacagttttatatggtggaa

SEQ ID NO: 417229 - DNA, 30 bp, Artificial Sequence
  Synthetic oligonucleotide
aagtaagcgattgtagaggggcttgtggaa

SEQ ID NO: 417230 - DNA, 30 bp, Artificial Sequence
  Synthetic oligonucleotide
tacctagattcgaagcgccgacaattggaa

SEQ ID NO: 417231 - DNA, 30 bp, Artificial Sequence
  Synthetic oligonucleotide
tctgattgatcgtgttacgggggattggaa

SEQ ID NO: 417232 - DNA, 30 bp, Artificial Sequence
  Synthetic oligonucleotide
ctgactttgatcctcaaaggtatattggaa

SEQ ID NO: 417233 - DNA, 30 bp, Artificial Sequence
  Synthetic oligonucleotide
aaattctgcgatagcgtaattgccttggaa

SEQ ID NO: 417234 - DNA, 30 bp, Artificial Sequence
  Synthetic oligonucleotide
gatagtatagcgtttcctaaggtcttggaa

SEQ ID NO: 417235 - DNA, 30 bp, Artificial Sequence
  Synthetic oligonucleotide
cgtccacatgtccaattatggacgttggaa

SEQ ID NO: 417236 - DNA, 30 bp, Artificial Sequence
  Synthetic oligonucleotide
gagttaagcaaaaactacgtaaggttggaa

SEQ ID NO: 417237 - DNA, 30 bp, Artificial Sequence
  Synthetic oligonucleotide
catgcgagaccgcttagtgtatgtttggaa

SEQ ID NO: 417238 - DNA, 30 bp, Artificial Sequence
  Synthetic oligonucleotide
tgcagcagtacgttaacatcgtttttggaa

SEQ ID NO: 417239 - DNA, 30 bp, Artificial Sequence
  Synthetic oligonucleotide
gagcagaagtgtaggtgaagttttttggaa

SEQ ID NO: 417240 - DNA, 30 bp, Artificial Sequence
  Synthetic oligonucleotide
gactgacgaaatggaaatgaagcaaatgaa

SEQ ID NO: 417241 - DNA, 30 bp, Artificial Sequence
  Synthetic oligonucleotide
gatcctctttttggttgagactcaaatgaa

SEQ ID NO: 417242 - DNA, 30 bp, Artificial Sequence
  Synthetic oligonucleotide
acacaccgtgcttacttccattgaaatgaa

SEQ ID NO: 417243 - DNA, 30 bp, Artificial Sequence
  Synthetic oligonucleotide
tgtcctttaaaatgctatgtgctaaatgaa

SEQ ID NO: 417244 - DNA, 30 bp, Artificial Sequence
  Synthetic oligonucleotide
gggcgcagaaaaagtgtatactacaatgaa

SEQ ID NO: 417245 - DNA, 30 bp, Artificial Sequence
  Synthetic oligonucleotide
ttccgctagcatcgcacaggcggcaatgaa

SEQ ID NO: 417246 - DNA, 30 bp, Artificial Sequence
  Synthetic oligonucleotide
tgtgcatcacagccattcttgggcaatgaa

SEQ ID NO: 417247 - DNA, 30 bp, Artificial Sequence
  Synthetic oligonucleotide
gtggtcacaactgtaggcggctgcaatgaa

SEQ ID NO: 417248 - DNA, 30 bp, Artificial Sequence
  Synthetic oligonucleotide
gggtaactcagcggtaagtttggtaatgaa

SEQ ID NO: 417249 - DNA, 30 bp, Artificial Sequence
  Synthetic oligonucleotide
atattgagagcgtgatggaaggttaatgaa

SEQ ID NO: 417250 - DNA, 30 bp, Artificial Sequence
  Synthetic oligonucleotide
gccgtccgtccgccgcgtcgtaaacatgaa

SEQ ID NO: 417251 - DNA, 30 bp, Artificial Sequence
  Synthetic oligonucleotide
ctgtttagaatccactagaggctacatgaa

SEQ ID NO: 417252 - DNA, 30 bp, Artificial Sequence
  Synthetic oligonucleotide
aattgtctggccagtgtctaagtccatgaa

SEQ ID NO: 417253 - DNA, 30 bp, Artificial Sequence
  Synthetic oligonucleotide
gtattttaaatacgcgacggagagcatgaa

SEQ ID NO: 417254 - DNA, 30 bp, Artificial Sequence
  Synthetic oligonucleotide
tgcaagcgattgctcctcaccgagcatgaa

SEQ ID NO: 417255 - DNA, 30 bp, Artificial Sequence
  Synthetic oligonucleotide
aaatgaagtactatgtagatacttcatgaa

SEQ ID NO: 417256 - DNA, 30 bp, Artificial Sequence
  Synthetic oligonucleotide
ctcggggcattaccgcggccactagatgaa

SEQ ID NO: 417257 - DNA, 30 bp, Artificial Sequence
  Synthetic oligonucleotide
gggtcattataccgtgggtgattagatgaa

SEQ ID NO: 417258 - DNA, 30 bp, Artificial Sequence
  Synthetic oligonucleotide
attctgacttgcctatgccagtacgatgaa

SEQ ID NO: 417259 - DNA, 30 bp, Artificial Sequence
  Synthetic oligonucleotide
gagctttccttaggcgtcccagtggatgaa

SEQ ID NO: 417260 - DNA, 30 bp, Artificial Sequence
  Synthetic oligonucleotide
aattcagtattcaggatgcccggtgatgaa

SEQ ID NO: 417261 - DNA, 30 bp, Artificial Sequence
  Synthetic oligonucleotide
ttaaggacctaaatggtcctttttgatgaa

SEQ ID NO: 417262 - DNA, 30 bp, Artificial Sequence
  Synthetic oligonucleotide
tgttggttgtccctgtggagaaaatatgaa

SEQ ID NO: 417263 - DNA, 30 bp, Artificial Sequence
  Synthetic oligonucleotide
tatttaactatttgcatggatgaatatgaa

SEQ ID NO: 417264 - DNA, 30 bp, Artificial Sequence
  Synthetic oligonucleotide
ccggggttggaattaatgattccatatgaa

SEQ ID NO: 417265 - DNA, 30 bp, Artificial Sequence
  Synthetic oligonucleotide
cttaagcacccttatttcaaagtctatgaa

SEQ ID NO: 417266 - DNA, 30 bp, Artificial Sequence
  Synthetic oligonucleotide
cgccccacatagggcaggaagcattatgaa

SEQ ID NO: 417267 - DNA, 30 bp, Artificial Sequence
  Synthetic oligonucleotide
actagcactggaccgtgatgtggttatgaa

SEQ ID NO: 417268 - DNA, 30 bp, Artificial Sequence
  Synthetic oligonucleotide
atagctcagtcttgcagtataataactgaa

SEQ ID NO: 417269 - DNA, 30 bp, Artificial Sequence
  Synthetic oligonucleotide
cgatagatgcaagtccacaaaagcactgaa

SEQ ID NO: 417270 - DNA, 30 bp, Artificial Sequence
  Synthetic oligonucleotide
tcgggacttcaccagtcacattgcactgaa

SEQ ID NO: 417271 - DNA, 30 bp, Artificial Sequence
  Synthetic oligonucleotide
ctatgtcgaaggatgtcgcaacagactgaa

SEQ ID NO: 417272 - DNA, 30 bp, Artificial Sequence
  Synthetic oligonucleotide
tatccccgagcaaaagatccctcgactgaa

SEQ ID NO: 417273 - DNA, 30 bp, Artificial Sequence
  Synthetic oligonucleotide
tctctacgcacaaccgacattaggactgaa

SEQ ID NO: 417274 - DNA, 30 bp, Artificial Sequence
  Synthetic oligonucleotide
aaggttacactaagtgttattatgactgaa

SEQ ID NO: 417275 - DNA, 30 bp, Artificial Sequence
  Synthetic oligonucleotide
ccgcagatgagctatttcctattgactgaa

SEQ ID NO: 417276 - DNA, 30 bp, Artificial Sequence
  Synthetic oligonucleotide
ctgtctttattggaaacagttcgtactgaa

SEQ ID NO: 417277 - DNA, 30 bp, Artificial Sequence
  Synthetic oligonucleotide
cggctcgacggatctagacgaggtactgaa

SEQ ID NO: 417278 - DNA, 30 bp, Artificial Sequence
  Synthetic oligonucleotide
accatcgagtgatactatccgtttactgaa

SEQ ID NO: 417279 - DNA, 30 bp, Artificial Sequence
  Synthetic oligonucleotide
aactgttcgagcaacaagggacaccctgaa

SEQ ID NO: 417280 - DNA, 30 bp, Artificial Sequence
  Synthetic oligonucleotide
ccgaaaggtatcaatcgttgtcaccctgaa

SEQ ID NO: 417281 - DNA, 30 bp, Artificial Sequence
  Synthetic oligonucleotide
tttgtgatacgctcatcgtgcgcccctgaa

SEQ ID NO: 417282 - DNA, 30 bp, Artificial Sequence
  Synthetic oligonucleotide
gcagggcgcattggtatctttggccctgaa

SEQ ID NO: 417283 - DNA, 30 bp, Artificial Sequence
  Synthetic oligonucleotide
gtccgggggtccaagacctgtgtccctgaa

SEQ ID NO: 417284 - DNA, 30 bp, Artificial Sequence
  Synthetic oligonucleotide
aggccgtgagtaatgctacagtcgcctgaa

SEQ ID NO: 417285 - DNA, 30 bp, Artificial Sequence
  Synthetic oligonucleotide
atgccaaagagtctgtagcagcatcctgaa

SEQ ID NO: 417286 - DNA, 30 bp, Artificial Sequence
  Synthetic oligonucleotide
aaaatcgtgacgcttgagccaggtcctgaa

SEQ ID NO: 417287 - DNA, 30 bp, Artificial Sequence
  Synthetic oligonucleotide
cagatctggacgagaactttgtgtcctgaa

SEQ ID NO: 417288 - DNA, 30 bp, Artificial Sequence
  Synthetic oligonucleotide
ctcaactgtagatgcggaactcacgctgaa

SEQ ID NO: 417289 - DNA, 27 bp, Artificial Sequence
  Synthetic oligonucleotide
gcgcccgtcggctaattgcaggctgaa

SEQ ID NO: 417290 - DNA, 30 bp, Artificial Sequence
  Synthetic oligonucleotide
gatagcggaacgccgccgcgttaggctgaa

SEQ ID NO: 417291 - DNA, 30 bp, Artificial Sequence
  Synthetic oligonucleotide
cctccgtgtttttttacaaagggggctgaa

SEQ ID NO: 417292 - DNA, 30 bp, Artificial Sequence
  Synthetic oligonucleotide
ccgaatattggatgattttagttggctgaa

SEQ ID NO: 417293 - DNA, 30 bp, Artificial Sequence
  Synthetic oligonucleotide
cggaaacttacttaaggcgataatgctgaa

SEQ ID NO: 417294 - DNA, 30 bp, Artificial Sequence
  Synthetic oligonucleotide
tcatcgcttattcatgttacggctgctgaa

SEQ ID NO: 417295 - DNA, 30 bp, Artificial Sequence
  Synthetic oligonucleotide
gaagtgtttgacgatagaatgtgtgctgaa

SEQ ID NO: 417296 - DNA, 30 bp, Artificial Sequence
  Synthetic oligonucleotide
ttgaccggccgcaattgaacggaatctgaa

SEQ ID NO: 417297 - DNA, 30 bp, Artificial Sequence
  Synthetic oligonucleotide
ggaatgactaataacgtcgcggcatctgaa

SEQ ID NO: 417298 - DNA, 30 bp, Artificial Sequence
  Synthetic oligonucleotide
tactaggagccataatccggtgggtctgaa

SEQ ID NO: 417299 - DNA, 30 bp, Artificial Sequence
  Synthetic oligonucleotide
gttgagccccataatttacgcgcttctgaa

SEQ ID NO: 417300 - DNA, 30 bp, Artificial Sequence
  Synthetic oligonucleotide
tgttagtaggcggaggtccttccaagtgaa

SEQ ID NO: 417301 - DNA, 31 bp, Artificial Sequence
  Synthetic oligonucleotide
tatctagtcagtgtagcttacctccagtgaa

SEQ ID NO: 417302 - DNA, 30 bp, Artificial Sequence
  Synthetic oligonucleotide
gttccgattcgtcgccatcacatcagtgaa

SEQ ID NO: 417303 - DNA, 30 bp, Artificial Sequence
  Synthetic oligonucleotide
caattatgctgggatgctgtgtagagtgaa

SEQ ID NO: 417304 - DNA, 30 bp, Artificial Sequence
  Synthetic oligonucleotide
ctggtctttaaacgttagcggtatagtgaa

SEQ ID NO: 417305 - DNA, 30 bp, Artificial Sequence
  Synthetic oligonucleotide
tctacacattgagaggcaggttgtagtgaa

SEQ ID NO: 417306 - DNA, 30 bp, Artificial Sequence
  Synthetic oligonucleotide
gacttgacgtaattcgtgatataccgtgaa

SEQ ID NO: 417307 - DNA, 30 bp, Artificial Sequence
  Synthetic oligonucleotide
gttgtcctcctgttacaaaagttgcgtgaa

SEQ ID NO: 417308 - DNA, 30 bp, Artificial Sequence
  Synthetic oligonucleotide
ccttgtagaagctggttatgacctcgtgaa

SEQ ID NO: 417309 - DNA, 30 bp, Artificial Sequence
  Synthetic oligonucleotide
cgtcagtacattgtgagtccgacaggtgaa

SEQ ID NO: 417310 - DNA, 30 bp, Artificial Sequence
  Synthetic oligonucleotide
aagatcccatgaaggtgaatcctaggtgaa

SEQ ID NO: 417311 - DNA, 30 bp, Artificial Sequence
  Synthetic oligonucleotide
cgcaaagaattagaaccgacgcggggtgaa

SEQ ID NO: 417312 - DNA, 30 bp, Artificial Sequence
  Synthetic oligonucleotide
tccagtcaatggtctgacagttatggtgaa

SEQ ID NO: 417313 - DNA, 30 bp, Artificial Sequence
  Synthetic oligonucleotide
actgcgtcttatctattcatgggtggtgaa

SEQ ID NO: 417314 - DNA, 30 bp, Artificial Sequence
  Synthetic oligonucleotide
ccagctgtgatagaaccttcctgatgtgaa

SEQ ID NO: 417315 - DNA, 30 bp, Artificial Sequence
  Synthetic oligonucleotide
ggtgagcagccactctctatggactgtgaa

SEQ ID NO: 417316 - DNA, 30 bp, Artificial Sequence
  Synthetic oligonucleotide
tctctatgcgtttgcggttaatactgtgaa

SEQ ID NO: 417317 - DNA, 30 bp, Artificial Sequence
  Synthetic oligonucleotide
cagcccccgccggttaatagctactgtgaa

SEQ ID NO: 417318 - DNA, 30 bp, Artificial Sequence
  Synthetic oligonucleotide
gatgttgagaacgcagcccgaagctgtgaa

SEQ ID NO: 417319 - DNA, 30 bp, Artificial Sequence
  Synthetic oligonucleotide
tacaacattgtgggaacctgtatctgtgaa

SEQ ID NO: 417320 - DNA, 30 bp, Artificial Sequence
  Synthetic oligonucleotide
gtttggaaagtggaaccaacaaagtgtgaa

SEQ ID NO: 417321 - DNA, 30 bp, Artificial Sequence
  Synthetic oligonucleotide
aattaatagtgtcgtcagtaatagtgtgaa

SEQ ID NO: 417322 - DNA, 30 bp, Artificial Sequence
  Synthetic oligonucleotide
gttagaggtacttgtggctggatgtgtgaa

SEQ ID NO: 417323 - DNA, 30 bp, Artificial Sequence
  Synthetic oligonucleotide
ctataccatagcatagggcgctattgtgaa

SEQ ID NO: 417324 - DNA, 30 bp, Artificial Sequence
  Synthetic oligonucleotide
agaatgcacgatcacaaacagtattgtgaa

SEQ ID NO: 417325 - DNA, 30 bp, Artificial Sequence
  Synthetic oligonucleotide
ttcgttatccaccaatacgccagttgtgaa

SEQ ID NO: 417326 - DNA, 30 bp, Artificial Sequence
  Synthetic oligonucleotide
gcatcaattatacataccactagttgtgaa

SEQ ID NO: 417327 - DNA, 30 bp, Artificial Sequence
  Synthetic oligonucleotide
tccgctctaccccctaccctgctttgtgaa

SEQ ID NO: 417328 - DNA, 30 bp, Artificial Sequence
  Synthetic oligonucleotide
tctattaaaataagacgttacttttgtgaa

SEQ ID NO: 417329 - DNA, 30 bp, Artificial Sequence
  Synthetic oligonucleotide
atagtgctagtctccgaagtgcgcattgaa

SEQ ID NO: 417330 - DNA, 30 bp, Artificial Sequence
  Synthetic oligonucleotide
gttcgtgagcaggtcgaactggtcattgaa

SEQ ID NO: 417331 - DNA, 30 bp, Artificial Sequence
  Synthetic oligonucleotide
cagtaataagaaccctccagggggattgaa

SEQ ID NO: 417332 - DNA, 30 bp, Artificial Sequence
  Synthetic oligonucleotide
tgcggtcagacttaaagcggggtgattgaa

SEQ ID NO: 417333 - DNA, 30 bp, Artificial Sequence
  Synthetic oligonucleotide
atggttatttgggctgctccaactattgaa

SEQ ID NO: 417334 - DNA, 30 bp, Artificial Sequence
  Synthetic oligonucleotide
gaccccgtaattactgcatctcaacttgaa

SEQ ID NO: 417335 - DNA, 30 bp, Artificial Sequence
  Synthetic oligonucleotide
gatatatctaagttcacgcgacgacttgaa

SEQ ID NO: 417336 - DNA, 30 bp, Artificial Sequence
  Synthetic oligonucleotide
ttaccgggtggtaatgcgcatagccttgaa

SEQ ID NO: 417337 - DNA, 30 bp, Artificial Sequence
  Synthetic oligonucleotide
cagttcttttgatccgatcactcgcttgaa

SEQ ID NO: 417338 - DNA, 30 bp, Artificial Sequence
  Synthetic oligonucleotide
gtggttcccgttgcagcagacaggcttgaa

SEQ ID NO: 417339 - DNA, 30 bp, Artificial Sequence
  Synthetic oligonucleotide
catcaaagatccggctcaacagtgcttgaa

SEQ ID NO: 417340 - DNA, 30 bp, Artificial Sequence
  Synthetic oligonucleotide
taatacgttattaactacgcctatcttgaa

SEQ ID NO: 417341 - DNA, 30 bp, Artificial Sequence
  Synthetic oligonucleotide
atgctcatttcgctcggcggacttcttgaa

SEQ ID NO: 417342 - DNA, 30 bp, Artificial Sequence
  Synthetic oligonucleotide
agactttatttgtgtaaattgtaagttgaa

SEQ ID NO: 417343 - DNA, 30 bp, Artificial Sequence
  Synthetic oligonucleotide
accacagtcggcgcattgacaggagttgaa

SEQ ID NO: 417344 - DNA, 30 bp, Artificial Sequence
  Synthetic oligonucleotide
aatagaagtcccttcttatctaacgttgaa

SEQ ID NO: 417345 - DNA, 30 bp, Artificial Sequence
  Synthetic oligonucleotide
atgggttgacagatagacgccgaggttgaa

SEQ ID NO: 417346 - DNA, 30 bp, Artificial Sequence
  Synthetic oligonucleotide
tctttgattaagatgcaggcaacggttgaa

SEQ ID NO: 417347 - DNA, 30 bp, Artificial Sequence
  Synthetic oligonucleotide
cgacatccttgggtaccaacccctgttgaa

SEQ ID NO: 417348 - DNA, 30 bp, Artificial Sequence
  Synthetic oligonucleotide
ctactgaaggcccatagatgtgctgttgaa

SEQ ID NO: 417349 - DNA, 30 bp, Artificial Sequence
  Synthetic oligonucleotide
ttgatcgagccttaaacaaacattgttgaa

SEQ ID NO: 417350 - DNA, 30 bp, Artificial Sequence
  Synthetic oligonucleotide
catcgttgctgaggtctctaccaatttgaa

SEQ ID NO: 417351 - DNA, 30 bp, Artificial Sequence
  Synthetic oligonucleotide
gtctgaaaatgatcctgcttatcatttgaa

SEQ ID NO: 417352 - DNA, 30 bp, Artificial Sequence
  Synthetic oligonucleotide
tggtttgggactggaccggcgttatttgaa

SEQ ID NO: 417353 - DNA, 30 bp, Artificial Sequence
  Synthetic oligonucleotide
tgccgtataactagatggtacaactttgaa

SEQ ID NO: 417354 - DNA, 30 bp, Artificial Sequence
  Synthetic oligonucleotide
atagcaattgacggctttctggactttgaa

SEQ ID NO: 417355 - DNA, 30 bp, Artificial Sequence
  Synthetic oligonucleotide
aaatgggtgcctcctgcacacagctttgaa

SEQ ID NO: 417356 - DNA, 30 bp, Artificial Sequence
  Synthetic oligonucleotide
cctctctttgttgcgatagaacgctttgaa

SEQ ID NO: 417357 - DNA, 30 bp, Artificial Sequence
  Synthetic oligonucleotide
tgcgagcggtgtgtatgtgtagtctttgaa

SEQ ID NO: 417358 - DNA, 30 bp, Artificial Sequence
  Synthetic oligonucleotide
gcagtagtgtggagcgcagtgccgtttgaa

SEQ ID NO: 417359 - DNA, 30 bp, Artificial Sequence
  Synthetic oligonucleotide
ggagttgcgtagatggtgcaatcgtttgaa

SEQ ID NO: 417360 - DNA, 30 bp, Artificial Sequence
  Synthetic oligonucleotide
cacaaaagattacgctagaatgcttttgaa

SEQ ID NO: 417361 - DNA, 30 bp, Artificial Sequence
  Synthetic oligonucleotide
acgaatgaatagatatgtctataaaaataa

SEQ ID NO: 417362 - DNA, 30 bp, Artificial Sequence
  Synthetic oligonucleotide
cctgttcacccataccatatgtcaaaataa

SEQ ID NO: 417363 - DNA, 30 bp, Artificial Sequence
  Synthetic oligonucleotide
aaaaaggtgccgttgtaccttataaaataa

SEQ ID NO: 417364 - DNA, 30 bp, Artificial Sequence
  Synthetic oligonucleotide
gggtcgtgaagaccagcccgcagcaaataa

SEQ ID NO: 417365 - DNA, 30 bp, Artificial Sequence
  Synthetic oligonucleotide
gactttaagcgcagggtgttgggcaaataa

SEQ ID NO: 417366 - DNA, 30 bp, Artificial Sequence
  Synthetic oligonucleotide
aagatgtcgcaccgcacagttggcaaataa

SEQ ID NO: 417367 - DNA, 31 bp, Artificial Sequence
  Synthetic oligonucleotide
aaaactgtagcgtcaatcacacaggaaataa

SEQ ID NO: 417368 - DNA, 30 bp, Artificial Sequence
  Synthetic oligonucleotide
cttttggtggattggaaaattgggaaataa

SEQ ID NO: 417369 - DNA, 30 bp, Artificial Sequence
  Synthetic oligonucleotide
tactccatggagacctctggatataaataa

SEQ ID NO: 417370 - DNA, 30 bp, Artificial Sequence
  Synthetic oligonucleotide
ggaaaacttcccagccttggctataaataa

SEQ ID NO: 417371 - DNA, 30 bp, Artificial Sequence
  Synthetic oligonucleotide
ggactaaggttgaggtatctgagacaataa

SEQ ID NO: 417372 - DNA, 30 bp, Artificial Sequence
  Synthetic oligonucleotide
agtaaatgatcgccatgtcttagacaataa

SEQ ID NO: 417373 - DNA, 30 bp, Artificial Sequence
  Synthetic oligonucleotide
ccgctgaatagaacgacacagtgacaataa

SEQ ID NO: 417374 - DNA, 30 bp, Artificial Sequence
  Synthetic oligonucleotide
gacacatcgacacactgtgacggccaataa

SEQ ID NO: 417375 - DNA, 30 bp, Artificial Sequence
  Synthetic oligonucleotide
agaccttttgcgaatgtgttctagcaataa

SEQ ID NO: 417376 - DNA, 30 bp, Artificial Sequence
  Synthetic oligonucleotide
cgctggtagattattacctcacggcaataa

SEQ ID NO: 417377 - DNA, 30 bp, Artificial Sequence
  Synthetic oligonucleotide
tggggttttgcatgtataaagatgcaataa

SEQ ID NO: 417378 - DNA, 30 bp, Artificial Sequence
  Synthetic oligonucleotide
gctcacaaaatgttagactcccatcaataa

SEQ ID NO: 417379 - DNA, 30 bp, Artificial Sequence
  Synthetic oligonucleotide
atgaggggtctcgcaagtagacctcaataa

SEQ ID NO: 417380 - DNA, 30 bp, Artificial Sequence
  Synthetic oligonucleotide
atcgtcttatcttatatagtgcctcaataa

SEQ ID NO: 417381 - DNA, 30 bp, Artificial Sequence
  Synthetic oligonucleotide
gccggctacgattgttcataaagtcaataa

SEQ ID NO: 417382 - DNA, 30 bp, Artificial Sequence
  Synthetic oligonucleotide
aaaagggttgattcctctaaatttcaataa

SEQ ID NO: 417383 - DNA, 30 bp, Artificial Sequence
  Synthetic oligonucleotide
ggataattcgagggttgattatcagaataa

SEQ ID NO: 417384 - DNA, 30 bp, Artificial Sequence
  Synthetic oligonucleotide
acaaggttatacctgcattaactagaataa

SEQ ID NO: 417385 - DNA, 30 bp, Artificial Sequence
  Synthetic oligonucleotide
ggttgacttcaatctaagcgaagcgaataa

SEQ ID NO: 417386 - DNA, 30 bp, Artificial Sequence
  Synthetic oligonucleotide
gcgagatggtcccggtggacggaggaataa

SEQ ID NO: 417387 - DNA, 30 bp, Artificial Sequence
  Synthetic oligonucleotide
tgttggcttaccacggagtggccggaataa

SEQ ID NO: 417388 - DNA, 30 bp, Artificial Sequence
  Synthetic oligonucleotide
tagccaatacttaaaagctctttggaataa

SEQ ID NO: 417389 - DNA, 30 bp, Artificial Sequence
  Synthetic oligonucleotide
tggttgggtttcttcggccccaatgaataa

SEQ ID NO: 417390 - DNA, 30 bp, Artificial Sequence
  Synthetic oligonucleotide
gctgtgggccattattttcactgtgaataa

SEQ ID NO: 417391 - DNA, 30 bp, Artificial Sequence
  Synthetic oligonucleotide
ggtgacgtcgtttatcgggtttttgaataa

SEQ ID NO: 417392 - DNA, 30 bp, Artificial Sequence
  Synthetic oligonucleotide
ttagcccggtgggggtttagataataataa

SEQ ID NO: 417393 - DNA, 30 bp, Artificial Sequence
  Synthetic oligonucleotide
agaaaagagtcatggcaagtctcataataa

SEQ ID NO: 417394 - DNA, 30 bp, Artificial Sequence
  Synthetic oligonucleotide
cttaagctcgggattagtacgttataataa

SEQ ID NO: 417395 - DNA, 30 bp, Artificial Sequence
  Synthetic oligonucleotide
tctcgtgacttgcgcgacgcgtactaataa

SEQ ID NO: 417396 - DNA, 30 bp, Artificial Sequence
  Synthetic oligonucleotide
ctgtaatcttggaaccattcccgctaataa

SEQ ID NO: 417397 - DNA, 30 bp, Artificial Sequence
  Synthetic oligonucleotide
cctgtagcaccccggcggagcccgtaataa

SEQ ID NO: 417398 - DNA, 30 bp, Artificial Sequence
  Synthetic oligonucleotide
cccattgcctatgcggtaccctggtaataa

SEQ ID NO: 417399 - DNA, 30 bp, Artificial Sequence
  Synthetic oligonucleotide
tcgtccctgtctcatgatagatattaataa

SEQ ID NO: 417400 - DNA, 30 bp, Artificial Sequence
  Synthetic oligonucleotide
gagtaggtctactagcacactggttaataa

SEQ ID NO: 417401 - DNA, 30 bp, Artificial Sequence
  Synthetic oligonucleotide
cgcggcgaactcccatatgctttttaataa

SEQ ID NO: 417402 - DNA, 30 bp, Artificial Sequence
  Synthetic oligonucleotide
ctctcaggggccacgcacaatccaacataa

SEQ ID NO: 417403 - DNA, 30 bp, Artificial Sequence
  Synthetic oligonucleotide
agcagtagtaccgggagttaccgaacataa

SEQ ID NO: 417404 - DNA, 30 bp, Artificial Sequence
  Synthetic oligonucleotide
atttgtcagaaaacatgcggagtaacataa

SEQ ID NO: 417405 - DNA, 30 bp, Artificial Sequence
  Synthetic oligonucleotide
ccccatgaatagtagatggacgtaacataa

SEQ ID NO: 417406 - DNA, 30 bp, Artificial Sequence
  Synthetic oligonucleotide
cctccgcatatattggggttagacacataa

SEQ ID NO: 417407 - DNA, 30 bp, Artificial Sequence
  Synthetic oligonucleotide
tgtgcgggtgcgccactgctacgcacataa

SEQ ID NO: 417408 - DNA, 30 bp, Artificial Sequence
  Synthetic oligonucleotide
gcccaagtcaccgtcgtctttacaccataa

SEQ ID NO: 417409 - DNA, 30 bp, Artificial Sequence
  Synthetic oligonucleotide
tcgatcagcgcctaggtgataagaccataa

SEQ ID NO: 417410 - DNA, 31 bp, Artificial Sequence
  Synthetic oligonucleotide
tcctaagggtaatccgacaggcgtaccataa

SEQ ID NO: 417411 - DNA, 30 bp, Artificial Sequence
  Synthetic oligonucleotide
gcgtcccgggacaacaaggttgtaccataa

SEQ ID NO: 417412 - DNA, 30 bp, Artificial Sequence
  Synthetic oligonucleotide
cgtggctccctttcgcccatcaccccataa

SEQ ID NO: 417413 - DNA, 30 bp, Artificial Sequence
  Synthetic oligonucleotide
gaaatccccgattttaaggcggaagcataa

SEQ ID NO: 417414 - DNA, 30 bp, Artificial Sequence
  Synthetic oligonucleotide
gttagcccatcggcatgggcgctagcataa

SEQ ID NO: 417415 - DNA, 30 bp, Artificial Sequence
  Synthetic oligonucleotide
tcgtaacccccagtgccagtacacgcataa

SEQ ID NO: 417416 - DNA, 30 bp, Artificial Sequence
  Synthetic oligonucleotide
gacgagccccccgttgagctatacgcataa

SEQ ID NO: 417417 - DNA, 30 bp, Artificial Sequence
  Synthetic oligonucleotide
tagaatgggataaatcgaaggggcgcataa

SEQ ID NO: 417418 - DNA, 30 bp, Artificial Sequence
  Synthetic oligonucleotide
tgcgacaagccgagagtctcggaggcataa

SEQ ID NO: 417419 - DNA, 30 bp, Artificial Sequence
  Synthetic oligonucleotide
aggctttaaacgaaacatacgtaggcataa

SEQ ID NO: 417420 - DNA, 30 bp, Artificial Sequence
  Synthetic oligonucleotide
tttgataaacagatgattggtccggcataa

SEQ ID NO: 417421 - DNA, 30 bp, Artificial Sequence
  Synthetic oligonucleotide
aataggacgaagaaaaacaaccaatcataa

SEQ ID NO: 417422 - DNA, 30 bp, Artificial Sequence
  Synthetic oligonucleotide
ggtcaatcagaacacggtctgcaatcataa

SEQ ID NO: 417423 - DNA, 30 bp, Artificial Sequence
  Synthetic oligonucleotide
ctatcgggaatccattcgccaacatcataa

SEQ ID NO: 417424 - DNA, 30 bp, Artificial Sequence
  Synthetic oligonucleotide
ctatcgggaccggtagaaacgcgatcataa

SEQ ID NO: 417425 - DNA, 30 bp, Artificial Sequence
  Synthetic oligonucleotide
gaaactcgctttatacagacaggatcataa

SEQ ID NO: 417426 - DNA, 30 bp, Artificial Sequence
  Synthetic oligonucleotide
gaagtaagcctttcggtcgggtactcataa

SEQ ID NO: 417427 - DNA, 30 bp, Artificial Sequence
  Synthetic oligonucleotide
tatttcgtcatgaactcatgggcctcataa

SEQ ID NO: 417428 - DNA, 30 bp, Artificial Sequence
  Synthetic oligonucleotide
cgcgttagcgtaatgaccgttcagtcataa

SEQ ID NO: 417429 - DNA, 30 bp, Artificial Sequence
  Synthetic oligonucleotide
gggtgtgaggtattgggccttgggtcataa

SEQ ID NO: 417430 - DNA, 30 bp, Artificial Sequence
  Synthetic oligonucleotide
aattcttggtgtcggtgtccattgtcataa

SEQ ID NO: 417431 - DNA, 30 bp, Artificial Sequence
  Synthetic oligonucleotide
cctggtgcatcgatacacaggaattcataa

SEQ ID NO: 417432 - DNA, 30 bp, Artificial Sequence
  Synthetic oligonucleotide
gtaaatctcgggtacaacccggattcataa

SEQ ID NO: 417433 - DNA, 30 bp, Artificial Sequence
  Synthetic oligonucleotide
gacaagtttgaatcgcctatcgtttcataa

SEQ ID NO: 417434 - DNA, 30 bp, Artificial Sequence
  Synthetic oligonucleotide
cagtcctacggcgcgctcaaacaaagataa

SEQ ID NO: 417435 - DNA, 30 bp, Artificial Sequence
  Synthetic oligonucleotide
ggcctccaccagtgactccactaaagataa

SEQ ID NO: 417436 - DNA, 30 bp, Artificial Sequence
  Synthetic oligonucleotide
gcagcagttatttctgaccacaacagataa

SEQ ID NO: 417437 - DNA, 30 bp, Artificial Sequence
  Synthetic oligonucleotide
aatgttttccaaattacgtacaacagataa

SEQ ID NO: 417438 - DNA, 30 bp, Artificial Sequence
  Synthetic oligonucleotide
tttgtgcacgcacggcgcagccacagataa

SEQ ID NO: 417439 - DNA, 30 bp, Artificial Sequence
  Synthetic oligonucleotide
tcaatgttaggcgcattcccgcccagataa

SEQ ID NO: 417440 - DNA, 30 bp, Artificial Sequence
  Synthetic oligonucleotide
atttgagaacattaaaacgggcccagataa

SEQ ID NO: 417441 - DNA, 30 bp, Artificial Sequence
  Synthetic oligonucleotide
gggtatttgtgtctgttgtcattgagataa

SEQ ID NO: 417442 - DNA, 30 bp, Artificial Sequence
  Synthetic oligonucleotide
cccgtttatgtattctgattctctagataa

SEQ ID NO: 417443 - DNA, 30 bp, Artificial Sequence
  Synthetic oligonucleotide
tagaggttcatgggaacctcataccgataa

SEQ ID NO: 417444 - DNA, 30 bp, Artificial Sequence
  Synthetic oligonucleotide
aatgcgctaaggatgttgtcatcgcgataa

SEQ ID NO: 417445 - DNA, 30 bp, Artificial Sequence
  Synthetic oligonucleotide
cactctggaattgttagacttttgcgataa

SEQ ID NO: 417446 - DNA, 30 bp, Artificial Sequence
  Synthetic oligonucleotide
cccggcctgacctctgaacgcactcgataa

SEQ ID NO: 417447 - DNA, 30 bp, Artificial Sequence
  Synthetic oligonucleotide
ctaacccagagtattcgcgaatgtcgataa

SEQ ID NO: 417448 - DNA, 30 bp, Artificial Sequence
  Synthetic oligonucleotide
gacgtactctgaacgtgagtcgttcgataa

SEQ ID NO: 417449 - DNA, 30 bp, Artificial Sequence
  Synthetic oligonucleotide
gagatttgatgggttcttcagcaaggataa

SEQ ID NO: 417450 - DNA, 30 bp, Artificial Sequence
  Synthetic oligonucleotide
ctggagtcgttcagggagacgcaaggataa

SEQ ID NO: 417451 - DNA, 30 bp, Artificial Sequence
  Synthetic oligonucleotide
gagacaattatccaacattcctaaggataa

SEQ ID NO: 417452 - DNA, 30 bp, Artificial Sequence
  Synthetic oligonucleotide
aggcatgttcccagccgatatggaggataa

SEQ ID NO: 417453 - DNA, 30 bp, Artificial Sequence
  Synthetic oligonucleotide
atagtaccattccgggatcgtttaggataa

SEQ ID NO: 417454 - DNA, 30 bp, Artificial Sequence
  Synthetic oligonucleotide
cctggcggtggctgaggaatcggcggataa

SEQ ID NO: 417455 - DNA, 30 bp, Artificial Sequence
  Synthetic oligonucleotide
ttgaaacatatccggcggcgactcggataa

SEQ ID NO: 417456 - DNA, 30 bp, Artificial Sequence
  Synthetic oligonucleotide
tataggtgctcattactagcgctcggataa

SEQ ID NO: 417457 - DNA, 30 bp, Artificial Sequence
  Synthetic oligonucleotide
tcacaaacgcggccattgtgacagggataa

SEQ ID NO: 417458 - DNA, 31 bp, Artificial Sequence
  Synthetic oligonucleotide
tgttgtgtttgcagattaaaaagagggataa

SEQ ID NO: 417459 - DNA, 30 bp, Artificial Sequence
  Synthetic oligonucleotide
tcttcctctgggcggactgaacggggataa

SEQ ID NO: 417460 - DNA, 30 bp, Artificial Sequence
  Synthetic oligonucleotide
cgctgtgtggggagcatagaccggggataa

SEQ ID NO: 417461 - DNA, 30 bp, Artificial Sequence
  Synthetic oligonucleotide
ggcatacacttcaatcggtcagggggataa

SEQ ID NO: 417462 - DNA, 30 bp, Artificial Sequence
  Synthetic oligonucleotide
gcccgcttcaaccaatctagcatgggataa

SEQ ID NO: 417463 - DNA, 30 bp, Artificial Sequence
  Synthetic oligonucleotide
tggacgctggttccaattactctgggataa

SEQ ID NO: 417464 - DNA, 30 bp, Artificial Sequence
  Synthetic oligonucleotide
gaattaggtggatgtggacaagtgggataa

SEQ ID NO: 417465 - DNA, 30 bp, Artificial Sequence
  Synthetic oligonucleotide
atcccgtaagcgctgtggcaagtgggataa

SEQ ID NO: 417466 - DNA, 30 bp, Artificial Sequence
  Synthetic oligonucleotide
gttggagcgggaccggtacacgctggataa

SEQ ID NO: 417467 - DNA, 30 bp, Artificial Sequence
  Synthetic oligonucleotide
gagtcagattaaataaatggatgtggataa

SEQ ID NO: 417468 - DNA, 30 bp, Artificial Sequence
  Synthetic oligonucleotide
ttttgtacgaaatggccctgacttggataa

SEQ ID NO: 417469 - DNA, 30 bp, Artificial Sequence
  Synthetic oligonucleotide
ccccggctgagtgttgcgtagcttggataa

SEQ ID NO: 417470 - DNA, 30 bp, Artificial Sequence
  Synthetic oligonucleotide
agcggctgcaataccgtcttctaatgataa

SEQ ID NO: 417471 - DNA, 30 bp, Artificial Sequence
  Synthetic oligonucleotide
tatctgagaaaattgggaattgcatgataa

SEQ ID NO: 417472 - DNA, 30 bp, Artificial Sequence
  Synthetic oligonucleotide
gtcgcggcaatcgacatacaatcatgataa

SEQ ID NO: 417473 - DNA, 30 bp, Artificial Sequence
  Synthetic oligonucleotide
actgttacagccttgtggctgatatgataa

SEQ ID NO: 417474 - DNA, 30 bp, Artificial Sequence
  Synthetic oligonucleotide
ttagcgggttacagataggtaatctgataa

SEQ ID NO: 417475 - DNA, 30 bp, Artificial Sequence
  Synthetic oligonucleotide
tcataatggtgtatgagcaatgtctgataa

SEQ ID NO: 417476 - DNA, 30 bp, Artificial Sequence
  Synthetic oligonucleotide
ttgaagttgcaacttcgggacacgtgataa

SEQ ID NO: 417477 - DNA, 30 bp, Artificial Sequence
  Synthetic oligonucleotide
gttggggttcagttcggtcgactgtgataa

SEQ ID NO: 417478 - DNA, 30 bp, Artificial Sequence
  Synthetic oligonucleotide
cagatggaggatgacagtcctttgtgataa

SEQ ID NO: 417479 - DNA, 30 bp, Artificial Sequence
  Synthetic oligonucleotide
aacgttgacagcttataccgcgaaatataa

SEQ ID NO: 417480 - DNA, 30 bp, Artificial Sequence
  Synthetic oligonucleotide
cactttccaagccataactaggaaatataa

SEQ ID NO: 417481 - DNA, 30 bp, Artificial Sequence
  Synthetic oligonucleotide
tctggaatggaagtcgcttatataatataa

SEQ ID NO: 417482 - DNA, 30 bp, Artificial Sequence
  Synthetic oligonucleotide
aataacctggcactatttggtgtaatataa

SEQ ID NO: 417483 - DNA, 30 bp, Artificial Sequence
  Synthetic oligonucleotide
tccctaagtctccgtcaaggaggcatataa

SEQ ID NO: 417484 - DNA, 30 bp, Artificial Sequence
  Synthetic oligonucleotide
caaaattaaccacgttggaatagtatataa

SEQ ID NO: 417485 - DNA, 30 bp, Artificial Sequence
  Synthetic oligonucleotide
tgttattatacgcgtaactacgttatataa

SEQ ID NO: 417486 - DNA, 30 bp, Artificial Sequence
  Synthetic oligonucleotide
cagtccgacaatagtaggttttttatataa

SEQ ID NO: 417487 - DNA, 30 bp, Artificial Sequence
  Synthetic oligonucleotide
ccgctattatctgtttctcggtaactataa

SEQ ID NO: 417488 - DNA, 30 bp, Artificial Sequence
  Synthetic oligonucleotide
ggatgcagctacggatgaggctcactataa

SEQ ID NO: 417489 - DNA, 30 bp, Artificial Sequence
  Synthetic oligonucleotide
gttaaaaccggtctctccttgggcctataa

SEQ ID NO: 417490 - DNA, 30 bp, Artificial Sequence
  Synthetic oligonucleotide
gctggtgtagcgcacatgtaagtcctataa

SEQ ID NO: 417491 - DNA, 30 bp, Artificial Sequence
  Synthetic oligonucleotide
cgaacctgcaatcgttagaatacgctataa

SEQ ID NO: 417492 - DNA, 30 bp, Artificial Sequence
  Synthetic oligonucleotide
cctcttagtggggtgtttcaacatctataa

SEQ ID NO: 417493 - DNA, 30 bp, Artificial Sequence
  Synthetic oligonucleotide
cggtatctgatttctgtggccggagtataa

SEQ ID NO: 417494 - DNA, 30 bp, Artificial Sequence
  Synthetic oligonucleotide
ttcatctcttcaccacaatgaaccgtataa

SEQ ID NO: 417495 - DNA, 30 bp, Artificial Sequence
  Synthetic oligonucleotide
agagtcgactatgttttgtgacgggtataa

SEQ ID NO: 417496 - DNA, 30 bp, Artificial Sequence
  Synthetic oligonucleotide
cctttgttaacccagtcagggttggtataa

SEQ ID NO: 417497 - DNA, 30 bp, Artificial Sequence
  Synthetic oligonucleotide
tcctaggggttcagcacttggcctgtataa

SEQ ID NO: 417498 - DNA, 30 bp, Artificial Sequence
  Synthetic oligonucleotide
cccagcgttcctagcgatccaggtgtataa

SEQ ID NO: 417499 - DNA, 30 bp, Artificial Sequence
  Synthetic oligonucleotide
atattctattcgtttatgcgagttgtataa

SEQ ID NO: 417500 - DNA, 30 bp, Artificial Sequence
  Synthetic oligonucleotide
catgtcgatggttactgctatcaattataa

SEQ ID NO: 417501 - DNA, 30 bp, Artificial Sequence
  Synthetic oligonucleotide
gggatcaaaggtcatattggtaacttataa

SEQ ID NO: 417502 - DNA, 30 bp, Artificial Sequence
  Synthetic oligonucleotide
ctagagtcggccggtctgatgatcttataa

SEQ ID NO: 417503 - DNA, 30 bp, Artificial Sequence
  Synthetic oligonucleotide
gtatatcgaggcttacatatttagttataa

SEQ ID NO: 417504 - DNA, 30 bp, Artificial Sequence
  Synthetic oligonucleotide
gcatgcatttgacacattatggcgttataa

SEQ ID NO: 417505 - DNA, 30 bp, Artificial Sequence
  Synthetic oligonucleotide
tcaagctgggactccgaaacgcggttataa

SEQ ID NO: 417506 - DNA, 30 bp, Artificial Sequence
  Synthetic oligonucleotide
taggcatacggatgcaacatttggttataa

SEQ ID NO: 417507 - DNA, 30 bp, Artificial Sequence
  Synthetic oligonucleotide
atgtattacactgattcatatgtgttataa

SEQ ID NO: 417508 - DNA, 30 bp, Artificial Sequence
  Synthetic oligonucleotide
aagttcatatactaaaacgaccgtttataa

SEQ ID NO: 417509 - DNA, 30 bp, Artificial Sequence
  Synthetic oligonucleotide
cagttggttaatctgggagtgtgtttataa

SEQ ID NO: 417510 - DNA, 30 bp, Artificial Sequence
  Synthetic oligonucleotide
ttaatatgcatcttattctagtaaaactaa

SEQ ID NO: 417511 - DNA, 30 bp, Artificial Sequence
  Synthetic oligonucleotide
tataatgatagcggaagagcccccaactaa

SEQ ID NO: 417512 - DNA, 30 bp, Artificial Sequence
  Synthetic oligonucleotide
catgcgttgtggaatcttagtatccactaa

SEQ ID NO: 417513 - DNA, 30 bp, Artificial Sequence
  Synthetic oligonucleotide
gtaacagaaccgtaagatcgtcagcactaa

SEQ ID NO: 417514 - DNA, 30 bp, Artificial Sequence
  Synthetic oligonucleotide
catatttacgtttcactgcttgggcactaa

SEQ ID NO: 417515 - DNA, 30 bp, Artificial Sequence
  Synthetic oligonucleotide
taaatcgtccagccgtaacgaatgcactaa

SEQ ID NO: 417516 - DNA, 30 bp, Artificial Sequence
  Synthetic oligonucleotide
aagtaacctagcataatgctagatcactaa

SEQ ID NO: 417517 - DNA, 30 bp, Artificial Sequence
  Synthetic oligonucleotide
tttagacttgatgtgccttggagtcactaa

SEQ ID NO: 417518 - DNA, 30 bp, Artificial Sequence
  Synthetic oligonucleotide
ttagcggtttccaatagacgtagcgactaa

SEQ ID NO: 417519 - DNA, 30 bp, Artificial Sequence
  Synthetic oligonucleotide
ctcacggccctctggttcttccgcgactaa

SEQ ID NO: 417520 - DNA, 30 bp, Artificial Sequence
  Synthetic oligonucleotide
agttcattacataaggacgtaggcgactaa

SEQ ID NO: 417521 - DNA, 30 bp, Artificial Sequence
  Synthetic oligonucleotide
atgccgtcctataaaatgctttgcgactaa

SEQ ID NO: 417522 - DNA, 30 bp, Artificial Sequence
  Synthetic oligonucleotide
gtggcgagacgccagcatatcgcatactaa

SEQ ID NO: 417523 - DNA, 30 bp, Artificial Sequence
  Synthetic oligonucleotide
agctccctatgcctcgcggacagatactaa

SEQ ID NO: 417524 - DNA, 30 bp, Artificial Sequence
  Synthetic oligonucleotide
ggcatctagtgtttctggatcccgtactaa

SEQ ID NO: 417525 - DNA, 30 bp, Artificial Sequence
  Synthetic oligonucleotide
tagtcttcaccccgaggcgccgggtactaa

SEQ ID NO: 417526 - DNA, 30 bp, Artificial Sequence
  Synthetic oligonucleotide
ccgttaatgcgtctaagccatttgtactaa

SEQ ID NO: 417527 - DNA, 30 bp, Artificial Sequence
  Synthetic oligonucleotide
aagaattgccaattcgatggagattactaa

SEQ ID NO: 417528 - DNA, 30 bp, Artificial Sequence
  Synthetic oligonucleotide
ataggaaaaccgtttttcgggctttactaa

SEQ ID NO: 417529 - DNA, 30 bp, Artificial Sequence
  Synthetic oligonucleotide
atctcatattgatggctaattttttactaa

SEQ ID NO: 417530 - DNA, 30 bp, Artificial Sequence
  Synthetic oligonucleotide
ctacaggtgcagcacgcaaacataacctaa

SEQ ID NO: 417531 - DNA, 30 bp, Artificial Sequence
  Synthetic oligonucleotide
gacttatcagctgttagctcaacgacctaa

SEQ ID NO: 417532 - DNA, 30 bp, Artificial Sequence
  Synthetic oligonucleotide
gacggcccatacttttccggtttgacctaa

SEQ ID NO: 417533 - DNA, 30 bp, Artificial Sequence
  Synthetic oligonucleotide
agccgcgttaggacggagaatgttacctaa

SEQ ID NO: 417534 - DNA, 30 bp, Artificial Sequence
  Synthetic oligonucleotide
ggagtctccatcctccctgtgtcaccctaa

SEQ ID NO: 417535 - DNA, 30 bp, Artificial Sequence
  Synthetic oligonucleotide
gcatcgttcatgaccgtgttcgtaccctaa

SEQ ID NO: 417536 - DNA, 30 bp, Artificial Sequence
  Synthetic oligonucleotide
aaactcggcttggggcatgtcatcccctaa

SEQ ID NO: 417537 - DNA, 30 bp, Artificial Sequence
  Synthetic oligonucleotide
cagtgccatgcagcccccaaaaggccctaa

SEQ ID NO: 417538 - DNA, 30 bp, Artificial Sequence
  Synthetic oligonucleotide
taacggtagaacccggtaacggggccctaa

SEQ ID NO: 417539 - DNA, 30 bp, Artificial Sequence
  Synthetic oligonucleotide
taaatagtatgtgaaaccgcaattccctaa

SEQ ID NO: 417540 - DNA, 30 bp, Artificial Sequence
  Synthetic oligonucleotide
tttggtatgcggggctagtttgtagcctaa

SEQ ID NO: 417541 - DNA, 30 bp, Artificial Sequence
  Synthetic oligonucleotide
cttggatagagttatagattgggcgcctaa

SEQ ID NO: 417542 - DNA, 30 bp, Artificial Sequence
  Synthetic oligonucleotide
ccacgcatataaagatatgcgtaggcctaa

SEQ ID NO: 417543 - DNA, 30 bp, Artificial Sequence
  Synthetic oligonucleotide
agatatcggatcctggagccgtttgcctaa

SEQ ID NO: 417544 - DNA, 30 bp, Artificial Sequence
  Synthetic oligonucleotide
cccacttacagacaccttgtttttgcctaa

SEQ ID NO: 417545 - DNA, 30 bp, Artificial Sequence
  Synthetic oligonucleotide
gaaacgaaactgtgacacatcttatcctaa

SEQ ID NO: 417546 - DNA, 30 bp, Artificial Sequence
  Synthetic oligonucleotide
aagatcgtacgtgtcgaacggttctcctaa

SEQ ID NO: 417547 - DNA, 30 bp, Artificial Sequence
  Synthetic oligonucleotide
aaacattcaggtagccggtgccagtcctaa

SEQ ID NO: 417548 - DNA, 30 bp, Artificial Sequence
  Synthetic oligonucleotide
aaacttgcacggcctaactagagttcctaa

SEQ ID NO: 417549 - DNA, 30 bp, Artificial Sequence
  Synthetic oligonucleotide
gattcttaaaagctaacgcagttaagctaa

SEQ ID NO: 417550 - DNA, 30 bp, Artificial Sequence
  Synthetic oligonucleotide
ataacagctcgaatttatttagagagctaa

SEQ ID NO: 417551 - DNA, 30 bp, Artificial Sequence
  Synthetic oligonucleotide
cagttaagagctggccataagtcgagctaa

SEQ ID NO: 417552 - DNA, 30 bp, Artificial Sequence
  Synthetic oligonucleotide
tgcatggcatttggccaggtgctgagctaa

SEQ ID NO: 417553 - DNA, 30 bp, Artificial Sequence
  Synthetic oligonucleotide
tgaccctaatggtaataatcaagtagctaa

SEQ ID NO: 417554 - DNA, 30 bp, Artificial Sequence
  Synthetic oligonucleotide
acccccattctaccagccccgagacgctaa

SEQ ID NO: 417555 - DNA, 30 bp, Artificial Sequence
  Synthetic oligonucleotide
ctaaaaggcttaatctcaatcgcccgctaa

SEQ ID NO: 417556 - DNA, 30 bp, Artificial Sequence
  Synthetic oligonucleotide
ccctaacccgccaactatgctcgccgctaa

SEQ ID NO: 417557 - DNA, 30 bp, Artificial Sequence
  Synthetic oligonucleotide
gcgcgctgcggagaagcggcgttccgctaa

SEQ ID NO: 417558 - DNA, 29 bp, Artificial Sequence
  Synthetic oligonucleotide
gattacccaggaccctaatcaagcgctaa

SEQ ID NO: 417559 - DNA, 30 bp, Artificial Sequence
  Synthetic oligonucleotide
tgaggttggtccaagcatcggcagcgctaa

SEQ ID NO: 417560 - DNA, 30 bp, Artificial Sequence
  Synthetic oligonucleotide
tgcgccacgtttgagaccctgaggcgctaa

SEQ ID NO: 417561 - DNA, 30 bp, Artificial Sequence
  Synthetic oligonucleotide
tccggcaggagtgtatgatcccatcgctaa

SEQ ID NO: 417562 - DNA, 30 bp, Artificial Sequence
  Synthetic oligonucleotide
gggtctctgtgcgtcactgcagctcgctaa

SEQ ID NO: 417563 - DNA, 30 bp, Artificial Sequence
  Synthetic oligonucleotide
gtgatcacggtgagatttatttaaggctaa

SEQ ID NO: 417564 - DNA, 30 bp, Artificial Sequence
  Synthetic oligonucleotide
gtctccgtcctggaacatacgaagggctaa

SEQ ID NO: 417565 - DNA, 30 bp, Artificial Sequence
  Synthetic oligonucleotide
caaggtcgggttcaagttctttagggctaa

SEQ ID NO: 417566 - DNA, 30 bp, Artificial Sequence
  Synthetic oligonucleotide
acacctgcacaagactgttagtttggctaa

SEQ ID NO: 417567 - DNA, 30 bp, Artificial Sequence
  Synthetic oligonucleotide
gtgggtatcaaatgggtctttgaatgctaa

SEQ ID NO: 417568 - DNA, 30 bp, Artificial Sequence
  Synthetic oligonucleotide
cgcatctgggcattcaggtatacatgctaa

SEQ ID NO: 417569 - DNA, 30 bp, Artificial Sequence
  Synthetic oligonucleotide
aagcagtgcatgtttaatgcaaactgctaa

SEQ ID NO: 417570 - DNA, 30 bp, Artificial Sequence
  Synthetic oligonucleotide
gccgtagtgccagctaatccccggtgctaa

SEQ ID NO: 417571 - DNA, 30 bp, Artificial Sequence
  Synthetic oligonucleotide
tttaagcaggacgcaccacacatgtgctaa

SEQ ID NO: 417572 - DNA, 30 bp, Artificial Sequence
  Synthetic oligonucleotide
cacccattgggctaaacacgaaaaatctaa

SEQ ID NO: 417573 - DNA, 30 bp, Artificial Sequence
  Synthetic oligonucleotide
tgtcatgggccgccagggcctggaatctaa

SEQ ID NO: 417574 - DNA, 30 bp, Artificial Sequence
  Synthetic oligonucleotide
gggaaaatataccggttatattgaatctaa

SEQ ID NO: 417575 - DNA, 30 bp, Artificial Sequence
  Synthetic oligonucleotide
aacacataccgcgtccgtgaggtaatctaa

SEQ ID NO: 417576 - DNA, 30 bp, Artificial Sequence
  Synthetic oligonucleotide
catctacagctagatttctcggtcatctaa

SEQ ID NO: 417577 - DNA, 30 bp, Artificial Sequence
  Synthetic oligonucleotide
gcacatacggttagacgatgggagatctaa

SEQ ID NO: 417578 - DNA, 30 bp, Artificial Sequence
  Synthetic oligonucleotide
gtgctaacctgggttcaaaccgtgatctaa

SEQ ID NO: 417579 - DNA, 30 bp, Artificial Sequence
  Synthetic oligonucleotide
agtcgcattggaatccgaactggactctaa

SEQ ID NO: 417580 - DNA, 30 bp, Artificial Sequence
  Synthetic oligonucleotide
ctagcctttgaaggggggtttttactctaa

SEQ ID NO: 417581 - DNA, 30 bp, Artificial Sequence
  Synthetic oligonucleotide
tgcgtcaagcgttccactaaaaacctctaa

SEQ ID NO: 417582 - DNA, 30 bp, Artificial Sequence
  Synthetic oligonucleotide
ccttggacattgaatgtgcgaaacctctaa

SEQ ID NO: 417583 - DNA, 30 bp, Artificial Sequence
  Synthetic oligonucleotide
ttacgctcagtaatgtttttcctgctctaa

SEQ ID NO: 417584 - DNA, 30 bp, Artificial Sequence
  Synthetic oligonucleotide
acttcgcctgggtcaacccagacagtctaa

SEQ ID NO: 417585 - DNA, 30 bp, Artificial Sequence
  Synthetic oligonucleotide
ttttccgaagggccctattaatacgtctaa

SEQ ID NO: 417586 - DNA, 30 bp, Artificial Sequence
  Synthetic oligonucleotide
gatatcccgggctctgataaaatcgtctaa

SEQ ID NO: 417587 - DNA, 30 bp, Artificial Sequence
  Synthetic oligonucleotide
cgggaaattcacccaaataagtgggtctaa

SEQ ID NO: 417588 - DNA, 30 bp, Artificial Sequence
  Synthetic oligonucleotide
gctgtttgtgtggcgacgtggggtgtctaa

SEQ ID NO: 417589 - DNA, 30 bp, Artificial Sequence
  Synthetic oligonucleotide
ggtcaggattccaatctggcgattgtctaa

SEQ ID NO: 417590 - DNA, 30 bp, Artificial Sequence
  Synthetic oligonucleotide
caccgacgcagagggggggaaagattctaa

SEQ ID NO: 417591 - DNA, 30 bp, Artificial Sequence
  Synthetic oligonucleotide
taatcacgccaaatgtagtgcagcttctaa

SEQ ID NO: 417592 - DNA, 30 bp, Artificial Sequence
  Synthetic oligonucleotide
tattgagttgatcgtaatccacagttctaa

SEQ ID NO: 417593 - DNA, 30 bp, Artificial Sequence
  Synthetic oligonucleotide
gagtggcaaacaactagtaggaggttctaa

SEQ ID NO: 417594 - DNA, 30 bp, Artificial Sequence
  Synthetic oligonucleotide
cccctcaaacagctaagttgtaggttctaa

SEQ ID NO: 417595 - DNA, 30 bp, Artificial Sequence
  Synthetic oligonucleotide
atcatggaattaggaggtcctcggttctaa

SEQ ID NO: 417596 - DNA, 30 bp, Artificial Sequence
  Synthetic oligonucleotide
aacgaactgttgcccggagttcgtttctaa

SEQ ID NO: 417597 - DNA, 30 bp, Artificial Sequence
  Synthetic oligonucleotide
agtacgtgttgcccattacacgaaaagtaa

SEQ ID NO: 417598 - DNA, 30 bp, Artificial Sequence
  Synthetic oligonucleotide
aaggacagctttcgggctgggtaaaagtaa

SEQ ID NO: 417599 - DNA, 30 bp, Artificial Sequence
  Synthetic oligonucleotide
ttctactgcatcggtgcaacgtcaaagtaa

SEQ ID NO: 417600 - DNA, 30 bp, Artificial Sequence
  Synthetic oligonucleotide
ctgaataatttgatcacaaattccaagtaa

SEQ ID NO: 417601 - DNA, 30 bp, Artificial Sequence
  Synthetic oligonucleotide
caatgatctccaacatcggatgagaagtaa

SEQ ID NO: 417602 - DNA, 30 bp, Artificial Sequence
  Synthetic oligonucleotide
caatcattcgagcatgtataggtgaagtaa

SEQ ID NO: 417603 - DNA, 30 bp, Artificial Sequence
  Synthetic oligonucleotide
ggattctccgacagttgctccggtaagtaa

SEQ ID NO: 417604 - DNA, 31 bp, Artificial Sequence
  Synthetic oligonucleotide
gcagaatcgccattgacgtttcaaacagtaa

SEQ ID NO: 417605 - DNA, 30 bp, Artificial Sequence
  Synthetic oligonucleotide
aactgcttcgggttcaggtcatcacagtaa

SEQ ID NO: 417606 - DNA, 30 bp, Artificial Sequence
  Synthetic oligonucleotide
gttcttcaatgatccggaaaaaagcagtaa

SEQ ID NO: 417607 - DNA, 30 bp, Artificial Sequence
  Synthetic oligonucleotide
gtccttgaacccgaacaacggcgtcagtaa

SEQ ID NO: 417608 - DNA, 30 bp, Artificial Sequence
  Synthetic oligonucleotide
gtgcgcttacaatgtgcaggtggtcagtaa

SEQ ID NO: 417609 - DNA, 30 bp, Artificial Sequence
  Synthetic oligonucleotide
aacgtgagctgtatacacgcttaagagtaa

SEQ ID NO: 417610 - DNA, 30 bp, Artificial Sequence
  Synthetic oligonucleotide
ggaaagggctcgacggtcccgggagagtaa

SEQ ID NO: 417611 - DNA, 30 bp, Artificial Sequence
  Synthetic oligonucleotide
ctgttttgactgctatcagatgtcgagtaa

SEQ ID NO: 417612 - DNA, 30 bp, Artificial Sequence
  Synthetic oligonucleotide
ggcaccctcttagatgtctcacatgagtaa

SEQ ID NO: 417613 - DNA, 30 bp, Artificial Sequence
  Synthetic oligonucleotide
cgatatagatgggttcgctggcaatagtaa

SEQ ID NO: 417614 - DNA, 30 bp, Artificial Sequence
  Synthetic oligonucleotide
gttaggcaggaaatgctgtattgatagtaa

SEQ ID NO: 417615 - DNA, 30 bp, Artificial Sequence
  Synthetic oligonucleotide
aaatgtgttttcatgggcaggcactagtaa

SEQ ID NO: 417616 - DNA, 30 bp, Artificial Sequence
  Synthetic oligonucleotide
ttatcctaaaataggccagcttcctagtaa

SEQ ID NO: 417617 - DNA, 30 bp, Artificial Sequence
  Synthetic oligonucleotide
cctagataggaaagccattggatctagtaa

SEQ ID NO: 417618 - DNA, 30 bp, Artificial Sequence
  Synthetic oligonucleotide
taaagcatgctacaattcacgcagtagtaa

SEQ ID NO: 417619 - DNA, 30 bp, Artificial Sequence
  Synthetic oligonucleotide
ggaaagagatgcttgtagtatacgtagtaa

SEQ ID NO: 417620 - DNA, 30 bp, Artificial Sequence
  Synthetic oligonucleotide
taagatggacggagcagacccgggtagtaa

SEQ ID NO: 417621 - DNA, 30 bp, Artificial Sequence
  Synthetic oligonucleotide
ggggcgcatagatagaacgcggggtagtaa

SEQ ID NO: 417622 - DNA, 30 bp, Artificial Sequence
  Synthetic oligonucleotide
tgacttgaggataggtttgcctattagtaa

SEQ ID NO: 417623 - DNA, 30 bp, Artificial Sequence
  Synthetic oligonucleotide
gtatatataatagacatttccatttagtaa

SEQ ID NO: 417624 - DNA, 30 bp, Artificial Sequence
  Synthetic oligonucleotide
attgggctgcgtggctacttcttttagtaa

SEQ ID NO: 417625 - DNA, 30 bp, Artificial Sequence
  Synthetic oligonucleotide
gcgcaggaatgcgtaagtacccaaacgtaa

SEQ ID NO: 417626 - DNA, 30 bp, Artificial Sequence
  Synthetic oligonucleotide
taatttagatccatttggtaagaaacgtaa

SEQ ID NO: 417627 - DNA, 30 bp, Artificial Sequence
  Synthetic oligonucleotide
ggggaattttgcccaccagtttcaacgtaa

SEQ ID NO: 417628 - DNA, 30 bp, Artificial Sequence
  Synthetic oligonucleotide
atactgtcctgtttggtactgtacacgtaa

SEQ ID NO: 417629 - DNA, 30 bp, Artificial Sequence
  Synthetic oligonucleotide
gctgtatcgctaaggtctttttacacgtaa

SEQ ID NO: 417630 - DNA, 30 bp, Artificial Sequence
  Synthetic oligonucleotide
ctcgcaattaaactccctgcacccacgtaa

SEQ ID NO: 417631 - DNA, 30 bp, Artificial Sequence
  Synthetic oligonucleotide
ccgttcagtccgtcactcacatggacgtaa

SEQ ID NO: 417632 - DNA, 30 bp, Artificial Sequence
  Synthetic oligonucleotide
tgaccgcgttttaccccatgcatgacgtaa

SEQ ID NO: 417633 - DNA, 26 bp, Artificial Sequence
  Synthetic oligonucleotide
ggcattggtaaatagttgtgacgtaa

SEQ ID NO: 417634 - DNA, 30 bp, Artificial Sequence
  Synthetic oligonucleotide
gctaagaggatgtggagtcacggtacgtaa

SEQ ID NO: 417635 - DNA, 30 bp, Artificial Sequence
  Synthetic oligonucleotide
gtaatttacgtaaaacaataggtaccgtaa

SEQ ID NO: 417636 - DNA, 30 bp, Artificial Sequence
  Synthetic oligonucleotide
cctttagcgagtgtttctgaccccccgtaa

SEQ ID NO: 417637 - DNA, 30 bp, Artificial Sequence
  Synthetic oligonucleotide
ccaggcttacaaatacgtcaatccccgtaa

SEQ ID NO: 417638 - DNA, 30 bp, Artificial Sequence
  Synthetic oligonucleotide
aattgatgcgatttcagtgacaagccgtaa

SEQ ID NO: 417639 - DNA, 30 bp, Artificial Sequence
  Synthetic oligonucleotide
taggatctctcttgtctatcatggccgtaa

SEQ ID NO: 417640 - DNA, 30 bp, Artificial Sequence
  Synthetic oligonucleotide
atatacgcagggctcgtggcacatccgtaa

SEQ ID NO: 417641 - DNA, 30 bp, Artificial Sequence
  Synthetic oligonucleotide
gtcggacattagcaggatagctgtccgtaa

SEQ ID NO: 417642 - DNA, 30 bp, Artificial Sequence
  Synthetic oligonucleotide
agaacccgtgctctgtcaatgaaagcgtaa

SEQ ID NO: 417643 - DNA, 30 bp, Artificial Sequence
  Synthetic oligonucleotide
taaggtggtccgggacgaaccaccgcgtaa

SEQ ID NO: 417644 - DNA, 30 bp, Artificial Sequence
  Synthetic oligonucleotide
gggccgctatagcactgctttgctgcgtaa

SEQ ID NO: 417645 - DNA, 30 bp, Artificial Sequence
  Synthetic oligonucleotide
tgagtataatcagtcactttgcaatcgtaa

SEQ ID NO: 417646 - DNA, 30 bp, Artificial Sequence
  Synthetic oligonucleotide
accgcgcgttactgtgtatgcacatcgtaa

SEQ ID NO: 417647 - DNA, 30 bp, Artificial Sequence
  Synthetic oligonucleotide
tttcctgtggccatcacgtgaagatcgtaa

SEQ ID NO: 417648 - DNA, 30 bp, Artificial Sequence
  Synthetic oligonucleotide
tatattggtgagagaacttatttttcgtaa

SEQ ID NO: 417649 - DNA, 30 bp, Artificial Sequence
  Synthetic oligonucleotide
actgtattttagtaactacaacaaaggtaa

SEQ ID NO: 417650 - DNA, 30 bp, Artificial Sequence
  Synthetic oligonucleotide
attggctgcacacactcacgcagaaggtaa

SEQ ID NO: 417651 - DNA, 30 bp, Artificial Sequence
  Synthetic oligonucleotide
ttaaaagctctataatattaaggaaggtaa

SEQ ID NO: 417652 - DNA, 30 bp, Artificial Sequence
  Synthetic oligonucleotide
atcagcatgcgcgcgtaacgggtaaggtaa

SEQ ID NO: 417653 - DNA, 30 bp, Artificial Sequence
  Synthetic oligonucleotide
gaaattcctgtactagccaatatcaggtaa

SEQ ID NO: 417654 - DNA, 30 bp, Artificial Sequence
  Synthetic oligonucleotide
gagctaagtgtcgaacataatatgaggtaa

SEQ ID NO: 417655 - DNA, 30 bp, Artificial Sequence
  Synthetic oligonucleotide
tactaatcattaatgtcctacgctaggtaa

SEQ ID NO: 417656 - DNA, 30 bp, Artificial Sequence
  Synthetic oligonucleotide
aaaatagggctaattagcttaggtaggtaa

SEQ ID NO: 417657 - DNA, 30 bp, Artificial Sequence
  Synthetic oligonucleotide
ctttagatggaagatgactgatgtaggtaa

SEQ ID NO: 417658 - DNA, 30 bp, Artificial Sequence
  Synthetic oligonucleotide
gatgggctcttgtggacgtaggttaggtaa

SEQ ID NO: 417659 - DNA, 30 bp, Artificial Sequence
  Synthetic oligonucleotide
gagtccactcctgttgcgttgccacggtaa

SEQ ID NO: 417660 - DNA, 30 bp, Artificial Sequence
  Synthetic oligonucleotide
ttatttataccattaatgtctacccggtaa

SEQ ID NO: 417661 - DNA, 30 bp, Artificial Sequence
  Synthetic oligonucleotide
cctaagattggatcatcccgcagccggtaa

SEQ ID NO: 417662 - DNA, 30 bp, Artificial Sequence
  Synthetic oligonucleotide
catttcacctctggtcatccgatccggtaa

SEQ ID NO: 417663 - DNA, 30 bp, Artificial Sequence
  Synthetic oligonucleotide
ataggtgatactcctgcagaattccggtaa

SEQ ID NO: 417664 - DNA, 30 bp, Artificial Sequence
  Synthetic oligonucleotide
cgcggcgtgtcggtcactcagtagcggtaa

SEQ ID NO: 417665 - DNA, 30 bp, Artificial Sequence
  Synthetic oligonucleotide
acgcatatatgccgtctaggttatcggtaa

SEQ ID NO: 417666 - DNA, 30 bp, Artificial Sequence
  Synthetic oligonucleotide
aattagcttatgagcacttacactcggtaa

SEQ ID NO: 417667 - DNA, 30 bp, Artificial Sequence
  Synthetic oligonucleotide
agcacttgcaaatcttgttaccgtcggtaa

SEQ ID NO: 417668 - DNA, 30 bp, Artificial Sequence
  Synthetic oligonucleotide
cttttgattaggtagccaactgttcggtaa

SEQ ID NO: 417669 - DNA, 30 bp, Artificial Sequence
  Synthetic oligonucleotide
ttgtgataagaagtcaggctatttcggtaa

SEQ ID NO: 417670 - DNA, 30 bp, Artificial Sequence
  Synthetic oligonucleotide
gtattttgacccatttgaagttttcggtaa

SEQ ID NO: 417671 - DNA, 30 bp, Artificial Sequence
  Synthetic oligonucleotide
ggaacgcaaacagctgtcccaacagggtaa

SEQ ID NO: 417672 - DNA, 30 bp, Artificial Sequence
  Synthetic oligonucleotide
gccaattgggtcgggcacgcatcagggtaa

SEQ ID NO: 417673 - DNA, 30 bp, Artificial Sequence
  Synthetic oligonucleotide
atccaacttgtcaactgttcgagagggtaa

SEQ ID NO: 417674 - DNA, 30 bp, Artificial Sequence
  Synthetic oligonucleotide
cctcggtacggaccttaccatttcgggtaa

SEQ ID NO: 417675 - DNA, 30 bp, Artificial Sequence
  Synthetic oligonucleotide
gtagacagcgaaatcctatagtatgggtaa

SEQ ID NO: 417676 - DNA, 30 bp, Artificial Sequence
  Synthetic oligonucleotide
ttgctgatttgtactgttctgcctgggtaa

SEQ ID NO: 417677 - DNA, 30 bp, Artificial Sequence
  Synthetic oligonucleotide
tctagtagccagacaccattatgtgggtaa

SEQ ID NO: 417678 - DNA, 30 bp, Artificial Sequence
  Synthetic oligonucleotide
gactcacacgtacaccacacctgtgggtaa

SEQ ID NO: 417679 - DNA, 30 bp, Artificial Sequence
  Synthetic oligonucleotide
agtggatcgatcgctaacttgccatggtaa

SEQ ID NO: 417680 - DNA, 30 bp, Artificial Sequence
  Synthetic oligonucleotide
tttgtggtggtcaggatcaggggatggtaa

SEQ ID NO: 417681 - DNA, 30 bp, Artificial Sequence
  Synthetic oligonucleotide
ggattttaataccacataaagtagtggtaa

SEQ ID NO: 417682 - DNA, 30 bp, Artificial Sequence
  Synthetic oligonucleotide
actgactgcctgttagtatcaaggtggtaa

SEQ ID NO: 417683 - DNA, 30 bp, Artificial Sequence
  Synthetic oligonucleotide
tagtcctcttgtcaggttgagaggtggtaa

SEQ ID NO: 417684 - DNA, 30 bp, Artificial Sequence
  Synthetic oligonucleotide
agcgccctatttcatcttaagtggtggtaa

SEQ ID NO: 417685 - DNA, 30 bp, Artificial Sequence
  Synthetic oligonucleotide
tccggtaggaatcgcaatcggctgtggtaa

SEQ ID NO: 417686 - DNA, 30 bp, Artificial Sequence
  Synthetic oligonucleotide
gtgacgcttgcctaaaccttagtgtggtaa

SEQ ID NO: 417687 - DNA, 30 bp, Artificial Sequence
  Synthetic oligonucleotide
ctttagtgagatagggagaacgtgtggtaa

SEQ ID NO: 417688 - DNA, 30 bp, Artificial Sequence
  Synthetic oligonucleotide
agatcctcttttagcctgcagaattggtaa

SEQ ID NO: 417689 - DNA, 30 bp, Artificial Sequence
  Synthetic oligonucleotide
tgtcattaaagatattacaatgcaatgtaa

SEQ ID NO: 417690 - DNA, 30 bp, Artificial Sequence
  Synthetic oligonucleotide
tcgtatcaagcccttgcggacaacatgtaa

SEQ ID NO: 417691 - DNA, 30 bp, Artificial Sequence
  Synthetic oligonucleotide
gtagatatcatgggatgcacatacatgtaa

SEQ ID NO: 417692 - DNA, 30 bp, Artificial Sequence
  Synthetic oligonucleotide
gcaatagaattccaggcaagctccatgtaa

SEQ ID NO: 417693 - DNA, 30 bp, Artificial Sequence
  Synthetic oligonucleotide
attaaccggtggccagtaattctcatgtaa

SEQ ID NO: 417694 - DNA, 30 bp, Artificial Sequence
  Synthetic oligonucleotide
gagaatcgctgcgaggctccgccgatgtaa

SEQ ID NO: 417695 - DNA, 30 bp, Artificial Sequence
  Synthetic oligonucleotide
ggtcaggaatccatcatatatgcgatgtaa

SEQ ID NO: 417696 - DNA, 30 bp, Artificial Sequence
  Synthetic oligonucleotide
aatactcggtaattctcaagatcgatgtaa

SEQ ID NO: 417697 - DNA, 30 bp, Artificial Sequence
  Synthetic oligonucleotide
ttatccctcgtcacagaggagactatgtaa

SEQ ID NO: 417698 - DNA, 30 bp, Artificial Sequence
  Synthetic oligonucleotide
gaaaaggtttcgccttacatcagtatgtaa

SEQ ID NO: 417699 - DNA, 30 bp, Artificial Sequence
  Synthetic oligonucleotide
atggctcaaacgctcctgtgtagtatgtaa

SEQ ID NO: 417700 - DNA, 30 bp, Artificial Sequence
  Synthetic oligonucleotide
ccttctttgtgaaacattaaaattatgtaa

SEQ ID NO: 417701 - DNA, 30 bp, Artificial Sequence
  Synthetic oligonucleotide
tcctcttaaattcggcgttagaccctgtaa

SEQ ID NO: 417702 - DNA, 30 bp, Artificial Sequence
  Synthetic oligonucleotide
taattacggcgctgtcaggaccagctgtaa

SEQ ID NO: 417703 - DNA, 30 bp, Artificial Sequence
  Synthetic oligonucleotide
tgagagatacgaacgagagaaccgctgtaa

SEQ ID NO: 417704 - DNA, 30 bp, Artificial Sequence
  Synthetic oligonucleotide
aaacagttggaattagatgtccaagtgtaa

SEQ ID NO: 417705 - DNA, 30 bp, Artificial Sequence
  Synthetic oligonucleotide
ggggttcaccagcccgtacattaagtgtaa

SEQ ID NO: 417706 - DNA, 30 bp, Artificial Sequence
  Synthetic oligonucleotide
cactctgtggtcattttggtgcgagtgtaa

SEQ ID NO: 417707 - DNA, 30 bp, Artificial Sequence
  Synthetic oligonucleotide
tagtattcctcggatgtccgaccggtgtaa

SEQ ID NO: 417708 - DNA, 30 bp, Artificial Sequence
  Synthetic oligonucleotide
gcttactgcagtctagagcagtttgtgtaa

SEQ ID NO: 417709 - DNA, 30 bp, Artificial Sequence
  Synthetic oligonucleotide
tcacactttgcgtgtgtccagagattgtaa

SEQ ID NO: 417710 - DNA, 30 bp, Artificial Sequence
  Synthetic oligonucleotide
tcgtgcgttgaccctggcattgacttgtaa

SEQ ID NO: 417711 - DNA, 30 bp, Artificial Sequence
  Synthetic oligonucleotide
ttaacacgcaaacgtacaaacgccttgtaa

SEQ ID NO: 417712 - DNA, 30 bp, Artificial Sequence
  Synthetic oligonucleotide
caactcatctaatcgagcattgagttgtaa

SEQ ID NO: 417713 - DNA, 30 bp, Artificial Sequence
  Synthetic oligonucleotide
ttgtttggtggtggaccaggacggttgtaa

SEQ ID NO: 417714 - DNA, 30 bp, Artificial Sequence
  Synthetic oligonucleotide
agttaatggtagtcagcaacaatgttgtaa

SEQ ID NO: 417715 - DNA, 30 bp, Artificial Sequence
  Synthetic oligonucleotide
gaagtgataaaaatcgcatgcgatttgtaa

SEQ ID NO: 417716 - DNA, 30 bp, Artificial Sequence
  Synthetic oligonucleotide
attctacttatgtgagtctctgatttgtaa

SEQ ID NO: 417717 - DNA, 30 bp, Artificial Sequence
  Synthetic oligonucleotide
agtcactccagacgtaagattactttgtaa

SEQ ID NO: 417718 - DNA, 30 bp, Artificial Sequence
  Synthetic oligonucleotide
taatacactcgcttgccgaacgttttgtaa

SEQ ID NO: 417719 - DNA, 30 bp, Artificial Sequence
  Synthetic oligonucleotide
atgattcccgcaagggatttatttttgtaa

SEQ ID NO: 417720 - DNA, 30 bp, Artificial Sequence
  Synthetic oligonucleotide
tataaccagtccgggtaggcccgaaattaa

SEQ ID NO: 417721 - DNA, 30 bp, Artificial Sequence
  Synthetic oligonucleotide
tagcactatatgatgaattactgaaattaa

SEQ ID NO: 417722 - DNA, 30 bp, Artificial Sequence
  Synthetic oligonucleotide
gtcgaaggtaggatccattgttacaattaa

SEQ ID NO: 417723 - DNA, 30 bp, Artificial Sequence
  Synthetic oligonucleotide
tatgaaagccaatgaggttccaagaattaa

SEQ ID NO: 417724 - DNA, 30 bp, Artificial Sequence
  Synthetic oligonucleotide
cgtcttttcacatagcagggcaagaattaa

SEQ ID NO: 417725 - DNA, 30 bp, Artificial Sequence
  Synthetic oligonucleotide
tcttatctcccgtggctagaatagaattaa

SEQ ID NO: 417726 - DNA, 30 bp, Artificial Sequence
  Synthetic oligonucleotide
atataccaaattctgataccgccgaattaa

SEQ ID NO: 417727 - DNA, 30 bp, Artificial Sequence
  Synthetic oligonucleotide
agttttcgaatcacaggaccggggaattaa

SEQ ID NO: 417728 - DNA, 30 bp, Artificial Sequence
  Synthetic oligonucleotide
gggtttataataaatactggtatgaattaa

SEQ ID NO: 417729 - DNA, 30 bp, Artificial Sequence
  Synthetic oligonucleotide
ttggaaaacgattatgacgagttgaattaa

SEQ ID NO: 417730 - DNA, 30 bp, Artificial Sequence
  Synthetic oligonucleotide
cattgaatggttgttttgatgcataattaa

SEQ ID NO: 417731 - DNA, 30 bp, Artificial Sequence
  Synthetic oligonucleotide
acattcacacacaggcattcgtaacattaa

SEQ ID NO: 417732 - DNA, 30 bp, Artificial Sequence
  Synthetic oligonucleotide
atcgttgggtcagttcctagaggacattaa

SEQ ID NO: 417733 - DNA, 30 bp, Artificial Sequence
  Synthetic oligonucleotide
gtgtattagcagttagtgaaggtacattaa

SEQ ID NO: 417734 - DNA, 30 bp, Artificial Sequence
  Synthetic oligonucleotide
agcgcattaccggttgtcgtcaaccattaa

SEQ ID NO: 417735 - DNA, 30 bp, Artificial Sequence
  Synthetic oligonucleotide
gtagtggcgacgggcgacactaagcattaa

SEQ ID NO: 417736 - DNA, 30 bp, Artificial Sequence
  Synthetic oligonucleotide
gcagggtccacaataagtcgacagcattaa

SEQ ID NO: 417737 - DNA, 30 bp, Artificial Sequence
  Synthetic oligonucleotide
attgtctatcaaacaagacgcccgcattaa

SEQ ID NO: 417738 - DNA, 30 bp, Artificial Sequence
  Synthetic oligonucleotide
ccccagctcatagtccaaacgtcgcattaa

SEQ ID NO: 417739 - DNA, 30 bp, Artificial Sequence
  Synthetic oligonucleotide
aagctgagttaatagagatggcctcattaa

SEQ ID NO: 417740 - DNA, 30 bp, Artificial Sequence
  Synthetic oligonucleotide
tttggtccagcacctcgggacaaagattaa

SEQ ID NO: 417741 - DNA, 30 bp, Artificial Sequence
  Synthetic oligonucleotide
gtgaccagtgccgcggtttatcaagattaa

SEQ ID NO: 417742 - DNA, 30 bp, Artificial Sequence
  Synthetic oligonucleotide
caattccataatctagtggtacccgattaa

SEQ ID NO: 417743 - DNA, 30 bp, Artificial Sequence
  Synthetic oligonucleotide
ggtagacggcatcttgcgtaagtcgattaa

SEQ ID NO: 417744 - DNA, 30 bp, Artificial Sequence
  Synthetic oligonucleotide
ttaatgatcaggagatcagggtcggattaa

SEQ ID NO: 417745 - DNA, 30 bp, Artificial Sequence
  Synthetic oligonucleotide
ctcctcccactgggcgctaacggggattaa

SEQ ID NO: 417746 - DNA, 30 bp, Artificial Sequence
  Synthetic oligonucleotide
tctccgcctcgccggtgtagcttggattaa

SEQ ID NO: 417747 - DNA, 30 bp, Artificial Sequence
  Synthetic oligonucleotide
agctactttttttatgttgtagatgattaa

SEQ ID NO: 417748 - DNA, 30 bp, Artificial Sequence
  Synthetic oligonucleotide
tatggaagcagcggccttagccttgattaa

SEQ ID NO: 417749 - DNA, 30 bp, Artificial Sequence
  Synthetic oligonucleotide
aagctttcgataaacggggatcttgattaa

SEQ ID NO: 417750 - DNA, 30 bp, Artificial Sequence
  Synthetic oligonucleotide
tggagataggctagtttttaggttgattaa

SEQ ID NO: 417751 - DNA, 30 bp, Artificial Sequence
  Synthetic oligonucleotide
caatgcatgcgtaacgtacccaaatattaa

SEQ ID NO: 417752 - DNA, 30 bp, Artificial Sequence
  Synthetic oligonucleotide
taagccctcgggggtctttgcaaatattaa

SEQ ID NO: 417753 - DNA, 30 bp, Artificial Sequence
  Synthetic oligonucleotide
cataagccttacaggcagactaaatattaa

SEQ ID NO: 417754 - DNA, 30 bp, Artificial Sequence
  Synthetic oligonucleotide
gcccgtacaactctatgacttaaatattaa

SEQ ID NO: 417755 - DNA, 30 bp, Artificial Sequence
  Synthetic oligonucleotide
ccactgttttaataagcgggcccatattaa

SEQ ID NO: 417756 - DNA, 30 bp, Artificial Sequence
  Synthetic oligonucleotide
tacagtctgacgcatcttggcgtatattaa

SEQ ID NO: 417757 - DNA, 30 bp, Artificial Sequence
  Synthetic oligonucleotide
cctatgtggctataacaatctcactattaa

SEQ ID NO: 417758 - DNA, 30 bp, Artificial Sequence
  Synthetic oligonucleotide
gcactcgtggagcggtcatcctcctattaa

SEQ ID NO: 417759 - DNA, 30 bp, Artificial Sequence
  Synthetic oligonucleotide
cagctcagctgcattattgattgctattaa

SEQ ID NO: 417760 - DNA, 30 bp, Artificial Sequence
  Synthetic oligonucleotide
gatctgatagctaacatgatggtctattaa

SEQ ID NO: 417761 - DNA, 30 bp, Artificial Sequence
  Synthetic oligonucleotide
tataggggacagcatgtgattaagtattaa

SEQ ID NO: 417762 - DNA, 30 bp, Artificial Sequence
  Synthetic oligonucleotide
gtcgcatttatcgcttccactcggtattaa

SEQ ID NO: 417763 - DNA, 30 bp, Artificial Sequence
  Synthetic oligonucleotide
actgtgaggcccgggtgtctggggtattaa

SEQ ID NO: 417764 - DNA, 30 bp, Artificial Sequence
  Synthetic oligonucleotide
cttgaatcattgaccggccgaccttattaa

SEQ ID NO: 417765 - DNA, 30 bp, Artificial Sequence
  Synthetic oligonucleotide
ggctaaatattgtatttgtctccttattaa

SEQ ID NO: 417766 - DNA, 30 bp, Artificial Sequence
  Synthetic oligonucleotide
gccatagttaccgaagacgacggaacttaa

SEQ ID NO: 417767 - DNA, 30 bp, Artificial Sequence
  Synthetic oligonucleotide
gtctataaagctattacaccatgaacttaa

SEQ ID NO: 417768 - DNA, 30 bp, Artificial Sequence
  Synthetic oligonucleotide
gggcggatcttagtttaaggtctaacttaa

SEQ ID NO: 417769 - DNA, 30 bp, Artificial Sequence
  Synthetic oligonucleotide
agcgccactcatgcagcttgagtaacttaa

SEQ ID NO: 417770 - DNA, 30 bp, Artificial Sequence
  Synthetic oligonucleotide
gatacacagcggagggggttgaccacttaa

SEQ ID NO: 417771 - DNA, 30 bp, Artificial Sequence
  Synthetic oligonucleotide
caactagttagcctggtttgttccacttaa

SEQ ID NO: 417772 - DNA, 30 bp, Artificial Sequence
  Synthetic oligonucleotide
gcagctgtaagaaaattcagtcggacttaa

SEQ ID NO: 417773 - DNA, 30 bp, Artificial Sequence
  Synthetic oligonucleotide
tataatgtggagttctaaatgttgacttaa

SEQ ID NO: 417774 - DNA, 30 bp, Artificial Sequence
  Synthetic oligonucleotide
atttggtcgccgctctggctacctacttaa

SEQ ID NO: 417775 - DNA, 30 bp, Artificial Sequence
  Synthetic oligonucleotide
tatcggcgcggatagcgagagggtacttaa

SEQ ID NO: 417776 - DNA, 31 bp, Artificial Sequence
  Synthetic oligonucleotide
cattgatccgttggttacttaaataccttaa

SEQ ID NO: 417777 - DNA, 31 bp, Artificial Sequence
  Synthetic oligonucleotide
aaacataaggctttattcaatcaccccttaa

SEQ ID NO: 417778 - DNA, 30 bp, Artificial Sequence
  Synthetic oligonucleotide
ggaaaattgatttttgggcgttgcccttaa

SEQ ID NO: 417779 - DNA, 30 bp, Artificial Sequence
  Synthetic oligonucleotide
tccaacacctggtaagcggccctcccttaa

SEQ ID NO: 417780 - DNA, 30 bp, Artificial Sequence
  Synthetic oligonucleotide
ggaataacgcgtctattaatgcagccttaa

SEQ ID NO: 417781 - DNA, 30 bp, Artificial Sequence
  Synthetic oligonucleotide
aaggcactcgccctcccgcagcggccttaa

SEQ ID NO: 417782 - DNA, 30 bp, Artificial Sequence
  Synthetic oligonucleotide
gcggcctcgatcaatccgaaaggtccttaa

SEQ ID NO: 417783 - DNA, 30 bp, Artificial Sequence
  Synthetic oligonucleotide
ggataaagggtctcacggaatattccttaa

SEQ ID NO: 417784 - DNA, 30 bp, Artificial Sequence
  Synthetic oligonucleotide
cttctggcacaatgagtcagacaagcttaa

SEQ ID NO: 417785 - DNA, 30 bp, Artificial Sequence
  Synthetic oligonucleotide
tatcttggagttggtgtagatatagcttaa

SEQ ID NO: 417786 - DNA, 30 bp, Artificial Sequence
  Synthetic oligonucleotide
gctcaggtaaagcgcactctacgcgcttaa

SEQ ID NO: 417787 - DNA, 30 bp, Artificial Sequence
  Synthetic oligonucleotide
attagtttgtcagagtgataggaggcttaa

SEQ ID NO: 417788 - DNA, 30 bp, Artificial Sequence
  Synthetic oligonucleotide
gcagcaaaagtatgcgtattccatgcttaa

SEQ ID NO: 417789 - DNA, 30 bp, Artificial Sequence
  Synthetic oligonucleotide
aacgcatatagacaaaatgcgggtgcttaa

SEQ ID NO: 417790 - DNA, 30 bp, Artificial Sequence
  Synthetic oligonucleotide
ttatttacataggctttgccaaaatcttaa

SEQ ID NO: 417791 - DNA, 30 bp, Artificial Sequence
  Synthetic oligonucleotide
ggtatttggccgcctaacatactatcttaa

SEQ ID NO: 417792 - DNA, 30 bp, Artificial Sequence
  Synthetic oligonucleotide
ttagtcccaaaaagccttaaaaactcttaa

SEQ ID NO: 417793 - DNA, 30 bp, Artificial Sequence
  Synthetic oligonucleotide
agacaataagatgtaacgcgctactcttaa

SEQ ID NO: 417794 - DNA, 30 bp, Artificial Sequence
  Synthetic oligonucleotide
aataaaccttcgtagtcccaatgctcttaa

SEQ ID NO: 417795 - DNA, 30 bp, Artificial Sequence
  Synthetic oligonucleotide
aaaagtctagaagggccctatctctcttaa

SEQ ID NO: 417796 - DNA, 30 bp, Artificial Sequence
  Synthetic oligonucleotide
gcccgccagaggctaaattaacagtcttaa

SEQ ID NO: 417797 - DNA, 30 bp, Artificial Sequence
  Synthetic oligonucleotide
tcccgattgtcctcctagtttcggtcttaa

SEQ ID NO: 417798 - DNA, 30 bp, Artificial Sequence
  Synthetic oligonucleotide
gctcgcttcatggaagagtatgattcttaa

SEQ ID NO: 417799 - DNA, 30 bp, Artificial Sequence
  Synthetic oligonucleotide
ccttacagttatctatatttaaaaagttaa

SEQ ID NO: 417800 - DNA, 30 bp, Artificial Sequence
  Synthetic oligonucleotide
tctgcgcagaactcttctgctccaagttaa

SEQ ID NO: 417801 - DNA, 30 bp, Artificial Sequence
  Synthetic oligonucleotide
gtcaaagtcgcgtcctcctacgacagttaa

SEQ ID NO: 417802 - DNA, 30 bp, Artificial Sequence
  Synthetic oligonucleotide
ttaacacatcttgggggtaccagcagttaa

SEQ ID NO: 417803 - DNA, 29 bp, Artificial Sequence
  Synthetic oligonucleotide
cacgctataaattgttcgctagcagttaa

SEQ ID NO: 417804 - DNA, 30 bp, Artificial Sequence
  Synthetic oligonucleotide
tgaatttgccattgtaattcgcgcagttaa

SEQ ID NO: 417805 - DNA, 30 bp, Artificial Sequence
  Synthetic oligonucleotide
agcgaccgggcacagtacctggtgagttaa

SEQ ID NO: 417806 - DNA, 30 bp, Artificial Sequence
  Synthetic oligonucleotide
gtggactagagttctgagcggcgtagttaa

SEQ ID NO: 417807 - DNA, 30 bp, Artificial Sequence
  Synthetic oligonucleotide
gactctacctatacctctattcaacgttaa

SEQ ID NO: 417808 - DNA, 30 bp, Artificial Sequence
  Synthetic oligonucleotide
aattgtagatctagacgttcgagacgttaa

SEQ ID NO: 417809 - DNA, 30 bp, Artificial Sequence
  Synthetic oligonucleotide
gtatccgaattgaaaacccctcgacgttaa

SEQ ID NO: 417810 - DNA, 30 bp, Artificial Sequence
  Synthetic oligonucleotide
atacgatgttccgtggataaattacgttaa

SEQ ID NO: 417811 - DNA, 30 bp, Artificial Sequence
  Synthetic oligonucleotide
agacgcccccgctaaatcccttgccgttaa

SEQ ID NO: 417812 - DNA, 30 bp, Artificial Sequence
  Synthetic oligonucleotide
gcgtaacctatttagcttcgtaagcgttaa

SEQ ID NO: 417813 - DNA, 30 bp, Artificial Sequence
  Synthetic oligonucleotide
cagtacggcccatgggcccagtggcgttaa

SEQ ID NO: 417814 - DNA, 30 bp, Artificial Sequence
  Synthetic oligonucleotide
agtataagatagtttttgagggtgcgttaa

SEQ ID NO: 417815 - DNA, 30 bp, Artificial Sequence
  Synthetic oligonucleotide
tagtatcatatccggcctcatttgcgttaa

SEQ ID NO: 417816 - DNA, 30 bp, Artificial Sequence
  Synthetic oligonucleotide
gctcttaattagtgtaagaaatatcgttaa

SEQ ID NO: 417817 - DNA, 30 bp, Artificial Sequence
  Synthetic oligonucleotide
gactcaatgtccgtgtgagccacaggttaa

SEQ ID NO: 417818 - DNA, 30 bp, Artificial Sequence
  Synthetic oligonucleotide
accacaggcgctggcgcgggaaacggttaa

SEQ ID NO: 417819 - DNA, 30 bp, Artificial Sequence
  Synthetic oligonucleotide
aagtgcccggttagagtctccaacggttaa

SEQ ID NO: 417820 - DNA, 30 bp, Artificial Sequence
  Synthetic oligonucleotide
agttctgtataggagccacgcaacggttaa

SEQ ID NO: 417821 - DNA, 30 bp, Artificial Sequence
  Synthetic oligonucleotide
tctcctttggcgcaattaaatgacggttaa

SEQ ID NO: 417822 - DNA, 30 bp, Artificial Sequence
  Synthetic oligonucleotide
actaagcaccctacgaatttttgcggttaa

SEQ ID NO: 417823 - DNA, 30 bp, Artificial Sequence
  Synthetic oligonucleotide
gtaatccattcaggacggtaatcgggttaa

SEQ ID NO: 417824 - DNA, 30 bp, Artificial Sequence
  Synthetic oligonucleotide
tggacaccgcccaccaatcttagtggttaa

SEQ ID NO: 417825 - DNA, 30 bp, Artificial Sequence
  Synthetic oligonucleotide
tcaaataggaatgatacaggctgtggttaa

SEQ ID NO: 417826 - DNA, 30 bp, Artificial Sequence
  Synthetic oligonucleotide
tgttggttgtgtaacttatgaacatgttaa

SEQ ID NO: 417827 - DNA, 30 bp, Artificial Sequence
  Synthetic oligonucleotide
ccctacggctggaatatctttacatgttaa

SEQ ID NO: 417828 - DNA, 30 bp, Artificial Sequence
  Synthetic oligonucleotide
gaatgcaatgggcaagcctttttatgttaa

SEQ ID NO: 417829 - DNA, 30 bp, Artificial Sequence
  Synthetic oligonucleotide
ttcgaggcacagatacattctgcctgttaa

SEQ ID NO: 417830 - DNA, 30 bp, Artificial Sequence
  Synthetic oligonucleotide
accgtgagcaaatacatgactcgctgttaa

SEQ ID NO: 417831 - DNA, 30 bp, Artificial Sequence
  Synthetic oligonucleotide
tgatcaattattaatattgttcgctgttaa

SEQ ID NO: 417832 - DNA, 30 bp, Artificial Sequence
  Synthetic oligonucleotide
attgcctttaaggggtattggttctgttaa

SEQ ID NO: 417833 - DNA, 30 bp, Artificial Sequence
  Synthetic oligonucleotide
ggcaaaataccacttaatttggattgttaa

SEQ ID NO: 417834 - DNA, 30 bp, Artificial Sequence
  Synthetic oligonucleotide
acactttagtatcggacagctagttgttaa

SEQ ID NO: 417835 - DNA, 30 bp, Artificial Sequence
  Synthetic oligonucleotide
gttgctcacggtaatttacggcgttgttaa

SEQ ID NO: 417836 - DNA, 30 bp, Artificial Sequence
  Synthetic oligonucleotide
acattttaccataagtatggcggttgttaa

SEQ ID NO: 417837 - DNA, 30 bp, Artificial Sequence
  Synthetic oligonucleotide
tgtggttgtgcctagctaccaatttgttaa

SEQ ID NO: 417838 - DNA, 30 bp, Artificial Sequence
  Synthetic oligonucleotide
ttcgatgggggaggttgaaatctaatttaa

SEQ ID NO: 417839 - DNA, 30 bp, Artificial Sequence
  Synthetic oligonucleotide
cgcagttccgcaaacgagcaaaccatttaa

SEQ ID NO: 417840 - DNA, 30 bp, Artificial Sequence
  Synthetic oligonucleotide
gtatccccaaaactagtgcggtccatttaa

SEQ ID NO: 417841 - DNA, 30 bp, Artificial Sequence
  Synthetic oligonucleotide
gggtcgtcataaagtaacaaaatcatttaa

SEQ ID NO: 417842 - DNA, 30 bp, Artificial Sequence
  Synthetic oligonucleotide
ccccccgtatatgtcgactcatagatttaa

SEQ ID NO: 417843 - DNA, 30 bp, Artificial Sequence
  Synthetic oligonucleotide
aaggagtgattcctggagcctacgatttaa

SEQ ID NO: 417844 - DNA, 30 bp, Artificial Sequence
  Synthetic oligonucleotide
ccatcggcgcccggcactaggtcgatttaa

SEQ ID NO: 417845 - DNA, 30 bp, Artificial Sequence
  Synthetic oligonucleotide
gtgggagggatcccgccggacgggatttaa

SEQ ID NO: 417846 - DNA, 30 bp, Artificial Sequence
  Synthetic oligonucleotide
ggccaggaaggggaagtaatcgggatttaa

SEQ ID NO: 417847 - DNA, 30 bp, Artificial Sequence
  Synthetic oligonucleotide
aattagttgtgcatagcgggaatgatttaa

SEQ ID NO: 417848 - DNA, 30 bp, Artificial Sequence
  Synthetic oligonucleotide
tttcgacagctagctgccgctaatatttaa

SEQ ID NO: 417849 - DNA, 30 bp, Artificial Sequence
  Synthetic oligonucleotide
tacccaggaaagtggctgagacatatttaa

SEQ ID NO: 417850 - DNA, 30 bp, Artificial Sequence
  Synthetic oligonucleotide
gacgtcttcaagtgtcccctttgtatttaa

SEQ ID NO: 417851 - DNA, 30 bp, Artificial Sequence
  Synthetic oligonucleotide
tagtacctaggaaagagctgggcactttaa

SEQ ID NO: 417852 - DNA, 30 bp, Artificial Sequence
  Synthetic oligonucleotide
ccctctctacccctgagggttcgactttaa

SEQ ID NO: 417853 - DNA, 30 bp, Artificial Sequence
  Synthetic oligonucleotide
tctagaagaaattgaattcagcacctttaa

SEQ ID NO: 417854 - DNA, 30 bp, Artificial Sequence
  Synthetic oligonucleotide
caatgataagtttgggaattacccctttaa

SEQ ID NO: 417855 - DNA, 30 bp, Artificial Sequence
  Synthetic oligonucleotide
catttgtgctggccatgtatccagctttaa

SEQ ID NO: 417856 - DNA, 30 bp, Artificial Sequence
  Synthetic oligonucleotide
ctagatttgtaggcttcgggggcgctttaa

SEQ ID NO: 417857 - DNA, 30 bp, Artificial Sequence
  Synthetic oligonucleotide
gactgttcctcggcaataaattggctttaa

SEQ ID NO: 417858 - DNA, 30 bp, Artificial Sequence
  Synthetic oligonucleotide
aggttgggtttcggatatcggtatctttaa

SEQ ID NO: 417859 - DNA, 30 bp, Artificial Sequence
  Synthetic oligonucleotide
gagtggatgtggatcgagtacaaagtttaa

SEQ ID NO: 417860 - DNA, 30 bp, Artificial Sequence
  Synthetic oligonucleotide
aatcgagggtatttggcccatgaagtttaa

SEQ ID NO: 417861 - DNA, 30 bp, Artificial Sequence
  Synthetic oligonucleotide
tcgtacgcggtcttgtctgcttacgtttaa

SEQ ID NO: 417862 - DNA, 30 bp, Artificial Sequence
  Synthetic oligonucleotide
ataaggacgtacccaaatatacccgtttaa

SEQ ID NO: 417863 - DNA, 30 bp, Artificial Sequence
  Synthetic oligonucleotide
gttttcgtcgagtaggcgctccccgtttaa

SEQ ID NO: 417864 - DNA, 30 bp, Artificial Sequence
  Synthetic oligonucleotide
gtcgctggttggaccattcatgtcgtttaa

SEQ ID NO: 417865 - DNA, 30 bp, Artificial Sequence
  Synthetic oligonucleotide
ggcgcatagacccttgtgctcagggtttaa

SEQ ID NO: 417866 - DNA, 30 bp, Artificial Sequence
  Synthetic oligonucleotide
ttcagtattaacaatgctggggtggtttaa

SEQ ID NO: 417867 - DNA, 30 bp, Artificial Sequence
  Synthetic oligonucleotide
acgcggctatttttacacgaatatgtttaa

SEQ ID NO: 417868 - DNA, 30 bp, Artificial Sequence
  Synthetic oligonucleotide
taacattgagggtcgaacgcgcctgtttaa

SEQ ID NO: 417869 - DNA, 30 bp, Artificial Sequence
  Synthetic oligonucleotide
tcttccaaggatagtatttgggaattttaa

SEQ ID NO: 417870 - DNA, 30 bp, Artificial Sequence
  Synthetic oligonucleotide
ctctgcccattactacacgtgtgattttaa

SEQ ID NO: 417871 - DNA, 30 bp, Artificial Sequence
  Synthetic oligonucleotide
gcgcccgcatcatccatccagcccttttaa

SEQ ID NO: 417872 - DNA, 30 bp, Artificial Sequence
  Synthetic oligonucleotide
tgggctaatgagtaacctgtcttgttttaa

SEQ ID NO: 417873 - DNA, 30 bp, Artificial Sequence
  Synthetic oligonucleotide
gaacttgcaatgcatctttagaaaaaaaca

SEQ ID NO: 417874 - DNA, 30 bp, Artificial Sequence
  Synthetic oligonucleotide
ggccacagttaacactcatgctgaaaaaca

SEQ ID NO: 417875 - DNA, 30 bp, Artificial Sequence
  Synthetic oligonucleotide
tagtggaaccggtgcgccgcattaaaaaca

SEQ ID NO: 417876 - DNA, 30 bp, Artificial Sequence
  Synthetic oligonucleotide
tatcgtcttatacggtccacgtgcaaaaca

SEQ ID NO: 417877 - DNA, 30 bp, Artificial Sequence
  Synthetic oligonucleotide
cagctatttcgtcagggaagacagaaaaca

SEQ ID NO: 417878 - DNA, 30 bp, Artificial Sequence
  Synthetic oligonucleotide
gataccttgcaatatggcactgggaaaaca

SEQ ID NO: 417879 - DNA, 30 bp, Artificial Sequence
  Synthetic oligonucleotide
atgtatgcctagcaagcggctgataaaaca

SEQ ID NO: 417880 - DNA, 30 bp, Artificial Sequence
  Synthetic oligonucleotide
tgtggcctaatggggccgctaccacaaaca

SEQ ID NO: 417881 - DNA, 30 bp, Artificial Sequence
  Synthetic oligonucleotide
ctccgcgacttacgggggttttcacaaaca

SEQ ID NO: 417882 - DNA, 30 bp, Artificial Sequence
  Synthetic oligonucleotide
aattccaacaaacagccgaccctccaaaca

SEQ ID NO: 417883 - DNA, 30 bp, Artificial Sequence
  Synthetic oligonucleotide
tttagtgcagggaagttgtacttagaaaca

SEQ ID NO: 417884 - DNA, 30 bp, Artificial Sequence
  Synthetic oligonucleotide
cccactaagattagctcattgacggaaaca

SEQ ID NO: 417885 - DNA, 30 bp, Artificial Sequence
  Synthetic oligonucleotide
gaagcggcatggcttatgctgccggaaaca

SEQ ID NO: 417886 - DNA, 30 bp, Artificial Sequence
  Synthetic oligonucleotide
taaagatgttagagtttctggtcggaaaca

SEQ ID NO: 417887 - DNA, 30 bp, Artificial Sequence
  Synthetic oligonucleotide
ggatgtctgtaactataatcaagggaaaca

SEQ ID NO: 417888 - DNA, 30 bp, Artificial Sequence
  Synthetic oligonucleotide
ttcataagtggcgataacgaaggggaaaca

SEQ ID NO: 417889 - DNA, 30 bp, Artificial Sequence
  Synthetic oligonucleotide
tatcggagcagtaacaatgccaaataaaca

SEQ ID NO: 417890 - DNA, 30 bp, Artificial Sequence
  Synthetic oligonucleotide
gaacttgcataactatgttttaaataaaca

SEQ ID NO: 417891 - DNA, 30 bp, Artificial Sequence
  Synthetic oligonucleotide
accaatggatcgcaggggtcttaataaaca

SEQ ID NO: 417892 - DNA, 30 bp, Artificial Sequence
  Synthetic oligonucleotide
ttattgcagagttttagggaactataaaca

SEQ ID NO: 417893 - DNA, 30 bp, Artificial Sequence
  Synthetic oligonucleotide
atgaaccggtgccatcctaaaggctaaaca

SEQ ID NO: 417894 - DNA, 30 bp, Artificial Sequence
  Synthetic oligonucleotide
aattatcaggctctcgtccttcggtaaaca

SEQ ID NO: 417895 - DNA, 30 bp, Artificial Sequence
  Synthetic oligonucleotide
cctaggttgaaggctagcgtagtgtaaaca

SEQ ID NO: 417896 - DNA, 30 bp, Artificial Sequence
  Synthetic oligonucleotide
actttgggcacgcatccttagtattaaaca

SEQ ID NO: 417897 - DNA, 30 bp, Artificial Sequence
  Synthetic oligonucleotide
tcaaatggacgacagcaacagtcttaaaca

SEQ ID NO: 417898 - DNA, 30 bp, Artificial Sequence
  Synthetic oligonucleotide
gtatgtggcaaattactacgtagttaaaca

SEQ ID NO: 417899 - DNA, 30 bp, Artificial Sequence
  Synthetic oligonucleotide
gcggggttgatattcgaaagtcgttaaaca

SEQ ID NO: 417900 - DNA, 30 bp, Artificial Sequence
  Synthetic oligonucleotide
actaatgtcagtgcggattgatgaacaaca

SEQ ID NO: 417901 - DNA, 30 bp, Artificial Sequence
  Synthetic oligonucleotide
gactaacattagttctgacaggtaacaaca

SEQ ID NO: 417902 - DNA, 30 bp, Artificial Sequence
  Synthetic oligonucleotide
tatatgtaccctcggccagctatcacaaca

SEQ ID NO: 417903 - DNA, 30 bp, Artificial Sequence
  Synthetic oligonucleotide
atggcaagtaggagagtcctgtcgacaaca

SEQ ID NO: 417904 - DNA, 30 bp, Artificial Sequence
  Synthetic oligonucleotide
gttactgatccctgtcttggtcatacaaca

SEQ ID NO: 417905 - DNA, 30 bp, Artificial Sequence
  Synthetic oligonucleotide
gacgggttattctcattaatggctacaaca

SEQ ID NO: 417906 - DNA, 30 bp, Artificial Sequence
  Synthetic oligonucleotide
atcgcctacatcgggcgcagctcaccaaca

SEQ ID NO: 417907 - DNA, 30 bp, Artificial Sequence
  Synthetic oligonucleotide
ataagagacggctgtggtaggggaccaaca

SEQ ID NO: 417908 - DNA, 30 bp, Artificial Sequence
  Synthetic oligonucleotide
cccccctgcactcctaagttaaccccaaca

SEQ ID NO: 417909 - DNA, 30 bp, Artificial Sequence
  Synthetic oligonucleotide
acgcggttggggcagtcattgaagccaaca

SEQ ID NO: 417910 - DNA, 30 bp, Artificial Sequence
  Synthetic oligonucleotide
ggaaaacttgcccggttagtagcgccaaca

SEQ ID NO: 417911 - DNA, 30 bp, Artificial Sequence
  Synthetic oligonucleotide
cttgtgcccgcatttacggaatttccaaca

SEQ ID NO: 417912 - DNA, 30 bp, Artificial Sequence
  Synthetic oligonucleotide
ctctctttcctagagcagtgtgcagcaaca

SEQ ID NO: 417913 - DNA, 30 bp, Artificial Sequence
  Synthetic oligonucleotide
ttcaatatcactatgaacgtttgagcaaca

SEQ ID NO: 417914 - DNA, 30 bp, Artificial Sequence
  Synthetic oligonucleotide
gtttgtcagacactgattgtactagcaaca

SEQ ID NO: 417915 - DNA, 30 bp, Artificial Sequence
  Synthetic oligonucleotide
agagcggcttacggggggacccccgcaaca

SEQ ID NO: 417916 - DNA, 30 bp, Artificial Sequence
  Synthetic oligonucleotide
acgtagcgtaaagggtgatgcagggcaaca

SEQ ID NO: 417917 - DNA, 30 bp, Artificial Sequence
  Synthetic oligonucleotide
cgcagacattgacaaattcatcatgcaaca

SEQ ID NO: 417918 - DNA, 30 bp, Artificial Sequence
  Synthetic oligonucleotide
gtgtttataagtataaagcatgcgtcaaca

SEQ ID NO: 417919 - DNA, 30 bp, Artificial Sequence
  Synthetic oligonucleotide
gcaactgactttggaagtaattggtcaaca

SEQ ID NO: 417920 - DNA, 30 bp, Artificial Sequence
  Synthetic oligonucleotide
gtgaaggagctaagttggcgtatgtcaaca

SEQ ID NO: 417921 - DNA, 30 bp, Artificial Sequence
  Synthetic oligonucleotide
aggatccggatcctttcgtcattgtcaaca

SEQ ID NO: 417922 - DNA, 30 bp, Artificial Sequence
  Synthetic oligonucleotide
gcgctcacaccctcgatagacggttcaaca

SEQ ID NO: 417923 - DNA, 30 bp, Artificial Sequence
  Synthetic oligonucleotide
tataacagcatgcaccaaccagtttcaaca

SEQ ID NO: 417924 - DNA, 30 bp, Artificial Sequence
  Synthetic oligonucleotide
ataactacaattccacaagacgtttcaaca

SEQ ID NO: 417925 - DNA, 30 bp, Artificial Sequence
  Synthetic oligonucleotide
ttactttcaggcgctatgtgcctaagaaca

SEQ ID NO: 417926 - DNA, 30 bp, Artificial Sequence
  Synthetic oligonucleotide
aaaggggggaccatgcggcgggtaagaaca

SEQ ID NO: 417927 - DNA, 30 bp, Artificial Sequence
  Synthetic oligonucleotide
tacggctattctgcaataacttacagaaca

SEQ ID NO: 417928 - DNA, 30 bp, Artificial Sequence
  Synthetic oligonucleotide
ccaaaccgaccacgcccgtttagcagaaca

SEQ ID NO: 417929 - DNA, 30 bp, Artificial Sequence
  Synthetic oligonucleotide
caaataaggcgtgtaggcttgtgcagaaca

SEQ ID NO: 417930 - DNA, 30 bp, Artificial Sequence
  Synthetic oligonucleotide
atccgctctgtgttaggggtggtgagaaca

SEQ ID NO: 417931 - DNA, 30 bp, Artificial Sequence
  Synthetic oligonucleotide
tgacggggtctagggagctggttgagaaca

SEQ ID NO: 417932 - DNA, 30 bp, Artificial Sequence
  Synthetic oligonucleotide
catacactgttgggctatttagatagaaca

SEQ ID NO: 417933 - DNA, 30 bp, Artificial Sequence
  Synthetic oligonucleotide
cctattcgcgtatataagtcgtctagaaca

SEQ ID NO: 417934 - DNA, 30 bp, Artificial Sequence
  Synthetic oligonucleotide
gtcttcggcggaatggccaggcgtagaaca

SEQ ID NO: 417935 - DNA, 30 bp, Artificial Sequence
  Synthetic oligonucleotide
gaaatggtttttaaggatgaggaacgaaca

SEQ ID NO: 417936 - DNA, 30 bp, Artificial Sequence
  Synthetic oligonucleotide
tgtattatgaggctctaaacacgccgaaca

SEQ ID NO: 417937 - DNA, 30 bp, Artificial Sequence
  Synthetic oligonucleotide
tgagagtagttgttttttgtcagtcgaaca

SEQ ID NO: 417938 - DNA, 30 bp, Artificial Sequence
  Synthetic oligonucleotide
tggggtaaaacggtaacggagacaggaaca

SEQ ID NO: 417939 - DNA, 30 bp, Artificial Sequence
  Synthetic oligonucleotide
agaagtgagtgaggaacttgctcaggaaca

SEQ ID NO: 417940 - DNA, 30 bp, Artificial Sequence
  Synthetic oligonucleotide
actgggtcgtcgtggttgtatgtaggaaca

SEQ ID NO: 417941 - DNA, 30 bp, Artificial Sequence
  Synthetic oligonucleotide
attccatggacgcgcatcaaacgcggaaca

SEQ ID NO: 417942 - DNA, 30 bp, Artificial Sequence
  Synthetic oligonucleotide
ttgatagcctgtctggggtcaccgggaaca

SEQ ID NO: 417943 - DNA, 30 bp, Artificial Sequence
  Synthetic oligonucleotide
gagtgtttgctaccatttaggcggggaaca

SEQ ID NO: 417944 - DNA, 30 bp, Artificial Sequence
  Synthetic oligonucleotide
cattcacaggttgttcatgtccaatgaaca

SEQ ID NO: 417945 - DNA, 30 bp, Artificial Sequence
  Synthetic oligonucleotide
agtatattggttttaattcgtccatgaaca

SEQ ID NO: 417946 - DNA, 30 bp, Artificial Sequence
  Synthetic oligonucleotide
ccgcgatgtctaacccaggattactgaaca

SEQ ID NO: 417947 - DNA, 30 bp, Artificial Sequence
  Synthetic oligonucleotide
tcctgtaagtatgcagtattaggctgaaca

SEQ ID NO: 417948 - DNA, 30 bp, Artificial Sequence
  Synthetic oligonucleotide
ttactgtggccaggaggtttcatgtgaaca

SEQ ID NO: 417949 - DNA, 30 bp, Artificial Sequence
  Synthetic oligonucleotide
gccgacggaagctaggcaaaagtgtgaaca

SEQ ID NO: 417950 - DNA, 30 bp, Artificial Sequence
  Synthetic oligonucleotide
actggtacaccccaccgcgcattgtgaaca

SEQ ID NO: 417951 - DNA, 30 bp, Artificial Sequence
  Synthetic oligonucleotide
tattagcgtatttgggtaccgctttgaaca

SEQ ID NO: 417952 - DNA, 30 bp, Artificial Sequence
  Synthetic oligonucleotide
cagcagacgtttagtactccagacataaca

SEQ ID NO: 417953 - DNA, 30 bp, Artificial Sequence
  Synthetic oligonucleotide
gtggcacggcacttcctgtgcgatataaca

SEQ ID NO: 417954 - DNA, 30 bp, Artificial Sequence
  Synthetic oligonucleotide
gtggcatgctgagttgttccagctataaca

SEQ ID NO: 417955 - DNA, 30 bp, Artificial Sequence
  Synthetic oligonucleotide
tttcatgcaaactgtctatctagactaaca

SEQ ID NO: 417956 - DNA, 30 bp, Artificial Sequence
  Synthetic oligonucleotide
cctgtgtgtatcctattccgattgctaaca

SEQ ID NO: 417957 - DNA, 30 bp, Artificial Sequence
  Synthetic oligonucleotide
cactctgtctctattattgccaatctaaca

SEQ ID NO: 417958 - DNA, 30 bp, Artificial Sequence
  Synthetic oligonucleotide
gaaccaacgactaggagcgattgtctaaca

SEQ ID NO: 417959 - DNA, 30 bp, Artificial Sequence
  Synthetic oligonucleotide
ggcatgtaaagccaagggcttgttctaaca

SEQ ID NO: 417960 - DNA, 30 bp, Artificial Sequence
  Synthetic oligonucleotide
cacccaccgtgattcctttaattggtaaca

SEQ ID NO: 417961 - DNA, 30 bp, Artificial Sequence
  Synthetic oligonucleotide
ctacagccgaaaattcttttggctgtaaca

SEQ ID NO: 417962 - DNA, 30 bp, Artificial Sequence
  Synthetic oligonucleotide
gacttctaagttatagctagttctgtaaca

SEQ ID NO: 417963 - DNA, 30 bp, Artificial Sequence
  Synthetic oligonucleotide
cttgccacggcagagtgccaacttgtaaca

SEQ ID NO: 417964 - DNA, 30 bp, Artificial Sequence
  Synthetic oligonucleotide
acctggggcctctcctgaacaccattaaca

SEQ ID NO: 417965 - DNA, 30 bp, Artificial Sequence
  Synthetic oligonucleotide
tttgcacgccttatgaagaactcattaaca

SEQ ID NO: 417966 - DNA, 30 bp, Artificial Sequence
  Synthetic oligonucleotide
gccaagaatgtagcgccttggtcattaaca

SEQ ID NO: 417967 - DNA, 30 bp, Artificial Sequence
  Synthetic oligonucleotide
tgggatatgcctgcatcgcacggattaaca

SEQ ID NO: 417968 - DNA, 28 bp, Artificial Sequence
  Synthetic oligonucleotide
atgaaaccagcgcatgcaattattaaca

SEQ ID NO: 417969 - DNA, 30 bp, Artificial Sequence
  Synthetic oligonucleotide
gtcggaaaggttggatccttgaggttaaca

SEQ ID NO: 417970 - DNA, 30 bp, Artificial Sequence
  Synthetic oligonucleotide
aactagcggatatacacggtctatttaaca

SEQ ID NO: 417971 - DNA, 30 bp, Artificial Sequence
  Synthetic oligonucleotide
aatcatcagtacctgcttattaccaacaca

SEQ ID NO: 417972 - DNA, 30 bp, Artificial Sequence
  Synthetic oligonucleotide
aacgtgttgctaggccatgaggccaacaca

SEQ ID NO: 417973 - DNA, 30 bp, Artificial Sequence
  Synthetic oligonucleotide
tcctcttatgagtcttgtcattataacaca

SEQ ID NO: 417974 - DNA, 30 bp, Artificial Sequence
  Synthetic oligonucleotide
ctagcgaccatgcggtcgaaccgtaacaca

SEQ ID NO: 417975 - DNA, 30 bp, Artificial Sequence
  Synthetic oligonucleotide
cggtcatggggcctgctgccttgtaacaca

SEQ ID NO: 417976 - DNA, 30 bp, Artificial Sequence
  Synthetic oligonucleotide
tgattgtcaagttcttgtgcgaaacacaca

SEQ ID NO: 417977 - DNA, 30 bp, Artificial Sequence
  Synthetic oligonucleotide
tctgcagctaaacgtgtgaattaccacaca

SEQ ID NO: 417978 - DNA, 30 bp, Artificial Sequence
  Synthetic oligonucleotide
gtttgtgtactgcttcgctcggggcacaca

SEQ ID NO: 417979 - DNA, 30 bp, Artificial Sequence
  Synthetic oligonucleotide
gtatcagtcaggacggtgcgagtgcacaca

SEQ ID NO: 417980 - DNA, 30 bp, Artificial Sequence
  Synthetic oligonucleotide
tggtttccgtacgggtatgtcagtcacaca

SEQ ID NO: 417981 - DNA, 30 bp, Artificial Sequence
  Synthetic oligonucleotide
tagaaaagcgcccaaatgacccgtcacaca

SEQ ID NO: 417982 - DNA, 30 bp, Artificial Sequence
  Synthetic oligonucleotide
aaatgataaccgttatgtcgccgtcacaca

SEQ ID NO: 417983 - DNA, 30 bp, Artificial Sequence
  Synthetic oligonucleotide
aagaaagacgtacaaataccctgtcacaca

SEQ ID NO: 417984 - DNA, 30 bp, Artificial Sequence
  Synthetic oligonucleotide
agctaagcattaagatggtcaatagacaca

SEQ ID NO: 417985 - DNA, 30 bp, Artificial Sequence
  Synthetic oligonucleotide
taattgctcgtgtcatggattcaggacaca

SEQ ID NO: 417986 - DNA, 30 bp, Artificial Sequence
  Synthetic oligonucleotide
tagtatttggatgtgttgttctaggacaca

SEQ ID NO: 417987 - DNA, 30 bp, Artificial Sequence
  Synthetic oligonucleotide
actcttgaattgcttcagtatggggacaca

SEQ ID NO: 417988 - DNA, 30 bp, Artificial Sequence
  Synthetic oligonucleotide
gagtatgagcccgagagcaggtgggacaca

SEQ ID NO: 417989 - DNA, 30 bp, Artificial Sequence
  Synthetic oligonucleotide
gcataagagagatctagggcaactgacaca

SEQ ID NO: 417990 - DNA, 30 bp, Artificial Sequence
  Synthetic oligonucleotide
atcgatcctagcatttaaataactgacaca

SEQ ID NO: 417991 - DNA, 30 bp, Artificial Sequence
  Synthetic oligonucleotide
tctcgcttgaacctgccctcaattgacaca

SEQ ID NO: 417992 - DNA, 30 bp, Artificial Sequence
  Synthetic oligonucleotide
cgagatttgcattacatcgctctatacaca

SEQ ID NO: 417993 - DNA, 30 bp, Artificial Sequence
  Synthetic oligonucleotide
atcttgttaccgcgactcctcaattacaca

SEQ ID NO: 417994 - DNA, 30 bp, Artificial Sequence
  Synthetic oligonucleotide
tccggtgggtagctcagattggcttacaca

SEQ ID NO: 417995 - DNA, 30 bp, Artificial Sequence
  Synthetic oligonucleotide
gtatagggcagtctggttcagcaaaccaca

SEQ ID NO: 417996 - DNA, 30 bp, Artificial Sequence
  Synthetic oligonucleotide
gatccacgttggcacaaacgccgaaccaca

SEQ ID NO: 417997 - DNA, 30 bp, Artificial Sequence
  Synthetic oligonucleotide
cggagaatttggcagggcccgggaaccaca

SEQ ID NO: 417998 - DNA, 30 bp, Artificial Sequence
  Synthetic oligonucleotide
tttcatagatttccacccacacccaccaca

SEQ ID NO: 417999 - DNA, 30 bp, Artificial Sequence
  Synthetic oligonucleotide
caatatagggtgttttcgttgagcaccaca

SEQ ID NO: 418000 - DNA, 30 bp, Artificial Sequence
  Synthetic oligonucleotide
cttgcctgttacacactagtagggaccaca

SEQ ID NO: 418001 - DNA, 30 bp, Artificial Sequence
  Synthetic oligonucleotide
caagcagtgcccctggctaaacgtaccaca

SEQ ID NO: 418002 - DNA, 30 bp, Artificial Sequence
  Synthetic oligonucleotide
gcttgactggaatcgagttccggtaccaca

SEQ ID NO: 418003 - DNA, 30 bp, Artificial Sequence
  Synthetic oligonucleotide
gcgcccagaatagtgtaatgcgaccccaca

SEQ ID NO: 418004 - DNA, 30 bp, Artificial Sequence
  Synthetic oligonucleotide
tgtaagggtacaggggtggacaggcccaca

SEQ ID NO: 418005 - DNA, 30 bp, Artificial Sequence
  Synthetic oligonucleotide
gagtaccaaaaaaagcctggcgtgcccaca

SEQ ID NO: 418006 - DNA, 30 bp, Artificial Sequence
  Synthetic oligonucleotide
cattaggatgcgggcaatatgtgtcccaca

SEQ ID NO: 418007 - DNA, 30 bp, Artificial Sequence
  Synthetic oligonucleotide
tgaaaggcggtagtccgaatacccgccaca

SEQ ID NO: 418008 - DNA, 30 bp, Artificial Sequence
  Synthetic oligonucleotide
aataatctacaagacgttcagggcgccaca

SEQ ID NO: 418009 - DNA, 30 bp, Artificial Sequence
  Synthetic oligonucleotide
aaagttgctccggggaatgggtaggccaca

SEQ ID NO: 418010 - DNA, 30 bp, Artificial Sequence
  Synthetic oligonucleotide
ccctataaagccgggttgaccgcggccaca

SEQ ID NO: 418011 - DNA, 30 bp, Artificial Sequence
  Synthetic oligonucleotide
catactcggttcattaagcgaggggccaca

SEQ ID NO: 418012 - DNA, 30 bp, Artificial Sequence
  Synthetic oligonucleotide
cactagcggcggtctatggaaggtgccaca

SEQ ID NO: 418013 - DNA, 30 bp, Artificial Sequence
  Synthetic oligonucleotide
gccttgtgaataacacggtgtggtgccaca

SEQ ID NO: 418014 - DNA, 30 bp, Artificial Sequence
  Synthetic oligonucleotide
gttatgatggctctgccattataatccaca

SEQ ID NO: 418015 - DNA, 30 bp, Artificial Sequence
  Synthetic oligonucleotide
tgcgttatgtccgaggcggatgtatccaca

SEQ ID NO: 418016 - DNA, 30 bp, Artificial Sequence
  Synthetic oligonucleotide
cgagaaccttaatgtcgtaggaagtccaca

SEQ ID NO: 418017 - DNA, 30 bp, Artificial Sequence
  Synthetic oligonucleotide
gcgctctgtgcgttccgacgtgtgtccaca

SEQ ID NO: 418018 - DNA, 30 bp, Artificial Sequence
  Synthetic oligonucleotide
gaatggatctactagtttaggttgtccaca

SEQ ID NO: 418019 - DNA, 30 bp, Artificial Sequence
  Synthetic oligonucleotide
cagcaagagaagctcgcacatgattccaca

SEQ ID NO: 418020 - DNA, 30 bp, Artificial Sequence
  Synthetic oligonucleotide
aggtgtacctgatccacgaaaacttccaca

SEQ ID NO: 418021 - DNA, 30 bp, Artificial Sequence
  Synthetic oligonucleotide
tactaaagttgaatgctggcagtttccaca

SEQ ID NO: 418022 - DNA, 30 bp, Artificial Sequence
  Synthetic oligonucleotide
ctgctgagcgctgatgaaaccttttccaca

SEQ ID NO: 418023 - DNA, 30 bp, Artificial Sequence
  Synthetic oligonucleotide
tgtatggtcgtatgataacgaaaaagcaca

SEQ ID NO: 418024 - DNA, 30 bp, Artificial Sequence
  Synthetic oligonucleotide
aagtttatggaattcgcctttcaaagcaca

SEQ ID NO: 418025 - DNA, 30 bp, Artificial Sequence
  Synthetic oligonucleotide
aataagacttggacggcaagtggcagcaca

SEQ ID NO: 418026 - DNA, 30 bp, Artificial Sequence
  Synthetic oligonucleotide
taggattttatgatcgattatattagcaca

SEQ ID NO: 418027 - DNA, 30 bp, Artificial Sequence
  Synthetic oligonucleotide
aattaaggggacggattgtatgttagcaca

SEQ ID NO: 418028 - DNA, 30 bp, Artificial Sequence
  Synthetic oligonucleotide
cacacttagttacataatacggtacgcaca

SEQ ID NO: 418029 - DNA, 30 bp, Artificial Sequence
  Synthetic oligonucleotide
ttgatcgtattttatagaagcggccgcaca

SEQ ID NO: 418030 - DNA, 30 bp, Artificial Sequence
  Synthetic oligonucleotide
gtaaacaaaacgtgtaaaccagtgcgcaca

SEQ ID NO: 418031 - DNA, 30 bp, Artificial Sequence
  Synthetic oligonucleotide
aaaactgcaaagcatgtgacaactcgcaca

SEQ ID NO: 418032 - DNA, 30 bp, Artificial Sequence
  Synthetic oligonucleotide
atcgtaacattcttacccacttgtcgcaca

SEQ ID NO: 418033 - DNA, 30 bp, Artificial Sequence
  Synthetic oligonucleotide
tattcgacggtaacagttgttgtaggcaca

SEQ ID NO: 418034 - DNA, 30 bp, Artificial Sequence
  Synthetic oligonucleotide
gtgatcttttggttcttgtgtatcggcaca

SEQ ID NO: 418035 - DNA, 30 bp, Artificial Sequence
  Synthetic oligonucleotide
gtggttttggtttcagggttacagggcaca

SEQ ID NO: 418036 - DNA, 30 bp, Artificial Sequence
  Synthetic oligonucleotide
tttaccagtcagatgagcgttgggggcaca

SEQ ID NO: 418037 - DNA, 30 bp, Artificial Sequence
  Synthetic oligonucleotide
tactgacgcggtttaagttagctgggcaca

SEQ ID NO: 418038 - DNA, 30 bp, Artificial Sequence
  Synthetic oligonucleotide
agacatacctttttacaccggcatggcaca

SEQ ID NO: 418039 - DNA, 30 bp, Artificial Sequence
  Synthetic oligonucleotide
cccccacaatagtggaatagcggatgcaca

SEQ ID NO: 418040 - DNA, 30 bp, Artificial Sequence
  Synthetic oligonucleotide
actctgtagagtcttaaaaccttatgcaca

SEQ ID NO: 418041 - DNA, 30 bp, Artificial Sequence
  Synthetic oligonucleotide
agcgtgcaaatatgtctactgttatgcaca

SEQ ID NO: 418042 - DNA, 30 bp, Artificial Sequence
  Synthetic oligonucleotide
aataggggggcatcctaccggccctgcaca

SEQ ID NO: 418043 - DNA, 30 bp, Artificial Sequence
  Synthetic oligonucleotide
cgtatggtcatttctttttcttcctgcaca

SEQ ID NO: 418044 - DNA, 30 bp, Artificial Sequence
  Synthetic oligonucleotide
aaggtataattaattgagagacggtgcaca

SEQ ID NO: 418045 - DNA, 30 bp, Artificial Sequence
  Synthetic oligonucleotide
agggtgactcacttgaggctactgtgcaca

SEQ ID NO: 418046 - DNA, 30 bp, Artificial Sequence
  Synthetic oligonucleotide
tcccgatgccctcatcagttaacttgcaca

SEQ ID NO: 418047 - DNA, 30 bp, Artificial Sequence
  Synthetic oligonucleotide
aactcttctagcaaggtacggcgttgcaca

SEQ ID NO: 418048 - DNA, 30 bp, Artificial Sequence
  Synthetic oligonucleotide
gctattaaattgcgaaatggaggttgcaca

SEQ ID NO: 418049 - DNA, 30 bp, Artificial Sequence
  Synthetic oligonucleotide
tagttgacggacgtcctcaggctttgcaca

SEQ ID NO: 418050 - DNA, 25 bp, Artificial Sequence
  Synthetic oligonucleotide
cctatcaaaaacccccctcatcaca

SEQ ID NO: 418051 - DNA, 25 bp, Artificial Sequence
  Synthetic oligonucleotide
cctatcgaaaacccccttcatcaca

SEQ ID NO: 418052 - DNA, 30 bp, Artificial Sequence
  Synthetic oligonucleotide
ggtgagtcaagcaggggcgataagatcaca

SEQ ID NO: 418053 - DNA, 30 bp, Artificial Sequence
  Synthetic oligonucleotide
ataggacagcgtgtatgtcttgtgatcaca

SEQ ID NO: 418054 - DNA, 30 bp, Artificial Sequence
  Synthetic oligonucleotide
tccaagctatttagcggtgaaggtatcaca

SEQ ID NO: 418055 - DNA, 30 bp, Artificial Sequence
  Synthetic oligonucleotide
accggtttggtttatgtctaggttatcaca

SEQ ID NO: 418056 - DNA, 30 bp, Artificial Sequence
  Synthetic oligonucleotide
aaattcaacgcctagcgtcgcgaactcaca

SEQ ID NO: 418057 - DNA, 30 bp, Artificial Sequence
  Synthetic oligonucleotide
ataaggagctgttggtctacagacctcaca

SEQ ID NO: 418058 - DNA, 30 bp, Artificial Sequence
  Synthetic oligonucleotide
atgtagtcggctcgtattagtacgctcaca

SEQ ID NO: 418059 - DNA, 30 bp, Artificial Sequence
  Synthetic oligonucleotide
aatgtcaacgcatatccagttacgctcaca

SEQ ID NO: 418060 - DNA, 30 bp, Artificial Sequence
  Synthetic oligonucleotide
cataaagtttcggatttccccatgctcaca

SEQ ID NO: 418061 - DNA, 30 bp, Artificial Sequence
  Synthetic oligonucleotide
ctggagtacagcttcaatttagtagtcaca

SEQ ID NO: 418062 - DNA, 30 bp, Artificial Sequence
  Synthetic oligonucleotide
tggagattcgcctattctccactcgtcaca

SEQ ID NO: 418063 - DNA, 30 bp, Artificial Sequence
  Synthetic oligonucleotide
ggcctgcgtcgtactgctcatgatgtcaca

SEQ ID NO: 418064 - DNA, 30 bp, Artificial Sequence
  Synthetic oligonucleotide
gtgtttaagcgattcgtatgtgatgtcaca

SEQ ID NO: 418065 - DNA, 30 bp, Artificial Sequence
  Synthetic oligonucleotide
cgtggtatggagagaagcttccctgtcaca

SEQ ID NO: 418066 - DNA, 30 bp, Artificial Sequence
  Synthetic oligonucleotide
gacccggtgtacatcgcatcctctgtcaca

SEQ ID NO: 418067 - DNA, 30 bp, Artificial Sequence
  Synthetic oligonucleotide
attaaacgacctgttccgttacgtgtcaca

SEQ ID NO: 418068 - DNA, 30 bp, Artificial Sequence
  Synthetic oligonucleotide
ggcggcgcgtgatgaatcttccgtgtcaca

SEQ ID NO: 418069 - DNA, 30 bp, Artificial Sequence
  Synthetic oligonucleotide
tagagttttggagattgccaatgattcaca

SEQ ID NO: 418070 - DNA, 30 bp, Artificial Sequence
  Synthetic oligonucleotide
tattatagtctgatttatcaaagcttcaca

SEQ ID NO: 418071 - DNA, 30 bp, Artificial Sequence
  Synthetic oligonucleotide
acgtttcgttctgcgcagtggcagttcaca

SEQ ID NO: 418072 - DNA, 30 bp, Artificial Sequence
  Synthetic oligonucleotide
gtgacaccgatcgcatcatgttagttcaca

SEQ ID NO: 418073 - DNA, 30 bp, Artificial Sequence
  Synthetic oligonucleotide
caatcgaaccgacgaccccgcacgttcaca

SEQ ID NO: 418074 - DNA, 30 bp, Artificial Sequence
  Synthetic oligonucleotide
agctcccgattatcatagtctccgttcaca

SEQ ID NO: 418075 - DNA, 30 bp, Artificial Sequence
  Synthetic oligonucleotide
gtatgtctccagagcactgggactttcaca

SEQ ID NO: 418076 - DNA, 30 bp, Artificial Sequence
  Synthetic oligonucleotide
tatactgcttccctcgtcttgactttcaca

SEQ ID NO: 418077 - DNA, 30 bp, Artificial Sequence
  Synthetic oligonucleotide
cccaagatgtgtgtctctcttgctttcaca

SEQ ID NO: 418078 - DNA, 30 bp, Artificial Sequence
  Synthetic oligonucleotide
gtgggacgcgactagaacgtctgaaagaca

SEQ ID NO: 418079 - DNA, 30 bp, Artificial Sequence
  Synthetic oligonucleotide
gcctatgggtgatggaggagtcagaagaca

SEQ ID NO: 418080 - DNA, 30 bp, Artificial Sequence
  Synthetic oligonucleotide
ctgttgcgcgcttgtttgggcgtgaagaca

SEQ ID NO: 418081 - DNA, 30 bp, Artificial Sequence
  Synthetic oligonucleotide
ggggtagtattgcggcatggcactaagaca

SEQ ID NO: 418082 - DNA, 30 bp, Artificial Sequence
  Synthetic oligonucleotide
ccccgctcaacatgtgacagtacgcagaca

SEQ ID NO: 418083 - DNA, 30 bp, Artificial Sequence
  Synthetic oligonucleotide
attcgtggtgaaggactttaaccgcagaca

SEQ ID NO: 418084 - DNA, 30 bp, Artificial Sequence
  Synthetic oligonucleotide
gtgacttcgcatttcttccattggcagaca

SEQ ID NO: 418085 - DNA, 30 bp, Artificial Sequence
  Synthetic oligonucleotide
atgtactgctttaaacgcagtcatcagaca

SEQ ID NO: 418086 - DNA, 30 bp, Artificial Sequence
  Synthetic oligonucleotide
gtgcattattagggcctcttctaagagaca

SEQ ID NO: 418087 - DNA, 30 bp, Artificial Sequence
  Synthetic oligonucleotide
gcaaacataatataggggctaatggagaca

SEQ ID NO: 418088 - DNA, 30 bp, Artificial Sequence
  Synthetic oligonucleotide
cgggacgcaaccgtcccgcatttggagaca

SEQ ID NO: 418089 - DNA, 30 bp, Artificial Sequence
  Synthetic oligonucleotide
aatacttttttgcgtgtgacagatgagaca

SEQ ID NO: 418090 - DNA, 30 bp, Artificial Sequence
  Synthetic oligonucleotide
gtactagaataggggctctctagtgagaca

SEQ ID NO: 418091 - DNA, 30 bp, Artificial Sequence
  Synthetic oligonucleotide
tccggataaagcttttatattgcctagaca

SEQ ID NO: 418092 - DNA, 30 bp, Artificial Sequence
  Synthetic oligonucleotide
ggtctttactcggagaacttggtctagaca

SEQ ID NO: 418093 - DNA, 30 bp, Artificial Sequence
  Synthetic oligonucleotide
ccattagatttgtagtatagtttgtagaca

SEQ ID NO: 418094 - DNA, 30 bp, Artificial Sequence
  Synthetic oligonucleotide
agacgccttacctttatgacgcaaacgaca

SEQ ID NO: 418095 - DNA, 30 bp, Artificial Sequence
  Synthetic oligonucleotide
tgtgtgcacattggccgtaagatgacgaca

SEQ ID NO: 418096 - DNA, 30 bp, Artificial Sequence
  Synthetic oligonucleotide
ctagtgaaacagcctcacctgtctacgaca

SEQ ID NO: 418097 - DNA, 30 bp, Artificial Sequence
  Synthetic oligonucleotide
accgcggtaataatcgcgtagagtacgaca

SEQ ID NO: 418098 - DNA, 30 bp, Artificial Sequence
  Synthetic oligonucleotide
aactgtatgtgacaggaagtcgcaccgaca

SEQ ID NO: 418099 - DNA, 30 bp, Artificial Sequence
  Synthetic oligonucleotide
caataaagcctcatgtaaacaggcccgaca

SEQ ID NO: 418100 - DNA, 31 bp, Artificial Sequence
  Synthetic oligonucleotide
aggtgccttatccggtgatttgttgccgaca

SEQ ID NO: 418101 - DNA, 30 bp, Artificial Sequence
  Synthetic oligonucleotide
gtctgggactttcagactacctttccgaca

SEQ ID NO: 418102 - DNA, 30 bp, Artificial Sequence
  Synthetic oligonucleotide
ttcttctcggaaatggctggatcagcgaca

SEQ ID NO: 418103 - DNA, 30 bp, Artificial Sequence
  Synthetic oligonucleotide
aagttgacttcaccaaaagctttagcgaca

SEQ ID NO: 418104 - DNA, 30 bp, Artificial Sequence
  Synthetic oligonucleotide
gtgaatactgcattgtatacgcacgcgaca

SEQ ID NO: 418105 - DNA, 30 bp, Artificial Sequence
  Synthetic oligonucleotide
gattatgtggcgggttctcgttaggcgaca

SEQ ID NO: 418106 - DNA, 30 bp, Artificial Sequence
  Synthetic oligonucleotide
tgagtattgccagcgcttgtttcatcgaca

SEQ ID NO: 418107 - DNA, 30 bp, Artificial Sequence
  Synthetic oligonucleotide
atgctacaaatcagacgcaggtagtcgaca

SEQ ID NO: 418108 - DNA, 30 bp, Artificial Sequence
  Synthetic oligonucleotide
gtatgtcccctacagcgctttaggtcgaca

SEQ ID NO: 418109 - DNA, 30 bp, Artificial Sequence
  Synthetic oligonucleotide
cactattggatgatcccttatgggtcgaca

SEQ ID NO: 418110 - DNA, 30 bp, Artificial Sequence
  Synthetic oligonucleotide
tgacagcgtgtggtgcagcgggtgtcgaca

SEQ ID NO: 418111 - DNA, 30 bp, Artificial Sequence
  Synthetic oligonucleotide
tgtatatgctagttgcctggttaaaggaca

SEQ ID NO: 418112 - DNA, 30 bp, Artificial Sequence
  Synthetic oligonucleotide
atcggtgataggccgtacgcagcaaggaca

SEQ ID NO: 418113 - DNA, 30 bp, Artificial Sequence
  Synthetic oligonucleotide
aatctagacccagcactagctgtaaggaca

SEQ ID NO: 418114 - DNA, 30 bp, Artificial Sequence
  Synthetic oligonucleotide
gcacgtcctgcatctatgcatcccaggaca

SEQ ID NO: 418115 - DNA, 30 bp, Artificial Sequence
  Synthetic oligonucleotide
aaccagcgttaatacagtttggtgaggaca

SEQ ID NO: 418116 - DNA, 30 bp, Artificial Sequence
  Synthetic oligonucleotide
gagaagtacattgaagcgcttggtaggaca

SEQ ID NO: 418117 - DNA, 30 bp, Artificial Sequence
  Synthetic oligonucleotide
tcttcgggctttttcgcttcggaacggaca

SEQ ID NO: 418118 - DNA, 30 bp, Artificial Sequence
  Synthetic oligonucleotide
cccgcctgaagtaccacgctctcacggaca

SEQ ID NO: 418119 - DNA, 30 bp, Artificial Sequence
  Synthetic oligonucleotide
ttggtagcactctccgttaacagacggaca

SEQ ID NO: 418120 - DNA, 30 bp, Artificial Sequence
  Synthetic oligonucleotide
gtgagccctgctctttcacgccgacggaca

SEQ ID NO: 418121 - DNA, 30 bp, Artificial Sequence
  Synthetic oligonucleotide
tgcgatggtctccaaagctagtgacggaca

SEQ ID NO: 418122 - DNA, 30 bp, Artificial Sequence
  Synthetic oligonucleotide
tcattaaaatgactattttacctacggaca

SEQ ID NO: 418123 - DNA, 30 bp, Artificial Sequence
  Synthetic oligonucleotide
cgtgggcgttatgcgccaaaatcccggaca

SEQ ID NO: 418124 - DNA, 30 bp, Artificial Sequence
  Synthetic oligonucleotide
ctcaacagatgggcgagtgttagccggaca

SEQ ID NO: 418125 - DNA, 30 bp, Artificial Sequence
  Synthetic oligonucleotide
atcttggattggcccccctagattcggaca

SEQ ID NO: 418126 - DNA, 30 bp, Artificial Sequence
  Synthetic oligonucleotide
ttgcgtctctaacaccggaatattcggaca

SEQ ID NO: 418127 - DNA, 30 bp, Artificial Sequence
  Synthetic oligonucleotide
tcccctcgaacctttcgggggatagggaca

SEQ ID NO: 418128 - DNA, 30 bp, Artificial Sequence
  Synthetic oligonucleotide
gctgcggtcccggttttccgcggcgggaca

SEQ ID NO: 418129 - DNA, 30 bp, Artificial Sequence
  Synthetic oligonucleotide
cccttcatagcaatattgaatctggggaca

SEQ ID NO: 418130 - DNA, 30 bp, Artificial Sequence
  Synthetic oligonucleotide
tagatccggtttttgtaaaaatctgggaca

SEQ ID NO: 418131 - DNA, 30 bp, Artificial Sequence
  Synthetic oligonucleotide
atcgatggtctacagccggagattgggaca

SEQ ID NO: 418132 - DNA, 30 bp, Artificial Sequence
  Synthetic oligonucleotide
atctatatagtttccgtcaccctctggaca

SEQ ID NO: 418133 - DNA, 30 bp, Artificial Sequence
  Synthetic oligonucleotide
tgaagactcgttgttttaatgaagtggaca

SEQ ID NO: 418134 - DNA, 30 bp, Artificial Sequence
  Synthetic oligonucleotide
aagtgagcatgtgtatttcaacattggaca

SEQ ID NO: 418135 - DNA, 30 bp, Artificial Sequence
  Synthetic oligonucleotide
agtgtgacacattgtcggttcatttggaca

SEQ ID NO: 418136 - DNA, 30 bp, Artificial Sequence
  Synthetic oligonucleotide
tctcggggtcactattttgagatttggaca

SEQ ID NO: 418137 - DNA, 30 bp, Artificial Sequence
  Synthetic oligonucleotide
tccgaagggttggatccctggttttggaca

SEQ ID NO: 418138 - DNA, 30 bp, Artificial Sequence
  Synthetic oligonucleotide
gtcctactaaatccgatgcaataaatgaca

SEQ ID NO: 418139 - DNA, 30 bp, Artificial Sequence
  Synthetic oligonucleotide
taacttaagccctgggtcttggtaatgaca

SEQ ID NO: 418140 - DNA, 30 bp, Artificial Sequence
  Synthetic oligonucleotide
cacccggccttcgcttggaaatgcatgaca

SEQ ID NO: 418141 - DNA, 30 bp, Artificial Sequence
  Synthetic oligonucleotide
aggaatagaatgattggtagcttcatgaca

SEQ ID NO: 418142 - DNA, 30 bp, Artificial Sequence
  Synthetic oligonucleotide
gtacggctgctcatagcattttcgatgaca

SEQ ID NO: 418143 - DNA, 30 bp, Artificial Sequence
  Synthetic oligonucleotide
caacatcgcggtcaccgcacgcggatgaca

SEQ ID NO: 418144 - DNA, 30 bp, Artificial Sequence
  Synthetic oligonucleotide
attgtcaggccccgtagaacgctgatgaca

SEQ ID NO: 418145 - DNA, 30 bp, Artificial Sequence
  Synthetic oligonucleotide
gctgctgcatatgcgggagcccatatgaca

SEQ ID NO: 418146 - DNA, 31 bp, Artificial Sequence
  Synthetic oligonucleotide
gtagcatgacgagaaagaactgtatatgaca

SEQ ID NO: 418147 - DNA, 30 bp, Artificial Sequence
  Synthetic oligonucleotide
ccgacgaattagatgatgtacggtatgaca

SEQ ID NO: 418148 - DNA, 30 bp, Artificial Sequence
  Synthetic oligonucleotide
cgtttggagttgtaaagtgcataactgaca

SEQ ID NO: 418149 - DNA, 30 bp, Artificial Sequence
  Synthetic oligonucleotide
caagcacgttcagtgtcccactgactgaca

SEQ ID NO: 418150 - DNA, 30 bp, Artificial Sequence
  Synthetic oligonucleotide
ataagatgtagcgaggtctccatactgaca

SEQ ID NO: 418151 - DNA, 30 bp, Artificial Sequence
  Synthetic oligonucleotide
ccaggggccttgcaatcgaaacacctgaca

SEQ ID NO: 418152 - DNA, 30 bp, Artificial Sequence
  Synthetic oligonucleotide
gatcgtgagcacgtcatgatcggcctgaca

SEQ ID NO: 418153 - DNA, 30 bp, Artificial Sequence
  Synthetic oligonucleotide
tgtagggtccgatttccggactgcctgaca

SEQ ID NO: 418154 - DNA, 30 bp, Artificial Sequence
  Synthetic oligonucleotide
agtacatttctaaagacccgggggctgaca

SEQ ID NO: 418155 - DNA, 30 bp, Artificial Sequence
  Synthetic oligonucleotide
ttaatagcatcgtttatgttaagtctgaca

SEQ ID NO: 418156 - DNA, 30 bp, Artificial Sequence
  Synthetic oligonucleotide
catttgtaatcgagcatcgggtgtctgaca

SEQ ID NO: 418157 - DNA, 30 bp, Artificial Sequence
  Synthetic oligonucleotide
cagtttcgcactgatgcaggccaagtgaca

SEQ ID NO: 418158 - DNA, 30 bp, Artificial Sequence
  Synthetic oligonucleotide
agcatggcacacttgatccttccagtgaca

SEQ ID NO: 418159 - DNA, 30 bp, Artificial Sequence
  Synthetic oligonucleotide
gaatctaacggggactcaatgtgcgtgaca

SEQ ID NO: 418160 - DNA, 30 bp, Artificial Sequence
  Synthetic oligonucleotide
tgtatacagtccgccaggtcataggtgaca

SEQ ID NO: 418161 - DNA, 30 bp, Artificial Sequence
  Synthetic oligonucleotide
aatttgagggaattggtcttggtggtgaca

SEQ ID NO: 418162 - DNA, 30 bp, Artificial Sequence
  Synthetic oligonucleotide
agttacggtggtgtcatacaaggattgaca

SEQ ID NO: 418163 - DNA, 30 bp, Artificial Sequence
  Synthetic oligonucleotide
acactgaatcgaaaaacccacgtattgaca

SEQ ID NO: 418164 - DNA, 30 bp, Artificial Sequence
  Synthetic oligonucleotide
gagctccagccaattaaagttacgttgaca

SEQ ID NO: 418165 - DNA, 30 bp, Artificial Sequence
  Synthetic oligonucleotide
tctaattcgctttaaagaattgtgttgaca

SEQ ID NO: 418166 - DNA, 30 bp, Artificial Sequence
  Synthetic oligonucleotide
ttctcaagctatcagtctgttgtgttgaca

SEQ ID NO: 418167 - DNA, 30 bp, Artificial Sequence
  Synthetic oligonucleotide
agtttggcagaagccctcatatgtttgaca

SEQ ID NO: 418168 - DNA, 30 bp, Artificial Sequence
  Synthetic oligonucleotide
attctagactctaggaggtccgttttgaca

SEQ ID NO: 418169 - DNA, 30 bp, Artificial Sequence
  Synthetic oligonucleotide
atctgcacctgatatgcgcaaacaaataca

SEQ ID NO: 418170 - DNA, 30 bp, Artificial Sequence
  Synthetic oligonucleotide
ggaaagctttcctaattctgctcaaataca

SEQ ID NO: 418171 - DNA, 30 bp, Artificial Sequence
  Synthetic oligonucleotide
gctagggctctggagaattcgtcaaataca

SEQ ID NO: 418172 - DNA, 30 bp, Artificial Sequence
  Synthetic oligonucleotide
taatagacgcttggccaggtggacaataca

SEQ ID NO: 418173 - DNA, 30 bp, Artificial Sequence
  Synthetic oligonucleotide
tgtgcaacgttaataattcttgcgaataca

SEQ ID NO: 418174 - DNA, 30 bp, Artificial Sequence
  Synthetic oligonucleotide
gacgccttacacaggcgccccaataataca

SEQ ID NO: 418175 - DNA, 30 bp, Artificial Sequence
  Synthetic oligonucleotide
aaaaagcctacgggcttaatcggtaataca

SEQ ID NO: 418176 - DNA, 30 bp, Artificial Sequence
  Synthetic oligonucleotide
catcatgcctttgcgtcggtgccacataca

SEQ ID NO: 418177 - DNA, 30 bp, Artificial Sequence
  Synthetic oligonucleotide
gcatgtaacaaaaattttctagcacataca

SEQ ID NO: 418178 - DNA, 30 bp, Artificial Sequence
  Synthetic oligonucleotide
gatcgtttgttaacaaagggttgacataca

SEQ ID NO: 418179 - DNA, 30 bp, Artificial Sequence
  Synthetic oligonucleotide
attagctagtatccggagcacgaccataca

SEQ ID NO: 418180 - DNA, 30 bp, Artificial Sequence
  Synthetic oligonucleotide
gacatataccgtccaatcagtacccataca

SEQ ID NO: 418181 - DNA, 30 bp, Artificial Sequence
  Synthetic oligonucleotide
tacgtgacagatccgggggtttcccataca

SEQ ID NO: 418182 - DNA, 30 bp, Artificial Sequence
  Synthetic oligonucleotide
acacacggagtatatgcggggatgcataca

SEQ ID NO: 418183 - DNA, 30 bp, Artificial Sequence
  Synthetic oligonucleotide
ctgtctggttcaactttacgcgctcataca

SEQ ID NO: 418184 - DNA, 30 bp, Artificial Sequence
  Synthetic oligonucleotide
aagtctaaggagttaaattaatctcataca

SEQ ID NO: 418185 - DNA, 30 bp, Artificial Sequence
  Synthetic oligonucleotide
aggttggggctacattgctgtttagataca

SEQ ID NO: 418186 - DNA, 30 bp, Artificial Sequence
  Synthetic oligonucleotide
ggatttccactacccggcgttttcgataca

SEQ ID NO: 418187 - DNA, 30 bp, Artificial Sequence
  Synthetic oligonucleotide
gtgttcgatttgggcgtcatgtgggataca

SEQ ID NO: 418188 - DNA, 30 bp, Artificial Sequence
  Synthetic oligonucleotide
tcatgttgacgtcagaagcttatggataca

SEQ ID NO: 418189 - DNA, 30 bp, Artificial Sequence
  Synthetic oligonucleotide
gtctcagcgggaagctcgacccatgataca

SEQ ID NO: 418190 - DNA, 30 bp, Artificial Sequence
  Synthetic oligonucleotide
aagattacaattctaacactttctgataca

SEQ ID NO: 418191 - DNA, 30 bp, Artificial Sequence
  Synthetic oligonucleotide
tgttttcgtaactggagctcggaatataca

SEQ ID NO: 418192 - DNA, 31 bp, Artificial Sequence
  Synthetic oligonucleotide
atctcactccagcgatatgtgcaagtataca

SEQ ID NO: 418193 - DNA, 30 bp, Artificial Sequence
  Synthetic oligonucleotide
ctactcagcctttttgcttgaacgtataca

SEQ ID NO: 418194 - DNA, 30 bp, Artificial Sequence
  Synthetic oligonucleotide
attcccacagtcgtaggggtagggtataca

SEQ ID NO: 418195 - DNA, 30 bp, Artificial Sequence
  Synthetic oligonucleotide
cgggtatagggctcagtcgaagtgtataca

SEQ ID NO: 418196 - DNA, 30 bp, Artificial Sequence
  Synthetic oligonucleotide
gccaaaatgatatttgctaagagttataca

SEQ ID NO: 418197 - DNA, 30 bp, Artificial Sequence
  Synthetic oligonucleotide
gttcagttatttctctgacaccaaactaca

SEQ ID NO: 418198 - DNA, 30 bp, Artificial Sequence
  Synthetic oligonucleotide
gtatgcaaccccgcaaacagctgaactaca

SEQ ID NO: 418199 - DNA, 30 bp, Artificial Sequence
  Synthetic oligonucleotide
gactactatataatcctgtgacacactaca

SEQ ID NO: 418200 - DNA, 30 bp, Artificial Sequence
  Synthetic oligonucleotide
aatacccacagggtgtgcattctcactaca

SEQ ID NO: 418201 - DNA, 30 bp, Artificial Sequence
  Synthetic oligonucleotide
ctctacagcatcactatgcttctcactaca

SEQ ID NO: 418202 - DNA, 30 bp, Artificial Sequence
  Synthetic oligonucleotide
gttagcgtatgacagcaggacttcactaca

SEQ ID NO: 418203 - DNA, 30 bp, Artificial Sequence
  Synthetic oligonucleotide
taactcctatgcccgccgtgacagactaca

SEQ ID NO: 418204 - DNA, 30 bp, Artificial Sequence
  Synthetic oligonucleotide
gaacaggatttggatgtccgagagactaca

SEQ ID NO: 418205 - DNA, 30 bp, Artificial Sequence
  Synthetic oligonucleotide
gacgtgctcagcggtcaaatttatactaca

SEQ ID NO: 418206 - DNA, 30 bp, Artificial Sequence
  Synthetic oligonucleotide
agagttaagcacagaaacgagaaacctaca

SEQ ID NO: 418207 - DNA, 30 bp, Artificial Sequence
  Synthetic oligonucleotide
tctgtacacagaatgtggaatcgacctaca

SEQ ID NO: 418208 - DNA, 30 bp, Artificial Sequence
  Synthetic oligonucleotide
agcgacgccggatacctacgctgacctaca

SEQ ID NO: 418209 - DNA, 30 bp, Artificial Sequence
  Synthetic oligonucleotide
tctgaatctcctcatcgtttcctacctaca

SEQ ID NO: 418210 - DNA, 30 bp, Artificial Sequence
  Synthetic oligonucleotide
ggtcgctgctcgttacattgtgtacctaca

SEQ ID NO: 418211 - DNA, 30 bp, Artificial Sequence
  Synthetic oligonucleotide
gaaatcgatccttcatccgagacccctaca

SEQ ID NO: 418212 - DNA, 30 bp, Artificial Sequence
  Synthetic oligonucleotide
taaactcttcgcaaaggttctagccctaca

SEQ ID NO: 418213 - DNA, 30 bp, Artificial Sequence
  Synthetic oligonucleotide
tggatgaaattcactgactaaggccctaca

SEQ ID NO: 418214 - DNA, 30 bp, Artificial Sequence
  Synthetic oligonucleotide
tttgggctcttctagatctacgggcctaca

SEQ ID NO: 418215 - DNA, 30 bp, Artificial Sequence
  Synthetic oligonucleotide
gaccttgtacgaatctgtgtacatcctaca

SEQ ID NO: 418216 - DNA, 30 bp, Artificial Sequence
  Synthetic oligonucleotide
cgagcatgtcgtacataagtacctcctaca

SEQ ID NO: 418217 - DNA, 30 bp, Artificial Sequence
  Synthetic oligonucleotide
caggaaattaacacatcgaacggagctaca

SEQ ID NO: 418218 - DNA, 30 bp, Artificial Sequence
  Synthetic oligonucleotide
tcaacccgaggagttcatcgggacgctaca

SEQ ID NO: 418219 - DNA, 30 bp, Artificial Sequence
  Synthetic oligonucleotide
ataagaaatgcgttagtattcatcgctaca

SEQ ID NO: 418220 - DNA, 30 bp, Artificial Sequence
  Synthetic oligonucleotide
gattggcggatcacggccgccggggctaca

SEQ ID NO: 418221 - DNA, 30 bp, Artificial Sequence
  Synthetic oligonucleotide
ggcacgcctttcgttatcctcgatgctaca

SEQ ID NO: 418222 - DNA, 30 bp, Artificial Sequence
  Synthetic oligonucleotide
cgacgaacaggttatgtctgtactgctaca

SEQ ID NO: 418223 - DNA, 30 bp, Artificial Sequence
  Synthetic oligonucleotide
aaaaaagcagcatgacaaggatttgctaca

SEQ ID NO: 418224 - DNA, 30 bp, Artificial Sequence
  Synthetic oligonucleotide
gtactaaatgtaggccggtttacatctaca

SEQ ID NO: 418225 - DNA, 30 bp, Artificial Sequence
  Synthetic oligonucleotide
aactgagtaatgccgggactcaactctaca

SEQ ID NO: 418226 - DNA, 30 bp, Artificial Sequence
  Synthetic oligonucleotide
ggtgtctttgcataccaggtcggctctaca

SEQ ID NO: 418227 - DNA, 30 bp, Artificial Sequence
  Synthetic oligonucleotide
ttccattcttttccggcaagatgctctaca

SEQ ID NO: 418228 - DNA, 30 bp, Artificial Sequence
  Synthetic oligonucleotide
ttggttaacactgatggcaatttctctaca

SEQ ID NO: 418229 - DNA, 30 bp, Artificial Sequence
  Synthetic oligonucleotide
aggcaatacttgagtgtgcagcagtctaca

SEQ ID NO: 418230 - DNA, 30 bp, Artificial Sequence
  Synthetic oligonucleotide
acatgtaggtcgcaacctaagaattctaca

SEQ ID NO: 418231 - DNA, 30 bp, Artificial Sequence
  Synthetic oligonucleotide
ttagttgctcccgccatgacactttctaca

SEQ ID NO: 418232 - DNA, 30 bp, Artificial Sequence
  Synthetic oligonucleotide
ctgtgtttgtgttataccggtttttctaca

SEQ ID NO: 418233 - DNA, 30 bp, Artificial Sequence
  Synthetic oligonucleotide
aaatagacgaagacagtaaaagacagtaca

SEQ ID NO: 418234 - DNA, 30 bp, Artificial Sequence
  Synthetic oligonucleotide
agaaaaattaaggggtgcagcgcgagtaca

SEQ ID NO: 418235 - DNA, 30 bp, Artificial Sequence
  Synthetic oligonucleotide
attgcgctacggtcaattttgtcacgtaca

SEQ ID NO: 418236 - DNA, 30 bp, Artificial Sequence
  Synthetic oligonucleotide
cttttctaattgacgatgggacgacgtaca

SEQ ID NO: 418237 - DNA, 30 bp, Artificial Sequence
  Synthetic oligonucleotide
gttagacggctatgtccctccgtacgtaca

SEQ ID NO: 418238 - DNA, 30 bp, Artificial Sequence
  Synthetic oligonucleotide
gaatgtgattcgtttgcgcgtgtccgtaca

SEQ ID NO: 418239 - DNA, 30 bp, Artificial Sequence
  Synthetic oligonucleotide
cagaaatgtcaatactgaggggttcgtaca

SEQ ID NO: 418240 - DNA, 30 bp, Artificial Sequence
  Synthetic oligonucleotide
ttcagagccaactcggggatgacaggtaca

SEQ ID NO: 418241 - DNA, 30 bp, Artificial Sequence
  Synthetic oligonucleotide
tacctataggtgcatagcagaccaggtaca

SEQ ID NO: 418242 - DNA, 30 bp, Artificial Sequence
  Synthetic oligonucleotide
gtttgattaacgaaaatggttcgaggtaca

SEQ ID NO: 418243 - DNA, 30 bp, Artificial Sequence
  Synthetic oligonucleotide
taggcgacatatgtctatcattacggtaca

SEQ ID NO: 418244 - DNA, 30 bp, Artificial Sequence
  Synthetic oligonucleotide
ggtcttcctgcgggcaaacgccccggtaca

SEQ ID NO: 418245 - DNA, 30 bp, Artificial Sequence
  Synthetic oligonucleotide
ggtctcggtgatgaaccagctcgcggtaca

SEQ ID NO: 418246 - DNA, 30 bp, Artificial Sequence
  Synthetic oligonucleotide
gtttacaggagtttatgctaaacgggtaca

SEQ ID NO: 418247 - DNA, 30 bp, Artificial Sequence
  Synthetic oligonucleotide
tctggcattgttgaataagcctatggtaca

SEQ ID NO: 418248 - DNA, 30 bp, Artificial Sequence
  Synthetic oligonucleotide
gtgtcgattatcgaatgcttgtatggtaca

SEQ ID NO: 418249 - DNA, 30 bp, Artificial Sequence
  Synthetic oligonucleotide
aattaccgtcagaacagccggactggtaca

SEQ ID NO: 418250 - DNA, 30 bp, Artificial Sequence
  Synthetic oligonucleotide
cagtacccacacacaattttccgtggtaca

SEQ ID NO: 418251 - DNA, 30 bp, Artificial Sequence
  Synthetic oligonucleotide
ctgagcaattaaatatgccgcacatgtaca

SEQ ID NO: 418252 - DNA, 30 bp, Artificial Sequence
  Synthetic oligonucleotide
agttctattggaatatcgccgagatgtaca

SEQ ID NO: 418253 - DNA, 30 bp, Artificial Sequence
  Synthetic oligonucleotide
tttggtagtcgtgatcgatgtatctgtaca

SEQ ID NO: 418254 - DNA, 30 bp, Artificial Sequence
  Synthetic oligonucleotide
attccatacggctgaccggtggtgtgtaca

SEQ ID NO: 418255 - DNA, 30 bp, Artificial Sequence
  Synthetic oligonucleotide
gcacttagtgccaaacttgtgttgtgtaca

SEQ ID NO: 418256 - DNA, 30 bp, Artificial Sequence
  Synthetic oligonucleotide
aaatattgtttctgtcttttcgcttgtaca

SEQ ID NO: 418257 - DNA, 30 bp, Artificial Sequence
  Synthetic oligonucleotide
tggtttactatcaatgtccttgcttgtaca

SEQ ID NO: 418258 - DNA, 30 bp, Artificial Sequence
  Synthetic oligonucleotide
gggcccatgttagacaaaaaagtttgtaca

SEQ ID NO: 418259 - DNA, 30 bp, Artificial Sequence
  Synthetic oligonucleotide
atactccagtaagggcccgtggtttgtaca

SEQ ID NO: 418260 - DNA, 30 bp, Artificial Sequence
  Synthetic oligonucleotide
cgcagccgtgtgctcttgtaataaattaca

SEQ ID NO: 418261 - DNA, 30 bp, Artificial Sequence
  Synthetic oligonucleotide
tacctctatacacgaagggcgccaattaca

SEQ ID NO: 418262 - DNA, 30 bp, Artificial Sequence
  Synthetic oligonucleotide
ttattattatcggtcgggatatcaattaca

SEQ ID NO: 418263 - DNA, 30 bp, Artificial Sequence
  Synthetic oligonucleotide
cgcggcaagttatcgttatccataattaca

SEQ ID NO: 418264 - DNA, 30 bp, Artificial Sequence
  Synthetic oligonucleotide
gccttccactgtctggcgggcataattaca

SEQ ID NO: 418265 - DNA, 30 bp, Artificial Sequence
  Synthetic oligonucleotide
agaatttgtcgttaacgtcgacccattaca

SEQ ID NO: 418266 - DNA, 30 bp, Artificial Sequence
  Synthetic oligonucleotide
gagcatgagtgggcgcgtttttgcattaca

SEQ ID NO: 418267 - DNA, 30 bp, Artificial Sequence
  Synthetic oligonucleotide
tacttaggagctggcctgggactcattaca

SEQ ID NO: 418268 - DNA, 30 bp, Artificial Sequence
  Synthetic oligonucleotide
gcttacatagtcgagcaaaacgtcattaca

SEQ ID NO: 418269 - DNA, 30 bp, Artificial Sequence
  Synthetic oligonucleotide
tctcggtataggctgactaatccgattaca

SEQ ID NO: 418270 - DNA, 30 bp, Artificial Sequence
  Synthetic oligonucleotide
ggacagttttctgcctggcggaaacttaca

SEQ ID NO: 418271 - DNA, 30 bp, Artificial Sequence
  Synthetic oligonucleotide
tcaatacgtgcagatcgcgccatacttaca

SEQ ID NO: 418272 - DNA, 30 bp, Artificial Sequence
  Synthetic oligonucleotide
cccggtgccaattaggagatggaccttaca

SEQ ID NO: 418273 - DNA, 30 bp, Artificial Sequence
  Synthetic oligonucleotide
gactcacatgagggaagtgttccccttaca

SEQ ID NO: 418274 - DNA, 30 bp, Artificial Sequence
  Synthetic oligonucleotide
acttaggcctttgtgaaagatggccttaca

SEQ ID NO: 418275 - DNA, 30 bp, Artificial Sequence
  Synthetic oligonucleotide
cgccggaaattagatggtgaccagcttaca

SEQ ID NO: 418276 - DNA, 30 bp, Artificial Sequence
  Synthetic oligonucleotide
ttgggtttatagtttgagctttcgcttaca

SEQ ID NO: 418277 - DNA, 30 bp, Artificial Sequence
  Synthetic oligonucleotide
aaaaactggcttattactctgaatcttaca

SEQ ID NO: 418278 - DNA, 30 bp, Artificial Sequence
  Synthetic oligonucleotide
taatgtgcatagattctgggcagtcttaca

SEQ ID NO: 418279 - DNA, 30 bp, Artificial Sequence
  Synthetic oligonucleotide
gtacatcttctactttagaagaaagttaca

SEQ ID NO: 418280 - DNA, 30 bp, Artificial Sequence
  Synthetic oligonucleotide
taatatacttgccctacaaaacaagttaca

SEQ ID NO: 418281 - DNA, 30 bp, Artificial Sequence
  Synthetic oligonucleotide
taagaggacagcactgtattttcagttaca

SEQ ID NO: 418282 - DNA, 30 bp, Artificial Sequence
  Synthetic oligonucleotide
aaagcagtgcgagatgttaaaaacgttaca

SEQ ID NO: 418283 - DNA, 30 bp, Artificial Sequence
  Synthetic oligonucleotide
tggtaacggctatgatagtataaggttaca

SEQ ID NO: 418284 - DNA, 30 bp, Artificial Sequence
  Synthetic oligonucleotide
gcatgtgttcgtctgtaacgtcaggttaca

SEQ ID NO: 418285 - DNA, 30 bp, Artificial Sequence
  Synthetic oligonucleotide
tagagagaaagtttgttacgaggggttaca

SEQ ID NO: 418286 - DNA, 30 bp, Artificial Sequence
  Synthetic oligonucleotide
ctacgggcatttgcactctgcagtgttaca

SEQ ID NO: 418287 - DNA, 30 bp, Artificial Sequence
  Synthetic oligonucleotide
tgttattctcacttttaggctgcctttaca

SEQ ID NO: 418288 - DNA, 30 bp, Artificial Sequence
  Synthetic oligonucleotide
gagctatgcacggaagccaaatgctttaca

SEQ ID NO: 418289 - DNA, 30 bp, Artificial Sequence
  Synthetic oligonucleotide
cagttgatcgtattctaaagattttttaca

SEQ ID NO: 418290 - DNA, 30 bp, Artificial Sequence
  Synthetic oligonucleotide
cgggggataaccagagtcgagttttttaca

SEQ ID NO: 418291 - DNA, 30 bp, Artificial Sequence
  Synthetic oligonucleotide
agtagctgatagcaggagatgcaaaaacca

SEQ ID NO: 418292 - DNA, 30 bp, Artificial Sequence
  Synthetic oligonucleotide
gtagccatctaccggtatgtgcacaaacca

SEQ ID NO: 418293 - DNA, 30 bp, Artificial Sequence
  Synthetic oligonucleotide
cacagagtttgcttcatttccaccaaacca

SEQ ID NO: 418294 - DNA, 30 bp, Artificial Sequence
  Synthetic oligonucleotide
gagagaccttggatgtacattatcaaacca

SEQ ID NO: 418295 - DNA, 30 bp, Artificial Sequence
  Synthetic oligonucleotide
tgcatctgaagtcttttcaggacacaacca

SEQ ID NO: 418296 - DNA, 30 bp, Artificial Sequence
  Synthetic oligonucleotide
aggttgatgacaagcacgttgatacaacca

SEQ ID NO: 418297 - DNA, 30 bp, Artificial Sequence
  Synthetic oligonucleotide
atgagcatcgactttaacggtgtacaacca

SEQ ID NO: 418298 - DNA, 30 bp, Artificial Sequence
  Synthetic oligonucleotide
ggttgtcacgttggggcggagtgccaacca

SEQ ID NO: 418299 - DNA, 30 bp, Artificial Sequence
  Synthetic oligonucleotide
atttgatttaattcagagcgttgccaacca

SEQ ID NO: 418300 - DNA, 30 bp, Artificial Sequence
  Synthetic oligonucleotide
tccgagggcctctaacgggacccgcaacca

SEQ ID NO: 418301 - DNA, 30 bp, Artificial Sequence
  Synthetic oligonucleotide
tacaccctgggcagccgggtgtggcaacca

SEQ ID NO: 418302 - DNA, 30 bp, Artificial Sequence
  Synthetic oligonucleotide
acgctgaagggttcatatgtgatgcaacca

SEQ ID NO: 418303 - DNA, 30 bp, Artificial Sequence
  Synthetic oligonucleotide
cgaagcgtctgtactgatttcagtcaacca

SEQ ID NO: 418304 - DNA, 30 bp, Artificial Sequence
  Synthetic oligonucleotide
ataaggatggagcagattcactgtcaacca

SEQ ID NO: 418305 - DNA, 30 bp, Artificial Sequence
  Synthetic oligonucleotide
cattttatcaatgtgccgtgagaagaacca

SEQ ID NO: 418306 - DNA, 30 bp, Artificial Sequence
  Synthetic oligonucleotide
ttcatgttcacatccaattcattagaacca

SEQ ID NO: 418307 - DNA, 30 bp, Artificial Sequence
  Synthetic oligonucleotide
ggccctttccgaaatagcccgttagaacca

SEQ ID NO: 418308 - DNA, 30 bp, Artificial Sequence
  Synthetic oligonucleotide
gtgtgtttctcaacaaaacacggcgaacca

SEQ ID NO: 418309 - DNA, 30 bp, Artificial Sequence
  Synthetic oligonucleotide
taagttctttcttagttgatctgcgaacca

SEQ ID NO: 418310 - DNA, 30 bp, Artificial Sequence
  Synthetic oligonucleotide
ccctccgtcaagaggatttaggtcgaacca

SEQ ID NO: 418311 - DNA, 30 bp, Artificial Sequence
  Synthetic oligonucleotide
gtatttagaaccctctccattttggaacca

SEQ ID NO: 418312 - DNA, 30 bp, Artificial Sequence
  Synthetic oligonucleotide
gtgaagggataggtcatagtgtcataacca

SEQ ID NO: 418313 - DNA, 30 bp, Artificial Sequence
  Synthetic oligonucleotide
tagatcctgcgattcattccaggataacca

SEQ ID NO: 418314 - DNA, 30 bp, Artificial Sequence
  Synthetic oligonucleotide
taatggaaaaaatctgggctattataacca

SEQ ID NO: 418315 - DNA, 30 bp, Artificial Sequence
  Synthetic oligonucleotide
catcagtgactgcccctgcggaagtaacca

SEQ ID NO: 418316 - DNA, 30 bp, Artificial Sequence
  Synthetic oligonucleotide
gtactgaaaaacggagcacagaggtaacca

SEQ ID NO: 418317 - DNA, 30 bp, Artificial Sequence
  Synthetic oligonucleotide
gccggcgcatcctagtgctagaggtaacca

SEQ ID NO: 418318 - DNA, 30 bp, Artificial Sequence
  Synthetic oligonucleotide
tacttcctgtattcacggtctctaacacca

SEQ ID NO: 418319 - DNA, 30 bp, Artificial Sequence
  Synthetic oligonucleotide
gccgacgggggtgaagtgtcattcacacca

SEQ ID NO: 418320 - DNA, 30 bp, Artificial Sequence
  Synthetic oligonucleotide
gaaagttgcaagttagtagtttagacacca

SEQ ID NO: 418321 - DNA, 30 bp, Artificial Sequence
  Synthetic oligonucleotide
gttagtgtggcaattactttttaaccacca

SEQ ID NO: 418322 - DNA, 30 bp, Artificial Sequence
  Synthetic oligonucleotide
tggtcgcctcgaagggatgtgcagccacca

SEQ ID NO: 418323 - DNA, 30 bp, Artificial Sequence
  Synthetic oligonucleotide
cggattaaacccagttgattatctccacca

SEQ ID NO: 418324 - DNA, 30 bp, Artificial Sequence
  Synthetic oligonucleotide
gtgcacgtctacgtactgcagtgtccacca

SEQ ID NO: 418325 - DNA, 30 bp, Artificial Sequence
  Synthetic oligonucleotide
gatagtacctttaccagtccggcagcacca

SEQ ID NO: 418326 - DNA, 30 bp, Artificial Sequence
  Synthetic oligonucleotide
atacttattccgaccaacatcgccgcacca

SEQ ID NO: 418327 - DNA, 30 bp, Artificial Sequence
  Synthetic oligonucleotide
ttcggacaattgcggtagccctccgcacca

SEQ ID NO: 418328 - DNA, 30 bp, Artificial Sequence
  Synthetic oligonucleotide
gatgtaactgtgtcttcgaaggtcgcacca

SEQ ID NO: 418329 - DNA, 30 bp, Artificial Sequence
  Synthetic oligonucleotide
tcttgggtcatgtaggaatcgtcggcacca

SEQ ID NO: 418330 - DNA, 30 bp, Artificial Sequence
  Synthetic oligonucleotide
aatagcgttgtgatcgctcggactgcacca

SEQ ID NO: 418331 - DNA, 30 bp, Artificial Sequence
  Synthetic oligonucleotide
gtgggggggaatcttcaattccccagacca

SEQ ID NO: 418332 - DNA, 30 bp, Artificial Sequence
  Synthetic oligonucleotide
aactcaaggtgcctcggcatgcgcagacca

SEQ ID NO: 418333 - DNA, 30 bp, Artificial Sequence
  Synthetic oligonucleotide
ggttatatgcaccgtcctcatgatagacca

SEQ ID NO: 418334 - DNA, 30 bp, Artificial Sequence
  Synthetic oligonucleotide
gcaaaagacttaagccaccggcttagacca

SEQ ID NO: 418335 - DNA, 30 bp, Artificial Sequence
  Synthetic oligonucleotide
tgtttgcagggtagcaagggtaaacgacca

SEQ ID NO: 418336 - DNA, 30 bp, Artificial Sequence
  Synthetic oligonucleotide
tcttttactgcgataggacgactccgacca

SEQ ID NO: 418337 - DNA, 30 bp, Artificial Sequence
  Synthetic oligonucleotide
ccctcttgagctatggtttcagagcgacca

SEQ ID NO: 418338 - DNA, 30 bp, Artificial Sequence
  Synthetic oligonucleotide
ttaccgatttcaagtccttggcatcgacca

SEQ ID NO: 418339 - DNA, 30 bp, Artificial Sequence
  Synthetic oligonucleotide
gtcgatgccggagcctgtttagcaggacca

SEQ ID NO: 418340 - DNA, 30 bp, Artificial Sequence
  Synthetic oligonucleotide
gtttttacttaaggcccggtctcaggacca

SEQ ID NO: 418341 - DNA, 30 bp, Artificial Sequence
  Synthetic oligonucleotide
tttcccttccctgttgaatcgcacggacca

SEQ ID NO: 418342 - DNA, 30 bp, Artificial Sequence
  Synthetic oligonucleotide
tctgaggccgtaattttgagcgccggacca

SEQ ID NO: 418343 - DNA, 30 bp, Artificial Sequence
  Synthetic oligonucleotide
tcccggaagtgtgcacggatcgcgggacca

SEQ ID NO: 418344 - DNA, 30 bp, Artificial Sequence
  Synthetic oligonucleotide
atgagttctctggttcggcaagatggacca

SEQ ID NO: 418345 - DNA, 30 bp, Artificial Sequence
  Synthetic oligonucleotide
tgctggaacttattagtagaagctggacca

SEQ ID NO: 418346 - DNA, 30 bp, Artificial Sequence
  Synthetic oligonucleotide
atggcaccacaggatcacatcattggacca

SEQ ID NO: 418347 - DNA, 30 bp, Artificial Sequence
  Synthetic oligonucleotide
gcatgggcccgattgaagatcgtatgacca

SEQ ID NO: 418348 - DNA, 30 bp, Artificial Sequence
  Synthetic oligonucleotide
gaccactggtgaaccgcacagggctgacca

SEQ ID NO: 418349 - DNA, 30 bp, Artificial Sequence
  Synthetic oligonucleotide
ttaaaaatactcagaattcggtagtgacca

SEQ ID NO: 418350 - DNA, 30 bp, Artificial Sequence
  Synthetic oligonucleotide
cgtggtcagtatatttgtggtaattgacca

SEQ ID NO: 418351 - DNA, 30 bp, Artificial Sequence
  Synthetic oligonucleotide
gatcagacattcgcgctgatccattgacca

SEQ ID NO: 418352 - DNA, 30 bp, Artificial Sequence
  Synthetic oligonucleotide
cgttgatccatactttcgcattgttgacca

SEQ ID NO: 418353 - DNA, 30 bp, Artificial Sequence
  Synthetic oligonucleotide
gtgacgcccattatcgagtacctaatacca

SEQ ID NO: 418354 - DNA, 30 bp, Artificial Sequence
  Synthetic oligonucleotide
tttcagaactgtcagatgtctttcatacca

SEQ ID NO: 418355 - DNA, 30 bp, Artificial Sequence
  Synthetic oligonucleotide
agggttaattcggcgggaacgtagatacca

SEQ ID NO: 418356 - DNA, 30 bp, Artificial Sequence
  Synthetic oligonucleotide
tcccagtatgtgaagacgtcagtgctacca

SEQ ID NO: 418357 - DNA, 30 bp, Artificial Sequence
  Synthetic oligonucleotide
caatagcttgccagacacgcgggtctacca

SEQ ID NO: 418358 - DNA, 30 bp, Artificial Sequence
  Synthetic oligonucleotide
catgtagctttcttgaagtattaagtacca

SEQ ID NO: 418359 - DNA, 30 bp, Artificial Sequence
  Synthetic oligonucleotide
gttctggggcgcatatcgcaaatagtacca

SEQ ID NO: 418360 - DNA, 30 bp, Artificial Sequence
  Synthetic oligonucleotide
caaaagattttggcatgaatctacgtacca

SEQ ID NO: 418361 - DNA, 30 bp, Artificial Sequence
  Synthetic oligonucleotide
cgagcgcgcattgtccttcattacgtacca

SEQ ID NO: 418362 - DNA, 30 bp, Artificial Sequence
  Synthetic oligonucleotide
caaaaggcgttcgcacgcggaaccgtacca

SEQ ID NO: 418363 - DNA, 30 bp, Artificial Sequence
  Synthetic oligonucleotide
cgaacggcgtccgcggatcaagccgtacca

SEQ ID NO: 418364 - DNA, 30 bp, Artificial Sequence
  Synthetic oligonucleotide
agtcaccacggttcaatggttcgcgtacca

SEQ ID NO: 418365 - DNA, 30 bp, Artificial Sequence
  Synthetic oligonucleotide
aagagcttcaccaaaatagacatcgtacca

SEQ ID NO: 418366 - DNA, 30 bp, Artificial Sequence
  Synthetic oligonucleotide
accggttaagttgcgttccccgcggtacca

SEQ ID NO: 418367 - DNA, 30 bp, Artificial Sequence
  Synthetic oligonucleotide
tcatccagtgggtgggggcttttggtacca

SEQ ID NO: 418368 - DNA, 30 bp, Artificial Sequence
  Synthetic oligonucleotide
aatttatttctattggggggtgcattacca

SEQ ID NO: 418369 - DNA, 30 bp, Artificial Sequence
  Synthetic oligonucleotide
tagttattacttacggcggtacgattacca

SEQ ID NO: 418370 - DNA, 30 bp, Artificial Sequence
  Synthetic oligonucleotide
taatgtgcttagtgttttcgtggcttacca

SEQ ID NO: 418371 - DNA, 30 bp, Artificial Sequence
  Synthetic oligonucleotide
ctgcatatctggctacgatacttcttacca

SEQ ID NO: 418372 - DNA, 30 bp, Artificial Sequence
  Synthetic oligonucleotide
agtccattgtgcgcggcgggacatttacca

SEQ ID NO: 418373 - DNA, 30 bp, Artificial Sequence
  Synthetic oligonucleotide
tgggacgacacagcactgcaaattttacca

SEQ ID NO: 418374 - DNA, 30 bp, Artificial Sequence
  Synthetic oligonucleotide
gctagtacatggcaaacgtaggaaaaccca

SEQ ID NO: 418375 - DNA, 30 bp, Artificial Sequence
  Synthetic oligonucleotide
tactatatggtcgctaatccgggcaaccca

SEQ ID NO: 418376 - DNA, 30 bp, Artificial Sequence
  Synthetic oligonucleotide
cggagtcccgttcgagataaatgcaaccca

SEQ ID NO: 418377 - DNA, 30 bp, Artificial Sequence
  Synthetic oligonucleotide
tagcgaagtcgtgtccggcaactgaaccca

SEQ ID NO: 418378 - DNA, 30 bp, Artificial Sequence
  Synthetic oligonucleotide
cccgaccttgataaattttccaataaccca

SEQ ID NO: 418379 - DNA, 30 bp, Artificial Sequence
  Synthetic oligonucleotide
ttttacactctggagttgagacaacaccca

SEQ ID NO: 418380 - DNA, 30 bp, Artificial Sequence
  Synthetic oligonucleotide
ggtgccatatgcttgtatcgatgacaccca

SEQ ID NO: 418381 - DNA, 30 bp, Artificial Sequence
  Synthetic oligonucleotide
gtggcacctcttcggtggcaagcccaccca

SEQ ID NO: 418382 - DNA, 30 bp, Artificial Sequence
  Synthetic oligonucleotide
gtgatgggtcgttccatgttcctccaccca

SEQ ID NO: 418383 - DNA, 30 bp, Artificial Sequence
  Synthetic oligonucleotide
gaaggtacgctcccgggtgttgtgcaccca

SEQ ID NO: 418384 - DNA, 30 bp, Artificial Sequence
  Synthetic oligonucleotide
ttcgaaggccgctctgttagttctcaccca

SEQ ID NO: 418385 - DNA, 30 bp, Artificial Sequence
  Synthetic oligonucleotide
tcgagtactagtcataaaatatgagaccca

SEQ ID NO: 418386 - DNA, 30 bp, Artificial Sequence
  Synthetic oligonucleotide
agttgttgtttacaaggcgtcatagaccca

SEQ ID NO: 418387 - DNA, 30 bp, Artificial Sequence
  Synthetic oligonucleotide
taagctcacagtaaagcctatctataccca

SEQ ID NO: 418388 - DNA, 30 bp, Artificial Sequence
  Synthetic oligonucleotide
ccatacaatatagaagagtcagagtaccca

SEQ ID NO: 418389 - DNA, 30 bp, Artificial Sequence
  Synthetic oligonucleotide
gctctcttaacgttactcggagggtaccca

SEQ ID NO: 418390 - DNA, 30 bp, Artificial Sequence
  Synthetic oligonucleotide
cggtgggggccagatagagcacaaacccca

SEQ ID NO: 418391 - DNA, 30 bp, Artificial Sequence
  Synthetic oligonucleotide
aatgtgaagtcaagttttgagtaaacccca

SEQ ID NO: 418392 - DNA, 30 bp, Artificial Sequence
  Synthetic oligonucleotide
tatggcaacgaatgcaccgacgcaacccca

SEQ ID NO: 418393 - DNA, 30 bp, Artificial Sequence
  Synthetic oligonucleotide
gtagcatacgagccttgatatgcaacccca

SEQ ID NO: 418394 - DNA, 30 bp, Artificial Sequence
  Synthetic oligonucleotide
tgtctcgtataacgagcgtcagccacccca

SEQ ID NO: 418395 - DNA, 30 bp, Artificial Sequence
  Synthetic oligonucleotide
tctgctgcagctctgcttaaacgcacccca

SEQ ID NO: 418396 - DNA, 30 bp, Artificial Sequence
  Synthetic oligonucleotide
aatatactaccgaacgaggtcgtgacccca

SEQ ID NO: 418397 - DNA, 30 bp, Artificial Sequence
  Synthetic oligonucleotide
acacacacaaaattttcacgttgaccccca

SEQ ID NO: 418398 - DNA, 30 bp, Artificial Sequence
  Synthetic oligonucleotide
gggacaagtacatcaccgaattccccccca

SEQ ID NO: 418399 - DNA, 30 bp, Artificial Sequence
  Synthetic oligonucleotide
ataacccccagcattgtgaaatggccccca

SEQ ID NO: 418400 - DNA, 30 bp, Artificial Sequence
  Synthetic oligonucleotide
acttgaactggggggttatcaatgccccca

SEQ ID NO: 418401 - DNA, 30 bp, Artificial Sequence
  Synthetic oligonucleotide
attcgagagggtgtccgcgaatatccccca

SEQ ID NO: 418402 - DNA, 30 bp, Artificial Sequence
  Synthetic oligonucleotide
tcagagggttcgtacggtaggcctccccca

SEQ ID NO: 418403 - DNA, 30 bp, Artificial Sequence
  Synthetic oligonucleotide
gttgggatgcgctattatgggagtccccca

SEQ ID NO: 418404 - DNA, 30 bp, Artificial Sequence
  Synthetic oligonucleotide
aatcttcatacggtgcgtaaaggtccccca

SEQ ID NO: 418405 - DNA, 30 bp, Artificial Sequence
  Synthetic oligonucleotide
ctcagaacggaaactgaccgacgcgcccca

SEQ ID NO: 418406 - DNA, 30 bp, Artificial Sequence
  Synthetic oligonucleotide
agcccaaaaaccgagtgggatcgcgcccca

SEQ ID NO: 418407 - DNA, 30 bp, Artificial Sequence
  Synthetic oligonucleotide
gcttagtgctctgcgatcctgtgatcccca

SEQ ID NO: 418408 - DNA, 30 bp, Artificial Sequence
  Synthetic oligonucleotide
ttaactgaacaccgtgtaatgagctcccca

SEQ ID NO: 418409 - DNA, 30 bp, Artificial Sequence
  Synthetic oligonucleotide
ttaaccggcccaggcaaaaacaggtcccca

SEQ ID NO: 418410 - DNA, 30 bp, Artificial Sequence
  Synthetic oligonucleotide
aaggatctaatgtgggacgacaggtcccca

SEQ ID NO: 418411 - DNA, 30 bp, Artificial Sequence
  Synthetic oligonucleotide
aaatgtggccctggatcggtggattcccca

SEQ ID NO: 418412 - DNA, 30 bp, Artificial Sequence
  Synthetic oligonucleotide
gggaggggctcatgttatctacacagccca

SEQ ID NO: 418413 - DNA, 30 bp, Artificial Sequence
  Synthetic oligonucleotide
ctgcgaacattcgaccttgcaggcagccca

SEQ ID NO: 418414 - DNA, 30 bp, Artificial Sequence
  Synthetic oligonucleotide
gctggaagcgaacaaaatatgttcagccca

SEQ ID NO: 418415 - DNA, 30 bp, Artificial Sequence
  Synthetic oligonucleotide
tatacataagcatgttagtgtatgagccca

SEQ ID NO: 418416 - DNA, 30 bp, Artificial Sequence
  Synthetic oligonucleotide
gcttgccggcatgagttacaagatagccca

SEQ ID NO: 418417 - DNA, 31 bp, Artificial Sequence
  Synthetic oligonucleotide
gcaattattatactgataaatagttagccca

SEQ ID NO: 418418 - DNA, 30 bp, Artificial Sequence
  Synthetic oligonucleotide
gtgcgcacgtgattgggacgccaacgccca

SEQ ID NO: 418419 - DNA, 30 bp, Artificial Sequence
  Synthetic oligonucleotide
cacggctacgaccaaatctttcgacgccca

SEQ ID NO: 418420 - DNA, 30 bp, Artificial Sequence
  Synthetic oligonucleotide
aacactcgtgggtgtctcacgtgccgccca

SEQ ID NO: 418421 - DNA, 30 bp, Artificial Sequence
  Synthetic oligonucleotide
gtcttctttttaagtagcataaggcgccca

SEQ ID NO: 418422 - DNA, 30 bp, Artificial Sequence
  Synthetic oligonucleotide
ttcaataggcgcttaatatgcgtaggccca

SEQ ID NO: 418423 - DNA, 30 bp, Artificial Sequence
  Synthetic oligonucleotide
atccgggctgttctcccgttaaacggccca

SEQ ID NO: 418424 - DNA, 30 bp, Artificial Sequence
  Synthetic oligonucleotide
accggcgtttgtcatgaaagaaagggccca

SEQ ID NO: 418425 - DNA, 30 bp, Artificial Sequence
  Synthetic oligonucleotide
ccctgcgccgctcttctcgctcagggccca

SEQ ID NO: 418426 - DNA, 30 bp, Artificial Sequence
  Synthetic oligonucleotide
ctggaaacagcactcatttactggggccca

SEQ ID NO: 418427 - DNA, 30 bp, Artificial Sequence
  Synthetic oligonucleotide
gaaaaggctgatgtacaaaagagatgccca

SEQ ID NO: 418428 - DNA, 30 bp, Artificial Sequence
  Synthetic oligonucleotide
agtagggatagaactggtaggaactgccca

SEQ ID NO: 418429 - DNA, 30 bp, Artificial Sequence
  Synthetic oligonucleotide
gactattatttggtgtttctaggctgccca

SEQ ID NO: 418430 - DNA, 30 bp, Artificial Sequence
  Synthetic oligonucleotide
cttgtaacaattgaggacacgagttgccca

SEQ ID NO: 418431 - DNA, 30 bp, Artificial Sequence
  Synthetic oligonucleotide
gccgactcgggcgcttccccattttgccca

SEQ ID NO: 418432 - DNA, 30 bp, Artificial Sequence
  Synthetic oligonucleotide
acgtctcgtttgttattcgttaaaatccca

SEQ ID NO: 418433 - DNA, 30 bp, Artificial Sequence
  Synthetic oligonucleotide
gggttacctagcggagagggggaaatccca

SEQ ID NO: 418434 - DNA, 30 bp, Artificial Sequence
  Synthetic oligonucleotide
acagcactgcagggggtatgatgcatccca

SEQ ID NO: 418435 - DNA, 30 bp, Artificial Sequence
  Synthetic oligonucleotide
atgggagtgcccaacatatgcatgatccca

SEQ ID NO: 418436 - DNA, 30 bp, Artificial Sequence
  Synthetic oligonucleotide
tccgatccgtgctggccaccgcatatccca

SEQ ID NO: 418437 - DNA, 30 bp, Artificial Sequence
  Synthetic oligonucleotide
ggatatttctatctcaggggtagtatccca

SEQ ID NO: 418438 - DNA, 30 bp, Artificial Sequence
  Synthetic oligonucleotide
atctgttcgtactatgatacgaaactccca

SEQ ID NO: 418439 - DNA, 30 bp, Artificial Sequence
  Synthetic oligonucleotide
agcgacttctcttcggtatacggagtccca

SEQ ID NO: 418440 - DNA, 30 bp, Artificial Sequence
  Synthetic oligonucleotide
ggaaaagggctccacggggcttccgtccca

SEQ ID NO: 418441 - DNA, 30 bp, Artificial Sequence
  Synthetic oligonucleotide
gtcaccggaattggttttatattcgtccca

SEQ ID NO: 418442 - DNA, 30 bp, Artificial Sequence
  Synthetic oligonucleotide
gataagaccgaactatggttcagggtccca

SEQ ID NO: 418443 - DNA, 30 bp, Artificial Sequence
  Synthetic oligonucleotide
tactagtgtgcattggagcagggggtccca

SEQ ID NO: 418444 - DNA, 30 bp, Artificial Sequence
  Synthetic oligonucleotide
gctgcctcataggtacgactcaatgtccca

SEQ ID NO: 418445 - DNA, 30 bp, Artificial Sequence
  Synthetic oligonucleotide
taatagttaacggagactattggcttccca

SEQ ID NO: 418446 - DNA, 30 bp, Artificial Sequence
  Synthetic oligonucleotide
attatccgtaagtgatatggagctttccca

SEQ ID NO: 418447 - DNA, 30 bp, Artificial Sequence
  Synthetic oligonucleotide
tgcgctctgctcgattatacacttttccca

SEQ ID NO: 418448 - DNA, 30 bp, Artificial Sequence
  Synthetic oligonucleotide
ggtatgtctagacagtgcattacaaagcca

SEQ ID NO: 418449 - DNA, 30 bp, Artificial Sequence
  Synthetic oligonucleotide
ttagactcggtatccacccacccaaagcca

SEQ ID NO: 418450 - DNA, 30 bp, Artificial Sequence
  Synthetic oligonucleotide
gccctccaatctagtgctttcataaagcca

SEQ ID NO: 418451 - DNA, 30 bp, Artificial Sequence
  Synthetic oligonucleotide
ttttttgtagcggggtccaacgccaagcca

SEQ ID NO: 418452 - DNA, 30 bp, Artificial Sequence
  Synthetic oligonucleotide
cccctattcaggagcggcattatcaagcca

SEQ ID NO: 418453 - DNA, 30 bp, Artificial Sequence
  Synthetic oligonucleotide
tagaaagttacctattttcgactcaagcca

SEQ ID NO: 418454 - DNA, 30 bp, Artificial Sequence
  Synthetic oligonucleotide
gtggcctgtcaacaggcatatctgaagcca

SEQ ID NO: 418455 - DNA, 30 bp, Artificial Sequence
  Synthetic oligonucleotide
aagaatacagcaacgcagcggacacagcca

SEQ ID NO: 418456 - DNA, 30 bp, Artificial Sequence
  Synthetic oligonucleotide
ttatctccaattaatgggtaccaccagcca

SEQ ID NO: 418457 - DNA, 30 bp, Artificial Sequence
  Synthetic oligonucleotide
cgcacgctagttaacgcacggacccagcca

SEQ ID NO: 418458 - DNA, 30 bp, Artificial Sequence
  Synthetic oligonucleotide
cgatatactcctaaatcatggcagcagcca

SEQ ID NO: 418459 - DNA, 30 bp, Artificial Sequence
  Synthetic oligonucleotide
aattgttggagtttattcaaaccgcagcca

SEQ ID NO: 418460 - DNA, 30 bp, Artificial Sequence
  Synthetic oligonucleotide
gaatgccggttcgtgattggcgtgcagcca

SEQ ID NO: 418461 - DNA, 30 bp, Artificial Sequence
  Synthetic oligonucleotide
tgtaagtcgcgctgttggtcgcatcagcca

SEQ ID NO: 418462 - DNA, 30 bp, Artificial Sequence
  Synthetic oligonucleotide
agtgaggacttgtaggctgcgactcagcca

SEQ ID NO: 418463 - DNA, 30 bp, Artificial Sequence
  Synthetic oligonucleotide
agatttcattaatatgaagctacagagcca

SEQ ID NO: 418464 - DNA, 30 bp, Artificial Sequence
  Synthetic oligonucleotide
gctatatcgattagcgacatggtagagcca

SEQ ID NO: 418465 - DNA, 30 bp, Artificial Sequence
  Synthetic oligonucleotide
gtccctctccggcgtttactcaaggagcca

SEQ ID NO: 418466 - DNA, 30 bp, Artificial Sequence
  Synthetic oligonucleotide
ttcaatggagattttcacaatccggagcca

SEQ ID NO: 418467 - DNA, 30 bp, Artificial Sequence
  Synthetic oligonucleotide
tttggacgcaaaatcggcactgaatagcca

SEQ ID NO: 418468 - DNA, 30 bp, Artificial Sequence
  Synthetic oligonucleotide
catatgttggtgtcatggattgactagcca

SEQ ID NO: 418469 - DNA, 30 bp, Artificial Sequence
  Synthetic oligonucleotide
atcataattcgcttaaggcgatcctagcca

SEQ ID NO: 418470 - DNA, 30 bp, Artificial Sequence
  Synthetic oligonucleotide
ggaggcaagcagtgtattgtcatctagcca

SEQ ID NO: 418471 - DNA, 30 bp, Artificial Sequence
  Synthetic oligonucleotide
ccagtcggtgaccaacagggcgtgtagcca

SEQ ID NO: 418472 - DNA, 30 bp, Artificial Sequence
  Synthetic oligonucleotide
cttatacttcgtgttatatcgataacgcca

SEQ ID NO: 418473 - DNA, 30 bp, Artificial Sequence
  Synthetic oligonucleotide
gcccaaccgtcaggcttgtagcacacgcca

SEQ ID NO: 418474 - DNA, 30 bp, Artificial Sequence
  Synthetic oligonucleotide
tgcccccgttatatgctaggggggacgcca

SEQ ID NO: 418475 - DNA, 30 bp, Artificial Sequence
  Synthetic oligonucleotide
aaagtgaactataggtatgaatatacgcca

SEQ ID NO: 418476 - DNA, 30 bp, Artificial Sequence
  Synthetic oligonucleotide
attgataaaggaggctattagccaccgcca

SEQ ID NO: 418477 - DNA, 30 bp, Artificial Sequence
  Synthetic oligonucleotide
tcgtatcagatggcgtcatataacccgcca

SEQ ID NO: 418478 - DNA, 30 bp, Artificial Sequence
  Synthetic oligonucleotide
tatggatagtttcttaccgtcggtccgcca

SEQ ID NO: 418479 - DNA, 30 bp, Artificial Sequence
  Synthetic oligonucleotide
gccgtaatgcacagaaatacgacagcgcca

SEQ ID NO: 418480 - DNA, 30 bp, Artificial Sequence
  Synthetic oligonucleotide
acacgttatgacctcttactggcagcgcca

SEQ ID NO: 418481 - DNA, 30 bp, Artificial Sequence
  Synthetic oligonucleotide
gatgctagcctgaaggagccgcgagcgcca

SEQ ID NO: 418482 - DNA, 30 bp, Artificial Sequence
  Synthetic oligonucleotide
gtgctgttggtgctaactgcggtagcgcca

SEQ ID NO: 418483 - DNA, 30 bp, Artificial Sequence
  Synthetic oligonucleotide
ccaataggacttggtcacacaaacgcgcca

SEQ ID NO: 418484 - DNA, 30 bp, Artificial Sequence
  Synthetic oligonucleotide
tgaaacgccagactttaattcaacgcgcca

SEQ ID NO: 418485 - DNA, 30 bp, Artificial Sequence
  Synthetic oligonucleotide
caataaagaatatccatcgcagtggcgcca

SEQ ID NO: 418486 - DNA, 30 bp, Artificial Sequence
  Synthetic oligonucleotide
aatcatgtgtatatacgtggcgctgcgcca

SEQ ID NO: 418487 - DNA, 30 bp, Artificial Sequence
  Synthetic oligonucleotide
gggatcctttaaaagtagcttcaatcgcca

SEQ ID NO: 418488 - DNA, 30 bp, Artificial Sequence
  Synthetic oligonucleotide
ttcatgtaccggctgactccggcatcgcca

SEQ ID NO: 418489 - DNA, 30 bp, Artificial Sequence
  Synthetic oligonucleotide
ttagtagctccaaatgagatttgatcgcca

SEQ ID NO: 418490 - DNA, 30 bp, Artificial Sequence
  Synthetic oligonucleotide
tcgcgcccgcttagttaaccggtatcgcca

SEQ ID NO: 418491 - DNA, 30 bp, Artificial Sequence
  Synthetic oligonucleotide
cttggccgtaggaggccacttcgctcgcca

SEQ ID NO: 418492 - DNA, 30 bp, Artificial Sequence
  Synthetic oligonucleotide
atcatatccgggttttgtctctgctcgcca

SEQ ID NO: 418493 - DNA, 30 bp, Artificial Sequence
  Synthetic oligonucleotide
ttcttggaatgtttatgaggctggtcgcca

SEQ ID NO: 418494 - DNA, 30 bp, Artificial Sequence
  Synthetic oligonucleotide
cgcgatatgttgcgcattcggcgttcgcca

SEQ ID NO: 418495 - DNA, 30 bp, Artificial Sequence
  Synthetic oligonucleotide
gttttgaacgggcacgtggaaggttcgcca

SEQ ID NO: 418496 - DNA, 30 bp, Artificial Sequence
  Synthetic oligonucleotide
ccattgccggggaaggacacgggttcgcca

SEQ ID NO: 418497 - DNA, 30 bp, Artificial Sequence
  Synthetic oligonucleotide
gggatgtctatgacccaagtcacgaggcca

SEQ ID NO: 418498 - DNA, 30 bp, Artificial Sequence
  Synthetic oligonucleotide
aattaccccttatacgtgatttggaggcca

SEQ ID NO: 418499 - DNA, 30 bp, Artificial Sequence
  Synthetic oligonucleotide
catgtcttagaaaaacaacttattaggcca

SEQ ID NO: 418500 - DNA, 30 bp, Artificial Sequence
  Synthetic oligonucleotide
tactcgtacatttcgtcgtggtttaggcca

SEQ ID NO: 418501 - DNA, 30 bp, Artificial Sequence
  Synthetic oligonucleotide
gagttaaacgactcacactgtacacggcca

SEQ ID NO: 418502 - DNA, 30 bp, Artificial Sequence
  Synthetic oligonucleotide
gctgtgggcactttggataagtgacggcca

SEQ ID NO: 418503 - DNA, 30 bp, Artificial Sequence
  Synthetic oligonucleotide
catggacaatactccttgaagatacggcca

SEQ ID NO: 418504 - DNA, 30 bp, Artificial Sequence
  Synthetic oligonucleotide
ggtgataaatgcactcagtagccgcggcca

SEQ ID NO: 418505 - DNA, 30 bp, Artificial Sequence
  Synthetic oligonucleotide
ttaacggaattcacgtccattccgcggcca

SEQ ID NO: 418506 - DNA, 30 bp, Artificial Sequence
  Synthetic oligonucleotide
ccgcgcggccaccagactgatttgcggcca

SEQ ID NO: 418507 - DNA, 30 bp, Artificial Sequence
  Synthetic oligonucleotide
gcatgggcaccactccatgtcatagggcca

SEQ ID NO: 418508 - DNA, 30 bp, Artificial Sequence
  Synthetic oligonucleotide
actaagattttgaagcatttgaaggggcca

SEQ ID NO: 418509 - DNA, 30 bp, Artificial Sequence
  Synthetic oligonucleotide
taccgcaatgatgtacatctactatggcca

SEQ ID NO: 418510 - DNA, 30 bp, Artificial Sequence
  Synthetic oligonucleotide
ggctacatcaagtgttttacctggtggcca

SEQ ID NO: 418511 - DNA, 30 bp, Artificial Sequence
  Synthetic oligonucleotide
cccagacattgtaactgccacgcttggcca

SEQ ID NO: 418512 - DNA, 30 bp, Artificial Sequence
  Synthetic oligonucleotide
gaaaggcagaaggaaacattcagttggcca

SEQ ID NO: 418513 - DNA, 30 bp, Artificial Sequence
  Synthetic oligonucleotide
taatcgacgctaaagggggtgcgttggcca

SEQ ID NO: 418514 - DNA, 30 bp, Artificial Sequence
  Synthetic oligonucleotide
ctctcggaacccgaaaccgccatttggcca

SEQ ID NO: 418515 - DNA, 30 bp, Artificial Sequence
  Synthetic oligonucleotide
ggaatttttcagtaaatcgtgacactgcca

SEQ ID NO: 418516 - DNA, 30 bp, Artificial Sequence
  Synthetic oligonucleotide
atcagctggcacgacctctccggactgcca

SEQ ID NO: 418517 - DNA, 30 bp, Artificial Sequence
  Synthetic oligonucleotide
cgcttgctccaattcagcttacggctgcca

SEQ ID NO: 418518 - DNA, 30 bp, Artificial Sequence
  Synthetic oligonucleotide
gttatctttcataagtggggcatgctgcca

SEQ ID NO: 418519 - DNA, 30 bp, Artificial Sequence
  Synthetic oligonucleotide
ggcctcatagagagttgtatcttgctgcca

SEQ ID NO: 418520 - DNA, 30 bp, Artificial Sequence
  Synthetic oligonucleotide
ggagccccgcccgtgccatcaaaagtgcca

SEQ ID NO: 418521 - DNA, 30 bp, Artificial Sequence
  Synthetic oligonucleotide
taaaaatctacagaagcaccagtagtgcca

SEQ ID NO: 418522 - DNA, 30 bp, Artificial Sequence
  Synthetic oligonucleotide
ttctcagccgtaacatggaggaatgtgcca

SEQ ID NO: 418523 - DNA, 30 bp, Artificial Sequence
  Synthetic oligonucleotide
attcttgtgaaggcgtatatcactgtgcca

SEQ ID NO: 418524 - DNA, 30 bp, Artificial Sequence
  Synthetic oligonucleotide
cgcaaaggcgttcgaggcatcatattgcca

SEQ ID NO: 418525 - DNA, 30 bp, Artificial Sequence
  Synthetic oligonucleotide
cctaattactgatacagacaaggcttgcca

SEQ ID NO: 418526 - DNA, 30 bp, Artificial Sequence
  Synthetic oligonucleotide
cggagcggcggggatagtctattcttgcca

SEQ ID NO: 418527 - DNA, 30 bp, Artificial Sequence
  Synthetic oligonucleotide
cccattgcgcgaccagtgtgccttttgcca

SEQ ID NO: 418528 - DNA, 30 bp, Artificial Sequence
  Synthetic oligonucleotide
tattaagggaaaaattttatggttttgcca

SEQ ID NO: 418529 - DNA, 30 bp, Artificial Sequence
  Synthetic oligonucleotide
ctccacttcccccgtctcaatgttttgcca

SEQ ID NO: 418530 - DNA, 30 bp, Artificial Sequence
  Synthetic oligonucleotide
aatatcggtcaggcgtctcactaaaatcca

SEQ ID NO: 418531 - DNA, 30 bp, Artificial Sequence
  Synthetic oligonucleotide
ccttctaagttcgctaacttagcaaatcca

SEQ ID NO: 418532 - DNA, 30 bp, Artificial Sequence
  Synthetic oligonucleotide
cagctctaacgcacaacagcattaaatcca

SEQ ID NO: 418533 - DNA, 30 bp, Artificial Sequence
  Synthetic oligonucleotide
atccactcgcagatgggaagctacaatcca

SEQ ID NO: 418534 - DNA, 30 bp, Artificial Sequence
  Synthetic oligonucleotide
gactcgttccttggaccacaacgcaatcca

SEQ ID NO: 418535 - DNA, 30 bp, Artificial Sequence
  Synthetic oligonucleotide
ggtaggatacctacttccgtagggaatcca

SEQ ID NO: 418536 - DNA, 30 bp, Artificial Sequence
  Synthetic oligonucleotide
atcgcccatggttcaacgggacgccatcca

SEQ ID NO: 418537 - DNA, 30 bp, Artificial Sequence
  Synthetic oligonucleotide
gccgcatttatctataaacacggccatcca

SEQ ID NO: 418538 - DNA, 30 bp, Artificial Sequence
  Synthetic oligonucleotide
atgaaaacacctggtttaggttcgcatcca

SEQ ID NO: 418539 - DNA, 30 bp, Artificial Sequence
  Synthetic oligonucleotide
attgccattatgattgcggcttcagatcca

SEQ ID NO: 418540 - DNA, 30 bp, Artificial Sequence
  Synthetic oligonucleotide
ttcactccttaggtttttctcaacgatcca

SEQ ID NO: 418541 - DNA, 30 bp, Artificial Sequence
  Synthetic oligonucleotide
gccgataagacctgagatcatactgatcca

SEQ ID NO: 418542 - DNA, 30 bp, Artificial Sequence
  Synthetic oligonucleotide
tacaagaatggacacagcctggctgatcca

SEQ ID NO: 418543 - DNA, 30 bp, Artificial Sequence
  Synthetic oligonucleotide
gataaaaggatcgcctatttaggtgatcca

SEQ ID NO: 418544 - DNA, 30 bp, Artificial Sequence
  Synthetic oligonucleotide
caaacatggactcagttctaatttgatcca

SEQ ID NO: 418545 - DNA, 30 bp, Artificial Sequence
  Synthetic oligonucleotide
cggacattttgacaatccgcgacatatcca

SEQ ID NO: 418546 - DNA, 30 bp, Artificial Sequence
  Synthetic oligonucleotide
catgaattacctgtgcaggatgcatatcca

SEQ ID NO: 418547 - DNA, 30 bp, Artificial Sequence
  Synthetic oligonucleotide
ttagcttaacaccctcagttaatatatcca

SEQ ID NO: 418548 - DNA, 30 bp, Artificial Sequence
  Synthetic oligonucleotide
ccgcggggttcacgggaagcgctttatcca

SEQ ID NO: 418549 - DNA, 30 bp, Artificial Sequence
  Synthetic oligonucleotide
gtttgcggtcctcgcgtcgtttgaactcca

SEQ ID NO: 418550 - DNA, 30 bp, Artificial Sequence
  Synthetic oligonucleotide
ttaagtatcatatgtggctcgataactcca

SEQ ID NO: 418551 - DNA, 30 bp, Artificial Sequence
  Synthetic oligonucleotide
tctagtaagagagtgttcttcatcactcca

SEQ ID NO: 418552 - DNA, 30 bp, Artificial Sequence
  Synthetic oligonucleotide
tcttaggatcttgagttgccattcactcca

SEQ ID NO: 418553 - DNA, 30 bp, Artificial Sequence
  Synthetic oligonucleotide
attattagcaatgggactactttcactcca

SEQ ID NO: 418554 - DNA, 30 bp, Artificial Sequence
  Synthetic oligonucleotide
catcggattgtcggacgatgcaatactcca

SEQ ID NO: 418555 - DNA, 30 bp, Artificial Sequence
  Synthetic oligonucleotide
cggtccattatctaggaccgtaatactcca

SEQ ID NO: 418556 - DNA, 30 bp, Artificial Sequence
  Synthetic oligonucleotide
ggttatgaacggaccaggactattactcca

SEQ ID NO: 418557 - DNA, 30 bp, Artificial Sequence
  Synthetic oligonucleotide
aactctgtcgatgtccgtttaccgcctcca

SEQ ID NO: 418558 - DNA, 30 bp, Artificial Sequence
  Synthetic oligonucleotide
gtatggtgcaaagtatccgaggcgcctcca

SEQ ID NO: 418559 - DNA, 30 bp, Artificial Sequence
  Synthetic oligonucleotide
ggggtttaatcttctgtgtttaggcctcca

SEQ ID NO: 418560 - DNA, 30 bp, Artificial Sequence
  Synthetic oligonucleotide
tcttccttgcctggcctcccgtatcctcca

SEQ ID NO: 418561 - DNA, 30 bp, Artificial Sequence
  Synthetic oligonucleotide
ggattactgtgggatggacgggacgctcca

SEQ ID NO: 418562 - DNA, 30 bp, Artificial Sequence
  Synthetic oligonucleotide
caatagttgacgtagacatcataggctcca

SEQ ID NO: 418563 - DNA, 30 bp, Artificial Sequence
  Synthetic oligonucleotide
cgaggtattccttacgcactttaggctcca

SEQ ID NO: 418564 - DNA, 30 bp, Artificial Sequence
  Synthetic oligonucleotide
taatttagcaaatgctgtatcgatgctcca

SEQ ID NO: 418565 - DNA, 30 bp, Artificial Sequence
  Synthetic oligonucleotide
cgcaatattcgccaatgggcggcatctcca

SEQ ID NO: 418566 - DNA, 30 bp, Artificial Sequence
  Synthetic oligonucleotide
gaagataaaggggcccttttgagatctcca

SEQ ID NO: 418567 - DNA, 30 bp, Artificial Sequence
  Synthetic oligonucleotide
gcctgcctcggtagcacgagctcctctcca

SEQ ID NO: 418568 - DNA, 30 bp, Artificial Sequence
  Synthetic oligonucleotide
gtaattcggcacccgggctaatcgtctcca

SEQ ID NO: 418569 - DNA, 30 bp, Artificial Sequence
  Synthetic oligonucleotide
gcattgatgttgcgaggaaagttgtctcca

SEQ ID NO: 418570 - DNA, 30 bp, Artificial Sequence
  Synthetic oligonucleotide
aaggaacgtgggacgcggactaaaagtcca

SEQ ID NO: 418571 - DNA, 30 bp, Artificial Sequence
  Synthetic oligonucleotide
acggcccgcgtggaaaaatggataagtcca

SEQ ID NO: 418572 - DNA, 30 bp, Artificial Sequence
  Synthetic oligonucleotide
ctgggaccttctgcctatgacgcgagtcca

SEQ ID NO: 418573 - DNA, 30 bp, Artificial Sequence
  Synthetic oligonucleotide
cgaagcgctcagtcatattaactgagtcca

SEQ ID NO: 418574 - DNA, 30 bp, Artificial Sequence
  Synthetic oligonucleotide
ttgagctctttatggttgccacgtagtcca

SEQ ID NO: 418575 - DNA, 30 bp, Artificial Sequence
  Synthetic oligonucleotide
ttactgctagagggaagttaacttagtcca

SEQ ID NO: 418576 - DNA, 30 bp, Artificial Sequence
  Synthetic oligonucleotide
aggttggacgcaccacggcaggaacgtcca

SEQ ID NO: 418577 - DNA, 30 bp, Artificial Sequence
  Synthetic oligonucleotide
tgtcgggtccatctggcacgatatcgtcca

SEQ ID NO: 418578 - DNA, 30 bp, Artificial Sequence
  Synthetic oligonucleotide
cgttgaaaacgcttctaccgctttcgtcca

SEQ ID NO: 418579 - DNA, 30 bp, Artificial Sequence
  Synthetic oligonucleotide
tagcatggtcgatgcgctttaaaaggtcca

SEQ ID NO: 418580 - DNA, 30 bp, Artificial Sequence
  Synthetic oligonucleotide
gttaacacacagtggccttgggcaggtcca

SEQ ID NO: 418581 - DNA, 30 bp, Artificial Sequence
  Synthetic oligonucleotide
gagttcagggaccaaggacgggggggtcca

SEQ ID NO: 418582 - DNA, 30 bp, Artificial Sequence
  Synthetic oligonucleotide
catatgggcggacccggaaaacatggtcca

SEQ ID NO: 418583 - DNA, 30 bp, Artificial Sequence
  Synthetic oligonucleotide
ttcgtaattcgcgctgtgtaatatggtcca

SEQ ID NO: 418584 - DNA, 30 bp, Artificial Sequence
  Synthetic oligonucleotide
tgcgccgagtggagcaactcgcctggtcca

SEQ ID NO: 418585 - DNA, 30 bp, Artificial Sequence
  Synthetic oligonucleotide
ttttcatcgccttagcgtaggtaatgtcca

SEQ ID NO: 418586 - DNA, 30 bp, Artificial Sequence
  Synthetic oligonucleotide
gtagtgtctgtgatgaggcttcgatgtcca

SEQ ID NO: 418587 - DNA, 30 bp, Artificial Sequence
  Synthetic oligonucleotide
gcttactcaggatactagtacaactgtcca

SEQ ID NO: 418588 - DNA, 30 bp, Artificial Sequence
  Synthetic oligonucleotide
ggtccgattagagttgttcggtactgtcca

SEQ ID NO: 418589 - DNA, 30 bp, Artificial Sequence
  Synthetic oligonucleotide
tcttctcctgaagtgggggtcgagtgtcca

SEQ ID NO: 418590 - DNA, 30 bp, Artificial Sequence
  Synthetic oligonucleotide
gggttccttcatctgctcctgactattcca

SEQ ID NO: 418591 - DNA, 30 bp, Artificial Sequence
  Synthetic oligonucleotide
gagttgcatgtatcatcgtagggtattcca

SEQ ID NO: 418592 - DNA, 30 bp, Artificial Sequence
  Synthetic oligonucleotide
tcactggaactgcaggacctgtttattcca

SEQ ID NO: 418593 - DNA, 30 bp, Artificial Sequence
  Synthetic oligonucleotide
gcctaattttggcattagcgatcacttcca

SEQ ID NO: 418594 - DNA, 30 bp, Artificial Sequence
  Synthetic oligonucleotide
ggccggtttaatccagtgtcgtgccttcca

SEQ ID NO: 418595 - DNA, 30 bp, Artificial Sequence
  Synthetic oligonucleotide
gtggggggtacatattcagcagtccttcca

SEQ ID NO: 418596 - DNA, 30 bp, Artificial Sequence
  Synthetic oligonucleotide
gtgtatgtgttaaaattgttagtgcttcca

SEQ ID NO: 418597 - DNA, 30 bp, Artificial Sequence
  Synthetic oligonucleotide
gtgccagccgacgcaaactgcactcttcca

SEQ ID NO: 418598 - DNA, 30 bp, Artificial Sequence
  Synthetic oligonucleotide
aatacaaccgctcatcgcaatccagttcca

SEQ ID NO: 418599 - DNA, 30 bp, Artificial Sequence
  Synthetic oligonucleotide
cggtcatacaactgtgcagcaggagttcca

SEQ ID NO: 418600 - DNA, 30 bp, Artificial Sequence
  Synthetic oligonucleotide
aacgttgtttgggaggggatgggcgttcca

SEQ ID NO: 418601 - DNA, 30 bp, Artificial Sequence
  Synthetic oligonucleotide
gcaacatgaagctgtcatgcagaggttcca

SEQ ID NO: 418602 - DNA, 30 bp, Artificial Sequence
  Synthetic oligonucleotide
taatttaaaaaggttggctttagggttcca

SEQ ID NO: 418603 - DNA, 30 bp, Artificial Sequence
  Synthetic oligonucleotide
ataatatcgcgagggtattactatgttcca

SEQ ID NO: 418604 - DNA, 30 bp, Artificial Sequence
  Synthetic oligonucleotide
ttttgaaggttatcgataaccagtgttcca

SEQ ID NO: 418605 - DNA, 30 bp, Artificial Sequence
  Synthetic oligonucleotide
atggagcgcctggcttgaaccgttgttcca

SEQ ID NO: 418606 - DNA, 30 bp, Artificial Sequence
  Synthetic oligonucleotide
cttagagtacccaaaggggtatgatttcca

SEQ ID NO: 418607 - DNA, 30 bp, Artificial Sequence
  Synthetic oligonucleotide
aggcggttgctaatcgtcgccacctttcca

SEQ ID NO: 418608 - DNA, 30 bp, Artificial Sequence
  Synthetic oligonucleotide
acaccgtttggttatagctgaccctttcca

SEQ ID NO: 418609 - DNA, 30 bp, Artificial Sequence
  Synthetic oligonucleotide
gctcattagtccatgctatgtagctttcca

SEQ ID NO: 418610 - DNA, 30 bp, Artificial Sequence
  Synthetic oligonucleotide
tttcccactagtccttttatgcgttttcca

SEQ ID NO: 418611 - DNA, 30 bp, Artificial Sequence
  Synthetic oligonucleotide
catcaaatccacgaaacgagttgttttcca

SEQ ID NO: 418612 - DNA, 30 bp, Artificial Sequence
  Synthetic oligonucleotide
cactgaataaaggagtggctagtttttcca

SEQ ID NO: 418613 - DNA, 30 bp, Artificial Sequence
  Synthetic oligonucleotide
cgcacctctaataatgtgttaggaaaagca

SEQ ID NO: 418614 - DNA, 30 bp, Artificial Sequence
  Synthetic oligonucleotide
ttccaaggattattctgacccggaaaagca

SEQ ID NO: 418615 - DNA, 30 bp, Artificial Sequence
  Synthetic oligonucleotide
atcgacatgcagccacgtgagtgaaaagca

SEQ ID NO: 418616 - DNA, 30 bp, Artificial Sequence
  Synthetic oligonucleotide
ttaatgaaattgctggcgttggtaaaagca

SEQ ID NO: 418617 - DNA, 30 bp, Artificial Sequence
  Synthetic oligonucleotide
aataaaatgtagcaattttaagcgaaagca

SEQ ID NO: 418618 - DNA, 29 bp, Artificial Sequence
  Synthetic oligonucleotide
gctgaatgccgccatgcacttctaaagca

SEQ ID NO: 418619 - DNA, 30 bp, Artificial Sequence
  Synthetic oligonucleotide
tcccaaccggatcgcatttagcttaaagca

SEQ ID NO: 418620 - DNA, 30 bp, Artificial Sequence
  Synthetic oligonucleotide
aacttgtgaaccgggagcgcgcttaaagca

SEQ ID NO: 418621 - DNA, 30 bp, Artificial Sequence
  Synthetic oligonucleotide
aggacgtccagaagcattgtttttaaagca

SEQ ID NO: 418622 - DNA, 30 bp, Artificial Sequence
  Synthetic oligonucleotide
acattagaacgcaatctatggtaacaagca

SEQ ID NO: 418623 - DNA, 30 bp, Artificial Sequence
  Synthetic oligonucleotide
ggatttacaaccgaggcgtcagcccaagca

SEQ ID NO: 418624 - DNA, 30 bp, Artificial Sequence
  Synthetic oligonucleotide
aactaaaaagattgtgaagcttatcaagca

SEQ ID NO: 418625 - DNA, 30 bp, Artificial Sequence
  Synthetic oligonucleotide
catcattaatttaatactttttatcaagca

SEQ ID NO: 418626 - DNA, 30 bp, Artificial Sequence
  Synthetic oligonucleotide
aacccttctcggagtttagactgtcaagca

SEQ ID NO: 418627 - DNA, 30 bp, Artificial Sequence
  Synthetic oligonucleotide
tgggggcgcgaaagcagctacgcagaagca

SEQ ID NO: 418628 - DNA, 30 bp, Artificial Sequence
  Synthetic oligonucleotide
aagcttaacccgcacgtgcgggcagaagca

SEQ ID NO: 418629 - DNA, 30 bp, Artificial Sequence
  Synthetic oligonucleotide
tgctacccttaattacgggcttcagaagca

SEQ ID NO: 418630 - DNA, 30 bp, Artificial Sequence
  Synthetic oligonucleotide
ctttatattgagccaaatcttggcgaagca

SEQ ID NO: 418631 - DNA, 30 bp, Artificial Sequence
  Synthetic oligonucleotide
ctacgtctagtgcacgctggggtcgaagca

SEQ ID NO: 418632 - DNA, 30 bp, Artificial Sequence
  Synthetic oligonucleotide
tgtgtcagggtagggccacgctgggaagca

SEQ ID NO: 418633 - DNA, 30 bp, Artificial Sequence
  Synthetic oligonucleotide
tgccaaggcaccgattatatgctggaagca

SEQ ID NO: 418634 - DNA, 30 bp, Artificial Sequence
  Synthetic oligonucleotide
gctgtaatgttatcaccgctttgataagca

SEQ ID NO: 418635 - DNA, 30 bp, Artificial Sequence
  Synthetic oligonucleotide
cctaaatattagatggcgcttcaaacagca

SEQ ID NO: 418636 - DNA, 30 bp, Artificial Sequence
  Synthetic oligonucleotide
attctgcgggaacgtccaagtgaaacagca

SEQ ID NO: 418637 - DNA, 30 bp, Artificial Sequence
  Synthetic oligonucleotide
ataacttattccgtcaccgtgctaacagca

SEQ ID NO: 418638 - DNA, 30 bp, Artificial Sequence
  Synthetic oligonucleotide
cagtataacgcttgccgcgaccccacagca

SEQ ID NO: 418639 - DNA, 30 bp, Artificial Sequence
  Synthetic oligonucleotide
gcgtgcccgtggcgtcgccgcagcacagca

SEQ ID NO: 418640 - DNA, 30 bp, Artificial Sequence
  Synthetic oligonucleotide
gcttgcgttgcgtagctggcgagcacagca

SEQ ID NO: 418641 - DNA, 30 bp, Artificial Sequence
  Synthetic oligonucleotide
gttgttacttgtattcttttacagacagca

SEQ ID NO: 418642 - DNA, 30 bp, Artificial Sequence
  Synthetic oligonucleotide
gtatatagattacatggatgaaggacagca

SEQ ID NO: 418643 - DNA, 30 bp, Artificial Sequence
  Synthetic oligonucleotide
gagctttatatgtactcctgacgaccagca

SEQ ID NO: 418644 - DNA, 30 bp, Artificial Sequence
  Synthetic oligonucleotide
cgcgcacttagggcactataggccccagca

SEQ ID NO: 418645 - DNA, 30 bp, Artificial Sequence
  Synthetic oligonucleotide
atgtcctcgcagtgtacggataggccagca

SEQ ID NO: 418646 - DNA, 30 bp, Artificial Sequence
  Synthetic oligonucleotide
attcaaccgacttgatccgaatggccagca

SEQ ID NO: 418647 - DNA, 30 bp, Artificial Sequence
  Synthetic oligonucleotide
gcatggtacattagtagtgctttgccagca

SEQ ID NO: 418648 - DNA, 30 bp, Artificial Sequence
  Synthetic oligonucleotide
gtcctccaaggtggatagttgtatccagca

SEQ ID NO: 418649 - DNA, 30 bp, Artificial Sequence
  Synthetic oligonucleotide
gcatcaaaatgagtagtttctactccagca

SEQ ID NO: 418650 - DNA, 30 bp, Artificial Sequence
  Synthetic oligonucleotide
ataggttactttcgccccatcgttccagca

SEQ ID NO: 418651 - DNA, 30 bp, Artificial Sequence
  Synthetic oligonucleotide
tcaatgagttggttactcaccagagcagca

SEQ ID NO: 418652 - DNA, 30 bp, Artificial Sequence
  Synthetic oligonucleotide
ggtgacgcttcgtgcaatctaagcgcagca

SEQ ID NO: 418653 - DNA, 30 bp, Artificial Sequence
  Synthetic oligonucleotide
gacacctgagagatattactgagcgcagca

SEQ ID NO: 418654 - DNA, 30 bp, Artificial Sequence
  Synthetic oligonucleotide
tcccgccgcaccattgggcagatcgcagca

SEQ ID NO: 418655 - DNA, 30 bp, Artificial Sequence
  Synthetic oligonucleotide
acgctctatttactcatgttggctgcagca

SEQ ID NO: 418656 - DNA, 30 bp, Artificial Sequence
  Synthetic oligonucleotide
tgctggattacaatgggcgactaatcagca

SEQ ID NO: 418657 - DNA, 30 bp, Artificial Sequence
  Synthetic oligonucleotide
aatcttggtcacaggggagcttggtcagca

SEQ ID NO: 418658 - DNA, 30 bp, Artificial Sequence
  Synthetic oligonucleotide
ctgaggaataatgtactcctcagttcagca

SEQ ID NO: 418659 - DNA, 30 bp, Artificial Sequence
  Synthetic oligonucleotide
agtaactctagccgaggcgtaatttcagca

SEQ ID NO: 418660 - DNA, 30 bp, Artificial Sequence
  Synthetic oligonucleotide
aaccagcgtcagatcgctctgggaagagca

SEQ ID NO: 418661 - DNA, 30 bp, Artificial Sequence
  Synthetic oligonucleotide
gcagttattgtccgcggaataagcagagca

SEQ ID NO: 418662 - DNA, 30 bp, Artificial Sequence
  Synthetic oligonucleotide
tataaattcaacgaattggtagtcagagca

SEQ ID NO: 418663 - DNA, 30 bp, Artificial Sequence
  Synthetic oligonucleotide
catttatttcttacggcgtccgcgagagca

SEQ ID NO: 418664 - DNA, 30 bp, Artificial Sequence
  Synthetic oligonucleotide
tggcatccgagcgcaaaagcttggagagca

SEQ ID NO: 418665 - DNA, 30 bp, Artificial Sequence
  Synthetic oligonucleotide
gtatcaatgaccatctaacgttggagagca

SEQ ID NO: 418666 - DNA, 30 bp, Artificial Sequence
  Synthetic oligonucleotide
attactttgctctgatattcattgagagca

SEQ ID NO: 418667 - DNA, 30 bp, Artificial Sequence
  Synthetic oligonucleotide
ggactttatggcttggagtttagtagagca

SEQ ID NO: 418668 - DNA, 30 bp, Artificial Sequence
  Synthetic oligonucleotide
ggctaaggccgttttatttcgccacgagca

SEQ ID NO: 418669 - DNA, 30 bp, Artificial Sequence
  Synthetic oligonucleotide
atatcacaagatcgcttggatattcgagca

SEQ ID NO: 418670 - DNA, 30 bp, Artificial Sequence
  Synthetic oligonucleotide
gaactttaagtaactggggtgtaaggagca

SEQ ID NO: 418671 - DNA, 30 bp, Artificial Sequence
  Synthetic oligonucleotide
ccgagtattcactgaagcttggacggagca

SEQ ID NO: 418672 - DNA, 30 bp, Artificial Sequence
  Synthetic oligonucleotide
tttctcagagactaagttacatccggagca

SEQ ID NO: 418673 - DNA, 30 bp, Artificial Sequence
  Synthetic oligonucleotide
agaaactcagtatggggccgttgcggagca

SEQ ID NO: 418674 - DNA, 30 bp, Artificial Sequence
  Synthetic oligonucleotide
ttcttaattgatctacaataagaatgagca

SEQ ID NO: 418675 - DNA, 30 bp, Artificial Sequence
  Synthetic oligonucleotide
ccaccccattcgcagccgtaaaggtgagca

SEQ ID NO: 418676 - DNA, 30 bp, Artificial Sequence
  Synthetic oligonucleotide
gcgcctttgcagctccgtaatcggtgagca

SEQ ID NO: 418677 - DNA, 30 bp, Artificial Sequence
  Synthetic oligonucleotide
aaatgacttagattcccggtgcattgagca

SEQ ID NO: 418678 - DNA, 30 bp, Artificial Sequence
  Synthetic oligonucleotide
cagcatgagtagcattatggttcaatagca

SEQ ID NO: 418679 - DNA, 30 bp, Artificial Sequence
  Synthetic oligonucleotide
gattcaaatataaatttcgacagcatagca

SEQ ID NO: 418680 - DNA, 30 bp, Artificial Sequence
  Synthetic oligonucleotide
ttgtggtgcaagcagcgtaattgcatagca

SEQ ID NO: 418681 - DNA, 30 bp, Artificial Sequence
  Synthetic oligonucleotide
agaaacccgtggtattcaccgctcatagca

SEQ ID NO: 418682 - DNA, 30 bp, Artificial Sequence
  Synthetic oligonucleotide
atggtcaggaccgtagcgtatacgatagca

SEQ ID NO: 418683 - DNA, 30 bp, Artificial Sequence
  Synthetic oligonucleotide
cagatatactatattgcaacgtggatagca

SEQ ID NO: 418684 - DNA, 30 bp, Artificial Sequence
  Synthetic oligonucleotide
gcatagtcgaaagccacaagccttatagca

SEQ ID NO: 418685 - DNA, 30 bp, Artificial Sequence
  Synthetic oligonucleotide
agtggattgtgagtttagaagcttatagca

SEQ ID NO: 418686 - DNA, 30 bp, Artificial Sequence
  Synthetic oligonucleotide
cccgcagccaatacaagggttaaactagca

SEQ ID NO: 418687 - DNA, 30 bp, Artificial Sequence
  Synthetic oligonucleotide
atgttaaggccgcgtcgccttgcactagca

SEQ ID NO: 418688 - DNA, 30 bp, Artificial Sequence
  Synthetic oligonucleotide
gcttaactacttttgaaaagccggctagca

SEQ ID NO: 418689 - DNA, 30 bp, Artificial Sequence
  Synthetic oligonucleotide
ttatgggatcgtagcgcactcctgctagca

SEQ ID NO: 418690 - DNA, 30 bp, Artificial Sequence
  Synthetic oligonucleotide
cagttcgtatgcggaggatatcctctagca

SEQ ID NO: 418691 - DNA, 30 bp, Artificial Sequence
  Synthetic oligonucleotide
tttgcacctggttagtagacgggtctagca

SEQ ID NO: 418692 - DNA, 30 bp, Artificial Sequence
  Synthetic oligonucleotide
gtaccgtttcataggttgaatggagtagca

SEQ ID NO: 418693 - DNA, 30 bp, Artificial Sequence
  Synthetic oligonucleotide
tttcaggaagggaagaaaccgctcgtagca

SEQ ID NO: 418694 - DNA, 31 bp, Artificial Sequence
  Synthetic oligonucleotide
aacagtgtgatggtcttgcagggcattagca

SEQ ID NO: 418695 - DNA, 30 bp, Artificial Sequence
  Synthetic oligonucleotide
cccgccactcccgctgtccattacttagca

SEQ ID NO: 418696 - DNA, 30 bp, Artificial Sequence
  Synthetic oligonucleotide
atactcccgtctaattggagagccttagca

SEQ ID NO: 418697 - DNA, 30 bp, Artificial Sequence
  Synthetic oligonucleotide
cagcggcttacgtgtgactaccgcttagca

SEQ ID NO: 418698 - DNA, 30 bp, Artificial Sequence
  Synthetic oligonucleotide
aaacttaaggctctaggcttgcgcttagca

SEQ ID NO: 418699 - DNA, 30 bp, Artificial Sequence
  Synthetic oligonucleotide
agatttacgtatgagttaagttatttagca

SEQ ID NO: 418700 - DNA, 30 bp, Artificial Sequence
  Synthetic oligonucleotide
ttaaggttaacttcaattgtttgtttagca

SEQ ID NO: 418701 - DNA, 30 bp, Artificial Sequence
  Synthetic oligonucleotide
atgtgccgctcaagcatctcacttttagca

SEQ ID NO: 418702 - DNA, 30 bp, Artificial Sequence
  Synthetic oligonucleotide
tagtcgttttgcacgccgtctgttttagca

SEQ ID NO: 418703 - DNA, 30 bp, Artificial Sequence
  Synthetic oligonucleotide
ctcaccgcacgcattggaccgtaaaacgca

SEQ ID NO: 418704 - DNA, 30 bp, Artificial Sequence
  Synthetic oligonucleotide
gcatactcgacggaagcatctctaaacgca

SEQ ID NO: 418705 - DNA, 30 bp, Artificial Sequence
  Synthetic oligonucleotide
tatagaattggggtggaacacagcaacgca

SEQ ID NO: 418706 - DNA, 30 bp, Artificial Sequence
  Synthetic oligonucleotide
aggccgcgacgtgcgggcagtttcaacgca

SEQ ID NO: 418707 - DNA, 30 bp, Artificial Sequence
  Synthetic oligonucleotide
gtgtgaactgttagatatgcgacgaacgca

SEQ ID NO: 418708 - DNA, 30 bp, Artificial Sequence
  Synthetic oligonucleotide
cggtgcttatagcatggtcccccgaacgca

SEQ ID NO: 418709 - DNA, 30 bp, Artificial Sequence
  Synthetic oligonucleotide
tagcgttaattatcgctagatatgaacgca

SEQ ID NO: 418710 - DNA, 30 bp, Artificial Sequence
  Synthetic oligonucleotide
gaaggtcagacgacccagtttatgaacgca

SEQ ID NO: 418711 - DNA, 30 bp, Artificial Sequence
  Synthetic oligonucleotide
tttcgcaaggcgtcccgctggactaacgca

SEQ ID NO: 418712 - DNA, 30 bp, Artificial Sequence
  Synthetic oligonucleotide
gttggctctttttcaggcattcgtaacgca

SEQ ID NO: 418713 - DNA, 30 bp, Artificial Sequence
  Synthetic oligonucleotide
gccctgaacctcgcgtcgcctggtaacgca

SEQ ID NO: 418714 - DNA, 30 bp, Artificial Sequence
  Synthetic oligonucleotide
acgcacaagacgtatggccattcacacgca

SEQ ID NO: 418715 - DNA, 30 bp, Artificial Sequence
  Synthetic oligonucleotide
actcttaaaggcgcggactcgctacacgca

SEQ ID NO: 418716 - DNA, 30 bp, Artificial Sequence
  Synthetic oligonucleotide
agcccattcgccagtctcgatgggcacgca

SEQ ID NO: 418717 - DNA, 30 bp, Artificial Sequence
  Synthetic oligonucleotide
tttaaggcacctgtctacgcgattcacgca

SEQ ID NO: 418718 - DNA, 30 bp, Artificial Sequence
  Synthetic oligonucleotide
tgtttacgaaccagaggatttcttcacgca

SEQ ID NO: 418719 - DNA, 30 bp, Artificial Sequence
  Synthetic oligonucleotide
ctcctccgattcaatggggtgaaagacgca

SEQ ID NO: 418720 - DNA, 30 bp, Artificial Sequence
  Synthetic oligonucleotide
catttacctacgcgcatataataagacgca

SEQ ID NO: 418721 - DNA, 30 bp, Artificial Sequence
  Synthetic oligonucleotide
tagaaacctgggagccgatattgagacgca

SEQ ID NO: 418722 - DNA, 30 bp, Artificial Sequence
  Synthetic oligonucleotide
tagctttcgattcatcaaaagcacgacgca

SEQ ID NO: 418723 - DNA, 30 bp, Artificial Sequence
  Synthetic oligonucleotide
tacgacagagggagtagcatgagcgacgca

SEQ ID NO: 418724 - DNA, 30 bp, Artificial Sequence
  Synthetic oligonucleotide
gattgatcctatccttcttaacaggacgca

SEQ ID NO: 418725 - DNA, 30 bp, Artificial Sequence
  Synthetic oligonucleotide
aagaccaagatggttttccatgtggacgca

SEQ ID NO: 418726 - DNA, 30 bp, Artificial Sequence
  Synthetic oligonucleotide
ttcgtccgtattcaataaattttggacgca

SEQ ID NO: 418727 - DNA, 30 bp, Artificial Sequence
  Synthetic oligonucleotide
catatctactttgatcacaatcatgacgca

SEQ ID NO: 418728 - DNA, 30 bp, Artificial Sequence
  Synthetic oligonucleotide
taatgagaaataccgcaactacttgacgca

SEQ ID NO: 418729 - DNA, 30 bp, Artificial Sequence
  Synthetic oligonucleotide
gaagttcgtatccatggtaacgaatacgca

SEQ ID NO: 418730 - DNA, 30 bp, Artificial Sequence
  Synthetic oligonucleotide
ccacatgcgcggaccggcttcatatacgca

SEQ ID NO: 418731 - DNA, 30 bp, Artificial Sequence
  Synthetic oligonucleotide
taggatgttgtgcccctgggtcactacgca

SEQ ID NO: 418732 - DNA, 30 bp, Artificial Sequence
  Synthetic oligonucleotide
aagaggatttagttatgacttggctacgca

SEQ ID NO: 418733 - DNA, 30 bp, Artificial Sequence
  Synthetic oligonucleotide
cctggctagtgcaggcgtccgacgtacgca

SEQ ID NO: 418734 - DNA, 30 bp, Artificial Sequence
  Synthetic oligonucleotide
tatcaggccaaaggtcacagagcgtacgca

SEQ ID NO: 418735 - DNA, 30 bp, Artificial Sequence
  Synthetic oligonucleotide
acggactacctacttataattgggtacgca

SEQ ID NO: 418736 - DNA, 30 bp, Artificial Sequence
  Synthetic oligonucleotide
tggcaaagagcgcaatgattagtgtacgca

SEQ ID NO: 418737 - DNA, 30 bp, Artificial Sequence
  Synthetic oligonucleotide
ggtactcgccctgtccaaatcgattacgca

SEQ ID NO: 418738 - DNA, 30 bp, Artificial Sequence
  Synthetic oligonucleotide
agccgtttacgactagtatgggattacgca

SEQ ID NO: 418739 - DNA, 30 bp, Artificial Sequence
  Synthetic oligonucleotide
ttactggtcttacaagctcgttattacgca

SEQ ID NO: 418740 - DNA, 30 bp, Artificial Sequence
  Synthetic oligonucleotide
aagtcgcgcaaatcaatgactacttacgca

SEQ ID NO: 418741 - DNA, 30 bp, Artificial Sequence
  Synthetic oligonucleotide
tcgttttagggtggctattgttgttacgca

SEQ ID NO: 418742 - DNA, 30 bp, Artificial Sequence
  Synthetic oligonucleotide
ggataataacagctactaggtgtttacgca

SEQ ID NO: 418743 - DNA, 30 bp, Artificial Sequence
  Synthetic oligonucleotide
ttggagacacgggcgccggggcagaccgca

SEQ ID NO: 418744 - DNA, 30 bp, Artificial Sequence
  Synthetic oligonucleotide
gtgaacggcttcgcagaaaacccgaccgca

SEQ ID NO: 418745 - DNA, 30 bp, Artificial Sequence
  Synthetic oligonucleotide
tcatgggcattactttgcctcgttaccgca

SEQ ID NO: 418746 - DNA, 30 bp, Artificial Sequence
  Synthetic oligonucleotide
aattcaactgccaggaacgccgcacccgca

SEQ ID NO: 418747 - DNA, 30 bp, Artificial Sequence
  Synthetic oligonucleotide
ctgctttggagttagaagcgaggacccgca

SEQ ID NO: 418748 - DNA, 30 bp, Artificial Sequence
  Synthetic oligonucleotide
tggcgacgctgttcaaccggcacccccgca

SEQ ID NO: 418749 - DNA, 30 bp, Artificial Sequence
  Synthetic oligonucleotide
acacgtcaagagcgcggcctgttgcccgca

SEQ ID NO: 418750 - DNA, 30 bp, Artificial Sequence
  Synthetic oligonucleotide
cgcaggcaagagcatctagtgttgcccgca

SEQ ID NO: 418751 - DNA, 30 bp, Artificial Sequence
  Synthetic oligonucleotide
gggagtgagggtctgtcacctgttcccgca

SEQ ID NO: 418752 - DNA, 30 bp, Artificial Sequence
  Synthetic oligonucleotide
ggtaaaagggaagttattacattcgccgca

SEQ ID NO: 418753 - DNA, 30 bp, Artificial Sequence
  Synthetic oligonucleotide
gacttagtggggcgaactactatggccgca

SEQ ID NO: 418754 - DNA, 30 bp, Artificial Sequence
  Synthetic oligonucleotide
tcgatttccgtgtcaatatgggttgccgca

SEQ ID NO: 418755 - DNA, 30 bp, Artificial Sequence
  Synthetic oligonucleotide
accgcttactaacgattacatggatccgca

SEQ ID NO: 418756 - DNA, 30 bp, Artificial Sequence
  Synthetic oligonucleotide
ctggaatctcgttatgtggctatctccgca

SEQ ID NO: 418757 - DNA, 30 bp, Artificial Sequence
  Synthetic oligonucleotide
ccccgaacagcgggaacgagtttctccgca

SEQ ID NO: 418758 - DNA, 30 bp, Artificial Sequence
  Synthetic oligonucleotide
gatcattggaacaatcgtcttcagtccgca

SEQ ID NO: 418759 - DNA, 30 bp, Artificial Sequence
  Synthetic oligonucleotide
ttcaaagggacagcgcaaccggcgtccgca

SEQ ID NO: 418760 - DNA, 30 bp, Artificial Sequence
  Synthetic oligonucleotide
gtttcttctgtcctagcaatctggtccgca

SEQ ID NO: 418761 - DNA, 30 bp, Artificial Sequence
  Synthetic oligonucleotide
ggtgtgggaattctagctgggcattccgca

SEQ ID NO: 418762 - DNA, 30 bp, Artificial Sequence
  Synthetic oligonucleotide
ctccccatcgccagcattatgaaaagcgca

SEQ ID NO: 418763 - DNA, 30 bp, Artificial Sequence
  Synthetic oligonucleotide
gtgttaccctggcacttgaaatgcagcgca

SEQ ID NO: 418764 - DNA, 30 bp, Artificial Sequence
  Synthetic oligonucleotide
aagttctcgcggggcggttagtggagcgca

SEQ ID NO: 418765 - DNA, 30 bp, Artificial Sequence
  Synthetic oligonucleotide
gagggcaatgactctggcatcgctagcgca

SEQ ID NO: 418766 - DNA, 30 bp, Artificial Sequence
  Synthetic oligonucleotide
gcccctaccgtgttagagttagcacgcgca

SEQ ID NO: 418767 - DNA, 30 bp, Artificial Sequence
  Synthetic oligonucleotide
gcctattaatctaggccccattcacgcgca

SEQ ID NO: 418768 - DNA, 30 bp, Artificial Sequence
  Synthetic oligonucleotide
cacaccacagtgtacaccccccgacgcgca

SEQ ID NO: 418769 - DNA, 30 bp, Artificial Sequence
  Synthetic oligonucleotide
ggccatgcgcggggaggactaattcgcgca

SEQ ID NO: 418770 - DNA, 30 bp, Artificial Sequence
  Synthetic oligonucleotide
ttatcgctcggtgcttctgtggaaggcgca

SEQ ID NO: 418771 - DNA, 30 bp, Artificial Sequence
  Synthetic oligonucleotide
atagcgacgcacggcttacctggcggcgca

SEQ ID NO: 418772 - DNA, 30 bp, Artificial Sequence
  Synthetic oligonucleotide
aggagttggtcatctcgggcaatcggcgca

SEQ ID NO: 418773 - DNA, 30 bp, Artificial Sequence
  Synthetic oligonucleotide
ggtaccatgcatccatcaaatcggggcgca

SEQ ID NO: 418774 - DNA, 30 bp, Artificial Sequence
  Synthetic oligonucleotide
gtgttgttctcagtcaggcgcaattgcgca

SEQ ID NO: 418775 - DNA, 30 bp, Artificial Sequence
  Synthetic oligonucleotide
atacggagcgtagcagtattagtttgcgca

SEQ ID NO: 418776 - DNA, 30 bp, Artificial Sequence
  Synthetic oligonucleotide
gaacacgggtgtatgaaatgtacaatcgca

SEQ ID NO: 418777 - DNA, 30 bp, Artificial Sequence
  Synthetic oligonucleotide
atcgtagcgcaatatgacgctgcaatcgca

SEQ ID NO: 418778 - DNA, 30 bp, Artificial Sequence
  Synthetic oligonucleotide
gtagcgcgtcttgagactcacgacatcgca

SEQ ID NO: 418779 - DNA, 30 bp, Artificial Sequence
  Synthetic oligonucleotide
caatctgggccggtcataggatttatcgca

SEQ ID NO: 418780 - DNA, 30 bp, Artificial Sequence
  Synthetic oligonucleotide
gccgttcagatactcaaacctagactcgca

SEQ ID NO: 418781 - DNA, 31 bp, Artificial Sequence
  Synthetic oligonucleotide
tcggtcgcggagaatgcaagagaccctcgca

SEQ ID NO: 418782 - DNA, 30 bp, Artificial Sequence
  Synthetic oligonucleotide
caatcgatatgtatgagatcttagctcgca

SEQ ID NO: 418783 - DNA, 30 bp, Artificial Sequence
  Synthetic oligonucleotide
gggggacgtcaaaatcgggtcacgctcgca

SEQ ID NO: 418784 - DNA, 30 bp, Artificial Sequence
  Synthetic oligonucleotide
ggattatcagaccttatctgattgctcgca

SEQ ID NO: 418785 - DNA, 31 bp, Artificial Sequence
  Synthetic oligonucleotide
cttttcgacgagaagttcggttgctctcgca

SEQ ID NO: 418786 - DNA, 30 bp, Artificial Sequence
  Synthetic oligonucleotide
tcgcggcgcggccctcatgcatgcgtcgca

SEQ ID NO: 418787 - DNA, 31 bp, Artificial Sequence
  Synthetic oligonucleotide
cctagagataaataagcgaatgtaggtcgca

SEQ ID NO: 418788 - DNA, 30 bp, Artificial Sequence
  Synthetic oligonucleotide
tcgctttctggatacttcaagtatgtcgca

SEQ ID NO: 418789 - DNA, 30 bp, Artificial Sequence
  Synthetic oligonucleotide
tcaggtaggttatctatgggggttgtcgca

SEQ ID NO: 418790 - DNA, 30 bp, Artificial Sequence
  Synthetic oligonucleotide
cctggtaacagtagctagttcgaattcgca

SEQ ID NO: 418791 - DNA, 30 bp, Artificial Sequence
  Synthetic oligonucleotide
ttgcggactacgtgcagcgtttaattcgca

SEQ ID NO: 418792 - DNA, 30 bp, Artificial Sequence
  Synthetic oligonucleotide
cgcacgtgatcgcaacacctgagattcgca

SEQ ID NO: 418793 - DNA, 30 bp, Artificial Sequence
  Synthetic oligonucleotide
cattcaacgcaagcgaatatttccttcgca

SEQ ID NO: 418794 - DNA, 30 bp, Artificial Sequence
  Synthetic oligonucleotide
gctataattctgcgagtgacaatcttcgca

SEQ ID NO: 418795 - DNA, 30 bp, Artificial Sequence
  Synthetic oligonucleotide
ggttggccacatgttctatagttcttcgca

SEQ ID NO: 418796 - DNA, 30 bp, Artificial Sequence
  Synthetic oligonucleotide
acagtagccagcgggcagccagagttcgca

SEQ ID NO: 418797 - DNA, 30 bp, Artificial Sequence
  Synthetic oligonucleotide
gtattacaatatatggctgaaacgttcgca

SEQ ID NO: 418798 - DNA, 30 bp, Artificial Sequence
  Synthetic oligonucleotide
gagggcggaaggatggctctttcgttcgca

SEQ ID NO: 418799 - DNA, 30 bp, Artificial Sequence
  Synthetic oligonucleotide
gctatataggtaagttgaataggtttcgca

SEQ ID NO: 418800 - DNA, 30 bp, Artificial Sequence
  Synthetic oligonucleotide
ggatgagttaacagcacttcacaaaaggca

SEQ ID NO: 418801 - DNA, 30 bp, Artificial Sequence
  Synthetic oligonucleotide
ggggcgggtagcgcatgaggtgaaaaggca

SEQ ID NO: 418802 - DNA, 30 bp, Artificial Sequence
  Synthetic oligonucleotide
gtcagcatagccagggtagcagtaaaggca

SEQ ID NO: 418803 - DNA, 30 bp, Artificial Sequence
  Synthetic oligonucleotide
aaatgcgtccctgttgctagggacaaggca

SEQ ID NO: 418804 - DNA, 30 bp, Artificial Sequence
  Synthetic oligonucleotide
gcggtgcggcgccttatgcttgacaaggca

SEQ ID NO: 418805 - DNA, 30 bp, Artificial Sequence
  Synthetic oligonucleotide
aaagggttcctatgtttgtgatacaaggca

SEQ ID NO: 418806 - DNA, 30 bp, Artificial Sequence
  Synthetic oligonucleotide
ttgttttcggtgaacctgagatccaaggca

SEQ ID NO: 418807 - DNA, 30 bp, Artificial Sequence
  Synthetic oligonucleotide
ccctcggaagagcacggcttttgcaaggca

SEQ ID NO: 418808 - DNA, 30 bp, Artificial Sequence
  Synthetic oligonucleotide
ataaaccgtgtttatttttgcaagaaggca

SEQ ID NO: 418809 - DNA, 30 bp, Artificial Sequence
  Synthetic oligonucleotide
gagaaggtgccgtcatggatatataaggca

SEQ ID NO: 418810 - DNA, 30 bp, Artificial Sequence
  Synthetic oligonucleotide
tcggctccaccaagtcgcgttattaaggca

SEQ ID NO: 418811 - DNA, 30 bp, Artificial Sequence
  Synthetic oligonucleotide
acatacctctaaagcgtctggagccaggca

SEQ ID NO: 418812 - DNA, 30 bp, Artificial Sequence
  Synthetic oligonucleotide
atgctcatattcaagtgataatgccaggca

SEQ ID NO: 418813 - DNA, 30 bp, Artificial Sequence
  Synthetic oligonucleotide
ttcggtgaggaatcttattttgtccaggca

SEQ ID NO: 418814 - DNA, 30 bp, Artificial Sequence
  Synthetic oligonucleotide
actcttcttgattcccagcacgatcaggca

SEQ ID NO: 418815 - DNA, 30 bp, Artificial Sequence
  Synthetic oligonucleotide
gcaagttgtcatatttgaattcttcaggca

SEQ ID NO: 418816 - DNA, 30 bp, Artificial Sequence
  Synthetic oligonucleotide
gtgtgcttaaacggagcactggttcaggca

SEQ ID NO: 418817 - DNA, 30 bp, Artificial Sequence
  Synthetic oligonucleotide
gcaaggagcttaatgttcgtttaggaggca

SEQ ID NO: 418818 - DNA, 30 bp, Artificial Sequence
  Synthetic oligonucleotide
gatggtgtacagagcaaaaggggggaggca

SEQ ID NO: 418819 - DNA, 30 bp, Artificial Sequence
  Synthetic oligonucleotide
gagtagatgcgccatattggtatggaggca

SEQ ID NO: 418820 - DNA, 30 bp, Artificial Sequence
  Synthetic oligonucleotide
tgtcaggaccgattgcgctattcataggca

SEQ ID NO: 418821 - DNA, 30 bp, Artificial Sequence
  Synthetic oligonucleotide
gtcccgcatcctgggggggatatataggca

SEQ ID NO: 418822 - DNA, 30 bp, Artificial Sequence
  Synthetic oligonucleotide
accatgtataccagccaccatttataggca

SEQ ID NO: 418823 - DNA, 30 bp, Artificial Sequence
  Synthetic oligonucleotide
agagaggttgatgttgtgtgtcgctaggca

SEQ ID NO: 418824 - DNA, 30 bp, Artificial Sequence
  Synthetic oligonucleotide
aaatgggtcaaagggcattaaaggtaggca

SEQ ID NO: 418825 - DNA, 30 bp, Artificial Sequence
  Synthetic oligonucleotide
tagagagggctgggacggtgaccttaggca

SEQ ID NO: 418826 - DNA, 30 bp, Artificial Sequence
  Synthetic oligonucleotide
tcactgtctaaatgattacccctaacggca

SEQ ID NO: 418827 - DNA, 30 bp, Artificial Sequence
  Synthetic oligonucleotide
cttcgaggttgaaggccccccgtaacggca

SEQ ID NO: 418828 - DNA, 30 bp, Artificial Sequence
  Synthetic oligonucleotide
gatattgcatattagatgcagggcacggca

SEQ ID NO: 418829 - DNA, 30 bp, Artificial Sequence
  Synthetic oligonucleotide
acccatagattgctttacacttctacggca

SEQ ID NO: 418830 - DNA, 30 bp, Artificial Sequence
  Synthetic oligonucleotide
gtaataattaggagcaataccggtacggca

SEQ ID NO: 418831 - DNA, 30 bp, Artificial Sequence
  Synthetic oligonucleotide
cccggcgcggcaagatgtccaataccggca

SEQ ID NO: 418832 - DNA, 30 bp, Artificial Sequence
  Synthetic oligonucleotide
tggggtgtaagtgagcgtgcggccccggca

SEQ ID NO: 418833 - DNA, 30 bp, Artificial Sequence
  Synthetic oligonucleotide
atccactgccgcgggaaccgcagcccggca

SEQ ID NO: 418834 - DNA, 30 bp, Artificial Sequence
  Synthetic oligonucleotide
cagcctaacaccggtttagtaacgccggca

SEQ ID NO: 418835 - DNA, 30 bp, Artificial Sequence
  Synthetic oligonucleotide
catctgatagtagacgtagtacatccggca

SEQ ID NO: 418836 - DNA, 30 bp, Artificial Sequence
  Synthetic oligonucleotide
gggctatcccatattcttattattccggca

SEQ ID NO: 418837 - DNA, 30 bp, Artificial Sequence
  Synthetic oligonucleotide
ccccccagtattgcaagacgatcagcggca

SEQ ID NO: 418838 - DNA, 30 bp, Artificial Sequence
  Synthetic oligonucleotide
cgcgaaaggtagtgatagaccgtagcggca

SEQ ID NO: 418839 - DNA, 30 bp, Artificial Sequence
  Synthetic oligonucleotide
tattgatcagtacgaacaaccgacgcggca

SEQ ID NO: 418840 - DNA, 30 bp, Artificial Sequence
  Synthetic oligonucleotide
taccgaggcatggggtgacggcatgcggca

SEQ ID NO: 418841 - DNA, 30 bp, Artificial Sequence
  Synthetic oligonucleotide
tggttagctgagtgctttcctgctgcggca

SEQ ID NO: 418842 - DNA, 30 bp, Artificial Sequence
  Synthetic oligonucleotide
ctttttttcataaataatgagtttgcggca

SEQ ID NO: 418843 - DNA, 30 bp, Artificial Sequence
  Synthetic oligonucleotide
ggcgcttatgacgatgacataaaatcggca

SEQ ID NO: 418844 - DNA, 30 bp, Artificial Sequence
  Synthetic oligonucleotide
tcttgggccacttcgtcgatccgatcggca

SEQ ID NO: 418845 - DNA, 30 bp, Artificial Sequence
  Synthetic oligonucleotide
aatcttgacccactcaaatacttatcggca

SEQ ID NO: 418846 - DNA, 30 bp, Artificial Sequence
  Synthetic oligonucleotide
gattatttttccgtcgtatgtagctcggca

SEQ ID NO: 418847 - DNA, 30 bp, Artificial Sequence
  Synthetic oligonucleotide
tcttctcgcccgaagttacggacaagggca

SEQ ID NO: 418848 - DNA, 30 bp, Artificial Sequence
  Synthetic oligonucleotide
aagtcggggaactcattattttcaagggca

SEQ ID NO: 418849 - DNA, 30 bp, Artificial Sequence
  Synthetic oligonucleotide
ggggcctacgggttatgaaaccgaagggca

SEQ ID NO: 418850 - DNA, 30 bp, Artificial Sequence
  Synthetic oligonucleotide
cctaaataggtggccgatggtcgaagggca

SEQ ID NO: 418851 - DNA, 30 bp, Artificial Sequence
  Synthetic oligonucleotide
tcccgaatgcgcaagggcatagtaagggca

SEQ ID NO: 418852 - DNA, 30 bp, Artificial Sequence
  Synthetic oligonucleotide
ctagtcggcggccttttgtgactcagggca

SEQ ID NO: 418853 - DNA, 30 bp, Artificial Sequence
  Synthetic oligonucleotide
taagttccgtgttactgtgacaatagggca

SEQ ID NO: 418854 - DNA, 30 bp, Artificial Sequence
  Synthetic oligonucleotide
tgcgtcaacccactgatcgggggtagggca

SEQ ID NO: 418855 - DNA, 30 bp, Artificial Sequence
  Synthetic oligonucleotide
ggctctctttcgttgcatttaaaacgggca

SEQ ID NO: 418856 - DNA, 30 bp, Artificial Sequence
  Synthetic oligonucleotide
atccggacaaatgggttacggaaacgggca

SEQ ID NO: 418857 - DNA, 30 bp, Artificial Sequence
  Synthetic oligonucleotide
atgagaaacatcggtggctggttacgggca

SEQ ID NO: 418858 - DNA, 30 bp, Artificial Sequence
  Synthetic oligonucleotide
taaagggtacgtccggcacagcagcgggca

SEQ ID NO: 418859 - DNA, 30 bp, Artificial Sequence
  Synthetic oligonucleotide
cctgcggttgccctttggcaagctcgggca

SEQ ID NO: 418860 - DNA, 30 bp, Artificial Sequence
  Synthetic oligonucleotide
gaacactactatacctgcttttttcgggca

SEQ ID NO: 418861 - DNA, 30 bp, Artificial Sequence
  Synthetic oligonucleotide
cagtaggctggcatggttgtttacggggca

SEQ ID NO: 418862 - DNA, 30 bp, Artificial Sequence
  Synthetic oligonucleotide
atagaggcaatgcccctagttttcggggca

SEQ ID NO: 418863 - DNA, 30 bp, Artificial Sequence
  Synthetic oligonucleotide
attgctcgggcccacagattcagatgggca

SEQ ID NO: 418864 - DNA, 30 bp, Artificial Sequence
  Synthetic oligonucleotide
gttccttgttcaacatgacccagctgggca

SEQ ID NO: 418865 - DNA, 30 bp, Artificial Sequence
  Synthetic oligonucleotide
ctgtatcggaacgatgatggggtctgggca

SEQ ID NO: 418866 - DNA, 30 bp, Artificial Sequence
  Synthetic oligonucleotide
caaatacttgtggtgagcgcggtgtgggca

SEQ ID NO: 418867 - DNA, 30 bp, Artificial Sequence
  Synthetic oligonucleotide
aatcaataaccaaatctcagttattgggca

SEQ ID NO: 418868 - DNA, 31 bp, Artificial Sequence
  Synthetic oligonucleotide
cggatatgctataaagtctctggaaatggca

SEQ ID NO: 418869 - DNA, 30 bp, Artificial Sequence
  Synthetic oligonucleotide
tagaggcttcagagggatgcgcgaatggca

SEQ ID NO: 418870 - DNA, 30 bp, Artificial Sequence
  Synthetic oligonucleotide
tggtgtcgaagatgcagtaatttaatggca

SEQ ID NO: 418871 - DNA, 30 bp, Artificial Sequence
  Synthetic oligonucleotide
ttttcgtcagggccgggttcaaccatggca

SEQ ID NO: 418872 - DNA, 30 bp, Artificial Sequence
  Synthetic oligonucleotide
cggttatataggccaacagccaggatggca

SEQ ID NO: 418873 - DNA, 30 bp, Artificial Sequence
  Synthetic oligonucleotide
gctaatccctccgtggtgccttttatggca

SEQ ID NO: 418874 - DNA, 30 bp, Artificial Sequence
  Synthetic oligonucleotide
aaaattactctatctatgaatatactggca

SEQ ID NO: 418875 - DNA, 30 bp, Artificial Sequence
  Synthetic oligonucleotide
ccattcgcggttgttatctagtacctggca

SEQ ID NO: 418876 - DNA, 30 bp, Artificial Sequence
  Synthetic oligonucleotide
gataaccgccaacggatgccgtccctggca

SEQ ID NO: 418877 - DNA, 31 bp, Artificial Sequence
  Synthetic oligonucleotide
tcccagaacccaaggaatctcttagctggca

SEQ ID NO: 418878 - DNA, 30 bp, Artificial Sequence
  Synthetic oligonucleotide
cccaatggaaaatacgctaggtgtctggca

SEQ ID NO: 418879 - DNA, 30 bp, Artificial Sequence
  Synthetic oligonucleotide
gtccaatctgcgcctgtacaaattctggca

SEQ ID NO: 418880 - DNA, 30 bp, Artificial Sequence
  Synthetic oligonucleotide
ttttaaatggcgaactattgatgagtggca

SEQ ID NO: 418881 - DNA, 30 bp, Artificial Sequence
  Synthetic oligonucleotide
cttctgcgtattaccattcgatacgtggca

SEQ ID NO: 418882 - DNA, 30 bp, Artificial Sequence
  Synthetic oligonucleotide
tacaacggttcggggtctcggaccgtggca

SEQ ID NO: 418883 - DNA, 30 bp, Artificial Sequence
  Synthetic oligonucleotide
gcgggttctgcgcgtaaggttgtcgtggca

SEQ ID NO: 418884 - DNA, 30 bp, Artificial Sequence
  Synthetic oligonucleotide
gtttacgaggattcgacctcgctggtggca

SEQ ID NO: 418885 - DNA, 30 bp, Artificial Sequence
  Synthetic oligonucleotide
ggagaaaagcttccatcagtattggtggca

SEQ ID NO: 418886 - DNA, 30 bp, Artificial Sequence
  Synthetic oligonucleotide
aacgcactggaacgggttcgatacttggca

SEQ ID NO: 418887 - DNA, 30 bp, Artificial Sequence
  Synthetic oligonucleotide
tactcactgccgtgaaggttgtccttggca

SEQ ID NO: 418888 - DNA, 30 bp, Artificial Sequence
  Synthetic oligonucleotide
agcggttttgatggcaagttattcttggca

SEQ ID NO: 418889 - DNA, 28 bp, Artificial Sequence
  Synthetic oligonucleotide
gctgacccgttatcgtacctcgttggca

SEQ ID NO: 418890 - DNA, 30 bp, Artificial Sequence
  Synthetic oligonucleotide
gaggcgttacattcgctccgcaggttggca

SEQ ID NO: 418891 - DNA, 30 bp, Artificial Sequence
  Synthetic oligonucleotide
caggatatggggaccagcgtgtatttggca

SEQ ID NO: 418892 - DNA, 30 bp, Artificial Sequence
  Synthetic oligonucleotide
gtaatgataagattatgatcttctttggca

SEQ ID NO: 418893 - DNA, 30 bp, Artificial Sequence
  Synthetic oligonucleotide
acataccgctcttcgtcgcgtcgtttggca

SEQ ID NO: 418894 - DNA, 30 bp, Artificial Sequence
  Synthetic oligonucleotide
aataagcccttagtgggcgcagttttggca

SEQ ID NO: 418895 - DNA, 30 bp, Artificial Sequence
  Synthetic oligonucleotide
ctctttggcatacatcaactttgcaatgca

SEQ ID NO: 418896 - DNA, 30 bp, Artificial Sequence
  Synthetic oligonucleotide
atgatggatccccagcctttttataatgca

SEQ ID NO: 418897 - DNA, 30 bp, Artificial Sequence
  Synthetic oligonucleotide
cccctctgtgtttccgctcgcggacatgca

SEQ ID NO: 418898 - DNA, 30 bp, Artificial Sequence
  Synthetic oligonucleotide
ctccggtaaataagggtcttcaaccatgca

SEQ ID NO: 418899 - DNA, 30 bp, Artificial Sequence
  Synthetic oligonucleotide
ttctggtaaaccccagaccgcgcccatgca

SEQ ID NO: 418900 - DNA, 30 bp, Artificial Sequence
  Synthetic oligonucleotide
gtcttgcacggtcaatgggctggccatgca

SEQ ID NO: 418901 - DNA, 30 bp, Artificial Sequence
  Synthetic oligonucleotide
gggttatacggagtcgaaacatgccatgca

SEQ ID NO: 418902 - DNA, 30 bp, Artificial Sequence
  Synthetic oligonucleotide
cacatcaactttgccgagatcaagcatgca

SEQ ID NO: 418903 - DNA, 30 bp, Artificial Sequence
  Synthetic oligonucleotide
gcttgcccaccgtcaagcggtgtgcatgca

SEQ ID NO: 418904 - DNA, 30 bp, Artificial Sequence
  Synthetic oligonucleotide
gttggtagcatctctccacttcaagatgca

SEQ ID NO: 418905 - DNA, 30 bp, Artificial Sequence
  Synthetic oligonucleotide
ggactaacattccgggttactttagatgca

SEQ ID NO: 418906 - DNA, 30 bp, Artificial Sequence
  Synthetic oligonucleotide
cttgactgggtccttggtacaaacgatgca

SEQ ID NO: 418907 - DNA, 30 bp, Artificial Sequence
  Synthetic oligonucleotide
ctttgccagcccgagtgagacgacgatgca

SEQ ID NO: 418908 - DNA, 30 bp, Artificial Sequence
  Synthetic oligonucleotide
ttttgacgtcaccgagactggggcgatgca

SEQ ID NO: 418909 - DNA, 30 bp, Artificial Sequence
  Synthetic oligonucleotide
atacgttataacaacaaccttgtcgatgca

SEQ ID NO: 418910 - DNA, 30 bp, Artificial Sequence
  Synthetic oligonucleotide
gtgtgacaaaaagtattgatgtgggatgca

SEQ ID NO: 418911 - DNA, 30 bp, Artificial Sequence
  Synthetic oligonucleotide
aggtatttgaatcagaactatgatgatgca

SEQ ID NO: 418912 - DNA, 29 bp, Artificial Sequence
  Synthetic oligonucleotide
gacatctgatcaagtacgggcgtgatgca

SEQ ID NO: 418913 - DNA, 30 bp, Artificial Sequence
  Synthetic oligonucleotide
aaatgggggcaaccttgaccgggatatgca

SEQ ID NO: 418914 - DNA, 30 bp, Artificial Sequence
  Synthetic oligonucleotide
aatcgcgactcgcgccacccattatatgca

SEQ ID NO: 418915 - DNA, 30 bp, Artificial Sequence
  Synthetic oligonucleotide
cagcttcgtggataggagatcaactatgca

SEQ ID NO: 418916 - DNA, 30 bp, Artificial Sequence
  Synthetic oligonucleotide
acgatcgcatagcaccataaggactatgca

SEQ ID NO: 418917 - DNA, 30 bp, Artificial Sequence
  Synthetic oligonucleotide
ttgaacggcgcttaaagttagggctatgca

SEQ ID NO: 418918 - DNA, 30 bp, Artificial Sequence
  Synthetic oligonucleotide
caagcatgtaggcccatagacaagtatgca

SEQ ID NO: 418919 - DNA, 30 bp, Artificial Sequence
  Synthetic oligonucleotide
tggcttgcctcgaatggcctcaggtatgca

SEQ ID NO: 418920 - DNA, 30 bp, Artificial Sequence
  Synthetic oligonucleotide
ttcgtccgtgcagtacaggaaagttatgca

SEQ ID NO: 418921 - DNA, 30 bp, Artificial Sequence
  Synthetic oligonucleotide
aatactcgagggctgaactctctttatgca

SEQ ID NO: 418922 - DNA, 30 bp, Artificial Sequence
  Synthetic oligonucleotide
ttgctgacgtgtatcggggttataactgca

SEQ ID NO: 418923 - DNA, 30 bp, Artificial Sequence
  Synthetic oligonucleotide
tggcgcagtcatccctgaggcctaactgca

SEQ ID NO: 418924 - DNA, 30 bp, Artificial Sequence
  Synthetic oligonucleotide
gttatggtgtcccaacgatgggtcactgca

SEQ ID NO: 418925 - DNA, 30 bp, Artificial Sequence
  Synthetic oligonucleotide
ggtcaaccaccactgggtatatggactgca

SEQ ID NO: 418926 - DNA, 30 bp, Artificial Sequence
  Synthetic oligonucleotide
ccgactgatagtgggaaccccaatactgca

SEQ ID NO: 418927 - DNA, 30 bp, Artificial Sequence
  Synthetic oligonucleotide
gattcacacagccgttgacgcactactgca

SEQ ID NO: 418928 - DNA, 30 bp, Artificial Sequence
  Synthetic oligonucleotide
tgcgctacgacaagtcgtttacgtactgca

SEQ ID NO: 418929 - DNA, 30 bp, Artificial Sequence
  Synthetic oligonucleotide
tcgggcctcgtgcgttgttaaggtactgca

SEQ ID NO: 418930 - DNA, 30 bp, Artificial Sequence
  Synthetic oligonucleotide
ccccgtttacctgattggatttaacctgca

SEQ ID NO: 418931 - DNA, 30 bp, Artificial Sequence
  Synthetic oligonucleotide
ccattggggtgtaaacacgtgacacctgca

SEQ ID NO: 418932 - DNA, 30 bp, Artificial Sequence
  Synthetic oligonucleotide
tggtttcggccttaggcccagccacctgca

SEQ ID NO: 418933 - DNA, 30 bp, Artificial Sequence
  Synthetic oligonucleotide
cccgtccgccacgttgataggtctcctgca

SEQ ID NO: 418934 - DNA, 30 bp, Artificial Sequence
  Synthetic oligonucleotide
acttaccttggaccaccccggcccgctgca

SEQ ID NO: 418935 - DNA, 30 bp, Artificial Sequence
  Synthetic oligonucleotide
acgatttttgccaggcgattcatcgctgca

SEQ ID NO: 418936 - DNA, 30 bp, Artificial Sequence
  Synthetic oligonucleotide
tgagtttgaatattgtgatcgatcgctgca

SEQ ID NO: 418937 - DNA, 30 bp, Artificial Sequence
  Synthetic oligonucleotide
cattttctagttggcgaccgattcgctgca

SEQ ID NO: 418938 - DNA, 30 bp, Artificial Sequence
  Synthetic oligonucleotide
cggttcggacttttcgcacgtaatgctgca

SEQ ID NO: 418939 - DNA, 30 bp, Artificial Sequence
  Synthetic oligonucleotide
gcatgcgaaacatgtacgaaccatgctgca

SEQ ID NO: 418940 - DNA, 30 bp, Artificial Sequence
  Synthetic oligonucleotide
aatttggtcgacagaaaccggagtgctgca

SEQ ID NO: 418941 - DNA, 30 bp, Artificial Sequence
  Synthetic oligonucleotide
gcgcctgtttcatattgttggccatctgca

SEQ ID NO: 418942 - DNA, 30 bp, Artificial Sequence
  Synthetic oligonucleotide
tccaaattctgggccatcctattatctgca

SEQ ID NO: 418943 - DNA, 30 bp, Artificial Sequence
  Synthetic oligonucleotide
tgctgtgtcgaaataatattgatctctgca

SEQ ID NO: 418944 - DNA, 30 bp, Artificial Sequence
  Synthetic oligonucleotide
tgggcgctgcaacgtagcagggtctctgca

SEQ ID NO: 418945 - DNA, 30 bp, Artificial Sequence
  Synthetic oligonucleotide
aggctccgcgctgaggacgtaatgtctgca

SEQ ID NO: 418946 - DNA, 30 bp, Artificial Sequence
  Synthetic oligonucleotide
ttaattattcgaggatagcgttgttctgca

SEQ ID NO: 418947 - DNA, 30 bp, Artificial Sequence
  Synthetic oligonucleotide
atgggactatttggcatacttatttctgca

SEQ ID NO: 418948 - DNA, 30 bp, Artificial Sequence
  Synthetic oligonucleotide
gaggttgtaacaaacgaggaactttctgca

SEQ ID NO: 418949 - DNA, 30 bp, Artificial Sequence
  Synthetic oligonucleotide
tccgttcgtagggttcacttgaacagtgca

SEQ ID NO: 418950 - DNA, 30 bp, Artificial Sequence
  Synthetic oligonucleotide
gtgcgaaatgggtgcattcacatcagtgca

SEQ ID NO: 418951 - DNA, 30 bp, Artificial Sequence
  Synthetic oligonucleotide
gctacataccccataaagtcgtatagtgca

SEQ ID NO: 418952 - DNA, 30 bp, Artificial Sequence
  Synthetic oligonucleotide
gaaattcgtaggatgtaagcccgacgtgca

SEQ ID NO: 418953 - DNA, 30 bp, Artificial Sequence
  Synthetic oligonucleotide
cacacatatcttgttttactgtgacgtgca

SEQ ID NO: 418954 - DNA, 30 bp, Artificial Sequence
  Synthetic oligonucleotide
ccgatcttctacgacagcgtcgtccgtgca

SEQ ID NO: 418955 - DNA, 30 bp, Artificial Sequence
  Synthetic oligonucleotide
tcaagttccactgggtttcctcttcgtgca

SEQ ID NO: 418956 - DNA, 30 bp, Artificial Sequence
  Synthetic oligonucleotide
agttttaagcaggaatttcttagaggtgca

SEQ ID NO: 418957 - DNA, 30 bp, Artificial Sequence
  Synthetic oligonucleotide
ggctgcatgttttgagccaatctcggtgca

SEQ ID NO: 418958 - DNA, 30 bp, Artificial Sequence
  Synthetic oligonucleotide
atgtcgctattatctgtgttgcagggtgca

SEQ ID NO: 418959 - DNA, 30 bp, Artificial Sequence
  Synthetic oligonucleotide
gcgactgaacacttcccacttttgggtgca

SEQ ID NO: 418960 - DNA, 30 bp, Artificial Sequence
  Synthetic oligonucleotide
ccggttcccgtcacgggcccctatggtgca

SEQ ID NO: 418961 - DNA, 30 bp, Artificial Sequence
  Synthetic oligonucleotide
attggtttgtcacaggcatgaactggtgca

SEQ ID NO: 418962 - DNA, 30 bp, Artificial Sequence
  Synthetic oligonucleotide
attggattacaggtacataacactggtgca

SEQ ID NO: 418963 - DNA, 30 bp, Artificial Sequence
  Synthetic oligonucleotide
gtatgcgctccacattacctttctggtgca

SEQ ID NO: 418964 - DNA, 30 bp, Artificial Sequence
  Synthetic oligonucleotide
cggaaactacgacgtggcccgggtggtgca

SEQ ID NO: 418965 - DNA, 30 bp, Artificial Sequence
  Synthetic oligonucleotide
ttgcccgtagctggaggctcgatctgtgca

SEQ ID NO: 418966 - DNA, 30 bp, Artificial Sequence
  Synthetic oligonucleotide
acatcacgggccgtgccaatgttctgtgca

SEQ ID NO: 418967 - DNA, 30 bp, Artificial Sequence
  Synthetic oligonucleotide
acggagatgccaagcaagctaacttgtgca

SEQ ID NO: 418968 - DNA, 30 bp, Artificial Sequence
  Synthetic oligonucleotide
attggcattgggcggacccgaggttgtgca

SEQ ID NO: 418969 - DNA, 30 bp, Artificial Sequence
  Synthetic oligonucleotide
gaggatgcagcctgaggattgggttgtgca

SEQ ID NO: 418970 - DNA, 30 bp, Artificial Sequence
  Synthetic oligonucleotide
gaaggatcgtcggtccacttgaggattgca

SEQ ID NO: 418971 - DNA, 30 bp, Artificial Sequence
  Synthetic oligonucleotide
tctaggggttctctgtgttaagatattgca

SEQ ID NO: 418972 - DNA, 30 bp, Artificial Sequence
  Synthetic oligonucleotide
ctgataactatagaccacgaccctattgca

SEQ ID NO: 418973 - DNA, 30 bp, Artificial Sequence
  Synthetic oligonucleotide
tctgacaccatggtcttccgatttattgca

SEQ ID NO: 418974 - DNA, 30 bp, Artificial Sequence
  Synthetic oligonucleotide
cggatatttagcgccaggcatgcacttgca

SEQ ID NO: 418975 - DNA, 30 bp, Artificial Sequence
  Synthetic oligonucleotide
cggtagtcgcaagggcattttgcacttgca

SEQ ID NO: 418976 - DNA, 30 bp, Artificial Sequence
  Synthetic oligonucleotide
gatccgtggcgcctgtgcttgtagcttgca

SEQ ID NO: 418977 - DNA, 30 bp, Artificial Sequence
  Synthetic oligonucleotide
acaactagcctcattatggctaggcttgca

SEQ ID NO: 418978 - DNA, 30 bp, Artificial Sequence
  Synthetic oligonucleotide
tttcggcgagtgatgtaaaaaattcttgca

SEQ ID NO: 418979 - DNA, 30 bp, Artificial Sequence
  Synthetic oligonucleotide
tcgtgatatctgactgaagcaattcttgca

SEQ ID NO: 418980 - DNA, 30 bp, Artificial Sequence
  Synthetic oligonucleotide
gagaataactttgggtcatcagttcttgca

SEQ ID NO: 418981 - DNA, 30 bp, Artificial Sequence
  Synthetic oligonucleotide
tggttatccggcggggattcctcagttgca

SEQ ID NO: 418982 - DNA, 30 bp, Artificial Sequence
  Synthetic oligonucleotide
cttcgacgaacgcgctcggcacgagttgca

SEQ ID NO: 418983 - DNA, 30 bp, Artificial Sequence
  Synthetic oligonucleotide
tagcggggccgtttgtggtgttgagttgca

SEQ ID NO: 418984 - DNA, 30 bp, Artificial Sequence
  Synthetic oligonucleotide
gggtaggcactgttcggggaacaggttgca

SEQ ID NO: 418985 - DNA, 30 bp, Artificial Sequence
  Synthetic oligonucleotide
ctctactctcggggcactactacggttgca

SEQ ID NO: 418986 - DNA, 30 bp, Artificial Sequence
  Synthetic oligonucleotide
atggccagcttattatcccgagcggttgca

SEQ ID NO: 418987 - DNA, 30 bp, Artificial Sequence
  Synthetic oligonucleotide
cgccaaggtcgagttcatagttttgttgca

SEQ ID NO: 418988 - DNA, 30 bp, Artificial Sequence
  Synthetic oligonucleotide
aaattccctggaaaacgctttagatttgca

SEQ ID NO: 418989 - DNA, 30 bp, Artificial Sequence
  Synthetic oligonucleotide
atgcagctctgaaagaatgccacctttgca

SEQ ID NO: 418990 - DNA, 31 bp, Artificial Sequence
  Synthetic oligonucleotide
gataatttaatcccatgcatgaatctttgca

SEQ ID NO: 418991 - DNA, 30 bp, Artificial Sequence
  Synthetic oligonucleotide
gacgtgacgttgcgactaaccgagtttgca

SEQ ID NO: 418992 - DNA, 30 bp, Artificial Sequence
  Synthetic oligonucleotide
acggcctatagttttccatggccgtttgca

SEQ ID NO: 418993 - DNA, 30 bp, Artificial Sequence
  Synthetic oligonucleotide
aaaatagctggagtcacacattggtttgca

SEQ ID NO: 418994 - DNA, 30 bp, Artificial Sequence
  Synthetic oligonucleotide
gcttttagcacggcgtcccagctgtttgca

SEQ ID NO: 418995 - DNA, 30 bp, Artificial Sequence
  Synthetic oligonucleotide
aatcgtcactgttgtctaacaatttttgca

SEQ ID NO: 418996 - DNA, 29 bp, Artificial Sequence
  Synthetic oligonucleotide
tacacttcgagccttttcaataaaaatca

SEQ ID NO: 418997 - DNA, 30 bp, Artificial Sequence
  Synthetic oligonucleotide
ctctcagttaccgccttgtcatccaaatca

SEQ ID NO: 418998 - DNA, 30 bp, Artificial Sequence
  Synthetic oligonucleotide
tgacgtagtctaagatggtagtccaaatca

SEQ ID NO: 418999 - DNA, 30 bp, Artificial Sequence
  Synthetic oligonucleotide
agaattgcatagagtacctgtcgcaaatca

SEQ ID NO: 419000 - DNA, 30 bp, Artificial Sequence
  Synthetic oligonucleotide
tttattgcgtgatgaaggaatggcaaatca

SEQ ID NO: 419001 - DNA, 30 bp, Artificial Sequence
  Synthetic oligonucleotide
acgattgggtcaaaccctcctttcaaatca

SEQ ID NO: 419002 - DNA, 30 bp, Artificial Sequence
  Synthetic oligonucleotide
cgtaacctgatatgtccggcttggaaatca

SEQ ID NO: 419003 - DNA, 30 bp, Artificial Sequence
  Synthetic oligonucleotide
gtctgtcacttcgagtgggcgatgaaatca

SEQ ID NO: 419004 - DNA, 30 bp, Artificial Sequence
  Synthetic oligonucleotide
ttaacttgttcaaggcgtccgcctaaatca

SEQ ID NO: 419005 - DNA, 30 bp, Artificial Sequence
  Synthetic oligonucleotide
gggggcacacagcgggaattttgtaaatca

SEQ ID NO: 419006 - DNA, 30 bp, Artificial Sequence
  Synthetic oligonucleotide
ttcttggcggagatattgacgtgacaatca

SEQ ID NO: 419007 - DNA, 30 bp, Artificial Sequence
  Synthetic oligonucleotide
cagcagcgccttcggttgagtgtacaatca

SEQ ID NO: 419008 - DNA, 30 bp, Artificial Sequence
  Synthetic oligonucleotide
agttatactctttctcggatattacaatca

SEQ ID NO: 419009 - DNA, 30 bp, Artificial Sequence
  Synthetic oligonucleotide
tctagaagtgcctgagaatttttacaatca

SEQ ID NO: 419010 - DNA, 30 bp, Artificial Sequence
  Synthetic oligonucleotide
tctagatcgctctattagcgaacgcaatca

SEQ ID NO: 419011 - DNA, 30 bp, Artificial Sequence
  Synthetic oligonucleotide
tttcggttccaaggtgcatgatcgcaatca

SEQ ID NO: 419012 - DNA, 30 bp, Artificial Sequence
  Synthetic oligonucleotide
tgcaatagctggcaaagcttgtcgcaatca

SEQ ID NO: 419013 - DNA, 30 bp, Artificial Sequence
  Synthetic oligonucleotide
ctcgataaccggatccacgccatgcaatca

SEQ ID NO: 419014 - DNA, 30 bp, Artificial Sequence
  Synthetic oligonucleotide
cccaattcgcttgagcagggactagaatca

SEQ ID NO: 419015 - DNA, 30 bp, Artificial Sequence
  Synthetic oligonucleotide
atgcgacaagtaattagttccgtagaatca

SEQ ID NO: 419016 - DNA, 30 bp, Artificial Sequence
  Synthetic oligonucleotide
gagtactcttctagcggctggaacgaatca

SEQ ID NO: 419017 - DNA, 30 bp, Artificial Sequence
  Synthetic oligonucleotide
ctcgcagttaccgccttgtcatccgaatca

SEQ ID NO: 419018 - DNA, 30 bp, Artificial Sequence
  Synthetic oligonucleotide
gtgaaaaccctggcagcctatgaggaatca

SEQ ID NO: 419019 - DNA, 30 bp, Artificial Sequence
  Synthetic oligonucleotide
ccagtctgattactaacccggtaggaatca

SEQ ID NO: 419020 - DNA, 30 bp, Artificial Sequence
  Synthetic oligonucleotide
tccctggtcaaatgatttcgtgtggaatca

SEQ ID NO: 419021 - DNA, 30 bp, Artificial Sequence
  Synthetic oligonucleotide
acataagatcctgtctgtcttttggaatca

SEQ ID NO: 419022 - DNA, 30 bp, Artificial Sequence
  Synthetic oligonucleotide
taggagaaggcgtcgtggagctatgaatca

SEQ ID NO: 419023 - DNA, 30 bp, Artificial Sequence
  Synthetic oligonucleotide
gagcacgaaagaatctcacgccttgaatca

SEQ ID NO: 419024 - DNA, 30 bp, Artificial Sequence
  Synthetic oligonucleotide
ctgacgattgaagcatgcactgttgaatca

SEQ ID NO: 419025 - DNA, 30 bp, Artificial Sequence
  Synthetic oligonucleotide
ctcgggcgcaccaggggatcgacataatca

SEQ ID NO: 419026 - DNA, 30 bp, Artificial Sequence
  Synthetic oligonucleotide
attttagacggtgagtttcctctataatca

SEQ ID NO: 419027 - DNA, 30 bp, Artificial Sequence
  Synthetic oligonucleotide
cagtagtaccacgtacgctgcccctaatca

SEQ ID NO: 419028 - DNA, 30 bp, Artificial Sequence
  Synthetic oligonucleotide
ataatcttttgtcaggagtaattctaatca

SEQ ID NO: 419029 - DNA, 30 bp, Artificial Sequence
  Synthetic oligonucleotide
gatatacaggcaggtagttgttcttaatca

SEQ ID NO: 419030 - DNA, 30 bp, Artificial Sequence
  Synthetic oligonucleotide
atcactgaggatgatcagcatagttaatca

SEQ ID NO: 419031 - DNA, 30 bp, Artificial Sequence
  Synthetic oligonucleotide
ttgatcgtaaatcgccgagcggaaacatca

SEQ ID NO: 419032 - DNA, 30 bp, Artificial Sequence
  Synthetic oligonucleotide
gtttgtggccaagtcagtagggtaacatca

SEQ ID NO: 419033 - DNA, 30 bp, Artificial Sequence
  Synthetic oligonucleotide
ttagggcatgaatgttgagcgttaacatca

SEQ ID NO: 419034 - DNA, 30 bp, Artificial Sequence
  Synthetic oligonucleotide
tggttgatccgaattaacttcatcacatca

SEQ ID NO: 419035 - DNA, 30 bp, Artificial Sequence
  Synthetic oligonucleotide
ggtgccagaaaccagggcctctggacatca

SEQ ID NO: 419036 - DNA, 30 bp, Artificial Sequence
  Synthetic oligonucleotide
aacgagtgacttgggggaggagtgacatca

SEQ ID NO: 419037 - DNA, 30 bp, Artificial Sequence
  Synthetic oligonucleotide
gtaatgagctgttcccacggcggtacatca

SEQ ID NO: 419038 - DNA, 30 bp, Artificial Sequence
  Synthetic oligonucleotide
gaaaagtgtcttgatagattgcttacatca

SEQ ID NO: 419039 - DNA, 30 bp, Artificial Sequence
  Synthetic oligonucleotide
ctcccttaatgggcgctatgttaaccatca

SEQ ID NO: 419040 - DNA, 30 bp, Artificial Sequence
  Synthetic oligonucleotide
tttgggagcccgactaacatcgtaccatca

SEQ ID NO: 419041 - DNA, 30 bp, Artificial Sequence
  Synthetic oligonucleotide
attgaagcacggcgcagattactcccatca

SEQ ID NO: 419042 - DNA, 30 bp, Artificial Sequence
  Synthetic oligonucleotide
tccaatgtattacggggggttattccatca

SEQ ID NO: 419043 - DNA, 31 bp, Artificial Sequence
  Synthetic oligonucleotide
ttcaagaagccctctgtagccgggagcatca

SEQ ID NO: 419044 - DNA, 30 bp, Artificial Sequence
  Synthetic oligonucleotide
gaataggccgccgcttcagctctggcatca

SEQ ID NO: 419045 - DNA, 30 bp, Artificial Sequence
  Synthetic oligonucleotide
atttgggttcagtgacttaaaactgcatca

SEQ ID NO: 419046 - DNA, 30 bp, Artificial Sequence
  Synthetic oligonucleotide
gcgctccaaagacagtctgttgcatcatca

SEQ ID NO: 419047 - DNA, 30 bp, Artificial Sequence
  Synthetic oligonucleotide
ctctctcacgcaaggcgcgcttcatcatca

SEQ ID NO: 419048 - DNA, 30 bp, Artificial Sequence
  Synthetic oligonucleotide
gctctggatgtgacgatataatgatcatca

SEQ ID NO: 419049 - DNA, 30 bp, Artificial Sequence
  Synthetic oligonucleotide
ataaaccgcggcgctactcagatatcatca

SEQ ID NO: 419050 - DNA, 30 bp, Artificial Sequence
  Synthetic oligonucleotide
attaccggtgatagccgccttgactcatca

SEQ ID NO: 419051 - DNA, 30 bp, Artificial Sequence
  Synthetic oligonucleotide
ggacgcgctattggccggcggggctcatca

SEQ ID NO: 419052 - DNA, 30 bp, Artificial Sequence
  Synthetic oligonucleotide
ctatttccccagccgctaacgggttcatca

SEQ ID NO: 419053 - DNA, 30 bp, Artificial Sequence
  Synthetic oligonucleotide
ctcgggagacagcttttattctaaagatca

SEQ ID NO: 419054 - DNA, 30 bp, Artificial Sequence
  Synthetic oligonucleotide
tatgttcttgcgacagtcaattaaagatca

SEQ ID NO: 419055 - DNA, 30 bp, Artificial Sequence
  Synthetic oligonucleotide
tttcgaggggtagctgcctgttaaagatca

SEQ ID NO: 419056 - DNA, 30 bp, Artificial Sequence
  Synthetic oligonucleotide
tttcagggacatagcttgcatgcaagatca

SEQ ID NO: 419057 - DNA, 30 bp, Artificial Sequence
  Synthetic oligonucleotide
tatggggccttgaggagtcagagaagatca

SEQ ID NO: 419058 - DNA, 30 bp, Artificial Sequence
  Synthetic oligonucleotide
tagaatacatgagggttctggtgaagatca

SEQ ID NO: 419059 - DNA, 30 bp, Artificial Sequence
  Synthetic oligonucleotide
aatacagtgggttaaccccggcccagatca

SEQ ID NO: 419060 - DNA, 30 bp, Artificial Sequence
  Synthetic oligonucleotide
gtcgcaagcgtctaccgttttcgcagatca

SEQ ID NO: 419061 - DNA, 30 bp, Artificial Sequence
  Synthetic oligonucleotide
ggtagatatggccttccaccaggcagatca

SEQ ID NO: 419062 - DNA, 30 bp, Artificial Sequence
  Synthetic oligonucleotide
gaaagtctttgaagggcgtgcatcagatca

SEQ ID NO: 419063 - DNA, 30 bp, Artificial Sequence
  Synthetic oligonucleotide
aatgattggggggttacactcaggagatca

SEQ ID NO: 419064 - DNA, 30 bp, Artificial Sequence
  Synthetic oligonucleotide
acagaatcttggtccggcttgcggagatca

SEQ ID NO: 419065 - DNA, 30 bp, Artificial Sequence
  Synthetic oligonucleotide
ttgttggatgagtttgatgaggtgagatca

SEQ ID NO: 419066 - DNA, 30 bp, Artificial Sequence
  Synthetic oligonucleotide
gccacgctggtcacatatgttgttagatca

SEQ ID NO: 419067 - DNA, 30 bp, Artificial Sequence
  Synthetic oligonucleotide
aaatggtctttgaggttgggcagacgatca

SEQ ID NO: 419068 - DNA, 30 bp, Artificial Sequence
  Synthetic oligonucleotide
gctatctcgcactaaattaacccgcgatca

SEQ ID NO: 419069 - DNA, 30 bp, Artificial Sequence
  Synthetic oligonucleotide
ttgacctcgtactcgcacagtgatcgatca

SEQ ID NO: 419070 - DNA, 30 bp, Artificial Sequence
  Synthetic oligonucleotide
gactgcgctctaagagcggctgttcgatca

SEQ ID NO: 419071 - DNA, 30 bp, Artificial Sequence
  Synthetic oligonucleotide
aataggacggacagaaacgttgttcgatca

SEQ ID NO: 419072 - DNA, 30 bp, Artificial Sequence
  Synthetic oligonucleotide
gacttgtattgcgacatgtggtttcgatca

SEQ ID NO: 419073 - DNA, 30 bp, Artificial Sequence
  Synthetic oligonucleotide
cccagttgcaagacggagaagtgcggatca

SEQ ID NO: 419074 - DNA, 30 bp, Artificial Sequence
  Synthetic oligonucleotide
acatgtccggggctgatatagacgggatca

SEQ ID NO: 419075 - DNA, 30 bp, Artificial Sequence
  Synthetic oligonucleotide
atggaacatcgggctcttataggtggatca

SEQ ID NO: 419076 - DNA, 30 bp, Artificial Sequence
  Synthetic oligonucleotide
aagcacgagctctaggttcacggatgatca

SEQ ID NO: 419077 - DNA, 30 bp, Artificial Sequence
  Synthetic oligonucleotide
gctactctggcagcgttgcatggatgatca

SEQ ID NO: 419078 - DNA, 30 bp, Artificial Sequence
  Synthetic oligonucleotide
ctgcgtaggcagccatagataggctgatca

SEQ ID NO: 419079 - DNA, 30 bp, Artificial Sequence
  Synthetic oligonucleotide
ggttgggacgtaatactttgagtctgatca

SEQ ID NO: 419080 - DNA, 30 bp, Artificial Sequence
  Synthetic oligonucleotide
ccgcttaacgcctgaagttggttctgatca

SEQ ID NO: 419081 - DNA, 30 bp, Artificial Sequence
  Synthetic oligonucleotide
taacgggtttggtgttgaggcgagtgatca

SEQ ID NO: 419082 - DNA, 30 bp, Artificial Sequence
  Synthetic oligonucleotide
gggtataacagctttaaaagtcggtgatca

SEQ ID NO: 419083 - DNA, 30 bp, Artificial Sequence
  Synthetic oligonucleotide
aataggttgagggggaagggggggtgatca

SEQ ID NO: 419084 - DNA, 30 bp, Artificial Sequence
  Synthetic oligonucleotide
ttgatctttgttgggtacagcgcttgatca

SEQ ID NO: 419085 - DNA, 30 bp, Artificial Sequence
  Synthetic oligonucleotide
ggtaatgcatctatgttggcggcttgatca

SEQ ID NO: 419086 - DNA, 30 bp, Artificial Sequence
  Synthetic oligonucleotide
ctatcacgtctgctagacgcaccaatatca

SEQ ID NO: 419087 - DNA, 30 bp, Artificial Sequence
  Synthetic oligonucleotide
ttggactgaccgcatgtagctggcatatca

SEQ ID NO: 419088 - DNA, 30 bp, Artificial Sequence
  Synthetic oligonucleotide
gaccgacgcggaaactttgctttcatatca

SEQ ID NO: 419089 - DNA, 30 bp, Artificial Sequence
  Synthetic oligonucleotide
aagccgatatttgtctaaaggccgatatca

SEQ ID NO: 419090 - DNA, 30 bp, Artificial Sequence
  Synthetic oligonucleotide
tgagcagctcagttcatcccggggatatca

SEQ ID NO: 419091 - DNA, 30 bp, Artificial Sequence
  Synthetic oligonucleotide
gctgtcagcgagagttattggctgatatca

SEQ ID NO: 419092 - DNA, 30 bp, Artificial Sequence
  Synthetic oligonucleotide
tggtaggttaggcgagggtgacttatatca

SEQ ID NO: 419093 - DNA, 30 bp, Artificial Sequence
  Synthetic oligonucleotide
atggattatttgaacatgtccgttatatca

SEQ ID NO: 419094 - DNA, 30 bp, Artificial Sequence
  Synthetic oligonucleotide
tttctttgagggtaccggtgtcgactatca

SEQ ID NO: 419095 - DNA, 30 bp, Artificial Sequence
  Synthetic oligonucleotide
gggcgcatgccatgggcgttcttactatca

SEQ ID NO: 419096 - DNA, 30 bp, Artificial Sequence
  Synthetic oligonucleotide
gctcagttcttgtctcaaagacacctatca

SEQ ID NO: 419097 - DNA, 30 bp, Artificial Sequence
  Synthetic oligonucleotide
tgtaaggtaatggagctcagtgccctatca

SEQ ID NO: 419098 - DNA, 30 bp, Artificial Sequence
  Synthetic oligonucleotide
ttaatccctagcgatttaatggtcctatca

SEQ ID NO: 419099 - DNA, 30 bp, Artificial Sequence
  Synthetic oligonucleotide
tcctcccagtcctttgcgtctgtcctatca

SEQ ID NO: 419100 - DNA, 30 bp, Artificial Sequence
  Synthetic oligonucleotide
atcaggcgacgcccacgcctggttctatca

SEQ ID NO: 419101 - DNA, 30 bp, Artificial Sequence
  Synthetic oligonucleotide
aagagacatggttatcgcatatttctatca

SEQ ID NO: 419102 - DNA, 30 bp, Artificial Sequence
  Synthetic oligonucleotide
cgcagtttaaggaaaaccaagaaagtatca

SEQ ID NO: 419103 - DNA, 30 bp, Artificial Sequence
  Synthetic oligonucleotide
cgaagtttcgggccttcgcgctaagtatca

SEQ ID NO: 419104 - DNA, 30 bp, Artificial Sequence
  Synthetic oligonucleotide
ttgtgatgttctccccctgggggagtatca

SEQ ID NO: 419105 - DNA, 30 bp, Artificial Sequence
  Synthetic oligonucleotide
gagctttcgtgacttaacaacgacgtatca

SEQ ID NO: 419106 - DNA, 30 bp, Artificial Sequence
  Synthetic oligonucleotide
gcgttatttaacacgggcacaaccgtatca

SEQ ID NO: 419107 - DNA, 30 bp, Artificial Sequence
  Synthetic oligonucleotide
gggcctagtagctgctatcggttggtatca

SEQ ID NO: 419108 - DNA, 30 bp, Artificial Sequence
  Synthetic oligonucleotide
atgatataagacaggtgtttatgtgtatca

SEQ ID NO: 419109 - DNA, 30 bp, Artificial Sequence
  Synthetic oligonucleotide
gttgtttttcttggctaaacttaattatca

SEQ ID NO: 419110 - DNA, 30 bp, Artificial Sequence
  Synthetic oligonucleotide
attcccacattccagaggaggacattatca

SEQ ID NO: 419111 - DNA, 30 bp, Artificial Sequence
  Synthetic oligonucleotide
tgctcgtcaaactgttcgtaacgattatca

SEQ ID NO: 419112 - DNA, 30 bp, Artificial Sequence
  Synthetic oligonucleotide
gcactacgtaatcgccgacaatgattatca

SEQ ID NO: 419113 - DNA, 30 bp, Artificial Sequence
  Synthetic oligonucleotide
gtagaacgataaatgcgcttgctattatca

SEQ ID NO: 419114 - DNA, 30 bp, Artificial Sequence
  Synthetic oligonucleotide
agcctgagtacgccggtaaatgtattatca

SEQ ID NO: 419115 - DNA, 30 bp, Artificial Sequence
  Synthetic oligonucleotide
taccaaatgtcttacttcaggttattatca

SEQ ID NO: 419116 - DNA, 30 bp, Artificial Sequence
  Synthetic oligonucleotide
tgccgcacgaaagtgacaatatacttatca

SEQ ID NO: 419117 - DNA, 30 bp, Artificial Sequence
  Synthetic oligonucleotide
tgcctcctttagtggtcttggcggttatca

SEQ ID NO: 419118 - DNA, 30 bp, Artificial Sequence
  Synthetic oligonucleotide
atacgctgaaaatcatgattcgttttatca

SEQ ID NO: 419119 - DNA, 30 bp, Artificial Sequence
  Synthetic oligonucleotide
aatatgtccagaaataactgtcggaactca

SEQ ID NO: 419120 - DNA, 30 bp, Artificial Sequence
  Synthetic oligonucleotide
attatcagcagcctcatttaacataactca

SEQ ID NO: 419121 - DNA, 30 bp, Artificial Sequence
  Synthetic oligonucleotide
acacttgttacgtacgcggtggctaactca

SEQ ID NO: 419122 - DNA, 30 bp, Artificial Sequence
  Synthetic oligonucleotide
aagctctagtaggtcacgggaattaactca

SEQ ID NO: 419123 - DNA, 30 bp, Artificial Sequence
  Synthetic oligonucleotide
gcctgaactgcgagcggtgtatttaactca

SEQ ID NO: 419124 - DNA, 30 bp, Artificial Sequence
  Synthetic oligonucleotide
gtgcgccgctacgcgtagaattaacactca

SEQ ID NO: 419125 - DNA, 30 bp, Artificial Sequence
  Synthetic oligonucleotide
aagctggtgctctgtaaagcgccccactca

SEQ ID NO: 419126 - DNA, 30 bp, Artificial Sequence
  Synthetic oligonucleotide
ttgtgcatcatggatgtttctagccactca

SEQ ID NO: 419127 - DNA, 30 bp, Artificial Sequence
  Synthetic oligonucleotide
cctgctcttctgtacctatcacagcactca

SEQ ID NO: 419128 - DNA, 30 bp, Artificial Sequence
  Synthetic oligonucleotide
atgccgtgagcgactcggaacgagcactca

SEQ ID NO: 419129 - DNA, 30 bp, Artificial Sequence
  Synthetic oligonucleotide
tcctagggggattctagttcgtagcactca

SEQ ID NO: 419130 - DNA, 30 bp, Artificial Sequence
  Synthetic oligonucleotide
gaggcttaaccggctgagggctatcactca

SEQ ID NO: 419131 - DNA, 30 bp, Artificial Sequence
  Synthetic oligonucleotide
tgttcgtagttcctcgtatccacagactca

SEQ ID NO: 419132 - DNA, 30 bp, Artificial Sequence
  Synthetic oligonucleotide
tatgacctcataacagggtagatagactca

SEQ ID NO: 419133 - DNA, 30 bp, Artificial Sequence
  Synthetic oligonucleotide
ggtgcagcggatgttaccgttcacgactca

SEQ ID NO: 419134 - DNA, 30 bp, Artificial Sequence
  Synthetic oligonucleotide
tatctctctgaaaaaaccggttacgactca

SEQ ID NO: 419135 - DNA, 30 bp, Artificial Sequence
  Synthetic oligonucleotide
ttaacccatttcttcgttgaccgcgactca

SEQ ID NO: 419136 - DNA, 30 bp, Artificial Sequence
  Synthetic oligonucleotide
gcaaaagtgtgcgcgtttaagagatactca

SEQ ID NO: 419137 - DNA, 30 bp, Artificial Sequence
  Synthetic oligonucleotide
ttcctgcatatcctggtcttctcctactca

SEQ ID NO: 419138 - DNA, 30 bp, Artificial Sequence
  Synthetic oligonucleotide
aacctctgtgtttgacggaagaggtactca

SEQ ID NO: 419139 - DNA, 30 bp, Artificial Sequence
  Synthetic oligonucleotide
gtccagagcggtggggatacaacttactca

SEQ ID NO: 419140 - DNA, 30 bp, Artificial Sequence
  Synthetic oligonucleotide
tacgagtcgctaacacttagttgttactca

SEQ ID NO: 419141 - DNA, 30 bp, Artificial Sequence
  Synthetic oligonucleotide
agtcataagagtcaaatagctatttactca

SEQ ID NO: 419142 - DNA, 30 bp, Artificial Sequence
  Synthetic oligonucleotide
tcctcaagcgcttcttttcgattttactca

SEQ ID NO: 419143 - DNA, 30 bp, Artificial Sequence
  Synthetic oligonucleotide
atgagtccacagcgagtgaatttaacctca

SEQ ID NO: 419144 - DNA, 30 bp, Artificial Sequence
  Synthetic oligonucleotide
ctagtgttgtaacttaacagtttaacctca

SEQ ID NO: 419145 - DNA, 30 bp, Artificial Sequence
  Synthetic oligonucleotide
gatatacgggtggctcggacagacacctca

SEQ ID NO: 419146 - DNA, 30 bp, Artificial Sequence
  Synthetic oligonucleotide
atccttattgtgtgcacgagggacacctca

SEQ ID NO: 419147 - DNA, 30 bp, Artificial Sequence
  Synthetic oligonucleotide
tggcgctctcagaggtcagtggccacctca

SEQ ID NO: 419148 - DNA, 30 bp, Artificial Sequence
  Synthetic oligonucleotide
gccatcgatgctgaccgctatctcacctca

SEQ ID NO: 419149 - DNA, 30 bp, Artificial Sequence
  Synthetic oligonucleotide
accctatattgcgttataattcgtacctca

SEQ ID NO: 419150 - DNA, 30 bp, Artificial Sequence
  Synthetic oligonucleotide
cagattcaagagtcggaacagattacctca

SEQ ID NO: 419151 - DNA, 30 bp, Artificial Sequence
  Synthetic oligonucleotide
taagggtcaggggcgttaggttgaccctca

SEQ ID NO: 419152 - DNA, 30 bp, Artificial Sequence
  Synthetic oligonucleotide
agcctccgcacaactgtcgccatgccctca

SEQ ID NO: 419153 - DNA, 30 bp, Artificial Sequence
  Synthetic oligonucleotide
gtatccagttaacggatgtttttgccctca

SEQ ID NO: 419154 - DNA, 30 bp, Artificial Sequence
  Synthetic oligonucleotide
gatgtagctttaggaggaatggacgcctca

SEQ ID NO: 419155 - DNA, 30 bp, Artificial Sequence
  Synthetic oligonucleotide
agtagtaagtgagtccagttctcggcctca

SEQ ID NO: 419156 - DNA, 30 bp, Artificial Sequence
  Synthetic oligonucleotide
tttggacaggagggtagggcctgggcctca

SEQ ID NO: 419157 - DNA, 30 bp, Artificial Sequence
  Synthetic oligonucleotide
tgagggcctcccgttcactgaagtgcctca

SEQ ID NO: 419158 - DNA, 30 bp, Artificial Sequence
  Synthetic oligonucleotide
tactcccgagcgtaatagagacattcctca

SEQ ID NO: 419159 - DNA, 30 bp, Artificial Sequence
  Synthetic oligonucleotide
gttcgtgcttgccgcagggcagattcctca

SEQ ID NO: 419160 - DNA, 30 bp, Artificial Sequence
  Synthetic oligonucleotide
cggttcacggatcggagcaacggttcctca

SEQ ID NO: 419161 - DNA, 30 bp, Artificial Sequence
  Synthetic oligonucleotide
gtgtctcaaggctcatatcgggaaagctca

SEQ ID NO: 419162 - DNA, 30 bp, Artificial Sequence
  Synthetic oligonucleotide
ggtatcaatcctcgcataggaggaagctca

SEQ ID NO: 419163 - DNA, 30 bp, Artificial Sequence
  Synthetic oligonucleotide
cggggggtttcggtattagttgtaagctca

SEQ ID NO: 419164 - DNA, 30 bp, Artificial Sequence
  Synthetic oligonucleotide
tggagtcagctcagcatttataatagctca

SEQ ID NO: 419165 - DNA, 30 bp, Artificial Sequence
  Synthetic oligonucleotide
aagtaggtagtattctatgcatgtagctca

SEQ ID NO: 419166 - DNA, 30 bp, Artificial Sequence
  Synthetic oligonucleotide
gtgccaagttaatgagcgttatgacgctca

SEQ ID NO: 419167 - DNA, 30 bp, Artificial Sequence
  Synthetic oligonucleotide
gaacagcattacaacgacgcgagccgctca

SEQ ID NO: 419168 - DNA, 30 bp, Artificial Sequence
  Synthetic oligonucleotide
agggctagggtgtatattacatctcgctca

SEQ ID NO: 419169 - DNA, 30 bp, Artificial Sequence
  Synthetic oligonucleotide
ctcgagctatgcggcaaccctctaggctca

SEQ ID NO: 419170 - DNA, 30 bp, Artificial Sequence
  Synthetic oligonucleotide
agggcgtcccgactatctcgttcgggctca

SEQ ID NO: 419171 - DNA, 30 bp, Artificial Sequence
  Synthetic oligonucleotide
ggttgtctaagccgcgttaagaggggctca

SEQ ID NO: 419172 - DNA, 30 bp, Artificial Sequence
  Synthetic oligonucleotide
aaagcgggcctaccgggaacggggggctca

SEQ ID NO: 419173 - DNA, 30 bp, Artificial Sequence
  Synthetic oligonucleotide
gagggcacgacagttgcagccgatggctca

SEQ ID NO: 419174 - DNA, 30 bp, Artificial Sequence
  Synthetic oligonucleotide
gtcaaggaagttggtcccaaatgtggctca

SEQ ID NO: 419175 - DNA, 30 bp, Artificial Sequence
  Synthetic oligonucleotide
attctcgacgaggttgtagaagttggctca

SEQ ID NO: 419176 - DNA, 30 bp, Artificial Sequence
  Synthetic oligonucleotide
aggttcactttaacgttgccacgatgctca

SEQ ID NO: 419177 - DNA, 30 bp, Artificial Sequence
  Synthetic oligonucleotide
cccgtccgaatctgcctacccggatgctca

SEQ ID NO: 419178 - DNA, 30 bp, Artificial Sequence
  Synthetic oligonucleotide
atctggcggcactgtatcatgcactgctca

SEQ ID NO: 419179 - DNA, 30 bp, Artificial Sequence
  Synthetic oligonucleotide
cctctccagtaccctgtctaggggtgctca

SEQ ID NO: 419180 - DNA, 30 bp, Artificial Sequence
  Synthetic oligonucleotide
cccacttatgggaggtatgcaatgtgctca

SEQ ID NO: 419181 - DNA, 30 bp, Artificial Sequence
  Synthetic oligonucleotide
ctctggtccttcgcgggactaatgtgctca

SEQ ID NO: 419182 - DNA, 30 bp, Artificial Sequence
  Synthetic oligonucleotide
acttctaggtgctgtcagttcacttgctca

SEQ ID NO: 419183 - DNA, 30 bp, Artificial Sequence
  Synthetic oligonucleotide
agaaagaatttgagcggatgagtttgctca

SEQ ID NO: 419184 - DNA, 30 bp, Artificial Sequence
  Synthetic oligonucleotide
tgagctacttaaaggcgctcgttttgctca

SEQ ID NO: 419185 - DNA, 30 bp, Artificial Sequence
  Synthetic oligonucleotide
tcgacatgtccacgccagggggaaatctca

SEQ ID NO: 419186 - DNA, 30 bp, Artificial Sequence
  Synthetic oligonucleotide
atgcactaatcctgcataaagggaatctca

SEQ ID NO: 419187 - DNA, 30 bp, Artificial Sequence
  Synthetic oligonucleotide
catccaagtggcaacctttaagtaatctca

SEQ ID NO: 419188 - DNA, 30 bp, Artificial Sequence
  Synthetic oligonucleotide
acggtaatcgaaacgcctgagacgatctca

SEQ ID NO: 419189 - DNA, 30 bp, Artificial Sequence
  Synthetic oligonucleotide
cggtctcggttcctccggttaaggatctca

SEQ ID NO: 419190 - DNA, 30 bp, Artificial Sequence
  Synthetic oligonucleotide
gctgctcgcgttgcgcgtcccatgatctca

SEQ ID NO: 419191 - DNA, 30 bp, Artificial Sequence
  Synthetic oligonucleotide
gggtgcgacacagtggggagcgtgatctca

SEQ ID NO: 419192 - DNA, 30 bp, Artificial Sequence
  Synthetic oligonucleotide
tttgttacttctttatcgattgatatctca

SEQ ID NO: 419193 - DNA, 30 bp, Artificial Sequence
  Synthetic oligonucleotide
gtctttcgtaccccacagcagccactctca

SEQ ID NO: 419194 - DNA, 30 bp, Artificial Sequence
  Synthetic oligonucleotide
tttatatcgctcacgctatacaagctctca

SEQ ID NO: 419195 - DNA, 30 bp, Artificial Sequence
  Synthetic oligonucleotide
gtaatatcacacgctttattaaggctctca

SEQ ID NO: 419196 - DNA, 30 bp, Artificial Sequence
  Synthetic oligonucleotide
cccattgtgcttagacctgagcaagtctca

SEQ ID NO: 419197 - DNA, 30 bp, Artificial Sequence
  Synthetic oligonucleotide
agggtttaaacgctcgggcgtgaagtctca

SEQ ID NO: 419198 - DNA, 30 bp, Artificial Sequence
  Synthetic oligonucleotide
ttagtggagcactgtagaggccgagtctca

SEQ ID NO: 419199 - DNA, 30 bp, Artificial Sequence
  Synthetic oligonucleotide
ccagcctcacagaatgacgaggtagtctca

SEQ ID NO: 419200 - DNA, 30 bp, Artificial Sequence
  Synthetic oligonucleotide
cacctactaaaacatctaggtttagtctca

SEQ ID NO: 419201 - DNA, 30 bp, Artificial Sequence
  Synthetic oligonucleotide
gaccacaccttgatacattatcacgtctca

SEQ ID NO: 419202 - DNA, 30 bp, Artificial Sequence
  Synthetic oligonucleotide
tgataaaggagcttggcatccgtggtctca

SEQ ID NO: 419203 - DNA, 30 bp, Artificial Sequence
  Synthetic oligonucleotide
gatgcaaaaacgggcccgtccgttgtctca

SEQ ID NO: 419204 - DNA, 30 bp, Artificial Sequence
  Synthetic oligonucleotide
tgttaaagtgttccgatcactgttgtctca

SEQ ID NO: 419205 - DNA, 30 bp, Artificial Sequence
  Synthetic oligonucleotide
gatcgattattaggccttactgaattctca

SEQ ID NO: 419206 - DNA, 30 bp, Artificial Sequence
  Synthetic oligonucleotide
cgaagcttaggacatcctcgccagttctca

SEQ ID NO: 419207 - DNA, 31 bp, Artificial Sequence
  Synthetic oligonucleotide
tctgagagtcaacccatatagaccgttctca

SEQ ID NO: 419208 - DNA, 30 bp, Artificial Sequence
  Synthetic oligonucleotide
tgttcgtcccaggttcgtagattgttctca

SEQ ID NO: 419209 - DNA, 30 bp, Artificial Sequence
  Synthetic oligonucleotide
cataatataaaaacctatccgtatttctca

SEQ ID NO: 419210 - DNA, 30 bp, Artificial Sequence
  Synthetic oligonucleotide
tgccatttgcacgcgcttctaactttctca

SEQ ID NO: 419211 - DNA, 30 bp, Artificial Sequence
  Synthetic oligonucleotide
gggtcgttagcgtcatgcacccacaagtca

SEQ ID NO: 419212 - DNA, 30 bp, Artificial Sequence
  Synthetic oligonucleotide
gagatttgtgctcgcgagtctcacaagtca

SEQ ID NO: 419213 - DNA, 30 bp, Artificial Sequence
  Synthetic oligonucleotide
gaactggtatcctgcgggccaatcaagtca

SEQ ID NO: 419214 - DNA, 30 bp, Artificial Sequence
  Synthetic oligonucleotide
tgactattccaataggatctagggaagtca

SEQ ID NO: 419215 - DNA, 30 bp, Artificial Sequence
  Synthetic oligonucleotide
gatggttgaacatgaggcgttgctaagtca

SEQ ID NO: 419216 - DNA, 30 bp, Artificial Sequence
  Synthetic oligonucleotide
ggatatatattgtctgagattcttaagtca

SEQ ID NO: 419217 - DNA, 30 bp, Artificial Sequence
  Synthetic oligonucleotide
aacttcgagtggactccttatgttaagtca

SEQ ID NO: 419218 - DNA, 30 bp, Artificial Sequence
  Synthetic oligonucleotide
ttactctgagtagagacctggaaccagtca

SEQ ID NO: 419219 - DNA, 30 bp, Artificial Sequence
  Synthetic oligonucleotide
tgcaagtaacccctaaatagcatccagtca

SEQ ID NO: 419220 - DNA, 30 bp, Artificial Sequence
  Synthetic oligonucleotide
ttaatcaatgccggtatgtttcggcagtca

SEQ ID NO: 419221 - DNA, 30 bp, Artificial Sequence
  Synthetic oligonucleotide
gagtctgaggagaatagttaatctcagtca

SEQ ID NO: 419222 - DNA, 30 bp, Artificial Sequence
  Synthetic oligonucleotide
ttacagaacatcagcatatgcaaagagtca

SEQ ID NO: 419223 - DNA, 30 bp, Artificial Sequence
  Synthetic oligonucleotide
gtttcacctcatctgtacccgcgagagtca

SEQ ID NO: 419224 - DNA, 30 bp, Artificial Sequence
  Synthetic oligonucleotide
tatgccgttaagtacgccttgctcgagtca

SEQ ID NO: 419225 - DNA, 30 bp, Artificial Sequence
  Synthetic oligonucleotide
aattaatggagtgagctattgacggagtca

SEQ ID NO: 419226 - DNA, 30 bp, Artificial Sequence
  Synthetic oligonucleotide
aagctcaattgcatccaaccttgtgagtca

SEQ ID NO: 419227 - DNA, 30 bp, Artificial Sequence
  Synthetic oligonucleotide
tcctcattgtgcttagaaatctcatagtca

SEQ ID NO: 419228 - DNA, 30 bp, Artificial Sequence
  Synthetic oligonucleotide
aggtttatgagatgaactgttctatagtca

SEQ ID NO: 419229 - DNA, 30 bp, Artificial Sequence
  Synthetic oligonucleotide
ctagcttcctttctttttcaagtctagtca

SEQ ID NO: 419230 - DNA, 30 bp, Artificial Sequence
  Synthetic oligonucleotide
gcggtcgggtactgcttgttacggtagtca

SEQ ID NO: 419231 - DNA, 30 bp, Artificial Sequence
  Synthetic oligonucleotide
ttcgttagtgccaagcgggacctaacgtca

SEQ ID NO: 419232 - DNA, 30 bp, Artificial Sequence
  Synthetic oligonucleotide
aacacagctctcggatgagaagcaccgtca

SEQ ID NO: 419233 - DNA, 30 bp, Artificial Sequence
  Synthetic oligonucleotide
atggcttgacgatcatcccatcgaccgtca

SEQ ID NO: 419234 - DNA, 30 bp, Artificial Sequence
  Synthetic oligonucleotide
ccaaacgccgttgggacgtagttcccgtca

SEQ ID NO: 419235 - DNA, 30 bp, Artificial Sequence
  Synthetic oligonucleotide
gtttcccaaaatcgatacacgttcccgtca

SEQ ID NO: 419236 - DNA, 30 bp, Artificial Sequence
  Synthetic oligonucleotide
aaccctatgagcatggcatgtgggccgtca

SEQ ID NO: 419237 - DNA, 30 bp, Artificial Sequence
  Synthetic oligonucleotide
agctatgtgaaaggcgtattagctccgtca

SEQ ID NO: 419238 - DNA, 30 bp, Artificial Sequence
  Synthetic oligonucleotide
agctatgtgaaaggcttattagctccgtca

SEQ ID NO: 419239 - DNA, 30 bp, Artificial Sequence
  Synthetic oligonucleotide
acggatgccactactataggaggagcgtca

SEQ ID NO: 419240 - DNA, 30 bp, Artificial Sequence
  Synthetic oligonucleotide
aaagcccgtgcaaatattcgtggcgcgtca

SEQ ID NO: 419241 - DNA, 30 bp, Artificial Sequence
  Synthetic oligonucleotide
ggttaatgttatgtccggtatatggcgtca

SEQ ID NO: 419242 - DNA, 30 bp, Artificial Sequence
  Synthetic oligonucleotide
catactacatcgcgctccgctctggcgtca

SEQ ID NO: 419243 - DNA, 30 bp, Artificial Sequence
  Synthetic oligonucleotide
ccgggtcatgggtaggcgcaggctgcgtca

SEQ ID NO: 419244 - DNA, 40 bp, Artificial Sequence
  Synthetic oligonucleotide
cgggaaggagggtcaccgacgtcgcgccgttgctgcgtca

SEQ ID NO: 419245 - DNA, 30 bp, Artificial Sequence
  Synthetic oligonucleotide
acaatgccgtctaaggcgtctgaaaggtca

SEQ ID NO: 419246 - DNA, 30 bp, Artificial Sequence
  Synthetic oligonucleotide
ctttgaggaacgtagtggataataaggtca

SEQ ID NO: 419247 - DNA, 30 bp, Artificial Sequence
  Synthetic oligonucleotide
tgcgcaacatagggtccgtgaaacaggtca

SEQ ID NO: 419248 - DNA, 30 bp, Artificial Sequence
  Synthetic oligonucleotide
ttgaagatacccattgccgcacacaggtca

SEQ ID NO: 419249 - DNA, 30 bp, Artificial Sequence
  Synthetic oligonucleotide
gaaattctccgtacatatcatgacaggtca

SEQ ID NO: 419250 - DNA, 30 bp, Artificial Sequence
  Synthetic oligonucleotide
tttacgatctcataaattcccggcaggtca

SEQ ID NO: 419251 - DNA, 30 bp, Artificial Sequence
  Synthetic oligonucleotide
taggcttcggtgttactaggggtcaggtca

SEQ ID NO: 419252 - DNA, 30 bp, Artificial Sequence
  Synthetic oligonucleotide
tctctgaatagtcgaatcgtgaagaggtca

SEQ ID NO: 419253 - DNA, 30 bp, Artificial Sequence
  Synthetic oligonucleotide
ccaaatgtagcatatgggttactgaggtca

SEQ ID NO: 419254 - DNA, 30 bp, Artificial Sequence
  Synthetic oligonucleotide
ttacaaatttgggataagctcaataggtca

SEQ ID NO: 419255 - DNA, 30 bp, Artificial Sequence
  Synthetic oligonucleotide
aaaaaatctaccgctgcggtctataggtca

SEQ ID NO: 419256 - DNA, 30 bp, Artificial Sequence
  Synthetic oligonucleotide
agtcgcgtagaccgcccaaagggtaggtca

SEQ ID NO: 419257 - DNA, 30 bp, Artificial Sequence
  Synthetic oligonucleotide
gggctacaaaatttgggatacgaacggtca

SEQ ID NO: 419258 - DNA, 30 bp, Artificial Sequence
  Synthetic oligonucleotide
aataagtcattctcccgagggacacggtca

SEQ ID NO: 419259 - DNA, 30 bp, Artificial Sequence
  Synthetic oligonucleotide
ctcttctaagttgcggtgtttaaccggtca

SEQ ID NO: 419260 - DNA, 30 bp, Artificial Sequence
  Synthetic oligonucleotide
ggctaattgagttcgtgctcacgccggtca

SEQ ID NO: 419261 - DNA, 30 bp, Artificial Sequence
  Synthetic oligonucleotide
ccgcaaggtcgtatcgtttgcccagggtca

SEQ ID NO: 419262 - DNA, 30 bp, Artificial Sequence
  Synthetic oligonucleotide
catgtagacggaatcgtcaatggagggtca

SEQ ID NO: 419263 - DNA, 30 bp, Artificial Sequence
  Synthetic oligonucleotide
tactattgagaggtcggctaactcgggtca

SEQ ID NO: 419264 - DNA, 30 bp, Artificial Sequence
  Synthetic oligonucleotide
cagtattagtagcataagcgacgggggtca

SEQ ID NO: 419265 - DNA, 30 bp, Artificial Sequence
  Synthetic oligonucleotide
tattttcagcgacgccacctattggggtca

SEQ ID NO: 419266 - DNA, 30 bp, Artificial Sequence
  Synthetic oligonucleotide
ggtgaggatagcccaccggccttggggtca

SEQ ID NO: 419267 - DNA, 30 bp, Artificial Sequence
  Synthetic oligonucleotide
acatgaccccttttaagcaaaagtgggtca

SEQ ID NO: 419268 - DNA, 30 bp, Artificial Sequence
  Synthetic oligonucleotide
ggggtcatctaccgacttgagaactggtca

SEQ ID NO: 419269 - DNA, 30 bp, Artificial Sequence
  Synthetic oligonucleotide
tgaacgcaaattgtagtcctgacctggtca

SEQ ID NO: 419270 - DNA, 30 bp, Artificial Sequence
  Synthetic oligonucleotide
ggtctcgggtatggggcgacatcctggtca

SEQ ID NO: 419271 - DNA, 30 bp, Artificial Sequence
  Synthetic oligonucleotide
accaagactcgaccattctactattggtca

SEQ ID NO: 419272 - DNA, 30 bp, Artificial Sequence
  Synthetic oligonucleotide
ggcgtttcattagataatgactcttggtca

SEQ ID NO: 419273 - DNA, 30 bp, Artificial Sequence
  Synthetic oligonucleotide
taggaccgagatggcatagcaaaaatgtca

SEQ ID NO: 419274 - DNA, 30 bp, Artificial Sequence
  Synthetic oligonucleotide
gtacatttgtaacgggtcgttacaatgtca

SEQ ID NO: 419275 - DNA, 30 bp, Artificial Sequence
  Synthetic oligonucleotide
attaatggttccaatagtaacgcaatgtca

SEQ ID NO: 419276 - DNA, 30 bp, Artificial Sequence
  Synthetic oligonucleotide
acctggtgatagcagtagtggctaatgtca

SEQ ID NO: 419277 - DNA, 30 bp, Artificial Sequence
  Synthetic oligonucleotide
aactgttggacatggcatgaacgcatgtca

SEQ ID NO: 419278 - DNA, 30 bp, Artificial Sequence
  Synthetic oligonucleotide
acttttgcgttgtgctgacaatatatgtca

SEQ ID NO: 419279 - DNA, 30 bp, Artificial Sequence
  Synthetic oligonucleotide
atgtttggaagtctctgtggttatatgtca

SEQ ID NO: 419280 - DNA, 30 bp, Artificial Sequence
  Synthetic oligonucleotide
gcaaatcgttgggtcttcgccctactgtca

SEQ ID NO: 419281 - DNA, 30 bp, Artificial Sequence
  Synthetic oligonucleotide
aggtgtatagatgagcgtataggcctgtca

SEQ ID NO: 419282 - DNA, 30 bp, Artificial Sequence
  Synthetic oligonucleotide
caggatgtttcaccccatgtcgatctgtca

SEQ ID NO: 419283 - DNA, 30 bp, Artificial Sequence
  Synthetic oligonucleotide
gaaggactagcggccacaaggttagtgtca

SEQ ID NO: 419284 - DNA, 30 bp, Artificial Sequence
  Synthetic oligonucleotide
tagttttgagcattgacattgtaggtgtca

SEQ ID NO: 419285 - DNA, 30 bp, Artificial Sequence
  Synthetic oligonucleotide
gcgcagtcatgagtcacacaacgggtgtca

SEQ ID NO: 419286 - DNA, 30 bp, Artificial Sequence
  Synthetic oligonucleotide
gcaaccttttgactatctagacgggtgtca

SEQ ID NO: 419287 - DNA, 30 bp, Artificial Sequence
  Synthetic oligonucleotide
tttcatcggattttacgtttccgggtgtca

SEQ ID NO: 419288 - DNA, 30 bp, Artificial Sequence
  Synthetic oligonucleotide
attacagtcagttcttttgggctggtgtca

SEQ ID NO: 419289 - DNA, 30 bp, Artificial Sequence
  Synthetic oligonucleotide
aactcaggctacgacaatcaaaaattgtca

SEQ ID NO: 419290 - DNA, 30 bp, Artificial Sequence
  Synthetic oligonucleotide
tagtcacctactgtaattcatacattgtca

SEQ ID NO: 419291 - DNA, 30 bp, Artificial Sequence
  Synthetic oligonucleotide
tctgtattgacaatcctcactgggttgtca

SEQ ID NO: 419292 - DNA, 30 bp, Artificial Sequence
  Synthetic oligonucleotide
ggggaacaactacggttgtgtttgttgtca

SEQ ID NO: 419293 - DNA, 30 bp, Artificial Sequence
  Synthetic oligonucleotide
ccaacgcaattgtttagtagctttttgtca

SEQ ID NO: 419294 - DNA, 30 bp, Artificial Sequence
  Synthetic oligonucleotide
gcaaattcattcggctatgagtaaaattca

SEQ ID NO: 419295 - DNA, 30 bp, Artificial Sequence
  Synthetic oligonucleotide
tctggctgttagatgaggcgctacaattca

SEQ ID NO: 419296 - DNA, 30 bp, Artificial Sequence
  Synthetic oligonucleotide
agtccgcggtggaatttacccccgaattca

SEQ ID NO: 419297 - DNA, 30 bp, Artificial Sequence
  Synthetic oligonucleotide
gactactctgcgttacaggtcgctaattca

SEQ ID NO: 419298 - DNA, 31 bp, Artificial Sequence
  Synthetic oligonucleotide
gccgtagtattagaattcgggtttacattca

SEQ ID NO: 419299 - DNA, 30 bp, Artificial Sequence
  Synthetic oligonucleotide
tcggtctttgccgagttttctatccattca

SEQ ID NO: 419300 - DNA, 30 bp, Artificial Sequence
  Synthetic oligonucleotide
tgcctcccagggcgtacagctaggcattca

SEQ ID NO: 419301 - DNA, 31 bp, Artificial Sequence
  Synthetic oligonucleotide
atagcctgaaagacgattataacggcattca

SEQ ID NO: 419302 - DNA, 30 bp, Artificial Sequence
  Synthetic oligonucleotide
gaaccgtggagtggcgtcactaatcattca

SEQ ID NO: 419303 - DNA, 30 bp, Artificial Sequence
  Synthetic oligonucleotide
atcgtggtcgtcacgcacaaggatcattca

SEQ ID NO: 419304 - DNA, 30 bp, Artificial Sequence
  Synthetic oligonucleotide
atgtggcagcagatggttttgtccgattca

SEQ ID NO: 419305 - DNA, 30 bp, Artificial Sequence
  Synthetic oligonucleotide
tacaatccggaaccggggataggggattca

SEQ ID NO: 419306 - DNA, 30 bp, Artificial Sequence
  Synthetic oligonucleotide
gttagttatagatttatatatggggattca

SEQ ID NO: 419307 - DNA, 30 bp, Artificial Sequence
  Synthetic oligonucleotide
aaggggaatggcgttacgcatggtgattca

SEQ ID NO: 419308 - DNA, 30 bp, Artificial Sequence
  Synthetic oligonucleotide
ccctatttttagaggagtcaataatattca

SEQ ID NO: 419309 - DNA, 30 bp, Artificial Sequence
  Synthetic oligonucleotide
gcaaaacttttcccgataattcgctattca

SEQ ID NO: 419310 - DNA, 30 bp, Artificial Sequence
  Synthetic oligonucleotide
gttacaaaacgggattcattctcgtattca

SEQ ID NO: 419311 - DNA, 30 bp, Artificial Sequence
  Synthetic oligonucleotide
ccctgttggctacgttaagtaaggtattca

SEQ ID NO: 419312 - DNA, 30 bp, Artificial Sequence
  Synthetic oligonucleotide
cggattacgttttcattgcttgggtattca

SEQ ID NO: 419313 - DNA, 30 bp, Artificial Sequence
  Synthetic oligonucleotide
tggtgctcccaaacaataccgtggtattca

SEQ ID NO: 419314 - DNA, 30 bp, Artificial Sequence
  Synthetic oligonucleotide
gaaaggagacactgtaagtggtggtattca

SEQ ID NO: 419315 - DNA, 30 bp, Artificial Sequence
  Synthetic oligonucleotide
ctctgcccttcattatcgggaaattattca

SEQ ID NO: 419316 - DNA, 30 bp, Artificial Sequence
  Synthetic oligonucleotide
acgctgacgagggctcgcatatattattca

SEQ ID NO: 419317 - DNA, 30 bp, Artificial Sequence
  Synthetic oligonucleotide
atccagacctaacctccgaccgaaacttca

SEQ ID NO: 419318 - DNA, 30 bp, Artificial Sequence
  Synthetic oligonucleotide
acaagggcttagagtaagccctaaacttca

SEQ ID NO: 419319 - DNA, 30 bp, Artificial Sequence
  Synthetic oligonucleotide
agggcaatgataagacgccgagcaacttca

SEQ ID NO: 419320 - DNA, 30 bp, Artificial Sequence
  Synthetic oligonucleotide
tcagagccgttgttcccatttcgcacttca

SEQ ID NO: 419321 - DNA, 30 bp, Artificial Sequence
  Synthetic oligonucleotide
tctgtcgaaacatttcttgtgggcacttca

SEQ ID NO: 419322 - DNA, 30 bp, Artificial Sequence
  Synthetic oligonucleotide
gctgaggaacttgttttaacagtcacttca

SEQ ID NO: 419323 - DNA, 30 bp, Artificial Sequence
  Synthetic oligonucleotide
cttgttagtccctgagaaagtttcacttca

SEQ ID NO: 419324 - DNA, 30 bp, Artificial Sequence
  Synthetic oligonucleotide
attggtctcgggacgcaaactacgacttca

SEQ ID NO: 419325 - DNA, 30 bp, Artificial Sequence
  Synthetic oligonucleotide
tgtacccccaggaggcgagactcgacttca

SEQ ID NO: 419326 - DNA, 30 bp, Artificial Sequence
  Synthetic oligonucleotide
gattagaccaaatataggggttcgacttca

SEQ ID NO: 419327 - DNA, 30 bp, Artificial Sequence
  Synthetic oligonucleotide
cgaacgctgatgacgtttagttaaccttca

SEQ ID NO: 419328 - DNA, 30 bp, Artificial Sequence
  Synthetic oligonucleotide
tacatcctggcaaatttagcgataccttca

SEQ ID NO: 419329 - DNA, 30 bp, Artificial Sequence
  Synthetic oligonucleotide
ataagcgtgaggtttggggcattaccttca

SEQ ID NO: 419330 - DNA, 30 bp, Artificial Sequence
  Synthetic oligonucleotide
taagagaggttttgaaatatgcggccttca

SEQ ID NO: 419331 - DNA, 30 bp, Artificial Sequence
  Synthetic oligonucleotide
accaactaaggatcgagcaatagtccttca

SEQ ID NO: 419332 - DNA, 30 bp, Artificial Sequence
  Synthetic oligonucleotide
gggacgcgggtgctgcggtcgtcagcttca

SEQ ID NO: 419333 - DNA, 30 bp, Artificial Sequence
  Synthetic oligonucleotide
acggccacgtatgaagcacgggacgcttca

SEQ ID NO: 419334 - DNA, 30 bp, Artificial Sequence
  Synthetic oligonucleotide
aatgggccagatagtcgcatactggcttca

SEQ ID NO: 419335 - DNA, 30 bp, Artificial Sequence
  Synthetic oligonucleotide
taatgtacgcggccacctgtgaatgcttca

SEQ ID NO: 419336 - DNA, 30 bp, Artificial Sequence
  Synthetic oligonucleotide
gaacctttgggctagaaaagtgatgcttca

SEQ ID NO: 419337 - DNA, 30 bp, Artificial Sequence
  Synthetic oligonucleotide
ggcaatattctgagtgggggttctgcttca

SEQ ID NO: 419338 - DNA, 30 bp, Artificial Sequence
  Synthetic oligonucleotide
aggcagactgagtaaccgaccaagtcttca

SEQ ID NO: 419339 - DNA, 30 bp, Artificial Sequence
  Synthetic oligonucleotide
tgtttcaagtcgatagcaccgacgtcttca

SEQ ID NO: 419340 - DNA, 30 bp, Artificial Sequence
  Synthetic oligonucleotide
caattactagcgccagcccaaccaagttca

SEQ ID NO: 419341 - DNA, 30 bp, Artificial Sequence
  Synthetic oligonucleotide
ttggcttcttgaaaagttccacccagttca

SEQ ID NO: 419342 - DNA, 30 bp, Artificial Sequence
  Synthetic oligonucleotide
cggaagaaacccacggcggtgtccagttca

SEQ ID NO: 419343 - DNA, 30 bp, Artificial Sequence
  Synthetic oligonucleotide
tcggttcgcggctttggaacttggagttca

SEQ ID NO: 419344 - DNA, 30 bp, Artificial Sequence
  Synthetic oligonucleotide
aaccaaactgactgtggaaagttgagttca

SEQ ID NO: 419345 - DNA, 30 bp, Artificial Sequence
  Synthetic oligonucleotide
tgttagtacaactaccgttttagtagttca

SEQ ID NO: 419346 - DNA, 30 bp, Artificial Sequence
  Synthetic oligonucleotide
gattcaacacattgttcggcattacgttca

SEQ ID NO: 419347 - DNA, 30 bp, Artificial Sequence
  Synthetic oligonucleotide
gctatcgacggcgtcttacccacccgttca

SEQ ID NO: 419348 - DNA, 30 bp, Artificial Sequence
  Synthetic oligonucleotide
gccactaggccgaacagaataatgcgttca

SEQ ID NO: 419349 - DNA, 30 bp, Artificial Sequence
  Synthetic oligonucleotide
cagcagttaagctgatatgcaaatcgttca

SEQ ID NO: 419350 - DNA, 30 bp, Artificial Sequence
  Synthetic oligonucleotide
agtatagatccgctgcaaggagatcgttca

SEQ ID NO: 419351 - DNA, 30 bp, Artificial Sequence
  Synthetic oligonucleotide
ccgttccttctataacttatgattcgttca

SEQ ID NO: 419352 - DNA, 30 bp, Artificial Sequence
  Synthetic oligonucleotide
ggccgcctcgcggaggttacgcaaggttca

SEQ ID NO: 419353 - DNA, 30 bp, Artificial Sequence
  Synthetic oligonucleotide
ccaaagccggttgaccccccaggaggttca

SEQ ID NO: 419354 - DNA, 30 bp, Artificial Sequence
  Synthetic oligonucleotide
tcagcgccggaatttggtccaagcggttca

SEQ ID NO: 419355 - DNA, 30 bp, Artificial Sequence
  Synthetic oligonucleotide
ggcgtgactggagtcgtttacgcgggttca

SEQ ID NO: 419356 - DNA, 30 bp, Artificial Sequence
  Synthetic oligonucleotide
gcttggatctccgactgcggtttgggttca

SEQ ID NO: 419357 - DNA, 30 bp, Artificial Sequence
  Synthetic oligonucleotide
tacgcgggcaacgtgttcaaaactggttca

SEQ ID NO: 419358 - DNA, 30 bp, Artificial Sequence
  Synthetic oligonucleotide
agatggctcgccaatacgccttaatgttca

SEQ ID NO: 419359 - DNA, 30 bp, Artificial Sequence
  Synthetic oligonucleotide
ccaagggccttccatggcagtatatgttca

SEQ ID NO: 419360 - DNA, 30 bp, Artificial Sequence
  Synthetic oligonucleotide
ggaatatcgcctcacaggttctcctgttca

SEQ ID NO: 419361 - DNA, 30 bp, Artificial Sequence
  Synthetic oligonucleotide
ttggataaacattggatgttacgctgttca

SEQ ID NO: 419362 - DNA, 30 bp, Artificial Sequence
  Synthetic oligonucleotide
gtagcaagaaacatttcgattcggtgttca

SEQ ID NO: 419363 - DNA, 30 bp, Artificial Sequence
  Synthetic oligonucleotide
tggcatgtcagtagggcggaaatttgttca

SEQ ID NO: 419364 - DNA, 30 bp, Artificial Sequence
  Synthetic oligonucleotide
atacaactcctcttgggtcgataaatttca

SEQ ID NO: 419365 - DNA, 30 bp, Artificial Sequence
  Synthetic oligonucleotide
ggggtcatgtgcgtaatgcactaaatttca

SEQ ID NO: 419366 - DNA, 30 bp, Artificial Sequence
  Synthetic oligonucleotide
aagtgcctgatgacctggattccaatttca

SEQ ID NO: 419367 - DNA, 30 bp, Artificial Sequence
  Synthetic oligonucleotide
ctaggtacagacccctagtttggaatttca

SEQ ID NO: 419368 - DNA, 30 bp, Artificial Sequence
  Synthetic oligonucleotide
ctagttgtagacaaatcgcggtgcatttca

SEQ ID NO: 419369 - DNA, 30 bp, Artificial Sequence
  Synthetic oligonucleotide
gggttttgaacggaggtatgctcgatttca

SEQ ID NO: 419370 - DNA, 30 bp, Artificial Sequence
  Synthetic oligonucleotide
tattatttggttggattagcaggtatttca

SEQ ID NO: 419371 - DNA, 30 bp, Artificial Sequence
  Synthetic oligonucleotide
gccggccgcatttcactgtgtgaactttca

SEQ ID NO: 419372 - DNA, 30 bp, Artificial Sequence
  Synthetic oligonucleotide
gtccgtaactatgtttagtcggcactttca

SEQ ID NO: 419373 - DNA, 30 bp, Artificial Sequence
  Synthetic oligonucleotide
accatcctatgaagaggcgcaggcctttca

SEQ ID NO: 419374 - DNA, 30 bp, Artificial Sequence
  Synthetic oligonucleotide
gaaagagtttcggtaggtcggtagctttca

SEQ ID NO: 419375 - DNA, 30 bp, Artificial Sequence
  Synthetic oligonucleotide
ttgaagtgttataaataatacccgctttca

SEQ ID NO: 419376 - DNA, 30 bp, Artificial Sequence
  Synthetic oligonucleotide
tacttgggcgttatagtcgttactctttca

SEQ ID NO: 419377 - DNA, 30 bp, Artificial Sequence
  Synthetic oligonucleotide
tctgcattgccgatattggacgttctttca

SEQ ID NO: 419378 - DNA, 30 bp, Artificial Sequence
  Synthetic oligonucleotide
taataccgtaggcagcataccaaagtttca

SEQ ID NO: 419379 - DNA, 30 bp, Artificial Sequence
  Synthetic oligonucleotide
gggcattgtaaaatacgtcaggccgtttca

SEQ ID NO: 419380 - DNA, 30 bp, Artificial Sequence
  Synthetic oligonucleotide
ggataagaaggtgattccccacgggtttca

SEQ ID NO: 419381 - DNA, 30 bp, Artificial Sequence
  Synthetic oligonucleotide
ataagcccatgtaaccaaagacgggtttca

SEQ ID NO: 419382 - DNA, 30 bp, Artificial Sequence
  Synthetic oligonucleotide
agtgtatgctagtcaagtattcttgtttca

SEQ ID NO: 419383 - DNA, 30 bp, Artificial Sequence
  Synthetic oligonucleotide
gttctcccaggtactcggcgcacattttca

SEQ ID NO: 419384 - DNA, 30 bp, Artificial Sequence
  Synthetic oligonucleotide
aaaatagtctgcgaaatcgactcattttca

SEQ ID NO: 419385 - DNA, 30 bp, Artificial Sequence
  Synthetic oligonucleotide
tgctctatatgtttcagcatactattttca

SEQ ID NO: 419386 - DNA, 30 bp, Artificial Sequence
  Synthetic oligonucleotide
ggagaaagggtacggtatctcctattttca

SEQ ID NO: 419387 - DNA, 30 bp, Artificial Sequence
  Synthetic oligonucleotide
ggttacgaacgtgggggggtaaacttttca

SEQ ID NO: 419388 - DNA, 30 bp, Artificial Sequence
  Synthetic oligonucleotide
gaaactgcttccggaggcggtgacttttca

SEQ ID NO: 419389 - DNA, 30 bp, Artificial Sequence
  Synthetic oligonucleotide
gaccattgttgagatttccactatttttca

SEQ ID NO: 419390 - DNA, 30 bp, Artificial Sequence
  Synthetic oligonucleotide
gagcttgatagcggtctctggactttttca

SEQ ID NO: 419391 - DNA, 30 bp, Artificial Sequence
  Synthetic oligonucleotide
ccgcgtttgcatcaatccaatccgaaaaga

SEQ ID NO: 419392 - DNA, 30 bp, Artificial Sequence
  Synthetic oligonucleotide
aacccggtatgaattgcaacgatgaaaaga

SEQ ID NO: 419393 - DNA, 30 bp, Artificial Sequence
  Synthetic oligonucleotide
aatatatttgacctttataaacttaaaaga

SEQ ID NO: 419394 - DNA, 30 bp, Artificial Sequence
  Synthetic oligonucleotide
ggactgacagtgctcgcgccgggacaaaga

SEQ ID NO: 419395 - DNA, 30 bp, Artificial Sequence
  Synthetic oligonucleotide
caaagtgcacgactttaaaaaatacaaaga

SEQ ID NO: 419396 - DNA, 30 bp, Artificial Sequence
  Synthetic oligonucleotide
tcccactacatgaatttcctcacgcaaaga

SEQ ID NO: 419397 - DNA, 30 bp, Artificial Sequence
  Synthetic oligonucleotide
aagtctaagcacggctccgcccggcaaaga

SEQ ID NO: 419398 - DNA, 30 bp, Artificial Sequence
  Synthetic oligonucleotide
ttgttgactaaacgtctgcaacctcaaaga

SEQ ID NO: 419399 - DNA, 30 bp, Artificial Sequence
  Synthetic oligonucleotide
tcattggcatattataagggttgtcaaaga

SEQ ID NO: 419400 - DNA, 30 bp, Artificial Sequence
  Synthetic oligonucleotide
caactggtgctctttaatagaaacgaaaga

SEQ ID NO: 419401 - DNA, 30 bp, Artificial Sequence
  Synthetic oligonucleotide
gtttccttaggcctgtgttatttggaaaga

SEQ ID NO: 419402 - DNA, 30 bp, Artificial Sequence
  Synthetic oligonucleotide
aaacaagcttcagggaccagctctgaaaga

SEQ ID NO: 419403 - DNA, 30 bp, Artificial Sequence
  Synthetic oligonucleotide
tgcattctcctttagtatgctcgtgaaaga

SEQ ID NO: 419404 - DNA, 30 bp, Artificial Sequence
  Synthetic oligonucleotide
atttaaattgttggctgacctggtgaaaga

SEQ ID NO: 419405 - DNA, 30 bp, Artificial Sequence
  Synthetic oligonucleotide
caactatgtgcgcatcaagaaacataaaga

SEQ ID NO: 419406 - DNA, 30 bp, Artificial Sequence
  Synthetic oligonucleotide
aacacctgggtgatgctcactgtataaaga

SEQ ID NO: 419407 - DNA, 30 bp, Artificial Sequence
  Synthetic oligonucleotide
aggactagcgttaggcactcatcctaaaga

SEQ ID NO: 419408 - DNA, 30 bp, Artificial Sequence
  Synthetic oligonucleotide
gtcttgtagccacagggttttcgctaaaga

SEQ ID NO: 419409 - DNA, 30 bp, Artificial Sequence
  Synthetic oligonucleotide
acactcgcggtttagtgattctgctaaaga

SEQ ID NO: 419410 - DNA, 30 bp, Artificial Sequence
  Synthetic oligonucleotide
gtgtggtcaagaatatctattatctaaaga

SEQ ID NO: 419411 - DNA, 28 bp, Artificial Sequence
  Synthetic oligonucleotide
ctactacgacttgcatgttaagtaaaga

SEQ ID NO: 419412 - DNA, 30 bp, Artificial Sequence
  Synthetic oligonucleotide
tacgcgtgcgtctcaacatcgagttaaaga

SEQ ID NO: 419413 - DNA, 30 bp, Artificial Sequence
  Synthetic oligonucleotide
tacggttccacgttgtaaagtgcaacaaga

SEQ ID NO: 419414 - DNA, 30 bp, Artificial Sequence
  Synthetic oligonucleotide
cattctggggcgtagtcatgttcaacaaga

SEQ ID NO: 419415 - DNA, 30 bp, Artificial Sequence
  Synthetic oligonucleotide
tttagcccggctgattttgggacgacaaga

SEQ ID NO: 419416 - DNA, 30 bp, Artificial Sequence
  Synthetic oligonucleotide
tgaggcgaaaattcttggttattgacaaga

SEQ ID NO: 419417 - DNA, 30 bp, Artificial Sequence
  Synthetic oligonucleotide
gtggcaagattactacgtatcattacaaga

SEQ ID NO: 419418 - DNA, 30 bp, Artificial Sequence
  Synthetic oligonucleotide
ccgagtcagtgcagcgcgtgagaaccaaga

SEQ ID NO: 419419 - DNA, 30 bp, Artificial Sequence
  Synthetic oligonucleotide
tatttgaggccacgtcgcttactaccaaga

SEQ ID NO: 419420 - DNA, 30 bp, Artificial Sequence
  Synthetic oligonucleotide
tttctttgctgaattcaccgcgtaccaaga

SEQ ID NO: 419421 - DNA, 30 bp, Artificial Sequence
  Synthetic oligonucleotide
tattagcccgatgtgagaacagccccaaga

SEQ ID NO: 419422 - DNA, 30 bp, Artificial Sequence
  Synthetic oligonucleotide
gctagttcgactcgctggcagtggccaaga

SEQ ID NO: 419423 - DNA, 30 bp, Artificial Sequence
  Synthetic oligonucleotide
atgactaacatcatatttgcatatccaaga

SEQ ID NO: 419424 - DNA, 30 bp, Artificial Sequence
  Synthetic oligonucleotide
tgggcgacaggatccgtctggagtccaaga

SEQ ID NO: 419425 - DNA, 30 bp, Artificial Sequence
  Synthetic oligonucleotide
aaatttgtagaagagactagcgttccaaga

SEQ ID NO: 419426 - DNA, 30 bp, Artificial Sequence
  Synthetic oligonucleotide
ggtattggcaggcgcatccgtggagcaaga

SEQ ID NO: 419427 - DNA, 30 bp, Artificial Sequence
  Synthetic oligonucleotide
gcctgactcctctttccacgtggtgcaaga

SEQ ID NO: 419428 - DNA, 30 bp, Artificial Sequence
  Synthetic oligonucleotide
catccgcgcttacccaccagtgcatcaaga

SEQ ID NO: 419429 - DNA, 30 bp, Artificial Sequence
  Synthetic oligonucleotide
tagaattcccgggtggttcgcccctcaaga

SEQ ID NO: 419430 - DNA, 30 bp, Artificial Sequence
  Synthetic oligonucleotide
ttttatcatttagaataacttgagtcaaga

SEQ ID NO: 419431 - DNA, 30 bp, Artificial Sequence
  Synthetic oligonucleotide
tgccgccactggattcagcattcgtcaaga

SEQ ID NO: 419432 - DNA, 30 bp, Artificial Sequence
  Synthetic oligonucleotide
acacattactttgattttcttgcttcaaga

SEQ ID NO: 419433 - DNA, 30 bp, Artificial Sequence
  Synthetic oligonucleotide
gtcttgttggactcatttcagggttcaaga

SEQ ID NO: 419434 - DNA, 30 bp, Artificial Sequence
  Synthetic oligonucleotide
gttatgcggagtcacgttgggtgttcaaga

SEQ ID NO: 419435 - DNA, 30 bp, Artificial Sequence
  Synthetic oligonucleotide
ctactcgttctcatgtccgtcgtttcaaga

SEQ ID NO: 419436 - DNA, 30 bp, Artificial Sequence
  Synthetic oligonucleotide
tgtagtggttccatcatcagcgacagaaga

SEQ ID NO: 419437 - DNA, 30 bp, Artificial Sequence
  Synthetic oligonucleotide
tttaaccaatgtgttcaagttagcagaaga

SEQ ID NO: 419438 - DNA, 30 bp, Artificial Sequence
  Synthetic oligonucleotide
cggtcacgtctaataaaggaccgcagaaga

SEQ ID NO: 419439 - DNA, 30 bp, Artificial Sequence
  Synthetic oligonucleotide
ttgaacgtttcagagagtttactcagaaga

SEQ ID NO: 419440 - DNA, 30 bp, Artificial Sequence
  Synthetic oligonucleotide
gcgattattatcgctccgatggtcagaaga

SEQ ID NO: 419441 - DNA, 30 bp, Artificial Sequence
  Synthetic oligonucleotide
tcgactttcggtagcgcgcgcatgagaaga

SEQ ID NO: 419442 - DNA, 30 bp, Artificial Sequence
  Synthetic oligonucleotide
aggtaggtagaaggacaacgcaatagaaga

SEQ ID NO: 419443 - DNA, 30 bp, Artificial Sequence
  Synthetic oligonucleotide
gcaaatgtttgtccttctaataatagaaga

SEQ ID NO: 419444 - DNA, 30 bp, Artificial Sequence
  Synthetic oligonucleotide
taaacgtttgcgtgagtcaccgcacgaaga

SEQ ID NO: 419445 - DNA, 30 bp, Artificial Sequence
  Synthetic oligonucleotide
atcaaatgcctccatacagtaacgcgaaga

SEQ ID NO: 419446 - DNA, 30 bp, Artificial Sequence
  Synthetic oligonucleotide
gaaagaggtagtttgcccgcttcgcgaaga

SEQ ID NO: 419447 - DNA, 30 bp, Artificial Sequence
  Synthetic oligonucleotide
ccgaagagaatgtttctattaaggcgaaga

SEQ ID NO: 419448 - DNA, 30 bp, Artificial Sequence
  Synthetic oligonucleotide
gtgtgtttaagatcgactcctgctcgaaga

SEQ ID NO: 419449 - DNA, 30 bp, Artificial Sequence
  Synthetic oligonucleotide
catgaggtccacgtacgcaagattcgaaga

SEQ ID NO: 419450 - DNA, 30 bp, Artificial Sequence
  Synthetic oligonucleotide
tacgccgcagtaggtcttcagcaaggaaga

SEQ ID NO: 419451 - DNA, 25 bp, Artificial Sequence
  Synthetic oligonucleotide
aaaaggtgcaattaaaggaggaaga

SEQ ID NO: 419452 - DNA, 30 bp, Artificial Sequence
  Synthetic oligonucleotide
agtatgttacaagttgggcagggcggaaga

SEQ ID NO: 419453 - DNA, 30 bp, Artificial Sequence
  Synthetic oligonucleotide
gaagcagaacgtccgggcccacagggaaga

SEQ ID NO: 419454 - DNA, 30 bp, Artificial Sequence
  Synthetic oligonucleotide
tcacattacggcggctttatttcgggaaga

SEQ ID NO: 419455 - DNA, 30 bp, Artificial Sequence
  Synthetic oligonucleotide
ggcgtttctccgggttatgcgcgtggaaga

SEQ ID NO: 419456 - DNA, 30 bp, Artificial Sequence
  Synthetic oligonucleotide
cactcgagcacgtccctcatgaaatgaaga

SEQ ID NO: 419457 - DNA, 30 bp, Artificial Sequence
  Synthetic oligonucleotide
tgtcacagctaacagtatctgagatgaaga

SEQ ID NO: 419458 - DNA, 30 bp, Artificial Sequence
  Synthetic oligonucleotide
actgacacttatccaatttttcgctgaaga

SEQ ID NO: 419459 - DNA, 30 bp, Artificial Sequence
  Synthetic oligonucleotide
aggcctttgtgcccctgctccatctgaaga

SEQ ID NO: 419460 - DNA, 30 bp, Artificial Sequence
  Synthetic oligonucleotide
acagccttgttaagattttggaagtgaaga

SEQ ID NO: 419461 - DNA, 30 bp, Artificial Sequence
  Synthetic oligonucleotide
tacgcactatctactttaattgattgaaga

SEQ ID NO: 419462 - DNA, 30 bp, Artificial Sequence
  Synthetic oligonucleotide
gagctcaaggctcgtaaaatataaataaga

SEQ ID NO: 419463 - DNA, 30 bp, Artificial Sequence
  Synthetic oligonucleotide
ctcccgaatattcaccattgttaaataaga

SEQ ID NO: 419464 - DNA, 30 bp, Artificial Sequence
  Synthetic oligonucleotide
agtcgaaaatcagtacttataccaataaga

SEQ ID NO: 419465 - DNA, 30 bp, Artificial Sequence
  Synthetic oligonucleotide
cttgagtagtccttgcgacgttgaataaga

SEQ ID NO: 419466 - DNA, 30 bp, Artificial Sequence
  Synthetic oligonucleotide
ttgcaccatgacaccggcttcataataaga

SEQ ID NO: 419467 - DNA, 30 bp, Artificial Sequence
  Synthetic oligonucleotide
gcatttctcggttacgtgggtttaataaga

SEQ ID NO: 419468 - DNA, 30 bp, Artificial Sequence
  Synthetic oligonucleotide
gggtcgtaatggcagcgggcgctcataaga

SEQ ID NO: 419469 - DNA, 30 bp, Artificial Sequence
  Synthetic oligonucleotide
aaccgagaggccagtttcaagttcataaga

SEQ ID NO: 419470 - DNA, 30 bp, Artificial Sequence
  Synthetic oligonucleotide
gttctgattacagtagcgcactagataaga

SEQ ID NO: 419471 - DNA, 30 bp, Artificial Sequence
  Synthetic oligonucleotide
agcccatcgtaacgctagacttagataaga

SEQ ID NO: 419472 - DNA, 30 bp, Artificial Sequence
  Synthetic oligonucleotide
ctagatggatgtcctttggagctgataaga

SEQ ID NO: 419473 - DNA, 30 bp, Artificial Sequence
  Synthetic oligonucleotide
actaccaattacagagagaatgctataaga

SEQ ID NO: 419474 - DNA, 30 bp, Artificial Sequence
  Synthetic oligonucleotide
ctttgcgtaggtatggttataaaactaaga

SEQ ID NO: 419475 - DNA, 30 bp, Artificial Sequence
  Synthetic oligonucleotide
gatccttgtgggggtgggtgacagctaaga

SEQ ID NO: 419476 - DNA, 30 bp, Artificial Sequence
  Synthetic oligonucleotide
gcttgtagccactgggcacgatagctaaga

SEQ ID NO: 419477 - DNA, 30 bp, Artificial Sequence
  Synthetic oligonucleotide
tgtgaaaggggtatcaaatcaattctaaga

SEQ ID NO: 419478 - DNA, 30 bp, Artificial Sequence
  Synthetic oligonucleotide
tccgaactattgttctgtgatggagtaaga

SEQ ID NO: 419479 - DNA, 30 bp, Artificial Sequence
  Synthetic oligonucleotide
gatccgggcaacataagtttttgagtaaga

SEQ ID NO: 419480 - DNA, 30 bp, Artificial Sequence
  Synthetic oligonucleotide
aaggagtccttagcacgcgttatcgtaaga

SEQ ID NO: 419481 - DNA, 30 bp, Artificial Sequence
  Synthetic oligonucleotide
tttgtcttgtaccgtgtgtattatgtaaga

SEQ ID NO: 419482 - DNA, 30 bp, Artificial Sequence
  Synthetic oligonucleotide
tagccccgcccaatcttgaagactgtaaga

SEQ ID NO: 419483 - DNA, 30 bp, Artificial Sequence
  Synthetic oligonucleotide
tagtaatgattgattgccgagcttgtaaga

SEQ ID NO: 419484 - DNA, 30 bp, Artificial Sequence
  Synthetic oligonucleotide
cacgctgcattaccccgtgagtaattaaga

SEQ ID NO: 419485 - DNA, 30 bp, Artificial Sequence
  Synthetic oligonucleotide
gtgctctccgcgttcacgttatcattaaga

SEQ ID NO: 419486 - DNA, 30 bp, Artificial Sequence
  Synthetic oligonucleotide
cataggttggacgctttgagccgcttaaga

SEQ ID NO: 419487 - DNA, 30 bp, Artificial Sequence
  Synthetic oligonucleotide
gcattccttcacgaaataagcgcgttaaga

SEQ ID NO: 419488 - DNA, 30 bp, Artificial Sequence
  Synthetic oligonucleotide
tctgtacctgacgataaccaggcgttaaga

SEQ ID NO: 419489 - DNA, 31 bp, Artificial Sequence
  Synthetic oligonucleotide
agtaccgggattgaaacgagtctcgttaaga

SEQ ID NO: 419490 - DNA, 30 bp, Artificial Sequence
  Synthetic oligonucleotide
gaatacgctgcgtgagatagtgatttaaga

SEQ ID NO: 419491 - DNA, 30 bp, Artificial Sequence
  Synthetic oligonucleotide
caagttcccctgtgtagtatatatttaaga

SEQ ID NO: 419492 - DNA, 30 bp, Artificial Sequence
  Synthetic oligonucleotide
tgttctaacagggttcggttcgctttaaga

SEQ ID NO: 419493 - DNA, 30 bp, Artificial Sequence
  Synthetic oligonucleotide
aatccaatatagacgaataaatttttaaga

SEQ ID NO: 419494 - DNA, 30 bp, Artificial Sequence
  Synthetic oligonucleotide
aatttaggtgtatatcaggcatacaacaga

SEQ ID NO: 419495 - DNA, 30 bp, Artificial Sequence
  Synthetic oligonucleotide
tgaatcgtctttcgacgctcgagcaacaga

SEQ ID NO: 419496 - DNA, 30 bp, Artificial Sequence
  Synthetic oligonucleotide
gttttttcgaagccgcaatcgcgcaacaga

SEQ ID NO: 419497 - DNA, 30 bp, Artificial Sequence
  Synthetic oligonucleotide
ccagtcactattatgcgtgcctggaacaga

SEQ ID NO: 419498 - DNA, 30 bp, Artificial Sequence
  Synthetic oligonucleotide
ttatgcctacgaaacaacggttttaacaga

SEQ ID NO: 419499 - DNA, 30 bp, Artificial Sequence
  Synthetic oligonucleotide
agaggccaatgttcacactgttttaacaga

SEQ ID NO: 419500 - DNA, 30 bp, Artificial Sequence
  Synthetic oligonucleotide
ggcttatattataagctggtcccccacaga

SEQ ID NO: 419501 - DNA, 30 bp, Artificial Sequence
  Synthetic oligonucleotide
tggagctggccgagggcagctgagcacaga

SEQ ID NO: 419502 - DNA, 30 bp, Artificial Sequence
  Synthetic oligonucleotide
ctcttgtcggccgatccagttacgcacaga

SEQ ID NO: 419503 - DNA, 30 bp, Artificial Sequence
  Synthetic oligonucleotide
atacgatatgtacagactgctattcacaga

SEQ ID NO: 419504 - DNA, 30 bp, Artificial Sequence
  Synthetic oligonucleotide
cggctaagcctatactatatggttcacaga

SEQ ID NO: 419505 - DNA, 30 bp, Artificial Sequence
  Synthetic oligonucleotide
tatcttcaaattagaacaatttcagacaga

SEQ ID NO: 419506 - DNA, 30 bp, Artificial Sequence
  Synthetic oligonucleotide
taatgttggtgcgcatccagttgcgacaga

SEQ ID NO: 419507 - DNA, 30 bp, Artificial Sequence
  Synthetic oligonucleotide
aggactaacgaattcaccgcccgtgacaga

SEQ ID NO: 419508 - DNA, 30 bp, Artificial Sequence
  Synthetic oligonucleotide
gttaggcaccggtggtgaacaacgtacaga

SEQ ID NO: 419509 - DNA, 30 bp, Artificial Sequence
  Synthetic oligonucleotide
gaagttagggtctcctgcctctggtacaga

SEQ ID NO: 419510 - DNA, 30 bp, Artificial Sequence
  Synthetic oligonucleotide
gttaagcgtaatgccattacacattacaga

SEQ ID NO: 419511 - DNA, 30 bp, Artificial Sequence
  Synthetic oligonucleotide
gatcaggctcatcgtgcagcgcattacaga

SEQ ID NO: 419512 - DNA, 30 bp, Artificial Sequence
  Synthetic oligonucleotide
tgtaaatgatagggcggttttagttacaga

SEQ ID NO: 419513 - DNA, 30 bp, Artificial Sequence
  Synthetic oligonucleotide
atgtgggagcgcccgggtagggtacccaga

SEQ ID NO: 419514 - DNA, 30 bp, Artificial Sequence
  Synthetic oligonucleotide
cattgacatggggctagcccctcccccaga

SEQ ID NO: 419515 - DNA, 30 bp, Artificial Sequence
  Synthetic oligonucleotide
tcagctaagggttcagaacgcatagccaga

SEQ ID NO: 419516 - DNA, 30 bp, Artificial Sequence
  Synthetic oligonucleotide
cggggctgtagtggccatcctgacgccaga

SEQ ID NO: 419517 - DNA, 30 bp, Artificial Sequence
  Synthetic oligonucleotide
aatggataatttaacgtctcatacgccaga

SEQ ID NO: 419518 - DNA, 30 bp, Artificial Sequence
  Synthetic oligonucleotide
gaactagggaacacacctggagtcgccaga

SEQ ID NO: 419519 - DNA, 30 bp, Artificial Sequence
  Synthetic oligonucleotide
ttttaaagcattgtccagttttctgccaga

SEQ ID NO: 419520 - DNA, 30 bp, Artificial Sequence
  Synthetic oligonucleotide
agccacgcaggacggcagtttggtgccaga

SEQ ID NO: 419521 - DNA, 30 bp, Artificial Sequence
  Synthetic oligonucleotide
gttggaccgtttaatctttaatttgccaga

SEQ ID NO: 419522 - DNA, 30 bp, Artificial Sequence
  Synthetic oligonucleotide
ggtggtaaggtggactgacggtcgtccaga

SEQ ID NO: 419523 - DNA, 30 bp, Artificial Sequence
  Synthetic oligonucleotide
gttggggcttcgggaaattcattttccaga

SEQ ID NO: 419524 - DNA, 30 bp, Artificial Sequence
  Synthetic oligonucleotide
ccattctttcggccgggtctaataagcaga

SEQ ID NO: 419525 - DNA, 30 bp, Artificial Sequence
  Synthetic oligonucleotide
gtatataagcgcgggcagcgtctaagcaga

SEQ ID NO: 419526 - DNA, 30 bp, Artificial Sequence
  Synthetic oligonucleotide
cgacgccgctatacgtcctcgtatagcaga

SEQ ID NO: 419527 - DNA, 30 bp, Artificial Sequence
  Synthetic oligonucleotide
tatctctcctggattagacatcgtagcaga

SEQ ID NO: 419528 - DNA, 30 bp, Artificial Sequence
  Synthetic oligonucleotide
ttttcacccaaaggcatttaggaccgcaga

SEQ ID NO: 419529 - DNA, 30 bp, Artificial Sequence
  Synthetic oligonucleotide
aaaaatcgcgctaccaaggagacgcgcaga

SEQ ID NO: 419530 - DNA, 30 bp, Artificial Sequence
  Synthetic oligonucleotide
ttgcgttccacttaccttaacttgcgcaga

SEQ ID NO: 419531 - DNA, 30 bp, Artificial Sequence
  Synthetic oligonucleotide
tatccgagtaatctcgtggggcatcgcaga

SEQ ID NO: 419532 - DNA, 30 bp, Artificial Sequence
  Synthetic oligonucleotide
gattacatggagatctagtgacacggcaga

SEQ ID NO: 419533 - DNA, 30 bp, Artificial Sequence
  Synthetic oligonucleotide
gctgcgtcgctgaaccctggaggcggcaga

SEQ ID NO: 419534 - DNA, 30 bp, Artificial Sequence
  Synthetic oligonucleotide
gcatttcggtagattctctgcagatgcaga

SEQ ID NO: 419535 - DNA, 30 bp, Artificial Sequence
  Synthetic oligonucleotide
gttttgaacaaggtgcgccacggctgcaga

SEQ ID NO: 419536 - DNA, 30 bp, Artificial Sequence
  Synthetic oligonucleotide
tcagatagcgctgctcacacatcaatcaga

SEQ ID NO: 419537 - DNA, 30 bp, Artificial Sequence
  Synthetic oligonucleotide
tagcgttggtgctgctgggcgggaatcaga

SEQ ID NO: 419538 - DNA, 30 bp, Artificial Sequence
  Synthetic oligonucleotide
acgcgtgcgacctacgactattggatcaga

SEQ ID NO: 419539 - DNA, 30 bp, Artificial Sequence
  Synthetic oligonucleotide
aattggaaggaggcttatacttgtatcaga

SEQ ID NO: 419540 - DNA, 30 bp, Artificial Sequence
  Synthetic oligonucleotide
gttgttgtgatgtttaagtccacactcaga

SEQ ID NO: 419541 - DNA, 30 bp, Artificial Sequence
  Synthetic oligonucleotide
tcaggaagttctttcacagcttgactcaga

SEQ ID NO: 419542 - DNA, 30 bp, Artificial Sequence
  Synthetic oligonucleotide
aatggaggtcttttgacctcgaacctcaga

SEQ ID NO: 419543 - DNA, 30 bp, Artificial Sequence
  Synthetic oligonucleotide
tgaaattagacccttgacgatatggtcaga

SEQ ID NO: 419544 - DNA, 30 bp, Artificial Sequence
  Synthetic oligonucleotide
catggcattgattagaatttatgattcaga

SEQ ID NO: 419545 - DNA, 30 bp, Artificial Sequence
  Synthetic oligonucleotide
gttagaagtggtatttactggttattcaga

SEQ ID NO: 419546 - DNA, 30 bp, Artificial Sequence
  Synthetic oligonucleotide
ccccgagagagacacgggtgtaacttcaga

SEQ ID NO: 419547 - DNA, 30 bp, Artificial Sequence
  Synthetic oligonucleotide
aaggccccggcgtccgattcgtacttcaga

SEQ ID NO: 419548 - DNA, 30 bp, Artificial Sequence
  Synthetic oligonucleotide
tactacgtgtaaagttcaagtcccttcaga

SEQ ID NO: 419549 - DNA, 30 bp, Artificial Sequence
  Synthetic oligonucleotide
tttggtcgtttgagctattctcctttcaga

SEQ ID NO: 419550 - DNA, 30 bp, Artificial Sequence
  Synthetic oligonucleotide
gggatggttctggcgttctttcaaaagaga

SEQ ID NO: 419551 - DNA, 30 bp, Artificial Sequence
  Synthetic oligonucleotide
ctagcatattatgtactttggtaaaagaga

SEQ ID NO: 419552 - DNA, 30 bp, Artificial Sequence
  Synthetic oligonucleotide
tatagttcacttacagacgggataaagaga

SEQ ID NO: 419553 - DNA, 30 bp, Artificial Sequence
  Synthetic oligonucleotide
atttctctaagtcagtgcctgttaaagaga

SEQ ID NO: 419554 - DNA, 30 bp, Artificial Sequence
  Synthetic oligonucleotide
ttgtgctgacgggacacctcggtcaagaga

SEQ ID NO: 419555 - DNA, 30 bp, Artificial Sequence
  Synthetic oligonucleotide
gaaatctgttattcggtggtattcaagaga

SEQ ID NO: 419556 - DNA, 30 bp, Artificial Sequence
  Synthetic oligonucleotide
tagtcattccactgatgaggtactaagaga

SEQ ID NO: 419557 - DNA, 30 bp, Artificial Sequence
  Synthetic oligonucleotide
ttcatgaaaggcgagtgctaagcacagaga

SEQ ID NO: 419558 - DNA, 30 bp, Artificial Sequence
  Synthetic oligonucleotide
tcgacttgtgaccgcaagcattaccagaga

SEQ ID NO: 419559 - DNA, 30 bp, Artificial Sequence
  Synthetic oligonucleotide
aaaggacgggtggccaattcctagcagaga

SEQ ID NO: 419560 - DNA, 30 bp, Artificial Sequence
  Synthetic oligonucleotide
gccacgaagaaagagggaatctagcagaga

SEQ ID NO: 419561 - DNA, 30 bp, Artificial Sequence
  Synthetic oligonucleotide
ttggatcgacagtccctttgagcgcagaga

SEQ ID NO: 419562 - DNA, 30 bp, Artificial Sequence
  Synthetic oligonucleotide
tgactttccgtctgtttgtaactgcagaga

SEQ ID NO: 419563 - DNA, 30 bp, Artificial Sequence
  Synthetic oligonucleotide
gtttgcgagtttggtacgttggtgcagaga

SEQ ID NO: 419564 - DNA, 30 bp, Artificial Sequence
  Synthetic oligonucleotide
tattgagattattttcggcttactcagaga

SEQ ID NO: 419565 - DNA, 30 bp, Artificial Sequence
  Synthetic oligonucleotide
tcggtggcctccagggggacttaagagaga

SEQ ID NO: 419566 - DNA, 30 bp, Artificial Sequence
  Synthetic oligonucleotide
ggtagccagcccctcatcactgaggagaga

SEQ ID NO: 419567 - DNA, 30 bp, Artificial Sequence
  Synthetic oligonucleotide
ttttgacgagagacacaatgtctggagaga

SEQ ID NO: 419568 - DNA, 30 bp, Artificial Sequence
  Synthetic oligonucleotide
taacctacggcaatatggattacgtagaga

SEQ ID NO: 419569 - DNA, 30 bp, Artificial Sequence
  Synthetic oligonucleotide
ttgtgcagctctaagatcttgatgtagaga

SEQ ID NO: 419570 - DNA, 30 bp, Artificial Sequence
  Synthetic oligonucleotide
gcatcaactcacattcaaaggaattagaga

SEQ ID NO: 419571 - DNA, 30 bp, Artificial Sequence
  Synthetic oligonucleotide
gcgcgcagctatccagccatggattagaga

SEQ ID NO: 419572 - DNA, 30 bp, Artificial Sequence
  Synthetic oligonucleotide
gtgtctgattgaatgagtacaatttagaga

SEQ ID NO: 419573 - DNA, 30 bp, Artificial Sequence
  Synthetic oligonucleotide
taacccaatgcggttttcaaactttagaga

SEQ ID NO: 419574 - DNA, 30 bp, Artificial Sequence
  Synthetic oligonucleotide
ccgggttaccctgtgtttctcttttagaga

SEQ ID NO: 419575 - DNA, 30 bp, Artificial Sequence
  Synthetic oligonucleotide
ttcgaggatgaaagccaccctcgaacgaga

SEQ ID NO: 419576 - DNA, 30 bp, Artificial Sequence
  Synthetic oligonucleotide
actatttaagtaacatatagcgtaacgaga

SEQ ID NO: 419577 - DNA, 30 bp, Artificial Sequence
  Synthetic oligonucleotide
tttgcccgcagaggaccagtcttgacgaga

SEQ ID NO: 419578 - DNA, 30 bp, Artificial Sequence
  Synthetic oligonucleotide
gcggtaacggccggtagagccggtacgaga

SEQ ID NO: 419579 - DNA, 30 bp, Artificial Sequence
  Synthetic oligonucleotide
tctattgttaacgccccgttctgtacgaga

SEQ ID NO: 419580 - DNA, 30 bp, Artificial Sequence
  Synthetic oligonucleotide
ttgtatatcatcaagggaaaaagcccgaga

SEQ ID NO: 419581 - DNA, 30 bp, Artificial Sequence
  Synthetic oligonucleotide
atttaagagttcttagcgaatcggccgaga

SEQ ID NO: 419582 - DNA, 30 bp, Artificial Sequence
  Synthetic oligonucleotide
catgcgcttctttcaatgggcactccgaga

SEQ ID NO: 419583 - DNA, 30 bp, Artificial Sequence
  Synthetic oligonucleotide
ggcacattcgggaccggtcactgtccgaga

SEQ ID NO: 419584 - DNA, 31 bp, Artificial Sequence
  Synthetic oligonucleotide
agttttttgagcagacaaaagtgaagcgaga

SEQ ID NO: 419585 - DNA, 30 bp, Artificial Sequence
  Synthetic oligonucleotide
gacttttggattacggacctatcagcgaga

SEQ ID NO: 419586 - DNA, 31 bp, Artificial Sequence
  Synthetic oligonucleotide
gtggaaaccgaagcatctacgtggtgcgaga

SEQ ID NO: 419587 - DNA, 30 bp, Artificial Sequence
  Synthetic oligonucleotide
tatctagaaccaggctaggacgcatcgaga

SEQ ID NO: 419588 - DNA, 30 bp, Artificial Sequence
  Synthetic oligonucleotide
ttccagtgtgcaacttcgtactcaaggaga

SEQ ID NO: 419589 - DNA, 30 bp, Artificial Sequence
  Synthetic oligonucleotide
tctgtggggatgcagccaaatagaaggaga

SEQ ID NO: 419590 - DNA, 30 bp, Artificial Sequence
  Synthetic oligonucleotide
actaggtttcagaaaaagaacaacaggaga

SEQ ID NO: 419591 - DNA, 30 bp, Artificial Sequence
  Synthetic oligonucleotide
ttcggtttagactaaaaaactcccaggaga

SEQ ID NO: 419592 - DNA, 30 bp, Artificial Sequence
  Synthetic oligonucleotide
cctaaatactaattcatcctgacgaggaga

SEQ ID NO: 419593 - DNA, 30 bp, Artificial Sequence
  Synthetic oligonucleotide
ggatatgagggcaaaggctaggtgaggaga

SEQ ID NO: 419594 - DNA, 30 bp, Artificial Sequence
  Synthetic oligonucleotide
cttcggtgttgtaggaaccctcataggaga

SEQ ID NO: 419595 - DNA, 30 bp, Artificial Sequence
  Synthetic oligonucleotide
acaggttcttaaggaagcgaggaacggaga

SEQ ID NO: 419596 - DNA, 30 bp, Artificial Sequence
  Synthetic oligonucleotide
gaagtctcgctgtcggttaatatacggaga

SEQ ID NO: 419597 - DNA, 30 bp, Artificial Sequence
  Synthetic oligonucleotide
aaattccattcgccatcggaagtgcggaga

SEQ ID NO: 419598 - DNA, 30 bp, Artificial Sequence
  Synthetic oligonucleotide
gccttctcgtgacggcttggtcgtcggaga

SEQ ID NO: 419599 - DNA, 30 bp, Artificial Sequence
  Synthetic oligonucleotide
gtataagaactccgggagcggggcgggaga

SEQ ID NO: 419600 - DNA, 30 bp, Artificial Sequence
  Synthetic oligonucleotide
ttcctgagccttcgactatattaggggaga

SEQ ID NO: 419601 - DNA, 30 bp, Artificial Sequence
  Synthetic oligonucleotide
atttcaaattcctaattggcttgtgggaga

SEQ ID NO: 419602 - DNA, 30 bp, Artificial Sequence
  Synthetic oligonucleotide
atagtgaggtaaaggtctttgtaatggaga

SEQ ID NO: 419603 - DNA, 30 bp, Artificial Sequence
  Synthetic oligonucleotide
aggaaaacaggagaagcaaaccgatggaga

SEQ ID NO: 419604 - DNA, 30 bp, Artificial Sequence
  Synthetic oligonucleotide
atgttctctaactaatgccaattatggaga

SEQ ID NO: 419605 - DNA, 30 bp, Artificial Sequence
  Synthetic oligonucleotide
ccgaggcgtcggaaccatagtggctggaga

SEQ ID NO: 419606 - DNA, 30 bp, Artificial Sequence
  Synthetic oligonucleotide
accaactatcacgccccgcatttgtggaga

SEQ ID NO: 419607 - DNA, 30 bp, Artificial Sequence
  Synthetic oligonucleotide
cctttgtaagcactagatactaattggaga

SEQ ID NO: 419608 - DNA, 30 bp, Artificial Sequence
  Synthetic oligonucleotide
gagtgggtgctctgcggagaaataatgaga

SEQ ID NO: 419609 - DNA, 30 bp, Artificial Sequence
  Synthetic oligonucleotide
agctggtatcccaatggccaaatactgaga

SEQ ID NO: 419610 - DNA, 30 bp, Artificial Sequence
  Synthetic oligonucleotide
tgttgcccacggacagtggctcccctgaga

SEQ ID NO: 419611 - DNA, 30 bp, Artificial Sequence
  Synthetic oligonucleotide
ttttaccggtcgcatagcaatggcgtgaga

SEQ ID NO: 419612 - DNA, 30 bp, Artificial Sequence
  Synthetic oligonucleotide
atcgggtccagttaactcttgcaggtgaga

SEQ ID NO: 419613 - DNA, 30 bp, Artificial Sequence
  Synthetic oligonucleotide
tggcctctgtaaccctatgtaacggtgaga

SEQ ID NO: 419614 - DNA, 30 bp, Artificial Sequence
  Synthetic oligonucleotide
ttacaagttcttattttgggcacggtgaga

SEQ ID NO: 419615 - DNA, 30 bp, Artificial Sequence
  Synthetic oligonucleotide
ctgcatacactaaatctaatggatgtgaga

SEQ ID NO: 419616 - DNA, 30 bp, Artificial Sequence
  Synthetic oligonucleotide
gagtggaaccgggaccggaagccattgaga

SEQ ID NO: 419617 - DNA, 30 bp, Artificial Sequence
  Synthetic oligonucleotide
ctgtggctgccgcttggtggtcggttgaga

SEQ ID NO: 419618 - DNA, 30 bp, Artificial Sequence
  Synthetic oligonucleotide
caggcatcgcagacaggaagccctttgaga

SEQ ID NO: 419619 - DNA, 30 bp, Artificial Sequence
  Synthetic oligonucleotide
accacgggtgggcgcaggcagcgtttgaga

SEQ ID NO: 419620 - DNA, 30 bp, Artificial Sequence
  Synthetic oligonucleotide
actatagcactcctatgtccgcgtttgaga

SEQ ID NO: 419621 - DNA, 30 bp, Artificial Sequence
  Synthetic oligonucleotide
tcaggagtcaacgatagcaactgtttgaga

SEQ ID NO: 419622 - DNA, 30 bp, Artificial Sequence
  Synthetic oligonucleotide
gagtaatgagaacgtaggacttgtttgaga

SEQ ID NO: 419623 - DNA, 30 bp, Artificial Sequence
  Synthetic oligonucleotide
ttcgtacttaccgacggaggctaaaataga

SEQ ID NO: 419624 - DNA, 30 bp, Artificial Sequence
  Synthetic oligonucleotide
ctatatgctacaattatcagaggaaataga

SEQ ID NO: 419625 - DNA, 30 bp, Artificial Sequence
  Synthetic oligonucleotide
gtcttcaaacatttcccttagtgaaataga

SEQ ID NO: 419626 - DNA, 30 bp, Artificial Sequence
  Synthetic oligonucleotide
taataaagatgggaccctgaggacaataga

SEQ ID NO: 419627 - DNA, 30 bp, Artificial Sequence
  Synthetic oligonucleotide
acccgtctatgagacatgtaggccaataga

SEQ ID NO: 419628 - DNA, 30 bp, Artificial Sequence
  Synthetic oligonucleotide
ccaggaccgttaagcccagcgggcaataga

SEQ ID NO: 419629 - DNA, 30 bp, Artificial Sequence
  Synthetic oligonucleotide
taccattcggctcagttaacagcgaataga

SEQ ID NO: 419630 - DNA, 30 bp, Artificial Sequence
  Synthetic oligonucleotide
ggtgaagggcgcggcaacaggcataataga

SEQ ID NO: 419631 - DNA, 30 bp, Artificial Sequence
  Synthetic oligonucleotide
tttataaggtcacgaaggccgatccataga

SEQ ID NO: 419632 - DNA, 30 bp, Artificial Sequence
  Synthetic oligonucleotide
aataccggttttcaacccccggagcataga

SEQ ID NO: 419633 - DNA, 30 bp, Artificial Sequence
  Synthetic oligonucleotide
ttttatgctacgacctcacaatagcataga

SEQ ID NO: 419634 - DNA, 30 bp, Artificial Sequence
  Synthetic oligonucleotide
gattaagcgtatgccagtcctacgcataga

SEQ ID NO: 419635 - DNA, 30 bp, Artificial Sequence
  Synthetic oligonucleotide
aggtaatagaggcagaatattatgcataga

SEQ ID NO: 419636 - DNA, 30 bp, Artificial Sequence
  Synthetic oligonucleotide
cacaatctggttaattgttgctgtcataga

SEQ ID NO: 419637 - DNA, 30 bp, Artificial Sequence
  Synthetic oligonucleotide
ctccggtggaatttgattaacacagataga

SEQ ID NO: 419638 - DNA, 30 bp, Artificial Sequence
  Synthetic oligonucleotide
caggtcggcgctatcctatggggagataga

SEQ ID NO: 419639 - DNA, 30 bp, Artificial Sequence
  Synthetic oligonucleotide
ccctgagtctttccctgtcctgtagataga

SEQ ID NO: 419640 - DNA, 30 bp, Artificial Sequence
  Synthetic oligonucleotide
aactccacgggaatcgcatagtgggataga

SEQ ID NO: 419641 - DNA, 30 bp, Artificial Sequence
  Synthetic oligonucleotide
ggcccccaccggctttctatcatggataga

SEQ ID NO: 419642 - DNA, 30 bp, Artificial Sequence
  Synthetic oligonucleotide
tataatcaagccggaaatatgagatataga

SEQ ID NO: 419643 - DNA, 30 bp, Artificial Sequence
  Synthetic oligonucleotide
ccacaggactcaaacggccgctactataga

SEQ ID NO: 419644 - DNA, 30 bp, Artificial Sequence
  Synthetic oligonucleotide
actcagatgggtcaccggtagatctataga

SEQ ID NO: 419645 - DNA, 30 bp, Artificial Sequence
  Synthetic oligonucleotide
cttgctcgtggaccggctatattctataga

SEQ ID NO: 419646 - DNA, 31 bp, Artificial Sequence
  Synthetic oligonucleotide
gcaatcgagtacaactcgcgatttctataga

SEQ ID NO: 419647 - DNA, 30 bp, Artificial Sequence
  Synthetic oligonucleotide
agcagtacaacgtttttaaaatagtataga

SEQ ID NO: 419648 - DNA, 30 bp, Artificial Sequence
  Synthetic oligonucleotide
ttagtcaacggcaaagtgttccggtataga

SEQ ID NO: 419649 - DNA, 30 bp, Artificial Sequence
  Synthetic oligonucleotide
gtgttcgcgcccacctggttgaattataga

SEQ ID NO: 419650 - DNA, 30 bp, Artificial Sequence
  Synthetic oligonucleotide
gcggtatactgctggtctccaagaactaga

SEQ ID NO: 419651 - DNA, 30 bp, Artificial Sequence
  Synthetic oligonucleotide
acagacgggctatgaggcacgggcactaga

SEQ ID NO: 419652 - DNA, 30 bp, Artificial Sequence
  Synthetic oligonucleotide
ccgtggtagcgtgtgtatgcagggactaga

SEQ ID NO: 419653 - DNA, 30 bp, Artificial Sequence
  Synthetic oligonucleotide
attctttcctagtgactcactcatactaga

SEQ ID NO: 419654 - DNA, 30 bp, Artificial Sequence
  Synthetic oligonucleotide
caatacactagcgagctccagtctactaga

SEQ ID NO: 419655 - DNA, 30 bp, Artificial Sequence
  Synthetic oligonucleotide
gtcgttttaaggggttaagttattactaga

SEQ ID NO: 419656 - DNA, 30 bp, Artificial Sequence
  Synthetic oligonucleotide
ctttattacggatcagtggcaatccctaga

SEQ ID NO: 419657 - DNA, 30 bp, Artificial Sequence
  Synthetic oligonucleotide
ctttgaaaaaaatttggactactccctaga

SEQ ID NO: 419658 - DNA, 30 bp, Artificial Sequence
  Synthetic oligonucleotide
tagagtagcgtaatggactacgtccctaga

SEQ ID NO: 419659 - DNA, 30 bp, Artificial Sequence
  Synthetic oligonucleotide
ccgcctactattatcgcctgcagagctaga

SEQ ID NO: 419660 - DNA, 30 bp, Artificial Sequence
  Synthetic oligonucleotide
cagttcctaccccgagtcaggaacgctaga

SEQ ID NO: 419661 - DNA, 30 bp, Artificial Sequence
  Synthetic oligonucleotide
ggcgacctctgcttttgctcccacgctaga

SEQ ID NO: 419662 - DNA, 30 bp, Artificial Sequence
  Synthetic oligonucleotide
ctagctcagggggtagcgggagacgctaga

SEQ ID NO: 419663 - DNA, 30 bp, Artificial Sequence
  Synthetic oligonucleotide
cacggtttgcaggctccgtcgaccgctaga

SEQ ID NO: 419664 - DNA, 30 bp, Artificial Sequence
  Synthetic oligonucleotide
ggcatatagtgcctattcccgcaggctaga

SEQ ID NO: 419665 - DNA, 30 bp, Artificial Sequence
  Synthetic oligonucleotide
ctaatccggacaaggaccgtgcaggctaga

SEQ ID NO: 419666 - DNA, 30 bp, Artificial Sequence
  Synthetic oligonucleotide
gggtttagttgcacgcttaatcgggctaga

SEQ ID NO: 419667 - DNA, 30 bp, Artificial Sequence
  Synthetic oligonucleotide
cacttgagatatacagcccgtaaatctaga

SEQ ID NO: 419668 - DNA, 30 bp, Artificial Sequence
  Synthetic oligonucleotide
tttgtagagacggtcagcgcgaactctaga

SEQ ID NO: 419669 - DNA, 30 bp, Artificial Sequence
  Synthetic oligonucleotide
ttaggaatgcacatgtgcacgtactctaga

SEQ ID NO: 419670 - DNA, 30 bp, Artificial Sequence
  Synthetic oligonucleotide
gaaacggctgcgctactctaaccctctaga

SEQ ID NO: 419671 - DNA, 30 bp, Artificial Sequence
  Synthetic oligonucleotide
gtggtaggtcctggcaacgaagggtctaga

SEQ ID NO: 419672 - DNA, 30 bp, Artificial Sequence
  Synthetic oligonucleotide
acaccctctgcggggactccttattctaga

SEQ ID NO: 419673 - DNA, 30 bp, Artificial Sequence
  Synthetic oligonucleotide
tttgaggcttagatgtatcgagcaagtaga

SEQ ID NO: 419674 - DNA, 30 bp, Artificial Sequence
  Synthetic oligonucleotide
cctttgcgcgtcttcgatgtctgaagtaga

SEQ ID NO: 419675 - DNA, 30 bp, Artificial Sequence
  Synthetic oligonucleotide
agtaaccgtcacgcaaaccgccgcagtaga

SEQ ID NO: 419676 - DNA, 30 bp, Artificial Sequence
  Synthetic oligonucleotide
tgtttatgtgtcgctaaagccccgagtaga

SEQ ID NO: 419677 - DNA, 30 bp, Artificial Sequence
  Synthetic oligonucleotide
tatagctaagagtccttatgaaggagtaga

SEQ ID NO: 419678 - DNA, 30 bp, Artificial Sequence
  Synthetic oligonucleotide
agcctcagctgaccttgcgcacggagtaga

SEQ ID NO: 419679 - DNA, 30 bp, Artificial Sequence
  Synthetic oligonucleotide
attatatacataaaaaccggactgagtaga

SEQ ID NO: 419680 - DNA, 30 bp, Artificial Sequence
  Synthetic oligonucleotide
aatgcattataagacatacttgatagtaga

SEQ ID NO: 419681 - DNA, 30 bp, Artificial Sequence
  Synthetic oligonucleotide
ctctcgactttatgtaggccttatagtaga

SEQ ID NO: 419682 - DNA, 30 bp, Artificial Sequence
  Synthetic oligonucleotide
tctggtgttcgtcagattgtttatagtaga

SEQ ID NO: 419683 - DNA, 30 bp, Artificial Sequence
  Synthetic oligonucleotide
ttcactgctcgagaggtattctctagtaga

SEQ ID NO: 419684 - DNA, 30 bp, Artificial Sequence
  Synthetic oligonucleotide
ggttgtgcttttgcggacacgagacgtaga

SEQ ID NO: 419685 - DNA, 30 bp, Artificial Sequence
  Synthetic oligonucleotide
ggactaactgctgacaaccattgacgtaga

SEQ ID NO: 419686 - DNA, 30 bp, Artificial Sequence
  Synthetic oligonucleotide
ctgtacgcaactggatcataagcgcgtaga

SEQ ID NO: 419687 - DNA, 30 bp, Artificial Sequence
  Synthetic oligonucleotide
ccatgctgcagatctaatatggctcgtaga

SEQ ID NO: 419688 - DNA, 30 bp, Artificial Sequence
  Synthetic oligonucleotide
cccgttccggcaactcctgaaccaggtaga

SEQ ID NO: 419689 - DNA, 30 bp, Artificial Sequence
  Synthetic oligonucleotide
gtataaactaggttataggtcgcaggtaga

SEQ ID NO: 419690 - DNA, 30 bp, Artificial Sequence
  Synthetic oligonucleotide
ccgtttatcgtcaaacggcacagaggtaga

SEQ ID NO: 419691 - DNA, 30 bp, Artificial Sequence
  Synthetic oligonucleotide
tgcatgttctatccgaaccccgacggtaga

SEQ ID NO: 419692 - DNA, 30 bp, Artificial Sequence
  Synthetic oligonucleotide
cttgtctgctttgtaaaacaatacggtaga

SEQ ID NO: 419693 - DNA, 30 bp, Artificial Sequence
  Synthetic oligonucleotide
ctctccttgttcgctaggaagtacggtaga

SEQ ID NO: 419694 - DNA, 30 bp, Artificial Sequence
  Synthetic oligonucleotide
agtagacacggcacgcgccgcatcggtaga

SEQ ID NO: 419695 - DNA, 30 bp, Artificial Sequence
  Synthetic oligonucleotide
aatggcctaaccgtcattatggcgggtaga

SEQ ID NO: 419696 - DNA, 30 bp, Artificial Sequence
  Synthetic oligonucleotide
cgcttgggctcaacttgcacgttgggtaga

SEQ ID NO: 419697 - DNA, 30 bp, Artificial Sequence
  Synthetic oligonucleotide
tgacttcggtatcacgcatgtaaatgtaga

SEQ ID NO: 419698 - DNA, 30 bp, Artificial Sequence
  Synthetic oligonucleotide
gaaggactacacggtttcgcaacatgtaga

SEQ ID NO: 419699 - DNA, 30 bp, Artificial Sequence
  Synthetic oligonucleotide
cgtccttctactcctaaccgcttatgtaga

SEQ ID NO: 419700 - DNA, 30 bp, Artificial Sequence
  Synthetic oligonucleotide
cacgggccgcaacaccacagccactgtaga

SEQ ID NO: 419701 - DNA, 30 bp, Artificial Sequence
  Synthetic oligonucleotide
atctggcgtttgtcactatatcgctgtaga

SEQ ID NO: 419702 - DNA, 30 bp, Artificial Sequence
  Synthetic oligonucleotide
cccatggcgtacctctcttcaaattgtaga

SEQ ID NO: 419703 - DNA, 30 bp, Artificial Sequence
  Synthetic oligonucleotide
tttgaaacttaatgctcgaacaattgtaga

SEQ ID NO: 419704 - DNA, 30 bp, Artificial Sequence
  Synthetic oligonucleotide
attcgttccggagtaggaattaattgtaga

SEQ ID NO: 419705 - DNA, 30 bp, Artificial Sequence
  Synthetic oligonucleotide
tggacctacctacattgtactgattgtaga

SEQ ID NO: 419706 - DNA, 30 bp, Artificial Sequence
  Synthetic oligonucleotide
ccacaaccattgtgatacgttccttgtaga

SEQ ID NO: 419707 - DNA, 30 bp, Artificial Sequence
  Synthetic oligonucleotide
ttactcagtaggttatgagaaaaaattaga

SEQ ID NO: 419708 - DNA, 30 bp, Artificial Sequence
  Synthetic oligonucleotide
aaggtgaatactgttacggttagcattaga

SEQ ID NO: 419709 - DNA, 30 bp, Artificial Sequence
  Synthetic oligonucleotide
gggcctcatgtgcagcttgatctcattaga

SEQ ID NO: 419710 - DNA, 30 bp, Artificial Sequence
  Synthetic oligonucleotide
aatggggactacccatactctgtcattaga

SEQ ID NO: 419711 - DNA, 30 bp, Artificial Sequence
  Synthetic oligonucleotide
catcagtcgtaagtaaacaatatgattaga

SEQ ID NO: 419712 - DNA, 30 bp, Artificial Sequence
  Synthetic oligonucleotide
gttgttgctttgccagagccggttattaga

SEQ ID NO: 419713 - DNA, 30 bp, Artificial Sequence
  Synthetic oligonucleotide
ttcacccctagcccgaagcggacacttaga

SEQ ID NO: 419714 - DNA, 30 bp, Artificial Sequence
  Synthetic oligonucleotide
tccagcatgtaagttgactagccacttaga

SEQ ID NO: 419715 - DNA, 30 bp, Artificial Sequence
  Synthetic oligonucleotide
ccgacgttacccgtgcttagggtacttaga

SEQ ID NO: 419716 - DNA, 30 bp, Artificial Sequence
  Synthetic oligonucleotide
ttttggcatggatattcacgatcccttaga

SEQ ID NO: 419717 - DNA, 30 bp, Artificial Sequence
  Synthetic oligonucleotide
ctcggggataaagcgggtcgaggccttaga

SEQ ID NO: 419718 - DNA, 30 bp, Artificial Sequence
  Synthetic oligonucleotide
gctagcttcaggccctcaaaattccttaga

SEQ ID NO: 419719 - DNA, 30 bp, Artificial Sequence
  Synthetic oligonucleotide
tgcgttggatctccatctgcaaagcttaga

SEQ ID NO: 419720 - DNA, 30 bp, Artificial Sequence
  Synthetic oligonucleotide
aagccctgggtccgcataacatggcttaga

SEQ ID NO: 419721 - DNA, 30 bp, Artificial Sequence
  Synthetic oligonucleotide
tattctatcgaatggccgtctgctcttaga

SEQ ID NO: 419722 - DNA, 30 bp, Artificial Sequence
  Synthetic oligonucleotide
ccctgcaccagagggtgacttcaagttaga

SEQ ID NO: 419723 - DNA, 30 bp, Artificial Sequence
  Synthetic oligonucleotide
taagttaagtgggacggacacgacgttaga

SEQ ID NO: 419724 - DNA, 30 bp, Artificial Sequence
  Synthetic oligonucleotide
tattagttgacacgggatgcttacgttaga

SEQ ID NO: 419725 - DNA, 30 bp, Artificial Sequence
  Synthetic oligonucleotide
agtaagccaagtaacgcttgttacgttaga

SEQ ID NO: 419726 - DNA, 30 bp, Artificial Sequence
  Synthetic oligonucleotide
acacgatagtgatattcgggacccgttaga

SEQ ID NO: 419727 - DNA, 30 bp, Artificial Sequence
  Synthetic oligonucleotide
attagagcacggttctgatgttaggttaga

SEQ ID NO: 419728 - DNA, 30 bp, Artificial Sequence
  Synthetic oligonucleotide
gatcgaaccaagcggcggagctatgttaga

SEQ ID NO: 419729 - DNA, 30 bp, Artificial Sequence
  Synthetic oligonucleotide
aataaccatttctgcttttatactgttaga

SEQ ID NO: 419730 - DNA, 30 bp, Artificial Sequence
  Synthetic oligonucleotide
gatttccaggtggtcaagaaaaaatttaga

SEQ ID NO: 419731 - DNA, 30 bp, Artificial Sequence
  Synthetic oligonucleotide
gcatttctcttacagtcacagatatttaga

SEQ ID NO: 419732 - DNA, 30 bp, Artificial Sequence
  Synthetic oligonucleotide
acgctacgaatatatcaagatatatttaga

SEQ ID NO: 419733 - DNA, 30 bp, Artificial Sequence
  Synthetic oligonucleotide
gggccactgatgctttgtcacgcctttaga

SEQ ID NO: 419734 - DNA, 30 bp, Artificial Sequence
  Synthetic oligonucleotide
tacagtacatggtatgctcaggtctttaga

SEQ ID NO: 419735 - DNA, 30 bp, Artificial Sequence
  Synthetic oligonucleotide
cagagtgtaaaaaaggttcataagtttaga

SEQ ID NO: 419736 - DNA, 30 bp, Artificial Sequence
  Synthetic oligonucleotide
gtcgtgccggctgttcccctaacgtttaga

SEQ ID NO: 419737 - DNA, 30 bp, Artificial Sequence
  Synthetic oligonucleotide
aatcgatgtttgtgtggattctcgtttaga

SEQ ID NO: 419738 - DNA, 30 bp, Artificial Sequence
  Synthetic oligonucleotide
actatacgactcaagagggttaattttaga

SEQ ID NO: 419739 - DNA, 30 bp, Artificial Sequence
  Synthetic oligonucleotide
agctcgtaggagcatgttaatggaaaacga

SEQ ID NO: 419740 - DNA, 30 bp, Artificial Sequence
  Synthetic oligonucleotide
ccccttaggacggcagacattaataaacga

SEQ ID NO: 419741 - DNA, 30 bp, Artificial Sequence
  Synthetic oligonucleotide
tccggtccgagtcctacagactcccaacga

SEQ ID NO: 419742 - DNA, 30 bp, Artificial Sequence
  Synthetic oligonucleotide
tgtagactccggcttcgggactcgcaacga

SEQ ID NO: 419743 - DNA, 30 bp, Artificial Sequence
  Synthetic oligonucleotide
tctctgttctgggctttcggcctgcaacga

SEQ ID NO: 419744 - DNA, 30 bp, Artificial Sequence
  Synthetic oligonucleotide
tatatgcgcacagtcaatccctgtcaacga

SEQ ID NO: 419745 - DNA, 30 bp, Artificial Sequence
  Synthetic oligonucleotide
tagaaccccggaaagtgggtacttcaacga

SEQ ID NO: 419746 - DNA, 30 bp, Artificial Sequence
  Synthetic oligonucleotide
tgcaacttccctagccggagtaaagaacga

SEQ ID NO: 419747 - DNA, 30 bp, Artificial Sequence
  Synthetic oligonucleotide
tttccgtctagcttcggttacgtagaacga

SEQ ID NO: 419748 - DNA, 30 bp, Artificial Sequence
  Synthetic oligonucleotide
cttcttaaaatggcgctatgcggcgaacga

SEQ ID NO: 419749 - DNA, 30 bp, Artificial Sequence
  Synthetic oligonucleotide
gattttaaagtgttatgcacactggaacga

SEQ ID NO: 419750 - DNA, 30 bp, Artificial Sequence
  Synthetic oligonucleotide
aacattgttccttggtgtcatagtgaacga

SEQ ID NO: 419751 - DNA, 30 bp, Artificial Sequence
  Synthetic oligonucleotide
gtaatcgttaataggattaatattgaacga

SEQ ID NO: 419752 - DNA, 30 bp, Artificial Sequence
  Synthetic oligonucleotide
atcgggtgaacgaagaacaaagttgaacga

SEQ ID NO: 419753 - DNA, 30 bp, Artificial Sequence
  Synthetic oligonucleotide
ccgtcaggataatgtgttatctaataacga

SEQ ID NO: 419754 - DNA, 30 bp, Artificial Sequence
  Synthetic oligonucleotide
ttctgtcttggcttggcaacggcataacga

SEQ ID NO: 419755 - DNA, 30 bp, Artificial Sequence
  Synthetic oligonucleotide
cggtagggccaataacaccggcgataacga

SEQ ID NO: 419756 - DNA, 30 bp, Artificial Sequence
  Synthetic oligonucleotide
acagcatgagggccgtggaggggataacga

SEQ ID NO: 419757 - DNA, 30 bp, Artificial Sequence
  Synthetic oligonucleotide
gttatccttgaaagtgcttcaaggtaacga

SEQ ID NO: 419758 - DNA, 30 bp, Artificial Sequence
  Synthetic oligonucleotide
gtgcgaatggccacgcgcgggcggtaacga

SEQ ID NO: 419759 - DNA, 30 bp, Artificial Sequence
  Synthetic oligonucleotide
ccatgccagtaaactttgactcggtaacga

SEQ ID NO: 419760 - DNA, 30 bp, Artificial Sequence
  Synthetic oligonucleotide
aatcatggtttcagatacgacatgtaacga

SEQ ID NO: 419761 - DNA, 30 bp, Artificial Sequence
  Synthetic oligonucleotide
accatgctcgttcatttgccatgttaacga

SEQ ID NO: 419762 - DNA, 30 bp, Artificial Sequence
  Synthetic oligonucleotide
taatcaatagacgtgggtccttgaacacga

SEQ ID NO: 419763 - DNA, 30 bp, Artificial Sequence
  Synthetic oligonucleotide
cacggctattgttggaggagggtaacacga

SEQ ID NO: 419764 - DNA, 30 bp, Artificial Sequence
  Synthetic oligonucleotide
ggtgaggtcaaggacttagaacggacacga

SEQ ID NO: 419765 - DNA, 30 bp, Artificial Sequence
  Synthetic oligonucleotide
ccatggagagttttggggttcatgacacga

SEQ ID NO: 419766 - DNA, 30 bp, Artificial Sequence
  Synthetic oligonucleotide
tagtctagatgcgcagcagtcaatacacga

SEQ ID NO: 419767 - DNA, 31 bp, Artificial Sequence
  Synthetic oligonucleotide
tagccgtctatcacgcaatggtattacacga

SEQ ID NO: 419768 - DNA, 30 bp, Artificial Sequence
  Synthetic oligonucleotide
gtccgtgtatgtgtccaatttcaaccacga

SEQ ID NO: 419769 - DNA, 30 bp, Artificial Sequence
  Synthetic oligonucleotide
taaactttcgtgcgaaagcgctaaccacga

SEQ ID NO: 419770 - DNA, 30 bp, Artificial Sequence
  Synthetic oligonucleotide
tattgaacgcaataaggcgcgcccccacga

SEQ ID NO: 419771 - DNA, 30 bp, Artificial Sequence
  Synthetic oligonucleotide
gttacatggttgggttctacgggcccacga

SEQ ID NO: 419772 - DNA, 30 bp, Artificial Sequence
  Synthetic oligonucleotide
gatctctgcttctggtgatctgagccacga

SEQ ID NO: 419773 - DNA, 30 bp, Artificial Sequence
  Synthetic oligonucleotide
ggtagactaattatagatgagcatccacga

SEQ ID NO: 419774 - DNA, 30 bp, Artificial Sequence
  Synthetic oligonucleotide
aaatttgcagggtcttacagaattccacga

SEQ ID NO: 419775 - DNA, 30 bp, Artificial Sequence
  Synthetic oligonucleotide
ctacgtagtacatttggcctcattccacga

SEQ ID NO: 419776 - DNA, 30 bp, Artificial Sequence
  Synthetic oligonucleotide
gagcagccatcctactattacttagcacga

SEQ ID NO: 419777 - DNA, 30 bp, Artificial Sequence
  Synthetic oligonucleotide
actgttctgggactgttggagaaggcacga

SEQ ID NO: 419778 - DNA, 30 bp, Artificial Sequence
  Synthetic oligonucleotide
tgtgttccgtaaagaatcggccaggcacga

SEQ ID NO: 419779 - DNA, 30 bp, Artificial Sequence
  Synthetic oligonucleotide
acaaagtatttggacttacctggggcacga

SEQ ID NO: 419780 - DNA, 30 bp, Artificial Sequence
  Synthetic oligonucleotide
tcgcaggaacccgttcaaacgcctgcacga

SEQ ID NO: 419781 - DNA, 30 bp, Artificial Sequence
  Synthetic oligonucleotide
gtacgtgttctcctatacactgctgcacga

SEQ ID NO: 419782 - DNA, 30 bp, Artificial Sequence
  Synthetic oligonucleotide
tcagtcgtcaatattgctgacggatcacga

SEQ ID NO: 419783 - DNA, 30 bp, Artificial Sequence
  Synthetic oligonucleotide
ttgggtattacgtcgtcgctagtatcacga

SEQ ID NO: 419784 - DNA, 30 bp, Artificial Sequence
  Synthetic oligonucleotide
tgggttaaccagtcttcattagtatcacga

SEQ ID NO: 419785 - DNA, 30 bp, Artificial Sequence
  Synthetic oligonucleotide
ttgaatggtaacgtagtagggtcctcacga

SEQ ID NO: 419786 - DNA, 30 bp, Artificial Sequence
  Synthetic oligonucleotide
tggatgttaaggtgatgataattctcacga

SEQ ID NO: 419787 - DNA, 30 bp, Artificial Sequence
  Synthetic oligonucleotide
taagagacttatagatcgttgacgtcacga

SEQ ID NO: 419788 - DNA, 30 bp, Artificial Sequence
  Synthetic oligonucleotide
tttgattggtgaaaatagcagagttcacga

SEQ ID NO: 419789 - DNA, 30 bp, Artificial Sequence
  Synthetic oligonucleotide
gtgaagtcatggtgcacaccgttttcacga

SEQ ID NO: 419790 - DNA, 30 bp, Artificial Sequence
  Synthetic oligonucleotide
gattccttattaagttgaatagaaagacga

SEQ ID NO: 419791 - DNA, 30 bp, Artificial Sequence
  Synthetic oligonucleotide
tgcagtatcgcatagtggcgcttaagacga

SEQ ID NO: 419792 - DNA, 30 bp, Artificial Sequence
  Synthetic oligonucleotide
tatagtctgattacctatagtggcagacga

SEQ ID NO: 419793 - DNA, 30 bp, Artificial Sequence
  Synthetic oligonucleotide
tggataaaaggtggagggacttgcagacga

SEQ ID NO: 419794 - DNA, 30 bp, Artificial Sequence
  Synthetic oligonucleotide
tatggatccttctatttgtcgaagagacga

SEQ ID NO: 419795 - DNA, 30 bp, Artificial Sequence
  Synthetic oligonucleotide
gctgttctgtcataggcaccggggagacga

SEQ ID NO: 419796 - DNA, 30 bp, Artificial Sequence
  Synthetic oligonucleotide
gtggttcgataattcggttcgttgagacga

SEQ ID NO: 419797 - DNA, 30 bp, Artificial Sequence
  Synthetic oligonucleotide
atgtaccggtatgccttccatggtagacga

SEQ ID NO: 419798 - DNA, 30 bp, Artificial Sequence
  Synthetic oligonucleotide
cgcacaactcagcaacgtgggggacgacga

SEQ ID NO: 419799 - DNA, 30 bp, Artificial Sequence
  Synthetic oligonucleotide
atagcagtccgtggaaaagtagtgcgacga

SEQ ID NO: 419800 - DNA, 30 bp, Artificial Sequence
  Synthetic oligonucleotide
gggaccgctcatcgataccacaatcgacga

SEQ ID NO: 419801 - DNA, 30 bp, Artificial Sequence
  Synthetic oligonucleotide
cgcatattattgatgcactgcactcgacga

SEQ ID NO: 419802 - DNA, 27 bp, Artificial Sequence
  Synthetic oligonucleotide
ttataaatctaaagacatggtcgacga

SEQ ID NO: 419803 - DNA, 30 bp, Artificial Sequence
  Synthetic oligonucleotide
atataagcggtgagttcctaaagaggacga

SEQ ID NO: 419804 - DNA, 30 bp, Artificial Sequence
  Synthetic oligonucleotide
tacaagtccgtcttcgtcggatccggacga

SEQ ID NO: 419805 - DNA, 30 bp, Artificial Sequence
  Synthetic oligonucleotide
gtcgcttcgttgttttataggtgcggacga

SEQ ID NO: 419806 - DNA, 30 bp, Artificial Sequence
  Synthetic oligonucleotide
ttttcatgcccaatcggtggtatcggacga

SEQ ID NO: 419807 - DNA, 30 bp, Artificial Sequence
  Synthetic oligonucleotide
gattaaggcttgaatctagaggtgggacga

SEQ ID NO: 419808 - DNA, 29 bp, Artificial Sequence
  Synthetic oligonucleotide
catagataaccagcagtgcccgatgacga

SEQ ID NO: 419809 - DNA, 30 bp, Artificial Sequence
  Synthetic oligonucleotide
gcctaacggctaatcgaccatccttgacga

SEQ ID NO: 419810 - DNA, 30 bp, Artificial Sequence
  Synthetic oligonucleotide
catgtcaaagtcgactctcggctttgacga

SEQ ID NO: 419811 - DNA, 30 bp, Artificial Sequence
  Synthetic oligonucleotide
gcttcgtgtgagaacggagtcccaatacga

SEQ ID NO: 419812 - DNA, 30 bp, Artificial Sequence
  Synthetic oligonucleotide
gccttacgtagaaggacgcgcaagatacga

SEQ ID NO: 419813 - DNA, 30 bp, Artificial Sequence
  Synthetic oligonucleotide
cgcattggaactgtcggtaagcatatacga

SEQ ID NO: 419814 - DNA, 30 bp, Artificial Sequence
  Synthetic oligonucleotide
gtcggccgtcggtttttttctcatatacga

SEQ ID NO: 419815 - DNA, 30 bp, Artificial Sequence
  Synthetic oligonucleotide
gccgcaacagcttaggacacgggtatacga

SEQ ID NO: 419816 - DNA, 30 bp, Artificial Sequence
  Synthetic oligonucleotide
gtgttcacgtctctcctcagttgtatacga

SEQ ID NO: 419817 - DNA, 30 bp, Artificial Sequence
  Synthetic oligonucleotide
aacttgaaagcccggttggtcaagctacga

SEQ ID NO: 419818 - DNA, 30 bp, Artificial Sequence
  Synthetic oligonucleotide
gaaagcatgcatcgcttatattggctacga

SEQ ID NO: 419819 - DNA, 30 bp, Artificial Sequence
  Synthetic oligonucleotide
acaggctttagttttctatgtccagtacga

SEQ ID NO: 419820 - DNA, 30 bp, Artificial Sequence
  Synthetic oligonucleotide
tcacctttcaaccgaactcacttcgtacga

SEQ ID NO: 419821 - DNA, 30 bp, Artificial Sequence
  Synthetic oligonucleotide
gtagatagccaaggcacatctatattacga

SEQ ID NO: 419822 - DNA, 30 bp, Artificial Sequence
  Synthetic oligonucleotide
aactcataccaggccaacaaaatcttacga

SEQ ID NO: 419823 - DNA, 30 bp, Artificial Sequence
  Synthetic oligonucleotide
tttagatattattcgaacggtgcgttacga

SEQ ID NO: 419824 - DNA, 30 bp, Artificial Sequence
  Synthetic oligonucleotide
gcagcatattgacaccctcatgaaaaccga

SEQ ID NO: 419825 - DNA, 30 bp, Artificial Sequence
  Synthetic oligonucleotide
acaacgagttgcggcttcggtctaaaccga

SEQ ID NO: 419826 - DNA, 30 bp, Artificial Sequence
  Synthetic oligonucleotide
gagcggctcctatcggatacggagaaccga

SEQ ID NO: 419827 - DNA, 28 bp, Artificial Sequence
  Synthetic oligonucleotide
tattatggtgtacctaccatggaaccga

SEQ ID NO: 419828 - DNA, 30 bp, Artificial Sequence
  Synthetic oligonucleotide
gcccagtacctcggcattccgcataaccga

SEQ ID NO: 419829 - DNA, 30 bp, Artificial Sequence
  Synthetic oligonucleotide
tataagcttcagctatgatcatctaaccga

SEQ ID NO: 419830 - DNA, 30 bp, Artificial Sequence
  Synthetic oligonucleotide
gagtcgcaccagttcgccggctttaaccga

SEQ ID NO: 419831 - DNA, 30 bp, Artificial Sequence
  Synthetic oligonucleotide
gagtttcattcatgctcagtcatccaccga

SEQ ID NO: 419832 - DNA, 30 bp, Artificial Sequence
  Synthetic oligonucleotide
tagattaaaaaattacccagattccaccga

SEQ ID NO: 419833 - DNA, 30 bp, Artificial Sequence
  Synthetic oligonucleotide
gaacattcttcatcccggtatccgcaccga

SEQ ID NO: 419834 - DNA, 30 bp, Artificial Sequence
  Synthetic oligonucleotide
atcgtaacgggctcatgttgcgcagaccga

SEQ ID NO: 419835 - DNA, 30 bp, Artificial Sequence
  Synthetic oligonucleotide
tacggcgtctaattagaaattgacgaccga

SEQ ID NO: 419836 - DNA, 31 bp, Artificial Sequence
  Synthetic oligonucleotide
ttagagctatcgcgtctatccctccgaccga

SEQ ID NO: 419837 - DNA, 30 bp, Artificial Sequence
  Synthetic oligonucleotide
gaaatttccggtcgctggagcagggaccga

SEQ ID NO: 419838 - DNA, 30 bp, Artificial Sequence
  Synthetic oligonucleotide
aaccttgaaatcttgacagatatggaccga

SEQ ID NO: 419839 - DNA, 30 bp, Artificial Sequence
  Synthetic oligonucleotide
tgtgccaattgcgaggagaaaagtgaccga

SEQ ID NO: 419840 - DNA, 30 bp, Artificial Sequence
  Synthetic oligonucleotide
ccctagtgttcctctcctccgggtgaccga

SEQ ID NO: 419841 - DNA, 30 bp, Artificial Sequence
  Synthetic oligonucleotide
aaaatgtgctgttggagccattgtgaccga

SEQ ID NO: 419842 - DNA, 30 bp, Artificial Sequence
  Synthetic oligonucleotide
gcacgtgttaggtccagagcttcttaccga

SEQ ID NO: 419843 - DNA, 30 bp, Artificial Sequence
  Synthetic oligonucleotide
gccgctgatgcgtctcttccgcgttaccga

SEQ ID NO: 419844 - DNA, 30 bp, Artificial Sequence
  Synthetic oligonucleotide
tcgctagcgcaatcacgggtatgttaccga

SEQ ID NO: 419845 - DNA, 30 bp, Artificial Sequence
  Synthetic oligonucleotide
ctttcgggctcagctcagatccgaacccga

SEQ ID NO: 419846 - DNA, 30 bp, Artificial Sequence
  Synthetic oligonucleotide
gtttcgttctgcggggcaattcagacccga

SEQ ID NO: 419847 - DNA, 30 bp, Artificial Sequence
  Synthetic oligonucleotide
gacatgcgcagagttgcggtggggacccga

SEQ ID NO: 419848 - DNA, 30 bp, Artificial Sequence
  Synthetic oligonucleotide
gaacgcctattcgagggccttgatacccga

SEQ ID NO: 419849 - DNA, 30 bp, Artificial Sequence
  Synthetic oligonucleotide
attattgcaaggtgatacccctctacccga

SEQ ID NO: 419850 - DNA, 30 bp, Artificial Sequence
  Synthetic oligonucleotide
acggaatcataaaggtctagataaccccga

SEQ ID NO: 419851 - DNA, 30 bp, Artificial Sequence
  Synthetic oligonucleotide
gagtacggcctcgagcggagcgtaccccga

SEQ ID NO: 419852 - DNA, 30 bp, Artificial Sequence
  Synthetic oligonucleotide
gaagcttgatagctgaagcaattgccccga

SEQ ID NO: 419853 - DNA, 30 bp, Artificial Sequence
  Synthetic oligonucleotide
gaaagacgtgatggctttcaatctccccga

SEQ ID NO: 419854 - DNA, 30 bp, Artificial Sequence
  Synthetic oligonucleotide
ggctcaccactctacaggaatgcagcccga

SEQ ID NO: 419855 - DNA, 30 bp, Artificial Sequence
  Synthetic oligonucleotide
catgtaaatgctgctgggctaatagcccga

SEQ ID NO: 419856 - DNA, 30 bp, Artificial Sequence
  Synthetic oligonucleotide
ctaactgccatgtattgccgccacgcccga

SEQ ID NO: 419857 - DNA, 30 bp, Artificial Sequence
  Synthetic oligonucleotide
accctggatgtcttatcacgcaaggcccga

SEQ ID NO: 419858 - DNA, 30 bp, Artificial Sequence
  Synthetic oligonucleotide
gttcgccacgtacaggtgctattggcccga

SEQ ID NO: 419859 - DNA, 30 bp, Artificial Sequence
  Synthetic oligonucleotide
gttttgccggatcctatcaagacctcccga

SEQ ID NO: 419860 - DNA, 30 bp, Artificial Sequence
  Synthetic oligonucleotide
catgtgttctccgagcgacggttctcccga

SEQ ID NO: 419861 - DNA, 30 bp, Artificial Sequence
  Synthetic oligonucleotide
tcccgatcgttctcagccggtcagtcccga

SEQ ID NO: 419862 - DNA, 30 bp, Artificial Sequence
  Synthetic oligonucleotide
attcccctcggatcggtaccttagtcccga

SEQ ID NO: 419863 - DNA, 30 bp, Artificial Sequence
  Synthetic oligonucleotide
atagcactcagtccgtcgggcaggtcccga

SEQ ID NO: 419864 - DNA, 30 bp, Artificial Sequence
  Synthetic oligonucleotide
gccggggtaacgtttcctccatggtcccga

SEQ ID NO: 419865 - DNA, 30 bp, Artificial Sequence
  Synthetic oligonucleotide
gaattacaagtcgtaatgcggatgtcccga

SEQ ID NO: 419866 - DNA, 25 bp, Artificial Sequence
  Synthetic oligonucleotide
tgctccgtccgatagtttttcccga

SEQ ID NO: 419867 - DNA, 30 bp, Artificial Sequence
  Synthetic oligonucleotide
gagtgtggcctaggttgactagggagccga

SEQ ID NO: 419868 - DNA, 30 bp, Artificial Sequence
  Synthetic oligonucleotide
gaatcgttgcgttaccatcgccaacgccga

SEQ ID NO: 419869 - DNA, 30 bp, Artificial Sequence
  Synthetic oligonucleotide
ggctattcgagcgcggaatgctgccgccga

SEQ ID NO: 419870 - DNA, 30 bp, Artificial Sequence
  Synthetic oligonucleotide
gaaccggttaacatgctcgagatgcgccga

SEQ ID NO: 419871 - DNA, 30 bp, Artificial Sequence
  Synthetic oligonucleotide
tatacgtaagttagctcgcgcaatcgccga

SEQ ID NO: 419872 - DNA, 30 bp, Artificial Sequence
  Synthetic oligonucleotide
ctggttaccgtgtacgttcaagatcgccga

SEQ ID NO: 419873 - DNA, 30 bp, Artificial Sequence
  Synthetic oligonucleotide
ggactctatgcttactcggcaattcgccga

SEQ ID NO: 419874 - DNA, 30 bp, Artificial Sequence
  Synthetic oligonucleotide
aatgaaccggttaaagtagttacaggccga

SEQ ID NO: 419875 - DNA, 30 bp, Artificial Sequence
  Synthetic oligonucleotide
cagcatgggcagcagcaaattagaggccga

SEQ ID NO: 419876 - DNA, 30 bp, Artificial Sequence
  Synthetic oligonucleotide
attagtcgtctctcactccttaccggccga

SEQ ID NO: 419877 - DNA, 30 bp, Artificial Sequence
  Synthetic oligonucleotide
ataggttgcagtgcggatgtgcccggccga

SEQ ID NO: 419878 - DNA, 30 bp, Artificial Sequence
  Synthetic oligonucleotide
ccacttatgggggttaattagagcggccga

SEQ ID NO: 419879 - DNA, 30 bp, Artificial Sequence
  Synthetic oligonucleotide
cgattgtaggtctgaattgacatcggccga

SEQ ID NO: 419880 - DNA, 30 bp, Artificial Sequence
  Synthetic oligonucleotide
agacgtattaacgcccggtgtgggggccga

SEQ ID NO: 419881 - DNA, 30 bp, Artificial Sequence
  Synthetic oligonucleotide
gaccctatcggtgcttctgtcatgggccga

SEQ ID NO: 419882 - DNA, 30 bp, Artificial Sequence
  Synthetic oligonucleotide
gattacaggcgttacccctcggtgggccga

SEQ ID NO: 419883 - DNA, 30 bp, Artificial Sequence
  Synthetic oligonucleotide
ttactcgcgttggtatttcgcgatggccga

SEQ ID NO: 419884 - DNA, 30 bp, Artificial Sequence
  Synthetic oligonucleotide
atcaagataaatcggtgttacattggccga

SEQ ID NO: 419885 - DNA, 30 bp, Artificial Sequence
  Synthetic oligonucleotide
aataactataacccgcctttgtaatgccga

SEQ ID NO: 419886 - DNA, 30 bp, Artificial Sequence
  Synthetic oligonucleotide
agacgggaggttcaggattcggcatgccga

SEQ ID NO: 419887 - DNA, 30 bp, Artificial Sequence
  Synthetic oligonucleotide
aacccagaagtctaatgatccatatgccga

SEQ ID NO: 419888 - DNA, 30 bp, Artificial Sequence
  Synthetic oligonucleotide
ggcgtagagcggctgtgatttaactgccga

SEQ ID NO: 419889 - DNA, 30 bp, Artificial Sequence
  Synthetic oligonucleotide
ccctaggcaggtcggccttaatattgccga

SEQ ID NO: 419890 - DNA, 30 bp, Artificial Sequence
  Synthetic oligonucleotide
tgggttcgggagctcgagctacgttgccga

SEQ ID NO: 419891 - DNA, 30 bp, Artificial Sequence
  Synthetic oligonucleotide
gtcgtcttcgggagagttttaatcatccga

SEQ ID NO: 419892 - DNA, 30 bp, Artificial Sequence
  Synthetic oligonucleotide
ttttcagctcaactgacaagaccgatccga

SEQ ID NO: 419893 - DNA, 30 bp, Artificial Sequence
  Synthetic oligonucleotide
ctctagggtgccggaaccttggatatccga

SEQ ID NO: 419894 - DNA, 30 bp, Artificial Sequence
  Synthetic oligonucleotide
ttcaatttccccgaccagtgccctatccga

SEQ ID NO: 419895 - DNA, 30 bp, Artificial Sequence
  Synthetic oligonucleotide
gggaaacttagcgtccgcctggtcctccga

SEQ ID NO: 419896 - DNA, 30 bp, Artificial Sequence
  Synthetic oligonucleotide
gatccagagcgcaccccgtgttagctccga

SEQ ID NO: 419897 - DNA, 30 bp, Artificial Sequence
  Synthetic oligonucleotide
cttgtcctagccaaacctgacacgctccga

SEQ ID NO: 419898 - DNA, 30 bp, Artificial Sequence
  Synthetic oligonucleotide
gagactttgttgccttctcgtttgctccga

SEQ ID NO: 419899 - DNA, 30 bp, Artificial Sequence
  Synthetic oligonucleotide
agtcaactttatgaagaagatgcagtccga

SEQ ID NO: 419900 - DNA, 30 bp, Artificial Sequence
  Synthetic oligonucleotide
tggtcaccagggcggtctccccgagtccga

SEQ ID NO: 419901 - DNA, 30 bp, Artificial Sequence
  Synthetic oligonucleotide
ttgatttttcaagtttcgtcatgagtccga

SEQ ID NO: 419902 - DNA, 30 bp, Artificial Sequence
  Synthetic oligonucleotide
ttcatacgttatagcttgatgcaggtccga

SEQ ID NO: 419903 - DNA, 30 bp, Artificial Sequence
  Synthetic oligonucleotide
tgcactcgttcatggagccgtagattccga

SEQ ID NO: 419904 - DNA, 30 bp, Artificial Sequence
  Synthetic oligonucleotide
ggtatttctcccaatttttcacccttccga

SEQ ID NO: 419905 - DNA, 30 bp, Artificial Sequence
  Synthetic oligonucleotide
ttttagttgaatggtgcaaagcgtttccga

SEQ ID NO: 419906 - DNA, 30 bp, Artificial Sequence
  Synthetic oligonucleotide
ttccgattagggcactaagtgattttccga

SEQ ID NO: 419907 - DNA, 30 bp, Artificial Sequence
  Synthetic oligonucleotide
tgctgtgaaaagcgtacttaacagaagcga

SEQ ID NO: 419908 - DNA, 30 bp, Artificial Sequence
  Synthetic oligonucleotide
aaatgttgctctgcgacactttagaagcga

SEQ ID NO: 419909 - DNA, 30 bp, Artificial Sequence
  Synthetic oligonucleotide
actttatgtctcagattgaaacggaagcga

SEQ ID NO: 419910 - DNA, 30 bp, Artificial Sequence
  Synthetic oligonucleotide
gaccttgtgttctcaatagtgatgaagcga

SEQ ID NO: 419911 - DNA, 30 bp, Artificial Sequence
  Synthetic oligonucleotide
tttactagttaattaggcgacctgaagcga

SEQ ID NO: 419912 - DNA, 30 bp, Artificial Sequence
  Synthetic oligonucleotide
ttgagaccaccaccaagcgtactccagcga

SEQ ID NO: 419913 - DNA, 30 bp, Artificial Sequence
  Synthetic oligonucleotide
acaacctgcactcggcctggatagcagcga

SEQ ID NO: 419914 - DNA, 30 bp, Artificial Sequence
  Synthetic oligonucleotide
acaagtagtacgttagcccggttgcagcga

SEQ ID NO: 419915 - DNA, 30 bp, Artificial Sequence
  Synthetic oligonucleotide
taacagtgaagtcatagtgtgggtcagcga

SEQ ID NO: 419916 - DNA, 30 bp, Artificial Sequence
  Synthetic oligonucleotide
aaaataacccacggtattaaatttcagcga

SEQ ID NO: 419917 - DNA, 30 bp, Artificial Sequence
  Synthetic oligonucleotide
gtgatgcagctagtagaaggttcagagcga

SEQ ID NO: 419918 - DNA, 30 bp, Artificial Sequence
  Synthetic oligonucleotide
gtacggaatcggagttcggcagtagagcga

SEQ ID NO: 419919 - DNA, 30 bp, Artificial Sequence
  Synthetic oligonucleotide
gttcttggcctatgcacggagttcgagcga

SEQ ID NO: 419920 - DNA, 30 bp, Artificial Sequence
  Synthetic oligonucleotide
caataggcggtcccttcggctctggagcga

SEQ ID NO: 419921 - DNA, 30 bp, Artificial Sequence
  Synthetic oligonucleotide
gataggatccgtccttgatatgactagcga

SEQ ID NO: 419922 - DNA, 30 bp, Artificial Sequence
  Synthetic oligonucleotide
agaagttttgattcgacactcaggtagcga

SEQ ID NO: 419923 - DNA, 30 bp, Artificial Sequence
  Synthetic oligonucleotide
gcaatgaatctttgtataggtatttagcga

SEQ ID NO: 419924 - DNA, 30 bp, Artificial Sequence
  Synthetic oligonucleotide
ttatggacggggcgtttagataaaacgcga

SEQ ID NO: 419925 - DNA, 30 bp, Artificial Sequence
  Synthetic oligonucleotide
cactcaccagaagagttctgggtaacgcga

SEQ ID NO: 419926 - DNA, 30 bp, Artificial Sequence
  Synthetic oligonucleotide
acattggcgccgtattttatgaacacgcga

SEQ ID NO: 419927 - DNA, 30 bp, Artificial Sequence
  Synthetic oligonucleotide
aacgcttgagatcgtcccggtagcacgcga

SEQ ID NO: 419928 - DNA, 30 bp, Artificial Sequence
  Synthetic oligonucleotide
agcaattgggcaatcactaataagacgcga

SEQ ID NO: 419929 - DNA, 30 bp, Artificial Sequence
  Synthetic oligonucleotide
agtttagaagcttccctattgccgacgcga

SEQ ID NO: 419930 - DNA, 30 bp, Artificial Sequence
  Synthetic oligonucleotide
caactgtaaggtgtttaggttgatacgcga

SEQ ID NO: 419931 - DNA, 30 bp, Artificial Sequence
  Synthetic oligonucleotide
gaatgagaggccagaaaggtaacaccgcga

SEQ ID NO: 419932 - DNA, 30 bp, Artificial Sequence
  Synthetic oligonucleotide
atgctttgaacacttgtcgtttcaccgcga

SEQ ID NO: 419933 - DNA, 30 bp, Artificial Sequence
  Synthetic oligonucleotide
gatattctggagccactaggggacccgcga

SEQ ID NO: 419934 - DNA, 30 bp, Artificial Sequence
  Synthetic oligonucleotide
aaacgccgtttggtccggttatggccgcga

SEQ ID NO: 419935 - DNA, 30 bp, Artificial Sequence
  Synthetic oligonucleotide
tttttgagaatttttcaaactctgccgcga

SEQ ID NO: 419936 - DNA, 30 bp, Artificial Sequence
  Synthetic oligonucleotide
gagagacctacgtcggaaagcggagcgcga

SEQ ID NO: 419937 - DNA, 30 bp, Artificial Sequence
  Synthetic oligonucleotide
agtctagtaagacggaagcctctagcgcga

SEQ ID NO: 419938 - DNA, 30 bp, Artificial Sequence
  Synthetic oligonucleotide
ctaagacgggcagccgtttgcgcatcgcga

SEQ ID NO: 419939 - DNA, 30 bp, Artificial Sequence
  Synthetic oligonucleotide
gcgagtcccccaacaaatgtttactcgcga

SEQ ID NO: 419940 - DNA, 30 bp, Artificial Sequence
  Synthetic oligonucleotide
tagacttgaccgtttctcttgctttcgcga

SEQ ID NO: 419941 - DNA, 30 bp, Artificial Sequence
  Synthetic oligonucleotide
cccattcgccgcagaagcttttgaaggcga

SEQ ID NO: 419942 - DNA, 30 bp, Artificial Sequence
  Synthetic oligonucleotide
gagaatggggacgcggaatccgacaggcga

SEQ ID NO: 419943 - DNA, 30 bp, Artificial Sequence
  Synthetic oligonucleotide
gagtacagtccgatttgctaacgcaggcga

SEQ ID NO: 419944 - DNA, 30 bp, Artificial Sequence
  Synthetic oligonucleotide
gccagcggattttcccgattgcgtaggcga

SEQ ID NO: 419945 - DNA, 30 bp, Artificial Sequence
  Synthetic oligonucleotide
gaaccggtgctcaacgcaggacaacggcga

SEQ ID NO: 419946 - DNA, 30 bp, Artificial Sequence
  Synthetic oligonucleotide
tcgcctctgaattgtgctcgcagccggcga

SEQ ID NO: 419947 - DNA, 30 bp, Artificial Sequence
  Synthetic oligonucleotide
tattcgggatatcgggtttaccatcggcga

SEQ ID NO: 419948 - DNA, 30 bp, Artificial Sequence
  Synthetic oligonucleotide
tgtggacgagcgccacaggtacttcggcga

SEQ ID NO: 419949 - DNA, 30 bp, Artificial Sequence
  Synthetic oligonucleotide
gatatatgttataaatctaatcgagggcga

SEQ ID NO: 419950 - DNA, 30 bp, Artificial Sequence
  Synthetic oligonucleotide
agggatcaagtaggctaaagtcaggggcga

SEQ ID NO: 419951 - DNA, 30 bp, Artificial Sequence
  Synthetic oligonucleotide
gcattgtatgctattgacggggcggggcga

SEQ ID NO: 419952 - DNA, 30 bp, Artificial Sequence
  Synthetic oligonucleotide
agcccaattcccgtatacggaatggggcga

SEQ ID NO: 419953 - DNA, 30 bp, Artificial Sequence
  Synthetic oligonucleotide
tcgtgacgcgcggtcactttgatggggcga

SEQ ID NO: 419954 - DNA, 30 bp, Artificial Sequence
  Synthetic oligonucleotide
gaacggtattaggtaattgccatatggcga

SEQ ID NO: 419955 - DNA, 30 bp, Artificial Sequence
  Synthetic oligonucleotide
atacaagattaggtacgtctgttgtggcga

SEQ ID NO: 419956 - DNA, 30 bp, Artificial Sequence
  Synthetic oligonucleotide
aaatagttgtgactgatgcaggcttggcga

SEQ ID NO: 419957 - DNA, 30 bp, Artificial Sequence
  Synthetic oligonucleotide
tggaactaaaaggtctacatcggttggcga

SEQ ID NO: 419958 - DNA, 30 bp, Artificial Sequence
  Synthetic oligonucleotide
accaactgagttacgtccacgggttggcga

SEQ ID NO: 419959 - DNA, 30 bp, Artificial Sequence
  Synthetic oligonucleotide
attgatgttaaatcttctgtagcaatgcga

SEQ ID NO: 419960 - DNA, 30 bp, Artificial Sequence
  Synthetic oligonucleotide
tcccggatcactctcagcaaatctatgcga

SEQ ID NO: 419961 - DNA, 30 bp, Artificial Sequence
  Synthetic oligonucleotide
aggctattgtaatgactccacagtatgcga

SEQ ID NO: 419962 - DNA, 30 bp, Artificial Sequence
  Synthetic oligonucleotide
agcattcataagcttttagcggttatgcga

SEQ ID NO: 419963 - DNA, 30 bp, Artificial Sequence
  Synthetic oligonucleotide
ttgactccgactcgcgtcccactcctgcga

SEQ ID NO: 419964 - DNA, 30 bp, Artificial Sequence
  Synthetic oligonucleotide
aatatacgaagaaactccctctaagtgcga

SEQ ID NO: 419965 - DNA, 30 bp, Artificial Sequence
  Synthetic oligonucleotide
aatttccttctatgagtcacggtcgtgcga

SEQ ID NO: 419966 - DNA, 30 bp, Artificial Sequence
  Synthetic oligonucleotide
ccactttcggtccactatatacgggtgcga

SEQ ID NO: 419967 - DNA, 30 bp, Artificial Sequence
  Synthetic oligonucleotide
ctatctctatgcaggtgcgagcaattgcga

SEQ ID NO: 419968 - DNA, 30 bp, Artificial Sequence
  Synthetic oligonucleotide
attcccgttgatggtagattaagattgcga

SEQ ID NO: 419969 - DNA, 30 bp, Artificial Sequence
  Synthetic oligonucleotide
atattggggacaactgatgcaaacttgcga

SEQ ID NO: 419970 - DNA, 30 bp, Artificial Sequence
  Synthetic oligonucleotide
ttatacggacatcctttagtcaccttgcga

SEQ ID NO: 419971 - DNA, 30 bp, Artificial Sequence
  Synthetic oligonucleotide
aaattacttctaactgtcgttctcttgcga

SEQ ID NO: 419972 - DNA, 31 bp, Artificial Sequence
  Synthetic oligonucleotide
tgacgcaagcttagctgcatcctggttgcga

SEQ ID NO: 419973 - DNA, 30 bp, Artificial Sequence
  Synthetic oligonucleotide
gtggttcttacctaccccgattggttgcga

SEQ ID NO: 419974 - DNA, 30 bp, Artificial Sequence
  Synthetic oligonucleotide
cacataaaggtgtaaacttgagatttgcga

SEQ ID NO: 419975 - DNA, 30 bp, Artificial Sequence
  Synthetic oligonucleotide
taaaatagatttgaacatctgtctttgcga

SEQ ID NO: 419976 - DNA, 30 bp, Artificial Sequence
  Synthetic oligonucleotide
atttgtatacgctaaacggggtgaaatcga

SEQ ID NO: 419977 - DNA, 30 bp, Artificial Sequence
  Synthetic oligonucleotide
acccctggagggcccgttgacgaacatcga

SEQ ID NO: 419978 - DNA, 30 bp, Artificial Sequence
  Synthetic oligonucleotide
gaccggtacgtacttgttcccggacatcga

SEQ ID NO: 419979 - DNA, 30 bp, Artificial Sequence
  Synthetic oligonucleotide
aatttccaatagtaattagctgggcatcga

SEQ ID NO: 419980 - DNA, 30 bp, Artificial Sequence
  Synthetic oligonucleotide
gaaaaattattgctagacagcggtcatcga

SEQ ID NO: 419981 - DNA, 30 bp, Artificial Sequence
  Synthetic oligonucleotide
aactcgaatttaactgagccttgtcatcga

SEQ ID NO: 419982 - DNA, 30 bp, Artificial Sequence
  Synthetic oligonucleotide
cgcacagtgatcggacacattcaagatcga

SEQ ID NO: 419983 - DNA, 30 bp, Artificial Sequence
  Synthetic oligonucleotide
aagacggcggctgcaatcttttcagatcga

SEQ ID NO: 419984 - DNA, 30 bp, Artificial Sequence
  Synthetic oligonucleotide
gccgattgccgatcgcaacagggagatcga

SEQ ID NO: 419985 - DNA, 30 bp, Artificial Sequence
  Synthetic oligonucleotide
gcaaacctacagtatgagtaggtagatcga

SEQ ID NO: 419986 - DNA, 30 bp, Artificial Sequence
  Synthetic oligonucleotide
gtcgtcatgctggcttagctctccgatcga

SEQ ID NO: 419987 - DNA, 30 bp, Artificial Sequence
  Synthetic oligonucleotide
ttagttctcggacaaggcggagtcgatcga

SEQ ID NO: 419988 - DNA, 30 bp, Artificial Sequence
  Synthetic oligonucleotide
taatcgttcccttttcgacggcttgatcga

SEQ ID NO: 419989 - DNA, 30 bp, Artificial Sequence
  Synthetic oligonucleotide
gccagccctagacgccctggagcatatcga

SEQ ID NO: 419990 - DNA, 31 bp, Artificial Sequence
  Synthetic oligonucleotide
ctagggacagactgcgagataattatatcga

SEQ ID NO: 419991 - DNA, 30 bp, Artificial Sequence
  Synthetic oligonucleotide
ttgctgtgctgtcacgacacgacgtatcga

SEQ ID NO: 419992 - DNA, 30 bp, Artificial Sequence
  Synthetic oligonucleotide
agagttctcagccgcaaccggatgtatcga

SEQ ID NO: 419993 - DNA, 30 bp, Artificial Sequence
  Synthetic oligonucleotide
cgctatttgatatccggaacgccttatcga

SEQ ID NO: 419994 - DNA, 30 bp, Artificial Sequence
  Synthetic oligonucleotide
ctctacgatagtgaaccccgtctttatcga

SEQ ID NO: 419995 - DNA, 30 bp, Artificial Sequence
  Synthetic oligonucleotide
tattaggttcaaaggcagacaccaactcga

SEQ ID NO: 419996 - DNA, 30 bp, Artificial Sequence
  Synthetic oligonucleotide
cgcaagcatgttggtcgaatgctaactcga

SEQ ID NO: 419997 - DNA, 30 bp, Artificial Sequence
  Synthetic oligonucleotide
catattgaaccacaccggtgcgtcactcga

SEQ ID NO: 419998 - DNA, 30 bp, Artificial Sequence
  Synthetic oligonucleotide
cgttgttgttctccgtcctgaaagactcga

SEQ ID NO: 419999 - DNA, 29 bp, Artificial Sequence
  Synthetic oligonucleotide
tatcccgtatggctgatcccccgactcga

SEQ ID NO: 420000 - DNA, 29 bp, Artificial Sequence
  Synthetic oligonucleotide
aagtaagagatctagccgctatgactcga

SEQ ID NO: 420001 - DNA, 30 bp, Artificial Sequence
  Synthetic oligonucleotide
gcttgatggttcgttaattaagaacctcga

SEQ ID NO: 420002 - DNA, 30 bp, Artificial Sequence
  Synthetic oligonucleotide
ttttattggacaagtagagtcctacctcga

SEQ ID NO: 420003 - DNA, 30 bp, Artificial Sequence
  Synthetic oligonucleotide
ttggtagactccattgcgcaccaccctcga

SEQ ID NO: 420004 - DNA, 30 bp, Artificial Sequence
  Synthetic oligonucleotide
atcgaaggcagcactctgacaaggcctcga

SEQ ID NO: 420005 - DNA, 30 bp, Artificial Sequence
  Synthetic oligonucleotide
gcattcgttctaggtcaaaccctagctcga

SEQ ID NO: 420006 - DNA, 30 bp, Artificial Sequence
  Synthetic oligonucleotide
atttacggccggaaatagtagtacgctcga

SEQ ID NO: 420007 - DNA, 30 bp, Artificial Sequence
  Synthetic oligonucleotide
ttaccacggcttccaggaaattaggctcga

SEQ ID NO: 420008 - DNA, 30 bp, Artificial Sequence
  Synthetic oligonucleotide
ctcgtatacagcacgtggcggagggctcga

SEQ ID NO: 420009 - DNA, 30 bp, Artificial Sequence
  Synthetic oligonucleotide
cattaaaggtagtatcgaggtaaatctcga

SEQ ID NO: 420010 - DNA, 30 bp, Artificial Sequence
  Synthetic oligonucleotide
ttgcggtccgaagttgatagccgatctcga

SEQ ID NO: 420011 - DNA, 30 bp, Artificial Sequence
  Synthetic oligonucleotide
agtagagctatacgtgtcgaatactctcga

SEQ ID NO: 420012 - DNA, 30 bp, Artificial Sequence
  Synthetic oligonucleotide
atatgcaatactttcaactgacagtctcga

SEQ ID NO: 420013 - DNA, 30 bp, Artificial Sequence
  Synthetic oligonucleotide
ctattgatacccccggttacaagttctcga

SEQ ID NO: 420014 - DNA, 30 bp, Artificial Sequence
  Synthetic oligonucleotide
acactgttccccaatgaggctgcaagtcga

SEQ ID NO: 420015 - DNA, 30 bp, Artificial Sequence
  Synthetic oligonucleotide
gcttatgaattcccggcggccgatagtcga

SEQ ID NO: 420016 - DNA, 30 bp, Artificial Sequence
  Synthetic oligonucleotide
acatactgaattgcacgcggtccccgtcga

SEQ ID NO: 420017 - DNA, 30 bp, Artificial Sequence
  Synthetic oligonucleotide
ggaaaggttgtatattcacatgatcgtcga

SEQ ID NO: 420018 - DNA, 30 bp, Artificial Sequence
  Synthetic oligonucleotide
agcgcccggctagatttcatgtctcgtcga

SEQ ID NO: 420019 - DNA, 30 bp, Artificial Sequence
  Synthetic oligonucleotide
tggtctttaagtttataaaaaagaggtcga

SEQ ID NO: 420020 - DNA, 30 bp, Artificial Sequence
  Synthetic oligonucleotide
ggatttctaagaggacggacccgaggtcga

SEQ ID NO: 420021 - DNA, 30 bp, Artificial Sequence
  Synthetic oligonucleotide
ccttcgcgtatacattttaacataggtcga

SEQ ID NO: 420022 - DNA, 30 bp, Artificial Sequence
  Synthetic oligonucleotide
gcaccgctttgaaatgggtatctaggtcga

SEQ ID NO: 420023 - DNA, 30 bp, Artificial Sequence
  Synthetic oligonucleotide
ccgggctgggtctccggccaggacggtcga

SEQ ID NO: 420024 - DNA, 30 bp, Artificial Sequence
  Synthetic oligonucleotide
agctgtcttgatattgtaccgatgggtcga

SEQ ID NO: 420025 - DNA, 30 bp, Artificial Sequence
  Synthetic oligonucleotide
tcatcgacgcccgcatactagggatgtcga

SEQ ID NO: 420026 - DNA, 30 bp, Artificial Sequence
  Synthetic oligonucleotide
ggttgaaccctctcacttgtgggatgtcga

SEQ ID NO: 420027 - DNA, 30 bp, Artificial Sequence
  Synthetic oligonucleotide
tagctatgtttatgaaccggcatctgtcga

SEQ ID NO: 420028 - DNA, 30 bp, Artificial Sequence
  Synthetic oligonucleotide
ctcgggatagggagatgctcgtcttgtcga

SEQ ID NO: 420029 - DNA, 30 bp, Artificial Sequence
  Synthetic oligonucleotide
atttcctagtaacttatactacgttgtcga

SEQ ID NO: 420030 - DNA, 30 bp, Artificial Sequence
  Synthetic oligonucleotide
tggcggcggttctgccttccgctttgtcga

SEQ ID NO: 420031 - DNA, 30 bp, Artificial Sequence
  Synthetic oligonucleotide
gaatagatcactgtcgcgaataacattcga

SEQ ID NO: 420032 - DNA, 30 bp, Artificial Sequence
  Synthetic oligonucleotide
aaccaacttctcctagggatgtccattcga

SEQ ID NO: 420033 - DNA, 30 bp, Artificial Sequence
  Synthetic oligonucleotide
ctggattagtggaataacctttggattcga

SEQ ID NO: 420034 - DNA, 30 bp, Artificial Sequence
  Synthetic oligonucleotide
ccaaagacccctaaatatttttggattcga

SEQ ID NO: 420035 - DNA, 30 bp, Artificial Sequence
  Synthetic oligonucleotide
ctgacggttagtccagtcattaatattcga

SEQ ID NO: 420036 - DNA, 30 bp, Artificial Sequence
  Synthetic oligonucleotide
ataagctgaattttatccattactattcga

SEQ ID NO: 420037 - DNA, 30 bp, Artificial Sequence
  Synthetic oligonucleotide
caacatcttcgggactcccagtttattcga

SEQ ID NO: 420038 - DNA, 30 bp, Artificial Sequence
  Synthetic oligonucleotide
gcatccgagtatccaagtagaaggcttcga

SEQ ID NO: 420039 - DNA, 30 bp, Artificial Sequence
  Synthetic oligonucleotide
gtagcaggagttttcctctcagggcttcga

SEQ ID NO: 420040 - DNA, 30 bp, Artificial Sequence
  Synthetic oligonucleotide
tttgcgaggtagccttgttaatgtcttcga

SEQ ID NO: 420041 - DNA, 30 bp, Artificial Sequence
  Synthetic oligonucleotide
gtccgctgcttttcatatgtgtttcttcga

SEQ ID NO: 420042 - DNA, 30 bp, Artificial Sequence
  Synthetic oligonucleotide
cgtaccattgcggtaatgcacgcagttcga

SEQ ID NO: 420043 - DNA, 30 bp, Artificial Sequence
  Synthetic oligonucleotide
acaaggtctacgatgctcggacacgttcga

SEQ ID NO: 420044 - DNA, 30 bp, Artificial Sequence
  Synthetic oligonucleotide
aatagcccggggtatctcggtgccgttcga

SEQ ID NO: 420045 - DNA, 30 bp, Artificial Sequence
  Synthetic oligonucleotide
gtttcagtgggcctgtttaggagcgttcga

SEQ ID NO: 420046 - DNA, 30 bp, Artificial Sequence
  Synthetic oligonucleotide
cagtttatcttgttatccttgtgcgttcga

SEQ ID NO: 420047 - DNA, 30 bp, Artificial Sequence
  Synthetic oligonucleotide
ggacatggcctatggccctcttgcgttcga

SEQ ID NO: 420048 - DNA, 30 bp, Artificial Sequence
  Synthetic oligonucleotide
tcaaatcatgcatacgtgtcggatgttcga

SEQ ID NO: 420049 - DNA, 30 bp, Artificial Sequence
  Synthetic oligonucleotide
aaaaccactcgtcaatgaggccaatttcga

SEQ ID NO: 420050 - DNA, 30 bp, Artificial Sequence
  Synthetic oligonucleotide
ttgtctaaagttcagcgtgttcgatttcga

SEQ ID NO: 420051 - DNA, 30 bp, Artificial Sequence
  Synthetic oligonucleotide
ggaattcctctgggatgaggttactttcga

SEQ ID NO: 420052 - DNA, 30 bp, Artificial Sequence
  Synthetic oligonucleotide
cacagtatctgcaacgaaaatgcctttcga

SEQ ID NO: 420053 - DNA, 30 bp, Artificial Sequence
  Synthetic oligonucleotide
aaaataacgcaagcacgagaatcctttcga

SEQ ID NO: 420054 - DNA, 30 bp, Artificial Sequence
  Synthetic oligonucleotide
gtgctcgcaaatagcctatcacgctttcga

SEQ ID NO: 420055 - DNA, 30 bp, Artificial Sequence
  Synthetic oligonucleotide
agtcagttgaagttcaaaatcaggtttcga

SEQ ID NO: 420056 - DNA, 30 bp, Artificial Sequence
  Synthetic oligonucleotide
gtaatataaacatcaaattagaggtttcga

SEQ ID NO: 420057 - DNA, 30 bp, Artificial Sequence
  Synthetic oligonucleotide
gggggtcatacggtaattcaccattttcga

SEQ ID NO: 420058 - DNA, 30 bp, Artificial Sequence
  Synthetic oligonucleotide
tcttatgtacataatcgaacggattttcga

SEQ ID NO: 420059 - DNA, 30 bp, Artificial Sequence
  Synthetic oligonucleotide
aagattacgagtatagctgctatttttcga

SEQ ID NO: 420060 - DNA, 30 bp, Artificial Sequence
  Synthetic oligonucleotide
aactcctctataggcacagctcaaaaagga

SEQ ID NO: 420061 - DNA, 30 bp, Artificial Sequence
  Synthetic oligonucleotide
atagattgggtcattgcttggtcaaaagga

SEQ ID NO: 420062 - DNA, 30 bp, Artificial Sequence
  Synthetic oligonucleotide
acggacacgaccaagttctgcagcaaagga

SEQ ID NO: 420063 - DNA, 30 bp, Artificial Sequence
  Synthetic oligonucleotide
gtatttcatagggaatcaagtatcaaagga

SEQ ID NO: 420064 - DNA, 30 bp, Artificial Sequence
  Synthetic oligonucleotide
aaacttgaaggtggctagtttcagaaagga

SEQ ID NO: 420065 - DNA, 30 bp, Artificial Sequence
  Synthetic oligonucleotide
tgggtataccaggtctatataccgaaagga

SEQ ID NO: 420066 - DNA, 30 bp, Artificial Sequence
  Synthetic oligonucleotide
cattactgggagctcactgatgtgaaagga

SEQ ID NO: 420067 - DNA, 30 bp, Artificial Sequence
  Synthetic oligonucleotide
tattcggtgaaagttcaaaactataaagga

SEQ ID NO: 420068 - DNA, 30 bp, Artificial Sequence
  Synthetic oligonucleotide
aacgtatcctgtacgctcacggctaaagga

SEQ ID NO: 420069 - DNA, 30 bp, Artificial Sequence
  Synthetic oligonucleotide
gggtggcatgcttaatcaaatgtacaagga

SEQ ID NO: 420070 - DNA, 30 bp, Artificial Sequence
  Synthetic oligonucleotide
cttttggtagacaatgagcttgggcaagga

SEQ ID NO: 420071 - DNA, 30 bp, Artificial Sequence
  Synthetic oligonucleotide
aaacctccggcactgtaggtgcttcaagga

SEQ ID NO: 420072 - DNA, 30 bp, Artificial Sequence
  Synthetic oligonucleotide
catgtcctgccatgttgttgataagaagga

SEQ ID NO: 420073 - DNA, 30 bp, Artificial Sequence
  Synthetic oligonucleotide
ccgtactgtttttcctgcctatgagaagga

SEQ ID NO: 420074 - DNA, 30 bp, Artificial Sequence
  Synthetic oligonucleotide
tgtgtggtcctaatatgttttctagaagga

SEQ ID NO: 420075 - DNA, 30 bp, Artificial Sequence
  Synthetic oligonucleotide
ggtcttattgtattttatcctgcggaagga

SEQ ID NO: 420076 - DNA, 30 bp, Artificial Sequence
  Synthetic oligonucleotide
actaaggcaaagaccttcgaatcggaagga

SEQ ID NO: 420077 - DNA, 30 bp, Artificial Sequence
  Synthetic oligonucleotide
cttttagccattaaactatacgtggaagga

SEQ ID NO: 420078 - DNA, 30 bp, Artificial Sequence
  Synthetic oligonucleotide
ccatgtcgatggttggatacggatgaagga

SEQ ID NO: 420079 - DNA, 30 bp, Artificial Sequence
  Synthetic oligonucleotide
gcatttgtcgcttttctgttcacataagga

SEQ ID NO: 420080 - DNA, 30 bp, Artificial Sequence
  Synthetic oligonucleotide
ggcgttctatgcattattcaaccataagga

SEQ ID NO: 420081 - DNA, 30 bp, Artificial Sequence
  Synthetic oligonucleotide
cgcatctcttagtggtgcttgagataagga

SEQ ID NO: 420082 - DNA, 30 bp, Artificial Sequence
  Synthetic oligonucleotide
gtctgctaaccaaaagagtgcatctaagga

SEQ ID NO: 420083 - DNA, 30 bp, Artificial Sequence
  Synthetic oligonucleotide
aatcgttcgttagtatacatcgggtaagga

SEQ ID NO: 420084 - DNA, 30 bp, Artificial Sequence
  Synthetic oligonucleotide
tcttgcacgtgcggtttttttaattaagga

SEQ ID NO: 420085 - DNA, 30 bp, Artificial Sequence
  Synthetic oligonucleotide
gacccccggcgcgggagcggctcttaagga

SEQ ID NO: 420086 - DNA, 30 bp, Artificial Sequence
  Synthetic oligonucleotide
acatagtgcacactaaaagtaggttaagga

SEQ ID NO: 420087 - DNA, 30 bp, Artificial Sequence
  Synthetic oligonucleotide
gctctatctttggagcacactggttaagga

SEQ ID NO: 420088 - DNA, 30 bp, Artificial Sequence
  Synthetic oligonucleotide
tagtaagttattgaagtgctcggaacagga

SEQ ID NO: 420089 - DNA, 30 bp, Artificial Sequence
  Synthetic oligonucleotide
acgcagtgtcgcctgggatctgacacagga

SEQ ID NO: 420090 - DNA, 30 bp, Artificial Sequence
  Synthetic oligonucleotide
tgcagctgatgccaggtcctacccacagga

SEQ ID NO: 420091 - DNA, 30 bp, Artificial Sequence
  Synthetic oligonucleotide
gagttcctttgctggttgtgtggcacagga

SEQ ID NO: 420092 - DNA, 30 bp, Artificial Sequence
  Synthetic oligonucleotide
ttgttattgaaccccggtctatgcacagga

SEQ ID NO: 420093 - DNA, 30 bp, Artificial Sequence
  Synthetic oligonucleotide
cttgactctcctcaacaatggatcacagga

SEQ ID NO: 420094 - DNA, 30 bp, Artificial Sequence
  Synthetic oligonucleotide
tttttcggcacagtgaacttccagacagga

SEQ ID NO: 420095 - DNA, 30 bp, Artificial Sequence
  Synthetic oligonucleotide
atacacagcatcatacacctgtagacagga

SEQ ID NO: 420096 - DNA, 30 bp, Artificial Sequence
  Synthetic oligonucleotide
ggtggactaaaactgtgtctagcgacagga

SEQ ID NO: 420097 - DNA, 30 bp, Artificial Sequence
  Synthetic oligonucleotide
caggacggccatggccgggacgttacagga

SEQ ID NO: 420098 - DNA, 30 bp, Artificial Sequence
  Synthetic oligonucleotide
cggggccccagttgttatgactgaccagga

SEQ ID NO: 420099 - DNA, 30 bp, Artificial Sequence
  Synthetic oligonucleotide
tttaatgagggcggtcatggcgagccagga

SEQ ID NO: 420100 - DNA, 30 bp, Artificial Sequence
  Synthetic oligonucleotide
tctataaggctcgcaggcgctgagccagga

SEQ ID NO: 420101 - DNA, 30 bp, Artificial Sequence
  Synthetic oligonucleotide
cacaggcaatttacgagttgttcgccagga

SEQ ID NO: 420102 - DNA, 30 bp, Artificial Sequence
  Synthetic oligonucleotide
gttttgatattgagaaccccggtgccagga

SEQ ID NO: 420103 - DNA, 30 bp, Artificial Sequence
  Synthetic oligonucleotide
aaaggcgcgcggttaggcttgcctccagga

SEQ ID NO: 420104 - DNA, 30 bp, Artificial Sequence
  Synthetic oligonucleotide
tcggtctccgttcatggtgttctagcagga

SEQ ID NO: 420105 - DNA, 30 bp, Artificial Sequence
  Synthetic oligonucleotide
tttaagcgggaagattctaggcacgcagga

SEQ ID NO: 420106 - DNA, 30 bp, Artificial Sequence
  Synthetic oligonucleotide
gtggaatcaaacctagccctctacgcagga

SEQ ID NO: 420107 - DNA, 30 bp, Artificial Sequence
  Synthetic oligonucleotide
gacatccattcataaatgcagggcgcagga

SEQ ID NO: 420108 - DNA, 30 bp, Artificial Sequence
  Synthetic oligonucleotide
gcgatcatacactttcgtgtcatcgcagga

SEQ ID NO: 420109 - DNA, 30 bp, Artificial Sequence
  Synthetic oligonucleotide
gtgtggggtgcgagccgggtggctgcagga

SEQ ID NO: 420110 - DNA, 30 bp, Artificial Sequence
  Synthetic oligonucleotide
ctcgccgcagcagaatgagacggtgcagga

SEQ ID NO: 420111 - DNA, 30 bp, Artificial Sequence
  Synthetic oligonucleotide
gcatctttaatcacatgttcgggatcagga

SEQ ID NO: 420112 - DNA, 30 bp, Artificial Sequence
  Synthetic oligonucleotide
gtatctctgtgcggcctgtgaacctcagga

SEQ ID NO: 420113 - DNA, 30 bp, Artificial Sequence
  Synthetic oligonucleotide
tcacattctttcaatgtgaaatgctcagga

SEQ ID NO: 420114 - DNA, 30 bp, Artificial Sequence
  Synthetic oligonucleotide
cctgttgtgaggaacgaagcagtctcagga

SEQ ID NO: 420115 - DNA, 30 bp, Artificial Sequence
  Synthetic oligonucleotide
agtatacgtttgtgtaactgcagttcagga

SEQ ID NO: 420116 - DNA, 30 bp, Artificial Sequence
  Synthetic oligonucleotide
cgttttggcggcgatgctaaaccaagagga

SEQ ID NO: 420117 - DNA, 30 bp, Artificial Sequence
  Synthetic oligonucleotide
ttaattgtcactggagtatgaagcagagga

SEQ ID NO: 420118 - DNA, 30 bp, Artificial Sequence
  Synthetic oligonucleotide
tcactcagccggtctgcgaggcgcagagga

SEQ ID NO: 420119 - DNA, 30 bp, Artificial Sequence
  Synthetic oligonucleotide
cgataggtaaaagtaaggtaaggacgagga

SEQ ID NO: 420120 - DNA, 30 bp, Artificial Sequence
  Synthetic oligonucleotide
aactgtctttgaacgccgcgatagcgagga

SEQ ID NO: 420121 - DNA, 30 bp, Artificial Sequence
  Synthetic oligonucleotide
cgcggagaatcctgatgaacatcaggagga

SEQ ID NO: 420122 - DNA, 30 bp, Artificial Sequence
  Synthetic oligonucleotide
tgcgtggagacagggaccagagtaggagga

SEQ ID NO: 420123 - DNA, 30 bp, Artificial Sequence
  Synthetic oligonucleotide
agggtacctttatcacaacaacacggagga

SEQ ID NO: 420124 - DNA, 30 bp, Artificial Sequence
  Synthetic oligonucleotide
agcgatggcatattttgcggggtcggagga

SEQ ID NO: 420125 - DNA, 30 bp, Artificial Sequence
  Synthetic oligonucleotide
ccatcctcgctacactgagggcagggagga

SEQ ID NO: 420126 - DNA, 30 bp, Artificial Sequence
  Synthetic oligonucleotide
ggcagcacattcacaacctattagggagga

SEQ ID NO: 420127 - DNA, 30 bp, Artificial Sequence
  Synthetic oligonucleotide
ttagatggacagcgggtacgcccgggagga

SEQ ID NO: 420128 - DNA, 30 bp, Artificial Sequence
  Synthetic oligonucleotide
agctcagatagaaatatgagaaggggagga

SEQ ID NO: 420129 - DNA, 30 bp, Artificial Sequence
  Synthetic oligonucleotide
ttggtggcggagggggtaggtatgggagga

SEQ ID NO: 420130 - DNA, 30 bp, Artificial Sequence
  Synthetic oligonucleotide
cgccgcttgggattgtcgaatcatggagga

SEQ ID NO: 420131 - DNA, 30 bp, Artificial Sequence
  Synthetic oligonucleotide
actgccgcccagcttgttactttatgagga

SEQ ID NO: 420132 - DNA, 30 bp, Artificial Sequence
  Synthetic oligonucleotide
ttaacgtgttttgttctggaaacctgagga

SEQ ID NO: 420133 - DNA, 30 bp, Artificial Sequence
  Synthetic oligonucleotide
tgttcctctaaaagcctctaggcctgagga

SEQ ID NO: 420134 - DNA, 30 bp, Artificial Sequence
  Synthetic oligonucleotide
ccactccgtccgtcagtcatgttctgagga

SEQ ID NO: 420135 - DNA, 30 bp, Artificial Sequence
  Synthetic oligonucleotide
agccggatgacgggacgggcatagtgagga

SEQ ID NO: 420136 - DNA, 30 bp, Artificial Sequence
  Synthetic oligonucleotide
gtcccataatattaacgctggccgtgagga

SEQ ID NO: 420137 - DNA, 30 bp, Artificial Sequence
  Synthetic oligonucleotide
tacgcaggactggtaatcaggtgttgagga

SEQ ID NO: 420138 - DNA, 30 bp, Artificial Sequence
  Synthetic oligonucleotide
ctagtaatggcactaaatcctgaaatagga

SEQ ID NO: 420139 - DNA, 30 bp, Artificial Sequence
  Synthetic oligonucleotide
cgaggtaggatccttaggaccgcaatagga

SEQ ID NO: 420140 - DNA, 30 bp, Artificial Sequence
  Synthetic oligonucleotide
cgtagcaattagtaacatttgataatagga

SEQ ID NO: 420141 - DNA, 30 bp, Artificial Sequence
  Synthetic oligonucleotide
cggggctgaaccaccgttacgttcatagga

SEQ ID NO: 420142 - DNA, 30 bp, Artificial Sequence
  Synthetic oligonucleotide
gctggcagacaaacgagcacaaggatagga

SEQ ID NO: 420143 - DNA, 30 bp, Artificial Sequence
  Synthetic oligonucleotide
aaaaccgtctaaggttcggtggggatagga

SEQ ID NO: 420144 - DNA, 30 bp, Artificial Sequence
  Synthetic oligonucleotide
tagcagaccaccgttaggttcctgatagga

SEQ ID NO: 420145 - DNA, 30 bp, Artificial Sequence
  Synthetic oligonucleotide
tgatttctcctgaggacatttgtgatagga

SEQ ID NO: 420146 - DNA, 30 bp, Artificial Sequence
  Synthetic oligonucleotide
gccgatcagcctcctgttcccttgatagga

SEQ ID NO: 420147 - DNA, 30 bp, Artificial Sequence
  Synthetic oligonucleotide
tgtttccatagtgtgggaagtgatatagga

SEQ ID NO: 420148 - DNA, 30 bp, Artificial Sequence
  Synthetic oligonucleotide
agcggtcgctatctgacactttttatagga

SEQ ID NO: 420149 - DNA, 30 bp, Artificial Sequence
  Synthetic oligonucleotide
cgccctcggtacggcgatcctgaactagga

SEQ ID NO: 420150 - DNA, 30 bp, Artificial Sequence
  Synthetic oligonucleotide
tcggcccaaggtcttcccaaccgactagga

SEQ ID NO: 420151 - DNA, 30 bp, Artificial Sequence
  Synthetic oligonucleotide
atttgtcagtagcaagcgcgttgactagga

SEQ ID NO: 420152 - DNA, 30 bp, Artificial Sequence
  Synthetic oligonucleotide
aaaataacgggaagaccgctcgtcctagga

SEQ ID NO: 420153 - DNA, 30 bp, Artificial Sequence
  Synthetic oligonucleotide
ctccagtgttggatctggcagacgctagga

SEQ ID NO: 420154 - DNA, 30 bp, Artificial Sequence
  Synthetic oligonucleotide
ttatataagtggtgatatacaaggctagga

SEQ ID NO: 420155 - DNA, 30 bp, Artificial Sequence
  Synthetic oligonucleotide
attctgaatgtctagtgacacaggctagga

SEQ ID NO: 420156 - DNA, 30 bp, Artificial Sequence
  Synthetic oligonucleotide
cgcaacttcaacagatgtcttcgtctagga

SEQ ID NO: 420157 - DNA, 30 bp, Artificial Sequence
  Synthetic oligonucleotide
cctgggattaatgcccagcatccagtagga

SEQ ID NO: 420158 - DNA, 30 bp, Artificial Sequence
  Synthetic oligonucleotide
aaatcaatgtaaagggaggtcgatgtagga

SEQ ID NO: 420159 - DNA, 30 bp, Artificial Sequence
  Synthetic oligonucleotide
gtatcggtttagtctgacggcagtgtagga

SEQ ID NO: 420160 - DNA, 30 bp, Artificial Sequence
  Synthetic oligonucleotide
cggctttccgaaactataaggcgtgtagga

SEQ ID NO: 420161 - DNA, 30 bp, Artificial Sequence
  Synthetic oligonucleotide
gttaacctaggcgttgaagcacaattagga

SEQ ID NO: 420162 - DNA, 30 bp, Artificial Sequence
  Synthetic oligonucleotide
atgttgggagctcagcataacgcattagga

SEQ ID NO: 420163 - DNA, 30 bp, Artificial Sequence
  Synthetic oligonucleotide
cagttactcagtctctgatgtttattagga

SEQ ID NO: 420164 - DNA, 30 bp, Artificial Sequence
  Synthetic oligonucleotide
ttaaggttcataggtggacaaggcttagga

SEQ ID NO: 420165 - DNA, 30 bp, Artificial Sequence
  Synthetic oligonucleotide
tggtcgggaagcagtttaacctgcttagga

SEQ ID NO: 420166 - DNA, 30 bp, Artificial Sequence
  Synthetic oligonucleotide
gggattgggccggtttaggttttcttagga

SEQ ID NO: 420167 - DNA, 30 bp, Artificial Sequence
  Synthetic oligonucleotide
cccttattgagatctggcacaacgttagga

SEQ ID NO: 420168 - DNA, 30 bp, Artificial Sequence
  Synthetic oligonucleotide
caccatttgagtcagggttcaacgttagga

SEQ ID NO: 420169 - DNA, 30 bp, Artificial Sequence
  Synthetic oligonucleotide
ttccgtattcttttatatgtctctttagga

SEQ ID NO: 420170 - DNA, 30 bp, Artificial Sequence
  Synthetic oligonucleotide
tacgccaaccatcgttatacatttttagga

SEQ ID NO: 420171 - DNA, 30 bp, Artificial Sequence
  Synthetic oligonucleotide
tagtttgaacttctgggtttgcaaaacgga

SEQ ID NO: 420172 - DNA, 30 bp, Artificial Sequence
  Synthetic oligonucleotide
acacctacagttaatattcgggaaaacgga

SEQ ID NO: 420173 - DNA, 30 bp, Artificial Sequence
  Synthetic oligonucleotide
atcgcgactatcaccgatgcctcaaacgga

SEQ ID NO: 420174 - DNA, 30 bp, Artificial Sequence
  Synthetic oligonucleotide
tgttgtatcatatgcgccttatgcaacgga

SEQ ID NO: 420175 - DNA, 30 bp, Artificial Sequence
  Synthetic oligonucleotide
cacgaataatttcacgcaccttataacgga

SEQ ID NO: 420176 - DNA, 30 bp, Artificial Sequence
  Synthetic oligonucleotide
gtgtgcgtcagaggggacgcctaacacgga

SEQ ID NO: 420177 - DNA, 30 bp, Artificial Sequence
  Synthetic oligonucleotide
acattacgactcatgattgagggacacgga

SEQ ID NO: 420178 - DNA, 30 bp, Artificial Sequence
  Synthetic oligonucleotide
ctgttacgcatcgtatccactcagcacgga

SEQ ID NO: 420179 - DNA, 30 bp, Artificial Sequence
  Synthetic oligonucleotide
acgaacacggtctcttcaatagggcacgga

SEQ ID NO: 420180 - DNA, 30 bp, Artificial Sequence
  Synthetic oligonucleotide
ttttcccatatggggagtcgggggcacgga

SEQ ID NO: 420181 - DNA, 30 bp, Artificial Sequence
  Synthetic oligonucleotide
ggggccggctacggtccaaggtatcacgga

SEQ ID NO: 420182 - DNA, 30 bp, Artificial Sequence
  Synthetic oligonucleotide
ttgcgaactcagctccacacgcttcacgga

SEQ ID NO: 420183 - DNA, 30 bp, Artificial Sequence
  Synthetic oligonucleotide
atctaaatgagtctgatcgtgcaagacgga

SEQ ID NO: 420184 - DNA, 30 bp, Artificial Sequence
  Synthetic oligonucleotide
ttcaacggattgtacgcccattcagacgga

SEQ ID NO: 420185 - DNA, 30 bp, Artificial Sequence
  Synthetic oligonucleotide
tccctatacggtacgattaaatccgacgga

SEQ ID NO: 420186 - DNA, 30 bp, Artificial Sequence
  Synthetic oligonucleotide
gggatgctctcagatccaccttccgacgga

SEQ ID NO: 420187 - DNA, 30 bp, Artificial Sequence
  Synthetic oligonucleotide
tcttatctttgtcggaatgccggcgacgga

SEQ ID NO: 420188 - DNA, 30 bp, Artificial Sequence
  Synthetic oligonucleotide
gagggcgactaagtcaggcctttcgacgga

SEQ ID NO: 420189 - DNA, 30 bp, Artificial Sequence
  Synthetic oligonucleotide
cgacgggcttgcaggaatgtacgggacgga

SEQ ID NO: 420190 - DNA, 30 bp, Artificial Sequence
  Synthetic oligonucleotide
ggtctgaccaggggtccagcaaatgacgga

SEQ ID NO: 420191 - DNA, 30 bp, Artificial Sequence
  Synthetic oligonucleotide
gacggttgcggctgccattccggtgacgga

SEQ ID NO: 420192 - DNA, 30 bp, Artificial Sequence
  Synthetic oligonucleotide
gattggtagtgcaaggttaaggttgacgga

SEQ ID NO: 420193 - DNA, 30 bp, Artificial Sequence
  Synthetic oligonucleotide
ataagtgtttggtaggcaggtgaatacgga

SEQ ID NO: 420194 - DNA, 30 bp, Artificial Sequence
  Synthetic oligonucleotide
gtggactcacatgctctttcatcatacgga

SEQ ID NO: 420195 - DNA, 31 bp, Artificial Sequence
  Synthetic oligonucleotide
aaacgaatacgcattgcacccatgatacgga

SEQ ID NO: 420196 - DNA, 30 bp, Artificial Sequence
  Synthetic oligonucleotide
acagtattcgagcgcacgatttgctacgga

SEQ ID NO: 420197 - DNA, 30 bp, Artificial Sequence
  Synthetic oligonucleotide
tgctagagtaatttattgtaggcaaccgga

SEQ ID NO: 420198 - DNA, 30 bp, Artificial Sequence
  Synthetic oligonucleotide
gtggaatcgctgtattcagtttcaaccgga

SEQ ID NO: 420199 - DNA, 30 bp, Artificial Sequence
  Synthetic oligonucleotide
aggattaggctcttttgtgtggacaccgga

SEQ ID NO: 420200 - DNA, 30 bp, Artificial Sequence
  Synthetic oligonucleotide
acaattaatcctccggcacttcgcaccgga

SEQ ID NO: 420201 - DNA, 30 bp, Artificial Sequence
  Synthetic oligonucleotide
cgtgagcagtctccgtcgaaaggcaccgga

SEQ ID NO: 420202 - DNA, 30 bp, Artificial Sequence
  Synthetic oligonucleotide
acttttattgattttagaactatcaccgga

SEQ ID NO: 420203 - DNA, 30 bp, Artificial Sequence
  Synthetic oligonucleotide
ctgtcgacaataactgatagtgtgaccgga

SEQ ID NO: 420204 - DNA, 30 bp, Artificial Sequence
  Synthetic oligonucleotide
caatcaattcattcggtagagtataccgga

SEQ ID NO: 420205 - DNA, 30 bp, Artificial Sequence
  Synthetic oligonucleotide
cgtccggggcattggtggcggagacccgga

SEQ ID NO: 420206 - DNA, 30 bp, Artificial Sequence
  Synthetic oligonucleotide
aaatcccacgcacggcccggaaaccccgga

SEQ ID NO: 420207 - DNA, 30 bp, Artificial Sequence
  Synthetic oligonucleotide
ggtgttggctcgacgcccgggactcccgga

SEQ ID NO: 420208 - DNA, 30 bp, Artificial Sequence
  Synthetic oligonucleotide
tgttagggttgcgaaactaggcgtcccgga

SEQ ID NO: 420209 - DNA, 30 bp, Artificial Sequence
  Synthetic oligonucleotide
ggatccttgtttgtactcttttgtcccgga

SEQ ID NO: 420210 - DNA, 30 bp, Artificial Sequence
  Synthetic oligonucleotide
gtaggcgcacctcggtcaaactcagccgga

SEQ ID NO: 420211 - DNA, 30 bp, Artificial Sequence
  Synthetic oligonucleotide
aaaggtgcttcttccacctatggagccgga

SEQ ID NO: 420212 - DNA, 30 bp, Artificial Sequence
  Synthetic oligonucleotide
gttagtacctcaagtctaaagaccgccgga

SEQ ID NO: 420213 - DNA, 30 bp, Artificial Sequence
  Synthetic oligonucleotide
tgagattatttatgtgttagctgggccgga

SEQ ID NO: 420214 - DNA, 30 bp, Artificial Sequence
  Synthetic oligonucleotide
gagggaagttggtggggggtctgggccgga

SEQ ID NO: 420215 - DNA, 30 bp, Artificial Sequence
  Synthetic oligonucleotide
gccgagtgattatattattggggctccgga

SEQ ID NO: 420216 - DNA, 30 bp, Artificial Sequence
  Synthetic oligonucleotide
cggctaggtcggtagtttggcgagtccgga

SEQ ID NO: 420217 - DNA, 30 bp, Artificial Sequence
  Synthetic oligonucleotide
cggcttacggtccgtgagggtacttccgga

SEQ ID NO: 420218 - DNA, 30 bp, Artificial Sequence
  Synthetic oligonucleotide
agatttctattaagctgtgcaagaagcgga

SEQ ID NO: 420219 - DNA, 30 bp, Artificial Sequence
  Synthetic oligonucleotide
agatctctgatctagacgataggaagcgga

SEQ ID NO: 420220 - DNA, 30 bp, Artificial Sequence
  Synthetic oligonucleotide
gtaattatatggcacttatctggcagcgga

SEQ ID NO: 420221 - DNA, 30 bp, Artificial Sequence
  Synthetic oligonucleotide
tatctctagtcctctaataaaaagagcgga

SEQ ID NO: 420222 - DNA, 30 bp, Artificial Sequence
  Synthetic oligonucleotide
caccccttagggtccgtacagaagagcgga

SEQ ID NO: 420223 - DNA, 30 bp, Artificial Sequence
  Synthetic oligonucleotide
cgacaacgttatccgttctaatggagcgga

SEQ ID NO: 420224 - DNA, 30 bp, Artificial Sequence
  Synthetic oligonucleotide
tcacggtagttggagctacgcggacgcgga

SEQ ID NO: 420225 - DNA, 30 bp, Artificial Sequence
  Synthetic oligonucleotide
actattgaaatgcaagtatcgcggcgcgga

SEQ ID NO: 420226 - DNA, 30 bp, Artificial Sequence
  Synthetic oligonucleotide
cctgcaggacaaacgaaaccagctcgcgga

SEQ ID NO: 420227 - DNA, 28 bp, Artificial Sequence
  Synthetic oligonucleotide
tgtcacgttttgtttgtaccacggcgga

SEQ ID NO: 420228 - DNA, 30 bp, Artificial Sequence
  Synthetic oligonucleotide
aaatggcagcgttaaaaccattgcggcgga

SEQ ID NO: 420229 - DNA, 30 bp, Artificial Sequence
  Synthetic oligonucleotide
gcgattccccgtggtgaaagctcgggcgga

SEQ ID NO: 420230 - DNA, 30 bp, Artificial Sequence
  Synthetic oligonucleotide
ggattctttgttactgcgtgcaggggcgga

SEQ ID NO: 420231 - DNA, 30 bp, Artificial Sequence
  Synthetic oligonucleotide
actgaacacagacggagcatgttgggcgga

SEQ ID NO: 420232 - DNA, 30 bp, Artificial Sequence
  Synthetic oligonucleotide
atttggcgcacaacgaaccgcgactgcgga

SEQ ID NO: 420233 - DNA, 30 bp, Artificial Sequence
  Synthetic oligonucleotide
cgagtcgataccgattgctaagggtgcgga

SEQ ID NO: 420234 - DNA, 30 bp, Artificial Sequence
  Synthetic oligonucleotide
tctcgtaagtgatttctgacgatgtgcgga

SEQ ID NO: 420235 - DNA, 30 bp, Artificial Sequence
  Synthetic oligonucleotide
aagagcccgtggttttataaaaattgcgga

SEQ ID NO: 420236 - DNA, 30 bp, Artificial Sequence
  Synthetic oligonucleotide
tcttagtcataccggcgcacgccttgcgga

SEQ ID NO: 420237 - DNA, 30 bp, Artificial Sequence
  Synthetic oligonucleotide
aggacgctgtttactcgatcaagaatcgga

SEQ ID NO: 420238 - DNA, 30 bp, Artificial Sequence
  Synthetic oligonucleotide
aggtgggcagatcgagcatagcgaatcgga

SEQ ID NO: 420239 - DNA, 30 bp, Artificial Sequence
  Synthetic oligonucleotide
ttccggccgtgatccacgccactaatcgga

SEQ ID NO: 420240 - DNA, 30 bp, Artificial Sequence
  Synthetic oligonucleotide
gtctatccccctcggcgtttggccatcgga

SEQ ID NO: 420241 - DNA, 30 bp, Artificial Sequence
  Synthetic oligonucleotide
gcggttcaaggtcccagtagctttatcgga

SEQ ID NO: 420242 - DNA, 30 bp, Artificial Sequence
  Synthetic oligonucleotide
tgccggcagcgcacacactggcaactcgga

SEQ ID NO: 420243 - DNA, 30 bp, Artificial Sequence
  Synthetic oligonucleotide
cgcgaattgcatgttctaggagcactcgga

SEQ ID NO: 420244 - DNA, 30 bp, Artificial Sequence
  Synthetic oligonucleotide
gcaataacgacgcgtgtcgtctggctcgga

SEQ ID NO: 420245 - DNA, 30 bp, Artificial Sequence
  Synthetic oligonucleotide
tgtccttactaccacaaaatggtgctcgga

SEQ ID NO: 420246 - DNA, 30 bp, Artificial Sequence
  Synthetic oligonucleotide
tattgtgttgcttgtgtacgccctctcgga

SEQ ID NO: 420247 - DNA, 30 bp, Artificial Sequence
  Synthetic oligonucleotide
ctgaacaggaccgtaagtccatctctcgga

SEQ ID NO: 420248 - DNA, 30 bp, Artificial Sequence
  Synthetic oligonucleotide
ttgatgcatctgcgtaacctatctctcgga

SEQ ID NO: 420249 - DNA, 30 bp, Artificial Sequence
  Synthetic oligonucleotide
cttgcgtagcccacgaggacaggtctcgga

SEQ ID NO: 420250 - DNA, 30 bp, Artificial Sequence
  Synthetic oligonucleotide
aaatccacgttgacaaaagccacagtcgga

SEQ ID NO: 420251 - DNA, 30 bp, Artificial Sequence
  Synthetic oligonucleotide
aatagtttgaggccgacttagtgcgtcgga

SEQ ID NO: 420252 - DNA, 30 bp, Artificial Sequence
  Synthetic oligonucleotide
ggtgacgatgtgactttttaatctgtcgga

SEQ ID NO: 420253 - DNA, 30 bp, Artificial Sequence
  Synthetic oligonucleotide
ctgcgggctagtgcacagaggcgtgtcgga

SEQ ID NO: 420254 - DNA, 30 bp, Artificial Sequence
  Synthetic oligonucleotide
tccgatctcctgagtcgtctctgtgtcgga

SEQ ID NO: 420255 - DNA, 30 bp, Artificial Sequence
  Synthetic oligonucleotide
atttagcgttagatatgggtcgagttcgga

SEQ ID NO: 420256 - DNA, 30 bp, Artificial Sequence
  Synthetic oligonucleotide
agagtgcagattggggtttaactgttcgga

SEQ ID NO: 420257 - DNA, 30 bp, Artificial Sequence
  Synthetic oligonucleotide
aaccaccgctcgcgtgggggtctgttcgga

SEQ ID NO: 420258 - DNA, 30 bp, Artificial Sequence
  Synthetic oligonucleotide
tgtctggctggagcggtgcatattttcgga

SEQ ID NO: 420259 - DNA, 30 bp, Artificial Sequence
  Synthetic oligonucleotide
ttgagcctgacggggactacccgcaaggga

SEQ ID NO: 420260 - DNA, 30 bp, Artificial Sequence
  Synthetic oligonucleotide
aatcactagattccatccccgatcaaggga

SEQ ID NO: 420261 - DNA, 30 bp, Artificial Sequence
  Synthetic oligonucleotide
ccataactgcgagtcggaaatcctaaggga

SEQ ID NO: 420262 - DNA, 30 bp, Artificial Sequence
  Synthetic oligonucleotide
agggacgcctcaaagataggaagtaaggga

SEQ ID NO: 420263 - DNA, 30 bp, Artificial Sequence
  Synthetic oligonucleotide
atcttggggtgcctgactgcacttaaggga

SEQ ID NO: 420264 - DNA, 30 bp, Artificial Sequence
  Synthetic oligonucleotide
caactacgccctagaggcgaagttaaggga

SEQ ID NO: 420265 - DNA, 30 bp, Artificial Sequence
  Synthetic oligonucleotide
cctttccggcgttgtccttcggttaaggga

SEQ ID NO: 420266 - DNA, 31 bp, Artificial Sequence
  Synthetic oligonucleotide
ataaaccagccgaccacaaaaatttaaggga

SEQ ID NO: 420267 - DNA, 30 bp, Artificial Sequence
  Synthetic oligonucleotide
gacatagtaacctcgcatgtcgcacaggga

SEQ ID NO: 420268 - DNA, 30 bp, Artificial Sequence
  Synthetic oligonucleotide
tccacctgcctgtatcaagatttacaggga

SEQ ID NO: 420269 - DNA, 30 bp, Artificial Sequence
  Synthetic oligonucleotide
gcatcaagaaagtaccgcacgctgcaggga

SEQ ID NO: 420270 - DNA, 30 bp, Artificial Sequence
  Synthetic oligonucleotide
cgccacccttaattagagatcgatcaggga

SEQ ID NO: 420271 - DNA, 30 bp, Artificial Sequence
  Synthetic oligonucleotide
ggctccaggcgtgtcaggcgtattcaggga

SEQ ID NO: 420272 - DNA, 30 bp, Artificial Sequence
  Synthetic oligonucleotide
atggacactcgggcgggcagggaagaggga

SEQ ID NO: 420273 - DNA, 30 bp, Artificial Sequence
  Synthetic oligonucleotide
gatcactttagcgaactatgtgtagaggga

SEQ ID NO: 420274 - DNA, 30 bp, Artificial Sequence
  Synthetic oligonucleotide
gcagaagtaaggatgcgtgaggcggaggga

SEQ ID NO: 420275 - DNA, 30 bp, Artificial Sequence
  Synthetic oligonucleotide
attcagattatggttaccctaagggaggga

SEQ ID NO: 420276 - DNA, 30 bp, Artificial Sequence
  Synthetic oligonucleotide
cacaggtttggcgtatttaatggggaggga

SEQ ID NO: 420277 - DNA, 30 bp, Artificial Sequence
  Synthetic oligonucleotide
gaatcccgcccagaatcactgtatgaggga

SEQ ID NO: 420278 - DNA, 30 bp, Artificial Sequence
  Synthetic oligonucleotide
attgtccgggattttcagggatgtgaggga

SEQ ID NO: 420279 - DNA, 30 bp, Artificial Sequence
  Synthetic oligonucleotide
tttcgggctatgaatataggagcataggga

SEQ ID NO: 420280 - DNA, 30 bp, Artificial Sequence
  Synthetic oligonucleotide
aatctttacaaagtacttagttcataggga

SEQ ID NO: 420281 - DNA, 30 bp, Artificial Sequence
  Synthetic oligonucleotide
atccatctggaagtatgcacgatataggga

SEQ ID NO: 420282 - DNA, 30 bp, Artificial Sequence
  Synthetic oligonucleotide
atgatctatttcgtgtatcagtgctaggga

SEQ ID NO: 420283 - DNA, 30 bp, Artificial Sequence
  Synthetic oligonucleotide
tgggcaataccgcttatcggatcttaggga

SEQ ID NO: 420284 - DNA, 30 bp, Artificial Sequence
  Synthetic oligonucleotide
tctatgggttatttaaaggggatttaggga

SEQ ID NO: 420285 - DNA, 30 bp, Artificial Sequence
  Synthetic oligonucleotide
tcgttacgtcttttctaagaaaaaacggga

SEQ ID NO: 420286 - DNA, 30 bp, Artificial Sequence
  Synthetic oligonucleotide
cacatgcatccaagtgttttaaaaacggga

SEQ ID NO: 420287 - DNA, 30 bp, Artificial Sequence
  Synthetic oligonucleotide
ttcccatgttgatgattgtcttgcacggga

SEQ ID NO: 420288 - DNA, 30 bp, Artificial Sequence
  Synthetic oligonucleotide
taacgtggatcttccagccaactcacggga

SEQ ID NO: 420289 - DNA, 30 bp, Artificial Sequence
  Synthetic oligonucleotide
gctcctccgtagcatatacaatcgacggga

SEQ ID NO: 420290 - DNA, 30 bp, Artificial Sequence
  Synthetic oligonucleotide
tagtcggtgttccacgactcagtgacggga

SEQ ID NO: 420291 - DNA, 30 bp, Artificial Sequence
  Synthetic oligonucleotide
gaccgggaatagcaacccttgcatacggga

SEQ ID NO: 420292 - DNA, 30 bp, Artificial Sequence
  Synthetic oligonucleotide
atgaattgctatatctgcagtggtacggga

SEQ ID NO: 420293 - DNA, 30 bp, Artificial Sequence
  Synthetic oligonucleotide
ccgcgcaaaacggtcgttctgtacccggga

SEQ ID NO: 420294 - DNA, 30 bp, Artificial Sequence
  Synthetic oligonucleotide
gggccgggagaacgagacccgaggccggga

SEQ ID NO: 420295 - DNA, 30 bp, Artificial Sequence
  Synthetic oligonucleotide
gtccggcgggcaggaatgcaacggccggga

SEQ ID NO: 420296 - DNA, 30 bp, Artificial Sequence
  Synthetic oligonucleotide
gttcagccggaatggccggcaggtccggga

SEQ ID NO: 420297 - DNA, 30 bp, Artificial Sequence
  Synthetic oligonucleotide
tagatggactttgatgacctatgtccggga

SEQ ID NO: 420298 - DNA, 30 bp, Artificial Sequence
  Synthetic oligonucleotide
cggttactcttgtacttcccttccgcggga

SEQ ID NO: 420299 - DNA, 30 bp, Artificial Sequence
  Synthetic oligonucleotide
taatggctccttgatcactcaagcgcggga

SEQ ID NO: 420300 - DNA, 30 bp, Artificial Sequence
  Synthetic oligonucleotide
tatcattgactgtgggctatgtaggcggga

SEQ ID NO: 420301 - DNA, 30 bp, Artificial Sequence
  Synthetic oligonucleotide
ccaccgccggtatgctcacttcgggcggga

SEQ ID NO: 420302 - DNA, 30 bp, Artificial Sequence
  Synthetic oligonucleotide
tgcgctagggtttactttcctgtggcggga

SEQ ID NO: 420303 - DNA, 30 bp, Artificial Sequence
  Synthetic oligonucleotide
gtatcctatggcaaatcccagttatcggga

SEQ ID NO: 420304 - DNA, 30 bp, Artificial Sequence
  Synthetic oligonucleotide
catttccagaagtttcatcgagtttcggga

SEQ ID NO: 420305 - DNA, 30 bp, Artificial Sequence
  Synthetic oligonucleotide
ctaaattactgcgtatggactgtttcggga

SEQ ID NO: 420306 - DNA, 30 bp, Artificial Sequence
  Synthetic oligonucleotide
tagaatccctaacatgggtgtaaaagggga

SEQ ID NO: 420307 - DNA, 30 bp, Artificial Sequence
  Synthetic oligonucleotide
accgtaacacggtgagcttaacaaagggga

SEQ ID NO: 420308 - DNA, 30 bp, Artificial Sequence
  Synthetic oligonucleotide
tctggactcttaaaaccattcaccagggga

SEQ ID NO: 420309 - DNA, 30 bp, Artificial Sequence
  Synthetic oligonucleotide
ggcggcgtccacgagtccctcgcgagggga

SEQ ID NO: 420310 - DNA, 30 bp, Artificial Sequence
  Synthetic oligonucleotide
gcaatcgttgcggagggggcggggagggga

SEQ ID NO: 420311 - DNA, 30 bp, Artificial Sequence
  Synthetic oligonucleotide
gacgcatgcctctaaacatctcttagggga

SEQ ID NO: 420312 - DNA, 30 bp, Artificial Sequence
  Synthetic oligonucleotide
caaagacccgtggccgccagataacgggga

SEQ ID NO: 420313 - DNA, 30 bp, Artificial Sequence
  Synthetic oligonucleotide
taactctgaatttcggaaaattcacgggga

SEQ ID NO: 420314 - DNA, 30 bp, Artificial Sequence
  Synthetic oligonucleotide
tggtgctagcacacgtactccggacgggga

SEQ ID NO: 420315 - DNA, 30 bp, Artificial Sequence
  Synthetic oligonucleotide
aatctggcagcgctagatattgaccgggga

SEQ ID NO: 420316 - DNA, 30 bp, Artificial Sequence
  Synthetic oligonucleotide
agatcggttaaatcgtgtgtggcccgggga

SEQ ID NO: 420317 - DNA, 30 bp, Artificial Sequence
  Synthetic oligonucleotide
ctgggagagagaggcagattcaggcgggga

SEQ ID NO: 420318 - DNA, 30 bp, Artificial Sequence
  Synthetic oligonucleotide
ggtttaaaggtcgccatttagactcgggga

SEQ ID NO: 420319 - DNA, 30 bp, Artificial Sequence
  Synthetic oligonucleotide
tagagcgcccgcgtgaacagtcttcgggga

SEQ ID NO: 420320 - DNA, 26 bp, Artificial Sequence
  Synthetic oligonucleotide
tatcgcaccctgtgtttacaggggga

SEQ ID NO: 420321 - DNA, 30 bp, Artificial Sequence
  Synthetic oligonucleotide
gtatcaacgcaaccaaaccccgtcggggga

SEQ ID NO: 420322 - DNA, 30 bp, Artificial Sequence
  Synthetic oligonucleotide
gtcctgaatgatgatccatttaagggggga

SEQ ID NO: 420323 - DNA, 30 bp, Artificial Sequence
  Synthetic oligonucleotide
aatcatttagtctttggaattccgggggga

SEQ ID NO: 420324 - DNA, 30 bp, Artificial Sequence
  Synthetic oligonucleotide
ttgtacaacggggtaccaaagcggggggga

SEQ ID NO: 420325 - DNA, 40 bp, Artificial Sequence
  Synthetic oligonucleotide
aagataatacattcatggtatggtcggcgatcggggggga

SEQ ID NO: 420326 - DNA, 40 bp, Artificial Sequence
  Synthetic oligonucleotide
aagataatacactcatggtatggtcggggatcggggggga

SEQ ID NO: 420327 - DNA, 40 bp, Artificial Sequence
  Synthetic oligonucleotide
aagataatacattcatggtgtggtcggggatcggggggga

SEQ ID NO: 420328 - DNA, 30 bp, Artificial Sequence
  Synthetic oligonucleotide
gcgcgcgaaaaacagtgccgcgatggggga

SEQ ID NO: 420329 - DNA, 30 bp, Artificial Sequence
  Synthetic oligonucleotide
aagaaaaagaggtgggtgggctttggggga

SEQ ID NO: 420330 - DNA, 30 bp, Artificial Sequence
  Synthetic oligonucleotide
gggtaatttcggtgtccagattgatgggga

SEQ ID NO: 420331 - DNA, 30 bp, Artificial Sequence
  Synthetic oligonucleotide
atcaaatactagtccccttattactgggga

SEQ ID NO: 420332 - DNA, 30 bp, Artificial Sequence
  Synthetic oligonucleotide
cttgctgtctatgctctctaatcctgggga

SEQ ID NO: 420333 - DNA, 30 bp, Artificial Sequence
  Synthetic oligonucleotide
gttgacatctacggtcaaacgtattgggga

SEQ ID NO: 420334 - DNA, 30 bp, Artificial Sequence
  Synthetic oligonucleotide
atataaccgatgtaaaaaccgcgttgggga

SEQ ID NO: 420335 - DNA, 30 bp, Artificial Sequence
  Synthetic oligonucleotide
ttcggagtgcatagagtttcactttgggga

SEQ ID NO: 420336 - DNA, 30 bp, Artificial Sequence
  Synthetic oligonucleotide
ggcctttcgagattcttaggcaacatggga

SEQ ID NO: 420337 - DNA, 30 bp, Artificial Sequence
  Synthetic oligonucleotide
cccgagtcatggaagacacgacccatggga

SEQ ID NO: 420338 - DNA, 30 bp, Artificial Sequence
  Synthetic oligonucleotide
tatgtccatcaaagctcgctactcatggga

SEQ ID NO: 420339 - DNA, 30 bp, Artificial Sequence
  Synthetic oligonucleotide
gtctgcgctatcttaagtcttgatatggga

SEQ ID NO: 420340 - DNA, 30 bp, Artificial Sequence
  Synthetic oligonucleotide
ctggttttaagtgttacggttgatatggga

SEQ ID NO: 420341 - DNA, 30 bp, Artificial Sequence
  Synthetic oligonucleotide
acgtaatcttaggactttagtcgtatggga

SEQ ID NO: 420342 - DNA, 30 bp, Artificial Sequence
  Synthetic oligonucleotide
ttaatgagcttgagctggcgttgactggga

SEQ ID NO: 420343 - DNA, 30 bp, Artificial Sequence
  Synthetic oligonucleotide
gttaccaacaatactatattcgtactggga

SEQ ID NO: 420344 - DNA, 30 bp, Artificial Sequence
  Synthetic oligonucleotide
tgtgagagttgtggccatgcggtcctggga

SEQ ID NO: 420345 - DNA, 30 bp, Artificial Sequence
  Synthetic oligonucleotide
ctatttgacttttgcgaatccaggctggga

SEQ ID NO: 420346 - DNA, 30 bp, Artificial Sequence
  Synthetic oligonucleotide
gaacccaatagatgaacggtgaatctggga

SEQ ID NO: 420347 - DNA, 30 bp, Artificial Sequence
  Synthetic oligonucleotide
gtttaaatgcaggtagacgttaatctggga

SEQ ID NO: 420348 - DNA, 30 bp, Artificial Sequence
  Synthetic oligonucleotide
aatcgacgtggtcccgtcagtcgtctggga

SEQ ID NO: 420349 - DNA, 30 bp, Artificial Sequence
  Synthetic oligonucleotide
gatggaacatgtccgctttttgaagtggga

SEQ ID NO: 420350 - DNA, 30 bp, Artificial Sequence
  Synthetic oligonucleotide
atgttaaggttaatgtcggatgtagtggga

SEQ ID NO: 420351 - DNA, 30 bp, Artificial Sequence
  Synthetic oligonucleotide
cagccatacggtagcggggcgcccgtggga

SEQ ID NO: 420352 - DNA, 30 bp, Artificial Sequence
  Synthetic oligonucleotide
tttgccgcgaatgagtcttcactcgtggga

SEQ ID NO: 420353 - DNA, 30 bp, Artificial Sequence
  Synthetic oligonucleotide
accagccagccgcagggttcgcaggtggga

SEQ ID NO: 420354 - DNA, 30 bp, Artificial Sequence
  Synthetic oligonucleotide
gaagctatcgttcgtgaacgagaggtggga

SEQ ID NO: 420355 - DNA, 30 bp, Artificial Sequence
  Synthetic oligonucleotide
agtagcacatacctgtccttcttggtggga

SEQ ID NO: 420356 - DNA, 30 bp, Artificial Sequence
  Synthetic oligonucleotide
gcttatagtctgtgcgcgtacagtgtggga

SEQ ID NO: 420357 - DNA, 30 bp, Artificial Sequence
  Synthetic oligonucleotide
accgtttcatcggaaaatgatcgtgtggga

SEQ ID NO: 420358 - DNA, 30 bp, Artificial Sequence
  Synthetic oligonucleotide
aagatcacggtcgctgccgcgacattggga

SEQ ID NO: 420359 - DNA, 30 bp, Artificial Sequence
  Synthetic oligonucleotide
ctatttaaggcactaccggaaggattggga

SEQ ID NO: 420360 - DNA, 30 bp, Artificial Sequence
  Synthetic oligonucleotide
aacttcaatcgggagaacttggtattggga

SEQ ID NO: 420361 - DNA, 30 bp, Artificial Sequence
  Synthetic oligonucleotide
ttaagtaaccttttcctcaaacacttggga

SEQ ID NO: 420362 - DNA, 30 bp, Artificial Sequence
  Synthetic oligonucleotide
aaaggtttgaacttgtagtttaccttggga

SEQ ID NO: 420363 - DNA, 30 bp, Artificial Sequence
  Synthetic oligonucleotide
gccgtcgcttacttgagtttgtccttggga

SEQ ID NO: 420364 - DNA, 30 bp, Artificial Sequence
  Synthetic oligonucleotide
agccaacagttgaactaaagtctcttggga

SEQ ID NO: 420365 - DNA, 30 bp, Artificial Sequence
  Synthetic oligonucleotide
ttcgtctcgctccgcatccagttcttggga

SEQ ID NO: 420366 - DNA, 30 bp, Artificial Sequence
  Synthetic oligonucleotide
gcttatttagggaatagaacgttcttggga

SEQ ID NO: 420367 - DNA, 30 bp, Artificial Sequence
  Synthetic oligonucleotide
aacacggcaatttggtcctgcatgttggga

SEQ ID NO: 420368 - DNA, 30 bp, Artificial Sequence
  Synthetic oligonucleotide
tattcgcatgacggtaggtaacatttggga

SEQ ID NO: 420369 - DNA, 30 bp, Artificial Sequence
  Synthetic oligonucleotide
ctgtgaaacgttcttaaggttcttttggga

SEQ ID NO: 420370 - DNA, 30 bp, Artificial Sequence
  Synthetic oligonucleotide
catttcggcaaaacttagcggctaaatgga

SEQ ID NO: 420371 - DNA, 30 bp, Artificial Sequence
  Synthetic oligonucleotide
gttcttaagaccaggtgaaatatcaatgga

SEQ ID NO: 420372 - DNA, 30 bp, Artificial Sequence
  Synthetic oligonucleotide
agacgcttcacacgcttctatgggaatgga

SEQ ID NO: 420373 - DNA, 30 bp, Artificial Sequence
  Synthetic oligonucleotide
gttgttggacaacattcgctacaacatgga

SEQ ID NO: 420374 - DNA, 30 bp, Artificial Sequence
  Synthetic oligonucleotide
gactggtcggacactgtaccgcaccatgga

SEQ ID NO: 420375 - DNA, 30 bp, Artificial Sequence
  Synthetic oligonucleotide
tcagttgtgatatgttcttaggagcatgga

SEQ ID NO: 420376 - DNA, 30 bp, Artificial Sequence
  Synthetic oligonucleotide
ctcacaccggatgttcccgggtagcatgga

SEQ ID NO: 420377 - DNA, 30 bp, Artificial Sequence
  Synthetic oligonucleotide
tgatacgcttgtatatgcgcttagcatgga

SEQ ID NO: 420378 - DNA, 30 bp, Artificial Sequence
  Synthetic oligonucleotide
gaatatagggggttactcagagcgcatgga

SEQ ID NO: 420379 - DNA, 30 bp, Artificial Sequence
  Synthetic oligonucleotide
tttagtagattgctggttagactgcatgga

SEQ ID NO: 420380 - DNA, 30 bp, Artificial Sequence
  Synthetic oligonucleotide
ccgcggcaaggccacgttctgacagatgga

SEQ ID NO: 420381 - DNA, 30 bp, Artificial Sequence
  Synthetic oligonucleotide
ttttagcgaagggtcaccctagtagatgga

SEQ ID NO: 420382 - DNA, 30 bp, Artificial Sequence
  Synthetic oligonucleotide
aatccttctcgaacttgtaagggcgatgga

SEQ ID NO: 420383 - DNA, 30 bp, Artificial Sequence
  Synthetic oligonucleotide
cgggaactaggtgttaggtgaaaggatgga

SEQ ID NO: 420384 - DNA, 30 bp, Artificial Sequence
  Synthetic oligonucleotide
gtagggatatcaccctaatctagggatgga

SEQ ID NO: 420385 - DNA, 30 bp, Artificial Sequence
  Synthetic oligonucleotide
gcgacaatttccatcactggtgatgatgga

SEQ ID NO: 420386 - DNA, 30 bp, Artificial Sequence
  Synthetic oligonucleotide
tctaagtcactaaggcgtggcaaatatgga

SEQ ID NO: 420387 - DNA, 30 bp, Artificial Sequence
  Synthetic oligonucleotide
gcatgaagacgcttgccgggtttctatgga

SEQ ID NO: 420388 - DNA, 30 bp, Artificial Sequence
  Synthetic oligonucleotide
cacgttaatctccgctgtcggaattatgga

SEQ ID NO: 420389 - DNA, 30 bp, Artificial Sequence
  Synthetic oligonucleotide
gaagtccgttacgtttagcgctcttatgga

SEQ ID NO: 420390 - DNA, 30 bp, Artificial Sequence
  Synthetic oligonucleotide
tctatgggcttcacatgcctgagttatgga

SEQ ID NO: 420391 - DNA, 30 bp, Artificial Sequence
  Synthetic oligonucleotide
catgccgctccttccctggcgaaaactgga

SEQ ID NO: 420392 - DNA, 30 bp, Artificial Sequence
  Synthetic oligonucleotide
tcaactcaggttttttataaataaactgga

SEQ ID NO: 420393 - DNA, 30 bp, Artificial Sequence
  Synthetic oligonucleotide
tctcagttaaagatggcatccttaactgga

SEQ ID NO: 420394 - DNA, 30 bp, Artificial Sequence
  Synthetic oligonucleotide
attttcattgctccgtcaaggtagactgga

SEQ ID NO: 420395 - DNA, 30 bp, Artificial Sequence
  Synthetic oligonucleotide
agcctatagtttaaggttcccgggactgga

SEQ ID NO: 420396 - DNA, 30 bp, Artificial Sequence
  Synthetic oligonucleotide
gaacggcttttcctaccgaagcttactgga

SEQ ID NO: 420397 - DNA, 30 bp, Artificial Sequence
  Synthetic oligonucleotide
ttttctcggacctactctatgtgacctgga

SEQ ID NO: 420398 - DNA, 30 bp, Artificial Sequence
  Synthetic oligonucleotide
cagtcgtcgtcatttactcagttccctgga

SEQ ID NO: 420399 - DNA, 30 bp, Artificial Sequence
  Synthetic oligonucleotide
cggcttacagaggagccagcgaagcctgga

SEQ ID NO: 420400 - DNA, 30 bp, Artificial Sequence
  Synthetic oligonucleotide
tatatgggtgccgaactactctctcctgga

SEQ ID NO: 420401 - DNA, 30 bp, Artificial Sequence
  Synthetic oligonucleotide
taattgtacacacgtcgtgggcttcctgga

SEQ ID NO: 420402 - DNA, 30 bp, Artificial Sequence
  Synthetic oligonucleotide
catactgtggggagtagtccatttcctgga

SEQ ID NO: 420403 - DNA, 30 bp, Artificial Sequence
  Synthetic oligonucleotide
accactacagatagcttcgcaaaagctgga

SEQ ID NO: 420404 - DNA, 30 bp, Artificial Sequence
  Synthetic oligonucleotide
taaatacccggtccgccagaggccgctgga

SEQ ID NO: 420405 - DNA, 30 bp, Artificial Sequence
  Synthetic oligonucleotide
accctgcgaagatcaaaggtcttcgctgga

SEQ ID NO: 420406 - DNA, 30 bp, Artificial Sequence
  Synthetic oligonucleotide
actgcgttgagtcataaccccagggctgga

SEQ ID NO: 420407 - DNA, 30 bp, Artificial Sequence
  Synthetic oligonucleotide
tggttaccggcctcttcgtgggatgctgga

SEQ ID NO: 420408 - DNA, 30 bp, Artificial Sequence
  Synthetic oligonucleotide
cgcgtaaccggacccagtcgaggatctgga

SEQ ID NO: 420409 - DNA, 30 bp, Artificial Sequence
  Synthetic oligonucleotide
gttcaacatccttctataattgcctctgga

SEQ ID NO: 420410 - DNA, 30 bp, Artificial Sequence
  Synthetic oligonucleotide
tgtgaaggataattgtctcggctctctgga

SEQ ID NO: 420411 - DNA, 30 bp, Artificial Sequence
  Synthetic oligonucleotide
caagatggagtctttgaatcgcagtctgga

SEQ ID NO: 420412 - DNA, 30 bp, Artificial Sequence
  Synthetic oligonucleotide
gaaaagctcgcctaaagtacttagtctgga

SEQ ID NO: 420413 - DNA, 30 bp, Artificial Sequence
  Synthetic oligonucleotide
gacggtcatgtaatctcaatttcgtctgga

SEQ ID NO: 420414 - DNA, 30 bp, Artificial Sequence
  Synthetic oligonucleotide
aaacatagtgcttataatagcaggtctgga

SEQ ID NO: 420415 - DNA, 30 bp, Artificial Sequence
  Synthetic oligonucleotide
ggcggcattgaacattgtctatggtctgga

SEQ ID NO: 420416 - DNA, 30 bp, Artificial Sequence
  Synthetic oligonucleotide
caccgacgcacagtcatgaccagttctgga

SEQ ID NO: 420417 - DNA, 30 bp, Artificial Sequence
  Synthetic oligonucleotide
ctggccgaaagctggggattccgaagtgga

SEQ ID NO: 420418 - DNA, 30 bp, Artificial Sequence
  Synthetic oligonucleotide
tatgaaactataggcccgtggtccagtgga

SEQ ID NO: 420419 - DNA, 30 bp, Artificial Sequence
  Synthetic oligonucleotide
tgtttcccgcgttggttagggttcagtgga

SEQ ID NO: 420420 - DNA, 30 bp, Artificial Sequence
  Synthetic oligonucleotide
tacaccgaccgagctagtagctcgagtgga

SEQ ID NO: 420421 - DNA, 30 bp, Artificial Sequence
  Synthetic oligonucleotide
ccagtacatccgggggcgtcggggagtgga

SEQ ID NO: 420422 - DNA, 30 bp, Artificial Sequence
  Synthetic oligonucleotide
tatatggcacattggccccacaatagtgga

SEQ ID NO: 420423 - DNA, 30 bp, Artificial Sequence
  Synthetic oligonucleotide
gacctctcgctgggacgttatagtagtgga

SEQ ID NO: 420424 - DNA, 30 bp, Artificial Sequence
  Synthetic oligonucleotide
tgaagtaagccttcggggaggtttagtgga

SEQ ID NO: 420425 - DNA, 30 bp, Artificial Sequence
  Synthetic oligonucleotide
agctattacgacttttaaatttaacgtgga

SEQ ID NO: 420426 - DNA, 30 bp, Artificial Sequence
  Synthetic oligonucleotide
gtctcttcgtgatgtttgagcagacgtgga

SEQ ID NO: 420427 - DNA, 31 bp, Artificial Sequence
  Synthetic oligonucleotide
tatggaatacaggttccaacatgtgcgtgga

SEQ ID NO: 420428 - DNA, 30 bp, Artificial Sequence
  Synthetic oligonucleotide
tatagtgtatacattgggacggatcgtgga

SEQ ID NO: 420429 - DNA, 30 bp, Artificial Sequence
  Synthetic oligonucleotide
tagtattggattgatccgcgtcgcggtgga

SEQ ID NO: 420430 - DNA, 30 bp, Artificial Sequence
  Synthetic oligonucleotide
gaataacaacctagatggcgcggcggtgga

SEQ ID NO: 420431 - DNA, 30 bp, Artificial Sequence
  Synthetic oligonucleotide
gtaatcatcaattttgtaggctttggtgga

SEQ ID NO: 420432 - DNA, 30 bp, Artificial Sequence
  Synthetic oligonucleotide
gatccctgtgagggaagcaattttggtgga

SEQ ID NO: 420433 - DNA, 30 bp, Artificial Sequence
  Synthetic oligonucleotide
ttcgttttggctttacacatcagatgtgga

SEQ ID NO: 420434 - DNA, 30 bp, Artificial Sequence
  Synthetic oligonucleotide
gaatttggctgtaaggtaatgatatgtgga

SEQ ID NO: 420435 - DNA, 30 bp, Artificial Sequence
  Synthetic oligonucleotide
aggttctaacaacggcttgacttatgtgga

SEQ ID NO: 420436 - DNA, 30 bp, Artificial Sequence
  Synthetic oligonucleotide
accgtcgattcgccttcgtacgactgtgga

SEQ ID NO: 420437 - DNA, 31 bp, Artificial Sequence
  Synthetic oligonucleotide
taacgaatgcactgaatcctacagctgtgga

SEQ ID NO: 420438 - DNA, 30 bp, Artificial Sequence
  Synthetic oligonucleotide
cacaacctctttaaattgtgaatctgtgga

SEQ ID NO: 420439 - DNA, 30 bp, Artificial Sequence
  Synthetic oligonucleotide
gagtagatggtacaggatgtgttctgtgga

SEQ ID NO: 420440 - DNA, 30 bp, Artificial Sequence
  Synthetic oligonucleotide
cacagttaaagagaccaagtacagtgtgga

SEQ ID NO: 420441 - DNA, 30 bp, Artificial Sequence
  Synthetic oligonucleotide
aagtggtaacgtaaactaggtgagtgtgga

SEQ ID NO: 420442 - DNA, 30 bp, Artificial Sequence
  Synthetic oligonucleotide
ctagttcggacacaaatccctaggtgtgga

SEQ ID NO: 420443 - DNA, 30 bp, Artificial Sequence
  Synthetic oligonucleotide
gatgggtggaatattccagctttttgtgga

SEQ ID NO: 420444 - DNA, 30 bp, Artificial Sequence
  Synthetic oligonucleotide
aggaagagacggtagctatcttaaattgga

SEQ ID NO: 420445 - DNA, 30 bp, Artificial Sequence
  Synthetic oligonucleotide
tatacgcgcagttctcatgtcagaattgga

SEQ ID NO: 420446 - DNA, 30 bp, Artificial Sequence
  Synthetic oligonucleotide
ccctcacagacggcgccggctaacattgga

SEQ ID NO: 420447 - DNA, 30 bp, Artificial Sequence
  Synthetic oligonucleotide
agtataagcatactaattttggacattgga

SEQ ID NO: 420448 - DNA, 30 bp, Artificial Sequence
  Synthetic oligonucleotide
atctgacagtggtctggattaatcattgga

SEQ ID NO: 420449 - DNA, 30 bp, Artificial Sequence
  Synthetic oligonucleotide
gtgcggtattgagggattgtagagattgga

SEQ ID NO: 420450 - DNA, 30 bp, Artificial Sequence
  Synthetic oligonucleotide
tttagaccggaaaccacgcggacgattgga

SEQ ID NO: 420451 - DNA, 30 bp, Artificial Sequence
  Synthetic oligonucleotide
taaaaaccctgcttagttcgcaaacttgga

SEQ ID NO: 420452 - DNA, 30 bp, Artificial Sequence
  Synthetic oligonucleotide
gaccgttgctttatggttactatacttgga

SEQ ID NO: 420453 - DNA, 30 bp, Artificial Sequence
  Synthetic oligonucleotide
gtttgaagttagtagcgttatctacttgga

SEQ ID NO: 420454 - DNA, 30 bp, Artificial Sequence
  Synthetic oligonucleotide
cggttcgacgccctggcgagagggcttgga

SEQ ID NO: 420455 - DNA, 30 bp, Artificial Sequence
  Synthetic oligonucleotide
cgaccggcgtctctgggctgatggcttgga

SEQ ID NO: 420456 - DNA, 30 bp, Artificial Sequence
  Synthetic oligonucleotide
tcaccctagaggccacgtcgtagtcttgga

SEQ ID NO: 420457 - DNA, 30 bp, Artificial Sequence
  Synthetic oligonucleotide
gactttcggaatacgacgttgacagttgga

SEQ ID NO: 420458 - DNA, 31 bp, Artificial Sequence
  Synthetic oligonucleotide
ttatgttgcgtctgcatcagttccagttgga

SEQ ID NO: 420459 - DNA, 30 bp, Artificial Sequence
  Synthetic oligonucleotide
attctataacggtctactaagctagttgga

SEQ ID NO: 420460 - DNA, 30 bp, Artificial Sequence
  Synthetic oligonucleotide
cgtatattccccaatagggaaaacgttgga

SEQ ID NO: 420461 - DNA, 30 bp, Artificial Sequence
  Synthetic oligonucleotide
aaaaatagcgacgaagtcaaggccgttgga

SEQ ID NO: 420462 - DNA, 30 bp, Artificial Sequence
  Synthetic oligonucleotide
ggttgtaggtcatacttatgactcgttgga

SEQ ID NO: 420463 - DNA, 30 bp, Artificial Sequence
  Synthetic oligonucleotide
tatagttatttgatcggtactgaggttgga

SEQ ID NO: 420464 - DNA, 30 bp, Artificial Sequence
  Synthetic oligonucleotide
atgtggaggagctcatcgttaggggttgga

SEQ ID NO: 420465 - DNA, 30 bp, Artificial Sequence
  Synthetic oligonucleotide
gtgctaccaacattggcggagatggttgga

SEQ ID NO: 420466 - DNA, 30 bp, Artificial Sequence
  Synthetic oligonucleotide
caggctgaagagggtaggaccgtggttgga

SEQ ID NO: 420467 - DNA, 30 bp, Artificial Sequence
  Synthetic oligonucleotide
aaaatgaaggcaggtaaaagtcttgttgga

SEQ ID NO: 420468 - DNA, 30 bp, Artificial Sequence
  Synthetic oligonucleotide
aataagccgatgtagtccataaaatttgga

SEQ ID NO: 420469 - DNA, 30 bp, Artificial Sequence
  Synthetic oligonucleotide
ttccgtaaggtctgagggtggccatttgga

SEQ ID NO: 420470 - DNA, 29 bp, Artificial Sequence
  Synthetic oligonucleotide
tacggcgggcagctcctacatgatttgga

SEQ ID NO: 420471 - DNA, 30 bp, Artificial Sequence
  Synthetic oligonucleotide
tagatgtgtacatcagtgttaatatttgga

SEQ ID NO: 420472 - DNA, 30 bp, Artificial Sequence
  Synthetic oligonucleotide
aatgctatagcggcgaattagctatttgga

SEQ ID NO: 420473 - DNA, 30 bp, Artificial Sequence
  Synthetic oligonucleotide
gactgtgcctcgttggttcggctatttgga

SEQ ID NO: 420474 - DNA, 30 bp, Artificial Sequence
  Synthetic oligonucleotide
gtcaatattaaacctgtatcgccctttgga

SEQ ID NO: 420475 - DNA, 30 bp, Artificial Sequence
  Synthetic oligonucleotide
attgctcatcgtgcgaagtctggctttgga

SEQ ID NO: 420476 - DNA, 30 bp, Artificial Sequence
  Synthetic oligonucleotide
atattatgttttgcaaaggttaattttgga

SEQ ID NO: 420477 - DNA, 30 bp, Artificial Sequence
  Synthetic oligonucleotide
atgaactgcgtcaccgcatgtctttttgga

SEQ ID NO: 420478 - DNA, 30 bp, Artificial Sequence
  Synthetic oligonucleotide
tcttgtgggtagtaaaataaattttttgga

SEQ ID NO: 420479 - DNA, 30 bp, Artificial Sequence
  Synthetic oligonucleotide
tgccaccgccaaacgcacgtcaaaaaatga

SEQ ID NO: 420480 - DNA, 30 bp, Artificial Sequence
  Synthetic oligonucleotide
tctctgttatgagaccgacaatcaaaatga

SEQ ID NO: 420481 - DNA, 30 bp, Artificial Sequence
  Synthetic oligonucleotide
ctttccgtgggtacagttagactaaaatga

SEQ ID NO: 420482 - DNA, 30 bp, Artificial Sequence
  Synthetic oligonucleotide
tatgtcatgtaaggactatgactaaaatga

SEQ ID NO: 420483 - DNA, 30 bp, Artificial Sequence
  Synthetic oligonucleotide
ctagttgattcgatcaaatataagaaatga

SEQ ID NO: 420484 - DNA, 30 bp, Artificial Sequence
  Synthetic oligonucleotide
acacctcgtagcctccggatacagaaatga

SEQ ID NO: 420485 - DNA, 30 bp, Artificial Sequence
  Synthetic oligonucleotide
ttctattcccatgtaaatccgaataaatga

SEQ ID NO: 420486 - DNA, 30 bp, Artificial Sequence
  Synthetic oligonucleotide
ttctgcaataaattaacgggtactaaatga

SEQ ID NO: 420487 - DNA, 30 bp, Artificial Sequence
  Synthetic oligonucleotide
acattaggttgggctgcattctctaaatga

SEQ ID NO: 420488 - DNA, 30 bp, Artificial Sequence
  Synthetic oligonucleotide
caggtctccgcccagattgcggtgcaatga

SEQ ID NO: 420489 - DNA, 30 bp, Artificial Sequence
  Synthetic oligonucleotide
ctgagcgcagaggggcacaaatatcaatga

SEQ ID NO: 420490 - DNA, 30 bp, Artificial Sequence
  Synthetic oligonucleotide
ttcagggccgggcggcactgccctcaatga

SEQ ID NO: 420491 - DNA, 30 bp, Artificial Sequence
  Synthetic oligonucleotide
tagttggcacctgcaccttccaaagaatga

SEQ ID NO: 420492 - DNA, 30 bp, Artificial Sequence
  Synthetic oligonucleotide
gacccaaatgttcgtaaagctcaagaatga

SEQ ID NO: 420493 - DNA, 30 bp, Artificial Sequence
  Synthetic oligonucleotide
caggtgcttcggggtcgcacatgagaatga

SEQ ID NO: 420494 - DNA, 30 bp, Artificial Sequence
  Synthetic oligonucleotide
gattgagtatcaataaggacttaggaatga

SEQ ID NO: 420495 - DNA, 30 bp, Artificial Sequence
  Synthetic oligonucleotide
cgggaattaagcaaattaaccttggaatga

SEQ ID NO: 420496 - DNA, 30 bp, Artificial Sequence
  Synthetic oligonucleotide
tatcgtcaatccctcatctaaattgaatga

SEQ ID NO: 420497 - DNA, 30 bp, Artificial Sequence
  Synthetic oligonucleotide
ggacatatctgtcccactgcgattgaatga

SEQ ID NO: 420498 - DNA, 30 bp, Artificial Sequence
  Synthetic oligonucleotide
ggcaagtttgaacacttccaggttgaatga

SEQ ID NO: 420499 - DNA, 30 bp, Artificial Sequence
  Synthetic oligonucleotide
atgggtgtgtagctaacccacccataatga

SEQ ID NO: 420500 - DNA, 30 bp, Artificial Sequence
  Synthetic oligonucleotide
gacattaccaatcctctaagggcataatga

SEQ ID NO: 420501 - DNA, 30 bp, Artificial Sequence
  Synthetic oligonucleotide
cccgtataatctcagtaagggtactaatga

SEQ ID NO: 420502 - DNA, 30 bp, Artificial Sequence
  Synthetic oligonucleotide
ggcggctagtccatcttagccaagtaatga

SEQ ID NO: 420503 - DNA, 30 bp, Artificial Sequence
  Synthetic oligonucleotide
ctctcaaattgtcctattagagggtaatga

SEQ ID NO: 420504 - DNA, 30 bp, Artificial Sequence
  Synthetic oligonucleotide
agtgagattccccttgagagatcttaatga

SEQ ID NO: 420505 - DNA, 30 bp, Artificial Sequence
  Synthetic oligonucleotide
gacaacatcgcagggggggtgcgttaatga

SEQ ID NO: 420506 - DNA, 30 bp, Artificial Sequence
  Synthetic oligonucleotide
ttataacagactatcagcatcggttaatga

SEQ ID NO: 420507 - DNA, 30 bp, Artificial Sequence
  Synthetic oligonucleotide
aaccgggagcggcactactgttaaacatga

SEQ ID NO: 420508 - DNA, 30 bp, Artificial Sequence
  Synthetic oligonucleotide
ctatatactatcgttatacgtcgaacatga

SEQ ID NO: 420509 - DNA, 30 bp, Artificial Sequence
  Synthetic oligonucleotide
tacgataaagggcggctctttttcacatga

SEQ ID NO: 420510 - DNA, 29 bp, Artificial Sequence
  Synthetic oligonucleotide
atacatctgtttaaaacgattagacatga

SEQ ID NO: 420511 - DNA, 30 bp, Artificial Sequence
  Synthetic oligonucleotide
cacgctgaaagtcagcctggagcgacatga

SEQ ID NO: 420512 - DNA, 30 bp, Artificial Sequence
  Synthetic oligonucleotide
tgtggagtttaagagaaccctactacatga

SEQ ID NO: 420513 - DNA, 30 bp, Artificial Sequence
  Synthetic oligonucleotide
caaactacacgggactgactagctacatga

SEQ ID NO: 420514 - DNA, 30 bp, Artificial Sequence
  Synthetic oligonucleotide
gcatctaatcttcagcacgaagaaccatga

SEQ ID NO: 420515 - DNA, 30 bp, Artificial Sequence
  Synthetic oligonucleotide
aagtcaccattccggtttttagtaccatga

SEQ ID NO: 420516 - DNA, 30 bp, Artificial Sequence
  Synthetic oligonucleotide
gaacgtagaccttcctcttacgtcccatga

SEQ ID NO: 420517 - DNA, 30 bp, Artificial Sequence
  Synthetic oligonucleotide
ggtcaagcatgcggaattatcgagccatga

SEQ ID NO: 420518 - DNA, 30 bp, Artificial Sequence
  Synthetic oligonucleotide
tttgactgcagcttgagaatcgttccatga

SEQ ID NO: 420519 - DNA, 30 bp, Artificial Sequence
  Synthetic oligonucleotide
taattcgtccgtgccggcaggtttccatga

SEQ ID NO: 420520 - DNA, 30 bp, Artificial Sequence
  Synthetic oligonucleotide
aggggaaagggacgtccacacgcagcatga

SEQ ID NO: 420521 - DNA, 30 bp, Artificial Sequence
  Synthetic oligonucleotide
cttcgacatcgtcaaggtgttaacgcatga

SEQ ID NO: 420522 - DNA, 30 bp, Artificial Sequence
  Synthetic oligonucleotide
ccaaccggtggtgaggttggggacgcatga

SEQ ID NO: 420523 - DNA, 30 bp, Artificial Sequence
  Synthetic oligonucleotide
ccagtatcaaccattaaagaaggggcatga

SEQ ID NO: 420524 - DNA, 30 bp, Artificial Sequence
  Synthetic oligonucleotide
tatcgtgtgccgaacatcgcgccatcatga

SEQ ID NO: 420525 - DNA, 30 bp, Artificial Sequence
  Synthetic oligonucleotide
attgagtccgttgcatagcgattttcatga

SEQ ID NO: 420526 - DNA, 30 bp, Artificial Sequence
  Synthetic oligonucleotide
gcgtcatattattgtttgggtgacagatga

SEQ ID NO: 420527 - DNA, 30 bp, Artificial Sequence
  Synthetic oligonucleotide
tattcactgagagttaatatacatagatga

SEQ ID NO: 420528 - DNA, 30 bp, Artificial Sequence
  Synthetic oligonucleotide
gttgagcaatttcagttgtgctaacgatga

SEQ ID NO: 420529 - DNA, 30 bp, Artificial Sequence
  Synthetic oligonucleotide
ccgccccgatgatcgcttctgtcacgatga

SEQ ID NO: 420530 - DNA, 30 bp, Artificial Sequence
  Synthetic oligonucleotide
ctgcagcacatggccgatggacgacgatga

SEQ ID NO: 420531 - DNA, 30 bp, Artificial Sequence
  Synthetic oligonucleotide
gaacagaaggaatttgtgattggccgatga

SEQ ID NO: 420532 - DNA, 30 bp, Artificial Sequence
  Synthetic oligonucleotide
aatttatttaggtatcgtgggctccgatga

SEQ ID NO: 420533 - DNA, 30 bp, Artificial Sequence
  Synthetic oligonucleotide
gttctcatagaatgcaggcgattccgatga

SEQ ID NO: 420534 - DNA, 30 bp, Artificial Sequence
  Synthetic oligonucleotide
ccctctttaatttaatataagccaggatga

SEQ ID NO: 420535 - DNA, 30 bp, Artificial Sequence
  Synthetic oligonucleotide
tggtaggtggggagggctctgtacggatga

SEQ ID NO: 420536 - DNA, 30 bp, Artificial Sequence
  Synthetic oligonucleotide
tctgatcgagttcgatcagcctgcggatga

SEQ ID NO: 420537 - DNA, 30 bp, Artificial Sequence
  Synthetic oligonucleotide
ggttcagagccttaaaacttgctcggatga

SEQ ID NO: 420538 - DNA, 30 bp, Artificial Sequence
  Synthetic oligonucleotide
ggtgttaagaggggctagtggcagggatga

SEQ ID NO: 420539 - DNA, 30 bp, Artificial Sequence
  Synthetic oligonucleotide
tcatcttgtccattaaaaagcaatggatga

SEQ ID NO: 420540 - DNA, 30 bp, Artificial Sequence
  Synthetic oligonucleotide
tttaatgccgggaacactctttatggatga

SEQ ID NO: 420541 - DNA, 30 bp, Artificial Sequence
  Synthetic oligonucleotide
tgacgcttaatgcgtacgatagactgatga

SEQ ID NO: 420542 - DNA, 30 bp, Artificial Sequence
  Synthetic oligonucleotide
tcggggcattcttattcgttttactgatga

SEQ ID NO: 420543 - DNA, 30 bp, Artificial Sequence
  Synthetic oligonucleotide
actatgctgtggatcgggcagccctgatga

SEQ ID NO: 420544 - DNA, 30 bp, Artificial Sequence
  Synthetic oligonucleotide
gaacggctccagcaaattcaaggctgatga

SEQ ID NO: 420545 - DNA, 30 bp, Artificial Sequence
  Synthetic oligonucleotide
tagaaaatctcagtaggttatttctgatga

SEQ ID NO: 420546 - DNA, 30 bp, Artificial Sequence
  Synthetic oligonucleotide
gcagcgcactaacaatatcttatgtgatga

SEQ ID NO: 420547 - DNA, 30 bp, Artificial Sequence
  Synthetic oligonucleotide
tttaagctacaggcgtgaacatattgatga

SEQ ID NO: 420548 - DNA, 30 bp, Artificial Sequence
  Synthetic oligonucleotide
cagtatagccacggaagttcatcttgatga

SEQ ID NO: 420549 - DNA, 30 bp, Artificial Sequence
  Synthetic oligonucleotide
ggctgcatataaattcgcgcacgttgatga

SEQ ID NO: 420550 - DNA, 30 bp, Artificial Sequence
  Synthetic oligonucleotide
tatcctgattaggaaccagcaggttgatga

SEQ ID NO: 420551 - DNA, 30 bp, Artificial Sequence
  Synthetic oligonucleotide
tcatcggttcgctaagacatgctttgatga

SEQ ID NO: 420552 - DNA, 30 bp, Artificial Sequence
  Synthetic oligonucleotide
taaaagcgtgcaacgcttaattaaatatga

SEQ ID NO: 420553 - DNA, 30 bp, Artificial Sequence
  Synthetic oligonucleotide
ggtgagttcacaacgtaattgtgaatatga

SEQ ID NO: 420554 - DNA, 30 bp, Artificial Sequence
  Synthetic oligonucleotide
gactcaatacgttaccacggcataatatga

SEQ ID NO: 420555 - DNA, 30 bp, Artificial Sequence
  Synthetic oligonucleotide
aaatgtcctgcaccaaacgtacccatatga

SEQ ID NO: 420556 - DNA, 30 bp, Artificial Sequence
  Synthetic oligonucleotide
aagcctggactgtacgtgttaagcatatga

SEQ ID NO: 420557 - DNA, 30 bp, Artificial Sequence
  Synthetic oligonucleotide
attccccttgtaacgattggtcgcatatga

SEQ ID NO: 420558 - DNA, 30 bp, Artificial Sequence
  Synthetic oligonucleotide
tcatagaacgtgcatcttttagcgatatga

SEQ ID NO: 420559 - DNA, 30 bp, Artificial Sequence
  Synthetic oligonucleotide
ccccctggatggttcttcgcggggatatga

SEQ ID NO: 420560 - DNA, 30 bp, Artificial Sequence
  Synthetic oligonucleotide
gtagtcaggtcaaattgtaccatgatatga

SEQ ID NO: 420561 - DNA, 30 bp, Artificial Sequence
  Synthetic oligonucleotide
tgttagaaggacgtcaaagatctgatatga

SEQ ID NO: 420562 - DNA, 30 bp, Artificial Sequence
  Synthetic oligonucleotide
tgatgaaggccttaactttgcaatatatga

SEQ ID NO: 420563 - DNA, 30 bp, Artificial Sequence
  Synthetic oligonucleotide
gcccatctggataggcttacgtatatatga

SEQ ID NO: 420564 - DNA, 30 bp, Artificial Sequence
  Synthetic oligonucleotide
ccagaccaagtccaggttggacctatatga

SEQ ID NO: 420565 - DNA, 30 bp, Artificial Sequence
  Synthetic oligonucleotide
cgagccatatagaaatctagtgctatatga

SEQ ID NO: 420566 - DNA, 30 bp, Artificial Sequence
  Synthetic oligonucleotide
gacgcgatctttgtgtgtttgagtatatga

SEQ ID NO: 420567 - DNA, 30 bp, Artificial Sequence
  Synthetic oligonucleotide
ccatgtagtacgtcttgcgtacgtatatga

SEQ ID NO: 420568 - DNA, 30 bp, Artificial Sequence
  Synthetic oligonucleotide
acacactcccagcagcctacttgactatga

SEQ ID NO: 420569 - DNA, 30 bp, Artificial Sequence
  Synthetic oligonucleotide
gcgcaattgcatggcctagccctactatga

SEQ ID NO: 420570 - DNA, 30 bp, Artificial Sequence
  Synthetic oligonucleotide
cgacgaccggagctcatacaccacctatga

SEQ ID NO: 420571 - DNA, 30 bp, Artificial Sequence
  Synthetic oligonucleotide
gaagtttgcggtatcgccaaattgctatga

SEQ ID NO: 420572 - DNA, 30 bp, Artificial Sequence
  Synthetic oligonucleotide
gtttaatgctattgaggttacaatctatga

SEQ ID NO: 420573 - DNA, 30 bp, Artificial Sequence
  Synthetic oligonucleotide
aaaccgtaagttccgtcaagcattctatga

SEQ ID NO: 420574 - DNA, 30 bp, Artificial Sequence
  Synthetic oligonucleotide
tgttaagcgaggttttttctgattctatga

SEQ ID NO: 420575 - DNA, 30 bp, Artificial Sequence
  Synthetic oligonucleotide
catgcatcagtccaagtccgggtcgtatga

SEQ ID NO: 420576 - DNA, 30 bp, Artificial Sequence
  Synthetic oligonucleotide
gccaaggttggattgaagttatgtgtatga

SEQ ID NO: 420577 - DNA, 30 bp, Artificial Sequence
  Synthetic oligonucleotide
gggggtgccagtggggtactcggattatga

SEQ ID NO: 420578 - DNA, 30 bp, Artificial Sequence
  Synthetic oligonucleotide
tcatgtacgctttctgcgtcttgattatga

SEQ ID NO: 420579 - DNA, 30 bp, Artificial Sequence
  Synthetic oligonucleotide
aagtttgtaaactatctgactgtattatga

SEQ ID NO: 420580 - DNA, 30 bp, Artificial Sequence
  Synthetic oligonucleotide
gtggccaccgttaggtctttctccttatga

SEQ ID NO: 420581 - DNA, 31 bp, Artificial Sequence
  Synthetic oligonucleotide
tcagcgctactcgaacagtaagcgcttatga

SEQ ID NO: 420582 - DNA, 30 bp, Artificial Sequence
  Synthetic oligonucleotide
cctgtgagcttgctcgtagggtgcttatga

SEQ ID NO: 420583 - DNA, 30 bp, Artificial Sequence
  Synthetic oligonucleotide
tggcacttcgctaatcacttcctcttatga

SEQ ID NO: 420584 - DNA, 30 bp, Artificial Sequence
  Synthetic oligonucleotide
atcgaaactgcagcaactttgcggttatga

SEQ ID NO: 420585 - DNA, 30 bp, Artificial Sequence
  Synthetic oligonucleotide
gctggggacgttcttaagttaatgttatga

SEQ ID NO: 420586 - DNA, 30 bp, Artificial Sequence
  Synthetic oligonucleotide
atgtatcggggaggtatctcccctttatga

SEQ ID NO: 420587 - DNA, 30 bp, Artificial Sequence
  Synthetic oligonucleotide
aactcgggctagatgtcagattctttatga

SEQ ID NO: 420588 - DNA, 30 bp, Artificial Sequence
  Synthetic oligonucleotide
ggctttaaagggtcgcggcgaattttatga

SEQ ID NO: 420589 - DNA, 30 bp, Artificial Sequence
  Synthetic oligonucleotide
gagttcagtgggaaaggtcgtcttttatga

SEQ ID NO: 420590 - DNA, 30 bp, Artificial Sequence
  Synthetic oligonucleotide
actctcggagagttgttcgaacgaaactga

SEQ ID NO: 420591 - DNA, 30 bp, Artificial Sequence
  Synthetic oligonucleotide
ggatcacgtttgcccatgctgttaaactga

SEQ ID NO: 420592 - DNA, 30 bp, Artificial Sequence
  Synthetic oligonucleotide
tcgtgcaagcacgcatacttggtcaactga

SEQ ID NO: 420593 - DNA, 30 bp, Artificial Sequence
  Synthetic oligonucleotide
ctgatatcgggcgttttacttgcgaactga

SEQ ID NO: 420594 - DNA, 30 bp, Artificial Sequence
  Synthetic oligonucleotide
tgcttcaccacactcgtccacgggaactga

SEQ ID NO: 420595 - DNA, 30 bp, Artificial Sequence
  Synthetic oligonucleotide
aagaaaggctccggcgagagctataactga

SEQ ID NO: 420596 - DNA, 30 bp, Artificial Sequence
  Synthetic oligonucleotide
tacgaaaagtacgagaccctcagtaactga

SEQ ID NO: 420597 - DNA, 30 bp, Artificial Sequence
  Synthetic oligonucleotide
ggacagttgttttatttaggaacacactga

SEQ ID NO: 420598 - DNA, 30 bp, Artificial Sequence
  Synthetic oligonucleotide
ggattttcctcgggttttgcgtaccactga

SEQ ID NO: 420599 - DNA, 30 bp, Artificial Sequence
  Synthetic oligonucleotide
agagctaacgtctctgcatcgtagcactga

SEQ ID NO: 420600 - DNA, 30 bp, Artificial Sequence
  Synthetic oligonucleotide
tgatactcacggagtctttttcatcactga

SEQ ID NO: 420601 - DNA, 30 bp, Artificial Sequence
  Synthetic oligonucleotide
cgaaaattatagcttaacttggctcactga

SEQ ID NO: 420602 - DNA, 30 bp, Artificial Sequence
  Synthetic oligonucleotide
gagatttatataaatttccagtctcactga

SEQ ID NO: 420603 - DNA, 30 bp, Artificial Sequence
  Synthetic oligonucleotide
atgaccggggatgttcgagattcagactga

SEQ ID NO: 420604 - DNA, 30 bp, Artificial Sequence
  Synthetic oligonucleotide
gtgcttttagagaaaattctgatagactga

SEQ ID NO: 420605 - DNA, 30 bp, Artificial Sequence
  Synthetic oligonucleotide
gttcaagtaatgctcatgtagtccgactga

SEQ ID NO: 420606 - DNA, 30 bp, Artificial Sequence
  Synthetic oligonucleotide
gtcatatatgcattgtcattaagcgactga

SEQ ID NO: 420607 - DNA, 30 bp, Artificial Sequence
  Synthetic oligonucleotide
aatcgggagctcgggacaggtcgggactga

SEQ ID NO: 420608 - DNA, 30 bp, Artificial Sequence
  Synthetic oligonucleotide
ggttcggtcggctcttgggagaatgactga

SEQ ID NO: 420609 - DNA, 30 bp, Artificial Sequence
  Synthetic oligonucleotide
ggctctctgtgtattaagtcgactgactga

SEQ ID NO: 420610 - DNA, 30 bp, Artificial Sequence
  Synthetic oligonucleotide
ctctagtaccccatgcagccaggatactga

SEQ ID NO: 420611 - DNA, 30 bp, Artificial Sequence
  Synthetic oligonucleotide
tgatttgtactacattttcgccgctactga

SEQ ID NO: 420612 - DNA, 30 bp, Artificial Sequence
  Synthetic oligonucleotide
tcttggcctcggtggggtgaatggtactga

SEQ ID NO: 420613 - DNA, 30 bp, Artificial Sequence
  Synthetic oligonucleotide
catctggtactgatacactaatggtactga

SEQ ID NO: 420614 - DNA, 30 bp, Artificial Sequence
  Synthetic oligonucleotide
gcgtagatgactttcatcttgtattactga

SEQ ID NO: 420615 - DNA, 30 bp, Artificial Sequence
  Synthetic oligonucleotide
ctagtagcgtgccgggcaaaacgttactga

SEQ ID NO: 420616 - DNA, 31 bp, Artificial Sequence
  Synthetic oligonucleotide
cagtaaagggccattgagatctctttactga

SEQ ID NO: 420617 - DNA, 30 bp, Artificial Sequence
  Synthetic oligonucleotide
acagattcaggtatactatcgttcacctga

SEQ ID NO: 420618 - DNA, 30 bp, Artificial Sequence
  Synthetic oligonucleotide
cgagcccggtatgggctagtagagacctga

SEQ ID NO: 420619 - DNA, 30 bp, Artificial Sequence
  Synthetic oligonucleotide
tacgcgggaccacgataatcatgcccctga

SEQ ID NO: 420620 - DNA, 30 bp, Artificial Sequence
  Synthetic oligonucleotide
caatacttttaacagaagttactcccctga

SEQ ID NO: 420621 - DNA, 30 bp, Artificial Sequence
  Synthetic oligonucleotide
gccacttttaggatattacagttgccctga

SEQ ID NO: 420622 - DNA, 30 bp, Artificial Sequence
  Synthetic oligonucleotide
tcgaagccaaggataatcgcatatccctga

SEQ ID NO: 420623 - DNA, 30 bp, Artificial Sequence
  Synthetic oligonucleotide
taattctcatgcggcatgtcatcagcctga

SEQ ID NO: 420624 - DNA, 30 bp, Artificial Sequence
  Synthetic oligonucleotide
tgcccatcggcaatacggtgtaccgcctga

SEQ ID NO: 420625 - DNA, 30 bp, Artificial Sequence
  Synthetic oligonucleotide
aggcagcatgtggttattcgtcgcgcctga

SEQ ID NO: 420626 - DNA, 30 bp, Artificial Sequence
  Synthetic oligonucleotide
atggcatcaagatgtgcatactgcgcctga

SEQ ID NO: 420627 - DNA, 30 bp, Artificial Sequence
  Synthetic oligonucleotide
gactattatggcgtcatactggaggcctga

SEQ ID NO: 420628 - DNA, 30 bp, Artificial Sequence
  Synthetic oligonucleotide
gttatttagttaggtactaaaacggcctga

SEQ ID NO: 420629 - DNA, 30 bp, Artificial Sequence
  Synthetic oligonucleotide
gaaatgtagggcggcgcatgaacggcctga

SEQ ID NO: 420630 - DNA, 30 bp, Artificial Sequence
  Synthetic oligonucleotide
tcagccggatgagacatgcaaccggcctga

SEQ ID NO: 420631 - DNA, 30 bp, Artificial Sequence
  Synthetic oligonucleotide
tcgtggtgtgaaagcagtccaagggcctga

SEQ ID NO: 420632 - DNA, 30 bp, Artificial Sequence
  Synthetic oligonucleotide
acgtttagcatcgcagagtctggggcctga

SEQ ID NO: 420633 - DNA, 30 bp, Artificial Sequence
  Synthetic oligonucleotide
accagatcctcgttatcagtcatggcctga

SEQ ID NO: 420634 - DNA, 30 bp, Artificial Sequence
  Synthetic oligonucleotide
gaggtgattttttccagtaggctggcctga

SEQ ID NO: 420635 - DNA, 30 bp, Artificial Sequence
  Synthetic oligonucleotide
ggccggtcaggtttatttgtccttgcctga

SEQ ID NO: 420636 - DNA, 30 bp, Artificial Sequence
  Synthetic oligonucleotide
ccgctttggaacctggcactattatcctga

SEQ ID NO: 420637 - DNA, 30 bp, Artificial Sequence
  Synthetic oligonucleotide
gttccaaatgaggatcttgtaatctcctga

SEQ ID NO: 420638 - DNA, 30 bp, Artificial Sequence
  Synthetic oligonucleotide
aatcgatggaattacatacgggagtcctga

SEQ ID NO: 420639 - DNA, 30 bp, Artificial Sequence
  Synthetic oligonucleotide
attctggcgttgggggtttgcatgtcctga

SEQ ID NO: 420640 - DNA, 30 bp, Artificial Sequence
  Synthetic oligonucleotide
gaccacaccatttatgtcagcggttcctga

SEQ ID NO: 420641 - DNA, 30 bp, Artificial Sequence
  Synthetic oligonucleotide
aggcacaggacacttggcctacgcagctga

SEQ ID NO: 420642 - DNA, 30 bp, Artificial Sequence
  Synthetic oligonucleotide
ttcacgctgtagagagctagtccgagctga

SEQ ID NO: 420643 - DNA, 30 bp, Artificial Sequence
  Synthetic oligonucleotide
agatcggcttctcagagttagtggagctga

SEQ ID NO: 420644 - DNA, 30 bp, Artificial Sequence
  Synthetic oligonucleotide
gatcaggtgtggtttaactcgcatagctga

SEQ ID NO: 420645 - DNA, 30 bp, Artificial Sequence
  Synthetic oligonucleotide
gttactgctgttggagttcatcgtagctga

SEQ ID NO: 420646 - DNA, 30 bp, Artificial Sequence
  Synthetic oligonucleotide
tcgtcatgcctatatgtctgtaatcgctga

SEQ ID NO: 420647 - DNA, 30 bp, Artificial Sequence
  Synthetic oligonucleotide
atactagctcccgtacggctcattcgctga

SEQ ID NO: 420648 - DNA, 30 bp, Artificial Sequence
  Synthetic oligonucleotide
ctagggtgtcatcaccaggctgaaggctga

SEQ ID NO: 420649 - DNA, 30 bp, Artificial Sequence
  Synthetic oligonucleotide
ttgccccctcaagtatttggtccgggctga

SEQ ID NO: 420650 - DNA, 30 bp, Artificial Sequence
  Synthetic oligonucleotide
tcgatgttgtgtacttccaatttgggctga

SEQ ID NO: 420651 - DNA, 30 bp, Artificial Sequence
  Synthetic oligonucleotide
agttgcctcgaggaagacggacatggctga

SEQ ID NO: 420652 - DNA, 30 bp, Artificial Sequence
  Synthetic oligonucleotide
tcaatatattaattcgccgcgtatggctga

SEQ ID NO: 420653 - DNA, 30 bp, Artificial Sequence
  Synthetic oligonucleotide
gtagttgacgcctctcaggacagtggctga

SEQ ID NO: 420654 - DNA, 30 bp, Artificial Sequence
  Synthetic oligonucleotide
cgccgccgctaacacctgagatgtggctga

SEQ ID NO: 420655 - DNA, 30 bp, Artificial Sequence
  Synthetic oligonucleotide
tgatggtttaataccgtcgtatttggctga

SEQ ID NO: 420656 - DNA, 30 bp, Artificial Sequence
  Synthetic oligonucleotide
aagttaagtcgatgccaaatctactgctga

SEQ ID NO: 420657 - DNA, 30 bp, Artificial Sequence
  Synthetic oligonucleotide
gcaaaatctccgggtttgtacggttgctga

SEQ ID NO: 420658 - DNA, 30 bp, Artificial Sequence
  Synthetic oligonucleotide
gtctgaacatgcgtagaagttctttgctga

SEQ ID NO: 420659 - DNA, 30 bp, Artificial Sequence
  Synthetic oligonucleotide
catttggagctgggggcatctccaatctga

SEQ ID NO: 420660 - DNA, 30 bp, Artificial Sequence
  Synthetic oligonucleotide
aggttacatttctcggccgtcgcaatctga

SEQ ID NO: 420661 - DNA, 30 bp, Artificial Sequence
  Synthetic oligonucleotide
gcatatgatcctctggccaccgtaatctga

SEQ ID NO: 420662 - DNA, 30 bp, Artificial Sequence
  Synthetic oligonucleotide
atgtggtggaagaactaccggcacatctga

SEQ ID NO: 420663 - DNA, 30 bp, Artificial Sequence
  Synthetic oligonucleotide
attgcacgatgaaggctgatcacgatctga

SEQ ID NO: 420664 - DNA, 30 bp, Artificial Sequence
  Synthetic oligonucleotide
gtgactatgcatctgttaggtcctatctga

SEQ ID NO: 420665 - DNA, 30 bp, Artificial Sequence
  Synthetic oligonucleotide
gggggcgctctgaaatgtactcttatctga

SEQ ID NO: 420666 - DNA, 30 bp, Artificial Sequence
  Synthetic oligonucleotide
aacagttacagagcacacagactactctga

SEQ ID NO: 420667 - DNA, 30 bp, Artificial Sequence
  Synthetic oligonucleotide
cgtaacttttaatttccattatggctctga

SEQ ID NO: 420668 - DNA, 30 bp, Artificial Sequence
  Synthetic oligonucleotide
gtccataaccattgggcttactttctctga

SEQ ID NO: 420669 - DNA, 30 bp, Artificial Sequence
  Synthetic oligonucleotide
actagcaacgtttgttgaggacacgtctga

SEQ ID NO: 420670 - DNA, 30 bp, Artificial Sequence
  Synthetic oligonucleotide
taagcagagggtacttggtgcgacgtctga

SEQ ID NO: 420671 - DNA, 30 bp, Artificial Sequence
  Synthetic oligonucleotide
aaagttccaaacaaagctttattcgtctga

SEQ ID NO: 420672 - DNA, 30 bp, Artificial Sequence
  Synthetic oligonucleotide
gatttcggccaatccggataactggtctga

SEQ ID NO: 420673 - DNA, 30 bp, Artificial Sequence
  Synthetic oligonucleotide
aaaaagcgtagagggtctgtagtggtctga

SEQ ID NO: 420674 - DNA, 30 bp, Artificial Sequence
  Synthetic oligonucleotide
gacaaggacaatagacatcagcgtgtctga

SEQ ID NO: 420675 - DNA, 30 bp, Artificial Sequence
  Synthetic oligonucleotide
acgacatcagcaagagaataatttgtctga

SEQ ID NO: 420676 - DNA, 30 bp, Artificial Sequence
  Synthetic oligonucleotide
gggaatttgccgatagcgtcgtttgtctga

SEQ ID NO: 420677 - DNA, 30 bp, Artificial Sequence
  Synthetic oligonucleotide
tcgcctttcaatcacttttcaaaattctga

SEQ ID NO: 420678 - DNA, 30 bp, Artificial Sequence
  Synthetic oligonucleotide
ttgctctgccacgcttgtcattaattctga

SEQ ID NO: 420679 - DNA, 30 bp, Artificial Sequence
  Synthetic oligonucleotide
tagatcgggcatgcacgtacttaattctga

SEQ ID NO: 420680 - DNA, 30 bp, Artificial Sequence
  Synthetic oligonucleotide
tagatatttatttgagagtgctcattctga

SEQ ID NO: 420681 - DNA, 30 bp, Artificial Sequence
  Synthetic oligonucleotide
aattgcggaatcctttcggcacacttctga

SEQ ID NO: 420682 - DNA, 30 bp, Artificial Sequence
  Synthetic oligonucleotide
ggcaataccttcgcactaaatgggttctga

SEQ ID NO: 420683 - DNA, 30 bp, Artificial Sequence
  Synthetic oligonucleotide
gcgtttgggagagccacagactctttctga

SEQ ID NO: 420684 - DNA, 30 bp, Artificial Sequence
  Synthetic oligonucleotide
ccgtgaatcagctattattaaataaagtga

SEQ ID NO: 420685 - DNA, 30 bp, Artificial Sequence
  Synthetic oligonucleotide
tttaaaccttcacttatgttcctaaagtga

SEQ ID NO: 420686 - DNA, 30 bp, Artificial Sequence
  Synthetic oligonucleotide
taaggaccaaccccaggggggtctaagtga

SEQ ID NO: 420687 - DNA, 30 bp, Artificial Sequence
  Synthetic oligonucleotide
aacacagcgatatctcgtactcttaagtga

SEQ ID NO: 420688 - DNA, 30 bp, Artificial Sequence
  Synthetic oligonucleotide
ctaaattgtctaagaagacccgttaagtga

SEQ ID NO: 420689 - DNA, 30 bp, Artificial Sequence
  Synthetic oligonucleotide
acaacgtcactatgtactcactaacagtga

SEQ ID NO: 420690 - DNA, 30 bp, Artificial Sequence
  Synthetic oligonucleotide
ggacatgagagattaataattacacagtga

SEQ ID NO: 420691 - DNA, 30 bp, Artificial Sequence
  Synthetic oligonucleotide
actagcctctccgtgttttgcccccagtga

SEQ ID NO: 420692 - DNA, 30 bp, Artificial Sequence
  Synthetic oligonucleotide
gggcagcgcactatgacggagctgcagtga

SEQ ID NO: 420693 - DNA, 30 bp, Artificial Sequence
  Synthetic oligonucleotide
atagttaagaagtgttagctgcatcagtga

SEQ ID NO: 420694 - DNA, 30 bp, Artificial Sequence
  Synthetic oligonucleotide
gtatatggaggttgtttggaacttcagtga

SEQ ID NO: 420695 - DNA, 30 bp, Artificial Sequence
  Synthetic oligonucleotide
ttcgttttagatcttggccgaggagagtga

SEQ ID NO: 420696 - DNA, 30 bp, Artificial Sequence
  Synthetic oligonucleotide
gggaccccctctatgtaatatctagagtga

SEQ ID NO: 420697 - DNA, 30 bp, Artificial Sequence
  Synthetic oligonucleotide
tttatggggagctctcttgcaagggagtga

SEQ ID NO: 420698 - DNA, 30 bp, Artificial Sequence
  Synthetic oligonucleotide
tattgcttaagctcggtacacctggagtga

SEQ ID NO: 420699 - DNA, 30 bp, Artificial Sequence
  Synthetic oligonucleotide
agaaccaatttcgtctgtcttccatagtga

SEQ ID NO: 420700 - DNA, 30 bp, Artificial Sequence
  Synthetic oligonucleotide
gcttatgcgaaacatcagtctaagtagtga

SEQ ID NO: 420701 - DNA, 30 bp, Artificial Sequence
  Synthetic oligonucleotide
acagttctgcgtatatccgctagttagtga

SEQ ID NO: 420702 - DNA, 30 bp, Artificial Sequence
  Synthetic oligonucleotide
tttgcggtgtatgcgtgggcttaaacgtga
